United States Patent Application Publication US 2007/0042381 A1 - sequence listing, part 58

SEQ ID NO: 2628804 - RNA, 14 nt, Human
uggacagccccacc

SEQ ID NO: 2628805 - RNA, 16 nt, Human
uggacaggcauguucu

SEQ ID NO: 2628806 - RNA, 12 nt, Human
uggacaggcaug

SEQ ID NO: 2628807 - RNA, 21 nt, Human
uggagagcccggcgccccugc

SEQ ID NO: 2628808 - RNA, 22 nt, Human
uggagaggagggaugcugccug

SEQ ID NO: 2628809 - RNA, 20 nt, Human
uggagagccagaaccuggag

SEQ ID NO: 2628810 - RNA, 19 nt, Human
uggagagccagaaccugga

SEQ ID NO: 2628811 - RNA, 18 nt, Human
uggagagccagaaccugg

SEQ ID NO: 2628812 - RNA, 20 nt, Human
uggagaggcccggccucuca

SEQ ID NO: 2628813 - RNA, 21 nt, Human
uggagaggagggaugcugccu

SEQ ID NO: 2628814 - RNA, 16 nt, Human
uggagaggcccucugg

SEQ ID NO: 2628815 - RNA, 23 nt, Human
uggagaggagggaugcugccuga

SEQ ID NO: 2628816 - RNA, 18 nt, Human
uggagaggcccucuggag

SEQ ID NO: 2628817 - RNA, 19 nt, Human
uggagagggaugaggugcu

SEQ ID NO: 2628818 - RNA, 13 nt, Human
uggagagggauga

SEQ ID NO: 2628819 - RNA, 22 nt, Human
uggagagguuauaggucacucc

SEQ ID NO: 2628820 - RNA, 21 nt, Human
uggagagggaugaggugcugg

SEQ ID NO: 2628821 - RNA, 15 nt, Human
uggagaguaaaaacu

SEQ ID NO: 2628822 - RNA, 17 nt, Human
uggagagugcaacagua

SEQ ID NO: 2628823 - RNA, 20 nt, Human
uggagagugcaacaguagca

SEQ ID NO: 2628824 - RNA, 19 nt, Human
uggagauguuuuagaguua

SEQ ID NO: 2628825 - RNA, 23 nt, Human
uggagaugucuucguacaguucu

SEQ ID NO: 2628826 - RNA, 22 nt, Human
uggagaugucuucguacaguuc

SEQ ID NO: 2628827 - RNA, 19 nt, Human
uggagauuugaaggucugc

SEQ ID NO: 2628828 - RNA, 11 nt, Human
uggagauguuu

SEQ ID NO: 2628829 - RNA, 13 nt, Human
uggagauguuuag

SEQ ID NO: 2628830 - RNA, 21 nt, Human
uggagaguucaauggcugcug

SEQ ID NO: 2628831 - RNA, 19 nt, Human
uggagaguucaauggcugc

SEQ ID NO: 2628832 - RNA, 23 nt, Human
uggagaguucaauggcugcugaa

SEQ ID NO: 2628833 - RNA, 13 nt, Human
uggagaugcagag

SEQ ID NO: 2628834 - RNA, 14 nt, Human
uggagaugcagagg

SEQ ID NO: 2628835 - RNA, 16 nt, Human
uggagaugggaugcuu

SEQ ID NO: 2628836 - RNA, 13 nt, Human
uggagaugucuuc

SEQ ID NO: 2628837 - RNA, 18 nt, Human
uggagaugggaugcuugc

SEQ ID NO: 2628838 - RNA, 13 nt, Human
uggaggcugucuu

SEQ ID NO: 2628839 - RNA, 17 nt, Human
uggaggcuuccugcguc

SEQ ID NO: 2628840 - RNA, 16 nt, Human
uggaggcuuccugcgu

SEQ ID NO: 2628841 - RNA, 15 nt, Human
uggaggcuuccugcg

SEQ ID NO: 2628842 - RNA, 14 nt, Human
uggaggcugucuuc

SEQ ID NO: 2628843 - RNA, 22 nt, Human
uggaggcugucuucucaggcuc

SEQ ID NO: 2628844 - RNA, 13 nt, Human
uggaggcuuccug

SEQ ID NO: 2628845 - RNA, 23 nt, Human
uggaggcugucuucucaggcucu

SEQ ID NO: 2628846 - RNA, 15 nt, Human
uggaggcccaguuca

SEQ ID NO: 2628847 - RNA, 19 nt, Human
uggaggccgggugcucagg

SEQ ID NO: 2628848 - RNA, 21 nt, Human
uggaggccgggugcucagggc

SEQ ID NO: 2628849 - RNA, 12 nt, Human
uggaggcccagu

SEQ ID NO: 2628850 - RNA, 22 nt, Human
uggaggccauugugugagccua

SEQ ID NO: 2628851 - RNA, 22 nt, Human
uggaggcaugugaugagaggaa

SEQ ID NO: 2628852 - RNA, 14 nt, Human
uggaggccagccag

SEQ ID NO: 2628853 - RNA, 15 nt, Human
uggaggccagccagu

SEQ ID NO: 2628854 - RNA, 22 nt, Human
uggagauuugaaggucugcaag

SEQ ID NO: 2628855 - RNA, 17 nt, Human
uggaggcacacagcugc

SEQ ID NO: 2628856 - RNA, 15 nt, Human
uggagcaaagcugau

SEQ ID NO: 2628857 - RNA, 19 nt, Human
uggaggcacacagcugcag

SEQ ID NO: 2628858 - RNA, 18 nt, Human
uggaggcacacagcugca

SEQ ID NO: 2628859 - RNA, 13 nt, Human
uggaggcacuuua

SEQ ID NO: 2628860 - RNA, 14 nt, Human
uggaggcagggccu

SEQ ID NO: 2628861 - RNA, 22 nt, Human
uggaggcagggccuugcccaga

SEQ ID NO: 2628862 - RNA, 14 nt, Human
uggaggcacuuuag

SEQ ID NO: 2628863 - RNA, 22 nt, Human
uggaggcacacagcugcagaga

SEQ ID NO: 2628864 - RNA, 19 nt, Human
uggaugaagauucuccugu

SEQ ID NO: 2628865 - RNA, 18 nt, Human
uggaugaaauuuucuaga

SEQ ID NO: 2628866 - RNA, 17 nt, Human
uggaugaaauuuucuag

SEQ ID NO: 2628867 - RNA, 15 nt, Human
uggaugaaauuuucu

SEQ ID NO: 2628868 - RNA, 14 nt, Human
uggauauaaauaua

SEQ ID NO: 2628869 - RNA, 14 nt, Human
uggaugaaauuuuc

SEQ ID NO: 2628870 - RNA, 23 nt, Human
uggaugaagauucuccugugcua

SEQ ID NO: 2628871 - RNA, 22 nt, Human
uggaugaagauucuccugugcu

SEQ ID NO: 2628872 - RNA, 13 nt, Human
uggaugaccagaa

SEQ ID NO: 2628873 - RNA, 15 nt, Human
uggaugagcccucag

SEQ ID NO: 2628874 - RNA, 20 nt, Human
uggaugaccagaacaagguu

SEQ ID NO: 2628875 - RNA, 20 nt, Human
uggaugagacuuccaaaccu

SEQ ID NO: 2628876 - RNA, 17 nt, Human
uggaugagcccucagaa

SEQ ID NO: 2628877 - RNA, 20 nt, Human
uggaugauggucuucagccu

SEQ ID NO: 2628878 - RNA, 21 nt, Human
uggaugauggucuucagccuc

SEQ ID NO: 2628879 - RNA, 12 nt, Human
uggaugauguuu

SEQ ID NO: 2628880 - RNA, 17 nt, Human
uggauauaaauauauau

SEQ ID NO: 2628881 - RNA, 13 nt, Human
uggauauaaauau

SEQ ID NO: 2628882 - RNA, 12 nt, Human
uggauauaaaua

SEQ ID NO: 2628883 - RNA, 18 nt, Human
uggaucuucaauggcuuu

SEQ ID NO: 2628884 - RNA, 16 nt, Human
uggauaggagccugcu

SEQ ID NO: 2628885 - RNA, 18 nt, Human
uggauacauacaccagca

SEQ ID NO: 2628886 - RNA, 18 nt, Human
uggauaaugcuguugccu

SEQ ID NO: 2628887 - RNA, 17 nt, Human
uggauacugcccggggc

SEQ ID NO: 2628888 - RNA, 22 nt, Human
uggauacugcccggggcagcug

SEQ ID NO: 2628889 - RNA, 15 nt, Human
uggaauuauuuuaaa

SEQ ID NO: 2628890 - RNA, 21 nt, Human
uggaauuaaccuggugcugga

SEQ ID NO: 2628891 - RNA, 23 nt, Human
uggaauguggccccugaacaaga

SEQ ID NO: 2628892 - RNA, 16 nt, Human
uggaauuaaccuggug

SEQ ID NO: 2628893 - RNA, 17 nt, Human
uggaauuaaccuggugc

SEQ ID NO: 2628894 - RNA, 18 nt, Human
uggaauuaaccuggugcu

SEQ ID NO: 2628895 - RNA, 19 nt, Human
uggaauuaaccuggugcug

SEQ ID NO: 2628896 - RNA, 20 nt, Human
uggaauuaaccuggugcugg

SEQ ID NO: 2628897 - RNA, 17 nt, Human
uggaaucuggagaccag

SEQ ID NO: 2628898 - RNA, 18 nt, Human
uggaaucuggagaccagg

SEQ ID NO: 2628899 - RNA, 21 nt, Human
uggaaugguuauaaaagugau

SEQ ID NO: 2628900 - RNA, 15 nt, Human
uggaaucuggagagc

SEQ ID NO: 2628901 - RNA, 21 nt, Human
uggaauguggccccugaacaa

SEQ ID NO: 2628902 - RNA, 14 nt, Human
uggaauguaaucaa

SEQ ID NO: 2628903 - RNA, 22 nt, Human
uggaaucaggaauauuuuccaa

SEQ ID NO: 2628904 - RNA, 21 nt, Human
uggaaucaggaauauuuucca

SEQ ID NO: 2628905 - RNA, 23 nt, Human
uggaaucaggaauauuuuccaaa

SEQ ID NO: 2628906 - RNA, 13 nt, Human
uggaaucuggaga

SEQ ID NO: 2628907 - RNA, 19 nt, Human
uggaaucuaccaacuguuu

SEQ ID NO: 2628908 - RNA, 12 nt, Human
uggaaucuggag

SEQ ID NO: 2628909 - RNA, 20 nt, Human
uggaauaguauccuccaggu

SEQ ID NO: 2628910 - RNA, 19 nt, Human
uggaauaguauccuccagg

SEQ ID NO: 2628911 - RNA, 18 nt, Human
uggaauaguauccuccag

SEQ ID NO: 2628912 - RNA, 17 nt, Human
uggaauaguauccucca

SEQ ID NO: 2628913 - RNA, 21 nt, Human
uggaauaguauccuccagguu

SEQ ID NO: 2628914 - RNA, 15 nt, Human
uggaauauuguccau

SEQ ID NO: 2628915 - RNA, 20 nt, Human
uggaauauuguccauugucc

SEQ ID NO: 2628916 - RNA, 23 nt, Human
uggaauauuccccuaucucuaga

SEQ ID NO: 2628917 - RNA, 21 nt, Human
uggaagugugggucugugugu

SEQ ID NO: 2628918 - RNA, 14 nt, Human
uggaagacagcucu

SEQ ID NO: 2628919 - RNA, 18 nt, Human
uggaaguugcauggcauc

SEQ ID NO: 2628920 - RNA, 16 nt, Human
uggaaguugcauggca

SEQ ID NO: 2628921 - RNA, 11 nt, Human
uggaaguugca

SEQ ID NO: 2628922 - RNA, 23 nt, Human
uggaagacagagaccuccugccu

SEQ ID NO: 2628923 - RNA, 20 nt, Human
uggaagacagagaccuccug

SEQ ID NO: 2628924 - RNA, 23 nt, Human
uggaagugugggucugugugugu

SEQ ID NO: 2628925 - RNA, 21 nt, Human
uggaagugugugaucuguggg

SEQ ID NO: 2628926 - RNA, 12 nt, Human
uggaauacuuuu

SEQ ID NO: 2628927 - RNA, 13 nt, Human
uggaauacuuuuu

SEQ ID NO: 2628928 - RNA, 18 nt, Human
uggaauacuuuuuguuau

SEQ ID NO: 2628929 - RNA, 20 nt, Human
uggaauacuaaaaaucauga

SEQ ID NO: 2628930 - RNA, 22 nt, Human
uggaauacuaaaaaucaugaga

SEQ ID NO: 2628931 - RNA, 15 nt, Human
uggaauacaugaaau

SEQ ID NO: 2628932 - RNA, 14 nt, Human
uggaauacauuucu

SEQ ID NO: 2628933 - RNA, 22 nt, Human
uggaauacaguguuauuuucuu

SEQ ID NO: 2628934 - RNA, 14 nt, Human
uggaauacaugaaa

SEQ ID NO: 2628935 - RNA, 14 nt, Human
uggaauacaguguu

SEQ ID NO: 2628936 - RNA, 15 nt, Human
uggaauacaguguua

SEQ ID NO: 2628937 - RNA, 13 nt, Human
uggaaguuuucag

SEQ ID NO: 2628938 - RNA, 15 nt, Human
uggaaguuuucagga

SEQ ID NO: 2628939 - RNA, 14 nt, Human
uggaauaauguaaa

SEQ ID NO: 2628940 - RNA, 13 nt, Human
uggaagacagaga

SEQ ID NO: 2628941 - RNA, 23 nt, Human
uggaacugucucucaugaaccuc

SEQ ID NO: 2628942 - RNA, 16 nt, Human
uggaacuuacauuguu

SEQ ID NO: 2628943 - RNA, 12 nt, Human
uggaagacagcu

SEQ ID NO: 2628944 - RNA, 11 nt, Human
uggaagacagc

SEQ ID NO: 2628945 - RNA, 14 nt, Human
uggaacucucgagc

SEQ ID NO: 2628946 - RNA, 18 nt, Human
uggaacccuuuuggcccc

SEQ ID NO: 2628947 - RNA, 19 nt, Human
uggaacccuuuuggccccc

SEQ ID NO: 2628948 - RNA, 21 nt, Human
uggaacccuuuuggcccccga

SEQ ID NO: 2628949 - RNA, 16 nt, Human
uggaaccgcaggaagc

SEQ ID NO: 2628950 - RNA, 17 nt, Human
uggaaccgcaggaagcu

SEQ ID NO: 2628951 - RNA, 19 nt, Human
uggaaccgcaggaagcugc

SEQ ID NO: 2628952 - RNA, 23 nt, Human
uggaaccgcaggaagcugcuccg

SEQ ID NO: 2628953 - RNA, 13 nt, Human
uggaacucugcuu

SEQ ID NO: 2628954 - RNA, 15 nt, Human
uggaaccucagccug

SEQ ID NO: 2628955 - RNA, 16 nt, Human
uggaaccucagccugg

SEQ ID NO: 2628956 - RNA, 20 nt, Human
uggaaccgcaggaagcugcu

SEQ ID NO: 2628957 - RNA, 17 nt, Human
uggaaaaagugauggag

SEQ ID NO: 2628958 - RNA, 12 nt, Human
uggaaaaaguga

SEQ ID NO: 2628959 - RNA, 22 nt, Human
uggaaaaaaugauguucauuua

SEQ ID NO: 2628960 - RNA, 15 nt, Human
uggaaaauaaaucaa

SEQ ID NO: 2628961 - RNA, 11 nt, Human
uggaaaauaaa

SEQ ID NO: 2628962 - RNA, 20 nt, Human
uggaaaaaccacccccaaau

SEQ ID NO: 2628963 - RNA, 23 nt, Human
uggaaaaacaucugaaagccacg

SEQ ID NO: 2628964 - RNA, 15 nt, Human
uggaaaauaaauuau

SEQ ID NO: 2628965 - RNA, 16 nt, Human
uggaaaauaaauuauu

SEQ ID NO: 2628966 - RNA, 22 nt, Human
uggaacccagacucagacauug

SEQ ID NO: 2628967 - RNA, 16 nt, Human
uggaacccagacucag

SEQ ID NO: 2628968 - RNA, 17 nt, Human
uggaacccagacucaga

SEQ ID NO: 2628969 - RNA, 14 nt, Human
uggaacccagacuc

SEQ ID NO: 2628970 - RNA, 15 nt, Human
uggaacccagacuca

SEQ ID NO: 2628971 - RNA, 12 nt, Human
uggaacccagac

SEQ ID NO: 2628972 - RNA, 14 nt, Human
ugcuucuguuuuau

SEQ ID NO: 2628973 - RNA, 22 nt, Human
ugcuucucugacuucugccugg

SEQ ID NO: 2628974 - RNA, 21 nt, Human
ugcuucucugacuucugccug

SEQ ID NO: 2628975 - RNA, 23 nt, Human
ugcuucucugacuucugccugga

SEQ ID NO: 2628976 - RNA, 16 nt, Human
ugcuucuucagagacu

SEQ ID NO: 2628977 - RNA, 13 nt, Human
ugcuucugggaga

SEQ ID NO: 2628978 - RNA, 14 nt, Human
ugcuucuucucagg

SEQ ID NO: 2628979 - RNA, 20 nt, Human
ugcuucucugacuucugccu

SEQ ID NO: 2628980 - RNA, 19 nt, Human
ugcuucucugacuucugcc

SEQ ID NO: 2628981 - RNA, 17 nt, Human
ugcuucucugacuucug

SEQ ID NO: 2628982 - RNA, 14 nt, Human
ugcuucucugacuu

SEQ ID NO: 2628983 - RNA, 22 nt, Human
ugcuucuaauauuuauugcuuu

SEQ ID NO: 2628984 - RNA, 20 nt, Human
ugcuuccagugaggcucugc

SEQ ID NO: 2628985 - RNA, 19 nt, Human
ugcuuccagugaggcucug

SEQ ID NO: 2628986 - RNA, 21 nt, Human
ugcuuccagugaggcucugcc

SEQ ID NO: 2628987 - RNA, 12 nt, Human
ugcugccucccc

SEQ ID NO: 2628988 - RNA, 13 nt, Human
ugcugccucccca

SEQ ID NO: 2628989 - RNA, 14 nt, Human
ugcugccuccccaa

SEQ ID NO: 2628990 - RNA, 17 nt, Human
ugcugccuccccaaccc

SEQ ID NO: 2628991 - RNA, 18 nt, Human
ugcuucgggcccuuccca

SEQ ID NO: 2628992 - RNA, 19 nt, Human
ugcugccuccccaacccug

SEQ ID NO: 2628993 - RNA, 15 nt, Human
ugcuucgggcccuuc

SEQ ID NO: 2628994 - RNA, 13 nt, Human
ugcugccuaggcu

SEQ ID NO: 2628995 - RNA, 18 nt, Human
ugcugccuaggcugaccu

SEQ ID NO: 2628996 - RNA, 20 nt, Human
ugcugccgccucccagccug

SEQ ID NO: 2628997 - RNA, 21 nt, Human
ugcugccgccucccagccugg

SEQ ID NO: 2628998 - RNA, 23 nt, Human
ugcugccgccccacccagauggg

SEQ ID NO: 2628999 - RNA, 21 nt, Human
ugcugccgccccacccagaug

SEQ ID NO: 2629000 - RNA, 16 nt, Human
ugcugccgccucccag

SEQ ID NO: 2629001 - RNA, 17 nt, Human
ugcugccgccucccagc

SEQ ID NO: 2629002 - RNA, 19 nt, Human
ugcugccgccucccagccu

SEQ ID NO: 2629003 - RNA, 18 nt, Human
ugcuuccagugaggcucu

SEQ ID NO: 2629004 - RNA, 13 nt, Human
ugcugccucaugc

SEQ ID NO: 2629005 - RNA, 14 nt, Human
ugcugccuccagaa

SEQ ID NO: 2629006 - RNA, 15 nt, Human
ugcuuuauuccagaa

SEQ ID NO: 2629007 - RNA, 17 nt, Human
ugcuuuauuccagaaug

SEQ ID NO: 2629008 - RNA, 14 nt, Human
ugcuuuauuccaga

SEQ ID NO: 2629009 - RNA, 14 nt, Human
ugcuuuaugcugaa

SEQ ID NO: 2629010 - RNA, 15 nt, Human
ugcuuuaugcugaaa

SEQ ID NO: 2629011 - RNA, 17 nt, Human
ugcuuuaugcugaaaca

SEQ ID NO: 2629012 - RNA, 17 nt, Human
ugcuuuuuuguuuuggc

SEQ ID NO: 2629013 - RNA, 14 nt, Human
ugcuuuccagcuca

SEQ ID NO: 2629014 - RNA, 13 nt, Human
ugcuuuccagcuc

SEQ ID NO: 2629015 - RNA, 12 nt, Human
ugcuuuccagcu

SEQ ID NO: 2629016 - RNA, 20 nt, Human
ugcuuuccacaccuggcacu

SEQ ID NO: 2629017 - RNA, 14 nt, Human
ugcuuuccaaagcc

SEQ ID NO: 2629018 - RNA, 20 nt, Human
ugcuuucagauuaaaauugu

SEQ ID NO: 2629019 - RNA, 19 nt, Human
ugcuuucaucuuggucaca

SEQ ID NO: 2629020 - RNA, 14 nt, Human
ugcuuuauaaauaa

SEQ ID NO: 2629021 - RNA, 12 nt, Human
ugcuuuauaaau

SEQ ID NO: 2629022 - RNA, 15 nt, Human
ugcuuuaugccuucu

SEQ ID NO: 2629023 - RNA, 13 nt, Human
ugcuuuaugcuga

SEQ ID NO: 2629024 - RNA, 17 nt, Human
ugcuuuaggcucacggc

SEQ ID NO: 2629025 - RNA, 22 nt, Human
ugcuuuagcuugaaaaggugac

SEQ ID NO: 2629026 - RNA, 13 nt, Human
ugcuuuagcuuga

SEQ ID NO: 2629027 - RNA, 12 nt, Human
ugcuuuaaacau

SEQ ID NO: 2629028 - RNA, 16 nt, Human
ugcuuuaaaaacuauu

SEQ ID NO: 2629029 - RNA, 13 nt, Human
ugcuuuaaaaacu

SEQ ID NO: 2629030 - RNA, 23 nt, Human
ugcuuuaaaaacuauuuaacuug

SEQ ID NO: 2629031 - RNA, 14 nt, Human
ugcuuguuuccuag

SEQ ID NO: 2629032 - RNA, 14 nt, Human
ugcuuguuuacagc

SEQ ID NO: 2629033 - RNA, 23 nt, Human
ugcuuguugggauuccugaccca

SEQ ID NO: 2629034 - RNA, 23 nt, Human
ugcuuguuugcucaccuggggug

SEQ ID NO: 2629035 - RNA, 22 nt, Human
ugcuuguugggauuccugaccc

SEQ ID NO: 2629036 - RNA, 19 nt, Human
ugcuuguugggauuccuga

SEQ ID NO: 2629037 - RNA, 15 nt, Human
ugcuuguugggauuc

SEQ ID NO: 2629038 - RNA, 14 nt, Human
ugcuuguuggauuu

SEQ ID NO: 2629039 - RNA, 14 nt, Human
ugcuucuuggaguc

SEQ ID NO: 2629040 - RNA, 21 nt, Human
ugcuucuucuccuauguguaa

SEQ ID NO: 2629041 - RNA, 16 nt, Human
ugcuucuucucaggca

SEQ ID NO: 2629042 - RNA, 15 nt, Human
ugcuucuuucauuuu

SEQ ID NO: 2629043 - RNA, 23 nt, Human
ugcuucuucuccuauguguaagg

SEQ ID NO: 2629044 - RNA, 22 nt, Human
ugcuugaaaaaugugcaaaaca

SEQ ID NO: 2629045 - RNA, 17 nt, Human
ugcuugaaaaaugugca

SEQ ID NO: 2629046 - RNA, 16 nt, Human
ugcuugaaaaaugugc

SEQ ID NO: 2629047 - RNA, 17 nt, Human
ugcuucuuucauuuucu

SEQ ID NO: 2629048 - RNA, 19 nt, Human
ugcuucuuucuuugggaau

SEQ ID NO: 2629049 - RNA, 18 nt, Human
ugcuuguuaacugagugc

SEQ ID NO: 2629050 - RNA, 14 nt, Human
ugcuugaaagaaaa

SEQ ID NO: 2629051 - RNA, 21 nt, Human
ugcuugaaagaaaauaugcau

SEQ ID NO: 2629052 - RNA, 16 nt, Human
ugcuuguucccucucc

SEQ ID NO: 2629053 - RNA, 19 nt, Human
ugcuuguucccucucccug

SEQ ID NO: 2629054 - RNA, 17 nt, Human
ugcuugaacccaggaga

SEQ ID NO: 2629055 - RNA, 16 nt, Human
ugggcauacuaauaaa

SEQ ID NO: 2629056 - RNA, 22 nt, Human
ugggcaguuuuucuguauuuua

SEQ ID NO: 2629057 - RNA, 18 nt, Human
ugggcaguuuuucuguau

SEQ ID NO: 2629058 - RNA, 17 nt, Human
ugggcaguuacaugcau

SEQ ID NO: 2629059 - RNA, 13 nt, Human
ugggaggagggag

SEQ ID NO: 2629060 - RNA, 20 nt, Human
ugggaggacggugcaaccca

SEQ ID NO: 2629061 - RNA, 14 nt, Human
ugggaggagggaga

SEQ ID NO: 2629062 - RNA, 21 nt, Human
ugggcaggugguggcacugag

SEQ ID NO: 2629063 - RNA, 15 nt, Human
ugggcaguuacaugc

SEQ ID NO: 2629064 - RNA, 23 nt, Human
ugggaggaagcagaauaaagcaa

SEQ ID NO: 2629065 - RNA, 22 nt, Human
ugggaggaagcagaauaaagca

SEQ ID NO: 2629066 - RNA, 21 nt, Human
ugggaggaagcagaauaaagc

SEQ ID NO: 2629067 - RNA, 20 nt, Human
ugggaggaagcagaauaaag

SEQ ID NO: 2629068 - RNA, 19 nt, Human
ugggaggacggugcaaccc

SEQ ID NO: 2629069 - RNA, 24 nt, Human
ugggaggaagcagguugaggggcu

SEQ ID NO: 2629070 - RNA, 19 nt, Human
ugggaggaagcagaauaaa

SEQ ID NO: 2629071 - RNA, 18 nt, Human
ugggaggaagcagaauaa

SEQ ID NO: 2629072 - RNA, 17 nt, Human
ugggaggaagcagaaua

SEQ ID NO: 2629073 - RNA, 16 nt, Human
ugggaggaagcagaau

SEQ ID NO: 2629074 - RNA, 15 nt, Human
ugggaggaagcagaa

SEQ ID NO: 2629075 - RNA, 14 nt, Human
ugggaggaagcaga

SEQ ID NO: 2629076 - RNA, 13 nt, Human
ugggaggaagcag

SEQ ID NO: 2629077 - RNA, 20 nt, Human
ugggagcugguuagaaaugc

SEQ ID NO: 2629078 - RNA, 18 nt, Human
ugggagcugguuagaaau

SEQ ID NO: 2629079 - RNA, 17 nt, Human
ugggagcugaaaaauca

SEQ ID NO: 2629080 - RNA, 24 nt, Human
ugggagcugccuguucagcuccag

SEQ ID NO: 2629081 - RNA, 19 nt, Human
ugggagcugguuagaaaug

SEQ ID NO: 2629082 - RNA, 16 nt, Human
ugggagcuugggaaug

SEQ ID NO: 2629083 - RNA, 20 nt, Human
ugggagcuugauucucagca

SEQ ID NO: 2629084 - RNA, 12 nt, Human
ugggaggaaaag

SEQ ID NO: 2629085 - RNA, 20 nt, Human
ugggaggaaaagaaaagagg

SEQ ID NO: 2629086 - RNA, 11 nt, Human
ugggaggaagc

SEQ ID NO: 2629087 - RNA, 12 nt, Human
ugggaggaagca

SEQ ID NO: 2629088 - RNA, 15 nt, Human
ugggaggaaauuuga

SEQ ID NO: 2629089 - RNA, 14 nt, Human
ugggccuugcuggg

SEQ ID NO: 2629090 - RNA, 15 nt, Human
ugggccuucagggag

SEQ ID NO: 2629091 - RNA, 12 nt, Human
ugggccuugcug

SEQ ID NO: 2629092 - RNA, 13 nt, Human
ugggccuugcuac

SEQ ID NO: 2629093 - RNA, 18 nt, Human
ugggccuucagggaguga

SEQ ID NO: 2629094 - RNA, 18 nt, Human
ugggccuccucuguccag

SEQ ID NO: 2629095 - RNA, 20 nt, Human
ugggccuccucuguccaggg

SEQ ID NO: 2629096 - RNA, 22 nt, Human
ugggccuccugugugugcgccu

SEQ ID NO: 2629097 - RNA, 16 nt, Human
ugggccuccugugugu

SEQ ID NO: 2629098 - RNA, 21 nt, Human
ugggcauggggugggccucug

SEQ ID NO: 2629099 - RNA, 20 nt, Human
ugggcauggggugggccucu

SEQ ID NO: 2629100 - RNA, 15 nt, Human
ugggcaugggguggg

SEQ ID NO: 2629101 - RNA, 13 nt, Human
ugggcauggggug

SEQ ID NO: 2629102 - RNA, 15 nt, Human
ugggcaucuguucug

SEQ ID NO: 2629103 - RNA, 22 nt, Human
ugggcauagaugcaggugagcc

SEQ ID NO: 2629104 - RNA, 16 nt, Human
ugggcauagaugcagg

SEQ ID NO: 2629105 - RNA, 21 nt, Human
ugggcauacuaauaaaguaug

SEQ ID NO: 2629106 - RNA, 17 nt, Human
ugggcaucuguucuggu

SEQ ID NO: 2629107 - RNA, 16 nt, Human
ugggcaucuguucugg

SEQ ID NO: 2629108 - RNA, 22 nt, Human
ugggcauggggugggccucugg

SEQ ID NO: 2629109 - RNA, 14 nt, Human
ugggccuccugugu

SEQ ID NO: 2629110 - RNA, 21 nt, Human
ugggcuuggggaccagagcug

SEQ ID NO: 2629111 - RNA, 16 nt, Human
uggggcagcuugaggg

SEQ ID NO: 2629112 - RNA, 18 nt, Human
ugggcuuggccugcugug

SEQ ID NO: 2629113 - RNA, 17 nt, Human
ugggcuuggccugcugu

SEQ ID NO: 2629114 - RNA, 19 nt, Human
ugggcuuggccugcuguga

SEQ ID NO: 2629115 - RNA, 19 nt, Human
ugggcuuggggaccagagc

SEQ ID NO: 2629116 - RNA, 16 nt, Human
ugggcggggccuugcg

SEQ ID NO: 2629117 - RNA, 16 nt, Human
ugggcuuggccugcug

SEQ ID NO: 2629118 - RNA, 15 nt, Human
ugggcuuggccugcu

SEQ ID NO: 2629119 - RNA, 20 nt, Human
ugggcuucaguggcagcugc

SEQ ID NO: 2629120 - RNA, 20 nt, Human
ugggcgcccuggaagccggc

SEQ ID NO: 2629121 - RNA, 16 nt, Human
ugggcgcccuggaagc

SEQ ID NO: 2629122 - RNA, 15 nt, Human
ugggcgcccuggaag

SEQ ID NO: 2629123 - RNA, 15 nt, Human
ugggcggcacagccu

SEQ ID NO: 2629124 - RNA, 17 nt, Human
ugggcgcccuggaagcc

SEQ ID NO: 2629125 - RNA, 19 nt, Human
ugggcgggcagcacagcaa

SEQ ID NO: 2629126 - RNA, 18 nt, Human
ugggcgggcagcacagca

SEQ ID NO: 2629127 - RNA, 13 nt, Human
ugggcgggcagca

SEQ ID NO: 2629128 - RNA, 21 nt, Human
ugggcggcugagagccccagc

SEQ ID NO: 2629129 - RNA, 18 nt, Human
ugggcggcugagagcccc

SEQ ID NO: 2629130 - RNA, 16 nt, Human
ugggcggcugagagcc

SEQ ID NO: 2629131 - RNA, 15 nt, Human
ugggcggcugagagc

SEQ ID NO: 2629132 - RNA, 14 nt, Human
ugggcggcugagag

SEQ ID NO: 2629133 - RNA, 12 nt, Human
ugggcggcugag

SEQ ID NO: 2629134 - RNA, 19 nt, Human
ugggcggcagagaggacug

SEQ ID NO: 2629135 - RNA, 15 nt, Human
ugggcggcagagagg

SEQ ID NO: 2629136 - RNA, 13 nt, Human
ugggcggcagaga

SEQ ID NO: 2629137 - RNA, 19 nt, Human
ugggcuucaguggcagcug

SEQ ID NO: 2629138 - RNA, 18 nt, Human
ugggcuucaguggcagcu

SEQ ID NO: 2629139 - RNA, 18 nt, Human
ugggcgugagaccugccc

SEQ ID NO: 2629140 - RNA, 19 nt, Human
ugggcgugagaccugcccc

SEQ ID NO: 2629141 - RNA, 17 nt, Human
ugggcgugagaccugcc

SEQ ID NO: 2629142 - RNA, 15 nt, Human
ugggcggggccuugc

SEQ ID NO: 2629143 - RNA, 14 nt, Human
ugggcggggccuug

SEQ ID NO: 2629144 - RNA, 16 nt, Human
uggguucacugcaacc

SEQ ID NO: 2629145 - RNA, 17 nt, Human
uggguuauucuggaguu

SEQ ID NO: 2629146 - RNA, 16 nt, Human
uggguuauucuggagu

SEQ ID NO: 2629147 - RNA, 15 nt, Human
uggguuauucuggag

SEQ ID NO: 2629148 - RNA, 15 nt, Human
uggguuaugaauauu

SEQ ID NO: 2629149 - RNA, 21 nt, Human
uggguucagaaaugcugccug

SEQ ID NO: 2629150 - RNA, 20 nt, Human
uggguucagaaaugcugccu

SEQ ID NO: 2629151 - RNA, 24 nt, Human
uggguucaggggacucagcccuga

SEQ ID NO: 2629152 - RNA, 18 nt, Human
uggguguccaaaggaaga

SEQ ID NO: 2629153 - RNA, 14 nt, Human
uggguguggcgcag

SEQ ID NO: 2629154 - RNA, 23 nt, Human
uggguucaagcgauucuucugcu

SEQ ID NO: 2629155 - RNA, 15 nt, Human
uggguccaggggaug

SEQ ID NO: 2629156 - RNA, 20 nt, Human
uggguccaggggaugggagg

SEQ ID NO: 2629157 - RNA, 21 nt, Human
uggguccaggggaugggaggu

SEQ ID NO: 2629158 - RNA, 19 nt, Human
uggguccaggggccccucc

SEQ ID NO: 2629159 - RNA, 18 nt, Human
uggguccaggggccccuc

SEQ ID NO: 2629160 - RNA, 14 nt, Human
uggguccaugggca

SEQ ID NO: 2629161 - RNA, 17 nt, Human
uggguccaugggcagag

SEQ ID NO: 2629162 - RNA, 20 nt, Human
uggguguauuuauuuuccuc

SEQ ID NO: 2629163 - RNA, 21 nt, Human
uggguccaggggccccuccag

SEQ ID NO: 2629164 - RNA, 22 nt, Human
uggguguauuuauuuuccuccc

SEQ ID NO: 2629165 - RNA, 23 nt, Human
ugggugucaagagggucugagga

SEQ ID NO: 2629166 - RNA, 21 nt, Human
ugggugucaagagggucugag

SEQ ID NO: 2629167 - RNA, 17 nt, Human
uggguuggaaaacagua

SEQ ID NO: 2629168 - RNA, 23 nt, Human
uggguucuuuggaaggagugaga

SEQ ID NO: 2629169 - RNA, 21 nt, Human
uggguucugccugccagcugc

SEQ ID NO: 2629170 - RNA, 22 nt, Human
uggguucugccugccagcugca

SEQ ID NO: 2629171 - RNA, 17 nt, Human
uggguucuuuggaagga

SEQ ID NO: 2629172 - RNA, 14 nt, Human
uggguugacuuuca

SEQ ID NO: 2629173 - RNA, 23 nt, Human
uggguuggcgcacccuccccucc

SEQ ID NO: 2629174 - RNA, 22 nt, Human
uggguuggcgcacccuccccuc

SEQ ID NO: 2629175 - RNA, 17 nt, Human
uggguuggcgcacccuc

SEQ ID NO: 2629176 - RNA, 15 nt, Human
uggguuggcgcaccc

SEQ ID NO: 2629177 - RNA, 20 nt, Human
uggguuggugcacagugauu

SEQ ID NO: 2629178 - RNA, 19 nt, Human
uggguuggugcacagugau

SEQ ID NO: 2629179 - RNA, 15 nt, Human
uggguuggugcacag

SEQ ID NO: 2629180 - RNA, 16 nt, Human
uggguuucauauuucu

SEQ ID NO: 2629181 - RNA, 16 nt, Human
uggguuggugcuucua

SEQ ID NO: 2629182 - RNA, 22 nt, Human
uggguuucacaagugaaaaaca

SEQ ID NO: 2629183 - RNA, 21 nt, Human
uggguuccuuccucugagccu

SEQ ID NO: 2629184 - RNA, 22 nt, Human
uggguuccuuccucugagccuu

SEQ ID NO: 2629185 - RNA, 13 nt, Human
uggguuccucuuc

SEQ ID NO: 2629186 - RNA, 21 nt, Human
uggguuccucuuccccacucc

SEQ ID NO: 2629187 - RNA, 20 nt, Human
uggguucccuuuccuuccau

SEQ ID NO: 2629188 - RNA, 21 nt, Human
uggguuccagcaauucuccug

SEQ ID NO: 2629189 - RNA, 13 nt, Human
uggguucauuauu

SEQ ID NO: 2629190 - RNA, 16 nt, Human
uggguucauuauugga

SEQ ID NO: 2629191 - RNA, 18 nt, Human
uggguucauuauuggaau

SEQ ID NO: 2629192 - RNA, 20 nt, Human
uggguucauuauuggaauua

SEQ ID NO: 2629193 - RNA, 22 nt, Human
uggguucagaaaugcugccugc

SEQ ID NO: 2629194 - RNA, 11 nt, Human
uggguucauua

SEQ ID NO: 2629195 - RNA, 17 nt, Human
ugggguggggaccucag

SEQ ID NO: 2629196 - RNA, 19 nt, Human
ugggguggggggggugcug

SEQ ID NO: 2629197 - RNA, 11 nt, Human
uggggcagugg

SEQ ID NO: 2629198 - RNA, 17 nt, Human
uggggcaguagaagguc

SEQ ID NO: 2629199 - RNA, 22 nt, Human
uggggcagucaccugcccagau

SEQ ID NO: 2629200 - RNA, 12 nt, Human
uggggcaggcag

SEQ ID NO: 2629201 - RNA, 14 nt, Human
uggggcaggcagug

SEQ ID NO: 2629202 - RNA, 17 nt, Human
uggggcaggcuggcugg

SEQ ID NO: 2629203 - RNA, 16 nt, Human
uggguagacacacaug

SEQ ID NO: 2629204 - RNA, 17 nt, Human
uggguagacacacauga

SEQ ID NO: 2629205 - RNA, 22 nt, Human
ugggguggggggggugcugggc

SEQ ID NO: 2629206 - RNA, 21 nt, Human
ugggguggggggggugcuggg

SEQ ID NO: 2629207 - RNA, 18 nt, Human
ugggucaccccuccagga

SEQ ID NO: 2629208 - RNA, 12 nt, Human
uggguauaaaag

SEQ ID NO: 2629209 - RNA, 22 nt, Human
uggguagcuguaaggcaugaag

SEQ ID NO: 2629210 - RNA, 20 nt, Human
uggggugggccucugguuug

SEQ ID NO: 2629211 - RNA, 13 nt, Human
uggguagcuguaa

SEQ ID NO: 2629212 - RNA, 13 nt, Human
ugggucaggcagg

SEQ ID NO: 2629213 - RNA, 23 nt, Human
ugggucaguguccaaagcagggu

SEQ ID NO: 2629214 - RNA, 12 nt, Human
ugggucagucug

SEQ ID NO: 2629215 - RNA, 18 nt, Human
uggguccaaauaaaaacu

SEQ ID NO: 2629216 - RNA, 16 nt, Human
uggguccaaauaaaaa

SEQ ID NO: 2629217 - RNA, 14 nt, Human
uggguccaaauaaa

SEQ ID NO: 2629218 - RNA, 13 nt, Human
uggguccaaauaa

SEQ ID NO: 2629219 - RNA, 22 nt, Human
uggguccaaauaaaaacuaaau

SEQ ID NO: 2629220 - RNA, 21 nt, Human
uggcuuuuauuaaugcacuuu

SEQ ID NO: 2629221 - RNA, 20 nt, Human
uggcuuuuauuaaugcacuu

SEQ ID NO: 2629222 - RNA, 16 nt, Human
uggcuuuuagacagau

SEQ ID NO: 2629223 - RNA, 15 nt, Human
uggcuuuuagacaga

SEQ ID NO: 2629224 - RNA, 17 nt, Human
uggcuuuuauuaaugca

SEQ ID NO: 2629225 - RNA, 20 nt, Human
uggcuuugugauucaaucug

SEQ ID NO: 2629226 - RNA, 17 nt, Human
uggcuguccagugccca

SEQ ID NO: 2629227 - RNA, 15 nt, Human
uggcuguccagugcc

SEQ ID NO: 2629228 - RNA, 20 nt, Human
uggcuguagaaggagacaga

SEQ ID NO: 2629229 - RNA, 17 nt, Human
uggcuguaucuuguuuu

SEQ ID NO: 2629230 - RNA, 14 nt, Human
uggcugucagcagg

SEQ ID NO: 2629231 - RNA, 12 nt, Human
uggcuguccagu

SEQ ID NO: 2629232 - RNA, 17 nt, Human
uggcugucagcaggaag

SEQ ID NO: 2629233 - RNA, 22 nt, Human
uggcugguuagagguucccuuu

SEQ ID NO: 2629234 - RNA, 14 nt, Human
uggcugggggccuc

SEQ ID NO: 2629235 - RNA, 21 nt, Human
ugggacagucaccucauggaa

SEQ ID NO: 2629236 - RNA, 20 nt, Human
ugggacagucaccucaugga

SEQ ID NO: 2629237 - RNA, 18 nt, Human
ugggacagucaccucaug

SEQ ID NO: 2629238 - RNA, 21 nt, Human
ugggaauguauuauucugcag

SEQ ID NO: 2629239 - RNA, 16 nt, Human
ugggaaugcggcaaga

SEQ ID NO: 2629240 - RNA, 17 nt, Human
ugggaaugaggugggag

SEQ ID NO: 2629241 - RNA, 14 nt, Human
ugggaaugaggugg

SEQ ID NO: 2629242 - RNA, 22 nt, Human
ugggaaugaggcuugcugagag

SEQ ID NO: 2629243 - RNA, 18 nt, Human
ugggaaugaggcuugcug

SEQ ID NO: 2629244 - RNA, 17 nt, Human
ugggaaugaggcuugcu

SEQ ID NO: 2629245 - RNA, 15 nt, Human
ugggaaugagacaua

SEQ ID NO: 2629246 - RNA, 22 nt, Human
uggcuuuuauuaaugcacuuuc

SEQ ID NO: 2629247 - RNA, 14 nt, Human
uggcuuuucacugc

SEQ ID NO: 2629248 - RNA, 22 nt, Human
ugggaaugaaugucagugugac

SEQ ID NO: 2629249 - RNA, 16 nt, Human
ugggaccaaaccuagc

SEQ ID NO: 2629250 - RNA, 17 nt, Human
ugggaccaaaccuagcc

SEQ ID NO: 2629251 - RNA, 19 nt, Human
ugggaccacgugagaucau

SEQ ID NO: 2629252 - RNA, 23 nt, Human
ugggagcacuggagugcagggag

SEQ ID NO: 2629253 - RNA, 13 nt, Human
ugggagcacugga

SEQ ID NO: 2629254 - RNA, 12 nt, Human
ugggagcacugg

SEQ ID NO: 2629255 - RNA, 21 nt, Human
ugggaccgccagauggggccu

SEQ ID NO: 2629256 - RNA, 19 nt, Human
ugggaccgccagauggggc

SEQ ID NO: 2629257 - RNA, 13 nt, Human
ugggacccuuucc

SEQ ID NO: 2629258 - RNA, 14 nt, Human
ugggacccuuuccu

SEQ ID NO: 2629259 - RNA, 17 nt, Human
ugggacccuuuccuucc

SEQ ID NO: 2629260 - RNA, 18 nt, Human
ugggacccuuuccuuccu

SEQ ID NO: 2629261 - RNA, 20 nt, Human
ugggacauuugcucauggaa

SEQ ID NO: 2629262 - RNA, 19 nt, Human
ugggacauuugcucaugga

SEQ ID NO: 2629263 - RNA, 16 nt, Human
ugggacaugggaaagg

SEQ ID NO: 2629264 - RNA, 22 nt, Human
ugggaauguauuauucugcagc

SEQ ID NO: 2629265 - RNA, 16 nt, Human
ugggacagggcauggc

SEQ ID NO: 2629266 - RNA, 14 nt, Human
ugggagccgggucu

SEQ ID NO: 2629267 - RNA, 18 nt, Human
ugggagccgggucugccu

SEQ ID NO: 2629268 - RNA, 22 nt, Human
ugggagccccagggucuucccu

SEQ ID NO: 2629269 - RNA, 23 nt, Human
ugggagccccagggucuucccua

SEQ ID NO: 2629270 - RNA, 12 nt, Human
ugggagccaggg

SEQ ID NO: 2629271 - RNA, 13 nt, Human
ugggagccccagg

SEQ ID NO: 2629272 - RNA, 14 nt, Human
ugggagccccaggg

SEQ ID NO: 2629273 - RNA, 16 nt, Human
ugggagccccaggguc

SEQ ID NO: 2629274 - RNA, 23 nt, Human
ugggagcaggagauugagaagga

SEQ ID NO: 2629275 - RNA, 22 nt, Human
ugggagcaggagauugagaagg

SEQ ID NO: 2629276 - RNA, 14 nt, Human
ugggagcaggagau

SEQ ID NO: 2629277 - RNA, 13 nt, Human
ugggagcaggaga

SEQ ID NO: 2629278 - RNA, 23 nt, Human
ugggagcagcccgcugaguggac

SEQ ID NO: 2629279 - RNA, 21 nt, Human
ugggagcagcgguuuggggag

SEQ ID NO: 2629280 - RNA, 17 nt, Human
ugggagcuccucuccug

SEQ ID NO: 2629281 - RNA, 16 nt, Human
ugggagcuccucuccu

SEQ ID NO: 2629282 - RNA, 15 nt, Human
ugggagcuccucucc

SEQ ID NO: 2629283 - RNA, 14 nt, Human
ugggagcuccucuc

SEQ ID NO: 2629284 - RNA, 13 nt, Human
ugggagcuccucu

SEQ ID NO: 2629285 - RNA, 20 nt, Human
ugggagcgugggaggcggga

SEQ ID NO: 2629286 - RNA, 22 nt, Human
ugggagcuccacucugcuucuc

SEQ ID NO: 2629287 - RNA, 19 nt, Human
ugggagcuccacucugcuu

SEQ ID NO: 2629288 - RNA, 16 nt, Human
ugggagcuccacucug

SEQ ID NO: 2629289 - RNA, 22 nt, Human
ugggagccugcaaacucacugc

SEQ ID NO: 2629290 - RNA, 20 nt, Human
ugggagccugcaaacucacu

SEQ ID NO: 2629291 - RNA, 23 nt, Human
ugggagccgggucugccucuucu

SEQ ID NO: 2629292 - RNA, 21 nt, Human
ugggagcuccucuccuggagg

SEQ ID NO: 2629293 - RNA, 20 nt, Human
ugggagcuccucuccuggag

SEQ ID NO: 2629294 - RNA, 19 nt, Human
ugggagcuccucuccugga

SEQ ID NO: 2629295 - RNA, 18 nt, Human
ugggagcuccucuccugg

SEQ ID NO: 2629296 - RNA, 23 nt, Human
ugggagcuccucuccuggaggau

SEQ ID NO: 2629297 - RNA, 22 nt, Human
ugggagcuccucuccuggagga

SEQ ID NO: 2629298 - RNA, 23 nt, Human
ugggagcugccuguucagcucca

SEQ ID NO: 2629299 - RNA, 12 nt, Human
uggcugggggcc

SEQ ID NO: 2629300 - RNA, 22 nt, Human
uggcuggggccuaucagugugc

SEQ ID NO: 2629301 - RNA, 21 nt, Human
uggcuggggccuaucagugug

SEQ ID NO: 2629302 - RNA, 20 nt, Human
uggcuggggccuaucagugu

SEQ ID NO: 2629303 - RNA, 16 nt, Human
uggcugggggcaggag

SEQ ID NO: 2629304 - RNA, 17 nt, Human
uggcugggggcaggagg

SEQ ID NO: 2629305 - RNA, 16 nt, Human
uggcucuuccaggcug

SEQ ID NO: 2629306 - RNA, 16 nt, Human
uggcugggcccagaag

SEQ ID NO: 2629307 - RNA, 22 nt, Human
uggcucuggagacagccccaga

SEQ ID NO: 2629308 - RNA, 15 nt, Human
uggcucuuccaggcu

SEQ ID NO: 2629309 - RNA, 13 nt, Human
uggcucuuccagg

SEQ ID NO: 2629310 - RNA, 21 nt, Human
uggcucgaaucucugugccuu

SEQ ID NO: 2629311 - RNA, 21 nt, Human
uggcucuggagacagccccag

SEQ ID NO: 2629312 - RNA, 19 nt, Human
uggcucucauugacuuccu

SEQ ID NO: 2629313 - RNA, 14 nt, Human
uggcucuggagaca

SEQ ID NO: 2629314 - RNA, 16 nt, Human
uggcucucagaaggua

SEQ ID NO: 2629315 - RNA, 20 nt, Human
uggcucgaaucucugugccu

SEQ ID NO: 2629316 - RNA, 19 nt, Human
uggcucgaaucucugugcc

SEQ ID NO: 2629317 - RNA, 18 nt, Human
uggcucgaaucucugugc

SEQ ID NO: 2629318 - RNA, 17 nt, Human
uggcuccuucccaucgc

SEQ ID NO: 2629319 - RNA, 19 nt, Human
uggcuccuucccaucgcug

SEQ ID NO: 2629320 - RNA, 16 nt, Human
uggcuccaaacccucg

SEQ ID NO: 2629321 - RNA, 18 nt, Human
uggcuccaaacccucgag

SEQ ID NO: 2629322 - RNA, 20 nt, Human
uggcuccaaacccucgaggc

SEQ ID NO: 2629323 - RNA, 21 nt, Human
uggcuccugaggggcaucugc

SEQ ID NO: 2629324 - RNA, 23 nt, Human
uggcuccugaggggcaucugccc

SEQ ID NO: 2629325 - RNA, 22 nt, Human
uggcucagguggggucacucug

SEQ ID NO: 2629326 - RNA, 19 nt, Human
uggcucauauuccugcagc

SEQ ID NO: 2629327 - RNA, 21 nt, Human
uggcucauauuccugcagccu

SEQ ID NO: 2629328 - RNA, 22 nt, Human
uggcucauauuccugcagccug

SEQ ID NO: 2629329 - RNA, 20 nt, Human
uggcucagguggggucacuc

SEQ ID NO: 2629330 - RNA, 18 nt, Human
uggcgugucccucucgga

SEQ ID NO: 2629331 - RNA, 16 nt, Human
uggccuuuuccuauuu

SEQ ID NO: 2629332 - RNA, 13 nt, Human
uggccuuuuccua

SEQ ID NO: 2629333 - RNA, 17 nt, Human
uggcgagaggaggggcc

SEQ ID NO: 2629334 - RNA, 13 nt, Human
uggcgcagugccu

SEQ ID NO: 2629335 - RNA, 18 nt, Human
uggcgcagugccucuggu

SEQ ID NO: 2629336 - RNA, 17 nt, Human
uggcgcagugccucugg

SEQ ID NO: 2629337 - RNA, 15 nt, Human
uggcgcagugccucu

SEQ ID NO: 2629338 - RNA, 17 nt, Human
uggcgccgucuccaggg

SEQ ID NO: 2629339 - RNA, 15 nt, Human
uggcgccgucuccag

SEQ ID NO: 2629340 - RNA, 18 nt, Human
uggcgccgucuccagggg

SEQ ID NO: 2629341 - RNA, 13 nt, Human
uggcgcuaggcau

SEQ ID NO: 2629342 - RNA, 14 nt, Human
uggcgcugccccug

SEQ ID NO: 2629343 - RNA, 15 nt, Human
uggcgcugccccugg

SEQ ID NO: 2629344 - RNA, 22 nt, Human
uggcgugcaguggugcgaucug

SEQ ID NO: 2629345 - RNA, 13 nt, Human
uggcgucugucuu

SEQ ID NO: 2629346 - RNA, 15 nt, Human
uggcgucugucuuca

SEQ ID NO: 2629347 - RNA, 17 nt, Human
uggcgucugucuucaag

SEQ ID NO: 2629348 - RNA, 20 nt, Human
uggcgucugucuucaagggc

SEQ ID NO: 2629349 - RNA, 22 nt, Human
uggcgucugucuucaagggcuu

SEQ ID NO: 2629350 - RNA, 17 nt, Human
uggccuucggccuccau

SEQ ID NO: 2629351 - RNA, 18 nt, Human
uggccuucggccuccauc

SEQ ID NO: 2629352 - RNA, 15 nt, Human
uggccagaugcacca

SEQ ID NO: 2629353 - RNA, 18 nt, Human
uggccagagcugggaggc

SEQ ID NO: 2629354 - RNA, 17 nt, Human
uggccagagcugggagg

SEQ ID NO: 2629355 - RNA, 15 nt, Human
uggccagagcuggga

SEQ ID NO: 2629356 - RNA, 14 nt, Human
uggccagagcuggg

SEQ ID NO: 2629357 - RNA, 23 nt, Human
uggccagagcugggaggcauggc

SEQ ID NO: 2629358 - RNA, 20 nt, Human
uggccagagcugggaggcau

SEQ ID NO: 2629359 - RNA, 14 nt, Human
uggccagaggcuug

SEQ ID NO: 2629360 - RNA, 20 nt, Human
uggccuuucauauuuuagcu

SEQ ID NO: 2629361 - RNA, 23 nt, Human
uggccuugcagcacucacacagg

SEQ ID NO: 2629362 - RNA, 24 nt, Human
uggccagagcugggaggcauggcc

SEQ ID NO: 2629363 - RNA, 20 nt, Human
ugcccacccccugcccugca

SEQ ID NO: 2629364 - RNA, 19 nt, Human
ugcccacccccugcccugc

SEQ ID NO: 2629365 - RNA, 18 nt, Human
ugcccacccccugcccug

SEQ ID NO: 2629366 - RNA, 16 nt, Human
ugcccacccccugccc

SEQ ID NO: 2629367 - RNA, 15 nt, Human
ugcccacccccugcc

SEQ ID NO: 2629368 - RNA, 14 nt, Human
ugcccacccccugc

SEQ ID NO: 2629369 - RNA, 13 nt, Human
ugcccacccccug

SEQ ID NO: 2629370 - RNA, 24 nt, Human
ugcccacccccucaagccaauccc

SEQ ID NO: 2629371 - RNA, 18 nt, Human
ugcccacccccucaagcc

SEQ ID NO: 2629372 - RNA, 15 nt, Human
ugcccacccccucaa

SEQ ID NO: 2629373 - RNA, 14 nt, Human
ugcccacccccuca

SEQ ID NO: 2629374 - RNA, 13 nt, Human
ugcccacccccuc

SEQ ID NO: 2629375 - RNA, 11 nt, Human
ugcccaccccc

SEQ ID NO: 2629376 - RNA, 19 nt, Human
ugcccaccccacccccacc

SEQ ID NO: 2629377 - RNA, 17 nt, Human
ugcccaccccaccccca

SEQ ID NO: 2629378 - RNA, 16 nt, Human
ugcccaccccaccccc

SEQ ID NO: 2629379 - RNA, 17 nt, Human
ugcccaccuggccucug

SEQ ID NO: 2629380 - RNA, 15 nt, Human
ugcccaccuggccuc

SEQ ID NO: 2629381 - RNA, 18 nt, Human
ugcccaccuggccucugc

SEQ ID NO: 2629382 - RNA, 20 nt, Human
ugcccacccguggagauggg

SEQ ID NO: 2629383 - RNA, 14 nt, Human
ugcccaccuggccu

SEQ ID NO: 2629384 - RNA, 19 nt, Human
ugcccagagggcccaggca

SEQ ID NO: 2629385 - RNA, 10 nt, Human
ugcccagccc

SEQ ID NO: 2629386 - RNA, 20 nt, Human
ugcccagagggcccaggcag

SEQ ID NO: 2629387 - RNA, 21 nt, Human
ugcccagagggcccaggcagg

SEQ ID NO: 2629388 - RNA, 23 nt, Human
ugcccagagggcccaggcaggcc

SEQ ID NO: 2629389 - RNA, 15 nt, Human
ugcccagaguugcug

SEQ ID NO: 2629390 - RNA, 19 nt, Human
ugcccacccguggagaugg

SEQ ID NO: 2629391 - RNA, 16 nt, Human
ugcccacaucccaggc

SEQ ID NO: 2629392 - RNA, 23 nt, Human
ugccaugggcuucacuguauaaa

SEQ ID NO: 2629393 - RNA, 22 nt, Human
ugccaugggcuucacuguauaa

SEQ ID NO: 2629394 - RNA, 21 nt, Human
ugcccacaggccgcccugcgg

SEQ ID NO: 2629395 - RNA, 23 nt, Human
ugcccacaucccaggcuucaccc

SEQ ID NO: 2629396 - RNA, 13 nt, Human
ugcccaccccacc

SEQ ID NO: 2629397 - RNA, 12 nt, Human
ugcccaccccac

SEQ ID NO: 2629398 - RNA, 17 nt, Human
ugcccaccaacauccca

SEQ ID NO: 2629399 - RNA, 23 nt, Human
ugcccaccaacaucccauugccc

SEQ ID NO: 2629400 - RNA, 20 nt, Human
ugccaugggcuucacuguau

SEQ ID NO: 2629401 - RNA, 19 nt, Human
ugccaugggcuucacugua

SEQ ID NO: 2629402 - RNA, 18 nt, Human
ugccaugggcuucacugu

SEQ ID NO: 2629403 - RNA, 17 nt, Human
ugccauggcgugucccu

SEQ ID NO: 2629404 - RNA, 23 nt, Human
ugccauggaggcacacagcugca

SEQ ID NO: 2629405 - RNA, 18 nt, Human
ugccauggaggcacacag

SEQ ID NO: 2629406 - RNA, 17 nt, Human
ugccauggaggcacaca

SEQ ID NO: 2629407 - RNA, 16 nt, Human
ugccauggaggcacac

SEQ ID NO: 2629408 - RNA, 23 nt, Human
ugccauggacagaagaaggcagc

SEQ ID NO: 2629409 - RNA, 22 nt, Human
ugccaucugcgugacaauaaaa

SEQ ID NO: 2629410 - RNA, 16 nt, Human
ugccaucugugggcac

SEQ ID NO: 2629411 - RNA, 18 nt, Human
ugccaucugugggcacgc

SEQ ID NO: 2629412 - RNA, 13 nt, Human
ugccaucuuccca

SEQ ID NO: 2629413 - RNA, 16 nt, Human
ugccaugcagggccuc

SEQ ID NO: 2629414 - RNA, 20 nt, Human
ugccauggacagaagaaggc

SEQ ID NO: 2629415 - RNA, 18 nt, Human
ugccauggacagaagaag

SEQ ID NO: 2629416 - RNA, 22 nt, Human
ugccagggacagaggggguggc

SEQ ID NO: 2629417 - RNA, 11 nt, Human
ugccagggaca

SEQ ID NO: 2629418 - RNA, 11 nt, Human
ugccagggcag

SEQ ID NO: 2629419 - RNA, 17 nt, Human
ugccagggcaaugauga

SEQ ID NO: 2629420 - RNA, 22 nt, Human
ugccagggcaaugaugaaugag

SEQ ID NO: 2629421 - RNA, 18 nt, Human
ugccagggagacagagcu

SEQ ID NO: 2629422 - RNA, 15 nt, Human
ugccagggagacaga

SEQ ID NO: 2629423 - RNA, 11 nt, Human
ugccagggagc

SEQ ID NO: 2629424 - RNA, 12 nt, Human
ugccagggagcu

SEQ ID NO: 2629425 - RNA, 22 nt, Human
ugccaccccacccucccuggag

SEQ ID NO: 2629426 - RNA, 21 nt, Human
ugccaccccacccucccugga

SEQ ID NO: 2629427 - RNA, 20 nt, Human
ugccaccccacccucccugg

SEQ ID NO: 2629428 - RNA, 19 nt, Human
ugccaccccacccucccug

SEQ ID NO: 2629429 - RNA, 17 nt, Human
ugccaccccacccuccc

SEQ ID NO: 2629430 - RNA, 16 nt, Human
ugccaccccacccucc

SEQ ID NO: 2629431 - RNA, 15 nt, Human
ugccaccccacccuc

SEQ ID NO: 2629432 - RNA, 14 nt, Human
ugccaccccacccu

SEQ ID NO: 2629433 - RNA, 23 nt, Human
ugccaccccacccucccuggagu

SEQ ID NO: 2629434 - RNA, 22 nt, Human
ugccacccaccucccugccucc

SEQ ID NO: 2629435 - RNA, 20 nt, Human
ugccacccaccucccugccu

SEQ ID NO: 2629436 - RNA, 21 nt, Human
ugccacccaccucccugccuc

SEQ ID NO: 2629437 - RNA, 18 nt, Human
ugccacccaccucccugc

SEQ ID NO: 2629438 - RNA, 19 nt, Human
ugccacccaccucccugcc

SEQ ID NO: 2629439 - RNA, 17 nt, Human
ugccacccaccucccug

SEQ ID NO: 2629440 - RNA, 16 nt, Human
ugccacccaccucccu

SEQ ID NO: 2629441 - RNA, 23 nt, Human
ugccauccucaaacacugcaggc

SEQ ID NO: 2629442 - RNA, 19 nt, Human
ugccauccucaaacacugc

SEQ ID NO: 2629443 - RNA, 11 nt, Human
ugccauccuca

SEQ ID NO: 2629444 - RNA, 14 nt, Human
ugccagucaccccg

SEQ ID NO: 2629445 - RNA, 23 nt, Human
ugccaguaacgcgucuuccugag

SEQ ID NO: 2629446 - RNA, 22 nt, Human
ugccaguaacgcgucuuccuga

SEQ ID NO: 2629447 - RNA, 22 nt, Human
ugccaguaggcucaacuaggga

SEQ ID NO: 2629448 - RNA, 24 nt, Human
ugccagguuuuuggucugacccac

SEQ ID NO: 2629449 - RNA, 21 nt, Human
ugccaguaacgcgucuuccug

SEQ ID NO: 2629450 - RNA, 18 nt, Human
ugccaguaacgcgucuuc

SEQ ID NO: 2629451 - RNA, 22 nt, Human
ugcaucagcugcugaaacaaca

SEQ ID NO: 2629452 - RNA, 19 nt, Human
ugcaggcagccaggccaca

SEQ ID NO: 2629453 - RNA, 18 nt, Human
ugcaggcagccaggccac

SEQ ID NO: 2629454 - RNA, 17 nt, Human
ugcaggcagccaggcca

SEQ ID NO: 2629455 - RNA, 16 nt, Human
ugcaggaccugccugu

SEQ ID NO: 2629456 - RNA, 17 nt, Human
ugcaggaccugccugua

SEQ ID NO: 2629457 - RNA, 18 nt, Human
ugcaggaccugccuguag

SEQ ID NO: 2629458 - RNA, 19 nt, Human
ugcaggaccugccuguagc

SEQ ID NO: 2629459 - RNA, 13 nt, Human
ugcaggacuugag

SEQ ID NO: 2629460 - RNA, 15 nt, Human
ugcaggacuugagaa

SEQ ID NO: 2629461 - RNA, 18 nt, Human
ugcaggacuugagaagac

SEQ ID NO: 2629462 - RNA, 22 nt, Human
ugcaggagcaguaucaugaagc

SEQ ID NO: 2629463 - RNA, 16 nt, Human
ugcaggcagccaggcc

SEQ ID NO: 2629464 - RNA, 23 nt, Human
ugcaggaguuaaaaagggcaggg

SEQ ID NO: 2629465 - RNA, 17 nt, Human
ugcauccaacuccagga

SEQ ID NO: 2629466 - RNA, 16 nt, Human
ugcauccaacuccagg

SEQ ID NO: 2629467 - RNA, 13 nt, Human
ugcauccaacucc

SEQ ID NO: 2629468 - RNA, 18 nt, Human
ugcauccaaaggugcuca

SEQ ID NO: 2629469 - RNA, 16 nt, Human
ugcauccaaaggugcu

SEQ ID NO: 2629470 - RNA, 21 nt, Human
ugcauccuccgccucccgggu

SEQ ID NO: 2629471 - RNA, 15 nt, Human
ugcauccuccgccuc

SEQ ID NO: 2629472 - RNA, 18 nt, Human
ugcauccuccgccucccg

SEQ ID NO: 2629473 - RNA, 14 nt, Human
ugcauccauuccuc

SEQ ID NO: 2629474 - RNA, 16 nt, Human
ugcauccauuccucag

SEQ ID NO: 2629475 - RNA, 17 nt, Human
ugcauccauuccucagg

SEQ ID NO: 2629476 - RNA, 18 nt, Human
ugcauccauuccucaggg

SEQ ID NO: 2629477 - RNA, 16 nt, Human
ugcaugugaagaaagg

SEQ ID NO: 2629478 - RNA, 12 nt, Human
ugcaugugaaga

SEQ ID NO: 2629479 - RNA, 21 nt, Human
ugcaugucgugaccaacuaga

SEQ ID NO: 2629480 - RNA, 15 nt, Human
ugcaucguggagaca

SEQ ID NO: 2629481 - RNA, 14 nt, Human
ugcaucguggagac

SEQ ID NO: 2629482 - RNA, 16 nt, Human
ugcauguccuguaaag

SEQ ID NO: 2629483 - RNA, 13 nt, Human
ugcaugugacucu

SEQ ID NO: 2629484 - RNA, 14 nt, Human
ugcaugugacucug

SEQ ID NO: 2629485 - RNA, 15 nt, Human
ugcaugugacucuga

SEQ ID NO: 2629486 - RNA, 16 nt, Human
ugcaugugacucugaa

SEQ ID NO: 2629487 - RNA, 20 nt, Human
ugcaugugacucugaagcug

SEQ ID NO: 2629488 - RNA, 17 nt, Human
ugcaugugacucugaag

SEQ ID NO: 2629489 - RNA, 22 nt, Human
ugcaucgagucaaaacucaaau

SEQ ID NO: 2629490 - RNA, 18 nt, Human
ugcaucgagucaaaacuc

SEQ ID NO: 2629491 - RNA, 16 nt, Human
ugcauguaugucuugg

SEQ ID NO: 2629492 - RNA, 15 nt, Human
ugcaucguuucaucu

SEQ ID NO: 2629493 - RNA, 13 nt, Human
ugcauuaaauuca

SEQ ID NO: 2629494 - RNA, 14 nt, Human
ugcauuaaauucac

SEQ ID NO: 2629495 - RNA, 19 nt, Human
ugcauuaaaagaaaauaaa

SEQ ID NO: 2629496 - RNA, 15 nt, Human
ugcauuaaauucaca

SEQ ID NO: 2629497 - RNA, 16 nt, Human
ugcauuaaauucacaa

SEQ ID NO: 2629498 - RNA, 17 nt, Human
ugcauuaaauucacaaa

SEQ ID NO: 2629499 - RNA, 19 nt, Human
ugcauuaaauucacaaacu

SEQ ID NO: 2629500 - RNA, 19 nt, Human
ugcauguuacauaagauaa

SEQ ID NO: 2629501 - RNA, 11 nt, Human
ugcaugugugu

SEQ ID NO: 2629502 - RNA, 12 nt, Human
ugcaugugugcg

SEQ ID NO: 2629503 - RNA, 13 nt, Human
ugcaugugugugc

SEQ ID NO: 2629504 - RNA, 14 nt, Human
ugcaugugugugcu

SEQ ID NO: 2629505 - RNA, 15 nt, Human
ugcauuauauuuauu

SEQ ID NO: 2629506 - RNA, 20 nt, Human
ugcauuaaauucacaaacuu

SEQ ID NO: 2629507 - RNA, 21 nt, Human
ugcauuaaauucacaaacuuu

SEQ ID NO: 2629508 - RNA, 11 nt, Human
ugcauuacaga

SEQ ID NO: 2629509 - RNA, 12 nt, Human
ugcauuacagag

SEQ ID NO: 2629510 - RNA, 15 nt, Human
ugcauuacagagagg

SEQ ID NO: 2629511 - RNA, 20 nt, Human
ugcauuauauuuauuacugu

SEQ ID NO: 2629512 - RNA, 21 nt, Human
ugcauuauauuuauuacugua

SEQ ID NO: 2629513 - RNA, 22 nt, Human
ugcauuuuguuugguauuguau

SEQ ID NO: 2629514 - RNA, 14 nt, Human
ugccaagacaugau

SEQ ID NO: 2629515 - RNA, 23 nt, Human
ugccaacuguuguaacuaggcuc

SEQ ID NO: 2629516 - RNA, 21 nt, Human
ugccaacuucuucagagcuga

SEQ ID NO: 2629517 - RNA, 20 nt, Human
ugccaaccuguaauaaauau

SEQ ID NO: 2629518 - RNA, 19 nt, Human
ugccaaccuguaauaaaua

SEQ ID NO: 2629519 - RNA, 18 nt, Human
ugccaaccuguaauaaau

SEQ ID NO: 2629520 - RNA, 16 nt, Human
ugccaaccucuggagc

SEQ ID NO: 2629521 - RNA, 22 nt, Human
ugccaaccuguaauaaauauga

SEQ ID NO: 2629522 - RNA, 21 nt, Human
ugccaaccuguaauaaauaug

SEQ ID NO: 2629523 - RNA, 23 nt, Human
ugccaaccuguaauaaauaugag

SEQ ID NO: 2629524 - RNA, 19 nt, Human
ugcauuuuugugaaaugaa

SEQ ID NO: 2629525 - RNA, 18 nt, Human
ugcauuacagagaggaga

SEQ ID NO: 2629526 - RNA, 14 nt, Human
ugcauuuuugugaa

SEQ ID NO: 2629527 - RNA, 16 nt, Human
ugcauuuuugugaaau

SEQ ID NO: 2629528 - RNA, 17 nt, Human
ugcauuuuugugaaaug

SEQ ID NO: 2629529 - RNA, 23 nt, Human
ugcauuuuguuugguauuguauu

SEQ ID NO: 2629530 - RNA, 16 nt, Human
ugcauuacagagagga

SEQ ID NO: 2629531 - RNA, 17 nt, Human
ugcauuacagagaggag

SEQ ID NO: 2629532 - RNA, 20 nt, Human
ugccaaaaaaagacagggcu

SEQ ID NO: 2629533 - RNA, 14 nt, Human
ugcaccucccccca

SEQ ID NO: 2629534 - RNA, 15 nt, Human
ugcaccuccccccac

SEQ ID NO: 2629535 - RNA, 16 nt, Human
ugcaccuccccccacu

SEQ ID NO: 2629536 - RNA, 17 nt, Human
ugcaccuccccccacug

SEQ ID NO: 2629537 - RNA, 18 nt, Human
ugcaccuccccccacugc

SEQ ID NO: 2629538 - RNA, 19 nt, Human
ugcaccuccccccacugca

SEQ ID NO: 2629539 - RNA, 20 nt, Human
ugcaccuccccccacugcag

SEQ ID NO: 2629540 - RNA, 11 nt, Human
ugcaccugcau

SEQ ID NO: 2629541 - RNA, 15 nt, Human
ugcaccugccagccu

SEQ ID NO: 2629542 - RNA, 16 nt, Human
ugcaccugccagccug

SEQ ID NO: 2629543 - RNA, 17 nt, Human
ugcaccugccagccugg

SEQ ID NO: 2629544 - RNA, 18 nt, Human
ugcaccugccagccuggc

SEQ ID NO: 2629545 - RNA, 19 nt, Human
ugcaccugccagccuggcu

SEQ ID NO: 2629546 - RNA, 20 nt, Human
ugcaccugccagccuggcuu

SEQ ID NO: 2629547 - RNA, 15 nt, Human
ugcacaucaaaauau

SEQ ID NO: 2629548 - RNA, 18 nt, Human
ugcacauauggacucugc

SEQ ID NO: 2629549 - RNA, 17 nt, Human
ugcacauauggacucug

SEQ ID NO: 2629550 - RNA, 15 nt, Human
ugcacauauggacuc

SEQ ID NO: 2629551 - RNA, 14 nt, Human
ugcacauauggacu

SEQ ID NO: 2629552 - RNA, 15 nt, Human
ugcacaucugugucu

SEQ ID NO: 2629553 - RNA, 16 nt, Human
ugcacaucugugucuu

SEQ ID NO: 2629554 - RNA, 18 nt, Human
ugcacaucugugucuugu

SEQ ID NO: 2629555 - RNA, 19 nt, Human
ugcacaucugugucuuguu

SEQ ID NO: 2629556 - RNA, 15 nt, Human
ugcacaucucugcuu

SEQ ID NO: 2629557 - RNA, 14 nt, Human
ugcacaucucugcu

SEQ ID NO: 2629558 - RNA, 19 nt, Human
ugcacauauggacucugca

SEQ ID NO: 2629559 - RNA, 23 nt, Human
ugcacaguuuucuggcuggagcc

SEQ ID NO: 2629560 - RNA, 22 nt, Human
ugcacaguuagcaaacuuugua

SEQ ID NO: 2629561 - RNA, 24 nt, Human
ugcacaguuuucuggcuggagccu

SEQ ID NO: 2629562 - RNA, 21 nt, Human
ugcacauacgcaccacaucuc

SEQ ID NO: 2629563 - RNA, 22 nt, Human
ugcacauagcuaucaagugugc

SEQ ID NO: 2629564 - RNA, 15 nt, Human
ugcacauacuugaga

SEQ ID NO: 2629565 - RNA, 20 nt, Human
ugcacagugcaucucagccc

SEQ ID NO: 2629566 - RNA, 19 nt, Human
ugcacagugcaucucagcc

SEQ ID NO: 2629567 - RNA, 16 nt, Human
ugcacagggagacgua

SEQ ID NO: 2629568 - RNA, 14 nt, Human
ugcacagggagacg

SEQ ID NO: 2629569 - RNA, 12 nt, Human
ugcacagggcag

SEQ ID NO: 2629570 - RNA, 18 nt, Human
ugcacagggcagcugggc

SEQ ID NO: 2629571 - RNA, 17 nt, Human
ugcacagggcagcuggg

SEQ ID NO: 2629572 - RNA, 16 nt, Human
ugcacagggcagcugg

SEQ ID NO: 2629573 - RNA, 15 nt, Human
ugcacagggcagcug

SEQ ID NO: 2629574 - RNA, 18 nt, Human
ugcacagugcaucucagc

SEQ ID NO: 2629575 - RNA, 20 nt, Human
ugcacagcuaacauggaagu

SEQ ID NO: 2629576 - RNA, 18 nt, Human
ugcacagcuaacauggaa

SEQ ID NO: 2629577 - RNA, 23 nt, Human
ugcacagcuaacauggaaguacu

SEQ ID NO: 2629578 - RNA, 17 nt, Human
ugcacagcguccugucc

SEQ ID NO: 2629579 - RNA, 18 nt, Human
ugcacagcggccccugca

SEQ ID NO: 2629580 - RNA, 16 nt, Human
ugcacagcggccccug

SEQ ID NO: 2629581 - RNA, 17 nt, Human
ugcacagcuaacaugga

SEQ ID NO: 2629582 - RNA, 23 nt, Human
ugcacagaguuguuacauuuuua

SEQ ID NO: 2629583 - RNA, 19 nt, Human
ugcacagagcucuccagcu

SEQ ID NO: 2629584 - RNA, 19 nt, Human
ugcacagauggauuugccu

SEQ ID NO: 2629585 - RNA, 23 nt, Human
ugcacagauggauuugccugugc

SEQ ID NO: 2629586 - RNA, 21 nt, Human
ugcacagaguuguuacauuuu

SEQ ID NO: 2629587 - RNA, 22 nt, Human
ugcacagaguuguuacauuuuu

SEQ ID NO: 2629588 - RNA, 20 nt, Human
ugcacagagcucuccagcuc

SEQ ID NO: 2629589 - RNA, 18 nt, Human
ugcacagagcucuccagc

SEQ ID NO: 2629590 - RNA, 16 nt, Human
ugcacagagcucucca

SEQ ID NO: 2629591 - RNA, 14 nt, Human
ugcacagagcucuc

SEQ ID NO: 2629592 - RNA, 13 nt, Human
ugcacagagcucu

SEQ ID NO: 2629593 - RNA, 12 nt, Human
ugcacagagcuc

SEQ ID NO: 2629594 - RNA, 19 nt, Human
ugcacagacgucccuccac

SEQ ID NO: 2629595 - RNA, 22 nt, Human
ugaagucuuuguacagacaaca

SEQ ID NO: 2629596 - RNA, 14 nt, Human
ugaagucugaaauu

SEQ ID NO: 2629597 - RNA, 21 nt, Human
ugcacacuugugugugggcug

SEQ ID NO: 2629598 - RNA, 22 nt, Human
ugcacacuuugccauauuuuca

SEQ ID NO: 2629599 - RNA, 14 nt, Human
ugcacacuuugcca

SEQ ID NO: 2629600 - RNA, 23 nt, Human
ugcacacuugugugugggcugug

SEQ ID NO: 2629601 - RNA, 20 nt, Human
ugaagucuuuguacagacaa

SEQ ID NO: 2629602 - RNA, 17 nt, Human
ugaagucuuuguacaga

SEQ ID NO: 2629603 - RNA, 13 nt, Human
ugaagucugaaau

SEQ ID NO: 2629604 - RNA, 12 nt, Human
ugaagucugaaa

SEQ ID NO: 2629605 - RNA, 11 nt, Human
ugaagucugaa

SEQ ID NO: 2629606 - RNA, 17 nt, Human
ugaagucguugugaggg

SEQ ID NO: 2629607 - RNA, 16 nt, Human
ugaagucguugugagg

SEQ ID NO: 2629608 - RNA, 21 nt, Human
ugaagucgucuuaacucacca

SEQ ID NO: 2629609 - RNA, 19 nt, Human
ugaagucucugaagugaaa

SEQ ID NO: 2629610 - RNA, 16 nt, Human
ugcacguacacacaca

SEQ ID NO: 2629611 - RNA, 21 nt, Human
ugcacggugggccuugcuggg

SEQ ID NO: 2629612 - RNA, 23 nt, Human
ugcacggugggccuugcugggga

SEQ ID NO: 2629613 - RNA, 22 nt, Human
ugcaccugccagccuggcuucu

SEQ ID NO: 2629614 - RNA, 18 nt, Human
ugcacggugggccuugcu

SEQ ID NO: 2629615 - RNA, 18 nt, Human
ugcaccugcauccguagu

SEQ ID NO: 2629616 - RNA, 16 nt, Human
ugcacuugcagacucu

SEQ ID NO: 2629617 - RNA, 21 nt, Human
ugcacuugcagacucuacaga

SEQ ID NO: 2629618 - RNA, 20 nt, Human
ugcacuugugauuauuuauu

SEQ ID NO: 2629619 - RNA, 17 nt, Human
ugcacuugugauuauuu

SEQ ID NO: 2629620 - RNA, 16 nt, Human
ugcacuuggcugcaua

SEQ ID NO: 2629621 - RNA, 14 nt, Human
ugcacuuggccucu

SEQ ID NO: 2629622 - RNA, 15 nt, Human
ugcacuuggccucug

SEQ ID NO: 2629623 - RNA, 17 nt, Human
ugcacuuggccucugga

SEQ ID NO: 2629624 - RNA, 20 nt, Human
ugcacuuuguucuggcucuu

SEQ ID NO: 2629625 - RNA, 19 nt, Human
ugcacuuuguucuggcucu

SEQ ID NO: 2629626 - RNA, 18 nt, Human
ugcacuuuguucuggcuc

SEQ ID NO: 2629627 - RNA, 15 nt, Human
ugcacuuuguucugg

SEQ ID NO: 2629628 - RNA, 17 nt, Human
ugcagauaaacaguagu

SEQ ID NO: 2629629 - RNA, 18 nt, Human
ugcagagugcccagaacu

SEQ ID NO: 2629630 - RNA, 16 nt, Human
ugcagauaaacaguag

SEQ ID NO: 2629631 - RNA, 13 nt, Human
ugcagagucagca

SEQ ID NO: 2629632 - RNA, 14 nt, Human
ugcagagucagcag

SEQ ID NO: 2629633 - RNA, 15 nt, Human
ugcagagucagcaga

SEQ ID NO: 2629634 - RNA, 17 nt, Human
ugcagaguccugcacag

SEQ ID NO: 2629635 - RNA, 17 nt, Human
ugcagagucagcagaac

SEQ ID NO: 2629636 - RNA, 14 nt, Human
ugcagagugcccag

SEQ ID NO: 2629637 - RNA, 15 nt, Human
ugcagagugcccaga

SEQ ID NO: 2629638 - RNA, 18 nt, Human
ugcaggaccucaggugag

SEQ ID NO: 2629639 - RNA, 15 nt, Human
ugcaggaccugccug

SEQ ID NO: 2629640 - RNA, 16 nt, Human
ugcaggaauaaggccu

SEQ ID NO: 2629641 - RNA, 17 nt, Human
ugcaggaauaaggccuu

SEQ ID NO: 2629642 - RNA, 15 nt, Human
ugcaggaccucaggu

SEQ ID NO: 2629643 - RNA, 16 nt, Human
ugcaggaccucaggug

SEQ ID NO: 2629644 - RNA, 15 nt, Human
ugcagcuuuacaugc

SEQ ID NO: 2629645 - RNA, 17 nt, Human
ugcaggaaauggcugug

SEQ ID NO: 2629646 - RNA, 22 nt, Human
ugcagcuuuaaaaaauuaaucu

SEQ ID NO: 2629647 - RNA, 16 nt, Human
ugcagcuuuacaugca

SEQ ID NO: 2629648 - RNA, 14 nt, Human
ugcaggaccucagg

SEQ ID NO: 2629649 - RNA, 14 nt, Human
ugcagcaauaaagc

SEQ ID NO: 2629650 - RNA, 15 nt, Human
ugcagcaauaaagca

SEQ ID NO: 2629651 - RNA, 23 nt, Human
ugcagcauguugcugaggaguga

SEQ ID NO: 2629652 - RNA, 21 nt, Human
ugcagcauguugcugaggagu

SEQ ID NO: 2629653 - RNA, 20 nt, Human
ugcagcauguugcugaggag

SEQ ID NO: 2629654 - RNA, 18 nt, Human
ugcagcauguugcugagg

SEQ ID NO: 2629655 - RNA, 20 nt, Human
ugcagaguuuccaaaaccag

SEQ ID NO: 2629656 - RNA, 17 nt, Human
ugcagcauguugcugag

SEQ ID NO: 2629657 - RNA, 16 nt, Human
ugcagcaauaaagcag

SEQ ID NO: 2629658 - RNA, 13 nt, Human
ugcagcuuuaaaa

SEQ ID NO: 2629659 - RNA, 12 nt, Human
ugcagcccaugc

SEQ ID NO: 2629660 - RNA, 22 nt, Human
ugcagccagcccagcccagcug

SEQ ID NO: 2629661 - RNA, 14 nt, Human
ugcagccagcccag

SEQ ID NO: 2629662 - RNA, 15 nt, Human
ugcagccagcccagc

SEQ ID NO: 2629663 - RNA, 16 nt, Human
ugcagccagcccagcc

SEQ ID NO: 2629664 - RNA, 17 nt, Human
ugcagccagcccagccc

SEQ ID NO: 2629665 - RNA, 19 nt, Human
ugcagccagcccagcccag

SEQ ID NO: 2629666 - RNA, 21 nt, Human
ugcagccagcccagcccagcu

SEQ ID NO: 2629667 - RNA, 23 nt, Human
ugcagccagcccagcccagcugg

SEQ ID NO: 2629668 - RNA, 23 nt, Human
ugcagccagaccuauuccuccug

SEQ ID NO: 2629669 - RNA, 21 nt, Human
ugcagccagaccuauuccucc

SEQ ID NO: 2629670 - RNA, 14 nt, Human
ugcagccagaccua

SEQ ID NO: 2629671 - RNA, 13 nt, Human
ugcagccagaccu

SEQ ID NO: 2629672 - RNA, 12 nt, Human
ugcagccagccc

SEQ ID NO: 2629673 - RNA, 13 nt, Human
ugcagccagccca

SEQ ID NO: 2629674 - RNA, 18 nt, Human
ugccuccuuugugaggaa

SEQ ID NO: 2629675 - RNA, 17 nt, Human
ugccuccuuugugagga

SEQ ID NO: 2629676 - RNA, 19 nt, Human
ugccuccuuccaccucccu

SEQ ID NO: 2629677 - RNA, 17 nt, Human
ugccuccuuccaccucc

SEQ ID NO: 2629678 - RNA, 18 nt, Human
ugccuccccucuccuucc

SEQ ID NO: 2629679 - RNA, 16 nt, Human
ugccuccuuugugagg

SEQ ID NO: 2629680 - RNA, 21 nt, Human
ugccucuguccccuucucuca

SEQ ID NO: 2629681 - RNA, 20 nt, Human
ugccucuguccccuucucuc

SEQ ID NO: 2629682 - RNA, 17 nt, Human
ugccucuguccccuucu

SEQ ID NO: 2629683 - RNA, 16 nt, Human
ugccucuguccccuuc

SEQ ID NO: 2629684 - RNA, 13 nt, Human
ugccucugugcug

SEQ ID NO: 2629685 - RNA, 12 nt, Human
ugccucugugcu

SEQ ID NO: 2629686 - RNA, 11 nt, Human
ugccucugugc

SEQ ID NO: 2629687 - RNA, 15 nt, Human
ugccucuguccccuu

SEQ ID NO: 2629688 - RNA, 14 nt, Human
ugccucuguccccu

SEQ ID NO: 2629689 - RNA, 13 nt, Human
ugccucugucccc

SEQ ID NO: 2629690 - RNA, 14 nt, Human
ugccucugggacug

SEQ ID NO: 2629691 - RNA, 17 nt, Human
ugccugaagucacacag

SEQ ID NO: 2629692 - RNA, 18 nt, Human
ugccugaagucacacagu

SEQ ID NO: 2629693 - RNA, 22 nt, Human
ugccugaagucacacagugagu

SEQ ID NO: 2629694 - RNA, 16 nt, Human
ugccucugugcugugu

SEQ ID NO: 2629695 - RNA, 14 nt, Human
ugccucugugcugu

SEQ ID NO: 2629696 - RNA, 15 nt, Human
ugccugaauauuugu

SEQ ID NO: 2629697 - RNA, 19 nt, Human
ugccugaaguuggagugag

SEQ ID NO: 2629698 - RNA, 18 nt, Human
ugccugaggucuguacgu

SEQ ID NO: 2629699 - RNA, 16 nt, Human
ugccugaggucuguac

SEQ ID NO: 2629700 - RNA, 15 nt, Human
ugccugaggucugua

SEQ ID NO: 2629701 - RNA, 18 nt, Human
ugccugaggguggagacu

SEQ ID NO: 2629702 - RNA, 11 nt, Human
ugccugagggu

SEQ ID NO: 2629703 - RNA, 14 nt, Human
ugccugagggugga

SEQ ID NO: 2629704 - RNA, 14 nt, Human
ugccugauauaaau

SEQ ID NO: 2629705 - RNA, 16 nt, Human
ugccugagugccuggc

SEQ ID NO: 2629706 - RNA, 19 nt, Human
ugccugagucacccaugaa

SEQ ID NO: 2629707 - RNA, 20 nt, Human
ugccugauucggcugucuca

SEQ ID NO: 2629708 - RNA, 19 nt, Human
ugccugauucggcugucuc

SEQ ID NO: 2629709 - RNA, 18 nt, Human
ugccugauucggcugucu

SEQ ID NO: 2629710 - RNA, 15 nt, Human
ugccugauggaccug

SEQ ID NO: 2629711 - RNA, 18 nt, Human
ugccugauccagccucuc

SEQ ID NO: 2629712 - RNA, 22 nt, Human
ugccugauauuucccuccccug

SEQ ID NO: 2629713 - RNA, 15 nt, Human
ugccugauauaaaug

SEQ ID NO: 2629714 - RNA, 17 nt, Human
ugccugcacaaacucac

SEQ ID NO: 2629715 - RNA, 20 nt, Human
ugccugauugccaagcucag

SEQ ID NO: 2629716 - RNA, 15 nt, Human
ugccugauugccaag

SEQ ID NO: 2629717 - RNA, 21 nt, Human
ugccugauucggcugucucag

SEQ ID NO: 2629718 - RNA, 14 nt, Human
ugccugcagagaga

SEQ ID NO: 2629719 - RNA, 19 nt, Human
ugccuaaggcugaacuugu

SEQ ID NO: 2629720 - RNA, 19 nt, Human
ugcccagggcucagccugg

SEQ ID NO: 2629721 - RNA, 17 nt, Human
ugcccagggcucagccu

SEQ ID NO: 2629722 - RNA, 18 nt, Human
ugcccagggcucagccug

SEQ ID NO: 2629723 - RNA, 11 nt, Human
ugcccagggcu

SEQ ID NO: 2629724 - RNA, 14 nt, Human
ugcccagggcucag

SEQ ID NO: 2629725 - RNA, 15 nt, Human
ugcccagggcucagc

SEQ ID NO: 2629726 - RNA, 16 nt, Human
ugcccagggcucagcc

SEQ ID NO: 2629727 - RNA, 17 nt, Human
ugcccaggcuggucuca

SEQ ID NO: 2629728 - RNA, 19 nt, Human
ugcccagggccacucugcc

SEQ ID NO: 2629729 - RNA, 21 nt, Human
ugcccagggccacucugccuc

SEQ ID NO: 2629730 - RNA, 22 nt, Human
ugcccagggccacucugccucu

SEQ ID NO: 2629731 - RNA, 23 nt, Human
ugcccaggcuggcgugcaguggu

SEQ ID NO: 2629732 - RNA, 11 nt, Human
ugcccagcccc

SEQ ID NO: 2629733 - RNA, 16 nt, Human
ugcccagaucccagaa

SEQ ID NO: 2629734 - RNA, 17 nt, Human
ugcccagaucccagaag

SEQ ID NO: 2629735 - RNA, 22 nt, Human
ugcccagaucccagaaggaccu

SEQ ID NO: 2629736 - RNA, 17 nt, Human
ugccuccccucuccuuc

SEQ ID NO: 2629737 - RNA, 18 nt, Human
ugccuaggauugugccug

SEQ ID NO: 2629738 - RNA, 14 nt, Human
ugccuaggcugacc

SEQ ID NO: 2629739 - RNA, 18 nt, Human
ugccuaggcugaccuuga

SEQ ID NO: 2629740 - RNA, 17 nt, Human
ugccuagggccuggucc

SEQ ID NO: 2629741 - RNA, 18 nt, Human
ugccuagggccuggucca

SEQ ID NO: 2629742 - RNA, 14 nt, Human
ugccuaaguggcug

SEQ ID NO: 2629743 - RNA, 15 nt, Human
ugccuaaguggcugc

SEQ ID NO: 2629744 - RNA, 17 nt, Human
ugccuaaguggcugcug

SEQ ID NO: 2629745 - RNA, 18 nt, Human
ugccuaauaaacauccuu

SEQ ID NO: 2629746 - RNA, 21 nt, Human
ugccuaauaaacauccuucaa

SEQ ID NO: 2629747 - RNA, 12 nt, Human
ugccuacugcau

SEQ ID NO: 2629748 - RNA, 17 nt, Human
ugccuaggaauucccag

SEQ ID NO: 2629749 - RNA, 22 nt, Human
ugccuuauggaacacucugaga

SEQ ID NO: 2629750 - RNA, 21 nt, Human
ugccuuauggaacacucugag

SEQ ID NO: 2629751 - RNA, 20 nt, Human
ugccuuauggaacacucuga

SEQ ID NO: 2629752 - RNA, 18 nt, Human
ugccuuauggaacacucu

SEQ ID NO: 2629753 - RNA, 20 nt, Human
ugccuggccuggcacacauc

SEQ ID NO: 2629754 - RNA, 17 nt, Human
ugccuggccuggcacac

SEQ ID NO: 2629755 - RNA, 19 nt, Human
ugccuggcccccuguccuc

SEQ ID NO: 2629756 - RNA, 16 nt, Human
ugccuggccuggcaca

SEQ ID NO: 2629757 - RNA, 17 nt, Human
ugccuggcccccugucc

SEQ ID NO: 2629758 - RNA, 16 nt, Human
ugccuggcccccagcu

SEQ ID NO: 2629759 - RNA, 16 nt, Human
ugccugcagagagaag

SEQ ID NO: 2629760 - RNA, 15 nt, Human
ugccugcagagagaa

SEQ ID NO: 2629761 - RNA, 19 nt, Human
ugccugcacaaacucacca

SEQ ID NO: 2629762 - RNA, 23 nt, Human
ugccuggcaggcugucuggccag

SEQ ID NO: 2629763 - RNA, 12 nt, Human
ugccuggccagg

SEQ ID NO: 2629764 - RNA, 14 nt, Human
ugccuggccaggca

SEQ ID NO: 2629765 - RNA, 16 nt, Human
ugccuggccaggcaga

SEQ ID NO: 2629766 - RNA, 15 nt, Human
ugccuggcaggcugu

SEQ ID NO: 2629767 - RNA, 20 nt, Human
ugccuggccaggcagaucug

SEQ ID NO: 2629768 - RNA, 18 nt, Human
ugccuucagcucuacagc

SEQ ID NO: 2629769 - RNA, 17 nt, Human
ugccuucagcucuacag

SEQ ID NO: 2629770 - RNA, 17 nt, Human
ugccuucauuaccuuuu

SEQ ID NO: 2629771 - RNA, 16 nt, Human
ugccuucagauguucu

SEQ ID NO: 2629772 - RNA, 12 nt, Human
ugccuucauuug

SEQ ID NO: 2629773 - RNA, 19 nt, Human
ugccuucauuaccuuuuuu

SEQ ID NO: 2629774 - RNA, 13 nt, Human
ugccuuccacgcu

SEQ ID NO: 2629775 - RNA, 21 nt, Human
ugccuuauuagagugucuuuc

SEQ ID NO: 2629776 - RNA, 23 nt, Human
ugccuuauuagagugucuuucca

SEQ ID NO: 2629777 - RNA, 16 nt, Human
ugccuuauuaaaguuc

SEQ ID NO: 2629778 - RNA, 22 nt, Human
ugccuggccuggcacacaucag

SEQ ID NO: 2629779 - RNA, 14 nt, Human
ugccuucaauaaau

SEQ ID NO: 2629780 - RNA, 20 nt, Human
ugccuucaacuaaaaacaaa

SEQ ID NO: 2629781 - RNA, 13 nt, Human
ugccuucagcucu

SEQ ID NO: 2629782 - RNA, 17 nt, Human
ugccuucccuagcuuua

SEQ ID NO: 2629783 - RNA, 20 nt, Human
ugccuuccccugggcccuga

SEQ ID NO: 2629784 - RNA, 15 nt, Human
ugccuuccccugggc

SEQ ID NO: 2629785 - RNA, 21 nt, Human
ugccuuccaugucggccucua

SEQ ID NO: 2629786 - RNA, 20 nt, Human
ugccuuccaugucggccucu

SEQ ID NO: 2629787 - RNA, 14 nt, Human
ugccuucccuagcu

SEQ ID NO: 2629788 - RNA, 13 nt, Human
ugccuucccuagc

SEQ ID NO: 2629789 - RNA, 14 nt, Human
ugccuuccuccugg

SEQ ID NO: 2629790 - RNA, 15 nt, Human
ugccuuccuccuggg

SEQ ID NO: 2629791 - RNA, 16 nt, Human
ugccuuccuccugggc

SEQ ID NO: 2629792 - RNA, 18 nt, Human
ugccuuccagcacccugc

SEQ ID NO: 2629793 - RNA, 13 nt, Human
ugccuuccauaau

SEQ ID NO: 2629794 - RNA, 14 nt, Human
ugccuuccauaauu

SEQ ID NO: 2629795 - RNA, 17 nt, Human
ugccuuccauaauuaug

SEQ ID NO: 2629796 - RNA, 21 nt, Human
ugccuuccauaauuaugacag

SEQ ID NO: 2629797 - RNA, 23 nt, Human
ugccuuccacgcugucuccagac

SEQ ID NO: 2629798 - RNA, 21 nt, Human
ugccuuccacgcugucuccag

SEQ ID NO: 2629799 - RNA, 22 nt, Human
ugccuuccacgcugucuccaga

SEQ ID NO: 2629800 - RNA, 14 nt, Human
ugccuuccacgcug

SEQ ID NO: 2629801 - RNA, 17 nt, Human
ugccuuccacgcugucu

SEQ ID NO: 2629802 - RNA, 19 nt, Human
ugccuuccacgcugucucc

SEQ ID NO: 2629803 - RNA, 20 nt, Human
ugccuuccacgcugucucca

SEQ ID NO: 2629804 - RNA, 17 nt, Human
ugccuucgcuucuugcc

SEQ ID NO: 2629805 - RNA, 16 nt, Human
ugccuucgcuucuugc

SEQ ID NO: 2629806 - RNA, 14 nt, Human
ugccuucgcuucuu

SEQ ID NO: 2629807 - RNA, 13 nt, Human
ugccuucgcuucu

SEQ ID NO: 2629808 - RNA, 17 nt, Human
ugccuucucaacuccaa

SEQ ID NO: 2629809 - RNA, 12 nt, Human
ugccuuccuugc

SEQ ID NO: 2629810 - RNA, 20 nt, Human
ugccuucgcgguggaaggcc

SEQ ID NO: 2629811 - RNA, 16 nt, Human
ugccuucccuagcuuu

SEQ ID NO: 2629812 - RNA, 19 nt, Human
ugccuuccuguuuuucaca

SEQ ID NO: 2629813 - RNA, 15 nt, Human
ugccuuccuguuuuu

SEQ ID NO: 2629814 - RNA, 20 nt, Human
ugccuuccuccugggcccuc

SEQ ID NO: 2629815 - RNA, 17 nt, Human
ugccuuccuccugggcc

SEQ ID NO: 2629816 - RNA, 19 nt, Human
ugccuuccuccugggcccu

SEQ ID NO: 2629817 - RNA, 12 nt, Human
ugcgauucugga

SEQ ID NO: 2629818 - RNA, 22 nt, Human
ugcgauggcgugggcugcguga

SEQ ID NO: 2629819 - RNA, 18 nt, Human
ugcgaucuucagagcagg

SEQ ID NO: 2629820 - RNA, 17 nt, Human
ugcgaucuucagagcag

SEQ ID NO: 2629821 - RNA, 20 nt, Human
ugccuucuguccugguguca

SEQ ID NO: 2629822 - RNA, 18 nt, Human
ugccuucuguccuggugu

SEQ ID NO: 2629823 - RNA, 21 nt, Human
ugccuucuuauucucacucca

SEQ ID NO: 2629824 - RNA, 23 nt, Human
ugcgauucuggauaaagccacug

SEQ ID NO: 2629825 - RNA, 15 nt, Human
ugcgauucuggauaa

SEQ ID NO: 2629826 - RNA, 13 nt, Human
ugcgauucuggau

SEQ ID NO: 2629827 - RNA, 22 nt, Human
ugcgcacaaggcugaccaagag

SEQ ID NO: 2629828 - RNA, 22 nt, Human
ugccuucucaacuccaaacuga

SEQ ID NO: 2629829 - RNA, 17 nt, Human
ugccuucuguccuggug

SEQ ID NO: 2629830 - RNA, 12 nt, Human
ugccuucugucc

SEQ ID NO: 2629831 - RNA, 23 nt, Human
ugccuucuccagacaaaccagaa

SEQ ID NO: 2629832 - RNA, 21 nt, Human
ugcgguggcucacgccuguaa

SEQ ID NO: 2629833 - RNA, 24 nt, Human
ugcgccgagucugucucugucaug

SEQ ID NO: 2629834 - RNA, 17 nt, Human
ugcgccgagucugucuc

SEQ ID NO: 2629835 - RNA, 23 nt, Human
ugcggugcuaucucccccagccc

SEQ ID NO: 2629836 - RNA, 15 nt, Human
ugcgccgagucuguc

SEQ ID NO: 2629837 - RNA, 16 nt, Human
ugcgcccuuaccuucc

SEQ ID NO: 2629838 - RNA, 15 nt, Human
ugcgcccuuaccuuc

SEQ ID NO: 2629839 - RNA, 14 nt, Human
ugcgcccugggcuc

SEQ ID NO: 2629840 - RNA, 23 nt, Human
ugcgcccccuccgcccugccacu

SEQ ID NO: 2629841 - RNA, 13 nt, Human
ugcgccuacagga

SEQ ID NO: 2629842 - RNA, 13 nt, Human
ugcgcaggcuggc

SEQ ID NO: 2629843 - RNA, 16 nt, Human
ugcgcaggcuggcccu

SEQ ID NO: 2629844 - RNA, 17 nt, Human
ugcgcaggcuggcccug

SEQ ID NO: 2629845 - RNA, 17 nt, Human
ugcgccauugcacucca

SEQ ID NO: 2629846 - RNA, 19 nt, Human
ugcgauuuugccugugucu

SEQ ID NO: 2629847 - RNA, 21 nt, Human
ugcgauucuggauaaagccac

SEQ ID NO: 2629848 - RNA, 18 nt, Human
ugcgccauugcacuccag

SEQ ID NO: 2629849 - RNA, 20 nt, Human
ugcgcccaccccgcucugca

SEQ ID NO: 2629850 - RNA, 17 nt, Human
ugcgcccaccccgcucu

SEQ ID NO: 2629851 - RNA, 13 nt, Human
ugcgcccaccccg

SEQ ID NO: 2629852 - RNA, 21 nt, Human
ugcgccauugcacuccagccu

SEQ ID NO: 2629853 - RNA, 21 nt, Human
ugcgcccccuccgcccugcca

SEQ ID NO: 2629854 - RNA, 18 nt, Human
ugcgcccaguccuuccac

SEQ ID NO: 2629855 - RNA, 17 nt, Human
ugcgcccaguccuucca

SEQ ID NO: 2629856 - RNA, 21 nt, Human
ugcugaauaggcgaucacaac

SEQ ID NO: 2629857 - RNA, 18 nt, Human
ugcugaauaggcgaucac

SEQ ID NO: 2629858 - RNA, 11 nt, Human
ugcugaauagg

SEQ ID NO: 2629859 - RNA, 22 nt, Human
ugcugaagguggggauugccca

SEQ ID NO: 2629860 - RNA, 17 nt, Human
ugcugaaugguuuucaa

SEQ ID NO: 2629861 - RNA, 18 nt, Human
ugcugaaugguuuucaaa

SEQ ID NO: 2629862 - RNA, 22 nt, Human
ugcugaaugguuuucaaaauaa

SEQ ID NO: 2629863 - RNA, 22 nt, Human
ugcugaagggaccuugaagggu

SEQ ID NO: 2629864 - RNA, 13 nt, Human
ugcugaagggacc

SEQ ID NO: 2629865 - RNA, 19 nt, Human
ugcugaaaacuagcucgug

SEQ ID NO: 2629866 - RNA, 14 nt, Human
ugcugaaaauggua

SEQ ID NO: 2629867 - RNA, 18 nt, Human
ugcugaauacagaggcaa

SEQ ID NO: 2629868 - RNA, 23 nt, Human
ugcugaauacagaggcaacugca

SEQ ID NO: 2629869 - RNA, 22 nt, Human
ugcucuuucucugccagugaca

SEQ ID NO: 2629870 - RNA, 21 nt, Human
ugcucuuucucugccagugac

SEQ ID NO: 2629871 - RNA, 18 nt, Human
ugcucuuucucugccagu

SEQ ID NO: 2629872 - RNA, 17 nt, Human
ugcucuuucucugccag

SEQ ID NO: 2629873 - RNA, 21 nt, Human
ugcuccuugggcccuuugagu

SEQ ID NO: 2629874 - RNA, 14 nt, Human
ugcuccuuguuccu

SEQ ID NO: 2629875 - RNA, 16 nt, Human
ugcucuuucucugcca

SEQ ID NO: 2629876 - RNA, 15 nt, Human
ugcuccuuguuccua

SEQ ID NO: 2629877 - RNA, 15 nt, Human
ugcucuuucucugcc

SEQ ID NO: 2629878 - RNA, 15 nt, Human
ugcuccuugggcccu

SEQ ID NO: 2629879 - RNA, 16 nt, Human
ugcuccuugggcccuu

SEQ ID NO: 2629880 - RNA, 18 nt, Human
ugcuccuugggcccuuug

SEQ ID NO: 2629881 - RNA, 19 nt, Human
ugcuccuugggcccuuuga

SEQ ID NO: 2629882 - RNA, 12 nt, Human
ugcuccuugggc

SEQ ID NO: 2629883 - RNA, 14 nt, Human
ugcuccuugggccc

SEQ ID NO: 2629884 - RNA, 19 nt, Human
ugcuccuggcccacugcau

SEQ ID NO: 2629885 - RNA, 19 nt, Human
ugcuccuuccaacaggagc

SEQ ID NO: 2629886 - RNA, 20 nt, Human
ugcuccugggcuacaaggac

SEQ ID NO: 2629887 - RNA, 21 nt, Human
ugcuccuuccaacaggagcug

SEQ ID NO: 2629888 - RNA, 19 nt, Human
ugcugcaggggcucuggag

SEQ ID NO: 2629889 - RNA, 18 nt, Human
ugcugcaggggcucugga

SEQ ID NO: 2629890 - RNA, 17 nt, Human
ugcugcaggggcucugg

SEQ ID NO: 2629891 - RNA, 13 nt, Human
ugcugcaggggcu

SEQ ID NO: 2629892 - RNA, 16 nt, Human
ugcugcaguugccagu

SEQ ID NO: 2629893 - RNA, 15 nt, Human
ugcugcaguugccag

SEQ ID NO: 2629894 - RNA, 21 nt, Human
ugcugcaggacuugagaagac

SEQ ID NO: 2629895 - RNA, 23 nt, Human
ugcugcagaggggcaggcccugc

SEQ ID NO: 2629896 - RNA, 22 nt, Human
ugcugcaccaacccagccgcug

SEQ ID NO: 2629897 - RNA, 22 nt, Human
ugcugcagaggggcaggcccug

SEQ ID NO: 2629898 - RNA, 21 nt, Human
ugcugcagaggggcaggcccu

SEQ ID NO: 2629899 - RNA, 23 nt, Human
ugcugauguucaguguaauuucu

SEQ ID NO: 2629900 - RNA, 20 nt, Human
ugcugcaccaacccagccgc

SEQ ID NO: 2629901 - RNA, 17 nt, Human
ugcugauucucccguuc

SEQ ID NO: 2629902 - RNA, 23 nt, Human
ugcugauggugcaaugaccuuuc

SEQ ID NO: 2629903 - RNA, 20 nt, Human
ugcugauggugcaaugaccu

SEQ ID NO: 2629904 - RNA, 21 nt, Human
ugcugauguucaguguaauuu

SEQ ID NO: 2629905 - RNA, 20 nt, Human
ugcugauguucaguguaauu

SEQ ID NO: 2629906 - RNA, 18 nt, Human
ugcugauguucaguguaa

SEQ ID NO: 2629907 - RNA, 17 nt, Human
ugcugauguucagugua

SEQ ID NO: 2629908 - RNA, 16 nt, Human
ugcugauguucagugu

SEQ ID NO: 2629909 - RNA, 15 nt, Human
ugcugauguucagug

SEQ ID NO: 2629910 - RNA, 14 nt, Human
ugcugauguucagu

SEQ ID NO: 2629911 - RNA, 17 nt, Human
ugcugauguccucacca

SEQ ID NO: 2629912 - RNA, 13 nt, Human
ugcugauguucag

SEQ ID NO: 2629913 - RNA, 19 nt, Human
ugcugacagacacaggccc

SEQ ID NO: 2629914 - RNA, 16 nt, Human
ugcugacagacacagg

SEQ ID NO: 2629915 - RNA, 15 nt, Human
ugcugacagacacag

SEQ ID NO: 2629916 - RNA, 18 nt, Human
ugcugaauguugggacug

SEQ ID NO: 2629917 - RNA, 18 nt, Human
ugcugaauauacagcagg

SEQ ID NO: 2629918 - RNA, 20 nt, Human
ugcugaauguugggacugcu

SEQ ID NO: 2629919 - RNA, 14 nt, Human
ugcugaauuuucac

SEQ ID NO: 2629920 - RNA, 23 nt, Human
ugcugaauuuucacaugaacaua

SEQ ID NO: 2629921 - RNA, 22 nt, Human
ugcugaauuuucacaugaacau

SEQ ID NO: 2629922 - RNA, 17 nt, Human
ugcugaauuuucacaug

SEQ ID NO: 2629923 - RNA, 16 nt, Human
ugcugaauuuucacau

SEQ ID NO: 2629924 - RNA, 21 nt, Human
ugcugaugaacucuuaaucaa

SEQ ID NO: 2629925 - RNA, 15 nt, Human
ugcugaguugguguu

SEQ ID NO: 2629926 - RNA, 21 nt, Human
ugcuccuggagccuuugaaua

SEQ ID NO: 2629927 - RNA, 20 nt, Human
ugcuccuggagccuuugaau

SEQ ID NO: 2629928 - RNA, 14 nt, Human
ugcuccuggagccu

SEQ ID NO: 2629929 - RNA, 18 nt, Human
ugcucaucugcugguccg

SEQ ID NO: 2629930 - RNA, 16 nt, Human
ugcucaucugcugguc

SEQ ID NO: 2629931 - RNA, 18 nt, Human
ugcuccucuccccagcaa

SEQ ID NO: 2629932 - RNA, 19 nt, Human
ugcuccucuccccagcaag

SEQ ID NO: 2629933 - RNA, 15 nt, Human
ugcucaucugcuggu

SEQ ID NO: 2629934 - RNA, 14 nt, Human
ugcucaucugcugg

SEQ ID NO: 2629935 - RNA, 13 nt, Human
ugcucaucugcug

SEQ ID NO: 2629936 - RNA, 11 nt, Human
ugcucauggaa

SEQ ID NO: 2629937 - RNA, 19 nt, Human
ugcucaucauucucugucu

SEQ ID NO: 2629938 - RNA, 20 nt, Human
ugcucaucauucucugucuc

SEQ ID NO: 2629939 - RNA, 21 nt, Human
ugcucaucauucucugucuca

SEQ ID NO: 2629940 - RNA, 23 nt, Human
ugcucaucauucucugucucauc

SEQ ID NO: 2629941 - RNA, 15 nt, Human
ugcucaucauucucu

SEQ ID NO: 2629942 - RNA, 17 nt, Human
ugcucaucauucucugu

SEQ ID NO: 2629943 - RNA, 22 nt, Human
ugcucaucauuccuugagaaaa

SEQ ID NO: 2629944 - RNA, 17 nt, Human
ugcuagggaaacuuccc

SEQ ID NO: 2629945 - RNA, 22 nt, Human
ugcuaggcgagugccaggacuc

SEQ ID NO: 2629946 - RNA, 18 nt, Human
ugcuagcucugagccagu

SEQ ID NO: 2629947 - RNA, 16 nt, Human
ugcuagcucugagcca

SEQ ID NO: 2629948 - RNA, 21 nt, Human
ugcuaggcgagugccaggacu

SEQ ID NO: 2629949 - RNA, 20 nt, Human
ugcuagggguuuuaggucuc

SEQ ID NO: 2629950 - RNA, 22 nt, Human
ugcuagggaaacuucccguccc

SEQ ID NO: 2629951 - RNA, 21 nt, Human
ugcuagggguuuuaggucucu

SEQ ID NO: 2629952 - RNA, 14 nt, Human
ugcuaggucucgga

SEQ ID NO: 2629953 - RNA, 22 nt, Human
ugcuaggucucggacuaagccu

SEQ ID NO: 2629954 - RNA, 14 nt, Human
ugcuaggugggcca

SEQ ID NO: 2629955 - RNA, 23 nt, Human
ugcuagguuaauuccaauuauau

SEQ ID NO: 2629956 - RNA, 21 nt, Human
ugcuaggugggccagccccuc

SEQ ID NO: 2629957 - RNA, 23 nt, Human
ugcuaggugggccagccccuccc

SEQ ID NO: 2629958 - RNA, 16 nt, Human
ugcuagguuaauucca

SEQ ID NO: 2629959 - RNA, 15 nt, Human
ugcuaggugggccag

SEQ ID NO: 2629960 - RNA, 17 nt, Human
ugcuaggugggccagcc

SEQ ID NO: 2629961 - RNA, 19 nt, Human
ugcuaggugggccagcccc

SEQ ID NO: 2629962 - RNA, 20 nt, Human
ugcuaggugggccagccccu

SEQ ID NO: 2629963 - RNA, 18 nt, Human
ugcucagcucugggccau

SEQ ID NO: 2629964 - RNA, 20 nt, Human
ugcucagcucugggccauuc

SEQ ID NO: 2629965 - RNA, 12 nt, Human
ugcucagcuucu

SEQ ID NO: 2629966 - RNA, 17 nt, Human
ugcucagcucugggcca

SEQ ID NO: 2629967 - RNA, 15 nt, Human
ugcucagcuucuccu

SEQ ID NO: 2629968 - RNA, 20 nt, Human
ugcucagcuucuccugugug

SEQ ID NO: 2629969 - RNA, 14 nt, Human
ugcucaggagcccu

SEQ ID NO: 2629970 - RNA, 14 nt, Human
ugcucaggacucag

SEQ ID NO: 2629971 - RNA, 17 nt, Human
ugcucaggacucagaag

SEQ ID NO: 2629972 - RNA, 23 nt, Human
ugcucaggacucagaagccucug

SEQ ID NO: 2629973 - RNA, 21 nt, Human
ugcucagcuucuccuguguga

SEQ ID NO: 2629974 - RNA, 20 nt, Human
ugcuagaacucccuuucaac

SEQ ID NO: 2629975 - RNA, 21 nt, Human
ugcuagaacucccuuucaaca

SEQ ID NO: 2629976 - RNA, 17 nt, Human
ugcuagacacauuuuua

SEQ ID NO: 2629977 - RNA, 20 nt, Human
ugcuagaugugcaaaugcaa

SEQ ID NO: 2629978 - RNA, 19 nt, Human
ugcuagaugugcaaaugca

SEQ ID NO: 2629979 - RNA, 18 nt, Human
ugcuagcacuuggagcca

SEQ ID NO: 2629980 - RNA, 19 nt, Human
ugcuaggaacacuccuuca

SEQ ID NO: 2629981 - RNA, 17 nt, Human
ugcuaggaacacuccuu

SEQ ID NO: 2629982 - RNA, 16 nt, Human
ugcuaggaacacuccu

SEQ ID NO: 2629983 - RNA, 20 nt, Human
ugcuagcacuuggagccaag

SEQ ID NO: 2629984 - RNA, 19 nt, Human
ugcuagaacucccuuucaa

SEQ ID NO: 2629985 - RNA, 18 nt, Human
ugcuagaacucccuuuca

SEQ ID NO: 2629986 - RNA, 13 nt, Human
ugcgugucguggg

SEQ ID NO: 2629987 - RNA, 22 nt, Human
ugcguggacucugcacaugucu

SEQ ID NO: 2629988 - RNA, 18 nt, Human
ugcguggacucugcacau

SEQ ID NO: 2629989 - RNA, 19 nt, Human
ugcguggcauagcccagac

SEQ ID NO: 2629990 - RNA, 17 nt, Human
ugcguggacucugcaca

SEQ ID NO: 2629991 - RNA, 16 nt, Human
ugcguggacucugcac

SEQ ID NO: 2629992 - RNA, 15 nt, Human
ugcgugcauaccacu

SEQ ID NO: 2629993 - RNA, 21 nt, Human
ugcgguuuguuggaucuucaa

SEQ ID NO: 2629994 - RNA, 16 nt, Human
ugcguaacuggcugug

SEQ ID NO: 2629995 - RNA, 15 nt, Human
ugcguacguuuccug

SEQ ID NO: 2629996 - RNA, 20 nt, Human
ugcguacguuuccugagaag

SEQ ID NO: 2629997 - RNA, 23 nt, Human
ugcguacguuuccugagaagugu

SEQ ID NO: 2629998 - RNA, 17 nt, Human
ugcguaacuggcugugu

SEQ ID NO: 2629999 - RNA, 14 nt, Human
ugcguaugucuguu

SEQ ID NO: 2630000 - RNA, 19 nt, Human
ugcguaugucuguuaccau

SEQ ID NO: 2630001 - RNA, 17 nt, Human
uuaaggaugcuuguaca

SEQ ID NO: 2630002 - RNA, 18 nt, Human
uuaaggaugcuuguacau

SEQ ID NO: 2630003 - RNA, 19 nt, Human
uuaaggaugcuuguacaua

SEQ ID NO: 2630004 - RNA, 20 nt, Human
uuaaggaugcuuguacauaa

SEQ ID NO: 2630005 - RNA, 16 nt, Human
uuaaggaaacucuuau

SEQ ID NO: 2630006 - RNA, 14 nt, Human
uuaaggaaacucuu

SEQ ID NO: 2630007 - RNA, 14 nt, Human
uuaaggaaacaaua

SEQ ID NO: 2630008 - RNA, 12 nt, Human
uuaaggaaacaa

SEQ ID NO: 2630009 - RNA, 20 nt, Human
uuaaggaaacucuuaucuca

SEQ ID NO: 2630010 - RNA, 19 nt, Human
uuaaggacaaaaaugaacu

SEQ ID NO: 2630011 - RNA, 21 nt, Human
uuaaggaagacaaugugaaaa

SEQ ID NO: 2630012 - RNA, 14 nt, Human
uuaacauucuguaa

SEQ ID NO: 2630013 - RNA, 14 nt, Human
uuaagcuguuucca

SEQ ID NO: 2630014 - RNA, 12 nt, Human
uuaagcuuauuu

SEQ ID NO: 2630015 - RNA, 16 nt, Human
uuaauaauguuucaaa

SEQ ID NO: 2630016 - RNA, 18 nt, Human
uuaaggauuuuaugcuuu

SEQ ID NO: 2630017 - RNA, 20 nt, Human
uuaaggauuuuaugcuuuaa

SEQ ID NO: 2630018 - RNA, 23 nt, Human
uuaaggcugaggaaaggccagcu

SEQ ID NO: 2630019 - RNA, 22 nt, Human
uuaaggaugcuuguacauaaug

SEQ ID NO: 2630020 - RNA, 13 nt, Human
uuaaggauuuuau

SEQ ID NO: 2630021 - RNA, 15 nt, Human
uuaaggauuuuaugc

SEQ ID NO: 2630022 - RNA, 20 nt, Human
uuaaggauugugauauuuuu

SEQ ID NO: 2630023 - RNA, 18 nt, Human
uuaauaauguuucaaaca

SEQ ID NO: 2630024 - RNA, 18 nt, Human
uuaauagcuuuuauugua

SEQ ID NO: 2630025 - RNA, 22 nt, Human
uuaauuaugccuuuuuugauca

SEQ ID NO: 2630026 - RNA, 15 nt, Human
uuaauuaucuuuucu

SEQ ID NO: 2630027 - RNA, 23 nt, Human
uuaauuauaccauggugaauuaa

SEQ ID NO: 2630028 - RNA, 21 nt, Human
uuaauuagugcuaagugugaa

SEQ ID NO: 2630029 - RNA, 14 nt, Human
uuaauuauuauuug

SEQ ID NO: 2630030 - RNA, 14 nt, Human
uuaauuauuauuua

SEQ ID NO: 2630031 - RNA, 17 nt, Human
uuaauuauuauucuuca

SEQ ID NO: 2630032 - RNA, 14 nt, Human
uuaauuauuauucu

SEQ ID NO: 2630033 - RNA, 20 nt, Human
uuaauuagugcuaaguguga

SEQ ID NO: 2630034 - RNA, 18 nt, Human
uuaauuagugcuaagugu

SEQ ID NO: 2630035 - RNA, 16 nt, Human
uuaauuagugcuaagu

SEQ ID NO: 2630036 - RNA, 18 nt, Human
uuaaugucacaggcaggu

SEQ ID NO: 2630037 - RNA, 19 nt, Human
uuaauggacaugagauaau

SEQ ID NO: 2630038 - RNA, 15 nt, Human
uuaaugcuucuuuca

SEQ ID NO: 2630039 - RNA, 18 nt, Human
uuaaugcuuuuauauuuu

SEQ ID NO: 2630040 - RNA, 14 nt, Human
uuaauggaaauguu

SEQ ID NO: 2630041 - RNA, 22 nt, Human
uuaauggccggcuggaaaugcu

SEQ ID NO: 2630042 - RNA, 23 nt, Human
uuaauggcaaggcagcccugucu

SEQ ID NO: 2630043 - RNA, 22 nt, Human
uuaauggacaugagauaauguu

SEQ ID NO: 2630044 - RNA, 22 nt, Human
uuaaugucaauucuugccaaau

SEQ ID NO: 2630045 - RNA, 17 nt, Human
uuaaugucacaggcagg

SEQ ID NO: 2630046 - RNA, 20 nt, Human
uuaauaucccuacauguauu

SEQ ID NO: 2630047 - RNA, 19 nt, Human
uuaauaucccuacauguau

SEQ ID NO: 2630048 - RNA, 23 nt, Human
uuaauauaaaguaguccugugaa

SEQ ID NO: 2630049 - RNA, 22 nt, Human
uuaauauaaaguaguccuguga

SEQ ID NO: 2630050 - RNA, 18 nt, Human
uuaauaucaucaguauug

SEQ ID NO: 2630051 - RNA, 19 nt, Human
uuaauaguguuaaucaauu

SEQ ID NO: 2630052 - RNA, 15 nt, Human
uuaauaucaucagua

SEQ ID NO: 2630053 - RNA, 22 nt, Human
uuaauagcuuuuauuguauaaa

SEQ ID NO: 2630054 - RNA, 20 nt, Human
uuaauagcuuuuauuguaua

SEQ ID NO: 2630055 - RNA, 21 nt, Human
uuaauaguguuaaucaauuua

SEQ ID NO: 2630056 - RNA, 18 nt, Human
uuaauaguguuaaucaau

SEQ ID NO: 2630057 - RNA, 17 nt, Human
uuaauaguguuaaucaa

SEQ ID NO: 2630058 - RNA, 16 nt, Human
uuaauaguguuaauca

SEQ ID NO: 2630059 - RNA, 15 nt, Human
uuaauaguguuaauc

SEQ ID NO: 2630060 - RNA, 14 nt, Human
uuaauaguguuaau

SEQ ID NO: 2630061 - RNA, 18 nt, Human
uuaaugccuuuaaaguau

SEQ ID NO: 2630062 - RNA, 15 nt, Human
uuaaugccuuuaaag

SEQ ID NO: 2630063 - RNA, 23 nt, Human
uuaauauguuaaccucaguguca

SEQ ID NO: 2630064 - RNA, 23 nt, Human
uuaaugccgauauacucuagaug

SEQ ID NO: 2630065 - RNA, 12 nt, Human
uuaauaugaaaa

SEQ ID NO: 2630066 - RNA, 14 nt, Human
uuaauaugaaaacu

SEQ ID NO: 2630067 - RNA, 15 nt, Human
uuaauaugaaaacuu

SEQ ID NO: 2630068 - RNA, 16 nt, Human
uuaauaugaaaacuua

SEQ ID NO: 2630069 - RNA, 17 nt, Human
uuaauaugaaaacuuau

SEQ ID NO: 2630070 - RNA, 13 nt, Human
uuaauauggcucu

SEQ ID NO: 2630071 - RNA, 22 nt, Human
uuaauauggggaugcagcauua

SEQ ID NO: 2630072 - RNA, 16 nt, Human
uuaauauggggaugca

SEQ ID NO: 2630073 - RNA, 20 nt, Human
uuacagaugaauguauuuau

SEQ ID NO: 2630074 - RNA, 12 nt, Human
uuacauggcucu

SEQ ID NO: 2630075 - RNA, 23 nt, Human
uuacagauaguaucuagcaauca

SEQ ID NO: 2630076 - RNA, 22 nt, Human
uuacaugguuaagguaaaguaa

SEQ ID NO: 2630077 - RNA, 17 nt, Human
uuacauguauuauuuca

SEQ ID NO: 2630078 - RNA, 12 nt, Human
uuacauguuuuc

SEQ ID NO: 2630079 - RNA, 18 nt, Human
uuacauguuuucuuugcu

SEQ ID NO: 2630080 - RNA, 15 nt, Human
uuacauuuguauaaa

SEQ ID NO: 2630081 - RNA, 14 nt, Human
uuacauuuguauaa

SEQ ID NO: 2630082 - RNA, 14 nt, Human
uuacauuuccuaaa

SEQ ID NO: 2630083 - RNA, 16 nt, Human
uuacauuaauguuaau

SEQ ID NO: 2630084 - RNA, 14 nt, Human
uuacauuaauguua

SEQ ID NO: 2630085 - RNA, 22 nt, Human
uuacauguuuucuuugcuuuaa

SEQ ID NO: 2630086 - RNA, 12 nt, Human
uuacaaucaaag

SEQ ID NO: 2630087 - RNA, 23 nt, Human
uuacaauaaaaucuugaaaaugc

SEQ ID NO: 2630088 - RNA, 21 nt, Human
uuaauuauuauuuguguuuua

SEQ ID NO: 2630089 - RNA, 14 nt, Human
uuaauuauuguaca

SEQ ID NO: 2630090 - RNA, 22 nt, Human
uuaauucagcacugauuucaca

SEQ ID NO: 2630091 - RNA, 16 nt, Human
uuaauucaccaaagua

SEQ ID NO: 2630092 - RNA, 14 nt, Human
uuacaaguguauau

SEQ ID NO: 2630093 - RNA, 15 nt, Human
uuaauucacucccac

SEQ ID NO: 2630094 - RNA, 13 nt, Human
uuaauucauguuu

SEQ ID NO: 2630095 - RNA, 16 nt, Human
uuacaaguguauauca

SEQ ID NO: 2630096 - RNA, 21 nt, Human
uuacaauaaaacuuugcugcc

SEQ ID NO: 2630097 - RNA, 20 nt, Human
uuacagagacagaaagcaga

SEQ ID NO: 2630098 - RNA, 23 nt, Human
uuacaaucauugcugaaaauggu

SEQ ID NO: 2630099 - RNA, 22 nt, Human
uuacaaucauugcugaaaaugg

SEQ ID NO: 2630100 - RNA, 17 nt, Human
uuacaaucauugcugaa

SEQ ID NO: 2630101 - RNA, 15 nt, Human
uuacagaggacagua

SEQ ID NO: 2630102 - RNA, 16 nt, Human
uuacagaggaaguuau

SEQ ID NO: 2630103 - RNA, 20 nt, Human
uuacagagaggagaaacaca

SEQ ID NO: 2630104 - RNA, 22 nt, Human
uuacagagaggagaaacacauc

SEQ ID NO: 2630105 - RNA, 14 nt, Human
uuacagagaggaga

SEQ ID NO: 2630106 - RNA, 17 nt, Human
uuacagagaggagaaac

SEQ ID NO: 2630107 - RNA, 18 nt, Human
uuacagagaggagaaaca

SEQ ID NO: 2630108 - RNA, 20 nt, Human
uuacauuuuuaagugcugca

SEQ ID NO: 2630109 - RNA, 21 nt, Human
uuacauuuuuaagugcugcau

SEQ ID NO: 2630110 - RNA, 22 nt, Human
uuacauuuuuaagugcugcauu

SEQ ID NO: 2630111 - RNA, 23 nt, Human
uuacauuuuuaagugcugcauuu

SEQ ID NO: 2630112 - RNA, 19 nt, Human
uuaccagauaaugcuacuu

SEQ ID NO: 2630113 - RNA, 18 nt, Human
uuaccagauaaugcuacu

SEQ ID NO: 2630114 - RNA, 21 nt, Human
uuaccagauuuuuacacaugu

SEQ ID NO: 2630115 - RNA, 24 nt, Human
uuaccagauuuuuacacauguauc

SEQ ID NO: 2630116 - RNA, 15 nt, Human
uuaccuuuuuauuug

SEQ ID NO: 2630117 - RNA, 18 nt, Human
uuaccuuuuuauuugcau

SEQ ID NO: 2630118 - RNA, 14 nt, Human
uuaccagcagagca

SEQ ID NO: 2630119 - RNA, 21 nt, Human
uuaccacuuguguuuugcaag

SEQ ID NO: 2630120 - RNA, 12 nt, Human
uuaccacucagg

SEQ ID NO: 2630121 - RNA, 14 nt, Human
uuaccacucaggca

SEQ ID NO: 2630122 - RNA, 17 nt, Human
uuaccagaagcuuccau

SEQ ID NO: 2630123 - RNA, 21 nt, Human
uuaccagacgguucaccagcc

SEQ ID NO: 2630124 - RNA, 22 nt, Human
uuaccagacgguucaccagccu

SEQ ID NO: 2630125 - RNA, 15 nt, Human
uuacgcuuugauuca

SEQ ID NO: 2630126 - RNA, 16 nt, Human
uuacgcuuugauucau

SEQ ID NO: 2630127 - RNA, 13 nt, Human
uuacgcuuugauu

SEQ ID NO: 2630128 - RNA, 18 nt, Human
uuacgcccaacccuuccc

SEQ ID NO: 2630129 - RNA, 20 nt, Human
uuacgcacacguacuuaaau

SEQ ID NO: 2630130 - RNA, 20 nt, Human
uuacgguuuuccagguuuaa

SEQ ID NO: 2630131 - RNA, 12 nt, Human
uuacgugagcca

SEQ ID NO: 2630132 - RNA, 16 nt, Human
uuacggacacccccuc

SEQ ID NO: 2630133 - RNA, 19 nt, Human
uuaccuuuuuuauacauaa

SEQ ID NO: 2630134 - RNA, 20 nt, Human
uuaccuuuuuuauacauaaa

SEQ ID NO: 2630135 - RNA, 22 nt, Human
uuaccuuuuuuauacauaaaca

SEQ ID NO: 2630136 - RNA, 23 nt, Human
uuaccuuuuuugauaaaguuucu

SEQ ID NO: 2630137 - RNA, 17 nt, Human
uuaccuuuuuugauaaa

SEQ ID NO: 2630138 - RNA, 15 nt, Human
uuaccuuuuuugaua

SEQ ID NO: 2630139 - RNA, 20 nt, Human
uuaccuuuuuauuugcaugu

SEQ ID NO: 2630140 - RNA, 19 nt, Human
uuaccuuuuaauuaaugaa

SEQ ID NO: 2630141 - RNA, 19 nt, Human
uuaaaagaaugauuaugaa

SEQ ID NO: 2630142 - RNA, 20 nt, Human
uuaaaagaaugggcaguuac

SEQ ID NO: 2630143 - RNA, 13 nt, Human
uuaaaagaauggg

SEQ ID NO: 2630144 - RNA, 14 nt, Human
uuaaaaccaaagag

SEQ ID NO: 2630145 - RNA, 14 nt, Human
uuaaaacauguaau

SEQ ID NO: 2630146 - RNA, 13 nt, Human
uuaaaacauguaa

SEQ ID NO: 2630147 - RNA, 13 nt, Human
uuaaaagaaugau

SEQ ID NO: 2630148 - RNA, 21 nt, Human
uuaaaacagacacuggcaugg

SEQ ID NO: 2630149 - RNA, 14 nt, Human
uuaaaacagacacu

SEQ ID NO: 2630150 - RNA, 16 nt, Human
uuaaacuuaaucuaaa

SEQ ID NO: 2630151 - RNA, 18 nt, Human
uuaaacuuaaucuaaaug

SEQ ID NO: 2630152 - RNA, 18 nt, Human
uuaaaagauaaauauuau

SEQ ID NO: 2630153 - RNA, 15 nt, Human
uuaaaagacaagacu

SEQ ID NO: 2630154 - RNA, 12 nt, Human
uuaaaagacaag

SEQ ID NO: 2630155 - RNA, 22 nt, Human
uuaaaagaaugggcaguuacau

SEQ ID NO: 2630156 - RNA, 21 nt, Human
uuaaaagaaugggcaguuaca

SEQ ID NO: 2630157 - RNA, 17 nt, Human
uuaaaagacaagacuuc

SEQ ID NO: 2630158 - RNA, 16 nt, Human
uuaaaagacaagacuu

SEQ ID NO: 2630159 - RNA, 14 nt, Human
uuaaaagacacugu

SEQ ID NO: 2630160 - RNA, 13 nt, Human
uuaaagagagguu

SEQ ID NO: 2630161 - RNA, 20 nt, Human
uuaaagagagguuauagagu

SEQ ID NO: 2630162 - RNA, 14 nt, Human
uuaaagagagguua

SEQ ID NO: 2630163 - RNA, 20 nt, Human
uuaaacuuaaucuaaaugga

SEQ ID NO: 2630164 - RNA, 14 nt, Human
uuaaagacuuuuau

SEQ ID NO: 2630165 - RNA, 20 nt, Human
uuaaagcuuauuaaaacuca

SEQ ID NO: 2630166 - RNA, 14 nt, Human
uuaaagcugccugu

SEQ ID NO: 2630167 - RNA, 15 nt, Human
uuaaagcugccugua

SEQ ID NO: 2630168 - RNA, 17 nt, Human
uuaaagcugccuguagu

SEQ ID NO: 2630169 - RNA, 18 nt, Human
uuaaagcugccuguaguu

SEQ ID NO: 2630170 - RNA, 17 nt, Human
uuaaagauuuaucaaau

SEQ ID NO: 2630171 - RNA, 14 nt, Human
uuaaagauuuauca

SEQ ID NO: 2630172 - RNA, 13 nt, Human
uuaaagauguucc

SEQ ID NO: 2630173 - RNA, 14 nt, Human
uuaaagccuccuca

SEQ ID NO: 2630174 - RNA, 19 nt, Human
uuaaagcuaaaguaucugu

SEQ ID NO: 2630175 - RNA, 21 nt, Human
uuaaagauuuaucaaaucagu

SEQ ID NO: 2630176 - RNA, 14 nt, Human
uuaaagcaaaggag

SEQ ID NO: 2630177 - RNA, 17 nt, Human
uuaaaugcaccuggaau

SEQ ID NO: 2630178 - RNA, 18 nt, Human
uuaaaugcaccuggaaua

SEQ ID NO: 2630179 - RNA, 16 nt, Human
uuaaaugcaccuggaa

SEQ ID NO: 2630180 - RNA, 20 nt, Human
uuaaauauaauucuguaaau

SEQ ID NO: 2630181 - RNA, 19 nt, Human
uuaaauauaauucuguaaa

SEQ ID NO: 2630182 - RNA, 18 nt, Human
uuaaauauaauucuguaa

SEQ ID NO: 2630183 - RNA, 17 nt, Human
uuaaauauaauucugua

SEQ ID NO: 2630184 - RNA, 16 nt, Human
uuaaauauaauucugu

SEQ ID NO: 2630185 - RNA, 14 nt, Human
uuaaauauaauucu

SEQ ID NO: 2630186 - RNA, 13 nt, Human
uuaaauauaauuc

SEQ ID NO: 2630187 - RNA, 12 nt, Human
uuaaauauaauu

SEQ ID NO: 2630188 - RNA, 18 nt, Human
uuaaauaguaaaaauaaa

SEQ ID NO: 2630189 - RNA, 18 nt, Human
uuaaauaggauauuaaca

SEQ ID NO: 2630190 - RNA, 15 nt, Human
uuaaauauaauaugc

SEQ ID NO: 2630191 - RNA, 14 nt, Human
uuaaagcuguuauu

SEQ ID NO: 2630192 - RNA, 23 nt, Human
uuaaagcaacugucuauuucugc

SEQ ID NO: 2630193 - RNA, 16 nt, Human
uuaaauguaaauaauc

SEQ ID NO: 2630194 - RNA, 17 nt, Human
uuaacauauuuacuaag

SEQ ID NO: 2630195 - RNA, 15 nt, Human
uuaacauucauagag

SEQ ID NO: 2630196 - RNA, 18 nt, Human
uuaaaugcccagccccuu

SEQ ID NO: 2630197 - RNA, 17 nt, Human
uuaaaugcccagccccu

SEQ ID NO: 2630198 - RNA, 13 nt, Human
uuaaauguaaaga

SEQ ID NO: 2630199 - RNA, 17 nt, Human
uuaaauguaaagauauu

SEQ ID NO: 2630200 - RNA, 23 nt, Human
uuaaaugggcuacuuuguccuuu

SEQ ID NO: 2630201 - RNA, 21 nt, Human
uuaaauggguagagaaacacu

SEQ ID NO: 2630202 - RNA, 20 nt, Human
uuaaauggaaaaaaugaugu

SEQ ID NO: 2630203 - RNA, 13 nt, Human
uuaaauggacaga

SEQ ID NO: 2630204 - RNA, 22 nt, Human
uguuuccuggcacugcuuccag

SEQ ID NO: 2630205 - RNA, 21 nt, Human
uguuuccuggcacugcuucca

SEQ ID NO: 2630206 - RNA, 17 nt, Human
uguuuacagggagccuc

SEQ ID NO: 2630207 - RNA, 23 nt, Human
uguuuacagcacuacucugugcc

SEQ ID NO: 2630208 - RNA, 22 nt, Human
uguuuacagcacuacucugugc

SEQ ID NO: 2630209 - RNA, 21 nt, Human
uguuuacagcacuacucugug

SEQ ID NO: 2630210 - RNA, 20 nt, Human
uguuuacagcacuacucugu

SEQ ID NO: 2630211 - RNA, 20 nt, Human
uguuuccuggcacugcuucc

SEQ ID NO: 2630212 - RNA, 17 nt, Human
uguuucuccuucugaaa

SEQ ID NO: 2630213 - RNA, 15 nt, Human
uguuucucccucuca

SEQ ID NO: 2630214 - RNA, 17 nt, Human
uguuucucccccugggc

SEQ ID NO: 2630215 - RNA, 23 nt, Human
uguuucucccccugggcucugcc

SEQ ID NO: 2630216 - RNA, 22 nt, Human
uguuuacagggagccuccugcc

SEQ ID NO: 2630217 - RNA, 15 nt, Human
uguuucucccccugg

SEQ ID NO: 2630218 - RNA, 16 nt, Human
uguuucucccccuggg

SEQ ID NO: 2630219 - RNA, 23 nt, Human
uguuuacagggagccuccugccc

SEQ ID NO: 2630220 - RNA, 15 nt, Human
uguuucuagggaaau

SEQ ID NO: 2630221 - RNA, 19 nt, Human
uguuucuauugacuucaau

SEQ ID NO: 2630222 - RNA, 21 nt, Human
uguuuacagggagccuccugc

SEQ ID NO: 2630223 - RNA, 20 nt, Human
uguuuacagggagccuccug

SEQ ID NO: 2630224 - RNA, 14 nt, Human
uguuucucuuuccu

SEQ ID NO: 2630225 - RNA, 17 nt, Human
uguuuguugucagcuga

SEQ ID NO: 2630226 - RNA, 16 nt, Human
uguuuguugucagcug

SEQ ID NO: 2630227 - RNA, 13 nt, Human
uguuucucugcug

SEQ ID NO: 2630228 - RNA, 14 nt, Human
uguuucucugcugu

SEQ ID NO: 2630229 - RNA, 15 nt, Human
uguuucucugcuguu

SEQ ID NO: 2630230 - RNA, 18 nt, Human
uguuuuaaaaugagaaau

SEQ ID NO: 2630231 - RNA, 17 nt, Human
uguuuguuuccuuuguu

SEQ ID NO: 2630232 - RNA, 12 nt, Human
uguuuuaaaaag

SEQ ID NO: 2630233 - RNA, 20 nt, Human
uguuuuaaaaagaaacaaga

SEQ ID NO: 2630234 - RNA, 23 nt, Human
uguuuuaaaauaaaaauucugaa

SEQ ID NO: 2630235 - RNA, 12 nt, Human
uguuuuaaaaaa

SEQ ID NO: 2630236 - RNA, 22 nt, Human
uguuuguuucucccccugggcu

SEQ ID NO: 2630237 - RNA, 17 nt, Human
uguuuuuuagaucaaau

SEQ ID NO: 2630238 - RNA, 17 nt, Human
uguuuuuuccugagcuu

SEQ ID NO: 2630239 - RNA, 15 nt, Human
uguuuuuucugccac

SEQ ID NO: 2630240 - RNA, 21 nt, Human
uguuuuuuagaucaaauacuu

SEQ ID NO: 2630241 - RNA, 12 nt, Human
uguuuuuucuaa

SEQ ID NO: 2630242 - RNA, 14 nt, Human
uguuuuuugaaaac

SEQ ID NO: 2630243 - RNA, 16 nt, Human
uguuuuuugaaaacau

SEQ ID NO: 2630244 - RNA, 19 nt, Human
uguuuuuugaaaacauggu

SEQ ID NO: 2630245 - RNA, 20 nt, Human
uuaaaacaauauuguuucua

SEQ ID NO: 2630246 - RNA, 14 nt, Human
uguuuuucaugaaa

SEQ ID NO: 2630247 - RNA, 11 nt, Human
uguuuuucauu

SEQ ID NO: 2630248 - RNA, 20 nt, Human
uguuuuuccuuguauuuaaa

SEQ ID NO: 2630249 - RNA, 13 nt, Human
uguuuuugucuua

SEQ ID NO: 2630250 - RNA, 18 nt, Human
uguuuugcuuuuucugac

SEQ ID NO: 2630251 - RNA, 17 nt, Human
uguuuugcuuuuucuga

SEQ ID NO: 2630252 - RNA, 16 nt, Human
uguuuugcuuuuucug

SEQ ID NO: 2630253 - RNA, 23 nt, Human
uguuuuggcugaaauucuccugg

SEQ ID NO: 2630254 - RNA, 18 nt, Human
uguuuuggcugaaauucu

SEQ ID NO: 2630255 - RNA, 20 nt, Human
uguuuugcuuuuucugacuc

SEQ ID NO: 2630256 - RNA, 23 nt, Human
uguuuuaaaaugagaaaucuaaa

SEQ ID NO: 2630257 - RNA, 22 nt, Human
uguuuuaaauacgcacuacaug

SEQ ID NO: 2630258 - RNA, 20 nt, Human
uguuuuaaacauagaaaguu

SEQ ID NO: 2630259 - RNA, 13 nt, Human
uguuuuucaugaa

SEQ ID NO: 2630260 - RNA, 13 nt, Human
uguuuuucacauu

SEQ ID NO: 2630261 - RNA, 20 nt, Human
uguuuuuaugaagaaaaaau

SEQ ID NO: 2630262 - RNA, 22 nt, Human
uguuuugguaucuguucuuuaa

SEQ ID NO: 2630263 - RNA, 16 nt, Human
uguuuugguaucuguu

SEQ ID NO: 2630264 - RNA, 20 nt, Human
uguuuuggggaugagagggu

SEQ ID NO: 2630265 - RNA, 15 nt, Human
uguuuugguuugcua

SEQ ID NO: 2630266 - RNA, 23 nt, Human
uguugcugaauaggcgaucacaa

SEQ ID NO: 2630267 - RNA, 14 nt, Human
uguugcugaauagg

SEQ ID NO: 2630268 - RNA, 13 nt, Human
uguugcugccuca

SEQ ID NO: 2630269 - RNA, 14 nt, Human
uguugcugccaacc

SEQ ID NO: 2630270 - RNA, 13 nt, Human
uguugcugccaac

SEQ ID NO: 2630271 - RNA, 18 nt, Human
uguugagccuuuucccuc

SEQ ID NO: 2630272 - RNA, 16 nt, Human
uguugagccuuuuccc

SEQ ID NO: 2630273 - RNA, 19 nt, Human
uguugagguggucugaaug

SEQ ID NO: 2630274 - RNA, 13 nt, Human
uguugagcuguuu

SEQ ID NO: 2630275 - RNA, 23 nt, Human
uguugagguggucugaauguucu

SEQ ID NO: 2630276 - RNA, 20 nt, Human
uguugagguggucugaaugu

SEQ ID NO: 2630277 - RNA, 21 nt, Human
uguugagguggucugaauguu

SEQ ID NO: 2630278 - RNA, 19 nt, Human
uguugauaaauuccacugg

SEQ ID NO: 2630279 - RNA, 22 nt, Human
uguugauaaauuccacuggacu

SEQ ID NO: 2630280 - RNA, 22 nt, Human
uguugaaauuauguauguuuac

SEQ ID NO: 2630281 - RNA, 21 nt, Human
uguugaaauuauguauguuua

SEQ ID NO: 2630282 - RNA, 23 nt, Human
uguugagaaucccaaauuugauu

SEQ ID NO: 2630283 - RNA, 18 nt, Human
uguugagaauugugcuca

SEQ ID NO: 2630284 - RNA, 17 nt, Human
uguugagccaggccugg

SEQ ID NO: 2630285 - RNA, 14 nt, Human
uguugcuuacaauu

SEQ ID NO: 2630286 - RNA, 13 nt, Human
uguugcuuacaau

SEQ ID NO: 2630287 - RNA, 16 nt, Human
uguugcuguugauguu

SEQ ID NO: 2630288 - RNA, 14 nt, Human
uguugcugccucau

SEQ ID NO: 2630289 - RNA, 20 nt, Human
uguugcuuagucacuuauuu

SEQ ID NO: 2630290 - RNA, 16 nt, Human
uguugcuuagucacuu

SEQ ID NO: 2630291 - RNA, 16 nt, Human
uguugcuuacaauuuu

SEQ ID NO: 2630292 - RNA, 15 nt, Human
uguugcuuacaauuu

SEQ ID NO: 2630293 - RNA, 14 nt, Human
uguugcuuggacua

SEQ ID NO: 2630294 - RNA, 21 nt, Human
uguuggagaagaacugaaauc

SEQ ID NO: 2630295 - RNA, 21 nt, Human
uguugcuuuugugaacuuuuu

SEQ ID NO: 2630296 - RNA, 14 nt, Human
uguuggagccugca

SEQ ID NO: 2630297 - RNA, 13 nt, Human
uguuggaaaagaa

SEQ ID NO: 2630298 - RNA, 11 nt, Human
uguuggccagg

SEQ ID NO: 2630299 - RNA, 21 nt, Human
uguuggaucuucaauggcuuu

SEQ ID NO: 2630300 - RNA, 14 nt, Human
uguuggaucuucaa

SEQ ID NO: 2630301 - RNA, 11 nt, Human
uguuggaucuu

SEQ ID NO: 2630302 - RNA, 19 nt, Human
uguuggauaaaucaguggu

SEQ ID NO: 2630303 - RNA, 20 nt, Human
uguuggauaaaucagugguu

SEQ ID NO: 2630304 - RNA, 20 nt, Human
uguuggauuuguuuaaaagg

SEQ ID NO: 2630305 - RNA, 23 nt, Human
uguuggauuuauaaaugcuauuu

SEQ ID NO: 2630306 - RNA, 19 nt, Human
uguuggauuuauaaaugcu

SEQ ID NO: 2630307 - RNA, 17 nt, Human
uguuggauuuauaaaug

SEQ ID NO: 2630308 - RNA, 17 nt, Human
uguuggauuuuugucuu

SEQ ID NO: 2630309 - RNA, 14 nt, Human
uguuuaaaaggauu

SEQ ID NO: 2630310 - RNA, 14 nt, Human
uguuuaaaaucauu

SEQ ID NO: 2630311 - RNA, 13 nt, Human
uguuuaaaaucau

SEQ ID NO: 2630312 - RNA, 15 nt, Human
uguuuaauauuuaaa

SEQ ID NO: 2630313 - RNA, 14 nt, Human
uguuuaauauuuaa

SEQ ID NO: 2630314 - RNA, 17 nt, Human
uguuuaauauuuaaaca

SEQ ID NO: 2630315 - RNA, 18 nt, Human
uguuuacacucuuuguaa

SEQ ID NO: 2630316 - RNA, 16 nt, Human
uguuuacacucuuugu

SEQ ID NO: 2630317 - RNA, 15 nt, Human
uguuuacaagaaaaa

SEQ ID NO: 2630318 - RNA, 21 nt, Human
uguuuacagaggacaguauuu

SEQ ID NO: 2630319 - RNA, 17 nt, Human
uguuuacagauccccaa

SEQ ID NO: 2630320 - RNA, 14 nt, Human
uguuuacagaggac

SEQ ID NO: 2630321 - RNA, 19 nt, Human
uguuuacacucuuuguaag

SEQ ID NO: 2630322 - RNA, 16 nt, Human
uguuuacacacgugca

SEQ ID NO: 2630323 - RNA, 20 nt, Human
uguuguuuuguuuuaaauac

SEQ ID NO: 2630324 - RNA, 11 nt, Human
uguuguuuugu

SEQ ID NO: 2630325 - RNA, 12 nt, Human
uguuguuuguau

SEQ ID NO: 2630326 - RNA, 14 nt, Human
uguuguuucuuucu

SEQ ID NO: 2630327 - RNA, 13 nt, Human
uguuguuucuuuc

SEQ ID NO: 2630328 - RNA, 12 nt, Human
uguuguuugcca

SEQ ID NO: 2630329 - RNA, 18 nt, Human
uguuguuuuacuaaagaa

SEQ ID NO: 2630330 - RNA, 13 nt, Human
uguuguuuuacua

SEQ ID NO: 2630331 - RNA, 15 nt, Human
uguuguuucuuucua

SEQ ID NO: 2630332 - RNA, 12 nt, Human
uguuguuucuuu

SEQ ID NO: 2630333 - RNA, 13 nt, Human
uguuggccaggcu

SEQ ID NO: 2630334 - RNA, 18 nt, Human
uguuggccaggcugcucu

SEQ ID NO: 2630335 - RNA, 14 nt, Human
uguuggccaggcug

SEQ ID NO: 2630336 - RNA, 12 nt, Human
uguucucugccc

SEQ ID NO: 2630337 - RNA, 18 nt, Human
uguucucugaggacacua

SEQ ID NO: 2630338 - RNA, 16 nt, Human
uguucucugaggacac

SEQ ID NO: 2630339 - RNA, 13 nt, Human
uguucucugagga

SEQ ID NO: 2630340 - RNA, 16 nt, Human
uguucuauucaucuca

SEQ ID NO: 2630341 - RNA, 22 nt, Human
uguucuaguuuucaguuuguau

SEQ ID NO: 2630342 - RNA, 12 nt, Human
uguucuauagcu

SEQ ID NO: 2630343 - RNA, 15 nt, Human
uguucucagcucccc

SEQ ID NO: 2630344 - RNA, 14 nt, Human
uguucucagcuccc

SEQ ID NO: 2630345 - RNA, 21 nt, Human
uguucuauuucagugccaaua

SEQ ID NO: 2630346 - RNA, 18 nt, Human
uguucucagcucccccug

SEQ ID NO: 2630347 - RNA, 17 nt, Human
uguucucagcucccccu

SEQ ID NO: 2630348 - RNA, 20 nt, Human
uguucucagcucccccuguc

SEQ ID NO: 2630349 - RNA, 16 nt, Human
uguucuccgucccugc

SEQ ID NO: 2630350 - RNA, 22 nt, Human
uguucuccuagacugacccuga

SEQ ID NO: 2630351 - RNA, 13 nt, Human
uguucauaaauaa

SEQ ID NO: 2630352 - RNA, 18 nt, Human
uguucaguuacagaaagu

SEQ ID NO: 2630353 - RNA, 17 nt, Human
uguucaguuacagaaag

SEQ ID NO: 2630354 - RNA, 16 nt, Human
uguucaguuacagaaa

SEQ ID NO: 2630355 - RNA, 15 nt, Human
uguucaguuacagaa

SEQ ID NO: 2630356 - RNA, 22 nt, Human
uguucaguguaauuucuuugcc

SEQ ID NO: 2630357 - RNA, 21 nt, Human
uguucaguguaauuucuuugc

SEQ ID NO: 2630358 - RNA, 17 nt, Human
uguucagugucccgggc

SEQ ID NO: 2630359 - RNA, 17 nt, Human
uguucaguguaauuucu

SEQ ID NO: 2630360 - RNA, 15 nt, Human
uguucaguguaauuu

SEQ ID NO: 2630361 - RNA, 13 nt, Human
uguucaguguaau

SEQ ID NO: 2630362 - RNA, 15 nt, Human
uguucaguguaaaua

SEQ ID NO: 2630363 - RNA, 22 nt, Human
uguucauuaaagcaugaauggu

SEQ ID NO: 2630364 - RNA, 12 nt, Human
uguucauuguaa

SEQ ID NO: 2630365 - RNA, 22 nt, Human
uguucauuuagauugaaaacuu

SEQ ID NO: 2630366 - RNA, 16 nt, Human
uguucuaguuuucagu

SEQ ID NO: 2630367 - RNA, 13 nt, Human
uguucauuuccuc

SEQ ID NO: 2630368 - RNA, 11 nt, Human
uguucauuucc

SEQ ID NO: 2630369 - RNA, 22 nt, Human
uguucauuguaauguuacugau

SEQ ID NO: 2630370 - RNA, 23 nt, Human
uguucauuguaauguuacugauc

SEQ ID NO: 2630371 - RNA, 13 nt, Human
uguucauuguaau

SEQ ID NO: 2630372 - RNA, 14 nt, Human
uguucauuguaaug

SEQ ID NO: 2630373 - RNA, 16 nt, Human
uguucauuguaauguu

SEQ ID NO: 2630374 - RNA, 18 nt, Human
uguucauuguaauguuac

SEQ ID NO: 2630375 - RNA, 19 nt, Human
uguucauuguaauguuacu

SEQ ID NO: 2630376 - RNA, 20 nt, Human
uguucauuguaauguuacug

SEQ ID NO: 2630377 - RNA, 21 nt, Human
uguucauuguaauguuacuga

SEQ ID NO: 2630378 - RNA, 23 nt, Human
uguucucuugggaacugaacuca

SEQ ID NO: 2630379 - RNA, 19 nt, Human
uguucucugcccuccaaga

SEQ ID NO: 2630380 - RNA, 15 nt, Human
uguucugacccugcu

SEQ ID NO: 2630381 - RNA, 13 nt, Human
uguucugaacugu

SEQ ID NO: 2630382 - RNA, 18 nt, Human
uguucugaauaauuucuu

SEQ ID NO: 2630383 - RNA, 15 nt, Human
uguucugaacugugg

SEQ ID NO: 2630384 - RNA, 13 nt, Human
uguucugacauua

SEQ ID NO: 2630385 - RNA, 15 nt, Human
uguucugacauuaac

SEQ ID NO: 2630386 - RNA, 16 nt, Human
uguucugacauuaaca

SEQ ID NO: 2630387 - RNA, 17 nt, Human
uguucugacauuaacag

SEQ ID NO: 2630388 - RNA, 18 nt, Human
uguucugacccugcuuca

SEQ ID NO: 2630389 - RNA, 15 nt, Human
uguucugauaaugaa

SEQ ID NO: 2630390 - RNA, 19 nt, Human
uguucugacauuaacaguu

SEQ ID NO: 2630391 - RNA, 20 nt, Human
uguucugacauuaacaguuu

SEQ ID NO: 2630392 - RNA, 22 nt, Human
uguucugacauuaacaguuuuc

SEQ ID NO: 2630393 - RNA, 14 nt, Human
uguucugauuagaa

SEQ ID NO: 2630394 - RNA, 16 nt, Human
uguucugauuagaaau

SEQ ID NO: 2630395 - RNA, 19 nt, Human
uguucugauuagaaaugac

SEQ ID NO: 2630396 - RNA, 14 nt, Human
uguucuuucuggcu

SEQ ID NO: 2630397 - RNA, 17 nt, Human
uguucugcacacagcac

SEQ ID NO: 2630398 - RNA, 23 nt, Human
uguucugcaaaaauauuuauaaa

SEQ ID NO: 2630399 - RNA, 22 nt, Human
uguucugauuagaaaugaccaa

SEQ ID NO: 2630400 - RNA, 21 nt, Human
uguugaaaauuauuuuaaaca

SEQ ID NO: 2630401 - RNA, 16 nt, Human
uguucuuucuggaguc

SEQ ID NO: 2630402 - RNA, 15 nt, Human
uguugaaauuaugua

SEQ ID NO: 2630403 - RNA, 22 nt, Human
uguugaaaauuauuuuaaacaa

SEQ ID NO: 2630404 - RNA, 14 nt, Human
uguugaaauuaugu

SEQ ID NO: 2630405 - RNA, 24 nt, Human
uguugaaagguaauuugagagaaa

SEQ ID NO: 2630406 - RNA, 11 nt, Human
uguugaaagau

SEQ ID NO: 2630407 - RNA, 20 nt, Human
uguucuuucuggcuaugcau

SEQ ID NO: 2630408 - RNA, 22 nt, Human
uguucuuucuggcuaugcauuu

SEQ ID NO: 2630409 - RNA, 14 nt, Human
uguugaaaauguuc

SEQ ID NO: 2630410 - RNA, 17 nt, Human
uguugaaaauguucaga

SEQ ID NO: 2630411 - RNA, 20 nt, Human
uguucuuuccaaaguacacu

SEQ ID NO: 2630412 - RNA, 16 nt, Human
uguucaccaucggcag

SEQ ID NO: 2630413 - RNA, 22 nt, Human
uguucacacucucacauguuua

SEQ ID NO: 2630414 - RNA, 19 nt, Human
uguucacacucucacaugu

SEQ ID NO: 2630415 - RNA, 16 nt, Human
uguucacacucucaca

SEQ ID NO: 2630416 - RNA, 15 nt, Human
uguucacacucucac

SEQ ID NO: 2630417 - RNA, 22 nt, Human
uguucacaccuagcgucaguau

SEQ ID NO: 2630418 - RNA, 14 nt, Human
uguucagcuccagc

SEQ ID NO: 2630419 - RNA, 16 nt, Human
uguucacagccagacu

SEQ ID NO: 2630420 - RNA, 16 nt, Human
uguucaauguuuaaug

SEQ ID NO: 2630421 - RNA, 23 nt, Human
uguucaagaccagccugaccaac

SEQ ID NO: 2630422 - RNA, 11 nt, Human
uguucagcugg

SEQ ID NO: 2630423 - RNA, 16 nt, Human
uguucagcuccagcuc

SEQ ID NO: 2630424 - RNA, 15 nt, Human
uguucagcuccagcu

SEQ ID NO: 2630425 - RNA, 12 nt, Human
uguuauaaucuu

SEQ ID NO: 2630426 - RNA, 17 nt, Human
uguuauaacucugcacu

SEQ ID NO: 2630427 - RNA, 15 nt, Human
uguuauaacucugca

SEQ ID NO: 2630428 - RNA, 14 nt, Human
uguuauaacucugc

SEQ ID NO: 2630429 - RNA, 14 nt, Human
uguuauaacuacuc

SEQ ID NO: 2630430 - RNA, 23 nt, Human
uguuauaacucugcacuacuccu

SEQ ID NO: 2630431 - RNA, 18 nt, Human
uguuauaacucugcacua

SEQ ID NO: 2630432 - RNA, 14 nt, Human
uguuaguucccaac

SEQ ID NO: 2630433 - RNA, 13 nt, Human
uguuaguucccaa

SEQ ID NO: 2630434 - RNA, 12 nt, Human
uguuaguuccca

SEQ ID NO: 2630435 - RNA, 17 nt, Human
uguuaguuauagauguc

SEQ ID NO: 2630436 - RNA, 15 nt, Human
uguuaguucccaaca

SEQ ID NO: 2630437 - RNA, 21 nt, Human
uguuagauagaauuuccaaua

SEQ ID NO: 2630438 - RNA, 23 nt, Human
uguuagaguccaacguggggcag

SEQ ID NO: 2630439 - RNA, 14 nt, Human
uguuagugcaaauu

SEQ ID NO: 2630440 - RNA, 19 nt, Human
uguuagaaaauggacacug

SEQ ID NO: 2630441 - RNA, 20 nt, Human
uguuagagguuuuaaaguga

SEQ ID NO: 2630442 - RNA, 22 nt, Human
uguuagaggaucccucucugga

SEQ ID NO: 2630443 - RNA, 18 nt, Human
uguuagacucuuacuuuu

SEQ ID NO: 2630444 - RNA, 22 nt, Human
uguuagagguuuuaaagugauu

SEQ ID NO: 2630445 - RNA, 21 nt, Human
uguuagagguuuuaaagugau

SEQ ID NO: 2630446 - RNA, 18 nt, Human
uguuagaguccaacgugg

SEQ ID NO: 2630447 - RNA, 22 nt, Human
uguuacauuuuuaagugcugca

SEQ ID NO: 2630448 - RNA, 19 nt, Human
uguuaccaugucacugugg

SEQ ID NO: 2630449 - RNA, 18 nt, Human
uguuaccaugucacugug

SEQ ID NO: 2630450 - RNA, 13 nt, Human
uguuacauuuuua

SEQ ID NO: 2630451 - RNA, 15 nt, Human
uguuacauuauuauc

SEQ ID NO: 2630452 - RNA, 12 nt, Human
uguuacaucaca

SEQ ID NO: 2630453 - RNA, 18 nt, Human
uguuacuuaccuaaacag

SEQ ID NO: 2630454 - RNA, 14 nt, Human
uguuacuuaccuaa

SEQ ID NO: 2630455 - RNA, 15 nt, Human
uguuacuguaauucc

SEQ ID NO: 2630456 - RNA, 12 nt, Human
uguuacuuaccu

SEQ ID NO: 2630457 - RNA, 15 nt, Human
uguuacugucuucag

SEQ ID NO: 2630458 - RNA, 16 nt, Human
uguuacugucuucagu

SEQ ID NO: 2630459 - RNA, 23 nt, Human
uguguuuucugaauaacauuugu

SEQ ID NO: 2630460 - RNA, 14 nt, Human
uguguuuucugaau

SEQ ID NO: 2630461 - RNA, 19 nt, Human
uguuaaacuagcauaucug

SEQ ID NO: 2630462 - RNA, 18 nt, Human
uguuaaacuagcauaucu

SEQ ID NO: 2630463 - RNA, 23 nt, Human
uguuaaacuagcauaucugccuu

SEQ ID NO: 2630464 - RNA, 22 nt, Human
uguuaaacuagcauaucugccu

SEQ ID NO: 2630465 - RNA, 20 nt, Human
uguuaaacuagcauaucugc

SEQ ID NO: 2630466 - RNA, 17 nt, Human
uguguuugucauuagcc

SEQ ID NO: 2630467 - RNA, 14 nt, Human
uguguuugucauua

SEQ ID NO: 2630468 - RNA, 18 nt, Human
uguguuugguucuggggc

SEQ ID NO: 2630469 - RNA, 19 nt, Human
uguguuugucauuagccug

SEQ ID NO: 2630470 - RNA, 15 nt, Human
uguguuuguguauuu

SEQ ID NO: 2630471 - RNA, 11 nt, Human
uguguuugugu

SEQ ID NO: 2630472 - RNA, 13 nt, Human
uguguuuguguga

SEQ ID NO: 2630473 - RNA, 10 nt, Human
uguguuuguu

SEQ ID NO: 2630474 - RNA, 13 nt, Human
uguguuuucugaa

SEQ ID NO: 2630475 - RNA, 17 nt, Human
uguguuuucauaauaaa

SEQ ID NO: 2630476 - RNA, 14 nt, Human
uguguuuguuccua

SEQ ID NO: 2630477 - RNA, 20 nt, Human
uguguuuguucuuuuuauug

SEQ ID NO: 2630478 - RNA, 24 nt, Human
ugugugccauagaguuuaacacaa

SEQ ID NO: 2630479 - RNA, 14 nt, Human
ugugugcaugugug

SEQ ID NO: 2630480 - RNA, 23 nt, Human
ugugugccauagaguuuaacaca

SEQ ID NO: 2630481 - RNA, 21 nt, Human
ugugugccauagaguuuaaca

SEQ ID NO: 2630482 - RNA, 20 nt, Human
ugugugcaugugugugcuca

SEQ ID NO: 2630483 - RNA, 19 nt, Human
ugugugcagacucaauaaa

SEQ ID NO: 2630484 - RNA, 13 nt, Human
ugugugcagugaa

SEQ ID NO: 2630485 - RNA, 20 nt, Human
ugugugaggagcugcuggcu

SEQ ID NO: 2630486 - RNA, 16 nt, Human
uguguguccaaaacug

SEQ ID NO: 2630487 - RNA, 19 nt, Human
uguguguccaaaacugccu

SEQ ID NO: 2630488 - RNA, 20 nt, Human
ugugugguggguucuuugga

SEQ ID NO: 2630489 - RNA, 14 nt, Human
uguguguaugugua

SEQ ID NO: 2630490 - RNA, 19 nt, Human
uguguguauguuugcacac

SEQ ID NO: 2630491 - RNA, 18 nt, Human
ugugugcgagugugugca

SEQ ID NO: 2630492 - RNA, 14 nt, Human
uguguguauacaug

SEQ ID NO: 2630493 - RNA, 20 nt, Human
ugugugguuugguguguucc

SEQ ID NO: 2630494 - RNA, 11 nt, Human
uguguguaugu

SEQ ID NO: 2630495 - RNA, 13 nt, Human
uguguguaugcua

SEQ ID NO: 2630496 - RNA, 14 nt, Human
uguguugugugugg

SEQ ID NO: 2630497 - RNA, 23 nt, Human
uguguugugugugggagugugua

SEQ ID NO: 2630498 - RNA, 22 nt, Human
uguguguccacgacugucucca

SEQ ID NO: 2630499 - RNA, 13 nt, Human
uguguugugauag

SEQ ID NO: 2630500 - RNA, 22 nt, Human
uguguuuaaauaaaguaucaug

SEQ ID NO: 2630501 - RNA, 18 nt, Human
uguguuuaaauaaaguau

SEQ ID NO: 2630502 - RNA, 20 nt, Human
uguguuuacuuuauguuacu

SEQ ID NO: 2630503 - RNA, 15 nt, Human
uguguuuaaauaaag

SEQ ID NO: 2630504 - RNA, 14 nt, Human
uguguuuaaauaaa

SEQ ID NO: 2630505 - RNA, 13 nt, Human
uguguuuaaauaa

SEQ ID NO: 2630506 - RNA, 14 nt, Human
uguguuguugcuuu

SEQ ID NO: 2630507 - RNA, 13 nt, Human
uguguuguugcuu

SEQ ID NO: 2630508 - RNA, 12 nt, Human
uguguuuaaaua

SEQ ID NO: 2630509 - RNA, 15 nt, Human
uguguuuaugugugu

SEQ ID NO: 2630510 - RNA, 13 nt, Human
uguguuuauuguc

SEQ ID NO: 2630511 - RNA, 22 nt, Human
uguguuuaggaacuacugagga

SEQ ID NO: 2630512 - RNA, 13 nt, Human
uguguuuaugugu

SEQ ID NO: 2630513 - RNA, 14 nt, Human
uguguauguggggg

SEQ ID NO: 2630514 - RNA, 13 nt, Human
uguguaugugggg

SEQ ID NO: 2630515 - RNA, 19 nt, Human
uguguauccauuaucaugu

SEQ ID NO: 2630516 - RNA, 18 nt, Human
uguguauccauuaucaug

SEQ ID NO: 2630517 - RNA, 16 nt, Human
uguguauccauuauca

SEQ ID NO: 2630518 - RNA, 19 nt, Human
uguguauucauugaaguca

SEQ ID NO: 2630519 - RNA, 21 nt, Human
uguguauuaaaaaaaacaaaa

SEQ ID NO: 2630520 - RNA, 19 nt, Human
uguguauuaaaaaaaacaa

SEQ ID NO: 2630521 - RNA, 21 nt, Human
uguguauccauuaucaugugu

SEQ ID NO: 2630522 - RNA, 14 nt, Human
uguguauuccaaga

SEQ ID NO: 2630523 - RNA, 22 nt, Human
uguguauguguacgugugugug

SEQ ID NO: 2630524 - RNA, 14 nt, Human
uguguauuaaaaaa

SEQ ID NO: 2630525 - RNA, 23 nt, Human
uguguaugugggggucugugugu

SEQ ID NO: 2630526 - RNA, 21 nt, Human
uguguauagaugcaagauauu

SEQ ID NO: 2630527 - RNA, 15 nt, Human
uguguauacaugcca

SEQ ID NO: 2630528 - RNA, 21 nt, Human
uguguagaguuaagaagcugu

SEQ ID NO: 2630529 - RNA, 16 nt, Human
uguguagggcgggagg

SEQ ID NO: 2630530 - RNA, 19 nt, Human
uguguagaguuaagaagcu

SEQ ID NO: 2630531 - RNA, 18 nt, Human
uguguagaguuaagaagc

SEQ ID NO: 2630532 - RNA, 16 nt, Human
uguguagaguuaagaa

SEQ ID NO: 2630533 - RNA, 21 nt, Human
uguguagacaaauauuuggag

SEQ ID NO: 2630534 - RNA, 16 nt, Human
uguguagacaaauauu

SEQ ID NO: 2630535 - RNA, 17 nt, Human
uguguacauaacugaaa

SEQ ID NO: 2630536 - RNA, 13 nt, Human
uguguagaguuaa

SEQ ID NO: 2630537 - RNA, 23 nt, Human
ugugucacuggcugccuccacuc

SEQ ID NO: 2630538 - RNA, 22 nt, Human
ugugucacuggcugccuccacu

SEQ ID NO: 2630539 - RNA, 12 nt, Human
ugugugaaugaa

SEQ ID NO: 2630540 - RNA, 16 nt, Human
ugugugaaugaacacu

SEQ ID NO: 2630541 - RNA, 17 nt, Human
ugugugaaugaacacuc

SEQ ID NO: 2630542 - RNA, 18 nt, Human
ugugugaaugaacacucu

SEQ ID NO: 2630543 - RNA, 22 nt, Human
ugugugaaugaacacucuuuug

SEQ ID NO: 2630544 - RNA, 17 nt, Human
ugugugagcaagcauuu

SEQ ID NO: 2630545 - RNA, 17 nt, Human
ugugugaggagcugcug

SEQ ID NO: 2630546 - RNA, 15 nt, Human
uguguauuuacgcuu

SEQ ID NO: 2630547 - RNA, 19 nt, Human
uguguauuuccagugcaau

SEQ ID NO: 2630548 - RNA, 16 nt, Human
ugugucaaugggcaau

SEQ ID NO: 2630549 - RNA, 13 nt, Human
ugugucacuggcu

SEQ ID NO: 2630550 - RNA, 18 nt, Human
ugugucacuggcugccuc

SEQ ID NO: 2630551 - RNA, 17 nt, Human
ugugucacuggcugccu

SEQ ID NO: 2630552 - RNA, 15 nt, Human
ugugucacuggcugc

SEQ ID NO: 2630553 - RNA, 22 nt, Human
uguguauuuaacagggagggga

SEQ ID NO: 2630554 - RNA, 20 nt, Human
uguguauuuaacagggaggg

SEQ ID NO: 2630555 - RNA, 18 nt, Human
uguguauuuaacagggag

SEQ ID NO: 2630556 - RNA, 12 nt, Human
uguguauuguuc

SEQ ID NO: 2630557 - RNA, 13 nt, Human
uguguauuguucc

SEQ ID NO: 2630558 - RNA, 14 nt, Human
uguguauuguuccc

SEQ ID NO: 2630559 - RNA, 15 nt, Human
uguguauuguuccca

SEQ ID NO: 2630560 - RNA, 13 nt, Human
uguguauuuaaca

SEQ ID NO: 2630561 - RNA, 18 nt, Human
uguauccuggggcucccu

SEQ ID NO: 2630562 - RNA, 15 nt, Human
uguauccuggggcuc

SEQ ID NO: 2630563 - RNA, 19 nt, Human
uguauccuggggcucccuu

SEQ ID NO: 2630564 - RNA, 15 nt, Human
uguaucggagacagu

SEQ ID NO: 2630565 - RNA, 17 nt, Human
uguaucggagacaguga

SEQ ID NO: 2630566 - RNA, 15 nt, Human
uguaucggaugcuuu

SEQ ID NO: 2630567 - RNA, 19 nt, Human
uguaucguauagcuguauu

SEQ ID NO: 2630568 - RNA, 18 nt, Human
uguaucguauagcuguau

SEQ ID NO: 2630569 - RNA, 17 nt, Human
uguaucguauagcugua

SEQ ID NO: 2630570 - RNA, 16 nt, Human
uguaucguauagcugu

SEQ ID NO: 2630571 - RNA, 15 nt, Human
uguaucguauagcug

SEQ ID NO: 2630572 - RNA, 19 nt, Human
uguaucguaaccagccaga

SEQ ID NO: 2630573 - RNA, 18 nt, Human
uguaucggagacagugau

SEQ ID NO: 2630574 - RNA, 16 nt, Human
uguaugauucccagcc

SEQ ID NO: 2630575 - RNA, 20 nt, Human
uguaucuacaucuuuuuuca

SEQ ID NO: 2630576 - RNA, 21 nt, Human
uguaucguauagcuguauuga

SEQ ID NO: 2630577 - RNA, 22 nt, Human
uguaucguauagcuguauugaa

SEQ ID NO: 2630578 - RNA, 15 nt, Human
uguaucuaccucacu

SEQ ID NO: 2630579 - RNA, 17 nt, Human
uguaucuagugcagcug

SEQ ID NO: 2630580 - RNA, 19 nt, Human
uguaucuagugcagcugau

SEQ ID NO: 2630581 - RNA, 21 nt, Human
uguaucuagugcagcugauuu

SEQ ID NO: 2630582 - RNA, 18 nt, Human
uguaucuaugcauuuucu

SEQ ID NO: 2630583 - RNA, 17 nt, Human
uguaugcaacaggcacu

SEQ ID NO: 2630584 - RNA, 18 nt, Human
uguaugcagcuaucuggu

SEQ ID NO: 2630585 - RNA, 23 nt, Human
uguauucuuugauguuaacacau

SEQ ID NO: 2630586 - RNA, 22 nt, Human
uguauugaacuuggaaagaaau

SEQ ID NO: 2630587 - RNA, 14 nt, Human
uguaugcacuuugu

SEQ ID NO: 2630588 - RNA, 17 nt, Human
uguaugcagcuaucugg

SEQ ID NO: 2630589 - RNA, 12 nt, Human
uguaugcagcua

SEQ ID NO: 2630590 - RNA, 18 nt, Human
uguaugcacgugugcaca

SEQ ID NO: 2630591 - RNA, 14 nt, Human
uguauuggccugga

SEQ ID NO: 2630592 - RNA, 15 nt, Human
uguauuguaaacaug

SEQ ID NO: 2630593 - RNA, 13 nt, Human
uguauuggccugg

SEQ ID NO: 2630594 - RNA, 19 nt, Human
uguauuguaaacauguguu

SEQ ID NO: 2630595 - RNA, 19 nt, Human
uguauuguaccuuuuaaca

SEQ ID NO: 2630596 - RNA, 11 nt, Human
uguauuguacc

SEQ ID NO: 2630597 - RNA, 23 nt, Human
uguauugaugacaguaguaccaa

SEQ ID NO: 2630598 - RNA, 16 nt, Human
uguauugaaucaugua

SEQ ID NO: 2630599 - RNA, 14 nt, Human
uguauugcacauug

SEQ ID NO: 2630600 - RNA, 20 nt, Human
uguauugaaucauguaguau

SEQ ID NO: 2630601 - RNA, 15 nt, Human
uguauugaaucaugu

SEQ ID NO: 2630602 - RNA, 19 nt, Human
uguauugcacauuguaaaa

SEQ ID NO: 2630603 - RNA, 15 nt, Human
uguauugcacauugu

SEQ ID NO: 2630604 - RNA, 19 nt, Human
uguauugcauauauacaua

SEQ ID NO: 2630605 - RNA, 21 nt, Human
uguauuuauaaauauauuuaa

SEQ ID NO: 2630606 - RNA, 14 nt, Human
uguauuuauaaaua

SEQ ID NO: 2630607 - RNA, 21 nt, Human
uguauuuacgcuuugauucau

SEQ ID NO: 2630608 - RNA, 23 nt, Human
uguauuuacgcuuugauucauag

SEQ ID NO: 2630609 - RNA, 21 nt, Human
uguauuuauauuuugugcuau

SEQ ID NO: 2630610 - RNA, 16 nt, Human
uguauuuaugugugag

SEQ ID NO: 2630611 - RNA, 20 nt, Human
uguauuuacgcuuugauuca

SEQ ID NO: 2630612 - RNA, 15 nt, Human
uguauuuaauuuuga

SEQ ID NO: 2630613 - RNA, 21 nt, Human
uguauuguaccuuuuaacacc

SEQ ID NO: 2630614 - RNA, 18 nt, Human
uguauuuaacagggaggg

SEQ ID NO: 2630615 - RNA, 16 nt, Human
uguauacaacccuggc

SEQ ID NO: 2630616 - RNA, 15 nt, Human
uguauaauuguaucg

SEQ ID NO: 2630617 - RNA, 13 nt, Human
uguauacaugcca

SEQ ID NO: 2630618 - RNA, 13 nt, Human
uguauaauuguau

SEQ ID NO: 2630619 - RNA, 15 nt, Human
uguauacaugccagu

SEQ ID NO: 2630620 - RNA, 14 nt, Human
uguauccuggggcu

SEQ ID NO: 2630621 - RNA, 13 nt, Human
uguauccuggggc

SEQ ID NO: 2630622 - RNA, 12 nt, Human
uguauccugggg

SEQ ID NO: 2630623 - RNA, 20 nt, Human
uguauccugaggcugagaga

SEQ ID NO: 2630624 - RNA, 22 nt, Human
uguauccccccccuguauaguu

SEQ ID NO: 2630625 - RNA, 16 nt, Human
uguaucccaugagccu

SEQ ID NO: 2630626 - RNA, 21 nt, Human
uguauccccccccuguauagu

SEQ ID NO: 2630627 - RNA, 20 nt, Human
uguauccccccccuguauag

SEQ ID NO: 2630628 - RNA, 23 nt, Human
uguaucccaugagccucagcauc

SEQ ID NO: 2630629 - RNA, 19 nt, Human
uguaucccaugagccucag

SEQ ID NO: 2630630 - RNA, 22 nt, Human
uguagcaaaauucuuaaguaug

SEQ ID NO: 2630631 - RNA, 20 nt, Human
uguagcaaaacgcauggagu

SEQ ID NO: 2630632 - RNA, 15 nt, Human
uguagcacuuacugg

SEQ ID NO: 2630633 - RNA, 19 nt, Human
uguagcacuuacugguagg

SEQ ID NO: 2630634 - RNA, 20 nt, Human
uguagcaaccuucugcauuc

SEQ ID NO: 2630635 - RNA, 20 nt, Human
uguauaaguaagaaaauauu

SEQ ID NO: 2630636 - RNA, 18 nt, Human
uguauaaguaagaaaaua

SEQ ID NO: 2630637 - RNA, 17 nt, Human
uguauaaguaagaaaau

SEQ ID NO: 2630638 - RNA, 14 nt, Human
uguauaaguaagaa

SEQ ID NO: 2630639 - RNA, 19 nt, Human
uguauaaguccuugcaaga

SEQ ID NO: 2630640 - RNA, 19 nt, Human
uguauaaguggaggcacuu

SEQ ID NO: 2630641 - RNA, 20 nt, Human
uguauaaguggaggcacuuu

SEQ ID NO: 2630642 - RNA, 16 nt, Human
uguauaaguggaggca

SEQ ID NO: 2630643 - RNA, 16 nt, Human
uguauaaguccuugca

SEQ ID NO: 2630644 - RNA, 21 nt, Human
uguauaaguggaggcacuuua

SEQ ID NO: 2630645 - RNA, 23 nt, Human
uguauaaguggaggcacuuuagg

SEQ ID NO: 2630646 - RNA, 20 nt, Human
uguauaauucaaagcaccaa

SEQ ID NO: 2630647 - RNA, 15 nt, Human
uguauaauauuuuua

SEQ ID NO: 2630648 - RNA, 17 nt, Human
ugucccagguccucacu

SEQ ID NO: 2630649 - RNA, 14 nt, Human
ugucccaugaccca

SEQ ID NO: 2630650 - RNA, 16 nt, Human
ugucccaugacccacc

SEQ ID NO: 2630651 - RNA, 14 nt, Human
ugucccagguccuc

SEQ ID NO: 2630652 - RNA, 16 nt, Human
ugucccagguccucac

SEQ ID NO: 2630653 - RNA, 20 nt, Human
ugucccagaggcugccccac

SEQ ID NO: 2630654 - RNA, 20 nt, Human
ugucccaugacccaccccug

SEQ ID NO: 2630655 - RNA, 19 nt, Human
ugucccaugacccaccccu

SEQ ID NO: 2630656 - RNA, 18 nt, Human
ugucccaugacccacccc

SEQ ID NO: 2630657 - RNA, 17 nt, Human
ugucccaugacccaccc

SEQ ID NO: 2630658 - RNA, 17 nt, Human
ugucccaugaucccugu

SEQ ID NO: 2630659 - RNA, 16 nt, Human
ugucccaugaucccug

SEQ ID NO: 2630660 - RNA, 17 nt, Human
ugucccauggacacucc

SEQ ID NO: 2630661 - RNA, 21 nt, Human
ugucccaugacccaccccugu

SEQ ID NO: 2630662 - RNA, 18 nt, Human
ugucccaugaucccugug

SEQ ID NO: 2630663 - RNA, 19 nt, Human
ugucccauggacacuccag

SEQ ID NO: 2630664 - RNA, 18 nt, Human
ugucccauggacacucca

SEQ ID NO: 2630665 - RNA, 22 nt, Human
ugucccauggacacuccagugc

SEQ ID NO: 2630666 - RNA, 23 nt, Human
ugucccaaaaagaaaggagggga

SEQ ID NO: 2630667 - RNA, 16 nt, Human
ugucccacuaucuggg

SEQ ID NO: 2630668 - RNA, 15 nt, Human
ugucccacuaucugg

SEQ ID NO: 2630669 - RNA, 17 nt, Human
ugucccacucaagccaa

SEQ ID NO: 2630670 - RNA, 20 nt, Human
ugucccacucaagccaagca

SEQ ID NO: 2630671 - RNA, 22 nt, Human
uguccauugacauguacagaga

SEQ ID NO: 2630672 - RNA, 20 nt, Human
uguccauugacauguacaga

SEQ ID NO: 2630673 - RNA, 19 nt, Human
uguccauugacauguacag

SEQ ID NO: 2630674 - RNA, 18 nt, Human
uguccauugacauguaca

SEQ ID NO: 2630675 - RNA, 14 nt, Human
uguccauuguccaa

SEQ ID NO: 2630676 - RNA, 17 nt, Human
uguccauuguccaaucc

SEQ ID NO: 2630677 - RNA, 20 nt, Human
uguccaugugguucuucaaa

SEQ ID NO: 2630678 - RNA, 12 nt, Human
uguccaugugug

SEQ ID NO: 2630679 - RNA, 13 nt, Human
uguccaugugugu

SEQ ID NO: 2630680 - RNA, 15 nt, Human
uguccaugugugugc

SEQ ID NO: 2630681 - RNA, 16 nt, Human
uguccauugacaugua

SEQ ID NO: 2630682 - RNA, 15 nt, Human
uguccauugacaugu

SEQ ID NO: 2630683 - RNA, 14 nt, Human
uguccauugacaug

SEQ ID NO: 2630684 - RNA, 16 nt, Human
uguccaugugugugca

SEQ ID NO: 2630685 - RNA, 20 nt, Human
ugucauuagccugaguagaa

SEQ ID NO: 2630686 - RNA, 17 nt, Human
ugucauuagccugagua

SEQ ID NO: 2630687 - RNA, 14 nt, Human
ugucauuagccuga

SEQ ID NO: 2630688 - RNA, 13 nt, Human
ugucauuagccug

SEQ ID NO: 2630689 - RNA, 15 nt, Human
ugucauucagaaaaa

SEQ ID NO: 2630690 - RNA, 21 nt, Human
ugucauuagccugaguagaaa

SEQ ID NO: 2630691 - RNA, 19 nt, Human
ugucauuaccagacgguuc

SEQ ID NO: 2630692 - RNA, 18 nt, Human
ugucauugcuguuguccc

SEQ ID NO: 2630693 - RNA, 22 nt, Human
uguccaugcgcucagggccaug

SEQ ID NO: 2630694 - RNA, 20 nt, Human
uguccaugcgcucagggcca

SEQ ID NO: 2630695 - RNA, 16 nt, Human
ugucaucagaagauaa

SEQ ID NO: 2630696 - RNA, 15 nt, Human
ugucaucagaagaua

SEQ ID NO: 2630697 - RNA, 13 nt, Human
ugucaucagaacu

SEQ ID NO: 2630698 - RNA, 15 nt, Human
ugucaucaauugaau

SEQ ID NO: 2630699 - RNA, 22 nt, Human
ugucaucaauugaauggucagc

SEQ ID NO: 2630700 - RNA, 23 nt, Human
ugucauuaaauggggcucacaaa

SEQ ID NO: 2630701 - RNA, 17 nt, Human
ugucaucagaagauaac

SEQ ID NO: 2630702 - RNA, 19 nt, Human
ugucauuaaaauaaauaaa

SEQ ID NO: 2630703 - RNA, 17 nt, Human
ugucauuaaagguauca

SEQ ID NO: 2630704 - RNA, 13 nt, Human
ugucauuaaaggu

SEQ ID NO: 2630705 - RNA, 18 nt, Human
ugucauauauuacuagca

SEQ ID NO: 2630706 - RNA, 21 nt, Human
ugucauauguaggugucugca

SEQ ID NO: 2630707 - RNA, 19 nt, Human
ugucauauauuacuagcau

SEQ ID NO: 2630708 - RNA, 20 nt, Human
ugucauauauggggggccaa

SEQ ID NO: 2630709 - RNA, 22 nt, Human
ugucauauauggggggccaaca

SEQ ID NO: 2630710 - RNA, 15 nt, Human
ugucauagaaauuac

SEQ ID NO: 2630711 - RNA, 16 nt, Human
ugucauagaaauuaca

SEQ ID NO: 2630712 - RNA, 21 nt, Human
ugucacucauugcugagccuc

SEQ ID NO: 2630713 - RNA, 22 nt, Human
ugucacucauugcugagccucu

SEQ ID NO: 2630714 - RNA, 23 nt, Human
ugucacucauugcugagccucug

SEQ ID NO: 2630715 - RNA, 14 nt, Human
ugucagucacagcc

SEQ ID NO: 2630716 - RNA, 15 nt, Human
ugucagucacagcca

SEQ ID NO: 2630717 - RNA, 15 nt, Human
ugucacugcaggcac

SEQ ID NO: 2630718 - RNA, 15 nt, Human
ugucacucauugcug

SEQ ID NO: 2630719 - RNA, 16 nt, Human
ugucacucauugcuga

SEQ ID NO: 2630720 - RNA, 22 nt, Human
ugucacuacucacagucucuuu

SEQ ID NO: 2630721 - RNA, 16 nt, Human
ugucacuacucacagu

SEQ ID NO: 2630722 - RNA, 22 nt, Human
uguauuugugacuaauuguaua

SEQ ID NO: 2630723 - RNA, 16 nt, Human
uguauuugugacuaau

SEQ ID NO: 2630724 - RNA, 15 nt, Human
uguauuugugacuaa

SEQ ID NO: 2630725 - RNA, 14 nt, Human
uguauuugugacua

SEQ ID NO: 2630726 - RNA, 13 nt, Human
uguauuugugacu

SEQ ID NO: 2630727 - RNA, 12 nt, Human
uguauuugugac

SEQ ID NO: 2630728 - RNA, 14 nt, Human
uguauuugcuuuuu

SEQ ID NO: 2630729 - RNA, 20 nt, Human
uguauuuguuaaugguuuga

SEQ ID NO: 2630730 - RNA, 20 nt, Human
uguauuugugacuaauugua

SEQ ID NO: 2630731 - RNA, 18 nt, Human
uguauuugugacuaauug

SEQ ID NO: 2630732 - RNA, 18 nt, Human
uguauuuguuaaugguuu

SEQ ID NO: 2630733 - RNA, 20 nt, Human
ugucagugugacugaucucu

SEQ ID NO: 2630734 - RNA, 12 nt, Human
ugucagugugac

SEQ ID NO: 2630735 - RNA, 16 nt, Human
ugucagucacagccac

SEQ ID NO: 2630736 - RNA, 17 nt, Human
ugucagucacagccacc

SEQ ID NO: 2630737 - RNA, 18 nt, Human
ugucagucacagccaccc

SEQ ID NO: 2630738 - RNA, 22 nt, Human
ugucagucacagccaccccuga

SEQ ID NO: 2630739 - RNA, 14 nt, Human
ugucagugcagccc

SEQ ID NO: 2630740 - RNA, 23 nt, Human
ugucagugccgccgccucgccca

SEQ ID NO: 2630741 - RNA, 16 nt, Human
ugucagugccgccgcc

SEQ ID NO: 2630742 - RNA, 13 nt, Human
ugucagugccgcc

SEQ ID NO: 2630743 - RNA, 16 nt, Human
ugucagugcagcccgu

SEQ ID NO: 2630744 - RNA, 15 nt, Human
ugucaguggaagaag

SEQ ID NO: 2630745 - RNA, 16 nt, Human
ugucauaagaaugaau

SEQ ID NO: 2630746 - RNA, 17 nt, Human
ugucauaagaaugaaua

SEQ ID NO: 2630747 - RNA, 14 nt, Human
ugucauaagaauga

SEQ ID NO: 2630748 - RNA, 15 nt, Human
ugucauaagaaugaa

SEQ ID NO: 2630749 - RNA, 23 nt, Human
ugucauaccaggccgccccagcc

SEQ ID NO: 2630750 - RNA, 22 nt, Human
uguaccucuugagccuugaacu

SEQ ID NO: 2630751 - RNA, 14 nt, Human
uguaccucuugagc

SEQ ID NO: 2630752 - RNA, 23 nt, Human
uguaccucuugagccuugaacuu

SEQ ID NO: 2630753 - RNA, 18 nt, Human
uguaccuggugaccccuu

SEQ ID NO: 2630754 - RNA, 18 nt, Human
uguaccugcccccaaucc

SEQ ID NO: 2630755 - RNA, 16 nt, Human
uguacccuuccuacag

SEQ ID NO: 2630756 - RNA, 22 nt, Human
uguacccccgcccaggcuggcc

SEQ ID NO: 2630757 - RNA, 19 nt, Human
uguacccccgcccaggcug

SEQ ID NO: 2630758 - RNA, 17 nt, Human
uguacccccgcccaggc

SEQ ID NO: 2630759 - RNA, 16 nt, Human
uguacccccgcccagg

SEQ ID NO: 2630760 - RNA, 15 nt, Human
uguacccccgcccag

SEQ ID NO: 2630761 - RNA, 14 nt, Human
uguacccccgccca

SEQ ID NO: 2630762 - RNA, 23 nt, Human
uguaccccccaaccccugaggaa

SEQ ID NO: 2630763 - RNA, 20 nt, Human
uguaccccccaaccccugag

SEQ ID NO: 2630764 - RNA, 15 nt, Human
uguaccgcaauguga

SEQ ID NO: 2630765 - RNA, 14 nt, Human
uguaccauuugccu

SEQ ID NO: 2630766 - RNA, 16 nt, Human
uguaccccccaacccc

SEQ ID NO: 2630767 - RNA, 14 nt, Human
uguaccccccaacc

SEQ ID NO: 2630768 - RNA, 21 nt, Human
uguacccaguauucuagguag

SEQ ID NO: 2630769 - RNA, 18 nt, Human
uguacaguagauuuucca

SEQ ID NO: 2630770 - RNA, 17 nt, Human
uguacaguagauuuucc

SEQ ID NO: 2630771 - RNA, 20 nt, Human
uguacaguagauuuuccaaa

SEQ ID NO: 2630772 - RNA, 18 nt, Human
uguacagucugucaugaa

SEQ ID NO: 2630773 - RNA, 16 nt, Human
uguacagucugucaug

SEQ ID NO: 2630774 - RNA, 15 nt, Human
uguacagucugucau

SEQ ID NO: 2630775 - RNA, 14 nt, Human
uguacagucuguca

SEQ ID NO: 2630776 - RNA, 12 nt, Human
uguacagucuug

SEQ ID NO: 2630777 - RNA, 15 nt, Human
uguacagucuuguau

SEQ ID NO: 2630778 - RNA, 14 nt, Human
uguacagucuugua

SEQ ID NO: 2630779 - RNA, 23 nt, Human
uguacagucugucaugaacaugu

SEQ ID NO: 2630780 - RNA, 13 nt, Human
uguaaugaucaua

SEQ ID NO: 2630781 - RNA, 20 nt, Human
uguaaugaaucuaagcagca

SEQ ID NO: 2630782 - RNA, 21 nt, Human
uguaaugaaucuaagcagcau

SEQ ID NO: 2630783 - RNA, 20 nt, Human
uguaaugguaucuuaaagug

SEQ ID NO: 2630784 - RNA, 13 nt, Human
uguaaugucacca

SEQ ID NO: 2630785 - RNA, 16 nt, Human
uguaaugucaccaccu

SEQ ID NO: 2630786 - RNA, 19 nt, Human
uguaaugucaccaccuucc

SEQ ID NO: 2630787 - RNA, 14 nt, Human
uguacaguagauuu

SEQ ID NO: 2630788 - RNA, 20 nt, Human
uguaaugucaccaccuuccc

SEQ ID NO: 2630789 - RNA, 16 nt, Human
uguacgucugacaggc

SEQ ID NO: 2630790 - RNA, 17 nt, Human
uguacgucugacaggca

SEQ ID NO: 2630791 - RNA, 20 nt, Human
uguacguuuguaugugugua

SEQ ID NO: 2630792 - RNA, 19 nt, Human
uguacguuuguaugugugu

SEQ ID NO: 2630793 - RNA, 14 nt, Human
uguacguggagagg

SEQ ID NO: 2630794 - RNA, 17 nt, Human
uguaccuguuccuuaga

SEQ ID NO: 2630795 - RNA, 17 nt, Human
uguaccuggugaccccu

SEQ ID NO: 2630796 - RNA, 12 nt, Human
uguacguggaga

SEQ ID NO: 2630797 - RNA, 15 nt, Human
uguacguggagaggg

SEQ ID NO: 2630798 - RNA, 16 nt, Human
uguacguuuguaugug

SEQ ID NO: 2630799 - RNA, 13 nt, Human
uguacuccuccca

SEQ ID NO: 2630800 - RNA, 12 nt, Human
uguacuccuccc

SEQ ID NO: 2630801 - RNA, 18 nt, Human
uguacucaggaggcugag

SEQ ID NO: 2630802 - RNA, 19 nt, Human
uguacuagagaucugguuu

SEQ ID NO: 2630803 - RNA, 12 nt, Human
uguacuacaauu

SEQ ID NO: 2630804 - RNA, 19 nt, Human
uguagaguuaagaagcugu

SEQ ID NO: 2630805 - RNA, 18 nt, Human
uguagaguuaagaagcug

SEQ ID NO: 2630806 - RNA, 17 nt, Human
uguagaguuaagaagcu

SEQ ID NO: 2630807 - RNA, 16 nt, Human
uguagaguuaagaagc

SEQ ID NO: 2630808 - RNA, 15 nt, Human
uguagaguuaagaag

SEQ ID NO: 2630809 - RNA, 14 nt, Human
uguagaguuaagaa

SEQ ID NO: 2630810 - RNA, 13 nt, Human
uguagaguuaaga

SEQ ID NO: 2630811 - RNA, 12 nt, Human
uguagaguuaag

SEQ ID NO: 2630812 - RNA, 21 nt, Human
uguagaguuaagaagcuguug

SEQ ID NO: 2630813 - RNA, 17 nt, Human
uguagauaauacaguuc

SEQ ID NO: 2630814 - RNA, 22 nt, Human
uguacugauuuuuguaagacaa

SEQ ID NO: 2630815 - RNA, 20 nt, Human
uguacugagccuuguaauuc

SEQ ID NO: 2630816 - RNA, 19 nt, Human
uguacugagccuuguaauu

SEQ ID NO: 2630817 - RNA, 22 nt, Human
uguacugagccuuguaauucua

SEQ ID NO: 2630818 - RNA, 20 nt, Human
uguacugaaaaaugguaauu

SEQ ID NO: 2630819 - RNA, 14 nt, Human
uguacucuuccgaa

SEQ ID NO: 2630820 - RNA, 17 nt, Human
uguacugagccuuguaa

SEQ ID NO: 2630821 - RNA, 13 nt, Human
uguacucuuccga

SEQ ID NO: 2630822 - RNA, 23 nt, Human
uguacucgcuugugcagaaaaca

SEQ ID NO: 2630823 - RNA, 12 nt, Human
uguacugaaaaa

SEQ ID NO: 2630824 - RNA, 20 nt, Human
uguacucgcuugugcagaaa

SEQ ID NO: 2630825 - RNA, 12 nt, Human
uguaaaccaaag

SEQ ID NO: 2630826 - RNA, 22 nt, Human
uguaaacauguguuuuaauucc

SEQ ID NO: 2630827 - RNA, 14 nt, Human
uguaaacauguguu

SEQ ID NO: 2630828 - RNA, 14 nt, Human
uguaaaccaaagcc

SEQ ID NO: 2630829 - RNA, 13 nt, Human
uguaaaccaaagc

SEQ ID NO: 2630830 - RNA, 20 nt, Human
uguaaacaggagacaggaag

SEQ ID NO: 2630831 - RNA, 12 nt, Human
uguaaacagugc

SEQ ID NO: 2630832 - RNA, 14 nt, Human
uguaaacagugccu

SEQ ID NO: 2630833 - RNA, 16 nt, Human
uguaaacagugccugc

SEQ ID NO: 2630834 - RNA, 17 nt, Human
uguaaacagugccugcu

SEQ ID NO: 2630835 - RNA, 19 nt, Human
uguaaacagugccugcuga

SEQ ID NO: 2630836 - RNA, 20 nt, Human
uguaaaaugugaagugaaug

SEQ ID NO: 2630837 - RNA, 14 nt, Human
uguaaaauuguaua

SEQ ID NO: 2630838 - RNA, 17 nt, Human
uguaaaauguugaauaa

SEQ ID NO: 2630839 - RNA, 17 nt, Human
uguaaaauuucacuuaa

SEQ ID NO: 2630840 - RNA, 21 nt, Human
uguaaacaaaauuuaguuuuu

SEQ ID NO: 2630841 - RNA, 20 nt, Human
ugguaguuaguagcauguug

SEQ ID NO: 2630842 - RNA, 17 nt, Human
ugguaguuaguagcaug

SEQ ID NO: 2630843 - RNA, 18 nt, Human
ugguaguuaguagcaugu

SEQ ID NO: 2630844 - RNA, 17 nt, Human
ugguagggacuuaaaaa

SEQ ID NO: 2630845 - RNA, 22 nt, Human
ugguaguaaucacaguuggccu

SEQ ID NO: 2630846 - RNA, 22 nt, Human
ugguaguacuccugcaaaauuu

SEQ ID NO: 2630847 - RNA, 16 nt, Human
ugguaggcauuuccua

SEQ ID NO: 2630848 - RNA, 22 nt, Human
ugguaggaucagcccucauuuu

SEQ ID NO: 2630849 - RNA, 19 nt, Human
ugguagggggaaaaugugu

SEQ ID NO: 2630850 - RNA, 18 nt, Human
ugguaggacuguagaaaa

SEQ ID NO: 2630851 - RNA, 17 nt, Human
ugguaggacuguagaaa

SEQ ID NO: 2630852 - RNA, 14 nt, Human
uguaaauuaacuuu

SEQ ID NO: 2630853 - RNA, 15 nt, Human
uguaaauuaacuuuu

SEQ ID NO: 2630854 - RNA, 16 nt, Human
uguaaauuaacuuuua

SEQ ID NO: 2630855 - RNA, 17 nt, Human
uguaaauuaacuuuuau

SEQ ID NO: 2630856 - RNA, 13 nt, Human
uguaaauuaacuu

SEQ ID NO: 2630857 - RNA, 18 nt, Human
uguaaaugguguacauaa

SEQ ID NO: 2630858 - RNA, 16 nt, Human
uguaaaugguguacau

SEQ ID NO: 2630859 - RNA, 15 nt, Human
uguaaaugguguaca

SEQ ID NO: 2630860 - RNA, 11 nt, Human
uguaaauguau

SEQ ID NO: 2630861 - RNA, 17 nt, Human
uguaaaugguguacaua

SEQ ID NO: 2630862 - RNA, 18 nt, Human
uguaaaugcaucuguccu

SEQ ID NO: 2630863 - RNA, 22 nt, Human
uguaaaugcugucaacuaugau

SEQ ID NO: 2630864 - RNA, 15 nt, Human
uguaaaugcaucugu

SEQ ID NO: 2630865 - RNA, 21 nt, Human
uguaacuaggcucagagaugu

SEQ ID NO: 2630866 - RNA, 18 nt, Human
uguaacuaggcucagaga

SEQ ID NO: 2630867 - RNA, 20 nt, Human
uguaacguugcugugggaac

SEQ ID NO: 2630868 - RNA, 21 nt, Human
uguaacuauaguccagcuuug

SEQ ID NO: 2630869 - RNA, 19 nt, Human
uguaacuauaguccagcuu

SEQ ID NO: 2630870 - RNA, 18 nt, Human
uguaacguugcuguggga

SEQ ID NO: 2630871 - RNA, 17 nt, Human
uguaacguugcuguggg

SEQ ID NO: 2630872 - RNA, 16 nt, Human
uguaacguugcugugg

SEQ ID NO: 2630873 - RNA, 17 nt, Human
uguaaauugaaucagua

SEQ ID NO: 2630874 - RNA, 22 nt, Human
uguaaauugaaucaguauaaac

SEQ ID NO: 2630875 - RNA, 15 nt, Human
uguaaauuuauguga

SEQ ID NO: 2630876 - RNA, 19 nt, Human
uguaaccucuucagaggcc

SEQ ID NO: 2630877 - RNA, 16 nt, Human
uguaaauuuaugugau

SEQ ID NO: 2630878 - RNA, 23 nt, Human
uguaacugucagccgggcccuga

SEQ ID NO: 2630879 - RNA, 12 nt, Human
uguaacugcuga

SEQ ID NO: 2630880 - RNA, 21 nt, Human
uguaacuggcaguuuuccauu

SEQ ID NO: 2630881 - RNA, 12 nt, Human
uguaacuccacc

SEQ ID NO: 2630882 - RNA, 17 nt, Human
uguaacucuaaaagauc

SEQ ID NO: 2630883 - RNA, 16 nt, Human
uguaacucuaaaagau

SEQ ID NO: 2630884 - RNA, 12 nt, Human
uguaacucuaaa

SEQ ID NO: 2630885 - RNA, 13 nt, Human
uguaacuccacca

SEQ ID NO: 2630886 - RNA, 20 nt, Human
uguaacucuaaaagauccuu

SEQ ID NO: 2630887 - RNA, 19 nt, Human
uguaacucuaaaagauccu

SEQ ID NO: 2630888 - RNA, 18 nt, Human
uguaacucuaaaagaucc

SEQ ID NO: 2630889 - RNA, 23 nt, Human
uguaacugcauugagaacugcau

SEQ ID NO: 2630890 - RNA, 15 nt, Human
uguaaucacagcuac

SEQ ID NO: 2630891 - RNA, 14 nt, Human
uguaaucaguuuua

SEQ ID NO: 2630892 - RNA, 19 nt, Human
uguaaugaaccgcugaaua

SEQ ID NO: 2630893 - RNA, 20 nt, Human
uguaaugaaacaccuucucu

SEQ ID NO: 2630894 - RNA, 16 nt, Human
uguaaucccagcuacu

SEQ ID NO: 2630895 - RNA, 22 nt, Human
uguaaucccagcacuuugggag

SEQ ID NO: 2630896 - RNA, 23 nt, Human
uguaaucccagcacuuugggagg

SEQ ID NO: 2630897 - RNA, 16 nt, Human
uguaaucccagcacuu

SEQ ID NO: 2630898 - RNA, 17 nt, Human
uguaaucauauaauaaa

SEQ ID NO: 2630899 - RNA, 21 nt, Human
uguaaucauuucuugggcccu

SEQ ID NO: 2630900 - RNA, 13 nt, Human
uguaaucccagca

SEQ ID NO: 2630901 - RNA, 15 nt, Human
uguaaucccagcacu

SEQ ID NO: 2630902 - RNA, 23 nt, Human
ugugaauuucuucacuguugaaa

SEQ ID NO: 2630903 - RNA, 15 nt, Human
ugugaauggauugga

SEQ ID NO: 2630904 - RNA, 13 nt, Human
ugugaauggauug

SEQ ID NO: 2630905 - RNA, 21 nt, Human
ugugacaaggauugcuacugu

SEQ ID NO: 2630906 - RNA, 17 nt, Human
ugugaaugccacugccu

SEQ ID NO: 2630907 - RNA, 17 nt, Human
ugugaaugaacacucuu

SEQ ID NO: 2630908 - RNA, 23 nt, Human
ugugaaugaacacucuuuugcuu

SEQ ID NO: 2630909 - RNA, 14 nt, Human
ugugaaugaacacu

SEQ ID NO: 2630910 - RNA, 15 nt, Human
ugugaaucagacccu

SEQ ID NO: 2630911 - RNA, 18 nt, Human
ugugaaucagacccuacc

SEQ ID NO: 2630912 - RNA, 22 nt, Human
ugugaauagaacucugaaauga

SEQ ID NO: 2630913 - RNA, 20 nt, Human
ugugaauauggacucaguuu

SEQ ID NO: 2630914 - RNA, 12 nt, Human
ugugaauaaauu

SEQ ID NO: 2630915 - RNA, 16 nt, Human
ugugaaucauuuuacc

SEQ ID NO: 2630916 - RNA, 23 nt, Human
ugugaauauuuccauauggauuu

SEQ ID NO: 2630917 - RNA, 21 nt, Human
ugugaauauuuccauauggau

SEQ ID NO: 2630918 - RNA, 14 nt, Human
ugugaaucagaccc

SEQ ID NO: 2630919 - RNA, 22 nt, Human
ugugaccacugcagaagacagu

SEQ ID NO: 2630920 - RNA, 20 nt, Human
ugugacccagcacugcccaa

SEQ ID NO: 2630921 - RNA, 17 nt, Human
ugugacccagcacugcc

SEQ ID NO: 2630922 - RNA, 21 nt, Human
ugugacccagauccucacaac

SEQ ID NO: 2630923 - RNA, 15 nt, Human
ugugaccagggguga

SEQ ID NO: 2630924 - RNA, 19 nt, Human
ugugaccagucugacccuu

SEQ ID NO: 2630925 - RNA, 14 nt, Human
ugugaccagcacug

SEQ ID NO: 2630926 - RNA, 17 nt, Human
ugugaccagcacugucu

SEQ ID NO: 2630927 - RNA, 12 nt, Human
ugugacauguaa

SEQ ID NO: 2630928 - RNA, 22 nt, Human
ugugacauggugccugagaggc

SEQ ID NO: 2630929 - RNA, 14 nt, Human
ugugacauguaaca

SEQ ID NO: 2630930 - RNA, 20 nt, Human
ugugacauggugccugagag

SEQ ID NO: 2630931 - RNA, 18 nt, Human
ugugacauggugccugag

SEQ ID NO: 2630932 - RNA, 17 nt, Human
ugugacauggugccuga

SEQ ID NO: 2630933 - RNA, 16 nt, Human
ugugacauggugccug

SEQ ID NO: 2630934 - RNA, 21 nt, Human
ugugacaugcgggcugggcag

SEQ ID NO: 2630935 - RNA, 19 nt, Human
ugugacaugcgggcugggc

SEQ ID NO: 2630936 - RNA, 16 nt, Human
ugugaauggauuggau

SEQ ID NO: 2630937 - RNA, 22 nt, Human
ugugaauugccugcagagagaa

SEQ ID NO: 2630938 - RNA, 22 nt, Human
ugugacacauaugcaccuugug

SEQ ID NO: 2630939 - RNA, 17 nt, Human
ugugacacauaugcacc

SEQ ID NO: 2630940 - RNA, 19 nt, Human
ugugacaauuuuguacaaa

SEQ ID NO: 2630941 - RNA, 17 nt, Human
ugugacaggcagcagag

SEQ ID NO: 2630942 - RNA, 15 nt, Human
ugugacaggcagcag

SEQ ID NO: 2630943 - RNA, 18 nt, Human
ugugacagauuauacaga

SEQ ID NO: 2630944 - RNA, 16 nt, Human
ugugacaggcagcaga

SEQ ID NO: 2630945 - RNA, 18 nt, Human
ugugacauauuaugucuu

SEQ ID NO: 2630946 - RNA, 17 nt, Human
ugugacaugcgggcugg

SEQ ID NO: 2630947 - RNA, 15 nt, Human
ugugacccccagcuc

SEQ ID NO: 2630948 - RNA, 16 nt, Human
ugugacccccagcucc

SEQ ID NO: 2630949 - RNA, 20 nt, Human
ugugacccccagcuccggcc

SEQ ID NO: 2630950 - RNA, 17 nt, Human
ugugacccccagcuccg

SEQ ID NO: 2630951 - RNA, 22 nt, Human
ugugacccagcacugcccaaag

SEQ ID NO: 2630952 - RNA, 18 nt, Human
ugugaguacuacaguccu

SEQ ID NO: 2630953 - RNA, 18 nt, Human
ugugaggggcucucucau

SEQ ID NO: 2630954 - RNA, 21 nt, Human
ugugaggugcagagugcccag

SEQ ID NO: 2630955 - RNA, 20 nt, Human
ugugaguacuacaguccucc

SEQ ID NO: 2630956 - RNA, 19 nt, Human
ugugaguacuacaguccuc

SEQ ID NO: 2630957 - RNA, 23 nt, Human
ugugaguacuacaguccucccau

SEQ ID NO: 2630958 - RNA, 15 nt, Human
ugugaguaagagcug

SEQ ID NO: 2630959 - RNA, 19 nt, Human
ugugaguaagagcuggugu

SEQ ID NO: 2630960 - RNA, 22 nt, Human
ugugaguuuaccuuguauacug

SEQ ID NO: 2630961 - RNA, 21 nt, Human
ugugaguuuaguaaggcugug

SEQ ID NO: 2630962 - RNA, 23 nt, Human
ugugaguuuaccuuguauacugu

SEQ ID NO: 2630963 - RNA, 21 nt, Human
ugugauacaaugcugugcccu

SEQ ID NO: 2630964 - RNA, 15 nt, Human
ugugauagcacuuuc

SEQ ID NO: 2630965 - RNA, 17 nt, Human
ugugauagcacuuucua

SEQ ID NO: 2630966 - RNA, 14 nt, Human
ugugauagcacuuu

SEQ ID NO: 2630967 - RNA, 22 nt, Human
ugugauacccauagcuuccaug

SEQ ID NO: 2630968 - RNA, 18 nt, Human
ugugauaaggaucagaac

SEQ ID NO: 2630969 - RNA, 14 nt, Human
ugugaggcuguccu

SEQ ID NO: 2630970 - RNA, 14 nt, Human
ugugcaagagaggg

SEQ ID NO: 2630971 - RNA, 13 nt, Human
ugugauauaagug

SEQ ID NO: 2630972 - RNA, 17 nt, Human
ugugcaaguaugugagu

SEQ ID NO: 2630973 - RNA, 18 nt, Human
ugugcaaguaugugagug

SEQ ID NO: 2630974 - RNA, 16 nt, Human
ugugcaaguguaugca

SEQ ID NO: 2630975 - RNA, 15 nt, Human
ugugcaagugucugu

SEQ ID NO: 2630976 - RNA, 19 nt, Human
ugugcaagugucugugugc

SEQ ID NO: 2630977 - RNA, 20 nt, Human
ugugcaagugucugugugca

SEQ ID NO: 2630978 - RNA, 12 nt, Human
ugugcaagugug

SEQ ID NO: 2630979 - RNA, 21 nt, Human
ugugcaagugugugcaugugu

SEQ ID NO: 2630980 - RNA, 14 nt, Human
ugugaaguuuacau

SEQ ID NO: 2630981 - RNA, 20 nt, Human
ugugaaguuuacauuguaaa

SEQ ID NO: 2630982 - RNA, 14 nt, Human
ugugaaaggaaaga

SEQ ID NO: 2630983 - RNA, 13 nt, Human
ugugaaaggaaag

SEQ ID NO: 2630984 - RNA, 19 nt, Human
ugugaaacuggcacugaau

SEQ ID NO: 2630985 - RNA, 22 nt, Human
ugugaaaccuuuuuuaagauuu

SEQ ID NO: 2630986 - RNA, 20 nt, Human
ugugaaaccuuuuuuaagau

SEQ ID NO: 2630987 - RNA, 13 nt, Human
ugugaaacauguu

SEQ ID NO: 2630988 - RNA, 21 nt, Human
ugucuggugguggcaccaucu

SEQ ID NO: 2630989 - RNA, 21 nt, Human
ugucuuuuuuuuaaugugcug

SEQ ID NO: 2630990 - RNA, 18 nt, Human
ugucuuuuuuuuaaugug

SEQ ID NO: 2630991 - RNA, 17 nt, Human
ugugaaaaaaaaaaugc

SEQ ID NO: 2630992 - RNA, 20 nt, Human
ugugaaaaaaaaaaugcuga

SEQ ID NO: 2630993 - RNA, 22 nt, Human
ugucuuuggacccugaggccca

SEQ ID NO: 2630994 - RNA, 19 nt, Human
ugucuuuggacccugaggc

SEQ ID NO: 2630995 - RNA, 14 nt, Human
ugucuuuuuucuaa

SEQ ID NO: 2630996 - RNA, 16 nt, Human
ugucuuuuuucacuac

SEQ ID NO: 2630997 - RNA, 18 nt, Human
ugucuuuggacccugagg

SEQ ID NO: 2630998 - RNA, 17 nt, Human
ugucuuuggacccugag

SEQ ID NO: 2630999 - RNA, 16 nt, Human
ugucugguggccccgu

SEQ ID NO: 2631000 - RNA, 14 nt, Human
ugucugguggcccc

SEQ ID NO: 2631001 - RNA, 13 nt, Human
ugucugguggccc

SEQ ID NO: 2631002 - RNA, 12 nt, Human
ugucugggcuga

SEQ ID NO: 2631003 - RNA, 11 nt, Human
ugucugggcug

SEQ ID NO: 2631004 - RNA, 23 nt, Human
ugucuggcugaggauuucaagcc

SEQ ID NO: 2631005 - RNA, 22 nt, Human
ugucucaaugcucauaacggau

SEQ ID NO: 2631006 - RNA, 19 nt, Human
ugucucaaugcucauaacg

SEQ ID NO: 2631007 - RNA, 17 nt, Human
ugucucaaugcucauaa

SEQ ID NO: 2631008 - RNA, 16 nt, Human
ugucucaaugcucaua

SEQ ID NO: 2631009 - RNA, 17 nt, Human
ugucucaggucccugca

SEQ ID NO: 2631010 - RNA, 16 nt, Human
ugucucaggucccugc

SEQ ID NO: 2631011 - RNA, 21 nt, Human
ugucucaagagggcacuggug

SEQ ID NO: 2631012 - RNA, 20 nt, Human
ugucucaagagggcacuggu

SEQ ID NO: 2631013 - RNA, 15 nt, Human
ugucucaaugcucau

SEQ ID NO: 2631014 - RNA, 14 nt, Human
ugucucaaugcuca

SEQ ID NO: 2631015 - RNA, 23 nt, Human
ugucucaagagggcacugguggc

SEQ ID NO: 2631016 - RNA, 14 nt, Human
uguccccacacucc

SEQ ID NO: 2631017 - RNA, 12 nt, Human
uguccccacacu

SEQ ID NO: 2631018 - RNA, 11 nt, Human
uguccccacac

SEQ ID NO: 2631019 - RNA, 21 nt, Human
uguccccaaauccgaaccucc

SEQ ID NO: 2631020 - RNA, 22 nt, Human
uguccccaaauccgaaccuccu

SEQ ID NO: 2631021 - RNA, 14 nt, Human
uguccccaaauccg

SEQ ID NO: 2631022 - RNA, 19 nt, Human
uguccccaaauccgaaccu

SEQ ID NO: 2631023 - RNA, 20 nt, Human
ugucccauuucuaaaggccu

SEQ ID NO: 2631024 - RNA, 18 nt, Human
uguccccaaaccugcaag

SEQ ID NO: 2631025 - RNA, 16 nt, Human
uguccccacacuccua

SEQ ID NO: 2631026 - RNA, 15 nt, Human
uguccccacacuccu

SEQ ID NO: 2631027 - RNA, 19 nt, Human
ugucucaagagggcacugg

SEQ ID NO: 2631028 - RNA, 21 nt, Human
ugucucaguccaugaagaugu

SEQ ID NO: 2631029 - RNA, 22 nt, Human
ugucucaguccaugaagaugua

SEQ ID NO: 2631030 - RNA, 16 nt, Human
ugucugccaauuuuug

SEQ ID NO: 2631031 - RNA, 15 nt, Human
ugucugccagccagc

SEQ ID NO: 2631032 - RNA, 16 nt, Human
ugucugccagccagca

SEQ ID NO: 2631033 - RNA, 13 nt, Human
ugucugcauuucg

SEQ ID NO: 2631034 - RNA, 21 nt, Human
ugucugcauuucgguggcuag

SEQ ID NO: 2631035 - RNA, 18 nt, Human
ugucugcaggauugauua

SEQ ID NO: 2631036 - RNA, 17 nt, Human
ugucucaguccaccuga

SEQ ID NO: 2631037 - RNA, 14 nt, Human
ugucucacacuggc

SEQ ID NO: 2631038 - RNA, 16 nt, Human
ugucuggcugcagagc

SEQ ID NO: 2631039 - RNA, 17 nt, Human
ugucuggcugcagagca

SEQ ID NO: 2631040 - RNA, 14 nt, Human
ugucuggcugcaga

SEQ ID NO: 2631041 - RNA, 19 nt, Human
ugucuggcugaggauuuca

SEQ ID NO: 2631042 - RNA, 21 nt, Human
ugucugcgugguuccuuucuc

SEQ ID NO: 2631043 - RNA, 15 nt, Human
ugucugccucuuaga

SEQ ID NO: 2631044 - RNA, 14 nt, Human
ugucugccucuuag

SEQ ID NO: 2631045 - RNA, 16 nt, Human
ugucugcccuucaccc

SEQ ID NO: 2631046 - RNA, 11 nt, Human
ugucugcccuu

SEQ ID NO: 2631047 - RNA, 18 nt, Human
ugucugccagccagcagc

SEQ ID NO: 2631048 - RNA, 19 nt, Human
ugucugccagccagcagcc

SEQ ID NO: 2631049 - RNA, 13 nt, Human
ugucugccagggc

SEQ ID NO: 2631050 - RNA, 15 nt, Human
ugugccuggcucaga

SEQ ID NO: 2631051 - RNA, 13 nt, Human
ugugccuggcuca

SEQ ID NO: 2631052 - RNA, 15 nt, Human
ugugccugacccuac

SEQ ID NO: 2631053 - RNA, 13 nt, Human
ugugccugcagcc

SEQ ID NO: 2631054 - RNA, 15 nt, Human
ugugccucugccugu

SEQ ID NO: 2631055 - RNA, 12 nt, Human
ugugccugcagc

SEQ ID NO: 2631056 - RNA, 17 nt, Human
ugugccucugggacugg

SEQ ID NO: 2631057 - RNA, 20 nt, Human
ugugccuggguggacauggc

SEQ ID NO: 2631058 - RNA, 20 nt, Human
ugugcgugcauguguguuca

SEQ ID NO: 2631059 - RNA, 13 nt, Human
ugugcgugaaaca

SEQ ID NO: 2631060 - RNA, 14 nt, Human
ugugcgugaaacac

SEQ ID NO: 2631061 - RNA, 23 nt, Human
ugugcuucuaauauuuauugcuu

SEQ ID NO: 2631062 - RNA, 21 nt, Human
ugugcuucuaauauuuauugc

SEQ ID NO: 2631063 - RNA, 21 nt, Human
ugugcuucuuucuuugggaau

SEQ ID NO: 2631064 - RNA, 14 nt, Human
ugugcuucuuucuu

SEQ ID NO: 2631065 - RNA, 15 nt, Human
ugugcuuuucuccaa

SEQ ID NO: 2631066 - RNA, 14 nt, Human
ugugcuuuuccuau

SEQ ID NO: 2631067 - RNA, 16 nt, Human
ugugcuuuuccuauuu

SEQ ID NO: 2631068 - RNA, 16 nt, Human
ugugcuuuuaaaugca

SEQ ID NO: 2631069 - RNA, 22 nt, Human
ugugcuuauguaugagguacaa

SEQ ID NO: 2631070 - RNA, 19 nt, Human
ugugcuucgggcccuuccc

SEQ ID NO: 2631071 - RNA, 13 nt, Human
ugugcuuauguuu

SEQ ID NO: 2631072 - RNA, 20 nt, Human
ugugcgugcuugaguguguu

SEQ ID NO: 2631073 - RNA, 15 nt, Human
ugugcgugaaacaca

SEQ ID NO: 2631074 - RNA, 16 nt, Human
ugugcgugaaacacac

SEQ ID NO: 2631075 - RNA, 22 nt, Human
ugugcgugaaacacaccaggcu

SEQ ID NO: 2631076 - RNA, 15 nt, Human
ugugcgugcaugugc

SEQ ID NO: 2631077 - RNA, 21 nt, Human
ugugcguguguccaugugugu

SEQ ID NO: 2631078 - RNA, 20 nt, Human
ugugcguguguccaugugug

SEQ ID NO: 2631079 - RNA, 17 nt, Human
ugugcuacugauuguuu

SEQ ID NO: 2631080 - RNA, 14 nt, Human
ugugcuacuuugcc

SEQ ID NO: 2631081 - RNA, 21 nt, Human
ugugcuaccuggguccuuuuc

SEQ ID NO: 2631082 - RNA, 23 nt, Human
ugugcuaaccacgucugucuuca

SEQ ID NO: 2631083 - RNA, 22 nt, Human
ugugcagccuguccugggcugg

SEQ ID NO: 2631084 - RNA, 16 nt, Human
ugugcagguggggaga

SEQ ID NO: 2631085 - RNA, 23 nt, Human
ugugcagguggggagacugggcu

SEQ ID NO: 2631086 - RNA, 17 nt, Human
ugugcagucacuggagg

SEQ ID NO: 2631087 - RNA, 17 nt, Human
ugugcagguuuguuaca

SEQ ID NO: 2631088 - RNA, 23 nt, Human
ugugcagccccgccuccaggcca

SEQ ID NO: 2631089 - RNA, 19 nt, Human
ugugcagccgcugagcgag

SEQ ID NO: 2631090 - RNA, 22 nt, Human
ugugcagccccgccuccaggcc

SEQ ID NO: 2631091 - RNA, 22 nt, Human
ugugcaccuuaccaacuuucug

SEQ ID NO: 2631092 - RNA, 21 nt, Human
ugugcaccuuaccaacuuucu

SEQ ID NO: 2631093 - RNA, 23 nt, Human
ugugcagacucaauaaaaucaug

SEQ ID NO: 2631094 - RNA, 22 nt, Human
ugugcacaugcacgugugugca

SEQ ID NO: 2631095 - RNA, 16 nt, Human
ugugcacaugcacgug

SEQ ID NO: 2631096 - RNA, 18 nt, Human
ugugcacccucuauccca

SEQ ID NO: 2631097 - RNA, 14 nt, Human
ugugcacccauggg

SEQ ID NO: 2631098 - RNA, 13 nt, Human
ugugcaccagggu

SEQ ID NO: 2631099 - RNA, 14 nt, Human
ugugcaccaggguu

SEQ ID NO: 2631100 - RNA, 18 nt, Human
ugugcacaugugugcgug

SEQ ID NO: 2631101 - RNA, 15 nt, Human
ugugcacaauucugu

SEQ ID NO: 2631102 - RNA, 14 nt, Human
ugugccucugccug

SEQ ID NO: 2631103 - RNA, 22 nt, Human
ugugcauguguguaagugugug

SEQ ID NO: 2631104 - RNA, 13 nt, Human
ugugccucugccu

SEQ ID NO: 2631105 - RNA, 13 nt, Human
ugugccucuggga

SEQ ID NO: 2631106 - RNA, 15 nt, Human
ugugccucugggacu

SEQ ID NO: 2631107 - RNA, 16 nt, Human
ugugccucugggacug

SEQ ID NO: 2631108 - RNA, 20 nt, Human
ugugcauguaugucuuggac

SEQ ID NO: 2631109 - RNA, 15 nt, Human
ugugcaugguggcac

SEQ ID NO: 2631110 - RNA, 19 nt, Human
ugugcaugggugaagggag

SEQ ID NO: 2631111 - RNA, 23 nt, Human
ugugcauguaugucuuggacacu

SEQ ID NO: 2631112 - RNA, 22 nt, Human
ugugcaugugugcgagugugug

SEQ ID NO: 2631113 - RNA, 19 nt, Human
ugugcauauuguacacuuu

SEQ ID NO: 2631114 - RNA, 17 nt, Human
ugugcauauuguacacu

SEQ ID NO: 2631115 - RNA, 15 nt, Human
ugugcauauuguaca

SEQ ID NO: 2631116 - RNA, 13 nt, Human
ugugcauauugua

SEQ ID NO: 2631117 - RNA, 15 nt, Human
ugugcaugggagcaa

SEQ ID NO: 2631118 - RNA, 13 nt, Human
ugugcauggguga

SEQ ID NO: 2631119 - RNA, 20 nt, Human
ugugcagugaagguugcuga

SEQ ID NO: 2631120 - RNA, 20 nt, Human
ugugcaguccugggaugugg

SEQ ID NO: 2631121 - RNA, 17 nt, Human
ugugcaguccugggaug

SEQ ID NO: 2631122 - RNA, 18 nt, Human
ugugcagucacuggaggu

SEQ ID NO: 2631123 - RNA, 13 nt, Human
ugugcaguucuag

SEQ ID NO: 2631124 - RNA, 14 nt, Human
ugugcaguguagcc

SEQ ID NO: 2631125 - RNA, 12 nt, Human
ugugcaguguug

SEQ ID NO: 2631126 - RNA, 19 nt, Human
ugugcaguucuaguuugca

SEQ ID NO: 2631127 - RNA, 22 nt, Human
ugugcaguucuaguuugcauuc

SEQ ID NO: 2631128 - RNA, 19 nt, Human
ugugcauagagccacguau

SEQ ID NO: 2631129 - RNA, 17 nt, Human
uguggaaaguguaaagc

SEQ ID NO: 2631130 - RNA, 16 nt, Human
uguggaaaguguaaag

SEQ ID NO: 2631131 - RNA, 15 nt, Human
uguggaaaguguaaa

SEQ ID NO: 2631132 - RNA, 14 nt, Human
uguggaaaguguaa

SEQ ID NO: 2631133 - RNA, 20 nt, Human
uguggaaaguguaaagcauu

SEQ ID NO: 2631134 - RNA, 19 nt, Human
uguggaaaguguaaagcau

SEQ ID NO: 2631135 - RNA, 21 nt, Human
uguggacuaaaagauauaagu

SEQ ID NO: 2631136 - RNA, 21 nt, Human
uguggaaaguguaaagcauuc

SEQ ID NO: 2631137 - RNA, 14 nt, Human
uguggacugugaug

SEQ ID NO: 2631138 - RNA, 15 nt, Human
uguggacugugaugc

SEQ ID NO: 2631139 - RNA, 16 nt, Human
uguggacacagcucuu

SEQ ID NO: 2631140 - RNA, 15 nt, Human
uguggacacagcucu

SEQ ID NO: 2631141 - RNA, 21 nt, Human
uguggcuccuggggguucuuu

SEQ ID NO: 2631142 - RNA, 19 nt, Human
uguggcuccuaucuguguu

SEQ ID NO: 2631143 - RNA, 18 nt, Human
uguggcuccuaucugugu

SEQ ID NO: 2631144 - RNA, 17 nt, Human
uguggcuccuaucugug

SEQ ID NO: 2631145 - RNA, 23 nt, Human
uguggcuccccucuauuuagcau

SEQ ID NO: 2631146 - RNA, 19 nt, Human
uguggagaagccacaggcc

SEQ ID NO: 2631147 - RNA, 15 nt, Human
uguggcuccccucua

SEQ ID NO: 2631148 - RNA, 19 nt, Human
uguggacuaaaagauauaa

SEQ ID NO: 2631149 - RNA, 14 nt, Human
uguggcuccccucu

SEQ ID NO: 2631150 - RNA, 23 nt, Human
uguggagaaauaaaaauaccucu

SEQ ID NO: 2631151 - RNA, 13 nt, Human
uguggagaaagga

SEQ ID NO: 2631152 - RNA, 16 nt, Human
uguggacuuuguucac

SEQ ID NO: 2631153 - RNA, 23 nt, Human
uguggagaaacuguagucucagg

SEQ ID NO: 2631154 - RNA, 12 nt, Human
uguggagaagcg

SEQ ID NO: 2631155 - RNA, 21 nt, Human
uguggagaagcggcuggcagc

SEQ ID NO: 2631156 - RNA, 13 nt, Human
uguggacacagcu

SEQ ID NO: 2631157 - RNA, 14 nt, Human
uguggacacagcuc

SEQ ID NO: 2631158 - RNA, 14 nt, Human
uguggaaagccucu

SEQ ID NO: 2631159 - RNA, 15 nt, Human
uguggaaagccucug

SEQ ID NO: 2631160 - RNA, 17 nt, Human
uguggaaagccucugcu

SEQ ID NO: 2631161 - RNA, 19 nt, Human
uguggaaagccucugcugc

SEQ ID NO: 2631162 - RNA, 20 nt, Human
uguggaaagccucugcugcc

SEQ ID NO: 2631163 - RNA, 21 nt, Human
uguggaaagucacaggucaca

SEQ ID NO: 2631164 - RNA, 16 nt, Human
uguggaaagugaauuu

SEQ ID NO: 2631165 - RNA, 19 nt, Human
uguggaaagugaauuugaa

SEQ ID NO: 2631166 - RNA, 22 nt, Human
uguggaaagugaauuugaauga

SEQ ID NO: 2631167 - RNA, 12 nt, Human
uguggaaagugu

SEQ ID NO: 2631168 - RNA, 23 nt, Human
uguggaaagugaauuugaaugaa

SEQ ID NO: 2631169 - RNA, 21 nt, Human
uguggaaaagccaagaggcug

SEQ ID NO: 2631170 - RNA, 23 nt, Human
uguggaaaagccaagaggcugca

SEQ ID NO: 2631171 - RNA, 17 nt, Human
uguggaaaaugaaaauu

SEQ ID NO: 2631172 - RNA, 12 nt, Human
uguggaaagccu

SEQ ID NO: 2631173 - RNA, 13 nt, Human
uguggaaaacaga

SEQ ID NO: 2631174 - RNA, 20 nt, Human
uguggaaaaaugagagaagg

SEQ ID NO: 2631175 - RNA, 19 nt, Human
uguggaaaaaugagagaag

SEQ ID NO: 2631176 - RNA, 16 nt, Human
uguggaaaaaugagag

SEQ ID NO: 2631177 - RNA, 14 nt, Human
uguggaaaaauauu

SEQ ID NO: 2631178 - RNA, 16 nt, Human
uguggaaaaauauuua

SEQ ID NO: 2631179 - RNA, 19 nt, Human
uguggaaaagccaagaggc

SEQ ID NO: 2631180 - RNA, 20 nt, Human
uguggaaaagaaacacgcac

SEQ ID NO: 2631181 - RNA, 15 nt, Human
uguggaaaagaaaca

SEQ ID NO: 2631182 - RNA, 19 nt, Human
uguguacauggcagaguuu

SEQ ID NO: 2631183 - RNA, 24 nt, Human
uguguacaucccauguaacagaaa

SEQ ID NO: 2631184 - RNA, 15 nt, Human
uguguacccaaacgu

SEQ ID NO: 2631185 - RNA, 15 nt, Human
uguguacguggagag

SEQ ID NO: 2631186 - RNA, 16 nt, Human
uguguacguggagagg

SEQ ID NO: 2631187 - RNA, 14 nt, Human
ugugggucugugug

SEQ ID NO: 2631188 - RNA, 16 nt, Human
ugugggucugugugug

SEQ ID NO: 2631189 - RNA, 20 nt, Human
ugugggucugugugugugua

SEQ ID NO: 2631190 - RNA, 23 nt, Human
uguguacaucccauguaacagaa

SEQ ID NO: 2631191 - RNA, 20 nt, Human
uguguacaucccauguaaca

SEQ ID NO: 2631192 - RNA, 15 nt, Human
uguggguaccuguau

SEQ ID NO: 2631193 - RNA, 23 nt, Human
ugugggggaagagcacagcccuc

SEQ ID NO: 2631194 - RNA, 20 nt, Human
uguggggcugguagcucagg

SEQ ID NO: 2631195 - RNA, 13 nt, Human
ugugggggcugca

SEQ ID NO: 2631196 - RNA, 12 nt, Human
uguggggccuug

SEQ ID NO: 2631197 - RNA, 15 nt, Human
uguggggccagguca

SEQ ID NO: 2631198 - RNA, 16 nt, Human
uguggggauuucuccc

SEQ ID NO: 2631199 - RNA, 16 nt, Human
ugugggggucugugug

SEQ ID NO: 2631200 - RNA, 15 nt, Human
uguggggugaaaagu

SEQ ID NO: 2631201 - RNA, 22 nt, Human
uguggggugugcacaucucugc

SEQ ID NO: 2631202 - RNA, 21 nt, Human
ugugggguuuuuggagaaggu

SEQ ID NO: 2631203 - RNA, 21 nt, Human
uguggguacagagaggucaag

SEQ ID NO: 2631204 - RNA, 15 nt, Human
ugugggucaaggaau

SEQ ID NO: 2631205 - RNA, 17 nt, Human
uguggcuuucagccucu

SEQ ID NO: 2631206 - RNA, 19 nt, Human
uguggcuuucagccucugg

SEQ ID NO: 2631207 - RNA, 17 nt, Human
uguggcuuucuuucuuu

SEQ ID NO: 2631208 - RNA, 22 nt, Human
uguggcuucuuaaucuuuucac

SEQ ID NO: 2631209 - RNA, 19 nt, Human
uguggcugucagcaggaag

SEQ ID NO: 2631210 - RNA, 21 nt, Human
uguggcugucagcaggaagca

SEQ ID NO: 2631211 - RNA, 21 nt, Human
uguggcugggggcaggagggc

SEQ ID NO: 2631212 - RNA, 16 nt, Human
uguggcugcagcagcg

SEQ ID NO: 2631213 - RNA, 15 nt, Human
uguggcugucagcag

SEQ ID NO: 2631214 - RNA, 21 nt, Human
uguggcugaggaggccuccau

SEQ ID NO: 2631215 - RNA, 16 nt, Human
uguggcugaggaggcc

SEQ ID NO: 2631216 - RNA, 13 nt, Human
uguggcugaggag

SEQ ID NO: 2631217 - RNA, 20 nt, Human
uguggcuccuaucuguguuu

SEQ ID NO: 2631218 - RNA, 15 nt, Human
uguggcuccuuccca

SEQ ID NO: 2631219 - RNA, 14 nt, Human
uguggcuccuuccc

SEQ ID NO: 2631220 - RNA, 14 nt, Human
uguggcugcagcag

SEQ ID NO: 2631221 - RNA, 22 nt, Human
uguggcugaggaggccuccauc

SEQ ID NO: 2631222 - RNA, 14 nt, Human
uguggcugcuagca

SEQ ID NO: 2631223 - RNA, 15 nt, Human
uguggcugggggcag

SEQ ID NO: 2631224 - RNA, 18 nt, Human
uguggcugggggcaggag

SEQ ID NO: 2631225 - RNA, 12 nt, Human
ugugggaagggg

SEQ ID NO: 2631226 - RNA, 23 nt, Human
ugugggaacgagaggggaagagu

SEQ ID NO: 2631227 - RNA, 12 nt, Human
ugugggaacaga

SEQ ID NO: 2631228 - RNA, 15 nt, Human
ugugggaaggccagc

SEQ ID NO: 2631229 - RNA, 15 nt, Human
ugugggaagggagag

SEQ ID NO: 2631230 - RNA, 18 nt, Human
ugugggaaugcggcaaga

SEQ ID NO: 2631231 - RNA, 19 nt, Human
ugugggaaugcggcaagaa

SEQ ID NO: 2631232 - RNA, 16 nt, Human
ugugggcugcacucug

SEQ ID NO: 2631233 - RNA, 14 nt, Human
ugugggcugcacuc

SEQ ID NO: 2631234 - RNA, 13 nt, Human
ugugggcugcacu

SEQ ID NO: 2631235 - RNA, 21 nt, Human
ugugggcugcacucugugccc

SEQ ID NO: 2631236 - RNA, 20 nt, Human
ugugggcugcacucugugcc

SEQ ID NO: 2631237 - RNA, 22 nt, Human
ugugggcugcacucugugccca

SEQ ID NO: 2631238 - RNA, 13 nt, Human
ugugggcugugag

SEQ ID NO: 2631239 - RNA, 14 nt, Human
ugugggcugugagu

SEQ ID NO: 2631240 - RNA, 20 nt, Human
uguggggaucucaggggcug

SEQ ID NO: 2631241 - RNA, 19 nt, Human
uuguagaugaaaaagcaug

SEQ ID NO: 2631242 - RNA, 12 nt, Human
uuguagaugaaa

SEQ ID NO: 2631243 - RNA, 21 nt, Human
uuguagaugaaaaagcaugua

SEQ ID NO: 2631244 - RNA, 15 nt, Human
uuguaucagaggccu

SEQ ID NO: 2631245 - RNA, 17 nt, Human
uuguaucguauagcugu

SEQ ID NO: 2631246 - RNA, 15 nt, Human
uuguaucguauagcu

SEQ ID NO: 2631247 - RNA, 21 nt, Human
uuguaucgauguuauguaaaa

SEQ ID NO: 2631248 - RNA, 18 nt, Human
uuguaucgauguuaugua

SEQ ID NO: 2631249 - RNA, 22 nt, Human
uuguaucagaggccuauaauga

SEQ ID NO: 2631250 - RNA, 19 nt, Human
uuguaucauuugaacaacu

SEQ ID NO: 2631251 - RNA, 14 nt, Human
uuguauuacaaauc

SEQ ID NO: 2631252 - RNA, 20 nt, Human
uuguaucguauagcuguauu

SEQ ID NO: 2631253 - RNA, 18 nt, Human
uuguaucguauagcugua

SEQ ID NO: 2631254 - RNA, 22 nt, Human
uuguaucguauagcuguauuga

SEQ ID NO: 2631255 - RNA, 13 nt, Human
uuguaucuagugc

SEQ ID NO: 2631256 - RNA, 17 nt, Human
uuguaucuagugcagcu

SEQ ID NO: 2631257 - RNA, 18 nt, Human
uuguaucuagugcagcug

SEQ ID NO: 2631258 - RNA, 20 nt, Human
uuguaucuagugcagcugau

SEQ ID NO: 2631259 - RNA, 21 nt, Human
uuguaucuagugcagcugauu

SEQ ID NO: 2631260 - RNA, 21 nt, Human
uuguauucucuccuguaccuc

SEQ ID NO: 2631261 - RNA, 14 nt, Human
uuguauucagaguu

SEQ ID NO: 2631262 - RNA, 17 nt, Human
uuguauuagauguucuc

SEQ ID NO: 2631263 - RNA, 16 nt, Human
uuguauuagauguucu

SEQ ID NO: 2631264 - RNA, 15 nt, Human
uuguauuagauguuc

SEQ ID NO: 2631265 - RNA, 13 nt, Human
uuguauuagaugu

SEQ ID NO: 2631266 - RNA, 21 nt, Human
uuguaucucugaagcauguuu

SEQ ID NO: 2631267 - RNA, 20 nt, Human
uuguaucucugaagcauguu

SEQ ID NO: 2631268 - RNA, 13 nt, Human
uuguaucucuuuu

SEQ ID NO: 2631269 - RNA, 14 nt, Human
uuguaucucuuuug

SEQ ID NO: 2631270 - RNA, 19 nt, Human
uuguaucacaaaucuuaac

SEQ ID NO: 2631271 - RNA, 22 nt, Human
uuguagaauguauuguaccuuu

SEQ ID NO: 2631272 - RNA, 20 nt, Human
uuguagaauguauuguaccu

SEQ ID NO: 2631273 - RNA, 15 nt, Human
uuguagagccagggu

SEQ ID NO: 2631274 - RNA, 14 nt, Human
uuguagagccaggg

SEQ ID NO: 2631275 - RNA, 20 nt, Human
uuguacaguuuguuuacaca

SEQ ID NO: 2631276 - RNA, 18 nt, Human
uuguacaguuuguuuaca

SEQ ID NO: 2631277 - RNA, 20 nt, Human
uuguacaguuugcuguacua

SEQ ID NO: 2631278 - RNA, 17 nt, Human
uuguacaguuugcugua

SEQ ID NO: 2631279 - RNA, 16 nt, Human
uuguacaguuugcugu

SEQ ID NO: 2631280 - RNA, 15 nt, Human
uuguacaguuugcug

SEQ ID NO: 2631281 - RNA, 11 nt, Human
uuguacaguuu

SEQ ID NO: 2631282 - RNA, 16 nt, Human
uuguacaguucaguuc

SEQ ID NO: 2631283 - RNA, 15 nt, Human
uuguacaguucaguu

SEQ ID NO: 2631284 - RNA, 11 nt, Human
uuguacaguuc

SEQ ID NO: 2631285 - RNA, 16 nt, Human
uuguacagcuguuuaa

SEQ ID NO: 2631286 - RNA, 21 nt, Human
uuguacagacguaugcuuauu

SEQ ID NO: 2631287 - RNA, 18 nt, Human
uuguacagacguaugcuu

SEQ ID NO: 2631288 - RNA, 19 nt, Human
uuguacagacguaugcuua

SEQ ID NO: 2631289 - RNA, 13 nt, Human
uuguacaguuuuu

SEQ ID NO: 2631290 - RNA, 12 nt, Human
uuguacaguuuu

SEQ ID NO: 2631291 - RNA, 19 nt, Human
uuguagaauguauuguacc

SEQ ID NO: 2631292 - RNA, 16 nt, Human
uuguacaguuuuuauu

SEQ ID NO: 2631293 - RNA, 14 nt, Human
uuguaaaugugcuu

SEQ ID NO: 2631294 - RNA, 18 nt, Human
uuguaaaugugcuuuuaa

SEQ ID NO: 2631295 - RNA, 11 nt, Human
uuguaaaugug

SEQ ID NO: 2631296 - RNA, 12 nt, Human
uuguaaauauuu

SEQ ID NO: 2631297 - RNA, 13 nt, Human
uuguaaauauuua

SEQ ID NO: 2631298 - RNA, 16 nt, Human
uuguaaauauuuaugu

SEQ ID NO: 2631299 - RNA, 13 nt, Human
uuguacagacaac

SEQ ID NO: 2631300 - RNA, 12 nt, Human
uuguacagacaa

SEQ ID NO: 2631301 - RNA, 11 nt, Human
uuguacacuuu

SEQ ID NO: 2631302 - RNA, 15 nt, Human
uuguacacuuuuuug

SEQ ID NO: 2631303 - RNA, 13 nt, Human
uuguacacuuuuu

SEQ ID NO: 2631304 - RNA, 19 nt, Human
uuguaaauauuuauguaaa

SEQ ID NO: 2631305 - RNA, 14 nt, Human
uuguacaaauaaag

SEQ ID NO: 2631306 - RNA, 23 nt, Human
uuguacaauugaacuuaaauaaa

SEQ ID NO: 2631307 - RNA, 19 nt, Human
uuguacacaccuuauauuu

SEQ ID NO: 2631308 - RNA, 16 nt, Human
uuggucccccuuccau

SEQ ID NO: 2631309 - RNA, 22 nt, Human
uuggucccccuuccauggacuu

SEQ ID NO: 2631310 - RNA, 12 nt, Human
uugguccugcug

SEQ ID NO: 2631311 - RNA, 13 nt, Human
uugguccugcugc

SEQ ID NO: 2631312 - RNA, 23 nt, Human
uuggucccgugcagcuucugucc

SEQ ID NO: 2631313 - RNA, 22 nt, Human
uugguaaauuuccccaacagug

SEQ ID NO: 2631314 - RNA, 15 nt, Human
uugguccucuugccu

SEQ ID NO: 2631315 - RNA, 16 nt, Human
uuguaaaggaauuuaa

SEQ ID NO: 2631316 - RNA, 13 nt, Human
uuggucccugggg

SEQ ID NO: 2631317 - RNA, 18 nt, Human
uuguaaauaaaggaacca

SEQ ID NO: 2631318 - RNA, 23 nt, Human
uuguaaaguguggucccaacagg

SEQ ID NO: 2631319 - RNA, 22 nt, Human
uuguaaaguguggucccaacag

SEQ ID NO: 2631320 - RNA, 22 nt, Human
uuggcugggggccucagugcca

SEQ ID NO: 2631321 - RNA, 21 nt, Human
uuggcugggggccucagugcc

SEQ ID NO: 2631322 - RNA, 21 nt, Human
uuggcugugucuaaacugcau

SEQ ID NO: 2631323 - RNA, 20 nt, Human
uuggcugugucuaaacugca

SEQ ID NO: 2631324 - RNA, 18 nt, Human
uuggcugugucuaaacug

SEQ ID NO: 2631325 - RNA, 17 nt, Human
uuggcugugucuaaacu

SEQ ID NO: 2631326 - RNA, 15 nt, Human
uuggcugugucuaaa

SEQ ID NO: 2631327 - RNA, 14 nt, Human
uuggcugugucuaa

SEQ ID NO: 2631328 - RNA, 17 nt, Human
uuggcugugaggccccu

SEQ ID NO: 2631329 - RNA, 21 nt, Human
uuggcuguagaaggagacaga

SEQ ID NO: 2631330 - RNA, 16 nt, Human
uuggcugggcccagaa

SEQ ID NO: 2631331 - RNA, 17 nt, Human
uuggcugggcccagaag

SEQ ID NO: 2631332 - RNA, 18 nt, Human
uuggcugggcccagaagg

SEQ ID NO: 2631333 - RNA, 16 nt, Human
uuggcugcugaaggcu

SEQ ID NO: 2631334 - RNA, 15 nt, Human
uuggcugcuuggccu

SEQ ID NO: 2631335 - RNA, 18 nt, Human
uuggcugggggccucagu

SEQ ID NO: 2631336 - RNA, 20 nt, Human
uuggcuggaugaaauuuucu

SEQ ID NO: 2631337 - RNA, 16 nt, Human
uuggcugcuuggccuu

SEQ ID NO: 2631338 - RNA, 21 nt, Human
uuggcuggaugaaauuuucua

SEQ ID NO: 2631339 - RNA, 23 nt, Human
uuggcuggaugaaauuuucuaga

SEQ ID NO: 2631340 - RNA, 13 nt, Human
uuggcugggccca

SEQ ID NO: 2631341 - RNA, 16 nt, Human
uuggcauguguauguu

SEQ ID NO: 2631342 - RNA, 13 nt, Human
uuggcauucccca

SEQ ID NO: 2631343 - RNA, 14 nt, Human
uuggcaacagaagc

SEQ ID NO: 2631344 - RNA, 16 nt, Human
uuggcaaauuccuagu

SEQ ID NO: 2631345 - RNA, 16 nt, Human
uuggauuuuugacucu

SEQ ID NO: 2631346 - RNA, 23 nt, Human
uuggcaaacucuccaccacacgu

SEQ ID NO: 2631347 - RNA, 15 nt, Human
uuggcaucagcuggc

SEQ ID NO: 2631348 - RNA, 15 nt, Human
uuggcaacagaagca

SEQ ID NO: 2631349 - RNA, 21 nt, Human
uuggcaucacagggcagagcc

SEQ ID NO: 2631350 - RNA, 22 nt, Human
uuggccacuccgagaggugggc

SEQ ID NO: 2631351 - RNA, 21 nt, Human
uuggccacuccgagagguggg

SEQ ID NO: 2631352 - RNA, 14 nt, Human
uuggccacuccgag

SEQ ID NO: 2631353 - RNA, 14 nt, Human
uuggccaggcuggu

SEQ ID NO: 2631354 - RNA, 24 nt, Human
uuggccaaagccaaagcuaggccu

SEQ ID NO: 2631355 - RNA, 16 nt, Human
uuggccaagcagggag

SEQ ID NO: 2631356 - RNA, 15 nt, Human
uuggccaagcaggga

SEQ ID NO: 2631357 - RNA, 15 nt, Human
uuggccaaaguguua

SEQ ID NO: 2631358 - RNA, 18 nt, Human
uugggaggaagcagaaua

SEQ ID NO: 2631359 - RNA, 17 nt, Human
uugggaggaagcagaau

SEQ ID NO: 2631360 - RNA, 15 nt, Human
uugggaggaagcaga

SEQ ID NO: 2631361 - RNA, 14 nt, Human
uugggaggaagcag

SEQ ID NO: 2631362 - RNA, 13 nt, Human
uugggaggaagca

SEQ ID NO: 2631363 - RNA, 19 nt, Human
uugggagcuugggaaugga

SEQ ID NO: 2631364 - RNA, 18 nt, Human
uugggaacugaacucacu

SEQ ID NO: 2631365 - RNA, 16 nt, Human
uugggaggccauuugu

SEQ ID NO: 2631366 - RNA, 12 nt, Human
uugggaggcuga

SEQ ID NO: 2631367 - RNA, 22 nt, Human
uugggaggaagcagaauaaagc

SEQ ID NO: 2631368 - RNA, 21 nt, Human
uugggaggaagcagaauaaag

SEQ ID NO: 2631369 - RNA, 20 nt, Human
uugggaggaagcagaauaaa

SEQ ID NO: 2631370 - RNA, 19 nt, Human
uugggaggaagcagaauaa

SEQ ID NO: 2631371 - RNA, 23 nt, Human
uugggaggaagcagaauaaagca

SEQ ID NO: 2631372 - RNA, 17 nt, Human
uugggaggccccacugg

SEQ ID NO: 2631373 - RNA, 22 nt, Human
uuggcuuuggguugcaggaccu

SEQ ID NO: 2631374 - RNA, 23 nt, Human
uuggcugugucuaaacugcauua

SEQ ID NO: 2631375 - RNA, 16 nt, Human
uugggaaacuuggcuc

SEQ ID NO: 2631376 - RNA, 17 nt, Human
uuggguggggggcuuca

SEQ ID NO: 2631377 - RNA, 19 nt, Human
uuggguggggggcuucaua

SEQ ID NO: 2631378 - RNA, 16 nt, Human
uuggguggaugccugg

SEQ ID NO: 2631379 - RNA, 20 nt, Human
uuggguggggggcuucauac

SEQ ID NO: 2631380 - RNA, 21 nt, Human
uuggguggggggcuucauaca

SEQ ID NO: 2631381 - RNA, 22 nt, Human
uuggguggggggcuucauacac

SEQ ID NO: 2631382 - RNA, 17 nt, Human
uugggugggcaggaaaa

SEQ ID NO: 2631383 - RNA, 19 nt, Human
uuggguguaacaggucucc

SEQ ID NO: 2631384 - RNA, 20 nt, Human
uuggguguaacaggucuccu

SEQ ID NO: 2631385 - RNA, 14 nt, Human
uugguaaaccuuuu

SEQ ID NO: 2631386 - RNA, 19 nt, Human
uugguaaagacuggcuuuu

SEQ ID NO: 2631387 - RNA, 16 nt, Human
uugguaaagacuggcu

SEQ ID NO: 2631388 - RNA, 21 nt, Human
uugguaaauuuccccaacagu

SEQ ID NO: 2631389 - RNA, 16 nt, Human
uugguaaauuucccca

SEQ ID NO: 2631390 - RNA, 17 nt, Human
uuggguucauuauugga

SEQ ID NO: 2631391 - RNA, 12 nt, Human
uugguaaaccuu

SEQ ID NO: 2631392 - RNA, 13 nt, Human
uuggaaauauuca

SEQ ID NO: 2631393 - RNA, 14 nt, Human
uuggaacagaaugu

SEQ ID NO: 2631394 - RNA, 13 nt, Human
uuggaacagaaug

SEQ ID NO: 2631395 - RNA, 23 nt, Human
uuggaaagaguaggaagacuuug

SEQ ID NO: 2631396 - RNA, 20 nt, Human
uugcuuaggaugugugcaug

SEQ ID NO: 2631397 - RNA, 23 nt, Human
uugcuuacuuuggaauacauuuc

SEQ ID NO: 2631398 - RNA, 12 nt, Human
uugcuuacuaag

SEQ ID NO: 2631399 - RNA, 22 nt, Human
uuggaaagcuccuagcagagag

SEQ ID NO: 2631400 - RNA, 21 nt, Human
uuggaaagcagguggcaucuc

SEQ ID NO: 2631401 - RNA, 20 nt, Human
uuggaaagcaucaccucagg

SEQ ID NO: 2631402 - RNA, 23 nt, Human
uuggaaauagaaauuuccagaga

SEQ ID NO: 2631403 - RNA, 22 nt, Human
uuggaaauagaaauuuccagag

SEQ ID NO: 2631404 - RNA, 24 nt, Human
uugcuuaggauguuuuucaugaaa

SEQ ID NO: 2631405 - RNA, 14 nt, Human
uuggaaaggaccag

SEQ ID NO: 2631406 - RNA, 22 nt, Human
uuggaaagcaucaccucaggcc

SEQ ID NO: 2631407 - RNA, 14 nt, Human
uugcuguacuagag

SEQ ID NO: 2631408 - RNA, 23 nt, Human
uugcuguaccagcccagauguuu

SEQ ID NO: 2631409 - RNA, 11 nt, Human
uugcuguauau

SEQ ID NO: 2631410 - RNA, 14 nt, Human
uugcuguuuuccuc

SEQ ID NO: 2631411 - RNA, 16 nt, Human
uugcuguuuuccuccc

SEQ ID NO: 2631412 - RNA, 18 nt, Human
uugcuguuuuccucccuu

SEQ ID NO: 2631413 - RNA, 13 nt, Human
uugcuguuuugau

SEQ ID NO: 2631414 - RNA, 19 nt, Human
uugcuguuuuccucccuuc

SEQ ID NO: 2631415 - RNA, 20 nt, Human
uugcuguuuuccucccuucu

SEQ ID NO: 2631416 - RNA, 16 nt, Human
uugcuguuuuguucug

SEQ ID NO: 2631417 - RNA, 22 nt, Human
uugcuguuuuccucccuucugc

SEQ ID NO: 2631418 - RNA, 21 nt, Human
uugcuguuuuguucugugguu

SEQ ID NO: 2631419 - RNA, 18 nt, Human
uugcuuacauuuuuacaa

SEQ ID NO: 2631420 - RNA, 13 nt, Human
uugcuuacauuuu

SEQ ID NO: 2631421 - RNA, 23 nt, Human
uugcuuacaauuuuuuuaauuuu

SEQ ID NO: 2631422 - RNA, 22 nt, Human
uugcuuacaauuuuuuuaauuu

SEQ ID NO: 2631423 - RNA, 15 nt, Human
uugcuuacaauuuuu

SEQ ID NO: 2631424 - RNA, 14 nt, Human
uugcuuacaauuuu

SEQ ID NO: 2631425 - RNA, 13 nt, Human
uugcuuacaauuu

SEQ ID NO: 2631426 - RNA, 20 nt, Human
uugcuggggccgaaagaaca

SEQ ID NO: 2631427 - RNA, 20 nt, Human
uugcugccacuuuuuaacua

SEQ ID NO: 2631428 - RNA, 21 nt, Human
uugcugccugaagaacaguaa

SEQ ID NO: 2631429 - RNA, 22 nt, Human
uugcugguugcugugugguuug

SEQ ID NO: 2631430 - RNA, 15 nt, Human
uugcugguugcugug

SEQ ID NO: 2631431 - RNA, 14 nt, Human
uugcugguugcugu

SEQ ID NO: 2631432 - RNA, 15 nt, Human
uugcuggucacugcc

SEQ ID NO: 2631433 - RNA, 21 nt, Human
uugcuguaccagcccagaugu

SEQ ID NO: 2631434 - RNA, 16 nt, Human
uugcugguugcugugu

SEQ ID NO: 2631435 - RNA, 20 nt, Human
uugcuguagaagauggcacu

SEQ ID NO: 2631436 - RNA, 22 nt, Human
uuggaccccagcugggaggcaa

SEQ ID NO: 2631437 - RNA, 20 nt, Human
uuggaccccagcugggaggc

SEQ ID NO: 2631438 - RNA, 19 nt, Human
uuggaccccagcugggagg

SEQ ID NO: 2631439 - RNA, 17 nt, Human
uuggaccccagcuggga

SEQ ID NO: 2631440 - RNA, 16 nt, Human
uuggaccccagcuggg

SEQ ID NO: 2631441 - RNA, 15 nt, Human
uuggaccccagcugg

SEQ ID NO: 2631442 - RNA, 14 nt, Human
uuggaccccagcug

SEQ ID NO: 2631443 - RNA, 13 nt, Human
uuggaccccagcu

SEQ ID NO: 2631444 - RNA, 21 nt, Human
uuggauuauuuaauaacauua

SEQ ID NO: 2631445 - RNA, 19 nt, Human
uuggauuauuuaauaacau

SEQ ID NO: 2631446 - RNA, 17 nt, Human
uuggacccgcucuggac

SEQ ID NO: 2631447 - RNA, 16 nt, Human
uuggacccgcucugga

SEQ ID NO: 2631448 - RNA, 15 nt, Human
uuggacccgcucugg

SEQ ID NO: 2631449 - RNA, 18 nt, Human
uuggauuauuuaauaaca

SEQ ID NO: 2631450 - RNA, 15 nt, Human
uuggauucugagagc

SEQ ID NO: 2631451 - RNA, 17 nt, Human
uuggauucugagagcug

SEQ ID NO: 2631452 - RNA, 15 nt, Human
uuggauucuuaugua

SEQ ID NO: 2631453 - RNA, 14 nt, Human
uuggauuggggucc

SEQ ID NO: 2631454 - RNA, 20 nt, Human
uuggauuauuuaauaacauu

SEQ ID NO: 2631455 - RNA, 16 nt, Human
uuggcaaacucuccac

SEQ ID NO: 2631456 - RNA, 20 nt, Human
uuggcaaacucuccaccaca

SEQ ID NO: 2631457 - RNA, 17 nt, Human
uuggcaaaaaggcagga

SEQ ID NO: 2631458 - RNA, 14 nt, Human
uuggauuguccccg

SEQ ID NO: 2631459 - RNA, 14 nt, Human
uuggauuguauauu

SEQ ID NO: 2631460 - RNA, 18 nt, Human
uuggauuguauauugugu

SEQ ID NO: 2631461 - RNA, 18 nt, Human
uuggauuuuugucuugug

SEQ ID NO: 2631462 - RNA, 18 nt, Human
uuggacauuuucuucaga

SEQ ID NO: 2631463 - RNA, 16 nt, Human
uuggaaguugcauggc

SEQ ID NO: 2631464 - RNA, 13 nt, Human
uuggaaguuucau

SEQ ID NO: 2631465 - RNA, 16 nt, Human
uuggaaguuuucagga

SEQ ID NO: 2631466 - RNA, 16 nt, Human
uuggaacucugcuuga

SEQ ID NO: 2631467 - RNA, 11 nt, Human
uuggaaggaac

SEQ ID NO: 2631468 - RNA, 19 nt, Human
uuggaaggaacguccccug

SEQ ID NO: 2631469 - RNA, 15 nt, Human
uuggaagaccccacc

SEQ ID NO: 2631470 - RNA, 12 nt, Human
uugcccagagau

SEQ ID NO: 2631471 - RNA, 16 nt, Human
uugcccagagaugccu

SEQ ID NO: 2631472 - RNA, 17 nt, Human
uugcccagagaugccuc

SEQ ID NO: 2631473 - RNA, 18 nt, Human
uugcccagagaugccucc

SEQ ID NO: 2631474 - RNA, 19 nt, Human
uugcccagagaugccucca

SEQ ID NO: 2631475 - RNA, 22 nt, Human
uugcccagcauuuuacugauuc

SEQ ID NO: 2631476 - RNA, 22 nt, Human
uugcccagagaugccuccaccg

SEQ ID NO: 2631477 - RNA, 11 nt, Human
uugcccaggca

SEQ ID NO: 2631478 - RNA, 22 nt, Human
uugccauauugcacaugucuua

SEQ ID NO: 2631479 - RNA, 23 nt, Human
uugcccacgcuggagugcaguga

SEQ ID NO: 2631480 - RNA, 17 nt, Human
uugccauauugcacaug

SEQ ID NO: 2631481 - RNA, 15 nt, Human
uugccauauugcaca

SEQ ID NO: 2631482 - RNA, 13 nt, Human
uugccauauugca

SEQ ID NO: 2631483 - RNA, 22 nt, Human
uugccauacuuugucugaaaaa

SEQ ID NO: 2631484 - RNA, 18 nt, Human
uugccauacuuugucuga

SEQ ID NO: 2631485 - RNA, 18 nt, Human
uugccagucaccccggcc

SEQ ID NO: 2631486 - RNA, 13 nt, Human
uugccagucaccc

SEQ ID NO: 2631487 - RNA, 18 nt, Human
uugccacugccucuuccu

SEQ ID NO: 2631488 - RNA, 20 nt, Human
uugccucggcuccugcugca

SEQ ID NO: 2631489 - RNA, 19 nt, Human
uugccucggcuccugcugc

SEQ ID NO: 2631490 - RNA, 18 nt, Human
uugccucggcuccugcug

SEQ ID NO: 2631491 - RNA, 17 nt, Human
uugccucggcuccugcu

SEQ ID NO: 2631492 - RNA, 16 nt, Human
uugccucggcuccugc

SEQ ID NO: 2631493 - RNA, 15 nt, Human
uugccucggcuccug

SEQ ID NO: 2631494 - RNA, 14 nt, Human
uugccucggcuccu

SEQ ID NO: 2631495 - RNA, 22 nt, Human
uugccuccccauuucccaucug

SEQ ID NO: 2631496 - RNA, 15 nt, Human
uugccuccuguguaa

SEQ ID NO: 2631497 - RNA, 14 nt, Human
uugccucugccucu

SEQ ID NO: 2631498 - RNA, 11 nt, Human
uugccucugcc

SEQ ID NO: 2631499 - RNA, 13 nt, Human
uugccucugugcu

SEQ ID NO: 2631500 - RNA, 12 nt, Human
uugccucugugc

SEQ ID NO: 2631501 - RNA, 20 nt, Human
uugccucuguccccuucucu

SEQ ID NO: 2631502 - RNA, 19 nt, Human
uugccucuguccccuucuc

SEQ ID NO: 2631503 - RNA, 22 nt, Human
uugccucggcuccugcugcacc

SEQ ID NO: 2631504 - RNA, 15 nt, Human
uugccucucuguuug

SEQ ID NO: 2631505 - RNA, 18 nt, Human
uugccucuguccccuucu

SEQ ID NO: 2631506 - RNA, 17 nt, Human
uugccucuguccccuuc

SEQ ID NO: 2631507 - RNA, 18 nt, Human
uugccucugccucugaca

SEQ ID NO: 2631508 - RNA, 16 nt, Human
uugccucugccucuga

SEQ ID NO: 2631509 - RNA, 19 nt, Human
uugcugccccaucagugcu

SEQ ID NO: 2631510 - RNA, 20 nt, Human
uugcugccccaucagugcuc

SEQ ID NO: 2631511 - RNA, 11 nt, Human
uugcugccuca

SEQ ID NO: 2631512 - RNA, 12 nt, Human
uugcugccucau

SEQ ID NO: 2631513 - RNA, 15 nt, Human
uugcugccucaugcu

SEQ ID NO: 2631514 - RNA, 21 nt, Human
uugcugccaaccauaccuucc

SEQ ID NO: 2631515 - RNA, 18 nt, Human
uugcugccaaccauaccu

SEQ ID NO: 2631516 - RNA, 18 nt, Human
uugcugcaguaugaaaau

SEQ ID NO: 2631517 - RNA, 13 nt, Human
uugcugcaaaccu

SEQ ID NO: 2631518 - RNA, 15 nt, Human
uugcugcaaaccuga

SEQ ID NO: 2631519 - RNA, 20 nt, Human
uugcugauggugcaaugacc

SEQ ID NO: 2631520 - RNA, 12 nt, Human
uugcuaaaugua

SEQ ID NO: 2631521 - RNA, 19 nt, Human
uugcugauggugcaaugac

SEQ ID NO: 2631522 - RNA, 22 nt, Human
uugcugauggugcaaugaccuu

SEQ ID NO: 2631523 - RNA, 19 nt, Human
uugcguuagaaugaggagg

SEQ ID NO: 2631524 - RNA, 15 nt, Human
uugcugauucuugag

SEQ ID NO: 2631525 - RNA, 18 nt, Human
uugcguaugucuguuacc

SEQ ID NO: 2631526 - RNA, 16 nt, Human
uugcguaugucuguua

SEQ ID NO: 2631527 - RNA, 14 nt, Human
uugcguaugucugu

SEQ ID NO: 2631528 - RNA, 18 nt, Human
uugcguaacuggcugugu

SEQ ID NO: 2631529 - RNA, 15 nt, Human
uugcggggggaggga

SEQ ID NO: 2631530 - RNA, 14 nt, Human
uugcggggggaggg

SEQ ID NO: 2631531 - RNA, 17 nt, Human
uugcguaacuggcugug

SEQ ID NO: 2631532 - RNA, 15 nt, Human
uugcuaaauguaaca

SEQ ID NO: 2631533 - RNA, 22 nt, Human
uugcguuccaugaugcugggau

SEQ ID NO: 2631534 - RNA, 18 nt, Human
uugcguggacucugcaca

SEQ ID NO: 2631535 - RNA, 15 nt, Human
uugcguggacucugc

SEQ ID NO: 2631536 - RNA, 20 nt, Human
uugcguaugucuguuaccau

SEQ ID NO: 2631537 - RNA, 21 nt, Human
uugcguggaauugugcugagu

SEQ ID NO: 2631538 - RNA, 19 nt, Human
uugccucugugcugugugu

SEQ ID NO: 2631539 - RNA, 14 nt, Human
uugccucugugcug

SEQ ID NO: 2631540 - RNA, 17 nt, Human
uugccucuuccagucuu

SEQ ID NO: 2631541 - RNA, 19 nt, Human
uugccucuuccagucuucc

SEQ ID NO: 2631542 - RNA, 22 nt, Human
uugccugaacauccuuccuucc

SEQ ID NO: 2631543 - RNA, 19 nt, Human
uugccugaacauccuuccu

SEQ ID NO: 2631544 - RNA, 16 nt, Human
uugccugauauaaaug

SEQ ID NO: 2631545 - RNA, 23 nt, Human
uugccugaacauccuuccuuccc

SEQ ID NO: 2631546 - RNA, 20 nt, Human
uugccugaaguuggagugag

SEQ ID NO: 2631547 - RNA, 22 nt, Human
uugccugcguuuuggaagcucu

SEQ ID NO: 2631548 - RNA, 20 nt, Human
uugccugcagagagaagccu

SEQ ID NO: 2631549 - RNA, 19 nt, Human
uugccugcagagagaagcc

SEQ ID NO: 2631550 - RNA, 15 nt, Human
uugccugcagagaga

SEQ ID NO: 2631551 - RNA, 13 nt, Human
uugccugcagaga

SEQ ID NO: 2631552 - RNA, 12 nt, Human
uugccugcaggc

SEQ ID NO: 2631553 - RNA, 23 nt, Human
uugaccugccucccuucaugcau

SEQ ID NO: 2631554 - RNA, 22 nt, Human
uugaccugccucccuucaugca

SEQ ID NO: 2631555 - RNA, 14 nt, Human
uugacgccauccca

SEQ ID NO: 2631556 - RNA, 22 nt, Human
uugacgccaucccagccccaau

SEQ ID NO: 2631557 - RNA, 16 nt, Human
uugacgaagucucuuu

SEQ ID NO: 2631558 - RNA, 21 nt, Human
uugaccuuuuauguaguaauu

SEQ ID NO: 2631559 - RNA, 15 nt, Human
uugacgccaucccag

SEQ ID NO: 2631560 - RNA, 19 nt, Human
uugaccugaggcccuucuc

SEQ ID NO: 2631561 - RNA, 12 nt, Human
uugaccugaggc

SEQ ID NO: 2631562 - RNA, 22 nt, Human
uugaccugaggcccuucucucc

SEQ ID NO: 2631563 - RNA, 19 nt, Human
uugaccugaggcugugguc

SEQ ID NO: 2631564 - RNA, 21 nt, Human
uugaccugccucccuucaugc

SEQ ID NO: 2631565 - RNA, 13 nt, Human
uugaccugaggcu

SEQ ID NO: 2631566 - RNA, 21 nt, Human
uugaccgugaggccagagaca

SEQ ID NO: 2631567 - RNA, 20 nt, Human
uugaccgugaggccagagac

SEQ ID NO: 2631568 - RNA, 16 nt, Human
uugaaugucuuuugaa

SEQ ID NO: 2631569 - RNA, 12 nt, Human
uugaaugucuuu

SEQ ID NO: 2631570 - RNA, 20 nt, Human
uugaaugguguuguaugccu

SEQ ID NO: 2631571 - RNA, 15 nt, Human
uugaccucaggugau

SEQ ID NO: 2631572 - RNA, 23 nt, Human
uugaaugcuuuuugaauguuauu

SEQ ID NO: 2631573 - RNA, 20 nt, Human
uugaaugcuuuuugaauguu

SEQ ID NO: 2631574 - RNA, 17 nt, Human
uugaaugcuuuuugaau

SEQ ID NO: 2631575 - RNA, 15 nt, Human
uugaaugcuuuuuga

SEQ ID NO: 2631576 - RNA, 18 nt, Human
uugaauggccugccuuga

SEQ ID NO: 2631577 - RNA, 18 nt, Human
uugaauguaugcuucaua

SEQ ID NO: 2631578 - RNA, 16 nt, Human
uugaaugguguuguau

SEQ ID NO: 2631579 - RNA, 23 nt, Human
uugaauggucagcguugcauguc

SEQ ID NO: 2631580 - RNA, 15 nt, Human
uugaauggguccauu

SEQ ID NO: 2631581 - RNA, 13 nt, Human
uugaaugcauuuu

SEQ ID NO: 2631582 - RNA, 12 nt, Human
uugaaugcauuu

SEQ ID NO: 2631583 - RNA, 18 nt, Human
uugaaugaaaaauuuaag

SEQ ID NO: 2631584 - RNA, 12 nt, Human
uugaaugaaaaa

SEQ ID NO: 2631585 - RNA, 15 nt, Human
uugaaugaaaaauuu

SEQ ID NO: 2631586 - RNA, 23 nt, Human
uugaaugcauuuuguuugguauu

SEQ ID NO: 2631587 - RNA, 16 nt, Human
uugaaugcauuuuguu

SEQ ID NO: 2631588 - RNA, 16 nt, Human
uugaaugcuuccugac

SEQ ID NO: 2631589 - RNA, 19 nt, Human
uugagcugccuucccuagc

SEQ ID NO: 2631590 - RNA, 16 nt, Human
uugagcugccuucccu

SEQ ID NO: 2631591 - RNA, 15 nt, Human
uugagcugccuuccc

SEQ ID NO: 2631592 - RNA, 14 nt, Human
uugagcugccuucc

SEQ ID NO: 2631593 - RNA, 13 nt, Human
uugagcugccuuc

SEQ ID NO: 2631594 - RNA, 12 nt, Human
uugagcugccuu

SEQ ID NO: 2631595 - RNA, 11 nt, Human
uugagcugccu

SEQ ID NO: 2631596 - RNA, 19 nt, Human
uugacuagggauucaggcu

SEQ ID NO: 2631597 - RNA, 21 nt, Human
uugacuagggauucaggcugc

SEQ ID NO: 2631598 - RNA, 17 nt, Human
uugacuaucaaacugaa

SEQ ID NO: 2631599 - RNA, 20 nt, Human
uugacggaugauuggauuau

SEQ ID NO: 2631600 - RNA, 23 nt, Human
uugacuagaugauggaugccaau

SEQ ID NO: 2631601 - RNA, 20 nt, Human
uugacgccaucccagcccca

SEQ ID NO: 2631602 - RNA, 15 nt, Human
uugacggaugauugg

SEQ ID NO: 2631603 - RNA, 23 nt, Human
uugacgaagucucuuuucuuuag

SEQ ID NO: 2631604 - RNA, 23 nt, Human
uugacgagugugaagcuuccuug

SEQ ID NO: 2631605 - RNA, 12 nt, Human
uugagcuguuuu

SEQ ID NO: 2631606 - RNA, 21 nt, Human
uugagcuguugccucaguccc

SEQ ID NO: 2631607 - RNA, 18 nt, Human
uugagcuguuuucccuga

SEQ ID NO: 2631608 - RNA, 21 nt, Human
uugagcuuuccauguugcugc

SEQ ID NO: 2631609 - RNA, 14 nt, Human
uugagcuuuccaug

SEQ ID NO: 2631610 - RNA, 18 nt, Human
uugagcuuagugaaauua

SEQ ID NO: 2631611 - RNA, 13 nt, Human
uugaggaaaacaa

SEQ ID NO: 2631612 - RNA, 23 nt, Human
uugaggaaaacaagcauucacaa

SEQ ID NO: 2631613 - RNA, 18 nt, Human
uugaggaaacaacagcuu

SEQ ID NO: 2631614 - RNA, 14 nt, Human
uugaggacacugau

SEQ ID NO: 2631615 - RNA, 15 nt, Human
uugaggacacugaua

SEQ ID NO: 2631616 - RNA, 19 nt, Human
uugagggcccagagcagga

SEQ ID NO: 2631617 - RNA, 16 nt, Human
uugagggcccagagca

SEQ ID NO: 2631618 - RNA, 15 nt, Human
uugagggcccagagc

SEQ ID NO: 2631619 - RNA, 14 nt, Human
uugagggcccagag

SEQ ID NO: 2631620 - RNA, 15 nt, Human
uugaggcuuucaggu

SEQ ID NO: 2631621 - RNA, 20 nt, Human
uugauagcacagacccugcc

SEQ ID NO: 2631622 - RNA, 19 nt, Human
uugauagcacagacccugc

SEQ ID NO: 2631623 - RNA, 22 nt, Human
uugaggggcuggccuuccugcc

SEQ ID NO: 2631624 - RNA, 22 nt, Human
uugaggggauuaauaugaaaac

SEQ ID NO: 2631625 - RNA, 16 nt, Human
uugaggggcuccugga

SEQ ID NO: 2631626 - RNA, 16 nt, Human
uugaggggauuaauau

SEQ ID NO: 2631627 - RNA, 20 nt, Human
uugaggggauuaauaugaaa

SEQ ID NO: 2631628 - RNA, 15 nt, Human
uugaggggcuccugg

SEQ ID NO: 2631629 - RNA, 23 nt, Human
uugagggcccagagcaggaagca

SEQ ID NO: 2631630 - RNA, 21 nt, Human
uugagggcccagagcaggaag

SEQ ID NO: 2631631 - RNA, 15 nt, Human
uugaggggauuaaua

SEQ ID NO: 2631632 - RNA, 18 nt, Human
uugcauagauucccugag

SEQ ID NO: 2631633 - RNA, 22 nt, Human
uugccaccccacccucccugga

SEQ ID NO: 2631634 - RNA, 21 nt, Human
uugccaccccacccucccugg

SEQ ID NO: 2631635 - RNA, 13 nt, Human
uugccacccucau

SEQ ID NO: 2631636 - RNA, 22 nt, Human
uugcauaguaccaaucauuuua

SEQ ID NO: 2631637 - RNA, 19 nt, Human
uugccaccccacccucccu

SEQ ID NO: 2631638 - RNA, 15 nt, Human
uugccacugccucuu

SEQ ID NO: 2631639 - RNA, 14 nt, Human
uugccacugccucu

SEQ ID NO: 2631640 - RNA, 23 nt, Human
uugccaccccacccucccuggag

SEQ ID NO: 2631641 - RNA, 16 nt, Human
uugccacccucaugcu

SEQ ID NO: 2631642 - RNA, 14 nt, Human
uugcauagaauaaa

SEQ ID NO: 2631643 - RNA, 21 nt, Human
uugcauaauaagcuaaagagg

SEQ ID NO: 2631644 - RNA, 13 nt, Human
uugcagugagcca

SEQ ID NO: 2631645 - RNA, 21 nt, Human
uugcaggcaugcaugugcuug

SEQ ID NO: 2631646 - RNA, 23 nt, Human
uugcaggagcaguaucaugaagc

SEQ ID NO: 2631647 - RNA, 22 nt, Human
uugcagacaggcaagcaccucc

SEQ ID NO: 2631648 - RNA, 20 nt, Human
uugcagguggaacucaguca

SEQ ID NO: 2631649 - RNA, 19 nt, Human
uugcagguggaacucaguc

SEQ ID NO: 2631650 - RNA, 18 nt, Human
uugcagggagcauggcug

SEQ ID NO: 2631651 - RNA, 18 nt, Human
uugcagguggaacucagu

SEQ ID NO: 2631652 - RNA, 22 nt, Human
uugcaguaaacuuuuaauuaaa

SEQ ID NO: 2631653 - RNA, 15 nt, Human
uugcagguugcuuug

SEQ ID NO: 2631654 - RNA, 17 nt, Human
uugcaguagauuuucuu

SEQ ID NO: 2631655 - RNA, 20 nt, Human
uugcaguagagucaucucca

SEQ ID NO: 2631656 - RNA, 16 nt, Human
uugcagacaggcaagc

SEQ ID NO: 2631657 - RNA, 14 nt, Human
uugcaaccgucugu

SEQ ID NO: 2631658 - RNA, 13 nt, Human
uugcaacacacag

SEQ ID NO: 2631659 - RNA, 12 nt, Human
uugcaaccacug

SEQ ID NO: 2631660 - RNA, 15 nt, Human
uugcaacacacagac

SEQ ID NO: 2631661 - RNA, 21 nt, Human
uugcagaacuaaacucauuua

SEQ ID NO: 2631662 - RNA, 14 nt, Human
uugcaaccucgcug

SEQ ID NO: 2631663 - RNA, 19 nt, Human
uugcagaacuaaacucauu

SEQ ID NO: 2631664 - RNA, 22 nt, Human
uugcagaaacauuuugugguca

SEQ ID NO: 2631665 - RNA, 12 nt, Human
uugaugaagaag

SEQ ID NO: 2631666 - RNA, 19 nt, Human
uugauuuaugcauggaaac

SEQ ID NO: 2631667 - RNA, 12 nt, Human
uugauuuaugca

SEQ ID NO: 2631668 - RNA, 20 nt, Human
uugauuguucgggugugcaa

SEQ ID NO: 2631669 - RNA, 17 nt, Human
uugauugucagcuacua

SEQ ID NO: 2631670 - RNA, 21 nt, Human
uugauugucagcuacuaauga

SEQ ID NO: 2631671 - RNA, 15 nt, Human
uugauugucagcuac

SEQ ID NO: 2631672 - RNA, 13 nt, Human
uugaggguaggag

SEQ ID NO: 2631673 - RNA, 14 nt, Human
uugaucuggaaccc

SEQ ID NO: 2631674 - RNA, 21 nt, Human
uugauagcacagacccugccc

SEQ ID NO: 2631675 - RNA, 15 nt, Human
uugaucuggaaccca

SEQ ID NO: 2631676 - RNA, 16 nt, Human
uugaucuggaacccag

SEQ ID NO: 2631677 - RNA, 17 nt, Human
uugaucuggaacccaga

SEQ ID NO: 2631678 - RNA, 19 nt, Human
uugaucuggaacccagacu

SEQ ID NO: 2631679 - RNA, 18 nt, Human
uugaggguaauaaacuua

SEQ ID NO: 2631680 - RNA, 12 nt, Human
uugcaaacuuua

SEQ ID NO: 2631681 - RNA, 16 nt, Human
uugcaaaauuuccagu

SEQ ID NO: 2631682 - RNA, 21 nt, Human
uugcaaaauuuccaguaccuu

SEQ ID NO: 2631683 - RNA, 22 nt, Human
uugcaaaauuuccaguaccuuu

SEQ ID NO: 2631684 - RNA, 23 nt, Human
uugcaaaauuuccaguaccuuug

SEQ ID NO: 2631685 - RNA, 19 nt, Human
uugcaaaauagcauuuguu

SEQ ID NO: 2631686 - RNA, 15 nt, Human
uugcaaaauuuccag

SEQ ID NO: 2631687 - RNA, 11 nt, Human
uugcaaaauuu

SEQ ID NO: 2631688 - RNA, 17 nt, Human
uugcaacaggcugggcu

SEQ ID NO: 2631689 - RNA, 14 nt, Human
uugcaacaggcugg

SEQ ID NO: 2631690 - RNA, 18 nt, Human
uugauuuccguuaaaaua

SEQ ID NO: 2631691 - RNA, 17 nt, Human
uugcaaaagacuaauuu

SEQ ID NO: 2631692 - RNA, 18 nt, Human
uugauuuuuaccguuucu

SEQ ID NO: 2631693 - RNA, 16 nt, Human
uugauuuucuguugua

SEQ ID NO: 2631694 - RNA, 14 nt, Human
uugauuuucuguug

SEQ ID NO: 2631695 - RNA, 20 nt, Human
uugauuuuugccucuuccag

SEQ ID NO: 2631696 - RNA, 21 nt, Human
uugaaaacacuguucucugcc

SEQ ID NO: 2631697 - RNA, 19 nt, Human
uugaaaacacuguucucug

SEQ ID NO: 2631698 - RNA, 15 nt, Human
uugaaaaaugcaugu

SEQ ID NO: 2631699 - RNA, 15 nt, Human
uucuuuauacuguaa

SEQ ID NO: 2631700 - RNA, 10 nt, Human
uucuuucaag

SEQ ID NO: 2631701 - RNA, 20 nt, Human
uugaaaaauuccuauuguga

SEQ ID NO: 2631702 - RNA, 16 nt, Human
uugaaaaauuccuauu

SEQ ID NO: 2631703 - RNA, 15 nt, Human
uugaaaaauuccuau

SEQ ID NO: 2631704 - RNA, 13 nt, Human
uugaaaaauuccu

SEQ ID NO: 2631705 - RNA, 21 nt, Human
uugaaaaaugugcaaaacagc

SEQ ID NO: 2631706 - RNA, 20 nt, Human
uucuuucaagugaaucuaaa

SEQ ID NO: 2631707 - RNA, 22 nt, Human
uucuuucaagugaaucuaaaag

SEQ ID NO: 2631708 - RNA, 13 nt, Human
uucuuguaguagu

SEQ ID NO: 2631709 - RNA, 23 nt, Human
uucuuguaauuuaaacaggccca

SEQ ID NO: 2631710 - RNA, 12 nt, Human
uucuuguauuaa

SEQ ID NO: 2631711 - RNA, 13 nt, Human
uucuuguauuaag

SEQ ID NO: 2631712 - RNA, 15 nt, Human
uucuuuaggagauuu

SEQ ID NO: 2631713 - RNA, 14 nt, Human
uucuuuaggagauu

SEQ ID NO: 2631714 - RNA, 18 nt, Human
uucuuuagagcauugcca

SEQ ID NO: 2631715 - RNA, 22 nt, Human
uucuuuaggagauuuuaggugu

SEQ ID NO: 2631716 - RNA, 13 nt, Human
uucuuuauaaacu

SEQ ID NO: 2631717 - RNA, 14 nt, Human
uucuuuauaaacuu

SEQ ID NO: 2631718 - RNA, 16 nt, Human
uucuuuauacuguaau

SEQ ID NO: 2631719 - RNA, 22 nt, Human
uucuuuauacaacagugcuaaa

SEQ ID NO: 2631720 - RNA, 19 nt, Human
uucuuuauacaacagugcu

SEQ ID NO: 2631721 - RNA, 18 nt, Human
uucuuuauacaacagugc

SEQ ID NO: 2631722 - RNA, 16 nt, Human
uucuuuauacaacagu

SEQ ID NO: 2631723 - RNA, 18 nt, Human
uucuuuauaauucuacuu

SEQ ID NO: 2631724 - RNA, 16 nt, Human
uugaaaagacuccaaa

SEQ ID NO: 2631725 - RNA, 18 nt, Human
uugaaaagacuccaaaga

SEQ ID NO: 2631726 - RNA, 22 nt, Human
uugaaaagacuccaaagaaaug

SEQ ID NO: 2631727 - RNA, 23 nt, Human
uugaaaagacuccaaagaaaugu

SEQ ID NO: 2631728 - RNA, 23 nt, Human
uugaaaaauuccuauugugauuu

SEQ ID NO: 2631729 - RNA, 22 nt, Human
uugaaaacacuguucucugccc

SEQ ID NO: 2631730 - RNA, 23 nt, Human
uugaaacugagaugugaacacau

SEQ ID NO: 2631731 - RNA, 15 nt, Human
uugaaagaaaauaug

SEQ ID NO: 2631732 - RNA, 20 nt, Human
uugaagaacugcaggcccug

SEQ ID NO: 2631733 - RNA, 22 nt, Human
uugaacuuuuuuccacugaagu

SEQ ID NO: 2631734 - RNA, 16 nt, Human
uugaagaacugcaggc

SEQ ID NO: 2631735 - RNA, 13 nt, Human
uugaagaaugaac

SEQ ID NO: 2631736 - RNA, 16 nt, Human
uugaacuuuuuuccac

SEQ ID NO: 2631737 - RNA, 19 nt, Human
uugaagaacugcaggcccu

SEQ ID NO: 2631738 - RNA, 16 nt, Human
uugaagaaugaacaaa

SEQ ID NO: 2631739 - RNA, 15 nt, Human
uugaagaaugaacaa

SEQ ID NO: 2631740 - RNA, 22 nt, Human
uugaacuuugaccucugcagca

SEQ ID NO: 2631741 - RNA, 15 nt, Human
uugaacugauaguua

SEQ ID NO: 2631742 - RNA, 15 nt, Human
uugaacugagcuugg

SEQ ID NO: 2631743 - RNA, 16 nt, Human
uugaacugagcuugga

SEQ ID NO: 2631744 - RNA, 16 nt, Human
uugaacugauaaagau

SEQ ID NO: 2631745 - RNA, 17 nt, Human
uugaaagaaaggacucu

SEQ ID NO: 2631746 - RNA, 19 nt, Human
uugaacucuucaaucucuu

SEQ ID NO: 2631747 - RNA, 17 nt, Human
uugaagacagagcuaca

SEQ ID NO: 2631748 - RNA, 13 nt, Human
uugaagacacuga

SEQ ID NO: 2631749 - RNA, 15 nt, Human
uugaagacacugaaa

SEQ ID NO: 2631750 - RNA, 19 nt, Human
uugaagacuuuucuuucag

SEQ ID NO: 2631751 - RNA, 22 nt, Human
uugaagacacugaaauauacac

SEQ ID NO: 2631752 - RNA, 20 nt, Human
uugaaucuugucucaaugcu

SEQ ID NO: 2631753 - RNA, 17 nt, Human
uugaaucuugucucaau

SEQ ID NO: 2631754 - RNA, 16 nt, Human
uugaaucuugucucaa

SEQ ID NO: 2631755 - RNA, 15 nt, Human
uugaaucuugucuca

SEQ ID NO: 2631756 - RNA, 23 nt, Human
uugaaucuugucucaaugcucau

SEQ ID NO: 2631757 - RNA, 22 nt, Human
uugaaucuugucucaaugcuca

SEQ ID NO: 2631758 - RNA, 24 nt, Human
uugaaucugauuggacauuuucuu

SEQ ID NO: 2631759 - RNA, 15 nt, Human
uugaaucuuuccaau

SEQ ID NO: 2631760 - RNA, 20 nt, Human
uugaaucuauuuaaguaaaa

SEQ ID NO: 2631761 - RNA, 14 nt, Human
uugaaucuugucuc

SEQ ID NO: 2631762 - RNA, 23 nt, Human
uugaaucugauuggacauuuucu

SEQ ID NO: 2631763 - RNA, 14 nt, Human
uucugagcauuuaa

SEQ ID NO: 2631764 - RNA, 15 nt, Human
uucugagaaagacua

SEQ ID NO: 2631765 - RNA, 15 nt, Human
uucugacuccagugg

SEQ ID NO: 2631766 - RNA, 13 nt, Human
uucugacugcuga

SEQ ID NO: 2631767 - RNA, 12 nt, Human
uucugacuugac

SEQ ID NO: 2631768 - RNA, 22 nt, Human
uucugacuucauagauuuccuu

SEQ ID NO: 2631769 - RNA, 20 nt, Human
uucugagcccgggcugccug

SEQ ID NO: 2631770 - RNA, 19 nt, Human
uucugagcccgggcugccu

SEQ ID NO: 2631771 - RNA, 21 nt, Human
uucugagcccgggcugccugg

SEQ ID NO: 2631772 - RNA, 16 nt, Human
uucugagcuauuucau

SEQ ID NO: 2631773 - RNA, 23 nt, Human
uucugagcuauuucaucuauuuu

SEQ ID NO: 2631774 - RNA, 17 nt, Human
uucuguccgagcuuuga

SEQ ID NO: 2631775 - RNA, 21 nt, Human
uucuguccgagcuuugaaaau

SEQ ID NO: 2631776 - RNA, 23 nt, Human
uucuguggaaaguguaaagcauu

SEQ ID NO: 2631777 - RNA, 22 nt, Human
uucuguggaaaguguaaagcau

SEQ ID NO: 2631778 - RNA, 22 nt, Human
uucugugggagaauucuuacau

SEQ ID NO: 2631779 - RNA, 21 nt, Human
uucuguggaaaguguaaagca

SEQ ID NO: 2631780 - RNA, 17 nt, Human
uucuguccuacucugug

SEQ ID NO: 2631781 - RNA, 23 nt, Human
uucuguggguuucuaaagcugcc

SEQ ID NO: 2631782 - RNA, 16 nt, Human
uucuguggcucacaga

SEQ ID NO: 2631783 - RNA, 12 nt, Human
uucuguggcuca

SEQ ID NO: 2631784 - RNA, 15 nt, Human
uucuuauuucauuuc

SEQ ID NO: 2631785 - RNA, 21 nt, Human
uucuguucuguggaaagugua

SEQ ID NO: 2631786 - RNA, 20 nt, Human
uucuguucuguggaaagugu

SEQ ID NO: 2631787 - RNA, 14 nt, Human
uucuuauuucauga

SEQ ID NO: 2631788 - RNA, 16 nt, Human
uucuuauuucaugaaa

SEQ ID NO: 2631789 - RNA, 19 nt, Human
uucuucaacaggagaauuu

SEQ ID NO: 2631790 - RNA, 17 nt, Human
uucuucaacaucaaugu

SEQ ID NO: 2631791 - RNA, 14 nt, Human
uucuucaacucccu

SEQ ID NO: 2631792 - RNA, 21 nt, Human
uucuucaacaucaauguucau

SEQ ID NO: 2631793 - RNA, 22 nt, Human
uucuucaacaucaauguucauu

SEQ ID NO: 2631794 - RNA, 16 nt, Human
uucuguucuguggaaa

SEQ ID NO: 2631795 - RNA, 13 nt, Human
uucuguucugugg

SEQ ID NO: 2631796 - RNA, 11 nt, Human
uucuguucuuu

SEQ ID NO: 2631797 - RNA, 15 nt, Human
uucuuauugcuuuua

SEQ ID NO: 2631798 - RNA, 19 nt, Human
uucuuauuuaaugaaagac

SEQ ID NO: 2631799 - RNA, 23 nt, Human
uucuuauuuaaugaaagacugua

SEQ ID NO: 2631800 - RNA, 17 nt, Human
uucuugguuuguaaauu

SEQ ID NO: 2631801 - RNA, 18 nt, Human
uucuugguuuguaaauua

SEQ ID NO: 2631802 - RNA, 11 nt, Human
uucuuguaauu

SEQ ID NO: 2631803 - RNA, 20 nt, Human
uucuugguuggcuggccuuc

SEQ ID NO: 2631804 - RNA, 21 nt, Human
uucuuguaauuuaaacaggcc

SEQ ID NO: 2631805 - RNA, 16 nt, Human
uucuugguuggcuggc

SEQ ID NO: 2631806 - RNA, 16 nt, Human
uucuugguugaggaaa

SEQ ID NO: 2631807 - RNA, 23 nt, Human
uucuugguuuguaaauuaacuuu

SEQ ID NO: 2631808 - RNA, 13 nt, Human
uucuugguuugua

SEQ ID NO: 2631809 - RNA, 16 nt, Human
uucuugguuuguaaau

SEQ ID NO: 2631810 - RNA, 14 nt, Human
uucuucacccagcu

SEQ ID NO: 2631811 - RNA, 21 nt, Human
uucuucacccagcuaaucugu

SEQ ID NO: 2631812 - RNA, 22 nt, Human
uucuugguugaggaaacaaaca

SEQ ID NO: 2631813 - RNA, 14 nt, Human
uucuucagaagaca

SEQ ID NO: 2631814 - RNA, 22 nt, Human
uucuucacuguccuccaagcca

SEQ ID NO: 2631815 - RNA, 12 nt, Human
uucuauuuggaa

SEQ ID NO: 2631816 - RNA, 18 nt, Human
uucuauuugcugggcuuu

SEQ ID NO: 2631817 - RNA, 17 nt, Human
uucuauuugcugggcuu

SEQ ID NO: 2631818 - RNA, 16 nt, Human
uucuauuugcugggcu

SEQ ID NO: 2631819 - RNA, 15 nt, Human
uucuauuugcugggc

SEQ ID NO: 2631820 - RNA, 20 nt, Human
uucuauuuucauuuucugca

SEQ ID NO: 2631821 - RNA, 17 nt, Human
uucuauuuucauuuucu

SEQ ID NO: 2631822 - RNA, 13 nt, Human
uucuauuuuguaa

SEQ ID NO: 2631823 - RNA, 16 nt, Human
uucuauuuuguaaacu

SEQ ID NO: 2631824 - RNA, 23 nt, Human
uucuauuuucauuuucugcaagc

SEQ ID NO: 2631825 - RNA, 21 nt, Human
uucuauuuucauuuucugcaa

SEQ ID NO: 2631826 - RNA, 13 nt, Human
uucucaaacacag

SEQ ID NO: 2631827 - RNA, 15 nt, Human
uucuauuuuuguaga

SEQ ID NO: 2631828 - RNA, 14 nt, Human
uucuauuguuucuu

SEQ ID NO: 2631829 - RNA, 22 nt, Human
uucuauuguuacucugguucuu

SEQ ID NO: 2631830 - RNA, 19 nt, Human
uucuauuguuacucugguu

SEQ ID NO: 2631831 - RNA, 15 nt, Human
uucuauuguuguaca

SEQ ID NO: 2631832 - RNA, 14 nt, Human
uucuauuuaaugga

SEQ ID NO: 2631833 - RNA, 17 nt, Human
uucuauuguuuauucuu

SEQ ID NO: 2631834 - RNA, 13 nt, Human
uucuauuuaaugg

SEQ ID NO: 2631835 - RNA, 19 nt, Human
uucuauuucagugccaaua

SEQ ID NO: 2631836 - RNA, 17 nt, Human
uucuauuucuccuccau

SEQ ID NO: 2631837 - RNA, 19 nt, Human
uucuauuucuccuccaugg

SEQ ID NO: 2631838 - RNA, 18 nt, Human
uucuauuuauauguacau

SEQ ID NO: 2631839 - RNA, 19 nt, Human
uucuauuuauauguacaug

SEQ ID NO: 2631840 - RNA, 15 nt, Human
uucuauuuauuuacu

SEQ ID NO: 2631841 - RNA, 22 nt, Human
uucucaaaccuguuuaaauauu

SEQ ID NO: 2631842 - RNA, 23 nt, Human
uucucaaacacaguuacacuugu

SEQ ID NO: 2631843 - RNA, 18 nt, Human
uucucaaaguuuugaaaa

SEQ ID NO: 2631844 - RNA, 17 nt, Human
uucucaaaguuuugaaa

SEQ ID NO: 2631845 - RNA, 15 nt, Human
uucucaaaguuuuga

SEQ ID NO: 2631846 - RNA, 21 nt, Human
uucucaacaaagcacaguguu

SEQ ID NO: 2631847 - RNA, 12 nt, Human
uucucaaauaaa

SEQ ID NO: 2631848 - RNA, 22 nt, Human
uucucaaaguuuugaaaagcua

SEQ ID NO: 2631849 - RNA, 21 nt, Human
uucucaaaguuuugaaaagcu

SEQ ID NO: 2631850 - RNA, 15 nt, Human
uucucauccugcagg

SEQ ID NO: 2631851 - RNA, 14 nt, Human
uucucaugauccaa

SEQ ID NO: 2631852 - RNA, 18 nt, Human
uucucaucuuucuugauc

SEQ ID NO: 2631853 - RNA, 15 nt, Human
uucucaucuuucuug

SEQ ID NO: 2631854 - RNA, 11 nt, Human
uucucaugccu

SEQ ID NO: 2631855 - RNA, 12 nt, Human
uucucaugccuc

SEQ ID NO: 2631856 - RNA, 14 nt, Human
uucucaugccucag

SEQ ID NO: 2631857 - RNA, 14 nt, Human
uucuccaaaugaga

SEQ ID NO: 2631858 - RNA, 20 nt, Human
uucuccaaacugaagcagcc

SEQ ID NO: 2631859 - RNA, 17 nt, Human
uucuauuguuacucugg

SEQ ID NO: 2631860 - RNA, 14 nt, Human
uucuauuguuacuc

SEQ ID NO: 2631861 - RNA, 15 nt, Human
uucuauuguacagaa

SEQ ID NO: 2631862 - RNA, 14 nt, Human
uucuauuguacaga

SEQ ID NO: 2631863 - RNA, 18 nt, Human
uucuauugcaguuauaga

SEQ ID NO: 2631864 - RNA, 23 nt, Human
uucuauugacuucaaugauagua

SEQ ID NO: 2631865 - RNA, 14 nt, Human
uucuauugaaaaau

SEQ ID NO: 2631866 - RNA, 17 nt, Human
uucuauugacuucaaug

SEQ ID NO: 2631867 - RNA, 17 nt, Human
uucuauuaacuuuaauu

SEQ ID NO: 2631868 - RNA, 20 nt, Human
uucuauuagccagucuuuac

SEQ ID NO: 2631869 - RNA, 22 nt, Human
uucuauucaagguggccaaauu

SEQ ID NO: 2631870 - RNA, 13 nt, Human
uucuauugaaaaa

SEQ ID NO: 2631871 - RNA, 13 nt, Human
uucuaugagaaaa

SEQ ID NO: 2631872 - RNA, 17 nt, Human
uucuaucauuuuuguac

SEQ ID NO: 2631873 - RNA, 13 nt, Human
uucuaucauuuuu

SEQ ID NO: 2631874 - RNA, 17 nt, Human
uucuaucacauauuuga

SEQ ID NO: 2631875 - RNA, 14 nt, Human
uucuaucacauauu

SEQ ID NO: 2631876 - RNA, 15 nt, Human
uucuauguaguuuau

SEQ ID NO: 2631877 - RNA, 22 nt, Human
uucuaugugacaauuuuguaca

SEQ ID NO: 2631878 - RNA, 16 nt, Human
uucuaugacacaugca

SEQ ID NO: 2631879 - RNA, 17 nt, Human
uucuaugacacaugcaa

SEQ ID NO: 2631880 - RNA, 14 nt, Human
uucuaauagaacuc

SEQ ID NO: 2631881 - RNA, 12 nt, Human
uucuaauagaac

SEQ ID NO: 2631882 - RNA, 14 nt, Human
uucuaauaguuuua

SEQ ID NO: 2631883 - RNA, 18 nt, Human
uucuaauagaacucaguu

SEQ ID NO: 2631884 - RNA, 22 nt, Human
uucuaauauauuuuuauauuua

SEQ ID NO: 2631885 - RNA, 18 nt, Human
uucuaauauuuauugcuu

SEQ ID NO: 2631886 - RNA, 21 nt, Human
uucuaauauuuauugcuuuau

SEQ ID NO: 2631887 - RNA, 19 nt, Human
uucuaauauuuauugcuuu

SEQ ID NO: 2631888 - RNA, 23 nt, Human
uucuauaugaauuuaaauauaau

SEQ ID NO: 2631889 - RNA, 13 nt, Human
uucuaaugucuuc

SEQ ID NO: 2631890 - RNA, 20 nt, Human
uucugacccaugcugcccug

SEQ ID NO: 2631891 - RNA, 18 nt, Human
uucugacccaugcugccc

SEQ ID NO: 2631892 - RNA, 16 nt, Human
uucugacccaugcugc

SEQ ID NO: 2631893 - RNA, 19 nt, Human
uucucugguaauauugacu

SEQ ID NO: 2631894 - RNA, 21 nt, Human
uucugacccaugcugcccugu

SEQ ID NO: 2631895 - RNA, 14 nt, Human
uucucuguauagua

SEQ ID NO: 2631896 - RNA, 19 nt, Human
uucugacucgguuucucca

SEQ ID NO: 2631897 - RNA, 18 nt, Human
uucugacucgguuucucc

SEQ ID NO: 2631898 - RNA, 15 nt, Human
uucugacucugagcu

SEQ ID NO: 2631899 - RNA, 16 nt, Human
uucugacucugagcua

SEQ ID NO: 2631900 - RNA, 20 nt, Human
uucugacgugccuuuugcac

SEQ ID NO: 2631901 - RNA, 17 nt, Human
uucucuguagggaacuc

SEQ ID NO: 2631902 - RNA, 12 nt, Human
uucucugucuca

SEQ ID NO: 2631903 - RNA, 12 nt, Human
uucucugccagu

SEQ ID NO: 2631904 - RNA, 10 nt, Human
uucucugcca

SEQ ID NO: 2631905 - RNA, 13 nt, Human
uucucugccagug

SEQ ID NO: 2631906 - RNA, 22 nt, Human
uucucugaguaucuccucgcaa

SEQ ID NO: 2631907 - RNA, 15 nt, Human
uucucuggagccaag

SEQ ID NO: 2631908 - RNA, 17 nt, Human
uucucuggagccaaguc

SEQ ID NO: 2631909 - RNA, 15 nt, Human
uucucugcuccacca

SEQ ID NO: 2631910 - RNA, 22 nt, Human
uucucuggaaaggggggagcug

SEQ ID NO: 2631911 - RNA, 11 nt, Human
uucucugcucc

SEQ ID NO: 2631912 - RNA, 13 nt, Human
uucucugcuccac

SEQ ID NO: 2631913 - RNA, 14 nt, Human
uucucugcuccacc

SEQ ID NO: 2631914 - RNA, 17 nt, Human
uucucugacuucugccu

SEQ ID NO: 2631915 - RNA, 16 nt, Human
uucucugacuucugcc

SEQ ID NO: 2631916 - RNA, 12 nt, Human
uucucugacuuc

SEQ ID NO: 2631917 - RNA, 16 nt, Human
uucucugaagggaggu

SEQ ID NO: 2631918 - RNA, 15 nt, Human
uucucugaagggagg

SEQ ID NO: 2631919 - RNA, 11 nt, Human
uucucugacuu

SEQ ID NO: 2631920 - RNA, 23 nt, Human
uucucugaagaguggguuucaca

SEQ ID NO: 2631921 - RNA, 23 nt, Human
uucucuccucuccccaugauguu

SEQ ID NO: 2631922 - RNA, 14 nt, Human
uucucuccucccca

SEQ ID NO: 2631923 - RNA, 12 nt, Human
uucucuccuccc

SEQ ID NO: 2631924 - RNA, 23 nt, Human
uucucucccaggggcuggcuuca

SEQ ID NO: 2631925 - RNA, 21 nt, Human
uucucucccaggggcuggcuu

SEQ ID NO: 2631926 - RNA, 16 nt, Human
uucucucuccugucca

SEQ ID NO: 2631927 - RNA, 17 nt, Human
uucucucggcuccccau

SEQ ID NO: 2631928 - RNA, 12 nt, Human
uucucucucacc

SEQ ID NO: 2631929 - RNA, 22 nt, Human
uucucuccuguaccucuugagc

SEQ ID NO: 2631930 - RNA, 17 nt, Human
uucucuccuccccaaau

SEQ ID NO: 2631931 - RNA, 15 nt, Human
uucucuccuccccaa

SEQ ID NO: 2631932 - RNA, 20 nt, Human
uucucucggaguaucuggga

SEQ ID NO: 2631933 - RNA, 23 nt, Human
uucucccccccggggcuggguug

SEQ ID NO: 2631934 - RNA, 18 nt, Human
uucucuccagccccugga

SEQ ID NO: 2631935 - RNA, 17 nt, Human
uucucccccccggggcu

SEQ ID NO: 2631936 - RNA, 20 nt, Human
uucucccagguaccagcugc

SEQ ID NO: 2631937 - RNA, 19 nt, Human
uucucccagguaccagcug

SEQ ID NO: 2631938 - RNA, 21 nt, Human
uucucccccccggggcugggu

SEQ ID NO: 2631939 - RNA, 20 nt, Human
uucucccccccggggcuggg

SEQ ID NO: 2631940 - RNA, 14 nt, Human
uucucccccugggc

SEQ ID NO: 2631941 - RNA, 17 nt, Human
uucucccccugggcucu

SEQ ID NO: 2631942 - RNA, 18 nt, Human
uucucccccugggcucug

SEQ ID NO: 2631943 - RNA, 16 nt, Human
uucuccaagcaggaca

SEQ ID NO: 2631944 - RNA, 13 nt, Human
uucuccacccugc

SEQ ID NO: 2631945 - RNA, 22 nt, Human
uucuccacagcaaccccaggcu

SEQ ID NO: 2631946 - RNA, 21 nt, Human
uucuccaauaucagugcucga

SEQ ID NO: 2631947 - RNA, 19 nt, Human
uucuccaauaucagugcuc

SEQ ID NO: 2631948 - RNA, 15 nt, Human
uucuccacagcaacc

SEQ ID NO: 2631949 - RNA, 11 nt, Human
uucuccaggcu

SEQ ID NO: 2631950 - RNA, 22 nt, Human
uucuccauggccaccuuuucag

SEQ ID NO: 2631951 - RNA, 14 nt, Human
uucuccauuguaaa

SEQ ID NO: 2631952 - RNA, 13 nt, Human
uucucccacacug

SEQ ID NO: 2631953 - RNA, 13 nt, Human
uucucccaggaag

SEQ ID NO: 2631954 - RNA, 12 nt, Human
uucucccaggaa

SEQ ID NO: 2631955 - RNA, 17 nt, Human
uucucccacuuggccaa

SEQ ID NO: 2631956 - RNA, 15 nt, Human
uucucccaggaagcu

SEQ ID NO: 2631957 - RNA, 14 nt, Human
uucucccaggaagc

SEQ ID NO: 2631958 - RNA, 23 nt, Human
uucucccaggccaggcuccuucc

SEQ ID NO: 2631959 - RNA, 15 nt, Human
uucuccaucucucug

SEQ ID NO: 2631960 - RNA, 18 nt, Human
uucuccaggcucuuuggg

SEQ ID NO: 2631961 - RNA, 21 nt, Human
uucuccauccuuucugccucu

SEQ ID NO: 2631962 - RNA, 19 nt, Human
uucuccaucucucuggccc

SEQ ID NO: 2631963 - RNA, 18 nt, Human
uucuccaucuggcagggu

SEQ ID NO: 2631964 - RNA, 23 nt, Human
uucuccaugagacacaucuccuc

SEQ ID NO: 2631965 - RNA, 20 nt, Human
uucuccauccacaugggagc

SEQ ID NO: 2631966 - RNA, 20 nt, Human
uucuccaggucucacgggca

SEQ ID NO: 2631967 - RNA, 14 nt, Human
uuccccagcccagg

SEQ ID NO: 2631968 - RNA, 13 nt, Human
uuccccagcccag

SEQ ID NO: 2631969 - RNA, 22 nt, Human
uuccccagcagggucuuuucau

SEQ ID NO: 2631970 - RNA, 12 nt, Human
uuccccagccca

SEQ ID NO: 2631971 - RNA, 16 nt, Human
uucccuguauuuucuu

SEQ ID NO: 2631972 - RNA, 12 nt, Human
uucccugugcug

SEQ ID NO: 2631973 - RNA, 11 nt, Human
uucccugugcu

SEQ ID NO: 2631974 - RNA, 20 nt, Human
uucccuguauuuucuuucuc

SEQ ID NO: 2631975 - RNA, 23 nt, Human
uucccuucaguacccucucagcu

SEQ ID NO: 2631976 - RNA, 22 nt, Human
uucccuucaguacccucucagc

SEQ ID NO: 2631977 - RNA, 19 nt, Human
uucccuucaguacccucuc

SEQ ID NO: 2631978 - RNA, 17 nt, Human
uuccccacugcacacac

SEQ ID NO: 2631979 - RNA, 14 nt, Human
uuccccacugccug

SEQ ID NO: 2631980 - RNA, 18 nt, Human
uuccccacugccugccca

SEQ ID NO: 2631981 - RNA, 21 nt, Human
uuccccacugacagccuccca

SEQ ID NO: 2631982 - RNA, 23 nt, Human
uuccccacugacagccucccacc

SEQ ID NO: 2631983 - RNA, 17 nt, Human
uuccccacugacagccu

SEQ ID NO: 2631984 - RNA, 22 nt, Human
uuccccaccccagcucaugccc

SEQ ID NO: 2631985 - RNA, 11 nt, Human
uuccccagaga

SEQ ID NO: 2631986 - RNA, 12 nt, Human
uuccccagagaa

SEQ ID NO: 2631987 - RNA, 22 nt, Human
uuccccacuugagaauuacccu

SEQ ID NO: 2631988 - RNA, 14 nt, Human
uucccuucaucugg

SEQ ID NO: 2631989 - RNA, 15 nt, Human
uucccuucaucugga

SEQ ID NO: 2631990 - RNA, 16 nt, Human
uucccuucaucuggaa

SEQ ID NO: 2631991 - RNA, 18 nt, Human
uucccuugaugaagaagu

SEQ ID NO: 2631992 - RNA, 16 nt, Human
uucccuuggccucaga

SEQ ID NO: 2631993 - RNA, 11 nt, Human
uucccuuggcc

SEQ ID NO: 2631994 - RNA, 12 nt, Human
uucccuuggccu

SEQ ID NO: 2631995 - RNA, 14 nt, Human
uucccuuggccuca

SEQ ID NO: 2631996 - RNA, 15 nt, Human
uucccuuggccucag

SEQ ID NO: 2631997 - RNA, 15 nt, Human
uuccuagccaccgcc

SEQ ID NO: 2631998 - RNA, 21 nt, Human
uuccuagccaccgccuccuac

SEQ ID NO: 2631999 - RNA, 17 nt, Human
uuccuagcacacacuuu

SEQ ID NO: 2632000 - RNA, 19 nt, Human
uuccuagauggcagucacu

SEQ ID NO: 2632001 - RNA, 22 nt, Human
uuccuagauggcagucacugaa

SEQ ID NO: 2632002 - RNA, 14 nt, Human
uuccuagccaccgc

SEQ ID NO: 2632003 - RNA, 19 nt, Human
uucccuuugacgccauccc

SEQ ID NO: 2632004 - RNA, 22 nt, Human
uuccuagaaguuacugaaugca

SEQ ID NO: 2632005 - RNA, 15 nt, Human
uucccuuuccuucca

SEQ ID NO: 2632006 - RNA, 14 nt, Human
uuccuagcccucuc

SEQ ID NO: 2632007 - RNA, 19 nt, Human
uuccuagcacacacuuuug

SEQ ID NO: 2632008 - RNA, 22 nt, Human
uuccuagccaccgccuccuaca

SEQ ID NO: 2632009 - RNA, 20 nt, Human
uuccuagguauaauucacau

SEQ ID NO: 2632010 - RNA, 12 nt, Human
uuccuagugaaa

SEQ ID NO: 2632011 - RNA, 18 nt, Human
uuccuagcccucucacau

SEQ ID NO: 2632012 - RNA, 20 nt, Human
uuccuaguucuguagaaaug

SEQ ID NO: 2632013 - RNA, 17 nt, Human
uuccuaguucuguagaa

SEQ ID NO: 2632014 - RNA, 16 nt, Human
uuccuaguucuguaga

SEQ ID NO: 2632015 - RNA, 15 nt, Human
uuccuaguuuucucc

SEQ ID NO: 2632016 - RNA, 18 nt, Human
uuccuaguuuucuccucc

SEQ ID NO: 2632017 - RNA, 22 nt, Human
uuccucaggcaaggucuggccu

SEQ ID NO: 2632018 - RNA, 23 nt, Human
uuccucaguuuaauccuucuagu

SEQ ID NO: 2632019 - RNA, 17 nt, Human
uuccucaguuacacaaa

SEQ ID NO: 2632020 - RNA, 23 nt, Human
uuccucaguucauccauucuauu

SEQ ID NO: 2632021 - RNA, 23 nt, Human
uuccucauaguaugguggcuggg

SEQ ID NO: 2632022 - RNA, 14 nt, Human
uuccuccuccccac

SEQ ID NO: 2632023 - RNA, 14 nt, Human
uuccucccuucugc

SEQ ID NO: 2632024 - RNA, 15 nt, Human
uuccucccuucugcu

SEQ ID NO: 2632025 - RNA, 16 nt, Human
uuccucccuucugcua

SEQ ID NO: 2632026 - RNA, 18 nt, Human
uuccucccuucugcuacu

SEQ ID NO: 2632027 - RNA, 15 nt, Human
uuccuccucccuccu

SEQ ID NO: 2632028 - RNA, 16 nt, Human
uuccuccuccccacuu

SEQ ID NO: 2632029 - RNA, 17 nt, Human
uuccuccucccuccugc

SEQ ID NO: 2632030 - RNA, 11 nt, Human
uuccucccuuc

SEQ ID NO: 2632031 - RNA, 12 nt, Human
uuccucccuucu

SEQ ID NO: 2632032 - RNA, 22 nt, Human
uuccucccucccucuuucccuc

SEQ ID NO: 2632033 - RNA, 19 nt, Human
uuccucauccaccccaucc

SEQ ID NO: 2632034 - RNA, 18 nt, Human
uuccucauccaccccauc

SEQ ID NO: 2632035 - RNA, 15 nt, Human
uuccucaucugucca

SEQ ID NO: 2632036 - RNA, 12 nt, Human
uuccucccuccc

SEQ ID NO: 2632037 - RNA, 19 nt, Human
uuccucccucccucuuucc

SEQ ID NO: 2632038 - RNA, 21 nt, Human
uuccucccucccucuuucccu

SEQ ID NO: 2632039 - RNA, 17 nt, Human
uucuaaaggcuaccuuu

SEQ ID NO: 2632040 - RNA, 18 nt, Human
uucuaaaggcuaccuuug

SEQ ID NO: 2632041 - RNA, 20 nt, Human
uucuaaaggccucuuccuug

SEQ ID NO: 2632042 - RNA, 15 nt, Human
uucuaauaaaacaaa

SEQ ID NO: 2632043 - RNA, 16 nt, Human
uucuaaaggcuaccuu

SEQ ID NO: 2632044 - RNA, 16 nt, Human
uucuaaacaagauuuu

SEQ ID NO: 2632045 - RNA, 22 nt, Human
uucuaaacaagaaucagucuau

SEQ ID NO: 2632046 - RNA, 18 nt, Human
uucuaaacccaauccaaa

SEQ ID NO: 2632047 - RNA, 19 nt, Human
uucuaaacccaauccaaau

SEQ ID NO: 2632048 - RNA, 23 nt, Human
uucuaaacccaauccaaauggcg

SEQ ID NO: 2632049 - RNA, 19 nt, Human
uucuaaaauauaaucaacc

SEQ ID NO: 2632050 - RNA, 22 nt, Human
uucggccuccauccugaggcuc

SEQ ID NO: 2632051 - RNA, 18 nt, Human
uucggccuccauccugag

SEQ ID NO: 2632052 - RNA, 19 nt, Human
uucggccuccauccugagg

SEQ ID NO: 2632053 - RNA, 22 nt, Human
uuccuuugaauccucucucugu

SEQ ID NO: 2632054 - RNA, 15 nt, Human
uuccuuugaagagga

SEQ ID NO: 2632055 - RNA, 14 nt, Human
uuccuuugaagagg

SEQ ID NO: 2632056 - RNA, 20 nt, Human
uuccuuucuugguucauaaa

SEQ ID NO: 2632057 - RNA, 12 nt, Human
uuccuuucucag

SEQ ID NO: 2632058 - RNA, 14 nt, Human
uuccuuucucaccg

SEQ ID NO: 2632059 - RNA, 13 nt, Human
uuccuuucucacc

SEQ ID NO: 2632060 - RNA, 12 nt, Human
uuccuuucucac

SEQ ID NO: 2632061 - RNA, 10 nt, Human
uuccuuucuc

SEQ ID NO: 2632062 - RNA, 16 nt, Human
uuccuuuccccagccc

SEQ ID NO: 2632063 - RNA, 15 nt, Human
uuccuuuccccagcc

SEQ ID NO: 2632064 - RNA, 17 nt, Human
uuccuuuccccagccca

SEQ ID NO: 2632065 - RNA, 14 nt, Human
uuccuuuccccagc

SEQ ID NO: 2632066 - RNA, 20 nt, Human
uuccuuucauuuacuguggc

SEQ ID NO: 2632067 - RNA, 13 nt, Human
uuccugcccuggg

SEQ ID NO: 2632068 - RNA, 16 nt, Human
uuccugcccugggagg

SEQ ID NO: 2632069 - RNA, 22 nt, Human
uuccugcccugggaggcaguga

SEQ ID NO: 2632070 - RNA, 17 nt, Human
uuccugcccuuccucag

SEQ ID NO: 2632071 - RNA, 16 nt, Human
uuccugcccuuccuca

SEQ ID NO: 2632072 - RNA, 13 nt, Human
uuccuccuggaaa

SEQ ID NO: 2632073 - RNA, 11 nt, Human
uuccuccugga

SEQ ID NO: 2632074 - RNA, 13 nt, Human
uuccuccugcuca

SEQ ID NO: 2632075 - RNA, 15 nt, Human
uuccuccugcucaua

SEQ ID NO: 2632076 - RNA, 18 nt, Human
uuccugccccaggccuga

SEQ ID NO: 2632077 - RNA, 11 nt, Human
uuccugcccug

SEQ ID NO: 2632078 - RNA, 19 nt, Human
uuccuucagugccuuaugg

SEQ ID NO: 2632079 - RNA, 16 nt, Human
uuccuucagugccuua

SEQ ID NO: 2632080 - RNA, 23 nt, Human
uuccuucagugccuuauggaaca

SEQ ID NO: 2632081 - RNA, 19 nt, Human
uuccuucauucaacccacc

SEQ ID NO: 2632082 - RNA, 13 nt, Human
uuccuuccucuga

SEQ ID NO: 2632083 - RNA, 17 nt, Human
uuccuuccucugagccu

SEQ ID NO: 2632084 - RNA, 15 nt, Human
uuccuuccuguucug

SEQ ID NO: 2632085 - RNA, 14 nt, Human
uuccuuccuucccu

SEQ ID NO: 2632086 - RNA, 14 nt, Human
uuccuucucaucug

SEQ ID NO: 2632087 - RNA, 16 nt, Human
uuccuucucaucugug

SEQ ID NO: 2632088 - RNA, 20 nt, Human
uuccuucugugaaaguacau

SEQ ID NO: 2632089 - RNA, 17 nt, Human
uuccuucugccugagcu

SEQ ID NO: 2632090 - RNA, 21 nt, Human
uuccuuucauuuacuguggcu

SEQ ID NO: 2632091 - RNA, 17 nt, Human
uuccuucugugaaagua

SEQ ID NO: 2632092 - RNA, 13 nt, Human
uuccuucugaagu

SEQ ID NO: 2632093 - RNA, 16 nt, Human
uuccuuccuucccugg

SEQ ID NO: 2632094 - RNA, 12 nt, Human
uuccuucccugg

SEQ ID NO: 2632095 - RNA, 21 nt, Human
uuccuucccugggcugugcua

SEQ ID NO: 2632096 - RNA, 20 nt, Human
uuccuucccugggcugugcu

SEQ ID NO: 2632097 - RNA, 13 nt, Human
uuccuucccuggc

SEQ ID NO: 2632098 - RNA, 16 nt, Human
uuccuucccugggcug

SEQ ID NO: 2632099 - RNA, 14 nt, Human
uuccuucccuggcu

SEQ ID NO: 2632100 - RNA, 17 nt, Human
uuccuucauuuccuccg

SEQ ID NO: 2632101 - RNA, 18 nt, Human
uuccugccgcaacaguuu

SEQ ID NO: 2632102 - RNA, 15 nt, Human
uuccuucagugccuu

SEQ ID NO: 2632103 - RNA, 21 nt, Human
uuccuucccacccaucgcugu

SEQ ID NO: 2632104 - RNA, 12 nt, Human
uuccuucccacc

SEQ ID NO: 2632105 - RNA, 20 nt, Human
uuccuuccaucccuaccccc

SEQ ID NO: 2632106 - RNA, 18 nt, Human
uuccugcccuuccucagu

SEQ ID NO: 2632107 - RNA, 13 nt, Human
uucaguggcagcu

SEQ ID NO: 2632108 - RNA, 19 nt, Human
uucagugcuguggccuggg

SEQ ID NO: 2632109 - RNA, 21 nt, Human
uucagugcuguggccugggca

SEQ ID NO: 2632110 - RNA, 18 nt, Human
uucagggaauuucaggaa

SEQ ID NO: 2632111 - RNA, 13 nt, Human
uucagugcugugg

SEQ ID NO: 2632112 - RNA, 19 nt, Human
uucaguuggcugacuucca

SEQ ID NO: 2632113 - RNA, 24 nt, Human
uucaguggcacgucaucuaguuuu

SEQ ID NO: 2632114 - RNA, 12 nt, Human
uucaguggagaa

SEQ ID NO: 2632115 - RNA, 16 nt, Human
uucaguugauuuuaca

SEQ ID NO: 2632116 - RNA, 21 nt, Human
uucagugccuuauggaacacu

SEQ ID NO: 2632117 - RNA, 19 nt, Human
uucagugccuuauggaaca

SEQ ID NO: 2632118 - RNA, 23 nt, Human
uucagggaaccguuauuauaauu

SEQ ID NO: 2632119 - RNA, 16 nt, Human
uucaggcucuucuccu

SEQ ID NO: 2632120 - RNA, 13 nt, Human
uucaggcugcuug

SEQ ID NO: 2632121 - RNA, 16 nt, Human
uucaggcugcuuggga

SEQ ID NO: 2632122 - RNA, 23 nt, Human
uucauaaugacuuaagcacacuu

SEQ ID NO: 2632123 - RNA, 13 nt, Human
uucauaaugacuu

SEQ ID NO: 2632124 - RNA, 15 nt, Human
uucaucuaggauuuu

SEQ ID NO: 2632125 - RNA, 23 nt, Human
uucaucuauuuuuggcagucuga

SEQ ID NO: 2632126 - RNA, 23 nt, Human
uucauaagccaauuuuucugcac

SEQ ID NO: 2632127 - RNA, 23 nt, Human
uucaucgaaucuacuaauuccac

SEQ ID NO: 2632128 - RNA, 19 nt, Human
uucaguuucaauucagugc

SEQ ID NO: 2632129 - RNA, 13 nt, Human
uucaguuuguaua

SEQ ID NO: 2632130 - RNA, 19 nt, Human
uucaguuuuaccagaugau

SEQ ID NO: 2632131 - RNA, 17 nt, Human
uucaguuuuaucuuuaa

SEQ ID NO: 2632132 - RNA, 12 nt, Human
uucaguuuucag

SEQ ID NO: 2632133 - RNA, 22 nt, Human
uucauaagccaauuuuucugca

SEQ ID NO: 2632134 - RNA, 14 nt, Human
uucauaagccaauu

SEQ ID NO: 2632135 - RNA, 12 nt, Human
uucauaaguauu

SEQ ID NO: 2632136 - RNA, 21 nt, Human
uucaguuuucauuugguucau

SEQ ID NO: 2632137 - RNA, 17 nt, Human
uucauaacuuucauuaa

SEQ ID NO: 2632138 - RNA, 19 nt, Human
uucauaaguauuaugucuc

SEQ ID NO: 2632139 - RNA, 20 nt, Human
uucauaaguauuaugucucu

SEQ ID NO: 2632140 - RNA, 17 nt, Human
uucauaaguauuucaaa

SEQ ID NO: 2632141 - RNA, 14 nt, Human
uucauaaucuuugc

SEQ ID NO: 2632142 - RNA, 13 nt, Human
uucaugaaauccu

SEQ ID NO: 2632143 - RNA, 22 nt, Human
uucaugaacuucgcaucaaaag

SEQ ID NO: 2632144 - RNA, 21 nt, Human
uucaugaacuucgcaucaaaa

SEQ ID NO: 2632145 - RNA, 12 nt, Human
uucaucuugaau

SEQ ID NO: 2632146 - RNA, 11 nt, Human
uucaucuugaa

SEQ ID NO: 2632147 - RNA, 20 nt, Human
uucaucuuccaacucaaacu

SEQ ID NO: 2632148 - RNA, 21 nt, Human
uucaucucucagaagggaggc

SEQ ID NO: 2632149 - RNA, 17 nt, Human
uucaucucucagaaggg

SEQ ID NO: 2632150 - RNA, 14 nt, Human
uucaucucucagaa

SEQ ID NO: 2632151 - RNA, 22 nt, Human
uucaucuccagggaguccccuc

SEQ ID NO: 2632152 - RNA, 15 nt, Human
uucaucuccagggag

SEQ ID NO: 2632153 - RNA, 22 nt, Human
uucaucucccaccuagcagcac

SEQ ID NO: 2632154 - RNA, 16 nt, Human
uucaucuauuucugag

SEQ ID NO: 2632155 - RNA, 17 nt, Human
uucaucuauuucugaga

SEQ ID NO: 2632156 - RNA, 14 nt, Human
uucaucuccaggga

SEQ ID NO: 2632157 - RNA, 18 nt, Human
uucaucuauuucugagaa

SEQ ID NO: 2632158 - RNA, 15 nt, Human
uucauuucauuguau

SEQ ID NO: 2632159 - RNA, 13 nt, Human
uucauuucauugu

SEQ ID NO: 2632160 - RNA, 12 nt, Human
uucauuucauug

SEQ ID NO: 2632161 - RNA, 13 nt, Human
uucauuuccucaa

SEQ ID NO: 2632162 - RNA, 16 nt, Human
uucauuuccucaaaaa

SEQ ID NO: 2632163 - RNA, 15 nt, Human
uucauuucaacuguu

SEQ ID NO: 2632164 - RNA, 22 nt, Human
uucauuugguucauuaauucua

SEQ ID NO: 2632165 - RNA, 16 nt, Human
uucauuuccuccguca

SEQ ID NO: 2632166 - RNA, 19 nt, Human
uucauuuggaaauaagcug

SEQ ID NO: 2632167 - RNA, 18 nt, Human
uucauuuuaacaucugag

SEQ ID NO: 2632168 - RNA, 21 nt, Human
uucauuuuaacaucugagaaa

SEQ ID NO: 2632169 - RNA, 15 nt, Human
uucauuugugucaau

SEQ ID NO: 2632170 - RNA, 13 nt, Human
uucauuuguguca

SEQ ID NO: 2632171 - RNA, 19 nt, Human
uucauuuagucaugugacc

SEQ ID NO: 2632172 - RNA, 19 nt, Human
uucauuuaggugaggaagc

SEQ ID NO: 2632173 - RNA, 17 nt, Human
uucaugauuucauuuca

SEQ ID NO: 2632174 - RNA, 23 nt, Human
uucaugacuuuuccauguaucua

SEQ ID NO: 2632175 - RNA, 16 nt, Human
uucaugaguuuuuccc

SEQ ID NO: 2632176 - RNA, 19 nt, Human
uuccauuuaucuuucuaca

SEQ ID NO: 2632177 - RNA, 13 nt, Human
uuccauuugcaag

SEQ ID NO: 2632178 - RNA, 21 nt, Human
uuccauuguuuggagacauuc

SEQ ID NO: 2632179 - RNA, 20 nt, Human
uuccauuguuuggagacauu

SEQ ID NO: 2632180 - RNA, 17 nt, Human
uuccauuugcaagggaa

SEQ ID NO: 2632181 - RNA, 14 nt, Human
uuccauuugugugu

SEQ ID NO: 2632182 - RNA, 21 nt, Human
uuccaugucgccucugcauuc

SEQ ID NO: 2632183 - RNA, 20 nt, Human
uuccaugucgccucugcauu

SEQ ID NO: 2632184 - RNA, 18 nt, Human
uuccauuguuuggagaca

SEQ ID NO: 2632185 - RNA, 22 nt, Human
uuccauuguuugaaacaaagaa

SEQ ID NO: 2632186 - RNA, 17 nt, Human
uuccauuguuugaaaca

SEQ ID NO: 2632187 - RNA, 15 nt, Human
uuccauuguuugaaa

SEQ ID NO: 2632188 - RNA, 16 nt, Human
uuccaugucggccucu

SEQ ID NO: 2632189 - RNA, 15 nt, Human
uuccaugucggccuc

SEQ ID NO: 2632190 - RNA, 13 nt, Human
uuccauuguguga

SEQ ID NO: 2632191 - RNA, 14 nt, Human
uuccccaagacauu

SEQ ID NO: 2632192 - RNA, 23 nt, Human
uuccccaacagugugaaguuaga

SEQ ID NO: 2632193 - RNA, 16 nt, Human
uuccccaacaguguga

SEQ ID NO: 2632194 - RNA, 15 nt, Human
uuccccaacagugug

SEQ ID NO: 2632195 - RNA, 13 nt, Human
uuccccaacagug

SEQ ID NO: 2632196 - RNA, 15 nt, Human
uuccccaaagucuua

SEQ ID NO: 2632197 - RNA, 20 nt, Human
uuccccaacagugugaaguu

SEQ ID NO: 2632198 - RNA, 19 nt, Human
uuccccaacagugugaagu

SEQ ID NO: 2632199 - RNA, 18 nt, Human
uuccccaaccacuucauu

SEQ ID NO: 2632200 - RNA, 11 nt, Human
uucccaaaagc

SEQ ID NO: 2632201 - RNA, 21 nt, Human
uucccaaaagcccauucauuc

SEQ ID NO: 2632202 - RNA, 16 nt, Human
uucccaaacgccuccc

SEQ ID NO: 2632203 - RNA, 14 nt, Human
uucccauuuugcaa

SEQ ID NO: 2632204 - RNA, 17 nt, Human
uucccauuuugcaaaau

SEQ ID NO: 2632205 - RNA, 19 nt, Human
uucccauuuugcaaaauuu

SEQ ID NO: 2632206 - RNA, 13 nt, Human
uucccauuuugga

SEQ ID NO: 2632207 - RNA, 13 nt, Human
uuccaugaugcug

SEQ ID NO: 2632208 - RNA, 17 nt, Human
uuccaugauucuauuua

SEQ ID NO: 2632209 - RNA, 13 nt, Human
uuccaugccugag

SEQ ID NO: 2632210 - RNA, 18 nt, Human
uuccaugaugcugggauu

SEQ ID NO: 2632211 - RNA, 18 nt, Human
uuccaugauucuauuuau

SEQ ID NO: 2632212 - RNA, 17 nt, Human
uuccaugaguccccugu

SEQ ID NO: 2632213 - RNA, 19 nt, Human
uuccaugucgccucugcau

SEQ ID NO: 2632214 - RNA, 18 nt, Human
uuccaugucgccucugca

SEQ ID NO: 2632215 - RNA, 14 nt, Human
uuccaugccugagg

SEQ ID NO: 2632216 - RNA, 16 nt, Human
uuccaugucgccucug

SEQ ID NO: 2632217 - RNA, 17 nt, Human
uuccaugucgccucugc

SEQ ID NO: 2632218 - RNA, 20 nt, Human
uuccaugaaucgcuucucuu

SEQ ID NO: 2632219 - RNA, 15 nt, Human
uuccaugaaucgcuu

SEQ ID NO: 2632220 - RNA, 12 nt, Human
uuccaugaaugu

SEQ ID NO: 2632221 - RNA, 20 nt, Human
uuccaugaaguuugaacuuc

SEQ ID NO: 2632222 - RNA, 18 nt, Human
uuccaugaagaccacauc

SEQ ID NO: 2632223 - RNA, 16 nt, Human
uuccaugaaggcagag

SEQ ID NO: 2632224 - RNA, 15 nt, Human
uuccaugaauguauc

SEQ ID NO: 2632225 - RNA, 20 nt, Human
uuccaugaauguaucaggaa

SEQ ID NO: 2632226 - RNA, 18 nt, Human
uuccaugagaacagcagg

SEQ ID NO: 2632227 - RNA, 13 nt, Human
uuccaucuuuaca

SEQ ID NO: 2632228 - RNA, 18 nt, Human
uuccaucuuuacaaaacu

SEQ ID NO: 2632229 - RNA, 12 nt, Human
uuccaucugauu

SEQ ID NO: 2632230 - RNA, 13 nt, Human
uuccaugaaaacg

SEQ ID NO: 2632231 - RNA, 15 nt, Human
uuccaugaaaacguu

SEQ ID NO: 2632232 - RNA, 22 nt, Human
uuccaugaaaacguuuuauugu

SEQ ID NO: 2632233 - RNA, 24 nt, Human
uuccaugaaaaugcaacaacaugu

SEQ ID NO: 2632234 - RNA, 15 nt, Human
uuccaugaaaaugca

SEQ ID NO: 2632235 - RNA, 17 nt, Human
uuccagccccucugguc

SEQ ID NO: 2632236 - RNA, 16 nt, Human
uuccagccccucuggu

SEQ ID NO: 2632237 - RNA, 20 nt, Human
uuccagccccucuggucgcu

SEQ ID NO: 2632238 - RNA, 21 nt, Human
uuccagccggcauggcuggga

SEQ ID NO: 2632239 - RNA, 12 nt, Human
uuccagccugcc

SEQ ID NO: 2632240 - RNA, 14 nt, Human
uuccagccugccac

SEQ ID NO: 2632241 - RNA, 14 nt, Human
uuccaucccagagg

SEQ ID NO: 2632242 - RNA, 23 nt, Human
uuccaucucgccaccccuccuuc

SEQ ID NO: 2632243 - RNA, 16 nt, Human
uuccagccugccacuc

SEQ ID NO: 2632244 - RNA, 15 nt, Human
uuccaucccuacccc

SEQ ID NO: 2632245 - RNA, 21 nt, Human
uuccaucccuacccccuaaga

SEQ ID NO: 2632246 - RNA, 16 nt, Human
uuccagccagggcugc

SEQ ID NO: 2632247 - RNA, 15 nt, Human
uuccagccagggcug

SEQ ID NO: 2632248 - RNA, 14 nt, Human
uuccagccccucug

SEQ ID NO: 2632249 - RNA, 12 nt, Human
uuccagccaggg

SEQ ID NO: 2632250 - RNA, 23 nt, Human
uuccacuuuguucuuuaggagau

SEQ ID NO: 2632251 - RNA, 23 nt, Human
uuccagcaauucuccugccucag

SEQ ID NO: 2632252 - RNA, 18 nt, Human
uuccagaaaaccccagca

SEQ ID NO: 2632253 - RNA, 21 nt, Human
uuccagaaaaccccagcaucc

SEQ ID NO: 2632254 - RNA, 15 nt, Human
uuccacuuuguucuu

SEQ ID NO: 2632255 - RNA, 19 nt, Human
uuccacuuggcuacacagg

SEQ ID NO: 2632256 - RNA, 12 nt, Human
uuccacuuggcu

SEQ ID NO: 2632257 - RNA, 18 nt, Human
uuccacuugauuuugcaa

SEQ ID NO: 2632258 - RNA, 17 nt, Human
uuccagaaaaccccagc

SEQ ID NO: 2632259 - RNA, 20 nt, Human
uuccacuuuuuuuuguaugu

SEQ ID NO: 2632260 - RNA, 19 nt, Human
uuccacuuauaggaauuga

SEQ ID NO: 2632261 - RNA, 21 nt, Human
uuccacuuagaaauugcauuu

SEQ ID NO: 2632262 - RNA, 20 nt, Human
uuccacugucaagaaagagc

SEQ ID NO: 2632263 - RNA, 17 nt, Human
uuccacugcguugucca

SEQ ID NO: 2632264 - RNA, 23 nt, Human
uuccacugccugggaugaugcag

SEQ ID NO: 2632265 - RNA, 16 nt, Human
uuccacugagggcagu

SEQ ID NO: 2632266 - RNA, 12 nt, Human
uuccacuggacu

SEQ ID NO: 2632267 - RNA, 22 nt, Human
uuccacuggacuugagcuuggc

SEQ ID NO: 2632268 - RNA, 14 nt, Human
uuccacugagcucc

SEQ ID NO: 2632269 - RNA, 13 nt, Human
uuccacugagcuc

SEQ ID NO: 2632270 - RNA, 12 nt, Human
uuccacugagcu

SEQ ID NO: 2632271 - RNA, 14 nt, Human
uucauuuuuaauca

SEQ ID NO: 2632272 - RNA, 20 nt, Human
uuccacugagcuccaugugc

SEQ ID NO: 2632273 - RNA, 15 nt, Human
uuccacugagcucca

SEQ ID NO: 2632274 - RNA, 15 nt, Human
uuccacugagggcag

SEQ ID NO: 2632275 - RNA, 17 nt, Human
uucauuuugagcugaaa

SEQ ID NO: 2632276 - RNA, 13 nt, Human
uucauuuugagcu

SEQ ID NO: 2632277 - RNA, 17 nt, Human
uucauuuugaaaaacac

SEQ ID NO: 2632278 - RNA, 18 nt, Human
uucauuuucugcaagccu

SEQ ID NO: 2632279 - RNA, 20 nt, Human
uucauuuugagcugaaaugc

SEQ ID NO: 2632280 - RNA, 19 nt, Human
uucauuuugagcugaaaug

SEQ ID NO: 2632281 - RNA, 14 nt, Human
uucauuuucugcaa

SEQ ID NO: 2632282 - RNA, 23 nt, Human
uucagcuccagcucaccagcccc

SEQ ID NO: 2632283 - RNA, 17 nt, Human
uucagagggaaaguaaa

SEQ ID NO: 2632284 - RNA, 17 nt, Human
uucagcucugcaagaau

SEQ ID NO: 2632285 - RNA, 24 nt, Human
uucagcucugcaagaauugaagca

SEQ ID NO: 2632286 - RNA, 16 nt, Human
uucaggaagcucaggg

SEQ ID NO: 2632287 - RNA, 13 nt, Human
uucagcugcccca

SEQ ID NO: 2632288 - RNA, 18 nt, Human
uucagcugcauacaguuu

SEQ ID NO: 2632289 - RNA, 17 nt, Human
uucagcugacuuuucug

SEQ ID NO: 2632290 - RNA, 20 nt, Human
uucaggcgauucuccugccu

SEQ ID NO: 2632291 - RNA, 15 nt, Human
uucaggcucuucucc

SEQ ID NO: 2632292 - RNA, 21 nt, Human
uucaggauacucugucagaug

SEQ ID NO: 2632293 - RNA, 17 nt, Human
uucaggagucccaagga

SEQ ID NO: 2632294 - RNA, 16 nt, Human
uucaggauacaugugc

SEQ ID NO: 2632295 - RNA, 17 nt, Human
uucaggauacucuguca

SEQ ID NO: 2632296 - RNA, 20 nt, Human
uucaggagagaguugaaccu

SEQ ID NO: 2632297 - RNA, 21 nt, Human
uucaggagagaguugaaccua

SEQ ID NO: 2632298 - RNA, 19 nt, Human
uucaggaauguguggccug

SEQ ID NO: 2632299 - RNA, 21 nt, Human
uucaggacuuaacggcuccag

SEQ ID NO: 2632300 - RNA, 22 nt, Human
uucaggagcagccucagaacaa

SEQ ID NO: 2632301 - RNA, 20 nt, Human
uucaggagcagccucagaac

SEQ ID NO: 2632302 - RNA, 16 nt, Human
uucaggagcagccuca

SEQ ID NO: 2632303 - RNA, 12 nt, Human
uucaggagggau

SEQ ID NO: 2632304 - RNA, 19 nt, Human
uucaggaagcucagggccu

SEQ ID NO: 2632305 - RNA, 17 nt, Human
uucaggaagcucagggc

SEQ ID NO: 2632306 - RNA, 20 nt, Human
uucaggaagcucagggccug

SEQ ID NO: 2632307 - RNA, 15 nt, Human
uucaggaagcucagg

SEQ ID NO: 2632308 - RNA, 22 nt, Human
uucagaggcccucgcugccagc

SEQ ID NO: 2632309 - RNA, 23 nt, Human
uucagaggcccucgcugccagcu

SEQ ID NO: 2632310 - RNA, 21 nt, Human
uucagagacucagggccccag

SEQ ID NO: 2632311 - RNA, 15 nt, Human
uucagagacuccugc

SEQ ID NO: 2632312 - RNA, 19 nt, Human
uucagacuuugcuucccau

SEQ ID NO: 2632313 - RNA, 14 nt, Human
uucagacucagacu

SEQ ID NO: 2632314 - RNA, 15 nt, Human
uucagagacucaggg

SEQ ID NO: 2632315 - RNA, 20 nt, Human
uucagagacucagggcccca

SEQ ID NO: 2632316 - RNA, 20 nt, Human
uucagacucccauuccugaa

SEQ ID NO: 2632317 - RNA, 21 nt, Human
uucagacucccauuccugaag

SEQ ID NO: 2632318 - RNA, 13 nt, Human
uucagaccccagc

SEQ ID NO: 2632319 - RNA, 15 nt, Human
uucagaccccagcgg

SEQ ID NO: 2632320 - RNA, 12 nt, Human
uucagacucaga

SEQ ID NO: 2632321 - RNA, 13 nt, Human
uucagacucagac

SEQ ID NO: 2632322 - RNA, 22 nt, Human
uucacugaagaaaccuucagau

SEQ ID NO: 2632323 - RNA, 16 nt, Human
uucacucuuccagaau

SEQ ID NO: 2632324 - RNA, 10 nt, Human
uucagacccc

SEQ ID NO: 2632325 - RNA, 18 nt, Human
uucacucuuggagccugc

SEQ ID NO: 2632326 - RNA, 19 nt, Human
uucacucuuggagccugca

SEQ ID NO: 2632327 - RNA, 15 nt, Human
uucacucuuccagaa

SEQ ID NO: 2632328 - RNA, 12 nt, Human
uucacucucuga

SEQ ID NO: 2632329 - RNA, 14 nt, Human
uucacucuuccaga

SEQ ID NO: 2632330 - RNA, 14 nt, Human
uucacucuuggagc

SEQ ID NO: 2632331 - RNA, 14 nt, Human
uucacucuccuugg

SEQ ID NO: 2632332 - RNA, 16 nt, Human
uucacccccuuuccug

SEQ ID NO: 2632333 - RNA, 12 nt, Human
uucaccccuccc

SEQ ID NO: 2632334 - RNA, 13 nt, Human
uucacucucugaa

SEQ ID NO: 2632335 - RNA, 22 nt, Human
uucaccccccacucaccagugu

SEQ ID NO: 2632336 - RNA, 23 nt, Human
uucaccccccacucaccaguguc

SEQ ID NO: 2632337 - RNA, 17 nt, Human
uucaccccccacucacc

SEQ ID NO: 2632338 - RNA, 21 nt, Human
uucaccccaguggccacucag

SEQ ID NO: 2632339 - RNA, 19 nt, Human
uucacccccuuuccuggac

SEQ ID NO: 2632340 - RNA, 17 nt, Human
uucaccccagggccuga

SEQ ID NO: 2632341 - RNA, 20 nt, Human
uucaccccagggccugagcc

SEQ ID NO: 2632342 - RNA, 22 nt, Human
uucaccccaguggccacucagc

SEQ ID NO: 2632343 - RNA, 22 nt, Human
uucaccccagggccugagccug

SEQ ID NO: 2632344 - RNA, 14 nt, Human
uucaauuccugggc

SEQ ID NO: 2632345 - RNA, 16 nt, Human
uucaauuccugggccc

SEQ ID NO: 2632346 - RNA, 13 nt, Human
uucaauucucaaa

SEQ ID NO: 2632347 - RNA, 15 nt, Human
uucacccagacagcu

SEQ ID NO: 2632348 - RNA, 13 nt, Human
uucaccccacccu

SEQ ID NO: 2632349 - RNA, 14 nt, Human
uucaccccacccuu

SEQ ID NO: 2632350 - RNA, 18 nt, Human
uucacccagcuaaucugu

SEQ ID NO: 2632351 - RNA, 17 nt, Human
uucaccccaaucccagc

SEQ ID NO: 2632352 - RNA, 15 nt, Human
uuacgugagccaggu

SEQ ID NO: 2632353 - RNA, 14 nt, Human
uuacgugaguccug

SEQ ID NO: 2632354 - RNA, 13 nt, Human
uuacgugaguccu

SEQ ID NO: 2632355 - RNA, 21 nt, Human
uuacuaaacauuuuguuauug

SEQ ID NO: 2632356 - RNA, 16 nt, Human
uuacuaaacauuuugu

SEQ ID NO: 2632357 - RNA, 13 nt, Human
uuacuaaacauuu

SEQ ID NO: 2632358 - RNA, 14 nt, Human
uuauuuucaguauu

SEQ ID NO: 2632359 - RNA, 12 nt, Human
uuauuuucagua

SEQ ID NO: 2632360 - RNA, 14 nt, Human
uuauuuucaccugu

SEQ ID NO: 2632361 - RNA, 18 nt, Human
uuacuaaagaaaauaucu

SEQ ID NO: 2632362 - RNA, 11 nt, Human
uuacuaaagaa

SEQ ID NO: 2632363 - RNA, 12 nt, Human
uuauuuucacug

SEQ ID NO: 2632364 - RNA, 12 nt, Human
uuauuuucuaca

SEQ ID NO: 2632365 - RNA, 16 nt, Human
uuauuuuccuccccag

SEQ ID NO: 2632366 - RNA, 13 nt, Human
uuauuuuccaaaa

SEQ ID NO: 2632367 - RNA, 14 nt, Human
uuauuuuccucccc

SEQ ID NO: 2632368 - RNA, 15 nt, Human
uuauuuuccucccca

SEQ ID NO: 2632369 - RNA, 13 nt, Human
uucaaagauauuu

SEQ ID NO: 2632370 - RNA, 15 nt, Human
uucaaagcaaauguc

SEQ ID NO: 2632371 - RNA, 11 nt, Human
uuauuuugaug

SEQ ID NO: 2632372 - RNA, 17 nt, Human
uuauuuucuuugaaauu

SEQ ID NO: 2632373 - RNA, 21 nt, Human
uuauuuucugguagauagaaa

SEQ ID NO: 2632374 - RNA, 19 nt, Human
uucaaagcaccaaaauaag

SEQ ID NO: 2632375 - RNA, 21 nt, Human
uucaaagcaccaaaauaagaa

SEQ ID NO: 2632376 - RNA, 23 nt, Human
uucaaagcaccaaaauaagaaaa

SEQ ID NO: 2632377 - RNA, 13 nt, Human
uucaaagccagcg

SEQ ID NO: 2632378 - RNA, 23 nt, Human
uucaaagccaaguuuauauacaa

SEQ ID NO: 2632379 - RNA, 13 nt, Human
uucaaauuucaca

SEQ ID NO: 2632380 - RNA, 23 nt, Human
uucaaauuguaagcaugcacaaa

SEQ ID NO: 2632381 - RNA, 17 nt, Human
uucaaagauucaaaauu

SEQ ID NO: 2632382 - RNA, 20 nt, Human
uucaaucucccgcugcugcu

SEQ ID NO: 2632383 - RNA, 14 nt, Human
uucaaucuguaaac

SEQ ID NO: 2632384 - RNA, 15 nt, Human
uucaaucuguaaacu

SEQ ID NO: 2632385 - RNA, 16 nt, Human
uucaaucccaggaugu

SEQ ID NO: 2632386 - RNA, 15 nt, Human
uucaacccuggagag

SEQ ID NO: 2632387 - RNA, 14 nt, Human
uucaacgcagcccu

SEQ ID NO: 2632388 - RNA, 13 nt, Human
uucaacccuggag

SEQ ID NO: 2632389 - RNA, 13 nt, Human
uucaacgcagccc

SEQ ID NO: 2632390 - RNA, 20 nt, Human
uucaaccauuccccauggga

SEQ ID NO: 2632391 - RNA, 17 nt, Human
uucaaccauuccccaug

SEQ ID NO: 2632392 - RNA, 16 nt, Human
uucaacaggagaauuu

SEQ ID NO: 2632393 - RNA, 23 nt, Human
uucaacagacccccucuagaaau

SEQ ID NO: 2632394 - RNA, 16 nt, Human
uucaaucuguaaacug

SEQ ID NO: 2632395 - RNA, 17 nt, Human
uucaaucuguaaacugu

SEQ ID NO: 2632396 - RNA, 18 nt, Human
uucaaucuguaaacugug

SEQ ID NO: 2632397 - RNA, 20 nt, Human
uucaaucuguaaacugugua

SEQ ID NO: 2632398 - RNA, 15 nt, Human
uucaaugaucuaggu

SEQ ID NO: 2632399 - RNA, 12 nt, Human
uucaaugaucua

SEQ ID NO: 2632400 - RNA, 16 nt, Human
uucaaugauaguaaga

SEQ ID NO: 2632401 - RNA, 16 nt, Human
uucaauggcugcugaa

SEQ ID NO: 2632402 - RNA, 22 nt, Human
uucaaugaucuagguuuaacuc

SEQ ID NO: 2632403 - RNA, 19 nt, Human
uucaaugaucuagguuuaa

SEQ ID NO: 2632404 - RNA, 22 nt, Human
uucaaugguuugcaaggaagcc

SEQ ID NO: 2632405 - RNA, 20 nt, Human
uucaaugguuugcaaggaag

SEQ ID NO: 2632406 - RNA, 21 nt, Human
uucaaugugauucuaaugucu

SEQ ID NO: 2632407 - RNA, 23 nt, Human
uucaaugaucuagguuuaacuca

SEQ ID NO: 2632408 - RNA, 23 nt, Human
uucaaugguuugcaaggaagcca

SEQ ID NO: 2632409 - RNA, 18 nt, Human
uucaauucucauuuguca

SEQ ID NO: 2632410 - RNA, 16 nt, Human
uucaauuccucuggga

SEQ ID NO: 2632411 - RNA, 13 nt, Human
uucaauuccuggg

SEQ ID NO: 2632412 - RNA, 12 nt, Human
uucaauuccucu

SEQ ID NO: 2632413 - RNA, 19 nt, Human
uucaauucagugcuguacu

SEQ ID NO: 2632414 - RNA, 17 nt, Human
uucaauucaacacuccc

SEQ ID NO: 2632415 - RNA, 13 nt, Human
uucaauucagugc

SEQ ID NO: 2632416 - RNA, 19 nt, Human
uucaauuaaacggauuauu

SEQ ID NO: 2632417 - RNA, 18 nt, Human
uucaauuaaacggauuau

SEQ ID NO: 2632418 - RNA, 16 nt, Human
uucaauuaaacggauu

SEQ ID NO: 2632419 - RNA, 15 nt, Human
uucaauuaaacggau

SEQ ID NO: 2632420 - RNA, 14 nt, Human
uucaauuaaacgga

SEQ ID NO: 2632421 - RNA, 12 nt, Human
uucaauuaaacg

SEQ ID NO: 2632422 - RNA, 11 nt, Human
uucaauuaaac

SEQ ID NO: 2632423 - RNA, 11 nt, Human
uuuuuucugag

SEQ ID NO: 2632424 - RNA, 12 nt, Human
uuuuuucugaau

SEQ ID NO: 2632425 - RNA, 11 nt, Human
uuuuuucuacc

SEQ ID NO: 2632426 - RNA, 16 nt, Human
uuuuuuaugcuaauca

SEQ ID NO: 2632427 - RNA, 20 nt, Human
uuuuuuauacacuguaauga

SEQ ID NO: 2632428 - RNA, 12 nt, Human
uuuuuucuaaga

SEQ ID NO: 2632429 - RNA, 15 nt, Human
uuuuuucuaagagaa

SEQ ID NO: 2632430 - RNA, 17 nt, Human
uuuuuuccuucagugcc

SEQ ID NO: 2632431 - RNA, 13 nt, Human
uuuuuuaugcuaa

SEQ ID NO: 2632432 - RNA, 16 nt, Human
uuuuuuagaucaaaua

SEQ ID NO: 2632433 - RNA, 15 nt, Human
uuuuuuauacacaua

SEQ ID NO: 2632434 - RNA, 12 nt, Human
uuuuuuacuaau

SEQ ID NO: 2632435 - RNA, 14 nt, Human
uuuuucuguuauau

SEQ ID NO: 2632436 - RNA, 23 nt, Human
uuuuucuuaaauaauaaagauca

SEQ ID NO: 2632437 - RNA, 20 nt, Human
uuuuuuauacaggaugauga

SEQ ID NO: 2632438 - RNA, 16 nt, Human
uuuuucuucuguauuu

SEQ ID NO: 2632439 - RNA, 23 nt, Human
uuuuuuagaaagcauuugaaugc

SEQ ID NO: 2632440 - RNA, 15 nt, Human
uuuuuuagaucaaau

SEQ ID NO: 2632441 - RNA, 14 nt, Human
uuuuucugcacuga

SEQ ID NO: 2632442 - RNA, 17 nt, Human
uuuuucugcacugagca

SEQ ID NO: 2632443 - RNA, 13 nt, Human
uuuuucugauugu

SEQ ID NO: 2632444 - RNA, 20 nt, Human
uuuugaaaucuguaucugua

SEQ ID NO: 2632445 - RNA, 23 nt, Human
uuuuucugcacugagcagagucu

SEQ ID NO: 2632446 - RNA, 22 nt, Human
uuuuucugcacugagcagaguc

SEQ ID NO: 2632447 - RNA, 14 nt, Human
uuuuucugcuuuug

SEQ ID NO: 2632448 - RNA, 17 nt, Human
uuuuucugcuuuugaaa

SEQ ID NO: 2632449 - RNA, 21 nt, Human
uuuuucuggagguugauaacu

SEQ ID NO: 2632450 - RNA, 21 nt, Human
uuuugaaaccaugaagagauu

SEQ ID NO: 2632451 - RNA, 22 nt, Human
uuuugaaauauuaaacccugga

SEQ ID NO: 2632452 - RNA, 23 nt, Human
uuuugaaaagcuauuagccagga

SEQ ID NO: 2632453 - RNA, 16 nt, Human
uuuugaaaagcuauua

SEQ ID NO: 2632454 - RNA, 15 nt, Human
uuuugaaaagcuauu

SEQ ID NO: 2632455 - RNA, 22 nt, Human
uuuugaaaaauuccuauuguga

SEQ ID NO: 2632456 - RNA, 21 nt, Human
uuuucuugccucuguccccuu

SEQ ID NO: 2632457 - RNA, 19 nt, Human
uuuucuugccucugucccc

SEQ ID NO: 2632458 - RNA, 18 nt, Human
uuuucuugccucuguccc

SEQ ID NO: 2632459 - RNA, 13 nt, Human
uuuugaaaaacug

SEQ ID NO: 2632460 - RNA, 18 nt, Human
uuuugaaaaauuccuauu

SEQ ID NO: 2632461 - RNA, 13 nt, Human
uuuucuuguaauu

SEQ ID NO: 2632462 - RNA, 21 nt, Human
uuuucuugccaaugaggucug

SEQ ID NO: 2632463 - RNA, 16 nt, Human
uuuaucgucacugcuu

SEQ ID NO: 2632464 - RNA, 16 nt, Human
uuuauaaacuuuaccu

SEQ ID NO: 2632465 - RNA, 21 nt, Human
uuuaucgucacugcuuaacuu

SEQ ID NO: 2632466 - RNA, 17 nt, Human
uuuauaaaccucuaauu

SEQ ID NO: 2632467 - RNA, 16 nt, Human
uuuauaaaccucuaau

SEQ ID NO: 2632468 - RNA, 20 nt, Human
uuuaucuaauaccucugugu

SEQ ID NO: 2632469 - RNA, 14 nt, Human
uuuauaaacuuuac

SEQ ID NO: 2632470 - RNA, 18 nt, Human
uuuagaguuagacuguug

SEQ ID NO: 2632471 - RNA, 13 nt, Human
uuuauaaaacuuc

SEQ ID NO: 2632472 - RNA, 23 nt, Human
uuuauaaaagaauaaaauugcac

SEQ ID NO: 2632473 - RNA, 14 nt, Human
uuuauaaaacuucu

SEQ ID NO: 2632474 - RNA, 17 nt, Human
uuuagaguuagacuguu

SEQ ID NO: 2632475 - RNA, 16 nt, Human
uuuagaguuagacugu

SEQ ID NO: 2632476 - RNA, 16 nt, Human
uuuagagcauugccau

SEQ ID NO: 2632477 - RNA, 18 nt, Human
uuuagaguagcaugagag

SEQ ID NO: 2632478 - RNA, 21 nt, Human
uuuaugaaaugguuaagaauu

SEQ ID NO: 2632479 - RNA, 18 nt, Human
uuuaugaagaaaaaauac

SEQ ID NO: 2632480 - RNA, 19 nt, Human
uuuaugaagaaaaaauaca

SEQ ID NO: 2632481 - RNA, 12 nt, Human
uuuaugaagaaa

SEQ ID NO: 2632482 - RNA, 22 nt, Human
uuuaugaagaaaaaauacauuu

SEQ ID NO: 2632483 - RNA, 22 nt, Human
uuuaugauacuugaaaauuaac

SEQ ID NO: 2632484 - RNA, 17 nt, Human
uuuaugaaggcaaaaaa

SEQ ID NO: 2632485 - RNA, 18 nt, Human
uuuaugauuuaauaaaau

SEQ ID NO: 2632486 - RNA, 14 nt, Human
uuuaugauuuaaua

SEQ ID NO: 2632487 - RNA, 12 nt, Human
uuuaugauuuaa

SEQ ID NO: 2632488 - RNA, 14 nt, Human
uuuaugauguauau

SEQ ID NO: 2632489 - RNA, 16 nt, Human
uuuaugcaaauauuuu

SEQ ID NO: 2632490 - RNA, 18 nt, Human
uuuaucuuuauaugaaga

SEQ ID NO: 2632491 - RNA, 12 nt, Human
uuuaucuuuaua

SEQ ID NO: 2632492 - RNA, 19 nt, Human
uuuaucuuugauucuccuu

SEQ ID NO: 2632493 - RNA, 18 nt, Human
uuuaucuuugauucuccu

SEQ ID NO: 2632494 - RNA, 19 nt, Human
uuuaugaaagguuuacauu

SEQ ID NO: 2632495 - RNA, 18 nt, Human
uuuaugaaagguuuacau

SEQ ID NO: 2632496 - RNA, 13 nt, Human
uuuaugaaaagag

SEQ ID NO: 2632497 - RNA, 22 nt, Human
uuuauuguaacagacauuguuu

SEQ ID NO: 2632498 - RNA, 20 nt, Human
uuuauuguaacagacauugu

SEQ ID NO: 2632499 - RNA, 13 nt, Human
uuuauuguauaaa

SEQ ID NO: 2632500 - RNA, 16 nt, Human
uuuauuguaacagaca

SEQ ID NO: 2632501 - RNA, 16 nt, Human
uuuauugucaaagugg

SEQ ID NO: 2632502 - RNA, 14 nt, Human
uuuauugucaaagu

SEQ ID NO: 2632503 - RNA, 19 nt, Human
uuuauuuaguuccuugagu

SEQ ID NO: 2632504 - RNA, 13 nt, Human
uuuauugugaucu

SEQ ID NO: 2632505 - RNA, 17 nt, Human
uuuauuguguuugucau

SEQ ID NO: 2632506 - RNA, 16 nt, Human
uuuauuguguuuguca

SEQ ID NO: 2632507 - RNA, 15 nt, Human
uuuauuuaucaguga

SEQ ID NO: 2632508 - RNA, 15 nt, Human
uuuauuuauacuauu

SEQ ID NO: 2632509 - RNA, 22 nt, Human
uuuauuguguuugucauuagcc

SEQ ID NO: 2632510 - RNA, 21 nt, Human
uuuauuguguuugucauuagc

SEQ ID NO: 2632511 - RNA, 17 nt, Human
uuuauuuauacacuguc

SEQ ID NO: 2632512 - RNA, 20 nt, Human
uuuauuguuaacucuugucu

SEQ ID NO: 2632513 - RNA, 17 nt, Human
uuuauuguguuuuuaau

SEQ ID NO: 2632514 - RNA, 14 nt, Human
uuuaugcauauuau

SEQ ID NO: 2632515 - RNA, 15 nt, Human
uuuaugcaaggaagg

SEQ ID NO: 2632516 - RNA, 17 nt, Human
uuuaugcaaggaaggaa

SEQ ID NO: 2632517 - RNA, 18 nt, Human
uuuaugcaaggaaggaaa

SEQ ID NO: 2632518 - RNA, 17 nt, Human
uuuauucaaguuauugu

SEQ ID NO: 2632519 - RNA, 17 nt, Human
uuuauuauuuucaccug

SEQ ID NO: 2632520 - RNA, 22 nt, Human
uuuauucagcuucauuuguguc

SEQ ID NO: 2632521 - RNA, 21 nt, Human
uuuauucagcuucauuugugu

SEQ ID NO: 2632522 - RNA, 19 nt, Human
uuuauucagcuucauuugu

SEQ ID NO: 2632523 - RNA, 17 nt, Human
uuuauucagcuucauuu

SEQ ID NO: 2632524 - RNA, 13 nt, Human
uuuauucaauaaa

SEQ ID NO: 2632525 - RNA, 17 nt, Human
uuuauucaauuccucug

SEQ ID NO: 2632526 - RNA, 18 nt, Human
uuuauuccagaaugcugu

SEQ ID NO: 2632527 - RNA, 19 nt, Human
uuuauuccagaaugcugua

SEQ ID NO: 2632528 - RNA, 22 nt, Human
uuuauuccagaaugcuguacau

SEQ ID NO: 2632529 - RNA, 23 nt, Human
uuuauuccagaaugcuguacauc

SEQ ID NO: 2632530 - RNA, 23 nt, Human
uuuauugcaucuggguagcugua

SEQ ID NO: 2632531 - RNA, 24 nt, Human
uuuauugcaucuggguagcuguaa

SEQ ID NO: 2632532 - RNA, 17 nt, Human
uuuauugcuugauacuu

SEQ ID NO: 2632533 - RNA, 16 nt, Human
uuuauuggcugagaua

SEQ ID NO: 2632534 - RNA, 14 nt, Human
uuuauugcuuuaua

SEQ ID NO: 2632535 - RNA, 13 nt, Human
uuuauugcuuguu

SEQ ID NO: 2632536 - RNA, 12 nt, Human
uuuagaaacaca

SEQ ID NO: 2632537 - RNA, 16 nt, Human
uuuacuuuuaaacugu

SEQ ID NO: 2632538 - RNA, 16 nt, Human
uuuacuuuuaaauguc

SEQ ID NO: 2632539 - RNA, 19 nt, Human
uuuacaugggguuuucaau

SEQ ID NO: 2632540 - RNA, 18 nt, Human
uuuacuuuuaaacaguga

SEQ ID NO: 2632541 - RNA, 15 nt, Human
uuuacuuuuaaacug

SEQ ID NO: 2632542 - RNA, 15 nt, Human
uuuacuuuuaaacag

SEQ ID NO: 2632543 - RNA, 13 nt, Human
uuuacuuugaauu

SEQ ID NO: 2632544 - RNA, 15 nt, Human
uuuacauuguaaaua

SEQ ID NO: 2632545 - RNA, 20 nt, Human
uuuacauuguaaauaguauu

SEQ ID NO: 2632546 - RNA, 15 nt, Human
uuuacuuuguguuca

SEQ ID NO: 2632547 - RNA, 13 nt, Human
uuuacauuguaaa

SEQ ID NO: 2632548 - RNA, 15 nt, Human
uuuacauguaguagu

SEQ ID NO: 2632549 - RNA, 19 nt, Human
uuuacaauuuacaaagugu

SEQ ID NO: 2632550 - RNA, 18 nt, Human
uuuacaugggguuuucaa

SEQ ID NO: 2632551 - RNA, 20 nt, Human
uuuagacuuaauagaaacau

SEQ ID NO: 2632552 - RNA, 18 nt, Human
uuuagagaacuguggccg

SEQ ID NO: 2632553 - RNA, 15 nt, Human
uuuagagaggaaaag

SEQ ID NO: 2632554 - RNA, 21 nt, Human
uuuagagaugaauuaaauuua

SEQ ID NO: 2632555 - RNA, 19 nt, Human
uuuagaagaagugugucac

SEQ ID NO: 2632556 - RNA, 15 nt, Human
uuuagaagacucuac

SEQ ID NO: 2632557 - RNA, 14 nt, Human
uuuagaagacucua

SEQ ID NO: 2632558 - RNA, 17 nt, Human
uuuagaagaaguguguc

SEQ ID NO: 2632559 - RNA, 20 nt, Human
uuuagaaacacaacuauauu

SEQ ID NO: 2632560 - RNA, 20 nt, Human
uuguauuuauucaauaaagu

SEQ ID NO: 2632561 - RNA, 16 nt, Human
uuguauuuauucaaua

SEQ ID NO: 2632562 - RNA, 15 nt, Human
uuguauuuauucaau

SEQ ID NO: 2632563 - RNA, 14 nt, Human
uuguauuuauucaa

SEQ ID NO: 2632564 - RNA, 16 nt, Human
uuguauuguuucaauu

SEQ ID NO: 2632565 - RNA, 12 nt, Human
uuuaaucaugaa

SEQ ID NO: 2632566 - RNA, 20 nt, Human
uuguauuuuacuaauaaaau

SEQ ID NO: 2632567 - RNA, 15 nt, Human
uuguauuuauuuagu

SEQ ID NO: 2632568 - RNA, 18 nt, Human
uuguauuuauuccauauu

SEQ ID NO: 2632569 - RNA, 14 nt, Human
uuguauuuuaacuc

SEQ ID NO: 2632570 - RNA, 20 nt, Human
uuguauucucugagcugugc

SEQ ID NO: 2632571 - RNA, 22 nt, Human
uuguauucucugagcugugcag

SEQ ID NO: 2632572 - RNA, 17 nt, Human
uuguauucuuugauguu

SEQ ID NO: 2632573 - RNA, 13 nt, Human
uuguauucuuuga

SEQ ID NO: 2632574 - RNA, 15 nt, Human
uuguauucucugagc

SEQ ID NO: 2632575 - RNA, 16 nt, Human
uuguauucucugagcu

SEQ ID NO: 2632576 - RNA, 14 nt, Human
uuguauucucugag

SEQ ID NO: 2632577 - RNA, 19 nt, Human
uuguauucuuugauguuaa

SEQ ID NO: 2632578 - RNA, 18 nt, Human
uuguauucuuugauguua

SEQ ID NO: 2632579 - RNA, 15 nt, Human
uuguauuguuucaau

SEQ ID NO: 2632580 - RNA, 19 nt, Human
uuuacaauuuuuuaucaug

SEQ ID NO: 2632581 - RNA, 15 nt, Human
uuuacaauugaaaug

SEQ ID NO: 2632582 - RNA, 16 nt, Human
uuuacaauugaaauga

SEQ ID NO: 2632583 - RNA, 18 nt, Human
uuuacaauuuacaaagug

SEQ ID NO: 2632584 - RNA, 23 nt, Human
uuuacaauuguaaaacugaggca

SEQ ID NO: 2632585 - RNA, 16 nt, Human
uuuacaauaaauaauc

SEQ ID NO: 2632586 - RNA, 21 nt, Human
uuuacaaucagccacauucua

SEQ ID NO: 2632587 - RNA, 21 nt, Human
uuuacaaguguauaucagaaa

SEQ ID NO: 2632588 - RNA, 15 nt, Human
uuuacaaguguauau

SEQ ID NO: 2632589 - RNA, 21 nt, Human
uuuacaagcccccccuuccac

SEQ ID NO: 2632590 - RNA, 15 nt, Human
uuuacaagccccccc

SEQ ID NO: 2632591 - RNA, 15 nt, Human
uuuaaucauugccug

SEQ ID NO: 2632592 - RNA, 14 nt, Human
uuuaaucauugccu

SEQ ID NO: 2632593 - RNA, 24 nt, Human
uuuaaucaugaaauuacuuaucau

SEQ ID NO: 2632594 - RNA, 19 nt, Human
uuuaaucaugaaauuacuu

SEQ ID NO: 2632595 - RNA, 14 nt, Human
uuuaaucaugaaau

SEQ ID NO: 2632596 - RNA, 13 nt, Human
uuuaaucaugaaa

SEQ ID NO: 2632597 - RNA, 22 nt, Human
uuuaauccccaguaaaauugcc

SEQ ID NO: 2632598 - RNA, 16 nt, Human
uuuaauccccaguaaa

SEQ ID NO: 2632599 - RNA, 15 nt, Human
uuuaauccccaguaa

SEQ ID NO: 2632600 - RNA, 21 nt, Human
uuuaauccagaauugaccuuu

SEQ ID NO: 2632601 - RNA, 19 nt, Human
uuuacaagaaaaaaugaau

SEQ ID NO: 2632602 - RNA, 21 nt, Human
uuuacaagaaaaaaugaauuu

SEQ ID NO: 2632603 - RNA, 12 nt, Human
uuuacaagaaaa

SEQ ID NO: 2632604 - RNA, 13 nt, Human
uuuaaucuucagu

SEQ ID NO: 2632605 - RNA, 23 nt, Human
uuuaauccuucuaguuucccaca

SEQ ID NO: 2632606 - RNA, 21 nt, Human
uuuaauccuucuaguuuccca

SEQ ID NO: 2632607 - RNA, 14 nt, Human
uuuaauccagaauu

SEQ ID NO: 2632608 - RNA, 24 nt, Human
uuucuccccugcccccaggacugg

SEQ ID NO: 2632609 - RNA, 23 nt, Human
uuucuccccugcccccaggacug

SEQ ID NO: 2632610 - RNA, 20 nt, Human
uuucuccccugcccccagga

SEQ ID NO: 2632611 - RNA, 22 nt, Human
uuucuccccugcccccaggacu

SEQ ID NO: 2632612 - RNA, 22 nt, Human
uuucuaggaagaauuuuaaaaa

SEQ ID NO: 2632613 - RNA, 21 nt, Human
uuucuaggaagaauuuuaaaa

SEQ ID NO: 2632614 - RNA, 16 nt, Human
uuucuaggaagaauuu

SEQ ID NO: 2632615 - RNA, 14 nt, Human
uuucuaggaagaau

SEQ ID NO: 2632616 - RNA, 21 nt, Human
uuucucccucucacugucuga

SEQ ID NO: 2632617 - RNA, 20 nt, Human
uuucucccucucacugucug

SEQ ID NO: 2632618 - RNA, 13 nt, Human
uuucucccucuca

SEQ ID NO: 2632619 - RNA, 17 nt, Human
uuucucccuaaacugua

SEQ ID NO: 2632620 - RNA, 13 nt, Human
uuucucccucugg

SEQ ID NO: 2632621 - RNA, 22 nt, Human
uuucucccucucacugucugag

SEQ ID NO: 2632622 - RNA, 15 nt, Human
uuucuccucccagga

SEQ ID NO: 2632623 - RNA, 14 nt, Human
uuucuccuccaugg

SEQ ID NO: 2632624 - RNA, 15 nt, Human
uuucuagccagagga

SEQ ID NO: 2632625 - RNA, 14 nt, Human
uuucuaaugagaua

SEQ ID NO: 2632626 - RNA, 13 nt, Human
uuucuaauguggu

SEQ ID NO: 2632627 - RNA, 16 nt, Human
uuucuagauuaagaua

SEQ ID NO: 2632628 - RNA, 19 nt, Human
uuucuagcccgaauacaaa

SEQ ID NO: 2632629 - RNA, 21 nt, Human
uuucuagcuguugagcuguuu

SEQ ID NO: 2632630 - RNA, 19 nt, Human
uuucuagcuguugagcugu

SEQ ID NO: 2632631 - RNA, 22 nt, Human
uuucuagcuagaaauaugauuu

SEQ ID NO: 2632632 - RNA, 20 nt, Human
uuucuagcuagaaauaugau

SEQ ID NO: 2632633 - RNA, 20 nt, Human
uuucuagcccgaauacaaac

SEQ ID NO: 2632634 - RNA, 19 nt, Human
uuucuagcuagaaauauga

SEQ ID NO: 2632635 - RNA, 16 nt, Human
uuucucuucauacuuu

SEQ ID NO: 2632636 - RNA, 13 nt, Human
uuucucuugggcu

SEQ ID NO: 2632637 - RNA, 21 nt, Human
uuucucuugggcugagacugg

SEQ ID NO: 2632638 - RNA, 12 nt, Human
uuucucuugggc

SEQ ID NO: 2632639 - RNA, 18 nt, Human
uuucucuguguuuguucc

SEQ ID NO: 2632640 - RNA, 17 nt, Human
uuucucuguguuuguuc

SEQ ID NO: 2632641 - RNA, 17 nt, Human
uuucucuuacugcaaau

SEQ ID NO: 2632642 - RNA, 17 nt, Human
uuucucuguauaguacu

SEQ ID NO: 2632643 - RNA, 16 nt, Human
uuucuccucccuuccu

SEQ ID NO: 2632644 - RNA, 15 nt, Human
uuucuccucccuucc

SEQ ID NO: 2632645 - RNA, 19 nt, Human
uuucuccuuagucuucuca

SEQ ID NO: 2632646 - RNA, 20 nt, Human
uuucuccuuagucuucucau

SEQ ID NO: 2632647 - RNA, 22 nt, Human
uuucugagaaagacuauucaaa

SEQ ID NO: 2632648 - RNA, 15 nt, Human
uuucugagcccgggc

SEQ ID NO: 2632649 - RNA, 12 nt, Human
uuucugagcccg

SEQ ID NO: 2632650 - RNA, 11 nt, Human
uuucugagccc

SEQ ID NO: 2632651 - RNA, 16 nt, Human
uuucugagcacacuuu

SEQ ID NO: 2632652 - RNA, 16 nt, Human
uuucugagaagguccu

SEQ ID NO: 2632653 - RNA, 19 nt, Human
uuucugagaagguccuuaa

SEQ ID NO: 2632654 - RNA, 14 nt, Human
uuucucuuucuccu

SEQ ID NO: 2632655 - RNA, 16 nt, Human
uuucucuuucucuccu

SEQ ID NO: 2632656 - RNA, 12 nt, Human
uuucucuuucuc

SEQ ID NO: 2632657 - RNA, 17 nt, Human
uuucuaaagcugccagc

SEQ ID NO: 2632658 - RNA, 14 nt, Human
uuucuaaagcugcc

SEQ ID NO: 2632659 - RNA, 14 nt, Human
uuucuaaaggcuac

SEQ ID NO: 2632660 - RNA, 20 nt, Human
uuuccugagaccacagagag

SEQ ID NO: 2632661 - RNA, 13 nt, Human
uuuccugagcuug

SEQ ID NO: 2632662 - RNA, 18 nt, Human
uuuccugagcuuggccag

SEQ ID NO: 2632663 - RNA, 18 nt, Human
uuucuaaaggcuaccuuu

SEQ ID NO: 2632664 - RNA, 19 nt, Human
uuucuaaaggccucuuccu

SEQ ID NO: 2632665 - RNA, 16 nt, Human
uuucuaagagaaguua

SEQ ID NO: 2632666 - RNA, 11 nt, Human
uuucuaagaga

SEQ ID NO: 2632667 - RNA, 13 nt, Human
uuucuaagagaag

SEQ ID NO: 2632668 - RNA, 17 nt, Human
uuuccuagcccucucac

SEQ ID NO: 2632669 - RNA, 21 nt, Human
uuuccuagcacacacuuuugg

SEQ ID NO: 2632670 - RNA, 23 nt, Human
uuuccuagcccucucacauuuau

SEQ ID NO: 2632671 - RNA, 21 nt, Human
uuuccuaguucuguagaaaug

SEQ ID NO: 2632672 - RNA, 23 nt, Human
uuuccuagauggcagucacugaa

SEQ ID NO: 2632673 - RNA, 15 nt, Human
uuuccaggcugguuc

SEQ ID NO: 2632674 - RNA, 22 nt, Human
uuuccaggcugguucggauuug

SEQ ID NO: 2632675 - RNA, 24 nt, Human
uuuccuacucucaggaucaagaaa

SEQ ID NO: 2632676 - RNA, 18 nt, Human
uuuccuagcacacacuuu

SEQ ID NO: 2632677 - RNA, 21 nt, Human
uuuccucuuuggucuacacug

SEQ ID NO: 2632678 - RNA, 21 nt, Human
uuuccugaaacaacuuggaaa

SEQ ID NO: 2632679 - RNA, 23 nt, Human
uuuccugacagaaggacucaggu

SEQ ID NO: 2632680 - RNA, 22 nt, Human
uuuccucaaaacuucagacaua

SEQ ID NO: 2632681 - RNA, 21 nt, Human
uuuccucuucuauuuuguaaa

SEQ ID NO: 2632682 - RNA, 22 nt, Human
uuuccucuucuauuuuguaaac

SEQ ID NO: 2632683 - RNA, 22 nt, Human
uuucagggcuaacgaccacagg

SEQ ID NO: 2632684 - RNA, 21 nt, Human
uuucaggggucgucaccaccu

SEQ ID NO: 2632685 - RNA, 22 nt, Human
uuucagggagguggcuggguuu

SEQ ID NO: 2632686 - RNA, 19 nt, Human
uuucagggagguggcuggg

SEQ ID NO: 2632687 - RNA, 22 nt, Human
uuucauugcugggcuugucugu

SEQ ID NO: 2632688 - RNA, 13 nt, Human
uuucauucuucuc

SEQ ID NO: 2632689 - RNA, 15 nt, Human
uuucauucuccugcc

SEQ ID NO: 2632690 - RNA, 22 nt, Human
uuucauugacuaucaaacugaa

SEQ ID NO: 2632691 - RNA, 21 nt, Human
uuucauugauaugaaaaauau

SEQ ID NO: 2632692 - RNA, 22 nt, Human
uuucauugauaugaaaaauaug

SEQ ID NO: 2632693 - RNA, 17 nt, Human
uuucaggagcagccuca

SEQ ID NO: 2632694 - RNA, 16 nt, Human
uuucaggaccuuuuga

SEQ ID NO: 2632695 - RNA, 20 nt, Human
uuucagcuucugcugggcug

SEQ ID NO: 2632696 - RNA, 19 nt, Human
uuucagcuucugcugggcu

SEQ ID NO: 2632697 - RNA, 22 nt, Human
uuucaggagagaguugaaccua

SEQ ID NO: 2632698 - RNA, 13 nt, Human
uuucaggauacuc

SEQ ID NO: 2632699 - RNA, 16 nt, Human
uuucaggauacucugu

SEQ ID NO: 2632700 - RNA, 19 nt, Human
uuucaggauacucugucag

SEQ ID NO: 2632701 - RNA, 20 nt, Human
uuucaggauacucugucaga

SEQ ID NO: 2632702 - RNA, 21 nt, Human
uuucaggauacucugucagau

SEQ ID NO: 2632703 - RNA, 15 nt, Human
uuucagccaagaauu

SEQ ID NO: 2632704 - RNA, 16 nt, Human
uuucagccaagaauuc

SEQ ID NO: 2632705 - RNA, 21 nt, Human
uuucagcugugaacauggacu

SEQ ID NO: 2632706 - RNA, 14 nt, Human
uuucagcuucugcu

SEQ ID NO: 2632707 - RNA, 13 nt, Human
uuuccaggaaggc

SEQ ID NO: 2632708 - RNA, 19 nt, Human
uuuccagaggcuauuauuu

SEQ ID NO: 2632709 - RNA, 18 nt, Human
uuuccagacuuccuugag

SEQ ID NO: 2632710 - RNA, 19 nt, Human
uuuccagacuuccuugaga

SEQ ID NO: 2632711 - RNA, 23 nt, Human
uuuccacuuuguucuuuaggaga

SEQ ID NO: 2632712 - RNA, 13 nt, Human
uuuccaaaggcau

SEQ ID NO: 2632713 - RNA, 15 nt, Human
uuuccaaauaaaaug

SEQ ID NO: 2632714 - RNA, 14 nt, Human
uuuccaaaggcauu

SEQ ID NO: 2632715 - RNA, 15 nt, Human
uuuccaaauucacaa

SEQ ID NO: 2632716 - RNA, 12 nt, Human
uuuccaaaguac

SEQ ID NO: 2632717 - RNA, 15 nt, Human
uuuccaaaguacacu

SEQ ID NO: 2632718 - RNA, 14 nt, Human
uuuccaaaauaauu

SEQ ID NO: 2632719 - RNA, 17 nt, Human
uuucauuguaugaugug

SEQ ID NO: 2632720 - RNA, 24 nt, Human
uuuccaaaaguggccucuuugucu

SEQ ID NO: 2632721 - RNA, 16 nt, Human
uuucauuguaugaugu

SEQ ID NO: 2632722 - RNA, 15 nt, Human
uuucauuguaugaug

SEQ ID NO: 2632723 - RNA, 14 nt, Human
uuucauuguaaaac

SEQ ID NO: 2632724 - RNA, 15 nt, Human
uuucagcagcugcag

SEQ ID NO: 2632725 - RNA, 21 nt, Human
uuucagauaaucacaauacau

SEQ ID NO: 2632726 - RNA, 18 nt, Human
uuucagauaacuguuauu

SEQ ID NO: 2632727 - RNA, 21 nt, Human
uuucagacucccauuccugaa

SEQ ID NO: 2632728 - RNA, 17 nt, Human
uuucaauauuuuccuuc

SEQ ID NO: 2632729 - RNA, 15 nt, Human
uuucagauaaucaca

SEQ ID NO: 2632730 - RNA, 17 nt, Human
uuucagagaccauugca

SEQ ID NO: 2632731 - RNA, 16 nt, Human
uuucagagaccauugc

SEQ ID NO: 2632732 - RNA, 16 nt, Human
uuuauuucugcauaug

SEQ ID NO: 2632733 - RNA, 13 nt, Human
uuuauuuccagug

SEQ ID NO: 2632734 - RNA, 15 nt, Human
uuuauuuauuuuauc

SEQ ID NO: 2632735 - RNA, 13 nt, Human
uuuauuuauuuau

SEQ ID NO: 2632736 - RNA, 14 nt, Human
uuuauuuauuuaca

SEQ ID NO: 2632737 - RNA, 14 nt, Human
uuuauuuaucagug

SEQ ID NO: 2632738 - RNA, 14 nt, Human
uuuauuuauuaaga

SEQ ID NO: 2632739 - RNA, 22 nt, Human
uuucaauaggaaaaacugauuu

SEQ ID NO: 2632740 - RNA, 20 nt, Human
uuucaauaggaaaaacugau

SEQ ID NO: 2632741 - RNA, 21 nt, Human
uuuauuuuaaaacagaagaau

SEQ ID NO: 2632742 - RNA, 20 nt, Human
uuuauuuguuugugcauuug

SEQ ID NO: 2632743 - RNA, 13 nt, Human
uuuauuucuuaaa

SEQ ID NO: 2632744 - RNA, 22 nt, Human
uuugucagaacuagaauuugau

SEQ ID NO: 2632745 - RNA, 20 nt, Human
uuugucagaacuagaauuug

SEQ ID NO: 2632746 - RNA, 14 nt, Human
uuugucagacuuua

SEQ ID NO: 2632747 - RNA, 23 nt, Human
uuugucacaauccuaacacauua

SEQ ID NO: 2632748 - RNA, 17 nt, Human
uuugucaaugacaguuu

SEQ ID NO: 2632749 - RNA, 14 nt, Human
uuugucaaacugua

SEQ ID NO: 2632750 - RNA, 16 nt, Human
uuugucaaacuguaga

SEQ ID NO: 2632751 - RNA, 17 nt, Human
uuugucaaacuguagaa

SEQ ID NO: 2632752 - RNA, 23 nt, Human
uuugucaaacuguagaaaugaug

SEQ ID NO: 2632753 - RNA, 11 nt, Human
uuugucaauga

SEQ ID NO: 2632754 - RNA, 21 nt, Human
uuuguauaaaauaauuuuuau

SEQ ID NO: 2632755 - RNA, 22 nt, Human
uuuguaaauuaacuuuuauaaa

SEQ ID NO: 2632756 - RNA, 20 nt, Human
uuuguauaauuguaucguau

SEQ ID NO: 2632757 - RNA, 18 nt, Human
uuuguauaauuguaucgu

SEQ ID NO: 2632758 - RNA, 17 nt, Human
uuuguauaauuguaucg

SEQ ID NO: 2632759 - RNA, 16 nt, Human
uuuguauaauuguauc

SEQ ID NO: 2632760 - RNA, 13 nt, Human
uuuguauaauugu

SEQ ID NO: 2632761 - RNA, 19 nt, Human
uuuguauaacuucuuaaaa

SEQ ID NO: 2632762 - RNA, 18 nt, Human
uuuguauaacuucuuaaa

SEQ ID NO: 2632763 - RNA, 16 nt, Human
uuuguaaauuaacuuu

SEQ ID NO: 2632764 - RNA, 17 nt, Human
uuuguaaauuaacuuuu

SEQ ID NO: 2632765 - RNA, 15 nt, Human
uuuguaaauuaacuu

SEQ ID NO: 2632766 - RNA, 22 nt, Human
uuugguuaagucuguuuuauga

SEQ ID NO: 2632767 - RNA, 15 nt, Human
uuuggaauacuuuuu

SEQ ID NO: 2632768 - RNA, 17 nt, Human
uuuggaauacuuuuugu

SEQ ID NO: 2632769 - RNA, 19 nt, Human
uuuggugguuucagaaaug

SEQ ID NO: 2632770 - RNA, 16 nt, Human
uuuggaauacauuucu

SEQ ID NO: 2632771 - RNA, 13 nt, Human
uuuggaauacuuu

SEQ ID NO: 2632772 - RNA, 13 nt, Human
uuuggaauaaagu

SEQ ID NO: 2632773 - RNA, 14 nt, Human
uuuggaaguuuuca

SEQ ID NO: 2632774 - RNA, 13 nt, Human
uuugguguguucc

SEQ ID NO: 2632775 - RNA, 12 nt, Human
uuugguguguuc

SEQ ID NO: 2632776 - RNA, 19 nt, Human
uuugguguguggagaugca

SEQ ID NO: 2632777 - RNA, 19 nt, Human
uuugguuaagucuguuuua

SEQ ID NO: 2632778 - RNA, 20 nt, Human
uuugguuaagucuguuuuau

SEQ ID NO: 2632779 - RNA, 18 nt, Human
uuugguuaagucuguuuu

SEQ ID NO: 2632780 - RNA, 14 nt, Human
uuugguguguuccc

SEQ ID NO: 2632781 - RNA, 21 nt, Human
uuuguccccaccgcagacagg

SEQ ID NO: 2632782 - RNA, 13 nt, Human
uuuguccccaccg

SEQ ID NO: 2632783 - RNA, 23 nt, Human
uuugucauuagccugaguagaaa

SEQ ID NO: 2632784 - RNA, 20 nt, Human
uuugucauuagccugaguag

SEQ ID NO: 2632785 - RNA, 21 nt, Human
uuugucaugaauucuuaugcu

SEQ ID NO: 2632786 - RNA, 17 nt, Human
uuugucaucagccacca

SEQ ID NO: 2632787 - RNA, 17 nt, Human
uuuguccuaaaacaccu

SEQ ID NO: 2632788 - RNA, 12 nt, Human
uuugucccaggu

SEQ ID NO: 2632789 - RNA, 19 nt, Human
uuuguguguugucuugaaa

SEQ ID NO: 2632790 - RNA, 22 nt, Human
uuuguguuucagccauguauuu

SEQ ID NO: 2632791 - RNA, 21 nt, Human
uuuguguuguuggaaaaaguc

SEQ ID NO: 2632792 - RNA, 20 nt, Human
uuuguguuguuggaaaaagu

SEQ ID NO: 2632793 - RNA, 16 nt, Human
uuuguuauuuugcaac

SEQ ID NO: 2632794 - RNA, 18 nt, Human
uuuguuaaauauuuacau

SEQ ID NO: 2632795 - RNA, 22 nt, Human
uuuguuaaauauuuacauauga

SEQ ID NO: 2632796 - RNA, 17 nt, Human
uuuguuaaauauuuaca

SEQ ID NO: 2632797 - RNA, 15 nt, Human
uuuguuauuuugcaa

SEQ ID NO: 2632798 - RNA, 13 nt, Human
uuuguucaucugu

SEQ ID NO: 2632799 - RNA, 12 nt, Human
uuuguucaucug

SEQ ID NO: 2632800 - RNA, 18 nt, Human
uuuguuccccuccuccac

SEQ ID NO: 2632801 - RNA, 16 nt, Human
uuuguuccccuccucc

SEQ ID NO: 2632802 - RNA, 16 nt, Human
uuuguugucagcugaa

SEQ ID NO: 2632803 - RNA, 15 nt, Human
uuuguuccccuccuc

SEQ ID NO: 2632804 - RNA, 13 nt, Human
uuuguuccccucc

SEQ ID NO: 2632805 - RNA, 12 nt, Human
uuuguuccccuc

SEQ ID NO: 2632806 - RNA, 17 nt, Human
uuugaggucuguucuuu

SEQ ID NO: 2632807 - RNA, 22 nt, Human
uuugaggucuguucuuuccaaa

SEQ ID NO: 2632808 - RNA, 14 nt, Human
uuugagcucagccc

SEQ ID NO: 2632809 - RNA, 20 nt, Human
uuugagcucugcagcccagg

SEQ ID NO: 2632810 - RNA, 14 nt, Human
uuugagcugccuuc

SEQ ID NO: 2632811 - RNA, 12 nt, Human
uuugagcugccu

SEQ ID NO: 2632812 - RNA, 21 nt, Human
uuugagcugaaaugcugcauu

SEQ ID NO: 2632813 - RNA, 19 nt, Human
uuugagcugaaaugcugca

SEQ ID NO: 2632814 - RNA, 17 nt, Human
uuugagcugccuucccu

SEQ ID NO: 2632815 - RNA, 19 nt, Human
uuugagcuuagugaaauua

SEQ ID NO: 2632816 - RNA, 20 nt, Human
uuugagguuuuuaagccuua

SEQ ID NO: 2632817 - RNA, 16 nt, Human
uuugagguggaagagg

SEQ ID NO: 2632818 - RNA, 17 nt, Human
uuugauaauguuaaauu

SEQ ID NO: 2632819 - RNA, 19 nt, Human
uuugauaauguuaaauuug

SEQ ID NO: 2632820 - RNA, 19 nt, Human
uuugauacauaugugaaua

SEQ ID NO: 2632821 - RNA, 23 nt, Human
uuugauaauguuaaauuuguaag

SEQ ID NO: 2632822 - RNA, 16 nt, Human
uuugagugauuauuug

SEQ ID NO: 2632823 - RNA, 16 nt, Human
uuugagugaggguuuc

SEQ ID NO: 2632824 - RNA, 16 nt, Human
uuugauacauauguga

SEQ ID NO: 2632825 - RNA, 17 nt, Human
uuucuuacauaauuuuu

SEQ ID NO: 2632826 - RNA, 16 nt, Human
uuucugaguuccugca

SEQ ID NO: 2632827 - RNA, 15 nt, Human
uuucugagcugcucu

SEQ ID NO: 2632828 - RNA, 14 nt, Human
uuucugagcgauua

SEQ ID NO: 2632829 - RNA, 10 nt, Human
uuucugagcg

SEQ ID NO: 2632830 - RNA, 21 nt, Human
uuucugagcccgggcugccug

SEQ ID NO: 2632831 - RNA, 16 nt, Human
uuucugaggagaaaca

SEQ ID NO: 2632832 - RNA, 18 nt, Human
uuucugaggagaaacaaa

SEQ ID NO: 2632833 - RNA, 22 nt, Human
uuucuuacugucuuuuuucuaa

SEQ ID NO: 2632834 - RNA, 20 nt, Human
uuucuuacugauuuuuaagu

SEQ ID NO: 2632835 - RNA, 14 nt, Human
uuucuuagaaauuu

SEQ ID NO: 2632836 - RNA, 22 nt, Human
uuucuuagaaauuuauuuccua

SEQ ID NO: 2632837 - RNA, 22 nt, Human
uuucuuacaggcacaaaaugau

SEQ ID NO: 2632838 - RNA, 15 nt, Human
uuugagcagggcuca

SEQ ID NO: 2632839 - RNA, 16 nt, Human
uuucuuagcuuuuuaa

SEQ ID NO: 2632840 - RNA, 13 nt, Human
uuucuuagcuuuu

SEQ ID NO: 2632841 - RNA, 12 nt, Human
uuucuuagcuuu

SEQ ID NO: 2632842 - RNA, 15 nt, Human
uuugagcaauuuucg

SEQ ID NO: 2632843 - RNA, 15 nt, Human
uuugagcaacuuucu

SEQ ID NO: 2632844 - RNA, 23 nt, Human
uuugcauaacguauaaaagccug

SEQ ID NO: 2632845 - RNA, 19 nt, Human
uuugcauaacguauaaaag

SEQ ID NO: 2632846 - RNA, 15 nt, Human
uuugcagaugacaaa

SEQ ID NO: 2632847 - RNA, 19 nt, Human
uuugcagaaaagcaccugc

SEQ ID NO: 2632848 - RNA, 20 nt, Human
uuugcagaaaagcaccugcc

SEQ ID NO: 2632849 - RNA, 22 nt, Human
uuugcagaaaagcaccugccga

SEQ ID NO: 2632850 - RNA, 21 nt, Human
uuugcagcugagagaaaauaa

SEQ ID NO: 2632851 - RNA, 16 nt, Human
uuugcagaugacaaaa

SEQ ID NO: 2632852 - RNA, 21 nt, Human
uuugcagcagugagucucuuc

SEQ ID NO: 2632853 - RNA, 14 nt, Human
uuugcagacaggca

SEQ ID NO: 2632854 - RNA, 21 nt, Human
uuugcacuugugauuauuuau

SEQ ID NO: 2632855 - RNA, 17 nt, Human
uuugcacuguaugcugg

SEQ ID NO: 2632856 - RNA, 20 nt, Human
uuugauaucacagucuaauu

SEQ ID NO: 2632857 - RNA, 17 nt, Human
uuugauaucacagucua

SEQ ID NO: 2632858 - RNA, 19 nt, Human
uuugauaucacagucuaau

SEQ ID NO: 2632859 - RNA, 15 nt, Human
uuugauacuuguuca

SEQ ID NO: 2632860 - RNA, 18 nt, Human
uuugauaguauugugcau

SEQ ID NO: 2632861 - RNA, 18 nt, Human
uuugccauguuggccagg

SEQ ID NO: 2632862 - RNA, 20 nt, Human
uuugccaugggcuucacugu

SEQ ID NO: 2632863 - RNA, 14 nt, Human
uuugccaugggcuu

SEQ ID NO: 2632864 - RNA, 16 nt, Human
uuugccagugggaacu

SEQ ID NO: 2632865 - RNA, 15 nt, Human
uuugccagugggaac

SEQ ID NO: 2632866 - RNA, 21 nt, Human
uuugcauagauucccugagca

SEQ ID NO: 2632867 - RNA, 22 nt, Human
uuugcauaggugaucucauuua

SEQ ID NO: 2632868 - RNA, 15 nt, Human
uuuuaaaaugagaaa

SEQ ID NO: 2632869 - RNA, 18 nt, Human
uuuuaaaaucuuuucuau

SEQ ID NO: 2632870 - RNA, 17 nt, Human
uuuuaaaaucuuuucua

SEQ ID NO: 2632871 - RNA, 14 nt, Human
uuuguuuaaaagga

SEQ ID NO: 2632872 - RNA, 12 nt, Human
uuuguuuacaca

SEQ ID NO: 2632873 - RNA, 10 nt, Human
uuuguuguua

SEQ ID NO: 2632874 - RNA, 22 nt, Human
uuuuaaaaugagaaaucuaaaa

SEQ ID NO: 2632875 - RNA, 19 nt, Human
uuuuaaaaugagagucacu

SEQ ID NO: 2632876 - RNA, 12 nt, Human
uuuuaaaaugag

SEQ ID NO: 2632877 - RNA, 16 nt, Human
uuuuaaacaaaauaga

SEQ ID NO: 2632878 - RNA, 20 nt, Human
uuuuaaacaaaauagaagcu

SEQ ID NO: 2632879 - RNA, 17 nt, Human
uuuuaauuuacaaaaau

SEQ ID NO: 2632880 - RNA, 23 nt, Human
uuuuaauuuaugaguuuuugaua

SEQ ID NO: 2632881 - RNA, 21 nt, Human
uuuuaauuuauuuauacuauu

SEQ ID NO: 2632882 - RNA, 13 nt, Human
uuuuaccaaguuu

SEQ ID NO: 2632883 - RNA, 14 nt, Human
uuuuacccauaucc

SEQ ID NO: 2632884 - RNA, 22 nt, Human
uuuuaccaugccccugagcaau

SEQ ID NO: 2632885 - RNA, 15 nt, Human
uuuuacuacugugga

SEQ ID NO: 2632886 - RNA, 15 nt, Human
uuuuacuagaacaca

SEQ ID NO: 2632887 - RNA, 18 nt, Human
uuuuacccauauccccuc

SEQ ID NO: 2632888 - RNA, 15 nt, Human
uuuuacuccaguggu

SEQ ID NO: 2632889 - RNA, 13 nt, Human
uuuuacuccccuu

SEQ ID NO: 2632890 - RNA, 15 nt, Human
uuuuacauucugaau

SEQ ID NO: 2632891 - RNA, 15 nt, Human
uuuuacauacugcug

SEQ ID NO: 2632892 - RNA, 16 nt, Human
uuuuacauacugcugu

SEQ ID NO: 2632893 - RNA, 16 nt, Human
uuuuacagcugccugc

SEQ ID NO: 2632894 - RNA, 15 nt, Human
uuuuaauuuuguauu

SEQ ID NO: 2632895 - RNA, 16 nt, Human
uuuuaauuuuguauuu

SEQ ID NO: 2632896 - RNA, 13 nt, Human
uuuuaauuuugua

SEQ ID NO: 2632897 - RNA, 14 nt, Human
uuuuaauuuuaacc

SEQ ID NO: 2632898 - RNA, 12 nt, Human
uuuuaauuuugu

SEQ ID NO: 2632899 - RNA, 22 nt, Human
uuuuaauuuauuuauuaagaug

SEQ ID NO: 2632900 - RNA, 13 nt, Human
uuuuaauuugaua

SEQ ID NO: 2632901 - RNA, 10 nt, Human
uuuuauauuu

SEQ ID NO: 2632902 - RNA, 23 nt, Human
uuuuauauuaaaauaagcacugu

SEQ ID NO: 2632903 - RNA, 14 nt, Human
uuuuauaugucaaa

SEQ ID NO: 2632904 - RNA, 17 nt, Human
uuuuauauuaaaauaag

SEQ ID NO: 2632905 - RNA, 17 nt, Human
uuuuaucacauguaugu

SEQ ID NO: 2632906 - RNA, 15 nt, Human
uuuuaucacauguau

SEQ ID NO: 2632907 - RNA, 22 nt, Human
uuuuauauugauaacagcacug

SEQ ID NO: 2632908 - RNA, 19 nt, Human
uuuuaucaugacauguuau

SEQ ID NO: 2632909 - RNA, 17 nt, Human
uuuuaucaugacauguu

SEQ ID NO: 2632910 - RNA, 16 nt, Human
uuuuaucaugcauguc

SEQ ID NO: 2632911 - RNA, 12 nt, Human
uuuuaucaguag

SEQ ID NO: 2632912 - RNA, 15 nt, Human
uuuuaucaugacaug

SEQ ID NO: 2632913 - RNA, 20 nt, Human
uuuuaugauacuugaaaauu

SEQ ID NO: 2632914 - RNA, 16 nt, Human
uuuuaugauacuugaa

SEQ ID NO: 2632915 - RNA, 18 nt, Human
uuuuaucgucacugcuua

SEQ ID NO: 2632916 - RNA, 19 nt, Human
uuuuaucauuuucaaaaug

SEQ ID NO: 2632917 - RNA, 20 nt, Human
uuuuauaugcuucuguuuua

SEQ ID NO: 2632918 - RNA, 15 nt, Human
uuuuauaugcuucug

SEQ ID NO: 2632919 - RNA, 22 nt, Human
uuuuauaugaagauaaguguau

SEQ ID NO: 2632920 - RNA, 20 nt, Human
uuuuauaucaauuuaaaaaa

SEQ ID NO: 2632921 - RNA, 14 nt, Human
uuuuacuguacaga

SEQ ID NO: 2632922 - RNA, 15 nt, Human
uuuuauauauacagu

SEQ ID NO: 2632923 - RNA, 17 nt, Human
uuuuacugccacucuuu

SEQ ID NO: 2632924 - RNA, 14 nt, Human
uuuuacugccacuc

SEQ ID NO: 2632925 - RNA, 14 nt, Human
uuuuacugaacaau

SEQ ID NO: 2632926 - RNA, 19 nt, Human
uuuuacugaagccuuucuu

SEQ ID NO: 2632927 - RNA, 11 nt, Human
uuuuacugaac

SEQ ID NO: 2632928 - RNA, 13 nt, Human
uuuuacugaacaa

SEQ ID NO: 2632929 - RNA, 15 nt, Human
uuuuacugaagccuu

SEQ ID NO: 2632930 - RNA, 15 nt, Human
uuuuccuucagugcc

SEQ ID NO: 2632931 - RNA, 14 nt, Human
uuuuccuugaagcc

SEQ ID NO: 2632932 - RNA, 18 nt, Human
uuuuccucuucuauuuug

SEQ ID NO: 2632933 - RNA, 23 nt, Human
uuuucgaacauucuuugccuggu

SEQ ID NO: 2632934 - RNA, 16 nt, Human
uuuuccuuugucauca

SEQ ID NO: 2632935 - RNA, 21 nt, Human
uuuuccuuuaaaaaaauuuaa

SEQ ID NO: 2632936 - RNA, 19 nt, Human
uuuuccuuuuuuauacaca

SEQ ID NO: 2632937 - RNA, 12 nt, Human
uuuuccuuuaaa

SEQ ID NO: 2632938 - RNA, 16 nt, Human
uuuuccuuguccccac

SEQ ID NO: 2632939 - RNA, 17 nt, Human
uuuuccuuugaauccuc

SEQ ID NO: 2632940 - RNA, 15 nt, Human
uuuuccuugaagccg

SEQ ID NO: 2632941 - RNA, 17 nt, Human
uuuucuugcaugaggcu

SEQ ID NO: 2632942 - RNA, 15 nt, Human
uuuucuucuucccuc

SEQ ID NO: 2632943 - RNA, 14 nt, Human
uuuucuucuucccu

SEQ ID NO: 2632944 - RNA, 18 nt, Human
uuuucuucuucccucccu

SEQ ID NO: 2632945 - RNA, 14 nt, Human
uuuucuucucccuc

SEQ ID NO: 2632946 - RNA, 19 nt, Human
uuuucgaagcucagcccac

SEQ ID NO: 2632947 - RNA, 19 nt, Human
uuuuccaugaguccccugu

SEQ ID NO: 2632948 - RNA, 18 nt, Human
uuuuccaugaguccccug

SEQ ID NO: 2632949 - RNA, 16 nt, Human
uuuucagaaaauauua

SEQ ID NO: 2632950 - RNA, 20 nt, Human
uuuuccaugcguguuucuga

SEQ ID NO: 2632951 - RNA, 17 nt, Human
uuuuccauuguuugaaa

SEQ ID NO: 2632952 - RNA, 14 nt, Human
uuuuccauguaucu

SEQ ID NO: 2632953 - RNA, 16 nt, Human
uuuuccauugguuuac

SEQ ID NO: 2632954 - RNA, 18 nt, Human
uuuuccuauuuucagccc

SEQ ID NO: 2632955 - RNA, 13 nt, Human
uuuuccuauuugu

SEQ ID NO: 2632956 - RNA, 13 nt, Human
uuuuccucccuca

SEQ ID NO: 2632957 - RNA, 14 nt, Human
uuuuccucccuucu

SEQ ID NO: 2632958 - RNA, 17 nt, Human
uuuuccucccuucugcu

SEQ ID NO: 2632959 - RNA, 13 nt, Human
uuuucccaaagcc

SEQ ID NO: 2632960 - RNA, 17 nt, Human
uuuuccuagcccucuca

SEQ ID NO: 2632961 - RNA, 13 nt, Human
uuuuccugaaaac

SEQ ID NO: 2632962 - RNA, 22 nt, Human
uuuuccucccuuggguucugau

SEQ ID NO: 2632963 - RNA, 21 nt, Human
uuuuccucccuuggguucuga

SEQ ID NO: 2632964 - RNA, 20 nt, Human
uuuuccucccuucugcuacu

SEQ ID NO: 2632965 - RNA, 21 nt, Human
uuuuccucccuucugcuacug

SEQ ID NO: 2632966 - RNA, 19 nt, Human
uuuuccuccgggagagggg

SEQ ID NO: 2632967 - RNA, 17 nt, Human
uuuuaucccucaccugu

SEQ ID NO: 2632968 - RNA, 22 nt, Human
uuuucaacgcagcccugcuuug

SEQ ID NO: 2632969 - RNA, 21 nt, Human
uuuucaacgcagcccugcuuu

SEQ ID NO: 2632970 - RNA, 23 nt, Human
uuuuaugcaaauauuuuuuugua

SEQ ID NO: 2632971 - RNA, 15 nt, Human
uuuuaugcaaauauu

SEQ ID NO: 2632972 - RNA, 17 nt, Human
uuuucaacgcagcccug

SEQ ID NO: 2632973 - RNA, 14 nt, Human
uuuucaagaaacug

SEQ ID NO: 2632974 - RNA, 15 nt, Human
uuuucaagaaacuga

SEQ ID NO: 2632975 - RNA, 13 nt, Human
uuuucaacugcca

SEQ ID NO: 2632976 - RNA, 23 nt, Human
uuuucaacugccaaaaugcucua

SEQ ID NO: 2632977 - RNA, 16 nt, Human
uuuucaaggcccucag

SEQ ID NO: 2632978 - RNA, 16 nt, Human
uuuucaagaauaauca

SEQ ID NO: 2632979 - RNA, 15 nt, Human
uuuucacaguucucu

SEQ ID NO: 2632980 - RNA, 13 nt, Human
uuuucacaaauaa

SEQ ID NO: 2632981 - RNA, 22 nt, Human
uuuucaauuaaacggauuauuu

SEQ ID NO: 2632982 - RNA, 14 nt, Human
uuuucaauuuugca

SEQ ID NO: 2632983 - RNA, 21 nt, Human
uuuucaauuaaacggauuauu

SEQ ID NO: 2632984 - RNA, 18 nt, Human
uuuucaauuaaacggauu

SEQ ID NO: 2632985 - RNA, 17 nt, Human
uuuucaauuaaacggau

SEQ ID NO: 2632986 - RNA, 16 nt, Human
uuuucaauuaaacgga

SEQ ID NO: 2632987 - RNA, 15 nt, Human
uuuucaauuaaacgg

SEQ ID NO: 2632988 - RNA, 14 nt, Human
uuuucaauuaaacg

SEQ ID NO: 2632989 - RNA, 13 nt, Human
uuuucaauuaaac

SEQ ID NO: 2632990 - RNA, 12 nt, Human
uuuucaauuaaa

SEQ ID NO: 2632991 - RNA, 10 nt, Human
uuuucaauua

SEQ ID NO: 2632992 - RNA, 16 nt, Human
uuuucaauauuuauua

SEQ ID NO: 2632993 - RNA, 14 nt, Human
uuuucaauauuuau

SEQ ID NO: 2632994 - RNA, 18 nt, Human
uuuucacuuugugauuau

SEQ ID NO: 2632995 - RNA, 16 nt, Human
uuuucacuguagaaug

SEQ ID NO: 2632996 - RNA, 15 nt, Human
uuuucagaaaauauu

SEQ ID NO: 2632997 - RNA, 21 nt, Human
uuuucacuggaguuacauuaa

SEQ ID NO: 2632998 - RNA, 19 nt, Human
uuuucacggaaguuuucaa

SEQ ID NO: 2632999 - RNA, 20 nt, Human
uuuucacggaaguuuucaau

SEQ ID NO: 2633000 - RNA, 20 nt, Human
uuuucacugcuggcugccuu

SEQ ID NO: 2633001 - RNA, 19 nt, Human
uuuucacugcuggcugccu

SEQ ID NO: 2633002 - RNA, 18 nt, Human
uuuucaauuuugcaugcu

SEQ ID NO: 2633003 - RNA, 14 nt, Human
uuuucacaaauaaa

SEQ ID NO: 2633004 - RNA, 23 nt, Human
uuuucacacaauacaauaaguua

SEQ ID NO: 2633005 - RNA, 21 nt, Human immunodeficiency virus 2 [HIV-2]
uaguacacccagcacaaacaa

SEQ ID NO: 2633006 - RNA, 16 nt, Human immunodeficiency virus 2 [HIV-2]
agcacaaacaagcaga

SEQ ID NO: 2633007 - RNA, 14 nt, Human immunodeficiency virus 2 [HIV-2]
ucgguguucaucug

SEQ ID NO: 2633008 - RNA, 14 nt, Human immunodeficiency virus 2 [HIV-2]
agacgaagaaggac

SEQ ID NO: 2633009 - RNA, 20 nt, Human immunodeficiency virus 2 [HIV-2]
ccagcaacagaaagacagaa

SEQ ID NO: 2633010 - RNA, 21 nt, Human immunodeficiency virus 2 [HIV-2]
aaggacacaugguauuuagaa

SEQ ID NO: 2633011 - RNA, 15 nt, Human immunodeficiency virus 2 [HIV-2]
gaguaccacggagag

SEQ ID NO: 2633012 - RNA, 23 nt, Human immunodeficiency virus 2 [HIV-2]
cuggaaaaauaugacauggcagg

SEQ ID NO: 2633013 - RNA, 17 nt, Human immunodeficiency virus 2 [HIV-2]
ggaccggggacagccag

SEQ ID NO: 2633014 - RNA, 15 nt, Human immunodeficiency virus 2 [HIV-2]
acuggguaauagaaa

SEQ ID NO: 2633015 - RNA, 17 nt, Human immunodeficiency virus 2 [HIV-2]
aguguuucacucucagc

SEQ ID NO: 2633016 - RNA, 19 nt, Human immunodeficiency virus 2 [HIV-2]
auaagcacuauugggaugc

SEQ ID NO: 2633017 - RNA, 15 nt, Human immunodeficiency virus 2 [HIV-2]
gggacugcaagggau

SEQ ID NO: 2633018 - RNA, 18 nt, Human immunodeficiency virus 2 [HIV-2]
cagauggagggaagccau

SEQ ID NO: 2633019 - RNA, 22 nt, Human immunodeficiency virus 2 [HIV-2]
gcaggcucagacccggaagugg

SEQ ID NO: 2633020 - RNA, 22 nt, Human immunodeficiency virus 2 [HIV-2]
acagcaguaucagcagggagag

SEQ ID NO: 2633021 - RNA, 16 nt, Human immunodeficiency virus 2 [HIV-2]
ccgccgacugaucucc

SEQ ID NO: 2633022 - RNA, 18 nt, Human immunodeficiency virus 2 [HIV-2]
auggagggaagccaugca

SEQ ID NO: 2633023 - RNA, 15 nt, Human immunodeficiency virus 2 [HIV-2]
gaacaaccauacuug

SEQ ID NO: 2633024 - RNA, 23 nt, Human immunodeficiency virus 2 [HIV-2]
ucagcagggagaguacaugaaca

SEQ ID NO: 2633025 - RNA, 13 nt, Human immunodeficiency virus 2 [HIV-2]
augacauggcagg

SEQ ID NO: 2633026 - RNA, 19 nt, Human immunodeficiency virus 2 [HIV-2]
gcagcaacagcaacagcug

SEQ ID NO: 2633027 - RNA, 23 nt, Human immunodeficiency virus 2 [HIV-2]
gaaauaauuuuaaaugugacaga

SEQ ID NO: 2633028 - RNA, 18 nt, Human immunodeficiency virus 2 [HIV-2]
gagacuuacuauccaaga

SEQ ID NO: 2633029 - RNA, 13 nt, Human immunodeficiency virus 2 [HIV-2]
aggagugggagaa

SEQ ID NO: 2633030 - RNA, 20 nt, Human immunodeficiency virus 2 [HIV-2]
aaggcgccagagagcucauu

SEQ ID NO: 2633031 - RNA, 15 nt, Human immunodeficiency virus 2 [HIV-2]
cuaaauucaugggga

SEQ ID NO: 2633032 - RNA, 22 nt, Human immunodeficiency virus 2 [HIV-2]
ggaaaaauaugacauggcagga

SEQ ID NO: 2633033 - RNA, 23 nt, Human immunodeficiency virus 2 [HIV-2]
guuccaagaagaaucaggcaggg

SEQ ID NO: 2633034 - RNA, 17 nt, Human immunodeficiency virus 2 [HIV-2]
gaugauuaucaggaaau

SEQ ID NO: 2633035 - RNA, 16 nt, Human immunodeficiency virus 2 [HIV-2]
cgaaggaacagaagaa

SEQ ID NO: 2633036 - RNA, 14 nt, Human immunodeficiency virus 2 [HIV-2]
agauguaaugauac

SEQ ID NO: 2633037 - RNA, 13 nt, Human immunodeficiency virus 2 [HIV-2]
cugugagggacag

SEQ ID NO: 2633038 - RNA, 12 nt, Human immunodeficiency virus 2 [HIV-2]
cagaagaagacg

SEQ ID NO: 2633039 - RNA, 13 nt, Human immunodeficiency virus 2 [HIV-2]
uggacuaacugca

SEQ ID NO: 2633040 - RNA, 16 nt, Human immunodeficiency virus 2 [HIV-2]
caguaaccagcauaau

SEQ ID NO: 2633041 - RNA, 17 nt, Human immunodeficiency virus 2 [HIV-2]
caugcacuaacaaaugc

SEQ ID NO: 2633042 - RNA, 13 nt, Human immunodeficiency virus 2 [HIV-2]
cagucgcucugcg

SEQ ID NO: 2633043 - RNA, 16 nt, Human immunodeficiency virus 2 [HIV-2]
cagaaagacagaaaga

SEQ ID NO: 2633044 - RNA, 23 nt, Human immunodeficiency virus 2 [HIV-2]
gagugcauauaguagugggaaua

SEQ ID NO: 2633045 - RNA, 18 nt, Human immunodeficiency virus 2 [HIV-2]
gaggacuacgagagagac

SEQ ID NO: 2633046 - RNA, 14 nt, Human immunodeficiency virus 2 [HIV-2]
gcaggagugggaga

SEQ ID NO: 2633047 - RNA, 14 nt, Human immunodeficiency virus 2 [HIV-2]
gggacagccagcca

SEQ ID NO: 2633048 - RNA, 15 nt, Human immunodeficiency virus 2 [HIV-2]
ccagugaggaacaaa

SEQ ID NO: 2633049 - RNA, 17 nt, Human immunodeficiency virus 2 [HIV-2]
agccuuaaacagggagg

SEQ ID NO: 2633050 - RNA, 16 nt, Human immunodeficiency virus 2 [HIV-2]
gaacagcccauggaga

SEQ ID NO: 2633051 - RNA, 18 nt, Human immunodeficiency virus 2 [HIV-2]
cccagcaacagaaagaca

SEQ ID NO: 2633052 - RNA, 17 nt, Human immunodeficiency virus 2 [HIV-2]
uuagaagcaaguuaagu

SEQ ID NO: 2633053 - RNA, 12 nt, Human immunodeficiency virus 2 [HIV-2]
caagaggcagag

SEQ ID NO: 2633054 - RNA, 21 nt, Human immunodeficiency virus 2 [HIV-2]
caggagugggagaaacaaguc

SEQ ID NO: 2633055 - RNA, 18 nt, Human immunodeficiency virus 2 [HIV-2]
cagcugaggcugcaggga

SEQ ID NO: 2633056 - RNA, 21 nt, Human immunodeficiency virus 2 [HIV-2]
gcucugcggagaggcuggcag

SEQ ID NO: 2633057 - RNA, 14 nt, Human immunodeficiency virus 2 [HIV-2]
guacacccagcaca

SEQ ID NO: 2633058 - RNA, 19 nt, Human immunodeficiency virus 2 [HIV-2]
acugaucucccagagucua

SEQ ID NO: 2633059 - RNA, 12 nt, Human immunodeficiency virus 2 [HIV-2]
guacacccagca

SEQ ID NO: 2633060 - RNA, 16 nt, Human immunodeficiency virus 2 [HIV-2]
ccuagaaaaagaggaa

SEQ ID NO: 2633061 - RNA, 22 nt, Human immunodeficiency virus 2 [HIV-2]
gagggauaccauauagugaaua

SEQ ID NO: 2633062 - RNA, 18 nt, Human immunodeficiency virus 2 [HIV-2]
gcagcaacagcaacagcu

SEQ ID NO: 2633063 - RNA, 19 nt, Human immunodeficiency virus 2 [HIV-2]
ggcaugaugaacaagggau

SEQ ID NO: 2633064 - RNA, 16 nt, Human immunodeficiency virus 2 [HIV-2]
gaggaccauagaagcc

SEQ ID NO: 2633065 - RNA, 16 nt, Human immunodeficiency virus 2 [HIV-2]
agcaguaucagcaggg

SEQ ID NO: 2633066 - RNA, 19 nt, Human immunodeficiency virus 2 [HIV-2]
acucugagggaaauaaagg

SEQ ID NO: 2633067 - RNA, 14 nt, Human immunodeficiency virus 2 [HIV-2]
gagguauaaggaca

SEQ ID NO: 2633068 - RNA, 12 nt, Human immunodeficiency virus 2 [HIV-2]
aucaggcaggga

SEQ ID NO: 2633069 - RNA, 14 nt, Human immunodeficiency virus 2 [HIV-2]
cuuaaacagggagg

SEQ ID NO: 2633070 - RNA, 14 nt, Human immunodeficiency virus 2 [HIV-2]
cauauaaagcagau

SEQ ID NO: 2633071 - RNA, 15 nt, Human immunodeficiency virus 2 [HIV-2]
gaaucaggcagggag

SEQ ID NO: 2633072 - RNA, 16 nt, Human immunodeficiency virus 2 [HIV-2]
uuuacaguaggaggag

SEQ ID NO: 2633073 - RNA, 20 nt, Human immunodeficiency virus 2 [HIV-2]
gaaaauagaacauauaucua

SEQ ID NO: 2633074 - RNA, 13 nt, Human immunodeficiency virus 2 [HIV-2]
uauucccuuauuu

SEQ ID NO: 2633075 - RNA, 22 nt, Human immunodeficiency virus 2 [HIV-2]
gagccuggguguucccugcugg

SEQ ID NO: 2633076 - RNA, 23 nt, Human immunodeficiency virus 2 [HIV-2]
gagccuggguguucccugcugga

SEQ ID NO: 2633077 - RNA, 19 nt, Human immunodeficiency virus 2 [HIV-2]
gcagacaugaugaugagca

SEQ ID NO: 2633078 - RNA, 14 nt, Human immunodeficiency virus 2 [HIV-2]
cagacgaagaagga

SEQ ID NO: 2633079 - RNA, 17 nt, Human immunodeficiency virus 2 [HIV-2]
aucagcagggagaguac

SEQ ID NO: 2633080 - RNA, 21 nt, Human immunodeficiency virus 2 [HIV-2]
uuccaagaagaaucaggcagg

SEQ ID NO: 2633081 - RNA, 16 nt, Human immunodeficiency virus 2 [HIV-2]
agaaucaggcagggag

SEQ ID NO: 2633082 - RNA, 17 nt, Human immunodeficiency virus 2 [HIV-2]
gcaauagauaugucaca

SEQ ID NO: 2633083 - RNA, 21 nt, Human immunodeficiency virus 2 [HIV-2]
guggggaugguuaugggaagc

SEQ ID NO: 2633084 - RNA, 22 nt, Human immunodeficiency virus 2 [HIV-2]
agucgcucugcggagaggcugg

SEQ ID NO: 2633085 - RNA, 17 nt, Human immunodeficiency virus 2 [HIV-2]
gacagaccccagagaaa

SEQ ID NO: 2633086 - RNA, 21 nt, Human immunodeficiency virus 2 [HIV-2]
acagcaguaucagcagggaga

SEQ ID NO: 2633087 - RNA, 23 nt, Human immunodeficiency virus 2 [HIV-2]
aaauauggaugauguagauucug

SEQ ID NO: 2633088 - RNA, 16 nt, Human immunodeficiency virus 2 [HIV-2]
cagcaaucagggacug

SEQ ID NO: 2633089 - RNA, 13 nt, Human immunodeficiency virus 2 [HIV-2]
gacaagaaccaaa

SEQ ID NO: 2633090 - RNA, 22 nt, Human immunodeficiency virus 2 [HIV-2]
ugugcaacuaaaaauagagaca

SEQ ID NO: 2633091 - RNA, 21 nt, Human immunodeficiency virus 2 [HIV-2]
uggcuaaacaaggagaagaac

SEQ ID NO: 2633092 - RNA, 18 nt, Human immunodeficiency virus 2 [HIV-2]
cauuagcuuaaacaagua

SEQ ID NO: 2633093 - RNA, 15 nt, Human immunodeficiency virus 2 [HIV-2]
gaauccaaggcagga

SEQ ID NO: 2633094 - RNA, 20 nt, Human immunodeficiency virus 2 [HIV-2]
ugaaccaucugccccgagag

SEQ ID NO: 2633095 - RNA, 14 nt, Human immunodeficiency virus 2 [HIV-2]
ugcuggacucucac

SEQ ID NO: 2633096 - RNA, 17 nt, Human immunodeficiency virus 2 [HIV-2]
agugaguauggagccug

SEQ ID NO: 2633097 - RNA, 21 nt, Human immunodeficiency virus 2 [HIV-2]
agagaaaggguaccgccagga

SEQ ID NO: 2633098 - RNA, 22 nt, Human immunodeficiency virus 2 [HIV-2]
gaguaccacggagagaaaugac

SEQ ID NO: 2633099 - RNA, 20 nt, Human immunodeficiency virus 2 [HIV-2]
acuccagugaggaacaaaag

SEQ ID NO: 2633100 - RNA, 15 nt, Human immunodeficiency virus 2 [HIV-2]
gagaccauuggagag

SEQ ID NO: 2633101 - RNA, 22 nt, Human immunodeficiency virus 2 [HIV-2]
ucaauaccuagcccuaguagua

SEQ ID NO: 2633102 - RNA, 17 nt, Human immunodeficiency virus 2 [HIV-2]
aaacaguggagaagaga

SEQ ID NO: 2633103 - RNA, 21 nt, Human immunodeficiency virus 2 [HIV-2]
cuaagaaacagcugaggcugc

SEQ ID NO: 2633104 - RNA, 18 nt, Human immunodeficiency virus 2 [HIV-2]
cauuuuacuaacaagugc

SEQ ID NO: 2633105 - RNA, 13 nt, Human immunodeficiency virus 2 [HIV-2]
acauugacauaga

SEQ ID NO: 2633106 - RNA, 13 nt, Human immunodeficiency virus 2 [HIV-2]
ggcccaacugcaa

SEQ ID NO: 2633107 - RNA, 18 nt, Human immunodeficiency virus 2 [HIV-2]
ggagacauuaguguggca

SEQ ID NO: 2633108 - RNA, 14 nt, Human immunodeficiency virus 2 [HIV-2]
agaaaaagggggac

SEQ ID NO: 2633109 - RNA, 14 nt, Human immunodeficiency virus 2 [HIV-2]
ugaggagaugaugc

SEQ ID NO: 2633110 - RNA, 17 nt, Human immunodeficiency virus 2 [HIV-2]
accagcauaauugcuaa

SEQ ID NO: 2633111 - RNA, 23 nt, Human immunodeficiency virus 2 [HIV-2]
cucuccagcacuagcagguagag

SEQ ID NO: 2633112 - RNA, 12 nt, Human immunodeficiency virus 2 [HIV-2]
gcugcagggacu

SEQ ID NO: 2633113 - RNA, 18 nt, Human immunodeficiency virus 2 [HIV-2]
caggugaaguaagaagag

SEQ ID NO: 2633114 - RNA, 13 nt, Human immunodeficiency virus 2 [HIV-2]
agguagagccugg

SEQ ID NO: 2633115 - RNA, 21 nt, Human immunodeficiency virus 2 [HIV-2]
gugcaacuaaaaauagagaca

SEQ ID NO: 2633116 - RNA, 14 nt, Human immunodeficiency virus 2 [HIV-2]
ggguaccgccagga

SEQ ID NO: 2633117 - RNA, 19 nt, Human immunodeficiency virus 2 [HIV-2]
ugaucgggcuauacaacau

SEQ ID NO: 2633118 - RNA, 14 nt, Human immunodeficiency virus 2 [HIV-2]
ucaacuccagugag

SEQ ID NO: 2633119 - RNA, 12 nt, Human immunodeficiency virus 2 [HIV-2]
caaggcaggaaa

SEQ ID NO: 2633120 - RNA, 21 nt, Human immunodeficiency virus 2 [HIV-2]
auagcaaucuauguagugcaa

SEQ ID NO: 2633121 - RNA, 17 nt, Human immunodeficiency virus 2 [HIV-2]
acucuguacccagaaga

SEQ ID NO: 2633122 - RNA, 14 nt, Human immunodeficiency virus 2 [HIV-2]
caacaucugcagag

SEQ ID NO: 2633123 - RNA, 13 nt, Human immunodeficiency virus 2 [HIV-2]
augggccaggagu

SEQ ID NO: 2633124 - RNA, 13 nt, Human immunodeficiency virus 2 [HIV-2]
guuuggaggcaga

SEQ ID NO: 2633125 - RNA, 16 nt, Human immunodeficiency virus 2 [HIV-2]
ucuugcuuuacggcag

SEQ ID NO: 2633126 - RNA, 21 nt, Human immunodeficiency virus 2 [HIV-2]
cagacaagugaguauggagcc

SEQ ID NO: 2633127 - RNA, 19 nt, Human immunodeficiency virus 2 [HIV-2]
aaagcuauauuuacacauu

SEQ ID NO: 2633128 - RNA, 20 nt, Human immunodeficiency virus 2 [HIV-2]
aagaauggaaggcaaaacug

SEQ ID NO: 2633129 - RNA, 13 nt, Human immunodeficiency virus 2 [HIV-2]
gggcgcgugggga

SEQ ID NO: 2633130 - RNA, 21 nt, Human immunodeficiency virus 2 [HIV-2]
cgggcuauacaacaucugcag

SEQ ID NO: 2633131 - RNA, 22 nt, Human immunodeficiency virus 2 [HIV-2]
ggauaauaccagauuggcagaa

SEQ ID NO: 2633132 - RNA, 16 nt, Human immunodeficiency virus 2 [HIV-2]
agaaaaagaggaaggg

SEQ ID NO: 2633133 - RNA, 13 nt, Human immunodeficiency virus 2 [HIV-2]
agaaucaggcagg

SEQ ID NO: 2633134 - RNA, 22 nt, Human immunodeficiency virus 2 [HIV-2]
acucugagggaaauaaaggaag

SEQ ID NO: 2633135 - RNA, 17 nt, Human immunodeficiency virus 2 [HIV-2]
agugcagaaguggcaga

SEQ ID NO: 2633136 - RNA, 13 nt, Human immunodeficiency virus 2 [HIV-2]
agaagaugucugg

SEQ ID NO: 2633137 - RNA, 14 nt, Human immunodeficiency virus 2 [HIV-2]
uaucagcagggaga

SEQ ID NO: 2633138 - RNA, 17 nt, Human immunodeficiency virus 2 [HIV-2]
ccagcacaaacaagcag

SEQ ID NO: 2633139 - RNA, 14 nt, Human immunodeficiency virus 2 [HIV-2]
cagaggaagaugag

SEQ ID NO: 2633140 - RNA, 17 nt, Human immunodeficiency virus 2 [HIV-2]
gaacaagauaagaaaag

SEQ ID NO: 2633141 - RNA, 21 nt, Human immunodeficiency virus 2 [HIV-2]
agcuacuaagaaacagcugag

SEQ ID NO: 2633142 - RNA, 16 nt, Human immunodeficiency virus 2 [HIV-2]
cuuuccagaaggggcu

SEQ ID NO: 2633143 - RNA, 21 nt, Human immunodeficiency virus 2 [HIV-2]
ccauauagugaauaacaggaa

SEQ ID NO: 2633144 - RNA, 15 nt, Human immunodeficiency virus 2 [HIV-2]
cacaagaggcagagg

SEQ ID NO: 2633145 - RNA, 13 nt, Human immunodeficiency virus 2 [HIV-2]
aagagaccaggaa

SEQ ID NO: 2633146 - RNA, 12 nt, Human immunodeficiency virus 2 [HIV-2]
cggagaggcugg

SEQ ID NO: 2633147 - RNA, 14 nt, Human immunodeficiency virus 2 [HIV-2]
uaugugacuguuuu

SEQ ID NO: 2633148 - RNA, 17 nt, Human immunodeficiency virus 2 [HIV-2]
acaaggccuaggcaggc

SEQ ID NO: 2633149 - RNA, 15 nt, Human immunodeficiency virus 2 [HIV-2]
cacuagcagguagag

SEQ ID NO: 2633150 - RNA, 12 nt, Human immunodeficiency virus 2 [HIV-2]
caaggcaggaag

SEQ ID NO: 2633151 - RNA, 20 nt, Human immunodeficiency virus 2 [HIV-2]
cuguuacaccaagaguacca

SEQ ID NO: 2633152 - RNA, 19 nt, Human immunodeficiency virus 2 [HIV-2]
auagagacacuugggggac

SEQ ID NO: 2633153 - RNA, 13 nt, Human immunodeficiency virus 2 [HIV-2]
ggcagggagcaga

SEQ ID NO: 2633154 - RNA, 17 nt, Human immunodeficiency virus 2 [HIV-2]
gcuaguaucaguagaac

SEQ ID NO: 2633155 - RNA, 22 nt, Human immunodeficiency virus 2 [HIV-2]
acgaagaaggacuccaaggaaa

SEQ ID NO: 2633156 - RNA, 22 nt, Human immunodeficiency virus 2 [HIV-2]
auuaacuuuacgaaaccgggag

SEQ ID NO: 2633157 - RNA, 20 nt, Human immunodeficiency virus 2 [HIV-2]
aaaaagggggacugcaaggg

SEQ ID NO: 2633158 - RNA, 13 nt, Human immunodeficiency virus 2 [HIV-2]
cauugccagcugu

SEQ ID NO: 2633159 - RNA, 18 nt, Human immunodeficiency virus 2 [HIV-2]
cauggaauaauacaguga

SEQ ID NO: 2633160 - RNA, 14 nt, Human immunodeficiency virus 2 [HIV-2]
acagcugaggcugc

SEQ ID NO: 2633161 - RNA, 20 nt, Human immunodeficiency virus 2 [HIV-2]
cagucaaaguuuagaagaag

SEQ ID NO: 2633162 - RNA, 16 nt, Human immunodeficiency virus 2 [HIV-2]
ccgucuggggaacgaa

SEQ ID NO: 2633163 - RNA, 17 nt, Human immunodeficiency virus 2 [HIV-2]
caguggagaagagacca

SEQ ID NO: 2633164 - RNA, 18 nt, Human immunodeficiency virus 2 [HIV-2]
caggaggugaagcaaacc

SEQ ID NO: 2633165 - RNA, 20 nt, Human immunodeficiency virus 2 [HIV-2]
auuggcaugaugaacaaggg

SEQ ID NO: 2633166 - RNA, 19 nt, Human immunodeficiency virus 2 [HIV-2]
aaaaaccuccaggcaagag

SEQ ID NO: 2633167 - RNA, 16 nt, Human immunodeficiency virus 2 [HIV-2]
ggcagaucgagcccug

SEQ ID NO: 2633168 - RNA, 21 nt, Human immunodeficiency virus 2 [HIV-2]
agucaaaguuuagaagaagcc

SEQ ID NO: 2633169 - RNA, 21 nt, Human immunodeficiency virus 2 [HIV-2]
gauaauaccagauuggcagaa

SEQ ID NO: 2633170 - RNA, 18 nt, Human immunodeficiency virus 2 [HIV-2]
acuacaaauuaauagaaa

SEQ ID NO: 2633171 - RNA, 20 nt, Human immunodeficiency virus 2 [HIV-2]
aucugaguaacaagacccug

SEQ ID NO: 2633172 - RNA, 16 nt, Human immunodeficiency virus 2 [HIV-2]
aaaauaugacauggca

SEQ ID NO: 2633173 - RNA, 16 nt, Human immunodeficiency virus 2 [HIV-2]
aauaaaggaagaagcc

SEQ ID NO: 2633174 - RNA, 14 nt, Human immunodeficiency virus 2 [HIV-2]
cucacaagaggcag

SEQ ID NO: 2633175 - RNA, 19 nt, Human immunodeficiency virus 2 [HIV-2]
cauauagugaauaacagga

SEQ ID NO: 2633176 - RNA, 17 nt, Human immunodeficiency virus 2 [HIV-2]
ccuagaaaaagaggaag

SEQ ID NO: 2633177 - RNA, 22 nt, Human immunodeficiency virus 2 [HIV-2]
gggaacgaaaaaccuccaggca

SEQ ID NO: 2633178 - RNA, 18 nt, Human immunodeficiency virus 2 [HIV-2]
ccuaaagcaucaggcaca

SEQ ID NO: 2633179 - RNA, 20 nt, Human immunodeficiency virus 2 [HIV-2]
caaggaccggggacagccag

SEQ ID NO: 2633180 - RNA, 15 nt, Human immunodeficiency virus 2 [HIV-2]
caaggccuaggcagg

SEQ ID NO: 2633181 - RNA, 16 nt, Human immunodeficiency virus 2 [HIV-2]
acacauuucaagagag

SEQ ID NO: 2633182 - RNA, 16 nt, Human immunodeficiency virus 2 [HIV-2]
acaugagacauugcaa

SEQ ID NO: 2633183 - RNA, 18 nt, Human immunodeficiency virus 2 [HIV-2]
cgggauagugcagcaaca

SEQ ID NO: 2633184 - RNA, 19 nt, Human immunodeficiency virus 2 [HIV-2]
ggaugguuaugggaagcag

SEQ ID NO: 2633185 - RNA, 15 nt, Human immunodeficiency virus 2 [HIV-2]
caggauugccagaga

SEQ ID NO: 2633186 - RNA, 17 nt, Human immunodeficiency virus 2 [HIV-2]
aauugcuaacauugaca

SEQ ID NO: 2633187 - RNA, 20 nt, Human immunodeficiency virus 2 [HIV-2]
cauaauaaaugaaacuucua

SEQ ID NO: 2633188 - RNA, 22 nt, Human immunodeficiency virus 2 [HIV-2]
cauauaucuauuggcauggcag

SEQ ID NO: 2633189 - RNA, 18 nt, Human immunodeficiency virus 2 [HIV-2]
auccauaauagacaugga

SEQ ID NO: 2633190 - RNA, 21 nt, Human immunodeficiency virus 2 [HIV-2]
guacuucggguggcuguggaa

SEQ ID NO: 2633191 - RNA, 14 nt, Human immunodeficiency virus 2 [HIV-2]
aaggauuggaagac

SEQ ID NO: 2633192 - RNA, 15 nt, Human immunodeficiency virus 2 [HIV-2]
gaguauggagccugg

SEQ ID NO: 2633193 - RNA, 17 nt, Human immunodeficiency virus 2 [HIV-2]
ccgguuuggaggcagau

SEQ ID NO: 2633194 - RNA, 16 nt, Human immunodeficiency virus 2 [HIV-2]
uacaaggccuucacuc

SEQ ID NO: 2633195 - RNA, 11 nt, Human immunodeficiency virus 2 [HIV-2]
gaucagagaag

SEQ ID NO: 2633196 - RNA, 18 nt, Human immunodeficiency virus 2 [HIV-2]
gagaccauuggagaggcc

SEQ ID NO: 2633197 - RNA, 17 nt, Human immunodeficiency virus 2 [HIV-2]
aagaaucaggcagggag

SEQ ID NO: 2633198 - RNA, 21 nt, Human immunodeficiency virus 2 [HIV-2]
aucaacacaaggccuaggcag

SEQ ID NO: 2633199 - RNA, 22 nt, Human immunodeficiency virus 2 [HIV-2]
agaaguaccuaaagcaucaggc

SEQ ID NO: 2633200 - RNA, 16 nt, Human immunodeficiency virus 2 [HIV-2]
acguagucaagagaca

SEQ ID NO: 2633201 - RNA, 22 nt, Human immunodeficiency virus 2 [HIV-2]
uuguauucagucgcucugcgga

SEQ ID NO: 2633202 - RNA, 15 nt, Human immunodeficiency virus 2 [HIV-2]
ucaucugaguaacaa

SEQ ID NO: 2633203 - RNA, 17 nt, Human immunodeficiency virus 2 [HIV-2]
acaugggaggagcuggu

SEQ ID NO: 2633204 - RNA, 18 nt, Human immunodeficiency virus 2 [HIV-2]
aaaguagggaaaaaugua

SEQ ID NO: 2633205 - RNA, 14 nt, Human immunodeficiency virus 2 [HIV-2]
gaagcuuuccaagc

SEQ ID NO: 2633206 - RNA, 22 nt, Human immunodeficiency virus 2 [HIV-2]
accgccaggaaacaguggagaa

SEQ ID NO: 2633207 - RNA, 20 nt, Human immunodeficiency virus 2 [HIV-2]
gagagguucucuccagcacu

SEQ ID NO: 2633208 - RNA, 14 nt, Human immunodeficiency virus 2 [HIV-2]
aguggauccaagaa

SEQ ID NO: 2633209 - RNA, 15 nt, Human immunodeficiency virus 2 [HIV-2]
auaccauauagugaa

SEQ ID NO: 2633210 - RNA, 20 nt, Human immunodeficiency virus 2 [HIV-2]
ucgggcuauacaacaucugc

SEQ ID NO: 2633211 - RNA, 22 nt, Human immunodeficiency virus 2 [HIV-2]
aagauuuguauaggcagcaaaa

SEQ ID NO: 2633212 - RNA, 22 nt, Human immunodeficiency virus 2 [HIV-2]
accauacuuggucaaggcagga

SEQ ID NO: 2633213 - RNA, 13 nt, Human immunodeficiency virus 2 [HIV-2]
ggaggcagugaac

SEQ ID NO: 2633214 - RNA, 16 nt, Human immunodeficiency virus 2 [HIV-2]
caggcaagagucacug

SEQ ID NO: 2633215 - RNA, 19 nt, Human immunodeficiency virus 2 [HIV-2]
aucuauuggcauggcagag

SEQ ID NO: 2633216 - RNA, 20 nt, Human immunodeficiency virus 2 [HIV-2]
cuaagugcacuaaaguagua

SEQ ID NO: 2633217 - RNA, 14 nt, Human immunodeficiency virus 2 [HIV-2]
gaaggcgccagaga

SEQ ID NO: 2633218 - RNA, 18 nt, Human immunodeficiency virus 2 [HIV-2]
cucgcaguuccaagaaga

SEQ ID NO: 2633219 - RNA, 14 nt, Human immunodeficiency virus 2 [HIV-2]
cuagaggcaaauau

SEQ ID NO: 2633220 - RNA, 13 nt, Human immunodeficiency virus 2 [HIV-2]
cgguuaucuccaa

SEQ ID NO: 2633221 - RNA, 17 nt, Human immunodeficiency virus 2 [HIV-2]
gccgguacugggcagac

SEQ ID NO: 2633222 - RNA, 19 nt, Human immunodeficiency virus 2 [HIV-2]
uauaaauuggcaauagaua

SEQ ID NO: 2633223 - RNA, 23 nt, Human immunodeficiency virus 2 [HIV-2]
agcgcgacgcaucgggaggggaa

SEQ ID NO: 2633224 - RNA, 16 nt, Human immunodeficiency virus 2 [HIV-2]
uggccuauaacuacaa

SEQ ID NO: 2633225 - RNA, 20 nt, Human immunodeficiency virus 2 [HIV-2]
ccaucacuucaauaccuagc

SEQ ID NO: 2633226 - RNA, 18 nt, Human immunodeficiency virus 2 [HIV-2]
ccagcaacagaaagacag

SEQ ID NO: 2633227 - RNA, 20 nt, Human immunodeficiency virus 2 [HIV-2]
gacaugggaggagcuggugg

SEQ ID NO: 2633228 - RNA, 14 nt, Human immunodeficiency virus 2 [HIV-2]
uaggcagcaaaaua

SEQ ID NO: 2633229 - RNA, 19 nt, Human immunodeficiency virus 2 [HIV-2]
gcugccaguuagaagcaag

SEQ ID NO: 2633230 - RNA, 23 nt, Human immunodeficiency virus 2 [HIV-2]
ccaagaguaccacggagagaaau

SEQ ID NO: 2633231 - RNA, 14 nt, Human immunodeficiency virus 2 [HIV-2]
auccuagacauaua

SEQ ID NO: 2633232 - RNA, 19 nt, Human immunodeficiency virus 2 [HIV-2]
gcuuaguacacccagcaca

SEQ ID NO: 2633233 - RNA, 17 nt, Human immunodeficiency virus 2 [HIV-2]
gugcagaaguggcagaa

SEQ ID NO: 2633234 - RNA, 13 nt, Human immunodeficiency virus 2 [HIV-2]
cagaaguggcaga

SEQ ID NO: 2633235 - RNA, 23 nt, Human immunodeficiency virus 2 [HIV-2]
guuugugacaacacaacagcugg

SEQ ID NO: 2633236 - RNA, 20 nt, Human immunodeficiency virus 2 [HIV-2]
gcccauggagaaacccagca

SEQ ID NO: 2633237 - RNA, 12 nt, Human immunodeficiency virus 2 [HIV-2]
agaaucaggcag

SEQ ID NO: 2633238 - RNA, 15 nt, Human immunodeficiency virus 2 [HIV-2]
ucucacaagaggcag

SEQ ID NO: 2633239 - RNA, 16 nt, Human immunodeficiency virus 2 [HIV-2]
caaggccuaggcaggc

SEQ ID NO: 2633240 - RNA, 14 nt, Human immunodeficiency virus 2 [HIV-2]
ccaaggcaggaaaa

SEQ ID NO: 2633241 - RNA, 14 nt, Human immunodeficiency virus 2 [HIV-2]
cagaaagacagaaa

SEQ ID NO: 2633242 - RNA, 23 nt, Human immunodeficiency virus 2 [HIV-2]
aagccuuaaacagggaggcagug

SEQ ID NO: 2633243 - RNA, 21 nt, Human immunodeficiency virus 2 [HIV-2]
cauauaucuauuggcauggca

SEQ ID NO: 2633244 - RNA, 12 nt, Human immunodeficiency virus 2 [HIV-2]
aggacaugggcc

SEQ ID NO: 2633245 - RNA, 14 nt, Human immunodeficiency virus 2 [HIV-2]
ugacuccaugcugg

SEQ ID NO: 2633246 - RNA, 22 nt, Human immunodeficiency virus 2 [HIV-2]
caggugaaguaagaagagccau

SEQ ID NO: 2633247 - RNA, 20 nt, Human immunodeficiency virus 2 [HIV-2]
cacgaccccgaaucccagga

SEQ ID NO: 2633248 - RNA, 17 nt, Human immunodeficiency virus 2 [HIV-2]
agaaucaggcagggagc

SEQ ID NO: 2633249 - RNA, 13 nt, Human immunodeficiency virus 2 [HIV-2]
gaauccaaggcag

SEQ ID NO: 2633250 - RNA, 22 nt, Human immunodeficiency virus 2 [HIV-2]
aguuagaagcaaguuaagugug

SEQ ID NO: 2633251 - RNA, 14 nt, Human immunodeficiency virus 2 [HIV-2]
cagaucgagcccug

SEQ ID NO: 2633252 - RNA, 16 nt, Human immunodeficiency virus 2 [HIV-2]
gaaucaggcagggagc

SEQ ID NO: 2633253 - RNA, 19 nt, Human immunodeficiency virus 2 [HIV-2]
gaaucaacaguaaccagca

SEQ ID NO: 2633254 - RNA, 17 nt, Human immunodeficiency virus 2 [HIV-2]
gucuaaugacugaagca

SEQ ID NO: 2633255 - RNA, 13 nt, Human immunodeficiency virus 2 [HIV-2]
gaggcuggcagau

SEQ ID NO: 2633256 - RNA, 22 nt, Human immunodeficiency virus 2 [HIV-2]
gaugcuaugagguuuagauacu

SEQ ID NO: 2633257 - RNA, 18 nt, Human immunodeficiency virus 2 [HIV-2]
agcccucuucgugcacuu

SEQ ID NO: 2633258 - RNA, 13 nt, Human immunodeficiency virus 2 [HIV-2]
cggagaggcuggc

SEQ ID NO: 2633259 - RNA, 13 nt, Human immunodeficiency virus 2 [HIV-2]
gcuggacucucac

SEQ ID NO: 2633260 - RNA, 23 nt, Human immunodeficiency virus 2 [HIV-2]
agaggcuggcagaucgagcccug

SEQ ID NO: 2633261 - RNA, 21 nt, Human immunodeficiency virus 2 [HIV-2]
agcacuagcagguagagccug

SEQ ID NO: 2633262 - RNA, 24 nt, Human immunodeficiency virus 2 [HIV-2]
gagccuggguguucccugcuggac

SEQ ID NO: 2633263 - RNA, 17 nt, Human immunodeficiency virus 2 [HIV-2]
gucaggauugccagaga

SEQ ID NO: 2633264 - RNA, 15 nt, Human immunodeficiency virus 2 [HIV-2]
cugggagacuacaaa

SEQ ID NO: 2633265 - RNA, 19 nt, Human immunodeficiency virus 2 [HIV-2]
agaagccuuaaacagggag

SEQ ID NO: 2633266 - RNA, 22 nt, Human immunodeficiency virus 2 [HIV-2]
cagcacaaacaagcagacauga

SEQ ID NO: 2633267 - RNA, 21 nt, Human immunodeficiency virus 2 [HIV-2]
guagcuacuaagaaacagcug

SEQ ID NO: 2633268 - RNA, 13 nt, Human immunodeficiency virus 2 [HIV-2]
cagauacaaagga

SEQ ID NO: 2633269 - RNA, 23 nt, Human immunodeficiency virus 2 [HIV-2]
cuguguuucucgaaaaaggggcu

SEQ ID NO: 2633270 - RNA, 21 nt, Human immunodeficiency virus 2 [HIV-2]
cauggaauaauacagugacag

SEQ ID NO: 2633271 - RNA, 12 nt, Human immunodeficiency virus 2 [HIV-2]
uccaaggcagga

SEQ ID NO: 2633272 - RNA, 19 nt, Human immunodeficiency virus 2 [HIV-2]
guuggacguagucaagaga

SEQ ID NO: 2633273 - RNA, 23 nt, Human immunodeficiency virus 2 [HIV-2]
aagugcuugcuuaguauauugua

SEQ ID NO: 2633274 - RNA, 18 nt, Human immunodeficiency virus 2 [HIV-2]
cagcaguaucagcaggga

SEQ ID NO: 2633275 - RNA, 21 nt, Human immunodeficiency virus 2 [HIV-2]
uaguaucaguagaacucucac

SEQ ID NO: 2633276 - RNA, 12 nt, Human immunodeficiency virus 2 [HIV-2]
caaugaauugua

SEQ ID NO: 2633277 - RNA, 13 nt, Human immunodeficiency virus 2 [HIV-2]
ggcaauagauaug

SEQ ID NO: 2633278 - RNA, 20 nt, Human immunodeficiency virus 2 [HIV-2]
aacacaucaaucaucaaaga

SEQ ID NO: 2633279 - RNA, 20 nt, Human immunodeficiency virus 2 [HIV-2]
gccgguuuggaggcagaugg

SEQ ID NO: 2633280 - RNA, 14 nt, Human immunodeficiency virus 2 [HIV-2]
agggacaugggagg

SEQ ID NO: 2633281 - RNA, 16 nt, Human immunodeficiency virus 2 [HIV-2]
gaaggcgccagagagc

SEQ ID NO: 2633282 - RNA, 12 nt, Human immunodeficiency virus 2 [HIV-2]
ggaggacauggg

SEQ ID NO: 2633283 - RNA, 15 nt, Human immunodeficiency virus 2 [HIV-2]
aggguaugaggagau

SEQ ID NO: 2633284 - RNA, 19 nt, Human immunodeficiency virus 2 [HIV-2]
agcugaggcugcagggacu

SEQ ID NO: 2633285 - RNA, 20 nt, Human immunodeficiency virus 2 [HIV-2]
agucaaaguuuagaagaagc

SEQ ID NO: 2633286 - RNA, 17 nt, Human immunodeficiency virus 2 [HIV-2]
aauauguaugaauuaca

SEQ ID NO: 2633287 - RNA, 19 nt, Human immunodeficiency virus 2 [HIV-2]
caugaacagcccauggaga

SEQ ID NO: 2633288 - RNA, 15 nt, Human immunodeficiency virus 2 [HIV-2]
ggucaaggcaggaag

SEQ ID NO: 2633289 - RNA, 18 nt, Human immunodeficiency virus 2 [HIV-2]
gccgggauagugcagcaa

SEQ ID NO: 2633290 - RNA, 15 nt, Human immunodeficiency virus 2 [HIV-2]
cugcggagaggcugg

SEQ ID NO: 2633291 - RNA, 22 nt, Human immunodeficiency virus 2 [HIV-2]
uauaccuagaaaaagaggaagg

SEQ ID NO: 2633292 - RNA, 17 nt, Human immunodeficiency virus 2 [HIV-2]
cugcaccagacaaguga

SEQ ID NO: 2633293 - RNA, 13 nt, Human immunodeficiency virus 2 [HIV-2]
agcaagcuacaca

SEQ ID NO: 2633294 - RNA, 17 nt, Human immunodeficiency virus 2 [HIV-2]
aggacuacgagagagac

SEQ ID NO: 2633295 - RNA, 14 nt, Human immunodeficiency virus 2 [HIV-2]
ucucgcgacagcag

SEQ ID NO: 2633296 - RNA, 15 nt, Human immunodeficiency virus 2 [HIV-2]
ggacuaacugcagag

SEQ ID NO: 2633297 - RNA, 16 nt, Human immunodeficiency virus 2 [HIV-2]
auuuuacuaacaagug

SEQ ID NO: 2633298 - RNA, 17 nt, Human immunodeficiency virus 2 [HIV-2]
acggcuccacgcuugcu

SEQ ID NO: 2633299 - RNA, 20 nt, Human immunodeficiency virus 2 [HIV-2]
ugaauaacaggaacaaccau

SEQ ID NO: 2633300 - RNA, 16 nt, Human immunodeficiency virus 2 [HIV-2]
caaaaagcuauauuua

SEQ ID NO: 2633301 - RNA, 13 nt, Human immunodeficiency virus 2 [HIV-2]
acuacgagagaga

SEQ ID NO: 2633302 - RNA, 15 nt, Human immunodeficiency virus 2 [HIV-2]
acccagcaacagaaa

SEQ ID NO: 2633303 - RNA, 17 nt, Human immunodeficiency virus 2 [HIV-2]
gacagaacaagcaguag

SEQ ID NO: 2633304 - RNA, 16 nt, Human immunodeficiency virus 2 [HIV-2]
caggcagggagcagaa

SEQ ID NO: 2633305 - RNA, 14 nt, Human immunodeficiency virus 2 [HIV-2]
uauaaagcagauaa

SEQ ID NO: 2633306 - RNA, 22 nt, Human immunodeficiency virus 2 [HIV-2]
cgcaggauuaggguaugaggag

SEQ ID NO: 2633307 - RNA, 23 nt, Human immunodeficiency virus 2 [HIV-2]
guagaacucucacaagaggcaga

SEQ ID NO: 2633308 - RNA, 23 nt, Human immunodeficiency virus 2 [HIV-2]
ugaugcauggaauaauacaguga

SEQ ID NO: 2633309 - RNA, 19 nt, Human immunodeficiency virus 2 [HIV-2]
gaguuucccccagaagaug

SEQ ID NO: 2633310 - RNA, 12 nt, Human immunodeficiency virus 2 [HIV-2]
agaggcuggcag

SEQ ID NO: 2633311 - RNA, 20 nt, Human immunodeficiency virus 2 [HIV-2]
ccaagaagaaucaggcaggg

SEQ ID NO: 2633312 - RNA, 21 nt, Human immunodeficiency virus 2 [HIV-2]
aagaauuggcuaaacaaggag

SEQ ID NO: 2633313 - RNA, 23 nt, Human immunodeficiency virus 2 [HIV-2]
uuauacucaugggccaggaguaa

SEQ ID NO: 2633314 - RNA, 18 nt, Human immunodeficiency virus 2 [HIV-2]
cagaccccagagaaaggg

SEQ ID NO: 2633315 - RNA, 14 nt, Human immunodeficiency virus 2 [HIV-2]
gagaggcuggcaga

SEQ ID NO: 2633316 - RNA, 14 nt, Human immunodeficiency virus 2 [HIV-2]
ggagcuggugggga

SEQ ID NO: 2633317 - RNA, 11 nt, Human immunodeficiency virus 2 [HIV-2]
gugagggacag

SEQ ID NO: 2633318 - RNA, 16 nt, Human immunodeficiency virus 2 [HIV-2]
gcaggaggugaagcaa

SEQ ID NO: 2633319 - RNA, 23 nt, Human immunodeficiency virus 2 [HIV-2]
cacaaggaugauggaaacgcaaa

SEQ ID NO: 2633320 - RNA, 17 nt, Human immunodeficiency virus 2 [HIV-2]
caaaacugaaagcaaga

SEQ ID NO: 2633321 - RNA, 14 nt, Human immunodeficiency virus 2 [HIV-2]
aaucaggcagggag

SEQ ID NO: 2633322 - RNA, 20 nt, Human immunodeficiency virus 2 [HIV-2]
ucagucaaaguuuagaagaa

SEQ ID NO: 2633323 - RNA, 21 nt, Human immunodeficiency virus 2 [HIV-2]
cauacuuacuguauaaaugua

SEQ ID NO: 2633324 - RNA, 15 nt, Human immunodeficiency virus 2 [HIV-2]
guaccacggagagaa

SEQ ID NO: 2633325 - RNA, 23 nt, Human immunodeficiency virus 2 [HIV-2]
acucucacaagaggcagaggaag

SEQ ID NO: 2633326 - RNA, 16 nt, Human immunodeficiency virus 2 [HIV-2]
acauguuacaugagac

SEQ ID NO: 2633327 - RNA, 14 nt, Human immunodeficiency virus 2 [HIV-2]
aucugcagagacuu

SEQ ID NO: 2633328 - RNA, 17 nt, Human immunodeficiency virus 2 [HIV-2]
auggcaggagugggaga

SEQ ID NO: 2633329 - RNA, 18 nt, Human immunodeficiency virus 2 [HIV-2]
acagcugaggcugcaggg

SEQ ID NO: 2633330 - RNA, 17 nt, Human immunodeficiency virus 2 [HIV-2]
gacauuaguguggcagu

SEQ ID NO: 2633331 - RNA, 15 nt, Human immunodeficiency virus 2 [HIV-2]
gacaacacaacagcu

SEQ ID NO: 2633332 - RNA, 12 nt, Human immunodeficiency virus 2 [HIV-2]
auaauaggacua

SEQ ID NO: 2633333 - RNA, 15 nt, Human immunodeficiency virus 2 [HIV-2]
gcagaaguggcagaa

SEQ ID NO: 2633334 - RNA, 20 nt, Human immunodeficiency virus 2 [HIV-2]
accauacagugcuugccaga

SEQ ID NO: 2633335 - RNA, 12 nt, Human immunodeficiency virus 2 [HIV-2]
ccagagaaagaa

SEQ ID NO: 2633336 - RNA, 12 nt, Human immunodeficiency virus 2 [HIV-2]
uagaacaagaua

SEQ ID NO: 2633337 - RNA, 14 nt, Human immunodeficiency virus 2 [HIV-2]
gcaguagaagaugu

SEQ ID NO: 2633338 - RNA, 15 nt, Human immunodeficiency virus 2 [HIV-2]
aaccaagggagggac

SEQ ID NO: 2633339 - RNA, 19 nt, Human immunodeficiency virus 2 [HIV-2]
caaucaucaaagagucaug

SEQ ID NO: 2633340 - RNA, 14 nt, Human immunodeficiency virus 2 [HIV-2]
gccaaucaacacaa

SEQ ID NO: 2633341 - RNA, 19 nt, Human immunodeficiency virus 2 [HIV-2]
uuguaagagaccaggaaau

SEQ ID NO: 2633342 - RNA, 13 nt, Human immunodeficiency virus 2 [HIV-2]
ggcauggcagaga

SEQ ID NO: 2633343 - RNA, 19 nt, Human immunodeficiency virus 2 [HIV-2]
cucuucaauaaagcugcca

SEQ ID NO: 2633344 - RNA, 16 nt, Human immunodeficiency virus 2 [HIV-2]
uaaacagggaggcagu

SEQ ID NO: 2633345 - RNA, 22 nt, Human immunodeficiency virus 2 [HIV-2]
cuggucauucgguguucaucug

SEQ ID NO: 2633346 - RNA, 17 nt, Human immunodeficiency virus 2 [HIV-2]
acaagaggcagaggaag

SEQ ID NO: 2633347 - RNA, 17 nt, Human immunodeficiency virus 2 [HIV-2]
acuaacugcagaggaga

SEQ ID NO: 2633348 - RNA, 22 nt, Human immunodeficiency virus 2 [HIV-2]
agaguaccacggagagaaauga

SEQ ID NO: 2633349 - RNA, 22 nt, Human immunodeficiency virus 2 [HIV-2]
ggcagcaaaauauggaugaugu

SEQ ID NO: 2633350 - RNA, 14 nt, Human immunodeficiency virus 2 [HIV-2]
ugaauuacaaaaau

SEQ ID NO: 2633351 - RNA, 13 nt, Human immunodeficiency virus 2 [HIV-2]
uuccaagaagaau

SEQ ID NO: 2633352 - RNA, 23 nt, Human immunodeficiency virus 2 [HIV-2]
ucaaggcaggaaguagcuacuaa

SEQ ID NO: 2633353 - RNA, 17 nt, Human immunodeficiency virus 2 [HIV-2]
auacuuggucaaggcag

SEQ ID NO: 2633354 - RNA, 23 nt, Human immunodeficiency virus 2 [HIV-2]
uuuccagaaggggcuguaaccaa

SEQ ID NO: 2633355 - RNA, 17 nt, Human immunodeficiency virus 2 [HIV-2]
cuuguacaacaucccag

SEQ ID NO: 2633356 - RNA, 13 nt, Human immunodeficiency virus 2 [HIV-2]
caggcagggagca

SEQ ID NO: 2633357 - RNA, 19 nt, Human immunodeficiency virus 2 [HIV-2]
uguggaagcuaguaucagu

SEQ ID NO: 2633358 - RNA, 18 nt, Human immunodeficiency virus 2 [HIV-2]
ugcuuaguacacccagca

SEQ ID NO: 2633359 - RNA, 20 nt, Human immunodeficiency virus 2 [HIV-2]
agucaggauugccagagaaa

SEQ ID NO: 2633360 - RNA, 20 nt, Human immunodeficiency virus 2 [HIV-2]
gcuggacucucaccaguacu

SEQ ID NO: 2633361 - RNA, 19 nt, Human immunodeficiency virus 2 [HIV-2]
cuagcagguagagccuggg

SEQ ID NO: 2633362 - RNA, 14 nt, Human immunodeficiency virus 2 [HIV-2]
agcaaucagggacu

SEQ ID NO: 2633363 - RNA, 16 nt, Human immunodeficiency virus 2 [HIV-2]
gcuauacaacaucugc

SEQ ID NO: 2633364 - RNA, 13 nt, Human immunodeficiency virus 2 [HIV-2]
acuaacugcagag

SEQ ID NO: 2633365 - RNA, 14 nt, Human immunodeficiency virus 2 [HIV-2]
guacccaauguacu

SEQ ID NO: 2633366 - RNA, 20 nt, Human immunodeficiency virus 2 [HIV-2]
uaaugcaaaaagcuauauuu

SEQ ID NO: 2633367 - RNA, 20 nt, Human immunodeficiency virus 2 [HIV-2]
gucaggauugccagagaaag

SEQ ID NO: 2633368 - RNA, 15 nt, Human immunodeficiency virus 2 [HIV-2]
aguacacccagcaca

SEQ ID NO: 2633369 - RNA, 19 nt, Human immunodeficiency virus 2 [HIV-2]
augacagaccccagagaaa

SEQ ID NO: 2633370 - RNA, 23 nt, Human immunodeficiency virus 2 [HIV-2]
cauauaucuauuggcauggcaga

SEQ ID NO: 2633371 - RNA, 19 nt, Human immunodeficiency virus 2 [HIV-2]
ccauggagaaacccagcaa

SEQ ID NO: 2633372 - RNA, 20 nt, Human immunodeficiency virus 2 [HIV-2]
uggacguagucaagagacaa

SEQ ID NO: 2633373 - RNA, 23 nt, Human immunodeficiency virus 2 [HIV-2]
gaccucuucaauaaagcugccag

SEQ ID NO: 2633374 - RNA, 15 nt, Human immunodeficiency virus 2 [HIV-2]
agggcuauaggccug

SEQ ID NO: 2633375 - RNA, 19 nt, Human immunodeficiency virus 2 [HIV-2]
acggcgcaacuauugccau

SEQ ID NO: 2633376 - RNA, 14 nt, Human immunodeficiency virus 2 [HIV-2]
agggagggacaugg

SEQ ID NO: 2633377 - RNA, 15 nt, Human immunodeficiency virus 2 [HIV-2]
uugugccuaaugcaa

SEQ ID NO: 2633378 - RNA, 13 nt, Human immunodeficiency virus 2 [HIV-2]
uggguagaagaca

SEQ ID NO: 2633379 - RNA, 18 nt, Human immunodeficiency virus 2 [HIV-2]
acuuacuguauaaaugua

SEQ ID NO: 2633380 - RNA, 22 nt, Human immunodeficiency virus 2 [HIV-2]
ccaacagaguuucccccagaag

SEQ ID NO: 2633381 - RNA, 13 nt, Human immunodeficiency virus 2 [HIV-2]
uguacccagaaga

SEQ ID NO: 2633382 - RNA, 13 nt, Human immunodeficiency virus 2 [HIV-2]
gggaagccaugca

SEQ ID NO: 2633383 - RNA, 17 nt, Human immunodeficiency virus 2 [HIV-2]
gcaacagcaacagcugu

SEQ ID NO: 2633384 - RNA, 15 nt, Human immunodeficiency virus 2 [HIV-2]
agcagguagagccug

SEQ ID NO: 2633385 - RNA, 14 nt, Human immunodeficiency virus 2 [HIV-2]
aggauugccagaga

SEQ ID NO: 2633386 - RNA, 19 nt, Human immunodeficiency virus 2 [HIV-2]
aaaauauggaugauguaga

SEQ ID NO: 2633387 - RNA, 16 nt, Human immunodeficiency virus 2 [HIV-2]
aagaguaccacggaga

SEQ ID NO: 2633388 - RNA, 19 nt, Human immunodeficiency virus 2 [HIV-2]
augaacagcccauggagaa

SEQ ID NO: 2633389 - RNA, 23 nt, Human immunodeficiency virus 2 [HIV-2]
augcaaaaagcuauauuuacaca

SEQ ID NO: 2633390 - RNA, 20 nt, Human immunodeficiency virus 2 [HIV-2]
agaguacaugaacagcccau

SEQ ID NO: 2633391 - RNA, 16 nt, Human immunodeficiency virus 2 [HIV-2]
gcgaaagggcagacga

SEQ ID NO: 2633392 - RNA, 14 nt, Human immunodeficiency virus 2 [HIV-2]
agucaggauugcca

SEQ ID NO: 2633393 - RNA, 19 nt, Human immunodeficiency virus 2 [HIV-2]
guuugggcacaagucagga

SEQ ID NO: 2633394 - RNA, 13 nt, Human immunodeficiency virus 2 [HIV-2]
gcgaaagggcaga

SEQ ID NO: 2633395 - RNA, 21 nt, Human immunodeficiency virus 2 [HIV-2]
caauauggagugcauauagua

SEQ ID NO: 2633396 - RNA, 17 nt, Human immunodeficiency virus 2 [HIV-2]
uggguguucccugcugg

SEQ ID NO: 2633397 - RNA, 19 nt, Human immunodeficiency virus 2 [HIV-2]
auacagugcuugccagaca

SEQ ID NO: 2633398 - RNA, 19 nt, Human immunodeficiency virus 2 [HIV-2]
ugcauagaaaacaacacau

SEQ ID NO: 2633399 - RNA, 13 nt, Human immunodeficiency virus 2 [HIV-2]
uaucagcagggag

SEQ ID NO: 2633400 - RNA, 19 nt, Human immunodeficiency virus 2 [HIV-2]
ggagacauuaguguggcag

SEQ ID NO: 2633401 - RNA, 15 nt, Human immunodeficiency virus 2 [HIV-2]
ugccuaaugcaaaaa

SEQ ID NO: 2633402 - RNA, 19 nt, Human immunodeficiency virus 2 [HIV-2]
aucaacaguaaccagcaua

SEQ ID NO: 2633403 - RNA, 18 nt, Human immunodeficiency virus 2 [HIV-2]
ugggggaccauacagugc

SEQ ID NO: 2633404 - RNA, 14 nt, Human immunodeficiency virus 2 [HIV-2]
agauaagaaaagga

SEQ ID NO: 2633405 - RNA, 14 nt, Human immunodeficiency virus 2 [HIV-2]
ccaccuacugacuc

SEQ ID NO: 2633406 - RNA, 21 nt, Human immunodeficiency virus 2 [HIV-2]
cauaugagcgaaagggcagac

SEQ ID NO: 2633407 - RNA, 17 nt, Human immunodeficiency virus 2 [HIV-2]
aguggauccaagaagcu

SEQ ID NO: 2633408 - RNA, 13 nt, Human immunodeficiency virus 2 [HIV-2]
gagucaugugaua

SEQ ID NO: 2633409 - RNA, 20 nt, Human immunodeficiency virus 2 [HIV-2]
ggcuggcagaucgagcccug

SEQ ID NO: 2633410 - RNA, 17 nt, Human immunodeficiency virus 2 [HIV-2]
cgaguggcuagagagga

SEQ ID NO: 2633411 - RNA, 13 nt, Human immunodeficiency virus 2 [HIV-2]
gacaacaagaaau

SEQ ID NO: 2633412 - RNA, 19 nt, Human immunodeficiency virus 2 [HIV-2]
aacagcaaucagggacugg

SEQ ID NO: 2633413 - RNA, 19 nt, Human immunodeficiency virus 2 [HIV-2]
caggauugccagagaaaga

SEQ ID NO: 2633414 - RNA, 20 nt, Human immunodeficiency virus 2 [HIV-2]
ugcgggcgcguggggauggu

SEQ ID NO: 2633415 - RNA, 18 nt, Human immunodeficiency virus 2 [HIV-2]
cugagagguucucuccag

SEQ ID NO: 2633416 - RNA, 14 nt, Human immunodeficiency virus 2 [HIV-2]
gcagaaguggcaga

SEQ ID NO: 2633417 - RNA, 14 nt, Human immunodeficiency virus 2 [HIV-2]
aggaaucaaugaua

SEQ ID NO: 2633418 - RNA, 16 nt, Human immunodeficiency virus 2 [HIV-2]
auuaccuuuagugcag

SEQ ID NO: 2633419 - RNA, 16 nt, Human immunodeficiency virus 2 [HIV-2]
aacgcccucauacuua

SEQ ID NO: 2633420 - RNA, 22 nt, Human immunodeficiency virus 2 [HIV-2]
gggaauacucgcaguuccaaga

SEQ ID NO: 2633421 - RNA, 15 nt, Human immunodeficiency virus 2 [HIV-2]
agcaacagaaagaca

SEQ ID NO: 2633422 - RNA, 20 nt, Human immunodeficiency virus 2 [HIV-2]
gcuacacaaaguauagauau

SEQ ID NO: 2633423 - RNA, 21 nt, Human immunodeficiency virus 2 [HIV-2]
cgaagaaggacuccaaggaaa

SEQ ID NO: 2633424 - RNA, 17 nt, Human immunodeficiency virus 2 [HIV-2]
ugaguaacaagacccug

SEQ ID NO: 2633425 - RNA, 23 nt, Human immunodeficiency virus 2 [HIV-2]
gaaacagcugaggcugcagggac

SEQ ID NO: 2633426 - RNA, 17 nt, Human immunodeficiency virus 2 [HIV-2]
caucccagauacaaagg

SEQ ID NO: 2633427 - RNA, 15 nt, Human immunodeficiency virus 2 [HIV-2]
caguuagaagcaagu

SEQ ID NO: 2633428 - RNA, 23 nt, Human immunodeficiency virus 2 [HIV-2]
aguacuuggccgguacugggcag

SEQ ID NO: 2633429 - RNA, 20 nt, Human immunodeficiency virus 2 [HIV-2]
ggagggacaugggaggagcu

SEQ ID NO: 2633430 - RNA, 19 nt, Human immunodeficiency virus 2 [HIV-2]
acuggccgggauagugcag

SEQ ID NO: 2633431 - RNA, 13 nt, Human immunodeficiency virus 2 [HIV-2]
aggaaauaagaca

SEQ ID NO: 2633432 - RNA, 11 nt, Human immunodeficiency virus 2 [HIV-2]
aaagcugccag

SEQ ID NO: 2633433 - RNA, 22 nt, Human immunodeficiency virus 2 [HIV-2]
cuggggaacgaaaaaccuccag

SEQ ID NO: 2633434 - RNA, 13 nt, Human immunodeficiency virus 2 [HIV-2]
gaugcauggaaua

SEQ ID NO: 2633435 - RNA, 17 nt, Human immunodeficiency virus 2 [HIV-2]
gaguuggccugugaauc

SEQ ID NO: 2633436 - RNA, 11 nt, Human immunodeficiency virus 2 [HIV-2]
gacaacacaac

SEQ ID NO: 2633437 - RNA, 17 nt, Human immunodeficiency virus 2 [HIV-2]
caagagacaacaagaaa

SEQ ID NO: 2633438 - RNA, 14 nt, Human immunodeficiency virus 2 [HIV-2]
gcgaaagggcagac

SEQ ID NO: 2633439 - RNA, 17 nt, Human immunodeficiency virus 2 [HIV-2]
gugacagaacaagcagu

SEQ ID NO: 2633440 - RNA, 21 nt, Human immunodeficiency virus 2 [HIV-2]
auaauaccagauuggcagaau

SEQ ID NO: 2633441 - RNA, 16 nt, Human immunodeficiency virus 2 [HIV-2]
ugaaggcgccagagag

SEQ ID NO: 2633442 - RNA, 14 nt, Human immunodeficiency virus 2 [HIV-2]
ccuugcccagcugc

SEQ ID NO: 2633443 - RNA, 17 nt, Human immunodeficiency virus 2 [HIV-2]
gcugccaguuagaagca

SEQ ID NO: 2633444 - RNA, 16 nt, Human immunodeficiency virus 2 [HIV-2]
ggaauccaaggcagga

SEQ ID NO: 2633445 - RNA, 20 nt, Human immunodeficiency virus 2 [HIV-2]
ucuaacugcauagaaaacaa

SEQ ID NO: 2633446 - RNA, 17 nt, Human immunodeficiency virus 2 [HIV-2]
cagaaagacagaaagau

SEQ ID NO: 2633447 - RNA, 14 nt, Human immunodeficiency virus 2 [HIV-2]
agcugaggcugcag

SEQ ID NO: 2633448 - RNA, 19 nt, Human immunodeficiency virus 2 [HIV-2]
gcuacuaagaaacagcuga

SEQ ID NO: 2633449 - RNA, 14 nt, Human immunodeficiency virus 2 [HIV-2]
agaaucaggcaggg

SEQ ID NO: 2633450 - RNA, 17 nt, Human immunodeficiency virus 2 [HIV-2]
cacaaacaagcagacau

SEQ ID NO: 2633451 - RNA, 21 nt, Human immunodeficiency virus 2 [HIV-2]
cuuaaggcggcccaacugcaa

SEQ ID NO: 2633452 - RNA, 17 nt, Human immunodeficiency virus 2 [HIV-2]
uccauaauagacaugga

SEQ ID NO: 2633453 - RNA, 13 nt, Human immunodeficiency virus 2 [HIV-2]
gggaggcagugaa

SEQ ID NO: 2633454 - RNA, 14 nt, Human immunodeficiency virus 2 [HIV-2]
ccauugccagcugu

SEQ ID NO: 2633455 - RNA, 17 nt, Human immunodeficiency virus 2 [HIV-2]
accuagaaaaagaggaa

SEQ ID NO: 2633456 - RNA, 19 nt, Human immunodeficiency virus 2 [HIV-2]
agaacuguaccgauuagaa

SEQ ID NO: 2633457 - RNA, 15 nt, Human immunodeficiency virus 2 [HIV-2]
gcacaaggaugaugg

SEQ ID NO: 2633458 - RNA, 22 nt, Human immunodeficiency virus 2 [HIV-2]
agcccauggagaaacccagcaa

SEQ ID NO: 2633459 - RNA, 20 nt, Human immunodeficiency virus 2 [HIV-2]
aucaacacaaggccuaggca

SEQ ID NO: 2633460 - RNA, 22 nt, Human immunodeficiency virus 2 [HIV-2]
gccaacgaaggaacagaagaag

SEQ ID NO: 2633461 - RNA, 13 nt, Human immunodeficiency virus 2 [HIV-2]
ucucuccagcacu

SEQ ID NO: 2633462 - RNA, 17 nt, Human immunodeficiency virus 2 [HIV-2]
acucaugggccaggagu

SEQ ID NO: 2633463 - RNA, 24 nt, Human immunodeficiency virus 2 [HIV-2]
uaaccaagggagggacaugggagg

SEQ ID NO: 2633464 - RNA, 13 nt, Human immunodeficiency virus 2 [HIV-2]
ggccuaggcaggc

SEQ ID NO: 2633465 - RNA, 14 nt, Human immunodeficiency virus 2 [HIV-2]
acugaaagcaagag

SEQ ID NO: 2633466 - RNA, 22 nt, Human immunodeficiency virus 2 [HIV-2]
agaacucucacaagaggcagag

SEQ ID NO: 2633467 - RNA, 13 nt, Human immunodeficiency virus 2 [HIV-2]
agacaaugaugau

SEQ ID NO: 2633468 - RNA, 15 nt, Human immunodeficiency virus 2 [HIV-2]
ggcuguggaagcuag

SEQ ID NO: 2633469 - RNA, 22 nt, Human immunodeficiency virus 2 [HIV-2]
aaucagggacuggcugagacuu

SEQ ID NO: 2633470 - RNA, 17 nt, Human immunodeficiency virus 2 [HIV-2]
uguaugaauuacaaaaa

SEQ ID NO: 2633471 - RNA, 13 nt, Human immunodeficiency virus 2 [HIV-2]
ccaaggcaggaaa

SEQ ID NO: 2633472 - RNA, 20 nt, Human immunodeficiency virus 2 [HIV-2]
cuagagccaugcacuaacaa

SEQ ID NO: 2633473 - RNA, 19 nt, Human immunodeficiency virus 2 [HIV-2]
cggacuuuacuggccggga

SEQ ID NO: 2633474 - RNA, 24 nt, Human immunodeficiency virus 2 [HIV-2]
cacucucagccaaucaacacaagg

SEQ ID NO: 2633475 - RNA, 21 nt, Human immunodeficiency virus 2 [HIV-2]
gucuaacagcaaucagggacu

SEQ ID NO: 2633476 - RNA, 16 nt, Human immunodeficiency virus 2 [HIV-2]
ucugcggagaggcugg

SEQ ID NO: 2633477 - RNA, 19 nt, Human immunodeficiency virus 2 [HIV-2]
agaaaacaacacaugcgca

SEQ ID NO: 2633478 - RNA, 22 nt, Human immunodeficiency virus 2 [HIV-2]
gcuuugggaauccaaggcagga

SEQ ID NO: 2633479 - RNA, 15 nt, Human immunodeficiency virus 2 [HIV-2]
cauaccaacauuacc

SEQ ID NO: 2633480 - RNA, 20 nt, Human immunodeficiency virus 2 [HIV-2]
acaguaggaggagacauaga

SEQ ID NO: 2633481 - RNA, 14 nt, Human immunodeficiency virus 2 [HIV-2]
gcaagcuacacaaa

SEQ ID NO: 2633482 - RNA, 19 nt, Human immunodeficiency virus 2 [HIV-2]
agacuuacuauccaagaac

SEQ ID NO: 2633483 - RNA, 16 nt, Human immunodeficiency virus 2 [HIV-2]
gucaggauugccagag

SEQ ID NO: 2633484 - RNA, 12 nt, Human immunodeficiency virus 2 [HIV-2]
gguagagccugg

SEQ ID NO: 2633485 - RNA, 20 nt, Human immunodeficiency virus 2 [HIV-2]
caggauuaguguuucacucu

SEQ ID NO: 2633486 - RNA, 16 nt, Human immunodeficiency virus 2 [HIV-2]
cugcagggacuuucca

SEQ ID NO: 2633487 - RNA, 13 nt, Human immunodeficiency virus 2 [HIV-2]
gcaugaugaacaa

SEQ ID NO: 2633488 - RNA, 13 nt, Human immunodeficiency virus 2 [HIV-2]
cuugcccagcugc

SEQ ID NO: 2633489 - RNA, 20 nt, Human immunodeficiency virus 2 [HIV-2]
caaaauauggaugauguaga

SEQ ID NO: 2633490 - RNA, 14 nt, Human immunodeficiency virus 2 [HIV-2]
uauaggccuguuuu

SEQ ID NO: 2633491 - RNA, 21 nt, Human immunodeficiency virus 2 [HIV-2]
uagaacucucacaagaggcag

SEQ ID NO: 2633492 - RNA, 17 nt, Human immunodeficiency virus 2 [HIV-2]
guaagagaccaggaaau

SEQ ID NO: 2633493 - RNA, 22 nt, Human immunodeficiency virus 2 [HIV-2]
uuaguacacccagcacaaacaa

SEQ ID NO: 2633494 - RNA, 17 nt, Human immunodeficiency virus 2 [HIV-2]
gaggggaauacucgcag

SEQ ID NO: 2633495 - RNA, 16 nt, Human immunodeficiency virus 2 [HIV-2]
auuggcuaaacaagga

SEQ ID NO: 2633496 - RNA, 23 nt, Human immunodeficiency virus 2 [HIV-2]
gcuauacaacaucugcagagacu

SEQ ID NO: 2633497 - RNA, 21 nt, Human immunodeficiency virus 2 [HIV-2]
cugagggaaauaaaggaagaa

SEQ ID NO: 2633498 - RNA, 21 nt, Human immunodeficiency virus 2 [HIV-2]
aggaccggggacagccagcca

SEQ ID NO: 2633499 - RNA, 16 nt, Human immunodeficiency virus 2 [HIV-2]
gcaacagaaagacaga

SEQ ID NO: 2633500 - RNA, 14 nt, Human immunodeficiency virus 2 [HIV-2]
ggagaaacccagca

SEQ ID NO: 2633501 - RNA, 20 nt, Human immunodeficiency virus 2 [HIV-2]
guggcaaagguccuggagau

SEQ ID NO: 2633502 - RNA, 16 nt, Human immunodeficiency virus 2 [HIV-2]
cuccuugcccagcugc

SEQ ID NO: 2633503 - RNA, 20 nt, Human immunodeficiency virus 2 [HIV-2]
cacaagucaggauugccaga

SEQ ID NO: 2633504 - RNA, 13 nt, Human immunodeficiency virus 2 [HIV-2]
aauagaacauaua

SEQ ID NO: 2633505 - RNA, 17 nt, Human immunodeficiency virus 2 [HIV-2]
gaggcagaggaagauga

SEQ ID NO: 2633506 - RNA, 17 nt, Human immunodeficiency virus 2 [HIV-2]
cuagacauauaccuaga

SEQ ID NO: 2633507 - RNA, 14 nt, Human immunodeficiency virus 2 [HIV-2]
caaaugcuauugua

SEQ ID NO: 2633508 - RNA, 15 nt, Human immunodeficiency virus 2 [HIV-2]
ugggaauccaaggca

SEQ ID NO: 2633509 - RNA, 18 nt, Human immunodeficiency virus 2 [HIV-2]
augcaguuuccauugcca

SEQ ID NO: 2633510 - RNA, 17 nt, Human immunodeficiency virus 2 [HIV-2]
acaaguauuauaaucuc

SEQ ID NO: 2633511 - RNA, 22 nt, Human immunodeficiency virus 2 [HIV-2]
auaguagugggaauaauagcuu

SEQ ID NO: 2633512 - RNA, 13 nt, Human immunodeficiency virus 2 [HIV-2]
gagaggcuggcag

SEQ ID NO: 2633513 - RNA, 20 nt, Human immunodeficiency virus 2 [HIV-2]
acagaguuucccccagaaga

SEQ ID NO: 2633514 - RNA, 17 nt, Human immunodeficiency virus 2 [HIV-2]
gggaauccaaggcagga

SEQ ID NO: 2633515 - RNA, 19 nt, Human immunodeficiency virus 2 [HIV-2]
caagaagaaucaggcaggg

SEQ ID NO: 2633516 - RNA, 18 nt, Human immunodeficiency virus 2 [HIV-2]
acuagcagguagagccug

SEQ ID NO: 2633517 - RNA, 16 nt, Human immunodeficiency virus 2 [HIV-2]
agaacaagcaguagaa

SEQ ID NO: 2633518 - RNA, 16 nt, Human immunodeficiency virus 2 [HIV-2]
auggcacuagagcaga

SEQ ID NO: 2633519 - RNA, 17 nt, Human immunodeficiency virus 2 [HIV-2]
gaagaaucaggcaggga

SEQ ID NO: 2633520 - RNA, 13 nt, Human immunodeficiency virus 2 [HIV-2]
gaauggaaggcaa

SEQ ID NO: 2633521 - RNA, 20 nt, Human immunodeficiency virus 2 [HIV-2]
aagcugccaguuagaagcaa

SEQ ID NO: 2633522 - RNA, 15 nt, Human immunodeficiency virus 2 [HIV-2]
cuccugugagggaca

SEQ ID NO: 2633523 - RNA, 18 nt, Human immunodeficiency virus 2 [HIV-2]
gaauaauacagugacaga

SEQ ID NO: 2633524 - RNA, 20 nt, Human immunodeficiency virus 2 [HIV-2]
cagcaguaucagcagggaga

SEQ ID NO: 2633525 - RNA, 19 nt, Human immunodeficiency virus 2 [HIV-2]
cagcagggagaguacauga

SEQ ID NO: 2633526 - RNA, 18 nt, Human immunodeficiency virus 2 [HIV-2]
gugacaacacaacagcug

SEQ ID NO: 2633527 - RNA, 22 nt, Human immunodeficiency virus 2 [HIV-2]
aaaagggggacugcaagggaug

SEQ ID NO: 2633528 - RNA, 12 nt, Human immunodeficiency virus 2 [HIV-2]
uauaaggacaca

SEQ ID NO: 2633529 - RNA, 18 nt, Human immunodeficiency virus 2 [HIV-2]
gcugagacuuaaggcggc

SEQ ID NO: 2633530 - RNA, 14 nt, Human immunodeficiency virus 2 [HIV-2]
caaucuauguagug

SEQ ID NO: 2633531 - RNA, 21 nt, Human immunodeficiency virus 2 [HIV-2]
aguaucaguagaacucucaca

SEQ ID NO: 2633532 - RNA, 17 nt, Human immunodeficiency virus 2 [HIV-2]
caguaucagcagggaga

SEQ ID NO: 2633533 - RNA, 22 nt, Human immunodeficiency virus 2 [HIV-2]
agaaucaggcagggagcagaac

SEQ ID NO: 2633534 - RNA, 20 nt, Human immunodeficiency virus 2 [HIV-2]
aacagcaaucagggacuggc

SEQ ID NO: 2633535 - RNA, 17 nt, Human immunodeficiency virus 2 [HIV-2]
cugccaguuagaagcaa

SEQ ID NO: 2633536 - RNA, 20 nt, Human immunodeficiency virus 2 [HIV-2]
agaauuggcuaaacaaggag

SEQ ID NO: 2633537 - RNA, 22 nt, Human immunodeficiency virus 2 [HIV-2]
aucucccagagucuaacagcaa

SEQ ID NO: 2633538 - RNA, 17 nt, Human immunodeficiency virus 2 [HIV-2]
cucuucaauaaagcugc

SEQ ID NO: 2633539 - RNA, 14 nt, Human immunodeficiency virus 2 [HIV-2]
agcaacagaaagac

SEQ ID NO: 2633540 - RNA, 22 nt, Human immunodeficiency virus 2 [HIV-2]
cucgcccuccugugagggacag

SEQ ID NO: 2633541 - RNA, 21 nt, Human immunodeficiency virus 2 [HIV-2]
uaacaggaacaaccauacuug

SEQ ID NO: 2633542 - RNA, 19 nt, Human immunodeficiency virus 2 [HIV-2]
uccugugagggacagcagu

SEQ ID NO: 2633543 - RNA, 18 nt, Human immunodeficiency virus 2 [HIV-2]
agauauuggcaugaugaa

SEQ ID NO: 2633544 - RNA, 12 nt, Human immunodeficiency virus 2 [HIV-2]
gucaaggcagga

SEQ ID NO: 2633545 - RNA, 18 nt, Human immunodeficiency virus 2 [HIV-2]
cagggaggcagugaacca

SEQ ID NO: 2633546 - RNA, 21 nt, Human immunodeficiency virus 2 [HIV-2]
gcaaguuaaguguguguuccc

SEQ ID NO: 2633547 - RNA, 16 nt, Human immunodeficiency virus 2 [HIV-2]
cggagaggcuggcaga

SEQ ID NO: 2633548 - RNA, 24 nt, Human immunodeficiency virus 2 [HIV-2]
gaagggguuagaacaagauaagaa

SEQ ID NO: 2633549 - RNA, 20 nt, Human immunodeficiency virus 2 [HIV-2]
augcauggaauaauacagug

SEQ ID NO: 2633550 - RNA, 16 nt, Human immunodeficiency virus 2 [HIV-2]
agauucugaugaugau

SEQ ID NO: 2633551 - RNA, 21 nt, Human immunodeficiency virus 2 [HIV-2]
acaagcaguagaagaugucug

SEQ ID NO: 2633552 - RNA, 17 nt, Human immunodeficiency virus 2 [HIV-2]
ugcgaguggauccaaga

SEQ ID NO: 2633553 - RNA, 13 nt, Human immunodeficiency virus 2 [HIV-2]
gcccucauacuua

SEQ ID NO: 2633554 - RNA, 21 nt, Human immunodeficiency virus 2 [HIV-2]
auuacaaaaauuaaauagcug

SEQ ID NO: 2633555 - RNA, 16 nt, Human immunodeficiency virus 2 [HIV-2]
acaagaggcagaggaa

SEQ ID NO: 2633556 - RNA, 22 nt, Human immunodeficiency virus 2 [HIV-2]
acacuugggggaccauacagug

SEQ ID NO: 2633557 - RNA, 12 nt, Human immunodeficiency virus 2 [HIV-2]
agggagggacau

SEQ ID NO: 2633558 - RNA, 17 nt, Human immunodeficiency virus 2 [HIV-2]
guauaaauguacccgcu

SEQ ID NO: 2633559 - RNA, 18 nt, Human immunodeficiency virus 2 [HIV-2]
ucuugcauuguauucagu

SEQ ID NO: 2633560 - RNA, 15 nt, Human immunodeficiency virus 2 [HIV-2]
uccauugccagcugu

SEQ ID NO: 2633561 - RNA, 16 nt, Human immunodeficiency virus 2 [HIV-2]
aguaccacggagagaa

SEQ ID NO: 2633562 - RNA, 12 nt, Human immunodeficiency virus 2 [HIV-2]
gccuaggcaggc

SEQ ID NO: 2633563 - RNA, 17 nt, Human immunodeficiency virus 2 [HIV-2]
aacaagacccuggucug

SEQ ID NO: 2633564 - RNA, 20 nt, Human immunodeficiency virus 2 [HIV-2]
uguaagagaccaggaaauaa

SEQ ID NO: 2633565 - RNA, 14 nt, Human immunodeficiency virus 2 [HIV-2]
cagcaaucagggac

SEQ ID NO: 2633566 - RNA, 20 nt, Human immunodeficiency virus 2 [HIV-2]
cagaauuauacucaugggcc

SEQ ID NO: 2633567 - RNA, 12 nt, Human immunodeficiency virus 2 [HIV-2]
aaccaagggagg

SEQ ID NO: 2633568 - RNA, 21 nt, Human immunodeficiency virus 2 [HIV-2]
gcacagcuaaauucaugggga

SEQ ID NO: 2633569 - RNA, 17 nt, Human immunodeficiency virus 2 [HIV-2]
acuucuaacugcauaga

SEQ ID NO: 2633570 - RNA, 14 nt, Human immunodeficiency virus 2 [HIV-2]
ccagaaggggcugu

SEQ ID NO: 2633571 - RNA, 23 nt, Human immunodeficiency virus 2 [HIV-2]
aggcucagacccggaaguggcau

SEQ ID NO: 2633572 - RNA, 15 nt, Human immunodeficiency virus 2 [HIV-2]
gacagaccccagaga

SEQ ID NO: 2633573 - RNA, 24 nt, Human immunodeficiency virus 2 [HIV-2]
aagagucaugugauaagcacuauu

SEQ ID NO: 2633574 - RNA, 20 nt, Human immunodeficiency virus 2 [HIV-2]
gaagaugugguuugugacaa

SEQ ID NO: 2633575 - RNA, 16 nt, Human immunodeficiency virus 2 [HIV-2]
gcagacaugaugauga

SEQ ID NO: 2633576 - RNA, 13 nt, Human immunodeficiency virus 2 [HIV-2]
aguaggaggagac

SEQ ID NO: 2633577 - RNA, 23 nt, Human immunodeficiency virus 2 [HIV-2]
ggaaauaauuuuaaaugugacag

SEQ ID NO: 2633578 - RNA, 17 nt, Human immunodeficiency virus 2 [HIV-2]
ggcacuagagcagaaaa

SEQ ID NO: 2633579 - RNA, 14 nt, Human immunodeficiency virus 2 [HIV-2]
ggcaggaaguagcu

SEQ ID NO: 2633580 - RNA, 21 nt, Human immunodeficiency virus 2 [HIV-2]
uacuccucaacuccagugagg

SEQ ID NO: 2633581 - RNA, 18 nt, Human immunodeficiency virus 2 [HIV-2]
aagaagccuuaagacauu

SEQ ID NO: 2633582 - RNA, 15 nt, Human immunodeficiency virus 2 [HIV-2]
ggaagccaugcagga

SEQ ID NO: 2633583 - RNA, 14 nt, Human immunodeficiency virus 2 [HIV-2]
ggacuccaaggaaa

SEQ ID NO: 2633584 - RNA, 18 nt, Human immunodeficiency virus 2 [HIV-2]
aacaucugcagagacuua

SEQ ID NO: 2633585 - RNA, 12 nt, Human immunodeficiency virus 2 [HIV-2]
agacaugaugau

SEQ ID NO: 2633586 - RNA, 21 nt, Human immunodeficiency virus 2 [HIV-2]
cacccuugaaggcgccagaga

SEQ ID NO: 2633587 - RNA, 20 nt, Human immunodeficiency virus 2 [HIV-2]
caauaacacuuaugucagga

SEQ ID NO: 2633588 - RNA, 17 nt, Human immunodeficiency virus 2 [HIV-2]
caagagagggugcacuu

SEQ ID NO: 2633589 - RNA, 23 nt, Human immunodeficiency virus 2 [HIV-2]
agguacuccucaacuccagugag

SEQ ID NO: 2633590 - RNA, 15 nt, Human immunodeficiency virus 2 [HIV-2]
uggagaaacccagca

SEQ ID NO: 2633591 - RNA, 23 nt, Human immunodeficiency virus 2 [HIV-2]
gccagccaacgaaggaacagaag

SEQ ID NO: 2633592 - RNA, 19 nt, Human immunodeficiency virus 2 [HIV-2]
cucugcggagaggcuggca

SEQ ID NO: 2633593 - RNA, 17 nt, Human immunodeficiency virus 2 [HIV-2]
ugacagaccccagagaa

SEQ ID NO: 2633594 - RNA, 14 nt, Human immunodeficiency virus 2 [HIV-2]
aaguaagaagagcc

SEQ ID NO: 2633595 - RNA, 23 nt, Human immunodeficiency virus 2 [HIV-2]
ggggaauacucgcaguuccaaga

SEQ ID NO: 2633596 - RNA, 16 nt, Human immunodeficiency virus 2 [HIV-2]
agaagagccaucagag

SEQ ID NO: 2633597 - RNA, 21 nt, Human immunodeficiency virus 2 [HIV-2]
agaagccuuaaacagggaggc

SEQ ID NO: 2633598 - RNA, 13 nt, Human immunodeficiency virus 2 [HIV-2]
caagaaccaaaca

SEQ ID NO: 2633599 - RNA, 17 nt, Human immunodeficiency virus 2 [HIV-2]
gaagaagccuuaagaca

SEQ ID NO: 2633600 - RNA, 19 nt, Human immunodeficiency virus 2 [HIV-2]
agcuacuaagaaacagcug

SEQ ID NO: 2633601 - RNA, 18 nt, Human immunodeficiency virus 2 [HIV-2]
cggcaggugaaguaagaa

SEQ ID NO: 2633602 - RNA, 23 nt, Human immunodeficiency virus 2 [HIV-2]
agacaugaugaugagcaugggga

SEQ ID NO: 2633603 - RNA, 18 nt, Human immunodeficiency virus 2 [HIV-2]
agagccaucagaggggaa

SEQ ID NO: 2633604 - RNA, 17 nt, Human immunodeficiency virus 2 [HIV-2]
gggaagccaugcaggag

SEQ ID NO: 2633605 - RNA, 13 nt, Human immunodeficiency virus 2 [HIV-2]
agaggcuggcaga

SEQ ID NO: 2633606 - RNA, 14 nt, Human immunodeficiency virus 2 [HIV-2]
agccaugcaggagg

SEQ ID NO: 2633607 - RNA, 20 nt, Human immunodeficiency virus 2 [HIV-2]
acagcaguaucagcagggag

SEQ ID NO: 2633608 - RNA, 20 nt, Human immunodeficiency virus 2 [HIV-2]
ggaaucaaugauacagggaa

SEQ ID NO: 2633609 - RNA, 12 nt, Human immunodeficiency virus 2 [HIV-2]
uuuggaggcaga

SEQ ID NO: 2633610 - RNA, 20 nt, Human immunodeficiency virus 2 [HIV-2]
ugcagggacuuuccagaagg

SEQ ID NO: 2633611 - RNA, 18 nt, Human immunodeficiency virus 2 [HIV-2]
aagcuaguaucaguagaa

SEQ ID NO: 2633612 - RNA, 15 nt, Human immunodeficiency virus 2 [HIV-2]
gcacaaacaagcaga

SEQ ID NO: 2633613 - RNA, 23 nt, Human immunodeficiency virus 2 [HIV-2]
agggagugacuggguaauagaaa

SEQ ID NO: 2633614 - RNA, 21 nt, Human immunodeficiency virus 2 [HIV-2]
uaaccaagggagggacauggg

SEQ ID NO: 2633615 - RNA, 19 nt, Human immunodeficiency virus 2 [HIV-2]
auaucuauuggcauggcag

SEQ ID NO: 2633616 - RNA, 14 nt, Human immunodeficiency virus 2 [HIV-2]
ucaagagacaacaa

SEQ ID NO: 2633617 - RNA, 18 nt, Human immunodeficiency virus 2 [HIV-2]
acaaguccgcuaccuaga

SEQ ID NO: 2633618 - RNA, 15 nt, Human immunodeficiency virus 2 [HIV-2]
ccgccgacugaucuc

SEQ ID NO: 2633619 - RNA, 21 nt, Human immunodeficiency virus 2 [HIV-2]
ugauggaaacgcaaacuucua

SEQ ID NO: 2633620 - RNA, 18 nt, Human immunodeficiency virus 2 [HIV-2]
cuacaaggccuucacucu

SEQ ID NO: 2633621 - RNA, 16 nt, Human immunodeficiency virus 2 [HIV-2]
gguagaagacaagaac

SEQ ID NO: 2633622 - RNA, 21 nt, Human immunodeficiency virus 2 [HIV-2]
gugcaauuguuaaguagauuu

SEQ ID NO: 2633623 - RNA, 21 nt, Human immunodeficiency virus 2 [HIV-2]
acagcaaucagggacuggcug

SEQ ID NO: 2633624 - RNA, 17 nt, Human immunodeficiency virus 2 [HIV-2]
ccaaauucaacaagaaa

SEQ ID NO: 2633625 - RNA, 12 nt, Human immunodeficiency virus 2 [HIV-2]
augacauggcag

SEQ ID NO: 2633626 - RNA, 22 nt, Human immunodeficiency virus 2 [HIV-2]
ggacagcaguaucagcagggag

SEQ ID NO: 2633627 - RNA, 14 nt, Human immunodeficiency virus 2 [HIV-2]
ugugccuaaugcaa

SEQ ID NO: 2633628 - RNA, 17 nt, Human immunodeficiency virus 2 [HIV-2]
caaacaagcagacauga

SEQ ID NO: 2633629 - RNA, 14 nt, Human immunodeficiency virus 2 [HIV-2]
uguucccugcugga

SEQ ID NO: 2633630 - RNA, 18 nt, Human immunodeficiency virus 2 [HIV-2]
ggccgguacugggcagac

SEQ ID NO: 2633631 - RNA, 19 nt, Human immunodeficiency virus 2 [HIV-2]
cagaaguggcagaacugua

SEQ ID NO: 2633632 - RNA, 18 nt, Human immunodeficiency virus 2 [HIV-2]
uggccgguacugggcaga

SEQ ID NO: 2633633 - RNA, 21 nt, Human immunodeficiency virus 2 [HIV-2]
caggaaguagcuacuaagaaa

SEQ ID NO: 2633634 - RNA, 17 nt, Human immunodeficiency virus 2 [HIV-2]
guagauucugaugauga

SEQ ID NO: 2633635 - RNA, 19 nt, Human immunodeficiency virus 2 [HIV-2]
augaugagcauggggagac

SEQ ID NO: 2633636 - RNA, 18 nt, Human immunodeficiency virus 2 [HIV-2]
agaucgagcccugagagg

SEQ ID NO: 2633637 - RNA, 20 nt, Human immunodeficiency virus 2 [HIV-2]
accgauuagaacugggagac

SEQ ID NO: 2633638 - RNA, 15 nt, Human immunodeficiency virus 2 [HIV-2]
aagaauauguaugaa

SEQ ID NO: 2633639 - RNA, 13 nt, Human immunodeficiency virus 2 [HIV-2]
caguaugugacug

SEQ ID NO: 2633640 - RNA, 18 nt, Human immunodeficiency virus 2 [HIV-2]
cuaacugcagaggagaau

SEQ ID NO: 2633641 - RNA, 23 nt, Human immunodeficiency virus 2 [HIV-2]
ggaggcagauggagggaagccau

SEQ ID NO: 2633642 - RNA, 14 nt, Human immunodeficiency virus 2 [HIV-2]
aguagaacucucac

SEQ ID NO: 2633643 - RNA, 21 nt, Human immunodeficiency virus 2 [HIV-2]
aacaacacaugcgcaggauua

SEQ ID NO: 2633644 - RNA, 23 nt, Human immunodeficiency virus 2 [HIV-2]
ugugcaacuaaaaauagagacac

SEQ ID NO: 2633645 - RNA, 13 nt, Human immunodeficiency virus 2 [HIV-2]
ucuccagcacuag

SEQ ID NO: 2633646 - RNA, 21 nt, Human immunodeficiency virus 2 [HIV-2]
aguuccuguuacaccaagagu

SEQ ID NO: 2633647 - RNA, 14 nt, Human immunodeficiency virus 2 [HIV-2]
caaacaagcagaca

SEQ ID NO: 2633648 - RNA, 15 nt, Human immunodeficiency virus 2 [HIV-2]
agaaauaacaccaau

SEQ ID NO: 2633649 - RNA, 16 nt, Human immunodeficiency virus 2 [HIV-2]
cuuggucaaggcagga

SEQ ID NO: 2633650 - RNA, 15 nt, Human immunodeficiency virus 2 [HIV-2]
aguaacaagacccug

SEQ ID NO: 2633651 - RNA, 20 nt, Human immunodeficiency virus 2 [HIV-2]
ccagccaacgaaggaacaga

SEQ ID NO: 2633652 - RNA, 15 nt, Human immunodeficiency virus 2 [HIV-2]
acaccaauuggcuuc

SEQ ID NO: 2633653 - RNA, 15 nt, Human immunodeficiency virus 2 [HIV-2]
guucucuccagcacu

SEQ ID NO: 2633654 - RNA, 23 nt, Human immunodeficiency virus 2 [HIV-2]
cuuuaauggcacuagagcagaaa

SEQ ID NO: 2633655 - RNA, 19 nt, Human immunodeficiency virus 2 [HIV-2]
agaggcuuuugaugcaugg

SEQ ID NO: 2633656 - RNA, 16 nt, Human immunodeficiency virus 2 [HIV-2]
caagcagacaugauga

SEQ ID NO: 2633657 - RNA, 22 nt, Human immunodeficiency virus 2 [HIV-2]
gacagcaguaucagcagggaga

SEQ ID NO: 2633658 - RNA, 22 nt, Human immunodeficiency virus 2 [HIV-2]
ugcaguuuccauugccagcugu

SEQ ID NO: 2633659 - RNA, 22 nt, Human immunodeficiency virus 2 [HIV-2]
gaagcccaaauucaacaagaaa

SEQ ID NO: 2633660 - RNA, 21 nt, Human immunodeficiency virus 2 [HIV-2]
cauguuacaugagacauugca

SEQ ID NO: 2633661 - RNA, 14 nt, Human immunodeficiency virus 2 [HIV-2]
auuggcauggcaga

SEQ ID NO: 2633662 - RNA, 22 nt, Human immunodeficiency virus 2 [HIV-2]
aaagcagauaauuaauaccugg

SEQ ID NO: 2633663 - RNA, 21 nt, Human immunodeficiency virus 2 [HIV-2]
cagugaggaacaaaagaggug

SEQ ID NO: 2633664 - RNA, 11 nt, Human immunodeficiency virus 2 [HIV-2]
ccauacagugc

SEQ ID NO: 2633665 - RNA, 14 nt, Human immunodeficiency virus 2 [HIV-2]
auaauacagugaca

SEQ ID NO: 2633666 - RNA, 20 nt, Human immunodeficiency virus 2 [HIV-2]
aaaauaugacauggcaggag

SEQ ID NO: 2633667 - RNA, 23 nt, Human immunodeficiency virus 2 [HIV-2]
aaagaauggaaggcaaaacugaa

SEQ ID NO: 2633668 - RNA, 17 nt, Human immunodeficiency virus 2 [HIV-2]
cagagucuaacagcaau

SEQ ID NO: 2633669 - RNA, 17 nt, Human immunodeficiency virus 2 [HIV-2]
gagaaguaccuaaagca

SEQ ID NO: 2633670 - RNA, 15 nt, Human immunodeficiency virus 2 [HIV-2]
cugaggcugcaggga

SEQ ID NO: 2633671 - RNA, 13 nt, Human immunodeficiency virus 2 [HIV-2]
ucagcagggagag

SEQ ID NO: 2633672 - RNA, 15 nt, Human immunodeficiency virus 2 [HIV-2]
uagaagccuuaaaca

SEQ ID NO: 2633673 - RNA, 20 nt, Human immunodeficiency virus 2 [HIV-2]
caagggagggacaugggagg

SEQ ID NO: 2633674 - RNA, 22 nt, Human immunodeficiency virus 2 [HIV-2]
ucaauauggagugcauauagua

SEQ ID NO: 2633675 - RNA, 21 nt, Human immunodeficiency virus 2 [HIV-2]
aggcuggcagaucgagcccug

SEQ ID NO: 2633676 - RNA, 16 nt, Human immunodeficiency virus 2 [HIV-2]
uguggacuaacugcag

SEQ ID NO: 2633677 - RNA, 12 nt, Human immunodeficiency virus 2 [HIV-2]
uucuaacugcau

SEQ ID NO: 2633678 - RNA, 18 nt, Human immunodeficiency virus 2 [HIV-2]
agcaguaucagcagggag

SEQ ID NO: 2633679 - RNA, 15 nt, Human immunodeficiency virus 2 [HIV-2]
guauuuagaagaugu

SEQ ID NO: 2633680 - RNA, 23 nt, Human immunodeficiency virus 2 [HIV-2]
cuucgaguggcuagagaggacca

SEQ ID NO: 2633681 - RNA, 16 nt, Human immunodeficiency virus 2 [HIV-2]
caacacaugcgcagga

SEQ ID NO: 2633682 - RNA, 19 nt, Human immunodeficiency virus 2 [HIV-2]
guagagccuggguguuccc

SEQ ID NO: 2633683 - RNA, 14 nt, Human immunodeficiency virus 2 [HIV-2]
aauaaagcugccag

SEQ ID NO: 2633684 - RNA, 18 nt, Human immunodeficiency virus 2 [HIV-2]
uaagguacccaauguacu

SEQ ID NO: 2633685 - RNA, 23 nt, Human immunodeficiency virus 2 [HIV-2]
gaacucgcccuccugugagggac

SEQ ID NO: 2633686 - RNA, 22 nt, Human immunodeficiency virus 2 [HIV-2]
aauaacacuuaugucaggauua

SEQ ID NO: 2633687 - RNA, 16 nt, Human immunodeficiency virus 2 [HIV-2]
ccagcaacagaaagac

SEQ ID NO: 2633688 - RNA, 21 nt, Human immunodeficiency virus 2 [HIV-2]
gcccaaauucaacaagaaaag

SEQ ID NO: 2633689 - RNA, 18 nt, Human immunodeficiency virus 2 [HIV-2]
ggacuuagggagugacug

SEQ ID NO: 2633690 - RNA, 18 nt, Human immunodeficiency virus 2 [HIV-2]
gccaggaaacaguggaga

SEQ ID NO: 2633691 - RNA, 17 nt, Human immunodeficiency virus 2 [HIV-2]
agucgccgccuggucau

SEQ ID NO: 2633692 - RNA, 12 nt, Human immunodeficiency virus 2 [HIV-2]
caaggagaagaa

SEQ ID NO: 2633693 - RNA, 16 nt, Human immunodeficiency virus 2 [HIV-2]
agagggauaccauaua

SEQ ID NO: 2633694 - RNA, 23 nt, Human immunodeficiency virus 2 [HIV-2]
aggcuuugaaccuaagugcacua

SEQ ID NO: 2633695 - RNA, 19 nt, Human immunodeficiency virus 2 [HIV-2]
uacaaauuaauagaaauaa

SEQ ID NO: 2633696 - RNA, 17 nt, Human immunodeficiency virus 2 [HIV-2]
cugagagguucucucca

SEQ ID NO: 2633697 - RNA, 14 nt, Human immunodeficiency virus 2 [HIV-2]
aucaggcagggagc

SEQ ID NO: 2633698 - RNA, 19 nt, Human immunodeficiency virus 2 [HIV-2]
gaugugcguuuagacaggu

SEQ ID NO: 2633699 - RNA, 24 nt, Human immunodeficiency virus 2 [HIV-2]
caguagaacucucacaagaggcag

SEQ ID NO: 2633700 - RNA, 13 nt, Human immunodeficiency virus 2 [HIV-2]
ccagcaacagaaa

SEQ ID NO: 2633701 - RNA, 14 nt, Human immunodeficiency virus 2 [HIV-2]
accacggagagaaa

SEQ ID NO: 2633702 - RNA, 21 nt, Human immunodeficiency virus 2 [HIV-2]
agaagaugggaccccacggag

SEQ ID NO: 2633703 - RNA, 12 nt, Human immunodeficiency virus 2 [HIV-2]
ucugcggagagg

SEQ ID NO: 2633704 - RNA, 23 nt, Human immunodeficiency virus 2 [HIV-2]
cccaauguacuucggguggcugu

SEQ ID NO: 2633705 - RNA, 19 nt, Human immunodeficiency virus 2 [HIV-2]
cuuacuguauaaauguacc

SEQ ID NO: 2633706 - RNA, 12 nt, Human immunodeficiency virus 2 [HIV-2]
aucucccagagu

SEQ ID NO: 2633707 - RNA, 16 nt, Human immunodeficiency virus 2 [HIV-2]
agcgcgacgcaucggg

SEQ ID NO: 2633708 - RNA, 14 nt, Human immunodeficiency virus 2 [HIV-2]
aggcaaaacugaaa

SEQ ID NO: 2633709 - RNA, 19 nt, Human immunodeficiency virus 2 [HIV-2]
acagcaguaucagcaggga

SEQ ID NO: 2633710 - RNA, 17 nt, Human immunodeficiency virus 2 [HIV-2]
agcagguagagccuggg

SEQ ID NO: 2633711 - RNA, 19 nt, Human immunodeficiency virus 2 [HIV-2]
ccaacgaaggaacagaaga

SEQ ID NO: 2633712 - RNA, 13 nt, Human immunodeficiency virus 2 [HIV-2]
caggaacaaccau

SEQ ID NO: 2633713 - RNA, 13 nt, Human immunodeficiency virus 2 [HIV-2]
ggucaaggcagga

SEQ ID NO: 2633714 - RNA, 21 nt, Human immunodeficiency virus 2 [HIV-2]
acgcuugcuugcuuaaagacc

SEQ ID NO: 2633715 - RNA, 21 nt, Human immunodeficiency virus 2 [HIV-2]
cccagcacaaacaagcagaca

SEQ ID NO: 2633716 - RNA, 16 nt, Human immunodeficiency virus 2 [HIV-2]
cugcggagaggcuggc

SEQ ID NO: 2633717 - RNA, 12 nt, Human immunodeficiency virus 2 [HIV-2]
uuaucaggaaau

SEQ ID NO: 2633718 - RNA, 19 nt, Human immunodeficiency virus 2 [HIV-2]
gggaauccaaggcaggaaa

SEQ ID NO: 2633719 - RNA, 19 nt, Human immunodeficiency virus 2 [HIV-2]
aaguagcuacuaagaaaca

SEQ ID NO: 2633720 - RNA, 15 nt, Human immunodeficiency virus 2 [HIV-2]
ucucgcgacagcagg

SEQ ID NO: 2633721 - RNA, 16 nt, Human immunodeficiency virus 2 [HIV-2]
gcuugcuuaguauauu

SEQ ID NO: 2633722 - RNA, 23 nt, Human immunodeficiency virus 2 [HIV-2]
guguucccugcuggacucucacc

SEQ ID NO: 2633723 - RNA, 13 nt, Human immunodeficiency virus 2 [HIV-2]
acaacgagcccuc

SEQ ID NO: 2633724 - RNA, 22 nt, Human immunodeficiency virus 2 [HIV-2]
cagaagaguuugggcacaaguc

SEQ ID NO: 2633725 - RNA, 13 nt, Human immunodeficiency virus 2 [HIV-2]
gccugugaaucaa

SEQ ID NO: 2633726 - RNA, 17 nt, Human immunodeficiency virus 2 [HIV-2]
guggacuaacugcagag

SEQ ID NO: 2633727 - RNA, 21 nt, Human immunodeficiency virus 2 [HIV-2]
aagaaacagcugaggcugcag

SEQ ID NO: 2633728 - RNA, 18 nt, Human immunodeficiency virus 2 [HIV-2]
gaagccuuaaacagggag

SEQ ID NO: 2633729 - RNA, 14 nt, Human immunodeficiency virus 2 [HIV-2]
cagauggagggaag

SEQ ID NO: 2633730 - RNA, 20 nt, Human immunodeficiency virus 2 [HIV-2]
gcaccuacagaucagagaag

SEQ ID NO: 2633731 - RNA, 18 nt, Human immunodeficiency virus 2 [HIV-2]
aaguagauuuagaaaggg

SEQ ID NO: 2633732 - RNA, 15 nt, Human immunodeficiency virus 2 [HIV-2]
acagcaaucagggac

SEQ ID NO: 2633733 - RNA, 18 nt, Human immunodeficiency virus 2 [HIV-2]
aaauucauggggaugugc

SEQ ID NO: 2633734 - RNA, 15 nt, Human immunodeficiency virus 2 [HIV-2]
caacaaaaugacaga

SEQ ID NO: 2633735 - RNA, 18 nt, Human immunodeficiency virus 2 [HIV-2]
auacuuggucaaggcagg

SEQ ID NO: 2633736 - RNA, 19 nt, Human immunodeficiency virus 2 [HIV-2]
cuugcgggcgcguggggau

SEQ ID NO: 2633737 - RNA, 13 nt, Human immunodeficiency virus 2 [HIV-2]
acugcagaggaga

SEQ ID NO: 2633738 - RNA, 11 nt, Human immunodeficiency virus 2 [HIV-2]
ugcccagcugc

SEQ ID NO: 2633739 - RNA, 21 nt, Human immunodeficiency virus 2 [HIV-2]
cagcaguaucagcagggagag

SEQ ID NO: 2633740 - RNA, 18 nt, Human immunodeficiency virus 2 [HIV-2]
acucgcaguuccaagaag

SEQ ID NO: 2633741 - RNA, 13 nt, Human immunodeficiency virus 2 [HIV-2]
cuagagaggacca

SEQ ID NO: 2633742 - RNA, 17 nt, Human immunodeficiency virus 2 [HIV-2]
uaucauuagcuuaaaca

SEQ ID NO: 2633743 - RNA, 21 nt, Human immunodeficiency virus 2 [HIV-2]
gaacucucacaagaggcagag

SEQ ID NO: 2633744 - RNA, 14 nt, Human immunodeficiency virus 2 [HIV-2]
accagauuggcaga

SEQ ID NO: 2633745 - RNA, 16 nt, Human immunodeficiency virus 2 [HIV-2]
auugccagcuguguuu

SEQ ID NO: 2633746 - RNA, 11 nt, Human immunodeficiency virus 2 [HIV-2]
cugguggggaa

SEQ ID NO: 2633747 - RNA, 14 nt, Human immunodeficiency virus 2 [HIV-2]
aaagcaagagggau

SEQ ID NO: 2633748 - RNA, 19 nt, Human immunodeficiency virus 2 [HIV-2]
uggaaaaauaugacauggc

SEQ ID NO: 2633749 - RNA, 24 nt, Human immunodeficiency virus 2 [HIV-2]
gccaaucaacacaaggccuaggca

SEQ ID NO: 2633750 - RNA, 19 nt, Human immunodeficiency virus 2 [HIV-2]
ggaauccaaggcaggaaaa

SEQ ID NO: 2633751 - RNA, 21 nt, Human immunodeficiency virus 2 [HIV-2]
agaauuggcuaaacaaggaga

SEQ ID NO: 2633752 - RNA, 22 nt, Human immunodeficiency virus 2 [HIV-2]
uuccucaauuggguagaagaca

SEQ ID NO: 2633753 - RNA, 17 nt, Human immunodeficiency virus 2 [HIV-2]
cuuaguacacccagcac

SEQ ID NO: 2633754 - RNA, 12 nt, Human
aaaaacacagca

SEQ ID NO: 2633755 - RNA, 17 nt, Human
aaaacaaggaugaauua

SEQ ID NO: 2633756 - RNA, 18 nt, Human
aaaacacagcaaggguga

SEQ ID NO: 2633757 - RNA, 13 nt, Human
aaaacacagcaag

SEQ ID NO: 2633758 - RNA, 12 nt, Human
aaaacacagcaa

SEQ ID NO: 2633759 - RNA, 14 nt, Human
aaaacaaggaugaa

SEQ ID NO: 2633760 - RNA, 17 nt, Human
aggauguugaaaaaguu

SEQ ID NO: 2633761 - RNA, 14 nt, Human
aggauguugaaaaa

SEQ ID NO: 2633762 - RNA, 14 nt, Human
agcuguaugauucc

SEQ ID NO: 2633763 - RNA, 21 nt, Human
agauaggucagugcaaauacu

SEQ ID NO: 2633764 - RNA, 17 nt, Human
agacugcauuauauuua

SEQ ID NO: 2633765 - RNA, 12 nt, Human
agcaugaagaca

SEQ ID NO: 2633766 - RNA, 15 nt, Human
agcaugaagacagag

SEQ ID NO: 2633767 - RNA, 15 nt, Human
agccagauuuuccug

SEQ ID NO: 2633768 - RNA, 19 nt, Human
agccagauuuuccugaaaa

SEQ ID NO: 2633769 - RNA, 20 nt, Human
agcaguucagagcugcccuc

SEQ ID NO: 2633770 - RNA, 19 nt, Human
agcaguucagagcugcccu

SEQ ID NO: 2633771 - RNA, 21 nt, Human
agaugggagaaucacuugaac

SEQ ID NO: 2633772 - RNA, 14 nt, Human
agauguagaggaga

SEQ ID NO: 2633773 - RNA, 21 nt, Human
agcaguugaaaagacuccaaa

SEQ ID NO: 2633774 - RNA, 23 nt, Human
agcaguugaaaagacuccaaaga

SEQ ID NO: 2633775 - RNA, 16 nt, Human
agcaguucagagcugc

SEQ ID NO: 2633776 - RNA, 15 nt, Human
agcaguucagagcug

SEQ ID NO: 2633777 - RNA, 17 nt, Human
agcaguucagagcugcc

SEQ ID NO: 2633778 - RNA, 18 nt, Human
agcaguucagagcugccc

SEQ ID NO: 2633779 - RNA, 19 nt, Human
agccccacccucagaugca

SEQ ID NO: 2633780 - RNA, 21 nt, Human
agccgggcgugguggugagug

SEQ ID NO: 2633781 - RNA, 16 nt, Human
augucaaucagccuag

SEQ ID NO: 2633782 - RNA, 20 nt, Human
auguaagggaaacugccagc

SEQ ID NO: 2633783 - RNA, 22 nt, Human
auguaagggaaacugccagcaa

SEQ ID NO: 2633784 - RNA, 21 nt, Human
auguaagggaaacugccagca

SEQ ID NO: 2633785 - RNA, 17 nt, Human
aucagcugcugaaacaa

SEQ ID NO: 2633786 - RNA, 22 nt, Human
aucuuauaauuuaaaauaugcu

SEQ ID NO: 2633787 - RNA, 16 nt, Human
aguccaagcauuuaga

SEQ ID NO: 2633788 - RNA, 21 nt, Human
aguccaagcauuuagauguau

SEQ ID NO: 2633789 - RNA, 15 nt, Human
agucaaauuguguga

SEQ ID NO: 2633790 - RNA, 17 nt, Human
agucaaauugugugaaa

SEQ ID NO: 2633791 - RNA, 13 nt, Human
agucaaauugugu

SEQ ID NO: 2633792 - RNA, 15 nt, Human
agugauuaccaggga

SEQ ID NO: 2633793 - RNA, 18 nt, Human
agugauuaccagggacug

SEQ ID NO: 2633794 - RNA, 19 nt, Human
aguuguaccgcaaugugac

SEQ ID NO: 2633795 - RNA, 18 nt, Human
aguuguaccgcaauguga

SEQ ID NO: 2633796 - RNA, 14 nt, Human
auaauuacuauguc

SEQ ID NO: 2633797 - RNA, 18 nt, Human
auauuuauuuuaauaaug

SEQ ID NO: 2633798 - RNA, 14 nt, Human
auauuuauuacugu

SEQ ID NO: 2633799 - RNA, 19 nt, Human
auauuuauuacuguaagaa

SEQ ID NO: 2633800 - RNA, 23 nt, Human
auauuucagauaaucacaauaca

SEQ ID NO: 2633801 - RNA, 23 nt, Human
auaugcuucuguuuuauaauuuu

SEQ ID NO: 2633802 - RNA, 18 nt, Human
auaucacuugucaauaaa

SEQ ID NO: 2633803 - RNA, 15 nt, Human
auaucaauuuaaaaa

SEQ ID NO: 2633804 - RNA, 18 nt, Human
acagcaguugaaaagacu

SEQ ID NO: 2633805 - RNA, 15 nt, Human
acagcaguugaaaag

SEQ ID NO: 2633806 - RNA, 16 nt, Human
acagccagacuggcac

SEQ ID NO: 2633807 - RNA, 15 nt, Human
acagccagacuggca

SEQ ID NO: 2633808 - RNA, 13 nt, Human
acagccagacugg

SEQ ID NO: 2633809 - RNA, 20 nt, Human
acagcucugcauacucauua

SEQ ID NO: 2633810 - RNA, 13 nt, Human
acaacuauauugu

SEQ ID NO: 2633811 - RNA, 15 nt, Human
acccacaagaaauga

SEQ ID NO: 2633812 - RNA, 16 nt, Human
acccaaguccaagcau

SEQ ID NO: 2633813 - RNA, 14 nt, Human
acauuuguauaaaa

SEQ ID NO: 2633814 - RNA, 18 nt, Human
acauuugcucauggaauu

SEQ ID NO: 2633815 - RNA, 13 nt, Human
acauguuacaaca

SEQ ID NO: 2633816 - RNA, 18 nt, Human
acuuguaaaggaauuuaa

SEQ ID NO: 2633817 - RNA, 15 nt, Human
acuuggucugugaga

SEQ ID NO: 2633818 - RNA, 14 nt, Human
acuuggucugugag

SEQ ID NO: 2633819 - RNA, 20 nt, Human
acuuguaaaggaauuuaaaa

SEQ ID NO: 2633820 - RNA, 19 nt, Human
acuuguaaaggaauuuaaa

SEQ ID NO: 2633821 - RNA, 14 nt, Human
acuagcuauggugu

SEQ ID NO: 2633822 - RNA, 14 nt, Human
acucaaaucaagaa

SEQ ID NO: 2633823 - RNA, 13 nt, Human
acucccuuucaac

SEQ ID NO: 2633824 - RNA, 12 nt, Human
acucccuuucaa

SEQ ID NO: 2633825 - RNA, 16 nt, Human
acgugcacgcacacug

SEQ ID NO: 2633826 - RNA, 15 nt, Human
acuaagagagaauga

SEQ ID NO: 2633827 - RNA, 16 nt, Human
acuaagagagaaugag

SEQ ID NO: 2633828 - RNA, 15 nt, Human
aacacgagcaggcua

SEQ ID NO: 2633829 - RNA, 23 nt, Human
aacugacacaugcugaacaucac

SEQ ID NO: 2633830 - RNA, 14 nt, Human
aagaaauguaaggg

SEQ ID NO: 2633831 - RNA, 13 nt, Human
aagaaauguaagg

SEQ ID NO: 2633832 - RNA, 17 nt, Human
aaacugacucuuaagaa

SEQ ID NO: 2633833 - RNA, 15 nt, Human
aaacugccagcaacg

SEQ ID NO: 2633834 - RNA, 14 nt, Human
aaacugccagcaac

SEQ ID NO: 2633835 - RNA, 16 nt, Human
aaacugacucuuaaga

SEQ ID NO: 2633836 - RNA, 19 nt, Human
aaacugccagcaacgcagg

SEQ ID NO: 2633837 - RNA, 17 nt, Human
aaagaugaaaauauuug

SEQ ID NO: 2633838 - RNA, 16 nt, Human
aaagaugaaaauauuu

SEQ ID NO: 2633839 - RNA, 13 nt, Human
aaagaugaaaaua

SEQ ID NO: 2633840 - RNA, 18 nt, Human
aaauggcuuccuggcaau

SEQ ID NO: 2633841 - RNA, 19 nt, Human
aaaucaaauaugcaaagca

SEQ ID NO: 2633842 - RNA, 18 nt, Human
aaaucaaauaugcaaagc

SEQ ID NO: 2633843 - RNA, 12 nt, Human
aaauaacaauga

SEQ ID NO: 2633844 - RNA, 14 nt, Human
aauuaguuuuauau

SEQ ID NO: 2633845 - RNA, 17 nt, Human
aauuaguuuuauaugcu

SEQ ID NO: 2633846 - RNA, 20 nt, Human
aauuaguuuuauaugcuucu

SEQ ID NO: 2633847 - RNA, 17 nt, Human
aaugauaacuggaaacu

SEQ ID NO: 2633848 - RNA, 20 nt, Human
aaugauaacuggaaacuuca

SEQ ID NO: 2633849 - RNA, 13 nt, Human
aauccauacauuu

SEQ ID NO: 2633850 - RNA, 14 nt, Human
aauccauacauuug

SEQ ID NO: 2633851 - RNA, 16 nt, Human
aauauuauguuaaaac

SEQ ID NO: 2633852 - RNA, 15 nt, Human
aaucaagaaacuuaa

SEQ ID NO: 2633853 - RNA, 13 nt, Human
aaucacaauacau

SEQ ID NO: 2633854 - RNA, 13 nt, Human
aagccagauuuuc

SEQ ID NO: 2633855 - RNA, 16 nt, Human
aagauuuaccacuugu

SEQ ID NO: 2633856 - RNA, 19 nt, Human
aauaaaauggguuuuacug

SEQ ID NO: 2633857 - RNA, 14 nt, Human
aauaaaauggguuu

SEQ ID NO: 2633858 - RNA, 21 nt, Human
aauaauccuaaacauaugaau

SEQ ID NO: 2633859 - RNA, 20 nt, Human
ggcuaagcuucacuguaaaa

SEQ ID NO: 2633860 - RNA, 16 nt, Human
ggccuucggccuccau

SEQ ID NO: 2633861 - RNA, 22 nt, Human
ggccuucggccuccauccugag

SEQ ID NO: 2633862 - RNA, 18 nt, Human
ggccuucggccuccaucc

SEQ ID NO: 2633863 - RNA, 13 nt, Human
aaaaauacaaaaa

SEQ ID NO: 2633864 - RNA, 17 nt, Human
aaaguauguuagugcaa

SEQ ID NO: 2633865 - RNA, 12 nt, Human
gguuucuagcau

SEQ ID NO: 2633866 - RNA, 19 nt, Human
gguuuuauuguuuaaaauc

SEQ ID NO: 2633867 - RNA, 20 nt, Human
aaagggcuguuauaaucuuu

SEQ ID NO: 2633868 - RNA, 22 nt, Human
aaagggcuguuauaaucuuuca

SEQ ID NO: 2633869 - RNA, 13 nt, Human
aaagcuuauuaaa

SEQ ID NO: 2633870 - RNA, 19 nt, Human
aaacuuuaugcuaagugaa

SEQ ID NO: 2633871 - RNA, 12 nt, Human
aaacuuuaugcu

SEQ ID NO: 2633872 - RNA, 16 nt, Human
aaagcagaacagugau

SEQ ID NO: 2633873 - RNA, 17 nt, Human
aaauaugcaaagcacug

SEQ ID NO: 2633874 - RNA, 16 nt, Human
aaauaugcaaagcacu

SEQ ID NO: 2633875 - RNA, 15 nt, Human
aaauaugcaaagcac

SEQ ID NO: 2633876 - RNA, 13 nt, Human
aaauaugcaaagc

SEQ ID NO: 2633877 - RNA, 21 nt, Human
aaauaccaugccauuuaaagc

SEQ ID NO: 2633878 - RNA, 18 nt, Human
aaauauaugcuaagucuu

SEQ ID NO: 2633879 - RNA, 22 nt, Human
aaauaucacuugucaauaaaau

SEQ ID NO: 2633880 - RNA, 13 nt, Human
guaauaaacucau

SEQ ID NO: 2633881 - RNA, 20 nt, Human
ggguuuuauuguuuaaaauc

SEQ ID NO: 2633882 - RNA, 14 nt, Human
ggucagugcaaaua

SEQ ID NO: 2633883 - RNA, 18 nt, Human
aaaaugguuuaaaugguc

SEQ ID NO: 2633884 - RNA, 16 nt, Human
aaaaugguuuaaaugg

SEQ ID NO: 2633885 - RNA, 16 nt, Human
aaaauggguuuuacug

SEQ ID NO: 2633886 - RNA, 17 nt, Human
aaaaucucaauauuuca

SEQ ID NO: 2633887 - RNA, 11 nt, Human
aaaauaauuuu

SEQ ID NO: 2633888 - RNA, 14 nt, Human
aaaauacacacuca

SEQ ID NO: 2633889 - RNA, 16 nt, Human
aaaauaauuuuuauau

SEQ ID NO: 2633890 - RNA, 17 nt, Human
aaaauaauuuuuauauu

SEQ ID NO: 2633891 - RNA, 14 nt, Human
gcugccuccccucc

SEQ ID NO: 2633892 - RNA, 13 nt, Human
gcugcugaaacaa

SEQ ID NO: 2633893 - RNA, 21 nt, Human
gcuguauuuuaaaagaaugau

SEQ ID NO: 2633894 - RNA, 20 nt, Human
gcuguauuuuaaaagaauga

SEQ ID NO: 2633895 - RNA, 18 nt, Human
gcuguauuuuaaaagaau

SEQ ID NO: 2633896 - RNA, 19 nt, Human
ggaaaucaggguuaguauu

SEQ ID NO: 2633897 - RNA, 21 nt, Human
ggacagucaccucauggaauu

SEQ ID NO: 2633898 - RNA, 17 nt, Human
ggacagucaccucaugg

SEQ ID NO: 2633899 - RNA, 18 nt, Human
ggacagucaccucaugga

SEQ ID NO: 2633900 - RNA, 16 nt, Human
ggaaaaaauaacaaug

SEQ ID NO: 2633901 - RNA, 13 nt, Human
ggaaacugccagc

SEQ ID NO: 2633902 - RNA, 22 nt, Human
gccucauguccacugguucuuc

SEQ ID NO: 2633903 - RNA, 15 nt, Human
gccuccauccugagg

SEQ ID NO: 2633904 - RNA, 14 nt, Human
gccuccauccugag

SEQ ID NO: 2633905 - RNA, 13 nt, Human
gccuccauccuga

SEQ ID NO: 2633906 - RNA, 12 nt, Human
gcauuuagaugu

SEQ ID NO: 2633907 - RNA, 19 nt, Human
gcauuuaggccaugggaca

SEQ ID NO: 2633908 - RNA, 13 nt, Human
gcauuuagaugua

SEQ ID NO: 2633909 - RNA, 11 nt, Human
gccccaaaagg

SEQ ID NO: 2633910 - RNA, 15 nt, Human
gcagcucuccccuuc

SEQ ID NO: 2633911 - RNA, 22 nt, Human
gcagaacagugauuaccaggga

SEQ ID NO: 2633912 - RNA, 18 nt, Human
gcagaacagugauuacca

SEQ ID NO: 2633913 - RNA, 13 nt, Human
gcagaacagugau

SEQ ID NO: 2633914 - RNA, 12 nt, Human
gcagaacaguga

SEQ ID NO: 2633915 - RNA, 20 nt, Human
gcaucuagcaugucgucaaa

SEQ ID NO: 2633916 - RNA, 22 nt, Human
gcaguuguugcccacagcugua

SEQ ID NO: 2633917 - RNA, 13 nt, Human
gcagugaugucac

SEQ ID NO: 2633918 - RNA, 14 nt, Human
gaaugaauggcuaa

SEQ ID NO: 2633919 - RNA, 13 nt, Human
gaauuacauuugu

SEQ ID NO: 2633920 - RNA, 20 nt, Human
gaauuacauuuguauaaaau

SEQ ID NO: 2633921 - RNA, 15 nt, Human
gaauuacauuuguau

SEQ ID NO: 2633922 - RNA, 18 nt, Human
gaauuacauuuguauaaa

SEQ ID NO: 2633923 - RNA, 15 nt, Human
gaauuaacacaugau

SEQ ID NO: 2633924 - RNA, 14 nt, Human
gaauuaacacauga

SEQ ID NO: 2633925 - RNA, 22 nt, Human
gaaugauuaugaauuacauuug

SEQ ID NO: 2633926 - RNA, 14 nt, Human
gaaugauuaugaau

SEQ ID NO: 2633927 - RNA, 20 nt, Human
gaaugaauggcuaagcaaaa

SEQ ID NO: 2633928 - RNA, 15 nt, Human
gaaugaauggcuaag

SEQ ID NO: 2633929 - RNA, 12 nt, Human
gacagcucugca

SEQ ID NO: 2633930 - RNA, 18 nt, Human
gacagucaccucauggaa

SEQ ID NO: 2633931 - RNA, 14 nt, Human
gacgcucucuggcc

SEQ ID NO: 2633932 - RNA, 22 nt, Human
gacuuuuuauggcacuaguauu

SEQ ID NO: 2633933 - RNA, 16 nt, Human
gagaugcuagaacucc

SEQ ID NO: 2633934 - RNA, 20 nt, Human
gagaugcuagaacucccuuu

SEQ ID NO: 2633935 - RNA, 21 nt, Human
gagauugugccccugcacucc

SEQ ID NO: 2633936 - RNA, 14 nt, Human
gaggagaaacugga

SEQ ID NO: 2633937 - RNA, 12 nt, Human
gaggagaaacug

SEQ ID NO: 2633938 - RNA, 20 nt, Human
gaggacgcucucuggccuuc

SEQ ID NO: 2633939 - RNA, 21 nt, Human
gaggacgcucucuggccuucg

SEQ ID NO: 2633940 - RNA, 18 nt, Human
gaggcugagaugggagaa

SEQ ID NO: 2633941 - RNA, 17 nt, Human
gaggcuccacuuggucu

SEQ ID NO: 2633942 - RNA, 12 nt, Human
gaggcuccacuu

SEQ ID NO: 2633943 - RNA, 15 nt, Human
gaggcuccacuuggu

SEQ ID NO: 2633944 - RNA, 16 nt, Human
gagccccacccucaga

SEQ ID NO: 2633945 - RNA, 17 nt, Human
gagccccacccucagau

SEQ ID NO: 2633946 - RNA, 14 nt, Human
gagcagucaggaaa

SEQ ID NO: 2633947 - RNA, 22 nt, Human
gagcuguucacagccagacugg

SEQ ID NO: 2633948 - RNA, 17 nt, Human
gagcuguucacagccag

SEQ ID NO: 2633949 - RNA, 20 nt, Human
gagcuguucacagccagacu

SEQ ID NO: 2633950 - RNA, 22 nt, Human
cuucucuguauuccuagaaacu

SEQ ID NO: 2633951 - RNA, 23 nt, Human
cuuggucucagugucaaugcagc

SEQ ID NO: 2633952 - RNA, 21 nt, Human
gaaaagacuccaaagaaaugu

SEQ ID NO: 2633953 - RNA, 18 nt, Human
gaaaagacuccaaagaaa

SEQ ID NO: 2633954 - RNA, 20 nt, Human
gaaaagacuccaaagaaaug

SEQ ID NO: 2633955 - RNA, 23 nt, Human
gaaacuucagcgguuuauauaag

SEQ ID NO: 2633956 - RNA, 23 nt, Human
gaacaaauuuacagagacagaaa

SEQ ID NO: 2633957 - RNA, 18 nt, Human
gaacaaauuuacagagac

SEQ ID NO: 2633958 - RNA, 17 nt, Human
gaacaaauuuacagaga

SEQ ID NO: 2633959 - RNA, 18 nt, Human
gaaaugaaagcagggacu

SEQ ID NO: 2633960 - RNA, 23 nt, Human
gaaaucaaauaugcaaagcacug

SEQ ID NO: 2633961 - RNA, 17 nt, Human
gaaaugaaagcagggac

SEQ ID NO: 2633962 - RNA, 17 nt, Human
gaaaucaaauaugcaaa

SEQ ID NO: 2633963 - RNA, 21 nt, Human
gaaaucaaauaugcaaagcac

SEQ ID NO: 2633964 - RNA, 16 nt, Human
gaaaucaaauaugcaa

SEQ ID NO: 2633965 - RNA, 23 nt, Human
cuggaaaaguauguuagugcaaa

SEQ ID NO: 2633966 - RNA, 17 nt, Human
cugccuccccuccucug

SEQ ID NO: 2633967 - RNA, 18 nt, Human
cugccuccccuccucugc

SEQ ID NO: 2633968 - RNA, 21 nt, Human
cugccuccccuccucugcuug

SEQ ID NO: 2633969 - RNA, 19 nt, Human
cugccuccccuccucugcu

SEQ ID NO: 2633970 - RNA, 20 nt, Human
cugccuccccuccucugcuu

SEQ ID NO: 2633971 - RNA, 21 nt, Human
cugugagaugcuagaacuccc

SEQ ID NO: 2633972 - RNA, 23 nt, Human
cugugagaugcuagaacucccuu

SEQ ID NO: 2633973 - RNA, 22 nt, Human
cuguucacagccagacuggcac

SEQ ID NO: 2633974 - RNA, 19 nt, Human
cuguucacagccagacugg

SEQ ID NO: 2633975 - RNA, 12 nt, Human
cuguucacagcc

SEQ ID NO: 2633976 - RNA, 12 nt, Human
cuuaaaaauggu

SEQ ID NO: 2633977 - RNA, 20 nt, Human
cuuaaaaaugguuuaaaugg

SEQ ID NO: 2633978 - RNA, 13 nt, Human
cuuaaaaaugguu

SEQ ID NO: 2633979 - RNA, 20 nt, Human
cuguaagaaaauaucacuug

SEQ ID NO: 2633980 - RNA, 15 nt, Human
cugaaacaacaaaua

SEQ ID NO: 2633981 - RNA, 16 nt, Human
cucuccccuucucugu

SEQ ID NO: 2633982 - RNA, 21 nt, Human
cucuuagaugcaguucugaag

SEQ ID NO: 2633983 - RNA, 22 nt, Human
cucuuagaugcaguucugaaga

SEQ ID NO: 2633984 - RNA, 15 nt, Human
cuccacuuggucugu

SEQ ID NO: 2633985 - RNA, 13 nt, Human
cuccacuuggucu

SEQ ID NO: 2633986 - RNA, 22 nt, Human
cuccacuuggucugugagaugc

SEQ ID NO: 2633987 - RNA, 21 nt, Human
cuccacuuggucugugagaug

SEQ ID NO: 2633988 - RNA, 17 nt, Human
cuccacuuggucuguga

SEQ ID NO: 2633989 - RNA, 16 nt, Human
cuccacuuggucugug

SEQ ID NO: 2633990 - RNA, 18 nt, Human
cucaguagucagacugga

SEQ ID NO: 2633991 - RNA, 19 nt, Human
cuccccaugauguuuagaa

SEQ ID NO: 2633992 - RNA, 23 nt, Human
cuccacuuggucugugagaugcu

SEQ ID NO: 2633993 - RNA, 14 nt, Human
cucguuaauuugua

SEQ ID NO: 2633994 - RNA, 12 nt, Human
cuccucugcuug

SEQ ID NO: 2633995 - RNA, 14 nt, Human
cuccucugcuugcc

SEQ ID NO: 2633996 - RNA, 22 nt, Human
cuccugggcagcugccuccccu

SEQ ID NO: 2633997 - RNA, 18 nt, Human
cuccugggcagcugccuc

SEQ ID NO: 2633998 - RNA, 19 nt, Human
cuccugggcagcugccucc

SEQ ID NO: 2633999 - RNA, 14 nt, Human
cuccugggcagcug

SEQ ID NO: 2634000 - RNA, 15 nt, Human
cuccugggcagcugc

SEQ ID NO: 2634001 - RNA, 16 nt, Human
cuccugggcagcugcc

SEQ ID NO: 2634002 - RNA, 17 nt, Human
cuccugggcagcugccu

SEQ ID NO: 2634003 - RNA, 12 nt, Human
cuccugggcagc

SEQ ID NO: 2634004 - RNA, 21 nt, Human
cuccucugcuugccaucccuc

SEQ ID NO: 2634005 - RNA, 22 nt, Human
cuccucugcuugccaucccucc

SEQ ID NO: 2634006 - RNA, 15 nt, Human
cuccucugcuugcca

SEQ ID NO: 2634007 - RNA, 16 nt, Human
cuccucugcuugccau

SEQ ID NO: 2634008 - RNA, 17 nt, Human
cuccucugcuugccauc

SEQ ID NO: 2634009 - RNA, 20 nt, Human
cuccucugcuugccaucccu

SEQ ID NO: 2634010 - RNA, 17 nt, Human
cucaaaacugcacuguc

SEQ ID NO: 2634011 - RNA, 23 nt, Human
cucaaaauaccaugccauuuaaa

SEQ ID NO: 2634012 - RNA, 16 nt, Human
cuagcaugaagacaga

SEQ ID NO: 2634013 - RNA, 13 nt, Human
cuagaacucccuu

SEQ ID NO: 2634014 - RNA, 12 nt, Human
cuagaacucccu

SEQ ID NO: 2634015 - RNA, 23 nt, Human
cuaaguaaaaccacagcaguuga

SEQ ID NO: 2634016 - RNA, 22 nt, Human
cuaaguaaaaccacagcaguug

SEQ ID NO: 2634017 - RNA, 20 nt, Human
cgugugugugcguccugucg

SEQ ID NO: 2634018 - RNA, 20 nt, Human
cuaaguaaaaccacagcagu

SEQ ID NO: 2634019 - RNA, 15 nt, Human
cuacaaaaacacagc

SEQ ID NO: 2634020 - RNA, 18 nt, Human
cuacaaaaacacagcaag

SEQ ID NO: 2634021 - RNA, 17 nt, Human
cuacaaaaacacagcaa

SEQ ID NO: 2634022 - RNA, 16 nt, Human
cuacaaaaacacagca

SEQ ID NO: 2634023 - RNA, 18 nt, Human
cuacauacuauggaauuu

SEQ ID NO: 2634024 - RNA, 18 nt, Human
cuacaugagguacugaga

SEQ ID NO: 2634025 - RNA, 20 nt, Human
cuacaugagguacugagagu

SEQ ID NO: 2634026 - RNA, 18 nt, Human
cgcaggcccccaggugcc

SEQ ID NO: 2634027 - RNA, 22 nt, Human
cguggugauuuagcaggaagcu

SEQ ID NO: 2634028 - RNA, 22 nt, Human
ccauuuaaagcuuauuaaaacu

SEQ ID NO: 2634029 - RNA, 13 nt, Human
ccauacauuugug

SEQ ID NO: 2634030 - RNA, 14 nt, Human
ccauacauuugugu

SEQ ID NO: 2634031 - RNA, 18 nt, Human
ccccugcacuccagccug

SEQ ID NO: 2634032 - RNA, 22 nt, Human
ccugucggagcccugucuccuc

SEQ ID NO: 2634033 - RNA, 15 nt, Human
ccuguaaucacagcu

SEQ ID NO: 2634034 - RNA, 16 nt, Human
ccugucggagcccugu

SEQ ID NO: 2634035 - RNA, 17 nt, Human
ccugucggagcccuguc

SEQ ID NO: 2634036 - RNA, 21 nt, Human
ccugucggagcccugucuccu

SEQ ID NO: 2634037 - RNA, 19 nt, Human
cccugucuccucucucugu

SEQ ID NO: 2634038 - RNA, 23 nt, Human
ccucauggaauuggagcucgugg

SEQ ID NO: 2634039 - RNA, 17 nt, Human
ccaaauguucaucaaug

SEQ ID NO: 2634040 - RNA, 19 nt, Human
cauuuguauaaaauaauuu

SEQ ID NO: 2634041 - RNA, 20 nt, Human
cauuuguauaaaauaauuuu

SEQ ID NO: 2634042 - RNA, 17 nt, Human
cauuuguauaaaauaau

SEQ ID NO: 2634043 - RNA, 23 nt, Human
ccacagcaguugaaaagacucca

SEQ ID NO: 2634044 - RNA, 18 nt, Human
ccacagcaguugaaaaga

SEQ ID NO: 2634045 - RNA, 17 nt, Human
ccacagcaguugaaaag

SEQ ID NO: 2634046 - RNA, 12 nt, Human
ccacagcaguug

SEQ ID NO: 2634047 - RNA, 14 nt, Human
caugauguuuagaa

SEQ ID NO: 2634048 - RNA, 19 nt, Human
caggugccaguuauggcua

SEQ ID NO: 2634049 - RNA, 19 nt, Human
cagucaccucauggaauug

SEQ ID NO: 2634050 - RNA, 15 nt, Human
cagucacauuccaag

SEQ ID NO: 2634051 - RNA, 16 nt, Human
cagucaccucauggaa

SEQ ID NO: 2634052 - RNA, 20 nt, Human
cagucugacuguuuccauca

SEQ ID NO: 2634053 - RNA, 13 nt, Human
cagcaguucagag

SEQ ID NO: 2634054 - RNA, 16 nt, Human
cagagguugcagugag

SEQ ID NO: 2634055 - RNA, 17 nt, Human
cagagguugcagugagc

SEQ ID NO: 2634056 - RNA, 12 nt, Human
cagauccuggaa

SEQ ID NO: 2634057 - RNA, 22 nt, Human
cagcuccccucggagaagagcu

SEQ ID NO: 2634058 - RNA, 21 nt, Human
cagcuccccucggagaagagc

SEQ ID NO: 2634059 - RNA, 20 nt, Human
cacuuggucugugagaugcu

SEQ ID NO: 2634060 - RNA, 17 nt, Human
cacuuggucugugagau

SEQ ID NO: 2634061 - RNA, 23 nt, Human
caccucaaaauaccaugccauuu

SEQ ID NO: 2634062 - RNA, 21 nt, Human
caccuacaugagguacugaga

SEQ ID NO: 2634063 - RNA, 13 nt, Human
caccuugcagcuc

SEQ ID NO: 2634064 - RNA, 15 nt, Human
caccuugcagcucuc

SEQ ID NO: 2634065 - RNA, 22 nt, Human
caccuugcagcucuccccuucu

SEQ ID NO: 2634066 - RNA, 16 nt, Human
cacaagacugcacauc

SEQ ID NO: 2634067 - RNA, 12 nt, Human
caauuuaaaaaa

SEQ ID NO: 2634068 - RNA, 12 nt, Human
caauauuucaga

SEQ ID NO: 2634069 - RNA, 20 nt, Human
caauauuucagauaaucaca

SEQ ID NO: 2634070 - RNA, 21 nt, Human
caauauuucagauaaucacaa

SEQ ID NO: 2634071 - RNA, 14 nt, Human
caaugcuguauuuu

SEQ ID NO: 2634072 - RNA, 23 nt, Human
caaugcuguauuuuaaaagaaug

SEQ ID NO: 2634073 - RNA, 20 nt, Human
caaguauuagaauaccacag

SEQ ID NO: 2634074 - RNA, 14 nt, Human
caaguauuagaaua

SEQ ID NO: 2634075 - RNA, 15 nt, Human
caacacgagcaggcu

SEQ ID NO: 2634076 - RNA, 19 nt, Human
caacccaaauguucaucaa

SEQ ID NO: 2634077 - RNA, 21 nt, Human
caacuaucucauuuccaagca

SEQ ID NO: 2634078 - RNA, 17 nt, Human
auucuugccaaauauaa

SEQ ID NO: 2634079 - RNA, 18 nt, Human
auugacuuuuuauggcac

SEQ ID NO: 2634080 - RNA, 18 nt, Human
auucacaagacccaaaag

SEQ ID NO: 2634081 - RNA, 13 nt, Human
auuguaaaauggu

SEQ ID NO: 2634082 - RNA, 17 nt, Human
auuguaaaugugcuuuu

SEQ ID NO: 2634083 - RNA, 15 nt, Human
auuguaaaugugcuu

SEQ ID NO: 2634084 - RNA, 14 nt, Human
auuguaaaugugcu

SEQ ID NO: 2634085 - RNA, 19 nt, Human
auuguuuaaaaucauuucu

SEQ ID NO: 2634086 - RNA, 15 nt, Human
auuucuaugaaauau

SEQ ID NO: 2634087 - RNA, 18 nt, Human
auuucuaugaaauauuau

SEQ ID NO: 2634088 - RNA, 20 nt, Human
auuucuaugaaauauuaugu

SEQ ID NO: 2634089 - RNA, 19 nt, Human
uuuuuauauuugaaauauu

SEQ ID NO: 2634090 - RNA, 21 nt, Human
auuaaguaaugauaacuggaa

SEQ ID NO: 2634091 - RNA, 23 nt, Human
auuaaguaaugauaacuggaaac

SEQ ID NO: 2634092 - RNA, 19 nt, Human
uuuuugugaaaagcuccau

SEQ ID NO: 2634093 - RNA, 17 nt, Human
auuacauuuguauaaaa

SEQ ID NO: 2634094 - RNA, 18 nt, Human
auuacauuuguauaaaau

SEQ ID NO: 2634095 - RNA, 20 nt, Human
auuacauuuguauaaaauaa

SEQ ID NO: 2634096 - RNA, 12 nt, Human
auuaccagggac

SEQ ID NO: 2634097 - RNA, 18 nt, Human
auguucaucaaugaauga

SEQ ID NO: 2634098 - RNA, 19 nt, Human
augugcuaguaauuggaaa

SEQ ID NO: 2634099 - RNA, 16 nt, Human
uuuuaauaauguuuca

SEQ ID NO: 2634100 - RNA, 12 nt, Human
uuuuaauaaugu

SEQ ID NO: 2634101 - RNA, 13 nt, Human
uuuuaauaauguu

SEQ ID NO: 2634102 - RNA, 14 nt, Human
uuuuaauaauguuu

SEQ ID NO: 2634103 - RNA, 15 nt, Human
auuaaaagaauauuu

SEQ ID NO: 2634104 - RNA, 15 nt, Human
auguuuucaggcuag

SEQ ID NO: 2634105 - RNA, 17 nt, Human
auguuuucaggcuagau

SEQ ID NO: 2634106 - RNA, 21 nt, Human
auguuuucaggcuagauguau

SEQ ID NO: 2634107 - RNA, 14 nt, Human
uuuucucuaggaaa

SEQ ID NO: 2634108 - RNA, 16 nt, Human
uuuucucuaggaaaua

SEQ ID NO: 2634109 - RNA, 18 nt, Human
uuuucugagaaagacuau

SEQ ID NO: 2634110 - RNA, 15 nt, Human
uuuucugagaaagac

SEQ ID NO: 2634111 - RNA, 18 nt, Human
auugacccacaagaaaug

SEQ ID NO: 2634112 - RNA, 13 nt, Human
auuuagauguaua

SEQ ID NO: 2634113 - RNA, 14 nt, Human
auuugaaauauuga

SEQ ID NO: 2634114 - RNA, 19 nt, Human
auuuauuuuaauaauguuu

SEQ ID NO: 2634115 - RNA, 20 nt, Human
auuuauuuuaauaauguuuc

SEQ ID NO: 2634116 - RNA, 12 nt, Human
auuucauuucuu

SEQ ID NO: 2634117 - RNA, 17 nt, Human
auuuauuuuaauaaugu

SEQ ID NO: 2634118 - RNA, 22 nt, Human
auuuucaguuauuauauuuaca

SEQ ID NO: 2634119 - RNA, 18 nt, Human
auuuuaaaagaaugauua

SEQ ID NO: 2634120 - RNA, 22 nt, Human
auuuuaaaagaaugauuaugaa

SEQ ID NO: 2634121 - RNA, 17 nt, Human
auuuuaaaagaaugauu

SEQ ID NO: 2634122 - RNA, 19 nt, Human
auuuguauaaaauaauuuu

SEQ ID NO: 2634123 - RNA, 15 nt, Human
auuuguauaaaauaa

SEQ ID NO: 2634124 - RNA, 18 nt, Human
auuuguauaaaauaauuu

SEQ ID NO: 2634125 - RNA, 21 nt, Human
augaaauauuauguuaaaacu

SEQ ID NO: 2634126 - RNA, 20 nt, Human
augaaauauuauguuaaaac

SEQ ID NO: 2634127 - RNA, 12 nt, Human
uugcucauggaa

SEQ ID NO: 2634128 - RNA, 11 nt, Human
uugcucaugga

SEQ ID NO: 2634129 - RNA, 23 nt, Human
augaauuaguuuuauaugcuucu

SEQ ID NO: 2634130 - RNA, 22 nt, Human
augaauuacauuuguauaaaau

SEQ ID NO: 2634131 - RNA, 21 nt, Human
augaauuaguuuuauaugcuu

SEQ ID NO: 2634132 - RNA, 23 nt, Human
uuguaguguuggagaagaacuga

SEQ ID NO: 2634133 - RNA, 19 nt, Human
uuguauaaaauaauuuuua

SEQ ID NO: 2634134 - RNA, 13 nt, Human
uuguauaaaauaa

SEQ ID NO: 2634135 - RNA, 17 nt, Human
augaauuacauuuguau

SEQ ID NO: 2634136 - RNA, 18 nt, Human
augaauuacauuuguaua

SEQ ID NO: 2634137 - RNA, 19 nt, Human
augaauuacauuuguauaa

SEQ ID NO: 2634138 - RNA, 18 nt, Human
uugugaagcaaaauuuuu

SEQ ID NO: 2634139 - RNA, 20 nt, Human
uuuaaaaaagaaacauuugg

SEQ ID NO: 2634140 - RNA, 14 nt, Human
augauaacuggaaa

SEQ ID NO: 2634141 - RNA, 13 nt, Human
uuucuaugaaaua

SEQ ID NO: 2634142 - RNA, 14 nt, Human
uuucuaugaaauau

SEQ ID NO: 2634143 - RNA, 20 nt, Human
uuucuaugaaauauuauguu

SEQ ID NO: 2634144 - RNA, 14 nt, Human
uuucugcaucagcu

SEQ ID NO: 2634145 - RNA, 14 nt, Human
uuugaaauauugac

SEQ ID NO: 2634146 - RNA, 17 nt, Human
auggaauuucucccagu

SEQ ID NO: 2634147 - RNA, 19 nt, Human
auggcuauaggugcuacaa

SEQ ID NO: 2634148 - RNA, 16 nt, Human
auggcuauaggugcua

SEQ ID NO: 2634149 - RNA, 22 nt, Human
augggacauuugcucauggaau

SEQ ID NO: 2634150 - RNA, 21 nt, Human
augggacauuugcucauggaa

SEQ ID NO: 2634151 - RNA, 23 nt, Human
auggcuauaggugcuacaaaaac

SEQ ID NO: 2634152 - RNA, 21 nt, Human
auggcuauaggugcuacaaaa

SEQ ID NO: 2634153 - RNA, 13 nt, Human
augcuaagugaaa

SEQ ID NO: 2634154 - RNA, 24 nt, Human
uuuaaagcuuauuaaaacucauuu

SEQ ID NO: 2634155 - RNA, 17 nt, Human
uuuauaugcuucuguuu

SEQ ID NO: 2634156 - RNA, 16 nt, Human
uuuauuacuguaagaa

SEQ ID NO: 2634157 - RNA, 16 nt, Human
auggaacauaaaauac

SEQ ID NO: 2634158 - RNA, 16 nt, Human
uuuauuuuaauaaugu

SEQ ID NO: 2634159 - RNA, 14 nt, Human
augcuguauuuuaa

SEQ ID NO: 2634160 - RNA, 23 nt, Human
augcugucuacacuaagagagaa

SEQ ID NO: 2634161 - RNA, 19 nt, Human
uuuauuacuguaagaaaau

SEQ ID NO: 2634162 - RNA, 23 nt, Human
auggaauuggagcucgugggaca

SEQ ID NO: 2634163 - RNA, 23 nt, Human
auauguaccuaacgaaguauccu

SEQ ID NO: 2634164 - RNA, 15 nt, Human
auaugcaaagcacug

SEQ ID NO: 2634165 - RNA, 14 nt, Human
auaugcaaagcacu

SEQ ID NO: 2634166 - RNA, 13 nt, Human
auaugcaaagcac

SEQ ID NO: 2634167 - RNA, 14 nt, Human
uucauuaucucaaa

SEQ ID NO: 2634168 - RNA, 17 nt, Human
uucagcgguuuauauaa

SEQ ID NO: 2634169 - RNA, 15 nt, Human
uucaucaaugaauga

SEQ ID NO: 2634170 - RNA, 13 nt, Human
auauaugcuaagu

SEQ ID NO: 2634171 - RNA, 15 nt, Human
aucaaauaugcaaag

SEQ ID NO: 2634172 - RNA, 18 nt, Human
aucaaauaugcaaagcac

SEQ ID NO: 2634173 - RNA, 17 nt, Human
aucaaauaugcaaagca

SEQ ID NO: 2634174 - RNA, 16 nt, Human
aucaaauaugcaaagc

SEQ ID NO: 2634175 - RNA, 16 nt, Human
aucaaggguacacugc

SEQ ID NO: 2634176 - RNA, 19 nt, Human
aucaauuuuucuuauuuca

SEQ ID NO: 2634177 - RNA, 14 nt, Human
aucaauuuuucuua

SEQ ID NO: 2634178 - RNA, 21 nt, Human
aucaaggguacacugccuucu

SEQ ID NO: 2634179 - RNA, 13 nt, Human
aucaauuuaaaaa

SEQ ID NO: 2634180 - RNA, 14 nt, Human
auauuguuugcuaa

SEQ ID NO: 2634181 - RNA, 13 nt, Human
auauuuacaaaug

SEQ ID NO: 2634182 - RNA, 19 nt, Human
uugacacuuaaaaaugguu

SEQ ID NO: 2634183 - RNA, 17 nt, Human
uugacacuuaaaaaugg

SEQ ID NO: 2634184 - RNA, 21 nt, Human
uugaaggaugcugucuucgua

SEQ ID NO: 2634185 - RNA, 14 nt, Human
uugaaggaugcugu

SEQ ID NO: 2634186 - RNA, 16 nt, Human
uugaaggaugcugucu

SEQ ID NO: 2634187 - RNA, 16 nt, Human
auccugcaauuccacu

SEQ ID NO: 2634188 - RNA, 22 nt, Human
auccugaggcuccacuuggucu

SEQ ID NO: 2634189 - RNA, 13 nt, Human
auccugccccuga

SEQ ID NO: 2634190 - RNA, 18 nt, Human
auccugaggcuccacuug

SEQ ID NO: 2634191 - RNA, 16 nt, Human
auccugaggcuccacu

SEQ ID NO: 2634192 - RNA, 13 nt, Human
auccugaggcucc

SEQ ID NO: 2634193 - RNA, 11 nt, Human
auccugaggcu

SEQ ID NO: 2634194 - RNA, 23 nt, Human
aucacuugaacccgggaggcaga

SEQ ID NO: 2634195 - RNA, 16 nt, Human
uucuguuuuauaauuu

SEQ ID NO: 2634196 - RNA, 17 nt, Human
uucuguuuuauaauuuu

SEQ ID NO: 2634197 - RNA, 20 nt, Human
aucccucccuccaccucccu

SEQ ID NO: 2634198 - RNA, 21 nt, Human
aucccucccuccaccucccug

SEQ ID NO: 2634199 - RNA, 16 nt, Human
aucccucccuccaccu

SEQ ID NO: 2634200 - RNA, 17 nt, Human
aucccucccuccaccuc

SEQ ID NO: 2634201 - RNA, 18 nt, Human
aucccucccuccaccucc

SEQ ID NO: 2634202 - RNA, 11 nt, Human
aggagaaacug

SEQ ID NO: 2634203 - RNA, 13 nt, Human
uggaaaggcagcu

SEQ ID NO: 2634204 - RNA, 16 nt, Human
ugcuugccaucccucc

SEQ ID NO: 2634205 - RNA, 15 nt, Human
ugcuugccaucccuc

SEQ ID NO: 2634206 - RNA, 18 nt, Human
uggaauuggagcucgugg

SEQ ID NO: 2634207 - RNA, 22 nt, Human
uggaauuucucccagucauuua

SEQ ID NO: 2634208 - RNA, 18 nt, Human
aggaagcugugagagcag

SEQ ID NO: 2634209 - RNA, 11 nt, Human
aggaauuuaaa

SEQ ID NO: 2634210 - RNA, 23 nt, Human
aggaauugacccacaagaaauga

SEQ ID NO: 2634211 - RNA, 23 nt, Human
aggacagcccuucuuuccacaga

SEQ ID NO: 2634212 - RNA, 14 nt, Human
aggacacugauaug

SEQ ID NO: 2634213 - RNA, 14 nt, Human
ugcuggagcucugc

SEQ ID NO: 2634214 - RNA, 13 nt, Human
ugcuggagcucug

SEQ ID NO: 2634215 - RNA, 20 nt, Human
ugggaaagggauuuucagcc

SEQ ID NO: 2634216 - RNA, 22 nt, Human
uggcacaguuuucugagaaaga

SEQ ID NO: 2634217 - RNA, 20 nt, Human
uggcacaguuuucugagaaa

SEQ ID NO: 2634218 - RNA, 18 nt, Human
uggacgagaaaacaauaa

SEQ ID NO: 2634219 - RNA, 20 nt, Human
ugcagcucuccccuucucug

SEQ ID NO: 2634220 - RNA, 22 nt, Human
ugcagcucuccccuucucugua

SEQ ID NO: 2634221 - RNA, 16 nt, Human
ugccccauucaacauc

SEQ ID NO: 2634222 - RNA, 22 nt, Human
ugccauuuaaagcuuauuaaaa

SEQ ID NO: 2634223 - RNA, 12 nt, Human
ugcccucuccug

SEQ ID NO: 2634224 - RNA, 13 nt, Human
ugcccucuccugg

SEQ ID NO: 2634225 - RNA, 14 nt, Human
ugcccucuccuggg

SEQ ID NO: 2634226 - RNA, 15 nt, Human
ugcccucuccugggc

SEQ ID NO: 2634227 - RNA, 22 nt, Human
ugcccucuccugggcagcugcc

SEQ ID NO: 2634228 - RNA, 23 nt, Human
ugcccucuccugggcagcugccu

SEQ ID NO: 2634229 - RNA, 16 nt, Human
ugcccucuccugggca

SEQ ID NO: 2634230 - RNA, 17 nt, Human
ugcccucuccugggcag

SEQ ID NO: 2634231 - RNA, 18 nt, Human
ugcccucuccugggcagc

SEQ ID NO: 2634232 - RNA, 20 nt, Human
ugcccucuccugggcagcug

SEQ ID NO: 2634233 - RNA, 23 nt, Human
agcucugcccauccugccccuga

SEQ ID NO: 2634234 - RNA, 18 nt, Human
ugccucagaaaacaagga

SEQ ID NO: 2634235 - RNA, 11 nt, Human
ugccuccccuc

SEQ ID NO: 2634236 - RNA, 12 nt, Human
ugccuccccucc

SEQ ID NO: 2634237 - RNA, 13 nt, Human
ugccuccccuccu

SEQ ID NO: 2634238 - RNA, 14 nt, Human
ugccuccccuccuc

SEQ ID NO: 2634239 - RNA, 15 nt, Human
ugccuccccuccucu

SEQ ID NO: 2634240 - RNA, 16 nt, Human
ugccuccccuccucug

SEQ ID NO: 2634241 - RNA, 19 nt, Human
ugcccuguuaaaagaugaa

SEQ ID NO: 2634242 - RNA, 15 nt, Human
ugccucaccccuugc

SEQ ID NO: 2634243 - RNA, 21 nt, Human
agcugcccucuccugggcagc

SEQ ID NO: 2634244 - RNA, 19 nt, Human
agcugcccucuccugggca

SEQ ID NO: 2634245 - RNA, 20 nt, Human
agcugcccucuccugggcag

SEQ ID NO: 2634246 - RNA, 17 nt, Human
agcugcccucuccuggg

SEQ ID NO: 2634247 - RNA, 18 nt, Human
agcugcccucuccugggc

SEQ ID NO: 2634248 - RNA, 14 nt, Human
ugcagaagacagua

SEQ ID NO: 2634249 - RNA, 15 nt, Human
ugcagaagacaguau

SEQ ID NO: 2634250 - RNA, 11 nt, Human
agcccugucuc

SEQ ID NO: 2634251 - RNA, 18 nt, Human
agcccugucuccucucuc

SEQ ID NO: 2634252 - RNA, 22 nt, Human
agccagcaguucagagcugccc

SEQ ID NO: 2634253 - RNA, 20 nt, Human
agccagcaguucagagcugc

SEQ ID NO: 2634254 - RNA, 21 nt, Human
agccagcaguucagagcugcc

SEQ ID NO: 2634255 - RNA, 15 nt, Human
agccagcaguucaga

SEQ ID NO: 2634256 - RNA, 17 nt, Human
agccagcaguucagagc

SEQ ID NO: 2634257 - RNA, 19 nt, Human
agccagcaguucagagcug

SEQ ID NO: 2634258 - RNA, 18 nt, Human
ugauuaaguaaugauaac

SEQ ID NO: 2634259 - RNA, 23 nt, Human
ugauuaaguaaugauaacuggaa

SEQ ID NO: 2634260 - RNA, 11 nt, Human
ugaugaagaag

SEQ ID NO: 2634261 - RNA, 12 nt, Human
ugaugaagaagu

SEQ ID NO: 2634262 - RNA, 14 nt, Human
ugaugggaaagcau

SEQ ID NO: 2634263 - RNA, 19 nt, Human
ugaugggaaagcauuguaa

SEQ ID NO: 2634264 - RNA, 17 nt, Human
ugauuuagcaggaagcu

SEQ ID NO: 2634265 - RNA, 20 nt, Human
ugauuuagcaggaagcugug

SEQ ID NO: 2634266 - RNA, 19 nt, Human
uguuugcuaagcauuccaa

SEQ ID NO: 2634267 - RNA, 15 nt, Human
uguuugcuaagcauu

SEQ ID NO: 2634268 - RNA, 14 nt, Human
uguuuuaggagcau

SEQ ID NO: 2634269 - RNA, 13 nt, Human
uguuuuauaauuu

SEQ ID NO: 2634270 - RNA, 20 nt, Human
uguuuuauaauuuugugaag

SEQ ID NO: 2634271 - RNA, 21 nt, Human
aguugauaugccuuuucccaa

SEQ ID NO: 2634272 - RNA, 15 nt, Human
aguucugaagaagau

SEQ ID NO: 2634273 - RNA, 13 nt, Human
aguucugaagaag

SEQ ID NO: 2634274 - RNA, 14 nt, Human
aguucugaagaaga

SEQ ID NO: 2634275 - RNA, 16 nt, Human
aguuugguuucuagca

SEQ ID NO: 2634276 - RNA, 20 nt, Human
uuaaaaaugguuuaaauggu

SEQ ID NO: 2634277 - RNA, 22 nt, Human
aguugcauagguuuaauaauuu

SEQ ID NO: 2634278 - RNA, 15 nt, Human
uuaaaaaagaaacau

SEQ ID NO: 2634279 - RNA, 18 nt, Human
uuaaaaaagaaacauuug

SEQ ID NO: 2634280 - RNA, 20 nt, Human
aguucggugagcuacaaaug

SEQ ID NO: 2634281 - RNA, 14 nt, Human
aguucagagcugcc

SEQ ID NO: 2634282 - RNA, 15 nt, Human
aguucagagcugccc

SEQ ID NO: 2634283 - RNA, 16 nt, Human
aguucagagcugcccu

SEQ ID NO: 2634284 - RNA, 17 nt, Human
aguucagagcugcccuc

SEQ ID NO: 2634285 - RNA, 18 nt, Human
aguucagagcugcccucu

SEQ ID NO: 2634286 - RNA, 19 nt, Human
aguucagagcugcccucuc

SEQ ID NO: 2634287 - RNA, 19 nt, Human
aguuauggcuauaggugcu

SEQ ID NO: 2634288 - RNA, 20 nt, Human
aguuauuauauuuacaaaug

SEQ ID NO: 2634289 - RNA, 21 nt, Human
uuagccguggugauuuagcag

SEQ ID NO: 2634290 - RNA, 21 nt, Human
auaauuuuuauauuugaaaua

SEQ ID NO: 2634291 - RNA, 22 nt, Human
auaauuuuuauauuugaaauau

SEQ ID NO: 2634292 - RNA, 22 nt, Human
auacaaaaaaaaaaaaaaauua

SEQ ID NO: 2634293 - RNA, 14 nt, Human
auaauuuuuauauu

SEQ ID NO: 2634294 - RNA, 16 nt, Human
auaauuuuuauauuug

SEQ ID NO: 2634295 - RNA, 19 nt, Human
auaauuuuuauauuugaaa

SEQ ID NO: 2634296 - RNA, 13 nt, Human
auaauuuugugaa

SEQ ID NO: 2634297 - RNA, 14 nt, Human
auaauuuugugaag

SEQ ID NO: 2634298 - RNA, 15 nt, Human
auaauuuugugaagc

SEQ ID NO: 2634299 - RNA, 20 nt, Human
auaauuuugugaagcaaaau

SEQ ID NO: 2634300 - RNA, 18 nt, Human
uuauauaagcuuguauuc

SEQ ID NO: 2634301 - RNA, 21 nt, Human
auacaguucggugagcuacaa

SEQ ID NO: 2634302 - RNA, 20 nt, Human
auacaucccuuaccugggaa

SEQ ID NO: 2634303 - RNA, 22 nt, Human
auaccacaggaaccacaagacu

SEQ ID NO: 2634304 - RNA, 21 nt, Human
auaaucuuucacaggggacag

SEQ ID NO: 2634305 - RNA, 14 nt, Human
auaaugaauacuuu

SEQ ID NO: 2634306 - RNA, 23 nt, Human
uuagaugcaguucugaagaagau

SEQ ID NO: 2634307 - RNA, 22 nt, Human
uuagaugcaguucugaagaaga

SEQ ID NO: 2634308 - RNA, 18 nt, Human
uuagcaggaagcugugag

SEQ ID NO: 2634309 - RNA, 15 nt, Human
auaaacucauuucua

SEQ ID NO: 2634310 - RNA, 17 nt, Human
aguuuucugagaaagac

SEQ ID NO: 2634311 - RNA, 14 nt, Human
aguuuucugagaaa

SEQ ID NO: 2634312 - RNA, 13 nt, Human
aguuuucugagaa

SEQ ID NO: 2634313 - RNA, 12 nt, Human
aguuuucugaga

SEQ ID NO: 2634314 - RNA, 19 nt, Human
auaaaugugccuucauuuu

SEQ ID NO: 2634315 - RNA, 12 nt, Human
auaacuggaaac

SEQ ID NO: 2634316 - RNA, 17 nt, Human
uguaagaaaauaucacu

SEQ ID NO: 2634317 - RNA, 18 nt, Human
uguaagaaaauaucacuu

SEQ ID NO: 2634318 - RNA, 15 nt, Human
ugguuucuagcauga

SEQ ID NO: 2634319 - RNA, 22 nt, Human
agggugaugggaaagcauugua

SEQ ID NO: 2634320 - RNA, 21 nt, Human
agggugaugggaaagcauugu

SEQ ID NO: 2634321 - RNA, 15 nt, Human
aggucagugcaaaua

SEQ ID NO: 2634322 - RNA, 20 nt, Human
aggguuuauguuuaggaugu

SEQ ID NO: 2634323 - RNA, 22 nt, Human
uggucugugagaugcuagaacu

SEQ ID NO: 2634324 - RNA, 22 nt, Human
ugguccaugggccauaugaaaa

SEQ ID NO: 2634325 - RNA, 16 nt, Human
agugagccgagauugu

SEQ ID NO: 2634326 - RNA, 21 nt, Human
agugagcagucaggaaagaga

SEQ ID NO: 2634327 - RNA, 20 nt, Human
agugaaacucguuaauuugu

SEQ ID NO: 2634328 - RNA, 17 nt, Human
agugaaagaaaauaaca

SEQ ID NO: 2634329 - RNA, 16 nt, Human
agugaaagaggcagcu

SEQ ID NO: 2634330 - RNA, 14 nt, Human
agugagacagcucu

SEQ ID NO: 2634331 - RNA, 22 nt, Human
agugaaagaggcagcuugaaac

SEQ ID NO: 2634332 - RNA, 22 nt, Human
ugugagaugcuagaacucccuu

SEQ ID NO: 2634333 - RNA, 14 nt, Human
ugugaagcaaaauu

SEQ ID NO: 2634334 - RNA, 14 nt, Human
ugucuuaauuaaaa

SEQ ID NO: 2634335 - RNA, 15 nt, Human
ugucuccucucucug

SEQ ID NO: 2634336 - RNA, 17 nt, Human
ugucucuacuaaaaaua

SEQ ID NO: 2634337 - RNA, 14 nt, Human
ugucuucacaacag

SEQ ID NO: 2634338 - RNA, 23 nt, Human
ugucagcuccccucggagaagag

SEQ ID NO: 2634339 - RNA, 21 nt, Human
ugucagcuccccucggagaag

SEQ ID NO: 2634340 - RNA, 20 nt, Human
ugucagcuccccucggagaa

SEQ ID NO: 2634341 - RNA, 21 nt, Human
aguauuagaauaccacaggaa

SEQ ID NO: 2634342 - RNA, 18 nt, Human
aguauguuagugcaaauu

SEQ ID NO: 2634343 - RNA, 21 nt, Human
aguauguuagugcaaauuguc

SEQ ID NO: 2634344 - RNA, 15 nt, Human
aguauuguccagguc

SEQ ID NO: 2634345 - RNA, 16 nt, Human
aguauuguccaggucu

SEQ ID NO: 2634346 - RNA, 20 nt, Human
agucacauuccaagccucau

SEQ ID NO: 2634347 - RNA, 14 nt, Human
ugaaauaagccaga

SEQ ID NO: 2634348 - RNA, 19 nt, Human
agagcugcccucuccuggg

SEQ ID NO: 2634349 - RNA, 20 nt, Human
agagcugcccucuccugggc

SEQ ID NO: 2634350 - RNA, 16 nt, Human
agagcugcccucuccu

SEQ ID NO: 2634351 - RNA, 17 nt, Human
agagcugcccucuccug

SEQ ID NO: 2634352 - RNA, 18 nt, Human
agagcugcccucuccugg

SEQ ID NO: 2634353 - RNA, 13 nt, Human
ugaacaaauuuac

SEQ ID NO: 2634354 - RNA, 18 nt, Human
ugaacccgggaggcagag

SEQ ID NO: 2634355 - RNA, 22 nt, Human
ugaacccauauuuguacaccaa

SEQ ID NO: 2634356 - RNA, 22 nt, Human
ugaagaagcaccaaucaugaau

SEQ ID NO: 2634357 - RNA, 17 nt, Human
ugaaguacucauacaug

SEQ ID NO: 2634358 - RNA, 17 nt, Human
ugaagauuuaccacuug

SEQ ID NO: 2634359 - RNA, 20 nt, Human
ugaagauuuaccacuugugu

SEQ ID NO: 2634360 - RNA, 19 nt, Human
agagcuguucacagccaga

SEQ ID NO: 2634361 - RNA, 18 nt, Human
agagcuguucacagccag

SEQ ID NO: 2634362 - RNA, 21 nt, Human
agacuggcacaguuuucugag

SEQ ID NO: 2634363 - RNA, 20 nt, Human
agacuggcacaguuuucuga

SEQ ID NO: 2634364 - RNA, 23 nt, Human
agacuggcacaguuuucugagaa

SEQ ID NO: 2634365 - RNA, 22 nt, Human
agacuccaaagaaauguaaggg

SEQ ID NO: 2634366 - RNA, 16 nt, Human
agagacacacugaaga

SEQ ID NO: 2634367 - RNA, 15 nt, Human
agagacagaaagcag

SEQ ID NO: 2634368 - RNA, 14 nt, Human
agagacagaaagca

SEQ ID NO: 2634369 - RNA, 13 nt, Human
ugaaagaaaauaa

SEQ ID NO: 2634370 - RNA, 20 nt, Human
ugaaaaucuuauaauuuaaa

SEQ ID NO: 2634371 - RNA, 22 nt, Human
ugaaaauauuuguaucacaaau

SEQ ID NO: 2634372 - RNA, 21 nt, Human
ugaaaauauuuguaucacaaa

SEQ ID NO: 2634373 - RNA, 17 nt, Human
ugaaaauauuuguauca

SEQ ID NO: 2634374 - RNA, 17 nt, Human
ugaaagaggaaugaagu

SEQ ID NO: 2634375 - RNA, 18 nt, Human
ugaaagaggaaugaagua

SEQ ID NO: 2634376 - RNA, 24 nt, Human
ugagaugugaacacaucagcuugc

SEQ ID NO: 2634377 - RNA, 19 nt, Human
ugagaugugaacacaucag

SEQ ID NO: 2634378 - RNA, 18 nt, Human
ugagaugugaacacauca

SEQ ID NO: 2634379 - RNA, 13 nt, Human
ugagaugugaaca

SEQ ID NO: 2634380 - RNA, 21 nt, Human
ugagagacacacugaagaagc

SEQ ID NO: 2634381 - RNA, 22 nt, Human
ugagagacacacugaagaagca

SEQ ID NO: 2634382 - RNA, 21 nt, Human
ugagagcaguuugguuucuag

SEQ ID NO: 2634383 - RNA, 23 nt, Human
ugagagcaguuugguuucuagca

SEQ ID NO: 2634384 - RNA, 16 nt, Human
ugagagacacacugaa

SEQ ID NO: 2634385 - RNA, 17 nt, Human
ugagagacacacugaag

SEQ ID NO: 2634386 - RNA, 19 nt, Human
ugagagacacacugaagaa

SEQ ID NO: 2634387 - RNA, 20 nt, Human
ugagagacacacugaagaag

SEQ ID NO: 2634388 - RNA, 20 nt, Human
ugagacucugucucagucca

SEQ ID NO: 2634389 - RNA, 12 nt, Human
ugagacagcucu

SEQ ID NO: 2634390 - RNA, 16 nt, Human
agauuuuccugaaaac

SEQ ID NO: 2634391 - RNA, 15 nt, Human
agauuuuccugaaaa

SEQ ID NO: 2634392 - RNA, 14 nt, Human
agauuuuccugaaa

SEQ ID NO: 2634393 - RNA, 22 nt, Human
agcaagggugaugggaaagcau

SEQ ID NO: 2634394 - RNA, 20 nt, Human
agcaagggugaugggaaagc

SEQ ID NO: 2634395 - RNA, 16 nt, Human
agcaagggugauggga

SEQ ID NO: 2634396 - RNA, 15 nt, Human
ugacacuuaaaaaug

SEQ ID NO: 2634397 - RNA, 13 nt, Human
agaugcacaugag

SEQ ID NO: 2634398 - RNA, 16 nt, Human
agaugcacaugagcug

SEQ ID NO: 2634399 - RNA, 20 nt, Human
agaugcaguucugaagaaga

SEQ ID NO: 2634400 - RNA, 19 nt, Human
agaugcuagaacucccuuu

SEQ ID NO: 2634401 - RNA, 21 nt, Human
agaugcaguucugaagaagau

SEQ ID NO: 2634402 - RNA, 21 nt, Human
agaugcuagaacucccuuuca

SEQ ID NO: 2634403 - RNA, 14 nt, Human
agauccuggaaauc

SEQ ID NO: 2634404 - RNA, 13 nt, Human
agauccuggaaau

SEQ ID NO: 2634405 - RNA, 21 nt, Human
agauugugccccugcacucca

SEQ ID NO: 2634406 - RNA, 22 nt, Human
agaugugaacacaucagcuugc

SEQ ID NO: 2634407 - RNA, 17 nt, Human
agaugugaacacaucag

SEQ ID NO: 2634408 - RNA, 22 nt, Human
agauguauguacuucaugcugu

SEQ ID NO: 2634409 - RNA, 16 nt, Human
ucuaggaaauauuuau

SEQ ID NO: 2634410 - RNA, 17 nt, Human
ucuaggaaauauuuauu

SEQ ID NO: 2634411 - RNA, 12 nt, Human
uccugggcagcu

SEQ ID NO: 2634412 - RNA, 13 nt, Human
uccugggcagcug

SEQ ID NO: 2634413 - RNA, 14 nt, Human
uccugggcagcugc

SEQ ID NO: 2634414 - RNA, 20 nt, Human
ucuaaguaaaaccacagcag

SEQ ID NO: 2634415 - RNA, 19 nt, Human
ucuaaguaaaaccacagca

SEQ ID NO: 2634416 - RNA, 15 nt, Human
ucuaaguaaaaccac

SEQ ID NO: 2634417 - RNA, 14 nt, Human
ucuaaguaaaacca

SEQ ID NO: 2634418 - RNA, 15 nt, Human
ucucauuuccaagca

SEQ ID NO: 2634419 - RNA, 23 nt, Human
ucucaggaaaucaaauaugcaaa

SEQ ID NO: 2634420 - RNA, 21 nt, Human
ucucaggaaaucaaauaugca

SEQ ID NO: 2634421 - RNA, 14 nt, Human
ucucaggaaaucaa

SEQ ID NO: 2634422 - RNA, 15 nt, Human
acuugucaauaaaau

SEQ ID NO: 2634423 - RNA, 23 nt, Human
agaauuaacacaugauccugcaa

SEQ ID NO: 2634424 - RNA, 15 nt, Human
agaauuaacacauga

SEQ ID NO: 2634425 - RNA, 12 nt, Human
agacacacauga

SEQ ID NO: 2634426 - RNA, 15 nt, Human
agacacacaugaagu

SEQ ID NO: 2634427 - RNA, 24 nt, Human
agacagagccccacccucagaugc

SEQ ID NO: 2634428 - RNA, 22 nt, Human
agacagagccccacccucagau

SEQ ID NO: 2634429 - RNA, 14 nt, Human
ucugugagaugcua

SEQ ID NO: 2634430 - RNA, 22 nt, Human
ucugugagaugcuagaacuccc

SEQ ID NO: 2634431 - RNA, 17 nt, Human
ucugugagaugcuagaa

SEQ ID NO: 2634432 - RNA, 23 nt, Human
ucugugagaugcuagaacucccu

SEQ ID NO: 2634433 - RNA, 23 nt, Human
ucugcuugccaucccucccucca

SEQ ID NO: 2634434 - RNA, 17 nt, Human
ucugcuugccaucccuc

SEQ ID NO: 2634435 - RNA, 20 nt, Human
ucugcuugccaucccucccu

SEQ ID NO: 2634436 - RNA, 16 nt, Human
ucugcuugccaucccu

SEQ ID NO: 2634437 - RNA, 13 nt, Human
agaagaacugaaa

SEQ ID NO: 2634438 - RNA, 14 nt, Human
agaagaacugaaau

SEQ ID NO: 2634439 - RNA, 18 nt, Human
agaagaugguaccaccag

SEQ ID NO: 2634440 - RNA, 15 nt, Human
ucugcagauaaacag

SEQ ID NO: 2634441 - RNA, 18 nt, Human
ucugcagauaaacaguag

SEQ ID NO: 2634442 - RNA, 21 nt, Human
acucuuaagaagacugcauua

SEQ ID NO: 2634443 - RNA, 19 nt, Human
acuccagugagacagcucu

SEQ ID NO: 2634444 - RNA, 12 nt, Human
acugaagaagca

SEQ ID NO: 2634445 - RNA, 13 nt, Human
acugacucuuaag

SEQ ID NO: 2634446 - RNA, 14 nt, Human
acugacucuuaaga

SEQ ID NO: 2634447 - RNA, 15 nt, Human
acugacucuuaagaa

SEQ ID NO: 2634448 - RNA, 16 nt, Human
acugacucuuaagaag

SEQ ID NO: 2634449 - RNA, 20 nt, Human
acugacucuuaagaagacug

SEQ ID NO: 2634450 - RNA, 17 nt, Human
acugacucuuaagaaga

SEQ ID NO: 2634451 - RNA, 18 nt, Human
acugacucuuaagaagac

SEQ ID NO: 2634452 - RNA, 22 nt, Human
acugacuucuaaguaaaaccac

SEQ ID NO: 2634453 - RNA, 16 nt, Human
acugacuucuaaguaa

SEQ ID NO: 2634454 - RNA, 15 nt, Human
acugacuucuaagua

SEQ ID NO: 2634455 - RNA, 13 nt, Human
acugacuucuaag

SEQ ID NO: 2634456 - RNA, 17 nt, Human
acugagaugugaacaca

SEQ ID NO: 2634457 - RNA, 22 nt, Human
acugagaugugaacacaucagc

SEQ ID NO: 2634458 - RNA, 18 nt, Human
acugagagugaacaaauu

SEQ ID NO: 2634459 - RNA, 16 nt, Human
uccuggaaaucagggu

SEQ ID NO: 2634460 - RNA, 19 nt, Human
accuugaaaacuuuaugcu

SEQ ID NO: 2634461 - RNA, 20 nt, Human
accuuuuggucuggagggaa

SEQ ID NO: 2634462 - RNA, 22 nt, Human
uccacugguucuucuuggucuc

SEQ ID NO: 2634463 - RNA, 14 nt, Human
acgcucucuggccu

SEQ ID NO: 2634464 - RNA, 11 nt, Human
acgcucucugg

SEQ ID NO: 2634465 - RNA, 18 nt, Human
uccagugagacagcucug

SEQ ID NO: 2634466 - RNA, 15 nt, Human
acuaauuuuaaaaug

SEQ ID NO: 2634467 - RNA, 15 nt, Human
uccauccugaggcuc

SEQ ID NO: 2634468 - RNA, 12 nt, Human
uccauccugagg

SEQ ID NO: 2634469 - RNA, 17 nt, Human
acuauauuguuugcuaa

SEQ ID NO: 2634470 - RNA, 22 nt, Human
acuauauuguuugcuaagcauu

SEQ ID NO: 2634471 - RNA, 15 nt, Human
acuaucucauuucca

SEQ ID NO: 2634472 - RNA, 16 nt, Human
acuaucucauuuccaa

SEQ ID NO: 2634473 - RNA, 17 nt, Human
acuaucucauuuccaag

SEQ ID NO: 2634474 - RNA, 16 nt, Human
accuagggugauauua

SEQ ID NO: 2634475 - RNA, 17 nt, Human
ucaguuuuugugaaaag

SEQ ID NO: 2634476 - RNA, 15 nt, Human
ucaguuuuugugaaa

SEQ ID NO: 2634477 - RNA, 14 nt, Human
ucagcccucagaau

SEQ ID NO: 2634478 - RNA, 17 nt, Human
acccgggaggcagaggu

SEQ ID NO: 2634479 - RNA, 15 nt, Human
acccgggaggcagag

SEQ ID NO: 2634480 - RNA, 11 nt, Human
acaugggacau

SEQ ID NO: 2634481 - RNA, 14 nt, Human
acaugggacauuug

SEQ ID NO: 2634482 - RNA, 21 nt, Human
acaugggacauuugcucaugg

SEQ ID NO: 2634483 - RNA, 15 nt, Human
acaugggacauuugc

SEQ ID NO: 2634484 - RNA, 20 nt, Human
acaugggacauuugcucaug

SEQ ID NO: 2634485 - RNA, 16 nt, Human
acaugaaguccaagca

SEQ ID NO: 2634486 - RNA, 20 nt, Human
acaugagguacugagaguga

SEQ ID NO: 2634487 - RNA, 16 nt, Human
acaugagguacugaga

SEQ ID NO: 2634488 - RNA, 23 nt, Human
acaugagguacugagagugaaca

SEQ ID NO: 2634489 - RNA, 18 nt, Human
ucaaauugugugaaaggu

SEQ ID NO: 2634490 - RNA, 15 nt, Human
ucaaauugugugaaa

SEQ ID NO: 2634491 - RNA, 22 nt, Human
ucaauaucuuuuuuuuaauaaa

SEQ ID NO: 2634492 - RNA, 15 nt, Human
ucaauauuucagaua

SEQ ID NO: 2634493 - RNA, 19 nt, Human
ucaauauuucagauaauca

SEQ ID NO: 2634494 - RNA, 23 nt, Human
ucaaugaaugaaugaauggcuaa

SEQ ID NO: 2634495 - RNA, 23 nt, Human
accaaaaaucucaauauuucaga

SEQ ID NO: 2634496 - RNA, 14 nt, Human
accagucugacugu

SEQ ID NO: 2634497 - RNA, 23 nt, Human
ucacuugaacccgggaggcagag

SEQ ID NO: 2634498 - RNA, 14 nt, Human
ucaccucauggaau

SEQ ID NO: 2634499 - RNA, 12 nt, Human
ucaccucaugga

SEQ ID NO: 2634500 - RNA, 13 nt, Human
ucaccucauggaa

SEQ ID NO: 2634501 - RNA, 21 nt, Human
ucacaacagauuauuaccuua

SEQ ID NO: 2634502 - RNA, 16 nt, Human
ucaauucuugccaaau

SEQ ID NO: 2634503 - RNA, 16 nt, Human
aaucaggguuaguauu

SEQ ID NO: 2634504 - RNA, 21 nt, Human
aaucaggguuaguauugucca

SEQ ID NO: 2634505 - RNA, 22 nt, Human
aaucaggguuaguauuguccag

SEQ ID NO: 2634506 - RNA, 18 nt, Human
aauauuuauuuuaauaau

SEQ ID NO: 2634507 - RNA, 19 nt, Human
aauauuuauuuuaauaaug

SEQ ID NO: 2634508 - RNA, 21 nt, Human
aauaugccccauucaacaucu

SEQ ID NO: 2634509 - RNA, 24 nt, Human
aauaugccccauucaacaucuagu

SEQ ID NO: 2634510 - RNA, 20 nt, Human
aauaucacuugucaauaaaa

SEQ ID NO: 2634511 - RNA, 22 nt, Human
aauaucacuugucaauaaaauc

SEQ ID NO: 2634512 - RNA, 16 nt, Human
aauagucaaauugugu

SEQ ID NO: 2634513 - RNA, 20 nt, Human
uaacgauaaaagacagugaa

SEQ ID NO: 2634514 - RNA, 18 nt, Human
uaagaagugaaaaucuac

SEQ ID NO: 2634515 - RNA, 12 nt, Human
aaucaugaauua

SEQ ID NO: 2634516 - RNA, 15 nt, Human
aaucaugaauuaguu

SEQ ID NO: 2634517 - RNA, 12 nt, Human
uaauaaacucau

SEQ ID NO: 2634518 - RNA, 16 nt, Human
uaagcuuguauuccuu

SEQ ID NO: 2634519 - RNA, 19 nt, Human
uaaguaaugauaacuggaa

SEQ ID NO: 2634520 - RNA, 23 nt, Human
aaucgcuccaccuugcagcucuc

SEQ ID NO: 2634521 - RNA, 19 nt, Human
aaucuacacuccagugaga

SEQ ID NO: 2634522 - RNA, 19 nt, Human
aaucuuauaauuuaaaaua

SEQ ID NO: 2634523 - RNA, 22 nt, Human
aaugaauggcuaagcaaaaugu

SEQ ID NO: 2634524 - RNA, 14 nt, Human
uacacuaagagaga

SEQ ID NO: 2634525 - RNA, 18 nt, Human
uacacuaagagagaauga

SEQ ID NO: 2634526 - RNA, 16 nt, Human
aaugcuguauuuuaaa

SEQ ID NO: 2634527 - RNA, 20 nt, Human
uacaucccuuaccugggaaa

SEQ ID NO: 2634528 - RNA, 18 nt, Human
uaccaccagucugacugu

SEQ ID NO: 2634529 - RNA, 18 nt, Human
aauuccaagugauugaaa

SEQ ID NO: 2634530 - RNA, 22 nt, Human
aauuccacuuauaggaauugac

SEQ ID NO: 2634531 - RNA, 14 nt, Human
uacuguaagaaaau

SEQ ID NO: 2634532 - RNA, 22 nt, Human
aauugacccacaagaaaugaaa

SEQ ID NO: 2634533 - RNA, 21 nt, Human
aauugacccacaagaaaugaa

SEQ ID NO: 2634534 - RNA, 19 nt, Human
uaugccccauucaacaucu

SEQ ID NO: 2634535 - RNA, 16 nt, Human
uaugauuaaguaauga

SEQ ID NO: 2634536 - RNA, 20 nt, Human
uaugauuaaguaaugauaac

SEQ ID NO: 2634537 - RNA, 21 nt, Human
uaugauuaaguaaugauaacu

SEQ ID NO: 2634538 - RNA, 16 nt, Human
acagccucuuagaugc

SEQ ID NO: 2634539 - RNA, 17 nt, Human
uaucucaaaacugcacu

SEQ ID NO: 2634540 - RNA, 15 nt, Human
uauauuguuugcuaa

SEQ ID NO: 2634541 - RNA, 16 nt, Human
uauuaaaacucauuuu

SEQ ID NO: 2634542 - RNA, 21 nt, Human
uauguuuucaggcuagaugua

SEQ ID NO: 2634543 - RNA, 17 nt, Human
acaggaaguagaggagg

SEQ ID NO: 2634544 - RNA, 15 nt, Human
uauucaaacagucuc

SEQ ID NO: 2634545 - RNA, 23 nt, Human
uauucaaacagucucaggaaauc

SEQ ID NO: 2634546 - RNA, 14 nt, Human
uauuacuguaagaa

SEQ ID NO: 2634547 - RNA, 21 nt, Human
acagggaggacgcucucuggc

SEQ ID NO: 2634548 - RNA, 20 nt, Human
acagggaggacgcucucugg

SEQ ID NO: 2634549 - RNA, 17 nt, Human
acagucaccucauggaa

SEQ ID NO: 2634550 - RNA, 18 nt, Human
acagucaccucauggaau

SEQ ID NO: 2634551 - RNA, 16 nt, Human
acagucaccucaugga

SEQ ID NO: 2634552 - RNA, 18 nt, Human
acacaugauccugcaauu

SEQ ID NO: 2634553 - RNA, 15 nt, Human
acacaugaaguccaa

SEQ ID NO: 2634554 - RNA, 15 nt, Human
acacaucagcuugcc

SEQ ID NO: 2634555 - RNA, 14 nt, Human
acacuaagagagaa

SEQ ID NO: 2634556 - RNA, 13 nt, Human
acacuaagagaga

SEQ ID NO: 2634557 - RNA, 19 nt, Human
acacucaaaucaagaaacu

SEQ ID NO: 2634558 - RNA, 18 nt, Human
acaaugcuguauuuuaaa

SEQ ID NO: 2634559 - RNA, 22 nt, Human
acaaugcuguauuuuaaaagaa

SEQ ID NO: 2634560 - RNA, 15 nt, Human
acacacucaaaucaa

SEQ ID NO: 2634561 - RNA, 23 nt, Human
uaguguuggagaagaacugaaau

SEQ ID NO: 2634562 - RNA, 22 nt, Human
uagugaaacucguuaauuugua

SEQ ID NO: 2634563 - RNA, 18 nt, Human
acaaaaggauaaugaaua

SEQ ID NO: 2634564 - RNA, 22 nt, Human
uagaggagaaacuggaacucuc

SEQ ID NO: 2634565 - RNA, 19 nt, Human
uagaggagaaacuggaacu

SEQ ID NO: 2634566 - RNA, 19 nt, Human
acaaauuuacagagacaga

SEQ ID NO: 2634567 - RNA, 18 nt, Human
acaaauuuacagagacag

SEQ ID NO: 2634568 - RNA, 20 nt, Human
acaagacccaaaaggcagaa

SEQ ID NO: 2634569 - RNA, 15 nt, Human
uagaugcaguucuga

SEQ ID NO: 2634570 - RNA, 23 nt, Human
acaauacaucccuuaccugggaa

SEQ ID NO: 2634571 - RNA, 13 nt, Human
acaagacugcaca

SEQ ID NO: 2634572 - RNA, 14 nt, Human
acaagacugcacau

SEQ ID NO: 2634573 - RNA, 15 nt, Human
uagggagagaagaua

SEQ ID NO: 2634574 - RNA, 14 nt, Human
uagggagagaagau

SEQ ID NO: 2634575 - RNA, 12 nt, Human
uaggagcaugag

SEQ ID NO: 2634576 - RNA, 19 nt, Human
uaggaaauauuuauuuuaa

SEQ ID NO: 2634577 - RNA, 18 nt, Human
uaggaaauauuuauuuua

SEQ ID NO: 2634578 - RNA, 17 nt, Human
gugauuaccagggacug

SEQ ID NO: 2634579 - RNA, 16 nt, Human
gugauuaccagggacu

SEQ ID NO: 2634580 - RNA, 11 nt, Human
gugauuaccag

SEQ ID NO: 2634581 - RNA, 18 nt, Human
gugcacgcacacugucug

SEQ ID NO: 2634582 - RNA, 13 nt, Human
aacuucagacaua

SEQ ID NO: 2634583 - RNA, 18 nt, Human
aacuucagcgguuuauau

SEQ ID NO: 2634584 - RNA, 22 nt, Human
aacuuccuuggacucauuuuaa

SEQ ID NO: 2634585 - RNA, 23 nt, Human
aacuuccuuggacucauuuuaaa

SEQ ID NO: 2634586 - RNA, 22 nt, Human
gugcuacaaaaacacagcaagg

SEQ ID NO: 2634587 - RNA, 16 nt, Human
aagaaagaaaaucagg

SEQ ID NO: 2634588 - RNA, 13 nt, Human
aagaaagaaaauc

SEQ ID NO: 2634589 - RNA, 14 nt, Human
aagaaagaaaauca

SEQ ID NO: 2634590 - RNA, 11 nt, Human
aagaaacauuu

SEQ ID NO: 2634591 - RNA, 21 nt, Human
aacucauuuuuguuuucauua

SEQ ID NO: 2634592 - RNA, 24 nt, Human
aacucauuuuuguuuucauuaucu

SEQ ID NO: 2634593 - RNA, 19 nt, Human
gucuuauauauuguagaua

SEQ ID NO: 2634594 - RNA, 14 nt, Human
gucuuaauuaaaag

SEQ ID NO: 2634595 - RNA, 11 nt, Human
aaaucauuucu

SEQ ID NO: 2634596 - RNA, 17 nt, Human
aaauuccaagugauuga

SEQ ID NO: 2634597 - RNA, 17 nt, Human
aaauuguauuacaaauc

SEQ ID NO: 2634598 - RNA, 15 nt, Human
aaaugugcuuuuaaa

SEQ ID NO: 2634599 - RNA, 18 nt, Human
aaaugugccuucauuuuu

SEQ ID NO: 2634600 - RNA, 14 nt, Human
gucaggaaagagaa

SEQ ID NO: 2634601 - RNA, 13 nt, Human
gucaggaaagaga

SEQ ID NO: 2634602 - RNA, 21 nt, Human
gucaauuuuguuauguauauu

SEQ ID NO: 2634603 - RNA, 15 nt, Human
gucacaggaaguaga

SEQ ID NO: 2634604 - RNA, 13 nt, Human
gucacaggaagua

SEQ ID NO: 2634605 - RNA, 20 nt, Human
gucacaggaaguagaggagg

SEQ ID NO: 2634606 - RNA, 23 nt, Human
guccaugaagauguagaggagaa

SEQ ID NO: 2634607 - RNA, 22 nt, Human
guccaugaagauguagaggaga

SEQ ID NO: 2634608 - RNA, 17 nt, Human
aacacaacuauauuguu

SEQ ID NO: 2634609 - RNA, 20 nt, Human
aacacagcaagggugauggg

SEQ ID NO: 2634610 - RNA, 18 nt, Human
aacacagcaagggugaug

SEQ ID NO: 2634611 - RNA, 12 nt, Human
aacauauauaac

SEQ ID NO: 2634612 - RNA, 14 nt, Human
aacagucucaggaa

SEQ ID NO: 2634613 - RNA, 14 nt, Human
aacauaaaauacaa

SEQ ID NO: 2634614 - RNA, 13 nt, Human
aacagucucagga

SEQ ID NO: 2634615 - RNA, 18 nt, Human
aaguauguuagugcaaau

SEQ ID NO: 2634616 - RNA, 19 nt, Human
aaguauguuagugcaaauu

SEQ ID NO: 2634617 - RNA, 15 nt, Human
aagggcuguuauaau

SEQ ID NO: 2634618 - RNA, 17 nt, Human
aagggcuguuauaaucu

SEQ ID NO: 2634619 - RNA, 17 nt, Human
aaggggaauugaggaca

SEQ ID NO: 2634620 - RNA, 14 nt, Human
guuuaugauuccac

SEQ ID NO: 2634621 - RNA, 15 nt, Human
uaaaaccacagcagu

SEQ ID NO: 2634622 - RNA, 14 nt, Human
uaaaaccacagcag

SEQ ID NO: 2634623 - RNA, 21 nt, Human
uaaaaaaaaaccugagcccca

SEQ ID NO: 2634624 - RNA, 13 nt, Human
uaaaagaauauuu

SEQ ID NO: 2634625 - RNA, 22 nt, Human
uaaaauaauuuuuauauuugaa

SEQ ID NO: 2634626 - RNA, 21 nt, Human
uaaaauacacacucaaaucaa

SEQ ID NO: 2634627 - RNA, 9 nt, Human
uaaaauggu

SEQ ID NO: 2634628 - RNA, 18 nt, Human
aagcuuauuaaaacucau

SEQ ID NO: 2634629 - RNA, 18 nt, Human
guucccuugaugaagaag

SEQ ID NO: 2634630 - RNA, 21 nt, Human
aagccuuggggcugaugcagu

SEQ ID NO: 2634631 - RNA, 17 nt, Human
guuauuauauuuacaaa

SEQ ID NO: 2634632 - RNA, 19 nt, Human
guuauuauauuuacaaaug

SEQ ID NO: 2634633 - RNA, 18 nt, Human
aagcauuguaaaugugcu

SEQ ID NO: 2634634 - RNA, 20 nt, Human
aagcacugacuucuaaguaa

SEQ ID NO: 2634635 - RNA, 19 nt, Human
aagcacugacuucuaagua

SEQ ID NO: 2634636 - RNA, 19 nt, Human
aagcauuguaaaugugcuu

SEQ ID NO: 2634637 - RNA, 17 nt, Human
aagcacugacuucuaag

SEQ ID NO: 2634638 - RNA, 16 nt, Human
aagcacugacuucuaa

SEQ ID NO: 2634639 - RNA, 16 nt, Human
aagcacuaaacaaaga

SEQ ID NO: 2634640 - RNA, 15 nt, Human
aagauagcagggcau

SEQ ID NO: 2634641 - RNA, 22 nt, Human
gugucuuaauuaaaagaauauu

SEQ ID NO: 2634642 - RNA, 17 nt, Human
aagcaacccaaauguuc

SEQ ID NO: 2634643 - RNA, 20 nt, Human
cacaguuuucugagaaagac

SEQ ID NO: 2634644 - RNA, 19 nt, Human
cacaguuuucugagaaaga

SEQ ID NO: 2634645 - RNA, 17 nt, Human
cacaguuuucugagaaa

SEQ ID NO: 2634646 - RNA, 16 nt, Human
cacaguuuucugagaa

SEQ ID NO: 2634647 - RNA, 14 nt, Human
caaaaacacagcaa

SEQ ID NO: 2634648 - RNA, 13 nt, Human
caaaaacacagca

SEQ ID NO: 2634649 - RNA, 17 nt, Human
caaaaacacagcaaggg

SEQ ID NO: 2634650 - RNA, 15 nt, Human
caaaaacacagcaag

SEQ ID NO: 2634651 - RNA, 13 nt, Human
auuuuccugaaaa

SEQ ID NO: 2634652 - RNA, 23 nt, Human
caaaacuucagacauagaauuaa

SEQ ID NO: 2634653 - RNA, 19 nt, Human
caaaaaucucaauauuuca

SEQ ID NO: 2634654 - RNA, 16 nt, Human
caaaauuuuuucucua

SEQ ID NO: 2634655 - RNA, 21 nt, Human
caaaauuuuuucucuaggaaa

SEQ ID NO: 2634656 - RNA, 22 nt, Human
caaaauuuuuucucuaggaaau

SEQ ID NO: 2634657 - RNA, 21 nt, Human
caaauaugcaaagcacugacu

SEQ ID NO: 2634658 - RNA, 19 nt, Human
caaauaugcaaagcacuga

SEQ ID NO: 2634659 - RNA, 15 nt, Human
caaauugugugaaag

SEQ ID NO: 2634660 - RNA, 21 nt, Human
caagccagauuuuccugaaaa

SEQ ID NO: 2634661 - RNA, 17 nt, Human
caaggcugauuaaacca

SEQ ID NO: 2634662 - RNA, 22 nt, Human
caaugugacuuaaugccacuaa

SEQ ID NO: 2634663 - RNA, 23 nt, Human
caauacaucccuuaccugggaaa

SEQ ID NO: 2634664 - RNA, 13 nt, Human
uuauauuugaaau

SEQ ID NO: 2634665 - RNA, 15 nt, Human
uuauauuugaaauau

SEQ ID NO: 2634666 - RNA, 16 nt, Human
uuauauuuacaaaugg

SEQ ID NO: 2634667 - RNA, 12 nt, Human
uuauauuugaaa

SEQ ID NO: 2634668 - RNA, 20 nt, Human
uuauauuuauuacuguaaga

SEQ ID NO: 2634669 - RNA, 22 nt, Human
uuaugauuaaguaaugauaacu

SEQ ID NO: 2634670 - RNA, 11 nt, Human
uuaucucaaaa

SEQ ID NO: 2634671 - RNA, 18 nt, Human
uuauggcuauaggugcua

SEQ ID NO: 2634672 - RNA, 18 nt, Human
uuauaauuuugugaagca

SEQ ID NO: 2634673 - RNA, 16 nt, Human
uuauaauuuugugaag

SEQ ID NO: 2634674 - RNA, 17 nt, Human
uuauaauuuugugaagc

SEQ ID NO: 2634675 - RNA, 11 nt, Human
uuauaaucuuu

SEQ ID NO: 2634676 - RNA, 12 nt, Human
uuauaauuuaaa

SEQ ID NO: 2634677 - RNA, 14 nt, Human
uuauaauuuuguga

SEQ ID NO: 2634678 - RNA, 15 nt, Human
uuauaauuuugugaa

SEQ ID NO: 2634679 - RNA, 23 nt, Human
uucaguuauuauauuuacaaaug

SEQ ID NO: 2634680 - RNA, 18 nt, Human
uuccagauccuggaaauc

SEQ ID NO: 2634681 - RNA, 20 nt, Human
uuauuuuaauaauguuucaa

SEQ ID NO: 2634682 - RNA, 19 nt, Human
uuauuuuaauaauguuuca

SEQ ID NO: 2634683 - RNA, 22 nt, Human
uucacaagacccaaaaggcaga

SEQ ID NO: 2634684 - RNA, 15 nt, Human
uucagagcugcccuc

SEQ ID NO: 2634685 - RNA, 17 nt, Human
uucagagcugcccucuc

SEQ ID NO: 2634686 - RNA, 18 nt, Human
uucagagcugcccucucc

SEQ ID NO: 2634687 - RNA, 19 nt, Human
uucagagcugcccucuccu

SEQ ID NO: 2634688 - RNA, 20 nt, Human
uucagagcugcccucuccug

SEQ ID NO: 2634689 - RNA, 20 nt, Human
uucagauaaucacaauacau

SEQ ID NO: 2634690 - RNA, 14 nt, Human
uugacccacaagaa

SEQ ID NO: 2634691 - RNA, 17 nt, Human
uugacccacaagaaaug

SEQ ID NO: 2634692 - RNA, 23 nt, Human
uugaugaagaaguugauaugccu

SEQ ID NO: 2634693 - RNA, 13 nt, Human
uugaugaagaagu

SEQ ID NO: 2634694 - RNA, 14 nt, Human
uugaugaagaaguu

SEQ ID NO: 2634695 - RNA, 17 nt, Human
uucugucuucacaacag

SEQ ID NO: 2634696 - RNA, 18 nt, Human
uucggugagcuacaaaug

SEQ ID NO: 2634697 - RNA, 15 nt, Human
uucuacauacuaugg

SEQ ID NO: 2634698 - RNA, 14 nt, Human
uucuaugaaauauu

SEQ ID NO: 2634699 - RNA, 21 nt, Human
uucuaugaaauauuauguuaa

SEQ ID NO: 2634700 - RNA, 21 nt, Human
uucugagaaagacuauucaaa

SEQ ID NO: 2634701 - RNA, 16 nt, Human
uucugagaaagacuau

SEQ ID NO: 2634702 - RNA, 22 nt, Human
uuuauuguuuaaaaucauuucu

SEQ ID NO: 2634703 - RNA, 22 nt, Human
uuuauaauuuugugaagcaaaa

SEQ ID NO: 2634704 - RNA, 17 nt, Human
uuuauggcacuaguauu

SEQ ID NO: 2634705 - RNA, 13 nt, Human
uuuaccacuugug

SEQ ID NO: 2634706 - RNA, 19 nt, Human
uuuaacucuauaauguguu

SEQ ID NO: 2634707 - RNA, 13 nt, Human
uuuaauaauguuu

SEQ ID NO: 2634708 - RNA, 12 nt, Human
uugugccccugc

SEQ ID NO: 2634709 - RNA, 14 nt, Human
uuguuuaaaaucau

SEQ ID NO: 2634710 - RNA, 18 nt, Human
uuguguuuugcaagccag

SEQ ID NO: 2634711 - RNA, 16 nt, Human
uuggucugugagaugc

SEQ ID NO: 2634712 - RNA, 15 nt, Human
uugucuagugaaacu

SEQ ID NO: 2634713 - RNA, 15 nt, Human
uuuccacagaagcuc

SEQ ID NO: 2634714 - RNA, 17 nt, Human
uuuguauaaaauaauuu

SEQ ID NO: 2634715 - RNA, 18 nt, Human
uuuguauaaaauaauuuu

SEQ ID NO: 2634716 - RNA, 19 nt, Human
uuuguauaaaauaauuuuu

SEQ ID NO: 2634717 - RNA, 23 nt, Human
uuuuauaauuuugugaagcaaaa

SEQ ID NO: 2634718 - RNA, 21 nt, Human
uuuuauaauuuugugaagcaa

SEQ ID NO: 2634719 - RNA, 21 nt, Human
uuuuaaaguaacccuacaaaa

SEQ ID NO: 2634720 - RNA, 13 nt, Human
uuuuauauuugaa

SEQ ID NO: 2634721 - RNA, 18 nt, Human
uuuuauauuugaaauauu

SEQ ID NO: 2634722 - RNA, 13 nt, Human
uuuucuuauuuca

SEQ ID NO: 2634723 - RNA, 17 nt, Human
ugcaugguuuagaaagc

SEQ ID NO: 2634724 - RNA, 19 nt, Human
ugcagauaaacaguaguga

SEQ ID NO: 2634725 - RNA, 21 nt, Human
ugcauuauauuuauuacugua

SEQ ID NO: 2634726 - RNA, 16 nt, Human
ugcacgcacacugucu

SEQ ID NO: 2634727 - RNA, 17 nt, Human
ugcacgcacacugucug

SEQ ID NO: 2634728 - RNA, 16 nt, Human
ugcacugucaagauga

SEQ ID NO: 2634729 - RNA, 20 nt, Human
ugagaugcuagaacucccuu

SEQ ID NO: 2634730 - RNA, 16 nt, Human
ugagaugcuagaacuc

SEQ ID NO: 2634731 - RNA, 14 nt, Human
ugagaugcuagaac

SEQ ID NO: 2634732 - RNA, 20 nt, Human
ugagcagucaggaaagagaa

SEQ ID NO: 2634733 - RNA, 17 nt, Human
ugagcagucaggaaaga

SEQ ID NO: 2634734 - RNA, 15 nt, Human
ugagcagucaggaaa

SEQ ID NO: 2634735 - RNA, 16 nt, Human
ugagacagcucugcau

SEQ ID NO: 2634736 - RNA, 14 nt, Human
ugagacagcucugc

SEQ ID NO: 2634737 - RNA, 20 nt, Human
ugagaaagacuauucaaaca

SEQ ID NO: 2634738 - RNA, 18 nt, Human
ugagaaagacuauucaaa

SEQ ID NO: 2634739 - RNA, 17 nt, Human
ugagaaagacuauucaa

SEQ ID NO: 2634740 - RNA, 16 nt, Human
ugagaaagacuauuca

SEQ ID NO: 2634741 - RNA, 12 nt, Human
ugacucuuaaga

SEQ ID NO: 2634742 - RNA, 24 nt, Human
ugauaguuguaccgcaaugugacu

SEQ ID NO: 2634743 - RNA, 17 nt, Human
ugcuucuguuuuauaau

SEQ ID NO: 2634744 - RNA, 22 nt, Human
ugcuucuguuuuauaauuuugu

SEQ ID NO: 2634745 - RNA, 22 nt, Human
uggaaaaguauguuagugcaaa

SEQ ID NO: 2634746 - RNA, 23 nt, Human
uggccuucggccuccauccugag

SEQ ID NO: 2634747 - RNA, 20 nt, Human
uggccuucggccuccauccu

SEQ ID NO: 2634748 - RNA, 22 nt, Human
uggccuucggccuccauccuga

SEQ ID NO: 2634749 - RNA, 23 nt, Human
ugggcagcugccuccccuccucu

SEQ ID NO: 2634750 - RNA, 12 nt, Human
ugggcagcugcc

SEQ ID NO: 2634751 - RNA, 20 nt, Human
ugggcagcugccuccccucc

SEQ ID NO: 2634752 - RNA, 22 nt, Human
ugggcagcugccuccccuccuc

SEQ ID NO: 2634753 - RNA, 14 nt, Human
ugggacagggagga

SEQ ID NO: 2634754 - RNA, 18 nt, Human
uguauuuuaaaagaauga

SEQ ID NO: 2634755 - RNA, 19 nt, Human
uguauuuuaaaagaaugau

SEQ ID NO: 2634756 - RNA, 19 nt, Human
uguaguguuggagaagaac

SEQ ID NO: 2634757 - RNA, 20 nt, Human
uguaguguuggagaagaacu

SEQ ID NO: 2634758 - RNA, 21 nt, Human
uguaguguuggagaagaacug

SEQ ID NO: 2634759 - RNA, 14 nt, Human
uguauaaaauaauu

SEQ ID NO: 2634760 - RNA, 13 nt, Human
uguauaaaauaau

SEQ ID NO: 2634761 - RNA, 22 nt, Human
ugucuacacuaagagagaauga

SEQ ID NO: 2634762 - RNA, 17 nt, Human
ugucuacacuaagagag

SEQ ID NO: 2634763 - RNA, 12 nt, Human
ugucuuaauuaa

SEQ ID NO: 2634764 - RNA, 14 nt, Human
uggguagacacaca

SEQ ID NO: 2634765 - RNA, 16 nt, Human
ugguucccuugaugaa

SEQ ID NO: 2634766 - RNA, 17 nt, Human
ugguucccuugaugaag

SEQ ID NO: 2634767 - RNA, 20 nt, Human
ugguucccuugaugaagaag

SEQ ID NO: 2634768 - RNA, 12 nt, Human
uguaaaauggug

SEQ ID NO: 2634769 - RNA, 11 nt, Human
uguaaaauggu

SEQ ID NO: 2634770 - RNA, 21 nt, Human
uccucugcuugccaucccucc

SEQ ID NO: 2634771 - RNA, 22 nt, Human
uccucugcuugccaucccuccc

SEQ ID NO: 2634772 - RNA, 20 nt, Human
uccucugcuugccaucccuc

SEQ ID NO: 2634773 - RNA, 16 nt, Human
ucccugcaauaaaaug

SEQ ID NO: 2634774 - RNA, 16 nt, Human
ucccuugaugaagaag

SEQ ID NO: 2634775 - RNA, 15 nt, Human
ucccuugaugaagaa

SEQ ID NO: 2634776 - RNA, 16 nt, Human
uccuuggacucauuuu

SEQ ID NO: 2634777 - RNA, 20 nt, Human
uccugccuaagugcagcccc

SEQ ID NO: 2634778 - RNA, 22 nt, Human
uccugucggagcccugucuccu

SEQ ID NO: 2634779 - RNA, 19 nt, Human
uccugucggagcccugucu

SEQ ID NO: 2634780 - RNA, 19 nt, Human
ucuagugagcagucaggaa

SEQ ID NO: 2634781 - RNA, 22 nt, Human
ucuagugagcagucaggaaaga

SEQ ID NO: 2634782 - RNA, 13 nt, Human
ucuaugaaauauu

SEQ ID NO: 2634783 - RNA, 14 nt, Human
ucuaugaaauauua

SEQ ID NO: 2634784 - RNA, 17 nt, Human
ucuaugaaauauuaugu

SEQ ID NO: 2634785 - RNA, 15 nt, Human
ucucaacuccaaacu

SEQ ID NO: 2634786 - RNA, 13 nt, Human
ucguuaauuugua

SEQ ID NO: 2634787 - RNA, 17 nt, Human
ucggccuccauccugag

SEQ ID NO: 2634788 - RNA, 18 nt, Human
ucggccuccauccugagg

SEQ ID NO: 2634789 - RNA, 22 nt, Human
ucgugggacagucaccucaugg

SEQ ID NO: 2634790 - RNA, 21 nt, Human
ucguggaacaguuaccucugc

SEQ ID NO: 2634791 - RNA, 18 nt, Human
ucucuguaauaaacucau

SEQ ID NO: 2634792 - RNA, 22 nt, Human
ucucuguaauaaacucauuucu

SEQ ID NO: 2634793 - RNA, 14 nt, Human
ucugcaucagcugc

SEQ ID NO: 2634794 - RNA, 21 nt, Human
ucugcaucagcugcugaaaca

SEQ ID NO: 2634795 - RNA, 19 nt, Human
ucugcaucagcugcugaaa

SEQ ID NO: 2634796 - RNA, 18 nt, Human
ucuggccuucggccucca

SEQ ID NO: 2634797 - RNA, 17 nt, Human
ucuggccuucggccucc

SEQ ID NO: 2634798 - RNA, 15 nt, Human
ucugucuucacaaca

SEQ ID NO: 2634799 - RNA, 18 nt, Human
ucuuaagaagacugcauu

SEQ ID NO: 2634800 - RNA, 12 nt, Human
ucuuaagaagac

SEQ ID NO: 2634801 - RNA, 20 nt, Human
ucaaaucaagaaacuuaagg

SEQ ID NO: 2634802 - RNA, 14 nt, Human
ucaaauaugcaaag

SEQ ID NO: 2634803 - RNA, 14 nt, Human
ucaaauugugugaa

SEQ ID NO: 2634804 - RNA, 13 nt, Human
ucacaagacccaa

SEQ ID NO: 2634805 - RNA, 18 nt, Human
ucacaagacccaaaaggc

SEQ ID NO: 2634806 - RNA, 17 nt, Human
ucacaagacccaaaagg

SEQ ID NO: 2634807 - RNA, 16 nt, Human
ucacagucacauucca

SEQ ID NO: 2634808 - RNA, 14 nt, Human
ucaccaaggcugau

SEQ ID NO: 2634809 - RNA, 13 nt, Human
ucaaugcagcccc

SEQ ID NO: 2634810 - RNA, 21 nt, Human
ucaauaaaauccauacauuug

SEQ ID NO: 2634811 - RNA, 13 nt, Human
uauguacuucaug

SEQ ID NO: 2634812 - RNA, 17 nt, Human
uauguacuucaugcugu

SEQ ID NO: 2634813 - RNA, 16 nt, Human
uauuauucccauucua

SEQ ID NO: 2634814 - RNA, 17 nt, Human
uccaccucccugcaaua

SEQ ID NO: 2634815 - RNA, 15 nt, Human
uccaccucccugcaa

SEQ ID NO: 2634816 - RNA, 16 nt, Human
uccaccucccugcaau

SEQ ID NO: 2634817 - RNA, 19 nt, Human
uccacagaagcuccaggua

SEQ ID NO: 2634818 - RNA, 13 nt, Human
uccaccucccugc

SEQ ID NO: 2634819 - RNA, 14 nt, Human
uccaccucccugca

SEQ ID NO: 2634820 - RNA, 14 nt, Human
uccacuuggucugu

SEQ ID NO: 2634821 - RNA, 16 nt, Human
uccacuuggucuguga

SEQ ID NO: 2634822 - RNA, 15 nt, Human
uccacuuggucugug

SEQ ID NO: 2634823 - RNA, 18 nt, Human
ucauaccuaucaucuuaa

SEQ ID NO: 2634824 - RNA, 13 nt, Human
ucauuuccaagca

SEQ ID NO: 2634825 - RNA, 16 nt, Human
ucauuuccaagcaagu

SEQ ID NO: 2634826 - RNA, 20 nt, Human
ucauuaucucaaaacugcac

SEQ ID NO: 2634827 - RNA, 19 nt, Human
ucauuaucucaaaacugca

SEQ ID NO: 2634828 - RNA, 13 nt, Human
ucauuaucucaaa

SEQ ID NO: 2634829 - RNA, 19 nt, Human
ucagagcugcccucuccug

SEQ ID NO: 2634830 - RNA, 20 nt, Human
ucagagcugcccucuccugg

SEQ ID NO: 2634831 - RNA, 21 nt, Human
ucagagcugcccucuccuggg

SEQ ID NO: 2634832 - RNA, 22 nt, Human
ucagagcugcccucuccugggc

SEQ ID NO: 2634833 - RNA, 23 nt, Human
ucagagcugcccucuccugggca

SEQ ID NO: 2634834 - RNA, 13 nt, Human
ucaggcuagaugu

SEQ ID NO: 2634835 - RNA, 17 nt, Human
ucaggcuagauguaugu

SEQ ID NO: 2634836 - RNA, 17 nt, Human
ucagcuccccucggaga

SEQ ID NO: 2634837 - RNA, 18 nt, Human
ucagcuccccucggagaa

SEQ ID NO: 2634838 - RNA, 20 nt, Human
gggaggacgcucucuggccu

SEQ ID NO: 2634839 - RNA, 17 nt, Human
gggaggacgcucucugg

SEQ ID NO: 2634840 - RNA, 14 nt, Human
gggaauugaggaca

SEQ ID NO: 2634841 - RNA, 21 nt, Human
gggacugaggggaggggagca

SEQ ID NO: 2634842 - RNA, 23 nt, Human
ggcuauaggugcuacaaaaacac

SEQ ID NO: 2634843 - RNA, 20 nt, Human
ggcuaguaucaaaagaaaga

SEQ ID NO: 2634844 - RNA, 16 nt, Human
ggcuccacuuggucug

SEQ ID NO: 2634845 - RNA, 11 nt, Human
ggcagcugccu

SEQ ID NO: 2634846 - RNA, 12 nt, Human
ggcagcugccuc

SEQ ID NO: 2634847 - RNA, 13 nt, Human
ggcagcugccucc

SEQ ID NO: 2634848 - RNA, 16 nt, Human
ggcagcugccuccccu

SEQ ID NO: 2634849 - RNA, 21 nt, Human
ggcagagguugcagugagccg

SEQ ID NO: 2634850 - RNA, 19 nt, Human
ggauugaaggaugcugucu

SEQ ID NO: 2634851 - RNA, 19 nt, Human
ggacgcucucuggccuucg

SEQ ID NO: 2634852 - RNA, 16 nt, Human
ggacgcucucuggccu

SEQ ID NO: 2634853 - RNA, 15 nt, Human
ggacgcucucuggcc

SEQ ID NO: 2634854 - RNA, 23 nt, Human
ggagaagagcuguucacagccag

SEQ ID NO: 2634855 - RNA, 15 nt, Human
ggagaagagcuguuc

SEQ ID NO: 2634856 - RNA, 11 nt, Human
ggagaagaacu

SEQ ID NO: 2634857 - RNA, 14 nt, Human
ggagaagaacugaa

SEQ ID NO: 2634858 - RNA, 17 nt, Human
ggacauuugcucaugga

SEQ ID NO: 2634859 - RNA, 20 nt, Human
ggacauuugcucauggaauu

SEQ ID NO: 2634860 - RNA, 23 nt, Human
ggagcccugucuccucucucugu

SEQ ID NO: 2634861 - RNA, 18 nt, Human
ggagcccugucuccucuc

SEQ ID NO: 2634862 - RNA, 16 nt, Human
ggaggacgcucucugg

SEQ ID NO: 2634863 - RNA, 19 nt, Human
ggaggggagcaugggaagu

SEQ ID NO: 2634864 - RNA, 13 nt, Human
gcuagauguaugu

SEQ ID NO: 2634865 - RNA, 14 nt, Human
gcuagauguaugua

SEQ ID NO: 2634866 - RNA, 16 nt, Human
gcuagauguauguacu

SEQ ID NO: 2634867 - RNA, 19 nt, Human
gcuauaggugcuacaaaaa

SEQ ID NO: 2634868 - RNA, 21 nt, Human
gcuauaggugcuacaaaaaca

SEQ ID NO: 2634869 - RNA, 20 nt, Human
gccugagcgacagugagacu

SEQ ID NO: 2634870 - RNA, 17 nt, Human
gccugagcgacagugag

SEQ ID NO: 2634871 - RNA, 12 nt, Human
gcugcccucucc

SEQ ID NO: 2634872 - RNA, 21 nt, Human
gcugauuaaaccaaggcuaga

SEQ ID NO: 2634873 - RNA, 23 nt, Human
gcuggaaaaguauguuagugcaa

SEQ ID NO: 2634874 - RNA, 21 nt, Human
gcuggaaaaguauguuagugc

SEQ ID NO: 2634875 - RNA, 23 nt, Human
gcugcccucuccugggcagcugc

SEQ ID NO: 2634876 - RNA, 13 nt, Human
gcugcccucuccu

SEQ ID NO: 2634877 - RNA, 14 nt, Human
gcugcccucuccug

SEQ ID NO: 2634878 - RNA, 15 nt, Human
gcugcccucuccugg

SEQ ID NO: 2634879 - RNA, 16 nt, Human
gcugcccucuccuggg

SEQ ID NO: 2634880 - RNA, 17 nt, Human
gcugcccucuccugggc

SEQ ID NO: 2634881 - RNA, 18 nt, Human
gcugcccucuccugggca

SEQ ID NO: 2634882 - RNA, 20 nt, Human
gcugcccucuccugggcagc

SEQ ID NO: 2634883 - RNA, 22 nt, Human
gcugcccucuccugggcagcug

SEQ ID NO: 2634884 - RNA, 23 nt, Human
gcuggucccagccagcaguucag

SEQ ID NO: 2634885 - RNA, 19 nt, Human
gcuucuguuuuauaauuuu

SEQ ID NO: 2634886 - RNA, 15 nt, Human
gcaguugaaaagacu

SEQ ID NO: 2634887 - RNA, 19 nt, Human
gcaguugaaaagacuccaa

SEQ ID NO: 2634888 - RNA, 16 nt, Human
gcaguugaaaagacuc

SEQ ID NO: 2634889 - RNA, 21 nt, Human
gcaguugaaaagacuccaaag

SEQ ID NO: 2634890 - RNA, 19 nt, Human
gcaguucagagcugcccuc

SEQ ID NO: 2634891 - RNA, 20 nt, Human
gcaguucagagcugcccucu

SEQ ID NO: 2634892 - RNA, 22 nt, Human
gcaguucagagcugcccucucc

SEQ ID NO: 2634893 - RNA, 23 nt, Human
gcaguucagagcugcccucuccu

SEQ ID NO: 2634894 - RNA, 22 nt, Human
gcaucagcugcugaaacaacaa

SEQ ID NO: 2634895 - RNA, 23 nt, Human
gcaucagcugcugaaacaacaaa

SEQ ID NO: 2634896 - RNA, 15 nt, Human
gcacagccucuuaga

SEQ ID NO: 2634897 - RNA, 18 nt, Human
gcacagccucuuagaugc

SEQ ID NO: 2634898 - RNA, 15 nt, Human
gcacgcacacugucu

SEQ ID NO: 2634899 - RNA, 16 nt, Human
gcacgcacacugucug

SEQ ID NO: 2634900 - RNA, 16 nt, Human
gcaggaagcugugaga

SEQ ID NO: 2634901 - RNA, 23 nt, Human
gcagagguugcagugagccgaga

SEQ ID NO: 2634902 - RNA, 18 nt, Human
gcagagguugcagugagc

SEQ ID NO: 2634903 - RNA, 23 nt, Human
gccaugggacagggaggacgcuc

SEQ ID NO: 2634904 - RNA, 22 nt, Human
gccaugggacagggaggacgcu

SEQ ID NO: 2634905 - RNA, 18 nt, Human
gccagacuggcacaguuu

SEQ ID NO: 2634906 - RNA, 15 nt, Human
gccagacuggcacag

SEQ ID NO: 2634907 - RNA, 19 nt, Human
gccagacuggcacaguuuu

SEQ ID NO: 2634908 - RNA, 13 nt, Human
gauugugccccug

SEQ ID NO: 2634909 - RNA, 19 nt, Human
gauguugaaaaaguucugc

SEQ ID NO: 2634910 - RNA, 14 nt, Human
gaucuuuaaaauac

SEQ ID NO: 2634911 - RNA, 18 nt, Human
gaugcaguucugaagaag

SEQ ID NO: 2634912 - RNA, 16 nt, Human
gaugggaaagcauugu

SEQ ID NO: 2634913 - RNA, 21 nt, Human
gaguugaaaaucuuauaauuu

SEQ ID NO: 2634914 - RNA, 19 nt, Human
gagugaacaaauuuacaga

SEQ ID NO: 2634915 - RNA, 23 nt, Human
gagugaacaaauuuacagagaca

SEQ ID NO: 2634916 - RNA, 22 nt, Human
gagugaacaaauuuacagagac

SEQ ID NO: 2634917 - RNA, 13 nt, Human
gagcuacaaaugc

SEQ ID NO: 2634918 - RNA, 12 nt, Human
gagcuacaaaug

SEQ ID NO: 2634919 - RNA, 17 nt, Human
gagcugcccucuccugg

SEQ ID NO: 2634920 - RNA, 15 nt, Human
gagcugcccucuccu

SEQ ID NO: 2634921 - RNA, 16 nt, Human
gagcugcccucuccug

SEQ ID NO: 2634922 - RNA, 14 nt, Human
gagcugcccucucc

SEQ ID NO: 2634923 - RNA, 14 nt, Human
gagcuacaaaugca

SEQ ID NO: 2634924 - RNA, 21 nt, Human
gagcaggcuacugucagcucc

SEQ ID NO: 2634925 - RNA, 19 nt, Human
gaggcagagguugcaguga

SEQ ID NO: 2634926 - RNA, 23 nt, Human
cuauucaaacagucucaggaaau

SEQ ID NO: 2634927 - RNA, 16 nt, Human
cuauucaaacagucuc

SEQ ID NO: 2634928 - RNA, 18 nt, Human
cuauucaaacagucucag

SEQ ID NO: 2634929 - RNA, 18 nt, Human
cuauauuguuugcuaagc

SEQ ID NO: 2634930 - RNA, 20 nt, Human
cuauaggugcuacaaaaaca

SEQ ID NO: 2634931 - RNA, 22 nt, Human
cuauaggugcuacaaaaacaca

SEQ ID NO: 2634932 - RNA, 21 nt, Human
cuauaggugcuacaaaaacac

SEQ ID NO: 2634933 - RNA, 16 nt, Human
cuaguaauuggaaagg

SEQ ID NO: 2634934 - RNA, 20 nt, Human
cuagugaaacucguuaauuu

SEQ ID NO: 2634935 - RNA, 19 nt, Human
cuagugaaagaggcagcuu

SEQ ID NO: 2634936 - RNA, 18 nt, Human
cuagugaaagaggcagcu

SEQ ID NO: 2634937 - RNA, 21 nt, Human
cuagugagcagucaggaaaga

SEQ ID NO: 2634938 - RNA, 21 nt, Human
cucauuuccaagcaaguauua

SEQ ID NO: 2634939 - RNA, 14 nt, Human
cucauuucuagcag

SEQ ID NO: 2634940 - RNA, 13 nt, Human
cuccaaagaaaug

SEQ ID NO: 2634941 - RNA, 21 nt, Human
cuccaaacugacucuuaagaa

SEQ ID NO: 2634942 - RNA, 12 nt, Human
cuccaaagaaau

SEQ ID NO: 2634943 - RNA, 17 nt, Human
cuccaccuugcagcucu

SEQ ID NO: 2634944 - RNA, 12 nt, Human
cuccauccugag

SEQ ID NO: 2634945 - RNA, 20 nt, Human
cuccccuccucugcuugcca

SEQ ID NO: 2634946 - RNA, 13 nt, Human
cuccauccugagg

SEQ ID NO: 2634947 - RNA, 13 nt, Human
cuccccuccucug

SEQ ID NO: 2634948 - RNA, 11 nt, Human
cuccccuccuc

SEQ ID NO: 2634949 - RNA, 15 nt, Human
cugaggcuccacuug

SEQ ID NO: 2634950 - RNA, 21 nt, Human
cugaggcuccacuuggucugu

SEQ ID NO: 2634951 - RNA, 15 nt, Human
cugcaauaaaauggg

SEQ ID NO: 2634952 - RNA, 22 nt, Human
cugcaauaaaauggguuuuacu

SEQ ID NO: 2634953 - RNA, 20 nt, Human
cugcaucagcugcugaaaca

SEQ ID NO: 2634954 - RNA, 14 nt, Human
cugaagaagauggu

SEQ ID NO: 2634955 - RNA, 23 nt, Human
cugacgacuugagugcucaguag

SEQ ID NO: 2634956 - RNA, 18 nt, Human
cugagaaagacuauucaa

SEQ ID NO: 2634957 - RNA, 15 nt, Human
cugagaaagacuauu

SEQ ID NO: 2634958 - RNA, 13 nt, Human
cugagaaagacua

SEQ ID NO: 2634959 - RNA, 12 nt, Human
cugagaaagacu

SEQ ID NO: 2634960 - RNA, 21 nt, Human
cugagaugugaacacaucagc

SEQ ID NO: 2634961 - RNA, 20 nt, Human
cugagaaagacuauucaaac

SEQ ID NO: 2634962 - RNA, 19 nt, Human
cugagaaagacuauucaaa

SEQ ID NO: 2634963 - RNA, 20 nt, Human
cugagaugugaacacaucag

SEQ ID NO: 2634964 - RNA, 16 nt, Human
cugagaugugaacaca

SEQ ID NO: 2634965 - RNA, 16 nt, Human
cugagcaggauuuuaa

SEQ ID NO: 2634966 - RNA, 19 nt, Human
cucuuaagaagacugcauu

SEQ ID NO: 2634967 - RNA, 21 nt, Human
cucuggccuucggccuccauc

SEQ ID NO: 2634968 - RNA, 22 nt, Human
cucuggccuucggccuccaucc

SEQ ID NO: 2634969 - RNA, 21 nt, Human
gaacuagaguuuagcuggaaa

SEQ ID NO: 2634970 - RNA, 22 nt, Human
gaacuagaguuuagcuggaaaa

SEQ ID NO: 2634971 - RNA, 21 nt, Human
gaagaagcaccaaucaugaau

SEQ ID NO: 2634972 - RNA, 21 nt, Human
gaacuuguaaaggaauuuaaa

SEQ ID NO: 2634973 - RNA, 22 nt, Human
gaacuuccagauccuggaaauc

SEQ ID NO: 2634974 - RNA, 15 nt, Human
gaacucccuuucaac

SEQ ID NO: 2634975 - RNA, 14 nt, Human
gaacucccuuucaa

SEQ ID NO: 2634976 - RNA, 13 nt, Human
gaaauauuauguu

SEQ ID NO: 2634977 - RNA, 16 nt, Human
gaaauauuauguuaaa

SEQ ID NO: 2634978 - RNA, 22 nt, Human
gaaauguaagggaaacugccag

SEQ ID NO: 2634979 - RNA, 17 nt, Human
gaagacugcauuauauu

SEQ ID NO: 2634980 - RNA, 21 nt, Human
gaagccuuggggcugaugcag

SEQ ID NO: 2634981 - RNA, 20 nt, Human
gaauaauccuaaacauauga

SEQ ID NO: 2634982 - RNA, 14 nt, Human
gaauacuuuauaaa

SEQ ID NO: 2634983 - RNA, 20 nt, Human
gaaaaucuuauaauuuaaaa

SEQ ID NO: 2634984 - RNA, 12 nt, Human
gaaaauaucacu

SEQ ID NO: 2634985 - RNA, 19 nt, Human
gaaaaucuuauaauuuaaa

SEQ ID NO: 2634986 - RNA, 19 nt, Human
gaaaauaacgauaaaagac

SEQ ID NO: 2634987 - RNA, 22 nt, Human
gaaaacaauaacgauaaaagac

SEQ ID NO: 2634988 - RNA, 22 nt, Human
cuugccaucccucccuccaccu

SEQ ID NO: 2634989 - RNA, 21 nt, Human
cuugccaucccucccuccacc

SEQ ID NO: 2634990 - RNA, 19 nt, Human
cuuguaaaggaauuuaaaa

SEQ ID NO: 2634991 - RNA, 20 nt, Human
cuuuaaagggauggcaagau

SEQ ID NO: 2634992 - RNA, 18 nt, Human
cuuuaaagggauggcaag

SEQ ID NO: 2634993 - RNA, 13 nt, Human
cuuuccacagaag

SEQ ID NO: 2634994 - RNA, 21 nt, Human
cuuuauuuucuauaauuuaaa

SEQ ID NO: 2634995 - RNA, 16 nt, Human
cuguuaaaagaugaaa

SEQ ID NO: 2634996 - RNA, 15 nt, Human
cuguuaaaagaugaa

SEQ ID NO: 2634997 - RNA, 19 nt, Human
cuguuaaaagaugaaaaua

SEQ ID NO: 2634998 - RNA, 18 nt, Human
cugucuucacaacagauu

SEQ ID NO: 2634999 - RNA, 14 nt, Human
cuucacaacagauu

SEQ ID NO: 2635000 - RNA, 12 nt, Human
cuucacaacaga

SEQ ID NO: 2635001 - RNA, 17 nt, Human
cuucaaauccuugaaga

SEQ ID NO: 2635002 - RNA, 16 nt, Human
cuucagcgguuuauau

SEQ ID NO: 2635003 - RNA, 15 nt, Human
cuucagccugaaaga

SEQ ID NO: 2635004 - RNA, 20 nt, Human
cuucggccuccauccugagg

SEQ ID NO: 2635005 - RNA, 20 nt, Human
cuuccuuggacucauuuuaa

SEQ ID NO: 2635006 - RNA, 14 nt, Human
cuguuuuauaauuu

SEQ ID NO: 2635007 - RNA, 15 nt, Human
cuguuuuauaauuuu

SEQ ID NO: 2635008 - RNA, 21 nt, Human
cuuaagaagacugcauuauau

SEQ ID NO: 2635009 - RNA, 23 nt, Human
cuuaagaagacugcauuauauuu

SEQ ID NO: 2635010 - RNA, 20 nt, Human
cuuaauuaaaagaauauuuu

SEQ ID NO: 2635011 - RNA, 19 nt, Human
cuuaauuaaaagaauauuu

SEQ ID NO: 2635012 - RNA, 17 nt, Human
cuuaauuaaaagaauau

SEQ ID NO: 2635013 - RNA, 16 nt, Human
cuuaauuaaaagaaua

SEQ ID NO: 2635014 - RNA, 16 nt, Human
ccgggcguggugguga

SEQ ID NO: 2635015 - RNA, 17 nt, Human
ccucccuccaccucccu

SEQ ID NO: 2635016 - RNA, 20 nt, Human
ccucccuccaccucccugca

SEQ ID NO: 2635017 - RNA, 18 nt, Human
ccuccucugcuugccauc

SEQ ID NO: 2635018 - RNA, 16 nt, Human
ccuccucugcuugcca

SEQ ID NO: 2635019 - RNA, 13 nt, Human
ccuccucugcuug

SEQ ID NO: 2635020 - RNA, 17 nt, Human
ccuccaccucccugcaa

SEQ ID NO: 2635021 - RNA, 22 nt, Human
ccuccaccucccugcaauaaaa

SEQ ID NO: 2635022 - RNA, 13 nt, Human
ccuccaccucccu

SEQ ID NO: 2635023 - RNA, 14 nt, Human
ccuccaccucccug

SEQ ID NO: 2635024 - RNA, 15 nt, Human
ccuccaccucccugc

SEQ ID NO: 2635025 - RNA, 14 nt, Human
ccuccauccugagg

SEQ ID NO: 2635026 - RNA, 20 nt, Human
cccacaagaaaugaaagcag

SEQ ID NO: 2635027 - RNA, 13 nt, Human
cccacaagaaaug

SEQ ID NO: 2635028 - RNA, 14 nt, Human
cccuccaccucccu

SEQ ID NO: 2635029 - RNA, 12 nt, Human
cccuccaccucc

SEQ ID NO: 2635030 - RNA, 19 nt, Human
cccuccaccucccugcaau

SEQ ID NO: 2635031 - RNA, 15 nt, Human
cccuccaccucccug

SEQ ID NO: 2635032 - RNA, 17 nt, Human
cccuccaccucccugca

SEQ ID NO: 2635033 - RNA, 14 nt, Human
cccucuccugggca

SEQ ID NO: 2635034 - RNA, 15 nt, Human
cccucuccugggcag

SEQ ID NO: 2635035 - RNA, 11 nt, Human
cccucuccugg

SEQ ID NO: 2635036 - RNA, 12 nt, Human
cccucuccuggg

SEQ ID NO: 2635037 - RNA, 13 nt, Human
cccucuccugggc

SEQ ID NO: 2635038 - RNA, 15 nt, Human
cccgugggguuccuc

SEQ ID NO: 2635039 - RNA, 22 nt, Human
ccugggcagcugccuccccucc

SEQ ID NO: 2635040 - RNA, 23 nt, Human
ccuggaaaucaggguuaguauug

SEQ ID NO: 2635041 - RNA, 16 nt, Human
ccugcaauaaaauggg

SEQ ID NO: 2635042 - RNA, 11 nt, Human
ccugagcccca

SEQ ID NO: 2635043 - RNA, 18 nt, Human
cgagcaggcuacugucag

SEQ ID NO: 2635044 - RNA, 20 nt, Human
ccuucggccuccauccugag

SEQ ID NO: 2635045 - RNA, 19 nt, Human
ccuucggccuccauccuga

SEQ ID NO: 2635046 - RNA, 14 nt, Human
ccuucggccuccau

SEQ ID NO: 2635047 - RNA, 12 nt, Human
ccuucagccuga

SEQ ID NO: 2635048 - RNA, 14 nt, Human
ccuugaugaagaag

SEQ ID NO: 2635049 - RNA, 19 nt, Human
ccuuggggcugaugcaguu

SEQ ID NO: 2635050 - RNA, 20 nt, Human
ccuugaaaacuuuaugcuaa

SEQ ID NO: 2635051 - RNA, 21 nt, Human
ccuguuaaaagaugaaaauau

SEQ ID NO: 2635052 - RNA, 20 nt, Human
ccuguuaaaagaugaaaaua

SEQ ID NO: 2635053 - RNA, 14 nt, Human
ccaccucccugcaa

SEQ ID NO: 2635054 - RNA, 22 nt, Human
ccagccagcaguucagagcugc

SEQ ID NO: 2635055 - RNA, 13 nt, Human
ccagcaguucaga

SEQ ID NO: 2635056 - RNA, 18 nt, Human
ccagcaguucagagcugc

SEQ ID NO: 2635057 - RNA, 19 nt, Human
ccagcaguucagagcugcc

SEQ ID NO: 2635058 - RNA, 20 nt, Human
ccagcaguucagagcugccc

SEQ ID NO: 2635059 - RNA, 21 nt, Human
ccagcaguucagagcugcccu

SEQ ID NO: 2635060 - RNA, 22 nt, Human
ccagcaguucagagcugcccuc

SEQ ID NO: 2635061 - RNA, 23 nt, Human
ccagcaguucagagcugcccucu

SEQ ID NO: 2635062 - RNA, 19 nt, Human
ccaguguuuuaggagcaug

SEQ ID NO: 2635063 - RNA, 21 nt, Human
ccaguuauggcuauaggugcu

SEQ ID NO: 2635064 - RNA, 14 nt, Human
ccaguuauggcuau

SEQ ID NO: 2635065 - RNA, 19 nt, Human
ccaugggacagggaggacg

SEQ ID NO: 2635066 - RNA, 16 nt, Human
ccaugggacagggagg

SEQ ID NO: 2635067 - RNA, 19 nt, Human
caugagguacugagaguga

SEQ ID NO: 2635068 - RNA, 16 nt, Human
caugagguacugagag

SEQ ID NO: 2635069 - RNA, 18 nt, Human
caugaagauguagaggag

SEQ ID NO: 2635070 - RNA, 19 nt, Human
caugaagauguagaggaga

SEQ ID NO: 2635071 - RNA, 15 nt, Human
cauauauaacaaugc

SEQ ID NO: 2635072 - RNA, 13 nt, Human
cauauauaacaau

SEQ ID NO: 2635073 - RNA, 20 nt, Human
caucccucccuccaccuccc

SEQ ID NO: 2635074 - RNA, 22 nt, Human
caucccucccuccaccucccug

SEQ ID NO: 2635075 - RNA, 23 nt, Human
caucccucccuccaccucccugc

SEQ ID NO: 2635076 - RNA, 18 nt, Human
caucccuuaccugggaaa

SEQ ID NO: 2635077 - RNA, 22 nt, Human
cauuccaacuaucucauuucca

SEQ ID NO: 2635078 - RNA, 13 nt, Human
cauucuggaauaa

SEQ ID NO: 2635079 - RNA, 21 nt, Human
cauuguaaaugugcuuuuaaa

SEQ ID NO: 2635080 - RNA, 23 nt, Human
caugggacagggaggacgcucuc

SEQ ID NO: 2635081 - RNA, 20 nt, Human
cauggaauuggagcucgugg

SEQ ID NO: 2635082 - RNA, 20 nt, Human
caugugcuaguaauuggaaa

SEQ ID NO: 2635083 - RNA, 18 nt, Human
cagggacaggauaagagg

SEQ ID NO: 2635084 - RNA, 17 nt, Human
cagggcauggcugggaa

SEQ ID NO: 2635085 - RNA, 11 nt, Human
caggggacagg

SEQ ID NO: 2635086 - RNA, 16 nt, Human
caggggacaggauggu

SEQ ID NO: 2635087 - RNA, 14 nt, Human
caggcuacugucag

SEQ ID NO: 2635088 - RNA, 13 nt, Human
caggcuagaugua

SEQ ID NO: 2635089 - RNA, 19 nt, Human
caggcuagauguauguacu

SEQ ID NO: 2635090 - RNA, 19 nt, Human
caggcccccaggugccagu

SEQ ID NO: 2635091 - RNA, 14 nt, Human
caggcccccaggug

SEQ ID NO: 2635092 - RNA, 20 nt, Human
caggcccccaggugccaguu

SEQ ID NO: 2635093 - RNA, 16 nt, Human
caggauuuuaaucuuu

SEQ ID NO: 2635094 - RNA, 21 nt, Human
caggaugguucccuugaugaa

SEQ ID NO: 2635095 - RNA, 23 nt, Human
caggaugguucccuugaugaaga

SEQ ID NO: 2635096 - RNA, 13 nt, Human
caguccaugaaga

SEQ ID NO: 2635097 - RNA, 22 nt, Human
cagucaggaaagagaacuucca

SEQ ID NO: 2635098 - RNA, 15 nt, Human
cagucaggaaagaga

SEQ ID NO: 2635099 - RNA, 18 nt, Human
cagucaggaaagagaacu

SEQ ID NO: 2635100 - RNA, 12 nt, Human
caguagugauag

SEQ ID NO: 2635101 - RNA, 12 nt, Human
caguauggcagc

SEQ ID NO: 2635102 - RNA, 15 nt, Human
cagugagacagcucu

SEQ ID NO: 2635103 - RNA, 20 nt, Human
cagugaaagaaaauaacaau

SEQ ID NO: 2635104 - RNA, 16 nt, Human
cagugaaagaaaauaa

SEQ ID NO: 2635105 - RNA, 17 nt, Human
cagugauuaccagggac

SEQ ID NO: 2635106 - RNA, 18 nt, Human
cagugauuaccagggacu

SEQ ID NO: 2635107 - RNA, 23 nt, Human
cagcaagggugaugggaaagcau

SEQ ID NO: 2635108 - RNA, 22 nt, Human
cagcaagggugaugggaaagca

SEQ ID NO: 2635109 - RNA, 19 nt, Human
cagcaagggugaugggaaa

SEQ ID NO: 2635110 - RNA, 14 nt, Human
cagauuuuccugaa

SEQ ID NO: 2635111 - RNA, 15 nt, Human
cagauuuuccugaaa

SEQ ID NO: 2635112 - RNA, 23 nt, Human
cagcaacgcaggcccccaggugc

SEQ ID NO: 2635113 - RNA, 18 nt, Human
caggaaccacaagacugc

SEQ ID NO: 2635114 - RNA, 23 nt, Human
cagcuuuccucaaaacuucagac

SEQ ID NO: 2635115 - RNA, 18 nt, Human
cagcuugaaacugagaug

SEQ ID NO: 2635116 - RNA, 19 nt, Human
cagcuguaugauucccagc

SEQ ID NO: 2635117 - RNA, 22 nt, Human
caggaagcugugagagcaguuu

SEQ ID NO: 2635118 - RNA, 13 nt, Human
caggaagcuguga

SEQ ID NO: 2635119 - RNA, 14 nt, Human
caggaagcugugag

SEQ ID NO: 2635120 - RNA, 16 nt, Human
caggaaguagaggagg

SEQ ID NO: 2635121 - RNA, 15 nt, Human
caggaaguagaggag

SEQ ID NO: 2635122 - RNA, 16 nt, Human
cagcucuccccuucuc

SEQ ID NO: 2635123 - RNA, 20 nt, Human
cagcucugcauacucauuag

SEQ ID NO: 2635124 - RNA, 21 nt, Human
cagcugcugaaacaacaaaua

SEQ ID NO: 2635125 - RNA, 20 nt, Human
cagcugcugaaacaacaaau

SEQ ID NO: 2635126 - RNA, 18 nt, Human
cagcuguaugauucccag

SEQ ID NO: 2635127 - RNA, 16 nt, Human
cagccuaguugaucag

SEQ ID NO: 2635128 - RNA, 13 nt, Human
cagcccucagaau

SEQ ID NO: 2635129 - RNA, 19 nt, Human
cagcuacuugggaggcuga

SEQ ID NO: 2635130 - RNA, 19 nt, Human
cagacauagaauuaacaca

SEQ ID NO: 2635131 - RNA, 17 nt, Human
cagacauagaauuaaca

SEQ ID NO: 2635132 - RNA, 21 nt, Human
cagaaucgcuccaccuugcag

SEQ ID NO: 2635133 - RNA, 23 nt, Human
cagaaucgcuccaccuugcagcu

SEQ ID NO: 2635134 - RNA, 20 nt, Human
cagaagcaacccaaauguuc

SEQ ID NO: 2635135 - RNA, 19 nt, Human
cagaagcaacccaaauguu

SEQ ID NO: 2635136 - RNA, 18 nt, Human
cagaaagcagaacaguga

SEQ ID NO: 2635137 - RNA, 23 nt, Human
cagaacagugauuaccagggacu

SEQ ID NO: 2635138 - RNA, 19 nt, Human
cagaaagcagaacagugau

SEQ ID NO: 2635139 - RNA, 20 nt, Human
cagagccccacccucagaug

SEQ ID NO: 2635140 - RNA, 17 nt, Human
cagaugcacaugagcug

SEQ ID NO: 2635141 - RNA, 14 nt, Human
cagauccuggaaau

SEQ ID NO: 2635142 - RNA, 13 nt, Human
cagauccuggaaa

SEQ ID NO: 2635143 - RNA, 14 nt, Human
cagauaaacaguag

SEQ ID NO: 2635144 - RNA, 23 nt, Human
cagauaaauaguuuaugauucca

SEQ ID NO: 2635145 - RNA, 14 nt, Human
cagauaaucacaau

SEQ ID NO: 2635146 - RNA, 20 nt, Human
cacccucagaugcacaugag

SEQ ID NO: 2635147 - RNA, 13 nt, Human
caccucccugcaa

SEQ ID NO: 2635148 - RNA, 14 nt, Human
caccucccugcaau

SEQ ID NO: 2635149 - RNA, 10 nt, Human
caccucccug

SEQ ID NO: 2635150 - RNA, 11 nt, Human
caccucaugga

SEQ ID NO: 2635151 - RNA, 12 nt, Human
caccucauggaa

SEQ ID NO: 2635152 - RNA, 14 nt, Human
caccucauggaauu

SEQ ID NO: 2635153 - RNA, 15 nt, Human
cacgcacacugucug

SEQ ID NO: 2635154 - RNA, 22 nt, Human
cacgagcaggcuacugucagcu

SEQ ID NO: 2635155 - RNA, 17 nt, Human
cacgagcaggcuacugu

SEQ ID NO: 2635156 - RNA, 20 nt, Human
cacgagcaggcuacugucag

SEQ ID NO: 2635157 - RNA, 19 nt, Human
cacgagcaggcuacuguca

SEQ ID NO: 2635158 - RNA, 13 nt, Human
cacuaaacaaaga

SEQ ID NO: 2635159 - RNA, 22 nt, Human
cacguucuuacuaguuucccuu

SEQ ID NO: 2635160 - RNA, 16 nt, Human
cacucaaaucaagaaa

SEQ ID NO: 2635161 - RNA, 14 nt, Human
cacuaguauuucua

SEQ ID NO: 2635162 - RNA, 19 nt, Human
cacuaguauuucuaugaaa

SEQ ID NO: 2635163 - RNA, 21 nt, Human
cacuaaauugacacuuaaaaa

SEQ ID NO: 2635164 - RNA, 17 nt, Human
cacuaagagagaaugag

SEQ ID NO: 2635165 - RNA, 14 nt, Human
cacugucaagauga

SEQ ID NO: 2635166 - RNA, 22 nt, Human
cacuguggguagacacacauga

SEQ ID NO: 2635167 - RNA, 24 nt, Human
cacuguggguagacacacaugaag

SEQ ID NO: 2635168 - RNA, 19 nt, Human
cacuguggguagacacaca

SEQ ID NO: 2635169 - RNA, 15 nt, Human
cacuuggucugugag

SEQ ID NO: 2635170 - RNA, 23 nt, Human
cacuugaacccgggaggcagagg

SEQ ID NO: 2635171 - RNA, 21 nt, Human
cacuugaacccgggaggcaga

SEQ ID NO: 2635172 - RNA, 20 nt, Human
cacuugaacccgggaggcag

SEQ ID NO: 2635173 - RNA, 20 nt, Human
cacugccuucucaacuccaa

SEQ ID NO: 2635174 - RNA, 20 nt, Human
cacugacuucuaaguaaaac

SEQ ID NO: 2635175 - RNA, 16 nt, Human
cacugacuucuaagua

SEQ ID NO: 2635176 - RNA, 15 nt, Human
cacugacuucuaagu

SEQ ID NO: 2635177 - RNA, 14 nt, Human
cacugacuucuaag

SEQ ID NO: 2635178 - RNA, 21 nt, Human
cacugacuucuaaguaaaacc

SEQ ID NO: 2635179 - RNA, 13 nt, Human
aaaaacacagcaa

SEQ ID NO: 2635180 - RNA, 18 nt, Human
aaaaacacagcaagggug

SEQ ID NO: 2635181 - RNA, 23 nt, Human
aucagcugcugaaacaacaaaua

SEQ ID NO: 2635182 - RNA, 22 nt, Human
aucagcugcugaaacaacaaau

SEQ ID NO: 2635183 - RNA, 21 nt, Human
aucagcugcugaaacaacaaa

SEQ ID NO: 2635184 - RNA, 17 nt, Human
auauuuauuuuaauaau

SEQ ID NO: 2635185 - RNA, 14 nt, Human
auauuuauuuuaau

SEQ ID NO: 2635186 - RNA, 15 nt, Human
auauuuauuuuaaua

SEQ ID NO: 2635187 - RNA, 19 nt, Human
auguaagggaaacugccag

SEQ ID NO: 2635188 - RNA, 16 nt, Human
auguaagggaaacugc

SEQ ID NO: 2635189 - RNA, 14 nt, Human
auguaagggaaacu

SEQ ID NO: 2635190 - RNA, 17 nt, Human
auguucuaagaagugaa

SEQ ID NO: 2635191 - RNA, 18 nt, Human
augugggcagugauguca

SEQ ID NO: 2635192 - RNA, 12 nt, Human
aguccuguaaug

SEQ ID NO: 2635193 - RNA, 23 nt, Human
agucaaauugugugaaagguacu

SEQ ID NO: 2635194 - RNA, 19 nt, Human
agucaaauugugugaaagg

SEQ ID NO: 2635195 - RNA, 15 nt, Human
agugucuuaauuaaa

SEQ ID NO: 2635196 - RNA, 21 nt, Human
agugucuuaauuaaaagaaua

SEQ ID NO: 2635197 - RNA, 18 nt, Human
agugucuuaauuaaaaga

SEQ ID NO: 2635198 - RNA, 17 nt, Human
agugucuuaauuaaaag

SEQ ID NO: 2635199 - RNA, 21 nt, Human
aguugaaaagacuccaaagaa

SEQ ID NO: 2635200 - RNA, 22 nt, Human
aguugaaaaucuuauaauuuaa

SEQ ID NO: 2635201 - RNA, 22 nt, Human
aguugaaaagacuccaaagaaa

SEQ ID NO: 2635202 - RNA, 23 nt, Human
aguugaaaaucuuauaauuuaaa

SEQ ID NO: 2635203 - RNA, 22 nt, Human
auauuuauuacuguaagaaaau

SEQ ID NO: 2635204 - RNA, 13 nt, Human
auauuuauuuuaa

SEQ ID NO: 2635205 - RNA, 16 nt, Human
auauuauguuaaaacu

SEQ ID NO: 2635206 - RNA, 20 nt, Human
auaugcuucuguuuuauaau

SEQ ID NO: 2635207 - RNA, 22 nt, Human
auaugcuucuguuuuauaauuu

SEQ ID NO: 2635208 - RNA, 18 nt, Human
auagcagcuuauucacaa

SEQ ID NO: 2635209 - RNA, 15 nt, Human
auagguuuaauaauu

SEQ ID NO: 2635210 - RNA, 14 nt, Human
auaggugcuacaaa

SEQ ID NO: 2635211 - RNA, 23 nt, Human
auaggugcuacaaaaacacagca

SEQ ID NO: 2635212 - RNA, 21 nt, Human
auaggugcuacaaaaacacag

SEQ ID NO: 2635213 - RNA, 15 nt, Human
auaggugcuacaaaa

SEQ ID NO: 2635214 - RNA, 14 nt, Human
auagucaaauugug

SEQ ID NO: 2635215 - RNA, 18 nt, Human
auaaaggauuaaugucaa

SEQ ID NO: 2635216 - RNA, 15 nt, Human
auaaugucccuucac

SEQ ID NO: 2635217 - RNA, 23 nt, Human
auaauguuucaaacauauauaac

SEQ ID NO: 2635218 - RNA, 20 nt, Human
auacacacucaaaucaagaa

SEQ ID NO: 2635219 - RNA, 18 nt, Human
auacacacucaaaucaag

SEQ ID NO: 2635220 - RNA, 17 nt, Human
auacacacucaaaucaa

SEQ ID NO: 2635221 - RNA, 17 nt, Human
aggcuagauguauguac

SEQ ID NO: 2635222 - RNA, 15 nt, Human
aggcuagauguaugu

SEQ ID NO: 2635223 - RNA, 16 nt, Human
aggcuagauguaugua

SEQ ID NO: 2635224 - RNA, 17 nt, Human
aggcuacugucagcucc

SEQ ID NO: 2635225 - RNA, 21 nt, Human
aggcuagaaccaccugccuau

SEQ ID NO: 2635226 - RNA, 24 nt, Human
aggugcuacaaaaacacagcaagg

SEQ ID NO: 2635227 - RNA, 23 nt, Human
aggugcuacaaaaacacagcaag

SEQ ID NO: 2635228 - RNA, 18 nt, Human
aggugcuacaaaaacaca

SEQ ID NO: 2635229 - RNA, 22 nt, Human
aggugcuacaaaaacacagcaa

SEQ ID NO: 2635230 - RNA, 21 nt, Human
aggugcuacaaaaacacagca

SEQ ID NO: 2635231 - RNA, 20 nt, Human
aggugcuacaaaaacacagc

SEQ ID NO: 2635232 - RNA, 19 nt, Human
aggugcuacaaaaacacag

SEQ ID NO: 2635233 - RNA, 20 nt, Human
agguaaaagcaucacaugaa

SEQ ID NO: 2635234 - RNA, 22 nt, Human
agcuccccucggagaagagcug

SEQ ID NO: 2635235 - RNA, 23 nt, Human
aggaugguucccuugaugaagaa

SEQ ID NO: 2635236 - RNA, 16 nt, Human
agcaguugaaaagacu

SEQ ID NO: 2635237 - RNA, 13 nt, Human
agcaguugaaaag

SEQ ID NO: 2635238 - RNA, 23 nt, Human
agcaguucagagcugcccucucc

SEQ ID NO: 2635239 - RNA, 16 nt, Human
agcacugacuucuaag

SEQ ID NO: 2635240 - RNA, 21 nt, Human
agacugcauuauauuuauuac

SEQ ID NO: 2635241 - RNA, 17 nt, Human
agagaacuuccagaucc

SEQ ID NO: 2635242 - RNA, 21 nt, Human
agacgugcacgcacacugucu

SEQ ID NO: 2635243 - RNA, 22 nt, Human
agacgugcacgcacacugucug

SEQ ID NO: 2635244 - RNA, 15 nt, Human
aaugauuaugaauua

SEQ ID NO: 2635245 - RNA, 23 nt, Human
aaugauuaugaauuacauuugua

SEQ ID NO: 2635246 - RNA, 21 nt, Human
aaugauuaugaauuacauuug

SEQ ID NO: 2635247 - RNA, 15 nt, Human
aauccaaugaaauga

SEQ ID NO: 2635248 - RNA, 23 nt, Human
aauguuucaaacauauauaacaa

SEQ ID NO: 2635249 - RNA, 20 nt, Human
aaggcagcucuaaaugucaa

SEQ ID NO: 2635250 - RNA, 23 nt, Human
aagggaaacugccagcaacgcag

SEQ ID NO: 2635251 - RNA, 17 nt, Human
aagggaaacugccagca

SEQ ID NO: 2635252 - RNA, 16 nt, Human
aagggaaacugccagc

SEQ ID NO: 2635253 - RNA, 17 nt, Human
aaguccaagcauaccaa

SEQ ID NO: 2635254 - RNA, 18 nt, Human
aaguccaagcauuuagau

SEQ ID NO: 2635255 - RNA, 21 nt, Human
aaguagggacuucugucuuca

SEQ ID NO: 2635256 - RNA, 23 nt, Human
aaacugagaugugaacacaucag

SEQ ID NO: 2635257 - RNA, 21 nt, Human
aaacugagaugugaacacauc

SEQ ID NO: 2635258 - RNA, 15 nt, Human
aaagaaauguaaggg

SEQ ID NO: 2635259 - RNA, 16 nt, Human
aaaaucucaauauuuc

SEQ ID NO: 2635260 - RNA, 16 nt, Human
aaaaagaaacauuugg

SEQ ID NO: 2635261 - RNA, 18 nt, Human
aaaaguucugcagauaaa

SEQ ID NO: 2635262 - RNA, 21 nt, Human
aaaaucuacacuccagugaga

SEQ ID NO: 2635263 - RNA, 16 nt, Human
aaaucaaauaugcaaa

SEQ ID NO: 2635264 - RNA, 15 nt, Human
aaaucaaauaugcaa

SEQ ID NO: 2635265 - RNA, 14 nt, Human
aaaucaaauaugca

SEQ ID NO: 2635266 - RNA, 12 nt, Human
aaaucaaauaug

SEQ ID NO: 2635267 - RNA, 20 nt, Human
aaauauuuauuuuaauaaug

SEQ ID NO: 2635268 - RNA, 15 nt, Human
aaauauuuauuuuaa

SEQ ID NO: 2635269 - RNA, 13 nt, Human
aaauauuuauuuu

SEQ ID NO: 2635270 - RNA, 14 nt, Human
aaaggcagaagcaa

SEQ ID NO: 2635271 - RNA, 20 nt, Human
aacugagaugugaacacauc

SEQ ID NO: 2635272 - RNA, 19 nt, Human
aacugacucuuaagaagac

SEQ ID NO: 2635273 - RNA, 20 nt, Human
aacugacucuuaagaagacu

SEQ ID NO: 2635274 - RNA, 15 nt, Human
aacugacucuuaaga

SEQ ID NO: 2635275 - RNA, 18 nt, Human
aacugacucuuaagaaga

SEQ ID NO: 2635276 - RNA, 21 nt, Human
aacuuuaugcuaagugaaaua

SEQ ID NO: 2635277 - RNA, 20 nt, Human
aacuuuaugcuaagugaaau

SEQ ID NO: 2635278 - RNA, 17 nt, Human
aaccuagggugauauua

SEQ ID NO: 2635279 - RNA, 22 nt, Human
aaccacuggaaaguuuaugguu

SEQ ID NO: 2635280 - RNA, 19 nt, Human
aaauugacacuuaaaaaug

SEQ ID NO: 2635281 - RNA, 17 nt, Human
aaaucuuauaauuuaaa

SEQ ID NO: 2635282 - RNA, 22 nt, Human
aaauguuguucucuucuuuaaa

SEQ ID NO: 2635283 - RNA, 18 nt, Human
aacaaauuuacagagaca

SEQ ID NO: 2635284 - RNA, 16 nt, Human
aacacaucagcuugcc

SEQ ID NO: 2635285 - RNA, 21 nt, Human
acccacaagaaaugaaagcag

SEQ ID NO: 2635286 - RNA, 17 nt, Human
acccacaagaaaugaaa

SEQ ID NO: 2635287 - RNA, 22 nt, Human
acccaguguuuuaggagcauga

SEQ ID NO: 2635288 - RNA, 19 nt, Human
acccaguguuuuaggagca

SEQ ID NO: 2635289 - RNA, 21 nt, Human
acagcaguugaaaagacucca

SEQ ID NO: 2635290 - RNA, 23 nt, Human
acagcaguugaaaagacuccaaa

SEQ ID NO: 2635291 - RNA, 22 nt, Human
acagcaguugaaaagacuccaa

SEQ ID NO: 2635292 - RNA, 13 nt, Human
aauuuugugaagc

SEQ ID NO: 2635293 - RNA, 21 nt, Human
acacgagcaggcuacugucag

SEQ ID NO: 2635294 - RNA, 19 nt, Human
acacgagcaggcuacuguc

SEQ ID NO: 2635295 - RNA, 14 nt, Human
acacgagcaggcua

SEQ ID NO: 2635296 - RNA, 22 nt, Human
acuuuauuuucuauaauuuaaa

SEQ ID NO: 2635297 - RNA, 14 nt, Human
agaaaauaacaaua

SEQ ID NO: 2635298 - RNA, 16 nt, Human
agaaaaucaggcuggc

SEQ ID NO: 2635299 - RNA, 18 nt, Human
acucugucucaguccaug

SEQ ID NO: 2635300 - RNA, 20 nt, Human
acucugucucaguccaugaa

SEQ ID NO: 2635301 - RNA, 13 nt, Human
acugccagcaacg

SEQ ID NO: 2635302 - RNA, 22 nt, Human
acuguaagaaaauaucacuugu

SEQ ID NO: 2635303 - RNA, 19 nt, Human
acuguaagaaaauaucacu

SEQ ID NO: 2635304 - RNA, 13 nt, Human
acuguaagaaaau

SEQ ID NO: 2635305 - RNA, 12 nt, Human
acuucagacaua

SEQ ID NO: 2635306 - RNA, 21 nt, Human
acuucugucuucacaacagau

SEQ ID NO: 2635307 - RNA, 21 nt, Human
acuuggucugugagaugcuag

SEQ ID NO: 2635308 - RNA, 22 nt, Human
acuucugucuucacaacagauu

SEQ ID NO: 2635309 - RNA, 22 nt, Human
acgcaggcccccaggugccagu

SEQ ID NO: 2635310 - RNA, 19 nt, Human
acgcaggcccccaggugcc

SEQ ID NO: 2635311 - RNA, 13 nt, Human
acuaagagagaau

SEQ ID NO: 2635312 - RNA, 17 nt, Human
acucuauguucuaagaa

SEQ ID NO: 2635313 - RNA, 21 nt, Human
acuauucaaacagucucagga

SEQ ID NO: 2635314 - RNA, 20 nt, Human
acuaguauuucuaugaaaua

SEQ ID NO: 2635315 - RNA, 18 nt, Human
cuggauaguccgucucug

SEQ ID NO: 2635316 - RNA, 19 nt, Human
cuggauaguccgucucugc

SEQ ID NO: 2635317 - RNA, 13 nt, Human
cuguuauaaucuu

SEQ ID NO: 2635318 - RNA, 19 nt, Human
cuguuauaaucuuucacag

SEQ ID NO: 2635319 - RNA, 17 nt, Human
cugucggagcccugucu

SEQ ID NO: 2635320 - RNA, 23 nt, Human
cugucggagcccugucuccucuc

SEQ ID NO: 2635321 - RNA, 21 nt, Human
cuuaaaaaugguuuaaauggu

SEQ ID NO: 2635322 - RNA, 21 nt, Human
gaaaacuuuaugcuaagugaa

SEQ ID NO: 2635323 - RNA, 17 nt, Human
gaaaagacuccaaagaa

SEQ ID NO: 2635324 - RNA, 16 nt, Human
gaaaagacuccaaaga

SEQ ID NO: 2635325 - RNA, 14 nt, Human
gaaaagacuccaaa

SEQ ID NO: 2635326 - RNA, 18 nt, Human
gaaagaaaaucaggcugg

SEQ ID NO: 2635327 - RNA, 12 nt, Human
gaaagggauuuu

SEQ ID NO: 2635328 - RNA, 20 nt, Human
gaaagggauuuucagcccuc

SEQ ID NO: 2635329 - RNA, 17 nt, Human
gaacccaaguccaagca

SEQ ID NO: 2635330 - RNA, 16 nt, Human
gaacccaaguccaagc

SEQ ID NO: 2635331 - RNA, 19 nt, Human
gaacccgggaggcagaggu

SEQ ID NO: 2635332 - RNA, 17 nt, Human
gaacccgggaggcagag

SEQ ID NO: 2635333 - RNA, 19 nt, Human
cuuggucugugagaugcua

SEQ ID NO: 2635334 - RNA, 16 nt, Human
cuuggucugugagaug

SEQ ID NO: 2635335 - RNA, 20 nt, Human
cuucucacauuuauauuuuu

SEQ ID NO: 2635336 - RNA, 13 nt, Human
cuucucacauuua

SEQ ID NO: 2635337 - RNA, 21 nt, Human
cuucuaaguaaaaccacagca

SEQ ID NO: 2635338 - RNA, 17 nt, Human
cuucuaaguaaaaccac

SEQ ID NO: 2635339 - RNA, 13 nt, Human
cuucuaaguaaaa

SEQ ID NO: 2635340 - RNA, 21 nt, Human
gaugcugucuucguacuggga

SEQ ID NO: 2635341 - RNA, 16 nt, Human
gcaauaaaauggguuu

SEQ ID NO: 2635342 - RNA, 18 nt, Human
gcaauagucaaauugugu

SEQ ID NO: 2635343 - RNA, 16 nt, Human
gcauuguaaaugugcu

SEQ ID NO: 2635344 - RNA, 15 nt, Human
gcagcuuauucacaa

SEQ ID NO: 2635345 - RNA, 22 nt, Human
gcaguugaaaagacuccaaaga

SEQ ID NO: 2635346 - RNA, 16 nt, Human
gacuauucaaacaguc

SEQ ID NO: 2635347 - RNA, 15 nt, Human
gacuauucaaacagu

SEQ ID NO: 2635348 - RNA, 22 nt, Human
gacuauucaaacagucucagga

SEQ ID NO: 2635349 - RNA, 21 nt, Human
gacagcccuucuuuccacaga

SEQ ID NO: 2635350 - RNA, 20 nt, Human
gacagaaagcagaacaguga

SEQ ID NO: 2635351 - RNA, 14 nt, Human
gacagaaagcagaa

SEQ ID NO: 2635352 - RNA, 20 nt, Human
gacaguauggcagcuuuccu

SEQ ID NO: 2635353 - RNA, 15 nt, Human
gagcgacagugagac

SEQ ID NO: 2635354 - RNA, 13 nt, Human
gagcgacagugag

SEQ ID NO: 2635355 - RNA, 15 nt, Human
ggccuccauccugag

SEQ ID NO: 2635356 - RNA, 14 nt, Human
ggccuccauccuga

SEQ ID NO: 2635357 - RNA, 21 nt, Human
ggcacaguuuucugagaaaga

SEQ ID NO: 2635358 - RNA, 14 nt, Human
ggcuccacuugguc

SEQ ID NO: 2635359 - RNA, 14 nt, Human
aaaaauaacaauga

SEQ ID NO: 2635360 - RNA, 20 nt, Human
gggaacccaaguccaagcau

SEQ ID NO: 2635361 - RNA, 22 nt, Human
gggacagucaccucauggaauu

SEQ ID NO: 2635362 - RNA, 20 nt, Human
gggacagucaccucauggaa

SEQ ID NO: 2635363 - RNA, 21 nt, Human
gggacagucaccucauggaau

SEQ ID NO: 2635364 - RNA, 17 nt, Human
aaaaaugguuuaaaugg

SEQ ID NO: 2635365 - RNA, 15 nt, Human
aaaacuucagacaua

SEQ ID NO: 2635366 - RNA, 15 nt, Human
aaauccauacauuug

SEQ ID NO: 2635367 - RNA, 18 nt, Human
aaauccauacauuugugu

SEQ ID NO: 2635368 - RNA, 17 nt, Human
aaauauuauguuaaaac

SEQ ID NO: 2635369 - RNA, 12 nt, Human
aaaucauuucug

SEQ ID NO: 2635370 - RNA, 23 nt, Human
aaaucauuucugcaucagcugcu

SEQ ID NO: 2635371 - RNA, 22 nt, Human
aaaucauuucugcaucagcugc

SEQ ID NO: 2635372 - RNA, 21 nt, Human
aaaucauuucugcaucagcug

SEQ ID NO: 2635373 - RNA, 19 nt, Human
aaaucauuucugcaucagc

SEQ ID NO: 2635374 - RNA, 23 nt, Human
guagacgugcacgcacacugucu

SEQ ID NO: 2635375 - RNA, 20 nt, Human
guagacgugcacgcacacug

SEQ ID NO: 2635376 - RNA, 15 nt, Human
guacuucaugcuguc

SEQ ID NO: 2635377 - RNA, 21 nt, Human
guacuucaaauccuugaagau

SEQ ID NO: 2635378 - RNA, 22 nt, Human
guacuucaaauccuugaagauu

SEQ ID NO: 2635379 - RNA, 23 nt, Human
aaaguucugcagauaaacaguag

SEQ ID NO: 2635380 - RNA, 20 nt, Human
aaagguauuuuaaucaccaa

SEQ ID NO: 2635381 - RNA, 18 nt, Human
aaaguauguuagugcaaa

SEQ ID NO: 2635382 - RNA, 19 nt, Human
aaauacacacucaaaucaa

SEQ ID NO: 2635383 - RNA, 22 nt, Human
aaauaauuuuuauauuugaaau

SEQ ID NO: 2635384 - RNA, 23 nt, Human
aaauaauuuuuauauuugaaaua

SEQ ID NO: 2635385 - RNA, 15 nt, Human
aaauacacacucaaa

SEQ ID NO: 2635386 - RNA, 23 nt, Human
guacacugccuucucaacuccaa

SEQ ID NO: 2635387 - RNA, 21 nt, Human
aaauaauuuuuauauuugaaa

SEQ ID NO: 2635388 - RNA, 20 nt, Human
guaauaggcguaacuaauuu

SEQ ID NO: 2635389 - RNA, 11 nt, Human
aaacacagcaa

SEQ ID NO: 2635390 - RNA, 14 nt, Human
aaacacagcaaggg

SEQ ID NO: 2635391 - RNA, 12 nt, Human
aaacacagcaag

SEQ ID NO: 2635392 - RNA, 19 nt, Human
ggggaauugaggacacuga

SEQ ID NO: 2635393 - RNA, 14 nt, Human
aaacaguagugaua

SEQ ID NO: 2635394 - RNA, 15 nt, Human
aaacagucucaggaa

SEQ ID NO: 2635395 - RNA, 12 nt, Human
aaaccacagcag

SEQ ID NO: 2635396 - RNA, 15 nt, Human
aaacucguuaauuug

SEQ ID NO: 2635397 - RNA, 21 nt, Human
aaagcacugacuucuaaguaa

SEQ ID NO: 2635398 - RNA, 17 nt, Human
aaagcacugacuucuaa

SEQ ID NO: 2635399 - RNA, 20 nt, Human
aaagggauggcaagaugugg

SEQ ID NO: 2635400 - RNA, 14 nt, Human
aaagguacuucaaa

SEQ ID NO: 2635401 - RNA, 23 nt, Human
aaacuucagcgguuuauauaagc

SEQ ID NO: 2635402 - RNA, 19 nt, Human
aaacuucagacauagaauu

SEQ ID NO: 2635403 - RNA, 13 nt, Human
aaagacagugaaa

SEQ ID NO: 2635404 - RNA, 14 nt, Human
aaagacuccaaaga

SEQ ID NO: 2635405 - RNA, 21 nt, Human
aaagacuccaaagaaauguaa

SEQ ID NO: 2635406 - RNA, 15 nt, Human
aaagacuccaaagaa

SEQ ID NO: 2635407 - RNA, 21 nt, Human
aaagacuauucaaacagucuc

SEQ ID NO: 2635408 - RNA, 17 nt, Human
aaagacuauucaaacag

SEQ ID NO: 2635409 - RNA, 19 nt, Human
aaagacuauucaaacaguc

SEQ ID NO: 2635410 - RNA, 18 nt, Human
aaagacuauucaaacagu

SEQ ID NO: 2635411 - RNA, 15 nt, Human
aaagaggaaugaagu

SEQ ID NO: 2635412 - RNA, 15 nt, Human
aaagaggcagcuuga

SEQ ID NO: 2635413 - RNA, 19 nt, Human
gcuccaccuugcagcucuc

SEQ ID NO: 2635414 - RNA, 15 nt, Human
gcuccacuuggucug

SEQ ID NO: 2635415 - RNA, 21 nt, Human
gcuccccucggagaagagcug

SEQ ID NO: 2635416 - RNA, 19 nt, Human
gcuccacuuggucugugag

SEQ ID NO: 2635417 - RNA, 18 nt, Human
gcuccacuuggucuguga

SEQ ID NO: 2635418 - RNA, 18 nt, Human
gcuagaacucccuuucaa

SEQ ID NO: 2635419 - RNA, 16 nt, Human
gcuagaacucccuuuc

SEQ ID NO: 2635420 - RNA, 15 nt, Human
gcuagaacucccuuu

SEQ ID NO: 2635421 - RNA, 14 nt, Human
gcuagaacucccuu

SEQ ID NO: 2635422 - RNA, 13 nt, Human
gcuagaacucccu

SEQ ID NO: 2635423 - RNA, 12 nt, Human
gcuagaacuccc

SEQ ID NO: 2635424 - RNA, 20 nt, Human
gccuucggccuccauccuga

SEQ ID NO: 2635425 - RNA, 23 nt, Human
gccuucggccuccauccugaggc

SEQ ID NO: 2635426 - RNA, 21 nt, Human
gccuucggccuccauccugag

SEQ ID NO: 2635427 - RNA, 12 nt, Human
gccuccauccug

SEQ ID NO: 2635428 - RNA, 15 nt, Human
gccucuuagaugcag

SEQ ID NO: 2635429 - RNA, 22 nt, Human
ggacucauuuuaaaaaauggaa

SEQ ID NO: 2635430 - RNA, 13 nt, Human
ggagaaacuggaa

SEQ ID NO: 2635431 - RNA, 21 nt, Human
cugacacaugcugaacaucac

SEQ ID NO: 2635432 - RNA, 17 nt, Human
cugaaagaggaaugaag

SEQ ID NO: 2635433 - RNA, 13 nt, Human
cugaaagaggaau

SEQ ID NO: 2635434 - RNA, 17 nt, Human
cucucuggccuucggcc

SEQ ID NO: 2635435 - RNA, 22 nt, Human
cucucuggccuucggccuccau

SEQ ID NO: 2635436 - RNA, 19 nt, Human
cucucuggccuucggccuc

SEQ ID NO: 2635437 - RNA, 14 nt, Human
cuaacuggacuggu

SEQ ID NO: 2635438 - RNA, 15 nt, Human
cgguuuauauaagcu

SEQ ID NO: 2635439 - RNA, 24 nt, Human
cggagaagagcuguucacagccag

SEQ ID NO: 2635440 - RNA, 23 nt, Human
cggagaagagcuguucacagcca

SEQ ID NO: 2635441 - RNA, 19 nt, Human
cucagaaaacaaggaugaa

SEQ ID NO: 2635442 - RNA, 23 nt, Human
cucagaaaacaaggaugaauuaa

SEQ ID NO: 2635443 - RNA, 23 nt, Human
cuaugucauuugcuggagcucug

SEQ ID NO: 2635444 - RNA, 13 nt, Human
cucaaaacugcac

SEQ ID NO: 2635445 - RNA, 17 nt, Human
ccugucucuacuaaaaa

SEQ ID NO: 2635446 - RNA, 21 nt, Human
ccucauuuuuauaaugucccu

SEQ ID NO: 2635447 - RNA, 16 nt, Human
ccucccuucucuucac

SEQ ID NO: 2635448 - RNA, 14 nt, Human
ccucggagaagagc

SEQ ID NO: 2635449 - RNA, 12 nt, Human
ccucggagaaga

SEQ ID NO: 2635450 - RNA, 13 nt, Human
cccaacuccagaa

SEQ ID NO: 2635451 - RNA, 14 nt, Human
ccaucccucccucc

SEQ ID NO: 2635452 - RNA, 15 nt, Human
ccaucccucccucca

SEQ ID NO: 2635453 - RNA, 13 nt, Human
ccaucccucccuc

SEQ ID NO: 2635454 - RNA, 13 nt, Human
ccccugcacucca

SEQ ID NO: 2635455 - RNA, 13 nt, Human
cccuccucugcuu

SEQ ID NO: 2635456 - RNA, 22 nt, Human
cccuccucugcuugccaucccu

SEQ ID NO: 2635457 - RNA, 24 nt, Human
cccagccagcaguucagagcugcc

SEQ ID NO: 2635458 - RNA, 20 nt, Human
caauaaaauccauacauuug

SEQ ID NO: 2635459 - RNA, 23 nt, Human
caauaaaauccauacauuugugu

SEQ ID NO: 2635460 - RNA, 15 nt, Human
caauaaaauggguuu

SEQ ID NO: 2635461 - RNA, 23 nt, Human
cacuccagccugagcgacaguga

SEQ ID NO: 2635462 - RNA, 13 nt, Human
cacuccagccuga

SEQ ID NO: 2635463 - RNA, 12 nt, Human
cacuccagccug

SEQ ID NO: 2635464 - RNA, 15 nt, Human
cacuuaaaaaugguu

SEQ ID NO: 2635465 - RNA, 17 nt, Human
cacuuguguuuugcaag

SEQ ID NO: 2635466 - RNA, 18 nt, Human
cagaacagugauuaccag

SEQ ID NO: 2635467 - RNA, 11 nt, Human
cagaacaguga

SEQ ID NO: 2635468 - RNA, 17 nt, Human
cagaacagugauuacca

SEQ ID NO: 2635469 - RNA, 12 nt, Human
cagaacagugau

SEQ ID NO: 2635470 - RNA, 17 nt, Human
caaacauauauaacaau

SEQ ID NO: 2635471 - RNA, 17 nt, Human
caaacagucucaggaaa

SEQ ID NO: 2635472 - RNA, 16 nt, Human
caaacagucucaggaa

SEQ ID NO: 2635473 - RNA, 15 nt, Human
caaacagucucagga

SEQ ID NO: 2635474 - RNA, 21 nt, Human
caaaaggauaaugaauacuuu

SEQ ID NO: 2635475 - RNA, 15 nt, Human
auuuuuauauuugaa

SEQ ID NO: 2635476 - RNA, 21 nt, Human
auuuuauaucaauuuaaaaaa

SEQ ID NO: 2635477 - RNA, 19 nt, Human
caagacccaaaaggcagaa

SEQ ID NO: 2635478 - RNA, 21 nt, Human
caaaucuuaacuugaaggagu

SEQ ID NO: 2635479 - RNA, 22 nt, Human
auuaugaauuacauuuguauaa

SEQ ID NO: 2635480 - RNA, 19 nt, Human
auuaugaauuacauuugua

SEQ ID NO: 2635481 - RNA, 20 nt, Human
auuaugaauuacauuuguau

SEQ ID NO: 2635482 - RNA, 20 nt, Human
auuucauaccuaucaucuua

SEQ ID NO: 2635483 - RNA, 14 nt, Human
auuucuaugaaaua

SEQ ID NO: 2635484 - RNA, 16 nt, Human
auuuaauaaaugugcc

SEQ ID NO: 2635485 - RNA, 15 nt, Human
auuguuuaaaaucau

SEQ ID NO: 2635486 - RNA, 18 nt, Human
cagggaggacgcucucug

SEQ ID NO: 2635487 - RNA, 17 nt, Human
cagggaggacgcucucu

SEQ ID NO: 2635488 - RNA, 15 nt, Human
cagucucaggaaauc

SEQ ID NO: 2635489 - RNA, 15 nt, Human
cagucaccucaugga

SEQ ID NO: 2635490 - RNA, 18 nt, Human
cagccugagcgacaguga

SEQ ID NO: 2635491 - RNA, 22 nt, Human
cagccugagcgacagugagacu

SEQ ID NO: 2635492 - RNA, 19 nt, Human
cagccugagcgacagugag

SEQ ID NO: 2635493 - RNA, 15 nt, Human
cagcccuucuuucca

SEQ ID NO: 2635494 - RNA, 19 nt, Human
cagcccuucuuuccacaga

SEQ ID NO: 2635495 - RNA, 20 nt, Human
cagcccuucuuuccacagaa

SEQ ID NO: 2635496 - RNA, 21 nt, Human
cagcugccuccccuccucugc

SEQ ID NO: 2635497 - RNA, 22 nt, Human
cagcugccuccccuccucugcu

SEQ ID NO: 2635498 - RNA, 23 nt, Human
cagcugccuccccuccucugcuu

SEQ ID NO: 2635499 - RNA, 24 nt, Human
cagcugccuccccuccucugcuug

SEQ ID NO: 2635500 - RNA, 16 nt, Human
cagcuccccucggaga

SEQ ID NO: 2635501 - RNA, 18 nt, Human
cagcuccccucggagaag

SEQ ID NO: 2635502 - RNA, 17 nt, Human
cagcuccccucggagaa

SEQ ID NO: 2635503 - RNA, 20 nt, Human
cagcuccccucggagaagag

SEQ ID NO: 2635504 - RNA, 23 nt, Human
caggaaaucaaauaugcaaagca

SEQ ID NO: 2635505 - RNA, 17 nt, Human
cagagcugcccucuccu

SEQ ID NO: 2635506 - RNA, 13 nt, Human
cagagcugcccuc

SEQ ID NO: 2635507 - RNA, 15 nt, Human
cagagcugcccucuc

SEQ ID NO: 2635508 - RNA, 22 nt, Human
cagcacagccucuuagaugcag

SEQ ID NO: 2635509 - RNA, 22 nt, Human
cagcaguugaaaagacuccaaa

SEQ ID NO: 2635510 - RNA, 17 nt, Human
cagcaguugaaaagacu

SEQ ID NO: 2635511 - RNA, 21 nt, Human
cagcaguugaaaagacuccaa

SEQ ID NO: 2635512 - RNA, 20 nt, Human
cagcaguugaaaagacucca

SEQ ID NO: 2635513 - RNA, 14 nt, Human
cagccagcaguuca

SEQ ID NO: 2635514 - RNA, 22 nt, Human
cagccagcaguucagagcugcc

SEQ ID NO: 2635515 - RNA, 15 nt, Human
cagccagcaguucag

SEQ ID NO: 2635516 - RNA, 21 nt, Human
cagccagcaguucagagcugc

SEQ ID NO: 2635517 - RNA, 16 nt, Human
ccacagaagcuccagg

SEQ ID NO: 2635518 - RNA, 18 nt, Human
ccacagaagcuccaggua

SEQ ID NO: 2635519 - RNA, 18 nt, Human
ccaccagucugacuguuu

SEQ ID NO: 2635520 - RNA, 13 nt, Human
cauuaucucaaaa

SEQ ID NO: 2635521 - RNA, 12 nt, Human
cauuaucucaaa

SEQ ID NO: 2635522 - RNA, 16 nt, Human
auuuuaaaagaaugau

SEQ ID NO: 2635523 - RNA, 23 nt, Human
auuuuaaaagaaugauuaugaau

SEQ ID NO: 2635524 - RNA, 19 nt, Human
auuuguaguguuggagaag

SEQ ID NO: 2635525 - RNA, 22 nt, Human
auuuguaguguuggagaagaac

SEQ ID NO: 2635526 - RNA, 14 nt, Human
auuuguauaaaaua

SEQ ID NO: 2635527 - RNA, 14 nt, Human
auuuauuuuaauaa

SEQ ID NO: 2635528 - RNA, 13 nt, Human
auugacuuuuuau

SEQ ID NO: 2635529 - RNA, 19 nt, Human
auuggacaguaaaauccac

SEQ ID NO: 2635530 - RNA, 19 nt, Human
auuggagcucgugggacag

SEQ ID NO: 2635531 - RNA, 13 nt, Human
auugucuagugaa

SEQ ID NO: 2635532 - RNA, 12 nt, Human
auuuuaauaaug

SEQ ID NO: 2635533 - RNA, 14 nt, Human
auuuuccugaaaac

SEQ ID NO: 2635534 - RNA, 15 nt, Human
auuuucuauaauuua

SEQ ID NO: 2635535 - RNA, 14 nt, Human
auuuucuauaauuu

SEQ ID NO: 2635536 - RNA, 15 nt, Human
auuuuucuuauuuca

SEQ ID NO: 2635537 - RNA, 20 nt, Human
auuuuucuuauuucauuucu

SEQ ID NO: 2635538 - RNA, 19 nt, Human
auuuuucuuauuucauuuc

SEQ ID NO: 2635539 - RNA, 18 nt, Human
auuuuuuguuaaaugauu

SEQ ID NO: 2635540 - RNA, 20 nt, Human
auuuuuucucuaggaaauau

SEQ ID NO: 2635541 - RNA, 23 nt, Human
auuuuuucucuaggaaauauuua

SEQ ID NO: 2635542 - RNA, 21 nt, Human
auuuuuguuuucauuaucuca

SEQ ID NO: 2635543 - RNA, 22 nt, Human
auuuuugugauuuugugauuga

SEQ ID NO: 2635544 - RNA, 19 nt, Human
auugacacuuaaaaauggu

SEQ ID NO: 2635545 - RNA, 17 nt, Human
auugacacuuaaaaaug

SEQ ID NO: 2635546 - RNA, 15 nt, Human
auugacacuuaaaaa

SEQ ID NO: 2635547 - RNA, 21 nt, Human
auuauguuaaaacugggacag

SEQ ID NO: 2635548 - RNA, 15 nt, Human
auuauauuuauuacu

SEQ ID NO: 2635549 - RNA, 18 nt, Human
auuauauuuauuacugua

SEQ ID NO: 2635550 - RNA, 20 nt, Human
auucaaacagucucaggaaa

SEQ ID NO: 2635551 - RNA, 19 nt, Human
auucaaacagucucaggaa

SEQ ID NO: 2635552 - RNA, 18 nt, Human
auucaaacagucucagga

SEQ ID NO: 2635553 - RNA, 16 nt, Human
auucaaacagucucag

SEQ ID NO: 2635554 - RNA, 15 nt, Human
auuauauuuacaaau

SEQ ID NO: 2635555 - RNA, 14 nt, Human
auggcacuaguauu

SEQ ID NO: 2635556 - RNA, 16 nt, Human
auggcacuaguauuuc

SEQ ID NO: 2635557 - RNA, 19 nt, Human
auggcuaagcaaaauguga

SEQ ID NO: 2635558 - RNA, 22 nt, Human
augcuagaacucccuuucaaca

SEQ ID NO: 2635559 - RNA, 21 nt, Human
augcuagaacucccuuucaac

SEQ ID NO: 2635560 - RNA, 20 nt, Human
augcuagaacucccuuucaa

SEQ ID NO: 2635561 - RNA, 16 nt, Human
uuucaaacauauauaa

SEQ ID NO: 2635562 - RNA, 17 nt, Human
uuucaaacauauauaac

SEQ ID NO: 2635563 - RNA, 18 nt, Human
augauuaaguaaugauaa

SEQ ID NO: 2635564 - RNA, 14 nt, Human
augauuaaguaaug

SEQ ID NO: 2635565 - RNA, 15 nt, Human
augauaacuggaaac

SEQ ID NO: 2635566 - RNA, 18 nt, Human
uuuaaauauaugcuaagu

SEQ ID NO: 2635567 - RNA, 21 nt, Human
augccauuuaaagcuuauuaa

SEQ ID NO: 2635568 - RNA, 17 nt, Human
augccauuuaaagcuua

SEQ ID NO: 2635569 - RNA, 13 nt, Human
augcaguucugaa

SEQ ID NO: 2635570 - RNA, 15 nt, Human
uuugaaauauugacu

SEQ ID NO: 2635571 - RNA, 18 nt, Human
uuucucccagucauuuaa

SEQ ID NO: 2635572 - RNA, 17 nt, Human
uuucucccagucauuua

SEQ ID NO: 2635573 - RNA, 21 nt, Human
augguucccuugaugaagaag

SEQ ID NO: 2635574 - RNA, 14 nt, Human
uuugcaagccagau

SEQ ID NO: 2635575 - RNA, 16 nt, Human
auguacuucaugcugu

SEQ ID NO: 2635576 - RNA, 19 nt, Human
auguagaggagaaacugga

SEQ ID NO: 2635577 - RNA, 17 nt, Human
auguagaggagaaacug

SEQ ID NO: 2635578 - RNA, 13 nt, Human
auguagaggagaa

SEQ ID NO: 2635579 - RNA, 12 nt, Human
auguagaggaga

SEQ ID NO: 2635580 - RNA, 17 nt, Human
uuugugaagcaaaauuu

SEQ ID NO: 2635581 - RNA, 19 nt, Human
uuuguaguguuggagaaga

SEQ ID NO: 2635582 - RNA, 21 nt, Human
uuuguaguguuggagaagaac

SEQ ID NO: 2635583 - RNA, 17 nt, Human
auguccacugguucuuc

SEQ ID NO: 2635584 - RNA, 16 nt, Human
auguccacugguucuu

SEQ ID NO: 2635585 - RNA, 12 nt, Human
uucucuaggaaa

SEQ ID NO: 2635586 - RNA, 19 nt, Human
uugaacccgggaggcagag

SEQ ID NO: 2635587 - RNA, 17 nt, Human
uugaaauuguauuacaa

SEQ ID NO: 2635588 - RNA, 14 nt, Human
uucggccuccaucc

SEQ ID NO: 2635589 - RNA, 15 nt, Human
uucggccuccauccu

SEQ ID NO: 2635590 - RNA, 13 nt, Human
uucuaagaaguga

SEQ ID NO: 2635591 - RNA, 23 nt, Human
uucuaagaagugaaaaucuacac

SEQ ID NO: 2635592 - RNA, 16 nt, Human
uucuaaguaaaaccac

SEQ ID NO: 2635593 - RNA, 15 nt, Human
uucuaaguaaaacca

SEQ ID NO: 2635594 - RNA, 19 nt, Human
uucuagcaugaagacagag

SEQ ID NO: 2635595 - RNA, 22 nt, Human
aucacuugucaauaaaauccau

SEQ ID NO: 2635596 - RNA, 17 nt, Human
aucaggguuaguauugu

SEQ ID NO: 2635597 - RNA, 20 nt, Human
auauuuuuuguuaaaugauu

SEQ ID NO: 2635598 - RNA, 18 nt, Human
auauuuuuuguuaaauga

SEQ ID NO: 2635599 - RNA, 14 nt, Human
aucaacagauaaau

SEQ ID NO: 2635600 - RNA, 19 nt, Human
uuccguagguuauuuucag

SEQ ID NO: 2635601 - RNA, 13 nt, Human
uugcaucaauuuu

SEQ ID NO: 2635602 - RNA, 22 nt, Human
uugcaagccagauuuuccugaa

SEQ ID NO: 2635603 - RNA, 14 nt, Human
aucucauuuccaag

SEQ ID NO: 2635604 - RNA, 18 nt, Human
aucuacacuccagugaga

SEQ ID NO: 2635605 - RNA, 19 nt, Human
aucuacacuccagugagac

SEQ ID NO: 2635606 - RNA, 17 nt, Human
uugaagggaaauuucag

SEQ ID NO: 2635607 - RNA, 14 nt, Human
aucuuauaauuuaa

SEQ ID NO: 2635608 - RNA, 16 nt, Human
augaauuacauuugua

SEQ ID NO: 2635609 - RNA, 15 nt, Human
augaauuaaguuuuu

SEQ ID NO: 2635610 - RNA, 15 nt, Human
augaauuacauuugu

SEQ ID NO: 2635611 - RNA, 23 nt, Human
augaauggcuaagcaaaauguga

SEQ ID NO: 2635612 - RNA, 14 nt, Human
auaagccagacauc

SEQ ID NO: 2635613 - RNA, 14 nt, Human
auaaucuuucacag

SEQ ID NO: 2635614 - RNA, 15 nt, Human
uuagggagagaagau

SEQ ID NO: 2635615 - RNA, 14 nt, Human
uuaggguuaugauu

SEQ ID NO: 2635616 - RNA, 16 nt, Human
uuaggguuaugauuaa

SEQ ID NO: 2635617 - RNA, 14 nt, Human
uuaaaaucauuucu

SEQ ID NO: 2635618 - RNA, 22 nt, Human
uuaaaaucauuucugcaucagc

SEQ ID NO: 2635619 - RNA, 16 nt, Human
uuaaaaaauggaacau

SEQ ID NO: 2635620 - RNA, 20 nt, Human
aguuuaaauuguaauaggcg

SEQ ID NO: 2635621 - RNA, 17 nt, Human
aguuuaaauuguaauag

SEQ ID NO: 2635622 - RNA, 16 nt, Human
aguuuagcuggaaaag

SEQ ID NO: 2635623 - RNA, 19 nt, Human
uuaaaaaagaaacauuugg

SEQ ID NO: 2635624 - RNA, 15 nt, Human
aguuuagcuggaaaa

SEQ ID NO: 2635625 - RNA, 16 nt, Human
aguuuuauaugcuucu

SEQ ID NO: 2635626 - RNA, 19 nt, Human
uuaugauuaaguaaugaua

SEQ ID NO: 2635627 - RNA, 21 nt, Human
uuaugaauuacauuuguauaa

SEQ ID NO: 2635628 - RNA, 14 nt, Human
uuaugaauuacauu

SEQ ID NO: 2635629 - RNA, 16 nt, Human
uuaugaauuacauuug

SEQ ID NO: 2635630 - RNA, 17 nt, Human
uuaugaauuacauuugu

SEQ ID NO: 2635631 - RNA, 19 nt, Human
uuauauuugaaauauugac

SEQ ID NO: 2635632 - RNA, 17 nt, Human
auacuauggaauuucuc

SEQ ID NO: 2635633 - RNA, 15 nt, Human
uuauuauauuuacaa

SEQ ID NO: 2635634 - RNA, 19 nt, Human
uuauguuaaaacugggaca

SEQ ID NO: 2635635 - RNA, 14 nt, Human
uuauuauauuuaca

SEQ ID NO: 2635636 - RNA, 16 nt, Human
auacucauuaggaugg

SEQ ID NO: 2635637 - RNA, 18 nt, Human
auagauaggucagugcaa

SEQ ID NO: 2635638 - RNA, 17 nt, Human
auagaauuaacacauga

SEQ ID NO: 2635639 - RNA, 13 nt, Human
auagaaguaaaaa

SEQ ID NO: 2635640 - RNA, 14 nt, Human
agugcaaauuguca

SEQ ID NO: 2635641 - RNA, 23 nt, Human
agugaacaaauuuacagagacag

SEQ ID NO: 2635642 - RNA, 22 nt, Human
agugaacaaauuuacagagaca

SEQ ID NO: 2635643 - RNA, 16 nt, Human
agucuuucacauuuaa

SEQ ID NO: 2635644 - RNA, 18 nt, Human
agucuuucacauuuaaau

SEQ ID NO: 2635645 - RNA, 21 nt, Human
agugaacaaauuuacagagac

SEQ ID NO: 2635646 - RNA, 22 nt, Human
uguugcccacagcuguaugauu

SEQ ID NO: 2635647 - RNA, 15 nt, Human
uguucuaagaaguga

SEQ ID NO: 2635648 - RNA, 14 nt, Human
agucaggaaagaga

SEQ ID NO: 2635649 - RNA, 13 nt, Human
agucucaggaaau

SEQ ID NO: 2635650 - RNA, 16 nt, Human
agucucaggaaaucaa

SEQ ID NO: 2635651 - RNA, 20 nt, Human
uguccagccccguagacgug

SEQ ID NO: 2635652 - RNA, 13 nt, Human
aguaaugauaacu

SEQ ID NO: 2635653 - RNA, 12 nt, Human
aguaauuggaaa

SEQ ID NO: 2635654 - RNA, 13 nt, Human
aguaauuggaaag

SEQ ID NO: 2635655 - RNA, 20 nt, Human
aguaaaaccacagcaguuga

SEQ ID NO: 2635656 - RNA, 19 nt, Human
aguaaaaccacagcaguug

SEQ ID NO: 2635657 - RNA, 17 nt, Human
aguaaaaccacagcagu

SEQ ID NO: 2635658 - RNA, 16 nt, Human
aguaaaaccacagcag

SEQ ID NO: 2635659 - RNA, 16 nt, Human
uguaguguuggagaag

SEQ ID NO: 2635660 - RNA, 17 nt, Human
uguaguguuggagaaga

SEQ ID NO: 2635661 - RNA, 18 nt, Human
uguaguguuggagaagaa

SEQ ID NO: 2635662 - RNA, 14 nt, Human
agguugcagugagc

SEQ ID NO: 2635663 - RNA, 16 nt, Human
aggugcuacaaaaaca

SEQ ID NO: 2635664 - RNA, 18 nt, Human
uguaagggaaacugccag

SEQ ID NO: 2635665 - RNA, 13 nt, Human
uguaagggaaacu

SEQ ID NO: 2635666 - RNA, 19 nt, Human
uguaagggaaacugccagc

SEQ ID NO: 2635667 - RNA, 19 nt, Human
ugggaggcugagaugggag

SEQ ID NO: 2635668 - RNA, 14 nt, Human
agggagagaagaua

SEQ ID NO: 2635669 - RNA, 13 nt, Human
agggagagaagau

SEQ ID NO: 2635670 - RNA, 23 nt, Human
agggacuucugucuucacaacag

SEQ ID NO: 2635671 - RNA, 22 nt, Human
agggcuguuauaaucuuucaca

SEQ ID NO: 2635672 - RNA, 20 nt, Human
ugggaacccaaguccaagca

SEQ ID NO: 2635673 - RNA, 15 nt, Human
agggaaacugccagc

SEQ ID NO: 2635674 - RNA, 14 nt, Human
agggaaacugccag

SEQ ID NO: 2635675 - RNA, 23 nt, Human
agggaaacugccagcaacgcagg

SEQ ID NO: 2635676 - RNA, 21 nt, Human
agggaaacugccagcaacgca

SEQ ID NO: 2635677 - RNA, 19 nt, Human
agggaaacugccagcaacg

SEQ ID NO: 2635678 - RNA, 16 nt, Human
agggaaacugccagca

SEQ ID NO: 2635679 - RNA, 16 nt, Human
ugggaaagcauuguaa

SEQ ID NO: 2635680 - RNA, 14 nt, Human
ugggaaagcauugu

SEQ ID NO: 2635681 - RNA, 21 nt, Human
ugggaaagcauuguaaaugug

SEQ ID NO: 2635682 - RNA, 18 nt, Human
ugggaaagcauuguaaau

SEQ ID NO: 2635683 - RNA, 17 nt, Human
ugggaaagcauuguaaa

SEQ ID NO: 2635684 - RNA, 18 nt, Human
ugggaaacaaaaggauaa

SEQ ID NO: 2635685 - RNA, 23 nt, Human
uggcuauaggugcuacaaaaaca

SEQ ID NO: 2635686 - RNA, 19 nt, Human
uggcuauaggugcuacaaa

SEQ ID NO: 2635687 - RNA, 15 nt, Human
uggcuauaggugcua

SEQ ID NO: 2635688 - RNA, 18 nt, Human
uggcuaagcaaaauguga

SEQ ID NO: 2635689 - RNA, 22 nt, Human
aggcuccacuuggucugugaga

SEQ ID NO: 2635690 - RNA, 21 nt, Human
aggcuccacuuggucugugag

SEQ ID NO: 2635691 - RNA, 17 nt, Human
aggcuccacuuggucug

SEQ ID NO: 2635692 - RNA, 11 nt, Human
aggcuccacuu

SEQ ID NO: 2635693 - RNA, 20 nt, Human
aggcagcucuaaaugucaau

SEQ ID NO: 2635694 - RNA, 16 nt, Human
uggagaagaacugaaa

SEQ ID NO: 2635695 - RNA, 16 nt, Human
ugcuaguaauuggaaa

SEQ ID NO: 2635696 - RNA, 14 nt, Human
ugcuaguaauugga

SEQ ID NO: 2635697 - RNA, 13 nt, Human
aggaaagagaacu

SEQ ID NO: 2635698 - RNA, 19 nt, Human
aggaaagagaacuuccaga

SEQ ID NO: 2635699 - RNA, 21 nt, Human
agcuuauugucuagugaaacu

SEQ ID NO: 2635700 - RNA, 15 nt, Human
agcuuauuaaaacuc

SEQ ID NO: 2635701 - RNA, 20 nt, Human
agcuuauuaaaacucauuuu

SEQ ID NO: 2635702 - RNA, 14 nt, Human
aggaaauauuuauu

SEQ ID NO: 2635703 - RNA, 18 nt, Human
aggaaauauuuauuuuaa

SEQ ID NO: 2635704 - RNA, 19 nt, Human
aggaaaucaaauaugcaaa

SEQ ID NO: 2635705 - RNA, 19 nt, Human
aggaauugacccacaagaa

SEQ ID NO: 2635706 - RNA, 13 nt, Human
agcuggaaaagua

SEQ ID NO: 2635707 - RNA, 18 nt, Human
agcugccuccccuccucu

SEQ ID NO: 2635708 - RNA, 19 nt, Human
agcugccuccccuccucug

SEQ ID NO: 2635709 - RNA, 20 nt, Human
agcugccuccccuccucugc

SEQ ID NO: 2635710 - RNA, 23 nt, Human
agcugccuccccuccucugcuug

SEQ ID NO: 2635711 - RNA, 21 nt, Human
agcugccuccccuccucugcu

SEQ ID NO: 2635712 - RNA, 22 nt, Human
agcugccuccccuccucugcuu

SEQ ID NO: 2635713 - RNA, 19 nt, Human
agcuauggugucauaggcu

SEQ ID NO: 2635714 - RNA, 18 nt, Human
agcccuucuuuccacaga

SEQ ID NO: 2635715 - RNA, 19 nt, Human
agcccuucuuuccacagaa

SEQ ID NO: 2635716 - RNA, 17 nt, Human
agcccuucuuuccacag

SEQ ID NO: 2635717 - RNA, 14 nt, Human
ugcagugagccgag

SEQ ID NO: 2635718 - RNA, 18 nt, Human
agccugagcgacagugag

SEQ ID NO: 2635719 - RNA, 19 nt, Human
agccugagcgacagugaga

SEQ ID NO: 2635720 - RNA, 22 nt, Human
acuuuuuauggcacuaguauuu

SEQ ID NO: 2635721 - RNA, 15 nt, Human
ucucccagucauuua

SEQ ID NO: 2635722 - RNA, 15 nt, Human
ucuccucucucugua

SEQ ID NO: 2635723 - RNA, 13 nt, Human
ucucuucuuuaaa

SEQ ID NO: 2635724 - RNA, 12 nt, Human
ucucuucuuuaa

SEQ ID NO: 2635725 - RNA, 13 nt, Human
ucucuggccuucg

SEQ ID NO: 2635726 - RNA, 17 nt, Human
ucucuggccuucggccu

SEQ ID NO: 2635727 - RNA, 16 nt, Human
ucucuggccuucggcc

SEQ ID NO: 2635728 - RNA, 19 nt, Human
agaaaacaaggaugaauua

SEQ ID NO: 2635729 - RNA, 14 nt, Human
agaaagaaaaucag

SEQ ID NO: 2635730 - RNA, 15 nt, Human
agaaacuggaacucu

SEQ ID NO: 2635731 - RNA, 13 nt, Human
agaaacuggaacu

SEQ ID NO: 2635732 - RNA, 21 nt, Human
agaagaacugaaaucauacuu

SEQ ID NO: 2635733 - RNA, 11 nt, Human
ucugcuugcca

SEQ ID NO: 2635734 - RNA, 12 nt, Human
ucugcuugccau

SEQ ID NO: 2635735 - RNA, 14 nt, Human
ucugcuugccaucc

SEQ ID NO: 2635736 - RNA, 14 nt, Human
agaagcuccaggua

SEQ ID NO: 2635737 - RNA, 23 nt, Human
agaaagacuauucaaacagucuc

SEQ ID NO: 2635738 - RNA, 20 nt, Human
agaaagacuauucaaacagu

SEQ ID NO: 2635739 - RNA, 18 nt, Human
agaaagacuauucaaaca

SEQ ID NO: 2635740 - RNA, 19 nt, Human
agaaagacuauucaaacag

SEQ ID NO: 2635741 - RNA, 21 nt, Human
ucugacuguuuccaucaaggg

SEQ ID NO: 2635742 - RNA, 20 nt, Human
ucugagaaagacuauucaaa

SEQ ID NO: 2635743 - RNA, 19 nt, Human
ucugagaaagacuauucaa

SEQ ID NO: 2635744 - RNA, 15 nt, Human
ucugagaaagacuau

SEQ ID NO: 2635745 - RNA, 14 nt, Human
ucugagaaagacua

SEQ ID NO: 2635746 - RNA, 23 nt, Human
ucugagaaagacuauucaaacag

SEQ ID NO: 2635747 - RNA, 22 nt, Human
ucugagaaagacuauucaaaca

SEQ ID NO: 2635748 - RNA, 21 nt, Human
ucugagaaagacuauucaaac

SEQ ID NO: 2635749 - RNA, 14 nt, Human
agaacucccuuuca

SEQ ID NO: 2635750 - RNA, 18 nt, Human
ucuguuuuauaauuuugu

SEQ ID NO: 2635751 - RNA, 14 nt, Human
ucuuaauuaaaaga

SEQ ID NO: 2635752 - RNA, 21 nt, Human
ucuuaauuaaaagaauauuuu

SEQ ID NO: 2635753 - RNA, 18 nt, Human
ucuuaauuaaaagaauau

SEQ ID NO: 2635754 - RNA, 18 nt, Human
agacuggcacaguuuucu

SEQ ID NO: 2635755 - RNA, 21 nt, Human
agacuggauaguccgucucug

SEQ ID NO: 2635756 - RNA, 15 nt, Human
agacuggcacaguuu

SEQ ID NO: 2635757 - RNA, 14 nt, Human
agacuggcacaguu

SEQ ID NO: 2635758 - RNA, 17 nt, Human
agagacacacugaagaa

SEQ ID NO: 2635759 - RNA, 15 nt, Human
agagaaugagagaca

SEQ ID NO: 2635760 - RNA, 18 nt, Human
agagacacacugaagaag

SEQ ID NO: 2635761 - RNA, 20 nt, Human
agagacacacugaagaagca

SEQ ID NO: 2635762 - RNA, 21 nt, Human
ucuuuaaagggauggcaagau

SEQ ID NO: 2635763 - RNA, 17 nt, Human
ucuuuaaaauacacacu

SEQ ID NO: 2635764 - RNA, 19 nt, Human
agacuccaaagaaauguaa

SEQ ID NO: 2635765 - RNA, 16 nt, Human
agacuccaaagaaaug

SEQ ID NO: 2635766 - RNA, 21 nt, Human
agacuauucaaacagucucag

SEQ ID NO: 2635767 - RNA, 20 nt, Human
agacuauucaaacagucuca

SEQ ID NO: 2635768 - RNA, 18 nt, Human
agacuauucaaacagucu

SEQ ID NO: 2635769 - RNA, 12 nt, Human
agacuccaaaga

SEQ ID NO: 2635770 - RNA, 14 nt, Human
agacuccaaagaaa

SEQ ID NO: 2635771 - RNA, 13 nt, Human
agacuccaaagaa

SEQ ID NO: 2635772 - RNA, 20 nt, Human
ugagcgacagugagacucug

SEQ ID NO: 2635773 - RNA, 16 nt, Human
ugagcgacagugagac

SEQ ID NO: 2635774 - RNA, 14 nt, Human
ugagcgacagugag

SEQ ID NO: 2635775 - RNA, 13 nt, Human
ugagcgacaguga

SEQ ID NO: 2635776 - RNA, 14 nt, Human
agcagaacagugau

SEQ ID NO: 2635777 - RNA, 14 nt, Human
agcaacgcaggccc

SEQ ID NO: 2635778 - RNA, 16 nt, Human
agcaccaaucaugaau

SEQ ID NO: 2635779 - RNA, 22 nt, Human
agcacagccucuuagaugcagu

SEQ ID NO: 2635780 - RNA, 16 nt, Human
ugagcuacaaaugcau

SEQ ID NO: 2635781 - RNA, 14 nt, Human
ugagcuacaaaugc

SEQ ID NO: 2635782 - RNA, 13 nt, Human
ugagcuacaaaug

SEQ ID NO: 2635783 - RNA, 15 nt, Human
ugaggacacugauau

SEQ ID NO: 2635784 - RNA, 22 nt, Human
ugagguacugagagugaacaaa

SEQ ID NO: 2635785 - RNA, 17 nt, Human
ugagguacugagaguga

SEQ ID NO: 2635786 - RNA, 18 nt, Human
ugaagauguagaggagaa

SEQ ID NO: 2635787 - RNA, 17 nt, Human
ugaagauguagaggaga

SEQ ID NO: 2635788 - RNA, 14 nt, Human
ugaagaagauggua

SEQ ID NO: 2635789 - RNA, 20 nt, Human
ugaagaagcaccaaucauga

SEQ ID NO: 2635790 - RNA, 22 nt, Human
agagugaacaaauuuacagaga

SEQ ID NO: 2635791 - RNA, 14 nt, Human
agagugaacaaauu

SEQ ID NO: 2635792 - RNA, 19 nt, Human
agaugaugaugaucuuuaa

SEQ ID NO: 2635793 - RNA, 22 nt, Human
agaugcuagaacucccuuucaa

SEQ ID NO: 2635794 - RNA, 23 nt, Human
agaugcuagaacucccuuucaac

SEQ ID NO: 2635795 - RNA, 16 nt, Human
agauuuaccacuugug

SEQ ID NO: 2635796 - RNA, 16 nt, Human
agauugugccccugca

SEQ ID NO: 2635797 - RNA, 15 nt, Human
ugacuguuuccauca

SEQ ID NO: 2635798 - RNA, 18 nt, Human
ucagaugcacaugagcug

SEQ ID NO: 2635799 - RNA, 21 nt, Human
acccaaauguucaucaaugaa

SEQ ID NO: 2635800 - RNA, 18 nt, Human
acccaaaaggcagaagca

SEQ ID NO: 2635801 - RNA, 15 nt, Human
acccaaaaggcagaa

SEQ ID NO: 2635802 - RNA, 13 nt, Human
acccaaaaggcag

SEQ ID NO: 2635803 - RNA, 12 nt, Human
uauuucauuucu

SEQ ID NO: 2635804 - RNA, 11 nt, Human
accacagcagu

SEQ ID NO: 2635805 - RNA, 13 nt, Human
accacugcagaag

SEQ ID NO: 2635806 - RNA, 19 nt, Human
accacugcagaagacagua

SEQ ID NO: 2635807 - RNA, 14 nt, Human
accacugcagaaga

SEQ ID NO: 2635808 - RNA, 19 nt, Human
accacuuguguuuugcaag

SEQ ID NO: 2635809 - RNA, 23 nt, Human
accacuuguguuuugcaagccag

SEQ ID NO: 2635810 - RNA, 22 nt, Human
ucaugaauuaguuuuauaugcu

SEQ ID NO: 2635811 - RNA, 21 nt, Human
uccagccugagcgacagugag

SEQ ID NO: 2635812 - RNA, 20 nt, Human
uccagccugagcgacaguga

SEQ ID NO: 2635813 - RNA, 21 nt, Human
uccaacuaucucauuuccaag

SEQ ID NO: 2635814 - RNA, 22 nt, Human
acugaggggaggggagcauggg

SEQ ID NO: 2635815 - RNA, 17 nt, Human
acugaggggaggggagc

SEQ ID NO: 2635816 - RNA, 18 nt, Human
uccugggcagcugccucc

SEQ ID NO: 2635817 - RNA, 19 nt, Human
uccugggcagcugccuccc

SEQ ID NO: 2635818 - RNA, 22 nt, Human
uccugggcagcugccuccccuc

SEQ ID NO: 2635819 - RNA, 23 nt, Human
uccugggcagcugccuccccucc

SEQ ID NO: 2635820 - RNA, 15 nt, Human
uccugggcagcugcc

SEQ ID NO: 2635821 - RNA, 16 nt, Human
uccugggcagcugccu

SEQ ID NO: 2635822 - RNA, 17 nt, Human
uccugggcagcugccuc

SEQ ID NO: 2635823 - RNA, 22 nt, Human
acuggcacaguuuucugagaaa

SEQ ID NO: 2635824 - RNA, 21 nt, Human
acuggcacaguuuucugagaa

SEQ ID NO: 2635825 - RNA, 13 nt, Human
uccuucagccuga

SEQ ID NO: 2635826 - RNA, 22 nt, Human
acugccuucucaacuccaaacu

SEQ ID NO: 2635827 - RNA, 13 nt, Human
acuaaaaauacaa

SEQ ID NO: 2635828 - RNA, 12 nt, Human
uccccuccucug

SEQ ID NO: 2635829 - RNA, 20 nt, Human
acucauuuuaaaaaauggaa

SEQ ID NO: 2635830 - RNA, 23 nt, Human
uauaaaauaauuuuuauauuuga

SEQ ID NO: 2635831 - RNA, 22 nt, Human
acacaucagcuugcccuguuaa

SEQ ID NO: 2635832 - RNA, 21 nt, Human
uauaaaauaauuuuuauauuu

SEQ ID NO: 2635833 - RNA, 22 nt, Human
uauaaaauaauuuuuauauuug

SEQ ID NO: 2635834 - RNA, 22 nt, Human
uagugagcagucaggaaagaga

SEQ ID NO: 2635835 - RNA, 15 nt, Human
uaguuuuauaugcuu

SEQ ID NO: 2635836 - RNA, 16 nt, Human
uaguuuuauaugcuuc

SEQ ID NO: 2635837 - RNA, 23 nt, Human
uauaggugcuacaaaaacacagc

SEQ ID NO: 2635838 - RNA, 20 nt, Human
uauaggugcuacaaaaacac

SEQ ID NO: 2635839 - RNA, 21 nt, Human
uauaggugcuacaaaaacaca

SEQ ID NO: 2635840 - RNA, 13 nt, Human
uauaggaauugac

SEQ ID NO: 2635841 - RNA, 19 nt, Human
uauaggaauugacccacaa

SEQ ID NO: 2635842 - RNA, 14 nt, Human
uauaggaauugacc

SEQ ID NO: 2635843 - RNA, 19 nt, Human
uauaauuuugugaagcaaa

SEQ ID NO: 2635844 - RNA, 14 nt, Human
uauaauuuugugaa

SEQ ID NO: 2635845 - RNA, 18 nt, Human
uauaacaaugcuguauuu

SEQ ID NO: 2635846 - RNA, 16 nt, Human
uauggcuauaggugcu

SEQ ID NO: 2635847 - RNA, 17 nt, Human
uauggcuauaggugcua

SEQ ID NO: 2635848 - RNA, 15 nt, Human
uauauuuacaaaugg

SEQ ID NO: 2635849 - RNA, 14 nt, Human
uauauuuacaaaug

SEQ ID NO: 2635850 - RNA, 23 nt, Human
acaguucggugagcuacaaaugc

SEQ ID NO: 2635851 - RNA, 22 nt, Human
acaguucggugagcuacaaaug

SEQ ID NO: 2635852 - RNA, 19 nt, Human
acaguucggugagcuacaa

SEQ ID NO: 2635853 - RNA, 18 nt, Human
uauuuauuuuaauaaugu

SEQ ID NO: 2635854 - RNA, 14 nt, Human
uauuuauuuuaaua

SEQ ID NO: 2635855 - RNA, 16 nt, Human
uauuuauuuuaauaau

SEQ ID NO: 2635856 - RNA, 17 nt, Human
uauugucuagugaaacu

SEQ ID NO: 2635857 - RNA, 23 nt, Human
uauucauagcagcuuauucacaa

SEQ ID NO: 2635858 - RNA, 15 nt, Human
uauuagaauaccaca

SEQ ID NO: 2635859 - RNA, 12 nt, Human
uauuaaaacuca

SEQ ID NO: 2635860 - RNA, 21 nt, Human
acaguauggcagcuuuccuca

SEQ ID NO: 2635861 - RNA, 18 nt, Human
acagugagacucugucuc

SEQ ID NO: 2635862 - RNA, 14 nt, Human
acagugagacucug

SEQ ID NO: 2635863 - RNA, 21 nt, Human
acaguuaccucugccucagaa

SEQ ID NO: 2635864 - RNA, 16 nt, Human
acagucucaggaaauc

SEQ ID NO: 2635865 - RNA, 15 nt, Human
acagucucaggaaau

SEQ ID NO: 2635866 - RNA, 14 nt, Human
acagucucaggaaa

SEQ ID NO: 2635867 - RNA, 13 nt, Human
acagucucaggaa

SEQ ID NO: 2635868 - RNA, 20 nt, Human
acagugaaagaaaauaacaa

SEQ ID NO: 2635869 - RNA, 17 nt, Human
acagucucaggaaauca

SEQ ID NO: 2635870 - RNA, 21 nt, Human
aauucuugccaaauauaaaua

SEQ ID NO: 2635871 - RNA, 13 nt, Human
aauugacccacaa

SEQ ID NO: 2635872 - RNA, 19 nt, Human
aauugacccacaagaaaug

SEQ ID NO: 2635873 - RNA, 16 nt, Human
aauugacccacaagaa

SEQ ID NO: 2635874 - RNA, 13 nt, Human
uacuguaagaaaa

SEQ ID NO: 2635875 - RNA, 23 nt, Human
aauugugugaaagguacuucaaa

SEQ ID NO: 2635876 - RNA, 14 nt, Human
uacuucaaauccuu

SEQ ID NO: 2635877 - RNA, 19 nt, Human
uacuucaaauccuugaaga

SEQ ID NO: 2635878 - RNA, 20 nt, Human
aauuucucccagucauuuaa

SEQ ID NO: 2635879 - RNA, 16 nt, Human
acaaaaacacagcaag

SEQ ID NO: 2635880 - RNA, 19 nt, Human
aauuuuuucucuaggaaau

SEQ ID NO: 2635881 - RNA, 19 nt, Human
aauuuuuauauuugaaaua

SEQ ID NO: 2635882 - RNA, 15 nt, Human
uagaacucccuuuca

SEQ ID NO: 2635883 - RNA, 16 nt, Human
uacuucaugcugucua

SEQ ID NO: 2635884 - RNA, 21 nt, Human
uacuucaaauccuugaagauu

SEQ ID NO: 2635885 - RNA, 16 nt, Human
uagaugcaguucugaa

SEQ ID NO: 2635886 - RNA, 17 nt, Human
uagaugcaguucugaag

SEQ ID NO: 2635887 - RNA, 19 nt, Human
uagaugcaguucugaagaa

SEQ ID NO: 2635888 - RNA, 18 nt, Human
uagcaugucgucaaagcu

SEQ ID NO: 2635889 - RNA, 21 nt, Human
uagcaugucgucaaagcugaa

SEQ ID NO: 2635890 - RNA, 22 nt, Human
acaagaaaugaaagcagggacu

SEQ ID NO: 2635891 - RNA, 18 nt, Human
acaagcacuaaacaaaga

SEQ ID NO: 2635892 - RNA, 15 nt, Human
aaugaaugaaugaau

SEQ ID NO: 2635893 - RNA, 19 nt, Human
uaacaaugcuguauuuuaa

SEQ ID NO: 2635894 - RNA, 13 nt, Human
uaaucuuucacag

SEQ ID NO: 2635895 - RNA, 18 nt, Human
uacaaaaacacagcaagg

SEQ ID NO: 2635896 - RNA, 17 nt, Human
uacaaaaacacagcaag

SEQ ID NO: 2635897 - RNA, 18 nt, Human
aauguugacaugggacau

SEQ ID NO: 2635898 - RNA, 16 nt, Human
aaugguuuaaaugguc

SEQ ID NO: 2635899 - RNA, 14 nt, Human
aaguaaaaccacag

SEQ ID NO: 2635900 - RNA, 16 nt, Human
aaguaaaaccacagca

SEQ ID NO: 2635901 - RNA, 15 nt, Human
aaguaaaaccacagc

SEQ ID NO: 2635902 - RNA, 21 nt, Human
aagggugaugggaaagcauug

SEQ ID NO: 2635903 - RNA, 18 nt, Human
aaguaaaaccacagcagu

SEQ ID NO: 2635904 - RNA, 17 nt, Human
aaguaaaaccacagcag

SEQ ID NO: 2635905 - RNA, 21 nt, Human
guuucuagcaugaagacagag

SEQ ID NO: 2635906 - RNA, 15 nt, Human
guuuucugagaaaga

SEQ ID NO: 2635907 - RNA, 15 nt, Human
guuuuauaauuuugu

SEQ ID NO: 2635908 - RNA, 22 nt, Human
guuuuauaauuuugugaagcaa

SEQ ID NO: 2635909 - RNA, 23 nt, Human
guuuuuuuuuaaaaaagaaacau

SEQ ID NO: 2635910 - RNA, 22 nt, Human
guuuucugagaaagacuauuca

SEQ ID NO: 2635911 - RNA, 17 nt, Human
guuuucugagaaagacu

SEQ ID NO: 2635912 - RNA, 16 nt, Human
guuuucugagaaagac

SEQ ID NO: 2635913 - RNA, 23 nt, Human
aaguauguuagugcaaauuguca

SEQ ID NO: 2635914 - RNA, 21 nt, Human
aaguauguuagugcaaauugu

SEQ ID NO: 2635915 - RNA, 13 nt, Human
aaggauaaugaau

SEQ ID NO: 2635916 - RNA, 19 nt, Human
aaggaaaaaauaacaauga

SEQ ID NO: 2635917 - RNA, 16 nt, Human
aaggaaaaaauaacaa

SEQ ID NO: 2635918 - RNA, 19 nt, Human
uaaaccaaggcuagaacca

SEQ ID NO: 2635919 - RNA, 12 nt, Human
uaaacucauuuc

SEQ ID NO: 2635920 - RNA, 17 nt, Human
uaaacucauuucuagca

SEQ ID NO: 2635921 - RNA, 22 nt, Human
aauaaaauccauacauuugugu

SEQ ID NO: 2635922 - RNA, 12 nt, Human
aauaaaaauaau

SEQ ID NO: 2635923 - RNA, 21 nt, Human
aauaaaugugccuucauuuuu

SEQ ID NO: 2635924 - RNA, 12 nt, Human
aauaaaugugcc

SEQ ID NO: 2635925 - RNA, 15 nt, Human
aauaacaauaaaaga

SEQ ID NO: 2635926 - RNA, 14 nt, Human
aauacacacucaaa

SEQ ID NO: 2635927 - RNA, 15 nt, Human
uaacaaugcuguauu

SEQ ID NO: 2635928 - RNA, 17 nt, Human
uaacaaugcuguauuuu

SEQ ID NO: 2635929 - RNA, 17 nt, Human
uaaaugauuucauucaa

SEQ ID NO: 2635930 - RNA, 15 nt, Human
uaaauguugacaugg

SEQ ID NO: 2635931 - RNA, 13 nt, Human
aagacccaaaagg

SEQ ID NO: 2635932 - RNA, 13 nt, Human
aagaauauuuuaa

SEQ ID NO: 2635933 - RNA, 22 nt, Human
aagaagcaccaaucaugaauua

SEQ ID NO: 2635934 - RNA, 13 nt, Human
aagaaaauaucac

SEQ ID NO: 2635935 - RNA, 14 nt, Human
guggguagacacac

SEQ ID NO: 2635936 - RNA, 18 nt, Human
aagagcuguucacagcca

SEQ ID NO: 2635937 - RNA, 19 nt, Human
aagagcuguucacagccag

SEQ ID NO: 2635938 - RNA, 14 nt, Human
aagacuauucaaac

SEQ ID NO: 2635939 - RNA, 14 nt, Human
aagacuccaaagaa

SEQ ID NO: 2635940 - RNA, 17 nt, Human
aagacuccaaagaaaug

SEQ ID NO: 2635941 - RNA, 16 nt, Human
aagacuccaaagaaau

SEQ ID NO: 2635942 - RNA, 16 nt, Human
aagcaaguauuagaau

SEQ ID NO: 2635943 - RNA, 19 nt, Human
aagcaaaauuuuuucucua

SEQ ID NO: 2635944 - RNA, 19 nt, Human
aagauguagaggagaaacu

SEQ ID NO: 2635945 - RNA, 22 nt, Human
aagauguagaggagaaacugga

SEQ ID NO: 2635946 - RNA, 13 nt, Human
aagcaaaauguga

SEQ ID NO: 2635947 - RNA, 16 nt, Human
aacauauauaacaaug

SEQ ID NO: 2635948 - RNA, 19 nt, Human
aacagauuauuaccuuaca

SEQ ID NO: 2635949 - RNA, 19 nt, Human
aacagucucaggaaaucaa

SEQ ID NO: 2635950 - RNA, 17 nt, Human
aacagucucaggaaauc

SEQ ID NO: 2635951 - RNA, 23 nt, Human
gucucaguccaugaagauguaga

SEQ ID NO: 2635952 - RNA, 13 nt, Human
gucuucacaacag

SEQ ID NO: 2635953 - RNA, 13 nt, Human
aacuauauuguuu

SEQ ID NO: 2635954 - RNA, 20 nt, Human
aacuaucucauuuccaagca

SEQ ID NO: 2635955 - RNA, 23 nt, Human
aacuaucucauuuccaagcaagu

SEQ ID NO: 2635956 - RNA, 13 nt, Human
aacugaaaucaua

SEQ ID NO: 2635957 - RNA, 20 nt, Human
aacugaaaucauacuucuua

SEQ ID NO: 2635958 - RNA, 14 nt, Human
caaauaugcaaagc

SEQ ID NO: 2635959 - RNA, 17 nt, Human
caaauaugcaaagcacu

SEQ ID NO: 2635960 - RNA, 16 nt, Human
caaauaugcaaagcac

SEQ ID NO: 2635961 - RNA, 18 nt, Human
caaauaugcaaagcacug

SEQ ID NO: 2635962 - RNA, 20 nt, Human
caaauguucaucaaugaaug

SEQ ID NO: 2635963 - RNA, 21 nt, Human
caaauguucaucaaugaauga

SEQ ID NO: 2635964 - RNA, 14 nt, Human
caaauuuacagaga

SEQ ID NO: 2635965 - RNA, 15 nt, Human
caaauuuacagagac

SEQ ID NO: 2635966 - RNA, 17 nt, Human
caagcacuaaacaaaga

SEQ ID NO: 2635967 - RNA, 14 nt, Human
cacaguuuucugag

SEQ ID NO: 2635968 - RNA, 15 nt, Human
cacaguuuucugaga

SEQ ID NO: 2635969 - RNA, 15 nt, Human
cacaggaaguagagg

SEQ ID NO: 2635970 - RNA, 20 nt, Human
cacaggaaccacaagacugc

SEQ ID NO: 2635971 - RNA, 19 nt, Human
cacaggaaccacaagacug

SEQ ID NO: 2635972 - RNA, 22 nt, Human
cacagcaguugaaaagacucca

SEQ ID NO: 2635973 - RNA, 13 nt, Human
cacaacuauauug

SEQ ID NO: 2635974 - RNA, 19 nt, Human
cacacucaaaucaagaaac

SEQ ID NO: 2635975 - RNA, 14 nt, Human
cacacugaagaagc

SEQ ID NO: 2635976 - RNA, 11 nt, Human
cacaacagauu

SEQ ID NO: 2635977 - RNA, 22 nt, Human
caaugaaugaaugaauggcuaa

SEQ ID NO: 2635978 - RNA, 20 nt, Human
uugguaaggggaauugagga

SEQ ID NO: 2635979 - RNA, 13 nt, Human
uuguaaaauggug

SEQ ID NO: 2635980 - RNA, 12 nt, Human
uuguaaaauggu

SEQ ID NO: 2635981 - RNA, 15 nt, Human
uuggucugugagaug

SEQ ID NO: 2635982 - RNA, 20 nt, Human
uuguaaaauggugugaccac

SEQ ID NO: 2635983 - RNA, 16 nt, Human
uuguaccgcaauguga

SEQ ID NO: 2635984 - RNA, 18 nt, Human
uugcuaagcauuccaacu

SEQ ID NO: 2635985 - RNA, 16 nt, Human
uugcuaagcauuccaa

SEQ ID NO: 2635986 - RNA, 21 nt, Human
uugaaaaucuuauaauuuaaa

SEQ ID NO: 2635987 - RNA, 18 nt, Human
uucuuuccacagaagcuc

SEQ ID NO: 2635988 - RNA, 19 nt, Human
uucuuaggguuaugauuaa

SEQ ID NO: 2635989 - RNA, 24 nt, Human
uucuaaguaaaaccacagcaguug

SEQ ID NO: 2635990 - RNA, 20 nt, Human
uugauaugccuuuucccaac

SEQ ID NO: 2635991 - RNA, 13 nt, Human
uugccaucccucc

SEQ ID NO: 2635992 - RNA, 22 nt, Human
uugccaucccucccuccaccuc

SEQ ID NO: 2635993 - RNA, 23 nt, Human
uugccaucccucccuccaccucc

SEQ ID NO: 2635994 - RNA, 14 nt, Human
uugccaucccuccc

SEQ ID NO: 2635995 - RNA, 16 nt, Human
uugccaucccucccuc

SEQ ID NO: 2635996 - RNA, 17 nt, Human
uugccaucccucccucc

SEQ ID NO: 2635997 - RNA, 18 nt, Human
uugccaucccucccucca

SEQ ID NO: 2635998 - RNA, 23 nt, Human
uugcagcucuccccuucucugua

SEQ ID NO: 2635999 - RNA, 13 nt, Human
uuuacagagacag

SEQ ID NO: 2636000 - RNA, 19 nt, Human
uuuaauaauguuucaaaca

SEQ ID NO: 2636001 - RNA, 13 nt, Human
uuuaauaaaccau

SEQ ID NO: 2636002 - RNA, 14 nt, Human
uuuaauaauguuuc

SEQ ID NO: 2636003 - RNA, 15 nt, Human
uuuaauaauguuuca

SEQ ID NO: 2636004 - RNA, 19 nt, Human
uuuaaaauacacacucaaa

SEQ ID NO: 2636005 - RNA, 16 nt, Human
uuuaaaaucauuucug

SEQ ID NO: 2636006 - RNA, 14 nt, Human
uuuaaaagaaugau

SEQ ID NO: 2636007 - RNA, 17 nt, Human
uuuaaaagaaugauuau

SEQ ID NO: 2636008 - RNA, 12 nt, Human
uuuaaaaugucu

SEQ ID NO: 2636009 - RNA, 17 nt, Human
uuguuuaaaaucauuuc

SEQ ID NO: 2636010 - RNA, 18 nt, Human
uuguuuaaaaucauuucu

SEQ ID NO: 2636011 - RNA, 12 nt, Human
uuucucuaggaa

SEQ ID NO: 2636012 - RNA, 18 nt, Human
uuugguaaggggaauuga

SEQ ID NO: 2636013 - RNA, 21 nt, Human
uuugaaauuguauuacaaauc

SEQ ID NO: 2636014 - RNA, 20 nt, Human
uucagacauagaauuaacac

SEQ ID NO: 2636015 - RNA, 16 nt, Human
uucagacauagaauua

SEQ ID NO: 2636016 - RNA, 13 nt, Human
uucagagcugccc

SEQ ID NO: 2636017 - RNA, 14 nt, Human
uucagagcugcccu

SEQ ID NO: 2636018 - RNA, 17 nt, Human
uuauuuuaauaauguuu

SEQ ID NO: 2636019 - RNA, 17 nt, Human
uucaaauccuugaagau

SEQ ID NO: 2636020 - RNA, 15 nt, Human
uuauuuuaauaaugu

SEQ ID NO: 2636021 - RNA, 16 nt, Human
uuauuuuaauaauguu

SEQ ID NO: 2636022 - RNA, 15 nt, Human
uuauugucuagugaa

SEQ ID NO: 2636023 - RNA, 21 nt, Human
uuauggcacuaguauuucuau

SEQ ID NO: 2636024 - RNA, 17 nt, Human
uuauggcuauaggugcu

SEQ ID NO: 2636025 - RNA, 16 nt, Human
uuauuacuguaagaaa

SEQ ID NO: 2636026 - RNA, 17 nt, Human
uuauuacuguaagaaaa

SEQ ID NO: 2636027 - RNA, 18 nt, Human
uuauuacuguaagaaaau

SEQ ID NO: 2636028 - RNA, 19 nt, Human
uuccagauccuggaaauca

SEQ ID NO: 2636029 - RNA, 17 nt, Human
uucccuugaugaagaag

SEQ ID NO: 2636030 - RNA, 17 nt, Human
uuccuuggacucauuuu

SEQ ID NO: 2636031 - RNA, 20 nt, Human
uuccuuggacucauuuuaaa

SEQ ID NO: 2636032 - RNA, 19 nt, Human
uuagaaacacaacuauauu

SEQ ID NO: 2636033 - RNA, 17 nt, Human
uuacuaguuucccuugc

SEQ ID NO: 2636034 - RNA, 12 nt, Human
uuagcuggaaaa

SEQ ID NO: 2636035 - RNA, 13 nt, Human
uuagcuggaaaag

SEQ ID NO: 2636036 - RNA, 20 nt, Human
uuagaugcaguucugaagaa

SEQ ID NO: 2636037 - RNA, 21 nt, Human
uuagaugcaguucugaagaag

SEQ ID NO: 2636038 - RNA, 18 nt, Human
uuaggauguugaaaaagu

SEQ ID NO: 2636039 - RNA, 22 nt, Human
uuaaaagaauauuuuaacuucc

SEQ ID NO: 2636040 - RNA, 21 nt, Human
uuaaaagaauauuuuaacuuc

SEQ ID NO: 2636041 - RNA, 19 nt, Human
uuaaaauacacacucaaau

SEQ ID NO: 2636042 - RNA, 18 nt, Human
uuaaaagaugaaaauauu

SEQ ID NO: 2636043 - RNA, 15 nt, Human
uuaaaagaugaaaau

SEQ ID NO: 2636044 - RNA, 21 nt, Human
uguuucaaacauauauaacaa

SEQ ID NO: 2636045 - RNA, 22 nt, Human
uguuucaaacauauauaacaau

SEQ ID NO: 2636046 - RNA, 19 nt, Human
uguuucaaacauauauaac

SEQ ID NO: 2636047 - RNA, 13 nt, Human
ugggcagcugccu

SEQ ID NO: 2636048 - RNA, 14 nt, Human
ugggcagcugccuc

SEQ ID NO: 2636049 - RNA, 15 nt, Human
ugggcagcugccucc

SEQ ID NO: 2636050 - RNA, 17 nt, Human
ugggcagcugccucccc

SEQ ID NO: 2636051 - RNA, 19 nt, Human
ugggcagcugccuccccuc

SEQ ID NO: 2636052 - RNA, 16 nt, Human
uggugauuuagcagga

SEQ ID NO: 2636053 - RNA, 22 nt, Human
uggugauuuagcaggaagcugu

SEQ ID NO: 2636054 - RNA, 17 nt, Human
uggucacaggaaguaga

SEQ ID NO: 2636055 - RNA, 22 nt, Human
uggucacaggaaguagaggagg

SEQ ID NO: 2636056 - RNA, 16 nt, Human
uggucccagccagcag

SEQ ID NO: 2636057 - RNA, 13 nt, Human
ugguauguuuuca

SEQ ID NO: 2636058 - RNA, 20 nt, Human
uggcaauagucaaauugugu

SEQ ID NO: 2636059 - RNA, 15 nt, Human
uggcacuaguauuuc

SEQ ID NO: 2636060 - RNA, 12 nt, Human
ugcaguucugaa

SEQ ID NO: 2636061 - RNA, 14 nt, Human
ugcaguucugaaga

SEQ ID NO: 2636062 - RNA, 22 nt, Human
ugcaucaauuuuucuuauuuca

SEQ ID NO: 2636063 - RNA, 13 nt, Human
ugcaucagcugcu

SEQ ID NO: 2636064 - RNA, 19 nt, Human
ugcaucagcugcugaaaca

SEQ ID NO: 2636065 - RNA, 16 nt, Human
ugccacuaaauugaca

SEQ ID NO: 2636066 - RNA, 17 nt, Human
ugcuagaacucccuuuc

SEQ ID NO: 2636067 - RNA, 15 nt, Human
ugcuagaacucccuu

SEQ ID NO: 2636068 - RNA, 14 nt, Human
ugcuagaacucccu

SEQ ID NO: 2636069 - RNA, 13 nt, Human
ugcuagaacuccc

SEQ ID NO: 2636070 - RNA, 20 nt, Human
ugcugggggggauuguaaaa

SEQ ID NO: 2636071 - RNA, 20 nt, Human
ugaggcuccacuuggucugu

SEQ ID NO: 2636072 - RNA, 18 nt, Human
ugaggcuccacuuggucu

SEQ ID NO: 2636073 - RNA, 16 nt, Human
ugauaacuggaaacuu

SEQ ID NO: 2636074 - RNA, 13 nt, Human
ugagccccaaaag

SEQ ID NO: 2636075 - RNA, 16 nt, Human
ugagagugaacaaauu

SEQ ID NO: 2636076 - RNA, 24 nt, Human
ugaucagcuuauugucuagugaaa

SEQ ID NO: 2636077 - RNA, 17 nt, Human
ugaucagcuuauugucu

SEQ ID NO: 2636078 - RNA, 14 nt, Human
ugaucuuuaaaaua

SEQ ID NO: 2636079 - RNA, 17 nt, Human
ugaucuuuaaaauacac

SEQ ID NO: 2636080 - RNA, 23 nt, Human
ugaugcuacaggauuugaaauug

SEQ ID NO: 2636081 - RNA, 20 nt, Human
ugaugcuacaggauuugaaa

SEQ ID NO: 2636082 - RNA, 15 nt, Human
ugauggugguauguu

SEQ ID NO: 2636083 - RNA, 21 nt, Human
ugauuaugaauuacauuugua

SEQ ID NO: 2636084 - RNA, 22 nt, Human
ugauuaugaauuacauuuguau

SEQ ID NO: 2636085 - RNA, 16 nt, Human
ugauuaccagggacug

SEQ ID NO: 2636086 - RNA, 22 nt, Human
ugauguuuagaaacacaacuau

SEQ ID NO: 2636087 - RNA, 13 nt, Human
ugauuauauguca

SEQ ID NO: 2636088 - RNA, 17 nt, Human
ugauuaugaauuacauu

SEQ ID NO: 2636089 - RNA, 19 nt, Human
ugauuaugaauuacauuug

SEQ ID NO: 2636090 - RNA, 15 nt, Human
ugaauuacauuugua

SEQ ID NO: 2636091 - RNA, 16 nt, Human
ugaauuacauuuguau

SEQ ID NO: 2636092 - RNA, 18 nt, Human
ugaauuacauuuguauaa

SEQ ID NO: 2636093 - RNA, 13 nt, Human
ugaaguccaagca

SEQ ID NO: 2636094 - RNA, 11 nt, Human
ugaaguccaag

SEQ ID NO: 2636095 - RNA, 20 nt, Human
ugaccacugcagaagacagu

SEQ ID NO: 2636096 - RNA, 16 nt, Human
ugacaugggacauuug

SEQ ID NO: 2636097 - RNA, 17 nt, Human
ugacaugggacauuugc

SEQ ID NO: 2636098 - RNA, 18 nt, Human
ugacaugggacauuugcu

SEQ ID NO: 2636099 - RNA, 15 nt, Human
ugacaagcucacaga

SEQ ID NO: 2636100 - RNA, 20 nt, Human
ugacaagcucacagaccuuu

SEQ ID NO: 2636101 - RNA, 12 nt, Human
ugacaagcucac

SEQ ID NO: 2636102 - RNA, 22 nt, Human
ugaaacaacaaauaggaauugu

SEQ ID NO: 2636103 - RNA, 18 nt, Human
ugaaagaggcagcuugaa

SEQ ID NO: 2636104 - RNA, 15 nt, Human
ugaaagguacuucaa

SEQ ID NO: 2636105 - RNA, 16 nt, Human
ugaaagguacuucaaa

SEQ ID NO: 2636106 - RNA, 16 nt, Human
ugaaauauugacuuuu

SEQ ID NO: 2636107 - RNA, 12 nt, Human
ucuuugccaagu

SEQ ID NO: 2636108 - RNA, 19 nt, Human
ucuuuccacagaagcucca

SEQ ID NO: 2636109 - RNA, 17 nt, Human
ucuuucacauuuaaaua

SEQ ID NO: 2636110 - RNA, 16 nt, Human
ucauuaggauggcuag

SEQ ID NO: 2636111 - RNA, 17 nt, Human
uccaaagaaauguaagg

SEQ ID NO: 2636112 - RNA, 14 nt, Human
uccaaagaaaugua

SEQ ID NO: 2636113 - RNA, 12 nt, Human
ucauagcagcuu

SEQ ID NO: 2636114 - RNA, 11 nt, Human
ucauagcagcu

SEQ ID NO: 2636115 - RNA, 17 nt, Human
ucaucaaugaaugaaug

SEQ ID NO: 2636116 - RNA, 23 nt, Human
uccacuuggucugugagaugcua

SEQ ID NO: 2636117 - RNA, 17 nt, Human
uccacuuggucugugag

SEQ ID NO: 2636118 - RNA, 21 nt, Human
uccacuuggucugugagaugc

SEQ ID NO: 2636119 - RNA, 15 nt, Human
uccauacauuugugu

SEQ ID NO: 2636120 - RNA, 20 nt, Human
uccaugggccauaugaaaag

SEQ ID NO: 2636121 - RNA, 19 nt, Human
uccagguagagggugugua

SEQ ID NO: 2636122 - RNA, 18 nt, Human
uccugccccugagcccau

SEQ ID NO: 2636123 - RNA, 17 nt, Human
uccugccccugagccca

SEQ ID NO: 2636124 - RNA, 20 nt, Human
uccugaggcuccacuugguc

SEQ ID NO: 2636125 - RNA, 19 nt, Human
uccugaggcuccacuuggu

SEQ ID NO: 2636126 - RNA, 17 nt, Human
uccuggcaauagucaaa

SEQ ID NO: 2636127 - RNA, 23 nt, Human
uccuagugaaagaggcagcuuga

SEQ ID NO: 2636128 - RNA, 14 nt, Human
uccuagugaaagag

SEQ ID NO: 2636129 - RNA, 22 nt, Human
uccucauuuuuauaaugucccu

SEQ ID NO: 2636130 - RNA, 20 nt, Human
ucccuucacaaacccagugu

SEQ ID NO: 2636131 - RNA, 23 nt, Human
ucucaguccaugaagauguagag

SEQ ID NO: 2636132 - RNA, 18 nt, Human
ucuaugaaauauuauguu

SEQ ID NO: 2636133 - RNA, 17 nt, Human
ucuacacuaagagagaa

SEQ ID NO: 2636134 - RNA, 12 nt, Human
ucggagaagagc

SEQ ID NO: 2636135 - RNA, 16 nt, Human
ucggagaagagcuguu

SEQ ID NO: 2636136 - RNA, 14 nt, Human
ucggagaagagcug

SEQ ID NO: 2636137 - RNA, 17 nt, Human
ucaaacauauauaacaa

SEQ ID NO: 2636138 - RNA, 22 nt, Human
ucaaacagucucaggaaaucaa

SEQ ID NO: 2636139 - RNA, 17 nt, Human
ucaaauaugcaaagcac

SEQ ID NO: 2636140 - RNA, 16 nt, Human
ucaaauaugcaaagca

SEQ ID NO: 2636141 - RNA, 16 nt, Human
ucaaauccuugaagau

SEQ ID NO: 2636142 - RNA, 15 nt, Human
ucaaauccuugaaga

SEQ ID NO: 2636143 - RNA, 19 nt, Human
ucaaauaugcaaagcacug

SEQ ID NO: 2636144 - RNA, 18 nt, Human
ucaaauaugcaaagcacu

SEQ ID NO: 2636145 - RNA, 22 nt, Human
ucaacuccaaacugacucuuaa

SEQ ID NO: 2636146 - RNA, 14 nt, Human
ucaauaaaauccau

SEQ ID NO: 2636147 - RNA, 22 nt, Human
ucacaagacccaaaaggcagaa

SEQ ID NO: 2636148 - RNA, 12 nt, Human
ucacauuuaaau

SEQ ID NO: 2636149 - RNA, 20 nt, Human
uauuguuuaaaaucauuucu

SEQ ID NO: 2636150 - RNA, 14 nt, Human
uauuucuaugaaau

SEQ ID NO: 2636151 - RNA, 15 nt, Human
uauuucuaugaaaua

SEQ ID NO: 2636152 - RNA, 13 nt, Human
uauuuauuacugu

SEQ ID NO: 2636153 - RNA, 13 nt, Human
uauuucuaugaaa

SEQ ID NO: 2636154 - RNA, 14 nt, Human
uauuuauuacugua

SEQ ID NO: 2636155 - RNA, 17 nt, Human
uauuguuuaaaaucauu

SEQ ID NO: 2636156 - RNA, 16 nt, Human
uauuguuuaaaaucau

SEQ ID NO: 2636157 - RNA, 15 nt, Human
uauuguuuaaaauca

SEQ ID NO: 2636158 - RNA, 17 nt, Human
uauguucuaagaaguga

SEQ ID NO: 2636159 - RNA, 19 nt, Human
uauggaggcuuugcauaga

SEQ ID NO: 2636160 - RNA, 19 nt, Human
uauguuagugcaaauuguc

SEQ ID NO: 2636161 - RNA, 12 nt, Human
uauguuaaaacu

SEQ ID NO: 2636162 - RNA, 17 nt, Human
uauuauauuuacaaaug

SEQ ID NO: 2636163 - RNA, 16 nt, Human
uauuauguuaaaacug

SEQ ID NO: 2636164 - RNA, 18 nt, Human
uaggugcuacaaaaacac

SEQ ID NO: 2636165 - RNA, 13 nt, Human
uaguaucaaaaga

SEQ ID NO: 2636166 - RNA, 16 nt, Human
uaguauuucuaugaaa

SEQ ID NO: 2636167 - RNA, 18 nt, Human
uaguauuucuaugaaaua

SEQ ID NO: 2636168 - RNA, 19 nt, Human
uaguauuucuaugaaauau

SEQ ID NO: 2636169 - RNA, 13 nt, Human
uagucaaauugug

SEQ ID NO: 2636170 - RNA, 14 nt, Human
uagucaaauugugu

SEQ ID NO: 2636171 - RNA, 14 nt, Human
uagugcaaauuguc

SEQ ID NO: 2636172 - RNA, 15 nt, Human
uagugcaaauuguca

SEQ ID NO: 2636173 - RNA, 16 nt, Human
uaggucagugcaaaua

SEQ ID NO: 2636174 - RNA, 18 nt, Human
uaggccaugggacaggga

SEQ ID NO: 2636175 - RNA, 16 nt, Human
uaggccaugggacagg

SEQ ID NO: 2636176 - RNA, 12 nt, Human
uaggaauugacc

SEQ ID NO: 2636177 - RNA, 13 nt, Human
uauaugcuucugu

SEQ ID NO: 2636178 - RNA, 13 nt, Human
uauauaacaaugc

SEQ ID NO: 2636179 - RNA, 15 nt, Human
uaugcuucuguuuua

SEQ ID NO: 2636180 - RNA, 16 nt, Human
uaugcuucuguuuuau

SEQ ID NO: 2636181 - RNA, 16 nt, Human
uaugauucccagccag

SEQ ID NO: 2636182 - RNA, 12 nt, Human
uaugcaaagcac

SEQ ID NO: 2636183 - RNA, 14 nt, Human
uaugcaaagcacug

SEQ ID NO: 2636184 - RNA, 13 nt, Human
uaugcaaagcacu

SEQ ID NO: 2636185 - RNA, 15 nt, Human
uaugcaaagcacuga

SEQ ID NO: 2636186 - RNA, 14 nt, Human
uauccuucagccug

SEQ ID NO: 2636187 - RNA, 15 nt, Human
uauccuucagccuga

SEQ ID NO: 2636188 - RNA, 23 nt, Human
uaugaauuacauuuguauaaaau

SEQ ID NO: 2636189 - RNA, 17 nt, Human
uaugaauuacauuugua

SEQ ID NO: 2636190 - RNA, 14 nt, Human
gugagcuacaaaug

SEQ ID NO: 2636191 - RNA, 16 nt, Human
gugagcagucaggaaa

SEQ ID NO: 2636192 - RNA, 19 nt, Human
gugaaagaaaauaacaaua

SEQ ID NO: 2636193 - RNA, 20 nt, Human
gugaaacucguuaauuugua

SEQ ID NO: 2636194 - RNA, 18 nt, Human
gugcaaauugucacagga

SEQ ID NO: 2636195 - RNA, 20 nt, Human
guccugucggagcccugucu

SEQ ID NO: 2636196 - RNA, 21 nt, Human
guccugucggagcccugucuc

SEQ ID NO: 2636197 - RNA, 18 nt, Human
guccugucggagcccugu

SEQ ID NO: 2636198 - RNA, 23 nt, Human
gucuacacuaagagagaaugaga

SEQ ID NO: 2636199 - RNA, 17 nt, Human
gucuacacuaagagaga

SEQ ID NO: 2636200 - RNA, 17 nt, Human
guauuucuaugaaauau

SEQ ID NO: 2636201 - RNA, 22 nt, Human
guauuucuaugaaauauuaugu

SEQ ID NO: 2636202 - RNA, 21 nt, Human
gucaauaaaauccauacauuu

SEQ ID NO: 2636203 - RNA, 15 nt, Human
gucaauaaaauccau

SEQ ID NO: 2636204 - RNA, 14 nt, Human
gucaccucauggaa

SEQ ID NO: 2636205 - RNA, 16 nt, Human
guauuuuaaaagaaug

SEQ ID NO: 2636206 - RNA, 17 nt, Human
guauuuuaaaagaauga

SEQ ID NO: 2636207 - RNA, 20 nt, Human
gucccagccagcaguucaga

SEQ ID NO: 2636208 - RNA, 22 nt, Human
gguagacacacaugaaguccaa

SEQ ID NO: 2636209 - RNA, 15 nt, Human
gguagacacacauga

SEQ ID NO: 2636210 - RNA, 22 nt, Human
gguacuucaaauccuugaagau

SEQ ID NO: 2636211 - RNA, 21 nt, Human
ggguagccacuggacugacga

SEQ ID NO: 2636212 - RNA, 19 nt, Human
ggugcuacaaaaacacagc

SEQ ID NO: 2636213 - RNA, 17 nt, Human
guaagggaaacugccag

SEQ ID NO: 2636214 - RNA, 18 nt, Human
guaagggaaacugccagc

SEQ ID NO: 2636215 - RNA, 23 nt, Human
guaaaaccacagcaguugaaaag

SEQ ID NO: 2636216 - RNA, 18 nt, Human
guaaaaccacagcaguug

SEQ ID NO: 2636217 - RNA, 16 nt, Human
guaaaaccacagcagu

SEQ ID NO: 2636218 - RNA, 15 nt, Human
guaaaaccacagcag

SEQ ID NO: 2636219 - RNA, 14 nt, Human
guaaaaccacagca

SEQ ID NO: 2636220 - RNA, 15 nt, Human
guaauuggaaaggca

SEQ ID NO: 2636221 - RNA, 19 nt, Human
guaaugauaacuggaaacu

SEQ ID NO: 2636222 - RNA, 15 nt, Human
guaccgcaaugugac

SEQ ID NO: 2636223 - RNA, 23 nt, Human
guacuuuauuuucuauaauuuaa

SEQ ID NO: 2636224 - RNA, 15 nt, Human
guagaggagaaacug

SEQ ID NO: 2636225 - RNA, 20 nt, Human
gcucucuggccuucggccuc

SEQ ID NO: 2636226 - RNA, 19 nt, Human
gcucucuggccuucggccu

SEQ ID NO: 2636227 - RNA, 15 nt, Human
gcucucuggccuucg

SEQ ID NO: 2636228 - RNA, 14 nt, Human
gcucucuggccuuc

SEQ ID NO: 2636229 - RNA, 11 nt, Human
gcucucuggcc

SEQ ID NO: 2636230 - RNA, 13 nt, Human
gcucucuggccuu

SEQ ID NO: 2636231 - RNA, 12 nt, Human
gcucucuggccu

SEQ ID NO: 2636232 - RNA, 20 nt, Human
gcuccauuuuuagugaaaua

SEQ ID NO: 2636233 - RNA, 14 nt, Human
gcuaagcauuccaa

SEQ ID NO: 2636234 - RNA, 17 nt, Human
gcuaagcaaaaugugau

SEQ ID NO: 2636235 - RNA, 22 nt, Human
gcccucuccugggcagcugccu

SEQ ID NO: 2636236 - RNA, 23 nt, Human
gcccucuccugggcagcugccuc

SEQ ID NO: 2636237 - RNA, 12 nt, Human
gcccucuccugg

SEQ ID NO: 2636238 - RNA, 13 nt, Human
gcccucuccuggg

SEQ ID NO: 2636239 - RNA, 14 nt, Human
gcccucuccugggc

SEQ ID NO: 2636240 - RNA, 22 nt, Human
gccuauauuuuuuguuaaauga

SEQ ID NO: 2636241 - RNA, 17 nt, Human
gccuaagugcagccccg

SEQ ID NO: 2636242 - RNA, 20 nt, Human
gcugucuacacuaagagaga

SEQ ID NO: 2636243 - RNA, 17 nt, Human
ggaaaucaaauaugcaa

SEQ ID NO: 2636244 - RNA, 23 nt, Human
ggaaagggauuuucagcccucag

SEQ ID NO: 2636245 - RNA, 19 nt, Human
ggagaaucacuugaacccg

SEQ ID NO: 2636246 - RNA, 15 nt, Human
ggagaaucacuugaa

SEQ ID NO: 2636247 - RNA, 14 nt, Human
ggacgcucucuggc

SEQ ID NO: 2636248 - RNA, 13 nt, Human
ggacgcucucugg

SEQ ID NO: 2636249 - RNA, 16 nt, Human
ggacauuugcucaugg

SEQ ID NO: 2636250 - RNA, 20 nt, Human
ggaagugacgguuuaauggg

SEQ ID NO: 2636251 - RNA, 23 nt, Human
ggaauuucucccagucauuuaau

SEQ ID NO: 2636252 - RNA, 16 nt, Human
ggaauuggagcucgug

SEQ ID NO: 2636253 - RNA, 22 nt, Human
ggaauuggagcucgugggacag

SEQ ID NO: 2636254 - RNA, 14 nt, Human
ggcauggcugggaa

SEQ ID NO: 2636255 - RNA, 15 nt, Human
ggauuguaaaauggu

SEQ ID NO: 2636256 - RNA, 17 nt, Human
ggauuagggagagaaga

SEQ ID NO: 2636257 - RNA, 12 nt, Human
gagcccugucuc

SEQ ID NO: 2636258 - RNA, 22 nt, Human
gauaaauggcuuccuggcaaua

SEQ ID NO: 2636259 - RNA, 19 nt, Human
gagugucuuaauuaaaaga

SEQ ID NO: 2636260 - RNA, 19 nt, Human
gcacuguggguagacacac

SEQ ID NO: 2636261 - RNA, 18 nt, Human
gcacugacuucuaaguaa

SEQ ID NO: 2636262 - RNA, 15 nt, Human
gcacugacuucuaag

SEQ ID NO: 2636263 - RNA, 13 nt, Human
gcacacugucugc

SEQ ID NO: 2636264 - RNA, 18 nt, Human
gaugcuagaacucccuuu

SEQ ID NO: 2636265 - RNA, 22 nt, Human
gaugcuagaacucccuuucaac

SEQ ID NO: 2636266 - RNA, 20 nt, Human
gaugcuagaacucccuuuca

SEQ ID NO: 2636267 - RNA, 16 nt, Human
gcaaauugucacagga

SEQ ID NO: 2636268 - RNA, 16 nt, Human
gaauuggagcucgugg

SEQ ID NO: 2636269 - RNA, 21 nt, Human
gaauugacccacaagaaauga

SEQ ID NO: 2636270 - RNA, 16 nt, Human
gaauugacccacaaga

SEQ ID NO: 2636271 - RNA, 16 nt, Human
gacaaggaaaaaauaa

SEQ ID NO: 2636272 - RNA, 18 nt, Human
gacagggaggacgcucuc

SEQ ID NO: 2636273 - RNA, 17 nt, Human
gacagggaggacgcucu

SEQ ID NO: 2636274 - RNA, 20 nt, Human
gacauagaauuaacacauga

SEQ ID NO: 2636275 - RNA, 19 nt, Human
gacagagccccacccucag

SEQ ID NO: 2636276 - RNA, 16 nt, Human
gacaugggacauuugc

SEQ ID NO: 2636277 - RNA, 21 nt, Human
gaccacugcagaagacaguau

SEQ ID NO: 2636278 - RNA, 22 nt, Human
gacccacaagaaaugaaagcag

SEQ ID NO: 2636279 - RNA, 15 nt, Human
gacccacaagaaaug

SEQ ID NO: 2636280 - RNA, 16 nt, Human
gacccaaaaggcagaa

SEQ ID NO: 2636281 - RNA, 18 nt, Human
gacuccaaagaaauguaa

SEQ ID NO: 2636282 - RNA, 16 nt, Human
gacuccaaagaaaugu

SEQ ID NO: 2636283 - RNA, 15 nt, Human
gacuccaaagaaaug

SEQ ID NO: 2636284 - RNA, 12 nt, Human
gacuccaaagaa

SEQ ID NO: 2636285 - RNA, 11 nt, Human
gacuccaaaga

SEQ ID NO: 2636286 - RNA, 21 nt, Human
gacucauuuuaaaaaauggaa

SEQ ID NO: 2636287 - RNA, 16 nt, Human
gacuggauaguccguc

SEQ ID NO: 2636288 - RNA, 14 nt, Human
gacugcauuauauu

SEQ ID NO: 2636289 - RNA, 16 nt, Human
gacugcauuauauuua

SEQ ID NO: 2636290 - RNA, 16 nt, Human
gacuucuaaguaaaac

SEQ ID NO: 2636291 - RNA, 18 nt, Human
gacuucuaaguaaaacca

SEQ ID NO: 2636292 - RNA, 17 nt, Human
gacuucuaaguaaaacc

SEQ ID NO: 2636293 - RNA, 24 nt, Human
gacuucuaaguaaaaccacagcag

SEQ ID NO: 2636294 - RNA, 23 nt, Human
gacuucuaaguaaaaccacagca

SEQ ID NO: 2636295 - RNA, 19 nt, Human
gacuucuaaguaaaaccac

SEQ ID NO: 2636296 - RNA, 23 nt, Human
gacuucugucuucacaacagauu

SEQ ID NO: 2636297 - RNA, 20 nt, Human
gacuucugucuucacaacag

SEQ ID NO: 2636298 - RNA, 21 nt, Human
gagaaccuagggugauauuaa

SEQ ID NO: 2636299 - RNA, 22 nt, Human
gagaaccuagggugauauuaac

SEQ ID NO: 2636300 - RNA, 22 nt, Human
gagaacuuccagauccuggaaa

SEQ ID NO: 2636301 - RNA, 23 nt, Human
gagaacuuccagauccuggaaau

SEQ ID NO: 2636302 - RNA, 17 nt, Human
gagaaugagagacacac

SEQ ID NO: 2636303 - RNA, 13 nt, Human
gagaagagcuguu

SEQ ID NO: 2636304 - RNA, 20 nt, Human
gagacagcucugcauacuca

SEQ ID NO: 2636305 - RNA, 20 nt, Human
gagaaugagagacacacuga

SEQ ID NO: 2636306 - RNA, 21 nt, Human
gagaaugagagacacacugaa

SEQ ID NO: 2636307 - RNA, 13 nt, Human
cugccuccccucc

SEQ ID NO: 2636308 - RNA, 14 nt, Human
cugccuccccuccu

SEQ ID NO: 2636309 - RNA, 20 nt, Human
cugcccucuccugggcagcu

SEQ ID NO: 2636310 - RNA, 21 nt, Human
cugcccucuccugggcagcug

SEQ ID NO: 2636311 - RNA, 16 nt, Human
cugcccucuccugggc

SEQ ID NO: 2636312 - RNA, 18 nt, Human
cugcccucuccugggcag

SEQ ID NO: 2636313 - RNA, 19 nt, Human
cugcccucuccugggcagc

SEQ ID NO: 2636314 - RNA, 18 nt, Human
cugcugaaacaacaaaua

SEQ ID NO: 2636315 - RNA, 16 nt, Human
cuggagcucugcccau

SEQ ID NO: 2636316 - RNA, 13 nt, Human
cuggagcucugcc

SEQ ID NO: 2636317 - RNA, 12 nt, Human
cuggagcucugc

SEQ ID NO: 2636318 - RNA, 23 nt, Human
cuggccuucggccuccauccuga

SEQ ID NO: 2636319 - RNA, 22 nt, Human
cuggccuucggccuccauccug

SEQ ID NO: 2636320 - RNA, 20 nt, Human
cuggcacaguuuucugagaa

SEQ ID NO: 2636321 - RNA, 22 nt, Human
cuggcacaguuuucugagaaag

SEQ ID NO: 2636322 - RNA, 21 nt, Human
cuggcacaguuuucugagaaa

SEQ ID NO: 2636323 - RNA, 22 nt, Human
cugggggggauuguaaaauggu

SEQ ID NO: 2636324 - RNA, 23 nt, Human
cuguaaucacagcuacuugggag

SEQ ID NO: 2636325 - RNA, 22 nt, Human
cuguauuuuaaaagaaugauua

SEQ ID NO: 2636326 - RNA, 20 nt, Human
cuguauuuuaaaagaaugau

SEQ ID NO: 2636327 - RNA, 19 nt, Human
cuguauuuuaaaagaauga

SEQ ID NO: 2636328 - RNA, 20 nt, Human
cugucuacacuaagagagaa

SEQ ID NO: 2636329 - RNA, 20 nt, Human
cuguuaaaagaugaaaauau

SEQ ID NO: 2636330 - RNA, 23 nt, Human
cuguuaaaagaugaaaauauuug

SEQ ID NO: 2636331 - RNA, 21 nt, Human
cuguuaaaagaugaaaauauu

SEQ ID NO: 2636332 - RNA, 15 nt, Human
cuuauuuccucauuu

SEQ ID NO: 2636333 - RNA, 15 nt, Human
cuuauuucauuucuu

SEQ ID NO: 2636334 - RNA, 14 nt, Human
cuuauuucauuucu

SEQ ID NO: 2636335 - RNA, 22 nt, Human
cuuagaugcaguucugaagaag

SEQ ID NO: 2636336 - RNA, 20 nt, Human
cuuagaugcaguucugaaga

SEQ ID NO: 2636337 - RNA, 18 nt, Human
cuucugucuucacaacag

SEQ ID NO: 2636338 - RNA, 22 nt, Human
cuucugucuucacaacagauua

SEQ ID NO: 2636339 - RNA, 21 nt, Human
cuucugucuucacaacagauu

SEQ ID NO: 2636340 - RNA, 23 nt, Human
cuugucaauaaaauccauacauu

SEQ ID NO: 2636341 - RNA, 19 nt, Human
cuugaguuuaaauuguaau

SEQ ID NO: 2636342 - RNA, 14 nt, Human
gaaacccugucucu

SEQ ID NO: 2636343 - RNA, 23 nt, Human
gaaacucguuaauuuguaguguu

SEQ ID NO: 2636344 - RNA, 16 nt, Human
gaaacacaacuauauu

SEQ ID NO: 2636345 - RNA, 11 nt, Human
gaaacauuugg

SEQ ID NO: 2636346 - RNA, 14 nt, Human
gaaagcagggacuu

SEQ ID NO: 2636347 - RNA, 22 nt, Human
gaaagcagaacagugauuacca

SEQ ID NO: 2636348 - RNA, 17 nt, Human
gaaagcagaacagugau

SEQ ID NO: 2636349 - RNA, 17 nt, Human
gaaagagaacuuccaga

SEQ ID NO: 2636350 - RNA, 20 nt, Human
gaaagaggcagcuugaaacu

SEQ ID NO: 2636351 - RNA, 21 nt, Human
gaaagaggaaugaaguacuca

SEQ ID NO: 2636352 - RNA, 18 nt, Human
gaaaauauuuguaucaca

SEQ ID NO: 2636353 - RNA, 22 nt, Human
gaaaaucuacacuccagugaga

SEQ ID NO: 2636354 - RNA, 18 nt, Human
gaaaaucuuauaauuuaa

SEQ ID NO: 2636355 - RNA, 15 nt, Human
ccuuggacucauuuu

SEQ ID NO: 2636356 - RNA, 17 nt, Human
ccuucggccuccauccu

SEQ ID NO: 2636357 - RNA, 16 nt, Human
ccuucggccuccaucc

SEQ ID NO: 2636358 - RNA, 18 nt, Human
ccuucggccuccauccug

SEQ ID NO: 2636359 - RNA, 13 nt, Human
ccugggcagcugc

SEQ ID NO: 2636360 - RNA, 14 nt, Human
ccugggcagcugcc

SEQ ID NO: 2636361 - RNA, 17 nt, Human
ccugaggcuccacuugg

SEQ ID NO: 2636362 - RNA, 14 nt, Human
ccugaggcuccacu

SEQ ID NO: 2636363 - RNA, 13 nt, Human
ccugaggcuccac

SEQ ID NO: 2636364 - RNA, 13 nt, Human
ccugaaagaggaa

SEQ ID NO: 2636365 - RNA, 17 nt, Human
ccugccccugagcccau

SEQ ID NO: 2636366 - RNA, 22 nt, Human
cuaggaaauauuuauuuuaaua

SEQ ID NO: 2636367 - RNA, 20 nt, Human
cgggaggcagagguugcagu

SEQ ID NO: 2636368 - RNA, 14 nt, Human
cuaagagagaauga

SEQ ID NO: 2636369 - RNA, 15 nt, Human
cuaagagagaaugag

SEQ ID NO: 2636370 - RNA, 19 nt, Human
cuaaauugacacuuaaaaa

SEQ ID NO: 2636371 - RNA, 19 nt, Human
cuaaguaaaaccacagcag

SEQ ID NO: 2636372 - RNA, 18 nt, Human
cuaaguaaaaccacagca

SEQ ID NO: 2636373 - RNA, 14 nt, Human
cuaaguaaaaccac

SEQ ID NO: 2636374 - RNA, 21 nt, Human
cuaagcuucacuguaaaauaa

SEQ ID NO: 2636375 - RNA, 14 nt, Human
cuacacuaagagag

SEQ ID NO: 2636376 - RNA, 23 nt, Human
cuacacgagauacagaauuuuau

SEQ ID NO: 2636377 - RNA, 18 nt, Human
cuagaguuuagcuggaaa

SEQ ID NO: 2636378 - RNA, 19 nt, Human
cuagaguuuagcuggaaaa

SEQ ID NO: 2636379 - RNA, 14 nt, Human
cuaggaaauauuua

SEQ ID NO: 2636380 - RNA, 15 nt, Human
cuaggaaauauuuau

SEQ ID NO: 2636381 - RNA, 19 nt, Human
cuaggaaauauuuauuuua

SEQ ID NO: 2636382 - RNA, 20 nt, Human
cuaggaaauauuuauuuuaa

SEQ ID NO: 2636383 - RNA, 15 nt, Human
cuauaggugcuacaa

SEQ ID NO: 2636384 - RNA, 19 nt, Human
cuaugaaauauuauguuaa

SEQ ID NO: 2636385 - RNA, 13 nt, Human
cuauaauuuaaau

SEQ ID NO: 2636386 - RNA, 12 nt, Human
cuauaauuuaaa

SEQ ID NO: 2636387 - RNA, 22 nt, Human
cucaggaaaucaaauaugcaaa

SEQ ID NO: 2636388 - RNA, 21 nt, Human
cucagaugcacaugagcuggc

SEQ ID NO: 2636389 - RNA, 14 nt, Human
cuccccucggagaa

SEQ ID NO: 2636390 - RNA, 23 nt, Human
cucauuuuuauaaugucccuuca

SEQ ID NO: 2636391 - RNA, 17 nt, Human
cucauuuccaagcaagu

SEQ ID NO: 2636392 - RNA, 12 nt, Human
cucauuuccaag

SEQ ID NO: 2636393 - RNA, 13 nt, Human
cucauuuccaagc

SEQ ID NO: 2636394 - RNA, 14 nt, Human
cucauuuccaagca

SEQ ID NO: 2636395 - RNA, 15 nt, Human
ccccucggagaagag

SEQ ID NO: 2636396 - RNA, 13 nt, Human
ccccuccucugcu

SEQ ID NO: 2636397 - RNA, 14 nt, Human
ccccuccucugcuu

SEQ ID NO: 2636398 - RNA, 17 nt, Human
ccccuccucugcuugcc

SEQ ID NO: 2636399 - RNA, 20 nt, Human
cccucuccugggcagcugcc

SEQ ID NO: 2636400 - RNA, 21 nt, Human
cccucuccugggcagcugccu

SEQ ID NO: 2636401 - RNA, 22 nt, Human
cccucuccugggcagcugccuc

SEQ ID NO: 2636402 - RNA, 23 nt, Human
cccucuccugggcagcugccucc

SEQ ID NO: 2636403 - RNA, 15 nt, Human
ccuaacgaaguaucc

SEQ ID NO: 2636404 - RNA, 15 nt, Human
ccacugguucuucuu

SEQ ID NO: 2636405 - RNA, 14 nt, Human
ccagacaucaacag

SEQ ID NO: 2636406 - RNA, 15 nt, Human
ccaccucccugcaau

SEQ ID NO: 2636407 - RNA, 19 nt, Human
ccaccucccugcaauaaaa

SEQ ID NO: 2636408 - RNA, 21 nt, Human
ccaccucccugcaauaaaaug

SEQ ID NO: 2636409 - RNA, 19 nt, Human
ccagccugagcgacaguga

SEQ ID NO: 2636410 - RNA, 13 nt, Human
ccaggugccaguu

SEQ ID NO: 2636411 - RNA, 12 nt, Human
ccaggugccagu

SEQ ID NO: 2636412 - RNA, 20 nt, Human
ccauccugaggcuccacuug

SEQ ID NO: 2636413 - RNA, 18 nt, Human
ccauccugaggcuccacu

SEQ ID NO: 2636414 - RNA, 20 nt, Human
ccagguagaggguguguaag

SEQ ID NO: 2636415 - RNA, 17 nt, Human
accucugccucagaaaa

SEQ ID NO: 2636416 - RNA, 18 nt, Human
accucugccucagaaaac

SEQ ID NO: 2636417 - RNA, 19 nt, Human
acggacgaaccuugaaaac

SEQ ID NO: 2636418 - RNA, 19 nt, Human
acuaguauuucuaugaaau

SEQ ID NO: 2636419 - RNA, 18 nt, Human
acuaguauuucuaugaaa

SEQ ID NO: 2636420 - RNA, 22 nt, Human
acuugggaggcugagaugggag

SEQ ID NO: 2636421 - RNA, 17 nt, Human
acuuuaugcuaagugaa

SEQ ID NO: 2636422 - RNA, 12 nt, Human
acuuuaugcuaa

SEQ ID NO: 2636423 - RNA, 20 nt, Human
acuucaaauccuugaagauu

SEQ ID NO: 2636424 - RNA, 17 nt, Human
acuucagcgguuuauau

SEQ ID NO: 2636425 - RNA, 18 nt, Human
acuucagcgguuuauaua

SEQ ID NO: 2636426 - RNA, 19 nt, Human
acuucagcgguuuauauaa

SEQ ID NO: 2636427 - RNA, 19 nt, Human
acuucaaauccuugaagau

SEQ ID NO: 2636428 - RNA, 21 nt, Human
acuuaaaaaugguuuaaaugg

SEQ ID NO: 2636429 - RNA, 14 nt, Human
acuuaaaaaugguu

SEQ ID NO: 2636430 - RNA, 13 nt, Human
acuuaaaaauggu

SEQ ID NO: 2636431 - RNA, 14 nt, Human
acucuuaagaagac

SEQ ID NO: 2636432 - RNA, 15 nt, Human
acucuuaagaagacu

SEQ ID NO: 2636433 - RNA, 20 nt, Human
acucuuaagaagacugcauu

SEQ ID NO: 2636434 - RNA, 17 nt, Human
acucugucucaguccau

SEQ ID NO: 2636435 - RNA, 15 nt, Human
acucugucucagucc

SEQ ID NO: 2636436 - RNA, 16 nt, Human
acagaagcuccaggua

SEQ ID NO: 2636437 - RNA, 13 nt, Human
acaagaaaugaaa

SEQ ID NO: 2636438 - RNA, 21 nt, Human
acaaggaugaauuaaguuuuu

SEQ ID NO: 2636439 - RNA, 16 nt, Human
acaagaaaugaaagca

SEQ ID NO: 2636440 - RNA, 15 nt, Human
acaagaaaugaaagc

SEQ ID NO: 2636441 - RNA, 17 nt, Human
aauuuugugaagcaaaa

SEQ ID NO: 2636442 - RNA, 18 nt, Human
aauuuugugaagcaaaau

SEQ ID NO: 2636443 - RNA, 19 nt, Human
accaaggcugauuaaacca

SEQ ID NO: 2636444 - RNA, 20 nt, Human
accaaggcugauuaaaccaa

SEQ ID NO: 2636445 - RNA, 20 nt, Human
acaucccuuaccugggaaag

SEQ ID NO: 2636446 - RNA, 21 nt, Human
acagugauuaccagggacuga

SEQ ID NO: 2636447 - RNA, 20 nt, Human
acagugauuaccagggacug

SEQ ID NO: 2636448 - RNA, 19 nt, Human
aagccagauuuuccugaaa

SEQ ID NO: 2636449 - RNA, 15 nt, Human
aagggauuuucagcc

SEQ ID NO: 2636450 - RNA, 17 nt, Human
aagggauggcaagaugu

SEQ ID NO: 2636451 - RNA, 14 nt, Human
aagggauggcaaga

SEQ ID NO: 2636452 - RNA, 21 nt, Human
aagggauuuucagcccucaga

SEQ ID NO: 2636453 - RNA, 23 nt, Human
aagggauuuucagcccucagaau

SEQ ID NO: 2636454 - RNA, 12 nt, Human
aaguagaggagg

SEQ ID NO: 2636455 - RNA, 14 nt, Human
aagauagcagggca

SEQ ID NO: 2636456 - RNA, 15 nt, Human
aagcagggacuugaa

SEQ ID NO: 2636457 - RNA, 15 nt, Human
aagagaacuuccaga

SEQ ID NO: 2636458 - RNA, 23 nt, Human
aagacagugaaagaaaauaacaa

SEQ ID NO: 2636459 - RNA, 17 nt, Human
aauccauacauuugugu

SEQ ID NO: 2636460 - RNA, 16 nt, Human
aauccauacauuugug

SEQ ID NO: 2636461 - RNA, 15 nt, Human
aaugauaacuggaaa

SEQ ID NO: 2636462 - RNA, 16 nt, Human
aaugauaacuggaaac

SEQ ID NO: 2636463 - RNA, 14 nt, Human
aaugauaacuggaa

SEQ ID NO: 2636464 - RNA, 22 nt, Human
aaucauuucugcaucagcugcu

SEQ ID NO: 2636465 - RNA, 22 nt, Human
aaucaaauaugcaaagcacuga

SEQ ID NO: 2636466 - RNA, 16 nt, Human
aaucaaauaugcaaag

SEQ ID NO: 2636467 - RNA, 15 nt, Human
aaucaaauaugcaaa

SEQ ID NO: 2636468 - RNA, 12 nt, Human
aauaauguuuca

SEQ ID NO: 2636469 - RNA, 14 nt, Human
aauaauguuucaaa

SEQ ID NO: 2636470 - RNA, 19 nt, Human
aauaauguuucaaacauau

SEQ ID NO: 2636471 - RNA, 10 nt, Human
aauaaaccau

SEQ ID NO: 2636472 - RNA, 22 nt, Human
aaguugauaugccuuuucccaa

SEQ ID NO: 2636473 - RNA, 17 nt, Human
aaguucugcagauaaac

SEQ ID NO: 2636474 - RNA, 12 nt, Human
aacacaucagcu

SEQ ID NO: 2636475 - RNA, 22 nt, Human
aaauugacacuuaaaaaugguu

SEQ ID NO: 2636476 - RNA, 20 nt, Human
aaauguucaucaaugaauga

SEQ ID NO: 2636477 - RNA, 14 nt, Human
aaaucuuaacuuga

SEQ ID NO: 2636478 - RNA, 23 nt, Human
aacugagaugugaacacaucagc

SEQ ID NO: 2636479 - RNA, 19 nt, Human
aaaauccauacauuugugu

SEQ ID NO: 2636480 - RNA, 21 nt, Human
aaacccugucucuacuaaaaa

SEQ ID NO: 2636481 - RNA, 19 nt, Human
aaacccuugccaugugcua

SEQ ID NO: 2636482 - RNA, 13 nt, Human
aaagaaacauuug

SEQ ID NO: 2636483 - RNA, 19 nt, Human
aaaggcagaagcaacccaa

SEQ ID NO: 2636484 - RNA, 20 nt, Human
aaagcauuguaaaugugcuu

SEQ ID NO: 2636485 - RNA, 19 nt, Human
aaagcauuguaaaugugcu

SEQ ID NO: 2636486 - RNA, 19 nt, Human
agcuccccucggagaagag

SEQ ID NO: 2636487 - RNA, 17 nt, Human
agcuccccucggagaag

SEQ ID NO: 2636488 - RNA, 20 nt, Human
agcuccccucggagaagagc

SEQ ID NO: 2636489 - RNA, 17 nt, Human
agcgacagugagacucu

SEQ ID NO: 2636490 - RNA, 18 nt, Human
agcuucacuguaaaauaa

SEQ ID NO: 2636491 - RNA, 20 nt, Human
agcuuauuuccucauuuuua

SEQ ID NO: 2636492 - RNA, 15 nt, Human
agggauuagggagag

SEQ ID NO: 2636493 - RNA, 17 nt, Human
agggauuuucagcccuc

SEQ ID NO: 2636494 - RNA, 22 nt, Human
agggauuuucagcccucagaau

SEQ ID NO: 2636495 - RNA, 21 nt, Human
aggccaugggcacugugggua

SEQ ID NO: 2636496 - RNA, 15 nt, Human
agggacugaggggag

SEQ ID NO: 2636497 - RNA, 24 nt, Human
agcaaaauuuuuucucuaggaaau

SEQ ID NO: 2636498 - RNA, 16 nt, Human
agauguagaggagaaa

SEQ ID NO: 2636499 - RNA, 19 nt, Human
agauguagaggagaaacug

SEQ ID NO: 2636500 - RNA, 21 nt, Human
agaagagcuguucacagccag

SEQ ID NO: 2636501 - RNA, 22 nt, Human
agaagagcuguucacagccaga

SEQ ID NO: 2636502 - RNA, 18 nt, Human
agaagacugcauuauauu

SEQ ID NO: 2636503 - RNA, 13 nt, Human
agaagauagcagg

SEQ ID NO: 2636504 - RNA, 21 nt, Human
agaagugaaaaucuacacucc

SEQ ID NO: 2636505 - RNA, 17 nt, Human
agaaugauuaugaauua

SEQ ID NO: 2636506 - RNA, 17 nt, Human
agaaugagagacacacu

SEQ ID NO: 2636507 - RNA, 22 nt, Human
agaaugagagacacacugaaga

SEQ ID NO: 2636508 - RNA, 19 nt, Human
agacccaaaaggcagaagc

SEQ ID NO: 2636509 - RNA, 17 nt, Human
agacccaaaaggcagaa

SEQ ID NO: 2636510 - RNA, 16 nt, Human
agacuggauaguccgu

SEQ ID NO: 2636511 - RNA, 20 nt, Human
agacuggauaguccgucucu

SEQ ID NO: 2636512 - RNA, 18 nt, Human
agacucugucucagucca

SEQ ID NO: 2636513 - RNA, 13 nt, Human
agaggaaugaagu

SEQ ID NO: 2636514 - RNA, 17 nt, Human
aucgcuccaccuugcag

SEQ ID NO: 2636515 - RNA, 21 nt, Human
aucgcuccaccuugcagcucu

SEQ ID NO: 2636516 - RNA, 19 nt, Human
auccucaguuuuugugaaa

SEQ ID NO: 2636517 - RNA, 13 nt, Human
aucagcuuauugu

SEQ ID NO: 2636518 - RNA, 22 nt, Human
aucagcuugcccuguuaaaaga

SEQ ID NO: 2636519 - RNA, 17 nt, Human
aucaugaauuaguuuua

SEQ ID NO: 2636520 - RNA, 14 nt, Human
aucaaauaugcaaa

SEQ ID NO: 2636521 - RNA, 21 nt, Human
augaaguacucauacauguua

SEQ ID NO: 2636522 - RNA, 13 nt, Human
augaaguacucau

SEQ ID NO: 2636523 - RNA, 20 nt, Human
augaaguccaagcauuuaga

SEQ ID NO: 2636524 - RNA, 23 nt, Human
augaaguccaagcauuuagaugu

SEQ ID NO: 2636525 - RNA, 21 nt, Human
augucaaucagccuaguugau

SEQ ID NO: 2636526 - RNA, 15 nt, Human
augugaacacaucag

SEQ ID NO: 2636527 - RNA, 16 nt, Human
auguuccuagugaaag

SEQ ID NO: 2636528 - RNA, 15 nt, Human
auguuccuagugaaa

SEQ ID NO: 2636529 - RNA, 17 nt, Human
auguuccuagugaaaga

SEQ ID NO: 2636530 - RNA, 18 nt, Human
augaugaucuuuaaaaua

SEQ ID NO: 2636531 - RNA, 21 nt, Human
augaugaucuuuaaaauacac

SEQ ID NO: 2636532 - RNA, 16 nt, Human
augaucuuuaaaauac

SEQ ID NO: 2636533 - RNA, 19 nt, Human
agugucaaugcagccccca

SEQ ID NO: 2636534 - RNA, 23 nt, Human
aguucagagcugcccucuccugg

SEQ ID NO: 2636535 - RNA, 21 nt, Human
aguucagagcugcccucuccu

SEQ ID NO: 2636536 - RNA, 22 nt, Human
aguucagagcugcccucuccug

SEQ ID NO: 2636537 - RNA, 20 nt, Human
aguucagagcugcccucucc

SEQ ID NO: 2636538 - RNA, 18 nt, Human
aguugaaaagacuccaaa

SEQ ID NO: 2636539 - RNA, 20 nt, Human
aguugaaaagacuccaaaga

SEQ ID NO: 2636540 - RNA, 19 nt, Human
aguugaaaagacuccaaag

SEQ ID NO: 2636541 - RNA, 11 nt, Human
aguccaagcau

SEQ ID NO: 2636542 - RNA, 14 nt, Human
auaacaaugaaagu

SEQ ID NO: 2636543 - RNA, 15 nt, Human
auaacaaugcuguau

SEQ ID NO: 2636544 - RNA, 17 nt, Human
auaacaaugcuguauuu

SEQ ID NO: 2636545 - RNA, 19 nt, Human
auaacaaugcuguauuuua

SEQ ID NO: 2636546 - RNA, 20 nt, Human
auaacaaugcuguauuuuaa

SEQ ID NO: 2636547 - RNA, 21 nt, Human
auaacaaugcuguauuuuaaa

SEQ ID NO: 2636548 - RNA, 18 nt, Human
auaauguuucaaacauau

SEQ ID NO: 2636549 - RNA, 13 nt, Human
auaauguuucaaa

SEQ ID NO: 2636550 - RNA, 22 nt, Human
auaagccagacaucaacagaua

SEQ ID NO: 2636551 - RNA, 21 nt, Human
auaagccagacaucaacagau

SEQ ID NO: 2636552 - RNA, 15 nt, Human
auagcagcuuauuca

SEQ ID NO: 2636553 - RNA, 14 nt, Human
auauuauguuaaaa

SEQ ID NO: 2636554 - RNA, 13 nt, Human
auauuauguuaaa

SEQ ID NO: 2636555 - RNA, 21 nt, Human
cuggaaaucaggguuaguauu

SEQ ID NO: 2636556 - RNA, 21 nt, Human
cugucagcuccccucggagaa

SEQ ID NO: 2636557 - RNA, 23 nt, Human
cugucagcuccccucggagaaga

SEQ ID NO: 2636558 - RNA, 16 nt, Human
cugugagaugcuagaa

SEQ ID NO: 2636559 - RNA, 10 nt, Human
cugggacagg

SEQ ID NO: 2636560 - RNA, 22 nt, Human
cugggcagcugccuccccuccu

SEQ ID NO: 2636561 - RNA, 20 nt, Human
cugggcagcugccuccccuc

SEQ ID NO: 2636562 - RNA, 21 nt, Human
cugggcagcugccuccccucc

SEQ ID NO: 2636563 - RNA, 16 nt, Human
cugggcagcugccucc

SEQ ID NO: 2636564 - RNA, 19 nt, Human
cugggcagcugccuccccu

SEQ ID NO: 2636565 - RNA, 17 nt, Human
gaaagacuauucaaaca

SEQ ID NO: 2636566 - RNA, 15 nt, Human
gaaagacuauucaaa

SEQ ID NO: 2636567 - RNA, 14 nt, Human
gaaagacuauucaa

SEQ ID NO: 2636568 - RNA, 18 nt, Human
gaaaucaaauaugcaaag

SEQ ID NO: 2636569 - RNA, 18 nt, Human
gaaauauuuauuuuaaua

SEQ ID NO: 2636570 - RNA, 22 nt, Human
gaaauauuuauuuuaauaaugu

SEQ ID NO: 2636571 - RNA, 20 nt, Human
gaaaucaaauaugcaaagca

SEQ ID NO: 2636572 - RNA, 19 nt, Human
gaaaucaaauaugcaaagc

SEQ ID NO: 2636573 - RNA, 17 nt, Human
gaaauauuuauuuuaau

SEQ ID NO: 2636574 - RNA, 15 nt, Human
cuucacuguaaaaua

SEQ ID NO: 2636575 - RNA, 23 nt, Human
cuucuaaguaaaaccacagcagu

SEQ ID NO: 2636576 - RNA, 22 nt, Human
cuucuaaguaaaaccacagcag

SEQ ID NO: 2636577 - RNA, 12 nt, Human
cuugaugaagaa

SEQ ID NO: 2636578 - RNA, 13 nt, Human
cuugaugaagaag

SEQ ID NO: 2636579 - RNA, 19 nt, Human
gcagggacuugaacccaua

SEQ ID NO: 2636580 - RNA, 11 nt, Human
gcagcugccuc

SEQ ID NO: 2636581 - RNA, 12 nt, Human
gcagcugccucc

SEQ ID NO: 2636582 - RNA, 13 nt, Human
gcagcugccuccc

SEQ ID NO: 2636583 - RNA, 15 nt, Human
gcagcugccuccccu

SEQ ID NO: 2636584 - RNA, 16 nt, Human
gcagcugccuccccuc

SEQ ID NO: 2636585 - RNA, 17 nt, Human
gcagcugccuccccucc

SEQ ID NO: 2636586 - RNA, 18 nt, Human
gcagcugccuccccuccu

SEQ ID NO: 2636587 - RNA, 22 nt, Human
gcagcugccuccccuccucugc

SEQ ID NO: 2636588 - RNA, 21 nt, Human
gcacaugagcuggcgggauug

SEQ ID NO: 2636589 - RNA, 18 nt, Human
gcacaguuuucugagaaa

SEQ ID NO: 2636590 - RNA, 17 nt, Human
gcacaguuuucugagaa

SEQ ID NO: 2636591 - RNA, 14 nt, Human
gcacaguuuucuga

SEQ ID NO: 2636592 - RNA, 17 nt, Human
gauuagggagagaagau

SEQ ID NO: 2636593 - RNA, 16 nt, Human
gaugugaacacaucag

SEQ ID NO: 2636594 - RNA, 14 nt, Human
gaugugaacacauc

SEQ ID NO: 2636595 - RNA, 14 nt, Human
gauuaccagggacu

SEQ ID NO: 2636596 - RNA, 16 nt, Human
gaguuuagcuggaaaa

SEQ ID NO: 2636597 - RNA, 21 nt, Human
gagugcucaguagucagacug

SEQ ID NO: 2636598 - RNA, 20 nt, Human
gauauguaccuaacgaagua

SEQ ID NO: 2636599 - RNA, 14 nt, Human
gagaaucacuugaa

SEQ ID NO: 2636600 - RNA, 15 nt, Human
gagaaucacuugaac

SEQ ID NO: 2636601 - RNA, 17 nt, Human
gacucuuaagaagacug

SEQ ID NO: 2636602 - RNA, 18 nt, Human
gacucuuaagaagacugc

SEQ ID NO: 2636603 - RNA, 16 nt, Human
gacucuuaagaagacu

SEQ ID NO: 2636604 - RNA, 22 nt, Human
gaaugagagacacacugaagaa

SEQ ID NO: 2636605 - RNA, 23 nt, Human
gaaugagagacacacugaagaag

SEQ ID NO: 2636606 - RNA, 20 nt, Human
gaaugagagacacacugaag

SEQ ID NO: 2636607 - RNA, 16 nt, Human
gacacuuaaaaauggu

SEQ ID NO: 2636608 - RNA, 17 nt, Human
gacagucaccucaugga

SEQ ID NO: 2636609 - RNA, 14 nt, Human
gacagugaaagaaa

SEQ ID NO: 2636610 - RNA, 14 nt, Human
gacacacugaagaa

SEQ ID NO: 2636611 - RNA, 13 nt, Human
gacacacugaaga

SEQ ID NO: 2636612 - RNA, 12 nt, Human
gacacacaugaa

SEQ ID NO: 2636613 - RNA, 11 nt, Human
gaauuaguuuu

SEQ ID NO: 2636614 - RNA, 12 nt, Human
ggauggcaagau

SEQ ID NO: 2636615 - RNA, 22 nt, Human
ggauguugaaaaaguucugcag

SEQ ID NO: 2636616 - RNA, 13 nt, Human
ggccuccauccug

SEQ ID NO: 2636617 - RNA, 23 nt, Human
ggccuucggccuccauccugagg

SEQ ID NO: 2636618 - RNA, 12 nt, Human
gggcagcugccu

SEQ ID NO: 2636619 - RNA, 17 nt, Human
gggauuguaaaauggug

SEQ ID NO: 2636620 - RNA, 16 nt, Human
gggauuguaaaauggu

SEQ ID NO: 2636621 - RNA, 22 nt, Human
aaaaauggaacauaaaauacaa

SEQ ID NO: 2636622 - RNA, 12 nt, Human
aaaaccacagca

SEQ ID NO: 2636623 - RNA, 14 nt, Human
aaaaccacagcagu

SEQ ID NO: 2636624 - RNA, 13 nt, Human
aaaaccacagcag

SEQ ID NO: 2636625 - RNA, 17 nt, Human
aaaagaugaaaauauuu

SEQ ID NO: 2636626 - RNA, 13 nt, Human
aaaacucauuuuu

SEQ ID NO: 2636627 - RNA, 19 nt, Human
gggacauuugcucauggaa

SEQ ID NO: 2636628 - RNA, 20 nt, Human
gggacauuugcucauggaau

SEQ ID NO: 2636629 - RNA, 21 nt, Human
gggacauuugcucauggaauu

SEQ ID NO: 2636630 - RNA, 19 nt, Human
aaaaguauguuagugcaaa

SEQ ID NO: 2636631 - RNA, 15 nt, Human
gggcgugguggugag

SEQ ID NO: 2636632 - RNA, 20 nt, Human
aaacaagcacuaaacaaaga

SEQ ID NO: 2636633 - RNA, 20 nt, Human
aaacagucucaggaaaucaa

SEQ ID NO: 2636634 - RNA, 15 nt, Human
aaaaugugauaugua

SEQ ID NO: 2636635 - RNA, 22 nt, Human
aaaauuuuuucucuaggaaaua

SEQ ID NO: 2636636 - RNA, 14 nt, Human
aaagacuauucaaa

SEQ ID NO: 2636637 - RNA, 17 nt, Human
aaagcagggacuugaac

SEQ ID NO: 2636638 - RNA, 15 nt, Human
aaagacuauucaaac

SEQ ID NO: 2636639 - RNA, 15 nt, Human
aaauaauuuuuauau

SEQ ID NO: 2636640 - RNA, 18 nt, Human
aaauaauuuuuauauuug

SEQ ID NO: 2636641 - RNA, 20 nt, Human
aaauaauuuuuauauuugaa

SEQ ID NO: 2636642 - RNA, 16 nt, Human
ggugugaccacugcag

SEQ ID NO: 2636643 - RNA, 16 nt, Human
gguuuagaaagcuugc

SEQ ID NO: 2636644 - RNA, 19 nt, Human
gcuuccuggcaauagucaa

SEQ ID NO: 2636645 - RNA, 13 nt, Human
gcuguauuuuaaa

SEQ ID NO: 2636646 - RNA, 12 nt, Human
gcuguauuuuaa

SEQ ID NO: 2636647 - RNA, 17 nt, Human
gcuuauuuccucauuuu

SEQ ID NO: 2636648 - RNA, 20 nt, Human
gcuccacuuggucugugaga

SEQ ID NO: 2636649 - RNA, 16 nt, Human
gcugaaacaacaaaua

SEQ ID NO: 2636650 - RNA, 12 nt, Human
gcugaacaucac

SEQ ID NO: 2636651 - RNA, 21 nt, Human
gcucugcccauccugccccug

SEQ ID NO: 2636652 - RNA, 15 nt, Human
gcucugcccauccug

SEQ ID NO: 2636653 - RNA, 13 nt, Human
gccagcaguucag

SEQ ID NO: 2636654 - RNA, 14 nt, Human
gccagcaguucaga

SEQ ID NO: 2636655 - RNA, 19 nt, Human
gccagcaguucagagcugc

SEQ ID NO: 2636656 - RNA, 20 nt, Human
gccagcaguucagagcugcc

SEQ ID NO: 2636657 - RNA, 21 nt, Human
gccagcaguucagagcugccc

SEQ ID NO: 2636658 - RNA, 22 nt, Human
gccaguuauggcuauaggugcu

SEQ ID NO: 2636659 - RNA, 16 nt, Human
gccauaugaaaaggcu

SEQ ID NO: 2636660 - RNA, 15 nt, Human
gccccacccucagau

SEQ ID NO: 2636661 - RNA, 18 nt, Human
gccccacccucagaugca

SEQ ID NO: 2636662 - RNA, 22 nt, Human
gccaugugcuaguaauuggaaa

SEQ ID NO: 2636663 - RNA, 20 nt, Human
gccuccauccugaggcucca

SEQ ID NO: 2636664 - RNA, 16 nt, Human
gccuccauccugaggc

SEQ ID NO: 2636665 - RNA, 17 nt, Human
gcuacuugggaggcuga

SEQ ID NO: 2636666 - RNA, 15 nt, Human
gcuacugucagcucc

SEQ ID NO: 2636667 - RNA, 17 nt, Human
gcuacaaaaacacagca

SEQ ID NO: 2636668 - RNA, 19 nt, Human
gcuacaaaaacacagcaag

SEQ ID NO: 2636669 - RNA, 18 nt, Human
gcuacaaaaacacagcaa

SEQ ID NO: 2636670 - RNA, 20 nt, Human
cucuuagaugcaguucugaa

SEQ ID NO: 2636671 - RNA, 15 nt, Human
cucuuagaugcaguu

SEQ ID NO: 2636672 - RNA, 11 nt, Human
cucucuggccu

SEQ ID NO: 2636673 - RNA, 12 nt, Human
cucucuggccuu

SEQ ID NO: 2636674 - RNA, 14 nt, Human
cucccugcaauaaa

SEQ ID NO: 2636675 - RNA, 16 nt, Human
cucccugcaauaaaau

SEQ ID NO: 2636676 - RNA, 21 nt, Human
cuccagugagacagcucugca

SEQ ID NO: 2636677 - RNA, 15 nt, Human
cguggugauuuagca

SEQ ID NO: 2636678 - RNA, 15 nt, Human
cuacaugagguacug

SEQ ID NO: 2636679 - RNA, 23 nt, Human
cuaagugaaauaagccagacauc

SEQ ID NO: 2636680 - RNA, 20 nt, Human
cuaagugaaauaagccagac

SEQ ID NO: 2636681 - RNA, 23 nt, Human
cuaguugaucagcuuauugucua

SEQ ID NO: 2636682 - RNA, 19 nt, Human
cuagaacucccuuucaaca

SEQ ID NO: 2636683 - RNA, 18 nt, Human
cuagaacucccuuucaac

SEQ ID NO: 2636684 - RNA, 17 nt, Human
cuagaacucccuuucaa

SEQ ID NO: 2636685 - RNA, 16 nt, Human
cuagaacucccuuuca

SEQ ID NO: 2636686 - RNA, 16 nt, Human
cgacagugagacucug

SEQ ID NO: 2636687 - RNA, 15 nt, Human
cgacagugagacucu

SEQ ID NO: 2636688 - RNA, 15 nt, Human
ccagauccuggaaau

SEQ ID NO: 2636689 - RNA, 20 nt, Human
cccauauuuguacaccaaua

SEQ ID NO: 2636690 - RNA, 16 nt, Human
cccagccagcaguuca

SEQ ID NO: 2636691 - RNA, 17 nt, Human
cccagccagcaguucag

SEQ ID NO: 2636692 - RNA, 20 nt, Human
cccagccagcaguucagagc

SEQ ID NO: 2636693 - RNA, 23 nt, Human
cccauuguggucacaggaaguag

SEQ ID NO: 2636694 - RNA, 22 nt, Human
cccauuguggucacaggaagua

SEQ ID NO: 2636695 - RNA, 23 nt, Human
cccgggaggcagagguugcagug

SEQ ID NO: 2636696 - RNA, 17 nt, Human
cccuucuuuccacagaa

SEQ ID NO: 2636697 - RNA, 13 nt, Human
cccuucucuguau

SEQ ID NO: 2636698 - RNA, 24 nt, Human
ccguagacgugcacgcacacuguc

SEQ ID NO: 2636699 - RNA, 16 nt, Human
ccguagguuauuuuca

SEQ ID NO: 2636700 - RNA, 20 nt, Human
ccucauguccacugguucuu

SEQ ID NO: 2636701 - RNA, 15 nt, Human
ccucauguccacugg

SEQ ID NO: 2636702 - RNA, 13 nt, Human
ccucugcuugcca

SEQ ID NO: 2636703 - RNA, 17 nt, Human
ccucugcuugccauccc

SEQ ID NO: 2636704 - RNA, 19 nt, Human
cagggaggacgcucucugg

SEQ ID NO: 2636705 - RNA, 22 nt, Human
cagggaggacgcucucuggccu

SEQ ID NO: 2636706 - RNA, 23 nt, Human
caggacagcccuucuuuccacag

SEQ ID NO: 2636707 - RNA, 24 nt, Human
caggacagcccuucuuuccacaga

SEQ ID NO: 2636708 - RNA, 17 nt, Human
cagcuuauucacaagac

SEQ ID NO: 2636709 - RNA, 16 nt, Human
cagcuuauucacaaga

SEQ ID NO: 2636710 - RNA, 22 nt, Human
caggaaaucaaauaugcaaagc

SEQ ID NO: 2636711 - RNA, 21 nt, Human
caggaaaucaaauaugcaaag

SEQ ID NO: 2636712 - RNA, 19 nt, Human
caggaaaucaaauaugcaa

SEQ ID NO: 2636713 - RNA, 18 nt, Human
cagcaguucagagcugcc

SEQ ID NO: 2636714 - RNA, 19 nt, Human
cagcaguucagagcugccc

SEQ ID NO: 2636715 - RNA, 20 nt, Human
cagcaguucagagcugcccu

SEQ ID NO: 2636716 - RNA, 21 nt, Human
cagcaguucagagcugcccuc

SEQ ID NO: 2636717 - RNA, 22 nt, Human
cagcaguucagagcugcccucu

SEQ ID NO: 2636718 - RNA, 19 nt, Human
cagccccgugggguuccuc

SEQ ID NO: 2636719 - RNA, 23 nt, Human
cagccugagcgacagugagacuc

SEQ ID NO: 2636720 - RNA, 18 nt, Human
cauagauucccugagcag

SEQ ID NO: 2636721 - RNA, 17 nt, Human
cauagauucccugagca

SEQ ID NO: 2636722 - RNA, 20 nt, Human
cauagcagcuuauucacaag

SEQ ID NO: 2636723 - RNA, 20 nt, Human
caucagcuugcccuguuaaa

SEQ ID NO: 2636724 - RNA, 15 nt, Human
caucagcugcugaaa

SEQ ID NO: 2636725 - RNA, 18 nt, Human
caucagcugcugaaacaa

SEQ ID NO: 2636726 - RNA, 17 nt, Human
caucagcugcugaaaca

SEQ ID NO: 2636727 - RNA, 16 nt, Human
caugaauuaguuuuau

SEQ ID NO: 2636728 - RNA, 12 nt, Human
cauuuccaagca

SEQ ID NO: 2636729 - RNA, 15 nt, Human
cauuaggauggcuag

SEQ ID NO: 2636730 - RNA, 18 nt, Human
ccaaauguucaucaauga

SEQ ID NO: 2636731 - RNA, 15 nt, Human
caauucuugccaaau

SEQ ID NO: 2636732 - RNA, 16 nt, Human
caaugcuguauuuuaa

SEQ ID NO: 2636733 - RNA, 17 nt, Human
caaugcuguauuuuaaa

SEQ ID NO: 2636734 - RNA, 15 nt, Human
caaugcuguauuuua

SEQ ID NO: 2636735 - RNA, 18 nt, Human
cacaagacugcacaucaa

SEQ ID NO: 2636736 - RNA, 17 nt, Human
cacacaugaaguccaag

SEQ ID NO: 2636737 - RNA, 22 nt, Human
cacacaugaaguccaagcauuu

SEQ ID NO: 2636738 - RNA, 17 nt, Human
cacagccucuuagaugc

SEQ ID NO: 2636739 - RNA, 21 nt, Human
cacagccucuuagaugcaguu

SEQ ID NO: 2636740 - RNA, 14 nt, Human
caaguccaagcaua

SEQ ID NO: 2636741 - RNA, 22 nt, Human
cacugguucuucuuggucucag

SEQ ID NO: 2636742 - RNA, 16 nt, Human
cacuugucaauaaaau

SEQ ID NO: 2636743 - RNA, 19 nt, Human
cacuuguguuuugcaagcc

SEQ ID NO: 2636744 - RNA, 22 nt, Human
cacuuguguuuugcaagccaga

SEQ ID NO: 2636745 - RNA, 21 nt, Human
cacugcagaagacaguauggc

SEQ ID NO: 2636746 - RNA, 21 nt, Human
cacuagggcagggacaggaua

SEQ ID NO: 2636747 - RNA, 20 nt, Human
cacuagggcagggacaggau

SEQ ID NO: 2636748 - RNA, 19 nt, Human
auuuuauagcuacuaauuu

SEQ ID NO: 2636749 - RNA, 17 nt, Human
auuuuauagcuacuaau

SEQ ID NO: 2636750 - RNA, 14 nt, Human
auuugcucauggaa

SEQ ID NO: 2636751 - RNA, 17 nt, Human
auuugcucauggaauug

SEQ ID NO: 2636752 - RNA, 22 nt, Human
caaagcacugacuucuaaguaa

SEQ ID NO: 2636753 - RNA, 20 nt, Human
caaagcacugacuucuaagu

SEQ ID NO: 2636754 - RNA, 23 nt, Human
caacacgagcaggcuacugucag

SEQ ID NO: 2636755 - RNA, 15 nt, Human
caaauccuugaagau

SEQ ID NO: 2636756 - RNA, 13 nt, Human
caaacccaguguu

SEQ ID NO: 2636757 - RNA, 24 nt, Human
caaacccaguguuuuaggagcaug

SEQ ID NO: 2636758 - RNA, 15 nt, Human
caaaaggcagaagca

SEQ ID NO: 2636759 - RNA, 20 nt, Human
caaaaaaaaaaaaaaauuag

SEQ ID NO: 2636760 - RNA, 14 nt, Human
auuguaaaauggug

SEQ ID NO: 2636761 - RNA, 23 nt, Human
auuguaauaggcguaacuaauuu

SEQ ID NO: 2636762 - RNA, 16 nt, Human
auuagggagagaagau

SEQ ID NO: 2636763 - RNA, 14 nt, Human
auuaugaauuacau

SEQ ID NO: 2636764 - RNA, 17 nt, Human
auuaugaauuacauuug

SEQ ID NO: 2636765 - RNA, 18 nt, Human
auuaugaauuacauuugu

SEQ ID NO: 2636766 - RNA, 19 nt, Human
auucacaagacccaaaagg

SEQ ID NO: 2636767 - RNA, 22 nt, Human
auucauagcagcuuauucacaa

SEQ ID NO: 2636768 - RNA, 19 nt, Human
auucauagcagcuuauuca

SEQ ID NO: 2636769 - RNA, 13 nt, Human
uugcccuguuaaa

SEQ ID NO: 2636770 - RNA, 18 nt, Human
uugauggugguauguuuu

SEQ ID NO: 2636771 - RNA, 19 nt, Human
uugauggugguauguuuuc

SEQ ID NO: 2636772 - RNA, 21 nt, Human
aucucauuuccaagcaaguau

SEQ ID NO: 2636773 - RNA, 23 nt, Human
aucucauuuccaagcaaguauua

SEQ ID NO: 2636774 - RNA, 13 nt, Human
aucucaauauuuc

SEQ ID NO: 2636775 - RNA, 18 nt, Human
augaaauauuauguuaaa

SEQ ID NO: 2636776 - RNA, 13 nt, Human
augaaauauuaug

SEQ ID NO: 2636777 - RNA, 17 nt, Human
augaaauauuauguuaa

SEQ ID NO: 2636778 - RNA, 13 nt, Human
augaaugaauggc

SEQ ID NO: 2636779 - RNA, 18 nt, Human
augaagauguagaggaga

SEQ ID NO: 2636780 - RNA, 13 nt, Human
aucuuuuucuaac

SEQ ID NO: 2636781 - RNA, 15 nt, Human
augaaagcagggacu

SEQ ID NO: 2636782 - RNA, 16 nt, Human
uuguauaaaauaauuu

SEQ ID NO: 2636783 - RNA, 15 nt, Human
uuguauaaaauaauu

SEQ ID NO: 2636784 - RNA, 17 nt, Human
uuguauaaaauaauuuu

SEQ ID NO: 2636785 - RNA, 16 nt, Human
uuguaucacaaaucuu

SEQ ID NO: 2636786 - RNA, 13 nt, Human
augagagacacac

SEQ ID NO: 2636787 - RNA, 14 nt, Human
augagagacacacu

SEQ ID NO: 2636788 - RNA, 17 nt, Human
augagagacacacugaa

SEQ ID NO: 2636789 - RNA, 19 nt, Human
augagagacacacugaaga

SEQ ID NO: 2636790 - RNA, 20 nt, Human
auggcuaguaucaaaagaaa

SEQ ID NO: 2636791 - RNA, 22 nt, Human
uuuagcuggaaaaguauguuag

SEQ ID NO: 2636792 - RNA, 20 nt, Human
uuuagcuggaaaaguauguu

SEQ ID NO: 2636793 - RNA, 13 nt, Human
uuuauauaagcuu

SEQ ID NO: 2636794 - RNA, 15 nt, Human
augcuagaacucccu

SEQ ID NO: 2636795 - RNA, 19 nt, Human
augcuagaacucccuuuca

SEQ ID NO: 2636796 - RNA, 16 nt, Human
augcuagaacucccuu

SEQ ID NO: 2636797 - RNA, 22 nt, Human
augcugucuacacuaagagaga

SEQ ID NO: 2636798 - RNA, 15 nt, Human
augcaguucugaaga

SEQ ID NO: 2636799 - RNA, 17 nt, Human
augcaguucugaagaag

SEQ ID NO: 2636800 - RNA, 18 nt, Human
augcaguucugaagaaga

SEQ ID NO: 2636801 - RNA, 19 nt, Human
augcaguucugaagaagau

SEQ ID NO: 2636802 - RNA, 17 nt, Human
augccacuaaauugaca

SEQ ID NO: 2636803 - RNA, 15 nt, Human
augccacuaaauuga

SEQ ID NO: 2636804 - RNA, 14 nt, Human
uuguuuucauuauc

SEQ ID NO: 2636805 - RNA, 23 nt, Human
augagagacacacugaagaagca

SEQ ID NO: 2636806 - RNA, 20 nt, Human
augagagacacacugaagaa

SEQ ID NO: 2636807 - RNA, 21 nt, Human
augagagacacacugaagaag

SEQ ID NO: 2636808 - RNA, 23 nt, Human
uugugugaaagguacuucaaauc

SEQ ID NO: 2636809 - RNA, 15 nt, Human
augcaaagcacugac

SEQ ID NO: 2636810 - RNA, 22 nt, Human
augauuaugaauuacauuugua

SEQ ID NO: 2636811 - RNA, 12 nt, Human
augauucccagc

SEQ ID NO: 2636812 - RNA, 20 nt, Human
aucaaauaugcaaagcacug

SEQ ID NO: 2636813 - RNA, 17 nt, Human
uucuaaguaaaaccaca

SEQ ID NO: 2636814 - RNA, 20 nt, Human
uucuaaguaaaaccacagca

SEQ ID NO: 2636815 - RNA, 19 nt, Human
uucuaaguaaaaccacagc

SEQ ID NO: 2636816 - RNA, 14 nt, Human
uucuauaauuuaaa

SEQ ID NO: 2636817 - RNA, 13 nt, Human
uucuauaauuuaa

SEQ ID NO: 2636818 - RNA, 21 nt, Human
uucuaaguaaaaccacagcag

SEQ ID NO: 2636819 - RNA, 20 nt, Human
aucauuucugcaucagcugc

SEQ ID NO: 2636820 - RNA, 14 nt, Human
auccauacauuugu

SEQ ID NO: 2636821 - RNA, 18 nt, Human
uugaacccgggaggcaga

SEQ ID NO: 2636822 - RNA, 19 nt, Human
uugaaauauugacuuuuua

SEQ ID NO: 2636823 - RNA, 18 nt, Human
uucccaacuccagaaagu

SEQ ID NO: 2636824 - RNA, 12 nt, Human
uucccaaauuuc

SEQ ID NO: 2636825 - RNA, 22 nt, Human
auaggaauugacccacaagaaa

SEQ ID NO: 2636826 - RNA, 17 nt, Human
auaggcguaacuaauuu

SEQ ID NO: 2636827 - RNA, 23 nt, Human
uucacaagacccaaaaggcagaa

SEQ ID NO: 2636828 - RNA, 14 nt, Human
uucaaacauauaua

SEQ ID NO: 2636829 - RNA, 18 nt, Human
uucaaacagucucaggaa

SEQ ID NO: 2636830 - RNA, 20 nt, Human
auaguuguaccgcaauguga

SEQ ID NO: 2636831 - RNA, 17 nt, Human
auauaacaaugcuguau

SEQ ID NO: 2636832 - RNA, 14 nt, Human
auauauaacaaugc

SEQ ID NO: 2636833 - RNA, 18 nt, Human
auuuguaguguuggagaa

SEQ ID NO: 2636834 - RNA, 23 nt, Human
auuugguaaggggaauugaggac

SEQ ID NO: 2636835 - RNA, 22 nt, Human
auuuauuacuguaagaaaauau

SEQ ID NO: 2636836 - RNA, 21 nt, Human
auuuguauaaaauaauuuuua

SEQ ID NO: 2636837 - RNA, 15 nt, Human
auuuguaucacaaau

SEQ ID NO: 2636838 - RNA, 14 nt, Human
auuuuaauaauguu

SEQ ID NO: 2636839 - RNA, 15 nt, Human
auuuuaauaauguuu

SEQ ID NO: 2636840 - RNA, 16 nt, Human
auuuuaauaauguuuc

SEQ ID NO: 2636841 - RNA, 20 nt, Human
auugacacuuaaaaaugguu

SEQ ID NO: 2636842 - RNA, 21 nt, Human
auugacccacaagaaaugaaa

SEQ ID NO: 2636843 - RNA, 13 nt, Human
auugugccccugc

SEQ ID NO: 2636844 - RNA, 15 nt, Human
auuguauuacaaauc

SEQ ID NO: 2636845 - RNA, 14 nt, Human
auuguauuacaaau

SEQ ID NO: 2636846 - RNA, 19 nt, Human
auuuaaagcuuauuaaaac

SEQ ID NO: 2636847 - RNA, 16 nt, Human
auuuacaaaugggaaa

SEQ ID NO: 2636848 - RNA, 20 nt, Human
auuccacuuauaggaauuga

SEQ ID NO: 2636849 - RNA, 15 nt, Human
auucaaacagucuca

SEQ ID NO: 2636850 - RNA, 14 nt, Human
auucaaacagucuc

SEQ ID NO: 2636851 - RNA, 23 nt, Human
uuuuuuaaaaaagaaacauuugg

SEQ ID NO: 2636852 - RNA, 13 nt, Human
auuaaguaaugau

SEQ ID NO: 2636853 - RNA, 15 nt, Human
auuaaguaaugauaa

SEQ ID NO: 2636854 - RNA, 13 nt, Human
auuacauuuguau

SEQ ID NO: 2636855 - RNA, 15 nt, Human
auuacauuuguauaa

SEQ ID NO: 2636856 - RNA, 16 nt, Human
auuacauuuguauaaa

SEQ ID NO: 2636857 - RNA, 16 nt, Human
auuauauuuacaaaug

SEQ ID NO: 2636858 - RNA, 17 nt, Human
auuauauuuacaaaugg

SEQ ID NO: 2636859 - RNA, 23 nt, Human
auuaucucaaaacugcacuguca

SEQ ID NO: 2636860 - RNA, 18 nt, Human
auuaucucaaaacugcac

SEQ ID NO: 2636861 - RNA, 20 nt, Human
auuauuaccuuacagaaguu

SEQ ID NO: 2636862 - RNA, 18 nt, Human
auguuucaaacauauaua

SEQ ID NO: 2636863 - RNA, 21 nt, Human
auguuucaaacauauauaaca

SEQ ID NO: 2636864 - RNA, 16 nt, Human
auuaaaagaauauuuu

SEQ ID NO: 2636865 - RNA, 14 nt, Human
uuuuauaauuuugu

SEQ ID NO: 2636866 - RNA, 19 nt, Human
uuuuauggcacuaguauuu

SEQ ID NO: 2636867 - RNA, 23 nt, Human
uuuuauggaggcuuugcauagau

SEQ ID NO: 2636868 - RNA, 15 nt, Human
auguugacaugggac

SEQ ID NO: 2636869 - RNA, 19 nt, Human
auguucaucaaugaaugaa

SEQ ID NO: 2636870 - RNA, 13 nt, Human
uuuuaaaaaagaa

SEQ ID NO: 2636871 - RNA, 14 nt, Human
uuuuaaaagaauga

SEQ ID NO: 2636872 - RNA, 15 nt, Human
uuuuaaaagaaugau

SEQ ID NO: 2636873 - RNA, 13 nt, Human
uuugcucauggaa

SEQ ID NO: 2636874 - RNA, 11 nt, Human
uuugcucaugg

SEQ ID NO: 2636875 - RNA, 12 nt, Human
uuugcucaugga

SEQ ID NO: 2636876 - RNA, 15 nt, Human
auggcuauaggugcu

SEQ ID NO: 2636877 - RNA, 15 nt, Human
auaaauaguuuauga

SEQ ID NO: 2636878 - RNA, 14 nt, Human
auaaauaaaaauaa

SEQ ID NO: 2636879 - RNA, 13 nt, Human
auaaauaaaaaua

SEQ ID NO: 2636880 - RNA, 22 nt, Human
auaacgauaaaagacagugaaa

SEQ ID NO: 2636881 - RNA, 18 nt, Human
auaauccuaaacauauga

SEQ ID NO: 2636882 - RNA, 14 nt, Human
uuagggagagaaga

SEQ ID NO: 2636883 - RNA, 14 nt, Human
aguuuaaauuguaa

SEQ ID NO: 2636884 - RNA, 13 nt, Human
uguuucaaacaua

SEQ ID NO: 2636885 - RNA, 20 nt, Human
uuaagaagacugcauuauau

SEQ ID NO: 2636886 - RNA, 12 nt, Human
auaaaauaauuu

SEQ ID NO: 2636887 - RNA, 15 nt, Human
auaaaauaauuuuua

SEQ ID NO: 2636888 - RNA, 18 nt, Human
aguuuucugagaaagacu

SEQ ID NO: 2636889 - RNA, 19 nt, Human
aguuuucugagaaagacua

SEQ ID NO: 2636890 - RNA, 23 nt, Human
aguuuucugagaaagacuauuca

SEQ ID NO: 2636891 - RNA, 19 nt, Human
aguucggugagcuacaaau

SEQ ID NO: 2636892 - RNA, 23 nt, Human
aguguuggagaagaacugaaauc

SEQ ID NO: 2636893 - RNA, 17 nt, Human
aguguuggagaagaacu

SEQ ID NO: 2636894 - RNA, 18 nt, Human
aguguuggagaagaacug

SEQ ID NO: 2636895 - RNA, 14 nt, Human
aguguuggagaaga

SEQ ID NO: 2636896 - RNA, 16 nt, Human
aguguuggagaagaac

SEQ ID NO: 2636897 - RNA, 22 nt, Human
agugcaaauugucacaggacag

SEQ ID NO: 2636898 - RNA, 18 nt, Human
agugcaaauugucacagg

SEQ ID NO: 2636899 - RNA, 21 nt, Human
agugcaaauugucacaggaca

SEQ ID NO: 2636900 - RNA, 21 nt, Human
agugccuguaaucacagcuac

SEQ ID NO: 2636901 - RNA, 23 nt, Human
agucagacuggauaguccgucuc

SEQ ID NO: 2636902 - RNA, 16 nt, Human
agucaggaaagagaac

SEQ ID NO: 2636903 - RNA, 15 nt, Human
agucaggaaagagaa

SEQ ID NO: 2636904 - RNA, 21 nt, Human
ugucaauaaaauccauacauu

SEQ ID NO: 2636905 - RNA, 20 nt, Human
ugucaaucagccuaguugau

SEQ ID NO: 2636906 - RNA, 23 nt, Human
ugucauuugcuggagcucugccc

SEQ ID NO: 2636907 - RNA, 22 nt, Human
aguauuucuaugaaauauuaug

SEQ ID NO: 2636908 - RNA, 13 nt, Human
aguauuucuauga

SEQ ID NO: 2636909 - RNA, 15 nt, Human
aguauuucuaugaaa

SEQ ID NO: 2636910 - RNA, 18 nt, Human
uguagaggagaaacugga

SEQ ID NO: 2636911 - RNA, 15 nt, Human
aguaaaaccacagca

SEQ ID NO: 2636912 - RNA, 19 nt, Human
aguagauaggccaugggca

SEQ ID NO: 2636913 - RNA, 17 nt, Human
agggcagggacaggaua

SEQ ID NO: 2636914 - RNA, 20 nt, Human
ugguaaggggaauugaggac

SEQ ID NO: 2636915 - RNA, 23 nt, Human
agguacuucaaauccuugaagau

SEQ ID NO: 2636916 - RNA, 17 nt, Human
aggguuaugauuaagua

SEQ ID NO: 2636917 - RNA, 22 nt, Human
agcugcccucuccugggcagcu

SEQ ID NO: 2636918 - RNA, 15 nt, Human
agcugccuccccucc

SEQ ID NO: 2636919 - RNA, 17 nt, Human
agcugccuccccuccuc

SEQ ID NO: 2636920 - RNA, 16 nt, Human
agcugccuccccuccu

SEQ ID NO: 2636921 - RNA, 19 nt, Human
agcuguucacagccagacu

SEQ ID NO: 2636922 - RNA, 16 nt, Human
agcuguucacagccag

SEQ ID NO: 2636923 - RNA, 17 nt, Human
agcuugaaacugagaug

SEQ ID NO: 2636924 - RNA, 20 nt, Human
ugcuacaaaaacacagcaag

SEQ ID NO: 2636925 - RNA, 19 nt, Human
ugcuacaaaaacacagcaa

SEQ ID NO: 2636926 - RNA, 18 nt, Human
ugcuacaaaaacacagca

SEQ ID NO: 2636927 - RNA, 17 nt, Human
ugcuacaaaaacacagc

SEQ ID NO: 2636928 - RNA, 16 nt, Human
ugcuacaaaaacacag

SEQ ID NO: 2636929 - RNA, 14 nt, Human
ugcucauggaauug

SEQ ID NO: 2636930 - RNA, 13 nt, Human
aggaaauauuuau

SEQ ID NO: 2636931 - RNA, 23 nt, Human
aggaaaucaaauaugcaaagcac

SEQ ID NO: 2636932 - RNA, 12 nt, Human
aggaaauauuua

SEQ ID NO: 2636933 - RNA, 23 nt, Human
ugcuguauuuuaaaagaaugauu

SEQ ID NO: 2636934 - RNA, 17 nt, Human
aggacacugauaugggu

SEQ ID NO: 2636935 - RNA, 13 nt, Human
ugcuguauuuuaa

SEQ ID NO: 2636936 - RNA, 21 nt, Human
ugcuguauuuuaaaagaauga

SEQ ID NO: 2636937 - RNA, 22 nt, Human
ugcuguauuuuaaaagaaugau

SEQ ID NO: 2636938 - RNA, 14 nt, Human
uggagcucguggaa

SEQ ID NO: 2636939 - RNA, 13 nt, Human
uggagaagaacug

SEQ ID NO: 2636940 - RNA, 14 nt, Human
uggagaagaacuga

SEQ ID NO: 2636941 - RNA, 14 nt, Human
uggccuucggccuc

SEQ ID NO: 2636942 - RNA, 18 nt, Human
uggcacaguuuucugaga

SEQ ID NO: 2636943 - RNA, 19 nt, Human
uggcacaguuuucugagaa

SEQ ID NO: 2636944 - RNA, 18 nt, Human
agcccauggcacucuaug

SEQ ID NO: 2636945 - RNA, 15 nt, Human
agccucauguccacu

SEQ ID NO: 2636946 - RNA, 20 nt, Human
agccucauguccacugguuc

SEQ ID NO: 2636947 - RNA, 22 nt, Human
agccugaaagaggaaugaagua

SEQ ID NO: 2636948 - RNA, 20 nt, Human
agccuuggggcugaugcagu

SEQ ID NO: 2636949 - RNA, 19 nt, Human
agcuacuaauuuuaaaaug

SEQ ID NO: 2636950 - RNA, 17 nt, Human
agcuacuugggaggcug

SEQ ID NO: 2636951 - RNA, 18 nt, Human
agcuacuugggaggcuga

SEQ ID NO: 2636952 - RNA, 17 nt, Human
ugaugaagaaguugaua

SEQ ID NO: 2636953 - RNA, 14 nt, Human
ugauuaccagggac

SEQ ID NO: 2636954 - RNA, 12 nt, Human
ugauuaaaccaa

SEQ ID NO: 2636955 - RNA, 14 nt, Human
ugaugaucuuuaaa

SEQ ID NO: 2636956 - RNA, 17 nt, Human
ugaugaucuuuaaaaua

SEQ ID NO: 2636957 - RNA, 19 nt, Human
agccagacuggcacaguuu

SEQ ID NO: 2636958 - RNA, 14 nt, Human
agccagacuggcac

SEQ ID NO: 2636959 - RNA, 18 nt, Human
ugagugucuuaauuaaaa

SEQ ID NO: 2636960 - RNA, 23 nt, Human
agcauaaauguugacaugggaca

SEQ ID NO: 2636961 - RNA, 22 nt, Human
ugaguaacugauuuguaacaag

SEQ ID NO: 2636962 - RNA, 18 nt, Human
agcauuguaaaugugcuu

SEQ ID NO: 2636963 - RNA, 17 nt, Human
agcauuguaaaugugcu

SEQ ID NO: 2636964 - RNA, 20 nt, Human
agcaugucgucaaagcugaa

SEQ ID NO: 2636965 - RNA, 17 nt, Human
agcaugucgucaaagcu

SEQ ID NO: 2636966 - RNA, 12 nt, Human
ugauaugggucu

SEQ ID NO: 2636967 - RNA, 16 nt, Human
agaugcaguucugaag

SEQ ID NO: 2636968 - RNA, 16 nt, Human
ugacacuuaaaaaugg

SEQ ID NO: 2636969 - RNA, 17 nt, Human
ugacacuuaaaaauggu

SEQ ID NO: 2636970 - RNA, 15 nt, Human
agauucccugagcag

SEQ ID NO: 2636971 - RNA, 24 nt, Human
ugacuucuaaguaaaaccacagca

SEQ ID NO: 2636972 - RNA, 15 nt, Human
ugacuucuaaguaaa

SEQ ID NO: 2636973 - RNA, 23 nt, Human
ugacuucuaaguaaaaccacagc

SEQ ID NO: 2636974 - RNA, 22 nt, Human
ugacuucuaaguaaaaccacag

SEQ ID NO: 2636975 - RNA, 23 nt, Human
agcaacgcaggcccccaggugcc

SEQ ID NO: 2636976 - RNA, 15 nt, Human
ugaauacuuuauaaa

SEQ ID NO: 2636977 - RNA, 21 nt, Human
agacauagaauuaacacauga

SEQ ID NO: 2636978 - RNA, 14 nt, Human
agacauagaauuaa

SEQ ID NO: 2636979 - RNA, 18 nt, Human
agacaucaacagauaaau

SEQ ID NO: 2636980 - RNA, 17 nt, Human
agacaucaacagauaaa

SEQ ID NO: 2636981 - RNA, 14 nt, Human
agaaucacuugaac

SEQ ID NO: 2636982 - RNA, 15 nt, Human
ucuucacaacagauu

SEQ ID NO: 2636983 - RNA, 14 nt, Human
agacuauucaaaca

SEQ ID NO: 2636984 - RNA, 12 nt, Human
agacuauucaaa

SEQ ID NO: 2636985 - RNA, 15 nt, Human
agacuauucaaacag

SEQ ID NO: 2636986 - RNA, 16 nt, Human
agacuauucaaacagu

SEQ ID NO: 2636987 - RNA, 21 nt, Human
agagcaguuugguuucuagca

SEQ ID NO: 2636988 - RNA, 23 nt, Human
agagcaguuugguuucuagcaug

SEQ ID NO: 2636989 - RNA, 22 nt, Human
ugaaaaaguucugcagauaaac

SEQ ID NO: 2636990 - RNA, 20 nt, Human
ugaaaagcuccauuuuuagu

SEQ ID NO: 2636991 - RNA, 22 nt, Human
ugaaacugagaugugaacacau

SEQ ID NO: 2636992 - RNA, 19 nt, Human
ugaaacucguuaauuugua

SEQ ID NO: 2636993 - RNA, 13 nt, Human
agaaguugauaug

SEQ ID NO: 2636994 - RNA, 10 nt, Human
ucuggccuuc

SEQ ID NO: 2636995 - RNA, 19 nt, Human
agaagcaccaaucaugaau

SEQ ID NO: 2636996 - RNA, 19 nt, Human
agaagcaacccaaauguuc

SEQ ID NO: 2636997 - RNA, 20 nt, Human
ucugcccauccugccccuga

SEQ ID NO: 2636998 - RNA, 17 nt, Human
agaacucccuuucaaca

SEQ ID NO: 2636999 - RNA, 16 nt, Human
agaacucccuuucaac

SEQ ID NO: 2637000 - RNA, 15 nt, Human
agaacucccuuucaa

SEQ ID NO: 2637001 - RNA, 23 nt, Human
agaaacuuaagguuaccuuuguu

SEQ ID NO: 2637002 - RNA, 15 nt, Human
agaaacauuugguaa

SEQ ID NO: 2637003 - RNA, 16 nt, Human
agaaaacaaggaugaa

SEQ ID NO: 2637004 - RNA, 16 nt, Human
agaaacacaacuauau

SEQ ID NO: 2637005 - RNA, 16 nt, Human
agaaagacuauucaaa

SEQ ID NO: 2637006 - RNA, 18 nt, Human
agaaagcagaacagugau

SEQ ID NO: 2637007 - RNA, 17 nt, Human
agaaagcagaacaguga

SEQ ID NO: 2637008 - RNA, 20 nt, Human
agaaagcagaacagugauua

SEQ ID NO: 2637009 - RNA, 21 nt, Human
acuugaacccgggaggcagag

SEQ ID NO: 2637010 - RNA, 23 nt, Human
acuugaacccgggaggcagaggu

SEQ ID NO: 2637011 - RNA, 21 nt, Human
acuucuaaguaaaaccacagc

SEQ ID NO: 2637012 - RNA, 13 nt, Human
acuucuaaguaaa

SEQ ID NO: 2637013 - RNA, 19 nt, Human
acuucuaaguaaaaccaca

SEQ ID NO: 2637014 - RNA, 18 nt, Human
acuucuaaguaaaaccac

SEQ ID NO: 2637015 - RNA, 17 nt, Human
ucucaaaacugcacugu

SEQ ID NO: 2637016 - RNA, 13 nt, Human
ucuauaauuuaaa

SEQ ID NO: 2637017 - RNA, 12 nt, Human
ucuagcaugaag

SEQ ID NO: 2637018 - RNA, 20 nt, Human
acuuccagauccuggaaauc

SEQ ID NO: 2637019 - RNA, 23 nt, Human
acugucagcuccccucggagaag

SEQ ID NO: 2637020 - RNA, 22 nt, Human
acugucagcuccccucggagaa

SEQ ID NO: 2637021 - RNA, 22 nt, Human
acugaagaagcaccaaucauga

SEQ ID NO: 2637022 - RNA, 17 nt, Human
ucuaccaaaaaucucaa

SEQ ID NO: 2637023 - RNA, 13 nt, Human
acuguggguagac

SEQ ID NO: 2637024 - RNA, 13 nt, Human
ucagagcugcccu

SEQ ID NO: 2637025 - RNA, 14 nt, Human
ucagagcugcccuc

SEQ ID NO: 2637026 - RNA, 18 nt, Human
ucagagcugcccucuccu

SEQ ID NO: 2637027 - RNA, 17 nt, Human
ucagagcugcccucucc

SEQ ID NO: 2637028 - RNA, 15 nt, Human
ucagagcugcccucu

SEQ ID NO: 2637029 - RNA, 16 nt, Human
ucagagcugcccucuc

SEQ ID NO: 2637030 - RNA, 12 nt, Human
ucagcccucaga

SEQ ID NO: 2637031 - RNA, 13 nt, Human
ucagcccucagaa

SEQ ID NO: 2637032 - RNA, 20 nt, Human
acccaaauguucaucaauga

SEQ ID NO: 2637033 - RNA, 16 nt, Human
acccaaauguucauca

SEQ ID NO: 2637034 - RNA, 13 nt, Human
ucaguagucagac

SEQ ID NO: 2637035 - RNA, 13 nt, Human
ucaaacagucuca

SEQ ID NO: 2637036 - RNA, 21 nt, Human
ucaaacagucucaggaaauca

SEQ ID NO: 2637037 - RNA, 20 nt, Human
ucaaacagucucaggaaauc

SEQ ID NO: 2637038 - RNA, 18 nt, Human
uauuuuaaaagaaugauu

SEQ ID NO: 2637039 - RNA, 14 nt, Human
uauuuuaaaagaau

SEQ ID NO: 2637040 - RNA, 22 nt, Human
uauuuuaauaauguuucaaaca

SEQ ID NO: 2637041 - RNA, 19 nt, Human
uauuuuaauaauguuucaa

SEQ ID NO: 2637042 - RNA, 23 nt, Human
ucaauauuucagauaaucacaau

SEQ ID NO: 2637043 - RNA, 19 nt, Human
accaacacgagcaggcuac

SEQ ID NO: 2637044 - RNA, 14 nt, Human
accaacacgagcag

SEQ ID NO: 2637045 - RNA, 16 nt, Human
accacaagacugcaca

SEQ ID NO: 2637046 - RNA, 22 nt, Human
ucacagcuuauuuccucauuuu

SEQ ID NO: 2637047 - RNA, 23 nt, Human
ucacagccagacuggcacaguuu

SEQ ID NO: 2637048 - RNA, 17 nt, Human
ucacagccagacuggca

SEQ ID NO: 2637049 - RNA, 13 nt, Human
ucaauuuaaaaaa

SEQ ID NO: 2637050 - RNA, 12 nt, Human
ucaauuuaaaaa

SEQ ID NO: 2637051 - RNA, 16 nt, Human
ucacagaccuuugaac

SEQ ID NO: 2637052 - RNA, 16 nt, Human
ucauaauaaguugcau

SEQ ID NO: 2637053 - RNA, 17 nt, Human
accugagccccaaaagg

SEQ ID NO: 2637054 - RNA, 12 nt, Human
accugagcccca

SEQ ID NO: 2637055 - RNA, 16 nt, Human
acgcucucuggccuuc

SEQ ID NO: 2637056 - RNA, 15 nt, Human
acgcucucuggccuu

SEQ ID NO: 2637057 - RNA, 17 nt, Human
acgcucucuggccuucg

SEQ ID NO: 2637058 - RNA, 22 nt, Human
uccaugaagauguagaggagaa

SEQ ID NO: 2637059 - RNA, 11 nt, Human
uccauccugag

SEQ ID NO: 2637060 - RNA, 14 nt, Human
uccagugagacagc

SEQ ID NO: 2637061 - RNA, 14 nt, Human
acuccagaaaguga

SEQ ID NO: 2637062 - RNA, 18 nt, Human
acuccagaaagugacaag

SEQ ID NO: 2637063 - RNA, 21 nt, Human
uccugaaaacccuugccaugu

SEQ ID NO: 2637064 - RNA, 22 nt, Human
uccugaaaacccuugccaugug

SEQ ID NO: 2637065 - RNA, 17 nt, Human
uccucuccccaugaugu

SEQ ID NO: 2637066 - RNA, 21 nt, Human
acuccaaacugacucuuaaga

SEQ ID NO: 2637067 - RNA, 19 nt, Human
ucccuccaccucccugcaa

SEQ ID NO: 2637068 - RNA, 14 nt, Human
ucccuccaccuccc

SEQ ID NO: 2637069 - RNA, 15 nt, Human
ucccuccaccucccu

SEQ ID NO: 2637070 - RNA, 17 nt, Human
ucccuccaccucccugc

SEQ ID NO: 2637071 - RNA, 14 nt, Human
uccccuccucugcu

SEQ ID NO: 2637072 - RNA, 15 nt, Human
uccccuccucugcuu

SEQ ID NO: 2637073 - RNA, 18 nt, Human
uccccuccucugcuugcc

SEQ ID NO: 2637074 - RNA, 24 nt, Human
uccccuccucugcuugccaucccu

SEQ ID NO: 2637075 - RNA, 18 nt, Human
acuauucaaacagucuca

SEQ ID NO: 2637076 - RNA, 16 nt, Human
acuauucaaacagucu

SEQ ID NO: 2637077 - RNA, 14 nt, Human
acuauucaaacagu

SEQ ID NO: 2637078 - RNA, 13 nt, Human
acuauucaaacag

SEQ ID NO: 2637079 - RNA, 20 nt, Human
acuagaguuuagcuggaaaa

SEQ ID NO: 2637080 - RNA, 16 nt, Human
uagaacucccuuucaa

SEQ ID NO: 2637081 - RNA, 18 nt, Human
uagaacucccuuucaaca

SEQ ID NO: 2637082 - RNA, 17 nt, Human
uagaacucccuuucaac

SEQ ID NO: 2637083 - RNA, 15 nt, Human
uagaaacacaacuau

SEQ ID NO: 2637084 - RNA, 13 nt, Human
uagacacacauga

SEQ ID NO: 2637085 - RNA, 14 nt, Human
uagaggguguguaa

SEQ ID NO: 2637086 - RNA, 15 nt, Human
acaaaaacacagcaa

SEQ ID NO: 2637087 - RNA, 14 nt, Human
acaaaaacacagca

SEQ ID NO: 2637088 - RNA, 13 nt, Human
acaaaaacacagc

SEQ ID NO: 2637089 - RNA, 13 nt, Human
acacaacuauauu

SEQ ID NO: 2637090 - RNA, 13 nt, Human
uaggauguugaaa

SEQ ID NO: 2637091 - RNA, 12 nt, Human
uauaggaauuga

SEQ ID NO: 2637092 - RNA, 16 nt, Human
uauaggugcuacaaaa

SEQ ID NO: 2637093 - RNA, 17 nt, Human
acacucaaaucaagaaa

SEQ ID NO: 2637094 - RNA, 18 nt, Human
acacucaaaucaagaaac

SEQ ID NO: 2637095 - RNA, 13 nt, Human
acacucaaaucaa

SEQ ID NO: 2637096 - RNA, 14 nt, Human
uaucacaaaucuua

SEQ ID NO: 2637097 - RNA, 20 nt, Human
uaucacaaaucuuaacuuga

SEQ ID NO: 2637098 - RNA, 16 nt, Human
uaucacaaaucuuaac

SEQ ID NO: 2637099 - RNA, 14 nt, Human
acagaccuuugaac

SEQ ID NO: 2637100 - RNA, 19 nt, Human
acagaaagcagaacaguga

SEQ ID NO: 2637101 - RNA, 15 nt, Human
uaugccccauucaac

SEQ ID NO: 2637102 - RNA, 18 nt, Human
acagcaagggugauggga

SEQ ID NO: 2637103 - RNA, 19 nt, Human
acagcccuucuuuccacag

SEQ ID NO: 2637104 - RNA, 14 nt, Human
acagcuguaugauu

SEQ ID NO: 2637105 - RNA, 19 nt, Human
acagcuguaugauucccag

SEQ ID NO: 2637106 - RNA, 20 nt, Human
acagcuguaugauucccagc

SEQ ID NO: 2637107 - RNA, 23 nt, Human
acagcuguaugauucccagccag

SEQ ID NO: 2637108 - RNA, 22 nt, Human
acaggaaccacaagacugcaca

SEQ ID NO: 2637109 - RNA, 16 nt, Human
uaccaugccauuuaaa

SEQ ID NO: 2637110 - RNA, 19 nt, Human
uaccagggacugaggggag

SEQ ID NO: 2637111 - RNA, 13 nt, Human
aauguucaucaau

SEQ ID NO: 2637112 - RNA, 20 nt, Human
aauguucaucaaugaaugaa

SEQ ID NO: 2637113 - RNA, 16 nt, Human
aauguucaucaaugaa

SEQ ID NO: 2637114 - RNA, 14 nt, Human
aauuacauuuguau

SEQ ID NO: 2637115 - RNA, 13 nt, Human
aauuacauuugua

SEQ ID NO: 2637116 - RNA, 22 nt, Human
aaugcuguauuuuaaaagaaug

SEQ ID NO: 2637117 - RNA, 20 nt, Human
aaugcuguauuuuaaaagaa

SEQ ID NO: 2637118 - RNA, 21 nt, Human
aaugcuguauuuuaaaagaau

SEQ ID NO: 2637119 - RNA, 21 nt, Human
uacaaaaaaaaaaaaaaauua

SEQ ID NO: 2637120 - RNA, 17 nt, Human
uacagagacagaaagca

SEQ ID NO: 2637121 - RNA, 20 nt, Human
aauguaagggaaacugccag

SEQ ID NO: 2637122 - RNA, 16 nt, Human
aaugauuucauucaau

SEQ ID NO: 2637123 - RNA, 18 nt, Human
uaauuuuuauauuugaaa

SEQ ID NO: 2637124 - RNA, 19 nt, Human
uaauuuuuauauuugaaau

SEQ ID NO: 2637125 - RNA, 21 nt, Human
uaauuuuuauauuugaaauau

SEQ ID NO: 2637126 - RNA, 22 nt, Human
uaauuccguagguuauuuucag

SEQ ID NO: 2637127 - RNA, 22 nt, Human
aaugagagacacacugaagaag

SEQ ID NO: 2637128 - RNA, 20 nt, Human
aauccucaguuuuugugaaa

SEQ ID NO: 2637129 - RNA, 20 nt, Human
uaaguaaugauaacuggaaa

SEQ ID NO: 2637130 - RNA, 19 nt, Human
uaaguaaaaccacagcagu

SEQ ID NO: 2637131 - RNA, 18 nt, Human
uaaguaaaaccacagcag

SEQ ID NO: 2637132 - RNA, 17 nt, Human
uaaguaaaaccacagca

SEQ ID NO: 2637133 - RNA, 16 nt, Human
uaaguaaaaccacagc

SEQ ID NO: 2637134 - RNA, 18 nt, Human
uaagguuaccuuuguucc

SEQ ID NO: 2637135 - RNA, 15 nt, Human
uaaguaaaaccacag

SEQ ID NO: 2637136 - RNA, 13 nt, Human
uaaguaaaaccac

SEQ ID NO: 2637137 - RNA, 15 nt, Human
aauauuuauuuuaau

SEQ ID NO: 2637138 - RNA, 16 nt, Human
aaucagccuaguugau

SEQ ID NO: 2637139 - RNA, 14 nt, Human
uaagcaaaauguga

SEQ ID NO: 2637140 - RNA, 21 nt, Human
uaagcaaaaugugauauguac

SEQ ID NO: 2637141 - RNA, 15 nt, Human
uaagcaaaaugugau

SEQ ID NO: 2637142 - RNA, 21 nt, Human
uaacuuccuuggacucauuuu

SEQ ID NO: 2637143 - RNA, 13 nt, Human
uaagaagugaaaa

SEQ ID NO: 2637144 - RNA, 19 nt, Human
aauagucaaauugugugaa

SEQ ID NO: 2637145 - RNA, 13 nt, Human
uaacaaugcugua

SEQ ID NO: 2637146 - RNA, 18 nt, Human
aauaccaugccauuuaaa

SEQ ID NO: 2637147 - RNA, 23 nt, Human
aauaccacaggaaccacaagacu

SEQ ID NO: 2637148 - RNA, 23 nt, Human
aauacaucccuuaccugggaaag

SEQ ID NO: 2637149 - RNA, 20 nt, Human
guuauuauauuuacaaaugg

SEQ ID NO: 2637150 - RNA, 20 nt, Human
aagcucacagaccuuugaac

SEQ ID NO: 2637151 - RNA, 13 nt, Human
aagcuccagguag

SEQ ID NO: 2637152 - RNA, 14 nt, Human
aagcuccagguaga

SEQ ID NO: 2637153 - RNA, 16 nt, Human
aagcauuuagauguau

SEQ ID NO: 2637154 - RNA, 13 nt, Human
aagcauuguaaau

SEQ ID NO: 2637155 - RNA, 23 nt, Human
aagaggaaugaaguacucauaca

SEQ ID NO: 2637156 - RNA, 16 nt, Human
aagacugcacaucaaa

SEQ ID NO: 2637157 - RNA, 17 nt, Human
aagacugcauuauauuu

SEQ ID NO: 2637158 - RNA, 13 nt, Human
aagauguagagga

SEQ ID NO: 2637159 - RNA, 14 nt, Human
aagaugaaaauauu

SEQ ID NO: 2637160 - RNA, 13 nt, Human
aagaugaaaauau

SEQ ID NO: 2637161 - RNA, 20 nt, Human
uaaaauaauuuuuauauuug

SEQ ID NO: 2637162 - RNA, 20 nt, Human
uaaaagacagugaaagaaaa

SEQ ID NO: 2637163 - RNA, 16 nt, Human
uaaaagaauauuuuaa

SEQ ID NO: 2637164 - RNA, 12 nt, Human
uaaaagaaugau

SEQ ID NO: 2637165 - RNA, 23 nt, Human
uaaaagaauauuuuaacuuccuu

SEQ ID NO: 2637166 - RNA, 22 nt, Human
aagucuuauauauuguagauaa

SEQ ID NO: 2637167 - RNA, 16 nt, Human
aagucuuucacauuua

SEQ ID NO: 2637168 - RNA, 14 nt, Human
aaguaaugauaacu

SEQ ID NO: 2637169 - RNA, 19 nt, Human
aaguaaugauaacuggaaa

SEQ ID NO: 2637170 - RNA, 13 nt, Human
aaguauuagaaua

SEQ ID NO: 2637171 - RNA, 14 nt, Human
aagguacuucaaau

SEQ ID NO: 2637172 - RNA, 19 nt, Human
aagggugaugggaaagcau

SEQ ID NO: 2637173 - RNA, 22 nt, Human
aacagugauuaccagggacuga

SEQ ID NO: 2637174 - RNA, 15 nt, Human
aacagugauuaccag

SEQ ID NO: 2637175 - RNA, 16 nt, Human
aacagauaaauaguuu

SEQ ID NO: 2637176 - RNA, 15 nt, Human
aacacagcaagggug

SEQ ID NO: 2637177 - RNA, 15 nt, Human
aacacaacuauauug

SEQ ID NO: 2637178 - RNA, 16 nt, Human
aacacaacuauauugu

SEQ ID NO: 2637179 - RNA, 17 nt, Human
aacaaugcuguauuuua

SEQ ID NO: 2637180 - RNA, 22 nt, Human
aacaaugcuguauuuuaaaaga

SEQ ID NO: 2637181 - RNA, 12 nt, Human
aacaauaaaaga

SEQ ID NO: 2637182 - RNA, 14 nt, Human
aacaaugcuguauu

SEQ ID NO: 2637183 - RNA, 15 nt, Human
aacaaugcuguauuu

SEQ ID NO: 2637184 - RNA, 20 nt, Human
aaauuuuuucucuaggaaau

SEQ ID NO: 2637185 - RNA, 18 nt, Human
guauguacuucaugcugu

SEQ ID NO: 2637186 - RNA, 16 nt, Human
gucaaauugugugaaa

SEQ ID NO: 2637187 - RNA, 15 nt, Human
guauaaaauaauuuu

SEQ ID NO: 2637188 - RNA, 21 nt, Human
guauaaaauaauuuuuauauu

SEQ ID NO: 2637189 - RNA, 16 nt, Human
guauauuuuauaucaa

SEQ ID NO: 2637190 - RNA, 17 nt, Human
guaguguuggagaagaa

SEQ ID NO: 2637191 - RNA, 16 nt, Human
aaauguaagggaaacu

SEQ ID NO: 2637192 - RNA, 20 nt, Human
guaguguuggagaagaacug

SEQ ID NO: 2637193 - RNA, 14 nt, Human
aaauggguuuuacu

SEQ ID NO: 2637194 - RNA, 15 nt, Human
aaauggguuuuacug

SEQ ID NO: 2637195 - RNA, 21 nt, Human
aacuagaguuuagcuggaaaa

SEQ ID NO: 2637196 - RNA, 18 nt, Human
aaccuugaaaacuuuaug

SEQ ID NO: 2637197 - RNA, 12 nt, Human
aacucauuucua

SEQ ID NO: 2637198 - RNA, 20 nt, Human
aaccugagccccaaaaggua

SEQ ID NO: 2637199 - RNA, 16 nt, Human
gucuuucacauuuaaa

SEQ ID NO: 2637200 - RNA, 18 nt, Human
aacccaaguccaagcaua

SEQ ID NO: 2637201 - RNA, 23 nt, Human
aacccaaauguucaucaaugaau

SEQ ID NO: 2637202 - RNA, 18 nt, Human
aaccugagccccaaaagg

SEQ ID NO: 2637203 - RNA, 16 nt, Human
aacccgggaggcagag

SEQ ID NO: 2637204 - RNA, 21 nt, Human
gugagaugcuagaacucccuu

SEQ ID NO: 2637205 - RNA, 12 nt, Human
aacugaaaucau

SEQ ID NO: 2637206 - RNA, 19 nt, Human
aacugcacugucaagauga

SEQ ID NO: 2637207 - RNA, 19 nt, Human
aacuggacugguucaaaug

SEQ ID NO: 2637208 - RNA, 17 nt, Human
aacugggacaggggaga

SEQ ID NO: 2637209 - RNA, 17 nt, Human
gugaugggaaagcauug

SEQ ID NO: 2637210 - RNA, 21 nt, Human
aacuucagcgguuuauauaag

SEQ ID NO: 2637211 - RNA, 18 nt, Human
aacuuccagauccuggaa

SEQ ID NO: 2637212 - RNA, 18 nt, Human
cacaagaaaugaaagcag

SEQ ID NO: 2637213 - RNA, 21 nt, Human
cacaagaaaugaaagcaggga

SEQ ID NO: 2637214 - RNA, 20 nt, Human
cacaagaaaugaaagcaggg

SEQ ID NO: 2637215 - RNA, 22 nt, Human
caauuuuucuuauuucauuucu

SEQ ID NO: 2637216 - RNA, 21 nt, Human
caauaucuuuuuuuuaauaaa

SEQ ID NO: 2637217 - RNA, 18 nt, Human
cacagccagacuggcaca

SEQ ID NO: 2637218 - RNA, 17 nt, Human
cacagccagacuggcac

SEQ ID NO: 2637219 - RNA, 19 nt, Human
cacagcaguugaaaagacu

SEQ ID NO: 2637220 - RNA, 21 nt, Human
cacagcaguugaaaagacucc

SEQ ID NO: 2637221 - RNA, 13 nt, Human
cacacugaagaag

SEQ ID NO: 2637222 - RNA, 18 nt, Human
caaggaaaaaauaacaau

SEQ ID NO: 2637223 - RNA, 20 nt, Human
caaggaaaaaauaacaauga

SEQ ID NO: 2637224 - RNA, 17 nt, Human
caauagucaaauugugu

SEQ ID NO: 2637225 - RNA, 19 nt, Human
caauagucaaauuguguga

SEQ ID NO: 2637226 - RNA, 21 nt, Human
caagggugaugggaaagcauu

SEQ ID NO: 2637227 - RNA, 23 nt, Human
caagggugaugggaaagcauugu

SEQ ID NO: 2637228 - RNA, 18 nt, Human
caaauguucaucaaugaa

SEQ ID NO: 2637229 - RNA, 14 nt, Human
caaauguucaucaa

SEQ ID NO: 2637230 - RNA, 12 nt, Human
caaauaugcaaa

SEQ ID NO: 2637231 - RNA, 13 nt, Human
caaauaugcaaag

SEQ ID NO: 2637232 - RNA, 15 nt, Human
caagaaaugaaagca

SEQ ID NO: 2637233 - RNA, 19 nt, Human
caagaaaugaaagcaggga

SEQ ID NO: 2637234 - RNA, 17 nt, Human
caagaaaugaaagcagg

SEQ ID NO: 2637235 - RNA, 17 nt, Human
caaacugacucuuaaga

SEQ ID NO: 2637236 - RNA, 21 nt, Human
caaacugacucuuaagaagac

SEQ ID NO: 2637237 - RNA, 16 nt, Human
caaacugacucuuaag

SEQ ID NO: 2637238 - RNA, 14 nt, Human
caaaacugcacugu

SEQ ID NO: 2637239 - RNA, 18 nt, Human
caaaacugcacugucaag

SEQ ID NO: 2637240 - RNA, 17 nt, Human
caaaacugcacugucaa

SEQ ID NO: 2637241 - RNA, 18 nt, Human
uguuuaaaaucauuucug

SEQ ID NO: 2637242 - RNA, 17 nt, Human
uguuuaaaaucauuucu

SEQ ID NO: 2637243 - RNA, 19 nt, Human
uguuggagaagaacugaaa

SEQ ID NO: 2637244 - RNA, 20 nt, Human
uguuggagaagaacugaaau

SEQ ID NO: 2637245 - RNA, 14 nt, Human
uguuggagaagaac

SEQ ID NO: 2637246 - RNA, 16 nt, Human
uguuggagaagaacug

SEQ ID NO: 2637247 - RNA, 17 nt, Human
uguuggagaagaacuga

SEQ ID NO: 2637248 - RNA, 20 nt, Human
uguugacaugggacauuugc

SEQ ID NO: 2637249 - RNA, 21 nt, Human
uguuaaaagaugaaaauauuu

SEQ ID NO: 2637250 - RNA, 21 nt, Human
ugugugaaagguacuucaaau

SEQ ID NO: 2637251 - RNA, 22 nt, Human
ugugugaaagguacuucaaauc

SEQ ID NO: 2637252 - RNA, 20 nt, Human
ugugugaaagguacuucaaa

SEQ ID NO: 2637253 - RNA, 13 nt, Human
uguguuuugcaag

SEQ ID NO: 2637254 - RNA, 19 nt, Human
uguguuuugcaagccagau

SEQ ID NO: 2637255 - RNA, 22 nt, Human
uuaaaaaaaaaccugagcccca

SEQ ID NO: 2637256 - RNA, 18 nt, Human
uuaaaauacacacucaaa

SEQ ID NO: 2637257 - RNA, 20 nt, Human
uuacauuuguauaaaauaau

SEQ ID NO: 2637258 - RNA, 19 nt, Human
ugugcuaguaauuggaaag

SEQ ID NO: 2637259 - RNA, 15 nt, Human
uguaugauucccagc

SEQ ID NO: 2637260 - RNA, 22 nt, Human
uguaguguuggagaagaacuga

SEQ ID NO: 2637261 - RNA, 20 nt, Human
uguaauaaacucauuucuag

SEQ ID NO: 2637262 - RNA, 16 nt, Human
uguaccgcaaugugac

SEQ ID NO: 2637263 - RNA, 15 nt, Human
ugccuucucaacucc

SEQ ID NO: 2637264 - RNA, 18 nt, Human
ugccuguaaucacagcua

SEQ ID NO: 2637265 - RNA, 16 nt, Human
ugcucaguagucagac

SEQ ID NO: 2637266 - RNA, 15 nt, Human
ugcuaagcauuccaa

SEQ ID NO: 2637267 - RNA, 19 nt, Human
ugcuaagcauuccaacuau

SEQ ID NO: 2637268 - RNA, 17 nt, Human
ugcugaaacaacaaaua

SEQ ID NO: 2637269 - RNA, 19 nt, Human
ugcaguucugaagaagaug

SEQ ID NO: 2637270 - RNA, 22 nt, Human
ugcaguucugaagaagauggua

SEQ ID NO: 2637271 - RNA, 15 nt, Human
ugcaguucugaagaa

SEQ ID NO: 2637272 - RNA, 16 nt, Human
ugcaguucugaagaag

SEQ ID NO: 2637273 - RNA, 17 nt, Human
ugcaguucugaagaaga

SEQ ID NO: 2637274 - RNA, 18 nt, Human
ugcaguucugaagaagau

SEQ ID NO: 2637275 - RNA, 19 nt, Human
ugcagugagccgagauugu

SEQ ID NO: 2637276 - RNA, 19 nt, Human
ugcacgcacacugucugcc

SEQ ID NO: 2637277 - RNA, 18 nt, Human
ugccaaauauaaauaaaa

SEQ ID NO: 2637278 - RNA, 17 nt, Human
ugccaaauauaaauaaa

SEQ ID NO: 2637279 - RNA, 22 nt, Human
ugccaaauauaaauaaaaauaa

SEQ ID NO: 2637280 - RNA, 19 nt, Human
ugccaaauauaaauaaaaa

SEQ ID NO: 2637281 - RNA, 20 nt, Human
ugccacuaaauugacacuua

SEQ ID NO: 2637282 - RNA, 14 nt, Human
ugccaucccucccu

SEQ ID NO: 2637283 - RNA, 11 nt, Human
ugccaucccuc

SEQ ID NO: 2637284 - RNA, 12 nt, Human
ugccaucccucc

SEQ ID NO: 2637285 - RNA, 21 nt, Human
uggcuugaguuuaaauuguaa

SEQ ID NO: 2637286 - RNA, 16 nt, Human
uggcuuccuggcaaua

SEQ ID NO: 2637287 - RNA, 14 nt, Human
ugggaguacaaaag

SEQ ID NO: 2637288 - RNA, 21 nt, Human
ugguauguuuucaggcuagau

SEQ ID NO: 2637289 - RNA, 11 nt, Human
uggagggaagc

SEQ ID NO: 2637290 - RNA, 23 nt, Human
uggaaacuucagcgguuuauaua

SEQ ID NO: 2637291 - RNA, 21 nt, Human
uggaacauaaaauacaauguu

SEQ ID NO: 2637292 - RNA, 20 nt, Human
uggaacauaaaauacaaugu

SEQ ID NO: 2637293 - RNA, 22 nt, Human
uggaauaauccuaaacauauga

SEQ ID NO: 2637294 - RNA, 12 nt, Human
ucuacuaaaaau

SEQ ID NO: 2637295 - RNA, 15 nt, Human
ucuacuaaaaauaca

SEQ ID NO: 2637296 - RNA, 19 nt, Human
ucuacuaaaaauacaaaaa

SEQ ID NO: 2637297 - RNA, 17 nt, Human
uccuugcaucaauuuuu

SEQ ID NO: 2637298 - RNA, 14 nt, Human
ucggagcccugucu

SEQ ID NO: 2637299 - RNA, 15 nt, Human
ucggagcccugucuc

SEQ ID NO: 2637300 - RNA, 16 nt, Human
ucggccuccauccuga

SEQ ID NO: 2637301 - RNA, 15 nt, Human
ucggccuccauccug

SEQ ID NO: 2637302 - RNA, 20 nt, Human
uccucaaaacuucagacaua

SEQ ID NO: 2637303 - RNA, 15 nt, Human
uccugaggcuccacu

SEQ ID NO: 2637304 - RNA, 21 nt, Human
uccugaggcuccacuuggucu

SEQ ID NO: 2637305 - RNA, 17 nt, Human
uccugaggcuccacuug

SEQ ID NO: 2637306 - RNA, 16 nt, Human
uccugaggcuccacuu

SEQ ID NO: 2637307 - RNA, 19 nt, Human
uccucugcuugccaucccu

SEQ ID NO: 2637308 - RNA, 14 nt, Human
uccucugcuugcca

SEQ ID NO: 2637309 - RNA, 15 nt, Human
uccucugcuugccau

SEQ ID NO: 2637310 - RNA, 16 nt, Human
uccucugcuugccauc

SEQ ID NO: 2637311 - RNA, 17 nt, Human
uccucugcuugccaucc

SEQ ID NO: 2637312 - RNA, 12 nt, Human
uccauacauuug

SEQ ID NO: 2637313 - RNA, 19 nt, Human
ucauggaauuggagcucgu

SEQ ID NO: 2637314 - RNA, 21 nt, Human
ucauggaauuggagcucgugg

SEQ ID NO: 2637315 - RNA, 18 nt, Human
ucaguccaugaagaugua

SEQ ID NO: 2637316 - RNA, 16 nt, Human
ucagcugcugaaacaa

SEQ ID NO: 2637317 - RNA, 21 nt, Human
ucagcuccccucggagaagag

SEQ ID NO: 2637318 - RNA, 22 nt, Human
ucagcuccccucggagaagagc

SEQ ID NO: 2637319 - RNA, 16 nt, Human
ucuucuuggucucagu

SEQ ID NO: 2637320 - RNA, 19 nt, Human
ucuugccaaauauaaauaa

SEQ ID NO: 2637321 - RNA, 22 nt, Human
ucuuaggguuaugauuaaguaa

SEQ ID NO: 2637322 - RNA, 14 nt, Human
ucuuauaauuuaaa

SEQ ID NO: 2637323 - RNA, 13 nt, Human
ucuuauaauuuaa

SEQ ID NO: 2637324 - RNA, 17 nt, Human
ucuuuccacagaagcuc

SEQ ID NO: 2637325 - RNA, 14 nt, Human
ucugucucagucca

SEQ ID NO: 2637326 - RNA, 20 nt, Human
ugagcaggauuuuaaucuuu

SEQ ID NO: 2637327 - RNA, 15 nt, Human
ugagcaggauuuuaa

SEQ ID NO: 2637328 - RNA, 15 nt, Human
ugagaaagacuauuc

SEQ ID NO: 2637329 - RNA, 13 nt, Human
ugacucuuaagaa

SEQ ID NO: 2637330 - RNA, 16 nt, Human
ugacucuuaagaagac

SEQ ID NO: 2637331 - RNA, 14 nt, Human
ugacucuuaagaag

SEQ ID NO: 2637332 - RNA, 15 nt, Human
ugacucuuaagaaga

SEQ ID NO: 2637333 - RNA, 14 nt, Human
ugaauuaaguuuuu

SEQ ID NO: 2637334 - RNA, 13 nt, Human
ugaauuacauuug

SEQ ID NO: 2637335 - RNA, 14 nt, Human
ugaauuacauuugu

SEQ ID NO: 2637336 - RNA, 18 nt, Human
ugaccacugcagaagaca

SEQ ID NO: 2637337 - RNA, 17 nt, Human
ugaccacugcagaagac

SEQ ID NO: 2637338 - RNA, 16 nt, Human
ugaccacugcagaaga

SEQ ID NO: 2637339 - RNA, 20 nt, Human
ugaaugaauggcuaagcaaa

SEQ ID NO: 2637340 - RNA, 15 nt, Human
ugaaugaauggcuaa

SEQ ID NO: 2637341 - RNA, 14 nt, Human
uacacuccagugag

SEQ ID NO: 2637342 - RNA, 16 nt, Human
uacacacucaaaucaa

SEQ ID NO: 2637343 - RNA, 17 nt, Human
uacacacucaaaucaag

SEQ ID NO: 2637344 - RNA, 13 nt, Human
uaauuuugugaag

SEQ ID NO: 2637345 - RNA, 16 nt, Human
uaauuuuuauauuuga

SEQ ID NO: 2637346 - RNA, 17 nt, Human
uaauuuuuauauuugaa

SEQ ID NO: 2637347 - RNA, 12 nt, Human
uaauuuuuauau

SEQ ID NO: 2637348 - RNA, 18 nt, Human
uaauuuugugaagcaaaa

SEQ ID NO: 2637349 - RNA, 23 nt, Human
uacaguucggugagcuacaaaug

SEQ ID NO: 2637350 - RNA, 23 nt, Human
uacugucagcuccccucggagaa

SEQ ID NO: 2637351 - RNA, 16 nt, Human
uaccuaucaucuuaag

SEQ ID NO: 2637352 - RNA, 22 nt, Human
uaccaaaaaucucaauauuuca

SEQ ID NO: 2637353 - RNA, 22 nt, Human
uaccuaacgaaguauccuucag

SEQ ID NO: 2637354 - RNA, 23 nt, Human
uagaauaccacaggaaccacaag

SEQ ID NO: 2637355 - RNA, 18 nt, Human
uagaauuaacacaugauc

SEQ ID NO: 2637356 - RNA, 16 nt, Human
uagaauuaacacauga

SEQ ID NO: 2637357 - RNA, 15 nt, Human
uagaauuaacacaug

SEQ ID NO: 2637358 - RNA, 16 nt, Human
uagcaugaagacagag

SEQ ID NO: 2637359 - RNA, 14 nt, Human
uagauaggccaugg

SEQ ID NO: 2637360 - RNA, 23 nt, Human
uaggugcuacaaaaacacagcaa

SEQ ID NO: 2637361 - RNA, 22 nt, Human
uaggugcuacaaaaacacagca

SEQ ID NO: 2637362 - RNA, 20 nt, Human
uaggugcuacaaaaacacag

SEQ ID NO: 2637363 - RNA, 17 nt, Human
uaguauuguccaggucu

SEQ ID NO: 2637364 - RNA, 17 nt, Human
uauauaacaaugcugua

SEQ ID NO: 2637365 - RNA, 19 nt, Human
uauauaacaaugcuguauu

SEQ ID NO: 2637366 - RNA, 14 nt, Human
uauaugcuucuguu

SEQ ID NO: 2637367 - RNA, 16 nt, Human
uauaugcuucuguuuu

SEQ ID NO: 2637368 - RNA, 20 nt, Human
uauauuugaaauauugacuu

SEQ ID NO: 2637369 - RNA, 21 nt, Human
uauauuuuuuguuaaaugauu

SEQ ID NO: 2637370 - RNA, 14 nt, Human
uaucaaaagaaaga

SEQ ID NO: 2637371 - RNA, 13 nt, Human
uaagugaaauaag

SEQ ID NO: 2637372 - RNA, 22 nt, Human
uaauguuucaaacauauauaac

SEQ ID NO: 2637373 - RNA, 23 nt, Human
uaaugauaacuggaaacuucagc

SEQ ID NO: 2637374 - RNA, 17 nt, Human
uaaugauaacuggaaac

SEQ ID NO: 2637375 - RNA, 22 nt, Human
uaaugauaacuggaaacuucag

SEQ ID NO: 2637376 - RNA, 14 nt, Human
uaauaauguuucaa

SEQ ID NO: 2637377 - RNA, 17 nt, Human
uaaccaggggccaugaa

SEQ ID NO: 2637378 - RNA, 21 nt, Human
uaagaaaauaucacuugucaa

SEQ ID NO: 2637379 - RNA, 14 nt, Human
uaagagagaaugag

SEQ ID NO: 2637380 - RNA, 23 nt, Human
uaagagagaaugagagacacacu

SEQ ID NO: 2637381 - RNA, 13 nt, Human
uaagagagaauga

SEQ ID NO: 2637382 - RNA, 15 nt, Human
uaacuggaaacuuca

SEQ ID NO: 2637383 - RNA, 20 nt, Human
uaaauugacacuuaaaaaug

SEQ ID NO: 2637384 - RNA, 16 nt, Human
uaaaugugcuuuuaaa

SEQ ID NO: 2637385 - RNA, 16 nt, Human
uaaaugugccuucauu

SEQ ID NO: 2637386 - RNA, 20 nt, Human
uaaauggcuuccuggcaaua

SEQ ID NO: 2637387 - RNA, 14 nt, Human
uaaaguguuugaaa

SEQ ID NO: 2637388 - RNA, 13 nt, Human
uaaaaccacagca

SEQ ID NO: 2637389 - RNA, 13 nt, Human
uaaaaucauuucu

SEQ ID NO: 2637390 - RNA, 10 nt, Human
uaaaaucauu

SEQ ID NO: 2637391 - RNA, 15 nt, Human
uaaaauccauacauu

SEQ ID NO: 2637392 - RNA, 17 nt, Human
uaaaauccauacauuug

SEQ ID NO: 2637393 - RNA, 22 nt, Human
uaaaaucauuucugcaucagcu

SEQ ID NO: 2637394 - RNA, 18 nt, Human
uaaaaucauuucugcauc

SEQ ID NO: 2637395 - RNA, 22 nt, Human
uaaaacaagcacuaaacaaaga

SEQ ID NO: 2637396 - RNA, 19 nt, Human
uaaaaaugguuuaaauggu

SEQ ID NO: 2637397 - RNA, 18 nt, Human
uaaaaaugguuuaaaugg

SEQ ID NO: 2637398 - RNA, 15 nt, Human
uaaaaaugguuuaaa

SEQ ID NO: 2637399 - RNA, 20 nt, Human
guuuauauaagcuuguauuc

SEQ ID NO: 2637400 - RNA, 20 nt, Human
guuuagcuggaaaaguaugu

SEQ ID NO: 2637401 - RNA, 21 nt, Human
guuuagcuggaaaaguauguu

SEQ ID NO: 2637402 - RNA, 16 nt, Human
guucaucaaugaauga

SEQ ID NO: 2637403 - RNA, 13 nt, Human
guucagagcugcc

SEQ ID NO: 2637404 - RNA, 14 nt, Human
guucagagcugccc

SEQ ID NO: 2637405 - RNA, 23 nt, Human
guucagagcugcccucuccuggg

SEQ ID NO: 2637406 - RNA, 20 nt, Human
guucagagcugcccucuccu

SEQ ID NO: 2637407 - RNA, 22 nt, Human
guucagagcugcccucuccugg

SEQ ID NO: 2637408 - RNA, 15 nt, Human
guucagagcugcccu

SEQ ID NO: 2637409 - RNA, 16 nt, Human
guucagagcugcccuc

SEQ ID NO: 2637410 - RNA, 17 nt, Human
guucagagcugcccucu

SEQ ID NO: 2637411 - RNA, 19 nt, Human
guucagagcugcccucucc

SEQ ID NO: 2637412 - RNA, 23 nt, Human
guuaccucugccucagaaaacaa

SEQ ID NO: 2637413 - RNA, 21 nt, Human
guugauggugguauguuuuca

SEQ ID NO: 2637414 - RNA, 20 nt, Human
guugauggugguauguuuuc

SEQ ID NO: 2637415 - RNA, 14 nt, Human
guucugaagaagau

SEQ ID NO: 2637416 - RNA, 15 nt, Human
guucugaagaagaug

SEQ ID NO: 2637417 - RNA, 12 nt, Human
guucugaagaag

SEQ ID NO: 2637418 - RNA, 13 nt, Human
guucugaagaaga

SEQ ID NO: 2637419 - RNA, 23 nt, Human
guugaaaagacuccaaagaaaug

SEQ ID NO: 2637420 - RNA, 22 nt, Human
guugaaaagacuccaaagaaau

SEQ ID NO: 2637421 - RNA, 17 nt, Human
guugaaaagacuccaaa

SEQ ID NO: 2637422 - RNA, 21 nt, Human
gugcuacaaaaacacagcaag

SEQ ID NO: 2637423 - RNA, 20 nt, Human
gugcuacaaaaacacagcaa

SEQ ID NO: 2637424 - RNA, 15 nt, Human
gugcuacaaaaacac

SEQ ID NO: 2637425 - RNA, 21 nt, Human
guguaaguagauaggccaugg

SEQ ID NO: 2637426 - RNA, 16 nt, Human
guuaaaagaugaaaau

SEQ ID NO: 2637427 - RNA, 14 nt, Human
guuaaaagaugaaa

SEQ ID NO: 2637428 - RNA, 20 nt, Human
guuaaaagaugaaaauauuu

SEQ ID NO: 2637429 - RNA, 16 nt, Human
gugugcguccugucgg

SEQ ID NO: 2637430 - RNA, 14 nt, Human
gugugcguccuguc

SEQ ID NO: 2637431 - RNA, 16 nt, Human
gugacaagcucacaga

SEQ ID NO: 2637432 - RNA, 21 nt, Human
gugaacaaauuuacagagaca

SEQ ID NO: 2637433 - RNA, 13 nt, Human
gugaacacaucag

SEQ ID NO: 2637434 - RNA, 13 nt, Human
gugcguccugucg

SEQ ID NO: 2637435 - RNA, 23 nt, Human
gucugugagaugcuagaacuccc

SEQ ID NO: 2637436 - RNA, 22 nt, Human
gucugugagaugcuagaacucc

SEQ ID NO: 2637437 - RNA, 21 nt, Human
gucugugagaugcuagaacuc

SEQ ID NO: 2637438 - RNA, 17 nt, Human
gucugugagaugcuaga

SEQ ID NO: 2637439 - RNA, 16 nt, Human
gucugugagaugcuag

SEQ ID NO: 2637440 - RNA, 15 nt, Human
gucugugagaugcua

SEQ ID NO: 2637441 - RNA, 13 nt, Human
gucugacuguuuc

SEQ ID NO: 2637442 - RNA, 23 nt, Human
gucggguuuuauuguuuaaaauc

SEQ ID NO: 2637443 - RNA, 16 nt, Human
gucggagcccugucuc

SEQ ID NO: 2637444 - RNA, 12 nt, Human
gucggagcccug

SEQ ID NO: 2637445 - RNA, 18 nt, Human
gucgucaaagcugaaaug

SEQ ID NO: 2637446 - RNA, 18 nt, Human
guauuuuaaaagaaugau

SEQ ID NO: 2637447 - RNA, 13 nt, Human
guauuuuaaucac

SEQ ID NO: 2637448 - RNA, 20 nt, Human
guauuuuaaaagaaugauua

SEQ ID NO: 2637449 - RNA, 22 nt, Human
gucaauaaaauccauacauuug

SEQ ID NO: 2637450 - RNA, 23 nt, Human
gucaauaaaauccauacauuugu

SEQ ID NO: 2637451 - RNA, 15 nt, Human
gucaaugcagccccc

SEQ ID NO: 2637452 - RNA, 19 nt, Human
gucagcuccccucggagaa

SEQ ID NO: 2637453 - RNA, 23 nt, Human
gucagcuccccucggagaagagc

SEQ ID NO: 2637454 - RNA, 22 nt, Human
gucagcuccccucggagaagag

SEQ ID NO: 2637455 - RNA, 21 nt, Human
gucagcuccccucggagaaga

SEQ ID NO: 2637456 - RNA, 18 nt, Human
gcuauaggugcuacaaaa

SEQ ID NO: 2637457 - RNA, 14 nt, Human
guaguguuggagaa

SEQ ID NO: 2637458 - RNA, 15 nt, Human
guaguguuggagaag

SEQ ID NO: 2637459 - RNA, 17 nt, Human
guauguuagugcaaauu

SEQ ID NO: 2637460 - RNA, 17 nt, Human
uuucuuauuucauuucu

SEQ ID NO: 2637461 - RNA, 18 nt, Human
uuugaaucaucaagucuu

SEQ ID NO: 2637462 - RNA, 18 nt, Human
uuuccucauuuuuauaau

SEQ ID NO: 2637463 - RNA, 15 nt, Human
uuucugagaaagacu

SEQ ID NO: 2637464 - RNA, 13 nt, Human
uuucugagaaaga

SEQ ID NO: 2637465 - RNA, 20 nt, Human
uuuuaauaauguuucaaaca

SEQ ID NO: 2637466 - RNA, 21 nt, Human
uuuuaaaagaaugauuaugaa

SEQ ID NO: 2637467 - RNA, 13 nt, Human
uuuguauaaaaua

SEQ ID NO: 2637468 - RNA, 14 nt, Human
uuuguauaaaauaa

SEQ ID NO: 2637469 - RNA, 16 nt, Human
uuuguauaaaauaauu

SEQ ID NO: 2637470 - RNA, 13 nt, Human
uuugguuucuagc

SEQ ID NO: 2637471 - RNA, 19 nt, Human
uuuuucucuaggaaauauu

SEQ ID NO: 2637472 - RNA, 18 nt, Human
uuuuuaaaaaagaaacau

SEQ ID NO: 2637473 - RNA, 18 nt, Human
uuuuggucuggagggaag

SEQ ID NO: 2637474 - RNA, 14 nt, Human
uuuuccugaaaacc

SEQ ID NO: 2637475 - RNA, 17 nt, Human
gccuccccuccucugcu

SEQ ID NO: 2637476 - RNA, 19 nt, Human
gccuccccuccucugcuug

SEQ ID NO: 2637477 - RNA, 23 nt, Human
gccuccccuccucugcuugccau

SEQ ID NO: 2637478 - RNA, 20 nt, Human
gccuccccuccucugcuugc

SEQ ID NO: 2637479 - RNA, 22 nt, Human
gccuccccuccucugcuugcca

SEQ ID NO: 2637480 - RNA, 23 nt, Human
gccguggugauuuagcaggaagc

SEQ ID NO: 2637481 - RNA, 22 nt, Human
gccgugugugugcguccugucg

SEQ ID NO: 2637482 - RNA, 20 nt, Human
gccgggcgugguggugagug

SEQ ID NO: 2637483 - RNA, 12 nt, Human
gcgacagugaga

SEQ ID NO: 2637484 - RNA, 19 nt, Human
gcuagaacucccuuucaac

SEQ ID NO: 2637485 - RNA, 13 nt, Human
gcuauaggugcua

SEQ ID NO: 2637486 - RNA, 18 nt, Human
gccaucccucccuccacc

SEQ ID NO: 2637487 - RNA, 23 nt, Human
gccaucccucccuccaccucccu

SEQ ID NO: 2637488 - RNA, 19 nt, Human
gccaugggcacugugggua

SEQ ID NO: 2637489 - RNA, 10 nt, Human
gcaagccaga

SEQ ID NO: 2637490 - RNA, 14 nt, Human
gcaagggugauggg

SEQ ID NO: 2637491 - RNA, 23 nt, Human
gcaaagcacugacuucuaaguaa

SEQ ID NO: 2637492 - RNA, 15 nt, Human
gauuuuccugaaaac

SEQ ID NO: 2637493 - RNA, 11 nt, Human
gauuuucagcc

SEQ ID NO: 2637494 - RNA, 15 nt, Human
gauuuucagcccuca

SEQ ID NO: 2637495 - RNA, 19 nt, Human
gauuuucagcccucagaau

SEQ ID NO: 2637496 - RNA, 21 nt, Human
gauggcuaguaucaaaagaaa

SEQ ID NO: 2637497 - RNA, 14 nt, Human
gaugaaaauauuug

SEQ ID NO: 2637498 - RNA, 13 nt, Human
gauccuggaaauc

SEQ ID NO: 2637499 - RNA, 22 nt, Human
gauaaauaguuuaugauuccac

SEQ ID NO: 2637500 - RNA, 13 nt, Human
gauagcagggcau

SEQ ID NO: 2637501 - RNA, 23 nt, Human
gauagauaggucagugcaaauac

SEQ ID NO: 2637502 - RNA, 17 nt, Human
gcauagguuuaauaauu

SEQ ID NO: 2637503 - RNA, 16 nt, Human
gcaguucagagcugcc

SEQ ID NO: 2637504 - RNA, 15 nt, Human
gcaguucugaagaag

SEQ ID NO: 2637505 - RNA, 17 nt, Human
gcaguucagagcugccc

SEQ ID NO: 2637506 - RNA, 18 nt, Human
gcaguucagagcugcccu

SEQ ID NO: 2637507 - RNA, 17 nt, Human
gcaguucugaagaagau

SEQ ID NO: 2637508 - RNA, 13 nt, Human
gcauagaaguaaa

SEQ ID NO: 2637509 - RNA, 12 nt, Human
gcaucagcugcu

SEQ ID NO: 2637510 - RNA, 13 nt, Human
gcauuauauuuau

SEQ ID NO: 2637511 - RNA, 18 nt, Human
gcagauaaacaguaguga

SEQ ID NO: 2637512 - RNA, 20 nt, Human
gcagccccgugggguuccuc

SEQ ID NO: 2637513 - RNA, 15 nt, Human
gacaagcucacagac

SEQ ID NO: 2637514 - RNA, 14 nt, Human
gacaucaacagaua

SEQ ID NO: 2637515 - RNA, 17 nt, Human
gacaugggacauuugcu

SEQ ID NO: 2637516 - RNA, 22 nt, Human
gacaugggacauuugcucaugg

SEQ ID NO: 2637517 - RNA, 23 nt, Human
gaccugauuucugagcauuuaau

SEQ ID NO: 2637518 - RNA, 16 nt, Human
gagcucgugggacagu

SEQ ID NO: 2637519 - RNA, 18 nt, Human
gagcugcccucuccuggg

SEQ ID NO: 2637520 - RNA, 19 nt, Human
gagcugcccucuccugggc

SEQ ID NO: 2637521 - RNA, 21 nt, Human
gagcugcccucuccugggcag

SEQ ID NO: 2637522 - RNA, 23 nt, Human
gagcugcccucuccugggcagcu

SEQ ID NO: 2637523 - RNA, 15 nt, Human
gagagugaacaaauu

SEQ ID NO: 2637524 - RNA, 17 nt, Human
gagauacagaauuuuau

SEQ ID NO: 2637525 - RNA, 19 nt, Human
gagagugaacaaauuuaca

SEQ ID NO: 2637526 - RNA, 19 nt, Human
gagagacacacugaagaag

SEQ ID NO: 2637527 - RNA, 13 nt, Human
gagacagcucugc

SEQ ID NO: 2637528 - RNA, 18 nt, Human
gagacagcucugcauacu

SEQ ID NO: 2637529 - RNA, 15 nt, Human
gagacagcucugcau

SEQ ID NO: 2637530 - RNA, 18 nt, Human
gagaaagacuauucaaac

SEQ ID NO: 2637531 - RNA, 17 nt, Human
gagaaagacuauucaaa

SEQ ID NO: 2637532 - RNA, 15 nt, Human
gagaaagacuauuca

SEQ ID NO: 2637533 - RNA, 13 nt, Human
gagaaagacuauu

SEQ ID NO: 2637534 - RNA, 22 nt, Human
gagaagagcuguucacagccag

SEQ ID NO: 2637535 - RNA, 15 nt, Human
gagaagagcuguuca

SEQ ID NO: 2637536 - RNA, 13 nt, Human
gagaagaacugaa

SEQ ID NO: 2637537 - RNA, 14 nt, Human
gagaagaacugaaa

SEQ ID NO: 2637538 - RNA, 16 nt, Human
gagaagaacugaaauc

SEQ ID NO: 2637539 - RNA, 18 nt, Human
gagacacacugaagaagc

SEQ ID NO: 2637540 - RNA, 22 nt, Human
gaacuuguaaaggaauuuaaaa

SEQ ID NO: 2637541 - RNA, 16 nt, Human
gaacucccuuucaaca

SEQ ID NO: 2637542 - RNA, 14 nt, Human
gaaccacaagacug

SEQ ID NO: 2637543 - RNA, 15 nt, Human
gaaccacaagacugc

SEQ ID NO: 2637544 - RNA, 17 nt, Human
gaagauguagaggagaa

SEQ ID NO: 2637545 - RNA, 23 nt, Human
gaagagcuguucacagccagacu

SEQ ID NO: 2637546 - RNA, 13 nt, Human
gaagagcuguuca

SEQ ID NO: 2637547 - RNA, 20 nt, Human
gaagagcuguucacagccag

SEQ ID NO: 2637548 - RNA, 15 nt, Human
gaagagcuguucaca

SEQ ID NO: 2637549 - RNA, 23 nt, Human
gaaguccaagcauuuagauguau

SEQ ID NO: 2637550 - RNA, 14 nt, Human
gaaggaugcugucu

SEQ ID NO: 2637551 - RNA, 21 nt, Human
gaaagcuugcccuggugccuc

SEQ ID NO: 2637552 - RNA, 16 nt, Human
gaaacugacacaugcu

SEQ ID NO: 2637553 - RNA, 15 nt, Human
gaaacugccagcaac

SEQ ID NO: 2637554 - RNA, 13 nt, Human
gaaacugccagca

SEQ ID NO: 2637555 - RNA, 14 nt, Human
gaaagcagaacagu

SEQ ID NO: 2637556 - RNA, 13 nt, Human
gaaagcagaacag

SEQ ID NO: 2637557 - RNA, 19 nt, Human
gaaagacuauucaaacagu

SEQ ID NO: 2637558 - RNA, 23 nt, Human
gaaagacuauucaaacagucuca

SEQ ID NO: 2637559 - RNA, 22 nt, Human
gaaagacuauucaaacagucuc

SEQ ID NO: 2637560 - RNA, 15 nt, Human
gaaauauuuauuuua

SEQ ID NO: 2637561 - RNA, 16 nt, Human
gaaauauuuauuuuaa

SEQ ID NO: 2637562 - RNA, 13 nt, Human
gaaauauuuauuu

SEQ ID NO: 2637563 - RNA, 24 nt, Human
gaacaguuaccucugccucagaaa

SEQ ID NO: 2637564 - RNA, 17 nt, Human
cuugccaaauauaaaua

SEQ ID NO: 2637565 - RNA, 18 nt, Human
cuuguaaaggaauuuaaa

SEQ ID NO: 2637566 - RNA, 13 nt, Human
cuucuuuccacag

SEQ ID NO: 2637567 - RNA, 19 nt, Human
cuucuuuccacagaagcuc

SEQ ID NO: 2637568 - RNA, 20 nt, Human
cuugaacccgggaggcagag

SEQ ID NO: 2637569 - RNA, 19 nt, Human
cuugaacccgggaggcaga

SEQ ID NO: 2637570 - RNA, 14 nt, Human
cuugaacccgggag

SEQ ID NO: 2637571 - RNA, 21 nt, Human
cuugcaugguuuagaaagcuu

SEQ ID NO: 2637572 - RNA, 23 nt, Human
cuugcaucaauuuuucuuauuuc

SEQ ID NO: 2637573 - RNA, 16 nt, Human
cuugagugcucaguag

SEQ ID NO: 2637574 - RNA, 15 nt, Human
cugcccucuccuggg

SEQ ID NO: 2637575 - RNA, 12 nt, Human
cugcccucuccu

SEQ ID NO: 2637576 - RNA, 13 nt, Human
cugcccucuccug

SEQ ID NO: 2637577 - RNA, 14 nt, Human
cugcccucuccugg

SEQ ID NO: 2637578 - RNA, 18 nt, Human
cugcuugccaucccuccc

SEQ ID NO: 2637579 - RNA, 19 nt, Human
cugcuugccaucccucccu

SEQ ID NO: 2637580 - RNA, 20 nt, Human
cugcuugccaucccucccuc

SEQ ID NO: 2637581 - RNA, 22 nt, Human
cugcuugccaucccucccucca

SEQ ID NO: 2637582 - RNA, 16 nt, Human
cugcuugccaucccuc

SEQ ID NO: 2637583 - RNA, 15 nt, Human
cugcuugccaucccu

SEQ ID NO: 2637584 - RNA, 12 nt, Human
cugcacugucaa

SEQ ID NO: 2637585 - RNA, 15 nt, Human
cugccagcaacgcag

SEQ ID NO: 2637586 - RNA, 15 nt, Human
cuggccuucggccuc

SEQ ID NO: 2637587 - RNA, 21 nt, Human
cuggccuucggccuccauccu

SEQ ID NO: 2637588 - RNA, 18 nt, Human
cuggccuucggccuccau

SEQ ID NO: 2637589 - RNA, 17 nt, Human
cuggccuucggccucca

SEQ ID NO: 2637590 - RNA, 16 nt, Human
cuggccuucggccucc

SEQ ID NO: 2637591 - RNA, 20 nt, Human
cugggaaagggauuuucagc

SEQ ID NO: 2637592 - RNA, 22 nt, Human
cuguaauaaacucauuucuagc

SEQ ID NO: 2637593 - RNA, 20 nt, Human
cugucuccucucucuguaau

SEQ ID NO: 2637594 - RNA, 17 nt, Human
cugucuccucucucugu

SEQ ID NO: 2637595 - RNA, 18 nt, Human
cugucucuacuaaaaaua

SEQ ID NO: 2637596 - RNA, 15 nt, Human
cuguaugauucccag

SEQ ID NO: 2637597 - RNA, 13 nt, Human
cuguauuuuaaaa

SEQ ID NO: 2637598 - RNA, 16 nt, Human
cuguauuuuaaaagaa

SEQ ID NO: 2637599 - RNA, 12 nt, Human
cucugcuugcca

SEQ ID NO: 2637600 - RNA, 14 nt, Human
cucugcuugccauc

SEQ ID NO: 2637601 - RNA, 17 nt, Human
cucugcuugccaucccu

SEQ ID NO: 2637602 - RNA, 20 nt, Human
cucugcuugccaucccuccc

SEQ ID NO: 2637603 - RNA, 12 nt, Human
cucuggccuucg

SEQ ID NO: 2637604 - RNA, 19 nt, Human
cucuggccuucggccucca

SEQ ID NO: 2637605 - RNA, 23 nt, Human
cugaagaagcaccaaucaugaau

SEQ ID NO: 2637606 - RNA, 17 nt, Human
cugaacaucacagcuua

SEQ ID NO: 2637607 - RNA, 22 nt, Human
cucuucuuuaaagggauggcaa

SEQ ID NO: 2637608 - RNA, 20 nt, Human
cugagcgacagugagacucu

SEQ ID NO: 2637609 - RNA, 16 nt, Human
cugagcgacagugaga

SEQ ID NO: 2637610 - RNA, 23 nt, Human
cugagaaagacuauucaaacagu

SEQ ID NO: 2637611 - RNA, 22 nt, Human
cugagaaagacuauucaaacag

SEQ ID NO: 2637612 - RNA, 17 nt, Human
cugacucuuaagaagac

SEQ ID NO: 2637613 - RNA, 16 nt, Human
cugacuucuaaguaaa

SEQ ID NO: 2637614 - RNA, 15 nt, Human
cugacuucuaaguaa

SEQ ID NO: 2637615 - RNA, 13 nt, Human
cugacuucuaagu

SEQ ID NO: 2637616 - RNA, 12 nt, Human
cucuccugggca

SEQ ID NO: 2637617 - RNA, 15 nt, Human
cucuccugggcagcu

SEQ ID NO: 2637618 - RNA, 16 nt, Human
cucuccugggcagcug

SEQ ID NO: 2637619 - RNA, 18 nt, Human
cucuccugggcagcugcc

SEQ ID NO: 2637620 - RNA, 19 nt, Human
cucuccugggcagcugccu

SEQ ID NO: 2637621 - RNA, 20 nt, Human
cucuccugggcagcugccuc

SEQ ID NO: 2637622 - RNA, 15 nt, Human
cucuaggaaauauuu

SEQ ID NO: 2637623 - RNA, 17 nt, Human
cucuaggaaauauuuau

SEQ ID NO: 2637624 - RNA, 18 nt, Human
cuccauccugaggcucca

SEQ ID NO: 2637625 - RNA, 16 nt, Human
cuccauccugaggcuc

SEQ ID NO: 2637626 - RNA, 11 nt, Human
cuccauccuga

SEQ ID NO: 2637627 - RNA, 14 nt, Human
cuccauccugaggc

SEQ ID NO: 2637628 - RNA, 17 nt, Human
cucccuccaccucccug

SEQ ID NO: 2637629 - RNA, 15 nt, Human
cucccuccaccuccc

SEQ ID NO: 2637630 - RNA, 15 nt, Human
cgcucucuggccuuc

SEQ ID NO: 2637631 - RNA, 14 nt, Human
cgcucucuggccuu

SEQ ID NO: 2637632 - RNA, 18 nt, Human
cgcucucuggccuucggc

SEQ ID NO: 2637633 - RNA, 17 nt, Human
cggugagcuacaaaugc

SEQ ID NO: 2637634 - RNA, 22 nt, Human
cggucggguuuuauuguuuaaa

SEQ ID NO: 2637635 - RNA, 21 nt, Human
cggguuuuauuguuuaaaauc

SEQ ID NO: 2637636 - RNA, 14 nt, Human
cggccuccauccug

SEQ ID NO: 2637637 - RNA, 12 nt, Human
cggccuccaucc

SEQ ID NO: 2637638 - RNA, 23 nt, Human
cuaaauugacacuuaaaaauggu

SEQ ID NO: 2637639 - RNA, 17 nt, Human
cucaccccuugccauaa

SEQ ID NO: 2637640 - RNA, 13 nt, Human
cucacauuuauau

SEQ ID NO: 2637641 - RNA, 23 nt, Human
cuaguaucaaaagaaagaaaauc

SEQ ID NO: 2637642 - RNA, 17 nt, Human
cuaguaucaaaagaaag

SEQ ID NO: 2637643 - RNA, 15 nt, Human
cuaguaucaaaagaa

SEQ ID NO: 2637644 - RNA, 22 nt, Human
cuaguauuucuaugaaauauua

SEQ ID NO: 2637645 - RNA, 19 nt, Human
cuaguauuucuaugaaaua

SEQ ID NO: 2637646 - RNA, 20 nt, Human
cuaguauuucuaugaaauau

SEQ ID NO: 2637647 - RNA, 13 nt, Human
cuaugaaauauua

SEQ ID NO: 2637648 - RNA, 18 nt, Human
cuaugaaauauuauguua

SEQ ID NO: 2637649 - RNA, 22 nt, Human
cuauauuuuuuguuaaaugauu

SEQ ID NO: 2637650 - RNA, 19 nt, Human
cuauauuguuugcuaagca

SEQ ID NO: 2637651 - RNA, 20 nt, Human
cuauauuuuuuguuaaauga

SEQ ID NO: 2637652 - RNA, 19 nt, Human
cuacuugggaggcugagau

SEQ ID NO: 2637653 - RNA, 18 nt, Human
cuacuugggaggcugaga

SEQ ID NO: 2637654 - RNA, 15 nt, Human
cuacuugggaggcug

SEQ ID NO: 2637655 - RNA, 16 nt, Human
cuacacuccagugaga

SEQ ID NO: 2637656 - RNA, 17 nt, Human
cuacacuccagugagac

SEQ ID NO: 2637657 - RNA, 18 nt, Human
cuaagcaaaaugugauau

SEQ ID NO: 2637658 - RNA, 15 nt, Human
cuaagcaaaauguga

SEQ ID NO: 2637659 - RNA, 14 nt, Human
cuaagcaaaaugug

SEQ ID NO: 2637660 - RNA, 20 nt, Human
cccucccuccaccucccugc

SEQ ID NO: 2637661 - RNA, 13 nt, Human
cccucccuccacc

SEQ ID NO: 2637662 - RNA, 12 nt, Human
cccucccuccac

SEQ ID NO: 2637663 - RNA, 14 nt, Human
ccccaggugccagu

SEQ ID NO: 2637664 - RNA, 14 nt, Human
cccugcaauaaaau

SEQ ID NO: 2637665 - RNA, 15 nt, Human
cccugcaauaaaaug

SEQ ID NO: 2637666 - RNA, 20 nt, Human
ccucagaugcacaugagcug

SEQ ID NO: 2637667 - RNA, 13 nt, Human
ccuaaacauauga

SEQ ID NO: 2637668 - RNA, 13 nt, Human
ccuccauccugag

SEQ ID NO: 2637669 - RNA, 12 nt, Human
ccuccauccuga

SEQ ID NO: 2637670 - RNA, 12 nt, Human
ccuccccuccuc

SEQ ID NO: 2637671 - RNA, 13 nt, Human
ccuccccuccucu

SEQ ID NO: 2637672 - RNA, 16 nt, Human
cccaguguuuuaggag

SEQ ID NO: 2637673 - RNA, 17 nt, Human
cccaguguuuuaggagc

SEQ ID NO: 2637674 - RNA, 23 nt, Human
ccauggcacucuauguucuaaga

SEQ ID NO: 2637675 - RNA, 16 nt, Human
ccauccugaggcucca

SEQ ID NO: 2637676 - RNA, 15 nt, Human
ccauccugaggcucc

SEQ ID NO: 2637677 - RNA, 23 nt, Human
caugcugucuacacuaagagaga

SEQ ID NO: 2637678 - RNA, 17 nt, Human
caugggacagggaggac

SEQ ID NO: 2637679 - RNA, 14 nt, Human
ccaacacgagcagg

SEQ ID NO: 2637680 - RNA, 21 nt, Human
ccaacacgagcaggcuacugu

SEQ ID NO: 2637681 - RNA, 18 nt, Human
ccaaggcuagaaccaccu

SEQ ID NO: 2637682 - RNA, 19 nt, Human
ccaaggcugauuaaaccaa

SEQ ID NO: 2637683 - RNA, 20 nt, Human
ccaauauucauagcagcuua

SEQ ID NO: 2637684 - RNA, 22 nt, Human
ccacaagaaaugaaagcaggga

SEQ ID NO: 2637685 - RNA, 16 nt, Human
ccacaagaaaugaaag

SEQ ID NO: 2637686 - RNA, 16 nt, Human
cauuugcucauggaau

SEQ ID NO: 2637687 - RNA, 15 nt, Human
cauuugcucauggaa

SEQ ID NO: 2637688 - RNA, 14 nt, Human
cauuugcucaugga

SEQ ID NO: 2637689 - RNA, 17 nt, Human
ccaaagaaauguaaggg

SEQ ID NO: 2637690 - RNA, 23 nt, Human
cauuucugcaucagcugcugaaa

SEQ ID NO: 2637691 - RNA, 19 nt, Human
cauuuaaagcuuauuaaaa

SEQ ID NO: 2637692 - RNA, 18 nt, Human
caucaaugaaugaaugaa

SEQ ID NO: 2637693 - RNA, 22 nt, Human
caucaagucuuucacauuuaaa

SEQ ID NO: 2637694 - RNA, 20 nt, Human
cauauauaacaaugcuguau

SEQ ID NO: 2637695 - RNA, 22 nt, Human
caucuagugagcagucaggaaa

SEQ ID NO: 2637696 - RNA, 14 nt, Human
caucuagugagcag

SEQ ID NO: 2637697 - RNA, 12 nt, Human
caucccucccuc

SEQ ID NO: 2637698 - RNA, 13 nt, Human
caucccucccucc

SEQ ID NO: 2637699 - RNA, 14 nt, Human
caucccucccucca

SEQ ID NO: 2637700 - RNA, 20 nt, Human
caguguuuuaggagcaugag

SEQ ID NO: 2637701 - RNA, 16 nt, Human
caguguuuuaggagca

SEQ ID NO: 2637702 - RNA, 21 nt, Human
caguuaccucugccucagaaa

SEQ ID NO: 2637703 - RNA, 22 nt, Human
caguucggugagcuacaaaugc

SEQ ID NO: 2637704 - RNA, 12 nt, Human
caguucugaaga

SEQ ID NO: 2637705 - RNA, 13 nt, Human
caguucugaagaa

SEQ ID NO: 2637706 - RNA, 14 nt, Human
caguucugaagaag

SEQ ID NO: 2637707 - RNA, 22 nt, Human
caguucugaagaagaugguacc

SEQ ID NO: 2637708 - RNA, 15 nt, Human
caguucugaagaaga

SEQ ID NO: 2637709 - RNA, 16 nt, Human
caguucugaagaagau

SEQ ID NO: 2637710 - RNA, 14 nt, Human
cagugucaaugcag

SEQ ID NO: 2637711 - RNA, 15 nt, Human
caguuuucugagaaa

SEQ ID NO: 2637712 - RNA, 14 nt, Human
caguuuucugagaa

SEQ ID NO: 2637713 - RNA, 20 nt, Human
caguuuucugagaaagacua

SEQ ID NO: 2637714 - RNA, 19 nt, Human
caguuuucugagaaagacu

SEQ ID NO: 2637715 - RNA, 18 nt, Human
caguugaaaagacuccaa

SEQ ID NO: 2637716 - RNA, 14 nt, Human
caguugaaaagacu

SEQ ID NO: 2637717 - RNA, 23 nt, Human
caguugaaaagacuccaaagaaa

SEQ ID NO: 2637718 - RNA, 22 nt, Human
caguugaaaagacuccaaagaa

SEQ ID NO: 2637719 - RNA, 21 nt, Human
caguugaaaagacuccaaaga

SEQ ID NO: 2637720 - RNA, 17 nt, Human
cauaccaacacgagcag

SEQ ID NO: 2637721 - RNA, 13 nt, Human
aaaagacuccaaa

SEQ ID NO: 2637722 - RNA, 11 nt, Human
aaaagaaugau

SEQ ID NO: 2637723 - RNA, 13 nt, Human
aaaagaauauuuu

SEQ ID NO: 2637724 - RNA, 20 nt, Human
aaaagacaaggaaaaaauaa

SEQ ID NO: 2637725 - RNA, 12 nt, Human
aaaagaauauuu

SEQ ID NO: 2637726 - RNA, 17 nt, Human
aaaagaaagaaaaucag

SEQ ID NO: 2637727 - RNA, 10 nt, Human
aaaaucauuu

SEQ ID NO: 2637728 - RNA, 12 nt, Human
aaaaucauuucu

SEQ ID NO: 2637729 - RNA, 11 nt, Human
aaaaucauuuc

SEQ ID NO: 2637730 - RNA, 21 nt, Human
aaaaucauuucugcaucagcu

SEQ ID NO: 2637731 - RNA, 15 nt, Human
aaacugcacugucaa

SEQ ID NO: 2637732 - RNA, 17 nt, Human
aaagcauuguaaaugug

SEQ ID NO: 2637733 - RNA, 15 nt, Human
aaagcauuguaaaug

SEQ ID NO: 2637734 - RNA, 21 nt, Human
aaauauuuauuuuaauaaugu

SEQ ID NO: 2637735 - RNA, 18 nt, Human
aaaucucaauauuucaga

SEQ ID NO: 2637736 - RNA, 23 nt, Human
aaauguugacaugggacauuugc

SEQ ID NO: 2637737 - RNA, 13 nt, Human
aaauguucaucaa

SEQ ID NO: 2637738 - RNA, 17 nt, Human
aaauguucaucaaugaa

SEQ ID NO: 2637739 - RNA, 22 nt, Human
aaauguugacaugggacauuug

SEQ ID NO: 2637740 - RNA, 15 nt, Human
aagaagacugcauua

SEQ ID NO: 2637741 - RNA, 21 nt, Human
aagacaaggaaaaaauaacaa

SEQ ID NO: 2637742 - RNA, 20 nt, Human
aagaagacugcauuauauuu

SEQ ID NO: 2637743 - RNA, 15 nt, Human
aagaacugaaaucau

SEQ ID NO: 2637744 - RNA, 11 nt, Human
aagaacugaaa

SEQ ID NO: 2637745 - RNA, 12 nt, Human
aagaacugaaau

SEQ ID NO: 2637746 - RNA, 13 nt, Human
aagaacugaaauc

SEQ ID NO: 2637747 - RNA, 20 nt, Human
aacgcaggcccccaggugcc

SEQ ID NO: 2637748 - RNA, 22 nt, Human
aagacagagccccacccucaga

SEQ ID NO: 2637749 - RNA, 20 nt, Human
aaugaauacuuuauaaagga

SEQ ID NO: 2637750 - RNA, 16 nt, Human
aaucucaauauuucag

SEQ ID NO: 2637751 - RNA, 15 nt, Human
acaccaauauucaua

SEQ ID NO: 2637752 - RNA, 22 nt, Human
aauuucauaccuaucaucuuaa

SEQ ID NO: 2637753 - RNA, 11 nt, Human
aauuguaauag

SEQ ID NO: 2637754 - RNA, 21 nt, Human
acauuuguauaaaauaauuuu

SEQ ID NO: 2637755 - RNA, 15 nt, Human
acauuugcucaugga

SEQ ID NO: 2637756 - RNA, 16 nt, Human
acauuugcucauggaa

SEQ ID NO: 2637757 - RNA, 16 nt, Human
acauuuguauaaaaua

SEQ ID NO: 2637758 - RNA, 19 nt, Human
acauuuguauaaaauaauu

SEQ ID NO: 2637759 - RNA, 19 nt, Human
acagugauuaccagggacu

SEQ ID NO: 2637760 - RNA, 24 nt, Human
acaggaugguucccuugaugaaga

SEQ ID NO: 2637761 - RNA, 22 nt, Human
acaggaugguucccuugaugaa

SEQ ID NO: 2637762 - RNA, 21 nt, Human
acccugucucuacuaaaaaua

SEQ ID NO: 2637763 - RNA, 20 nt, Human
acccucagaugcacaugagc

SEQ ID NO: 2637764 - RNA, 14 nt, Human
acgcacacugucug

SEQ ID NO: 2637765 - RNA, 20 nt, Human
accucugccucagaaaacaa

SEQ ID NO: 2637766 - RNA, 21 nt, Human
acuucagacauagaauuaaca

SEQ ID NO: 2637767 - RNA, 13 nt, Human
acuuggucuguga

SEQ ID NO: 2637768 - RNA, 22 nt, Human
acuuaaaaaugguuuaaauggu

SEQ ID NO: 2637769 - RNA, 17 nt, Human
acuucaaauccuugaag

SEQ ID NO: 2637770 - RNA, 18 nt, Human
acuucaaauccuugaaga

SEQ ID NO: 2637771 - RNA, 12 nt, Human
acuggaacucuc

SEQ ID NO: 2637772 - RNA, 17 nt, Human
acuguaaaauaauaacu

SEQ ID NO: 2637773 - RNA, 14 nt, Human
acucccuuucaaca

SEQ ID NO: 2637774 - RNA, 14 nt, Human
acucguuaauuugu

SEQ ID NO: 2637775 - RNA, 19 nt, Human
acucguuaauuuguagugu

SEQ ID NO: 2637776 - RNA, 19 nt, Human
acugauaugggucuugaua

SEQ ID NO: 2637777 - RNA, 13 nt, Human
acugacacaugcu

SEQ ID NO: 2637778 - RNA, 18 nt, Human
aggaaaaaauaacaauga

SEQ ID NO: 2637779 - RNA, 17 nt, Human
agcuguaugauucccag

SEQ ID NO: 2637780 - RNA, 18 nt, Human
agcuguaugauucccagc

SEQ ID NO: 2637781 - RNA, 20 nt, Human
agcugcugaaacaacaaaua

SEQ ID NO: 2637782 - RNA, 16 nt, Human
agcugcugaaacaaca

SEQ ID NO: 2637783 - RNA, 15 nt, Human
agcugcugaaacaac

SEQ ID NO: 2637784 - RNA, 14 nt, Human
agcugcugaaacaa

SEQ ID NO: 2637785 - RNA, 13 nt, Human
agcuacaaaugca

SEQ ID NO: 2637786 - RNA, 12 nt, Human
agcuacaaaugc

SEQ ID NO: 2637787 - RNA, 15 nt, Human
agcgacagugagacu

SEQ ID NO: 2637788 - RNA, 13 nt, Human
agcgacagugaga

SEQ ID NO: 2637789 - RNA, 17 nt, Human
agggacaggauaagagg

SEQ ID NO: 2637790 - RNA, 20 nt, Human
agggauuagggagagaagau

SEQ ID NO: 2637791 - RNA, 13 nt, Human
aggaaguagagga

SEQ ID NO: 2637792 - RNA, 23 nt, Human
aggccaugggcacuguggguaga

SEQ ID NO: 2637793 - RNA, 20 nt, Human
aggcagagguugcagugagc

SEQ ID NO: 2637794 - RNA, 19 nt, Human
agacaaggaaaaaauaaca

SEQ ID NO: 2637795 - RNA, 22 nt, Human
agaacagugauuaccagggacu

SEQ ID NO: 2637796 - RNA, 21 nt, Human
agaagacugcauuauauuuau

SEQ ID NO: 2637797 - RNA, 13 nt, Human
agaagagcuguuc

SEQ ID NO: 2637798 - RNA, 20 nt, Human
agaagagcuguucacagcca

SEQ ID NO: 2637799 - RNA, 14 nt, Human
agccagcaguucag

SEQ ID NO: 2637800 - RNA, 17 nt, Human
agcacugacuucuaagu

SEQ ID NO: 2637801 - RNA, 19 nt, Human
agcacugacuucuaaguaa

SEQ ID NO: 2637802 - RNA, 23 nt, Human
agcaaaauuuuuucucuaggaaa

SEQ ID NO: 2637803 - RNA, 20 nt, Human
agauagauaggucagugcaa

SEQ ID NO: 2637804 - RNA, 21 nt, Human
aucaugaauuaguuuuauaug

SEQ ID NO: 2637805 - RNA, 12 nt, Human
auccuugaagau

SEQ ID NO: 2637806 - RNA, 14 nt, Human
aucaaaagaaagaa

SEQ ID NO: 2637807 - RNA, 15 nt, Human
augggacagggagga

SEQ ID NO: 2637808 - RNA, 20 nt, Human
augggacauuugcucaugga

SEQ ID NO: 2637809 - RNA, 20 nt, Human
augggaaagcauuguaaaug

SEQ ID NO: 2637810 - RNA, 14 nt, Human
augggaaagcauug

SEQ ID NO: 2637811 - RNA, 23 nt, Human
auggcuuccuggcaauagucaaa

SEQ ID NO: 2637812 - RNA, 15 nt, Human
auaaaagacagugaa

SEQ ID NO: 2637813 - RNA, 16 nt, Human
auaaaagacagugaaa

SEQ ID NO: 2637814 - RNA, 14 nt, Human
aguugaaaagacuc

SEQ ID NO: 2637815 - RNA, 13 nt, Human
aguacucauacau

SEQ ID NO: 2637816 - RNA, 13 nt, Human
agucauuuaauaa

SEQ ID NO: 2637817 - RNA, 19 nt, Human
agugaugucacuagggcag

SEQ ID NO: 2637818 - RNA, 13 nt, Human
agugauuaccagg

SEQ ID NO: 2637819 - RNA, 16 nt, Human
cugcacuccagccuga

SEQ ID NO: 2637820 - RNA, 20 nt, Human
cugcacuccagccugagcga

SEQ ID NO: 2637821 - RNA, 17 nt, Human
cugcacuccagccugag

SEQ ID NO: 2637822 - RNA, 13 nt, Human
cugggcagcugcc

SEQ ID NO: 2637823 - RNA, 14 nt, Human
cugggcagcugccu

SEQ ID NO: 2637824 - RNA, 15 nt, Human
cugggcagcugccuc

SEQ ID NO: 2637825 - RNA, 12 nt, Human
cuggugccucac

SEQ ID NO: 2637826 - RNA, 21 nt, Human
cuggugccucaccccuugcca

SEQ ID NO: 2637827 - RNA, 20 nt, Human
cugcuuauccguuagccgug

SEQ ID NO: 2637828 - RNA, 11 nt, Human
cuucagacaua

SEQ ID NO: 2637829 - RNA, 23 nt, Human
cuucaugcugucuacacuaagag

SEQ ID NO: 2637830 - RNA, 15 nt, Human
cuucuguuuuauaau

SEQ ID NO: 2637831 - RNA, 20 nt, Human
cuucuguuuuauaauuuugu

SEQ ID NO: 2637832 - RNA, 21 nt, Human
cuuugagugucuuaauuaaaa

SEQ ID NO: 2637833 - RNA, 20 nt, Human
gcaaguauuagaauaccaca

SEQ ID NO: 2637834 - RNA, 22 nt, Human
gcaauagucaaauugugugaaa

SEQ ID NO: 2637835 - RNA, 23 nt, Human
gcacaguuuucugagaaagacua

SEQ ID NO: 2637836 - RNA, 22 nt, Human
gcacaguuuucugagaaagacu

SEQ ID NO: 2637837 - RNA, 20 nt, Human
gcacaguuuucugagaaaga

SEQ ID NO: 2637838 - RNA, 16 nt, Human
gauuuaccacuugugu

SEQ ID NO: 2637839 - RNA, 15 nt, Human
gauuuaccacuugug

SEQ ID NO: 2637840 - RNA, 22 nt, Human
gaugguucccuugaugaagaag

SEQ ID NO: 2637841 - RNA, 18 nt, Human
gauguagaggagaaacug

SEQ ID NO: 2637842 - RNA, 17 nt, Human
gauguagaggagaaacu

SEQ ID NO: 2637843 - RNA, 16 nt, Human
gaugaucuuuaaaaua

SEQ ID NO: 2637844 - RNA, 15 nt, Human
gaggacgcucucugg

SEQ ID NO: 2637845 - RNA, 23 nt, Human
gaggcuccacuuggucugugaga

SEQ ID NO: 2637846 - RNA, 18 nt, Human
gaggcuccacuuggucug

SEQ ID NO: 2637847 - RNA, 19 nt, Human
gaggcuccacuuggucugu

SEQ ID NO: 2637848 - RNA, 16 nt, Human
gaguuuaaauuguaau

SEQ ID NO: 2637849 - RNA, 14 nt, Human
gaacugaaaucaua

SEQ ID NO: 2637850 - RNA, 13 nt, Human
gaacugaaaucau

SEQ ID NO: 2637851 - RNA, 23 nt, Human
gaagcaacccaaauguucaucaa

SEQ ID NO: 2637852 - RNA, 14 nt, Human
gaagcaaaauuuuu

SEQ ID NO: 2637853 - RNA, 21 nt, Human
gacagaaagcagaacagugau

SEQ ID NO: 2637854 - RNA, 15 nt, Human
gacacacugaagaag

SEQ ID NO: 2637855 - RNA, 16 nt, Human
gacacacugaagaagc

SEQ ID NO: 2637856 - RNA, 16 nt, Human
gacauuugcucaugga

SEQ ID NO: 2637857 - RNA, 17 nt, Human
gacauuugcucauggaa

SEQ ID NO: 2637858 - RNA, 21 nt, Human
gacagugagacucugucucag

SEQ ID NO: 2637859 - RNA, 17 nt, Human
gacgcucucuggccuuc

SEQ ID NO: 2637860 - RNA, 16 nt, Human
gacgcucucuggccuu

SEQ ID NO: 2637861 - RNA, 15 nt, Human
gacgcucucuggccu

SEQ ID NO: 2637862 - RNA, 14 nt, Human
gacucuuaagaaga

SEQ ID NO: 2637863 - RNA, 15 nt, Human
gacucuuaagaagac

SEQ ID NO: 2637864 - RNA, 21 nt, Human
gacucuuaagaagacugcauu

SEQ ID NO: 2637865 - RNA, 12 nt, Human
ggauuuucagcc

SEQ ID NO: 2637866 - RNA, 22 nt, Human
ggaugguucccuugaugaagaa

SEQ ID NO: 2637867 - RNA, 23 nt, Human
ggaugguucccuugaugaagaag

SEQ ID NO: 2637868 - RNA, 16 nt, Human
ggccuccauccugagg

SEQ ID NO: 2637869 - RNA, 19 nt, Human
ggaggcugagaugggagaa

SEQ ID NO: 2637870 - RNA, 15 nt, Human
ggaggcugagauggg

SEQ ID NO: 2637871 - RNA, 11 nt, Human
gggaggcagag

SEQ ID NO: 2637872 - RNA, 20 nt, Human
gggaggcagagguugcagug

SEQ ID NO: 2637873 - RNA, 22 nt, Human
aaaagcuccauuuuuagugaaa

SEQ ID NO: 2637874 - RNA, 21 nt, Human
aaaacuuuaugcuaagugaaa

SEQ ID NO: 2637875 - RNA, 21 nt, Human
aaaauaauuuuuauauuugaa

SEQ ID NO: 2637876 - RNA, 23 nt, Human
aaaauaauuuuuauauuugaaau

SEQ ID NO: 2637877 - RNA, 20 nt, Human
aaaauaauuuuuauauuuga

SEQ ID NO: 2637878 - RNA, 21 nt, Human
gggauuuucagcccucagaau

SEQ ID NO: 2637879 - RNA, 17 nt, Human
gggauugaaggaugcug

SEQ ID NO: 2637880 - RNA, 20 nt, Human
gggcagcugccuccccuccu

SEQ ID NO: 2637881 - RNA, 23 nt, Human
gggcagcugccuccccuccucug

SEQ ID NO: 2637882 - RNA, 13 nt, Human
gggcagcugccuc

SEQ ID NO: 2637883 - RNA, 14 nt, Human
gggcagcugccucc

SEQ ID NO: 2637884 - RNA, 19 nt, Human
gggcagcugccuccccucc

SEQ ID NO: 2637885 - RNA, 16 nt, Human
aaagaaugauuaugaa

SEQ ID NO: 2637886 - RNA, 20 nt, Human
aaagaggcagcuugaaacug

SEQ ID NO: 2637887 - RNA, 18 nt, Human
aaagagaacuuccagauc

SEQ ID NO: 2637888 - RNA, 23 nt, Human
aaagacuauucaaacagucucag

SEQ ID NO: 2637889 - RNA, 13 nt, Human
aaagacuccaaag

SEQ ID NO: 2637890 - RNA, 22 nt, Human
aaagacuauucaaacagucuca

SEQ ID NO: 2637891 - RNA, 24 nt, Human
ggucugugagaugcuagaacuccc

SEQ ID NO: 2637892 - RNA, 14 nt, Human
ggucugugagaugc

SEQ ID NO: 2637893 - RNA, 15 nt, Human
ggugccaguuauggc

SEQ ID NO: 2637894 - RNA, 20 nt, Human
ggugauuuagcaggaagcug

SEQ ID NO: 2637895 - RNA, 13 nt, Human
aaaggaauuuaaa

SEQ ID NO: 2637896 - RNA, 14 nt, Human
aaacacaacuauau

SEQ ID NO: 2637897 - RNA, 13 nt, Human
aaacauauauaac

SEQ ID NO: 2637898 - RNA, 16 nt, Human
aaacauauauaacaau

SEQ ID NO: 2637899 - RNA, 19 nt, Human
aaacauauauaacaaugcu

SEQ ID NO: 2637900 - RNA, 21 nt, Human
aaacauauauaacaaugcugu

SEQ ID NO: 2637901 - RNA, 19 nt, Human
aaaauuuuuucucuaggaa

SEQ ID NO: 2637902 - RNA, 17 nt, Human
aaacaaggaugaauuaa

SEQ ID NO: 2637903 - RNA, 15 nt, Human
aaaccacagcaguug

SEQ ID NO: 2637904 - RNA, 16 nt, Human
aaaccacagcaguuga

SEQ ID NO: 2637905 - RNA, 16 nt, Human
aaacucauuucuagca

SEQ ID NO: 2637906 - RNA, 14 nt, Human
gcuggagcucugcc

SEQ ID NO: 2637907 - RNA, 17 nt, Human
gcuggagcucugcccau

SEQ ID NO: 2637908 - RNA, 21 nt, Human
gcugccuccccuccucugcuu

SEQ ID NO: 2637909 - RNA, 22 nt, Human
gcugccuccccuccucugcuug

SEQ ID NO: 2637910 - RNA, 16 nt, Human
gcugccuccccuccuc

SEQ ID NO: 2637911 - RNA, 17 nt, Human
gcugccuccccuccucu

SEQ ID NO: 2637912 - RNA, 20 nt, Human
gcugccuccccuccucugcu

SEQ ID NO: 2637913 - RNA, 16 nt, Human
gcuaguaucaaaagaa

SEQ ID NO: 2637914 - RNA, 21 nt, Human
gcuaguaauuggaaaggcagc

SEQ ID NO: 2637915 - RNA, 18 nt, Human
gcuccccucggagaagag

SEQ ID NO: 2637916 - RNA, 15 nt, Human
gcuccccucggagaa

SEQ ID NO: 2637917 - RNA, 22 nt, Human
gccagacaucaacagauaaaua

SEQ ID NO: 2637918 - RNA, 19 nt, Human
gccagauuuuccugaaaac

SEQ ID NO: 2637919 - RNA, 22 nt, Human
gccagcaguucagagcugcccu

SEQ ID NO: 2637920 - RNA, 23 nt, Human
gccagcaguucagagcugcccuc

SEQ ID NO: 2637921 - RNA, 17 nt, Human
gcccuguuaaaagauga

SEQ ID NO: 2637922 - RNA, 14 nt, Human
gcccuguuaaaaga

SEQ ID NO: 2637923 - RNA, 13 nt, Human
gcccuguuaaaag

SEQ ID NO: 2637924 - RNA, 16 nt, Human
gcccccaggugccagu

SEQ ID NO: 2637925 - RNA, 18 nt, Human
cuaucucauuuccaagca

SEQ ID NO: 2637926 - RNA, 18 nt, Human
cuauguucuaagaaguga

SEQ ID NO: 2637927 - RNA, 16 nt, Human
cucaguccaugaagau

SEQ ID NO: 2637928 - RNA, 13 nt, Human
cucucuggccuuc

SEQ ID NO: 2637929 - RNA, 16 nt, Human
cucucuggccuucggc

SEQ ID NO: 2637930 - RNA, 14 nt, Human
cucucuggccuucg

SEQ ID NO: 2637931 - RNA, 19 nt, Human
cucuauguucuaagaagug

SEQ ID NO: 2637932 - RNA, 16 nt, Human
cucuccccaugauguu

SEQ ID NO: 2637933 - RNA, 15 nt, Human
cucuccccaugaugu

SEQ ID NO: 2637934 - RNA, 16 nt, Human
cucucuguaauaaacu

SEQ ID NO: 2637935 - RNA, 21 nt, Human
cucucuguaauaaacucauuu

SEQ ID NO: 2637936 - RNA, 19 nt, Human
cucccuccaccucccugca

SEQ ID NO: 2637937 - RNA, 22 nt, Human
cucccuccaccucccugcaaua

SEQ ID NO: 2637938 - RNA, 20 nt, Human
cucccuccaccucccugcaa

SEQ ID NO: 2637939 - RNA, 21 nt, Human
cucccuccaccucccugcaau

SEQ ID NO: 2637940 - RNA, 17 nt, Human
ccuucucuucacaguca

SEQ ID NO: 2637941 - RNA, 20 nt, Human
cuaacgaaguauccuucagc

SEQ ID NO: 2637942 - RNA, 20 nt, Human
cuacaaaaacacagcaaggg

SEQ ID NO: 2637943 - RNA, 12 nt, Human
ccuuuucccaac

SEQ ID NO: 2637944 - RNA, 15 nt, Human
ccccauuguggucac

SEQ ID NO: 2637945 - RNA, 13 nt, Human
ccauuuaaagcuu

SEQ ID NO: 2637946 - RNA, 22 nt, Human
ccauuguggucacaggaaguag

SEQ ID NO: 2637947 - RNA, 18 nt, Human
ccaugggcacugugggua

SEQ ID NO: 2637948 - RNA, 15 nt, Human
ccaggggccaugaau

SEQ ID NO: 2637949 - RNA, 19 nt, Human
ccacuuggucugugagaug

SEQ ID NO: 2637950 - RNA, 17 nt, Human
ccacuuggucugugaga

SEQ ID NO: 2637951 - RNA, 16 nt, Human
ccacuuggucugugag

SEQ ID NO: 2637952 - RNA, 15 nt, Human
ccacuuggucuguga

SEQ ID NO: 2637953 - RNA, 22 nt, Human
ccacuuggucugugagaugcua

SEQ ID NO: 2637954 - RNA, 20 nt, Human
ccacuuggucugugagaugc

SEQ ID NO: 2637955 - RNA, 12 nt, Human
ccacuuggucug

SEQ ID NO: 2637956 - RNA, 13 nt, Human
cccucggagaaga

SEQ ID NO: 2637957 - RNA, 14 nt, Human
cccugagcaggauu

SEQ ID NO: 2637958 - RNA, 20 nt, Human
ccuaacgaaguauccuucag

SEQ ID NO: 2637959 - RNA, 15 nt, Human
ccucuccugggcagc

SEQ ID NO: 2637960 - RNA, 16 nt, Human
ccucuccugggcagcu

SEQ ID NO: 2637961 - RNA, 17 nt, Human
ccucuccugggcagcug

SEQ ID NO: 2637962 - RNA, 18 nt, Human
ccucuccugggcagcugc

SEQ ID NO: 2637963 - RNA, 19 nt, Human
ccucuccugggcagcugcc

SEQ ID NO: 2637964 - RNA, 20 nt, Human
ccucuccugggcagcugccu

SEQ ID NO: 2637965 - RNA, 21 nt, Human
ccucuccugggcagcugccuc

SEQ ID NO: 2637966 - RNA, 22 nt, Human
ccucuccugggcagcugccucc

SEQ ID NO: 2637967 - RNA, 19 nt, Human
cauuauauuuauuacugua

SEQ ID NO: 2637968 - RNA, 21 nt, Human
ccaacuccagaaagugacaag

SEQ ID NO: 2637969 - RNA, 14 nt, Human
ccaaaaggcagaag

SEQ ID NO: 2637970 - RNA, 14 nt, Human
cauuuguauaaaau

SEQ ID NO: 2637971 - RNA, 16 nt, Human
cauuuguauaaaauaa

SEQ ID NO: 2637972 - RNA, 23 nt, Human
caguucagagcugcccucuccug

SEQ ID NO: 2637973 - RNA, 24 nt, Human
caguucagagcugcccucuccugg

SEQ ID NO: 2637974 - RNA, 18 nt, Human
caguucagagcugcccuc

SEQ ID NO: 2637975 - RNA, 19 nt, Human
caguucagagcugcccucu

SEQ ID NO: 2637976 - RNA, 21 nt, Human
caguucagagcugcccucucc

SEQ ID NO: 2637977 - RNA, 22 nt, Human
caguucagagcugcccucuccu

SEQ ID NO: 2637978 - RNA, 15 nt, Human
caguucagagcugcc

SEQ ID NO: 2637979 - RNA, 16 nt, Human
caguucagagcugccc

SEQ ID NO: 2637980 - RNA, 17 nt, Human
caguucagagcugcccu

SEQ ID NO: 2637981 - RNA, 22 nt, Human
caguuauuauauuuacaaaugg

SEQ ID NO: 2637982 - RNA, 22 nt, Human
cagugauuaccagggacugagg

SEQ ID NO: 2637983 - RNA, 21 nt, Human
caguuauuauauuuacaaaug

SEQ ID NO: 2637984 - RNA, 17 nt, Human
caguuauuauauuuaca

SEQ ID NO: 2637985 - RNA, 20 nt, Human
caguuauggcuauaggugcu

SEQ ID NO: 2637986 - RNA, 19 nt, Human
caguuauggcuauaggugc

SEQ ID NO: 2637987 - RNA, 13 nt, Human
caguuauggcuau

SEQ ID NO: 2637988 - RNA, 19 nt, Human
cauccugaggcuccacuug

SEQ ID NO: 2637989 - RNA, 18 nt, Human
cauccugaggcuccacuu

SEQ ID NO: 2637990 - RNA, 13 nt, Human
caucagcugcuga

SEQ ID NO: 2637991 - RNA, 19 nt, Human
cauagcagcuuauucacaa

SEQ ID NO: 2637992 - RNA, 16 nt, Human
cauagguuuaauaauu

SEQ ID NO: 2637993 - RNA, 11 nt, Human
caggcuacugu

SEQ ID NO: 2637994 - RNA, 11 nt, Human
cagcugccucc

SEQ ID NO: 2637995 - RNA, 10 nt, Human
cagcugccuc

SEQ ID NO: 2637996 - RNA, 9 nt, Human
cagcugccu

SEQ ID NO: 2637997 - RNA, 14 nt, Human
cagcugccuccccu

SEQ ID NO: 2637998 - RNA, 15 nt, Human
cagcugccuccccuc

SEQ ID NO: 2637999 - RNA, 16 nt, Human
cagcugccuccccucc

SEQ ID NO: 2638000 - RNA, 17 nt, Human
cagcugccuccccuccu

SEQ ID NO: 2638001 - RNA, 18 nt, Human
cagcugccuccccuccuc

SEQ ID NO: 2638002 - RNA, 19 nt, Human
cagcugccuccccuccucu

SEQ ID NO: 2638003 - RNA, 20 nt, Human
cagcugccuccccuccucug

SEQ ID NO: 2638004 - RNA, 14 nt, Human
cagcuuauugucua

SEQ ID NO: 2638005 - RNA, 20 nt, Human
cagcuguaugauucccagcc

SEQ ID NO: 2638006 - RNA, 20 nt, Human
cagcuuauugucuagugaaa

SEQ ID NO: 2638007 - RNA, 16 nt, Human
caggaaagagaacuuc

SEQ ID NO: 2638008 - RNA, 20 nt, Human
caggaaagagaacuuccaga

SEQ ID NO: 2638009 - RNA, 19 nt, Human
cagacuggauaguccgucu

SEQ ID NO: 2638010 - RNA, 23 nt, Human
cagacuggcacaguuuucugaga

SEQ ID NO: 2638011 - RNA, 22 nt, Human
cagacuggcacaguuuucugag

SEQ ID NO: 2638012 - RNA, 18 nt, Human
cagacuggcacaguuuuc

SEQ ID NO: 2638013 - RNA, 17 nt, Human
cagacuggcacaguuuu

SEQ ID NO: 2638014 - RNA, 20 nt, Human
cagccagacuggcacaguuu

SEQ ID NO: 2638015 - RNA, 23 nt, Human
cagccagcaguucagagcugccc

SEQ ID NO: 2638016 - RNA, 18 nt, Human
cagccagacuggcacagu

SEQ ID NO: 2638017 - RNA, 15 nt, Human
cagccagacuggcac

SEQ ID NO: 2638018 - RNA, 14 nt, Human
cagccagacuggca

SEQ ID NO: 2638019 - RNA, 23 nt, Human
cagagcugcccucuccugggcag

SEQ ID NO: 2638020 - RNA, 18 nt, Human
cagagcugcccucuccug

SEQ ID NO: 2638021 - RNA, 19 nt, Human
cagagcugcccucuccugg

SEQ ID NO: 2638022 - RNA, 20 nt, Human
cagagcugcccucuccuggg

SEQ ID NO: 2638023 - RNA, 21 nt, Human
cagagcugcccucuccugggc

SEQ ID NO: 2638024 - RNA, 22 nt, Human
auugaggacacugauauggguc

SEQ ID NO: 2638025 - RNA, 19 nt, Human
auuuucuauaauuuaaaua

SEQ ID NO: 2638026 - RNA, 18 nt, Human
auuuucuauaauuuaaau

SEQ ID NO: 2638027 - RNA, 17 nt, Human
auuuucuauaauuuaaa

SEQ ID NO: 2638028 - RNA, 19 nt, Human
auuuuuauauuugaaauau

SEQ ID NO: 2638029 - RNA, 16 nt, Human
auuuuuauauuugaaa

SEQ ID NO: 2638030 - RNA, 21 nt, Human
caaaagguauuuuaaucacca

SEQ ID NO: 2638031 - RNA, 16 nt, Human
auuucagcagcugcag

SEQ ID NO: 2638032 - RNA, 21 nt, Human
cacuccagugagacagcucug

SEQ ID NO: 2638033 - RNA, 16 nt, Human
cacuccagugagacag

SEQ ID NO: 2638034 - RNA, 11 nt, Human
cacugaagaag

SEQ ID NO: 2638035 - RNA, 23 nt, Human
cacugaagaagcaccaaucauga

SEQ ID NO: 2638036 - RNA, 23 nt, Human
cacaucagcuugcccuguuaaaa

SEQ ID NO: 2638037 - RNA, 13 nt, Human
cacaucagcuugc

SEQ ID NO: 2638038 - RNA, 14 nt, Human
caagcaaguauuag

SEQ ID NO: 2638039 - RNA, 12 nt, Human
caacuccagaaa

SEQ ID NO: 2638040 - RNA, 19 nt, Human
caacuauauuguuugcuaa

SEQ ID NO: 2638041 - RNA, 19 nt, Human
caacuaucucauuuccaag

SEQ ID NO: 2638042 - RNA, 17 nt, Human
caaucagccuaguugau

SEQ ID NO: 2638043 - RNA, 21 nt, Human
auuuauuuuaauaauguuuca

SEQ ID NO: 2638044 - RNA, 19 nt, Human
auuuauuacuguaagaaaa

SEQ ID NO: 2638045 - RNA, 20 nt, Human
auuuauuacuguaagaaaau

SEQ ID NO: 2638046 - RNA, 22 nt, Human
auuuaccacuuguguuuugcaa

SEQ ID NO: 2638047 - RNA, 15 nt, Human
auuuaccacuugugu

SEQ ID NO: 2638048 - RNA, 17 nt, Human
auuuaaaaaaaaaccug

SEQ ID NO: 2638049 - RNA, 16 nt, Human
auuguaguccuguaau

SEQ ID NO: 2638050 - RNA, 20 nt, Human
auuucuugagguaaaagcau

SEQ ID NO: 2638051 - RNA, 16 nt, Human
auuggagcucguggaa

SEQ ID NO: 2638052 - RNA, 17 nt, Human
auuggagcucgugggac

SEQ ID NO: 2638053 - RNA, 17 nt, Human
auugaaggaugcugucu

SEQ ID NO: 2638054 - RNA, 24 nt, Human
auuccuagaaacugacacaugcug

SEQ ID NO: 2638055 - RNA, 16 nt, Human
uuuucuauaauuuaaa

SEQ ID NO: 2638056 - RNA, 20 nt, Human
uuuucaggcuagauguaugu

SEQ ID NO: 2638057 - RNA, 22 nt, Human
uuuuauggcacuaguauuucua

SEQ ID NO: 2638058 - RNA, 20 nt, Human
augugcuaguaauuggaaag

SEQ ID NO: 2638059 - RNA, 21 nt, Human
augugcuaguaauuggaaagg

SEQ ID NO: 2638060 - RNA, 20 nt, Human
uuugcuggagcucugcccau

SEQ ID NO: 2638061 - RNA, 19 nt, Human
uuugcuaagcauuccaacu

SEQ ID NO: 2638062 - RNA, 19 nt, Human
auguauauuuuauaucaau

SEQ ID NO: 2638063 - RNA, 23 nt, Human
augucgucaaagcugaaauggac

SEQ ID NO: 2638064 - RNA, 17 nt, Human
uuuguaguguuggagaa

SEQ ID NO: 2638065 - RNA, 17 nt, Human
auuccaagugauugaaa

SEQ ID NO: 2638066 - RNA, 20 nt, Human
auuauauggcuugaguuuaa

SEQ ID NO: 2638067 - RNA, 22 nt, Human
auucaaacagucucaggaaauc

SEQ ID NO: 2638068 - RNA, 17 nt, Human
uuuuuauauuugaaaua

SEQ ID NO: 2638069 - RNA, 15 nt, Human
uuuuugaagcuguau

SEQ ID NO: 2638070 - RNA, 15 nt, Human
uuuuguuuucauuau

SEQ ID NO: 2638071 - RNA, 14 nt, Human
uuuugugaagcaaa

SEQ ID NO: 2638072 - RNA, 15 nt, Human
auuacuguaagaaaa

SEQ ID NO: 2638073 - RNA, 16 nt, Human
auuacuguaagaaaau

SEQ ID NO: 2638074 - RNA, 20 nt, Human
uugucaauaaaauccauaca

SEQ ID NO: 2638075 - RNA, 15 nt, Human
augagguacugagag

SEQ ID NO: 2638076 - RNA, 18 nt, Human
augagguacugagaguga

SEQ ID NO: 2638077 - RNA, 17 nt, Human
augagguacugagagug

SEQ ID NO: 2638078 - RNA, 13 nt, Human
augauuucauuca

SEQ ID NO: 2638079 - RNA, 14 nt, Human
augcaaagcacuga

SEQ ID NO: 2638080 - RNA, 13 nt, Human
augcaaagcacug

SEQ ID NO: 2638081 - RNA, 12 nt, Human
augcaaagcacu

SEQ ID NO: 2638082 - RNA, 18 nt, Human
uuuaaaaaaauuccaagu

SEQ ID NO: 2638083 - RNA, 21 nt, Human
uuuaaauauaugcuaagucuu

SEQ ID NO: 2638084 - RNA, 23 nt, Human
augcuguauuuuaaaagaaugau

SEQ ID NO: 2638085 - RNA, 19 nt, Human
augcuguauuuuaaaagaa

SEQ ID NO: 2638086 - RNA, 22 nt, Human
augcuguauuuuaaaagaauga

SEQ ID NO: 2638087 - RNA, 21 nt, Human
augcuucuguuuuauaauuuu

SEQ ID NO: 2638088 - RNA, 19 nt, Human
uuucaaacauauauaacaa

SEQ ID NO: 2638089 - RNA, 19 nt, Human
uuuauaugcuucuguuuua

SEQ ID NO: 2638090 - RNA, 21 nt, Human
uuuauaugcuucuguuuuaua

SEQ ID NO: 2638091 - RNA, 14 nt, Human
augccuuuucccaa

SEQ ID NO: 2638092 - RNA, 20 nt, Human
augccuuuucccaacuccag

SEQ ID NO: 2638093 - RNA, 22 nt, Human
augccuuuucccaacuccagaa

SEQ ID NO: 2638094 - RNA, 18 nt, Human
augcuacaggauuugaaa

SEQ ID NO: 2638095 - RNA, 12 nt, Human
uugacuuuuuau

SEQ ID NO: 2638096 - RNA, 13 nt, Human
uugacaugggaca

SEQ ID NO: 2638097 - RNA, 15 nt, Human
aucucaaaacugcac

SEQ ID NO: 2638098 - RNA, 20 nt, Human
aucucaaaacugcacuguca

SEQ ID NO: 2638099 - RNA, 19 nt, Human
aucucaaaacugcacuguc

SEQ ID NO: 2638100 - RNA, 16 nt, Human
aucuuauaauuuaaaa

SEQ ID NO: 2638101 - RNA, 15 nt, Human
aucuuauaauuuaaa

SEQ ID NO: 2638102 - RNA, 15 nt, Human
uuggagaagaacuga

SEQ ID NO: 2638103 - RNA, 17 nt, Human
uuggagaagaacugaaa

SEQ ID NO: 2638104 - RNA, 22 nt, Human
uuggagaagaacugaaaucaua

SEQ ID NO: 2638105 - RNA, 15 nt, Human
aucuuuaaaauacac

SEQ ID NO: 2638106 - RNA, 12 nt, Human
aucuuuaaaaua

SEQ ID NO: 2638107 - RNA, 18 nt, Human
augaacuuguaaaggaau

SEQ ID NO: 2638108 - RNA, 23 nt, Human
auaugcaaagcacugacuucuaa

SEQ ID NO: 2638109 - RNA, 16 nt, Human
auaugcaaagcacuga

SEQ ID NO: 2638110 - RNA, 17 nt, Human
auagucaaauuguguga

SEQ ID NO: 2638111 - RNA, 18 nt, Human
auagucaaauugugugaa

SEQ ID NO: 2638112 - RNA, 12 nt, Human
auauaacaaugc

SEQ ID NO: 2638113 - RNA, 15 nt, Human
auauaacaaugcugu

SEQ ID NO: 2638114 - RNA, 19 nt, Human
auauaagcuuguauuccuu

SEQ ID NO: 2638115 - RNA, 19 nt, Human
auauauaacaaugcuguau

SEQ ID NO: 2638116 - RNA, 17 nt, Human
auauauaacaaugcugu

SEQ ID NO: 2638117 - RNA, 18 nt, Human
auauauaacaaugcugua

SEQ ID NO: 2638118 - RNA, 15 nt, Human
uucagcccucagaau

SEQ ID NO: 2638119 - RNA, 21 nt, Human
auaggaauugacccacaagaa

SEQ ID NO: 2638120 - RNA, 15 nt, Human
uucaaacauauauaa

SEQ ID NO: 2638121 - RNA, 17 nt, Human
auagcuacuaauuuuaa

SEQ ID NO: 2638122 - RNA, 14 nt, Human
auagcuacuaauuu

SEQ ID NO: 2638123 - RNA, 18 nt, Human
auagcuacuaauuuuaaa

SEQ ID NO: 2638124 - RNA, 17 nt, Human
uuauuguuuaaaaucau

SEQ ID NO: 2638125 - RNA, 14 nt, Human
uucucaacuccaaa

SEQ ID NO: 2638126 - RNA, 18 nt, Human
uucucaacuccaaacuga

SEQ ID NO: 2638127 - RNA, 12 nt, Human
uucugaagaaga

SEQ ID NO: 2638128 - RNA, 13 nt, Human
uucugaagaagau

SEQ ID NO: 2638129 - RNA, 16 nt, Human
uucugcaucagcugcu

SEQ ID NO: 2638130 - RNA, 14 nt, Human
uucugaagaagaug

SEQ ID NO: 2638131 - RNA, 23 nt, Human
uucugcaucagcugcugaaacaa

SEQ ID NO: 2638132 - RNA, 11 nt, Human
aucccucccuc

SEQ ID NO: 2638133 - RNA, 13 nt, Human
aucccucccucca

SEQ ID NO: 2638134 - RNA, 14 nt, Human
aucccucccuccac

SEQ ID NO: 2638135 - RNA, 23 nt, Human
aucccucccuccaccucccugca

SEQ ID NO: 2638136 - RNA, 23 nt, Human
auauuugaaauauugacuuuuua

SEQ ID NO: 2638137 - RNA, 14 nt, Human
auauuugaaauauu

SEQ ID NO: 2638138 - RNA, 19 nt, Human
auauuugaaauauugacuu

SEQ ID NO: 2638139 - RNA, 22 nt, Human
auauuuguaucacaaaucuuaa

SEQ ID NO: 2638140 - RNA, 12 nt, Human
auauuuuaacuu

SEQ ID NO: 2638141 - RNA, 13 nt, Human
auauuugaaauau

SEQ ID NO: 2638142 - RNA, 20 nt, Human
agugaacaaauuuacagaga

SEQ ID NO: 2638143 - RNA, 16 nt, Human
agugaacaaauuuaca

SEQ ID NO: 2638144 - RNA, 15 nt, Human
agugaaagaaaauaa

SEQ ID NO: 2638145 - RNA, 19 nt, Human
ugugagaugcuagaacucc

SEQ ID NO: 2638146 - RNA, 15 nt, Human
ugugagaugcuagaa

SEQ ID NO: 2638147 - RNA, 22 nt, Human
agucucaggaaaucaaauaugc

SEQ ID NO: 2638148 - RNA, 20 nt, Human
uguggucacaggaaguagag

SEQ ID NO: 2638149 - RNA, 13 nt, Human
uguguaaguagau

SEQ ID NO: 2638150 - RNA, 18 nt, Human
uguuccuagugaaagagg

SEQ ID NO: 2638151 - RNA, 14 nt, Human
uguuccuagugaaa

SEQ ID NO: 2638152 - RNA, 15 nt, Human
uguuauaaucuuuca

SEQ ID NO: 2638153 - RNA, 19 nt, Human
uguuuucauuaucucaaaa

SEQ ID NO: 2638154 - RNA, 21 nt, Human
aguucugcagauaaacaguag

SEQ ID NO: 2638155 - RNA, 16 nt, Human
aguucugcagauaaac

SEQ ID NO: 2638156 - RNA, 14 nt, Human
uguuuugcaagcca

SEQ ID NO: 2638157 - RNA, 16 nt, Human
aguucugaagaagaug

SEQ ID NO: 2638158 - RNA, 14 nt, Human
uuaccuuacagaag

SEQ ID NO: 2638159 - RNA, 12 nt, Human
uuaccugggaaa

SEQ ID NO: 2638160 - RNA, 15 nt, Human
uuacuguaagaaaau

SEQ ID NO: 2638161 - RNA, 18 nt, Human
auaaaauccauacauuug

SEQ ID NO: 2638162 - RNA, 19 nt, Human
auaaaauccauacauuugu

SEQ ID NO: 2638163 - RNA, 16 nt, Human
auaaaauaauuuuuau

SEQ ID NO: 2638164 - RNA, 21 nt, Human
auaaaauaauuuuuauauuug

SEQ ID NO: 2638165 - RNA, 22 nt, Human
auaaaauaauuuuuauauuuga

SEQ ID NO: 2638166 - RNA, 18 nt, Human
uuaaguaaugauaacugg

SEQ ID NO: 2638167 - RNA, 22 nt, Human
uuaagaagacugcauuauauuu

SEQ ID NO: 2638168 - RNA, 23 nt, Human
agggaggacgcucucuggccuuc

SEQ ID NO: 2638169 - RNA, 22 nt, Human
agggaggacgcucucuggccuu

SEQ ID NO: 2638170 - RNA, 21 nt, Human
agggaggacgcucucuggccu

SEQ ID NO: 2638171 - RNA, 13 nt, Human
agggaaauuucag

SEQ ID NO: 2638172 - RNA, 16 nt, Human
aggggaauugaggaca

SEQ ID NO: 2638173 - RNA, 18 nt, Human
aggggagcaugggaagug

SEQ ID NO: 2638174 - RNA, 16 nt, Human
uguaaaggaauuuaaa

SEQ ID NO: 2638175 - RNA, 23 nt, Human
uggugugaccacugcagaagaca

SEQ ID NO: 2638176 - RNA, 17 nt, Human
aguaaugauaacuggaa

SEQ ID NO: 2638177 - RNA, 18 nt, Human
aguaaugauaacuggaaa

SEQ ID NO: 2638178 - RNA, 20 nt, Human
aguaaugauaacuggaaacu

SEQ ID NO: 2638179 - RNA, 13 nt, Human
aguaaaauccaca

SEQ ID NO: 2638180 - RNA, 16 nt, Human
uguagaggagaaacug

SEQ ID NO: 2638181 - RNA, 13 nt, Human
uguauuacaaauc

SEQ ID NO: 2638182 - RNA, 22 nt, Human
uguauuacaaauccaaugaaau

SEQ ID NO: 2638183 - RNA, 14 nt, Human
uguaguguuggaga

SEQ ID NO: 2638184 - RNA, 15 nt, Human
uguaguguuggagaa

SEQ ID NO: 2638185 - RNA, 18 nt, Human
uguaucacaaaucuuaac

SEQ ID NO: 2638186 - RNA, 15 nt, Human
uguaucacaaaucuu

SEQ ID NO: 2638187 - RNA, 13 nt, Human
aguagucagacug

SEQ ID NO: 2638188 - RNA, 18 nt, Human
aguauuagaauaccacag

SEQ ID NO: 2638189 - RNA, 18 nt, Human
aguauuucuaugaaauau

SEQ ID NO: 2638190 - RNA, 17 nt, Human
aguauuucuaugaaaua

SEQ ID NO: 2638191 - RNA, 16 nt, Human
aguauuucuaugaaau

SEQ ID NO: 2638192 - RNA, 14 nt, Human
agucaccucaugga

SEQ ID NO: 2638193 - RNA, 15 nt, Human
agucaccucauggaa

SEQ ID NO: 2638194 - RNA, 17 nt, Human
agucaccucauggaauu

SEQ ID NO: 2638195 - RNA, 14 nt, Human
agcuguucacagcc

SEQ ID NO: 2638196 - RNA, 20 nt, Human
ugcccuguuaaaagaugaaa

SEQ ID NO: 2638197 - RNA, 13 nt, Human
agcugcccucucc

SEQ ID NO: 2638198 - RNA, 14 nt, Human
agcugcccucuccu

SEQ ID NO: 2638199 - RNA, 15 nt, Human
agcugcccucuccug

SEQ ID NO: 2638200 - RNA, 16 nt, Human
agcugcccucuccugg

SEQ ID NO: 2638201 - RNA, 22 nt, Human
aggaaaucaaauaugcaaagca

SEQ ID NO: 2638202 - RNA, 21 nt, Human
aggaaaucaaauaugcaaagc

SEQ ID NO: 2638203 - RNA, 20 nt, Human
aggaaaucaaauaugcaaag

SEQ ID NO: 2638204 - RNA, 20 nt, Human
agcuugcccuggugccucac

SEQ ID NO: 2638205 - RNA, 19 nt, Human
agcuugcccuguuaaaaga

SEQ ID NO: 2638206 - RNA, 18 nt, Human
agcuugcccuguuaaaag

SEQ ID NO: 2638207 - RNA, 16 nt, Human
agcuugcccuguuaaa

SEQ ID NO: 2638208 - RNA, 17 nt, Human
ugccuuuucccaacucc

SEQ ID NO: 2638209 - RNA, 19 nt, Human
ugccuuuucccaacuccag

SEQ ID NO: 2638210 - RNA, 15 nt, Human
ugcuacaaaaacaca

SEQ ID NO: 2638211 - RNA, 14 nt, Human
ugcuacaaaaacac

SEQ ID NO: 2638212 - RNA, 20 nt, Human
aggcauuuaggccaugggac

SEQ ID NO: 2638213 - RNA, 15 nt, Human
aggcagcuugaaacu

SEQ ID NO: 2638214 - RNA, 21 nt, Human
uggagcucgugggacagucac

SEQ ID NO: 2638215 - RNA, 17 nt, Human
uggagcucguggaacag

SEQ ID NO: 2638216 - RNA, 21 nt, Human
uggagcucguggaacaguuac

SEQ ID NO: 2638217 - RNA, 15 nt, Human
aggcccccaggugcc

SEQ ID NO: 2638218 - RNA, 14 nt, Human
uggaguugaaaauc

SEQ ID NO: 2638219 - RNA, 17 nt, Human
ugcuuuuaaaaaaaaau

SEQ ID NO: 2638220 - RNA, 17 nt, Human
aggagaaacuggaacuc

SEQ ID NO: 2638221 - RNA, 19 nt, Human
aggagaaacuggaacucuc

SEQ ID NO: 2638222 - RNA, 18 nt, Human
aggagaaacuggaacucu

SEQ ID NO: 2638223 - RNA, 14 nt, Human
aggacgcucucugg

SEQ ID NO: 2638224 - RNA, 13 nt, Human
aggacgcucucug

SEQ ID NO: 2638225 - RNA, 20 nt, Human
aggacgcucucuggccuucg

SEQ ID NO: 2638226 - RNA, 19 nt, Human
aggacgcucucuggccuuc

SEQ ID NO: 2638227 - RNA, 17 nt, Human
aggacgcucucuggccu

SEQ ID NO: 2638228 - RNA, 16 nt, Human
aggacgcucucuggcc

SEQ ID NO: 2638229 - RNA, 15 nt, Human
ugcacuccagccuga

SEQ ID NO: 2638230 - RNA, 17 nt, Human
ugcacuccagccugagc

SEQ ID NO: 2638231 - RNA, 22 nt, Human
ugcagaagacaguauggcagcu

SEQ ID NO: 2638232 - RNA, 18 nt, Human
agccccgugggguuccuc

SEQ ID NO: 2638233 - RNA, 15 nt, Human
ugcaagccagauuuu

SEQ ID NO: 2638234 - RNA, 21 nt, Human
ugcaagccagauuuuccugaa

SEQ ID NO: 2638235 - RNA, 17 nt, Human
ugcaauaaaauggguuu

SEQ ID NO: 2638236 - RNA, 21 nt, Human
ugcaauaaaauggguuuuacu

SEQ ID NO: 2638237 - RNA, 13 nt, Human
ugauuucauucaa

SEQ ID NO: 2638238 - RNA, 18 nt, Human
ugcaaagcacugacuucu

SEQ ID NO: 2638239 - RNA, 22 nt, Human
ugcaaagcacugacuucuaagu

SEQ ID NO: 2638240 - RNA, 20 nt, Human
ugcaaagcacugacuucuaa

SEQ ID NO: 2638241 - RNA, 17 nt, Human
ugccaguuauggcuaua

SEQ ID NO: 2638242 - RNA, 13 nt, Human
ugccauaauuacu

SEQ ID NO: 2638243 - RNA, 20 nt, Human
ugcauagauucccugagcag

SEQ ID NO: 2638244 - RNA, 13 nt, Human
ugcauacucauua

SEQ ID NO: 2638245 - RNA, 19 nt, Human
ugcauacucauuaggaugg

SEQ ID NO: 2638246 - RNA, 17 nt, Human
agcagucaggaaagaga

SEQ ID NO: 2638247 - RNA, 18 nt, Human
agcagucaggaaagagaa

SEQ ID NO: 2638248 - RNA, 22 nt, Human
agcaguuugguuucuagcauga

SEQ ID NO: 2638249 - RNA, 23 nt, Human
agcaguuugguuucuagcaugaa

SEQ ID NO: 2638250 - RNA, 20 nt, Human
agcaguuugguuucuagcau

SEQ ID NO: 2638251 - RNA, 19 nt, Human
agcagucaggaaagagaac

SEQ ID NO: 2638252 - RNA, 13 nt, Human
agcauaccaacac

SEQ ID NO: 2638253 - RNA, 22 nt, Human
agcauaccaacacgagcaggcu

SEQ ID NO: 2638254 - RNA, 19 nt, Human
agcauaccaacacgagcag

SEQ ID NO: 2638255 - RNA, 19 nt, Human
agcagggcauggcugggaa

SEQ ID NO: 2638256 - RNA, 20 nt, Human
agcaggaagcugugagagca

SEQ ID NO: 2638257 - RNA, 14 nt, Human
agcaggcuacuguc

SEQ ID NO: 2638258 - RNA, 20 nt, Human
agcaggcuacugucagcucc

SEQ ID NO: 2638259 - RNA, 19 nt, Human
agcaggcuacugucagcuc

SEQ ID NO: 2638260 - RNA, 17 nt, Human
agcaggcuacugucagc

SEQ ID NO: 2638261 - RNA, 16 nt, Human
agcaggcuacugucag

SEQ ID NO: 2638262 - RNA, 16 nt, Human
ugauuaaguaaugaua

SEQ ID NO: 2638263 - RNA, 15 nt, Human
ugauuaaguaaugau

SEQ ID NO: 2638264 - RNA, 20 nt, Human
agcaucacaugaacuuguaa

SEQ ID NO: 2638265 - RNA, 22 nt, Human
agcauuuagauguauagguuga

SEQ ID NO: 2638266 - RNA, 23 nt, Human
ugaacuagaguuuagcuggaaaa

SEQ ID NO: 2638267 - RNA, 18 nt, Human
ugaacaaauuuacagaga

SEQ ID NO: 2638268 - RNA, 20 nt, Human
ugaacaaauuuacagagaca

SEQ ID NO: 2638269 - RNA, 19 nt, Human
ugaacaaauuuacagagac

SEQ ID NO: 2638270 - RNA, 22 nt, Human
agagcugcccucuccugggcag

SEQ ID NO: 2638271 - RNA, 21 nt, Human
agagcuguucacagccagacu

SEQ ID NO: 2638272 - RNA, 15 nt, Human
agagguugcagugag

SEQ ID NO: 2638273 - RNA, 18 nt, Human
ugaaauauuauguuaaaa

SEQ ID NO: 2638274 - RNA, 15 nt, Human
ugaaauuguauuaca

SEQ ID NO: 2638275 - RNA, 15 nt, Human
agagcugcccucucc

SEQ ID NO: 2638276 - RNA, 13 nt, Human
agagcugcccucu

SEQ ID NO: 2638277 - RNA, 14 nt, Human
agagcugcccucuc

SEQ ID NO: 2638278 - RNA, 23 nt, Human
ugaaauaagccagacaucaacag

SEQ ID NO: 2638279 - RNA, 20 nt, Human
ugaaauaagccagacaucaa

SEQ ID NO: 2638280 - RNA, 18 nt, Human
ugaaauaagccagacauc

SEQ ID NO: 2638281 - RNA, 17 nt, Human
ugaaauaagccagacau

SEQ ID NO: 2638282 - RNA, 16 nt, Human
agaguuuagcuggaaa

SEQ ID NO: 2638283 - RNA, 17 nt, Human
agaguuuagcuggaaaa

SEQ ID NO: 2638284 - RNA, 17 nt, Human
ugacccacaagaaauga

SEQ ID NO: 2638285 - RNA, 17 nt, Human
agaugcaguucugaaga

SEQ ID NO: 2638286 - RNA, 18 nt, Human
agaugcaguucugaagaa

SEQ ID NO: 2638287 - RNA, 19 nt, Human
agaugcaguucugaagaag

SEQ ID NO: 2638288 - RNA, 15 nt, Human
agaugcuagaacucc

SEQ ID NO: 2638289 - RNA, 14 nt, Human
agaugcuagaacuc

SEQ ID NO: 2638290 - RNA, 23 nt, Human
agacuauucaaacagucucagga

SEQ ID NO: 2638291 - RNA, 16 nt, Human
ucuuauuucauuucuu

SEQ ID NO: 2638292 - RNA, 15 nt, Human
ucuuauuucauuucu

SEQ ID NO: 2638293 - RNA, 24 nt, Human
agagacagaaagcagaacagugau

SEQ ID NO: 2638294 - RNA, 23 nt, Human
ucuuagaugcaguucugaagaag

SEQ ID NO: 2638295 - RNA, 22 nt, Human
ucuuagaugcaguucugaagaa

SEQ ID NO: 2638296 - RNA, 16 nt, Human
agacacacugaagaag

SEQ ID NO: 2638297 - RNA, 17 nt, Human
agacacacugaagaagc

SEQ ID NO: 2638298 - RNA, 23 nt, Human
ucucuggccuucggccuccaucc

SEQ ID NO: 2638299 - RNA, 22 nt, Human
ucucuggccuucggccuccauc

SEQ ID NO: 2638300 - RNA, 21 nt, Human
ucucuggccuucggccuccau

SEQ ID NO: 2638301 - RNA, 12 nt, Human
ucucuggccuuc

SEQ ID NO: 2638302 - RNA, 12 nt, Human
ucugaagaagau

SEQ ID NO: 2638303 - RNA, 14 nt, Human
agaaaugaaagcag

SEQ ID NO: 2638304 - RNA, 23 nt, Human
acuucuaaguaaaaccacagcag

SEQ ID NO: 2638305 - RNA, 16 nt, Human
acuugucaauaaaauc

SEQ ID NO: 2638306 - RNA, 20 nt, Human
acuugaacccgggaggcaga

SEQ ID NO: 2638307 - RNA, 19 nt, Human
acuugaacccgggaggcag

SEQ ID NO: 2638308 - RNA, 21 nt, Human
acuugaacccauauuuguaca

SEQ ID NO: 2638309 - RNA, 12 nt, Human
ucucaggaaauc

SEQ ID NO: 2638310 - RNA, 16 nt, Human
acuuguguuuugcaag

SEQ ID NO: 2638311 - RNA, 20 nt, Human
ucuaaagccauuguaguccu

SEQ ID NO: 2638312 - RNA, 16 nt, Human
ucuacauacuauggaa

SEQ ID NO: 2638313 - RNA, 23 nt, Human
ucuaaguaaaaccacagcaguug

SEQ ID NO: 2638314 - RNA, 22 nt, Human
ucuaaguaaaaccacagcaguu

SEQ ID NO: 2638315 - RNA, 21 nt, Human
ucuaaguaaaaccacagcagu

SEQ ID NO: 2638316 - RNA, 22 nt, Human
ucggguuuuauuguuuaaaauc

SEQ ID NO: 2638317 - RNA, 18 nt, Human
acuguggguagacacaca

SEQ ID NO: 2638318 - RNA, 21 nt, Human
acugucagcuccccucggaga

SEQ ID NO: 2638319 - RNA, 18 nt, Human
acugggacaggggagaac

SEQ ID NO: 2638320 - RNA, 13 nt, Human
acuggcacaguuu

SEQ ID NO: 2638321 - RNA, 20 nt, Human
acuggcacaguuuucugaga

SEQ ID NO: 2638322 - RNA, 19 nt, Human
acuggcacaguuuucugag

SEQ ID NO: 2638323 - RNA, 13 nt, Human
acugccuucucaa

SEQ ID NO: 2638324 - RNA, 19 nt, Human
acugccuucucaacuccaa

SEQ ID NO: 2638325 - RNA, 20 nt, Human
acugccuucucaacuccaaa

SEQ ID NO: 2638326 - RNA, 14 nt, Human
acugcauuauauuu

SEQ ID NO: 2638327 - RNA, 15 nt, Human
acugcauuauauuua

SEQ ID NO: 2638328 - RNA, 18 nt, Human
ucgcuccaccuugcagcu

SEQ ID NO: 2638329 - RNA, 14 nt, Human
acuccaaagaaaug

SEQ ID NO: 2638330 - RNA, 18 nt, Human
acuccaaagaaauguaag

SEQ ID NO: 2638331 - RNA, 15 nt, Human
acuccaaagaaaugu

SEQ ID NO: 2638332 - RNA, 21 nt, Human
acuccaaagaaauguaaggga

SEQ ID NO: 2638333 - RNA, 16 nt, Human
uccccucggagaagag

SEQ ID NO: 2638334 - RNA, 17 nt, Human
uccccucggagaagagc

SEQ ID NO: 2638335 - RNA, 13 nt, Human
ucccucccuccac

SEQ ID NO: 2638336 - RNA, 14 nt, Human
ucccucccuccacc

SEQ ID NO: 2638337 - RNA, 21 nt, Human
ucccuccaccucccugcaaua

SEQ ID NO: 2638338 - RNA, 23 nt, Human
ucccuccaccucccugcaauaaa

SEQ ID NO: 2638339 - RNA, 15 nt, Human
ucccucccuccaccu

SEQ ID NO: 2638340 - RNA, 16 nt, Human
ucccucccuccaccuc

SEQ ID NO: 2638341 - RNA, 17 nt, Human
ucccucccuccaccucc

SEQ ID NO: 2638342 - RNA, 11 nt, Human
ucccugagcag

SEQ ID NO: 2638343 - RNA, 17 nt, Human
ucccagccagcaguuca

SEQ ID NO: 2638344 - RNA, 18 nt, Human
ucccagccagcaguucag

SEQ ID NO: 2638345 - RNA, 22 nt, Human
ucccagucauuuaauaaaugug

SEQ ID NO: 2638346 - RNA, 14 nt, Human
ucccagucauuuaa

SEQ ID NO: 2638347 - RNA, 13 nt, Human
uccaugaagaugu

SEQ ID NO: 2638348 - RNA, 21 nt, Human
uccaugaagauguagaggaga

SEQ ID NO: 2638349 - RNA, 19 nt, Human
uccauccugaggcuccacu

SEQ ID NO: 2638350 - RNA, 21 nt, Human
uccauccugaggcuccacuug

SEQ ID NO: 2638351 - RNA, 20 nt, Human
uccauccugaggcuccacuu

SEQ ID NO: 2638352 - RNA, 21 nt, Human
ucaugaauuaguuuuauaugc

SEQ ID NO: 2638353 - RNA, 12 nt, Human
accucccugcaa

SEQ ID NO: 2638354 - RNA, 13 nt, Human
accucccugcaau

SEQ ID NO: 2638355 - RNA, 16 nt, Human
ucaugaauuaguuuua

SEQ ID NO: 2638356 - RNA, 23 nt, Human
ucaggaaaucaaauaugcaaagc

SEQ ID NO: 2638357 - RNA, 22 nt, Human
ucaggaaaucaaauaugcaaag

SEQ ID NO: 2638358 - RNA, 21 nt, Human
accuagggugauauuaaccag

SEQ ID NO: 2638359 - RNA, 20 nt, Human
acgagcaggcuacugucagc

SEQ ID NO: 2638360 - RNA, 19 nt, Human
acgagcaggcuacugucag

SEQ ID NO: 2638361 - RNA, 14 nt, Human
acgagaaaacaaua

SEQ ID NO: 2638362 - RNA, 13 nt, Human
uauuucauuucuu

SEQ ID NO: 2638363 - RNA, 21 nt, Human
uaugaaauauuauguuaaaac

SEQ ID NO: 2638364 - RNA, 21 nt, Human
acaguuuucugagaaagacua

SEQ ID NO: 2638365 - RNA, 20 nt, Human
acaguuuucugagaaagacu

SEQ ID NO: 2638366 - RNA, 19 nt, Human
acaguuuucugagaaagac

SEQ ID NO: 2638367 - RNA, 18 nt, Human
acaguuuucugagaaaga

SEQ ID NO: 2638368 - RNA, 15 nt, Human
acaguuuucugagaa

SEQ ID NO: 2638369 - RNA, 17 nt, Human
acaguuuucugagaaag

SEQ ID NO: 2638370 - RNA, 16 nt, Human
acaguuuucugagaaa

SEQ ID NO: 2638371 - RNA, 13 nt, Human
acaucaacagaua

SEQ ID NO: 2638372 - RNA, 18 nt, Human
acauagaauuaacacaug

SEQ ID NO: 2638373 - RNA, 14 nt, Human
acauagaauuaaca

SEQ ID NO: 2638374 - RNA, 19 nt, Human
acauauauaacaaugcugu

SEQ ID NO: 2638375 - RNA, 14 nt, Human
ucaaagcugaaaug

SEQ ID NO: 2638376 - RNA, 19 nt, Human
acaugauccugcaauucca

SEQ ID NO: 2638377 - RNA, 18 nt, Human
ucaaaagaaagaaaauca

SEQ ID NO: 2638378 - RNA, 21 nt, Human
ucaaaauaccaugccauuuaa

SEQ ID NO: 2638379 - RNA, 23 nt, Human
ucaaaauaccaugccauuuaaag

SEQ ID NO: 2638380 - RNA, 21 nt, Human
ucaaaauaugccccauucaac

SEQ ID NO: 2638381 - RNA, 14 nt, Human
acaugcugaacauc

SEQ ID NO: 2638382 - RNA, 21 nt, Human
acaugcugaacaucacagcuu

SEQ ID NO: 2638383 - RNA, 22 nt, Human
ucaagaugaugaugaucuuuaa

SEQ ID NO: 2638384 - RNA, 13 nt, Human
ucaggaaagagaa

SEQ ID NO: 2638385 - RNA, 19 nt, Human
ucaggaaagagaacuucca

SEQ ID NO: 2638386 - RNA, 21 nt, Human
ucaggaaaucaaauaugcaaa

SEQ ID NO: 2638387 - RNA, 20 nt, Human
ucaggaaaucaaauaugcaa

SEQ ID NO: 2638388 - RNA, 12 nt, Human
ucagagcugccc

SEQ ID NO: 2638389 - RNA, 23 nt, Human
accauuucuugagguaaaagcau

SEQ ID NO: 2638390 - RNA, 14 nt, Human
accagggacugagg

SEQ ID NO: 2638391 - RNA, 18 nt, Human
accacuuguguuuugcaa

SEQ ID NO: 2638392 - RNA, 23 nt, Human
ucaauuuuucuuauuucauuucu

SEQ ID NO: 2638393 - RNA, 20 nt, Human
ucaauuuuucuuauuucauu

SEQ ID NO: 2638394 - RNA, 15 nt, Human
ucaauucuugccaaa

SEQ ID NO: 2638395 - RNA, 13 nt, Human
accaaucaugaau

SEQ ID NO: 2638396 - RNA, 15 nt, Human
accaaucaugaauua

SEQ ID NO: 2638397 - RNA, 14 nt, Human
acaaugcuguauuu

SEQ ID NO: 2638398 - RNA, 17 nt, Human
acaaugcuguauuuuaa

SEQ ID NO: 2638399 - RNA, 14 nt, Human
acacaacuauauug

SEQ ID NO: 2638400 - RNA, 17 nt, Human
acacaacuauauuguuu

SEQ ID NO: 2638401 - RNA, 13 nt, Human
acacacugaagaa

SEQ ID NO: 2638402 - RNA, 20 nt, Human
acacacucaaaucaagaaac

SEQ ID NO: 2638403 - RNA, 14 nt, Human
acacacugaagaag

SEQ ID NO: 2638404 - RNA, 12 nt, Human
uaguguuggaga

SEQ ID NO: 2638405 - RNA, 16 nt, Human
uaguguuggagaagaa

SEQ ID NO: 2638406 - RNA, 17 nt, Human
uaguguuggagaagaac

SEQ ID NO: 2638407 - RNA, 18 nt, Human
acacaugcugaacaucac

SEQ ID NO: 2638408 - RNA, 17 nt, Human
acacuaagagagaauga

SEQ ID NO: 2638409 - RNA, 18 nt, Human
acacuaagagagaaugag

SEQ ID NO: 2638410 - RNA, 19 nt, Human
acacuaagagagaaugaga

SEQ ID NO: 2638411 - RNA, 12 nt, Human
acacugaagaag

SEQ ID NO: 2638412 - RNA, 14 nt, Human
acacugaagaagca

SEQ ID NO: 2638413 - RNA, 14 nt, Human
acacuccagugaga

SEQ ID NO: 2638414 - RNA, 15 nt, Human
acacuuaaaaauggu

SEQ ID NO: 2638415 - RNA, 13 nt, Human
acacuuaaaaaug

SEQ ID NO: 2638416 - RNA, 12 nt, Human
uauauuuacaaa

SEQ ID NO: 2638417 - RNA, 19 nt, Human
uauauuuauuacuguaaga

SEQ ID NO: 2638418 - RNA, 15 nt, Human
uauauuuauuacugu

SEQ ID NO: 2638419 - RNA, 20 nt, Human
acagcccuucuuuccacaga

SEQ ID NO: 2638420 - RNA, 21 nt, Human
acagcccuucuuuccacagaa

SEQ ID NO: 2638421 - RNA, 19 nt, Human
aauuucucccagucauuua

SEQ ID NO: 2638422 - RNA, 15 nt, Human
aauuggagcucgugg

SEQ ID NO: 2638423 - RNA, 18 nt, Human
aauuuacagagacagaaa

SEQ ID NO: 2638424 - RNA, 17 nt, Human
aauuuacagagacagaa

SEQ ID NO: 2638425 - RNA, 19 nt, Human
uacuucuuaggguuaugau

SEQ ID NO: 2638426 - RNA, 18 nt, Human
uacuaaaaauacaaaaaa

SEQ ID NO: 2638427 - RNA, 14 nt, Human
uacuaaaaauacaa

SEQ ID NO: 2638428 - RNA, 19 nt, Human
uacugagagugaacaaauu

SEQ ID NO: 2638429 - RNA, 23 nt, Human
uacugggaaagggauuuucagcc

SEQ ID NO: 2638430 - RNA, 17 nt, Human
uacugagagugaacaaa

SEQ ID NO: 2638431 - RNA, 18 nt, Human
aauugaggacacugauau

SEQ ID NO: 2638432 - RNA, 22 nt, Human
acaagcucacagaccuuugaac

SEQ ID NO: 2638433 - RNA, 17 nt, Human
acaaauuuacagagaca

SEQ ID NO: 2638434 - RNA, 16 nt, Human
uagcuacuaauuuuaa

SEQ ID NO: 2638435 - RNA, 17 nt, Human
uagauaggccaugggca

SEQ ID NO: 2638436 - RNA, 22 nt, Human
uagauaggucagugcaaauacu

SEQ ID NO: 2638437 - RNA, 21 nt, Human
uagaugcaguucugaagaaga

SEQ ID NO: 2638438 - RNA, 20 nt, Human
uagaugcaguucugaagaag

SEQ ID NO: 2638439 - RNA, 21 nt, Human
aauuuuucuuauuucauuucu

SEQ ID NO: 2638440 - RNA, 22 nt, Human
aauuuuuucucuaggaaauauu

SEQ ID NO: 2638441 - RNA, 15 nt, Human
aauaacgauaaaaga

SEQ ID NO: 2638442 - RNA, 21 nt, Human
aauaacaaugaaaguugauaa

SEQ ID NO: 2638443 - RNA, 16 nt, Human
aauaauuuuuauauuu

SEQ ID NO: 2638444 - RNA, 17 nt, Human
aauaauuuuuauauuug

SEQ ID NO: 2638445 - RNA, 19 nt, Human
aauaauuuuuauauuugaa

SEQ ID NO: 2638446 - RNA, 20 nt, Human
aauaauuuuuauauuugaaa

SEQ ID NO: 2638447 - RNA, 18 nt, Human
aauaggcguaacuaauuu

SEQ ID NO: 2638448 - RNA, 15 nt, Human
aauaucacuugucaa

SEQ ID NO: 2638449 - RNA, 12 nt, Human
aauaucacuugu

SEQ ID NO: 2638450 - RNA, 19 nt, Human
aauaucuuuuuuuuaauaa

SEQ ID NO: 2638451 - RNA, 15 nt, Human
aauauuucagauaau

SEQ ID NO: 2638452 - RNA, 14 nt, Human
aauauuucagauaa

SEQ ID NO: 2638453 - RNA, 24 nt, Human
aauaugcaaagcacugacuucuaa

SEQ ID NO: 2638454 - RNA, 17 nt, Human
aauaugcaaagcacuga

SEQ ID NO: 2638455 - RNA, 15 nt, Human
aauaugcaaagcacu

SEQ ID NO: 2638456 - RNA, 16 nt, Human
aaucuuauaauuuaaa

SEQ ID NO: 2638457 - RNA, 14 nt, Human
aaucuuauaauuua

SEQ ID NO: 2638458 - RNA, 13 nt, Human
aauccuugaagau

SEQ ID NO: 2638459 - RNA, 15 nt, Human
aaucaucaagucuuu

SEQ ID NO: 2638460 - RNA, 23 nt, Human
aaucaugaauuaguuuuauaugc

SEQ ID NO: 2638461 - RNA, 19 nt, Human
aaucaugaauuaguuuuau

SEQ ID NO: 2638462 - RNA, 17 nt, Human
aaucaugaauuaguuuu

SEQ ID NO: 2638463 - RNA, 18 nt, Human
uaaguuuuuuuuuaaaaa

SEQ ID NO: 2638464 - RNA, 21 nt, Human
aaugagagacacacugaagaa

SEQ ID NO: 2638465 - RNA, 16 nt, Human
uaaugauaacuggaaa

SEQ ID NO: 2638466 - RNA, 14 nt, Human
uacaaaaacacagc

SEQ ID NO: 2638467 - RNA, 13 nt, Human
uacaaaaacacag

SEQ ID NO: 2638468 - RNA, 16 nt, Human
uacaaaaacacagcaa

SEQ ID NO: 2638469 - RNA, 15 nt, Human
uacaaaaacacagca

SEQ ID NO: 2638470 - RNA, 11 nt, Human
aaugugauaug

SEQ ID NO: 2638471 - RNA, 19 nt, Human
aauggacuuuuguacauag

SEQ ID NO: 2638472 - RNA, 19 nt, Human
uacacuaagagagaaugag

SEQ ID NO: 2638473 - RNA, 22 nt, Human
aagaagugaaaaucuacacucc

SEQ ID NO: 2638474 - RNA, 16 nt, Human
aagaagugaaaaucua

SEQ ID NO: 2638475 - RNA, 18 nt, Human
gugcuaguaauuggaaag

SEQ ID NO: 2638476 - RNA, 18 nt, Human
aagaaugauuaugaauua

SEQ ID NO: 2638477 - RNA, 16 nt, Human
aagaaugauuaugaau

SEQ ID NO: 2638478 - RNA, 13 nt, Human
aagacuauucaaa

SEQ ID NO: 2638479 - RNA, 21 nt, Human
gugggacagucaccucaugga

SEQ ID NO: 2638480 - RNA, 21 nt, Human
gugugaccacugcagaagaca

SEQ ID NO: 2638481 - RNA, 23 nt, Human
guuuucugagaaagacuauucaa

SEQ ID NO: 2638482 - RNA, 21 nt, Human
guuucaaacauauauaacaau

SEQ ID NO: 2638483 - RNA, 13 nt, Human
aagguacuucaaa

SEQ ID NO: 2638484 - RNA, 18 nt, Human
guuguaccgcaaugugac

SEQ ID NO: 2638485 - RNA, 16 nt, Human
guuuaaaaucauuucu

SEQ ID NO: 2638486 - RNA, 10 nt, Human
guuuaaaauc

SEQ ID NO: 2638487 - RNA, 23 nt, Human
aagcuuguauuccuuuuucucuc

SEQ ID NO: 2638488 - RNA, 13 nt, Human
guugacaugggac

SEQ ID NO: 2638489 - RNA, 14 nt, Human
guugacaugggaca

SEQ ID NO: 2638490 - RNA, 18 nt, Human
guugacaugggacauuug

SEQ ID NO: 2638491 - RNA, 21 nt, Human
gucuuaauuaaaagaauauuu

SEQ ID NO: 2638492 - RNA, 19 nt, Human
gucuuaauuaaaagaauau

SEQ ID NO: 2638493 - RNA, 22 nt, Human
gucuuaauuaaaagaauauuuu

SEQ ID NO: 2638494 - RNA, 14 nt, Human
aacuccagaaagug

SEQ ID NO: 2638495 - RNA, 21 nt, Human
aacuccagaaagugacaagcu

SEQ ID NO: 2638496 - RNA, 15 nt, Human
gugaacacaucagcu

SEQ ID NO: 2638497 - RNA, 14 nt, Human
aacucccuuucaac

SEQ ID NO: 2638498 - RNA, 13 nt, Human
aacucccuuucaa

SEQ ID NO: 2638499 - RNA, 18 nt, Human
aacucguuaauuuguagu

SEQ ID NO: 2638500 - RNA, 20 nt, Human
aacccauauuuguacaccaa

SEQ ID NO: 2638501 - RNA, 13 nt, Human
aacccaaauguuc

SEQ ID NO: 2638502 - RNA, 18 nt, Human
aacccaaauguucaucaa

SEQ ID NO: 2638503 - RNA, 20 nt, Human
aaccuagggugauauuaacc

SEQ ID NO: 2638504 - RNA, 12 nt, Human
aaccacagcagu

SEQ ID NO: 2638505 - RNA, 21 nt, Human
guccaagcauuuagauguaua

SEQ ID NO: 2638506 - RNA, 24 nt, Human
guccaagcauaccaacacgagcag

SEQ ID NO: 2638507 - RNA, 15 nt, Human
aacaaggaugaauua

SEQ ID NO: 2638508 - RNA, 21 nt, Human
aacaagccuccuuuuaaagua

SEQ ID NO: 2638509 - RNA, 22 nt, Human
aacaguagugauaguuguaccg

SEQ ID NO: 2638510 - RNA, 18 nt, Human
aacauuugguaaggggaa

SEQ ID NO: 2638511 - RNA, 19 nt, Human
aaauggcuuccuggcaaua

SEQ ID NO: 2638512 - RNA, 14 nt, Human
aaaugcauuucuaa

SEQ ID NO: 2638513 - RNA, 22 nt, Human
aaaugaaagcagggacuugaac

SEQ ID NO: 2638514 - RNA, 21 nt, Human
aaaugaaagcagggacuugaa

SEQ ID NO: 2638515 - RNA, 19 nt, Human
aaaucuacacuccagugag

SEQ ID NO: 2638516 - RNA, 14 nt, Human
aaauccuugaagau

SEQ ID NO: 2638517 - RNA, 22 nt, Human
aaauguaagggaaacugccagc

SEQ ID NO: 2638518 - RNA, 14 nt, Human
guaugauucccagc

SEQ ID NO: 2638519 - RNA, 18 nt, Human
aaauuucagcagcugcag

SEQ ID NO: 2638520 - RNA, 17 nt, Human
aaauuucagcagcugca

SEQ ID NO: 2638521 - RNA, 13 nt, Human
cacaagaaaugaa

SEQ ID NO: 2638522 - RNA, 15 nt, Human
cacaagaaaugaaag

SEQ ID NO: 2638523 - RNA, 23 nt, Human
cacaagacccaaaaggcagaagc

SEQ ID NO: 2638524 - RNA, 23 nt, Human
cacaagaaaugaaagcagggacu

SEQ ID NO: 2638525 - RNA, 23 nt, Human
caaauuuacagagacagaaagca

SEQ ID NO: 2638526 - RNA, 17 nt, Human
caaauuuacagagacag

SEQ ID NO: 2638527 - RNA, 16 nt, Human
caaauuuacagagaca

SEQ ID NO: 2638528 - RNA, 19 nt, Human
caagacugcacaucaaaau

SEQ ID NO: 2638529 - RNA, 13 nt, Human
caagaaaugaaag

SEQ ID NO: 2638530 - RNA, 16 nt, Human
caagcauuuagaugua

SEQ ID NO: 2638531 - RNA, 19 nt, Human
caagcauuuagauguauag

SEQ ID NO: 2638532 - RNA, 21 nt, Human
caagcauaccaacacgagcag

SEQ ID NO: 2638533 - RNA, 16 nt, Human
caagcauaccaacacg

SEQ ID NO: 2638534 - RNA, 18 nt, Human
auuuuaauaauguuucaa

SEQ ID NO: 2638535 - RNA, 19 nt, Human
auuuuaauaauguuucaaa

SEQ ID NO: 2638536 - RNA, 14 nt, Human
caaagaaauguaag

SEQ ID NO: 2638537 - RNA, 22 nt, Human
cacaguuuucugagaaagacua

SEQ ID NO: 2638538 - RNA, 21 nt, Human
cacaguuuucugagaaagacu

SEQ ID NO: 2638539 - RNA, 16 nt, Human
cacaugaaguccaagc

SEQ ID NO: 2638540 - RNA, 17 nt, Human
cacaugaaguccaagca

SEQ ID NO: 2638541 - RNA, 20 nt, Human
cacaugaaguccaagcauuu

SEQ ID NO: 2638542 - RNA, 13 nt, Human
uuuuccugaaaac

SEQ ID NO: 2638543 - RNA, 20 nt, Human
uuuuauaucaauuuaaaaaa

SEQ ID NO: 2638544 - RNA, 15 nt, Human
uuuuauaugcuucug

SEQ ID NO: 2638545 - RNA, 20 nt, Human
uuuuauaugcuucuguuuua

SEQ ID NO: 2638546 - RNA, 10 nt, Human
uuuuauauuu

SEQ ID NO: 2638547 - RNA, 21 nt, Human
uuugcauagauucccugagca

SEQ ID NO: 2638548 - RNA, 21 nt, Human
uuuguauaaaauaauuuuuau

SEQ ID NO: 2638549 - RNA, 15 nt, Human
uuucagauaaucaca

SEQ ID NO: 2638550 - RNA, 21 nt, Human
uuucagauaaucacaauacau

SEQ ID NO: 2638551 - RNA, 15 nt, Human
uuucagcagcugcag

SEQ ID NO: 2638552 - RNA, 22 nt, Human
uuuccucaaaacuucagacaua

SEQ ID NO: 2638553 - RNA, 22 nt, Human
uuucugagaaagacuauucaaa

SEQ ID NO: 2638554 - RNA, 20 nt, Human
uuuagaaacacaacuauauu

SEQ ID NO: 2638555 - RNA, 12 nt, Human
uuuagaaacaca

SEQ ID NO: 2638556 - RNA, 21 nt, Human
uucagagcugcccucuccugg

SEQ ID NO: 2638557 - RNA, 22 nt, Human
uucagagcugcccucuccuggg

SEQ ID NO: 2638558 - RNA, 23 nt, Human
uucagagcugcccucuccugggc

SEQ ID NO: 2638559 - RNA, 19 nt, Human
uuccacuuauaggaauuga

SEQ ID NO: 2638560 - RNA, 19 nt, Human
uucggccuccauccugagg

SEQ ID NO: 2638561 - RNA, 18 nt, Human
uucggccuccauccugag

SEQ ID NO: 2638562 - RNA, 22 nt, Human
uucggccuccauccugaggcuc

SEQ ID NO: 2638563 - RNA, 12 nt, Human
uuccuagugaaa

SEQ ID NO: 2638564 - RNA, 18 nt, Human
uucccuugaugaagaagu

SEQ ID NO: 2638565 - RNA, 23 nt, Human
uucucuccucuccccaugauguu

SEQ ID NO: 2638566 - RNA, 15 nt, Human
uucuuauuucauuuc

SEQ ID NO: 2638567 - RNA, 15 nt, Human
uucugagaaagacua

SEQ ID NO: 2638568 - RNA, 14 nt, Human
uucugagcauuuaa

SEQ ID NO: 2638569 - RNA, 23 nt, Human
uugaaacugagaugugaacacau

SEQ ID NO: 2638570 - RNA, 23 nt, Human
uugaaaagacuccaaagaaaugu

SEQ ID NO: 2638571 - RNA, 22 nt, Human
uugaaaagacuccaaagaaaug

SEQ ID NO: 2638572 - RNA, 18 nt, Human
uugaaaagacuccaaaga

SEQ ID NO: 2638573 - RNA, 16 nt, Human
uugaaaagacuccaaa

SEQ ID NO: 2638574 - RNA, 12 nt, Human
uugaugaagaag

SEQ ID NO: 2638575 - RNA, 18 nt, Human
uugcauagauucccugag

SEQ ID NO: 2638576 - RNA, 15 nt, Human
uugaggacacugaua

SEQ ID NO: 2638577 - RNA, 14 nt, Human
uugaggacacugau

SEQ ID NO: 2638578 - RNA, 12 nt, Human
uugggaggcuga

SEQ ID NO: 2638579 - RNA, 16 nt, Human
uuguaaaggaauuuaa

SEQ ID NO: 2638580 - RNA, 11 nt, Human
uuguaaaugug

SEQ ID NO: 2638581 - RNA, 18 nt, Human
uuguaaaugugcuuuuaa

SEQ ID NO: 2638582 - RNA, 14 nt, Human
uuguaaaugugcuu

SEQ ID NO: 2638583 - RNA, 19 nt, Human
uuguaucacaaaucuuaac

SEQ ID NO: 2638584 - RNA, 14 nt, Human
uuguauuacaaauc

SEQ ID NO: 2638585 - RNA, 14 nt, Human
ugugcguccugucg

SEQ ID NO: 2638586 - RNA, 22 nt, Human
ugucucaguccaugaagaugua

SEQ ID NO: 2638587 - RNA, 21 nt, Human
ugucucaguccaugaagaugu

SEQ ID NO: 2638588 - RNA, 22 nt, Human
ugugaccacugcagaagacagu

SEQ ID NO: 2638589 - RNA, 14 nt, Human
uguaaucacagcua

SEQ ID NO: 2638590 - RNA, 15 nt, Human
uguaaucacagcuac

SEQ ID NO: 2638591 - RNA, 17 nt, Human
uguagauaauacaguuc

SEQ ID NO: 2638592 - RNA, 15 nt, Human
uguaccgcaauguga

SEQ ID NO: 2638593 - RNA, 16 nt, Human
uguaugauucccagcc

SEQ ID NO: 2638594 - RNA, 19 nt, Human
ugugugcguccugucggag

SEQ ID NO: 2638595 - RNA, 14 nt, Human
uguuagugcaaauu

SEQ ID NO: 2638596 - RNA, 12 nt, Human
uguuauaaucuu

SEQ ID NO: 2638597 - RNA, 16 nt, Human
uguucacagccagacu

SEQ ID NO: 2638598 - RNA, 13 nt, Human
uguuuaaaaucau

SEQ ID NO: 2638599 - RNA, 14 nt, Human
uguuuaaaaucauu

SEQ ID NO: 2638600 - RNA, 21 nt, Human
uguuggagaagaacugaaauc

SEQ ID NO: 2638601 - RNA, 20 nt, Human
uuaaagcuuauuaaaacuca

SEQ ID NO: 2638602 - RNA, 13 nt, Human
uuaaaagaaugau

SEQ ID NO: 2638603 - RNA, 19 nt, Human
uuaaaagaaugauuaugaa

SEQ ID NO: 2638604 - RNA, 21 nt, Human
uuaccacuuguguuuugcaag

SEQ ID NO: 2638605 - RNA, 20 nt, Human
uuacagagacagaaagcaga

SEQ ID NO: 2638606 - RNA, 14 nt, Human
uuacauuuguauaa

SEQ ID NO: 2638607 - RNA, 15 nt, Human
uuacauuuguauaaa

SEQ ID NO: 2638608 - RNA, 22 nt, Human
uuaaugucaauucuugccaaau

SEQ ID NO: 2638609 - RNA, 18 nt, Human
uuaauaauguuucaaaca

SEQ ID NO: 2638610 - RNA, 16 nt, Human
uuaauaauguuucaaa

SEQ ID NO: 2638611 - RNA, 18 nt, Human
ugcuagaacucccuuuca

SEQ ID NO: 2638612 - RNA, 19 nt, Human
ugcuagaacucccuuucaa

SEQ ID NO: 2638613 - RNA, 21 nt, Human
ugcuagaacucccuuucaaca

SEQ ID NO: 2638614 - RNA, 20 nt, Human
ugcuagaacucccuuucaac

SEQ ID NO: 2638615 - RNA, 11 nt, Human
ugcucauggaa

SEQ ID NO: 2638616 - RNA, 22 nt, Human
ugccuucucaacuccaaacuga

SEQ ID NO: 2638617 - RNA, 17 nt, Human
ugccuucucaacuccaa

SEQ ID NO: 2638618 - RNA, 18 nt, Human
ugccuccccuccucugcu

SEQ ID NO: 2638619 - RNA, 23 nt, Human
ugccuccccuccucugcuugcca

SEQ ID NO: 2638620 - RNA, 19 nt, Human
ugccuccccuccucugcuu

SEQ ID NO: 2638621 - RNA, 22 nt, Human
ugccuccccuccucugcuugcc

SEQ ID NO: 2638622 - RNA, 16 nt, Human
ugcagauaaacaguag

SEQ ID NO: 2638623 - RNA, 17 nt, Human
ugcagauaaacaguagu

SEQ ID NO: 2638624 - RNA, 15 nt, Human
ugcacaucaaaauau

SEQ ID NO: 2638625 - RNA, 14 nt, Human
ugcauuauauuuau

SEQ ID NO: 2638626 - RNA, 20 nt, Human
ugcauuauauuuauuacugu

SEQ ID NO: 2638627 - RNA, 15 nt, Human
ugcauuauauuuauu

SEQ ID NO: 2638628 - RNA, 22 nt, Human
ugcaucagcugcugaaacaaca

SEQ ID NO: 2638629 - RNA, 21 nt, Human
ugccaucccucccuccaccuc

SEQ ID NO: 2638630 - RNA, 22 nt, Human
ugccaucccucccuccaccucc

SEQ ID NO: 2638631 - RNA, 15 nt, Human
ugccaucccucccuc

SEQ ID NO: 2638632 - RNA, 19 nt, Human
ugccaucccucccuccacc

SEQ ID NO: 2638633 - RNA, 20 nt, Human
ugccaucccucccuccaccu

SEQ ID NO: 2638634 - RNA, 18 nt, Human
uggccuucggccuccauc

SEQ ID NO: 2638635 - RNA, 17 nt, Human
uggccuucggccuccau

SEQ ID NO: 2638636 - RNA, 19 nt, Human
ugggacauuugcucaugga

SEQ ID NO: 2638637 - RNA, 20 nt, Human
ugggacauuugcucauggaa

SEQ ID NO: 2638638 - RNA, 18 nt, Human
ugggacagucaccucaug

SEQ ID NO: 2638639 - RNA, 20 nt, Human
ugggacagucaccucaugga

SEQ ID NO: 2638640 - RNA, 21 nt, Human
ugggacagucaccucauggaa

SEQ ID NO: 2638641 - RNA, 17 nt, Human
uggguagacacacauga

SEQ ID NO: 2638642 - RNA, 16 nt, Human
uggguagacacacaug

SEQ ID NO: 2638643 - RNA, 14 nt, Human
ugcuucuguuuuau

SEQ ID NO: 2638644 - RNA, 14 nt, Human
uggaacucucgagc

SEQ ID NO: 2638645 - RNA, 22 nt, Human
ucuguuuuauaauuuugugaag

SEQ ID NO: 2638646 - RNA, 20 nt, Human
ucuguuuuauaauuuuguga

SEQ ID NO: 2638647 - RNA, 19 nt, Human
ucuguaauaaacucauuuc

SEQ ID NO: 2638648 - RNA, 23 nt, Human
ucuguaauaaacucauuucuagc

SEQ ID NO: 2638649 - RNA, 24 nt, Human
ucuguaauaaacucauuucuagca

SEQ ID NO: 2638650 - RNA, 23 nt, Human
ucuggccuucggccuccauccug

SEQ ID NO: 2638651 - RNA, 22 nt, Human
ugaaaagacuccaaagaaaugu

SEQ ID NO: 2638652 - RNA, 18 nt, Human
ugaaacccugucucuacu

SEQ ID NO: 2638653 - RNA, 23 nt, Human
ugaaagcagggacuugaacccau

SEQ ID NO: 2638654 - RNA, 19 nt, Human
ugaaagcagggacuugaac

SEQ ID NO: 2638655 - RNA, 18 nt, Human
ugaaagcagggacuugaa

SEQ ID NO: 2638656 - RNA, 19 nt, Human
ugaaaacuuuaugcuaagu

SEQ ID NO: 2638657 - RNA, 19 nt, Human
ugaaaagacuccaaagaaa

SEQ ID NO: 2638658 - RNA, 17 nt, Human
ugaaaagacuccaaaga

SEQ ID NO: 2638659 - RNA, 16 nt, Human
ugaaaagacuccaaag

SEQ ID NO: 2638660 - RNA, 15 nt, Human
ugaaaagacuccaaa

SEQ ID NO: 2638661 - RNA, 21 nt, Human
ugaaguccaagcauuuagaug

SEQ ID NO: 2638662 - RNA, 22 nt, Human
ugaaguccaagcauuuagaugu

SEQ ID NO: 2638663 - RNA, 22 nt, Human
ugaacuuguaaaggaauuuaaa

SEQ ID NO: 2638664 - RNA, 14 nt, Human
ugaacacaucagcu

SEQ ID NO: 2638665 - RNA, 19 nt, Human
ugaaauggacuuuuguaca

SEQ ID NO: 2638666 - RNA, 15 nt, Human
uccuugcaucaauuu

SEQ ID NO: 2638667 - RNA, 17 nt, Human
ucuacacuccagugaga

SEQ ID NO: 2638668 - RNA, 21 nt, Human
ucuacacuaagagagaaugag

SEQ ID NO: 2638669 - RNA, 14 nt, Human
ucuccugggcagcu

SEQ ID NO: 2638670 - RNA, 13 nt, Human
ucuccugggcagc

SEQ ID NO: 2638671 - RNA, 15 nt, Human
ucuccugggcagcug

SEQ ID NO: 2638672 - RNA, 16 nt, Human
ucuccugggcagcugc

SEQ ID NO: 2638673 - RNA, 17 nt, Human
ucuccugggcagcugcc

SEQ ID NO: 2638674 - RNA, 18 nt, Human
ucuccugggcagcugccu

SEQ ID NO: 2638675 - RNA, 21 nt, Human
ucucagugucaaugcagcccc

SEQ ID NO: 2638676 - RNA, 21 nt, Human
ucuccugggcagcugccuccc

SEQ ID NO: 2638677 - RNA, 19 nt, Human
ucuccugggcagcugccuc

SEQ ID NO: 2638678 - RNA, 20 nt, Human
ucuccugggcagcugccucc

SEQ ID NO: 2638679 - RNA, 13 nt, Human
ucucuaggaaaua

SEQ ID NO: 2638680 - RNA, 19 nt, Human
ucucuaggaaauauuuauu

SEQ ID NO: 2638681 - RNA, 18 nt, Human
ucucuucacagucacauu

SEQ ID NO: 2638682 - RNA, 13 nt, Human
uccacuuggucug

SEQ ID NO: 2638683 - RNA, 12 nt, Human
uccacuuggucu

SEQ ID NO: 2638684 - RNA, 14 nt, Human
uccagauccuggaa

SEQ ID NO: 2638685 - RNA, 16 nt, Human
uccagauccuggaaau

SEQ ID NO: 2638686 - RNA, 17 nt, Human
uccagauccuggaaauc

SEQ ID NO: 2638687 - RNA, 23 nt, Human
uccaccucccugcaauaaaaugg

SEQ ID NO: 2638688 - RNA, 12 nt, Human
uccaccucccug

SEQ ID NO: 2638689 - RNA, 14 nt, Human
uccaccuacaugag

SEQ ID NO: 2638690 - RNA, 20 nt, Human
uccaagcauuuagauguaua

SEQ ID NO: 2638691 - RNA, 17 nt, Human
uccaagcauuuagaugu

SEQ ID NO: 2638692 - RNA, 23 nt, Human
uccaagcauaccaacacgagcag

SEQ ID NO: 2638693 - RNA, 12 nt, Human
uccaaagaaaug

SEQ ID NO: 2638694 - RNA, 23 nt, Human
uccaaacugacucuuaagaagac

SEQ ID NO: 2638695 - RNA, 14 nt, Human
ucauuucuuugagu

SEQ ID NO: 2638696 - RNA, 22 nt, Human
ucauuucugcaucagcugcuga

SEQ ID NO: 2638697 - RNA, 16 nt, Human
ucauuucugcaucagc

SEQ ID NO: 2638698 - RNA, 16 nt, Human
ucccaaauuucauacc

SEQ ID NO: 2638699 - RNA, 22 nt, Human
ucagacauagaauuaacacaug

SEQ ID NO: 2638700 - RNA, 19 nt, Human
ucagacauagaauuaacac

SEQ ID NO: 2638701 - RNA, 17 nt, Human
ucacuugucaauaaaau

SEQ ID NO: 2638702 - RNA, 19 nt, Human
ucaacuccaaacugacucu

SEQ ID NO: 2638703 - RNA, 23 nt, Human
ucacaggacagcccuucuuucca

SEQ ID NO: 2638704 - RNA, 19 nt, Human
ucacaggaaguagaggagg

SEQ ID NO: 2638705 - RNA, 14 nt, Human
ucacaggaaguaga

SEQ ID NO: 2638706 - RNA, 22 nt, Human
uauuucuaugaaauauuauguu

SEQ ID NO: 2638707 - RNA, 21 nt, Human
uauuucuaugaaauauuaugu

SEQ ID NO: 2638708 - RNA, 13 nt, Human
ucaaaacugcacu

SEQ ID NO: 2638709 - RNA, 20 nt, Human
guuuaggauguugaaaaagu

SEQ ID NO: 2638710 - RNA, 17 nt, Human
guuuagaaagcuugccc

SEQ ID NO: 2638711 - RNA, 13 nt, Human
guuuagaaagcuu

SEQ ID NO: 2638712 - RNA, 16 nt, Human
guuuucauuaucucaa

SEQ ID NO: 2638713 - RNA, 18 nt, Human
guuuucaggcuagaugua

SEQ ID NO: 2638714 - RNA, 16 nt, Human
uaaaaaagaaacauuu

SEQ ID NO: 2638715 - RNA, 19 nt, Human
uaaaauccauacauuugug

SEQ ID NO: 2638716 - RNA, 18 nt, Human
uaaaauccauacauuugu

SEQ ID NO: 2638717 - RNA, 14 nt, Human
uaaaagaugaaaau

SEQ ID NO: 2638718 - RNA, 17 nt, Human
uaaaauggguuuuacug

SEQ ID NO: 2638719 - RNA, 18 nt, Human
uaaauauaugcuaagucu

SEQ ID NO: 2638720 - RNA, 17 nt, Human
uaaauaaaaauaauccu

SEQ ID NO: 2638721 - RNA, 14 nt, Human
uaaaggaauuuaaa

SEQ ID NO: 2638722 - RNA, 23 nt, Human
uaaauugacacuuaaaaaugguu

SEQ ID NO: 2638723 - RNA, 23 nt, Human
uaagagggauuagggagagaaga

SEQ ID NO: 2638724 - RNA, 21 nt, Human
uaagccagacaucaacagaua

SEQ ID NO: 2638725 - RNA, 20 nt, Human
uaagccagacaucaacagau

SEQ ID NO: 2638726 - RNA, 20 nt, Human
uaagcauuccaacuaucuca

SEQ ID NO: 2638727 - RNA, 16 nt, Human
uaagcauuccaacuau

SEQ ID NO: 2638728 - RNA, 18 nt, Human
uaagcauuccaacuaucu

SEQ ID NO: 2638729 - RNA, 13 nt, Human
uaagccagacauc

SEQ ID NO: 2638730 - RNA, 20 nt, Human
uaauuuguaguguuggagaa

SEQ ID NO: 2638731 - RNA, 23 nt, Human
uaauuuguaguguuggagaagaa

SEQ ID NO: 2638732 - RNA, 22 nt, Human
uaauuggaaaggcagcucuaaa

SEQ ID NO: 2638733 - RNA, 20 nt, Human
uaauuaaaagaauauuuuaa

SEQ ID NO: 2638734 - RNA, 15 nt, Human
uaauguuucaaacau

SEQ ID NO: 2638735 - RNA, 14 nt, Human
uaauguuucaaaca

SEQ ID NO: 2638736 - RNA, 19 nt, Human
uaaugccacuaaauugaca

SEQ ID NO: 2638737 - RNA, 15 nt, Human
uaauaauguuucaaa

SEQ ID NO: 2638738 - RNA, 23 nt, Human
uacugauguuccuagugaaagag

SEQ ID NO: 2638739 - RNA, 23 nt, Human
uaccuuuguucccaaauuucaua

SEQ ID NO: 2638740 - RNA, 23 nt, Human
uaccacaggaaccacaagacugc

SEQ ID NO: 2638741 - RNA, 16 nt, Human
uaccaacacgagcagg

SEQ ID NO: 2638742 - RNA, 22 nt, Human
uacaugagguacugagagugaa

SEQ ID NO: 2638743 - RNA, 21 nt, Human
uacaugagguacugagaguga

SEQ ID NO: 2638744 - RNA, 17 nt, Human
uacauuuguauaaaaua

SEQ ID NO: 2638745 - RNA, 11 nt, Human
uacauuugugu

SEQ ID NO: 2638746 - RNA, 16 nt, Human
uacauuuguauaaaau

SEQ ID NO: 2638747 - RNA, 14 nt, Human
uacaggauuugaaa

SEQ ID NO: 2638748 - RNA, 13 nt, Human
uacagaauuuuau

SEQ ID NO: 2638749 - RNA, 13 nt, Human
uaggccaugggac

SEQ ID NO: 2638750 - RNA, 20 nt, Human
uaggaauugacccacaagaa

SEQ ID NO: 2638751 - RNA, 23 nt, Human
uaggaauugacccacaagaaaug

SEQ ID NO: 2638752 - RNA, 20 nt, Human
uagcagggcauggcugggaa

SEQ ID NO: 2638753 - RNA, 20 nt, Human
uagauguauguacuucaugc

SEQ ID NO: 2638754 - RNA, 16 nt, Human
uagauguauguacuuc

SEQ ID NO: 2638755 - RNA, 17 nt, Human
uagaguuuagcuggaaa

SEQ ID NO: 2638756 - RNA, 18 nt, Human
uagaguuuagcuggaaaa

SEQ ID NO: 2638757 - RNA, 13 nt, Human
uauauuugaaaua

SEQ ID NO: 2638758 - RNA, 14 nt, Human
uauauuugaaauau

SEQ ID NO: 2638759 - RNA, 20 nt, Human
uauauuuauuacuguaagaa

SEQ ID NO: 2638760 - RNA, 23 nt, Human
uauauuuauuacuguaagaaaau

SEQ ID NO: 2638761 - RNA, 19 nt, Human
uauauuuuuuguuaaauga

SEQ ID NO: 2638762 - RNA, 21 nt, Human
uaguuguaccgcaaugugacu

SEQ ID NO: 2638763 - RNA, 18 nt, Human
uagucaaauugugugaaa

SEQ ID NO: 2638764 - RNA, 19 nt, Human
ggaggacgcucucuggccu

SEQ ID NO: 2638765 - RNA, 21 nt, Human
ggaggacgcucucuggccuuc

SEQ ID NO: 2638766 - RNA, 20 nt, Human
ggaggacgcucucuggccuu

SEQ ID NO: 2638767 - RNA, 22 nt, Human
ggcagcugccuccccuccucug

SEQ ID NO: 2638768 - RNA, 18 nt, Human
ggcagcugccuccccucc

SEQ ID NO: 2638769 - RNA, 21 nt, Human
ggcagcugccuccccuccucu

SEQ ID NO: 2638770 - RNA, 22 nt, Human
ggccaugggacagggaggacgc

SEQ ID NO: 2638771 - RNA, 22 nt, Human
gcuguauuuuaaaagaaugauu

SEQ ID NO: 2638772 - RNA, 18 nt, Human
gcuagauguauguacuuc

SEQ ID NO: 2638773 - RNA, 16 nt, Human
ggaaaucaaauaugca

SEQ ID NO: 2638774 - RNA, 17 nt, Human
ggaaauauuuauuuuaa

SEQ ID NO: 2638775 - RNA, 18 nt, Human
ggaaauauuuauuuuaau

SEQ ID NO: 2638776 - RNA, 12 nt, Human
ggaaauauuuau

SEQ ID NO: 2638777 - RNA, 13 nt, Human
ggaaauauuuauu

SEQ ID NO: 2638778 - RNA, 15 nt, Human
ggaaauauuuauuuu

SEQ ID NO: 2638779 - RNA, 20 nt, Human
ggaaaaaauaacaaugaaag

SEQ ID NO: 2638780 - RNA, 17 nt, Human
gcuuuuaaaaaaaaaua

SEQ ID NO: 2638781 - RNA, 23 nt, Human
gcuguucacagccagacuggcac

SEQ ID NO: 2638782 - RNA, 16 nt, Human
gcuguucacagccaga

SEQ ID NO: 2638783 - RNA, 15 nt, Human
gcuguucacagccag

SEQ ID NO: 2638784 - RNA, 18 nt, Human
gcuugccaucccucccuc

SEQ ID NO: 2638785 - RNA, 21 nt, Human
gcuugccaucccucccuccac

SEQ ID NO: 2638786 - RNA, 19 nt, Human
gcuugcccuggugccucac

SEQ ID NO: 2638787 - RNA, 17 nt, Human
gcuugcccuggugccuc

SEQ ID NO: 2638788 - RNA, 18 nt, Human
gcuugcccuguuaaaaga

SEQ ID NO: 2638789 - RNA, 16 nt, Human
gcuugccaucccuccc

SEQ ID NO: 2638790 - RNA, 22 nt, Human
ggcuugaguuuaaauuguaaua

SEQ ID NO: 2638791 - RNA, 23 nt, Human
ggugcuacaaaaacacagcaagg

SEQ ID NO: 2638792 - RNA, 21 nt, Human
ggugcuacaaaaacacagcaa

SEQ ID NO: 2638793 - RNA, 19 nt, Human
gccuucggccuccauccug

SEQ ID NO: 2638794 - RNA, 18 nt, Human
gccuuggggcugaugcag

SEQ ID NO: 2638795 - RNA, 18 nt, Human
gccuucggccuccauccu

SEQ ID NO: 2638796 - RNA, 22 nt, Human
gcgacagugagacucugucuca

SEQ ID NO: 2638797 - RNA, 18 nt, Human
gccuguaaucacagcuac

SEQ ID NO: 2638798 - RNA, 22 nt, Human
gcguccugucggagcccugucu

SEQ ID NO: 2638799 - RNA, 19 nt, Human
gcguccugucggagcccug

SEQ ID NO: 2638800 - RNA, 11 nt, Human
gccuccccucc

SEQ ID NO: 2638801 - RNA, 12 nt, Human
gccuccccuccu

SEQ ID NO: 2638802 - RNA, 13 nt, Human
gccuccccuccuc

SEQ ID NO: 2638803 - RNA, 14 nt, Human
gccuccccuccucu

SEQ ID NO: 2638804 - RNA, 16 nt, Human
gccuccccuccucugc

SEQ ID NO: 2638805 - RNA, 19 nt, Human
gcccuucuuuccacagaag

SEQ ID NO: 2638806 - RNA, 17 nt, Human
gccccgugggguuccuc

SEQ ID NO: 2638807 - RNA, 19 nt, Human
gccccugcacuccagccug

SEQ ID NO: 2638808 - RNA, 15 nt, Human
gcccucuccugggca

SEQ ID NO: 2638809 - RNA, 16 nt, Human
gcccucuccugggcag

SEQ ID NO: 2638810 - RNA, 18 nt, Human
gcccucuccugggcagcu

SEQ ID NO: 2638811 - RNA, 19 nt, Human
gcccucuccugggcagcug

SEQ ID NO: 2638812 - RNA, 21 nt, Human
gcccucuccugggcagcugcc

SEQ ID NO: 2638813 - RNA, 22 nt, Human
gccacguucuuacuaguuuccc

SEQ ID NO: 2638814 - RNA, 11 nt, Human
gccaucccucc

SEQ ID NO: 2638815 - RNA, 13 nt, Human
gccaucccucccu

SEQ ID NO: 2638816 - RNA, 14 nt, Human
gccaucccucccuc

SEQ ID NO: 2638817 - RNA, 19 nt, Human
gccaugggacagggaggac

SEQ ID NO: 2638818 - RNA, 14 nt, Human
gccaugggacaggg

SEQ ID NO: 2638819 - RNA, 15 nt, Human
gccaucccucccucc

SEQ ID NO: 2638820 - RNA, 16 nt, Human
gccaucccucccucca

SEQ ID NO: 2638821 - RNA, 22 nt, Human
gccauuuaaagcuuauuaaaac

SEQ ID NO: 2638822 - RNA, 16 nt, Human
gcccacagcuguauga

SEQ ID NO: 2638823 - RNA, 18 nt, Human
gcauagauucccugagca

SEQ ID NO: 2638824 - RNA, 13 nt, Human
gcaguucugaaga

SEQ ID NO: 2638825 - RNA, 14 nt, Human
gcaguucugaagaa

SEQ ID NO: 2638826 - RNA, 15 nt, Human
gcaggcuacugucag

SEQ ID NO: 2638827 - RNA, 20 nt, Human
gcacagccucuuagaugcag

SEQ ID NO: 2638828 - RNA, 14 nt, Human
gcagaagacaguau

SEQ ID NO: 2638829 - RNA, 15 nt, Human
gcacugucaagauga

SEQ ID NO: 2638830 - RNA, 16 nt, Human
gcaagaugugggcagu

SEQ ID NO: 2638831 - RNA, 12 nt, Human
gcaagauguggg

SEQ ID NO: 2638832 - RNA, 16 nt, Human
gaugcuagaacucccu

SEQ ID NO: 2638833 - RNA, 22 nt, Human
gauuaaguaaugauaacuggaa

SEQ ID NO: 2638834 - RNA, 14 nt, Human
gauuaaguaaugau

SEQ ID NO: 2638835 - RNA, 13 nt, Human
gaucuuuaaaaua

SEQ ID NO: 2638836 - RNA, 14 nt, Human
gauccuggaaauca

SEQ ID NO: 2638837 - RNA, 13 nt, Human
gauaaacaguagu

SEQ ID NO: 2638838 - RNA, 17 nt, Human
gauaggucagugcaaau

SEQ ID NO: 2638839 - RNA, 23 nt, Human
gaucagcuuauugucuagugaaa

SEQ ID NO: 2638840 - RNA, 16 nt, Human
gaauauuuuaacuucc

SEQ ID NO: 2638841 - RNA, 16 nt, Human
gaaguauccuucagcc

SEQ ID NO: 2638842 - RNA, 14 nt, Human
gaaguauccuucag

SEQ ID NO: 2638843 - RNA, 12 nt, Human
gaaguccaagca

SEQ ID NO: 2638844 - RNA, 22 nt, Human
gaaguccaagcauuuagaugua

SEQ ID NO: 2638845 - RNA, 19 nt, Human
gaagacugcauuauauuua

SEQ ID NO: 2638846 - RNA, 12 nt, Human
gaagaacugaaa

SEQ ID NO: 2638847 - RNA, 18 nt, Human
gaagauguagaggagaaa

SEQ ID NO: 2638848 - RNA, 15 nt, Human
gaacauaaaauacaa

SEQ ID NO: 2638849 - RNA, 14 nt, Human
gaacaucacagcuu

SEQ ID NO: 2638850 - RNA, 20 nt, Human
gaacagugauuaccagggac

SEQ ID NO: 2638851 - RNA, 16 nt, Human
gaacagugauuaccag

SEQ ID NO: 2638852 - RNA, 16 nt, Human
gaaauuguauuacaaa

SEQ ID NO: 2638853 - RNA, 18 nt, Human
gaaauuguauuacaaauc

SEQ ID NO: 2638854 - RNA, 24 nt, Human
gacugcauuauauuuauuacugua

SEQ ID NO: 2638855 - RNA, 16 nt, Human
gacugaggggagggga

SEQ ID NO: 2638856 - RNA, 22 nt, Human
gacuggauaguccgucucugcu

SEQ ID NO: 2638857 - RNA, 14 nt, Human
gacuggcacaguuu

SEQ ID NO: 2638858 - RNA, 17 nt, Human
gacuggauaguccgucu

SEQ ID NO: 2638859 - RNA, 22 nt, Human
gacuggcacaguuuucugagaa

SEQ ID NO: 2638860 - RNA, 18 nt, Human
gacuggcacaguuuucug

SEQ ID NO: 2638861 - RNA, 21 nt, Human
gacagagccccacccucagau

SEQ ID NO: 2638862 - RNA, 23 nt, Human
gacaggaugguucccuugaugaa

SEQ ID NO: 2638863 - RNA, 20 nt, Human
gacccaaaaggcagaagcaa

SEQ ID NO: 2638864 - RNA, 19 nt, Human
gacccaaaaggcagaagca

SEQ ID NO: 2638865 - RNA, 18 nt, Human
gacccaaaaggcagaagc

SEQ ID NO: 2638866 - RNA, 18 nt, Human
gaccacugcagaagacag

SEQ ID NO: 2638867 - RNA, 16 nt, Human
gaccacugcagaagac

SEQ ID NO: 2638868 - RNA, 16 nt, Human
cuuggacucauuuuaa

SEQ ID NO: 2638869 - RNA, 16 nt, Human
cuuggggcugaugcag

SEQ ID NO: 2638870 - RNA, 18 nt, Human
cuuggggcugaugcaguu

SEQ ID NO: 2638871 - RNA, 17 nt, Human
cuuguacuuuauuuucu

SEQ ID NO: 2638872 - RNA, 22 nt, Human
cuugcccuguuaaaagaugaaa

SEQ ID NO: 2638873 - RNA, 20 nt, Human
cuugcuugauuguauggugg

SEQ ID NO: 2638874 - RNA, 17 nt, Human
cuugccaucccucccuc

SEQ ID NO: 2638875 - RNA, 15 nt, Human
cuugccaucccuccc

SEQ ID NO: 2638876 - RNA, 16 nt, Human
cuugccaucccucccu

SEQ ID NO: 2638877 - RNA, 19 nt, Human
cuugccaucccucccucca

SEQ ID NO: 2638878 - RNA, 18 nt, Human
cuugcccuggugccucac

SEQ ID NO: 2638879 - RNA, 14 nt, Human
cuugcccuguuaaa

SEQ ID NO: 2638880 - RNA, 14 nt, Human
cuugccaucccucc

SEQ ID NO: 2638881 - RNA, 22 nt, Human
cuugcagcucuccccuucucug

SEQ ID NO: 2638882 - RNA, 20 nt, Human
gaaaaguauguuagugcaaa

SEQ ID NO: 2638883 - RNA, 14 nt, Human
gaaaaguauguuag

SEQ ID NO: 2638884 - RNA, 19 nt, Human
gaaaauaacaauaaaagac

SEQ ID NO: 2638885 - RNA, 14 nt, Human
gaaaacaaggauga

SEQ ID NO: 2638886 - RNA, 19 nt, Human
cuuuccucaaaacuucaga

SEQ ID NO: 2638887 - RNA, 17 nt, Human
cuucggccuccauccug

SEQ ID NO: 2638888 - RNA, 19 nt, Human
cuucggccuccauccugag

SEQ ID NO: 2638889 - RNA, 18 nt, Human
cuucggccuccauccuga

SEQ ID NO: 2638890 - RNA, 19 nt, Human
cuuccuuggacucauuuua

SEQ ID NO: 2638891 - RNA, 19 nt, Human
cuuccagauccuggaaauc

SEQ ID NO: 2638892 - RNA, 18 nt, Human
cuucagcgguuuauauaa

SEQ ID NO: 2638893 - RNA, 19 nt, Human
cuguuuuauaauuuuguga

SEQ ID NO: 2638894 - RNA, 18 nt, Human
cuuaaugccacuaaauug

SEQ ID NO: 2638895 - RNA, 21 nt, Human
cuuaggguuaugauuaaguaa

SEQ ID NO: 2638896 - RNA, 13 nt, Human
cuuauaauuuaaa

SEQ ID NO: 2638897 - RNA, 19 nt, Human
cuuauaggaauugacccac

SEQ ID NO: 2638898 - RNA, 14 nt, Human
cuuauaauuuaaaa

SEQ ID NO: 2638899 - RNA, 19 nt, Human
cuuacuaguuucccuugca

SEQ ID NO: 2638900 - RNA, 19 nt, Human
cuuagaugcaguucugaag

SEQ ID NO: 2638901 - RNA, 13 nt, Human
cucuuaagaagac

SEQ ID NO: 2638902 - RNA, 23 nt, Human
cucugcauacucauuaggauggc

SEQ ID NO: 2638903 - RNA, 21 nt, Human
cucuccugggcagcugccucc

SEQ ID NO: 2638904 - RNA, 23 nt, Human
cuccaccucccugcaauaaaaug

SEQ ID NO: 2638905 - RNA, 14 nt, Human
cuccaccucccugc

SEQ ID NO: 2638906 - RNA, 15 nt, Human
cuccaccucccugca

SEQ ID NO: 2638907 - RNA, 16 nt, Human
cuccaccucccugcaa

SEQ ID NO: 2638908 - RNA, 17 nt, Human
cuccaccucccugcaau

SEQ ID NO: 2638909 - RNA, 17 nt, Human
cucccagucauuuaaua

SEQ ID NO: 2638910 - RNA, 23 nt, Human
cuccauccugaggcuccacuugg

SEQ ID NO: 2638911 - RNA, 20 nt, Human
cuccauccugaggcuccacu

SEQ ID NO: 2638912 - RNA, 21 nt, Human
cuccauccugaggcuccacuu

SEQ ID NO: 2638913 - RNA, 18 nt, Human
cucauuaggauggcuagu

SEQ ID NO: 2638914 - RNA, 17 nt, Human
cucauuaggauggcuag

SEQ ID NO: 2638915 - RNA, 12 nt, Human
cucggagaagag

SEQ ID NO: 2638916 - RNA, 20 nt, Human
cucggagaagagcuguucac

SEQ ID NO: 2638917 - RNA, 13 nt, Human
cucggagaagagc

SEQ ID NO: 2638918 - RNA, 12 nt, Human
cucccuuucaac

SEQ ID NO: 2638919 - RNA, 13 nt, Human
cucccuuucaaca

SEQ ID NO: 2638920 - RNA, 16 nt, Human
cucccuucucuucaca

SEQ ID NO: 2638921 - RNA, 21 nt, Human
cugauguuccuagugaaagag

SEQ ID NO: 2638922 - RNA, 20 nt, Human
cugauguuccuagugaaaga

SEQ ID NO: 2638923 - RNA, 18 nt, Human
cugauguuccuagugaaa

SEQ ID NO: 2638924 - RNA, 13 nt, Human
cugauguuccuag

SEQ ID NO: 2638925 - RNA, 23 nt, Human
cugcagaagacaguauggcagcu

SEQ ID NO: 2638926 - RNA, 13 nt, Human
cugcagaagacag

SEQ ID NO: 2638927 - RNA, 15 nt, Human
cugccuaagugcagc

SEQ ID NO: 2638928 - RNA, 16 nt, Human
cuggccaacgggguga

SEQ ID NO: 2638929 - RNA, 19 nt, Human
cuggcacaguuuucugaga

SEQ ID NO: 2638930 - RNA, 18 nt, Human
cuggcacaguuuucugag

SEQ ID NO: 2638931 - RNA, 13 nt, Human
cugcugaaacaac

SEQ ID NO: 2638932 - RNA, 23 nt, Human
cuggaauaauccuaaacauauga

SEQ ID NO: 2638933 - RNA, 22 nt, Human
cugggaacccaaguccaagcau

SEQ ID NO: 2638934 - RNA, 21 nt, Human
cuggucccagccagcaguuca

SEQ ID NO: 2638935 - RNA, 11 nt, Human
ccuccucugcu

SEQ ID NO: 2638936 - RNA, 17 nt, Human
ccuccccuccucugcuu

SEQ ID NO: 2638937 - RNA, 18 nt, Human
ccuccccuccucugcuug

SEQ ID NO: 2638938 - RNA, 12 nt, Human
ccucccugcaau

SEQ ID NO: 2638939 - RNA, 16 nt, Human
ccucccugcaauaaaa

SEQ ID NO: 2638940 - RNA, 20 nt, Human
ccucagaaaacaaggaugaa

SEQ ID NO: 2638941 - RNA, 15 nt, Human
ccuccccuccucugc

SEQ ID NO: 2638942 - RNA, 14 nt, Human
ccuccccuccucug

SEQ ID NO: 2638943 - RNA, 11 nt, Human
ccucuccuggg

SEQ ID NO: 2638944 - RNA, 12 nt, Human
ccucuccugggc

SEQ ID NO: 2638945 - RNA, 13 nt, Human
ccucuccugggca

SEQ ID NO: 2638946 - RNA, 14 nt, Human
ccucuccugggcag

SEQ ID NO: 2638947 - RNA, 21 nt, Human
ccucugcuugccaucccuccc

SEQ ID NO: 2638948 - RNA, 20 nt, Human
ccucugcuugccaucccucc

SEQ ID NO: 2638949 - RNA, 23 nt, Human
ccucuuagaugcaguucugaaga

SEQ ID NO: 2638950 - RNA, 18 nt, Human
ccugaaagaggaaugaag

SEQ ID NO: 2638951 - RNA, 23 nt, Human
ccugaaagaggaaugaaguacuc

SEQ ID NO: 2638952 - RNA, 20 nt, Human
ccugaggcuccacuuggucu

SEQ ID NO: 2638953 - RNA, 18 nt, Human
ccugaggcuccacuuggu

SEQ ID NO: 2638954 - RNA, 22 nt, Human
ccgggaggcagagguugcagug

SEQ ID NO: 2638955 - RNA, 15 nt, Human
cccuugaugaagaag

SEQ ID NO: 2638956 - RNA, 16 nt, Human
cccuugaugaagaagu

SEQ ID NO: 2638957 - RNA, 15 nt, Human
ccugggcagcugccu

SEQ ID NO: 2638958 - RNA, 16 nt, Human
ccugggcagcugccuc

SEQ ID NO: 2638959 - RNA, 17 nt, Human
ccugggcagcugccucc

SEQ ID NO: 2638960 - RNA, 18 nt, Human
ccugggcagcugccuccc

SEQ ID NO: 2638961 - RNA, 20 nt, Human
ccugggcagcugccuccccu

SEQ ID NO: 2638962 - RNA, 18 nt, Human
cgugcacgcacacugucu

SEQ ID NO: 2638963 - RNA, 11 nt, Human
cgcaaugugac

SEQ ID NO: 2638964 - RNA, 17 nt, Human
cggccuccauccugagg

SEQ ID NO: 2638965 - RNA, 16 nt, Human
cggccuccauccugag

SEQ ID NO: 2638966 - RNA, 13 nt, Human
cccaggugccagu

SEQ ID NO: 2638967 - RNA, 14 nt, Human
ccaugaagauguag

SEQ ID NO: 2638968 - RNA, 16 nt, Human
ccaugauguuuagaaa

SEQ ID NO: 2638969 - RNA, 18 nt, Human
ccaucaaggguacacugc

SEQ ID NO: 2638970 - RNA, 18 nt, Human
cccaaaaggcagaagcaa

SEQ ID NO: 2638971 - RNA, 13 nt, Human
cccaaaaggcaga

SEQ ID NO: 2638972 - RNA, 17 nt, Human
ccaggugccaguuaugg

SEQ ID NO: 2638973 - RNA, 18 nt, Human
ccacugcagaagacagua

SEQ ID NO: 2638974 - RNA, 13 nt, Human
ccacugcagaaga

SEQ ID NO: 2638975 - RNA, 20 nt, Human
ccacaggaaccacaagacug

SEQ ID NO: 2638976 - RNA, 16 nt, Human
ccaauauucauagcag

SEQ ID NO: 2638977 - RNA, 22 nt, Human
ccaagcauaccaacacgagcag

SEQ ID NO: 2638978 - RNA, 17 nt, Human
ccaagcauuuagaugua

SEQ ID NO: 2638979 - RNA, 14 nt, Human
ccaagcaaguauua

SEQ ID NO: 2638980 - RNA, 23 nt, Human
ccaaauuucauaccuaucaucuu

SEQ ID NO: 2638981 - RNA, 22 nt, Human
ccaaacugacucuuaagaagac

SEQ ID NO: 2638982 - RNA, 17 nt, Human
cauuuaggccaugggac

SEQ ID NO: 2638983 - RNA, 13 nt, Human
cauuugcucaugg

SEQ ID NO: 2638984 - RNA, 18 nt, Human
cauuugcucauggaauug

SEQ ID NO: 2638985 - RNA, 21 nt, Human metapneumovirus
ugaagcugcuauaagcaguga

SEQ ID NO: 2638986 - RNA, 20 nt, Human metapneumovirus
acaaaaaggacucaucauca

SEQ ID NO: 2638987 - RNA, 23 nt, Human metapneumovirus
gacaacucagacaccaacucaag

SEQ ID NO: 2638988 - RNA, 12 nt, Human metapneumovirus
caaaaacaugua

SEQ ID NO: 2638989 - RNA, 18 nt, Human metapneumovirus
ucaucaagcaacugaaca

SEQ ID NO: 2638990 - RNA, 22 nt, Human metapneumovirus
uguugaagcugcuauaagcagu

SEQ ID NO: 2638991 - RNA, 22 nt, Human metapneumovirus
agucagcuacuguugaagcugc

SEQ ID NO: 2638992 - RNA, 14 nt, Human metapneumovirus
cauaccacauaauu

SEQ ID NO: 2638993 - RNA, 19 nt, Human metapneumovirus
caaggaugguauugucaaa

SEQ ID NO: 2638994 - RNA, 15 nt, Human metapneumovirus
cucaaaaaaauaauu

SEQ ID NO: 2638995 - RNA, 13 nt, Human metapneumovirus
uugcaacugcagc

SEQ ID NO: 2638996 - RNA, 17 nt, Human metapneumovirus
ucaaagguauacaaacu

SEQ ID NO: 2638997 - RNA, 19 nt, Human metapneumovirus
accccugcagaaaagaaac

SEQ ID NO: 2638998 - RNA, 16 nt, Human metapneumovirus
uagaggagaaauuaag

SEQ ID NO: 2638999 - RNA, 15 nt, Human metapneumovirus
uccuuacacagcagc

SEQ ID NO: 2639000 - RNA, 16 nt, Human metapneumovirus
auauuuugaaaacaag

SEQ ID NO: 2639001 - RNA, 16 nt, Human metapneumovirus
aagcuuuccagaaauc

SEQ ID NO: 2639002 - RNA, 16 nt, Human metapneumovirus
cagcaggugcugaaaa

SEQ ID NO: 2639003 - RNA, 19 nt, Human metapneumovirus
uccacacaaaaaacaaccc

SEQ ID NO: 2639004 - RNA, 22 nt, Human metapneumovirus
aagcacaaguggagaauccgaa

SEQ ID NO: 2639005 - RNA, 23 nt, Human metapneumovirus
ggagcauauguccaggcugaaag

SEQ ID NO: 2639006 - RNA, 23 nt, Human metapneumovirus
aauuauacuauauauuuagaaua

SEQ ID NO: 2639007 - RNA, 22 nt, Human metapneumovirus
cuugaaagugaaguaacagcaa

SEQ ID NO: 2639008 - RNA, 16 nt, Human metapneumovirus
agcucagccaaaucag

SEQ ID NO: 2639009 - RNA, 22 nt, Human metapneumovirus
caccuguuacaauaccagcauu

SEQ ID NO: 2639010 - RNA, 22 nt, Human metapneumovirus
aagguuucauuuacaccaaaug

SEQ ID NO: 2639011 - RNA, 21 nt, Human metapneumovirus
agcacucgguguugcaacugc

SEQ ID NO: 2639012 - RNA, 18 nt, Human metapneumovirus
caaguugaucuaauagaa

SEQ ID NO: 2639013 - RNA, 20 nt, Human metapneumovirus
acccaaaugaaaaagacugu

SEQ ID NO: 2639014 - RNA, 16 nt, Human metapneumovirus
guuucaaucaaagaga

SEQ ID NO: 2639015 - RNA, 13 nt, Human metapneumovirus
aaaucccagacaa

SEQ ID NO: 2639016 - RNA, 16 nt, Human metapneumovirus
gacaaauaaaacugau

SEQ ID NO: 2639017 - RNA, 22 nt, Human metapneumovirus
cagaagcuuuccagaaaucauu

SEQ ID NO: 2639018 - RNA, 21 nt, Human metapneumovirus
aauaggaaaugguaguguaaa

SEQ ID NO: 2639019 - RNA, 21 nt, Human metapneumovirus
gaccaagcucuaacacaggcc

SEQ ID NO: 2639020 - RNA, 14 nt, Human metapneumovirus
accugcaaaaccaa

SEQ ID NO: 2639021 - RNA, 13 nt, Human metapneumovirus
agauaacaaacua

SEQ ID NO: 2639022 - RNA, 23 nt, Human metapneumovirus
aagauuuugugagcaagaaucua

SEQ ID NO: 2639023 - RNA, 14 nt, Human metapneumovirus
cugcaggacaaaua

SEQ ID NO: 2639024 - RNA, 20 nt, Human metapneumovirus
auuagcuuuacuaacauuuc

SEQ ID NO: 2639025 - RNA, 22 nt, Human metapneumovirus
caacaugccaacaucugcagga

SEQ ID NO: 2639026 - RNA, 14 nt, Human metapneumovirus
cucagaacaguuuc

SEQ ID NO: 2639027 - RNA, 14 nt, Human metapneumovirus
caauagaggagaaa

SEQ ID NO: 2639028 - RNA, 14 nt, Human metapneumovirus
acacacaacaccac

SEQ ID NO: 2639029 - RNA, 16 nt, Human metapneumovirus
agaagaaccaaaagac

SEQ ID NO: 2639030 - RNA, 14 nt, Human metapneumovirus
aagcauaagcaaaa

SEQ ID NO: 2639031 - RNA, 13 nt, Human metapneumovirus
acaggccaaaauu

SEQ ID NO: 2639032 - RNA, 21 nt, Human metapneumovirus
uaucaaggcauuccuuacaca

SEQ ID NO: 2639033 - RNA, 22 nt, Human metapneumovirus
acacgugcaaucaacaaaaaca

SEQ ID NO: 2639034 - RNA, 13 nt, Human metapneumovirus
aaagugaaguaac

SEQ ID NO: 2639035 - RNA, 22 nt, Human metapneumovirus
aaggcauuccuuacacagcagc

SEQ ID NO: 2639036 - RNA, 19 nt, Human metapneumovirus
ugaagucucauacuaacau

SEQ ID NO: 2639037 - RNA, 16 nt, Human metapneumovirus
aaucaacaaaaacaag

SEQ ID NO: 2639038 - RNA, 12 nt, Human metapneumovirus
uaaaaaacaaua

SEQ ID NO: 2639039 - RNA, 21 nt, Human metapneumovirus
agcaggacccacagcagcaag

SEQ ID NO: 2639040 - RNA, 17 nt, Human metapneumovirus
cuaggagcaauagcacu

SEQ ID NO: 2639041 - RNA, 14 nt, Human metapneumovirus
agucagcuacuguu

SEQ ID NO: 2639042 - RNA, 23 nt, Human metapneumovirus
aucaauagaggagaaauuaagca

SEQ ID NO: 2639043 - RNA, 22 nt, Human metapneumovirus
acaagucaaaaugucauucccu

SEQ ID NO: 2639044 - RNA, 14 nt, Human metapneumovirus
ccagucaaguuucc

SEQ ID NO: 2639045 - RNA, 19 nt, Human metapneumovirus
caacuggcaagagaggagc

SEQ ID NO: 2639046 - RNA, 16 nt, Human metapneumovirus
uccuaagcagugcaga

SEQ ID NO: 2639047 - RNA, 22 nt, Human metapneumovirus
ccuucuuguucaggaaaaaagg

SEQ ID NO: 2639048 - RNA, 19 nt, Human metapneumovirus
accaagcucuaacacaggc

SEQ ID NO: 2639049 - RNA, 22 nt, Human metapneumovirus
caaggcauuccuuacacagcag

SEQ ID NO: 2639050 - RNA, 23 nt, Human metapneumovirus
caauuuaaaaaguaaaaaacaau

SEQ ID NO: 2639051 - RNA, 15 nt, Human metapneumovirus
cugcucgaucagcua

SEQ ID NO: 2639052 - RNA, 15 nt, Human metapneumovirus
ccuaagcagugcaga

SEQ ID NO: 2639053 - RNA, 22 nt, Human metapneumovirus
cccaaaaaauuugaagucaaug

SEQ ID NO: 2639054 - RNA, 12 nt, Human metapneumovirus
caauagaggaga

SEQ ID NO: 2639055 - RNA, 21 nt, Human metapneumovirus
cucagaacaguuucugcugau

SEQ ID NO: 2639056 - RNA, 14 nt, Human metapneumovirus
uaagcagugaagca

SEQ ID NO: 2639057 - RNA, 13 nt, Human metapneumovirus
ggaucuagaaaag

SEQ ID NO: 2639058 - RNA, 18 nt, Human metapneumovirus
uguuuuaaaucugaagac

SEQ ID NO: 2639059 - RNA, 11 nt, Human metapneumovirus
ggugcagcaau

SEQ ID NO: 2639060 - RNA, 16 nt, Human metapneumovirus
gaauuaaaucaaucaa

SEQ ID NO: 2639061 - RNA, 14 nt, Human metapneumovirus
caagaaaaaaacug

SEQ ID NO: 2639062 - RNA, 17 nt, Human metapneumovirus
aagcaaaauaugcaaga

SEQ ID NO: 2639063 - RNA, 21 nt, Human metapneumovirus
acagcauguuauaaaaggaag

SEQ ID NO: 2639064 - RNA, 18 nt, Human metapneumovirus
aacuauucaauuuaaaaa

SEQ ID NO: 2639065 - RNA, 21 nt, Human metapneumovirus
caaguaguuauggaggugaaa

SEQ ID NO: 2639066 - RNA, 13 nt, Human metapneumovirus
agcagcaaaauua

SEQ ID NO: 2639067 - RNA, 15 nt, Human metapneumovirus
cucuaacacaggcca

SEQ ID NO: 2639068 - RNA, 22 nt, Human metapneumovirus
gaccaaaagugcacuaagagag

SEQ ID NO: 2639069 - RNA, 23 nt, Human metapneumovirus
cuccguaauuuacauggugcaac

SEQ ID NO: 2639070 - RNA, 19 nt, Human metapneumovirus
cucaguguucugaggacag

SEQ ID NO: 2639071 - RNA, 17 nt, Human metapneumovirus
aguccacacaaaaaaca

SEQ ID NO: 2639072 - RNA, 15 nt, Human metapneumovirus
gauaaugaagaagaa

SEQ ID NO: 2639073 - RNA, 20 nt, Human metapneumovirus
auggguaaugaagcagcaaa

SEQ ID NO: 2639074 - RNA, 16 nt, Human metapneumovirus
gcaaaguuagcacagg

SEQ ID NO: 2639075 - RNA, 17 nt, Human metapneumovirus
auaaaaauaaacaaugg

SEQ ID NO: 2639076 - RNA, 19 nt, Human metapneumovirus
auuggcguaagagaggaau

SEQ ID NO: 2639077 - RNA, 16 nt, Human metapneumovirus
aagaagaugcagaauc

SEQ ID NO: 2639078 - RNA, 14 nt, Human metapneumovirus
aucuacuacuaauu

SEQ ID NO: 2639079 - RNA, 15 nt, Human metapneumovirus
gauauggacucacaa

SEQ ID NO: 2639080 - RNA, 16 nt, Human metapneumovirus
agcagcaaaauuagca

SEQ ID NO: 2639081 - RNA, 17 nt, Human metapneumovirus
gucaaguuuccugaaga

SEQ ID NO: 2639082 - RNA, 13 nt, Human metapneumovirus
acacaaaaaccaa

SEQ ID NO: 2639083 - RNA, 15 nt, Human metapneumovirus
aauugccaaaaccau

SEQ ID NO: 2639084 - RNA, 14 nt, Human metapneumovirus
auaaaugacaauga

SEQ ID NO: 2639085 - RNA, 23 nt, Human metapneumovirus
gcaacugcagcugcaguuacagc

SEQ ID NO: 2639086 - RNA, 19 nt, Human metapneumovirus
aaacccugacaauaaccac

SEQ ID NO: 2639087 - RNA, 15 nt, Human metapneumovirus
aauuaaaauuaaaaa

SEQ ID NO: 2639088 - RNA, 20 nt, Human metapneumovirus
gaagcuuuccagaaaucauu

SEQ ID NO: 2639089 - RNA, 12 nt, Human metapneumovirus
cacuaagagagc

SEQ ID NO: 2639090 - RNA, 19 nt, Human metapneumovirus
uagcacucucaaauuaaau

SEQ ID NO: 2639091 - RNA, 22 nt, Human metapneumovirus
aaacaguuuacuuaacaaccau

SEQ ID NO: 2639092 - RNA, 13 nt, Human metapneumovirus
gagagaaacugaa

SEQ ID NO: 2639093 - RNA, 21 nt, Human metapneumovirus
acuguuuacuacccaaaugaa

SEQ ID NO: 2639094 - RNA, 22 nt, Human metapneumovirus
aguaaguuucuaugauacuuca

SEQ ID NO: 2639095 - RNA, 14 nt, Human metapneumovirus
gcugucaaauuaaa

SEQ ID NO: 2639096 - RNA, 17 nt, Human metapneumovirus
gcugaaagcauaagcaa

SEQ ID NO: 2639097 - RNA, 15 nt, Human metapneumovirus
aguuuccugaagauc

SEQ ID NO: 2639098 - RNA, 17 nt, Human metapneumovirus
guugcaacugcagcugc

SEQ ID NO: 2639099 - RNA, 19 nt, Human metapneumovirus
caaacuggaauuugacaaa

SEQ ID NO: 2639100 - RNA, 22 nt, Human metapneumovirus
ucccaaaaaauuugaagucaau

SEQ ID NO: 2639101 - RNA, 14 nt, Human metapneumovirus
gagcucagaacagu

SEQ ID NO: 2639102 - RNA, 14 nt, Human metapneumovirus
caauuauauaaaag

SEQ ID NO: 2639103 - RNA, 16 nt, Human metapneumovirus
ucaucaagcaacugaa

SEQ ID NO: 2639104 - RNA, 20 nt, Human metapneumovirus
auagcagacauaauaaagga

SEQ ID NO: 2639105 - RNA, 15 nt, Human metapneumovirus
acaaaccaaaaccag

SEQ ID NO: 2639106 - RNA, 19 nt, Human metapneumovirus
cagaaaugauggaagagga

SEQ ID NO: 2639107 - RNA, 19 nt, Human metapneumovirus
cucgguguugcaacugcag

SEQ ID NO: 2639108 - RNA, 18 nt, Human metapneumovirus
aagacuacucuaaaucau

SEQ ID NO: 2639109 - RNA, 13 nt, Human metapneumovirus
aguggaaaacaau

SEQ ID NO: 2639110 - RNA, 16 nt, Human metapneumovirus
caccuaucaaggcauu

SEQ ID NO: 2639111 - RNA, 19 nt, Human metapneumovirus
aaucaaugcacaaauauaa

SEQ ID NO: 2639112 - RNA, 21 nt, Human metapneumovirus
ggccagugucaagcagcuuug

SEQ ID NO: 2639113 - RNA, 17 nt, Human metapneumovirus
caacuggcaagagagga

SEQ ID NO: 2639114 - RNA, 19 nt, Human metapneumovirus
gccaacacaucaacaacau

SEQ ID NO: 2639115 - RNA, 23 nt, Human metapneumovirus
uaugugauuggcugcaguuaaag

SEQ ID NO: 2639116 - RNA, 14 nt, Human metapneumovirus
agauaaugaagaag

SEQ ID NO: 2639117 - RNA, 18 nt, Human metapneumovirus
caaguuuucgagagcauu

SEQ ID NO: 2639118 - RNA, 17 nt, Human metapneumovirus
aauuugggacaaaucau

SEQ ID NO: 2639119 - RNA, 20 nt, Human metapneumovirus
auucaaagguauacaaacuc

SEQ ID NO: 2639120 - RNA, 15 nt, Human metapneumovirus
ucucagauaaugaag

SEQ ID NO: 2639121 - RNA, 17 nt, Human metapneumovirus
cagaaaugauggaagag

SEQ ID NO: 2639122 - RNA, 20 nt, Human metapneumovirus
caaaaugucauucccugaag

SEQ ID NO: 2639123 - RNA, 16 nt, Human metapneumovirus
ucaaaaaaauaauuaa

SEQ ID NO: 2639124 - RNA, 17 nt, Human metapneumovirus
uacucaaagugaaugca

SEQ ID NO: 2639125 - RNA, 23 nt, Human metapneumovirus
ugcagagaaaggaaacacuggcu

SEQ ID NO: 2639126 - RNA, 23 nt, Human metapneumovirus
ccaugucuuuugcgacacagcag

SEQ ID NO: 2639127 - RNA, 19 nt, Human metapneumovirus
gugacaauagacaacacug

SEQ ID NO: 2639128 - RNA, 12 nt, Human metapneumovirus
aagugcagugag

SEQ ID NO: 2639129 - RNA, 19 nt, Human metapneumovirus
aacuuuuaaggaacacuga

SEQ ID NO: 2639130 - RNA, 23 nt, Human metapneumovirus
caacagaagguuccuaaauguug

SEQ ID NO: 2639131 - RNA, 13 nt, Human metapneumovirus
ccugcaaaaccaa

SEQ ID NO: 2639132 - RNA, 20 nt, Human metapneumovirus
cauaauaaagaaaacaaaga

SEQ ID NO: 2639133 - RNA, 19 nt, Human metapneumovirus
agcauguuauaaaaggaag

SEQ ID NO: 2639134 - RNA, 19 nt, Human metapneumovirus
aaucucccuggaaaaaaca

SEQ ID NO: 2639135 - RNA, 23 nt, Human metapneumovirus
ucugugaaguaaaaacaguuuac

SEQ ID NO: 2639136 - RNA, 13 nt, Human metapneumovirus
cuaagcaaaguug

SEQ ID NO: 2639137 - RNA, 15 nt, Human metapneumovirus
gucucauacuaacau

SEQ ID NO: 2639138 - RNA, 22 nt, Human metapneumovirus
aaugaagaagaagaugcagaau

SEQ ID NO: 2639139 - RNA, 16 nt, Human metapneumovirus
ugaacaaaggcugcuc

SEQ ID NO: 2639140 - RNA, 17 nt, Human metapneumovirus
agaauccuaagcagugc

SEQ ID NO: 2639141 - RNA, 16 nt, Human metapneumovirus
gcucagccaaaucagu

SEQ ID NO: 2639142 - RNA, 16 nt, Human metapneumovirus
aaagauuuugugagca

SEQ ID NO: 2639143 - RNA, 14 nt, Human metapneumovirus
cucaaaaagaccaa

SEQ ID NO: 2639144 - RNA, 21 nt, Human metapneumovirus
aaccauaccgucagaaccaaa

SEQ ID NO: 2639145 - RNA, 21 nt, Human metapneumovirus
accaaugaagcaguaucuaca

SEQ ID NO: 2639146 - RNA, 21 nt, Human metapneumovirus
uuauggaucuagaaaagaaca

SEQ ID NO: 2639147 - RNA, 21 nt, Human metapneumovirus
ggcaauuuucagacaacgcug

SEQ ID NO: 2639148 - RNA, 18 nt, Human metapneumovirus
agcagacauaauaaagga

SEQ ID NO: 2639149 - RNA, 21 nt, Human metapneumovirus
gaccaaaagugcacuaagaga

SEQ ID NO: 2639150 - RNA, 17 nt, Human metapneumovirus
cauaacaaaagcugcag

SEQ ID NO: 2639151 - RNA, 11 nt, Human metapneumovirus
acaaacaaugg

SEQ ID NO: 2639152 - RNA, 14 nt, Human metapneumovirus
aaauaaagcaagca

SEQ ID NO: 2639153 - RNA, 22 nt, Human metapneumovirus
aacuaucugacagcaaacaugu

SEQ ID NO: 2639154 - RNA, 15 nt, Human metapneumovirus
agcagcagaaaugau

SEQ ID NO: 2639155 - RNA, 15 nt, Human metapneumovirus
uaccguguuagaaaa

SEQ ID NO: 2639156 - RNA, 22 nt, Human metapneumovirus
aucaacuaacaccaaaaagaag

SEQ ID NO: 2639157 - RNA, 18 nt, Human metapneumovirus
auggaucccauugaagaa

SEQ ID NO: 2639158 - RNA, 21 nt, Human metapneumovirus
gcugaaagauuuugugagcaa

SEQ ID NO: 2639159 - RNA, 18 nt, Human metapneumovirus
ccggcuugaaagugaagu

SEQ ID NO: 2639160 - RNA, 21 nt, Human metapneumovirus
gugcagagaaaggaaacacug

SEQ ID NO: 2639161 - RNA, 14 nt, Human metapneumovirus
uaauaaaaacagaa

SEQ ID NO: 2639162 - RNA, 17 nt, Human metapneumovirus
cggcuugaaagugaagu

SEQ ID NO: 2639163 - RNA, 23 nt, Human metapneumovirus
caaguugaucuaauagaaaagga

SEQ ID NO: 2639164 - RNA, 18 nt, Human metapneumovirus
auuaaacaaugaaaucac

SEQ ID NO: 2639165 - RNA, 19 nt, Human metapneumovirus
aauacuguaucagaaacau

SEQ ID NO: 2639166 - RNA, 13 nt, Human metapneumovirus
aagaugaaagcac

SEQ ID NO: 2639167 - RNA, 15 nt, Human metapneumovirus
agaacgggacaaaua

SEQ ID NO: 2639168 - RNA, 13 nt, Human metapneumovirus
acaauaccagcau

SEQ ID NO: 2639169 - RNA, 14 nt, Human metapneumovirus
cucagauaaugaag

SEQ ID NO: 2639170 - RNA, 14 nt, Human metapneumovirus
ugcaauaaacagug

SEQ ID NO: 2639171 - RNA, 16 nt, Human metapneumovirus
auaagcagugaagcag

SEQ ID NO: 2639172 - RNA, 18 nt, Human metapneumovirus
aggaccuguuaccugcaa

SEQ ID NO: 2639173 - RNA, 23 nt, Human metapneumovirus
aagaaaaaaacugggcaaaacaa

SEQ ID NO: 2639174 - RNA, 14 nt, Human metapneumovirus
aaaaccaacaauug

SEQ ID NO: 2639175 - RNA, 20 nt, Human metapneumovirus
uaaccacucuguaugcugca

SEQ ID NO: 2639176 - RNA, 15 nt, Human metapneumovirus
acuguauaccagcua

SEQ ID NO: 2639177 - RNA, 15 nt, Human metapneumovirus
cuaagcagugcagag

SEQ ID NO: 2639178 - RNA, 14 nt, Human metapneumovirus
ugauguuggagaac

SEQ ID NO: 2639179 - RNA, 19 nt, Human metapneumovirus
auguugcacuugaccaagu

SEQ ID NO: 2639180 - RNA, 16 nt, Human metapneumovirus
uaccagcuaagcaaag

SEQ ID NO: 2639181 - RNA, 17 nt, Human metapneumovirus
gcugaguggugucacaa

SEQ ID NO: 2639182 - RNA, 16 nt, Human metapneumovirus
gucaaggcuuacuuaa

SEQ ID NO: 2639183 - RNA, 15 nt, Human metapneumovirus
augguaucaaaauuu

SEQ ID NO: 2639184 - RNA, 18 nt, Human metapneumovirus
ggagaaauuaagcaugau

SEQ ID NO: 2639185 - RNA, 17 nt, Human metapneumovirus
gcaacauaaacauaucu

SEQ ID NO: 2639186 - RNA, 13 nt, Human metapneumovirus
aaaguaaaaaaca

SEQ ID NO: 2639187 - RNA, 19 nt, Human metapneumovirus
cauguuagacucaaaaaug

SEQ ID NO: 2639188 - RNA, 15 nt, Human metapneumovirus
acaaacuaucugaca

SEQ ID NO: 2639189 - RNA, 18 nt, Human metapneumovirus
cgagagagaaacugaaaa

SEQ ID NO: 2639190 - RNA, 16 nt, Human metapneumovirus
aucauaauaaagaaaa

SEQ ID NO: 2639191 - RNA, 18 nt, Human metapneumovirus
auccggcuugaaagugaa

SEQ ID NO: 2639192 - RNA, 16 nt, Human metapneumovirus
caguagaccugcaaaa

SEQ ID NO: 2639193 - RNA, 13 nt, Human metapneumovirus
gauaaugaagaag

SEQ ID NO: 2639194 - RNA, 17 nt, Human metapneumovirus
uucaaaaagcuuggagc

SEQ ID NO: 2639195 - RNA, 24 nt, Human metapneumovirus
ccaugucuuuugcgacacagcagc

SEQ ID NO: 2639196 - RNA, 18 nt, Human metapneumovirus
auuaaucaauaaaaacuu

SEQ ID NO: 2639197 - RNA, 19 nt, Human metapneumovirus
cuuuucauggguaaugaag

SEQ ID NO: 2639198 - RNA, 16 nt, Human metapneumovirus
ucaaauuaaacaauga

SEQ ID NO: 2639199 - RNA, 14 nt, Human metapneumovirus
cauacuaacauuua

SEQ ID NO: 2639200 - RNA, 21 nt, Human metapneumovirus
ccacaggagcaccuccagagc

SEQ ID NO: 2639201 - RNA, 22 nt, Human metapneumovirus
gaaacaaaccaaaaccagcagu

SEQ ID NO: 2639202 - RNA, 18 nt, Human metapneumovirus
augcugcaucacaaaaug

SEQ ID NO: 2639203 - RNA, 21 nt, Human metapneumovirus
cacgugcaaucaacaaaaaca

SEQ ID NO: 2639204 - RNA, 20 nt, Human metapneumovirus
aauuaguuaauuaaaaauaa

SEQ ID NO: 2639205 - RNA, 18 nt, Human metapneumovirus
aaugauggaagaggaaau

SEQ ID NO: 2639206 - RNA, 21 nt, Human metapneumovirus
ucaaaaagcuuggagcuggga

SEQ ID NO: 2639207 - RNA, 19 nt, Human metapneumovirus
caacucaagcccacagcau

SEQ ID NO: 2639208 - RNA, 13 nt, Human metapneumovirus
ccguccacagcau

SEQ ID NO: 2639209 - RNA, 11 nt, Human metapneumovirus
ugaagcagcaa

SEQ ID NO: 2639210 - RNA, 15 nt, Human metapneumovirus
acacaccaccagcag

SEQ ID NO: 2639211 - RNA, 19 nt, Human metapneumovirus
uaaagggaaagcagcagaa

SEQ ID NO: 2639212 - RNA, 19 nt, Human metapneumovirus
aaaugaaaaagacugugaa

SEQ ID NO: 2639213 - RNA, 17 nt, Human metapneumovirus
aaggcgaacagcauguu

SEQ ID NO: 2639214 - RNA, 16 nt, Human metapneumovirus
agaauccuaagcagug

SEQ ID NO: 2639215 - RNA, 18 nt, Human metapneumovirus
gugccgauggacccagcu

SEQ ID NO: 2639216 - RNA, 16 nt, Human metapneumovirus
acaaugauaacauuag

SEQ ID NO: 2639217 - RNA, 13 nt, Human metapneumovirus
caggagcaggcag

SEQ ID NO: 2639218 - RNA, 20 nt, Human metapneumovirus
aggagcaccuccagagcuga

SEQ ID NO: 2639219 - RNA, 16 nt, Human metapneumovirus
aaaaguggaaaacaau

SEQ ID NO: 2639220 - RNA, 16 nt, Human metapneumovirus
ugagagagcugaaaga

SEQ ID NO: 2639221 - RNA, 20 nt, Human metapneumovirus
agaaaucaaugcacaaauau

SEQ ID NO: 2639222 - RNA, 17 nt, Human metapneumovirus
uaauaaaaauaaacaau

SEQ ID NO: 2639223 - RNA, 10 nt, Human metapneumovirus
agugcaguga

SEQ ID NO: 2639224 - RNA, 16 nt, Human metapneumovirus
gugcacuaagagagcu

SEQ ID NO: 2639225 - RNA, 14 nt, Human metapneumovirus
augguauuaaauga

SEQ ID NO: 2639226 - RNA, 17 nt, Human metapneumovirus
aggaaacacuggcuuca

SEQ ID NO: 2639227 - RNA, 15 nt, Human metapneumovirus
auaaaugacaaugau

SEQ ID NO: 2639228 - RNA, 21 nt, Human metapneumovirus
agcacuaaucaagugcaguga

SEQ ID NO: 2639229 - RNA, 17 nt, Human metapneumovirus
auuggcguaagagagga

SEQ ID NO: 2639230 - RNA, 18 nt, Human metapneumovirus
cgagagcauugagaacag

SEQ ID NO: 2639231 - RNA, 17 nt, Human metapneumovirus
uuacuuaaguuaguaaa

SEQ ID NO: 2639232 - RNA, 19 nt, Human metapneumovirus
caaaacugaaauaaagcaa

SEQ ID NO: 2639233 - RNA, 18 nt, Human metapneumovirus
caacaaaauuguugaaga

SEQ ID NO: 2639234 - RNA, 17 nt, Human metapneumovirus
ugcuggaaaauaaacag

SEQ ID NO: 2639235 - RNA, 18 nt, Human metapneumovirus
caguagaccugcaaaacc

SEQ ID NO: 2639236 - RNA, 15 nt, Human metapneumovirus
uauugucaaaaugca

SEQ ID NO: 2639237 - RNA, 13 nt, Human metapneumovirus
uaagcagugcaga

SEQ ID NO: 2639238 - RNA, 19 nt, Human metapneumovirus
cuaggagcauauguccagg

SEQ ID NO: 2639239 - RNA, 20 nt, Human metapneumovirus
accucaaaaaaauaauuaaa

SEQ ID NO: 2639240 - RNA, 23 nt, Human metapneumovirus
aaacucacagucugugaaguaaa

SEQ ID NO: 2639241 - RNA, 18 nt, Human metapneumovirus
uugaagaugaaagcacaa

SEQ ID NO: 2639242 - RNA, 19 nt, Human metapneumovirus
gacacaaaaaccaacaauu

SEQ ID NO: 2639243 - RNA, 16 nt, Human metapneumovirus
aacaugccaacaucug

SEQ ID NO: 2639244 - RNA, 17 nt, Human metapneumovirus
cuguuacaauaccagca

SEQ ID NO: 2639245 - RNA, 17 nt, Human metapneumovirus
ggacggcacgcagaacc

SEQ ID NO: 2639246 - RNA, 16 nt, Human metapneumovirus
gaucagagaugcaaug

SEQ ID NO: 2639247 - RNA, 16 nt, Human metapneumovirus
agcugcuauaagcagu

SEQ ID NO: 2639248 - RNA, 17 nt, Human metapneumovirus
uauaagcagugaagcag

SEQ ID NO: 2639249 - RNA, 20 nt, Human metapneumovirus
guguuggcaacugcagugag

SEQ ID NO: 2639250 - RNA, 14 nt, Human metapneumovirus
cugggacucaaguc

SEQ ID NO: 2639251 - RNA, 20 nt, Human metapneumovirus
cuaucaguagaccugcaaaa

SEQ ID NO: 2639252 - RNA, 18 nt, Human metapneumovirus
acagaauccuaagcagug

SEQ ID NO: 2639253 - RNA, 18 nt, Human metapneumovirus
aucugaagacacaaaaac

SEQ ID NO: 2639254 - RNA, 15 nt, Human metapneumovirus
acaaucugcaaauau

SEQ ID NO: 2639255 - RNA, 23 nt, Human metapneumovirus
guuucugcugaucaacuggcaag

SEQ ID NO: 2639256 - RNA, 21 nt, Human metapneumovirus
cacagcagcaggaaucaaugu

SEQ ID NO: 2639257 - RNA, 23 nt, Human metapneumovirus
ucaaaggagugcaacauaaacau

SEQ ID NO: 2639258 - RNA, 18 nt, Human metapneumovirus
uaagagaggaauuaauag

SEQ ID NO: 2639259 - RNA, 21 nt, Human metapneumovirus
caagucauaguagaacuagga

SEQ ID NO: 2639260 - RNA, 11 nt, Human metapneumovirus
auaaauuaaaa

SEQ ID NO: 2639261 - RNA, 21 nt, Human metapneumovirus
auggaugcugucaaauuaaac

SEQ ID NO: 2639262 - RNA, 21 nt, Human metapneumovirus
caaaauaugcaagacuuggag

SEQ ID NO: 2639263 - RNA, 18 nt, Human metapneumovirus
gcagacauaauaaaggaa

SEQ ID NO: 2639264 - RNA, 15 nt, Human metapneumovirus
uaaaguaaauuaaaa

SEQ ID NO: 2639265 - RNA, 15 nt, Human metapneumovirus
agcaagaaucuaaca

SEQ ID NO: 2639266 - RNA, 17 nt, Human metapneumovirus
aucaagggacaagauau

SEQ ID NO: 2639267 - RNA, 23 nt, Human metapneumovirus
gcuggaaaauaaacagaaaucaa

SEQ ID NO: 2639268 - RNA, 16 nt, Human metapneumovirus
acaguauuuuaaaagu

SEQ ID NO: 2639269 - RNA, 16 nt, Human metapneumovirus
cagauaaugaagaaga

SEQ ID NO: 2639270 - RNA, 15 nt, Human metapneumovirus
ucaaaaagcuuggag

SEQ ID NO: 2639271 - RNA, 17 nt, Human metapneumovirus
uuucaggccaacacacc

SEQ ID NO: 2639272 - RNA, 14 nt, Human metapneumovirus
ccuuggccaagagc

SEQ ID NO: 2639273 - RNA, 19 nt, Human metapneumovirus
augcagacaccaacaaugg

SEQ ID NO: 2639274 - RNA, 14 nt, Human metapneumovirus
acagaaaaagcaaa

SEQ ID NO: 2639275 - RNA, 15 nt, Human metapneumovirus
ucaaugcacaaauau

SEQ ID NO: 2639276 - RNA, 17 nt, Human metapneumovirus
aaaaucaaguuagaaca

SEQ ID NO: 2639277 - RNA, 12 nt, Human metapneumovirus
auuguugaagau

SEQ ID NO: 2639278 - RNA, 14 nt, Human metapneumovirus
aagcagcagaaaug

SEQ ID NO: 2639279 - RNA, 19 nt, Human metapneumovirus
uccggcuugaaagugaagu

SEQ ID NO: 2639280 - RNA, 11 nt, Human metapneumovirus
gugcaaucaac

SEQ ID NO: 2639281 - RNA, 14 nt, Human metapneumovirus
aaaaagaccaauga

SEQ ID NO: 2639282 - RNA, 18 nt, Human metapneumovirus
agugaaguaacagcaauu

SEQ ID NO: 2639283 - RNA, 17 nt, Human metapneumovirus
caccagcagugcugcuc

SEQ ID NO: 2639284 - RNA, 19 nt, Human metapneumovirus
aguccacacaaaaaacaac

SEQ ID NO: 2639285 - RNA, 21 nt, Human metapneumovirus
uagaaugccauuguauauaca

SEQ ID NO: 2639286 - RNA, 21 nt, Human metapneumovirus
aguucguguguuggcaacugc

SEQ ID NO: 2639287 - RNA, 11 nt, Human metapneumovirus
uaaaauuaaaa

SEQ ID NO: 2639288 - RNA, 19 nt, Human metapneumovirus
acaucugcaggacaaauaa

SEQ ID NO: 2639289 - RNA, 11 nt, Human metapneumovirus
cgugcaauggu

SEQ ID NO: 2639290 - RNA, 16 nt, Human metapneumovirus
gaucuaauagaaaagg

SEQ ID NO: 2639291 - RNA, 15 nt, Human metapneumovirus
gucccugaaaaaacc

SEQ ID NO: 2639292 - RNA, 18 nt, Human metapneumovirus
ucagacaacgcuggaaua

SEQ ID NO: 2639293 - RNA, 20 nt, Human metapneumovirus
cuuacacagcagcuguucaa

SEQ ID NO: 2639294 - RNA, 18 nt, Human metapneumovirus
acccaugcaaaguuagca

SEQ ID NO: 2639295 - RNA, 13 nt, Human metapneumovirus
cugcagaaaagaa

SEQ ID NO: 2639296 - RNA, 13 nt, Human metapneumovirus
caguuucaaucaa

SEQ ID NO: 2639297 - RNA, 24 nt, Human metapneumovirus
acaaaauuguugaagaugaaagca

SEQ ID NO: 2639298 - RNA, 17 nt, Human metapneumovirus
ugaugggauagugaagu

SEQ ID NO: 2639299 - RNA, 22 nt, Human metapneumovirus
aguggagaauccgaagaagaag

SEQ ID NO: 2639300 - RNA, 22 nt, Human metapneumovirus
acugccgagagagaaacugaaa

SEQ ID NO: 2639301 - RNA, 14 nt, Human metapneumovirus
guuuccaacaugcc

SEQ ID NO: 2639302 - RNA, 16 nt, Human metapneumovirus
ucaugacuaugaacaa

SEQ ID NO: 2639303 - RNA, 16 nt, Human metapneumovirus
cacaaaaaacaaccca

SEQ ID NO: 2639304 - RNA, 17 nt, Human metapneumovirus
ccaugauccuagugagu

SEQ ID NO: 2639305 - RNA, 21 nt, Human metapneumovirus
acaccuaucaaggcauuccuu

SEQ ID NO: 2639306 - RNA, 19 nt, Human metapneumovirus
uaaucaagugcagugagca

SEQ ID NO: 2639307 - RNA, 17 nt, Human metapneumovirus
augggucuucaaaaaca

SEQ ID NO: 2639308 - RNA, 20 nt, Human metapneumovirus
aaacugaaaaaauuagcaaa

SEQ ID NO: 2639309 - RNA, 21 nt, Human metapneumovirus
ugacaaacucacagucuguga

SEQ ID NO: 2639310 - RNA, 16 nt, Human metapneumovirus
agagagcucagaacag

SEQ ID NO: 2639311 - RNA, 16 nt, Human metapneumovirus
aucugcaggacaaaua

SEQ ID NO: 2639312 - RNA, 21 nt, Human metapneumovirus
augguaguguaaaauuaacag

SEQ ID NO: 2639313 - RNA, 19 nt, Human metapneumovirus
aaaauuugggacaaaucau

SEQ ID NO: 2639314 - RNA, 14 nt, Human metapneumovirus
uaacaaaauuaaaa

SEQ ID NO: 2639315 - RNA, 15 nt, Human metapneumovirus
cauuguauauacaca

SEQ ID NO: 2639316 - RNA, 17 nt, Human metapneumovirus
acucgaugaauauagca

SEQ ID NO: 2639317 - RNA, 15 nt, Human metapneumovirus
caaaaaauuugaagu

SEQ ID NO: 2639318 - RNA, 14 nt, Human metapneumovirus
agacucaaaaaugc

SEQ ID NO: 2639319 - RNA, 23 nt, Human metapneumovirus
aacuauucaauuuaaaaaguaaa

SEQ ID NO: 2639320 - RNA, 17 nt, Human metapneumovirus
caacacggucuuaaaga

SEQ ID NO: 2639321 - RNA, 14 nt, Human metapneumovirus
ugucaaaaugcagg

SEQ ID NO: 2639322 - RNA, 22 nt, Human metapneumovirus
uacuuaacaaccaugaaaccau

SEQ ID NO: 2639323 - RNA, 14 nt, Human metapneumovirus
gaaaagaaacugaa

SEQ ID NO: 2639324 - RNA, 19 nt, Human metapneumovirus
guaaauuaaaauaaauuaa

SEQ ID NO: 2639325 - RNA, 21 nt, Human metapneumovirus
ccaugcaaaguuagcacagga

SEQ ID NO: 2639326 - RNA, 16 nt, Human metapneumovirus
uaaaaauaaaaauuug

SEQ ID NO: 2639327 - RNA, 22 nt, Human metapneumovirus
aauaccagcauucaucaaauca

SEQ ID NO: 2639328 - RNA, 15 nt, Human metapneumovirus
uguagacaacaacaa

SEQ ID NO: 2639329 - RNA, 12 nt, Human metapneumovirus
caacugcaguga

SEQ ID NO: 2639330 - RNA, 14 nt, Human metapneumovirus
ucaaucaaagagag

SEQ ID NO: 2639331 - RNA, 15 nt, Human metapneumovirus
agaagauaggacaca

SEQ ID NO: 2639332 - RNA, 17 nt, Human metapneumovirus
cguguguuggcaacugc

SEQ ID NO: 2639333 - RNA, 16 nt, Human metapneumovirus
cauauguccaggcuga

SEQ ID NO: 2639334 - RNA, 15 nt, Human metapneumovirus
auaaacagugacaca

SEQ ID NO: 2639335 - RNA, 12 nt, Human metapneumovirus
aacuuaaaagug

SEQ ID NO: 2639336 - RNA, 15 nt, Human metapneumovirus
ggucuuaaagagagc

SEQ ID NO: 2639337 - RNA, 16 nt, Human metapneumovirus
acagugacaauagaca

SEQ ID NO: 2639338 - RNA, 17 nt, Human metapneumovirus
caaagaaacccacagga

SEQ ID NO: 2639339 - RNA, 19 nt, Human metapneumovirus
cuaagcagugcagagaaag

SEQ ID NO: 2639340 - RNA, 21 nt, Human metapneumovirus
uggccguuagcuucagucaau

SEQ ID NO: 2639341 - RNA, 17 nt, Human metapneumovirus
aacagaaaaagcaaaag

SEQ ID NO: 2639342 - RNA, 18 nt, Human metapneumovirus
aauagaaaaggaccuguu

SEQ ID NO: 2639343 - RNA, 19 nt, Human metapneumovirus
guuacagcagguguugcaa

SEQ ID NO: 2639344 - RNA, 16 nt, Human metapneumovirus
acgcagacacagugac

SEQ ID NO: 2639345 - RNA, 17 nt, Human metapneumovirus
guuggcaacugcaguga

SEQ ID NO: 2639346 - RNA, 18 nt, Human metapneumovirus
ccaagcucuaacacaggc

SEQ ID NO: 2639347 - RNA, 22 nt, Human metapneumovirus
cauauguccaggcugaaagcau

SEQ ID NO: 2639348 - RNA, 13 nt, Human metapneumovirus
ccaccagcagugc

SEQ ID NO: 2639349 - RNA, 18 nt, Human metapneumovirus
auaacaaacuaucugaca

SEQ ID NO: 2639350 - RNA, 15 nt, Human metapneumovirus
aaaaggcaacaacac

SEQ ID NO: 2639351 - RNA, 17 nt, Human metapneumovirus
caccagcaauaucuuug

SEQ ID NO: 2639352 - RNA, 16 nt, Human metapneumovirus
gaacuagccagagcug

SEQ ID NO: 2639353 - RNA, 20 nt, Human metapneumovirus
cugaagaucaauucaauguu

SEQ ID NO: 2639354 - RNA, 23 nt, Human metapneumovirus
aucaacuggcaagagaggagcaa

SEQ ID NO: 2639355 - RNA, 12 nt, Human metapneumovirus
ggccaacacacc

SEQ ID NO: 2639356 - RNA, 16 nt, Human metapneumovirus
caaaguuagcacagga

SEQ ID NO: 2639357 - RNA, 17 nt, Human metapneumovirus
auugaugauaaccaaag

SEQ ID NO: 2639358 - RNA, 16 nt, Human metapneumovirus
agaaaauaaaaaaucg

SEQ ID NO: 2639359 - RNA, 19 nt, Human metapneumovirus
aaaggcauauucaaaaagc

SEQ ID NO: 2639360 - RNA, 19 nt, Human metapneumovirus
acaauggcuucauaccaca

SEQ ID NO: 2639361 - RNA, 21 nt, Human metapneumovirus
cucgguguugcaacugcagcu

SEQ ID NO: 2639362 - RNA, 23 nt, Human metapneumovirus
cacaugcuggaaaauaaacagaa

SEQ ID NO: 2639363 - RNA, 17 nt, Human metapneumovirus
aguuagcauggacagau

SEQ ID NO: 2639364 - RNA, 17 nt, Human metapneumovirus
aaaagacugugaaacaa

SEQ ID NO: 2639365 - RNA, 16 nt, Human metapneumovirus
uaaagggaaagcagca

SEQ ID NO: 2639366 - RNA, 20 nt, Human metapneumovirus
cgacauugcugaccugaaaa

SEQ ID NO: 2639367 - RNA, 16 nt, Human metapneumovirus
gacauaauaaaggaag

SEQ ID NO: 2639368 - RNA, 14 nt, Human metapneumovirus
caagagaggagcaa

SEQ ID NO: 2639369 - RNA, 21 nt, Human metapneumovirus
uuaugaucaugacuaugaaca

SEQ ID NO: 2639370 - RNA, 17 nt, Human metapneumovirus
caauagacaacacugua

SEQ ID NO: 2639371 - RNA, 20 nt, Human metapneumovirus
ggaagcuaaagggaaagcag

SEQ ID NO: 2639372 - RNA, 22 nt, Human metapneumovirus
aagcagcaaaauuagcagaagc

SEQ ID NO: 2639373 - RNA, 21 nt, Human metapneumovirus
agcuuugacccagucaaguuu

SEQ ID NO: 2639374 - RNA, 21 nt, Human metapneumovirus
cccagcuuaauaaaaacagaa

SEQ ID NO: 2639375 - RNA, 16 nt, Human metapneumovirus
cagagaugcaaugauu

SEQ ID NO: 2639376 - RNA, 15 nt, Human metapneumovirus
aucaaucaaacagaa

SEQ ID NO: 2639377 - RNA, 22 nt, Human metapneumovirus
aggaaucaauguugcugagcag

SEQ ID NO: 2639378 - RNA, 12 nt, Human metapneumovirus
guaacagcaauu

SEQ ID NO: 2639379 - RNA, 15 nt, Human metapneumovirus
gaagaagaagaagaa

SEQ ID NO: 2639380 - RNA, 18 nt, Human metapneumovirus
uuuucauggguaaugaag

SEQ ID NO: 2639381 - RNA, 20 nt, Human metapneumovirus
auggaucuagaaaagaacac

SEQ ID NO: 2639382 - RNA, 16 nt, Human metapneumovirus
aaaguuagcacaggaa

SEQ ID NO: 2639383 - RNA, 19 nt, Human metapneumovirus
gcugaaagcauaagcaaaa

SEQ ID NO: 2639384 - RNA, 15 nt, Human metapneumovirus
aacugccaaucuuug

SEQ ID NO: 2639385 - RNA, 12 nt, Human metapneumovirus
aaauuaagcaug

SEQ ID NO: 2639386 - RNA, 20 nt, Human metapneumovirus
uaggaguuuacggaagcucc

SEQ ID NO: 2639387 - RNA, 23 nt, Human metapneumovirus
gauauggacucacaaggacuuaa

SEQ ID NO: 2639388 - RNA, 19 nt, Human metapneumovirus
acacacaagacaauaguca

SEQ ID NO: 2639389 - RNA, 16 nt, Human metapneumovirus
ccuuacacagcagcug

SEQ ID NO: 2639390 - RNA, 20 nt, Human metapneumovirus
gcaggacccacagcagcaag

SEQ ID NO: 2639391 - RNA, 13 nt, Human metapneumovirus
cagaaacaaacca

SEQ ID NO: 2639392 - RNA, 20 nt, Human metapneumovirus
caguuucaaucaaagagagu

SEQ ID NO: 2639393 - RNA, 23 nt, Human metapneumovirus
aggagcaccuccagagcugagug

SEQ ID NO: 2639394 - RNA, 12 nt, Human metapneumovirus
uuggcaacugca

SEQ ID NO: 2639395 - RNA, 17 nt, Human metapneumovirus
uggaucccauugaagaa

SEQ ID NO: 2639396 - RNA, 17 nt, Human metapneumovirus
gagcauauguccaggcu

SEQ ID NO: 2639397 - RNA, 17 nt, Human metapneumovirus
cuaaucaagugcaguga

SEQ ID NO: 2639398 - RNA, 21 nt, Human metapneumovirus
gaagcugcuauaagcagugaa

SEQ ID NO: 2639399 - RNA, 17 nt, Human metapneumovirus
agcucagccaaaucagu

SEQ ID NO: 2639400 - RNA, 20 nt, Human metapneumovirus
gcacuaaucaagugcaguga

SEQ ID NO: 2639401 - RNA, 16 nt, Human metapneumovirus
aagucucauacuaaca

SEQ ID NO: 2639402 - RNA, 22 nt, Human metapneumovirus
aagaucaauucaauguugcacu

SEQ ID NO: 2639403 - RNA, 17 nt, Human metapneumovirus
gcagcaggaaucaaugu

SEQ ID NO: 2639404 - RNA, 14 nt, Human metapneumovirus
uaagaucaaauuau

SEQ ID NO: 2639405 - RNA, 14 nt, Human metapneumovirus
ucaaaucaguuuca

SEQ ID NO: 2639406 - RNA, 17 nt, Human metapneumovirus
aacaaucugcaaauaug

SEQ ID NO: 2639407 - RNA, 14 nt, Human metapneumovirus
agauagauacuuau

SEQ ID NO: 2639408 - RNA, 16 nt, Human metapneumovirus
acaaguaaaaauggag

SEQ ID NO: 2639409 - RNA, 15 nt, Human metapneumovirus
cucagccaaaucagu

SEQ ID NO: 2639410 - RNA, 12 nt, Human metapneumovirus
ucaucaaaucag

SEQ ID NO: 2639411 - RNA, 19 nt, Human metapneumovirus
cgcuggaauaacaccagca

SEQ ID NO: 2639412 - RNA, 18 nt, Human metapneumovirus
gaaaaucccagacaaucu

SEQ ID NO: 2639413 - RNA, 18 nt, Human metapneumovirus
cauauucaaaaagcuugg

SEQ ID NO: 2639414 - RNA, 17 nt, Human metapneumovirus
ucaggccaacacaccac

SEQ ID NO: 2639415 - RNA, 23 nt, Human metapneumovirus
caaggcauuccuuacacagcagc

SEQ ID NO: 2639416 - RNA, 16 nt, Human metapneumovirus
guagcacucgaugaau

SEQ ID NO: 2639417 - RNA, 13 nt, Human metapneumovirus
auaacaccagcaa

SEQ ID NO: 2639418 - RNA, 17 nt, Human metapneumovirus
auggaucuagaaaagaa

SEQ ID NO: 2639419 - RNA, 18 nt, Human metapneumovirus
caggacccacagcagcaa

SEQ ID NO: 2639420 - RNA, 18 nt, Human metapneumovirus
cagauuuaugcagaaaca

SEQ ID NO: 2639421 - RNA, 22 nt, Human metapneumovirus
aaaaacugaaucagacaaaaag

SEQ ID NO: 2639422 - RNA, 12 nt, Human metapneumovirus
aacaagaggaga

SEQ ID NO: 2639423 - RNA, 19 nt, Human metapneumovirus
cacaggagcaccuccagag

SEQ ID NO: 2639424 - RNA, 19 nt, Human metapneumovirus
uucauggguaaugaagcag

SEQ ID NO: 2639425 - RNA, 18 nt, Human metapneumovirus
agaccugaccaaaagugc

SEQ ID NO: 2639426 - RNA, 13 nt, Human metapneumovirus
caacugcagcugc

SEQ ID NO: 2639427 - RNA, 14 nt, Human metapneumovirus
uugucaaaaugcag

SEQ ID NO: 2639428 - RNA, 16 nt, Human metapneumovirus
gauguuggagaaccgu

SEQ ID NO: 2639429 - RNA, 20 nt, Human metapneumovirus
aaauauaacaacauacaaau

SEQ ID NO: 2639430 - RNA, 15 nt, Human metapneumovirus
agaaacccacaggag

SEQ ID NO: 2639431 - RNA, 20 nt, Human metapneumovirus
uguccuagguuccaccaaug

SEQ ID NO: 2639432 - RNA, 15 nt, Human metapneumovirus
agucaaaaacugaau

SEQ ID NO: 2639433 - RNA, 16 nt, Human metapneumovirus
cuggauaguaaaagca

SEQ ID NO: 2639434 - RNA, 13 nt, Human metapneumovirus
accaaaacugaaa

SEQ ID NO: 2639435 - RNA, 19 nt, Human metapneumovirus
acaagaauuaaaucaauca

SEQ ID NO: 2639436 - RNA, 19 nt, Human metapneumovirus
gagaaaggaaacacuggcu

SEQ ID NO: 2639437 - RNA, 22 nt, Human metapneumovirus
aggacagguugguacaccaaug

SEQ ID NO: 2639438 - RNA, 12 nt, Human metapneumovirus
uauuuugaaaac

SEQ ID NO: 2639439 - RNA, 13 nt, Human metapneumovirus
cugaaaaaaccaa

SEQ ID NO: 2639440 - RNA, 13 nt, Human metapneumovirus
acuauaacugaag

SEQ ID NO: 2639441 - RNA, 15 nt, Human metapneumovirus
acauggugcaacugc

SEQ ID NO: 2639442 - RNA, 15 nt, Human metapneumovirus
ugcaguuacagcagg

SEQ ID NO: 2639443 - RNA, 11 nt, Human metapneumovirus
uaaaaaugucu

SEQ ID NO: 2639444 - RNA, 12 nt, Human metapneumovirus
acacagcagcug

SEQ ID NO: 2639445 - RNA, 14 nt, Human metapneumovirus
caaaccaaaaccag

SEQ ID NO: 2639446 - RNA, 20 nt, Human metapneumovirus
gaccaagcucuaacacaggc

SEQ ID NO: 2639447 - RNA, 21 nt, Human metapneumovirus
auuugcucucagauaaugaag

SEQ ID NO: 2639448 - RNA, 17 nt, Human metapneumovirus
ccuuacacagcagcugu

SEQ ID NO: 2639449 - RNA, 13 nt, Human metapneumovirus
aaaaacagaauua

SEQ ID NO: 2639450 - RNA, 18 nt, Human metapneumovirus
caacugcagugagagagc

SEQ ID NO: 2639451 - RNA, 17 nt, Human metapneumovirus
agcuucagucaauucaa

SEQ ID NO: 2639452 - RNA, 15 nt, Human metapneumovirus
aaguuggaaaaagau

SEQ ID NO: 2639453 - RNA, 23 nt, Human metapneumovirus
aucuagaaaagaacacaccuguu

SEQ ID NO: 2639454 - RNA, 20 nt, Human metapneumovirus
gacaacacuguauaccagcu

SEQ ID NO: 2639455 - RNA, 16 nt, Human metapneumovirus
aaaaguaaaaaacaau

SEQ ID NO: 2639456 - RNA, 22 nt, Human metapneumovirus
ugagcagucaaaggagugcaac

SEQ ID NO: 2639457 - RNA, 14 nt, Human metapneumovirus
augauggaagagga

SEQ ID NO: 2639458 - RNA, 22 nt, Human metapneumovirus
aagaugaaagcacaaguggaga

SEQ ID NO: 2639459 - RNA, 15 nt, Human metapneumovirus
ccaaaugaaaaagac

SEQ ID NO: 2639460 - RNA, 17 nt, Human metapneumovirus
agaauuagaccugacca

SEQ ID NO: 2639461 - RNA, 19 nt, Human metapneumovirus
aucuagaaaagaacacacc

SEQ ID NO: 2639462 - RNA, 20 nt, Human metapneumovirus
acccaugcaaaguuagcaca

SEQ ID NO: 2639463 - RNA, 13 nt, Human metapneumovirus
aaacaaucugcaa

SEQ ID NO: 2639464 - RNA, 18 nt, Human metapneumovirus
ucagauaaugaagaagaa

SEQ ID NO: 2639465 - RNA, 16 nt, Human metapneumovirus
caacugcagcugcagu

SEQ ID NO: 2639466 - RNA, 12 nt, Human metapneumovirus
gcggcaauuuuc

SEQ ID NO: 2639467 - RNA, 19 nt, Human metapneumovirus
guuggagaaccgugcaaug

SEQ ID NO: 2639468 - RNA, 20 nt, Human metapneumovirus
aggaacacugauagagcuga

SEQ ID NO: 2639469 - RNA, 14 nt, Human metapneumovirus
caacugaacaaagg

SEQ ID NO: 2639470 - RNA, 23 nt, Human metapneumovirus
agacaacgcuggaauaacaccag

SEQ ID NO: 2639471 - RNA, 18 nt, Human metapneumovirus
acagucugugaaguaaaa

SEQ ID NO: 2639472 - RNA, 17 nt, Human metapneumovirus
cacuggcuucaucauug

SEQ ID NO: 2639473 - RNA, 13 nt, Human metapneumovirus
aguaaaaaacaau

SEQ ID NO: 2639474 - RNA, 17 nt, Human metapneumovirus
caaaugcaauagaggaa

SEQ ID NO: 2639475 - RNA, 21 nt, Human metapneumovirus
augggaaaaccccugcagaaa

SEQ ID NO: 2639476 - RNA, 12 nt, Human metapneumovirus
caaaauugcacc

SEQ ID NO: 2639477 - RNA, 20 nt, Human metapneumovirus
aaauuagcaaagcucauaau

SEQ ID NO: 2639478 - RNA, 18 nt, Human metapneumovirus
cagaauccuaagcagugc

SEQ ID NO: 2639479 - RNA, 15 nt, Human metapneumovirus
aaucaugauaucaca

SEQ ID NO: 2639480 - RNA, 11 nt, Human metapneumovirus
aagaaaacaaa

SEQ ID NO: 2639481 - RNA, 15 nt, Human metapneumovirus
ccacaggagcaccuc

SEQ ID NO: 2639482 - RNA, 14 nt, Human metapneumovirus
gagaccaugucuuu

SEQ ID NO: 2639483 - RNA, 16 nt, Human metapneumovirus
aagaaacugaaaccau

SEQ ID NO: 2639484 - RNA, 15 nt, Human metapneumovirus
uaggagcauaugucc

SEQ ID NO: 2639485 - RNA, 20 nt, Human metapneumovirus
cagcccaaggugcagcaaug

SEQ ID NO: 2639486 - RNA, 19 nt, Human metapneumovirus
gcaaaaaaacacaugaucu

SEQ ID NO: 2639487 - RNA, 19 nt, Human metapneumovirus
acagaagguuccuaaaugu

SEQ ID NO: 2639488 - RNA, 19 nt, Human metapneumovirus
ccaacaucugcaggacaaa

SEQ ID NO: 2639489 - RNA, 23 nt, Human metapneumovirus
ugggaaaaccccugcagaaaaga

SEQ ID NO: 2639490 - RNA, 16 nt, Human metapneumovirus
acuucccaaaaaauuu

SEQ ID NO: 2639491 - RNA, 23 nt, Human metapneumovirus
agugaguguuuuuaucauaauaa

SEQ ID NO: 2639492 - RNA, 17 nt, Human metapneumovirus
caugaucuaaucgcacu

SEQ ID NO: 2639493 - RNA, 13 nt, Human metapneumovirus
ugcaaucaacaaa

SEQ ID NO: 2639494 - RNA, 18 nt, Human metapneumovirus
aagggacaagauaugucu

SEQ ID NO: 2639495 - RNA, 14 nt, Human metapneumovirus
ggcaacugcaguga

SEQ ID NO: 2639496 - RNA, 17 nt, Human metapneumovirus
gaacuagccagagcugu

SEQ ID NO: 2639497 - RNA, 19 nt, Human metapneumovirus
ugcacaaauauaacaacau

SEQ ID NO: 2639498 - RNA, 13 nt, Human metapneumovirus
aagcagcaaaauu

SEQ ID NO: 2639499 - RNA, 14 nt, Human metapneumovirus
cuguuuccaacaug

SEQ ID NO: 2639500 - RNA, 20 nt, Human metapneumovirus
aaaauauuuugaaaacaagu

SEQ ID NO: 2639501 - RNA, 12 nt, Human metapneumovirus
caaaacaacacc

SEQ ID NO: 2639502 - RNA, 21 nt, Human metapneumovirus
aaggccagugucaagcagcuu

SEQ ID NO: 2639503 - RNA, 18 nt, Human metapneumovirus
agcauucaucaaaucagu

SEQ ID NO: 2639504 - RNA, 16 nt, Human metapneumovirus
gaaagugaaguaacag

SEQ ID NO: 2639505 - RNA, 13 nt, Human metapneumovirus
ccugcagaaaaga

SEQ ID NO: 2639506 - RNA, 15 nt, Human metapneumovirus
uugaagaugaaagca

SEQ ID NO: 2639507 - RNA, 22 nt, Human metapneumovirus
cacucgguguugcaacugcagc

SEQ ID NO: 2639508 - RNA, 16 nt, Human metapneumovirus
acuguugaagcugcua

SEQ ID NO: 2639509 - RNA, 15 nt, Human metapneumovirus
caggacccacagcag

SEQ ID NO: 2639510 - RNA, 17 nt, Human metapneumovirus
acacaccaccagcagug

SEQ ID NO: 2639511 - RNA, 16 nt, Human metapneumovirus
aucaucaagcaacuga

SEQ ID NO: 2639512 - RNA, 15 nt, Human metapneumovirus
aauaaaaaugucuug

SEQ ID NO: 2639513 - RNA, 15 nt, Human metapneumovirus
uaaaaauaaacaaug

SEQ ID NO: 2639514 - RNA, 21 nt, Human metapneumovirus
ucaagagacugccgagagaga

SEQ ID NO: 2639515 - RNA, 17 nt, Human metapneumovirus
ugacaaacucacagucu

SEQ ID NO: 2639516 - RNA, 20 nt, Human metapneumovirus
uagauucguucuaggagcaa

SEQ ID NO: 2639517 - RNA, 13 nt, Human metapneumovirus
uggggaauggagu

SEQ ID NO: 2639518 - RNA, 15 nt, Human metapneumovirus
uaucaggagcaggca

SEQ ID NO: 2639519 - RNA, 23 nt, Human metapneumovirus
ccagagcugaguggugucacaaa

SEQ ID NO: 2639520 - RNA, 21 nt, Human metapneumovirus
cugcaucuuuaaucaacaauc

SEQ ID NO: 2639521 - RNA, 14 nt, Human metapneumovirus
auuuugaaaacaag

SEQ ID NO: 2639522 - RNA, 15 nt, Human metapneumovirus
caucacaacauuauu

SEQ ID NO: 2639523 - RNA, 14 nt, Human metapneumovirus
agaucauaaaguca

SEQ ID NO: 2639524 - RNA, 16 nt, Human metapneumovirus
augcacaaauauaaca

SEQ ID NO: 2639525 - RNA, 15 nt, Human metapneumovirus
ugaaaaagacuguga

SEQ ID NO: 2639526 - RNA, 16 nt, Human metapneumovirus
caccagcagugcugcu

SEQ ID NO: 2639527 - RNA, 18 nt, Human metapneumovirus
uugagaacagucaggccu

SEQ ID NO: 2639528 - RNA, 19 nt, Human metapneumovirus
aauauuuugaaaacaagua

SEQ ID NO: 2639529 - RNA, 21 nt, Human metapneumovirus
caaacucacagucugugaagu

SEQ ID NO: 2639530 - RNA, 18 nt, Human metapneumovirus
caaaaaauuugaagucaa

SEQ ID NO: 2639531 - RNA, 12 nt, Human metapneumovirus
agaaaaagcaaa

SEQ ID NO: 2639532 - RNA, 18 nt, Human metapneumovirus
acugugaaacaagaggag

SEQ ID NO: 2639533 - RNA, 19 nt, Human metapneumovirus
guuauauaaaaaucaaguu

SEQ ID NO: 2639534 - RNA, 16 nt, Human metapneumovirus
caauucaauguugcac

SEQ ID NO: 2639535 - RNA, 18 nt, Human metapneumovirus
cuuaauaaaaacagaauu

SEQ ID NO: 2639536 - RNA, 16 nt, Human metapneumovirus
acacaggccaaaauug

SEQ ID NO: 2639537 - RNA, 20 nt, Human metapneumovirus
caagaauuaaaucaaucaag

SEQ ID NO: 2639538 - RNA, 16 nt, Human metapneumovirus
gacacagcagcaggaa

SEQ ID NO: 2639539 - RNA, 17 nt, Human metapneumovirus
acuaacaccaaaaagaa

SEQ ID NO: 2639540 - RNA, 14 nt, Human metapneumovirus
accaccagcagugc

SEQ ID NO: 2639541 - RNA, 20 nt, Human metapneumovirus
ugaugggucuucaaaaacau

SEQ ID NO: 2639542 - RNA, 23 nt, Human metapneumovirus
agucauggaucccauugaagaag

SEQ ID NO: 2639543 - RNA, 22 nt, Human metapneumovirus
aaggaaggccagugucaagcag

SEQ ID NO: 2639544 - RNA, 13 nt, Human metapneumovirus
acccacaggagca

SEQ ID NO: 2639545 - RNA, 14 nt, Human metapneumovirus
aaaauuugugagcu

SEQ ID NO: 2639546 - RNA, 15 nt, Human metapneumovirus
cacucgguguugcaa

SEQ ID NO: 2639547 - RNA, 14 nt, Human metapneumovirus
cuugaaguccagau

SEQ ID NO: 2639548 - RNA, 18 nt, Human metapneumovirus
aagauaugucuugaaguc

SEQ ID NO: 2639549 - RNA, 18 nt, Human metapneumovirus
aggacccacagcagcaag

SEQ ID NO: 2639550 - RNA, 15 nt, Human metapneumovirus
acucaagcccacagc

SEQ ID NO: 2639551 - RNA, 20 nt, Human metapneumovirus
auugaaaaucccagacaauc

SEQ ID NO: 2639552 - RNA, 13 nt, Human metapneumovirus
uguuggagaaccg

SEQ ID NO: 2639553 - RNA, 16 nt, Human metapneumovirus
guuauauaaaaaucaa

SEQ ID NO: 2639554 - RNA, 13 nt, Human metapneumovirus
aaaugaaaaagac

SEQ ID NO: 2639555 - RNA, 17 nt, Human metapneumovirus
ucaauguugcugagcag

SEQ ID NO: 2639556 - RNA, 21 nt, Human metapneumovirus
agucaaguuuccugaagauca

SEQ ID NO: 2639557 - RNA, 12 nt, Human metapneumovirus
auaaaaacagaa

SEQ ID NO: 2639558 - RNA, 17 nt, Human metapneumovirus
aagagcucaacaaaauu

SEQ ID NO: 2639559 - RNA, 14 nt, Human metapneumovirus
cacaaauauaacaa

SEQ ID NO: 2639560 - RNA, 14 nt, Human metapneumovirus
cuaagcagugcaga

SEQ ID NO: 2639561 - RNA, 20 nt, Human metapneumovirus
ucaaucaaacagaauccuaa

SEQ ID NO: 2639562 - RNA, 22 nt, Human metapneumovirus
acaucagagugggauaaaugac

SEQ ID NO: 2639563 - RNA, 13 nt, Human metapneumovirus
uaguuaauuaaaa

SEQ ID NO: 2639564 - RNA, 12 nt, Human metapneumovirus
cagucaaaaacu

SEQ ID NO: 2639565 - RNA, 18 nt, Human metapneumovirus
ggcauuccuuacacagca

SEQ ID NO: 2639566 - RNA, 15 nt, Human metapneumovirus
agacugugaaacaag

SEQ ID NO: 2639567 - RNA, 16 nt, Human metapneumovirus
guaaugaagcagcaaa

SEQ ID NO: 2639568 - RNA, 17 nt, Human metapneumovirus
aaacaaaccaaaaccag

SEQ ID NO: 2639569 - RNA, 14 nt, Human metapneumovirus
uuggcaacugcagu

SEQ ID NO: 2639570 - RNA, 16 nt, Human metapneumovirus
aauuguuauuuagaaa

SEQ ID NO: 2639571 - RNA, 21 nt, Human metapneumovirus
gucaagcagcuuugacccagu

SEQ ID NO: 2639572 - RNA, 22 nt, Human metapneumovirus
auaagcaaaauaugcaagacuu

SEQ ID NO: 2639573 - RNA, 21 nt, Human metapneumovirus
aauccuaaauguuaacaccag

SEQ ID NO: 2639574 - RNA, 18 nt, Human metapneumovirus
aauuaaaaacuuaaaagu

SEQ ID NO: 2639575 - RNA, 15 nt, Human metapneumovirus
cagagaaaggaaaca

SEQ ID NO: 2639576 - RNA, 19 nt, Human metapneumovirus
agacugugaaacaagagga

SEQ ID NO: 2639577 - RNA, 19 nt, Human metapneumovirus
cagcuuaauaaaaacagaa

SEQ ID NO: 2639578 - RNA, 17 nt, Human metapneumovirus
acagcaggacccacagc

SEQ ID NO: 2639579 - RNA, 21 nt, Human metapneumovirus
caaacuaucugacagcaaaca

SEQ ID NO: 2639580 - RNA, 15 nt, Human metapneumovirus
ucaaaaacugaauca

SEQ ID NO: 2639581 - RNA, 14 nt, Human metapneumovirus
agaacuaggagcau

SEQ ID NO: 2639582 - RNA, 19 nt, Human metapneumovirus
gccuugguggaucaaucaa

SEQ ID NO: 2639583 - RNA, 15 nt, Human metapneumovirus
gccucuuaagagaag

SEQ ID NO: 2639584 - RNA, 21 nt, Human metapneumovirus
ggaauaacaccagcaauaucu

SEQ ID NO: 2639585 - RNA, 16 nt, Human metapneumovirus
aagaagaagaagaacc

SEQ ID NO: 2639586 - RNA, 17 nt, Human metapneumovirus
agaauuaaaucaaucaa

SEQ ID NO: 2639587 - RNA, 22 nt, Human metapneumovirus
accacauaauuaguuaauuaaa

SEQ ID NO: 2639588 - RNA, 21 nt, Human metapneumovirus
caaucuuaaccuuugaagaaa

SEQ ID NO: 2639589 - RNA, 22 nt, Human metapneumovirus
agacagugaaagcacuaaucaa

SEQ ID NO: 2639590 - RNA, 21 nt, Human metapneumovirus
ugagcuguuccauuggcagca

SEQ ID NO: 2639591 - RNA, 21 nt, Human metapneumovirus
gucaaguuuccugaagaucaa

SEQ ID NO: 2639592 - RNA, 14 nt, Human metapneumovirus
ugacacaugcugga

SEQ ID NO: 2639593 - RNA, 23 nt, Human metapneumovirus
acuuauuaauaagaucaaauuau

SEQ ID NO: 2639594 - RNA, 23 nt, Human metapneumovirus
gcaagaaucuaacacgugcaauc

SEQ ID NO: 2639595 - RNA, 16 nt, Human metapneumovirus
cagguguugcaauugc

SEQ ID NO: 2639596 - RNA, 19 nt, Human metapneumovirus
ccaagcucuaacacaggcc

SEQ ID NO: 2639597 - RNA, 16 nt, Human metapneumovirus
aagcuuggagcuggga

SEQ ID NO: 2639598 - RNA, 15 nt, Human metapneumovirus
gagaaccgugcaaug

SEQ ID NO: 2639599 - RNA, 20 nt, Human metapneumovirus
aagucucauacuaacauuua

SEQ ID NO: 2639600 - RNA, 23 nt, Human metapneumovirus
ggagaugagcaaaacuccugcau

SEQ ID NO: 2639601 - RNA, 13 nt, Human metapneumovirus
agagagcugaaag

SEQ ID NO: 2639602 - RNA, 14 nt, Human metapneumovirus
caagcccacagcau

SEQ ID NO: 2639603 - RNA, 14 nt, Human metapneumovirus
uccauuggcagcaa

SEQ ID NO: 2639604 - RNA, 21 nt, Human metapneumovirus
agacacagugacaauagacaa

SEQ ID NO: 2639605 - RNA, 18 nt, Human metapneumovirus
ucagcccaaggugcagca

SEQ ID NO: 2639606 - RNA, 13 nt, Human metapneumovirus
gcacuaagagagc

SEQ ID NO: 2639607 - RNA, 18 nt, Human metapneumovirus
ucauuuacaccaaaugaa

SEQ ID NO: 2639608 - RNA, 20 nt, Human metapneumovirus
ccaccagcagugcugcucga

SEQ ID NO: 2639609 - RNA, 18 nt, Human metapneumovirus
ggcaacugcagugagaga

SEQ ID NO: 2639610 - RNA, 19 nt, Human metapneumovirus
guguuggcaacugcaguga

SEQ ID NO: 2639611 - RNA, 22 nt, Human metapneumovirus
cuacauaauauaaucaaacaac

SEQ ID NO: 2639612 - RNA, 14 nt, Human metapneumovirus
aaaauaaacaaugg

SEQ ID NO: 2639613 - RNA, 13 nt, Human metapneumovirus
accuuugaagaaa

SEQ ID NO: 2639614 - RNA, 19 nt, Human metapneumovirus
aauuacccaugcaaaguua

SEQ ID NO: 2639615 - RNA, 14 nt, Human metapneumovirus
aauacucaaaguga

SEQ ID NO: 2639616 - RNA, 17 nt, Human metapneumovirus
cuuaagagaagaccaag

SEQ ID NO: 2639617 - RNA, 19 nt, Human metapneumovirus
agcaaaagagcucaacaaa

SEQ ID NO: 2639618 - RNA, 11 nt, Human metapneumovirus
guugaagauga

SEQ ID NO: 2639619 - RNA, 19 nt, Human metapneumovirus
ugcagaaaagaaacugaaa

SEQ ID NO: 2639620 - RNA, 19 nt, Human metapneumovirus
agggaucaucaagcaacug

SEQ ID NO: 2639621 - RNA, 12 nt, Human metapneumovirus
uacacagcagcu

SEQ ID NO: 2639622 - RNA, 23 nt, Human metapneumovirus
caauagacaacacuguauaccag

SEQ ID NO: 2639623 - RNA, 14 nt, Human metapneumovirus
agagagcugaaaga

SEQ ID NO: 2639624 - RNA, 17 nt, Human metapneumovirus
acagcaauuaagaaugc

SEQ ID NO: 2639625 - RNA, 16 nt, Human metapneumovirus
uauaagcagugaagca

SEQ ID NO: 2639626 - RNA, 16 nt, Human metapneumovirus
cacagcagcuguucaa

SEQ ID NO: 2639627 - RNA, 12 nt, Human metapneumovirus
aaacccugacaa

SEQ ID NO: 2639628 - RNA, 21 nt, Human metapneumovirus
cuuacaugugccgauggaccc

SEQ ID NO: 2639629 - RNA, 20 nt, Human metapneumovirus
uaucaaaauuugugagcuca

SEQ ID NO: 2639630 - RNA, 14 nt, Human metapneumovirus
uucaucaaaucagu

SEQ ID NO: 2639631 - RNA, 18 nt, Human metapneumovirus
aaauuguugaagaugaaa

SEQ ID NO: 2639632 - RNA, 19 nt, Human metapneumovirus
agugcacuaagagagcuca

SEQ ID NO: 2639633 - RNA, 21 nt, Human metapneumovirus
ugugagcucagccaaaucagu

SEQ ID NO: 2639634 - RNA, 14 nt, Human metapneumovirus
acaccaaaaagaag

SEQ ID NO: 2639635 - RNA, 14 nt, Human metapneumovirus
cuaggagcaauagc

SEQ ID NO: 2639636 - RNA, 16 nt, Human metapneumovirus
uggaaaacaaucugca

SEQ ID NO: 2639637 - RNA, 22 nt, Human metapneumovirus
acuaugcuugccucuuaagaga

SEQ ID NO: 2639638 - RNA, 18 nt, Human metapneumovirus
aaggcuccgugcaaauau

SEQ ID NO: 2639639 - RNA, 13 nt, Human metapneumovirus
guuggcaacugca

SEQ ID NO: 2639640 - RNA, 20 nt, Human metapneumovirus
aauacucaaagugaaugcau

SEQ ID NO: 2639641 - RNA, 17 nt, Human metapneumovirus
cuggaaaauaaacagaa

SEQ ID NO: 2639642 - RNA, 14 nt, Human metapneumovirus
caacccacaaaaac

SEQ ID NO: 2639643 - RNA, 15 nt, Human metapneumovirus
ucaguguucugagga

SEQ ID NO: 2639644 - RNA, 22 nt, Human metapneumovirus
agcacuaaucaagugcagugag

SEQ ID NO: 2639645 - RNA, 17 nt, Human metapneumovirus
caacgguccccacagac

SEQ ID NO: 2639646 - RNA, 18 nt, Human metapneumovirus
ugacaauagacaacacug

SEQ ID NO: 2639647 - RNA, 18 nt, Human metapneumovirus
uggaucccauugaagaag

SEQ ID NO: 2639648 - RNA, 15 nt, Human metapneumovirus
agcauaagcaaaaua

SEQ ID NO: 2639649 - RNA, 13 nt, Human metapneumovirus
caauucaacagaa

SEQ ID NO: 2639650 - RNA, 12 nt, Human metapneumovirus
aaaaacagaauu

SEQ ID NO: 2639651 - RNA, 14 nt, Human metapneumovirus
caaugauaacauua

SEQ ID NO: 2639652 - RNA, 13 nt, Human metapneumovirus
aacugcagugaga

SEQ ID NO: 2639653 - RNA, 14 nt, Human metapneumovirus
ccaauacucaaagu

SEQ ID NO: 2639654 - RNA, 19 nt, Human metapneumovirus
cagucaaguuuccugaaga

SEQ ID NO: 2639655 - RNA, 22 nt, Human metapneumovirus
agagauacuucaucauuaagca

SEQ ID NO: 2639656 - RNA, 22 nt, Human metapneumovirus
cucaaaaagaccaaugaagcag

SEQ ID NO: 2639657 - RNA, 23 nt, Human metapneumovirus
uagauacuuauuaauaagaucaa

SEQ ID NO: 2639658 - RNA, 22 nt, Human metapneumovirus
ucuacauaauauaaucaaacaa

SEQ ID NO: 2639659 - RNA, 13 nt, Human metapneumovirus
caauuaacaaaau

SEQ ID NO: 2639660 - RNA, 15 nt, Human metapneumovirus
gcagugagagagcug

SEQ ID NO: 2639661 - RNA, 12 nt, Human metapneumovirus
ugauaaacugac

SEQ ID NO: 2639662 - RNA, 15 nt, Human metapneumovirus
uagaucauaaaguca

SEQ ID NO: 2639663 - RNA, 14 nt, Human metapneumovirus
caguguucugagga

SEQ ID NO: 2639664 - RNA, 18 nt, Human metapneumovirus
caacuggcaagagaggag

SEQ ID NO: 2639665 - RNA, 18 nt, Human metapneumovirus
aucaucaagcaacugaac

SEQ ID NO: 2639666 - RNA, 18 nt, Human metapneumovirus
ugaauauagcaaacugga

SEQ ID NO: 2639667 - RNA, 23 nt, Human metapneumovirus
aagagaggaauuaauagcagaca

SEQ ID NO: 2639668 - RNA, 18 nt, Human metapneumovirus
caacaucugcaggacaaa

SEQ ID NO: 2639669 - RNA, 13 nt, Human metapneumovirus
gugcacuaagaga

SEQ ID NO: 2639670 - RNA, 15 nt, Human metapneumovirus
aguggugaucauuuu

SEQ ID NO: 2639671 - RNA, 13 nt, Human metapneumovirus
gaauccuaagcag

SEQ ID NO: 2639672 - RNA, 14 nt, Human metapneumovirus
aaucaaacagaauc

SEQ ID NO: 2639673 - RNA, 17 nt, Human metapneumovirus
agcagucaaaggagugc

SEQ ID NO: 2639674 - RNA, 18 nt, Human metapneumovirus
gcaaaguuagcacaggaa

SEQ ID NO: 2639675 - RNA, 22 nt, Human metapneumovirus
aaaguugaaggcgaacagcaug

SEQ ID NO: 2639676 - RNA, 13 nt, Human metapneumovirus
aacaaaaacaagu

SEQ ID NO: 2639677 - RNA, 15 nt, Human metapneumovirus
aucaagcaacugaac

SEQ ID NO: 2639678 - RNA, 12 nt, Human metapneumovirus
guaaugaagcag

SEQ ID NO: 2639679 - RNA, 19 nt, Human metapneumovirus
ggaucccauugaagaagaa

SEQ ID NO: 2639680 - RNA, 11 nt, Human metapneumovirus
cucaaauuaaa

SEQ ID NO: 2639681 - RNA, 13 nt, Human metapneumovirus
uuggcaacugcag

SEQ ID NO: 2639682 - RNA, 14 nt, Human metapneumovirus
gaaguaacagcaau

SEQ ID NO: 2639683 - RNA, 16 nt, Human metapneumovirus
gcccaaggugcagcaa

SEQ ID NO: 2639684 - RNA, 19 nt, Human metapneumovirus
aagcuaaagggaaagcagc

SEQ ID NO: 2639685 - RNA, 15 nt, Human metapneumovirus
agagagcuacuuaga

SEQ ID NO: 2639686 - RNA, 13 nt, Human metapneumovirus
aaggaaacacugg

SEQ ID NO: 2639687 - RNA, 19 nt, Human metapneumovirus
ucugugaaguaaaaacagu

SEQ ID NO: 2639688 - RNA, 13 nt, Human metapneumovirus
ccuuacacagcag

SEQ ID NO: 2639689 - RNA, 16 nt, Human metapneumovirus
auaaagaaaacaaaga

SEQ ID NO: 2639690 - RNA, 16 nt, Human metapneumovirus
acugaaauaaagcaag

SEQ ID NO: 2639691 - RNA, 17 nt, Human metapneumovirus
aggagcaccuccagagc

SEQ ID NO: 2639692 - RNA, 23 nt, Human metapneumovirus
caaaaugucauucccugaaggaa

SEQ ID NO: 2639693 - RNA, 21 nt, Human metapneumovirus
cuaucugacagcaaacaugua

SEQ ID NO: 2639694 - RNA, 15 nt, Human metapneumovirus
aauaaaggaagcuaa

SEQ ID NO: 2639695 - RNA, 17 nt, Human metapneumovirus
ccagugucaagcagcuu

SEQ ID NO: 2639696 - RNA, 15 nt, Human metapneumovirus
uaaccuuugaagaaa

SEQ ID NO: 2639697 - RNA, 17 nt, Human metapneumovirus
acaauagacaacacugu

SEQ ID NO: 2639698 - RNA, 20 nt, Human metapneumovirus
ugauggaagaggaaaugagu

SEQ ID NO: 2639699 - RNA, 12 nt, Human metapneumovirus
caagcaccuugg

SEQ ID NO: 2639700 - RNA, 20 nt, Human metapneumovirus
ccauaccgucagaaccaaag

SEQ ID NO: 2639701 - RNA, 14 nt, Human metapneumovirus
gagcagucaaagga

SEQ ID NO: 2639702 - RNA, 13 nt, Human metapneumovirus
caaaaacaagugc

SEQ ID NO: 2639703 - RNA, 21 nt, Human metapneumovirus
gacccacagcagcaagagaug

SEQ ID NO: 2639704 - RNA, 15 nt, Human metapneumovirus
ugcgacacagcagca

SEQ ID NO: 2639705 - RNA, 20 nt, Human metapneumovirus
aagugggacaagucaaaaug

SEQ ID NO: 2639706 - RNA, 19 nt, Human metapneumovirus
uccuaaauguuaacaccag

SEQ ID NO: 2639707 - RNA, 18 nt, Human metapneumovirus
guaauaauucuaauugcu

SEQ ID NO: 2639708 - RNA, 17 nt, Human metapneumovirus
gauggcccaaaauuaaa

SEQ ID NO: 2639709 - RNA, 15 nt, Human metapneumovirus
gaauccgaagaagaa

SEQ ID NO: 2639710 - RNA, 15 nt, Human metapneumovirus
gaucaaucaaacaga

SEQ ID NO: 2639711 - RNA, 19 nt, Human metapneumovirus
guugaaggcgaacagcaug

SEQ ID NO: 2639712 - RNA, 15 nt, Human metapneumovirus
gaucuaauagaaaag

SEQ ID NO: 2639713 - RNA, 16 nt, Human metapneumovirus
aaauuugaagucaaug

SEQ ID NO: 2639714 - RNA, 15 nt, Human metapneumovirus
ugaagcagaccaagc

SEQ ID NO: 2639715 - RNA, 14 nt, Human metapneumovirus
guauuuuaaaaguu

SEQ ID NO: 2639716 - RNA, 19 nt, Human metapneumovirus
cguguguuggcaacugcag

SEQ ID NO: 2639717 - RNA, 15 nt, Human metapneumovirus
cuuuggacuuaauga

SEQ ID NO: 2639718 - RNA, 17 nt, Human metapneumovirus
aaacaagaggagaccau

SEQ ID NO: 2639719 - RNA, 19 nt, Human metapneumovirus
uuacauggugcaacugcca

SEQ ID NO: 2639720 - RNA, 19 nt, Human metapneumovirus
aaguaauaauuaauugcuu

SEQ ID NO: 2639721 - RNA, 20 nt, Human metapneumovirus
aaauaauuaaagaccacucu

SEQ ID NO: 2639722 - RNA, 20 nt, Human metapneumovirus
agggaaagcagcagaaauga

SEQ ID NO: 2639723 - RNA, 16 nt, Human metapneumovirus
caucauuguaauaauu

SEQ ID NO: 2639724 - RNA, 20 nt, Human metapneumovirus
gcaaugguaagaagaaaagg

SEQ ID NO: 2639725 - RNA, 16 nt, Human metapneumovirus
agaaccuuacaugugc

SEQ ID NO: 2639726 - RNA, 14 nt, Human metapneumovirus
gcuucauaccacau

SEQ ID NO: 2639727 - RNA, 18 nt, Human metapneumovirus
aacacaccaccagcagug

SEQ ID NO: 2639728 - RNA, 15 nt, Human metapneumovirus
gcaaccaaaacugaa

SEQ ID NO: 2639729 - RNA, 22 nt, Human metapneumovirus
uacagcaggacccacagcagca

SEQ ID NO: 2639730 - RNA, 18 nt, Human metapneumovirus
aauaaaguaaauuaaaau

SEQ ID NO: 2639731 - RNA, 12 nt, Human metapneumovirus
caagcaacugaa

SEQ ID NO: 2639732 - RNA, 21 nt, Human metapneumovirus
guccaauacucaaagugaaug

SEQ ID NO: 2639733 - RNA, 13 nt, Human metapneumovirus
aaugaagaagaag

SEQ ID NO: 2639734 - RNA, 21 nt, Human metapneumovirus
aaaaaucaaguuagaacaaga

SEQ ID NO: 2639735 - RNA, 23 nt, Human metapneumovirus
ucaacaccagauacaacaaaccg

SEQ ID NO: 2639736 - RNA, 21 nt, Human metapneumovirus
gcuauuaagaacacucaacau

SEQ ID NO: 2639737 - RNA, 11 nt, Human metapneumovirus
aucacaaaaau

SEQ ID NO: 2639738 - RNA, 13 nt, Human metapneumovirus
gaaucuucaaucu

SEQ ID NO: 2639739 - RNA, 17 nt, Human metapneumovirus
ucgguguugcaacugca

SEQ ID NO: 2639740 - RNA, 21 nt, Human metapneumovirus
caacaauugugauaaacugac

SEQ ID NO: 2639741 - RNA, 22 nt, Human metapneumovirus
cucucagauaaugaagaagaag

SEQ ID NO: 2639742 - RNA, 15 nt, Human metapneumovirus
acggcacgcagaacc

SEQ ID NO: 2639743 - RNA, 15 nt, Human metapneumovirus
agcaccuccagagcu

SEQ ID NO: 2639744 - RNA, 16 nt, Human metapneumovirus
ugaccaaaagugcacu

SEQ ID NO: 2639745 - RNA, 18 nt, Human metapneumovirus
auauuagcuuuacuaaca

SEQ ID NO: 2639746 - RNA, 20 nt, Human metapneumovirus
guagggaucaucaagcaacu

SEQ ID NO: 2639747 - RNA, 16 nt, Human metapneumovirus
cuuacacagcagcugu

SEQ ID NO: 2639748 - RNA, 14 nt, Human metapneumovirus
gaagaagaagaugc

SEQ ID NO: 2639749 - RNA, 17 nt, Human metapneumovirus
aagcaccuuggccaaga

SEQ ID NO: 2639750 - RNA, 19 nt, Human metapneumovirus
caaugcgacuguagcacuc

SEQ ID NO: 2639751 - RNA, 16 nt, Human metapneumovirus
ucauuaagaaaaccag

SEQ ID NO: 2639752 - RNA, 16 nt, Human metapneumovirus
agcagugcagagaaag

SEQ ID NO: 2639753 - RNA, 16 nt, Human metapneumovirus
aggacccacagcagca

SEQ ID NO: 2639754 - RNA, 14 nt, Human metapneumovirus
agugagagagcuga

SEQ ID NO: 2639755 - RNA, 17 nt, Human metapneumovirus
gugaagcagaccaagcu

SEQ ID NO: 2639756 - RNA, 18 nt, Human metapneumovirus
aaaaguggaaaacaaucu

SEQ ID NO: 2639757 - RNA, 22 nt, Human metapneumovirus
caagagacugccgagagagaaa

SEQ ID NO: 2639758 - RNA, 12 nt, Human metapneumovirus
aaauuugaaguc

SEQ ID NO: 2639759 - RNA, 13 nt, Human metapneumovirus
uccgaagaagaag

SEQ ID NO: 2639760 - RNA, 12 nt, Human metapneumovirus
gauaaugaagaa

SEQ ID NO: 2639761 - RNA, 14 nt, Human metapneumovirus
acaaauaaaaaugu

SEQ ID NO: 2639762 - RNA, 17 nt, Human metapneumovirus
gaucaauuaacaaaauu

SEQ ID NO: 2639763 - RNA, 14 nt, Human metapneumovirus
agucaagaagauga

SEQ ID NO: 2639764 - RNA, 12 nt, Human metapneumovirus
caaucaaagaga

SEQ ID NO: 2639765 - RNA, 13 nt, Human metapneumovirus
aaucugcaaauau

SEQ ID NO: 2639766 - RNA, 18 nt, Human metapneumovirus
ggagaauccgaagaagaa

SEQ ID NO: 2639767 - RNA, 23 nt, Human metapneumovirus
ucuucaaaaacauguacucaccu

SEQ ID NO: 2639768 - RNA, 17 nt, Human metapneumovirus
gcucagccaaaucaguu

SEQ ID NO: 2639769 - RNA, 13 nt, Human metapneumovirus
ugacagaugcuga

SEQ ID NO: 2639770 - RNA, 15 nt, Human metapneumovirus
ucaguuucaaucaaa

SEQ ID NO: 2639771 - RNA, 14 nt, Human metapneumovirus
caggaaucaauguu

SEQ ID NO: 2639772 - RNA, 15 nt, Human metapneumovirus
aagaacacaccuguu

SEQ ID NO: 2639773 - RNA, 15 nt, Human metapneumovirus
ugcaaaaaaacacau

SEQ ID NO: 2639774 - RNA, 14 nt, Human metapneumovirus
aaaggcaacaacac

SEQ ID NO: 2639775 - RNA, 22 nt, Human metapneumovirus
aagugcacuaagagagcucaga

SEQ ID NO: 2639776 - RNA, 14 nt, Human metapneumovirus
ugacuaugaacaau

SEQ ID NO: 2639777 - RNA, 21 nt, Human metapneumovirus
acugaaucagacaaaaaggac

SEQ ID NO: 2639778 - RNA, 23 nt, Human metapneumovirus
acagucugugaaguaaaaacagu

SEQ ID NO: 2639779 - RNA, 21 nt, Human metapneumovirus
ugcucucagauaaugaagaag

SEQ ID NO: 2639780 - RNA, 19 nt, Human metapneumovirus
aacucugcaauaaacagug

SEQ ID NO: 2639781 - RNA, 22 nt, Human metapneumovirus
ugcagaaacaaaccaaaaccag

SEQ ID NO: 2639782 - RNA, 12 nt, Human metapneumovirus
acaccagcaaua

SEQ ID NO: 2639783 - RNA, 16 nt, Human metapneumovirus
aggagaaaaagugaau

SEQ ID NO: 2639784 - RNA, 12 nt, Human metapneumovirus
cgacacagcagc

SEQ ID NO: 2639785 - RNA, 17 nt, Human metapneumovirus
aauuguuauuuagaaaa

SEQ ID NO: 2639786 - RNA, 14 nt, Human metapneumovirus
uggggcaaccaaaa

SEQ ID NO: 2639787 - RNA, 14 nt, Human metapneumovirus
uaaucaagugcagu

SEQ ID NO: 2639788 - RNA, 15 nt, Human metapneumovirus
uguuuuaaaucugaa

SEQ ID NO: 2639789 - RNA, 23 nt, Human metapneumovirus
uuuucauggguaaugaagcagca

SEQ ID NO: 2639790 - RNA, 18 nt, Human metapneumovirus
acacggucuuaaagagag

SEQ ID NO: 2639791 - RNA, 20 nt, Human metapneumovirus
caaaaugcagggucaacugu

SEQ ID NO: 2639792 - RNA, 23 nt, Human metapneumovirus
aaguuucuaugauacuucauaau

SEQ ID NO: 2639793 - RNA, 16 nt, Human metapneumovirus
agacaaauaacaaugg

SEQ ID NO: 2639794 - RNA, 17 nt, Human metapneumovirus
acauaucuacuacuaau

SEQ ID NO: 2639795 - RNA, 22 nt, Human metapneumovirus
auggaucccauugaagaagaag

SEQ ID NO: 2639796 - RNA, 10 nt, Human metapneumovirus
guaaauuaaa

SEQ ID NO: 2639797 - RNA, 16 nt, Human metapneumovirus
aacaguuuacuuaaca

SEQ ID NO: 2639798 - RNA, 17 nt, Human metapneumovirus
ggaucccauugaagaag

SEQ ID NO: 2639799 - RNA, 15 nt, Human metapneumovirus
agcaggaaucaaugu

SEQ ID NO: 2639800 - RNA, 17 nt, Human metapneumovirus
aaaagaccaaugaagca

SEQ ID NO: 2639801 - RNA, 16 nt, Human metapneumovirus
uacuacccaaaugaaa

SEQ ID NO: 2639802 - RNA, 15 nt, Human metapneumovirus
cuuugggguuauaga

SEQ ID NO: 2639803 - RNA, 18 nt, Human metapneumovirus
agaugacauuuaccaguu

SEQ ID NO: 2639804 - RNA, 22 nt, Human metapneumovirus
caagaaucuaacacgugcaauc

SEQ ID NO: 2639805 - RNA, 16 nt, Human metapneumovirus
gaauaacaccagcaau

SEQ ID NO: 2639806 - RNA, 13 nt, Human metapneumovirus
uggcaagagagga

SEQ ID NO: 2639807 - RNA, 18 nt, Human metapneumovirus
ugagcucagccaaaucag

SEQ ID NO: 2639808 - RNA, 14 nt, Human metapneumovirus
cagguguugcaauu

SEQ ID NO: 2639809 - RNA, 19 nt, Human metapneumovirus
agggacaagauaugucuug

SEQ ID NO: 2639810 - RNA, 14 nt, Human metapneumovirus
acacaucugaauca

SEQ ID NO: 2639811 - RNA, 21 nt, Human metapneumovirus
ucaaucuuaaccuuugaagaa

SEQ ID NO: 2639812 - RNA, 16 nt, Human metapneumovirus
ugcaacugcagcugca

SEQ ID NO: 2639813 - RNA, 16 nt, Human metapneumovirus
ucaucaaauaccacau

SEQ ID NO: 2639814 - RNA, 17 nt, Human metapneumovirus
ccagcagugcugcucga

SEQ ID NO: 2639815 - RNA, 17 nt, Human metapneumovirus
aaaugauggaagaggaa

SEQ ID NO: 2639816 - RNA, 12 nt, Human metapneumovirus
guuauagacacg

SEQ ID NO: 2639817 - RNA, 19 nt, Human metapneumovirus
ccaaacuaguuaacaaaaa

SEQ ID NO: 2639818 - RNA, 15 nt, Human metapneumovirus
agcagucaaaggagu

SEQ ID NO: 2639819 - RNA, 11 nt, Human metapneumovirus
guuagcacagg

SEQ ID NO: 2639820 - RNA, 19 nt, Human metapneumovirus
auauaacaacauacaaauu

SEQ ID NO: 2639821 - RNA, 15 nt, Human metapneumovirus
uauaacaacauacaa

SEQ ID NO: 2639822 - RNA, 15 nt, Human metapneumovirus
ggaucuagaaaagaa

SEQ ID NO: 2639823 - RNA, 17 nt, Human metapneumovirus
aagcagugaagcagacc

SEQ ID NO: 2639824 - RNA, 22 nt, Human metapneumovirus
ucaacuggcaagagaggagcaa

SEQ ID NO: 2639825 - RNA, 15 nt, Human metapneumovirus
ugguauugucaaaau

SEQ ID NO: 2639826 - RNA, 16 nt, Human metapneumovirus
gaagaagaugcagaau

SEQ ID NO: 2639827 - RNA, 14 nt, Human metapneumovirus
cagucuacauaaua

SEQ ID NO: 2639828 - RNA, 23 nt, Human metapneumovirus
accaacaauugugauaaacugac

SEQ ID NO: 2639829 - RNA, 22 nt, Human metapneumovirus
aaguuagcauggacagauaaag

SEQ ID NO: 2639830 - RNA, 19 nt, Human metapneumovirus
aaaaagugggacaagucaa

SEQ ID NO: 2639831 - RNA, 15 nt, Human metapneumovirus
auaacaccagcaaua

SEQ ID NO: 2639832 - RNA, 16 nt, Human metapneumovirus
ccauggaauccagcag

SEQ ID NO: 2639833 - RNA, 19 nt, Human metapneumovirus
gaucccauugaagaagaag

SEQ ID NO: 2639834 - RNA, 18 nt, Human metapneumovirus
cuaggagcaauagcacuc

SEQ ID NO: 2639835 - RNA, 17 nt, Human metapneumovirus
uagaccugcaaaaccaa

SEQ ID NO: 2639836 - RNA, 19 nt, Human metapneumovirus
augucauucccugaaggaa

SEQ ID NO: 2639837 - RNA, 18 nt, Human metapneumovirus
ucauaauaaagaaaacaa

SEQ ID NO: 2639838 - RNA, 21 nt, Human metapneumovirus
cuguugaagcugcuauaagca

SEQ ID NO: 2639839 - RNA, 20 nt, Human metapneumovirus
augcccucaaaaagaccaau

SEQ ID NO: 2639840 - RNA, 12 nt, Human metapneumovirus
ugguaucaaaau

SEQ ID NO: 2639841 - RNA, 23 nt, Human metapneumovirus
aaagaccaaugaagcaguaucua

SEQ ID NO: 2639842 - RNA, 23 nt, Human metapneumovirus
gcuugaaagugaaguaacagcaa

SEQ ID NO: 2639843 - RNA, 23 nt, Human metapneumovirus
ccgaagaagaagaagaaccaaaa

SEQ ID NO: 2639844 - RNA, 22 nt, Human metapneumovirus
ugaaacccaauccuaaauguua

SEQ ID NO: 2639845 - RNA, 21 nt, Human metapneumovirus
gauacuuauuaauaagaucaa

SEQ ID NO: 2639846 - RNA, 17 nt, Human metapneumovirus
aaucaguuggcaaaaaa

SEQ ID NO: 2639847 - RNA, 20 nt, Human metapneumovirus
gcugaucaacuggcaagaga

SEQ ID NO: 2639848 - RNA, 15 nt, Human metapneumovirus
auuaacagaaaaagc

SEQ ID NO: 2639849 - RNA, 19 nt, Human metapneumovirus
ucuagaaaagaacacaccu

SEQ ID NO: 2639850 - RNA, 13 nt, Human metapneumovirus
cagucaaaaacug

SEQ ID NO: 2639851 - RNA, 16 nt, Human metapneumovirus
uccagauaacaaccaa

SEQ ID NO: 2639852 - RNA, 20 nt, Human metapneumovirus
ccagcauucaucaaaucagu

SEQ ID NO: 2639853 - RNA, 16 nt, Human metapneumovirus
uggaaaauaaacagaa

SEQ ID NO: 2639854 - RNA, 16 nt, Human metapneumovirus
ucaaaggagugcaaca

SEQ ID NO: 2639855 - RNA, 18 nt, Human metapneumovirus
gcauuccuuacacagcag

SEQ ID NO: 2639856 - RNA, 23 nt, Human metapneumovirus
aagccuaacaauaugguucccuu

SEQ ID NO: 2639857 - RNA, 16 nt, Human metapneumovirus
cucuguaugcugcauc

SEQ ID NO: 2639858 - RNA, 18 nt, Human metapneumovirus
gcauucaucaaaucaguu

SEQ ID NO: 2639859 - RNA, 17 nt, Human metapneumovirus
uaacaaccaugaaacca

SEQ ID NO: 2639860 - RNA, 20 nt, Human metapneumovirus
agcagacauaauaaaggaag

SEQ ID NO: 2639861 - RNA, 21 nt, Human metapneumovirus
ucaagcaacugaacaaaggcu

SEQ ID NO: 2639862 - RNA, 15 nt, Human metapneumovirus
aaucaauaaaaacuu

SEQ ID NO: 2639863 - RNA, 21 nt, Human metapneumovirus
augaagaagaagaugcagaau

SEQ ID NO: 2639864 - RNA, 14 nt, Human metapneumovirus
aaaaaccaacaauu

SEQ ID NO: 2639865 - RNA, 16 nt, Human metapneumovirus
aaaaauuugaagucaa

SEQ ID NO: 2639866 - RNA, 22 nt, Human metapneumovirus
ugcagcugcaguuacagcaggu

SEQ ID NO: 2639867 - RNA, 17 nt, Human metapneumovirus
caccccaagaaaaaaac

SEQ ID NO: 2639868 - RNA, 19 nt, Human metapneumovirus
uugugagcucagccaaauc

SEQ ID NO: 2639869 - RNA, 22 nt, Human metapneumovirus
agugcugcucgaucagcuaaaa

SEQ ID NO: 2639870 - RNA, 15 nt, Human metapneumovirus
aagcaagcaaucaaa

SEQ ID NO: 2639871 - RNA, 14 nt, Human metapneumovirus
cacaccuguuacaa

SEQ ID NO: 2639872 - RNA, 16 nt, Human metapneumovirus
aagcgcaagcagaaca

SEQ ID NO: 2639873 - RNA, 16 nt, Human metapneumovirus
uguuggcaacugcagu

SEQ ID NO: 2639874 - RNA, 18 nt, Human metapneumovirus
cauaauaaagaaaacaaa

SEQ ID NO: 2639875 - RNA, 11 nt, Human metapneumovirus
agugcagugag

SEQ ID NO: 2639876 - RNA, 18 nt, Human metapneumovirus
ccuaaauguuaacaccag

SEQ ID NO: 2639877 - RNA, 14 nt, Human metapneumovirus
uggcagcaacagag

SEQ ID NO: 2639878 - RNA, 21 nt, Human metapneumovirus
cuaugaacaaucccaaaggca

SEQ ID NO: 2639879 - RNA, 22 nt, Human metapneumovirus
agcaacagaguagggaucauca

SEQ ID NO: 2639880 - RNA, 15 nt, Human metapneumovirus
agagagaaacugaaa

SEQ ID NO: 2639881 - RNA, 17 nt, Human metapneumovirus
agcagcuguucaaguug

SEQ ID NO: 2639882 - RNA, 15 nt, Human metapneumovirus
aaaauuguugaagau

SEQ ID NO: 2639883 - RNA, 22 nt, Human metapneumovirus
augcugaacuagccagagcugu

SEQ ID NO: 2639884 - RNA, 23 nt, Human metapneumovirus
aaccauccggcuugaaagugaag

SEQ ID NO: 2639885 - RNA, 23 nt, Human metapneumovirus
agauuuaugcagaaacaaaccaa

SEQ ID NO: 2639886 - RNA, 18 nt, Human metapneumovirus
acuguaucagaaacauug

SEQ ID NO: 2639887 - RNA, 19 nt, Human metapneumovirus
uguuuacuacccaaaugaa

SEQ ID NO: 2639888 - RNA, 17 nt, Human metapneumovirus
acccaaaugaaaaagac

SEQ ID NO: 2639889 - RNA, 20 nt, Human metapneumovirus
ugaccaaguuuucgagagca

SEQ ID NO: 2639890 - RNA, 21 nt, Human metapneumovirus
uggaauuugacaaacucacag

SEQ ID NO: 2639891 - RNA, 22 nt, Human metapneumovirus
aggagcaccuccagagcugagu

SEQ ID NO: 2639892 - RNA, 19 nt, Human metapneumovirus
uagcacucgguguugcaac

SEQ ID NO: 2639893 - RNA, 22 nt, Human metapneumovirus
gcuugaaagugaaguaacagca

SEQ ID NO: 2639894 - RNA, 22 nt, Human metapneumovirus
gcugaucaacuggcaagagagg

SEQ ID NO: 2639895 - RNA, 22 nt, Human metapneumovirus
gaauuagaccugaccaaaagug

SEQ ID NO: 2639896 - RNA, 17 nt, Human metapneumovirus
uaucugacagcaaacau

SEQ ID NO: 2639897 - RNA, 19 nt, Human metapneumovirus
ccagcuuaauaaaaacaga

SEQ ID NO: 2639898 - RNA, 23 nt, Human metapneumovirus
auuaaaacaguuuuuaacaagga

SEQ ID NO: 2639899 - RNA, 22 nt, Human metapneumovirus
guaaagugcuuauuguacuuaa

SEQ ID NO: 2639900 - RNA, 19 nt, Human metapneumovirus
aauuacuuaccugagaaaa

SEQ ID NO: 2639901 - RNA, 14 nt, Human metapneumovirus
aaaaaaacacauga

SEQ ID NO: 2639902 - RNA, 18 nt, Human metapneumovirus
cuaaagggaaagcagcag

SEQ ID NO: 2639903 - RNA, 14 nt, Human metapneumovirus
ggcaacaacaccau

SEQ ID NO: 2639904 - RNA, 16 nt, Human metapneumovirus
caguccacacaaaaaa

SEQ ID NO: 2639905 - RNA, 14 nt, Human metapneumovirus
aaaauuaacagaaa

SEQ ID NO: 2639906 - RNA, 22 nt, Human metapneumovirus
aagcacuaaucaagugcaguga

SEQ ID NO: 2639907 - RNA, 19 nt, Human metapneumovirus
cagcaagcucaccagagac

SEQ ID NO: 2639908 - RNA, 15 nt, Human metapneumovirus
guuagcacaggaaga

SEQ ID NO: 2639909 - RNA, 20 nt, Human metapneumovirus
cugcagaaaagaaacugaaa

SEQ ID NO: 2639910 - RNA, 16 nt, Human metapneumovirus
cagugcagagaaagga

SEQ ID NO: 2639911 - RNA, 22 nt, Human metapneumovirus
uggcaacugcagugagagagcu

SEQ ID NO: 2639912 - RNA, 14 nt, Human metapneumovirus
guggaucaaucaaa

SEQ ID NO: 2639913 - RNA, 13 nt, Human metapneumovirus
caaucaaacagaa

SEQ ID NO: 2639914 - RNA, 22 nt, Human metapneumovirus
caaguggagaauccgaagaaga

SEQ ID NO: 2639915 - RNA, 15 nt, Human metapneumovirus
ggcaacugcagugag

SEQ ID NO: 2639916 - RNA, 16 nt, Human metapneumovirus
cauaauaaagaaaaca

SEQ ID NO: 2639917 - RNA, 14 nt, Human metapneumovirus
ccuuacacagcagc

SEQ ID NO: 2639918 - RNA, 15 nt, Human metapneumovirus
ccugaaggaaaagau

SEQ ID NO: 2639919 - RNA, 22 nt, Human metapneumovirus
agcagcaaaauuagcagaagcu

SEQ ID NO: 2639920 - RNA, 21 nt, Human metapneumovirus
cugaagaucaauucaauguug

SEQ ID NO: 2639921 - RNA, 21 nt, Human metapneumovirus
caaggcauuccuuacacagca

SEQ ID NO: 2639922 - RNA, 23 nt, Human metapneumovirus
cucaaagugaaugcaucagccca

SEQ ID NO: 2639923 - RNA, 18 nt, Human metapneumovirus
aucaugacuaugaacaau

SEQ ID NO: 2639924 - RNA, 19 nt, Human metapneumovirus
acggucuuaaagagagcua

SEQ ID NO: 2639925 - RNA, 16 nt, Human metapneumovirus
aagcagugcagagaaa

SEQ ID NO: 2639926 - RNA, 21 nt, Human metapneumovirus
aacaucugcaggacaaauaaa

SEQ ID NO: 2639927 - RNA, 23 nt, Human metapneumovirus
gguaucaaaauuugugagcucag

SEQ ID NO: 2639928 - RNA, 17 nt, Human metapneumovirus
uguccaggcugaaagca

SEQ ID NO: 2639929 - RNA, 20 nt, Human metapneumovirus
agagaggagcaaauugaaaa

SEQ ID NO: 2639930 - RNA, 17 nt, Human metapneumovirus
ugaacuagccagagcug

SEQ ID NO: 2639931 - RNA, 17 nt, Human metapneumovirus
auagaaaaggaccuguu

SEQ ID NO: 2639932 - RNA, 13 nt, Human metapneumovirus
acaccaaaaagaa

SEQ ID NO: 2639933 - RNA, 20 nt, Human metapneumovirus
cagaauccuaagcagugcag

SEQ ID NO: 2639934 - RNA, 20 nt, Human metapneumovirus
aacgaucaaaaauaggaaau

SEQ ID NO: 2639935 - RNA, 17 nt, Human metapneumovirus
caaggugcagcaauguc

SEQ ID NO: 2639936 - RNA, 16 nt, Human metapneumovirus
ucagauaaugaagaag

SEQ ID NO: 2639937 - RNA, 18 nt, Human metapneumovirus
gcgaacagcauguuauaa

SEQ ID NO: 2639938 - RNA, 12 nt, Human metapneumovirus
gaaauuaagcau

SEQ ID NO: 2639939 - RNA, 23 nt, Human metapneumovirus
caggaaucaauguugcugagcag

SEQ ID NO: 2639940 - RNA, 13 nt, Human metapneumovirus
uuaagaaaaccag

SEQ ID NO: 2639941 - RNA, 18 nt, Human metapneumovirus
caagaaucuaacacgugc

SEQ ID NO: 2639942 - RNA, 17 nt, Human metapneumovirus
auggcccaaaauuaaaa

SEQ ID NO: 2639943 - RNA, 11 nt, Human metapneumovirus
cccaauccuaa

SEQ ID NO: 2639944 - RNA, 22 nt, Human metapneumovirus
aaggaagcuaaagggaaagcag

SEQ ID NO: 2639945 - RNA, 16 nt, Human metapneumovirus
caagcucuaacacagg

SEQ ID NO: 2639946 - RNA, 20 nt, Human metapneumovirus
aaaguuggaaaaagaugcuc

SEQ ID NO: 2639947 - RNA, 20 nt, Human metapneumovirus
aaagcaagcaaucaaaguca

SEQ ID NO: 2639948 - RNA, 15 nt, Human metapneumovirus
agugucaagcagcuu

SEQ ID NO: 2639949 - RNA, 18 nt, Human metapneumovirus
aagaacgggacaaauaaa

SEQ ID NO: 2639950 - RNA, 17 nt, Human metapneumovirus
gugagagagcugaaaga

SEQ ID NO: 2639951 - RNA, 14 nt, Human metapneumovirus
ugaagcagaccaag

SEQ ID NO: 2639952 - RNA, 14 nt, Human metapneumovirus
ccucuuaagagaag

SEQ ID NO: 2639953 - RNA, 20 nt, Human metapneumovirus
ucugaagacacaaaaaccaa

SEQ ID NO: 2639954 - RNA, 18 nt, Human metapneumovirus
agugaagucucauacuaa

SEQ ID NO: 2639955 - RNA, 15 nt, Human metapneumovirus
agcucaacaaaauug

SEQ ID NO: 2639956 - RNA, 16 nt, Human metapneumovirus
aaaaugcaaaaaaaca

SEQ ID NO: 2639957 - RNA, 20 nt, Human metapneumovirus
agcagcaggaaucaauguug

SEQ ID NO: 2639958 - RNA, 23 nt, Human metapneumovirus
aaccgugcaaugguaagaagaaa

SEQ ID NO: 2639959 - RNA, 21 nt, Human metapneumovirus
cccacaaacaucugcaagcac

SEQ ID NO: 2639960 - RNA, 23 nt, Human metapneumovirus
ugccucuuaagagaagaccaagg

SEQ ID NO: 2639961 - RNA, 14 nt, Human metapneumovirus
acuuuauuaaaugg

SEQ ID NO: 2639962 - RNA, 16 nt, Human metapneumovirus
uuuacaccaaaugaac

SEQ ID NO: 2639963 - RNA, 21 nt, Human metapneumovirus
agucaaaggagugcaacauaa

SEQ ID NO: 2639964 - RNA, 14 nt, Human metapneumovirus
caaucccaaaggca

SEQ ID NO: 2639965 - RNA, 17 nt, Human metapneumovirus
auauaaaaaucaaguua

SEQ ID NO: 2639966 - RNA, 13 nt, Human metapneumovirus
aaaccagcaguug

SEQ ID NO: 2639967 - RNA, 17 nt, Human metapneumovirus
aauuaguuaauuaaaaa

SEQ ID NO: 2639968 - RNA, 18 nt, Human metapneumovirus
gaaagauuuugugagcaa

SEQ ID NO: 2639969 - RNA, 21 nt, Human metapneumovirus
cacaugcuggaaaauaaacag

SEQ ID NO: 2639970 - RNA, 21 nt, Human metapneumovirus
caggccaacacaccaccagca

SEQ ID NO: 2639971 - RNA, 18 nt, Human metapneumovirus
ggaauaacaccagcaaua

SEQ ID NO: 2639972 - RNA, 21 nt, Human metapneumovirus
caauguuuuuacacuggaggu

SEQ ID NO: 2639973 - RNA, 23 nt, Human metapneumovirus
auuaagaaugcccucaaaaagac

SEQ ID NO: 2639974 - RNA, 19 nt, Human metapneumovirus
agaggaagugagugcaagu

SEQ ID NO: 2639975 - RNA, 13 nt, Human metapneumovirus
auggaagaggaaa

SEQ ID NO: 2639976 - RNA, 21 nt, Human metapneumovirus
auuaguuaauuaaaaauaaag

SEQ ID NO: 2639977 - RNA, 15 nt, Human metapneumovirus
auaugcaagacuugg

SEQ ID NO: 2639978 - RNA, 16 nt, Human metapneumovirus
agcauucaucaaauca

SEQ ID NO: 2639979 - RNA, 22 nt, Human metapneumovirus
gauuuuauggaucuagaaaaga

SEQ ID NO: 2639980 - RNA, 16 nt, Human metapneumovirus
ugucaagcagcuuuga

SEQ ID NO: 2639981 - RNA, 13 nt, Human metapneumovirus
ggguaaugaagca

SEQ ID NO: 2639982 - RNA, 13 nt, Human metapneumovirus
aauaggaaauggu

SEQ ID NO: 2639983 - RNA, 18 nt, Human metapneumovirus
auuauaggagaaaaagug

SEQ ID NO: 2639984 - RNA, 18 nt, Human metapneumovirus
caacugaacaaaggcugc

SEQ ID NO: 2639985 - RNA, 22 nt, Human metapneumovirus
aaaacaaucugcaaauaugcca

SEQ ID NO: 2639986 - RNA, 15 nt, Human metapneumovirus
caagagcaacaaaag

SEQ ID NO: 2639987 - RNA, 18 nt, Human metapneumovirus
acggucuuaaagagagcu

SEQ ID NO: 2639988 - RNA, 13 nt, Human metapneumovirus
caucaaaucaguu

SEQ ID NO: 2639989 - RNA, 19 nt, Human metapneumovirus
cauuccuuacacagcagcu

SEQ ID NO: 2639990 - RNA, 21 nt, Human metapneumovirus
ugggacaaguaaaaauggagu

SEQ ID NO: 2639991 - RNA, 21 nt, Human metapneumovirus
gcacuaaucaagugcagugag

SEQ ID NO: 2639992 - RNA, 15 nt, Human metapneumovirus
caauucaacagaagg

SEQ ID NO: 2639993 - RNA, 19 nt, Human metapneumovirus
aggaacacugauagagcug

SEQ ID NO: 2639994 - RNA, 17 nt, Human metapneumovirus
gaucaacuggcaagaga

SEQ ID NO: 2639995 - RNA, 12 nt, Human metapneumovirus
agaaacugaaaa

SEQ ID NO: 2639996 - RNA, 20 nt, Human metapneumovirus
aucaguuggcaaaaaaacac

SEQ ID NO: 2639997 - RNA, 13 nt, Human metapneumovirus
uaaugaagcagca

SEQ ID NO: 2639998 - RNA, 22 nt, Human metapneumovirus
gccaacacaccaccagcagugc

SEQ ID NO: 2639999 - RNA, 19 nt, Human metapneumovirus
caaacuaguuaacaaaaaa

SEQ ID NO: 2640000 - RNA, 17 nt, Human metapneumovirus
acaagugcgacauugcu

SEQ ID NO: 2640001 - RNA, 16 nt, Human metapneumovirus
gaagaugaaagcacaa

SEQ ID NO: 2640002 - RNA, 17 nt, Human metapneumovirus
aucuaauagaaaaggac

SEQ ID NO: 2640003 - RNA, 15 nt, Human metapneumovirus
cuuuguuucaggcca

SEQ ID NO: 2640004 - RNA, 20 nt, Human metapneumovirus
cgacacacacacaacaccac

SEQ ID NO: 2640005 - RNA, 20 nt, Human metapneumovirus
aggccagugucaagcagcuu

SEQ ID NO: 2640006 - RNA, 19 nt, Human metapneumovirus
uagcacuauaacugaagga

SEQ ID NO: 2640007 - RNA, 21 nt, Human metapneumovirus
aaauuugggacaaaucauaau

SEQ ID NO: 2640008 - RNA, 21 nt, Human metapneumovirus
acauuagaugucauuaaaagu

SEQ ID NO: 2640009 - RNA, 13 nt, Human metapneumovirus
aaggaagcuaaag

SEQ ID NO: 2640010 - RNA, 14 nt, Human metapneumovirus
ggagugagcuguuc

SEQ ID NO: 2640011 - RNA, 15 nt, Human metapneumovirus
ugcaagacuuggagc

SEQ ID NO: 2640012 - RNA, 20 nt, Human metapneumovirus
caaauuauuuauuaaaucaa

SEQ ID NO: 2640013 - RNA, 16 nt, Human metapneumovirus
aucucaagagacugcc

SEQ ID NO: 2640014 - RNA, 14 nt, Human metapneumovirus
auuaagaaaaccag

SEQ ID NO: 2640015 - RNA, 21 nt, Human metapneumovirus
ccaugucuuuugcgacacagc

SEQ ID NO: 2640016 - RNA, 18 nt, Human metapneumovirus
aguguaaaauuaacagaa

SEQ ID NO: 2640017 - RNA, 11 nt, Human metapneumovirus
cccugcagaaa

SEQ ID NO: 2640018 - RNA, 19 nt, Human metapneumovirus
gaggaaaugagucaacgau

SEQ ID NO: 2640019 - RNA, 17 nt, Human metapneumovirus
gagcaccuccagagcug

SEQ ID NO: 2640020 - RNA, 20 nt, Human metapneumovirus
gagagcuugacagaacuaag

SEQ ID NO: 2640021 - RNA, 14 nt, Human metapneumovirus
cagaaaaagcaaaa

SEQ ID NO: 2640022 - RNA, 21 nt, Human metapneumovirus
caguuacagcagguguugcaa

SEQ ID NO: 2640023 - RNA, 14 nt, Human metapneumovirus
agcagugaagcaga

SEQ ID NO: 2640024 - RNA, 21 nt, Human metapneumovirus
cagcaagagaugggaucagag

SEQ ID NO: 2640025 - RNA, 13 nt, Human metapneumovirus
aauauagcaaacu

SEQ ID NO: 2640026 - RNA, 20 nt, Human metapneumovirus
cauaauaauaaguaauaauu

SEQ ID NO: 2640027 - RNA, 16 nt, Human metapneumovirus
gggcuauuaagaacac

SEQ ID NO: 2640028 - RNA, 19 nt, Human metapneumovirus
auagaaauuauauauguca

SEQ ID NO: 2640029 - RNA, 16 nt, Human metapneumovirus
aagggagugagcuguu

SEQ ID NO: 2640030 - RNA, 13 nt, Human metapneumovirus
aaccuuugaagaa

SEQ ID NO: 2640031 - RNA, 16 nt, Human metapneumovirus
caaguuagaacaagaa

SEQ ID NO: 2640032 - RNA, 23 nt, Human metapneumovirus
uauacaaacucugcaauaaacag

SEQ ID NO: 2640033 - RNA, 15 nt, Human metapneumovirus
agcugggacucaagu

SEQ ID NO: 2640034 - RNA, 13 nt, Human metapneumovirus
aucacaaaauggu

SEQ ID NO: 2640035 - RNA, 21 nt, Human metapneumovirus
uacagcaggacccacagcagc

SEQ ID NO: 2640036 - RNA, 22 nt, Human metapneumovirus
agaaugccauuguauauacaca

SEQ ID NO: 2640037 - RNA, 13 nt, Human metapneumovirus
acagcagcuguuc

SEQ ID NO: 2640038 - RNA, 20 nt, Human metapneumovirus
augauaaccaaagcauaaca

SEQ ID NO: 2640039 - RNA, 11 nt, Human metapneumovirus
uaucaggagca

SEQ ID NO: 2640040 - RNA, 16 nt, Human metapneumovirus
cagacacagugacaau

SEQ ID NO: 2640041 - RNA, 22 nt, Human metapneumovirus
uaaccacucuguaugcugcauc

SEQ ID NO: 2640042 - RNA, 16 nt, Human metapneumovirus
accagcagugcugcuc

SEQ ID NO: 2640043 - RNA, 20 nt, Human metapneumovirus
cugaguggugucacaaacaa

SEQ ID NO: 2640044 - RNA, 12 nt, Human metapneumovirus
uuaaucaacaau

SEQ ID NO: 2640045 - RNA, 18 nt, Human metapneumovirus
aaaucaguuucaaucaaa

SEQ ID NO: 2640046 - RNA, 19 nt, Human metapneumovirus
acaagggagugagcuguuc

SEQ ID NO: 2640047 - RNA, 21 nt, Human metapneumovirus
gaaagugaaguaacagcaauu

SEQ ID NO: 2640048 - RNA, 15 nt, Human metapneumovirus
ugcacuaagagagcu

SEQ ID NO: 2640049 - RNA, 12 nt, Human metapneumovirus
caacaacaaaag

SEQ ID NO: 2640050 - RNA, 22 nt, Human metapneumovirus
accaagacgcagacacagugac

SEQ ID NO: 2640051 - RNA, 20 nt, Human metapneumovirus
caaauaaaaaugucuuggaa

SEQ ID NO: 2640052 - RNA, 14 nt, Human metapneumovirus
acacaguuaaaugg

SEQ ID NO: 2640053 - RNA, 19 nt, Human metapneumovirus
ugaguggugucacaaacaa

SEQ ID NO: 2640054 - RNA, 14 nt, Human metapneumovirus
aaaauaaaaauuug

SEQ ID NO: 2640055 - RNA, 12 nt, Human metapneumovirus
aggugcagcaau

SEQ ID NO: 2640056 - RNA, 17 nt, Human metapneumovirus
uagaacaagaauuaaau

SEQ ID NO: 2640057 - RNA, 16 nt, Human metapneumovirus
ccaacaucaacaccag

SEQ ID NO: 2640058 - RNA, 16 nt, Human metapneumovirus
cagcccaaggugcagc

SEQ ID NO: 2640059 - RNA, 22 nt, Human metapneumovirus
uccccaaaaaggcaacaacacc

SEQ ID NO: 2640060 - RNA, 16 nt, Human metapneumovirus
gacaaacucacagucu

SEQ ID NO: 2640061 - RNA, 22 nt, Human metapneumovirus
acuuaaguuaguaaaaacacau

SEQ ID NO: 2640062 - RNA, 22 nt, Human metapneumovirus
auucuuuucauggguaaugaag

SEQ ID NO: 2640063 - RNA, 20 nt, Human metapneumovirus
cagucugugaaguaaaaaca

SEQ ID NO: 2640064 - RNA, 15 nt, Human metapneumovirus
aauuauauaaaagug

SEQ ID NO: 2640065 - RNA, 15 nt, Human metapneumovirus
caccagcagugcugc

SEQ ID NO: 2640066 - RNA, 23 nt, Human metapneumovirus
aacaauugugauaaacugacaga

SEQ ID NO: 2640067 - RNA, 11 nt, Human metapneumovirus
agagagcucag

SEQ ID NO: 2640068 - RNA, 22 nt, Human metapneumovirus
aaaagcugcagccuguuacagu

SEQ ID NO: 2640069 - RNA, 21 nt, Human metapneumovirus
ucaacacggucuuaaagagag

SEQ ID NO: 2640070 - RNA, 16 nt, Human metapneumovirus
aucaagugcagugagc

SEQ ID NO: 2640071 - RNA, 12 nt, Human metapneumovirus
ccaaugaagcag

SEQ ID NO: 2640072 - RNA, 23 nt, Human metapneumovirus
gcugcuauaagcagugaagcaga

SEQ ID NO: 2640073 - RNA, 15 nt, Human metapneumovirus
cacacaaaaaacaac

SEQ ID NO: 2640074 - RNA, 18 nt, Human metapneumovirus
aguacuagauuuagaaau

SEQ ID NO: 2640075 - RNA, 22 nt, Human metapneumovirus
uucuaguuauauaaaaaucaag

SEQ ID NO: 2640076 - RNA, 21 nt, Human metapneumovirus
cugugaaacaagaggagacca

SEQ ID NO: 2640077 - RNA, 17 nt, Human metapneumovirus
aaagcagcagaaaugau

SEQ ID NO: 2640078 - RNA, 19 nt, Human metapneumovirus
auuccuuacacagcagcug

SEQ ID NO: 2640079 - RNA, 16 nt, Human metapneumovirus
acucugguaaagugcu

SEQ ID NO: 2640080 - RNA, 16 nt, Human metapneumovirus
aacugggcaaaacaac

SEQ ID NO: 2640081 - RNA, 14 nt, Human metapneumovirus
aauauaaucaaaca

SEQ ID NO: 2640082 - RNA, 21 nt, Human metapneumovirus
caacacggucuuaaagagagc

SEQ ID NO: 2640083 - RNA, 16 nt, Human metapneumovirus
agagcucaacaaaauu

SEQ ID NO: 2640084 - RNA, 21 nt, Human metapneumovirus
aucaguuucaaucaaagagag

SEQ ID NO: 2640085 - RNA, 12 nt, Human metapneumovirus
aaauaaagcaag

SEQ ID NO: 2640086 - RNA, 17 nt, Human metapneumovirus
ccaagcucuaacacagg

SEQ ID NO: 2640087 - RNA, 17 nt, Human metapneumovirus
gaaucaauagaggagaa

SEQ ID NO: 2640088 - RNA, 14 nt, Human metapneumovirus
augggacaaguaaa

SEQ ID NO: 2640089 - RNA, 23 nt, Human metapneumovirus
cuguuccauuggcagcaacagag

SEQ ID NO: 2640090 - RNA, 16 nt, Human metapneumovirus
cucagccaaaucaguu

SEQ ID NO: 2640091 - RNA, 13 nt, Human metapneumovirus
aaucccaaaggca

SEQ ID NO: 2640092 - RNA, 16 nt, Human metapneumovirus
gaugucauuaaaagug

SEQ ID NO: 2640093 - RNA, 14 nt, Human metapneumovirus
aaaagaaacugaaa

SEQ ID NO: 2640094 - RNA, 17 nt, Human metapneumovirus
auuuacaccaaaugaac

SEQ ID NO: 2640095 - RNA, 15 nt, Human metapneumovirus
aauagacaacacugu

SEQ ID NO: 2640096 - RNA, 23 nt, Human metapneumovirus
cagaccaagcucuaacacaggcc

SEQ ID NO: 2640097 - RNA, 18 nt, Human metapneumovirus
uggaucaaucaaacagaa

SEQ ID NO: 2640098 - RNA, 16 nt, Human metapneumovirus
gucuuaaagagagcua

SEQ ID NO: 2640099 - RNA, 17 nt, Human metapneumovirus
ucacaguaacaaucacc

SEQ ID NO: 2640100 - RNA, 20 nt, Human metapneumovirus
gaagagucuaccgagaagaa

SEQ ID NO: 2640101 - RNA, 16 nt, Human metapneumovirus
cauauucaaaaagcuu

SEQ ID NO: 2640102 - RNA, 18 nt, Human metapneumovirus
gcuauaagcagugaagca

SEQ ID NO: 2640103 - RNA, 17 nt, Human metapneumovirus
cuguuaguucaacaauu

SEQ ID NO: 2640104 - RNA, 12 nt, Human metapneumovirus
cagcagcuguuc

SEQ ID NO: 2640105 - RNA, 18 nt, Human metapneumovirus
aaccaacaucaacaccag

SEQ ID NO: 2640106 - RNA, 19 nt, Human metapneumovirus
aucaauguugcugagcagu

SEQ ID NO: 2640107 - RNA, 22 nt, Human metapneumovirus
aucagcaggugcugaaaaugac

SEQ ID NO: 2640108 - RNA, 19 nt, Human metapneumovirus
agcccaaggugcagcaaug

SEQ ID NO: 2640109 - RNA, 16 nt, Human metapneumovirus
uaagaacacucaacau

SEQ ID NO: 2640110 - RNA, 22 nt, Human metapneumovirus
gacagugaaagcacuaaucaag

SEQ ID NO: 2640111 - RNA, 14 nt, Human metapneumovirus
gcgcaagcagaaca

SEQ ID NO: 2640112 - RNA, 17 nt, Human metapneumovirus
aauuagaccugaccaaa

SEQ ID NO: 2640113 - RNA, 17 nt, Human metapneumovirus
aauaucuuuggacuuaa

SEQ ID NO: 2640114 - RNA, 14 nt, Human metapneumovirus
cuacucuaaaucau

SEQ ID NO: 2640115 - RNA, 12 nt, Human metapneumovirus
cauuguuaauaa

SEQ ID NO: 2640116 - RNA, 13 nt, Human metapneumovirus
aguuauuuaaaaa

SEQ ID NO: 2640117 - RNA, 21 nt, Human metapneumovirus
gugucacaaacaauggcuuca

SEQ ID NO: 2640118 - RNA, 16 nt, Human metapneumovirus
gaaaucauuaagaaaa

SEQ ID NO: 2640119 - RNA, 19 nt, Human metapneumovirus
gcucucagauaaugaagaa

SEQ ID NO: 2640120 - RNA, 15 nt, Human metapneumovirus
agcaggugcugaaaa

SEQ ID NO: 2640121 - RNA, 14 nt, Human metapneumovirus
ugucacaaacaaug

SEQ ID NO: 2640122 - RNA, 16 nt, Human metapneumovirus
aaggcaacaacaccau

SEQ ID NO: 2640123 - RNA, 16 nt, Human metapneumovirus
acaaggacuuaaaaga

SEQ ID NO: 2640124 - RNA, 21 nt, Human metapneumovirus
aaccaccccaagaaaaaaacu

SEQ ID NO: 2640125 - RNA, 18 nt, Human metapneumovirus
ugaagacacaaaaaccaa

SEQ ID NO: 2640126 - RNA, 17 nt, Human metapneumovirus
aaugcccucaaaaagac

SEQ ID NO: 2640127 - RNA, 15 nt, Human metapneumovirus
aaucaacaaucucaa

SEQ ID NO: 2640128 - RNA, 19 nt, Human metapneumovirus
ucaagaacgggacaaauaa

SEQ ID NO: 2640129 - RNA, 13 nt, Human metapneumovirus
aguaacagcaauu

SEQ ID NO: 2640130 - RNA, 20 nt, Human metapneumovirus
acaaacucugcaauaaacag

SEQ ID NO: 2640131 - RNA, 12 nt, Human metapneumovirus
caagugcaguga

SEQ ID NO: 2640132 - RNA, 22 nt, Human metapneumovirus
ucaaucuuaaccuuugaagaaa

SEQ ID NO: 2640133 - RNA, 20 nt, Human metapneumovirus
aaacaaugggacaaguaaaa

SEQ ID NO: 2640134 - RNA, 22 nt, Human metapneumovirus
agcauauguccaggcugaaagc

SEQ ID NO: 2640135 - RNA, 12 nt, Human metapneumovirus
ggugcagcaaug

SEQ ID NO: 2640136 - RNA, 17 nt, Human metapneumovirus
caaggcuccgugcaaau

SEQ ID NO: 2640137 - RNA, 13 nt, Human metapneumovirus
ucacaaacaaugg

SEQ ID NO: 2640138 - RNA, 11 nt, Human metapneumovirus
aagugcaguga

SEQ ID NO: 2640139 - RNA, 17 nt, Human metapneumovirus
gaaagugaaguaacagc

SEQ ID NO: 2640140 - RNA, 13 nt, Human metapneumovirus
gccagagcuguuu

SEQ ID NO: 2640141 - RNA, 19 nt, Human metapneumovirus
aaaacugaaauaaagcaag

SEQ ID NO: 2640142 - RNA, 13 nt, Human metapneumovirus
caacaaaaacaag

SEQ ID NO: 2640143 - RNA, 17 nt, Human metapneumovirus
cuacauaauauaaucaa

SEQ ID NO: 2640144 - RNA, 20 nt, Human metapneumovirus
aagggaaagcagcagaaaug

SEQ ID NO: 2640145 - RNA, 23 nt, Human metapneumovirus
cuuagaagagucauguagcacua

SEQ ID NO: 2640146 - RNA, 20 nt, Human metapneumovirus
aaaucaguuggcaaaaaaac

SEQ ID NO: 2640147 - RNA, 21 nt, Human metapneumovirus
acuggcaagagaggagcaaau

SEQ ID NO: 2640148 - RNA, 16 nt, Human metapneumovirus
ucugaagacacaaaaa

SEQ ID NO: 2640149 - RNA, 17 nt, Human metapneumovirus
aacuggaauuugacaaa

SEQ ID NO: 2640150 - RNA, 23 nt, Human metapneumovirus
aagcagcuuugacccagucaagu

SEQ ID NO: 2640151 - RNA, 15 nt, Human metapneumovirus
aaauuugaagucaau

SEQ ID NO: 2640152 - RNA, 17 nt, Human metapneumovirus
agcagcuuugacccagu

SEQ ID NO: 2640153 - RNA, 14 nt, Human metapneumovirus
ugccaacaucugca

SEQ ID NO: 2640154 - RNA, 18 nt, Human metapneumovirus
ucucagauaaugaagaag

SEQ ID NO: 2640155 - RNA, 17 nt, Human metapneumovirus
aaguaacagcaauuaag

SEQ ID NO: 2640156 - RNA, 16 nt, Human metapneumovirus
ggcaacugcagugaga

SEQ ID NO: 2640157 - RNA, 17 nt, Human metapneumovirus
acagaauccuaagcagu

SEQ ID NO: 2640158 - RNA, 10 nt, Human metapneumovirus
auaauuaaag

SEQ ID NO: 2640159 - RNA, 13 nt, Human metapneumovirus
gcaagcaaucaaa

SEQ ID NO: 2640160 - RNA, 19 nt, Human metapneumovirus
aguuggcaaaaaaacacau

SEQ ID NO: 2640161 - RNA, 15 nt, Human metapneumovirus
aagacuuggagccau

SEQ ID NO: 2640162 - RNA, 17 nt, Human metapneumovirus
caguuggcaaaaaaaca

SEQ ID NO: 2640163 - RNA, 12 nt, Human metapneumovirus
auuaaaagugau

SEQ ID NO: 2640164 - RNA, 18 nt, Human metapneumovirus
ucaagaacgggacaaaua

SEQ ID NO: 2640165 - RNA, 16 nt, Human metapneumovirus
agcaccuccagagcug

SEQ ID NO: 2640166 - RNA, 23 nt, Human metapneumovirus
acaauggcuucauaccacauaau

SEQ ID NO: 2640167 - RNA, 20 nt, Human metapneumovirus
agaccuuaccuaaaaaauga

SEQ ID NO: 2640168 - RNA, 11 nt, Human metapneumovirus
aauaaaguaaa

SEQ ID NO: 2640169 - RNA, 18 nt, Human metapneumovirus
guggaucaaucaaacaga

SEQ ID NO: 2640170 - RNA, 13 nt, Human metapneumovirus
gucaaaaacugaa

SEQ ID NO: 2640171 - RNA, 21 nt, Human metapneumovirus
ugaaguccagauaacaaccaa

SEQ ID NO: 2640172 - RNA, 17 nt, Human metapneumovirus
aacaaccaugaaaccau

SEQ ID NO: 2640173 - RNA, 13 nt, Human metapneumovirus
uccuaagcagugc

SEQ ID NO: 2640174 - RNA, 21 nt, Human metapneumovirus
uuaaaaauauuuugaaaacaa

SEQ ID NO: 2640175 - RNA, 23 nt, Human metapneumovirus
ucauggaucccauugaagaagaa

SEQ ID NO: 2640176 - RNA, 22 nt, Human metapneumovirus
aguuuucgagagcauugagaac

SEQ ID NO: 2640177 - RNA, 21 nt, Human metapneumovirus
uauuauaggagaaaaagugaa

SEQ ID NO: 2640178 - RNA, 23 nt, Human metapneumovirus
aggcauuccuuacacagcagcug

SEQ ID NO: 2640179 - RNA, 14 nt, Human metapneumovirus
aagacacaaaaacc

SEQ ID NO: 2640180 - RNA, 19 nt, Human metapneumovirus
agucaaugcgacuguagca

SEQ ID NO: 2640181 - RNA, 16 nt, Human metapneumovirus
gaucaaucaaacagaa

SEQ ID NO: 2640182 - RNA, 12 nt, Human metapneumovirus
uaguucaacaau

SEQ ID NO: 2640183 - RNA, 21 nt, Human metapneumovirus
uuucugcugaucaacuggcaa

SEQ ID NO: 2640184 - RNA, 16 nt, Human metapneumovirus
auggaucuagaaaaga

SEQ ID NO: 2640185 - RNA, 12 nt, Human metapneumovirus
gcaaaacaacac

SEQ ID NO: 2640186 - RNA, 17 nt, Human metapneumovirus
cucagccaaaucaguug

SEQ ID NO: 2640187 - RNA, 15 nt, Human metapneumovirus
uucccugaaggaaaa

SEQ ID NO: 2640188 - RNA, 21 nt, Human metapneumovirus
caucagcccaaggugcagcaa

SEQ ID NO: 2640189 - RNA, 16 nt, Human metapneumovirus
agaacgggacaaauaa

SEQ ID NO: 2640190 - RNA, 15 nt, Human metapneumovirus
acaccaccagcagug

SEQ ID NO: 2640191 - RNA, 14 nt, Human metapneumovirus
acugccaaucuuug

SEQ ID NO: 2640192 - RNA, 18 nt, Human metapneumovirus
aagaucaauucaauguug

SEQ ID NO: 2640193 - RNA, 20 nt, Human metapneumovirus
gauacuucaucauuaagcau

SEQ ID NO: 2640194 - RNA, 19 nt, Human metapneumovirus
ucgacacacacacaacacc

SEQ ID NO: 2640195 - RNA, 17 nt, Human metapneumovirus
gaauaacaccagcaaua

SEQ ID NO: 2640196 - RNA, 22 nt, Human metapneumovirus
cugaucaauuaacaaaauuaaa

SEQ ID NO: 2640197 - RNA, 14 nt, Human metapneumovirus
caccuccagagcug

SEQ ID NO: 2640198 - RNA, 12 nt, Human metapneumovirus
uguagagaaccu

SEQ ID NO: 2640199 - RNA, 18 nt, Human metapneumovirus
aaaagcaaaagagcucaa

SEQ ID NO: 2640200 - RNA, 23 nt, Human metapneumovirus
accaugucuuuugcgacacagca

SEQ ID NO: 2640201 - RNA, 11 nt, Human metapneumovirus
aacugaacaaa

SEQ ID NO: 2640202 - RNA, 20 nt, Human metapneumovirus
uccagaaaucauuaagaaaa

SEQ ID NO: 2640203 - RNA, 13 nt, Human metapneumovirus
cugaccaaaagug

SEQ ID NO: 2640204 - RNA, 15 nt, Human metapneumovirus
ugcuauaagcaguga

SEQ ID NO: 2640205 - RNA, 23 nt, Human metapneumovirus
ucaacacggucuuaaagagagcu

SEQ ID NO: 2640206 - RNA, 17 nt, Human metapneumovirus
cuagagauaacaaacua

SEQ ID NO: 2640207 - RNA, 22 nt, Human metapneumovirus
ugaaaaagacugugaaacaaga

SEQ ID NO: 2640208 - RNA, 19 nt, Human metapneumovirus
caaucuauuauaggagaaa

SEQ ID NO: 2640209 - RNA, 20 nt, Human metapneumovirus
caacaugccaacaucugcag

SEQ ID NO: 2640210 - RNA, 17 nt, Human metapneumovirus
gcuugaaagugaaguaa

SEQ ID NO: 2640211 - RNA, 15 nt, Human metapneumovirus
gugggacaagucaaa

SEQ ID NO: 2640212 - RNA, 14 nt, Human metapneumovirus
acaccaccagcagu

SEQ ID NO: 2640213 - RNA, 13 nt, Human metapneumovirus
gcaacugcaguga

SEQ ID NO: 2640214 - RNA, 19 nt, Human metapneumovirus
auuagaugucauuaaaagu

SEQ ID NO: 2640215 - RNA, 20 nt, Human metapneumovirus
acucuaaaucaugauaucac

SEQ ID NO: 2640216 - RNA, 20 nt, Human metapneumovirus
acuccaacgguccccacaga

SEQ ID NO: 2640217 - RNA, 18 nt, Human metapneumovirus
agugcacuaagagagcuc

SEQ ID NO: 2640218 - RNA, 21 nt, Human metapneumovirus
gucagcuacuguugaagcugc

SEQ ID NO: 2640219 - RNA, 16 nt, Human metapneumovirus
guaauaauuaauugcu

SEQ ID NO: 2640220 - RNA, 16 nt, Human metapneumovirus
ggaauaacaccagcaa

SEQ ID NO: 2640221 - RNA, 19 nt, Human metapneumovirus
cugcugaucaacuggcaag

SEQ ID NO: 2640222 - RNA, 21 nt, Human metapneumovirus
ccaaaugaaaaagacugugaa

SEQ ID NO: 2640223 - RNA, 15 nt, Human metapneumovirus
ucacagucugugaag

SEQ ID NO: 2640224 - RNA, 11 nt, Human metapneumovirus
acagaaaucaa

SEQ ID NO: 2640225 - RNA, 21 nt, Human metapneumovirus
cuuuugcgacacagcagcagg

SEQ ID NO: 2640226 - RNA, 14 nt, Human metapneumovirus
aacacaccaccagc

SEQ ID NO: 2640227 - RNA, 11 nt, Human metapneumovirus
augaaaaagac

SEQ ID NO: 2640228 - RNA, 14 nt, Human metapneumovirus
acagucuacauaau

SEQ ID NO: 2640229 - RNA, 15 nt, Human metapneumovirus
agagaagauaggaca

SEQ ID NO: 2640230 - RNA, 20 nt, Human metapneumovirus
gaaggccagugucaagcagc

SEQ ID NO: 2640231 - RNA, 22 nt, Human metapneumovirus
cacaggagcaccuccagagcug

SEQ ID NO: 2640232 - RNA, 13 nt, Human metapneumovirus
aucagacaaaaag

SEQ ID NO: 2640233 - RNA, 17 nt, Human metapneumovirus
gugcacuaagagagcuc

SEQ ID NO: 2640234 - RNA, 18 nt, Human metapneumovirus
uuagggcuauuaagaaca

SEQ ID NO: 2640235 - RNA, 14 nt, Human metapneumovirus
cauugaagaagaag

SEQ ID NO: 2640236 - RNA, 20 nt, Human metapneumovirus
aguccuaccuaguagacacc

SEQ ID NO: 2640237 - RNA, 17 nt, Human metapneumovirus
acagcauccaacucaac

SEQ ID NO: 2640238 - RNA, 17 nt, Human metapneumovirus
ccuaagcagugcagaga

SEQ ID NO: 2640239 - RNA, 14 nt, Human metapneumovirus
aaguggaaaacaau

SEQ ID NO: 2640240 - RNA, 17 nt, Human metapneumovirus
cauggguaaugaagcag

SEQ ID NO: 2640241 - RNA, 14 nt, Human metapneumovirus
augguaagaagaaa

SEQ ID NO: 2640242 - RNA, 14 nt, Human metapneumovirus
ccugcagaaaagaa

SEQ ID NO: 2640243 - RNA, 20 nt, Human metapneumovirus
accaaaacugaaauaaagca

SEQ ID NO: 2640244 - RNA, 14 nt, Human metapneumovirus
aguuggaaaaagau

SEQ ID NO: 2640245 - RNA, 16 nt, Human metapneumovirus
ccucaaaaagaccaau

SEQ ID NO: 2640246 - RNA, 17 nt, Human metapneumovirus
ccaagacgcagacacag

SEQ ID NO: 2640247 - RNA, 21 nt, Human metapneumovirus
cagaauccuaagcagugcaga

SEQ ID NO: 2640248 - RNA, 20 nt, Human metapneumovirus
acagcauguuauaaaaggaa

SEQ ID NO: 2640249 - RNA, 21 nt, Human metapneumovirus
uuagagaaugcugcugaauua

SEQ ID NO: 2640250 - RNA, 18 nt, Human metapneumovirus
uauaaaaguggaaaacaa

SEQ ID NO: 2640251 - RNA, 22 nt, Human metapneumovirus
aaugagucaacgaucaaaaaua

SEQ ID NO: 2640252 - RNA, 17 nt, Human metapneumovirus
ccaaagcauaacaaaag

SEQ ID NO: 2640253 - RNA, 13 nt, Human metapneumovirus
uaagaaaaccagg

SEQ ID NO: 2640254 - RNA, 17 nt, Human metapneumovirus
gaaggcgaacagcaugu

SEQ ID NO: 2640255 - RNA, 18 nt, Human metapneumovirus
uuaaaaaguaaaaaacaa

SEQ ID NO: 2640256 - RNA, 19 nt, Human metapneumovirus
cgacacagcagcaggaauc

SEQ ID NO: 2640257 - RNA, 17 nt, Human metapneumovirus
auuccuuacacagcagc

SEQ ID NO: 2640258 - RNA, 20 nt, Human metapneumovirus
uacacuggagguaggcgaug

SEQ ID NO: 2640259 - RNA, 19 nt, Human metapneumovirus
aaaaugacucuucauaugc

SEQ ID NO: 2640260 - RNA, 21 nt, Human papillomavirus type 11
uacaaauugcugcagcaacaa

SEQ ID NO: 2640261 - RNA, 14 nt, Human papillomavirus type 11
ggaauguguaugua

SEQ ID NO: 2640262 - RNA, 16 nt, Human papillomavirus type 11
acuggggggccagcag

SEQ ID NO: 2640263 - RNA, 20 nt, Human papillomavirus type 11
uaccaccauuaacuguguca

SEQ ID NO: 2640264 - RNA, 20 nt, Human papillomavirus type 11
acaccuguauauauguauau

SEQ ID NO: 2640265 - RNA, 13 nt, Human papillomavirus type 11
auuuguuugaauu

SEQ ID NO: 2640266 - RNA, 21 nt, Human papillomavirus type 11
ccaacauauuuuaucaugcca

SEQ ID NO: 2640267 - RNA, 23 nt, Human papillomavirus type 11
gaugaggaagaggagguggagga

SEQ ID NO: 2640268 - RNA, 18 nt, Human papillomavirus type 11
caauucuuuuuacuaaca

SEQ ID NO: 2640269 - RNA, 22 nt, Human papillomavirus type 11
cuuaauugaggagucugcuauu

SEQ ID NO: 2640270 - RNA, 16 nt, Human papillomavirus type 11
uacaucugugcuggua

SEQ ID NO: 2640271 - RNA, 17 nt, Human papillomavirus type 11
uauuauguguguccugu

SEQ ID NO: 2640272 - RNA, 23 nt, Human papillomavirus type 11
uacuuggauuguuguuacuacau

SEQ ID NO: 2640273 - RNA, 13 nt, Human papillomavirus type 11
auguuucuuguau

SEQ ID NO: 2640274 - RNA, 18 nt, Human papillomavirus type 11
auuuuccugccuuuuaua

SEQ ID NO: 2640275 - RNA, 20 nt, Human papillomavirus type 11
uuuucgguugcccuuacaua

SEQ ID NO: 2640276 - RNA, 16 nt, Human papillomavirus type 11
uuguuauugcauuugc

SEQ ID NO: 2640277 - RNA, 21 nt, Human papillomavirus type 11
auauauuuguggaauguguau

SEQ ID NO: 2640278 - RNA, 13 nt, Human papillomavirus type 11
accuguugcugug

SEQ ID NO: 2640279 - RNA, 11 nt, Human papillomavirus type 11
auguauguuuu

SEQ ID NO: 2640280 - RNA, 22 nt, Human papillomavirus type 11
gugauaauggagauuaugugua

SEQ ID NO: 2640281 - RNA, 23 nt, Human papillomavirus type 11
gcacguccgccagugcuugugga

SEQ ID NO: 2640282 - RNA, 19 nt, Human papillomavirus type 11
agggguuuuuuuugguggg

SEQ ID NO: 2640283 - RNA, 22 nt, Human papillomavirus type 11
acauuaugcauuggaaaugcau

SEQ ID NO: 2640284 - RNA, 23 nt, Human papillomavirus type 11
gguacacaaauaucagaagauga

SEQ ID NO: 2640285 - RNA, 11 nt, Human papillomavirus type 11
uuuauauacac

SEQ ID NO: 2640286 - RNA, 20 nt, Human papillomavirus type 11
ugauuuuguaguauauacau

SEQ ID NO: 2640287 - RNA, 13 nt, Human papillomavirus type 11
uuagauauagacu

SEQ ID NO: 2640288 - RNA, 18 nt, Human papillomavirus type 11
cuuuaacacaacauuacc

SEQ ID NO: 2640289 - RNA, 18 nt, Human papillomavirus type 11
guauauacaucugugcug

SEQ ID NO: 2640290 - RNA, 23 nt, Human papillomavirus type 11
cugcagcaacaacuacaacauug

SEQ ID NO: 2640291 - RNA, 14 nt, Human papillomavirus type 11
uguaacauuaacau

SEQ ID NO: 2640292 - RNA, 12 nt, Human papillomavirus type 11
uauacacauaua

SEQ ID NO: 2640293 - RNA, 14 nt, Human papillomavirus type 11
caccauuaacugug

SEQ ID NO: 2640294 - RNA, 13 nt, Human papillomavirus type 11
uguugccuucaua

SEQ ID NO: 2640295 - RNA, 16 nt, Human papillomavirus type 11
cugccuuuuauauaca

SEQ ID NO: 2640296 - RNA, 21 nt, Human papillomavirus type 11
uuguuucugugguuguuuacu

SEQ ID NO: 2640297 - RNA, 14 nt, Human papillomavirus type 11
auacacauauacau

SEQ ID NO: 2640298 - RNA, 14 nt, Human papillomavirus type 11
cagccuccugaccc

SEQ ID NO: 2640299 - RNA, 14 nt, Human papillomavirus type 11
uuauguauguuugu

SEQ ID NO: 2640300 - RNA, 14 nt, Human papillomavirus type 11
gcauuggaaaugca

SEQ ID NO: 2640301 - RNA, 15 nt, Human papillomavirus type 11
cugugugugugcuau

SEQ ID NO: 2640302 - RNA, 12 nt, Human papillomavirus type 11
uauuuuccugcc

SEQ ID NO: 2640303 - RNA, 16 nt, Human papillomavirus type 11
auucuuaguauuguac

SEQ ID NO: 2640304 - RNA, 13 nt, Human papillomavirus type 11
uuguaguguguau

SEQ ID NO: 2640305 - RNA, 14 nt, Human papillomavirus type 11
uauuguacuuauaa

SEQ ID NO: 2640306 - RNA, 16 nt, Human papillomavirus type 11
ccuguugcuguggaug

SEQ ID NO: 2640307 - RNA, 15 nt, Human papillomavirus type 11
auuccaauuguuuaa

SEQ ID NO: 2640308 - RNA, 17 nt, Human papillomavirus type 11
uacauaacauacgugua

SEQ ID NO: 2640309 - RNA, 14 nt, Human papillomavirus type 11
gaauguguauguau

SEQ ID NO: 2640310 - RNA, 16 nt, Human papillomavirus type 11
acagcucagaagauga

SEQ ID NO: 2640311 - RNA, 17 nt, Human papillomavirus type 11
uuauuaaugcuggugca

SEQ ID NO: 2640312 - RNA, 13 nt, Human papillomavirus type 11
ccgcaauacuacu

SEQ ID NO: 2640313 - RNA, 20 nt, Human papillomavirus type 11
uauguuuuugugcaauaaac

SEQ ID NO: 2640314 - RNA, 18 nt, Human papillomavirus type 11
guaccaccauuaacugug

SEQ ID NO: 2640315 - RNA, 12 nt, Human papillomavirus type 11
aagguaaagcga

SEQ ID NO: 2640316 - RNA, 15 nt, Human papillomavirus type 11
ucugauuuuguagua

SEQ ID NO: 2640317 - RNA, 21 nt, Human papillomavirus type 11
auaucaauauagaguguuuaa

SEQ ID NO: 2640318 - RNA, 16 nt, Human papillomavirus type 11
cguuuguguugccuuc

SEQ ID NO: 2640319 - RNA, 15 nt, Human papillomavirus type 11
uggaagcacaggcau

SEQ ID NO: 2640320 - RNA, 18 nt, Human papillomavirus type 11
uguauuacuacacaaagc

SEQ ID NO: 2640321 - RNA, 14 nt, Human papillomavirus type 11
uauguuguuaugua

SEQ ID NO: 2640322 - RNA, 21 nt, Human papillomavirus type 11
gaggggucgggguguacagga

SEQ ID NO: 2640323 - RNA, 14 nt, Human papillomavirus type 11
aauguguauguaug

SEQ ID NO: 2640324 - RNA, 15 nt, Human papillomavirus type 11
auugaugacaggcau

SEQ ID NO: 2640325 - RNA, 23 nt, Human papillomavirus type 11
cuacaagaccuuuugcugggcac

SEQ ID NO: 2640326 - RNA, 15 nt, Human papillomavirus type 11
aauuuuuaaacagug

SEQ ID NO: 2640327 - RNA, 22 nt, Human papillomavirus type 11
uacuacuguggauuauguguau

SEQ ID NO: 2640328 - RNA, 21 nt, Human papillomavirus type 11
uacuguggauuauguguauau

SEQ ID NO: 2640329 - RNA, 20 nt, Human papillomavirus type 11
aguggguaugacauggugga

SEQ ID NO: 2640330 - RNA, 16 nt, Human papillomavirus type 11
cauuaugcgacugugc

SEQ ID NO: 2640331 - RNA, 22 nt, Human papillomavirus type 11
cacauuaugcauuggaaaugca

SEQ ID NO: 2640332 - RNA, 20 nt, Human papillomavirus type 11
agcucagaagaugaggugga

SEQ ID NO: 2640333 - RNA, 15 nt, Human papillomavirus type 11
uaaaucaaaccgcaa

SEQ ID NO: 2640334 - RNA, 11 nt, Human papillomavirus type 11
cugcaggacaa

SEQ ID NO: 2640335 - RNA, 15 nt, Human papillomavirus type 11
uuguaguauauacau

SEQ ID NO: 2640336 - RNA, 16 nt, Human papillomavirus type 11
accauuaacuguguca

SEQ ID NO: 2640337 - RNA, 16 nt, Human papillomavirus type 11
aauaccacccaccauu

SEQ ID NO: 2640338 - RNA, 13 nt, Human papillomavirus type 11
ggguguacaggau

SEQ ID NO: 2640339 - RNA, 12 nt, Human papillomavirus type 11
agcacaggcauu

SEQ ID NO: 2640340 - RNA, 15 nt, Human papillomavirus type 11
gguguacaggauggu

SEQ ID NO: 2640341 - RNA, 23 nt, Human papillomavirus type 11
ucccaagccugcuauuacugggg

SEQ ID NO: 2640342 - RNA, 17 nt, Human papillomavirus type 11
uuguuuacugcauuugu

SEQ ID NO: 2640343 - RNA, 12 nt, Human papillomavirus type 11
caugaacuagag

SEQ ID NO: 2640344 - RNA, 19 nt, Human papillomavirus type 11
gauacaugguuguuucugu

SEQ ID NO: 2640345 - RNA, 16 nt, Human papillomavirus type 11
guuacacccagugacu

SEQ ID NO: 2640346 - RNA, 18 nt, Human papillomavirus type 11
gaugagguggacaaggug

SEQ ID NO: 2640347 - RNA, 19 nt, Human papillomavirus type 11
acgcaacaauaauggugau

SEQ ID NO: 2640348 - RNA, 15 nt, Human papillomavirus type 11
caauuguaacauuaa

SEQ ID NO: 2640349 - RNA, 23 nt, Human papillomavirus type 11
cagaucaaauauuaaaaugggga

SEQ ID NO: 2640350 - RNA, 18 nt, Human papillomavirus type 11
cagagacuaaaggacaua

SEQ ID NO: 2640351 - RNA, 17 nt, Human papillomavirus type 11
aaauacugaccuguugc

SEQ ID NO: 2640352 - RNA, 18 nt, Human papillomavirus type 11
aguugaacauacuacuau

SEQ ID NO: 2640353 - RNA, 21 nt, Human papillomavirus type 11
cuguacaaauugcugcagcaa

SEQ ID NO: 2640354 - RNA, 15 nt, Human papillomavirus type 11
cugcuauuacugggg

SEQ ID NO: 2640355 - RNA, 14 nt, Human papillomavirus type 11
cuuagcaaaaacuc

SEQ ID NO: 2640356 - RNA, 17 nt, Human papillomavirus type 11
cuauaucaaacaugcaa

SEQ ID NO: 2640357 - RNA, 19 nt, Human papillomavirus type 11
uuaccaaauacugaccugu

SEQ ID NO: 2640358 - RNA, 16 nt, Human papillomavirus type 11
gacugguuguggagug

SEQ ID NO: 2640359 - RNA, 22 nt, Human papillomavirus type 11
uguguacauaacauacguguau

SEQ ID NO: 2640360 - RNA, 19 nt, Human papillomavirus type 11
auguaauuccuaaaguuga

SEQ ID NO: 2640361 - RNA, 18 nt, Human papillomavirus type 11
uuauuauguguguccugu

SEQ ID NO: 2640362 - RNA, 14 nt, Human papillomavirus type 11
uaguguguguauau

SEQ ID NO: 2640363 - RNA, 14 nt, Human papillomavirus type 11
ggaagcacaggcau

SEQ ID NO: 2640364 - RNA, 22 nt, Human papillomavirus type 11
uaacacugugugugugcuauuu

SEQ ID NO: 2640365 - RNA, 20 nt, Human papillomavirus type 11
aacgucagcaauuuuuaaac

SEQ ID NO: 2640366 - RNA, 11 nt, Human papillomavirus type 11
gacccuguagg

SEQ ID NO: 2640367 - RNA, 19 nt, Human papillomavirus type 11
ugauacaugguuguuucug

SEQ ID NO: 2640368 - RNA, 15 nt, Human papillomavirus type 11
gcaguccauauguaa

SEQ ID NO: 2640369 - RNA, 23 nt, Human papillomavirus type 11
cuuuaaaaaacagggaaauacug

SEQ ID NO: 2640370 - RNA, 13 nt, Human papillomavirus type 11
auauguguacaua

SEQ ID NO: 2640371 - RNA, 23 nt, Human papillomavirus type 11
ccauuaaacuuacaacacagcca

SEQ ID NO: 2640372 - RNA, 16 nt, Human papillomavirus type 11
gccauaguagagcaca

SEQ ID NO: 2640373 - RNA, 20 nt, Human papillomavirus type 11
gcuaaugcaguagaaaguga

SEQ ID NO: 2640374 - RNA, 15 nt, Human papillomavirus type 11
cauaaugcuauugaa

SEQ ID NO: 2640375 - RNA, 15 nt, Human papillomavirus type 11
cuccucccaacccug

SEQ ID NO: 2640376 - RNA, 20 nt, Human papillomavirus type 11
gggguuuaugucauuacauu

SEQ ID NO: 2640377 - RNA, 22 nt, Human papillomavirus type 11
acuaaucccauauguugugugc

SEQ ID NO: 2640378 - RNA, 15 nt, Human papillomavirus type 11
auauguuucuuguau

SEQ ID NO: 2640379 - RNA, 17 nt, Human papillomavirus type 11
ccugcagccuccugacc

SEQ ID NO: 2640380 - RNA, 17 nt, Human papillomavirus type 11
auuacaccuguauauau

SEQ ID NO: 2640381 - RNA, 16 nt, Human papillomavirus type 11
uucaucccuguuugac

SEQ ID NO: 2640382 - RNA, 15 nt, Human papillomavirus type 11
uuguguauaugugua

SEQ ID NO: 2640383 - RNA, 15 nt, Human papillomavirus type 11
gcucagaagaugagg

SEQ ID NO: 2640384 - RNA, 23 nt, Human papillomavirus type 11
ugguacaggggcugguaguggcg

SEQ ID NO: 2640385 - RNA, 12 nt, Human papillomavirus type 11
accuuuugcugg

SEQ ID NO: 2640386 - RNA, 13 nt, Human papillomavirus type 11
gaggagucugcua

SEQ ID NO: 2640387 - RNA, 18 nt, Human papillomavirus type 11
uacuauugcagaucaaau

SEQ ID NO: 2640388 - RNA, 20 nt, Human papillomavirus type 11
cauauauaccugcaggacaa

SEQ ID NO: 2640389 - RNA, 18 nt, Human papillomavirus type 11
aaccauaacaaggauggc

SEQ ID NO: 2640390 - RNA, 20 nt, Human papillomavirus type 11
uaaaaaugcaauuguaacau

SEQ ID NO: 2640391 - RNA, 15 nt, Human papillomavirus type 11
uuguggaauguguau

SEQ ID NO: 2640392 - RNA, 14 nt, Human papillomavirus type 11
uguagcuguacuug

SEQ ID NO: 2640393 - RNA, 23 nt, Human papillomavirus type 11
gaagaggagguggaggacagugg

SEQ ID NO: 2640394 - RNA, 16 nt, Human papillomavirus type 11
guaacauuaacauaua

SEQ ID NO: 2640395 - RNA, 14 nt, Human papillomavirus type 11
guguauauguuucu

SEQ ID NO: 2640396 - RNA, 16 nt, Human papillomavirus type 11
gggucgggguguacag

SEQ ID NO: 2640397 - RNA, 16 nt, Human papillomavirus type 11
ugaauuagcaucuuca

SEQ ID NO: 2640398 - RNA, 21 nt, Human papillomavirus type 11
acuuuauugaugacaggcaua

SEQ ID NO: 2640399 - RNA, 14 nt, Human papillomavirus type 11
agaaagugagauaa

SEQ ID NO: 2640400 - RNA, 12 nt, Human papillomavirus type 11
uuggaaaugcau

SEQ ID NO: 2640401 - RNA, 20 nt, Human papillomavirus type 11
uauugaaaugcaaaugcauu

SEQ ID NO: 2640402 - RNA, 19 nt, Human papillomavirus type 11
uuaaccugucacuuaaaug

SEQ ID NO: 2640403 - RNA, 20 nt, Human papillomavirus type 11
uuucugugguuguuuacugc

SEQ ID NO: 2640404 - RNA, 14 nt, Human papillomavirus type 11
aaugcaauuguaac

SEQ ID NO: 2640405 - RNA, 16 nt, Human papillomavirus type 11
augugguauggacaca

SEQ ID NO: 2640406 - RNA, 17 nt, Human papillomavirus type 11
ucuuguauuguguauau

SEQ ID NO: 2640407 - RNA, 15 nt, Human papillomavirus type 11
auugcauuugcagua

SEQ ID NO: 2640408 - RNA, 22 nt, Human papillomavirus type 11
uauguuucuuguauuguguaua

SEQ ID NO: 2640409 - RNA, 22 nt, Human papillomavirus type 11
caaaacaaaugggccugagcca

SEQ ID NO: 2640410 - RNA, 19 nt, Human papillomavirus type 11
auaguacuagaccugcagc

SEQ ID NO: 2640411 - RNA, 16 nt, Human papillomavirus type 11
aggagguggaggacag

SEQ ID NO: 2640412 - RNA, 15 nt, Human papillomavirus type 11
cagcaacguccgacu

SEQ ID NO: 2640413 - RNA, 15 nt, Human papillomavirus type 11
gaccuuuugcugggc

SEQ ID NO: 2640414 - RNA, 20 nt, Human papillomavirus type 11
cuguugcuguggaugugaca

SEQ ID NO: 2640415 - RNA, 21 nt, Human papillomavirus type 11
caugguacugaaaaaacuaaa

SEQ ID NO: 2640416 - RNA, 17 nt, Human papillomavirus type 11
aauacugaccuguugcu

SEQ ID NO: 2640417 - RNA, 14 nt, Human papillomavirus type 11
uauuauauuauaua

SEQ ID NO: 2640418 - RNA, 17 nt, Human papillomavirus type 11
ugcauuggaaaugcaua

SEQ ID NO: 2640419 - RNA, 18 nt, Human papillomavirus type 11
cauuguuuaauaggcagg

SEQ ID NO: 2640420 - RNA, 20 nt, Human papillomavirus type 11
acaugguuguuucugugguu

SEQ ID NO: 2640421 - RNA, 20 nt, Human papillomavirus type 11
cuguggaagcacaggcauug

SEQ ID NO: 2640422 - RNA, 19 nt, Human papillomavirus type 11
gccaaaaaagguaaagcga

SEQ ID NO: 2640423 - RNA, 14 nt, Human papillomavirus type 11
ugaugacaggcaua

SEQ ID NO: 2640424 - RNA, 14 nt, Human papillomavirus type 11
aauuguuuaaaaug

SEQ ID NO: 2640425 - RNA, 19 nt, Human papillomavirus type 11
uaaaguugaacauacuacu

SEQ ID NO: 2640426 - RNA, 15 nt, Human papillomavirus type 11
uguguauauguguau

SEQ ID NO: 2640427 - RNA, 13 nt, Human papillomavirus type 11
uggauuaugugua

SEQ ID NO: 2640428 - RNA, 21 nt, Human papillomavirus type 11
uauauauguauauguguacau

SEQ ID NO: 2640429 - RNA, 16 nt, Human papillomavirus type 11
ugcuaaguguaaauca

SEQ ID NO: 2640430 - RNA, 20 nt, Human papillomavirus type 11
cuguuguuauugcauuugca

SEQ ID NO: 2640431 - RNA, 22 nt, Human papillomavirus type 11
uauguuguuguaguguguauau

SEQ ID NO: 2640432 - RNA, 13 nt, Human papillomavirus type 11
uaacaaggauggc

SEQ ID NO: 2640433 - RNA, 17 nt, Human papillomavirus type 11
uuuuuaaacaguguaaa

SEQ ID NO: 2640434 - RNA, 14 nt, Human papillomavirus type 11
auauguguacauaa

SEQ ID NO: 2640435 - RNA, 21 nt, Human papillomavirus type 11
cugcuauuauuaaugcuggug

SEQ ID NO: 2640436 - RNA, 13 nt, Human papillomavirus type 11
uccaauuguuuaa

SEQ ID NO: 2640437 - RNA, 18 nt, Human papillomavirus type 11
cuguuguuauugcauuug

SEQ ID NO: 2640438 - RNA, 14 nt, Human papillomavirus type 11
uuuguguugccuuc

SEQ ID NO: 2640439 - RNA, 15 nt, Human papillomavirus type 11
accuagggcacgcag

SEQ ID NO: 2640440 - RNA, 18 nt, Human papillomavirus type 11
acaccaguuaugaaaugu

SEQ ID NO: 2640441 - RNA, 22 nt, Human papillomavirus type 11
guacaugucccccagauguaau

SEQ ID NO: 2640442 - RNA, 16 nt, Human papillomavirus type 11
aggagucugcuauuau

SEQ ID NO: 2640443 - RNA, 16 nt, Human papillomavirus type 11
uauacacauauacauu

SEQ ID NO: 2640444 - RNA, 17 nt, Human papillomavirus type 11
auguuguuauguauguu

SEQ ID NO: 2640445 - RNA, 16 nt, Human papillomavirus type 11
uuguguauauguguau

SEQ ID NO: 2640446 - RNA, 16 nt, Human papillomavirus type 11
ggcgugcacaggguug

SEQ ID NO: 2640447 - RNA, 16 nt, Human papillomavirus type 11
cugcuauuacuggggg

SEQ ID NO: 2640448 - RNA, 22 nt, Human papillomavirus type 11
uacuaacacugugugugugcua

SEQ ID NO: 2640449 - RNA, 21 nt, Human papillomavirus type 11
uguauauguguauauguuugu

SEQ ID NO: 2640450 - RNA, 22 nt, Human papillomavirus type 11
aaguaguaccaccauuaacugu

SEQ ID NO: 2640451 - RNA, 14 nt, Human papillomavirus type 11
cucagaagaugagg

SEQ ID NO: 2640452 - RNA, 10 nt, Human papillomavirus type 11
uauauguuuc

SEQ ID NO: 2640453 - RNA, 19 nt, Human papillomavirus type 11
accugucacuuaaaugaug

SEQ ID NO: 2640454 - RNA, 22 nt, Human papillomavirus type 11
aguaugguguggaaccuuggac

SEQ ID NO: 2640455 - RNA, 22 nt, Human papillomavirus type 11
guggaauguguauguauguuuu

SEQ ID NO: 2640456 - RNA, 13 nt, Human papillomavirus type 11
uuguuauguaugu

SEQ ID NO: 2640457 - RNA, 14 nt, Human papillomavirus type 11
agugccuguacaaa

SEQ ID NO: 2640458 - RNA, 20 nt, Human papillomavirus type 11
caucugugcugguacuaaca

SEQ ID NO: 2640459 - RNA, 15 nt, Human papillomavirus type 11
ugugcuauuuuccug

SEQ ID NO: 2640460 - RNA, 16 nt, Human papillomavirus type 11
gauauugccuguuguu

SEQ ID NO: 2640461 - RNA, 22 nt, Human papillomavirus type 11
auuaauaucugauuuuguagua

SEQ ID NO: 2640462 - RNA, 11 nt, Human papillomavirus type 11
auguauguuug

SEQ ID NO: 2640463 - RNA, 23 nt, Human papillomavirus type 11
ugguagaagccauaguagagcac

SEQ ID NO: 2640464 - RNA, 14 nt, Human papillomavirus type 11
cacauuaugcauug

SEQ ID NO: 2640465 - RNA, 23 nt, Human papillomavirus type 11
caaaacaguuguaccaaaggugu

SEQ ID NO: 2640466 - RNA, 21 nt, Human papillomavirus type 11
auggugauguuaaccugucac

SEQ ID NO: 2640467 - RNA, 22 nt, Human papillomavirus type 11
ugcaggguauauacccuuggga

SEQ ID NO: 2640468 - RNA, 17 nt, Human papillomavirus type 11
ugaggcaccacauaaaa

SEQ ID NO: 2640469 - RNA, 14 nt, Human papillomavirus type 11
uaugucauuacauu

SEQ ID NO: 2640470 - RNA, 14 nt, Human papillomavirus type 11
guuguuauugcauu

SEQ ID NO: 2640471 - RNA, 18 nt, Human papillomavirus type 11
gccauuaaacuuacaaca

SEQ ID NO: 2640472 - RNA, 14 nt, Human papillomavirus type 11
gaagaggaggugga

SEQ ID NO: 2640473 - RNA, 17 nt, Human papillomavirus type 11
gacggcuguuugaaaca

SEQ ID NO: 2640474 - RNA, 22 nt, Human papillomavirus type 11
uccuaaaguugaacauacuacu

SEQ ID NO: 2640475 - RNA, 13 nt, Human papillomavirus type 11
uauguugugugcc

SEQ ID NO: 2640476 - RNA, 22 nt, Human papillomavirus type 11
acagcaacguccgacugguugu

SEQ ID NO: 2640477 - RNA, 22 nt, Human papillomavirus type 11
cgucagcaauuuuuaaacagug

SEQ ID NO: 2640478 - RNA, 18 nt, Human papillomavirus type 11
auuacagggcuguacaug

SEQ ID NO: 2640479 - RNA, 18 nt, Human papillomavirus type 11
gugguuguuuacugcauu

SEQ ID NO: 2640480 - RNA, 22 nt, Human papillomavirus type 11
aaaacgaaaguauuuaggcagu

SEQ ID NO: 2640481 - RNA, 21 nt, Human papillomavirus type 11
agcucagaagaugagguggac

SEQ ID NO: 2640482 - RNA, 21 nt, Human papillomavirus type 11
guuuaaaauguuuuagauaua

SEQ ID NO: 2640483 - RNA, 17 nt, Human papillomavirus type 11
acaccacccaaacggug

SEQ ID NO: 2640484 - RNA, 15 nt, Human papillomavirus type 11
cacguccgccagugc

SEQ ID NO: 2640485 - RNA, 20 nt, Human papillomavirus type 11
ugagcaauuagaagacagcu

SEQ ID NO: 2640486 - RNA, 21 nt, Human papillomavirus type 11
ggacgauucagguacagaaaa

SEQ ID NO: 2640487 - RNA, 18 nt, Human papillomavirus type 11
uauuacuacacaaagcaa

SEQ ID NO: 2640488 - RNA, 19 nt, Human papillomavirus type 11
uauguaaguccuauaagca

SEQ ID NO: 2640489 - RNA, 19 nt, Human papillomavirus type 11
cagaagaugaggaagagga

SEQ ID NO: 2640490 - RNA, 20 nt, Human papillomavirus type 11
gacaccaguuaugaaaugug

SEQ ID NO: 2640491 - RNA, 20 nt, Human papillomavirus type 11
uacuauugcagaucaaauau

SEQ ID NO: 2640492 - RNA, 18 nt, Human papillomavirus type 11
uuaugcauuggaaaugca

SEQ ID NO: 2640493 - RNA, 22 nt, Human papillomavirus type 11
uacaaauugcugcagcaacaac

SEQ ID NO: 2640494 - RNA, 19 nt, Human papillomavirus type 11
auauauuuguaauauaccu

SEQ ID NO: 2640495 - RNA, 18 nt, Human papillomavirus type 11
auuagaagacagcucaga

SEQ ID NO: 2640496 - RNA, 20 nt, Human papillomavirus type 11
auggagguagugccuguaca

SEQ ID NO: 2640497 - RNA, 22 nt, Human papillomavirus type 11
gacauaaugcuauugaaaugca

SEQ ID NO: 2640498 - RNA, 17 nt, Human papillomavirus type 11
gcauuugcaguauguau

SEQ ID NO: 2640499 - RNA, 21 nt, Human papillomavirus type 11
uaauggagauuauguguacau

SEQ ID NO: 2640500 - RNA, 22 nt, Human papillomavirus type 11
aauuagaagacagcucagaaga

SEQ ID NO: 2640501 - RNA, 21 nt, Human papillomavirus type 11
auugccuguuguuauugcauu

SEQ ID NO: 2640502 - RNA, 22 nt, Human papillomavirus type 11
acuacauuacagggcuguacau

SEQ ID NO: 2640503 - RNA, 17 nt, Human papillomavirus type 11
auuacauuuauuguaac

SEQ ID NO: 2640504 - RNA, 15 nt, Human papillomavirus type 11
uauauguuuguguau

SEQ ID NO: 2640505 - RNA, 16 nt, Human papillomavirus type 11
auguauguuuuugugc

SEQ ID NO: 2640506 - RNA, 19 nt, Human papillomavirus type 11
caaauaucagaagaugagg

SEQ ID NO: 2640507 - RNA, 20 nt, Human papillomavirus type 11
uaaacaauuauuaugugugu

SEQ ID NO: 2640508 - RNA, 15 nt, Human papillomavirus type 11
gugcuauuuuccugc

SEQ ID NO: 2640509 - RNA, 12 nt, Human papillomavirus type 11
guagcuaaugca

SEQ ID NO: 2640510 - RNA, 18 nt, Human papillomavirus type 11
agguggaggacagugggu

SEQ ID NO: 2640511 - RNA, 23 nt, Human papillomavirus type 11
gggaagcucucccaagccugcua

SEQ ID NO: 2640512 - RNA, 18 nt, Human papillomavirus type 11
gaaaaaacuaaaugugcu

SEQ ID NO: 2640513 - RNA, 14 nt, Human papillomavirus type 11
ccugauucaucccu

SEQ ID NO: 2640514 - RNA, 20 nt, Human papillomavirus type 11
uaaaugugcuaaguguaaau

SEQ ID NO: 2640515 - RNA, 17 nt, Human papillomavirus type 11
caaagcaaaacaaaugg

SEQ ID NO: 2640516 - RNA, 15 nt, Human papillomavirus type 11
caguuaugaaaugug

SEQ ID NO: 2640517 - RNA, 21 nt, Human papillomavirus type 11
auucuguggaagcacaggcau

SEQ ID NO: 2640518 - RNA, 19 nt, Human papillomavirus type 11
guuacauugcuaugagcaa

SEQ ID NO: 2640519 - RNA, 24 nt, Human papillomavirus type 11
uacauuacagggcuguacauggua

SEQ ID NO: 2640520 - RNA, 12 nt, Human papillomavirus type 11
caacacagccaa

SEQ ID NO: 2640521 - RNA, 19 nt, Human papillomavirus type 11
guagagcacacuacaggua

SEQ ID NO: 2640522 - RNA, 12 nt, Human papillomavirus type 11
augcauuggaaa

SEQ ID NO: 2640523 - RNA, 12 nt, Human papillomavirus type 11
uaucugauuuug

SEQ ID NO: 2640524 - RNA, 17 nt, Human papillomavirus type 11
aaccgcaauacuacugu

SEQ ID NO: 2640525 - RNA, 18 nt, Human papillomavirus type 11
uguguauguuauguaugu

SEQ ID NO: 2640526 - RNA, 20 nt, Human papillomavirus type 11
aguccacgguuagacgccau

SEQ ID NO: 2640527 - RNA, 18 nt, Human papillomavirus type 11
uauacaguguguggugua

SEQ ID NO: 2640528 - RNA, 16 nt, Human papillomavirus type 11
uaaaguugaacauacu

SEQ ID NO: 2640529 - RNA, 20 nt, Human papillomavirus type 11
aaacuaaaugugcuaagugu

SEQ ID NO: 2640530 - RNA, 21 nt, Human papillomavirus type 11
ccuuggacauuacaggacacc

SEQ ID NO: 2640531 - RNA, 17 nt, Human papillomavirus type 11
uaccaaauacugaccug

SEQ ID NO: 2640532 - RNA, 15 nt, Human papillomavirus type 11
cacuuaaaugauggu

SEQ ID NO: 2640533 - RNA, 13 nt, Human papillomavirus type 11
cauugcuaaacaa

SEQ ID NO: 2640534 - RNA, 18 nt, Human papillomavirus type 11
ugauucaucccuguuuga

SEQ ID NO: 2640535 - RNA, 23 nt, Human papillomavirus type 11
uggagauuauguguacaugaacu

SEQ ID NO: 2640536 - RNA, 15 nt, Human papillomavirus type 11
ugauauacacaaaca

SEQ ID NO: 2640537 - RNA, 16 nt, Human papillomavirus type 11
augcgacugugcagga

SEQ ID NO: 2640538 - RNA, 14 nt, Human papillomavirus type 11
aauucuuuuuacua

SEQ ID NO: 2640539 - RNA, 16 nt, Human papillomavirus type 11
aauuauuauguguguc

SEQ ID NO: 2640540 - RNA, 18 nt, Human papillomavirus type 11
uagugccuguacaaauug

SEQ ID NO: 2640541 - RNA, 14 nt, Human papillomavirus type 11
cugguuguggagug

SEQ ID NO: 2640542 - RNA, 11 nt, Human papillomavirus type 11
auguguauguu

SEQ ID NO: 2640543 - RNA, 21 nt, Human papillomavirus type 11
uauuuuccugccuuuuauaua

SEQ ID NO: 2640544 - RNA, 20 nt, Human papillomavirus type 11
agugccuguacaaauugcug

SEQ ID NO: 2640545 - RNA, 17 nt, Human papillomavirus type 11
uuuaugguagaagccau

SEQ ID NO: 2640546 - RNA, 16 nt, Human papillomavirus type 11
gagacuaaaggacaua

SEQ ID NO: 2640547 - RNA, 23 nt, Human papillomavirus type 11
auugugcaaacgcaacaauaaug

SEQ ID NO: 2640548 - RNA, 23 nt, Human papillomavirus type 11
guuacacccagugacuaaguugu

SEQ ID NO: 2640549 - RNA, 15 nt, Human papillomavirus type 11
augucacauggugau

SEQ ID NO: 2640550 - RNA, 20 nt, Human papillomavirus type 11
cuauugaaaugcaaaugcau

SEQ ID NO: 2640551 - RNA, 19 nt, Human papillomavirus type 11
auguagaaaauaguggugg

SEQ ID NO: 2640552 - RNA, 19 nt, Human papillomavirus type 11
gcaacaacuacaacauuga

SEQ ID NO: 2640553 - RNA, 22 nt, Human papillomavirus type 11
acuaacacuucuuuuauauuug

SEQ ID NO: 2640554 - RNA, 19 nt, Human papillomavirus type 11
uuauacaguguguggugua

SEQ ID NO: 2640555 - RNA, 18 nt, Human papillomavirus type 11
cuguggaagcacaggcau

SEQ ID NO: 2640556 - RNA, 15 nt, Human papillomavirus type 11
uggagauuaugugua

SEQ ID NO: 2640557 - RNA, 17 nt, Human papillomavirus type 11
auguuuuugugcaauaa

SEQ ID NO: 2640558 - RNA, 20 nt, Human papillomavirus type 11
uaucugauuuuguaguauau

SEQ ID NO: 2640559 - RNA, 13 nt, Human papillomavirus type 11
caucugugcuggu

SEQ ID NO: 2640560 - RNA, 17 nt, Human papillomavirus type 11
uaaccugucacuuaaau

SEQ ID NO: 2640561 - RNA, 14 nt, Human papillomavirus type 11
uugcagaucaaaua

SEQ ID NO: 2640562 - RNA, 22 nt, Human papillomavirus type 11
aaaugcauuuagaauccuuagc

SEQ ID NO: 2640563 - RNA, 18 nt, Human papillomavirus type 11
uaacacaacauuaccaaa

SEQ ID NO: 2640564 - RNA, 17 nt, Human papillomavirus type 11
augcuauugaaaugcaa

SEQ ID NO: 2640565 - RNA, 16 nt, Human papillomavirus type 11
cauuuauuguaaccau

SEQ ID NO: 2640566 - RNA, 16 nt, Human papillomavirus type 11
gguuguuucugugguu

SEQ ID NO: 2640567 - RNA, 20 nt, Human papillomavirus type 11
uaacaaccccuuugcaauuc

SEQ ID NO: 2640568 - RNA, 12 nt, Human papillomavirus type 11
uagaagccauag

SEQ ID NO: 2640569 - RNA, 17 nt, Human papillomavirus type 11
uguuguuacuacauuac

SEQ ID NO: 2640570 - RNA, 16 nt, Human papillomavirus type 11
auauaccugcaggaca

SEQ ID NO: 2640571 - RNA, 19 nt, Human papillomavirus type 11
uguacuaaucccauauguu

SEQ ID NO: 2640572 - RNA, 16 nt, Human papillomavirus type 11
ugcaauucuuuuuacu

SEQ ID NO: 2640573 - RNA, 20 nt, Human papillomavirus type 11
gaccccacuacacagcguuu

SEQ ID NO: 2640574 - RNA, 16 nt, Human papillomavirus type 11
ggacauuacaggacac

SEQ ID NO: 2640575 - RNA, 17 nt, Human papillomavirus type 11
ugcagccuccugacccu

SEQ ID NO: 2640576 - RNA, 22 nt, Human papillomavirus type 11
acaaauaucagaagaugaggaa

SEQ ID NO: 2640577 - RNA, 23 nt, Human papillomavirus type 11
uguuucugugguuguuuacugca

SEQ ID NO: 2640578 - RNA, 17 nt, Human papillomavirus type 11
uaaaugugcuaagugua

SEQ ID NO: 2640579 - RNA, 17 nt, Human papillomavirus type 11
cacauuaugcauuggaa

SEQ ID NO: 2640580 - RNA, 18 nt, Human papillomavirus type 11
gucgggguguacaggaug

SEQ ID NO: 2640581 - RNA, 17 nt, Human papillomavirus type 11
uuaugaaauguggcuaa

SEQ ID NO: 2640582 - RNA, 19 nt, Human papillomavirus type 11
cacacuaaauauugugugu

SEQ ID NO: 2640583 - RNA, 16 nt, Human papillomavirus type 11
agaauccuuagcaaaa

SEQ ID NO: 2640584 - RNA, 14 nt, Human papillomavirus type 11
guauaugucacaug

SEQ ID NO: 2640585 - RNA, 14 nt, Human papillomavirus type 11
uugaugacaggcau

SEQ ID NO: 2640586 - RNA, 19 nt, Human papillomavirus type 11
cauaguagagcacacuaca

SEQ ID NO: 2640587 - RNA, 23 nt, Human papillomavirus type 11
ggccacugguacaugucccccag

SEQ ID NO: 2640588 - RNA, 10 nt, Human papillomavirus type 11
acugcauuug

SEQ ID NO: 2640589 - RNA, 17 nt, Human papillomavirus type 11
auacccuugggaagcuc

SEQ ID NO: 2640590 - RNA, 20 nt, Human papillomavirus type 11
uaucaauauagaguguuuaa

SEQ ID NO: 2640591 - RNA, 21 nt, Human papillomavirus type 11
auguuuuagauauagacugaa

SEQ ID NO: 2640592 - RNA, 20 nt, Human papillomavirus type 11
uacuaaucccauauguugug

SEQ ID NO: 2640593 - RNA, 13 nt, Human papillomavirus type 11
cuauacuauguua

SEQ ID NO: 2640594 - RNA, 13 nt, Human papillomavirus type 11
cggagacaucaga

SEQ ID NO: 2640595 - RNA, 20 nt, Human papillomavirus type 11
auauuaaaauggggaagcuu

SEQ ID NO: 2640596 - RNA, 22 nt, Human papillomavirus type 11
ggaggacaguggguaugacaug

SEQ ID NO: 2640597 - RNA, 14 nt, Human papillomavirus type 11
cugauucaucccug

SEQ ID NO: 2640598 - RNA, 14 nt, Human papillomavirus type 11
guauugauauacac

SEQ ID NO: 2640599 - RNA, 19 nt, Human papillomavirus type 11
gugauguuaaccugucacu

SEQ ID NO: 2640600 - RNA, 18 nt, Human papillomavirus type 11
uguggaagcacaggcauu

SEQ ID NO: 2640601 - RNA, 14 nt, Human papillomavirus type 11
caagaccuuuugcu

SEQ ID NO: 2640602 - RNA, 18 nt, Human papillomavirus type 11
acaaaugggccugagcca

SEQ ID NO: 2640603 - RNA, 12 nt, Human papillomavirus type 11
augacaggcaua

SEQ ID NO: 2640604 - RNA, 15 nt, Human papillomavirus type 11
gggaagcucucccaa

SEQ ID NO: 2640605 - RNA, 21 nt, Human papillomavirus type 11
aagacagcucagaagaugagg

SEQ ID NO: 2640606 - RNA, 23 nt, Human papillomavirus type 11
acuaaaugugcuaaguguaaauc

SEQ ID NO: 2640607 - RNA, 18 nt, Human papillomavirus type 11
uauaaacauuuguuugaa

SEQ ID NO: 2640608 - RNA, 18 nt, Human papillomavirus type 11
aaauaucagaagaugagg

SEQ ID NO: 2640609 - RNA, 14 nt, Human papillomavirus type 11
uagugccuguacaa

SEQ ID NO: 2640610 - RNA, 21 nt, Human papillomavirus type 11
guggaaccuuggacauuacag

SEQ ID NO: 2640611 - RNA, 15 nt, Human papillomavirus type 11
cagggaaauacugug

SEQ ID NO: 2640612 - RNA, 14 nt, Human papillomavirus type 11
auguguauguuaug

SEQ ID NO: 2640613 - RNA, 19 nt, Human papillomavirus type 11
ugugcaggaccuaaaacga

SEQ ID NO: 2640614 - RNA, 14 nt, Human papillomavirus type 11
gcuguggaugugac

SEQ ID NO: 2640615 - RNA, 18 nt, Human papillomavirus type 11
cauaacaaggauggcgga

SEQ ID NO: 2640616 - RNA, 16 nt, Human papillomavirus type 11
uguggaaccuuggaca

SEQ ID NO: 2640617 - RNA, 14 nt, Human papillomavirus type 11
gcuuguggagccug

SEQ ID NO: 2640618 - RNA, 21 nt, Human papillomavirus type 11
uuguaaccauuacaccuguau

SEQ ID NO: 2640619 - RNA, 15 nt, Human papillomavirus type 11
aucugcgcaccaaaa

SEQ ID NO: 2640620 - RNA, 16 nt, Human papillomavirus type 11
cagguacacaaauauc

SEQ ID NO: 2640621 - RNA, 19 nt, Human papillomavirus type 11
caggaugguuuaugguaga

SEQ ID NO: 2640622 - RNA, 16 nt, Human papillomavirus type 11
gcagcacguccgccag

SEQ ID NO: 2640623 - RNA, 21 nt, Human papillomavirus type 11
cacugugugugugcuauuuuc

SEQ ID NO: 2640624 - RNA, 12 nt, Human papillomavirus type 11
aauaucagaaga

SEQ ID NO: 2640625 - RNA, 17 nt, Human papillomavirus type 11
auauguguauauguuug

SEQ ID NO: 2640626 - RNA, 15 nt, Human papillomavirus type 11
gacaggcauauuaca

SEQ ID NO: 2640627 - RNA, 21 nt, Human papillomavirus type 11
gacagcucagaagaugaggug

SEQ ID NO: 2640628 - RNA, 23 nt, Human papillomavirus type 11
uuacaacacagccaaaaaaggua

SEQ ID NO: 2640629 - RNA, 18 nt, Human papillomavirus type 11
guacacaaauaucagaag

SEQ ID NO: 2640630 - RNA, 22 nt, Human papillomavirus type 11
uauauauuuguggaauguguau

SEQ ID NO: 2640631 - RNA, 14 nt, Human papillomavirus type 11
guaguauauacauc

SEQ ID NO: 2640632 - RNA, 14 nt, Human papillomavirus type 11
uauguuuguguaua

SEQ ID NO: 2640633 - RNA, 16 nt, Human papillomavirus type 11
uugauggcugugaaga

SEQ ID NO: 2640634 - RNA, 19 nt, Human papillomavirus type 11
auauaaacauuuguuugaa

SEQ ID NO: 2640635 - RNA, 13 nt, Human papillomavirus type 11
ggaugugacagca

SEQ ID NO: 2640636 - RNA, 22 nt, Human papillomavirus type 11
caggaccuaaaacgaaaguauu

SEQ ID NO: 2640637 - RNA, 15 nt, Human papillomavirus type 11
ugaugacaggcauau

SEQ ID NO: 2640638 - RNA, 19 nt, Human papillomavirus type 11
uggagauuauguguacaug

SEQ ID NO: 2640639 - RNA, 14 nt, Human papillomavirus type 11
caauuguaacauua

SEQ ID NO: 2640640 - RNA, 15 nt, Human papillomavirus type 11
aauaucagaagauga

SEQ ID NO: 2640641 - RNA, 16 nt, Human papillomavirus type 11
caugcaaggccacugg

SEQ ID NO: 2640642 - RNA, 15 nt, Human papillomavirus type 11
uuauguauguuaugu

SEQ ID NO: 2640643 - RNA, 22 nt, Human papillomavirus type 11
uguauauauguauauguguaca

SEQ ID NO: 2640644 - RNA, 19 nt, Human papillomavirus type 11
aacacauuaugcauuggaa

SEQ ID NO: 2640645 - RNA, 15 nt, Human papillomavirus type 11
ugcaaacgcaacaau

SEQ ID NO: 2640646 - RNA, 16 nt, Human papillomavirus type 11
ugucccaucugcgcac

SEQ ID NO: 2640647 - RNA, 19 nt, Human papillomavirus type 11
aggaugguuuaugguagaa

SEQ ID NO: 2640648 - RNA, 19 nt, Human papillomavirus type 11
auaucugauuuuguaguau

SEQ ID NO: 2640649 - RNA, 14 nt, Human papillomavirus type 11
agcucagaagauga

SEQ ID NO: 2640650 - RNA, 17 nt, Human papillomavirus type 11
aggugauuccaauuguu

SEQ ID NO: 2640651 - RNA, 15 nt, Human papillomavirus type 11
caaaauucuguggaa

SEQ ID NO: 2640652 - RNA, 12 nt, Human papillomavirus type 11
uaaccugucacu

SEQ ID NO: 2640653 - RNA, 22 nt, Human papillomavirus type 11
gguggacuuuauugaugacagg

SEQ ID NO: 2640654 - RNA, 22 nt, Human papillomavirus type 11
uggacuuuauugaugacaggca

SEQ ID NO: 2640655 - RNA, 18 nt, Human papillomavirus type 11
uguauguuuuugugcaau

SEQ ID NO: 2640656 - RNA, 13 nt, Human papillomavirus type 11
aguauuuaggcag

SEQ ID NO: 2640657 - RNA, 16 nt, Human papillomavirus type 11
uaacauuaacauauag

SEQ ID NO: 2640658 - RNA, 11 nt, Human papillomavirus type 11
gaagcacaggc

SEQ ID NO: 2640659 - RNA, 18 nt, Human papillomavirus type 11
uguauauguguauauguu

SEQ ID NO: 2640660 - RNA, 20 nt, Human papillomavirus type 11
aggcguugguguuagugggc

SEQ ID NO: 2640661 - RNA, 22 nt, Human papillomavirus type 11
gacugguuguggagugcacaga

SEQ ID NO: 2640662 - RNA, 22 nt, Human papillomavirus type 11
ugugaagacaauguaauggagu

SEQ ID NO: 2640663 - RNA, 14 nt, Human papillomavirus type 11
cauuggaaaugcau

SEQ ID NO: 2640664 - RNA, 14 nt, Human papillomavirus type 11
uacaaauugcugca

SEQ ID NO: 2640665 - RNA, 17 nt, Human papillomavirus type 11
cugaccuguugcugugg

SEQ ID NO: 2640666 - RNA, 21 nt, Human papillomavirus type 11
ugugucagagacuaaaggaca

SEQ ID NO: 2640667 - RNA, 15 nt, Human papillomavirus type 11
cagcucagaagauga

SEQ ID NO: 2640668 - RNA, 17 nt, Human papillomavirus type 11
acagcucagaagaugag

SEQ ID NO: 2640669 - RNA, 14 nt, Human papillomavirus type 11
auauguuguuguag

SEQ ID NO: 2640670 - RNA, 21 nt, Human papillomavirus type 11
gcaguauguauucuuaguauu

SEQ ID NO: 2640671 - RNA, 17 nt, Human papillomavirus type 11
uacugcauuuguuguag

SEQ ID NO: 2640672 - RNA, 21 nt, Human papillomavirus type 11
acgacucauggguaaaaguaa

SEQ ID NO: 2640673 - RNA, 12 nt, Human papillomavirus type 11
aguaugugguau

SEQ ID NO: 2640674 - RNA, 16 nt, Human papillomavirus type 11
uggacauuacaggaca

SEQ ID NO: 2640675 - RNA, 13 nt, Human papillomavirus type 11
auauuuguggaau

SEQ ID NO: 2640676 - RNA, 20 nt, Human papillomavirus type 11
cagaagaugagguggacaag

SEQ ID NO: 2640677 - RNA, 17 nt, Human papillomavirus type 11
uuaccaaauacugaccu

SEQ ID NO: 2640678 - RNA, 16 nt, Human papillomavirus type 11
auguuguuguagugug

SEQ ID NO: 2640679 - RNA, 21 nt, Human papillomavirus type 11
ggcggacgauucagguacaga

SEQ ID NO: 2640680 - RNA, 18 nt, Human papillomavirus type 11
cugaaaaaacuaaaugug

SEQ ID NO: 2640681 - RNA, 17 nt, Human papillomavirus type 11
aauggaguaugugguau

SEQ ID NO: 2640682 - RNA, 16 nt, Human papillomavirus type 11
augucauuacauuuau

SEQ ID NO: 2640683 - RNA, 16 nt, Human papillomavirus type 11
gaagaugagguggaca

SEQ ID NO: 2640684 - RNA, 16 nt, Human papillomavirus type 11
aacaacgucagcaauu

SEQ ID NO: 2640685 - RNA, 17 nt, Human papillomavirus type 11
cagaagaugaggaagag

SEQ ID NO: 2640686 - RNA, 15 nt, Human papillomavirus type 11
aacuauaucaaacau

SEQ ID NO: 2640687 - RNA, 23 nt, Human papillomavirus type 11
caauuuuuaaacaguguaaaaau

SEQ ID NO: 2640688 - RNA, 15 nt, Human papillomavirus type 11
uaucagaagaugagg

SEQ ID NO: 2640689 - RNA, 17 nt, Human papillomavirus type 11
uauguguauguuaugua

SEQ ID NO: 2640690 - RNA, 12 nt, Human papillomavirus type 11
acagccaaaaaa

SEQ ID NO: 2640691 - RNA, 17 nt, Human papillomavirus type 11
uauaaacauuuguuuga

SEQ ID NO: 2640692 - RNA, 13 nt, Human papillomavirus type 11
acacaaagcaaaa

SEQ ID NO: 2640693 - RNA, 18 nt, Human papillomavirus type 11
auggugauguuaaccugu

SEQ ID NO: 2640694 - RNA, 14 nt, Human papillomavirus type 11
aagcacaggcauug

SEQ ID NO: 2640695 - RNA, 18 nt, Human papillomavirus type 11
ccugucacuuaaaugaug

SEQ ID NO: 2640696 - RNA, 15 nt, Human papillomavirus type 11
uggauuguuguuacu

SEQ ID NO: 2640697 - RNA, 17 nt, Human papillomavirus type 11
gggaaauacuguggagg

SEQ ID NO: 2640698 - RNA, 18 nt, Human papillomavirus type 11
cucaccugaggcaccaca

SEQ ID NO: 2640699 - RNA, 17 nt, Human papillomavirus type 11
caauuuuuaaacagugu

SEQ ID NO: 2640700 - RNA, 17 nt, Human papillomavirus type 11
ugauuccaauuguuuaa

SEQ ID NO: 2640701 - RNA, 14 nt, Human papillomavirus type 11
gguauugguacagg

SEQ ID NO: 2640702 - RNA, 23 nt, Human papillomavirus type 11
augcuauugaaaugcaaaugcau

SEQ ID NO: 2640703 - RNA, 14 nt, Human papillomavirus type 11
uggaagcacaggca

SEQ ID NO: 2640704 - RNA, 15 nt, Human papillomavirus type 11
uauguguacaugaac

SEQ ID NO: 2640705 - RNA, 20 nt, Human papillomavirus type 11
guguauuacuacacaaagca

SEQ ID NO: 2640706 - RNA, 18 nt, Human papillomavirus type 11
ugccuuuuauauacacau

SEQ ID NO: 2640707 - RNA, 18 nt, Human papillomavirus type 11
gcuaugagcaauuagaag

SEQ ID NO: 2640708 - RNA, 22 nt, Human papillomavirus type 11
uaacaaaacaguuguaccaaag

SEQ ID NO: 2640709 - RNA, 18 nt, Human papillomavirus type 11
aaaaacucaguauggugu

SEQ ID NO: 2640710 - RNA, 17 nt, Human papillomavirus type 11
uacauuacagggcugua

SEQ ID NO: 2640711 - RNA, 22 nt, Human papillomavirus type 11
aauuugauggcugugaagacaa

SEQ ID NO: 2640712 - RNA, 18 nt, Human papillomavirus type 11
ucagccacacaacuauau

SEQ ID NO: 2640713 - RNA, 16 nt, Human papillomavirus type 11
uggaagcacaggcauu

SEQ ID NO: 2640714 - RNA, 19 nt, Human papillomavirus type 11
gcaaggccacugguacaug

SEQ ID NO: 2640715 - RNA, 10 nt, Human papillomavirus type 11
acaggauggu

SEQ ID NO: 2640716 - RNA, 14 nt, Human papillomavirus type 11
uuuaguguguguau

SEQ ID NO: 2640717 - RNA, 16 nt, Human papillomavirus type 11
gcguauguuaaacgca

SEQ ID NO: 2640718 - RNA, 14 nt, Human papillomavirus type 11
caucuucaacgugg

SEQ ID NO: 2640719 - RNA, 12 nt, Human papillomavirus type 11
ugcuauuuuccu

SEQ ID NO: 2640720 - RNA, 19 nt, Human papillomavirus type 11
uguguuuaguguguguaua

SEQ ID NO: 2640721 - RNA, 22 nt, Human papillomavirus type 11
aguaguaccaccauuaacugug

SEQ ID NO: 2640722 - RNA, 19 nt, Human papillomavirus type 11
ucauuaugcgacugugcag

SEQ ID NO: 2640723 - RNA, 18 nt, Human papillomavirus type 11
aaacagggaaauacugug

SEQ ID NO: 2640724 - RNA, 17 nt, Human papillomavirus type 11
cauauacauugugcaaa

SEQ ID NO: 2640725 - RNA, 15 nt, Human papillomavirus type 11
uguauauguuucuug

SEQ ID NO: 2640726 - RNA, 14 nt, Human papillomavirus type 11
uguauauauguaua

SEQ ID NO: 2640727 - RNA, 14 nt, Human papillomavirus type 11
gccacugguacaug

SEQ ID NO: 2640728 - RNA, 13 nt, Human papillomavirus type 11
cugggcacacuaa

SEQ ID NO: 2640729 - RNA, 16 nt, Human papillomavirus type 11
gacaguggguaugaca

SEQ ID NO: 2640730 - RNA, 19 nt, Human papillomavirus type 11
gaaaaaacuaaaugugcua

SEQ ID NO: 2640731 - RNA, 17 nt, Human papillomavirus type 11
cauuaacauauagcagu

SEQ ID NO: 2640732 - RNA, 13 nt, Human papillomavirus type 11
ugugguauggaca

SEQ ID NO: 2640733 - RNA, 23 nt, Human papillomavirus type 11
uggauuauguguauaugucacau

SEQ ID NO: 2640734 - RNA, 23 nt, Human papillomavirus type 11
ccugucacuuaaaugauggugau

SEQ ID NO: 2640735 - RNA, 14 nt, Human papillomavirus type 11
uauugauauacaca

SEQ ID NO: 2640736 - RNA, 18 nt, Human papillomavirus type 11
auuauauauauuuguaau

SEQ ID NO: 2640737 - RNA, 15 nt, Human papillomavirus type 11
accuguauauaugua

SEQ ID NO: 2640738 - RNA, 22 nt, Human papillomavirus type 11
acuaaaugugcuaaguguaaau

SEQ ID NO: 2640739 - RNA, 19 nt, Human papillomavirus type 11
gcucagaagaugaggugga

SEQ ID NO: 2640740 - RNA, 20 nt, Human papillomavirus type 11
cugauuuuguaguauauaca

SEQ ID NO: 2640741 - RNA, 15 nt, Human papillomavirus type 11
uguuauuuauauguu

SEQ ID NO: 2640742 - RNA, 15 nt, Human papillomavirus type 11
ccuguugcuguggau

SEQ ID NO: 2640743 - RNA, 15 nt, Human papillomavirus type 11
gacgauucagguaca

SEQ ID NO: 2640744 - RNA, 18 nt, Human papillomavirus type 11
uaaucccauauguugugu

SEQ ID NO: 2640745 - RNA, 21 nt, Human papillomavirus type 11
uuuguguguuuagugugugua

SEQ ID NO: 2640746 - RNA, 12 nt, Human papillomavirus type 11
agugcuugugga

SEQ ID NO: 2640747 - RNA, 18 nt, Human papillomavirus type 11
uggaauguguauguaugu

SEQ ID NO: 2640748 - RNA, 18 nt, Human papillomavirus type 11
cauaguagagcacacuac

SEQ ID NO: 2640749 - RNA, 17 nt, Human papillomavirus type 11
ggacauuacaggacacc

SEQ ID NO: 2640750 - RNA, 21 nt, Human papillomavirus type 11
gcuauugaaaugcaaaugcau

SEQ ID NO: 2640751 - RNA, 11 nt, Human papillomavirus type 11
acuaacacugu

SEQ ID NO: 2640752 - RNA, 16 nt, Human papillomavirus type 11
agaugaggaagaggag

SEQ ID NO: 2640753 - RNA, 17 nt, Human papillomavirus type 11
cucccaagccugcuauu

SEQ ID NO: 2640754 - RNA, 14 nt, Human papillomavirus type 11
ccuccugacccugu

SEQ ID NO: 2640755 - RNA, 13 nt, Human papillomavirus type 11
uuuuaucaugcca

SEQ ID NO: 2640756 - RNA, 18 nt, Human papillomavirus type 11
uguauauauuuguggaau

SEQ ID NO: 2640757 - RNA, 16 nt, Human papillomavirus type 11
cagcucagaagaugag

SEQ ID NO: 2640758 - RNA, 23 nt, Human papillomavirus type 11
uuacaccuguauauauguauaug

SEQ ID NO: 2640759 - RNA, 11 nt, Human papillomavirus type 11
ggaugugacag

SEQ ID NO: 2640760 - RNA, 21 nt, Human papillomavirus type 11
agaugaggaagaggaggugga

SEQ ID NO: 2640761 - RNA, 15 nt, Human papillomavirus type 11
uauguuuguguauau

SEQ ID NO: 2640762 - RNA, 19 nt, Human papillomavirus type 11
auauguguauguuauguau

SEQ ID NO: 2640763 - RNA, 16 nt, Human papillomavirus type 11
uuggauuguuguuacu

SEQ ID NO: 2640764 - RNA, 18 nt, Human papillomavirus type 11
auuacuacacaaagcaaa

SEQ ID NO: 2640765 - RNA, 17 nt, Human papillomavirus type 11
caugaacuagaguaaac

SEQ ID NO: 2640766 - RNA, 16 nt, Human papillomavirus type 11
uauuacucuaucaaaa

SEQ ID NO: 2640767 - RNA, 15 nt, Human papillomavirus type 11
ugaaaugcaaaugca

SEQ ID NO: 2640768 - RNA, 17 nt, Human papillomavirus type 11
uauugaugacaggcaua

SEQ ID NO: 2640769 - RNA, 21 nt, Human papillomavirus type 11
gcaacaauaauggugauguua

SEQ ID NO: 2640770 - RNA, 17 nt, Human papillomavirus type 11
uauaauauuaauaucug

SEQ ID NO: 2640771 - RNA, 15 nt, Human papillomavirus type 11
aguaugguguggaac

SEQ ID NO: 2640772 - RNA, 13 nt, Human papillomavirus type 11
uguauauauguau

SEQ ID NO: 2640773 - RNA, 15 nt, Human papillomavirus type 11
cgacugguuguggag

SEQ ID NO: 2640774 - RNA, 14 nt, Human papillomavirus type 11
guauauguguacau

SEQ ID NO: 2640775 - RNA, 19 nt, Human papillomavirus type 11
aaaacaaaugggccugagc

SEQ ID NO: 2640776 - RNA, 13 nt, Human papillomavirus type 11
aaugcaaaugcau

SEQ ID NO: 2640777 - RNA, 19 nt, Human papillomavirus type 11
gcuauuacuggggggccag

SEQ ID NO: 2640778 - RNA, 23 nt, Human papillomavirus type 11
auuugcaguauguauucuuagua

SEQ ID NO: 2640779 - RNA, 23 nt, Human papillomavirus type 11
uauauguuucuuguauuguguau

SEQ ID NO: 2640780 - RNA, 13 nt, Human papillomavirus type 11
acugguacauguc

SEQ ID NO: 2640781 - RNA, 17 nt, Human papillomavirus type 11
augcauuggaaaugcau

SEQ ID NO: 2640782 - RNA, 13 nt, Human papillomavirus type 11
cauuacaggacac

SEQ ID NO: 2640783 - RNA, 15 nt, Human papillomavirus type 11
agggaaauacugugg

SEQ ID NO: 2640784 - RNA, 16 nt, Human papillomavirus type 11
cuguauccaagguugu

SEQ ID NO: 2640785 - RNA, 17 nt, Human papillomavirus type 11
ugguacaugucccccag

SEQ ID NO: 2640786 - RNA, 15 nt, Human papillomavirus type 11
uauguuuuugugcaa

SEQ ID NO: 2640787 - RNA, 16 nt, Human papillomavirus type 11
uagcagugaggaacaa

SEQ ID NO: 2640788 - RNA, 22 nt, Human papillomavirus type 11
uacacaaauaucagaagaugag

SEQ ID NO: 2640789 - RNA, 14 nt, Human papillomavirus type 11
gcuauugaaaugca

SEQ ID NO: 2640790 - RNA, 23 nt, Human papillomavirus type 11
aaaauucuguggaagcacaggca

SEQ ID NO: 2640791 - RNA, 12 nt, Human papillomavirus type 11
caauuguaacau

SEQ ID NO: 2640792 - RNA, 17 nt, Human papillomavirus type 11
uaaacaauuauuaugug

SEQ ID NO: 2640793 - RNA, 19 nt, Human papillomavirus type 11
acugaaaaaacuaaaugug

SEQ ID NO: 2640794 - RNA, 18 nt, Human papillomavirus type 11
caauuuuuaaacagugua

SEQ ID NO: 2640795 - RNA, 22 nt, Human papillomavirus type 11
uugcauuaccugauucaucccu

SEQ ID NO: 2640796 - RNA, 16 nt, Human papillomavirus type 11
uauuguacuuauaaua

SEQ ID NO: 2640797 - RNA, 22 nt, Human papillomavirus type 11
cuauugaaaugcaaaugcauuu

SEQ ID NO: 2640798 - RNA, 16 nt, Human papillomavirus type 11
uggagauuauguguac

SEQ ID NO: 2640799 - RNA, 19 nt, Human papillomavirus type 11
caccuguauauauguauau

SEQ ID NO: 2640800 - RNA, 14 nt, Human papillomavirus type 11
gacguaaacgugcg

SEQ ID NO: 2640801 - RNA, 22 nt, Human
cacauauaaauguacuuuuucu

SEQ ID NO: 2640802 - RNA, 18 nt, Human
ccaaaucauacuuuuucu

SEQ ID NO: 2640803 - RNA, 13 nt, Human papillomavirus type 16
ugugucuacauac

SEQ ID NO: 2640804 - RNA, 20 nt, Human papillomavirus type 16
accauggcugauccugcagg

SEQ ID NO: 2640805 - RNA, 20 nt, Human papillomavirus type 16
gcuuguaaauauuaaguugu

SEQ ID NO: 2640806 - RNA, 14 nt, Human papillomavirus type 16
augcaguacagguu

SEQ ID NO: 2640807 - RNA, 18 nt, Human papillomavirus type 16
gcugaacaaauauuacaa

SEQ ID NO: 2640808 - RNA, 19 nt, Human papillomavirus type 16
aaugacagcucagaggagg

SEQ ID NO: 2640809 - RNA, 18 nt, Human papillomavirus type 16
uaugauagugaauggcaa

SEQ ID NO: 2640810 - RNA, 11 nt, Human papillomavirus type 16
uuccugacacc

SEQ ID NO: 2640811 - RNA, 17 nt, Human papillomavirus type 16
uguauguguguuuguau

SEQ ID NO: 2640812 - RNA, 20 nt, Human papillomavirus type 16
augacgagaacgaaaaugac

SEQ ID NO: 2640813 - RNA, 17 nt, Human papillomavirus type 16
agugcuuaugcagcaaa

SEQ ID NO: 2640814 - RNA, 22 nt, Human papillomavirus type 16
caaaaacuauuacagugucuac

SEQ ID NO: 2640815 - RNA, 16 nt, Human papillomavirus type 16
guucucagaaaccaua

SEQ ID NO: 2640816 - RNA, 17 nt, Human papillomavirus type 16
accaaguggugccaaca

SEQ ID NO: 2640817 - RNA, 16 nt, Human papillomavirus type 16
ugugugccccaucugu

SEQ ID NO: 2640818 - RNA, 18 nt, Human papillomavirus type 16
agaaaccauaaucuacca

SEQ ID NO: 2640819 - RNA, 18 nt, Human papillomavirus type 16
gagguaggucguggucag

SEQ ID NO: 2640820 - RNA, 16 nt, Human papillomavirus type 16
uguuguauaccauaac

SEQ ID NO: 2640821 - RNA, 11 nt, Human papillomavirus type 16
aauaaacuguu

SEQ ID NO: 2640822 - RNA, 19 nt, Human papillomavirus type 16
aauguaaaacauaaaagug

SEQ ID NO: 2640823 - RNA, 14 nt, Human papillomavirus type 16
ugugucuacauaca

SEQ ID NO: 2640824 - RNA, 16 nt, Human papillomavirus type 16
gagaugcaguacaggu

SEQ ID NO: 2640825 - RNA, 14 nt, Human papillomavirus type 16
uauuuguuuauaua

SEQ ID NO: 2640826 - RNA, 14 nt, Human papillomavirus type 16
auauaauuguugua

SEQ ID NO: 2640827 - RNA, 17 nt, Human papillomavirus type 16
auguauaaaaaaacaug

SEQ ID NO: 2640828 - RNA, 19 nt, Human papillomavirus type 16
aaccuaacaauaacaaaau

SEQ ID NO: 2640829 - RNA, 19 nt, Human papillomavirus type 16
ugugugccccaucuguucu

SEQ ID NO: 2640830 - RNA, 16 nt, Human papillomavirus type 16
uagguguuuuauugua

SEQ ID NO: 2640831 - RNA, 16 nt, Human papillomavirus type 16
uauuacuauuguggau

SEQ ID NO: 2640832 - RNA, 14 nt, Human papillomavirus type 16
cuacuaauuguguu

SEQ ID NO: 2640833 - RNA, 22 nt, Human papillomavirus type 16
cuauaugacaaaucuugauacu

SEQ ID NO: 2640834 - RNA, 14 nt, Human papillomavirus type 16
ggcugauccugcag

SEQ ID NO: 2640835 - RNA, 20 nt, Human papillomavirus type 16
uaauguaauuguuacauaua

SEQ ID NO: 2640836 - RNA, 15 nt, Human papillomavirus type 16
gaaacagagacagca

SEQ ID NO: 2640837 - RNA, 23 nt, Human papillomavirus type 16
caggauguauaaaaaaacaugga

SEQ ID NO: 2640838 - RNA, 18 nt, Human papillomavirus type 16
guccacuuagugauauua

SEQ ID NO: 2640839 - RNA, 14 nt, Human papillomavirus type 16
acuauauuugcuac

SEQ ID NO: 2640840 - RNA, 18 nt, Human papillomavirus type 16
uguaguggaaaaaaaaac

SEQ ID NO: 2640841 - RNA, 21 nt, Human papillomavirus type 16
auuguuacacuuacauaugau

SEQ ID NO: 2640842 - RNA, 20 nt, Human papillomavirus type 16
caagcaauugaacugcaacu

SEQ ID NO: 2640843 - RNA, 14 nt, Human papillomavirus type 16
aaacacguguguau

SEQ ID NO: 2640844 - RNA, 19 nt, Human papillomavirus type 16
guugugcguacaaagcaca

SEQ ID NO: 2640845 - RNA, 18 nt, Human papillomavirus type 16
aauacuuuaaaauguuua

SEQ ID NO: 2640846 - RNA, 21 nt, Human papillomavirus type 16
aggugaugcuaauacuuuaaa

SEQ ID NO: 2640847 - RNA, 13 nt, Human papillomavirus type 16
uacauacacauca

SEQ ID NO: 2640848 - RNA, 19 nt, Human papillomavirus type 16
agguucuaaaacgaaagua

SEQ ID NO: 2640849 - RNA, 19 nt, Human papillomavirus type 16
ggaggaugaaauagauggu

SEQ ID NO: 2640850 - RNA, 15 nt, Human papillomavirus type 16
uaugugcuuguaaau

SEQ ID NO: 2640851 - RNA, 19 nt, Human papillomavirus type 16
aacauggauauacagugga

SEQ ID NO: 2640852 - RNA, 19 nt, Human papillomavirus type 16
cuaauacuuuaaaauguuu

SEQ ID NO: 2640853 - RNA, 13 nt, Human papillomavirus type 16
cucagaggaggag

SEQ ID NO: 2640854 - RNA, 19 nt, Human papillomavirus type 16
aaaugggauuuaaacauau

SEQ ID NO: 2640855 - RNA, 19 nt, Human papillomavirus type 16
auguauaaaaaaacaugga

SEQ ID NO: 2640856 - RNA, 16 nt, Human papillomavirus type 16
acaagcaauugaacug

SEQ ID NO: 2640857 - RNA, 14 nt, Human papillomavirus type 16
cuauuacagugucu

SEQ ID NO: 2640858 - RNA, 17 nt, Human papillomavirus type 16
auuuuuaauacauacac

SEQ ID NO: 2640859 - RNA, 11 nt, Human papillomavirus type 16
uugaacugcaa

SEQ ID NO: 2640860 - RNA, 12 nt, Human papillomavirus type 16
ugguccagcugg

SEQ ID NO: 2640861 - RNA, 16 nt, Human papillomavirus type 16
cauuguauacugcagu

SEQ ID NO: 2640862 - RNA, 19 nt, Human papillomavirus type 16
aguaaugaaaaguggacau

SEQ ID NO: 2640863 - RNA, 14 nt, Human papillomavirus type 16
aaagcauuacaagc

SEQ ID NO: 2640864 - RNA, 19 nt, Human papillomavirus type 16
uaucaggauuacaauacag

SEQ ID NO: 2640865 - RNA, 23 nt, Human papillomavirus type 16
guuauucauuguauauaaacuau

SEQ ID NO: 2640866 - RNA, 19 nt, Human papillomavirus type 16
uuacauaauguauauguac

SEQ ID NO: 2640867 - RNA, 14 nt, Human papillomavirus type 16
auugaacugcaacu

SEQ ID NO: 2640868 - RNA, 17 nt, Human papillomavirus type 16
ucugugucuacauacac

SEQ ID NO: 2640869 - RNA, 21 nt, Human papillomavirus type 16
uauauguuuguaugugcuugu

SEQ ID NO: 2640870 - RNA, 14 nt, Human papillomavirus type 16
acauuauaccuaag

SEQ ID NO: 2640871 - RNA, 13 nt, Human papillomavirus type 16
gcuuaugcagcaa

SEQ ID NO: 2640872 - RNA, 14 nt, Human papillomavirus type 16
ucagaugacgagaa

SEQ ID NO: 2640873 - RNA, 23 nt, Human papillomavirus type 16
ugaccauauagacuauuggaaac

SEQ ID NO: 2640874 - RNA, 22 nt, Human papillomavirus type 16
accucauuuuauaauccagaua

SEQ ID NO: 2640875 - RNA, 11 nt, Human papillomavirus type 16
ugcuuuugugu

SEQ ID NO: 2640876 - RNA, 23 nt, Human papillomavirus type 16
ccuugaaguguauuuaacugcac

SEQ ID NO: 2640877 - RNA, 21 nt, Human papillomavirus type 16
caaaaacuauuacagugucua

SEQ ID NO: 2640878 - RNA, 12 nt, Human papillomavirus type 16
guugaaggcaaa

SEQ ID NO: 2640879 - RNA, 15 nt, Human papillomavirus type 16
aacaggauguauaaa

SEQ ID NO: 2640880 - RNA, 17 nt, Human papillomavirus type 16
uuauacaaacuggacac

SEQ ID NO: 2640881 - RNA, 13 nt, Human papillomavirus type 16
cagaaacagagac

SEQ ID NO: 2640882 - RNA, 21 nt, Human papillomavirus type 16
uauacaaacuggacacauaua

SEQ ID NO: 2640883 - RNA, 20 nt, Human papillomavirus type 16
cauuauuuuuaauacauaca

SEQ ID NO: 2640884 - RNA, 13 nt, Human papillomavirus type 16
ugcuuuugucugu

SEQ ID NO: 2640885 - RNA, 23 nt, Human papillomavirus type 16
auguauaaaaaaacauggauaua

SEQ ID NO: 2640886 - RNA, 17 nt, Human papillomavirus type 16
cauauauauauuuguga

SEQ ID NO: 2640887 - RNA, 15 nt, Human papillomavirus type 16
ggcagaaacagagac

SEQ ID NO: 2640888 - RNA, 16 nt, Human papillomavirus type 16
cagguaccaaugggga

SEQ ID NO: 2640889 - RNA, 19 nt, Human papillomavirus type 16
accuguuaaugggcacacu

SEQ ID NO: 2640890 - RNA, 22 nt, Human papillomavirus type 16
guacauaauguaauuguuacau

SEQ ID NO: 2640891 - RNA, 21 nt, Human papillomavirus type 16
ugcuuuugucugugucuacau

SEQ ID NO: 2640892 - RNA, 18 nt, Human papillomavirus type 16
ugaccaauuuuugucuca

SEQ ID NO: 2640893 - RNA, 18 nt, Human papillomavirus type 16
acaccuacuaauuguguu

SEQ ID NO: 2640894 - RNA, 22 nt, Human papillomavirus type 16
uuuaaaaggugaugcuaauacu

SEQ ID NO: 2640895 - RNA, 23 nt, Human papillomavirus type 16
cguacuuuggaagaccuguuaau

SEQ ID NO: 2640896 - RNA, 15 nt, Human papillomavirus type 16
acauaugauagugaa

SEQ ID NO: 2640897 - RNA, 21 nt, Human papillomavirus type 16
uagauuuuauaguaaaugaua

SEQ ID NO: 2640898 - RNA, 20 nt, Human papillomavirus type 16
ugagcaauuaaaugacagcu

SEQ ID NO: 2640899 - RNA, 14 nt, Human papillomavirus type 16
uuuuuaauuacaua

SEQ ID NO: 2640900 - RNA, 23 nt, Human papillomavirus type 16
uguugugguuauucauuguauau

SEQ ID NO: 2640901 - RNA, 16 nt, Human papillomavirus type 16
auguugcacgcacaaa

SEQ ID NO: 2640902 - RNA, 17 nt, Human papillomavirus type 16
gaacaaauauuacaaua

SEQ ID NO: 2640903 - RNA, 19 nt, Human papillomavirus type 16
uuaguggauguguagacaa

SEQ ID NO: 2640904 - RNA, 20 nt, Human papillomavirus type 16
augucuauaugacaaaucuu

SEQ ID NO: 2640905 - RNA, 13 nt, Human papillomavirus type 16
ggcuguaguggaa

SEQ ID NO: 2640906 - RNA, 16 nt, Human papillomavirus type 16
aaaacaugcaaacagg

SEQ ID NO: 2640907 - RNA, 18 nt, Human papillomavirus type 16
uaccauaacuuacuauuu

SEQ ID NO: 2640908 - RNA, 15 nt, Human papillomavirus type 16
accauggcugauccu

SEQ ID NO: 2640909 - RNA, 19 nt, Human papillomavirus type 16
acauauauauauuugugaa

SEQ ID NO: 2640910 - RNA, 19 nt, Human papillomavirus type 16
uacaguggaagugcaguuu

SEQ ID NO: 2640911 - RNA, 22 nt, Human papillomavirus type 16
aauggcaacgugaccaauuuuu

SEQ ID NO: 2640912 - RNA, 21 nt, Human papillomavirus type 16
cagguaccaauggggaagagg

SEQ ID NO: 2640913 - RNA, 22 nt, Human papillomavirus type 16
aggccucccacagcuacagaua

SEQ ID NO: 2640914 - RNA, 20 nt, Human papillomavirus type 16
gagcugcaaaaaggagauua

SEQ ID NO: 2640915 - RNA, 18 nt, Human papillomavirus type 16
uguacauuguauacugca

SEQ ID NO: 2640916 - RNA, 19 nt, Human papillomavirus type 16
uccacaacauuacuggcgu

SEQ ID NO: 2640917 - RNA, 13 nt, Human papillomavirus type 16
agugauacaggug

SEQ ID NO: 2640918 - RNA, 20 nt, Human papillomavirus type 16
auguauagaaaaacaaagua

SEQ ID NO: 2640919 - RNA, 20 nt, Human papillomavirus type 16
gccucccacagcuacagaua

SEQ ID NO: 2640920 - RNA, 20 nt, Human papillomavirus type 16
ugacaaaucuugauacugca

SEQ ID NO: 2640921 - RNA, 15 nt, Human papillomavirus type 16
auacuuuaaaauguu

SEQ ID NO: 2640922 - RNA, 14 nt, Human papillomavirus type 16
uauuuuuaauacau

SEQ ID NO: 2640923 - RNA, 16 nt, Human papillomavirus type 16
cccaucuguucucaga

SEQ ID NO: 2640924 - RNA, 20 nt, Human papillomavirus type 16
uaauaaacacguguguaugu

SEQ ID NO: 2640925 - RNA, 14 nt, Human papillomavirus type 16
aauacuuuaaaaug

SEQ ID NO: 2640926 - RNA, 14 nt, Human papillomavirus type 16
uacauacacaugca

SEQ ID NO: 2640927 - RNA, 23 nt, Human papillomavirus type 16
uugaaggcaaaacuauugcugaa

SEQ ID NO: 2640928 - RNA, 20 nt, Human papillomavirus type 16
auaauguaauuguuacauau

SEQ ID NO: 2640929 - RNA, 18 nt, Human papillomavirus type 16
ucaggauuacaauacagg

SEQ ID NO: 2640930 - RNA, 18 nt, Human papillomavirus type 16
cugaucucuacuguuaug

SEQ ID NO: 2640931 - RNA, 16 nt, Human papillomavirus type 16
aucuugauacugcauc

SEQ ID NO: 2640932 - RNA, 14 nt, Human papillomavirus type 16
aauacauacacaug

SEQ ID NO: 2640933 - RNA, 15 nt, Human papillomavirus type 16
ugcagcaaaugcagg

SEQ ID NO: 2640934 - RNA, 22 nt, Human papillomavirus type 16
cuugaaguguauuuaacugcac

SEQ ID NO: 2640935 - RNA, 15 nt, Human papillomavirus type 16
agcugcaaaaaggag

SEQ ID NO: 2640936 - RNA, 13 nt, Human papillomavirus type 16
uuguaugugcuug

SEQ ID NO: 2640937 - RNA, 16 nt, Human papillomavirus type 16
gaggguacgggaugua

SEQ ID NO: 2640938 - RNA, 18 nt, Human papillomavirus type 16
cgggauguaauggauggu

SEQ ID NO: 2640939 - RNA, 19 nt, Human papillomavirus type 16
uuaauacauacacaugcac

SEQ ID NO: 2640940 - RNA, 20 nt, Human papillomavirus type 16
ugcuuguaaauauuaaguug

SEQ ID NO: 2640941 - RNA, 13 nt, Human papillomavirus type 16
agaccuguuaaug

SEQ ID NO: 2640942 - RNA, 16 nt, Human papillomavirus type 16
aaacgcacaaaacgug

SEQ ID NO: 2640943 - RNA, 16 nt, Human papillomavirus type 16
uuauaaaacaugcaaa

SEQ ID NO: 2640944 - RNA, 16 nt, Human papillomavirus type 16
gcaggaacauccagac

SEQ ID NO: 2640945 - RNA, 20 nt, Human papillomavirus type 16
uaauaaacuguuauuacuua

SEQ ID NO: 2640946 - RNA, 22 nt, Human papillomavirus type 16
cagguaccaauggggaagaggg

SEQ ID NO: 2640947 - RNA, 20 nt, Human papillomavirus type 16
uauagacuauuggaaacaca

SEQ ID NO: 2640948 - RNA, 14 nt, Human papillomavirus type 16
uacauccuguuuuu

SEQ ID NO: 2640949 - RNA, 14 nt, Human papillomavirus type 16
caauugaacugcaa

SEQ ID NO: 2640950 - RNA, 15 nt, Human papillomavirus type 16
gcacaaaauguguuu

SEQ ID NO: 2640951 - RNA, 21 nt, Human papillomavirus type 16
uaaguuguauguguguuugua

SEQ ID NO: 2640952 - RNA, 23 nt, Human papillomavirus type 16
ccuaagguugaaggcaaaacuau

SEQ ID NO: 2640953 - RNA, 20 nt, Human papillomavirus type 16
cagguaccaauggggaagag

SEQ ID NO: 2640954 - RNA, 16 nt, Human papillomavirus type 16
aaaacauggauauaca

SEQ ID NO: 2640955 - RNA, 22 nt, Human papillomavirus type 16
caccaaguggugccaacacugg

SEQ ID NO: 2640956 - RNA, 17 nt, Human papillomavirus type 16
aaugacagugauacagg

SEQ ID NO: 2640957 - RNA, 20 nt, Human papillomavirus type 16
auuacuuaacaaugcgacac

SEQ ID NO: 2640958 - RNA, 21 nt, Human papillomavirus type 16
gaccauauagacuauuggaaa

SEQ ID NO: 2640959 - RNA, 18 nt, Human papillomavirus type 16
ccauccuuuauuaaauaa

SEQ ID NO: 2640960 - RNA, 23 nt, Human papillomavirus type 16
uuauacaaacuggacacauauau

SEQ ID NO: 2640961 - RNA, 18 nt, Human papillomavirus type 16
auggagacauaugcaaua

SEQ ID NO: 2640962 - RNA, 20 nt, Human papillomavirus type 16
aaacuauugcugaacaaaua

SEQ ID NO: 2640963 - RNA, 18 nt, Human papillomavirus type 16
gaacagggucggguacag

SEQ ID NO: 2640964 - RNA, 17 nt, Human papillomavirus type 16
aacuauugcugaacaaa

SEQ ID NO: 2640965 - RNA, 15 nt, Human papillomavirus type 16
ccuguuuuuguuuua

SEQ ID NO: 2640966 - RNA, 21 nt, Human papillomavirus type 16
uaaacacguguguauguguuu

SEQ ID NO: 2640967 - RNA, 17 nt, Human papillomavirus type 16
aaaacgcacaaaacgug

SEQ ID NO: 2640968 - RNA, 15 nt, Human papillomavirus type 16
aaacguucugcaaaa

SEQ ID NO: 2640969 - RNA, 20 nt, Human papillomavirus type 16
aucccuauuuuccuauuaaa

SEQ ID NO: 2640970 - RNA, 15 nt, Human papillomavirus type 16
uguauuuaacugcac

SEQ ID NO: 2640971 - RNA, 18 nt, Human papillomavirus type 16
acgugaccaauuuuuguc

SEQ ID NO: 2640972 - RNA, 21 nt, Human papillomavirus type 16
cuggcuguaucaaagaauaaa

SEQ ID NO: 2640973 - RNA, 21 nt, Human papillomavirus type 16
ccauauagacuauuggaaaca

SEQ ID NO: 2640974 - RNA, 20 nt, Human papillomavirus type 16
uguacauuguauacugcagu

SEQ ID NO: 2640975 - RNA, 16 nt, Human papillomavirus type 16
auuuuccuauuaaaaa

SEQ ID NO: 2640976 - RNA, 13 nt, Human papillomavirus type 16
auguuuguaugug

SEQ ID NO: 2640977 - RNA, 17 nt, Human papillomavirus type 16
acaggugaagauuuggu

SEQ ID NO: 2640978 - RNA, 22 nt, Human papillomavirus type 16
aagcacggaugaauauguugca

SEQ ID NO: 2640979 - RNA, 13 nt, Human papillomavirus type 16
uaauuguuacaua

SEQ ID NO: 2640980 - RNA, 13 nt, Human papillomavirus type 16
uaaacuauauuug

SEQ ID NO: 2640981 - RNA, 17 nt, Human papillomavirus type 16
ugugccccaucuguucu

SEQ ID NO: 2640982 - RNA, 21 nt, Human papillomavirus type 16
uacuuuggaagaccuguuaau

SEQ ID NO: 2640983 - RNA, 16 nt, Human papillomavirus type 16
guaauggaugguuuua

SEQ ID NO: 2640984 - RNA, 18 nt, Human papillomavirus type 16
auuugaaagcgaagacag

SEQ ID NO: 2640985 - RNA, 16 nt, Human papillomavirus type 16
ccugaccccaauaagu

SEQ ID NO: 2640986 - RNA, 19 nt, Human papillomavirus type 16
uuguauacugcagugucgu

SEQ ID NO: 2640987 - RNA, 11 nt, Human papillomavirus type 16
ucaugcaggaa

SEQ ID NO: 2640988 - RNA, 22 nt, Human papillomavirus type 16
cugcaccaacaggauguauaaa

SEQ ID NO: 2640989 - RNA, 17 nt, Human papillomavirus type 16
caauuguuacacuuaca

SEQ ID NO: 2640990 - RNA, 11 nt, Human papillomavirus type 16
acauccagacu

SEQ ID NO: 2640991 - RNA, 15 nt, Human papillomavirus type 16
acacagaaaaugcua

SEQ ID NO: 2640992 - RNA, 23 nt, Human papillomavirus type 16
aagcaaaacaacauagagaugca

SEQ ID NO: 2640993 - RNA, 20 nt, Human papillomavirus type 16
aaugcauuauacaaacugga

SEQ ID NO: 2640994 - RNA, 21 nt, Human papillomavirus type 16
auguaauuguuacauauaauu

SEQ ID NO: 2640995 - RNA, 18 nt, Human papillomavirus type 16
uccacaacauuacuggcg

SEQ ID NO: 2640996 - RNA, 11 nt, Human papillomavirus type 16
aauaaagcauu

SEQ ID NO: 2640997 - RNA, 16 nt, Human papillomavirus type 16
cuauuacagugucuac

SEQ ID NO: 2640998 - RNA, 17 nt, Human papillomavirus type 16
gugucgucuacauggca

SEQ ID NO: 2640999 - RNA, 20 nt, Human papillomavirus type 16
uaugucuauaugacaaaucu

SEQ ID NO: 2641000 - RNA, 14 nt, Human papillomavirus type 16
aguguauuuaacug

SEQ ID NO: 2641001 - RNA, 23 nt, Human papillomavirus type 16
cacaugcguuguuuacugcacag

SEQ ID NO: 2641002 - RNA, 17 nt, Human papillomavirus type 16
augucuauaugacaaau

SEQ ID NO: 2641003 - RNA, 24 nt, Human papillomavirus type 16
uuggaugacacagaaaaugcuagu

SEQ ID NO: 2641004 - RNA, 13 nt, Human papillomavirus type 16
acuguuauuacuu

SEQ ID NO: 2641005 - RNA, 12 nt, Human papillomavirus type 16
aaguuguaugug

SEQ ID NO: 2641006 - RNA, 14 nt, Human papillomavirus type 16
uauacuauauuuug

SEQ ID NO: 2641007 - RNA, 12 nt, Human papillomavirus type 16
aaaaaaaacagg

SEQ ID NO: 2641008 - RNA, 23 nt, Human papillomavirus type 16
aaaauguuuaagauauagauuua

SEQ ID NO: 2641009 - RNA, 13 nt, Human papillomavirus type 16
gaaccggacagag

SEQ ID NO: 2641010 - RNA, 16 nt, Human papillomavirus type 16
auuuaaacauauuaac

SEQ ID NO: 2641011 - RNA, 17 nt, Human papillomavirus type 16
uaaaaagcauuguacau

SEQ ID NO: 2641012 - RNA, 19 nt, Human papillomavirus type 16
aaaugcuuguguaacuauu

SEQ ID NO: 2641013 - RNA, 13 nt, Human papillomavirus type 16
uauuacagugucu

SEQ ID NO: 2641014 - RNA, 21 nt, Human papillomavirus type 16
auaaugauuauuuaacacagg

SEQ ID NO: 2641015 - RNA, 22 nt, Human papillomavirus type 16
cuuuugucugugucuacauaca

SEQ ID NO: 2641016 - RNA, 14 nt, Human papillomavirus type 16
gcuggacaagcaga

SEQ ID NO: 2641017 - RNA, 15 nt, Human papillomavirus type 16
cagaaacagagacag

SEQ ID NO: 2641018 - RNA, 20 nt, Human papillomavirus type 16
cauguccaccugacauuaua

SEQ ID NO: 2641019 - RNA, 19 nt, Human papillomavirus type 16
caaaaacuauuacaguguc

SEQ ID NO: 2641020 - RNA, 23 nt, Human papillomavirus type 16
caauaaguuugguuuuccugaca

SEQ ID NO: 2641021 - RNA, 13 nt, Human papillomavirus type 16
aaacaugcaaaca

SEQ ID NO: 2641022 - RNA, 13 nt, Human papillomavirus type 16
acaacauuacugg

SEQ ID NO: 2641023 - RNA, 14 nt, Human papillomavirus type 16
uagauuaaaagcua

SEQ ID NO: 2641024 - RNA, 22 nt, Human papillomavirus type 16
agacauaugcaauacaaugcau

SEQ ID NO: 2641025 - RNA, 20 nt, Human papillomavirus type 16
auuugcaaccagagacaacu

SEQ ID NO: 2641026 - RNA, 11 nt, Human papillomavirus type 16
acauacacaug

SEQ ID NO: 2641027 - RNA, 22 nt, Human papillomavirus type 16
gcacaugcguuguuuacugcac

SEQ ID NO: 2641028 - RNA, 14 nt, Human papillomavirus type 16
auuccauugggaac

SEQ ID NO: 2641029 - RNA, 15 nt, Human papillomavirus type 16
cagcucagaggagga

SEQ ID NO: 2641030 - RNA, 22 nt, Human papillomavirus type 16
acauuacuggcgugcuuuuugc

SEQ ID NO: 2641031 - RNA, 20 nt, Human papillomavirus type 16
ugguaguccacuuagugaua

SEQ ID NO: 2641032 - RNA, 19 nt, Human papillomavirus type 16
aauuguuacacuuacauau

SEQ ID NO: 2641033 - RNA, 18 nt, Human papillomavirus type 16
agacauaugcaauacaau

SEQ ID NO: 2641034 - RNA, 15 nt, Human papillomavirus type 16
caaaacaacauagag

SEQ ID NO: 2641035 - RNA, 20 nt, Human papillomavirus type 16
ccucauuuuauaauccagau

SEQ ID NO: 2641036 - RNA, 14 nt, Human papillomavirus type 16
uuuugucugugucu

SEQ ID NO: 2641037 - RNA, 19 nt, Human papillomavirus type 16
uguaacuauugugucaugc

SEQ ID NO: 2641038 - RNA, 16 nt, Human papillomavirus type 16
caggcagaaacagaga

SEQ ID NO: 2641039 - RNA, 16 nt, Human papillomavirus type 16
cuaugguuuaaacuug

SEQ ID NO: 2641040 - RNA, 22 nt, Human papillomavirus type 16
cuuuuguugcaagugugacucu

SEQ ID NO: 2641041 - RNA, 18 nt, Human papillomavirus type 16
auuauacaaacuggacac

SEQ ID NO: 2641042 - RNA, 17 nt, Human papillomavirus type 16
acuuuaaaauguuuaag

SEQ ID NO: 2641043 - RNA, 15 nt, Human papillomavirus type 16
gauggagacauaugc

SEQ ID NO: 2641044 - RNA, 17 nt, Human papillomavirus type 16
auaaauaaacuuauugu

SEQ ID NO: 2641045 - RNA, 12 nt, Human papillomavirus type 16
aaauaaacuuau

SEQ ID NO: 2641046 - RNA, 19 nt, Human papillomavirus type 16
uuacaagcaauugaacugc

SEQ ID NO: 2641047 - RNA, 12 nt, Human papillomavirus type 16
uuaaaauguuua

SEQ ID NO: 2641048 - RNA, 20 nt, Human papillomavirus type 16
acgcuuuuuaauuacauaau

SEQ ID NO: 2641049 - RNA, 18 nt, Human papillomavirus type 16
cauagagaugcaguacag

SEQ ID NO: 2641050 - RNA, 19 nt, Human papillomavirus type 16
uaaaagugcaauuguuaca

SEQ ID NO: 2641051 - RNA, 22 nt, Human papillomavirus type 16
caggauguauaaaaaaacaugg

SEQ ID NO: 2641052 - RNA, 15 nt, Human papillomavirus type 16
uaugcagcaaaugca

SEQ ID NO: 2641053 - RNA, 15 nt, Human papillomavirus type 16
uauacugcagugucg

SEQ ID NO: 2641054 - RNA, 13 nt, Human papillomavirus type 16
cagcucagaggag

SEQ ID NO: 2641055 - RNA, 15 nt, Human papillomavirus type 16
uaauuguuacauaua

SEQ ID NO: 2641056 - RNA, 17 nt, Human papillomavirus type 16
auuacaagcaauugaac

SEQ ID NO: 2641057 - RNA, 16 nt, Human papillomavirus type 16
aaaucuugauacugca

SEQ ID NO: 2641058 - RNA, 22 nt, Human papillomavirus type 16
ggccagagaaaugggauuuaaa

SEQ ID NO: 2641059 - RNA, 21 nt, Human papillomavirus type 16
uuacuauuguggauaacagca

SEQ ID NO: 2641060 - RNA, 17 nt, Human papillomavirus type 16
aguguauuuaacugcac

SEQ ID NO: 2641061 - RNA, 14 nt, Human papillomavirus type 16
uauuacuauugugg

SEQ ID NO: 2641062 - RNA, 14 nt, Human papillomavirus type 16
auauuaaguuguau

SEQ ID NO: 2641063 - RNA, 15 nt, Human papillomavirus type 16
caucaguaacugugg

SEQ ID NO: 2641064 - RNA, 13 nt, Human papillomavirus type 16
acagcuacagaua

SEQ ID NO: 2641065 - RNA, 16 nt, Human papillomavirus type 16
aacucacaauauagua

SEQ ID NO: 2641066 - RNA, 12 nt, Human papillomavirus type 16
aacauccagacu

SEQ ID NO: 2641067 - RNA, 22 nt, Human papillomavirus type 16
uaaaugcuuguguaacuauugu

SEQ ID NO: 2641068 - RNA, 21 nt, Human papillomavirus type 16
ugcugaacaaauauuacaaua

SEQ ID NO: 2641069 - RNA, 23 nt, Human papillomavirus type 16
auauaauuguuguauaccauaac

SEQ ID NO: 2641070 - RNA, 21 nt, Human papillomavirus type 16
gacauucguacuuuggaagac

SEQ ID NO: 2641071 - RNA, 14 nt, Human papillomavirus type 16
auuuuugucucaag

SEQ ID NO: 2641072 - RNA, 16 nt, Human papillomavirus type 16
gauccugcagguacca

SEQ ID NO: 2641073 - RNA, 19 nt, Human papillomavirus type 16
gcaaacaggcagguacaug

SEQ ID NO: 2641074 - RNA, 17 nt, Human papillomavirus type 16
auuggacaggacauaau

SEQ ID NO: 2641075 - RNA, 21 nt, Human papillomavirus type 16
acauaugcaauacaaugcauu

SEQ ID NO: 2641076 - RNA, 22 nt, Human papillomavirus type 16
uugucucaaguuaaaauaccaa

SEQ ID NO: 2641077 - RNA, 23 nt, Human papillomavirus type 16
gaugacgagaacgaaaaugacag

SEQ ID NO: 2641078 - RNA, 15 nt, Human papillomavirus type 16
caauggggaagaggg

SEQ ID NO: 2641079 - RNA, 13 nt, Human papillomavirus type 16
agaaacaauauau

SEQ ID NO: 2641080 - RNA, 18 nt, Human papillomavirus type 16
gcaaaacaacauagagau

SEQ ID NO: 2641081 - RNA, 16 nt, Human papillomavirus type 16
cauccacaacauuacu

SEQ ID NO: 2641082 - RNA, 17 nt, Human papillomavirus type 16
uaaaagugcaauuguua

SEQ ID NO: 2641083 - RNA, 15 nt, Human papillomavirus type 16
aucaguaacuguggu

SEQ ID NO: 2641084 - RNA, 14 nt, Human papillomavirus type 16
cauuauacaaacug

SEQ ID NO: 2641085 - RNA, 18 nt, Human papillomavirus type 16
ugacacagaaaaugcuag

SEQ ID NO: 2641086 - RNA, 20 nt, Human papillomavirus type 16
aguggccauccuuuauuaaa

SEQ ID NO: 2641087 - RNA, 20 nt, Human papillomavirus type 16
auguauaaaaaaacauggau

SEQ ID NO: 2641088 - RNA, 22 nt, Human papillomavirus type 16
cuauugcugaacaaauauuaca

SEQ ID NO: 2641089 - RNA, 22 nt, Human papillomavirus type 16
auuugugaagaagcaucaguaa

SEQ ID NO: 2641090 - RNA, 18 nt, Human papillomavirus type 16
gugggcauuaguggccau

SEQ ID NO: 2641091 - RNA, 22 nt, Human papillomavirus type 16
ggaagcaaaacaacauagagau

SEQ ID NO: 2641092 - RNA, 12 nt, Human papillomavirus type 16
aaauaguucuau

SEQ ID NO: 2641093 - RNA, 21 nt, Human papillomavirus type 16
cugcagguaccaauggggaag

SEQ ID NO: 2641094 - RNA, 16 nt, Human papillomavirus type 16
agcaauugaacugcaa

SEQ ID NO: 2641095 - RNA, 17 nt, Human papillomavirus type 16
ucagaggaggaggauga

SEQ ID NO: 2641096 - RNA, 17 nt, Human papillomavirus type 16
cauuacuggcgugcuuu

SEQ ID NO: 2641097 - RNA, 24 nt, Human papillomavirus type 16
gaagcaaaacaacauagagaugca

SEQ ID NO: 2641098 - RNA, 23 nt, Human papillomavirus type 16
auuuaacacaggcagaaacagag

SEQ ID NO: 2641099 - RNA, 19 nt, Human papillomavirus type 16
guuaaugggcacacuagga

SEQ ID NO: 2641100 - RNA, 17 nt, Human papillomavirus type 16
guuacacuuacauauga

SEQ ID NO: 2641101 - RNA, 23 nt, Human papillomavirus type 16
agcagaaccggacagagcccauu

SEQ ID NO: 2641102 - RNA, 13 nt, Human papillomavirus type 16
auauaaacuauau

SEQ ID NO: 2641103 - RNA, 22 nt, Human papillomavirus type 16
gcuuaugcagcaaaugcaggug

SEQ ID NO: 2641104 - RNA, 13 nt, Human papillomavirus type 16
uugaaguguauuu

SEQ ID NO: 2641105 - RNA, 23 nt, Human papillomavirus type 16
uuguuacauauaauuguuguaua

SEQ ID NO: 2641106 - RNA, 14 nt, Human papillomavirus type 16
uauguagaggcugu

SEQ ID NO: 2641107 - RNA, 20 nt, Human papillomavirus type 16
aaagcacacacguagacauu

SEQ ID NO: 2641108 - RNA, 14 nt, Human papillomavirus type 16
gacagugauacagg

SEQ ID NO: 2641109 - RNA, 23 nt, Human papillomavirus type 16
cacaauauaguaaugaaaagugg

SEQ ID NO: 2641110 - RNA, 18 nt, Human papillomavirus type 16
acacguguguauguguuu

SEQ ID NO: 2641111 - RNA, 13 nt, Human papillomavirus type 16
uauauguuuguau

SEQ ID NO: 2641112 - RNA, 15 nt, Human papillomavirus type 16
ccagcuggacaagca

SEQ ID NO: 2641113 - RNA, 16 nt, Human papillomavirus type 16
auaaacacguguguau

SEQ ID NO: 2641114 - RNA, 22 nt, Human papillomavirus type 16
uagauuaaaagcuauauguaua

SEQ ID NO: 2641115 - RNA, 12 nt, Human papillomavirus type 16
uaauuacauaau

SEQ ID NO: 2641116 - RNA, 19 nt, Human papillomavirus type 16
cucauuuuauaauccagau

SEQ ID NO: 2641117 - RNA, 15 nt, Human papillomavirus type 16
gacagugauacaggu

SEQ ID NO: 2641118 - RNA, 17 nt, Human papillomavirus type 16
cuauaugacaaaucuug

SEQ ID NO: 2641119 - RNA, 22 nt, Human papillomavirus type 16
auguuagauuugcaaccagaga

SEQ ID NO: 2641120 - RNA, 10 nt, Human papillomavirus type 16
cugugucuac

SEQ ID NO: 2641121 - RNA, 14 nt, Human papillomavirus type 16
cacguguguaugug

SEQ ID NO: 2641122 - RNA, 17 nt, Human papillomavirus type 16
acugcauccacaacauu

SEQ ID NO: 2641123 - RNA, 12 nt, Human papillomavirus type 16
agcaucaguaac

SEQ ID NO: 2641124 - RNA, 18 nt, Human papillomavirus type 16
cuuugcuuugugugcuuu

SEQ ID NO: 2641125 - RNA, 22 nt, Human papillomavirus type 16
auguuuaagauauagauuuaaa

SEQ ID NO: 2641126 - RNA, 13 nt, Human papillomavirus type 16
uuuauuguauaua

SEQ ID NO: 2641127 - RNA, 18 nt, Human papillomavirus type 16
aacucacaauauaguaau

SEQ ID NO: 2641128 - RNA, 15 nt, Human papillomavirus type 16
gaugaaauagauggu

SEQ ID NO: 2641129 - RNA, 13 nt, Human papillomavirus type 16
uggaagugcaguu

SEQ ID NO: 2641130 - RNA, 16 nt, Human papillomavirus type 16
acuaugguuuaaacuu

SEQ ID NO: 2641131 - RNA, 13 nt, Human papillomavirus type 16
auaauuguuguau

SEQ ID NO: 2641132 - RNA, 21 nt, Human papillomavirus type 16
ugugguuauucauuguauaua

SEQ ID NO: 2641133 - RNA, 14 nt, Human papillomavirus type 16
uacuuuaaaauguu

SEQ ID NO: 2641134 - RNA, 21 nt, Human papillomavirus type 16
ugaagaagcaucaguaacugu

SEQ ID NO: 2641135 - RNA, 19 nt, Human papillomavirus type 16
uuguuacauauaauuguug

SEQ ID NO: 2641136 - RNA, 18 nt, Human papillomavirus type 16
ugucuacauacacaucau

SEQ ID NO: 2641137 - RNA, 17 nt, Human papillomavirus type 16
ccauauagacuauugga

SEQ ID NO: 2641138 - RNA, 16 nt, Human papillomavirus type 16
gucggguacaggcgga

SEQ ID NO: 2641139 - RNA, 15 nt, Human papillomavirus type 16
auuauauuuguuuau

SEQ ID NO: 2641140 - RNA, 16 nt, Human papillomavirus type 16
caguuugauggagaca

SEQ ID NO: 2641141 - RNA, 13 nt, Human papillomavirus type 16
uuuguuguguaua

SEQ ID NO: 2641142 - RNA, 13 nt, Human papillomavirus type 16
gaagaggguacgg

SEQ ID NO: 2641143 - RNA, 16 nt, Human papillomavirus type 16
caggaacauccagacu

SEQ ID NO: 2641144 - RNA, 20 nt, Human papillomavirus type 16
uuauuugaaagcgaagacag

SEQ ID NO: 2641145 - RNA, 21 nt, Human papillomavirus type 16
uaugucuauaugacaaaucuu

SEQ ID NO: 2641146 - RNA, 13 nt, Human papillomavirus type 16
acaaaauguguuu

SEQ ID NO: 2641147 - RNA, 15 nt, Human papillomavirus type 16
cagaaccggacagag

SEQ ID NO: 2641148 - RNA, 13 nt, Human papillomavirus type 16
cuacauacacauc

SEQ ID NO: 2641149 - RNA, 21 nt, Human papillomavirus type 16
aauaaacuguuauuacuuaac

SEQ ID NO: 2641150 - RNA, 13 nt, Human papillomavirus type 16
caccuacauugca

SEQ ID NO: 2641151 - RNA, 21 nt, Human papillomavirus type 16
guuucaacaccuacuaauugu

SEQ ID NO: 2641152 - RNA, 21 nt, Human papillomavirus type 16
aacugcaacuaacguuagaaa

SEQ ID NO: 2641153 - RNA, 13 nt, Human papillomavirus type 16
acugcagugucgu

SEQ ID NO: 2641154 - RNA, 15 nt, Human papillomavirus type 16
auggagacauaugca

SEQ ID NO: 2641155 - RNA, 12 nt, Human papillomavirus type 16
uuuauuaaauaa

SEQ ID NO: 2641156 - RNA, 23 nt, Human papillomavirus type 16
gaauauguugcacgcacaaacau

SEQ ID NO: 2641157 - RNA, 19 nt, Human papillomavirus type 16
uggagacauaugcaauaca

SEQ ID NO: 2641158 - RNA, 16 nt, Human papillomavirus type 16
uaaaaagcauuguaca

SEQ ID NO: 2641159 - RNA, 17 nt, Human papillomavirus type 16
aaacauggauauacagu

SEQ ID NO: 2641160 - RNA, 20 nt, Human papillomavirus type 16
agcuucaaccgaauucgguu

SEQ ID NO: 2641161 - RNA, 13 nt, Human papillomavirus type 16
auuuaccugaccc

SEQ ID NO: 2641162 - RNA, 17 nt, Human papillomavirus type 16
caugcaaacaggcaggu

SEQ ID NO: 2641163 - RNA, 15 nt, Human papillomavirus type 16
caaguggugccaaca

SEQ ID NO: 2641164 - RNA, 19 nt, Human papillomavirus type 16
aacauccagacuacuugca

SEQ ID NO: 2641165 - RNA, 15 nt, Human papillomavirus type 16
acgaaaguauuuggu

SEQ ID NO: 2641166 - RNA, 15 nt, Human papillomavirus type 16
uagaaugugcuauuu

SEQ ID NO: 2641167 - RNA, 16 nt, Human papillomavirus type 16
gaugguccagcuggac

SEQ ID NO: 2641168 - RNA, 20 nt, Human papillomavirus type 16
uuggcacaaaauguguuuuu

SEQ ID NO: 2641169 - RNA, 20 nt, Human papillomavirus type 16
caguuugauggagacauaug

SEQ ID NO: 2641170 - RNA, 19 nt, Human papillomavirus type 16
uguauguugaauuaguguu

SEQ ID NO: 2641171 - RNA, 17 nt, Human papillomavirus type 16
aacauggauauacagug

SEQ ID NO: 2641172 - RNA, 14 nt, Human papillomavirus type 16
caugaauauauguu

SEQ ID NO: 2641173 - RNA, 22 nt, Human papillomavirus type 16
caaugcauuauacaaacuggac

SEQ ID NO: 2641174 - RNA, 13 nt, Human papillomavirus type 16
uuuaaaugcuugu

SEQ ID NO: 2641175 - RNA, 22 nt, Human papillomavirus type 16
uuguaaauauuaaguuguaugu

SEQ ID NO: 2641176 - RNA, 21 nt, Human papillomavirus type 16
ccaaguggugccaacacuggc

SEQ ID NO: 2641177 - RNA, 18 nt, Human papillomavirus type 16
gaaaaacaaaguagagcu

SEQ ID NO: 2641178 - RNA, 23 nt, Human papillomavirus type 16
auauauaacucacaauauaguaa

SEQ ID NO: 2641179 - RNA, 16 nt, Human papillomavirus type 16
gcuuuugugugucugc

SEQ ID NO: 2641180 - RNA, 14 nt, Human papillomavirus type 16
auuuaaaaagcauu

SEQ ID NO: 2641181 - RNA, 16 nt, Human papillomavirus type 16
uaacuauugugucaug

SEQ ID NO: 2641182 - RNA, 14 nt, Human papillomavirus type 16
uuaauuacauaaug

SEQ ID NO: 2641183 - RNA, 18 nt, Human papillomavirus type 16
uuguacguuuccugcuug

SEQ ID NO: 2641184 - RNA, 21 nt, Human papillomavirus type 16
aguggaaaaaaaaacagggga

SEQ ID NO: 2641185 - RNA, 19 nt, Human papillomavirus type 16
acccaacuuuauaaaacau

SEQ ID NO: 2641186 - RNA, 22 nt, Human papillomavirus type 16
aaugugcuauuuauuacaaggc

SEQ ID NO: 2641187 - RNA, 15 nt, Human papillomavirus type 16
uugguauuacuauug

SEQ ID NO: 2641188 - RNA, 14 nt, Human papillomavirus type 16
uuuuuauuuucaua

SEQ ID NO: 2641189 - RNA, 17 nt, Human papillomavirus type 16
auaaacacguguguaug

SEQ ID NO: 2641190 - RNA, 17 nt, Human papillomavirus type 16
cugaucucuacuguuau

SEQ ID NO: 2641191 - RNA, 19 nt, Human
ggauuuaaaagccugcuca

SEQ ID NO: 2641192 - RNA, 16 nt, Human
ggauuuaaaagccugc

SEQ ID NO: 2641193 - RNA, 17 nt, Human
ggauuuaaaagccugcu

SEQ ID NO: 2641194 - RNA, 18 nt, Human
ggauuuaaaagccugcuc

SEQ ID NO: 2641195 - RNA, 12 nt, Human
aaaaaaagauga

SEQ ID NO: 2641196 - RNA, 18 nt, Human
aaaaaaacaguggaucac

SEQ ID NO: 2641197 - RNA, 15 nt, Human
ggccugcccaguugc

SEQ ID NO: 2641198 - RNA, 21 nt, Human
ggccuguugcuauagagccua

SEQ ID NO: 2641199 - RNA, 24 nt, Human
ggccuguugcuauagagccuaccu

SEQ ID NO: 2641200 - RNA, 15 nt, Human
ggccuuagggcacug

SEQ ID NO: 2641201 - RNA, 20 nt, Human
ggccuuagggcacugggcug

SEQ ID NO: 2641202 - RNA, 12 nt, Human
ggcuaauuuaac

SEQ ID NO: 2641203 - RNA, 13 nt, Human
ggcuaauuuaaca

SEQ ID NO: 2641204 - RNA, 15 nt, Human
gguagguugggacac

SEQ ID NO: 2641205 - RNA, 17 nt, Human
gguagguugggacacca

SEQ ID NO: 2641206 - RNA, 19 nt, Human
aaacuguuggaauggauuu

SEQ ID NO: 2641207 - RNA, 19 nt, Human
gggucaagaaacagccagc

SEQ ID NO: 2641208 - RNA, 14 nt, Human
aaagcugauuuuuu

SEQ ID NO: 2641209 - RNA, 20 nt, Human
aaagguuuaagaaauagaau

SEQ ID NO: 2641210 - RNA, 18 nt, Human
gcuguuguuccauugaag

SEQ ID NO: 2641211 - RNA, 13 nt, Human
ggaaaucuuaaac

SEQ ID NO: 2641212 - RNA, 22 nt, Human
gcuaguuauacuuauuuguaua

SEQ ID NO: 2641213 - RNA, 12 nt, Human
gaucaaagauga

SEQ ID NO: 2641214 - RNA, 15 nt, Human
gaucaaagaugaaaa

SEQ ID NO: 2641215 - RNA, 18 nt, Human
gaucaaagaugaaaagua

SEQ ID NO: 2641216 - RNA, 15 nt, Human
gagccccuccuccag

SEQ ID NO: 2641217 - RNA, 17 nt, Human
gagccccuccuccagcc

SEQ ID NO: 2641218 - RNA, 20 nt, Human
gagccccuccuccagccccu

SEQ ID NO: 2641219 - RNA, 21 nt, Human
gagccccuccuccagccccug

SEQ ID NO: 2641220 - RNA, 22 nt, Human
gagccccuccuccagccccugu

SEQ ID NO: 2641221 - RNA, 17 nt, Human
gaggacucccaacccug

SEQ ID NO: 2641222 - RNA, 18 nt, Human
gaggacucccaacccugg

SEQ ID NO: 2641223 - RNA, 20 nt, Human
gaggacucccaacccuggcu

SEQ ID NO: 2641224 - RNA, 21 nt, Human
gaggacucccaacccuggcuu

SEQ ID NO: 2641225 - RNA, 14 nt, Human
cuuccauuuucccc

SEQ ID NO: 2641226 - RNA, 19 nt, Human
cuuccauuuucccccacua

SEQ ID NO: 2641227 - RNA, 22 nt, Human
cuuccauuuucccccacuacug

SEQ ID NO: 2641228 - RNA, 23 nt, Human
cuuccauuuucccccacuacugc

SEQ ID NO: 2641229 - RNA, 21 nt, Human
cuuuaacugccguaauuuaac

SEQ ID NO: 2641230 - RNA, 23 nt, Human
cuuuaacugccguaauuuaacuu

SEQ ID NO: 2641231 - RNA, 13 nt, Human
gaaagaauagaac

SEQ ID NO: 2641232 - RNA, 14 nt, Human
cuuaaacuaaaugu

SEQ ID NO: 2641233 - RNA, 15 nt, Human
cuuaaacuaaaugug

SEQ ID NO: 2641234 - RNA, 18 nt, Human
cuguugcuauagagccua

SEQ ID NO: 2641235 - RNA, 23 nt, Human
cuguugcuauagagccuaccugu

SEQ ID NO: 2641236 - RNA, 12 nt, Human
cuguaaagaugu

SEQ ID NO: 2641237 - RNA, 16 nt, Human
cuguaaagauguuuau

SEQ ID NO: 2641238 - RNA, 21 nt, Human
cuguaaagauguuuauuucag

SEQ ID NO: 2641239 - RNA, 22 nt, Human
cuguaaagauguuuauuucagg

SEQ ID NO: 2641240 - RNA, 14 nt, Human
cugaggacugauuu

SEQ ID NO: 2641241 - RNA, 22 nt, Human
cugaggacugauuucagaguga

SEQ ID NO: 2641242 - RNA, 15 nt, Human
cucuaaaauuauaaa

SEQ ID NO: 2641243 - RNA, 17 nt, Human
cucuaaaauuauaaaug

SEQ ID NO: 2641244 - RNA, 16 nt, Human
cgacucuggcccuggc

SEQ ID NO: 2641245 - RNA, 18 nt, Human
cgacucuggcccuggccc

SEQ ID NO: 2641246 - RNA, 15 nt, Human
cuacaguuuuaacug

SEQ ID NO: 2641247 - RNA, 18 nt, Human
ccugcagcaaacacucca

SEQ ID NO: 2641248 - RNA, 19 nt, Human
ccugcagcaaacacuccac

SEQ ID NO: 2641249 - RNA, 21 nt, Human
ccugcagcaaacacuccaccc

SEQ ID NO: 2641250 - RNA, 24 nt, Human
ccugcagcaaacacuccacccucc

SEQ ID NO: 2641251 - RNA, 14 nt, Human
cccuaucuguauuc

SEQ ID NO: 2641252 - RNA, 19 nt, Human
ccauugaagccgacucugg

SEQ ID NO: 2641253 - RNA, 20 nt, Human
ccauugaagccgacucuggc

SEQ ID NO: 2641254 - RNA, 23 nt, Human
ccauugaagccgacucuggcccu

SEQ ID NO: 2641255 - RNA, 11 nt, Human
ccagccccugu

SEQ ID NO: 2641256 - RNA, 13 nt, Human
ccagccccugucc

SEQ ID NO: 2641257 - RNA, 17 nt, Human
ccagccccugucccacc

SEQ ID NO: 2641258 - RNA, 23 nt, Human
auuucagagugacuacacacagu

SEQ ID NO: 2641259 - RNA, 15 nt, Human
auuguaaaaauggca

SEQ ID NO: 2641260 - RNA, 15 nt, Human
caacaaagaaacaaa

SEQ ID NO: 2641261 - RNA, 12 nt, Human
caaagaugaaaa

SEQ ID NO: 2641262 - RNA, 16 nt, Human
caauaaacaacagcug

SEQ ID NO: 2641263 - RNA, 21 nt, Human
caauaaacaacagcugaagca

SEQ ID NO: 2641264 - RNA, 12 nt, Human
cacuacugcagc

SEQ ID NO: 2641265 - RNA, 13 nt, Human
cacuacugcagca

SEQ ID NO: 2641266 - RNA, 16 nt, Human
cacuacugcagcaccu

SEQ ID NO: 2641267 - RNA, 17 nt, Human
cacuacugcagcaccuc

SEQ ID NO: 2641268 - RNA, 19 nt, Human
cacuacugcagcaccucca

SEQ ID NO: 2641269 - RNA, 20 nt, Human
cacuggucuguuugcauuug

SEQ ID NO: 2641270 - RNA, 16 nt, Human
cagaaauucaauuugg

SEQ ID NO: 2641271 - RNA, 20 nt, Human
cagaaauucaauuuggauuu

SEQ ID NO: 2641272 - RNA, 20 nt, Human
guguuugcagccugcucuag

SEQ ID NO: 2641273 - RNA, 15 nt, Human
uaaaauuauuucaug

SEQ ID NO: 2641274 - RNA, 18 nt, Human
guuucaacggaaagugcu

SEQ ID NO: 2641275 - RNA, 15 nt, Human
guuuugcacagccaa

SEQ ID NO: 2641276 - RNA, 15 nt, Human
guuuuaacuguggau

SEQ ID NO: 2641277 - RNA, 21 nt, Human
aacacacaggugcaacagacu

SEQ ID NO: 2641278 - RNA, 18 nt, Human
aaauuucuguaaaacagg

SEQ ID NO: 2641279 - RNA, 17 nt, Human
gucuuaaacuaaaugug

SEQ ID NO: 2641280 - RNA, 22 nt, Human
gucuuaaacuaaaugugcaaua

SEQ ID NO: 2641281 - RNA, 14 nt, Human
gugacagcuuccuu

SEQ ID NO: 2641282 - RNA, 14 nt, Human
aagaaacagccagc

SEQ ID NO: 2641283 - RNA, 14 nt, Human
aagaaacaaagaug

SEQ ID NO: 2641284 - RNA, 15 nt, Human
aagaaacaaagaugu

SEQ ID NO: 2641285 - RNA, 19 nt, Human
aagaagagcgagagaucaa

SEQ ID NO: 2641286 - RNA, 22 nt, Human
aagaagagcgagagaucaaaga

SEQ ID NO: 2641287 - RNA, 23 nt, Human
aagaagagcgagagaucaaagau

SEQ ID NO: 2641288 - RNA, 18 nt, Human
aacuguggauauuguuac

SEQ ID NO: 2641289 - RNA, 11 nt, Human
aacuguggaua

SEQ ID NO: 2641290 - RNA, 13 nt, Human
aacuguggauauu

SEQ ID NO: 2641291 - RNA, 14 nt, Human
aacuguggauauug

SEQ ID NO: 2641292 - RNA, 16 nt, Human
aacugccguaauuuaa

SEQ ID NO: 2641293 - RNA, 17 nt, Human
aacugccguaauuuaac

SEQ ID NO: 2641294 - RNA, 18 nt, Human
aacugccguaauuuaacu

SEQ ID NO: 2641295 - RNA, 12 nt, Human
gugcaauagaag

SEQ ID NO: 2641296 - RNA, 22 nt, Human
uagcugugugaauaccugcuca

SEQ ID NO: 2641297 - RNA, 15 nt, Human
uagauaugaaagcug

SEQ ID NO: 2641298 - RNA, 20 nt, Human
aauuguguuuuaauuguaaa

SEQ ID NO: 2641299 - RNA, 15 nt, Human
acaguacccaaacug

SEQ ID NO: 2641300 - RNA, 15 nt, Human
uacuguauauucagg

SEQ ID NO: 2641301 - RNA, 16 nt, Human
uacuaaaaaaaagaug

SEQ ID NO: 2641302 - RNA, 18 nt, Human
uacuaaaaaaaagaugaa

SEQ ID NO: 2641303 - RNA, 14 nt, Human
aauuaccuguggau

SEQ ID NO: 2641304 - RNA, 21 nt, Human
uaccugcucacgucaaaugca

SEQ ID NO: 2641305 - RNA, 15 nt, Human
aaugugcaauagaag

SEQ ID NO: 2641306 - RNA, 17 nt, Human
aaugugcaauagaaggu

SEQ ID NO: 2641307 - RNA, 13 nt, Human
aauggauuuuucu

SEQ ID NO: 2641308 - RNA, 17 nt, Human
aauggauuuuucuuuaa

SEQ ID NO: 2641309 - RNA, 18 nt, Human
aauggauuuuucuuuaac

SEQ ID NO: 2641310 - RNA, 20 nt, Human
aauggauuuuucuuuaacug

SEQ ID NO: 2641311 - RNA, 16 nt, Human
aaucuuuauaaaugua

SEQ ID NO: 2641312 - RNA, 13 nt, Human
uaacuuucugggu

SEQ ID NO: 2641313 - RNA, 14 nt, Human
uaacaguguuuaaa

SEQ ID NO: 2641314 - RNA, 20 nt, Human
ucacaaaauauauuuuguuu

SEQ ID NO: 2641315 - RNA, 16 nt, Human
accaaaacaguuaauc

SEQ ID NO: 2641316 - RNA, 14 nt, Human
ucaacaaagaaaca

SEQ ID NO: 2641317 - RNA, 20 nt, Human
ucaacaaagaaacaaagaug

SEQ ID NO: 2641318 - RNA, 21 nt, Human
ucaacaaagaaacaaagaugu

SEQ ID NO: 2641319 - RNA, 14 nt, Human
accuccaggccugu

SEQ ID NO: 2641320 - RNA, 15 nt, Human
accuccaggccuguu

SEQ ID NO: 2641321 - RNA, 12 nt, Human
acuacugcagca

SEQ ID NO: 2641322 - RNA, 13 nt, Human
acuacugcagcac

SEQ ID NO: 2641323 - RNA, 15 nt, Human
acuacugcagcaccu

SEQ ID NO: 2641324 - RNA, 20 nt, Human
acguccaucacguuagcugu

SEQ ID NO: 2641325 - RNA, 21 nt, Human
uccaguauaagacuacugaau

SEQ ID NO: 2641326 - RNA, 18 nt, Human
acgccucacugaaacaug

SEQ ID NO: 2641327 - RNA, 22 nt, Human
acgccucacugaaacauggcug

SEQ ID NO: 2641328 - RNA, 23 nt, Human
accuugaaaaaaaacaguggauc

SEQ ID NO: 2641329 - RNA, 17 nt, Human
uccuagcugugugaaua

SEQ ID NO: 2641330 - RNA, 17 nt, Human
agaauagaacacaguuu

SEQ ID NO: 2641331 - RNA, 15 nt, Human
acuugcuucucuagc

SEQ ID NO: 2641332 - RNA, 16 nt, Human
acuugcuucucuagcu

SEQ ID NO: 2641333 - RNA, 22 nt, Human
acuuugaccuaaauuauuuacu

SEQ ID NO: 2641334 - RNA, 14 nt, Human
acuuugacaguguu

SEQ ID NO: 2641335 - RNA, 18 nt, Human
acuuugacaguguuuuua

SEQ ID NO: 2641336 - RNA, 20 nt, Human
acuuugaccuaaauuauuua

SEQ ID NO: 2641337 - RNA, 15 nt, Human
acuuacaucaugugu

SEQ ID NO: 2641338 - RNA, 14 nt, Human
ucuauaaacuauaa

SEQ ID NO: 2641339 - RNA, 21 nt, Human
ucuauaaacuauaaccucucc

SEQ ID NO: 2641340 - RNA, 19 nt, Human
ugaaugccuaugguggauc

SEQ ID NO: 2641341 - RNA, 15 nt, Human
agcaccuccaggccu

SEQ ID NO: 2641342 - RNA, 16 nt, Human
agcaccuccaggccug

SEQ ID NO: 2641343 - RNA, 17 nt, Human
agcaccuccaggccugu

SEQ ID NO: 2641344 - RNA, 22 nt, Human
agagacugaauagauaugaaag

SEQ ID NO: 2641345 - RNA, 20 nt, Human
ugugaagcaaacucuaaaau

SEQ ID NO: 2641346 - RNA, 17 nt, Human
agggugacagcuuccuu

SEQ ID NO: 2641347 - RNA, 11 nt, Human
uguaaagaugu

SEQ ID NO: 2641348 - RNA, 17 nt, Human
uguagaacucacucugg

SEQ ID NO: 2641349 - RNA, 19 nt, Human
uguagaacucacucugggc

SEQ ID NO: 2641350 - RNA, 20 nt, Human
uguagaacucacucugggcu

SEQ ID NO: 2641351 - RNA, 21 nt, Human
uguagaacucacucugggcug

SEQ ID NO: 2641352 - RNA, 19 nt, Human
uguaaggauccggaaagaa

SEQ ID NO: 2641353 - RNA, 21 nt, Human
uguaaggauccggaaagaaga

SEQ ID NO: 2641354 - RNA, 23 nt, Human
uuauaaauguaccagagagaguu

SEQ ID NO: 2641355 - RNA, 17 nt, Human
uuauaacuguaaagaug

SEQ ID NO: 2641356 - RNA, 18 nt, Human
uuauaacuguaaagaugu

SEQ ID NO: 2641357 - RNA, 20 nt, Human
aguuauacuuauuuguauau

SEQ ID NO: 2641358 - RNA, 14 nt, Human
aguuaggggccuua

SEQ ID NO: 2641359 - RNA, 14 nt, Human
aguuccuuuagaaa

SEQ ID NO: 2641360 - RNA, 20 nt, Human
uguuggggaagggccugccc

SEQ ID NO: 2641361 - RNA, 23 nt, Human
uuaaacgcucuagguacgaugac

SEQ ID NO: 2641362 - RNA, 22 nt, Human
agccuccaccccacaacccaaa

SEQ ID NO: 2641363 - RNA, 16 nt, Human
ugcaauagaaggugau

SEQ ID NO: 2641364 - RNA, 21 nt, Human
aggccaaagagucuccaguuu

SEQ ID NO: 2641365 - RNA, 21 nt, Human
aggccucuccaguuugcaccu

SEQ ID NO: 2641366 - RNA, 23 nt, Human
aggccucuccaguuugcaccugu

SEQ ID NO: 2641367 - RNA, 24 nt, Human
aggccucuccaguuugcaccuguc

SEQ ID NO: 2641368 - RNA, 21 nt, Human
uggcuguguuugcagccugcu

SEQ ID NO: 2641369 - RNA, 22 nt, Human
uggcugcccaucauguggcccc

SEQ ID NO: 2641370 - RNA, 16 nt, Human
aggcuccuguuuugca

SEQ ID NO: 2641371 - RNA, 22 nt, Human
aggcuccuguuuugcacagcca

SEQ ID NO: 2641372 - RNA, 14 nt, Human
ugcugucuuaaacu

SEQ ID NO: 2641373 - RNA, 21 nt, Human
ugcugucuuaaacuaaaugug

SEQ ID NO: 2641374 - RNA, 13 nt, Human
ugcugucuuaaac

SEQ ID NO: 2641375 - RNA, 14 nt, Human
ugcuucacaauguu

SEQ ID NO: 2641376 - RNA, 15 nt, Human
aggagcugauacuuu

SEQ ID NO: 2641377 - RNA, 18 nt, Human
aggaggcaccuacacuca

SEQ ID NO: 2641378 - RNA, 22 nt, Human
aucccugaggacugauuucaga

SEQ ID NO: 2641379 - RNA, 15 nt, Human
aucccugaggacuga

SEQ ID NO: 2641380 - RNA, 18 nt, Human
aucccugaggacugauuu

SEQ ID NO: 2641381 - RNA, 13 nt, Human
auccaguauaaga

SEQ ID NO: 2641382 - RNA, 14 nt, Human
uugacaguguuuuu

SEQ ID NO: 2641383 - RNA, 18 nt, Human
uugauaaccuugaaaaaa

SEQ ID NO: 2641384 - RNA, 17 nt, Human
auaugaaagcugauuuu

SEQ ID NO: 2641385 - RNA, 13 nt, Human
auaugaaagcuga

SEQ ID NO: 2641386 - RNA, 16 nt, Human
auauauuuuguuuaca

SEQ ID NO: 2641387 - RNA, 16 nt, Human
augccuaugguggauc

SEQ ID NO: 2641388 - RNA, 19 nt, Human
augccuaugguggauccaa

SEQ ID NO: 2641389 - RNA, 21 nt, Human
augccuaugguggauccaaac

SEQ ID NO: 2641390 - RNA, 16 nt, Human
uuucguaacacagcau

SEQ ID NO: 2641391 - RNA, 21 nt, Human
uuugaaagaauagaacacagu

SEQ ID NO: 2641392 - RNA, 12 nt, Human
uuucuuuaacug

SEQ ID NO: 2641393 - RNA, 13 nt, Human
uuucuuuaacugc

SEQ ID NO: 2641394 - RNA, 15 nt, Human
uuucuggauuucaua

SEQ ID NO: 2641395 - RNA, 9 nt, Human
uuucuuuuc

SEQ ID NO: 2641396 - RNA, 17 nt, Human
augacaguguuccccga

SEQ ID NO: 2641397 - RNA, 16 nt, Human
uuguguggauucuuua

SEQ ID NO: 2641398 - RNA, 23 nt, Human
uuggggucaagaaacagccagca

SEQ ID NO: 2641399 - RNA, 15 nt, Human
auuuguuuuggauau

SEQ ID NO: 2641400 - RNA, 16 nt, Human
auuuguuuuggauaua

SEQ ID NO: 2641401 - RNA, 13 nt, Human
auugggguaguug

SEQ ID NO: 2641402 - RNA, 14 nt, Human
auguggccccaccc

SEQ ID NO: 2641403 - RNA, 22 nt, Human
auguugccauccuaccgucuuu

SEQ ID NO: 2641404 - RNA, 14 nt, Human
auguuaaguuauau

SEQ ID NO: 2641405 - RNA, 22 nt, Human
auguguuggggaagggccugcc

SEQ ID NO: 2641406 - RNA, 17 nt, Human
uuuugcacagccaaauu

SEQ ID NO: 2641407 - RNA, 13 nt, Human
aagaaauggugaa

SEQ ID NO: 2641408 - RNA, 19 nt, Human
aaucugcuaccaaaacagu

SEQ ID NO: 2641409 - RNA, 13 nt, Human
aaaacacacaggu

SEQ ID NO: 2641410 - RNA, 21 nt, Human
aacugauccaguauaagacua

SEQ ID NO: 2641411 - RNA, 11 nt, Human
aacaaagaaac

SEQ ID NO: 2641412 - RNA, 14 nt, Human
acgaugacaguguu

SEQ ID NO: 2641413 - RNA, 23 nt, Human
accuguaugucaauaaacaacag

SEQ ID NO: 2641414 - RNA, 12 nt, Human
acucugggcugu

SEQ ID NO: 2641415 - RNA, 23 nt, Human
acucugggcuguaacguggcacu

SEQ ID NO: 2641416 - RNA, 12 nt, Human
acucuggcccug

SEQ ID NO: 2641417 - RNA, 13 nt, Human
acucuggcccugg

SEQ ID NO: 2641418 - RNA, 14 nt, Human
acucuggcccuggc

SEQ ID NO: 2641419 - RNA, 15 nt, Human
acucuggcccuggcc

SEQ ID NO: 2641420 - RNA, 16 nt, Human
acucuggcccuggccc

SEQ ID NO: 2641421 - RNA, 17 nt, Human
acucuggcccuggcccu

SEQ ID NO: 2641422 - RNA, 14 nt, Human
acucagcuguccug

SEQ ID NO: 2641423 - RNA, 17 nt, Human
acucagcuguccugcag

SEQ ID NO: 2641424 - RNA, 13 nt, Human
agaaacaaagaug

SEQ ID NO: 2641425 - RNA, 17 nt, Human
agaaacaaagauguuau

SEQ ID NO: 2641426 - RNA, 15 nt, Human
acagguuauaacagu

SEQ ID NO: 2641427 - RNA, 18 nt, Human
acagguuauaacaguguu

SEQ ID NO: 2641428 - RNA, 20 nt, Human
aauuauaacuguaaagaugu

SEQ ID NO: 2641429 - RNA, 13 nt, Human
aauuauaaaugac

SEQ ID NO: 2641430 - RNA, 14 nt, Human
acagccagcaagag

SEQ ID NO: 2641431 - RNA, 18 nt, Human
auacuuauuuguauaugg

SEQ ID NO: 2641432 - RNA, 16 nt, Human
augaaaaguauauuga

SEQ ID NO: 2641433 - RNA, 19 nt, Human
augucaauaaacaacagcu

SEQ ID NO: 2641434 - RNA, 23 nt, Human
augucaauaaacaacagcugaag

SEQ ID NO: 2641435 - RNA, 19 nt, Human
auggaugcccagaggacuc

SEQ ID NO: 2641436 - RNA, 15 nt, Human
agagccccuccucca

SEQ ID NO: 2641437 - RNA, 19 nt, Human
agagccccuccuccagccc

SEQ ID NO: 2641438 - RNA, 20 nt, Human
agagccccuccuccagcccc

SEQ ID NO: 2641439 - RNA, 22 nt, Human
agagccccuccuccagccccug

SEQ ID NO: 2641440 - RNA, 23 nt, Human
agagccccuccuccagccccugu

SEQ ID NO: 2641441 - RNA, 20 nt, Human
agcugauacuuugacagugu

SEQ ID NO: 2641442 - RNA, 23 nt, Human
caauuuggauuuaaaagccugcu

SEQ ID NO: 2641443 - RNA, 21 nt, Human
caauuuggauuuaaaagccug

SEQ ID NO: 2641444 - RNA, 23 nt, Human
caacgcuuguagaacucacucug

SEQ ID NO: 2641445 - RNA, 20 nt, Human
caacggaaagugcugucuua

SEQ ID NO: 2641446 - RNA, 18 nt, Human
caaauacuguauauucag

SEQ ID NO: 2641447 - RNA, 11 nt, Human
caaaguggaac

SEQ ID NO: 2641448 - RNA, 14 nt, Human
caaaguggaacgaa

SEQ ID NO: 2641449 - RNA, 15 nt, Human
caaaguggaacgaaa

SEQ ID NO: 2641450 - RNA, 22 nt, Human
caaaaauuucuguaaaacaggu

SEQ ID NO: 2641451 - RNA, 21 nt, Human
caaaaauuucuguaaaacagg

SEQ ID NO: 2641452 - RNA, 14 nt, Human
cacuaacagagugg

SEQ ID NO: 2641453 - RNA, 12 nt, Human
cacucaccugca

SEQ ID NO: 2641454 - RNA, 18 nt, Human
cacucagcuguccugcag

SEQ ID NO: 2641455 - RNA, 20 nt, Human
cacucagcuguccugcagca

SEQ ID NO: 2641456 - RNA, 22 nt, Human
cacucagcuguccugcagcaaa

SEQ ID NO: 2641457 - RNA, 19 nt, Human
cacuaaaacacacaggugc

SEQ ID NO: 2641458 - RNA, 20 nt, Human
cacgucaaaugcauacaagu

SEQ ID NO: 2641459 - RNA, 18 nt, Human
caccuuccauuuuccccc

SEQ ID NO: 2641460 - RNA, 13 nt, Human
caccuccaggccu

SEQ ID NO: 2641461 - RNA, 14 nt, Human
caccuccaggccug

SEQ ID NO: 2641462 - RNA, 15 nt, Human
caccuccaggccugu

SEQ ID NO: 2641463 - RNA, 18 nt, Human
caccuccaggccuguugc

SEQ ID NO: 2641464 - RNA, 15 nt, Human
caccugcacuaacag

SEQ ID NO: 2641465 - RNA, 16 nt, Human
caccugcacuaacaga

SEQ ID NO: 2641466 - RNA, 21 nt, Human
caccugcacuaacagaguggc

SEQ ID NO: 2641467 - RNA, 20 nt, Human
caccuguccccacccuccac

SEQ ID NO: 2641468 - RNA, 21 nt, Human
caccuguccccacccuccacu

SEQ ID NO: 2641469 - RNA, 22 nt, Human
caccuguccccacccuccacuc

SEQ ID NO: 2641470 - RNA, 16 nt, Human
cagagccccuccucca

SEQ ID NO: 2641471 - RNA, 17 nt, Human
cagagccccuccuccag

SEQ ID NO: 2641472 - RNA, 18 nt, Human
cagagccccuccuccagc

SEQ ID NO: 2641473 - RNA, 21 nt, Human
cagagccccuccuccagcccc

SEQ ID NO: 2641474 - RNA, 22 nt, Human
cagagccccuccuccagccccu

SEQ ID NO: 2641475 - RNA, 19 nt, Human
cagaggacucccaacccug

SEQ ID NO: 2641476 - RNA, 21 nt, Human
cagaggacucccaacccuggc

SEQ ID NO: 2641477 - RNA, 22 nt, Human
cagaggacucccaacccuggcu

SEQ ID NO: 2641478 - RNA, 21 nt, Human
cagccugcucuagugggacag

SEQ ID NO: 2641479 - RNA, 23 nt, Human
cagccugcucuagugggacagcc

SEQ ID NO: 2641480 - RNA, 13 nt, Human
cagccccuguccc

SEQ ID NO: 2641481 - RNA, 14 nt, Human
cagccccuguccca

SEQ ID NO: 2641482 - RNA, 21 nt, Human
caggaauucuuggagaaaaug

SEQ ID NO: 2641483 - RNA, 20 nt, Human
cagcuuccuuuccugugugu

SEQ ID NO: 2641484 - RNA, 17 nt, Human
cagcaacgcuuguagaa

SEQ ID NO: 2641485 - RNA, 18 nt, Human
cagcaacgcuuguagaac

SEQ ID NO: 2641486 - RNA, 14 nt, Human
cagcaaacaggugc

SEQ ID NO: 2641487 - RNA, 15 nt, Human
cagcaaacacuccac

SEQ ID NO: 2641488 - RNA, 21 nt, Human
cagcaaacacuccacccucca

SEQ ID NO: 2641489 - RNA, 12 nt, Human
cagcccauccau

SEQ ID NO: 2641490 - RNA, 18 nt, Human
cagcccauccauuaggcc

SEQ ID NO: 2641491 - RNA, 21 nt, Human
cagcccauccauuaggccagc

SEQ ID NO: 2641492 - RNA, 22 nt, Human
cagcccauccauuaggccagca

SEQ ID NO: 2641493 - RNA, 14 nt, Human
cagcccagagccug

SEQ ID NO: 2641494 - RNA, 15 nt, Human
cagcccagagccugg

SEQ ID NO: 2641495 - RNA, 18 nt, Human
cagcccagagccuggcug

SEQ ID NO: 2641496 - RNA, 16 nt, Human
cagcauuguauaugug

SEQ ID NO: 2641497 - RNA, 22 nt, Human
cagccaaauuuaaaacuguugg

SEQ ID NO: 2641498 - RNA, 14 nt, Human
cagccaaauuuaaa

SEQ ID NO: 2641499 - RNA, 16 nt, Human
cagguuauaacagugu

SEQ ID NO: 2641500 - RNA, 17 nt, Human
cagguuauaacaguguu

SEQ ID NO: 2641501 - RNA, 15 nt, Human
cagguuauaacagug

SEQ ID NO: 2641502 - RNA, 15 nt, Human
caggcauuggauauu

SEQ ID NO: 2641503 - RNA, 22 nt, Human
caggccaaagagucuccaguuu

SEQ ID NO: 2641504 - RNA, 16 nt, Human
caggacuugaaagaaa

SEQ ID NO: 2641505 - RNA, 16 nt, Human
cauugaagccgacucu

SEQ ID NO: 2641506 - RNA, 17 nt, Human
cauugaagccgacucug

SEQ ID NO: 2641507 - RNA, 18 nt, Human
cauugaagccgacucugg

SEQ ID NO: 2641508 - RNA, 20 nt, Human
cauugaagccgacucuggcc

SEQ ID NO: 2641509 - RNA, 21 nt, Human
cauugaagccgacucuggccc

SEQ ID NO: 2641510 - RNA, 23 nt, Human
cauugaagccgacucuggcccug

SEQ ID NO: 2641511 - RNA, 21 nt, Human
cauuuucccccacuacugcag

SEQ ID NO: 2641512 - RNA, 13 nt, Human
cauucaggaauuc

SEQ ID NO: 2641513 - RNA, 19 nt, Human
cauucaggaauucuuggag

SEQ ID NO: 2641514 - RNA, 18 nt, Human
cauucaacagagacugaa

SEQ ID NO: 2641515 - RNA, 22 nt, Human
caucauguggccccacccaauc

SEQ ID NO: 2641516 - RNA, 19 nt, Human
caucacguuagcuguccca

SEQ ID NO: 2641517 - RNA, 20 nt, Human
cccaacccuggcuugggguc

SEQ ID NO: 2641518 - RNA, 15 nt, Human
ccagaggacucccaa

SEQ ID NO: 2641519 - RNA, 20 nt, Human
ccagaggacucccaacccug

SEQ ID NO: 2641520 - RNA, 17 nt, Human
ccacccuccaccuucca

SEQ ID NO: 2641521 - RNA, 19 nt, Human
ccacccuccaccuuccauu

SEQ ID NO: 2641522 - RNA, 13 nt, Human
ccacccuccacuc

SEQ ID NO: 2641523 - RNA, 12 nt, Human
ccacuacugcag

SEQ ID NO: 2641524 - RNA, 13 nt, Human
ccacuacugcagc

SEQ ID NO: 2641525 - RNA, 14 nt, Human
ccacuacugcagca

SEQ ID NO: 2641526 - RNA, 20 nt, Human
ccacuacugcagcaccucca

SEQ ID NO: 2641527 - RNA, 18 nt, Human
ccuguguguacucugucc

SEQ ID NO: 2641528 - RNA, 19 nt, Human
ccuguguguacucugucca

SEQ ID NO: 2641529 - RNA, 20 nt, Human
ccuguguguacucuguccag

SEQ ID NO: 2641530 - RNA, 19 nt, Human
ccugaggacugauuucaga

SEQ ID NO: 2641531 - RNA, 23 nt, Human
ccugaggacugauuucagaguga

SEQ ID NO: 2641532 - RNA, 17 nt, Human
ccugcacuaacagagug

SEQ ID NO: 2641533 - RNA, 22 nt, Human
ccugcauaauguuucuggauuu

SEQ ID NO: 2641534 - RNA, 19 nt, Human
ccugcucaaucccugagga

SEQ ID NO: 2641535 - RNA, 19 nt, Human
ccugcucacgucaaaugca

SEQ ID NO: 2641536 - RNA, 17 nt, Human
ccugcucuagugggaca

SEQ ID NO: 2641537 - RNA, 18 nt, Human
ccugcucuagugggacag

SEQ ID NO: 2641538 - RNA, 19 nt, Human
ccugcucuagugggacagc

SEQ ID NO: 2641539 - RNA, 22 nt, Human
ccugcucuagugggacagccca

SEQ ID NO: 2641540 - RNA, 12 nt, Human
ccuggcugccca

SEQ ID NO: 2641541 - RNA, 15 nt, Human
ccuggcugcccauca

SEQ ID NO: 2641542 - RNA, 23 nt, Human
ccuggcugcccaucauguggccc

SEQ ID NO: 2641543 - RNA, 12 nt, Human
cccuccaccuuc

SEQ ID NO: 2641544 - RNA, 15 nt, Human
cccuccaccuuccau

SEQ ID NO: 2641545 - RNA, 17 nt, Human
cccuccacucagcuguc

SEQ ID NO: 2641546 - RNA, 21 nt, Human
cccuccacucagcuguccugc

SEQ ID NO: 2641547 - RNA, 19 nt, Human
cccacaacccaaaagguuu

SEQ ID NO: 2641548 - RNA, 13 nt, Human
ccuccaccuucca

SEQ ID NO: 2641549 - RNA, 14 nt, Human
ccuccaccuuccau

SEQ ID NO: 2641550 - RNA, 21 nt, Human
ccuccaccuuccauuuucccc

SEQ ID NO: 2641551 - RNA, 21 nt, Human
ccuccacucagcuguccugca

SEQ ID NO: 2641552 - RNA, 13 nt, Human
ccuccaggccugu

SEQ ID NO: 2641553 - RNA, 17 nt, Human
ccuccaggccuguugcu

SEQ ID NO: 2641554 - RNA, 12 nt, Human
ccuccaggccug

SEQ ID NO: 2641555 - RNA, 14 nt, Human
ccuccagccccugu

SEQ ID NO: 2641556 - RNA, 15 nt, Human
ccuccagccccuguc

SEQ ID NO: 2641557 - RNA, 17 nt, Human
ccuccagccccuguccc

SEQ ID NO: 2641558 - RNA, 18 nt, Human
ccuccagccccuguccca

SEQ ID NO: 2641559 - RNA, 21 nt, Human
ccuccagccccugucccaccc

SEQ ID NO: 2641560 - RNA, 18 nt, Human
ccuacacucaccugcacu

SEQ ID NO: 2641561 - RNA, 18 nt, Human
cuguuugcauuugauaca

SEQ ID NO: 2641562 - RNA, 22 nt, Human
cuguuugcauuugauacauuuu

SEQ ID NO: 2641563 - RNA, 14 nt, Human
cuucccccagccca

SEQ ID NO: 2641564 - RNA, 16 nt, Human
cuucccccagcccauc

SEQ ID NO: 2641565 - RNA, 18 nt, Human
cuucagguugguuuaauc

SEQ ID NO: 2641566 - RNA, 19 nt, Human
cugucuuaaacuaaaugug

SEQ ID NO: 2641567 - RNA, 21 nt, Human
cugucuuaaacuaaaugugca

SEQ ID NO: 2641568 - RNA, 18 nt, Human
cuguguuuugaaagaaua

SEQ ID NO: 2641569 - RNA, 22 nt, Human
cuguguuuugaaagaauagaac

SEQ ID NO: 2641570 - RNA, 17 nt, Human
cuguguuuugaaagaau

SEQ ID NO: 2641571 - RNA, 22 nt, Human
cuguguuacuaaaaaaaagaug

SEQ ID NO: 2641572 - RNA, 23 nt, Human
cuguguuacuaaaaaaaagauga

SEQ ID NO: 2641573 - RNA, 18 nt, Human
cugugugaauaccugcuc

SEQ ID NO: 2641574 - RNA, 19 nt, Human
cugugugaauaccugcuca

SEQ ID NO: 2641575 - RNA, 12 nt, Human
cuguaauugugu

SEQ ID NO: 2641576 - RNA, 12 nt, Human
cugggcuguugu

SEQ ID NO: 2641577 - RNA, 14 nt, Human
cugggcuguuguuc

SEQ ID NO: 2641578 - RNA, 22 nt, Human
cugggcuguaacguggcacugg

SEQ ID NO: 2641579 - RNA, 23 nt, Human
cugggcuguaacguggcacuggu

SEQ ID NO: 2641580 - RNA, 13 nt, Human
cuuuauaaaugua

SEQ ID NO: 2641581 - RNA, 15 nt, Human
cuuuagaagccugca

SEQ ID NO: 2641582 - RNA, 14 nt, Human
cuuuagaagccugc

SEQ ID NO: 2641583 - RNA, 12 nt, Human
gaaacagccagc

SEQ ID NO: 2641584 - RNA, 15 nt, Human
gaaacagccagcaag

SEQ ID NO: 2641585 - RNA, 19 nt, Human
gaauagauaugaaagcuga

SEQ ID NO: 2641586 - RNA, 16 nt, Human
gaauagauaugaaagc

SEQ ID NO: 2641587 - RNA, 20 nt, Human
gaaggaggaaugcuggacug

SEQ ID NO: 2641588 - RNA, 22 nt, Human
gaaggaggaaugcuggacugga

SEQ ID NO: 2641589 - RNA, 15 nt, Human
gaaauuaccugugga

SEQ ID NO: 2641590 - RNA, 16 nt, Human
gaaauagaauuauaac

SEQ ID NO: 2641591 - RNA, 18 nt, Human
gaaccuacaguuuuaacu

SEQ ID NO: 2641592 - RNA, 23 nt, Human
gaaccuacaguuuuaacugugga

SEQ ID NO: 2641593 - RNA, 19 nt, Human
gaaccuacaguuuuaacug

SEQ ID NO: 2641594 - RNA, 21 nt, Human
gaaccuacaguuuuaacugug

SEQ ID NO: 2641595 - RNA, 11 nt, Human
cucugggcugu

SEQ ID NO: 2641596 - RNA, 23 nt, Human
cucugggcuguaacguggcacug

SEQ ID NO: 2641597 - RNA, 18 nt, Human
cugaauuaucuauuucau

SEQ ID NO: 2641598 - RNA, 17 nt, Human
cugaauuaucuauuuca

SEQ ID NO: 2641599 - RNA, 18 nt, Human
cugcccaucauguggccc

SEQ ID NO: 2641600 - RNA, 13 nt, Human
cugcccaguugca

SEQ ID NO: 2641601 - RNA, 14 nt, Human
cugcaaaaagaaaa

SEQ ID NO: 2641602 - RNA, 15 nt, Human
cuccuccagccccug

SEQ ID NO: 2641603 - RNA, 16 nt, Human
cuccuccagccccugu

SEQ ID NO: 2641604 - RNA, 17 nt, Human
cuccuccagccccuguc

SEQ ID NO: 2641605 - RNA, 18 nt, Human
cuccuccagccccugucc

SEQ ID NO: 2641606 - RNA, 20 nt, Human
cuccuccagccccuguccca

SEQ ID NO: 2641607 - RNA, 12 nt, Human
cuccaccuucca

SEQ ID NO: 2641608 - RNA, 14 nt, Human
cuagguacgaugac

SEQ ID NO: 2641609 - RNA, 19 nt, Human
cuagguacgaugacagugu

SEQ ID NO: 2641610 - RNA, 20 nt, Human
cuagguacgaugacaguguu

SEQ ID NO: 2641611 - RNA, 12 nt, Human
cuaucuguauuc

SEQ ID NO: 2641612 - RNA, 17 nt, Human
cuaucuguauucccaaa

SEQ ID NO: 2641613 - RNA, 16 nt, Human
cuauagagccuaccug

SEQ ID NO: 2641614 - RNA, 13 nt, Human
cuagugggacagc

SEQ ID NO: 2641615 - RNA, 17 nt, Human
cuagugggacagcccag

SEQ ID NO: 2641616 - RNA, 18 nt, Human
cuagugggacagcccaga

SEQ ID NO: 2641617 - RNA, 22 nt, Human
cuagugggacagcccagagccu

SEQ ID NO: 2641618 - RNA, 23 nt, Human
cuagugggacagcccagagccug

SEQ ID NO: 2641619 - RNA, 11 nt, Human
cucacucuggg

SEQ ID NO: 2641620 - RNA, 12 nt, Human
cucacucugggc

SEQ ID NO: 2641621 - RNA, 13 nt, Human
cucacucugggcu

SEQ ID NO: 2641622 - RNA, 14 nt, Human
cucacucugggcug

SEQ ID NO: 2641623 - RNA, 15 nt, Human
cucacucugggcugu

SEQ ID NO: 2641624 - RNA, 23 nt, Human
cucacugaaacauggcuguguuu

SEQ ID NO: 2641625 - RNA, 17 nt, Human
gaggaaugcuggacugg

SEQ ID NO: 2641626 - RNA, 18 nt, Human
gaggaaugcuggacugga

SEQ ID NO: 2641627 - RNA, 17 nt, Human
gaggccccuggagccag

SEQ ID NO: 2641628 - RNA, 18 nt, Human
gaggccccuggagccaga

SEQ ID NO: 2641629 - RNA, 15 nt, Human
gagaucaaagaugaa

SEQ ID NO: 2641630 - RNA, 20 nt, Human
gagaucaaagaugaaaagua

SEQ ID NO: 2641631 - RNA, 18 nt, Human
gaaugcuggacuggaggc

SEQ ID NO: 2641632 - RNA, 23 nt, Human
gaaugcuggacuggaggccccug

SEQ ID NO: 2641633 - RNA, 13 nt, Human
gagaucaaagaug

SEQ ID NO: 2641634 - RNA, 14 nt, Human
gagaucaaagauga

SEQ ID NO: 2641635 - RNA, 15 nt, Human
gagccagauggcaag

SEQ ID NO: 2641636 - RNA, 16 nt, Human
gagccuggcugcccau

SEQ ID NO: 2641637 - RNA, 18 nt, Human
gaguuaggggccuuaggg

SEQ ID NO: 2641638 - RNA, 21 nt, Human
gaugaaaaguauauugauaac

SEQ ID NO: 2641639 - RNA, 23 nt, Human
gaugaaaaguauauugauaaccu

SEQ ID NO: 2641640 - RNA, 16 nt, Human
gaucaacgccucacug

SEQ ID NO: 2641641 - RNA, 18 nt, Human
gaucaacgccucacugaa

SEQ ID NO: 2641642 - RNA, 13 nt, Human
gcccagagccugg

SEQ ID NO: 2641643 - RNA, 16 nt, Human
gcccagaggacuccca

SEQ ID NO: 2641644 - RNA, 20 nt, Human
gcccagaggacucccaaccc

SEQ ID NO: 2641645 - RNA, 21 nt, Human
gcccagaggacucccaacccu

SEQ ID NO: 2641646 - RNA, 12 nt, Human
gcacugggcugu

SEQ ID NO: 2641647 - RNA, 17 nt, Human
gcacagccaaauuuaaa

SEQ ID NO: 2641648 - RNA, 18 nt, Human
gcugugugaauaccugcu

SEQ ID NO: 2641649 - RNA, 20 nt, Human
gcugugugaauaccugcuca

SEQ ID NO: 2641650 - RNA, 17 nt, Human
gcuguguuugcagccug

SEQ ID NO: 2641651 - RNA, 18 nt, Human
gcuguguuugcagccugc

SEQ ID NO: 2641652 - RNA, 19 nt, Human
gcuguguuugcagccugcu

SEQ ID NO: 2641653 - RNA, 11 nt, Human
gcugauuuuuu

SEQ ID NO: 2641654 - RNA, 19 nt, Human
gccugcucuagugggacag

SEQ ID NO: 2641655 - RNA, 16 nt, Human
gcucaaucccugagga

SEQ ID NO: 2641656 - RNA, 20 nt, Human
gcucaaucccugaggacuga

SEQ ID NO: 2641657 - RNA, 22 nt, Human
gcuccuguuuugcacagccaaa

SEQ ID NO: 2641658 - RNA, 14 nt, Human
ggacagcccagagc

SEQ ID NO: 2641659 - RNA, 17 nt, Human
ggacagcccagagccug

SEQ ID NO: 2641660 - RNA, 18 nt, Human
ggacagcccagagccugg

SEQ ID NO: 2641661 - RNA, 21 nt, Human
ggacagcccagagccuggcug

SEQ ID NO: 2641662 - RNA, 12 nt, Human
ggauucuuuaaa

SEQ ID NO: 2641663 - RNA, 17 nt, Human
ggcaagagggugacagc

SEQ ID NO: 2641664 - RNA, 12 nt, Human
ggccucuccagu

SEQ ID NO: 2641665 - RNA, 17 nt, Human
gggacaccagggaagaa

SEQ ID NO: 2641666 - RNA, 20 nt, Human
ggcuguguuugcagccugcu

SEQ ID NO: 2641667 - RNA, 21 nt, Human
ucaucacuuugaccuaaauua

SEQ ID NO: 2641668 - RNA, 23 nt, Human
uccaccuuccauuuucccccacu

SEQ ID NO: 2641669 - RNA, 13 nt, Human
uccacccuccacc

SEQ ID NO: 2641670 - RNA, 14 nt, Human
uccacccuccaccu

SEQ ID NO: 2641671 - RNA, 15 nt, Human
uccacccuccaccuu

SEQ ID NO: 2641672 - RNA, 18 nt, Human
uccacccuccaccuucca

SEQ ID NO: 2641673 - RNA, 22 nt, Human
uauuguuacguagccuaaggcu

SEQ ID NO: 2641674 - RNA, 17 nt, Human
uaugguggauccaaacu

SEQ ID NO: 2641675 - RNA, 21 nt, Human
uaugucaauaaacaacagcug

SEQ ID NO: 2641676 - RNA, 16 nt, Human
ucaauaaacaacagcu

SEQ ID NO: 2641677 - RNA, 17 nt, Human
ucaauaaacaacagcug

SEQ ID NO: 2641678 - RNA, 18 nt, Human
ucaauaaacaacagcuga

SEQ ID NO: 2641679 - RNA, 19 nt, Human
ucaacgccucacugaaaca

SEQ ID NO: 2641680 - RNA, 23 nt, Human
ucaacgccucacugaaacauggc

SEQ ID NO: 2641681 - RNA, 19 nt, Human
uauuuuuucuuuucuuuac

SEQ ID NO: 2641682 - RNA, 12 nt, Human
ucuuaaacuaaa

SEQ ID NO: 2641683 - RNA, 18 nt, Human
ucucuaggccucuccagu

SEQ ID NO: 2641684 - RNA, 19 nt, Human
ucucuaggccucuccaguu

SEQ ID NO: 2641685 - RNA, 14 nt, Human
ucccuaauguguuu

SEQ ID NO: 2641686 - RNA, 20 nt, Human
ugucuuaaacuaaaugugca

SEQ ID NO: 2641687 - RNA, 18 nt, Human
ugucuuaaacuaaaugug

SEQ ID NO: 2641688 - RNA, 20 nt, Human
ugucuguguuuugaaagaau

SEQ ID NO: 2641689 - RNA, 18 nt, Human
uguccugcagcaaacacu

SEQ ID NO: 2641690 - RNA, 13 nt, Human
uguauaaaagugu

SEQ ID NO: 2641691 - RNA, 18 nt, Human
uguauaaaagugugaaau

SEQ ID NO: 2641692 - RNA, 21 nt, Human
uguauaaaagugugaaauaaa

SEQ ID NO: 2641693 - RNA, 14 nt, Human
ugggacagcccaga

SEQ ID NO: 2641694 - RNA, 18 nt, Human
ugggacagcccagagccu

SEQ ID NO: 2641695 - RNA, 20 nt, Human
ugggacagcccagagccugg

SEQ ID NO: 2641696 - RNA, 22 nt, Human
uggcuuggggucaagaaacagc

SEQ ID NO: 2641697 - RNA, 23 nt, Human
uggcuuggggucaagaaacagcc

SEQ ID NO: 2641698 - RNA, 21 nt, Human
ugcuucucuagcucucuaggc

SEQ ID NO: 2641699 - RNA, 22 nt, Human
ugcuucucuagcucucuaggcc

SEQ ID NO: 2641700 - RNA, 23 nt, Human
ugcuucucuagcucucuaggccu

SEQ ID NO: 2641701 - RNA, 10 nt, Human
ugcuucucua

SEQ ID NO: 2641702 - RNA, 16 nt, Human
uggauuuaaaagccug

SEQ ID NO: 2641703 - RNA, 18 nt, Human
uggauuuaaaagccugcu

SEQ ID NO: 2641704 - RNA, 20 nt, Human
uggauuuaaaagccugcuca

SEQ ID NO: 2641705 - RNA, 18 nt, Human
uggcaagagggugacagc

SEQ ID NO: 2641706 - RNA, 22 nt, Human
uggcaagagggugacagcuucc

SEQ ID NO: 2641707 - RNA, 14 nt, Human
uggaucacaaagug

SEQ ID NO: 2641708 - RNA, 15 nt, Human
uggaucacaaagugg

SEQ ID NO: 2641709 - RNA, 13 nt, Human
uggauauuuguau

SEQ ID NO: 2641710 - RNA, 11 nt, Human
uggauauuugu

SEQ ID NO: 2641711 - RNA, 14 nt, Human
uggauauuguuacg

SEQ ID NO: 2641712 - RNA, 17 nt, Human
ugaggacugauuucaga

SEQ ID NO: 2641713 - RNA, 17 nt, Human
ugaccuaaauuauuuac

SEQ ID NO: 2641714 - RNA, 13 nt, Human
ugcaccugucccc

SEQ ID NO: 2641715 - RNA, 16 nt, Human
ugcaccuguccccacc

SEQ ID NO: 2641716 - RNA, 17 nt, Human
ugcaccuguccccaccc

SEQ ID NO: 2641717 - RNA, 21 nt, Human
ugcaccuguccccacccucca

SEQ ID NO: 2641718 - RNA, 17 nt, Human
ugauuuuuuuuaauuac

SEQ ID NO: 2641719 - RNA, 14 nt, Human
ugccguaauuuaac

SEQ ID NO: 2641720 - RNA, 14 nt, Human
uuuucuuuaacugc

SEQ ID NO: 2641721 - RNA, 18 nt, Human
uuuucuuuaacugccgua

SEQ ID NO: 2641722 - RNA, 13 nt, Human
uuugcaccugucc

SEQ ID NO: 2641723 - RNA, 15 nt, Human
uuugcaccugucccc

SEQ ID NO: 2641724 - RNA, 23 nt, Human
uuugcaccuguccccacccucca

SEQ ID NO: 2641725 - RNA, 15 nt, Human
uuguuaaaaauguca

SEQ ID NO: 2641726 - RNA, 16 nt, Human
uuguuacguagccuaa

SEQ ID NO: 2641727 - RNA, 23 nt, Human
uuguuuccuccccuaucuguauu

SEQ ID NO: 2641728 - RNA, 17 nt, Human
uuuaacuguggauauug

SEQ ID NO: 2641729 - RNA, 18 nt, Human
uuuaacuguggauauugu

SEQ ID NO: 2641730 - RNA, 14 nt, Human
uuuaagaaauagaa

SEQ ID NO: 2641731 - RNA, 12 nt, Human
uuuaacugccgu

SEQ ID NO: 2641732 - RNA, 21 nt, Human
uuuaacugccguaauuuaacu

SEQ ID NO: 2641733 - RNA, 12 nt, Human
uuuaacugugga

SEQ ID NO: 2641734 - RNA, 13 nt, Human
uuuaacuguggau

SEQ ID NO: 2641735 - RNA, 15 nt, Human
uuuaacuguggauau

SEQ ID NO: 2641736 - RNA, 12 nt, Human
uuuaaauugugu

SEQ ID NO: 2641737 - RNA, 15 nt, Human
uuucaacggaaagug

SEQ ID NO: 2641738 - RNA, 23 nt, Human
uuucaacggaaagugcugucuua

SEQ ID NO: 2641739 - RNA, 13 nt, Human
uucguaacacagc

SEQ ID NO: 2641740 - RNA, 13 nt, Human
uugcaccuguccc

SEQ ID NO: 2641741 - RNA, 16 nt, Human
uugcaccuguccccac

SEQ ID NO: 2641742 - RNA, 18 nt, Human
uugcaccuguccccaccc

SEQ ID NO: 2641743 - RNA, 18 nt, Human
acucagcuguccugcagc

SEQ ID NO: 2641744 - RNA, 19 nt, Human
acucagcuguccugcagca

SEQ ID NO: 2641745 - RNA, 11 nt, Human
acucuguccag

SEQ ID NO: 2641746 - RNA, 22 nt, Human
acgcuuguagaacucacucugg

SEQ ID NO: 2641747 - RNA, 23 nt, Human
acgcuuguagaacucacucuggg

SEQ ID NO: 2641748 - RNA, 15 nt, Human
acggaaagugcuguc

SEQ ID NO: 2641749 - RNA, 14 nt, Human
accuguccccaccc

SEQ ID NO: 2641750 - RNA, 20 nt, Human
accuguccccacccuccacu

SEQ ID NO: 2641751 - RNA, 21 nt, Human
accuguccccacccuccacuc

SEQ ID NO: 2641752 - RNA, 22 nt, Human
accuguccccacccuccacuca

SEQ ID NO: 2641753 - RNA, 15 nt, Human
acuucuguaauugug

SEQ ID NO: 2641754 - RNA, 21 nt, Human
acuucuguaauuguguggauu

SEQ ID NO: 2641755 - RNA, 18 nt, Human
acugguagguugggacac

SEQ ID NO: 2641756 - RNA, 15 nt, Human
agaaaaucuuuauaa

SEQ ID NO: 2641757 - RNA, 15 nt, Human
acagccaaauuuaaa

SEQ ID NO: 2641758 - RNA, 14 nt, Human
acagccaaauuuaa

SEQ ID NO: 2641759 - RNA, 12 nt, Human
acccccuucccc

SEQ ID NO: 2641760 - RNA, 14 nt, Human
aaauuaaaugaauu

SEQ ID NO: 2641761 - RNA, 20 nt, Human
aaccuacaguuuuaacugug

SEQ ID NO: 2641762 - RNA, 12 nt, Human
aacucacucugg

SEQ ID NO: 2641763 - RNA, 13 nt, Human
aacucacucuggg

SEQ ID NO: 2641764 - RNA, 16 nt, Human
aacucacucugggcug

SEQ ID NO: 2641765 - RNA, 17 nt, Human
aacucacucugggcugu

SEQ ID NO: 2641766 - RNA, 20 nt, Human
aacgcucuagguacgaugac

SEQ ID NO: 2641767 - RNA, 22 nt, Human
aacgcuuguagaacucacucug

SEQ ID NO: 2641768 - RNA, 23 nt, Human
aacgcuuguagaacucacucugg

SEQ ID NO: 2641769 - RNA, 13 nt, Human
aaaguggaacgaa

SEQ ID NO: 2641770 - RNA, 20 nt, Human
aaaguggaacgaaaaugaaa

SEQ ID NO: 2641771 - RNA, 20 nt, Human
aaacacuccacccuccaccu

SEQ ID NO: 2641772 - RNA, 22 nt, Human
aaagaagagcgagagaucaaag

SEQ ID NO: 2641773 - RNA, 20 nt, Human
aagggaagaaggaggaaugc

SEQ ID NO: 2641774 - RNA, 20 nt, Human
aaguggaacgaaaaugaaag

SEQ ID NO: 2641775 - RNA, 20 nt, Human
aagauguuaugguguuuaga

SEQ ID NO: 2641776 - RNA, 20 nt, Human
aagauacuaaggacguuguu

SEQ ID NO: 2641777 - RNA, 16 nt, Human
aagauguuaugguguu

SEQ ID NO: 2641778 - RNA, 14 nt, Human
aaugcuggacugga

SEQ ID NO: 2641779 - RNA, 17 nt, Human
aaugcuggacuggaggc

SEQ ID NO: 2641780 - RNA, 22 nt, Human
aaugcuggacuggaggccccug

SEQ ID NO: 2641781 - RNA, 23 nt, Human
aaugcuggacuggaggccccugg

SEQ ID NO: 2641782 - RNA, 16 nt, Human
aauguuucuggauuuc

SEQ ID NO: 2641783 - RNA, 18 nt, Human
aaugaaagcuacucauag

SEQ ID NO: 2641784 - RNA, 14 nt, Human
aauagaaggugaug

SEQ ID NO: 2641785 - RNA, 13 nt, Human
aauagaaggugau

SEQ ID NO: 2641786 - RNA, 16 nt, Human
aauagaauuauaacug

SEQ ID NO: 2641787 - RNA, 18 nt, Human
agaggacucccaacccug

SEQ ID NO: 2641788 - RNA, 21 nt, Human
agaggacucccaacccuggcu

SEQ ID NO: 2641789 - RNA, 12 nt, Human
agccaaauuuaa

SEQ ID NO: 2641790 - RNA, 13 nt, Human
agccaaauuuaaa

SEQ ID NO: 2641791 - RNA, 19 nt, Human
agccaaauuuaaaacuguu

SEQ ID NO: 2641792 - RNA, 15 nt, Human
auaaauuuuuuauaa

SEQ ID NO: 2641793 - RNA, 14 nt, Human
aguuguguuucaac

SEQ ID NO: 2641794 - RNA, 23 nt, Human
aguuguguuucaacggaaagugc

SEQ ID NO: 2641795 - RNA, 22 nt, Human
agugucuguguuuugaaagaau

SEQ ID NO: 2641796 - RNA, 16 nt, Human
agugucuguguuuuga

SEQ ID NO: 2641797 - RNA, 20 nt, Human
auguucuauuuuuuguuuug

SEQ ID NO: 2641798 - RNA, 20 nt, Human
auggcuguguuugcagccug

SEQ ID NO: 2641799 - RNA, 21 nt, Human
auggcuguguuugcagccugc

SEQ ID NO: 2641800 - RNA, 17 nt, Human
aucauguggccccaccc

SEQ ID NO: 2641801 - RNA, 19 nt, Human
cuggacuggaggccccugg

SEQ ID NO: 2641802 - RNA, 15 nt, Human
cuguaacauucagga

SEQ ID NO: 2641803 - RNA, 13 nt, Human
cuuagggcacugg

SEQ ID NO: 2641804 - RNA, 17 nt, Human
cuuagggcacugggcug

SEQ ID NO: 2641805 - RNA, 18 nt, Human
cuuagggcacugggcugu

SEQ ID NO: 2641806 - RNA, 12 nt, Human
gaaacaaagaug

SEQ ID NO: 2641807 - RNA, 20 nt, Human
cuuucacuaaaacacacagg

SEQ ID NO: 2641808 - RNA, 15 nt, Human
cuuggggucaagaaa

SEQ ID NO: 2641809 - RNA, 15 nt, Human
gauuucauacuguaa

SEQ ID NO: 2641810 - RNA, 13 nt, Human
gcaccuccaggcc

SEQ ID NO: 2641811 - RNA, 15 nt, Human
gcaccuccaggccug

SEQ ID NO: 2641812 - RNA, 16 nt, Human
gcaccuccaggccugu

SEQ ID NO: 2641813 - RNA, 20 nt, Human
gcaccuccaggccuguugcu

SEQ ID NO: 2641814 - RNA, 20 nt, Human
gcauacaaguuucauucucc

SEQ ID NO: 2641815 - RNA, 17 nt, Human
gagcgagagaucaaaga

SEQ ID NO: 2641816 - RNA, 19 nt, Human
gagcgagagaucaaagaug

SEQ ID NO: 2641817 - RNA, 20 nt, Human
gagcgagagaucaaagauga

SEQ ID NO: 2641818 - RNA, 21 nt, Human
ggcacugguagguugggacac

SEQ ID NO: 2641819 - RNA, 14 nt, Human
ggcuccuguuuugc

SEQ ID NO: 2641820 - RNA, 15 nt, Human
ggcuccuguuuugca

SEQ ID NO: 2641821 - RNA, 16 nt, Human
gggacagcccagagcc

SEQ ID NO: 2641822 - RNA, 19 nt, Human
gggacagcccagagccugg

SEQ ID NO: 2641823 - RNA, 21 nt, Human
gggacagcccagagccuggcu

SEQ ID NO: 2641824 - RNA, 15 nt, Human
guaauuguguggauu

SEQ ID NO: 2641825 - RNA, 21 nt, Human
guaauuguguggauucuuuaa

SEQ ID NO: 2641826 - RNA, 12 nt, Human
guaauuuaacuu

SEQ ID NO: 2641827 - RNA, 16 nt, Human
guagaacucacucugg

SEQ ID NO: 2641828 - RNA, 17 nt, Human
guagaacucacucuggg

SEQ ID NO: 2641829 - RNA, 18 nt, Human
guagaacucacucugggc

SEQ ID NO: 2641830 - RNA, 19 nt, Human
guagaacucacucugggcu

SEQ ID NO: 2641831 - RNA, 20 nt, Human
guagaacucacucugggcug

SEQ ID NO: 2641832 - RNA, 21 nt, Human
guagaacucacucugggcugu

SEQ ID NO: 2641833 - RNA, 22 nt, Human
guagaacucacucugggcugua

SEQ ID NO: 2641834 - RNA, 19 nt, Human
gccugcccaguugcacuca

SEQ ID NO: 2641835 - RNA, 20 nt, Human
gccuguugcuauagagccua

SEQ ID NO: 2641836 - RNA, 18 nt, Human
ggacucccaacccuggcu

SEQ ID NO: 2641837 - RNA, 21 nt, Human
ggacucccaacccuggcuugg

SEQ ID NO: 2641838 - RNA, 14 nt, Human
ggacguuguuuugg

SEQ ID NO: 2641839 - RNA, 13 nt, Human
caugacagccucc

SEQ ID NO: 2641840 - RNA, 14 nt, Human
caugacagccucca

SEQ ID NO: 2641841 - RNA, 13 nt, Human
cauccauuaggcc

SEQ ID NO: 2641842 - RNA, 17 nt, Human
cauccauuaggccagca

SEQ ID NO: 2641843 - RNA, 20 nt, Human
cauccauuaggccagcaacg

SEQ ID NO: 2641844 - RNA, 16 nt, Human
cagcuguccugcagca

SEQ ID NO: 2641845 - RNA, 22 nt, Human
cagcuguccugcagcaaacacu

SEQ ID NO: 2641846 - RNA, 20 nt, Human
caggugcuaauuuguuuugg

SEQ ID NO: 2641847 - RNA, 23 nt, Human
auuucauacuguaacauucagga

SEQ ID NO: 2641848 - RNA, 18 nt, Human
auuaggccagcaacgcuu

SEQ ID NO: 2641849 - RNA, 20 nt, Human
caacaaagaaacaaagaugu

SEQ ID NO: 2641850 - RNA, 18 nt, Human
cacugguagguugggaca

SEQ ID NO: 2641851 - RNA, 19 nt, Human
cacugguagguugggacac

SEQ ID NO: 2641852 - RNA, 21 nt, Human
cacugguagguugggacacca

SEQ ID NO: 2641853 - RNA, 22 nt, Human
cacugguagguugggacaccag

SEQ ID NO: 2641854 - RNA, 13 nt, Human
caccagggaagaa

SEQ ID NO: 2641855 - RNA, 15 nt, Human
caccagggaagaaga

SEQ ID NO: 2641856 - RNA, 23 nt, Human
ccccagcccauccauuaggccag

SEQ ID NO: 2641857 - RNA, 18 nt, Human
cccuccuccagccccugu

SEQ ID NO: 2641858 - RNA, 19 nt, Human
cccuccuccagccccuguc

SEQ ID NO: 2641859 - RNA, 21 nt, Human
cccuccuccagccccuguccc

SEQ ID NO: 2641860 - RNA, 16 nt, Human
ccauccauuaggccag

SEQ ID NO: 2641861 - RNA, 17 nt, Human
ccauccauuaggccagc

SEQ ID NO: 2641862 - RNA, 18 nt, Human
ccauccauuaggccagca

SEQ ID NO: 2641863 - RNA, 18 nt, Human
ccaguugcacucagguga

SEQ ID NO: 2641864 - RNA, 13 nt, Human
cccacccuccacu

SEQ ID NO: 2641865 - RNA, 14 nt, Human
cccacccuccacuc

SEQ ID NO: 2641866 - RNA, 14 nt, Human
ccguaauuuaacuu

SEQ ID NO: 2641867 - RNA, 12 nt, Human
ccguaauuuaac

SEQ ID NO: 2641868 - RNA, 13 nt, Human
ccguaauuuaacu

SEQ ID NO: 2641869 - RNA, 13 nt, Human
ccuaauguguuua

SEQ ID NO: 2641870 - RNA, 16 nt, Human
ccgucuuuuccuguuu

SEQ ID NO: 2641871 - RNA, 17 nt, Human
cucaccugcacuaacag

SEQ ID NO: 2641872 - RNA, 20 nt, Human
cucaccugcacuaacagagu

SEQ ID NO: 2641873 - RNA, 15 nt, Human
cuaggccucuccagu

SEQ ID NO: 2641874 - RNA, 16 nt, Human
cuaggccucuccaguu

SEQ ID NO: 2641875 - RNA, 12 nt, Human
cguaauuuaacu

SEQ ID NO: 2641876 - RNA, 16 nt, Human
cuccaguuugcaccug

SEQ ID NO: 2641877 - RNA, 17 nt, Human
cuccaguuugcaccugu

SEQ ID NO: 2641878 - RNA, 18 nt, Human
cuccaguuugcaccuguc

SEQ ID NO: 2641879 - RNA, 20 nt, Human
cuccaguuugcaccuguccc

SEQ ID NO: 2641880 - RNA, 21 nt, Human
cuccaguuugcaccugucccc

SEQ ID NO: 2641881 - RNA, 13 nt, Human
aaccuuaagauac

SEQ ID NO: 2641882 - RNA, 20 nt, Human
guccugcagcaaacacucca

SEQ ID NO: 2641883 - RNA, 21 nt, Human
guccugcagcaaacacuccac

SEQ ID NO: 2641884 - RNA, 23 nt, Human
guccugcagcaaacacuccaccc

SEQ ID NO: 2641885 - RNA, 19 nt, Human
aacagguuauaacaguguu

SEQ ID NO: 2641886 - RNA, 19 nt, Human
aacagagacugaauagaua

SEQ ID NO: 2641887 - RNA, 22 nt, Human
guccuaaccucgggccugcugc

SEQ ID NO: 2641888 - RNA, 21 nt, Human
aagcaaacucuaaaauuauaa

SEQ ID NO: 2641889 - RNA, 15 nt, Human
aagaaaaucuuuaua

SEQ ID NO: 2641890 - RNA, 19 nt, Human
aacuugugucccuaaugug

SEQ ID NO: 2641891 - RNA, 21 nt, Human
guggcacugguagguugggac

SEQ ID NO: 2641892 - RNA, 22 nt, Human
guggcacugguagguugggaca

SEQ ID NO: 2641893 - RNA, 19 nt, Human
uaacaagaacuuuaaauug

SEQ ID NO: 2641894 - RNA, 22 nt, Human
aauaaauuuuuuauaaaagugu

SEQ ID NO: 2641895 - RNA, 13 nt, Human
uaaacuaaaugug

SEQ ID NO: 2641896 - RNA, 14 nt, Human
uaaacuaaaugugc

SEQ ID NO: 2641897 - RNA, 13 nt, Human
uaaaauuauuuca

SEQ ID NO: 2641898 - RNA, 23 nt, Human
aaguuucauucucccuuucacua

SEQ ID NO: 2641899 - RNA, 14 nt, Human
aaguguucauuguu

SEQ ID NO: 2641900 - RNA, 16 nt, Human
aaggauccggaaagaa

SEQ ID NO: 2641901 - RNA, 17 nt, Human
aaggauccggaaagaag

SEQ ID NO: 2641902 - RNA, 18 nt, Human
guuggggaagggccugcc

SEQ ID NO: 2641903 - RNA, 16 nt, Human
guuuuaacuguggaua

SEQ ID NO: 2641904 - RNA, 22 nt, Human
guuuuaacuguggauauuguua

SEQ ID NO: 2641905 - RNA, 14 nt, Human
guuucuggauuuca

SEQ ID NO: 2641906 - RNA, 11 nt, Human
guuugcagccu

SEQ ID NO: 2641907 - RNA, 21 nt, Human
aaggguguugggagggugguu

SEQ ID NO: 2641908 - RNA, 23 nt, Human
aagggccugcccaguugcacuca

SEQ ID NO: 2641909 - RNA, 24 nt, Human
uagcauuguaaaauuauuucauga

SEQ ID NO: 2641910 - RNA, 15 nt, Human
uagaacucacucugg

SEQ ID NO: 2641911 - RNA, 16 nt, Human
uagaacucacucuggg

SEQ ID NO: 2641912 - RNA, 17 nt, Human
uagaacucacucugggc

SEQ ID NO: 2641913 - RNA, 18 nt, Human
uagaacucacucugggcu

SEQ ID NO: 2641914 - RNA, 19 nt, Human
uagaacucacucugggcug

SEQ ID NO: 2641915 - RNA, 20 nt, Human
uagaacucacucugggcugu

SEQ ID NO: 2641916 - RNA, 12 nt, Human
uagaagccugca

SEQ ID NO: 2641917 - RNA, 17 nt, Human
aauuuguuuuggauaua

SEQ ID NO: 2641918 - RNA, 17 nt, Human
aauuuuuuauaaaagug

SEQ ID NO: 2641919 - RNA, 16 nt, Human
uacuguaacauucagg

SEQ ID NO: 2641920 - RNA, 15 nt, Human
aauuguguggauucu

SEQ ID NO: 2641921 - RNA, 19 nt, Human
aauuguguggauucuuuaa

SEQ ID NO: 2641922 - RNA, 21 nt, Human
uacguagccuaaggcuccugu

SEQ ID NO: 2641923 - RNA, 13 nt, Human
uacugaaucugcu

SEQ ID NO: 2641924 - RNA, 20 nt, Human
uauucaggacuugaaagaaa

SEQ ID NO: 2641925 - RNA, 22 nt, Human
uauugacuaacaggccaaagag

SEQ ID NO: 2641926 - RNA, 20 nt, Human
acagagacugaauagauaug

SEQ ID NO: 2641927 - RNA, 14 nt, Human
acagaguggccguc

SEQ ID NO: 2641928 - RNA, 10 nt, Human
acagcccaga

SEQ ID NO: 2641929 - RNA, 13 nt, Human
acagcccagagcc

SEQ ID NO: 2641930 - RNA, 15 nt, Human
acagcccagagccug

SEQ ID NO: 2641931 - RNA, 18 nt, Human
acagcccagagccuggcu

SEQ ID NO: 2641932 - RNA, 16 nt, Human
uauaacaguguuuaaa

SEQ ID NO: 2641933 - RNA, 19 nt, Human
uaguuauacuuauuuguau

SEQ ID NO: 2641934 - RNA, 15 nt, Human
acuaaaaaaaagaug

SEQ ID NO: 2641935 - RNA, 16 nt, Human
acuaaaaaaaagauga

SEQ ID NO: 2641936 - RNA, 17 nt, Human
acuaaaaaaaagaugaa

SEQ ID NO: 2641937 - RNA, 19 nt, Human
uccuucaugacagccucca

SEQ ID NO: 2641938 - RNA, 18 nt, Human
uccuguuuccuagcugug

SEQ ID NO: 2641939 - RNA, 21 nt, Human
uccuguuuugcacagccaaau

SEQ ID NO: 2641940 - RNA, 18 nt, Human
uccuguguguacucuguc

SEQ ID NO: 2641941 - RNA, 17 nt, Human
uccuguuuugcacagcc

SEQ ID NO: 2641942 - RNA, 12 nt, Human
acugcagcaccu

SEQ ID NO: 2641943 - RNA, 14 nt, Human
acugcagcaccucc

SEQ ID NO: 2641944 - RNA, 15 nt, Human
acugcagcaccucca

SEQ ID NO: 2641945 - RNA, 16 nt, Human
acugcagcaccuccag

SEQ ID NO: 2641946 - RNA, 18 nt, Human
acugcagcaccuccaggc

SEQ ID NO: 2641947 - RNA, 21 nt, Human
acugcagcaccuccaggccug

SEQ ID NO: 2641948 - RNA, 22 nt, Human
acugcagcaccuccaggccugu

SEQ ID NO: 2641949 - RNA, 13 nt, Human
uccugcagcaaac

SEQ ID NO: 2641950 - RNA, 19 nt, Human
uccugcagcaaacacucca

SEQ ID NO: 2641951 - RNA, 20 nt, Human
uccugcagcaaacacuccac

SEQ ID NO: 2641952 - RNA, 22 nt, Human
uccugcagcaaacacuccaccc

SEQ ID NO: 2641953 - RNA, 12 nt, Human
uccagccccugu

SEQ ID NO: 2641954 - RNA, 13 nt, Human
uccagccccuguc

SEQ ID NO: 2641955 - RNA, 14 nt, Human
uccagccccugucc

SEQ ID NO: 2641956 - RNA, 15 nt, Human
uccagccccuguccc

SEQ ID NO: 2641957 - RNA, 16 nt, Human
uccagccccuguccca

SEQ ID NO: 2641958 - RNA, 20 nt, Human
uccagccccugucccacccc

SEQ ID NO: 2641959 - RNA, 23 nt, Human
uccagccccugucccacccccuu

SEQ ID NO: 2641960 - RNA, 22 nt, Human
accuugaaaaaaaacaguggau

SEQ ID NO: 2641961 - RNA, 16 nt, Human
accuugaaaaaaaaca

SEQ ID NO: 2641962 - RNA, 18 nt, Human
accuugaaaaaaaacagu

SEQ ID NO: 2641963 - RNA, 14 nt, Human
ucaugacagccucc

SEQ ID NO: 2641964 - RNA, 15 nt, Human
accucgggccugcug

SEQ ID NO: 2641965 - RNA, 15 nt, Human
accagagagaguugu

SEQ ID NO: 2641966 - RNA, 21 nt, Human
uauuucaggcauuggauauuu

SEQ ID NO: 2641967 - RNA, 23 nt, Human
accauuuuguuauugacuaacag

SEQ ID NO: 2641968 - RNA, 12 nt, Human
acccuccaccuu

SEQ ID NO: 2641969 - RNA, 15 nt, Human
acccuccaccuucca

SEQ ID NO: 2641970 - RNA, 21 nt, Human
acccuccacucagcuguccug

SEQ ID NO: 2641971 - RNA, 20 nt, Human
ucaggcauuggauauuuuuu

SEQ ID NO: 2641972 - RNA, 22 nt, Human
agauggcaagagggugacagcu

SEQ ID NO: 2641973 - RNA, 16 nt, Human
agaucaacgccucacu

SEQ ID NO: 2641974 - RNA, 17 nt, Human
agaucaacgccucacug

SEQ ID NO: 2641975 - RNA, 15 nt, Human
ugaagccgacucugg

SEQ ID NO: 2641976 - RNA, 16 nt, Human
ugaagccgacucuggc

SEQ ID NO: 2641977 - RNA, 17 nt, Human
ugaagccgacucuggcc

SEQ ID NO: 2641978 - RNA, 18 nt, Human
ugaagccgacucuggccc

SEQ ID NO: 2641979 - RNA, 19 nt, Human
ugaagccgacucuggcccu

SEQ ID NO: 2641980 - RNA, 20 nt, Human
ugaagccgacucuggcccug

SEQ ID NO: 2641981 - RNA, 13 nt, Human
ucuggcccuggcc

SEQ ID NO: 2641982 - RNA, 14 nt, Human
ucuggcccuggccc

SEQ ID NO: 2641983 - RNA, 15 nt, Human
ucuggcccuggcccu

SEQ ID NO: 2641984 - RNA, 10 nt, Human
agaagccugc

SEQ ID NO: 2641985 - RNA, 11 nt, Human
agaagccugca

SEQ ID NO: 2641986 - RNA, 21 nt, Human
agaagccugcauaauguuucu

SEQ ID NO: 2641987 - RNA, 21 nt, Human
ucuccuucaugacagccucca

SEQ ID NO: 2641988 - RNA, 22 nt, Human
acuugugucccuaauguguuua

SEQ ID NO: 2641989 - RNA, 17 nt, Human
acuuuggggcuaauuua

SEQ ID NO: 2641990 - RNA, 17 nt, Human
ugcauaauguuucugga

SEQ ID NO: 2641991 - RNA, 18 nt, Human
ugcauaauguuucuggau

SEQ ID NO: 2641992 - RNA, 18 nt, Human
agccuaaggcuccuguuu

SEQ ID NO: 2641993 - RNA, 19 nt, Human
agccuaaggcuccuguuuu

SEQ ID NO: 2641994 - RNA, 17 nt, Human
ugcacuaacagaguggc

SEQ ID NO: 2641995 - RNA, 19 nt, Human
ugccauugggguaguugug

SEQ ID NO: 2641996 - RNA, 10 nt, Human
agccugcuca

SEQ ID NO: 2641997 - RNA, 12 nt, Human
ugccacuguugu

SEQ ID NO: 2641998 - RNA, 13 nt, Human
agcucucuaggcc

SEQ ID NO: 2641999 - RNA, 16 nt, Human
agcucucuaggccucu

SEQ ID NO: 2642000 - RNA, 17 nt, Human
agcucucuaggccucuc

SEQ ID NO: 2642001 - RNA, 18 nt, Human
agcucucuaggccucucc

SEQ ID NO: 2642002 - RNA, 19 nt, Human
agcucucuaggccucucca

SEQ ID NO: 2642003 - RNA, 22 nt, Human
agcucucuaggccucuccaguu

SEQ ID NO: 2642004 - RNA, 18 nt, Human
ugcuauagagccuaccug

SEQ ID NO: 2642005 - RNA, 21 nt, Human
uggcccuuacuugcuucucua

SEQ ID NO: 2642006 - RNA, 23 nt, Human
uggcccuuacuugcuucucuagc

SEQ ID NO: 2642007 - RNA, 14 nt, Human
aggccccuggagcc

SEQ ID NO: 2642008 - RNA, 16 nt, Human
aggccccuggagccag

SEQ ID NO: 2642009 - RNA, 20 nt, Human
uggcugacuuacaucaugug

SEQ ID NO: 2642010 - RNA, 16 nt, Human
uguaauuguguggauu

SEQ ID NO: 2642011 - RNA, 20 nt, Human
uguaauuguguggauucuuu

SEQ ID NO: 2642012 - RNA, 21 nt, Human
uguaauuguguggauucuuua

SEQ ID NO: 2642013 - RNA, 17 nt, Human
aggugcuaauuuguuuu

SEQ ID NO: 2642014 - RNA, 20 nt, Human
aggugcuaauuuguuuugga

SEQ ID NO: 2642015 - RNA, 23 nt, Human
aggugcuaauuuguuuuggauau

SEQ ID NO: 2642016 - RNA, 19 nt, Human
aguauaagacuacugaauc

SEQ ID NO: 2642017 - RNA, 23 nt, Human
agucacuggucuguuugcauuug

SEQ ID NO: 2642018 - RNA, 23 nt, Human
uguguuacuaaaaaaaagaugaa

SEQ ID NO: 2642019 - RNA, 14 nt, Human
uguggauucuuuaa

SEQ ID NO: 2642020 - RNA, 13 nt, Human
auagaaggugaug

SEQ ID NO: 2642021 - RNA, 19 nt, Human
auacuguauauucaggacu

SEQ ID NO: 2642022 - RNA, 13 nt, Human
aguuuuaacugug

SEQ ID NO: 2642023 - RNA, 18 nt, Human
aguuuuaacuguggauau

SEQ ID NO: 2642024 - RNA, 15 nt, Human
uuagggcacugggcu

SEQ ID NO: 2642025 - RNA, 16 nt, Human
uuauaaaaguguucau

SEQ ID NO: 2642026 - RNA, 12 nt, Human
uuauaaaagugu

SEQ ID NO: 2642027 - RNA, 23 nt, Human
uuagaagccugcauaauguuucu

SEQ ID NO: 2642028 - RNA, 18 nt, Human
uuggggaagggccugccc

SEQ ID NO: 2642029 - RNA, 18 nt, Human
aucugcuaccaaaacagu

SEQ ID NO: 2642030 - RNA, 17 nt, Human
uugaagccgacucuggc

SEQ ID NO: 2642031 - RNA, 18 nt, Human
uugaagccgacucuggcc

SEQ ID NO: 2642032 - RNA, 19 nt, Human
uugaagccgacucuggccc

SEQ ID NO: 2642033 - RNA, 23 nt, Human
aucuacuucuguaauugugugga

SEQ ID NO: 2642034 - RNA, 19 nt, Human
aucuacuucuguaauugug

SEQ ID NO: 2642035 - RNA, 20 nt, Human
aucuacuucuguaauugugu

SEQ ID NO: 2642036 - RNA, 13 nt, Human
auccggaaagaag

SEQ ID NO: 2642037 - RNA, 13 nt, Human
augugcaauagaa

SEQ ID NO: 2642038 - RNA, 18 nt, Human
augugcaauagaagguga

SEQ ID NO: 2642039 - RNA, 13 nt, Human
uuugacaguguuu

SEQ ID NO: 2642040 - RNA, 18 nt, Human
uuuaaagucucaguuucu

SEQ ID NO: 2642041 - RNA, 22 nt, Human
augauuagaaauuaccugugga

SEQ ID NO: 2642042 - RNA, 17 nt, Human
auggcaggggguggaau

SEQ ID NO: 2642043 - RNA, 24 nt, Human
auggcaggggguggaauuauuacu

SEQ ID NO: 2642044 - RNA, 18 nt, Human
auugaagccgacucuggc

SEQ ID NO: 2642045 - RNA, 22 nt, Human
auugaagccgacucuggcccug

SEQ ID NO: 2642046 - RNA, 15 nt, Human
auuuuucuuuaacug

SEQ ID NO: 2642047 - RNA, 16 nt, Human
auuuuucuuuaacugc

SEQ ID NO: 2642048 - RNA, 20 nt, Human
auuuucccccacuacugcag

SEQ ID NO: 2642049 - RNA, 21 nt, Human
auuuucccccacuacugcagc

SEQ ID NO: 2642050 - RNA, 11 nt, Human
auuuuguuuac

SEQ ID NO: 2642051 - RNA, 12 nt, Human
auuuuguuuaca

SEQ ID NO: 2642052 - RNA, 22 nt, Human
auuggauauuuuuuacuuuaga

SEQ ID NO: 2642053 - RNA, 11 nt, Human
auuggauauuu

SEQ ID NO: 2642054 - RNA, 16 nt, Human
cacagcauuguauaug

SEQ ID NO: 2642055 - RNA, 16 nt, Human
cacagccaaauuuaaa

SEQ ID NO: 2642056 - RNA, 20 nt, Human
cacaucacaagacuaugcca

SEQ ID NO: 2642057 - RNA, 12 nt, Human
caagaaacagcc

SEQ ID NO: 2642058 - RNA, 13 nt, Human
caagaaacagcca

SEQ ID NO: 2642059 - RNA, 14 nt, Human
caagaaacagccag

SEQ ID NO: 2642060 - RNA, 15 nt, Human
caagaaacagccagc

SEQ ID NO: 2642061 - RNA, 16 nt, Human
caagaaacagccagca

SEQ ID NO: 2642062 - RNA, 18 nt, Human
caagaaacagccagcaag

SEQ ID NO: 2642063 - RNA, 19 nt, Human
caagaaacagccagcaaga

SEQ ID NO: 2642064 - RNA, 19 nt, Human
caaauuuaaaacuguugga

SEQ ID NO: 2642065 - RNA, 16 nt, Human
caaagaaacaaagaug

SEQ ID NO: 2642066 - RNA, 17 nt, Human
caaagaaacaaagaugu

SEQ ID NO: 2642067 - RNA, 19 nt, Human
cacccaaucaagggaagaa

SEQ ID NO: 2642068 - RNA, 21 nt, Human
cacccaaucaagggaagaagg

SEQ ID NO: 2642069 - RNA, 12 nt, Human
cacccccuuccc

SEQ ID NO: 2642070 - RNA, 13 nt, Human
cacccccuucccc

SEQ ID NO: 2642071 - RNA, 14 nt, Human
cacccccuuccccc

SEQ ID NO: 2642072 - RNA, 22 nt, Human
ccauuuuguuauugacuaacag

SEQ ID NO: 2642073 - RNA, 23 nt, Human
ccauuuuguuauugacuaacagg

SEQ ID NO: 2642074 - RNA, 18 nt, Human
ccauuuuguuauugacua

SEQ ID NO: 2642075 - RNA, 22 nt, Human
ccauuuucccccacuacugcag

SEQ ID NO: 2642076 - RNA, 13 nt, Human
ccauuaggccagc

SEQ ID NO: 2642077 - RNA, 14 nt, Human
ccauuaggccagca

SEQ ID NO: 2642078 - RNA, 16 nt, Human
ccauuaggccagcaac

SEQ ID NO: 2642079 - RNA, 20 nt, Human
ccauuaggccagcaacgcuu

SEQ ID NO: 2642080 - RNA, 21 nt, Human
ccagcccauccauuaggccag

SEQ ID NO: 2642081 - RNA, 22 nt, Human
ccagcccauccauuaggccagc

SEQ ID NO: 2642082 - RNA, 21 nt, Human
ccagagccccuccuccagccc

SEQ ID NO: 2642083 - RNA, 19 nt, Human
ccagagccuggcugcccau

SEQ ID NO: 2642084 - RNA, 21 nt, Human
ccagagccuggcugcccauca

SEQ ID NO: 2642085 - RNA, 18 nt, Human
ccuaaccucgggccugcu

SEQ ID NO: 2642086 - RNA, 13 nt, Human
ccgacucuggccc

SEQ ID NO: 2642087 - RNA, 14 nt, Human
ccgacucuggcccu

SEQ ID NO: 2642088 - RNA, 19 nt, Human
ccgacucuggcccuggccc

SEQ ID NO: 2642089 - RNA, 20 nt, Human
cccuuacuugcuucucuagc

SEQ ID NO: 2642090 - RNA, 16 nt, Human
cccuucccccagccca

SEQ ID NO: 2642091 - RNA, 21 nt, Human
cccuucccccagcccauccau

SEQ ID NO: 2642092 - RNA, 13 nt, Human
ccccuccuccagc

SEQ ID NO: 2642093 - RNA, 17 nt, Human
ccccuccuccagccccu

SEQ ID NO: 2642094 - RNA, 22 nt, Human
ccccuccuccagccccuguccc

SEQ ID NO: 2642095 - RNA, 11 nt, Human
ccccuggagcc

SEQ ID NO: 2642096 - RNA, 19 nt, Human
cccaguugcacucagguga

SEQ ID NO: 2642097 - RNA, 20 nt, Human
cccaguugcacucaggugac

SEQ ID NO: 2642098 - RNA, 14 nt, Human
ccccacuacugcag

SEQ ID NO: 2642099 - RNA, 19 nt, Human
ccccacuacugcagcaccu

SEQ ID NO: 2642100 - RNA, 21 nt, Human
ccccacuacugcagcaccucc

SEQ ID NO: 2642101 - RNA, 23 nt, Human
ccccacuacugcagcaccuccag

SEQ ID NO: 2642102 - RNA, 15 nt, Human
ccccacccuccacuc

SEQ ID NO: 2642103 - RNA, 17 nt, Human
ccccacccuccacucag

SEQ ID NO: 2642104 - RNA, 15 nt, Human
cucaguuucuugcuu

SEQ ID NO: 2642105 - RNA, 14 nt, Human
cuccacucagcugu

SEQ ID NO: 2642106 - RNA, 15 nt, Human
cuccacucagcuguc

SEQ ID NO: 2642107 - RNA, 18 nt, Human
cuccacucagcuguccug

SEQ ID NO: 2642108 - RNA, 21 nt, Human
cuccacucagcuguccugcag

SEQ ID NO: 2642109 - RNA, 23 nt, Human
cuccacucagcuguccugcagca

SEQ ID NO: 2642110 - RNA, 14 nt, Human
cucccaacccuggc

SEQ ID NO: 2642111 - RNA, 16 nt, Human
cucccaacccuggcuu

SEQ ID NO: 2642112 - RNA, 12 nt, Human
cuccagccccug

SEQ ID NO: 2642113 - RNA, 16 nt, Human
cucagcuguccugcag

SEQ ID NO: 2642114 - RNA, 17 nt, Human
cucagcuguccugcagc

SEQ ID NO: 2642115 - RNA, 18 nt, Human
cucagcuguccugcagca

SEQ ID NO: 2642116 - RNA, 19 nt, Human
cucagcuguccugcagcaa

SEQ ID NO: 2642117 - RNA, 23 nt, Human
cuagcugugugaauaccugcuca

SEQ ID NO: 2642118 - RNA, 15 nt, Human
cuagcucucuaggcc

SEQ ID NO: 2642119 - RNA, 16 nt, Human
cuagcucucuaggccu

SEQ ID NO: 2642120 - RNA, 21 nt, Human
cuagcucucuaggccucucca

SEQ ID NO: 2642121 - RNA, 22 nt, Human
cuagcucucuaggccucuccag

SEQ ID NO: 2642122 - RNA, 13 nt, Human
cuacugcagcacc

SEQ ID NO: 2642123 - RNA, 18 nt, Human
cuacugcagcaccuccag

SEQ ID NO: 2642124 - RNA, 19 nt, Human
cuacugcagcaccuccagg

SEQ ID NO: 2642125 - RNA, 20 nt, Human
cuacugcagcaccuccaggc

SEQ ID NO: 2642126 - RNA, 21 nt, Human
cuacugcagcaccuccaggcc

SEQ ID NO: 2642127 - RNA, 22 nt, Human
cuacugcagcaccuccaggccu

SEQ ID NO: 2642128 - RNA, 16 nt, Human
cuaccgucuuuuccug

SEQ ID NO: 2642129 - RNA, 16 nt, Human
cuaaggcuccuguuuu

SEQ ID NO: 2642130 - RNA, 17 nt, Human
cuaaccucgggccugcu

SEQ ID NO: 2642131 - RNA, 14 nt, Human
cuaaaaaaaagaug

SEQ ID NO: 2642132 - RNA, 15 nt, Human
cuaaaaaaaagauga

SEQ ID NO: 2642133 - RNA, 15 nt, Human
cuacacucaccugca

SEQ ID NO: 2642134 - RNA, 22 nt, Human
ccuguaugucaauaaacaacag

SEQ ID NO: 2642135 - RNA, 12 nt, Human
ccugucccaccc

SEQ ID NO: 2642136 - RNA, 16 nt, Human
ccugucccacccccuu

SEQ ID NO: 2642137 - RNA, 19 nt, Human
ccugucccacccccuuccc

SEQ ID NO: 2642138 - RNA, 22 nt, Human
ccugucccacccccuuccccca

SEQ ID NO: 2642139 - RNA, 13 nt, Human
ccuguccccaccc

SEQ ID NO: 2642140 - RNA, 14 nt, Human
ccuguccccacccu

SEQ ID NO: 2642141 - RNA, 17 nt, Human
ccuguccccacccucca

SEQ ID NO: 2642142 - RNA, 19 nt, Human
ccuguccccacccuccacu

SEQ ID NO: 2642143 - RNA, 17 nt, Human
ccuucaugacagccucc

SEQ ID NO: 2642144 - RNA, 18 nt, Human
ccuucaugacagccucca

SEQ ID NO: 2642145 - RNA, 12 nt, Human
ccuguggauauu

SEQ ID NO: 2642146 - RNA, 16 nt, Human
cgagagaucaaagaug

SEQ ID NO: 2642147 - RNA, 17 nt, Human
cgagagaucaaagauga

SEQ ID NO: 2642148 - RNA, 13 nt, Human
gaaaaugaaagcu

SEQ ID NO: 2642149 - RNA, 19 nt, Human
gaaaaucuuuauaaaugua

SEQ ID NO: 2642150 - RNA, 20 nt, Human
cuucuguaauuguguggauu

SEQ ID NO: 2642151 - RNA, 15 nt, Human
cuucuguaauugugu

SEQ ID NO: 2642152 - RNA, 13 nt, Human
cuugaaagaaaug

SEQ ID NO: 2642153 - RNA, 14 nt, Human
cuugaaaaaaaaca

SEQ ID NO: 2642154 - RNA, 20 nt, Human
cuugaaaaaaaacaguggau

SEQ ID NO: 2642155 - RNA, 16 nt, Human
cuugaaaaaaaacagu

SEQ ID NO: 2642156 - RNA, 18 nt, Human
cuugaaaaaaaacagugg

SEQ ID NO: 2642157 - RNA, 16 nt, Human
cuuauuuguauauggu

SEQ ID NO: 2642158 - RNA, 16 nt, Human
cuguguuuugaaagaa

SEQ ID NO: 2642159 - RNA, 15 nt, Human
cuguguuugcagccu

SEQ ID NO: 2642160 - RNA, 20 nt, Human
cuguguuugcagccugcucu

SEQ ID NO: 2642161 - RNA, 23 nt, Human
cuguguuugcagccugcucuagu

SEQ ID NO: 2642162 - RNA, 20 nt, Human
cuguccaguuccuuuagaaa

SEQ ID NO: 2642163 - RNA, 14 nt, Human
cuguauauucagga

SEQ ID NO: 2642164 - RNA, 15 nt, Human
cugccguaauuuaac

SEQ ID NO: 2642165 - RNA, 14 nt, Human
gagagaucaaagau

SEQ ID NO: 2642166 - RNA, 15 nt, Human
gagagaucaaagaug

SEQ ID NO: 2642167 - RNA, 13 nt, Human
gacuugaaagaaa

SEQ ID NO: 2642168 - RNA, 15 nt, Human
gacuggaggccccug

SEQ ID NO: 2642169 - RNA, 16 nt, Human
gacuggaggccccugg

SEQ ID NO: 2642170 - RNA, 20 nt, Human
gacuggaggccccuggagcc

SEQ ID NO: 2642171 - RNA, 22 nt, Human
gacuggaggccccuggagccag

SEQ ID NO: 2642172 - RNA, 23 nt, Human
gacuggaggccccuggagccaga

SEQ ID NO: 2642173 - RNA, 11 nt, Human
gacagcccaga

SEQ ID NO: 2642174 - RNA, 13 nt, Human
gacagcccagagc

SEQ ID NO: 2642175 - RNA, 15 nt, Human
gacagcccagagccu

SEQ ID NO: 2642176 - RNA, 17 nt, Human
gacagcccagagccugg

SEQ ID NO: 2642177 - RNA, 20 nt, Human
gacaguguuccccgauacca

SEQ ID NO: 2642178 - RNA, 21 nt, Human
gacaguguuccccgauaccau

SEQ ID NO: 2642179 - RNA, 18 nt, Human
gaugcccagaggacuccc

SEQ ID NO: 2642180 - RNA, 19 nt, Human
gcacugguagguugggaca

SEQ ID NO: 2642181 - RNA, 22 nt, Human
gcacugguagguugggacacca

SEQ ID NO: 2642182 - RNA, 23 nt, Human
gcacugguagguugggacaccag

SEQ ID NO: 2642183 - RNA, 11 nt, Human
gcaccuguccc

SEQ ID NO: 2642184 - RNA, 15 nt, Human
gcaccuguccccacc

SEQ ID NO: 2642185 - RNA, 18 nt, Human
gcaccuguccccacccuc

SEQ ID NO: 2642186 - RNA, 20 nt, Human
gcaccuguccccacccucca

SEQ ID NO: 2642187 - RNA, 21 nt, Human
gcaccuguccccacccuccac

SEQ ID NO: 2642188 - RNA, 23 nt, Human
gcaccuguccccacccuccacuc

SEQ ID NO: 2642189 - RNA, 15 nt, Human
gauaugaaagcugau

SEQ ID NO: 2642190 - RNA, 18 nt, Human
gagggugacagcuuccuu

SEQ ID NO: 2642191 - RNA, 20 nt, Human
gagggugguucaacaaagaa

SEQ ID NO: 2642192 - RNA, 12 nt, Human
ggcccuggcccu

SEQ ID NO: 2642193 - RNA, 20 nt, Human
ggaauggauuuuucuuuaac

SEQ ID NO: 2642194 - RNA, 22 nt, Human
ggaauggauuuuucuuuaacug

SEQ ID NO: 2642195 - RNA, 19 nt, Human
ggaauggauuuuucuuuaa

SEQ ID NO: 2642196 - RNA, 14 nt, Human
ggaaugcuggacug

SEQ ID NO: 2642197 - RNA, 17 nt, Human
ggacuggaggccccugg

SEQ ID NO: 2642198 - RNA, 21 nt, Human
ggacuggaggccccuggagcc

SEQ ID NO: 2642199 - RNA, 12 nt, Human
gccucacugaaa

SEQ ID NO: 2642200 - RNA, 20 nt, Human
gccucacugaaacauggcug

SEQ ID NO: 2642201 - RNA, 14 nt, Human
gcagacguccauca

SEQ ID NO: 2642202 - RNA, 13 nt, Human
gccccuccuccag

SEQ ID NO: 2642203 - RNA, 15 nt, Human
gccccuccuccagcc

SEQ ID NO: 2642204 - RNA, 18 nt, Human
gccccuccuccagccccu

SEQ ID NO: 2642205 - RNA, 20 nt, Human
gccccuccuccagccccugu

SEQ ID NO: 2642206 - RNA, 21 nt, Human
gccccuccuccagccccuguc

SEQ ID NO: 2642207 - RNA, 15 nt, Human
gcucucuaggccucu

SEQ ID NO: 2642208 - RNA, 18 nt, Human
gcucucuaggccucucca

SEQ ID NO: 2642209 - RNA, 19 nt, Human
gcucucuaggccucuccag

SEQ ID NO: 2642210 - RNA, 15 nt, Human
guacgaugacagugu

SEQ ID NO: 2642211 - RNA, 23 nt, Human
guacgaaccuacaguuuuaacug

SEQ ID NO: 2642212 - RNA, 18 nt, Human
gguuuacucacugcugca

SEQ ID NO: 2642213 - RNA, 17 nt, Human
gguuuaagaaauagaau

SEQ ID NO: 2642214 - RNA, 23 nt, Human
gguucaacaaagaaacaaagaug

SEQ ID NO: 2642215 - RNA, 18 nt, Human
guaaggauccggaaagaa

SEQ ID NO: 2642216 - RNA, 19 nt, Human
guaaggauccggaaagaag

SEQ ID NO: 2642217 - RNA, 15 nt, Human
ggguuuauucacuga

SEQ ID NO: 2642218 - RNA, 14 nt, Human
ggucaagaaacagc

SEQ ID NO: 2642219 - RNA, 18 nt, Human
ggucaagaaacagccagc

SEQ ID NO: 2642220 - RNA, 19 nt, Human
ggucaagaaacagccagca

SEQ ID NO: 2642221 - RNA, 21 nt, Human
ggucaagaaacagccagcaag

SEQ ID NO: 2642222 - RNA, 17 nt, Human
gggccuuagggcacugg

SEQ ID NO: 2642223 - RNA, 21 nt, Human
gggccuuagggcacugggcug

SEQ ID NO: 2642224 - RNA, 19 nt, Human
gggcuguaacguggcacug

SEQ ID NO: 2642225 - RNA, 18 nt, Human
gucaagaaacagccagca

SEQ ID NO: 2642226 - RNA, 19 nt, Human
guauuuauuuuuucuuuuc

SEQ ID NO: 2642227 - RNA, 21 nt, Human
guauucccaaaaauuacuuug

SEQ ID NO: 2642228 - RNA, 15 nt, Human
gugaauaccugcuca

SEQ ID NO: 2642229 - RNA, 23 nt, Human
guggaucacaaaguggaacgaaa

SEQ ID NO: 2642230 - RNA, 14 nt, Human
guggauauuguuac

SEQ ID NO: 2642231 - RNA, 16 nt, Human
guggauauuuguauaa

SEQ ID NO: 2642232 - RNA, 19 nt, Human
guggauccaaacugaucca

SEQ ID NO: 2642233 - RNA, 16 nt, Human
guggaacgaaaaugaa

SEQ ID NO: 2642234 - RNA, 12 nt, Human
guggccccaccc

SEQ ID NO: 2642235 - RNA, 13 nt, Human
ucuagugggacag

SEQ ID NO: 2642236 - RNA, 15 nt, Human
ucuagugggacagcc

SEQ ID NO: 2642237 - RNA, 19 nt, Human
ucuagugggacagcccaga

SEQ ID NO: 2642238 - RNA, 24 nt, Human
ucuagugggacagcccagagccug

SEQ ID NO: 2642239 - RNA, 18 nt, Human
uccuccagccccuguccc

SEQ ID NO: 2642240 - RNA, 12 nt, Human
uccuccagcccc

SEQ ID NO: 2642241 - RNA, 14 nt, Human
uccuccagccccug

SEQ ID NO: 2642242 - RNA, 15 nt, Human
uccuccagccccugu

SEQ ID NO: 2642243 - RNA, 17 nt, Human
uccaguuugcaccuguc

SEQ ID NO: 2642244 - RNA, 18 nt, Human
uccaguuugcaccugucc

SEQ ID NO: 2642245 - RNA, 19 nt, Human
uccaguuugcaccuguccc

SEQ ID NO: 2642246 - RNA, 15 nt, Human
uccaguuccuuuaga

SEQ ID NO: 2642247 - RNA, 17 nt, Human
uccaguuccuuuagaaa

SEQ ID NO: 2642248 - RNA, 19 nt, Human
uccaucacguuagcugucc

SEQ ID NO: 2642249 - RNA, 15 nt, Human
uccagauaguguagc

SEQ ID NO: 2642250 - RNA, 22 nt, Human
uccagauaguguagcugaggag

SEQ ID NO: 2642251 - RNA, 14 nt, Human
uccauuaggccagc

SEQ ID NO: 2642252 - RNA, 15 nt, Human
uccauuaggccagca

SEQ ID NO: 2642253 - RNA, 17 nt, Human
uccauuaggccagcaac

SEQ ID NO: 2642254 - RNA, 20 nt, Human
uccauuaggccagcaacgcu

SEQ ID NO: 2642255 - RNA, 18 nt, Human
ucaggaauucuuggagaa

SEQ ID NO: 2642256 - RNA, 16 nt, Human
ucaggaauucuuggag

SEQ ID NO: 2642257 - RNA, 15 nt, Human
ucagcuguccugcag

SEQ ID NO: 2642258 - RNA, 17 nt, Human
ucagcuguccugcagca

SEQ ID NO: 2642259 - RNA, 18 nt, Human
ucagcuguccugcagcaa

SEQ ID NO: 2642260 - RNA, 19 nt, Human
ucagcuguccugcagcaaa

SEQ ID NO: 2642261 - RNA, 20 nt, Human
ucuugcuuggggaacuugug

SEQ ID NO: 2642262 - RNA, 15 nt, Human
ugaaagcuacucaua

SEQ ID NO: 2642263 - RNA, 23 nt, Human
ugauuagaaauuaccuguggaua

SEQ ID NO: 2642264 - RNA, 17 nt, Human
ugcucacgucaaaugca

SEQ ID NO: 2642265 - RNA, 14 nt, Human
ugcucuagugggac

SEQ ID NO: 2642266 - RNA, 16 nt, Human
ugcucuagugggacag

SEQ ID NO: 2642267 - RNA, 18 nt, Human
ugcucuagugggacagcc

SEQ ID NO: 2642268 - RNA, 16 nt, Human
ugcauuugauacauuu

SEQ ID NO: 2642269 - RNA, 21 nt, Human
ugcccagaggacucccaaccc

SEQ ID NO: 2642270 - RNA, 18 nt, Human
uggauuuuucuuuaacug

SEQ ID NO: 2642271 - RNA, 17 nt, Human
uggacuggaggccccug

SEQ ID NO: 2642272 - RNA, 21 nt, Human
uggacuggaggccccuggagc

SEQ ID NO: 2642273 - RNA, 23 nt, Human
uggacuggaggccccuggagcca

SEQ ID NO: 2642274 - RNA, 13 nt, Human
uuaaaagccugcu

SEQ ID NO: 2642275 - RNA, 12 nt, Human
uuaacuguggau

SEQ ID NO: 2642276 - RNA, 13 nt, Human
uuaacuguggaua

SEQ ID NO: 2642277 - RNA, 15 nt, Human
uuaacuguggauauu

SEQ ID NO: 2642278 - RNA, 19 nt, Human
uuaacugccguaauuuaac

SEQ ID NO: 2642279 - RNA, 10 nt, Human
uuaggccagc

SEQ ID NO: 2642280 - RNA, 17 nt, Human
uuaggccagcaacgcuu

SEQ ID NO: 2642281 - RNA, 13 nt, Human
uuacuugcuucuc

SEQ ID NO: 2642282 - RNA, 14 nt, Human
uuacuugcuucucu

SEQ ID NO: 2642283 - RNA, 15 nt, Human
uuacuugcuucucua

SEQ ID NO: 2642284 - RNA, 21 nt, Human
uuacuuuggggcuaauuuaac

SEQ ID NO: 2642285 - RNA, 18 nt, Human
uuacuuuagaagccugca

SEQ ID NO: 2642286 - RNA, 16 nt, Human
uuagaccuguguuacu

SEQ ID NO: 2642287 - RNA, 17 nt, Human
uucccccacuacugcag

SEQ ID NO: 2642288 - RNA, 18 nt, Human
uucccccacuacugcagc

SEQ ID NO: 2642289 - RNA, 13 nt, Human
uucccccagccca

SEQ ID NO: 2642290 - RNA, 16 nt, Human
uucaacggaaagugcu

SEQ ID NO: 2642291 - RNA, 15 nt, Human
uuuaaaacuguugga

SEQ ID NO: 2642292 - RNA, 22 nt, Human
uuuaaaacuguuggaauggauu

SEQ ID NO: 2642293 - RNA, 14 nt, Human
uuuaaaagccugcu

SEQ ID NO: 2642294 - RNA, 13 nt, Human
uuuaaaagccugc

SEQ ID NO: 2642295 - RNA, 15 nt, Human
uugcagccugcucua

SEQ ID NO: 2642296 - RNA, 22 nt, Human
uugcagccugcucuagugggac

SEQ ID NO: 2642297 - RNA, 23 nt, Human
uugcagccugcucuagugggaca

SEQ ID NO: 2642298 - RNA, 12 nt, Human
uucuuuaacugc

SEQ ID NO: 2642299 - RNA, 19 nt, Human
uucuuuaacugccguaauu

SEQ ID NO: 2642300 - RNA, 19 nt, Human
uuggauuuaaaagccugcu

SEQ ID NO: 2642301 - RNA, 21 nt, Human
uuggauuuaaaagccugcuca

SEQ ID NO: 2642302 - RNA, 17 nt, Human
uuguaaaauuauuucau

SEQ ID NO: 2642303 - RNA, 17 nt, Human
uuguagaacucacucug

SEQ ID NO: 2642304 - RNA, 19 nt, Human
uuguagaacucacucuggg

SEQ ID NO: 2642305 - RNA, 20 nt, Human
uuguagaacucacucugggc

SEQ ID NO: 2642306 - RNA, 22 nt, Human
uuguagaacucacucugggcug

SEQ ID NO: 2642307 - RNA, 14 nt, Human
uugggacaccaggg

SEQ ID NO: 2642308 - RNA, 16 nt, Human
aguuugcaccuguccc

SEQ ID NO: 2642309 - RNA, 13 nt, Human
aguuucuugcuug

SEQ ID NO: 2642310 - RNA, 15 nt, Human
agugggacagcccag

SEQ ID NO: 2642311 - RNA, 22 nt, Human
agugggacagcccagagccugg

SEQ ID NO: 2642312 - RNA, 12 nt, Human
auguuucuggau

SEQ ID NO: 2642313 - RNA, 15 nt, Human
aucuauaaacuauaa

SEQ ID NO: 2642314 - RNA, 12 nt, Human
aucaaagaugaa

SEQ ID NO: 2642315 - RNA, 19 nt, Human
agguacgaugacaguguuc

SEQ ID NO: 2642316 - RNA, 18 nt, Human
agcuucacaguacccaaa

SEQ ID NO: 2642317 - RNA, 17 nt, Human
agccuggcugcccauca

SEQ ID NO: 2642318 - RNA, 22 nt, Human
aaacugauccaguauaagacua

SEQ ID NO: 2642319 - RNA, 14 nt, Human
aaacagccagcaag

SEQ ID NO: 2642320 - RNA, 16 nt, Human
aacgaaaaugaaagcu

SEQ ID NO: 2642321 - RNA, 13 nt, Human
aauagaacacagu

SEQ ID NO: 2642322 - RNA, 19 nt, Human
aacuguuggaauggauuuu

SEQ ID NO: 2642323 - RNA, 18 nt, Human
acaggugcuaauuuguuu

SEQ ID NO: 2642324 - RNA, 18 nt, Human
acaaagaaacaaagaugu

SEQ ID NO: 2642325 - RNA, 17 nt, Human
acaaagaaacaaagaug

SEQ ID NO: 2642326 - RNA, 20 nt, Human
acaaagaaacaaagauguua

SEQ ID NO: 2642327 - RNA, 22 nt, Human
acugcaaaaagaaaaucuuuau

SEQ ID NO: 2642328 - RNA, 12 nt, Human
acugauuucaga

SEQ ID NO: 2642329 - RNA, 15 nt, Human
acugauuucagagug

SEQ ID NO: 2642330 - RNA, 13 nt, Human
acguggcacuggu

SEQ ID NO: 2642331 - RNA, 22 nt, Human
cugcuuuuuccaacucagaaau

SEQ ID NO: 2642332 - RNA, 13 nt, Human
cuguccugcagca

SEQ ID NO: 2642333 - RNA, 14 nt, Human
cuguccugcagcaa

SEQ ID NO: 2642334 - RNA, 15 nt, Human
cuguccugcagcaaa

SEQ ID NO: 2642335 - RNA, 16 nt, Human
cuguccugcagcaaac

SEQ ID NO: 2642336 - RNA, 23 nt, Human
cuguccugcagcaaacacuccac

SEQ ID NO: 2642337 - RNA, 15 nt, Human
cuguaaaacagguua

SEQ ID NO: 2642338 - RNA, 21 nt, Human
cuuuccuguguguacucuguc

SEQ ID NO: 2642339 - RNA, 16 nt, Human
gaaaaaaaacagugga

SEQ ID NO: 2642340 - RNA, 16 nt, Human
cuucaugacagccucc

SEQ ID NO: 2642341 - RNA, 16 nt, Human
gauccaguauaagacu

SEQ ID NO: 2642342 - RNA, 17 nt, Human
gauccaguauaagacua

SEQ ID NO: 2642343 - RNA, 15 nt, Human
gauuagaaauuaccu

SEQ ID NO: 2642344 - RNA, 20 nt, Human
gauuagaaauuaccugugga

SEQ ID NO: 2642345 - RNA, 22 nt, Human
gauuagaaauuaccuguggaua

SEQ ID NO: 2642346 - RNA, 19 nt, Human
gauaccaugcuguaaggau

SEQ ID NO: 2642347 - RNA, 13 nt, Human
gauacuaaggacg

SEQ ID NO: 2642348 - RNA, 12 nt, Human
gacucuggcccu

SEQ ID NO: 2642349 - RNA, 13 nt, Human
gacucuggcccug

SEQ ID NO: 2642350 - RNA, 14 nt, Human
gacucuggcccugg

SEQ ID NO: 2642351 - RNA, 16 nt, Human
gacucuggcccuggcc

SEQ ID NO: 2642352 - RNA, 17 nt, Human
gacucuggcccuggccc

SEQ ID NO: 2642353 - RNA, 18 nt, Human
gacucuggcccuggcccu

SEQ ID NO: 2642354 - RNA, 14 nt, Human
gaauuauaacugua

SEQ ID NO: 2642355 - RNA, 13 nt, Human
gaauuauaacugu

SEQ ID NO: 2642356 - RNA, 21 nt, Human
gaauuauaacuguaaagaugu

SEQ ID NO: 2642357 - RNA, 19 nt, Human
aaaacaguggaucacaaag

SEQ ID NO: 2642358 - RNA, 23 nt, Human
aaacaguggaucacaaaguggaa

SEQ ID NO: 2642359 - RNA, 13 nt, Human
gggcuaauuuaac

SEQ ID NO: 2642360 - RNA, 14 nt, Human
aaaaugaaagcuac

SEQ ID NO: 2642361 - RNA, 19 nt, Human
aaaaugaaagcuacucaua

SEQ ID NO: 2642362 - RNA, 21 nt, Human
guaaagauguuuauuucaggc

SEQ ID NO: 2642363 - RNA, 21 nt, Human
aaagugugaaauaaauuuuuu

SEQ ID NO: 2642364 - RNA, 12 nt, Human
ggucuguuugca

SEQ ID NO: 2642365 - RNA, 15 nt, Human
ggaggccccuggagc

SEQ ID NO: 2642366 - RNA, 18 nt, Human
ggaggccccuggagccag

SEQ ID NO: 2642367 - RNA, 16 nt, Human
ggaggaaugcuggacu

SEQ ID NO: 2642368 - RNA, 12 nt, Human
ggcacugggcug

SEQ ID NO: 2642369 - RNA, 13 nt, Human
ggcacugggcugu

SEQ ID NO: 2642370 - RNA, 22 nt, Human
ggcacugggcuguuguuccauu

SEQ ID NO: 2642371 - RNA, 13 nt, Human
ggccccuggagcc

SEQ ID NO: 2642372 - RNA, 20 nt, Human
ggcccuuacuugcuucucua

SEQ ID NO: 2642373 - RNA, 15 nt, Human
ggccuguugcuauag

SEQ ID NO: 2642374 - RNA, 14 nt, Human
ggaagaaggaggaa

SEQ ID NO: 2642375 - RNA, 19 nt, Human
gcucuagguacgaugacag

SEQ ID NO: 2642376 - RNA, 14 nt, Human
gcucuagugggaca

SEQ ID NO: 2642377 - RNA, 15 nt, Human
gcucuagugggacag

SEQ ID NO: 2642378 - RNA, 20 nt, Human
gcucuagugggacagcccag

SEQ ID NO: 2642379 - RNA, 21 nt, Human
gcucuagugggacagcccaga

SEQ ID NO: 2642380 - RNA, 13 nt, Human
gccccuggagcca

SEQ ID NO: 2642381 - RNA, 14 nt, Human
gccccuggagccag

SEQ ID NO: 2642382 - RNA, 15 nt, Human
gccccuggagccaga

SEQ ID NO: 2642383 - RNA, 12 nt, Human
gcguggcugacu

SEQ ID NO: 2642384 - RNA, 20 nt, Human
gcuaauuuguuuuggauaua

SEQ ID NO: 2642385 - RNA, 19 nt, Human
gcgagagaucaaagaugaa

SEQ ID NO: 2642386 - RNA, 20 nt, Human
auuguaaaauuauuucauga

SEQ ID NO: 2642387 - RNA, 19 nt, Human
auuguguggauucuuuaaa

SEQ ID NO: 2642388 - RNA, 19 nt, Human
auuguuacguagccuaagg

SEQ ID NO: 2642389 - RNA, 19 nt, Human
auugauaaccuugaaaaaa

SEQ ID NO: 2642390 - RNA, 13 nt, Human
cacccuccaccuu

SEQ ID NO: 2642391 - RNA, 17 nt, Human
cacccuccaccuuccau

SEQ ID NO: 2642392 - RNA, 15 nt, Human
cacccuccacucagc

SEQ ID NO: 2642393 - RNA, 19 nt, Human
cacaggugcaacagacuug

SEQ ID NO: 2642394 - RNA, 19 nt, Human
cacaguacgaaccuacagu

SEQ ID NO: 2642395 - RNA, 17 nt, Human
cauggcuguguuugcag

SEQ ID NO: 2642396 - RNA, 20 nt, Human
cauggcuguguuugcagccu

SEQ ID NO: 2642397 - RNA, 23 nt, Human
cauggcuguguuugcagccugcu

SEQ ID NO: 2642398 - RNA, 16 nt, Human
cauuaggccagcaacg

SEQ ID NO: 2642399 - RNA, 20 nt, Human
cauuaggccagcaacgcuug

SEQ ID NO: 2642400 - RNA, 20 nt, Human
cauuuuuguacuaacuagca

SEQ ID NO: 2642401 - RNA, 18 nt, Human
cauagcgggggccuaaaa

SEQ ID NO: 2642402 - RNA, 18 nt, Human
caguuuguagugccacug

SEQ ID NO: 2642403 - RNA, 18 nt, Human
caguuugcaccugucccc

SEQ ID NO: 2642404 - RNA, 17 nt, Human
cagagccuggcugccca

SEQ ID NO: 2642405 - RNA, 16 nt, Human
ccugcccaguugcacu

SEQ ID NO: 2642406 - RNA, 22 nt, Human
ccugcccaguugcacucaggug

SEQ ID NO: 2642407 - RNA, 12 nt, Human
ccuggcccuuac

SEQ ID NO: 2642408 - RNA, 18 nt, Human
ccuggcccuuacuugcuu

SEQ ID NO: 2642409 - RNA, 19 nt, Human
ccccagagccccuccucca

SEQ ID NO: 2642410 - RNA, 21 nt, Human
ccccagagccccuccuccagc

SEQ ID NO: 2642411 - RNA, 15 nt, Human
cccacuacugcagca

SEQ ID NO: 2642412 - RNA, 18 nt, Human
cccacuacugcagcaccu

SEQ ID NO: 2642413 - RNA, 17 nt, Human
ccaguuugcaccugucc

SEQ ID NO: 2642414 - RNA, 22 nt, Human
cuagcauuguaaaauuauuuca

SEQ ID NO: 2642415 - RNA, 23 nt, Human
cuagcauuguaaaauuauuucau

SEQ ID NO: 2642416 - RNA, 19 nt, Human
cuacaguuuuaacugugga

SEQ ID NO: 2642417 - RNA, 17 nt, Human
cuacaguuuuaacugug

SEQ ID NO: 2642418 - RNA, 18 nt, Human
cuacaguuuuaacugugg

SEQ ID NO: 2642419 - RNA, 20 nt, Human
cuacaguuuuaacuguggau

SEQ ID NO: 2642420 - RNA, 11 nt, Human
cuaauuuaaca

SEQ ID NO: 2642421 - RNA, 14 nt, Human
aacuguaaagaugu

SEQ ID NO: 2642422 - RNA, 16 nt, Human
aaccucgggccugcug

SEQ ID NO: 2642423 - RNA, 17 nt, Human
aaccuugaaaaaaaaca

SEQ ID NO: 2642424 - RNA, 20 nt, Human
aaccuugaaaaaaaacagug

SEQ ID NO: 2642425 - RNA, 22 nt, Human
guaugucaauaaacaacagcug

SEQ ID NO: 2642426 - RNA, 19 nt, Human
gucccacccccuuccccca

SEQ ID NO: 2642427 - RNA, 17 nt, Human
guuggaauggauuuuuc

SEQ ID NO: 2642428 - RNA, 15 nt, Human
guuggaauggauuuu

SEQ ID NO: 2642429 - RNA, 22 nt, Human
guuuugcacagccaaauuuaaa

SEQ ID NO: 2642430 - RNA, 14 nt, Human
aagccgacucuggc

SEQ ID NO: 2642431 - RNA, 16 nt, Human
aagccgacucuggccc

SEQ ID NO: 2642432 - RNA, 17 nt, Human
aagccgacucuggcccu

SEQ ID NO: 2642433 - RNA, 18 nt, Human
aagccgacucuggcccug

SEQ ID NO: 2642434 - RNA, 19 nt, Human
aagccgacucuggcccugg

SEQ ID NO: 2642435 - RNA, 21 nt, Human
aagccgacucuggcccuggcc

SEQ ID NO: 2642436 - RNA, 13 nt, Human
guucaacaaagaa

SEQ ID NO: 2642437 - RNA, 22 nt, Human
guucaacaaagaaacaaagaug

SEQ ID NO: 2642438 - RNA, 23 nt, Human
guucaacaaagaaacaaagaugu

SEQ ID NO: 2642439 - RNA, 12 nt, Human
aauaccugcuca

SEQ ID NO: 2642440 - RNA, 19 nt, Human
aauauauuuuguuuacaaa

SEQ ID NO: 2642441 - RNA, 18 nt, Human
uaagcagugucuguguuu

SEQ ID NO: 2642442 - RNA, 17 nt, Human
uaaggauccggaaagaa

SEQ ID NO: 2642443 - RNA, 18 nt, Human
uaaggauccggaaagaag

SEQ ID NO: 2642444 - RNA, 11 nt, Human
uaauuuaacuu

SEQ ID NO: 2642445 - RNA, 19 nt, Human
uaauuuaacuuucuggguu

SEQ ID NO: 2642446 - RNA, 12 nt, Human
uaccuguggaua

SEQ ID NO: 2642447 - RNA, 21 nt, Human
aauuaccaugcuucacaaugu

SEQ ID NO: 2642448 - RNA, 22 nt, Human
aauuacuuuggggcuaauuuaa

SEQ ID NO: 2642449 - RNA, 23 nt, Human
aauuacuuuggggcuaauuuaac

SEQ ID NO: 2642450 - RNA, 17 nt, Human
aauucaauuuggauuua

SEQ ID NO: 2642451 - RNA, 22 nt, Human
aauuauuucaugauuagaaauu

SEQ ID NO: 2642452 - RNA, 18 nt, Human
uaccaugcuucacaaugu

SEQ ID NO: 2642453 - RNA, 18 nt, Human
acagcuuccuuuccugug

SEQ ID NO: 2642454 - RNA, 19 nt, Human
uaugccauugggguaguug

SEQ ID NO: 2642455 - RNA, 21 nt, Human
uaugguauuuauuuuuucuuu

SEQ ID NO: 2642456 - RNA, 13 nt, Human
uagggcacugggc

SEQ ID NO: 2642457 - RNA, 14 nt, Human
uagggcacugggcu

SEQ ID NO: 2642458 - RNA, 15 nt, Human
uagggcacugggcug

SEQ ID NO: 2642459 - RNA, 16 nt, Human
uagggcacugggcugu

SEQ ID NO: 2642460 - RNA, 12 nt, Human
aauuuggauuua

SEQ ID NO: 2642461 - RNA, 23 nt, Human
aauuuggauuuaaaagccugcuc

SEQ ID NO: 2642462 - RNA, 17 nt, Human
uacuuuggaauucuuag

SEQ ID NO: 2642463 - RNA, 20 nt, Human
uacuuuggggcuaauuuaac

SEQ ID NO: 2642464 - RNA, 18 nt, Human
ucccccacuacugcagca

SEQ ID NO: 2642465 - RNA, 24 nt, Human
ucccccacuacugcagcaccucca

SEQ ID NO: 2642466 - RNA, 16 nt, Human
acuccacccuccaccu

SEQ ID NO: 2642467 - RNA, 13 nt, Human
acucagaaauuca

SEQ ID NO: 2642468 - RNA, 22 nt, Human
acucaccugcacuaacagagug

SEQ ID NO: 2642469 - RNA, 17 nt, Human
acugaaacauggcugug

SEQ ID NO: 2642470 - RNA, 13 nt, Human
uccuaccgucuuu

SEQ ID NO: 2642471 - RNA, 14 nt, Human
uccauuuuccccca

SEQ ID NO: 2642472 - RNA, 17 nt, Human
uccauuuucccccacua

SEQ ID NO: 2642473 - RNA, 21 nt, Human
uccauuuucccccacuacugc

SEQ ID NO: 2642474 - RNA, 19 nt, Human
acgaaccuacaguuuuaac

SEQ ID NO: 2642475 - RNA, 20 nt, Human
accugcucacgucaaaugca

SEQ ID NO: 2642476 - RNA, 16 nt, Human
accugcucacgucaaa

SEQ ID NO: 2642477 - RNA, 18 nt, Human
acauucaacagagacuga

SEQ ID NO: 2642478 - RNA, 18 nt, Human
uauuuguauaaaagugug

SEQ ID NO: 2642479 - RNA, 22 nt, Human
uauuuguauaaaagugugaaau

SEQ ID NO: 2642480 - RNA, 14 nt, Human
ucacugaaacaugg

SEQ ID NO: 2642481 - RNA, 22 nt, Human
ucagaauuagagcaugggaggu

SEQ ID NO: 2642482 - RNA, 15 nt, Human
acuguggauauuguu

SEQ ID NO: 2642483 - RNA, 18 nt, Human
ucuaaaauuauaaaugac

SEQ ID NO: 2642484 - RNA, 14 nt, Human
acuguauauucagg

SEQ ID NO: 2642485 - RNA, 14 nt, Human
ucuagcucucuagg

SEQ ID NO: 2642486 - RNA, 15 nt, Human
ucuagcucucuaggc

SEQ ID NO: 2642487 - RNA, 16 nt, Human
ucuagcucucuaggcc

SEQ ID NO: 2642488 - RNA, 12 nt, Human
acuugaaagaaa

SEQ ID NO: 2642489 - RNA, 16 nt, Human
agaaauagaauuauaa

SEQ ID NO: 2642490 - RNA, 16 nt, Human
acuuuagaagccugca

SEQ ID NO: 2642491 - RNA, 15 nt, Human
acuuuagaagccugc

SEQ ID NO: 2642492 - RNA, 15 nt, Human
agaacucacucuggg

SEQ ID NO: 2642493 - RNA, 19 nt, Human
agaacucacucugggcugu

SEQ ID NO: 2642494 - RNA, 20 nt, Human
agaacucacucugggcugua

SEQ ID NO: 2642495 - RNA, 19 nt, Human
agaaauuaccuguggauau

SEQ ID NO: 2642496 - RNA, 20 nt, Human
agaaauuaccuguggauauu

SEQ ID NO: 2642497 - RNA, 18 nt, Human
agaaauuaccuguggaua

SEQ ID NO: 2642498 - RNA, 22 nt, Human
agaaggaggaaugcuggacugg

SEQ ID NO: 2642499 - RNA, 20 nt, Human
ugaaaaggguguugggaggg

SEQ ID NO: 2642500 - RNA, 21 nt, Human
ugaaaaguauauugauaaccu

SEQ ID NO: 2642501 - RNA, 16 nt, Human
ugaaaaaaaacagugg

SEQ ID NO: 2642502 - RNA, 20 nt, Human
ugaaagaauagaacacaguu

SEQ ID NO: 2642503 - RNA, 14 nt, Human
agagaucaaagaug

SEQ ID NO: 2642504 - RNA, 15 nt, Human
agagaucaaagauga

SEQ ID NO: 2642505 - RNA, 11 nt, Human
ucuuuaacugc

SEQ ID NO: 2642506 - RNA, 20 nt, Human
ucuuuaacugccguaauuua

SEQ ID NO: 2642507 - RNA, 21 nt, Human
ucuuuaacugccguaauuuaa

SEQ ID NO: 2642508 - RNA, 22 nt, Human
ucuuuaacugccguaauuuaac

SEQ ID NO: 2642509 - RNA, 14 nt, Human
ugaauaccugcuca

SEQ ID NO: 2642510 - RNA, 21 nt, Human
ugaauagauaugaaagcugau

SEQ ID NO: 2642511 - RNA, 18 nt, Human
ugaauagauaugaaagcu

SEQ ID NO: 2642512 - RNA, 12 nt, Human
agaucaaagaug

SEQ ID NO: 2642513 - RNA, 13 nt, Human
agaucaaagauga

SEQ ID NO: 2642514 - RNA, 14 nt, Human
agcaacgcuuguag

SEQ ID NO: 2642515 - RNA, 17 nt, Human
agcaacgcuuguagaac

SEQ ID NO: 2642516 - RNA, 23 nt, Human
agcaacgcuuguagaacucacuc

SEQ ID NO: 2642517 - RNA, 15 nt, Human
agauguuuauuucag

SEQ ID NO: 2642518 - RNA, 16 nt, Human
agauguuuauuucagg

SEQ ID NO: 2642519 - RNA, 22 nt, Human
agcauuguaaaauuauuucaug

SEQ ID NO: 2642520 - RNA, 14 nt, Human
agcccagagccugg

SEQ ID NO: 2642521 - RNA, 17 nt, Human
agcccagagccuggcug

SEQ ID NO: 2642522 - RNA, 21 nt, Human
agcccagagccuggcugccca

SEQ ID NO: 2642523 - RNA, 18 nt, Human
agcgggggccuaaaaaaa

SEQ ID NO: 2642524 - RNA, 12 nt, Human
ugcagccugcuc

SEQ ID NO: 2642525 - RNA, 22 nt, Human
ugcagccugcucuagugggaca

SEQ ID NO: 2642526 - RNA, 14 nt, Human
agccuaccuguaug

SEQ ID NO: 2642527 - RNA, 12 nt, Human
agccgacucugg

SEQ ID NO: 2642528 - RNA, 13 nt, Human
agccgacucuggc

SEQ ID NO: 2642529 - RNA, 15 nt, Human
agccgacucuggccc

SEQ ID NO: 2642530 - RNA, 16 nt, Human
agccgacucuggcccu

SEQ ID NO: 2642531 - RNA, 17 nt, Human
agccgacucuggcccug

SEQ ID NO: 2642532 - RNA, 18 nt, Human
agccgacucuggcccugg

SEQ ID NO: 2642533 - RNA, 19 nt, Human
agccgacucuggcccuggc

SEQ ID NO: 2642534 - RNA, 20 nt, Human
agccgacucuggcccuggcc

SEQ ID NO: 2642535 - RNA, 21 nt, Human
agccgacucuggcccuggccc

SEQ ID NO: 2642536 - RNA, 20 nt, Human
agcccauccauuaggccagc

SEQ ID NO: 2642537 - RNA, 21 nt, Human
agcccauccauuaggccagca

SEQ ID NO: 2642538 - RNA, 23 nt, Human
agcccauccauuaggccagcaac

SEQ ID NO: 2642539 - RNA, 12 nt, Human
aggccagcaacg

SEQ ID NO: 2642540 - RNA, 13 nt, Human
aggccagcaacgc

SEQ ID NO: 2642541 - RNA, 14 nt, Human
aggccagcaacgcu

SEQ ID NO: 2642542 - RNA, 17 nt, Human
aggccagcaacgcuugu

SEQ ID NO: 2642543 - RNA, 13 nt, Human
uggcccuggcccu

SEQ ID NO: 2642544 - RNA, 23 nt, Human
aggcaccuacacucaccugcacu

SEQ ID NO: 2642545 - RNA, 21 nt, Human
aggcaccuacacucaccugca

SEQ ID NO: 2642546 - RNA, 22 nt, Human
uggaauucuuagucacaaaaua

SEQ ID NO: 2642547 - RNA, 14 nt, Human
aggauccggaaaga

SEQ ID NO: 2642548 - RNA, 16 nt, Human
aggauccggaaagaag

SEQ ID NO: 2642549 - RNA, 15 nt, Human
aggaaugcuggacug

SEQ ID NO: 2642550 - RNA, 16 nt, Human
aggaaugcuggacugg

SEQ ID NO: 2642551 - RNA, 17 nt, Human
aggaaugcuggacugga

SEQ ID NO: 2642552 - RNA, 14 nt, Human
agcuguccugcagc

SEQ ID NO: 2642553 - RNA, 15 nt, Human
agcuguccugcagca

SEQ ID NO: 2642554 - RNA, 16 nt, Human
agcuguccugcagcaa

SEQ ID NO: 2642555 - RNA, 22 nt, Human
agcuguccugcagcaaacacuc

SEQ ID NO: 2642556 - RNA, 20 nt, Human
agggugguucaacaaagaaa

SEQ ID NO: 2642557 - RNA, 17 nt, Human
aggggccuuagggcacu

SEQ ID NO: 2642558 - RNA, 19 nt, Human
aggggccuuagggcacugg

SEQ ID NO: 2642559 - RNA, 20 nt, Human
aggggccuuagggcacuggg

SEQ ID NO: 2642560 - RNA, 21 nt, Human
aggggccuuagggcacugggc

SEQ ID NO: 2642561 - RNA, 22 nt, Human
aggggccuuagggcacugggcu

SEQ ID NO: 2642562 - RNA, 20 nt, Human
aggccuguugcuauagagcc

SEQ ID NO: 2642563 - RNA, 16 nt, Human
uggggaagggccugcc

SEQ ID NO: 2642564 - RNA, 21 nt, Human
aggugcaacagacuugaaugc

SEQ ID NO: 2642565 - RNA, 18 nt, Human
ugucaauaaacaacagcu

SEQ ID NO: 2642566 - RNA, 17 nt, Human
agugccacuguuguuuu

SEQ ID NO: 2642567 - RNA, 13 nt, Human
uguggccccaccc

SEQ ID NO: 2642568 - RNA, 16 nt, Human
aguggaucacaaagug

SEQ ID NO: 2642569 - RNA, 16 nt, Human
aguggaacgaaaauga

SEQ ID NO: 2642570 - RNA, 24 nt, Human
aguggaacgaaaaugaaagcuacu

SEQ ID NO: 2642571 - RNA, 15 nt, Human
aguggaucacaaagu

SEQ ID NO: 2642572 - RNA, 15 nt, Human
uuaagaaauagaauu

SEQ ID NO: 2642573 - RNA, 19 nt, Human
uuagaaauuaccuguggau

SEQ ID NO: 2642574 - RNA, 23 nt, Human
uuagaaauuaccuguggauauuu

SEQ ID NO: 2642575 - RNA, 14 nt, Human
uuuuaacuguggau

SEQ ID NO: 2642576 - RNA, 14 nt, Human
auguuuauuucagg

SEQ ID NO: 2642577 - RNA, 22 nt, Human
auuagaaauuaccuguggauau

SEQ ID NO: 2642578 - RNA, 21 nt, Human
auuacuuuggggcuaauuuaa

SEQ ID NO: 2642579 - RNA, 23 nt, Human
auuacuuuggggcuaauuuaaca

SEQ ID NO: 2642580 - RNA, 14 nt, Human
auuaccuguggaua

SEQ ID NO: 2642581 - RNA, 15 nt, Human
auuaccuguggauau

SEQ ID NO: 2642582 - RNA, 16 nt, Human
auuaccuguggauauu

SEQ ID NO: 2642583 - RNA, 19 nt, Human
auuaccuguggauauuugu

SEQ ID NO: 2642584 - RNA, 13 nt, Human
auuuaaaacuguu

SEQ ID NO: 2642585 - RNA, 16 nt, Human
auuuguauaugguauu

SEQ ID NO: 2642586 - RNA, 19 nt, Human
auaguguagcugaggaggc

SEQ ID NO: 2642587 - RNA, 23 nt, Human
uuauuuuuggcguggcugacuua

SEQ ID NO: 2642588 - RNA, 13 nt, Human
uucacaauguuaa

SEQ ID NO: 2642589 - RNA, 18 nt, Human
uucauucucccuuucacu

SEQ ID NO: 2642590 - RNA, 17 nt, Human
uucucuagcucucuagg

SEQ ID NO: 2642591 - RNA, 18 nt, Human
uucucuagcucucuaggc

SEQ ID NO: 2642592 - RNA, 20 nt, Human
uucucuagcucucuaggccu

SEQ ID NO: 2642593 - RNA, 22 nt, Human
uucucuagcucucuaggccucu

SEQ ID NO: 2642594 - RNA, 23 nt, Human
augauuagaaauuaccuguggau

SEQ ID NO: 2642595 - RNA, 13 nt, Human
uuguguggauucu

SEQ ID NO: 2642596 - RNA, 11 nt, Human
uuuaaauugug

SEQ ID NO: 2642597 - RNA, 15 nt, Human
auggauuuuucuuua

SEQ ID NO: 2642598 - RNA, 16 nt, Human
auggauuuuucuuuaa

SEQ ID NO: 2642599 - RNA, 19 nt, Human
auggauuuuucuuuaacug

SEQ ID NO: 2642600 - RNA, 20 nt, Human
auggauuuuucuuuaacugc

SEQ ID NO: 2642601 - RNA, 16 nt, Human
uuucaugauuagaaau

SEQ ID NO: 2642602 - RNA, 19 nt, Human
uuguagugccacuguuguu

SEQ ID NO: 2642603 - RNA, 15 nt, Human
aucuuuauaaaugua

SEQ ID NO: 2642604 - RNA, 19 nt, Human
uuggauauuuuuuacuuua

SEQ ID NO: 2642605 - RNA, 19 nt, Human
uugcacagccaaauuuaaa

SEQ ID NO: 2642606 - RNA, 18 nt, Human
uugcacagccaaauuuaa

SEQ ID NO: 2642607 - RNA, 20 nt, Human
caaaauauauuuuguuuaca

SEQ ID NO: 2642608 - RNA, 22 nt, Human
caaaauauauuuuguuuacaaa

SEQ ID NO: 2642609 - RNA, 18 nt, Human
caaacacuccacccucca

SEQ ID NO: 2642610 - RNA, 20 nt, Human
caacagagacugaauagaua

SEQ ID NO: 2642611 - RNA, 15 nt, Human
caacagcaaacaggu

SEQ ID NO: 2642612 - RNA, 17 nt, Human
caacagcaaacaggugc

SEQ ID NO: 2642613 - RNA, 14 nt, Human
caacagcugaagca

SEQ ID NO: 2642614 - RNA, 22 nt, Human
cacaaaauauauuuuguuuaca

SEQ ID NO: 2642615 - RNA, 23 nt, Human
cagugucuguguuuugaaagaau

SEQ ID NO: 2642616 - RNA, 13 nt, Human
cagugucuguguu

SEQ ID NO: 2642617 - RNA, 17 nt, Human
caguggaucacaaagug

SEQ ID NO: 2642618 - RNA, 15 nt, Human
caguuccuuuagaaa

SEQ ID NO: 2642619 - RNA, 21 nt, Human
caguguuuuuagaccuguguu

SEQ ID NO: 2642620 - RNA, 15 nt, Human
cauccuaccgucuuu

SEQ ID NO: 2642621 - RNA, 17 nt, Human
cauccuccagauagugu

SEQ ID NO: 2642622 - RNA, 17 nt, Human
cauacuguaacauucag

SEQ ID NO: 2642623 - RNA, 11 nt, Human
ccaaauuuaaa

SEQ ID NO: 2642624 - RNA, 18 nt, Human
ccaaauuuaaaacuguug

SEQ ID NO: 2642625 - RNA, 17 nt, Human
ccaacccuggcuugggg

SEQ ID NO: 2642626 - RNA, 16 nt, Human
caugcuucacaauguu

SEQ ID NO: 2642627 - RNA, 15 nt, Human
cauguggccccaccc

SEQ ID NO: 2642628 - RNA, 20 nt, Human
ccaucauguggccccaccca

SEQ ID NO: 2642629 - RNA, 13 nt, Human
ccaggccuguugc

SEQ ID NO: 2642630 - RNA, 16 nt, Human
cccagagccccuccuc

SEQ ID NO: 2642631 - RNA, 20 nt, Human
cccagagccccuccuccagc

SEQ ID NO: 2642632 - RNA, 20 nt, Human
cccagagccuggcugcccau

SEQ ID NO: 2642633 - RNA, 12 nt, Human
ccuccuccagcc

SEQ ID NO: 2642634 - RNA, 16 nt, Human
ccuccuccagccccug

SEQ ID NO: 2642635 - RNA, 18 nt, Human
ccuccuccagccccuguc

SEQ ID NO: 2642636 - RNA, 20 nt, Human
ccuccuccagccccuguccc

SEQ ID NO: 2642637 - RNA, 18 nt, Human
ccucuccaguuugcaccu

SEQ ID NO: 2642638 - RNA, 19 nt, Human
ccucuccaguuugcaccug

SEQ ID NO: 2642639 - RNA, 20 nt, Human
ccucuccaguuugcaccugu

SEQ ID NO: 2642640 - RNA, 21 nt, Human
ccucuccaguuugcaccuguc

SEQ ID NO: 2642641 - RNA, 23 nt, Human
ccucuccaguuugcaccuguccc

SEQ ID NO: 2642642 - RNA, 15 nt, Human
ccuaaauuauuuacu

SEQ ID NO: 2642643 - RNA, 20 nt, Human
ccuacaguuuuaacugugga

SEQ ID NO: 2642644 - RNA, 21 nt, Human
ccuacaguuuuaacuguggau

SEQ ID NO: 2642645 - RNA, 22 nt, Human
ccuacaguuuuaacuguggaua

SEQ ID NO: 2642646 - RNA, 15 nt, Human
ccuacaguuuuaacu

SEQ ID NO: 2642647 - RNA, 17 nt, Human
ccuacaguuuuaacugu

SEQ ID NO: 2642648 - RNA, 19 nt, Human
ccuacaguuuuaacugugg

SEQ ID NO: 2642649 - RNA, 13 nt, Human
cccuggagccaga

SEQ ID NO: 2642650 - RNA, 12 nt, Human
cccuggagccag

SEQ ID NO: 2642651 - RNA, 17 nt, Human
cuacuucuguaauugug

SEQ ID NO: 2642652 - RNA, 18 nt, Human
cuacuucuguaauugugu

SEQ ID NO: 2642653 - RNA, 21 nt, Human
cuagauugcuaaggagcugau

SEQ ID NO: 2642654 - RNA, 16 nt, Human
cuaguuauacuuauuu

SEQ ID NO: 2642655 - RNA, 23 nt, Human
cuaguuauacuuauuuguauaug

SEQ ID NO: 2642656 - RNA, 23 nt, Human
cuaaauuauuuacugcaaaaaga

SEQ ID NO: 2642657 - RNA, 14 nt, Human
cuaaauuauuuacu

SEQ ID NO: 2642658 - RNA, 15 nt, Human
cuaaauuauuuacug

SEQ ID NO: 2642659 - RNA, 18 nt, Human
cuaaaugugcaauagaag

SEQ ID NO: 2642660 - RNA, 21 nt, Human
cuaaaugugcaauagaaggug

SEQ ID NO: 2642661 - RNA, 18 nt, Human
cgucuuuuccuguuuccu

SEQ ID NO: 2642662 - RNA, 12 nt, Human
cgcuuguagaac

SEQ ID NO: 2642663 - RNA, 19 nt, Human
cgcuuguagaacucacucu

SEQ ID NO: 2642664 - RNA, 20 nt, Human
cgcuuguagaacucacucug

SEQ ID NO: 2642665 - RNA, 21 nt, Human
cgcuuguagaacucacucugg

SEQ ID NO: 2642666 - RNA, 22 nt, Human
cgcuuguagaacucacucuggg

SEQ ID NO: 2642667 - RNA, 23 nt, Human
cgcuuguagaacucacucugggc

SEQ ID NO: 2642668 - RNA, 16 nt, Human
cucuaggccucuccag

SEQ ID NO: 2642669 - RNA, 17 nt, Human
cucuaggccucuccagu

SEQ ID NO: 2642670 - RNA, 23 nt, Human
cucuagguacgaugacaguguuc

SEQ ID NO: 2642671 - RNA, 17 nt, Human
cucuagcucucuaggcc

SEQ ID NO: 2642672 - RNA, 22 nt, Human
cucuccuucaugacagccucca

SEQ ID NO: 2642673 - RNA, 14 nt, Human
cucucuaggccucu

SEQ ID NO: 2642674 - RNA, 19 nt, Human
cucucuaggccucuccagu

SEQ ID NO: 2642675 - RNA, 13 nt, Human
cucuagugggaca

SEQ ID NO: 2642676 - RNA, 16 nt, Human
cucuagugggacagcc

SEQ ID NO: 2642677 - RNA, 18 nt, Human
cucuagugggacagccca

SEQ ID NO: 2642678 - RNA, 19 nt, Human
cucuagugggacagcccag

SEQ ID NO: 2642679 - RNA, 20 nt, Human
cucuagugggacagcccaga

SEQ ID NO: 2642680 - RNA, 22 nt, Human
cucuagugggacagcccagagc

SEQ ID NO: 2642681 - RNA, 23 nt, Human
cucuagugggacagcccagagcc

SEQ ID NO: 2642682 - RNA, 17 nt, Human
cucuagugcgguuuacu

SEQ ID NO: 2642683 - RNA, 13 nt, Human
cucuggcccuggc

SEQ ID NO: 2642684 - RNA, 14 nt, Human
cucuggcccuggcc

SEQ ID NO: 2642685 - RNA, 16 nt, Human
cucuggcccuggcccu

SEQ ID NO: 2642686 - RNA, 20 nt, Human
cucuggcccuggcccuuacu

SEQ ID NO: 2642687 - RNA, 12 nt, Human
cuguccccaccc

SEQ ID NO: 2642688 - RNA, 18 nt, Human
cuguccccacccuccacu

SEQ ID NO: 2642689 - RNA, 19 nt, Human
cuguccccacccuccacuc

SEQ ID NO: 2642690 - RNA, 21 nt, Human
cuguaaggauccggaaagaag

SEQ ID NO: 2642691 - RNA, 16 nt, Human
cugguagguugggaca

SEQ ID NO: 2642692 - RNA, 17 nt, Human
cugguagguugggacac

SEQ ID NO: 2642693 - RNA, 20 nt, Human
cugguagguugggacaccag

SEQ ID NO: 2642694 - RNA, 22 nt, Human
cugguagguugggacaccaggg

SEQ ID NO: 2642695 - RNA, 20 nt, Human
cuggcuuggggucaagaaac

SEQ ID NO: 2642696 - RNA, 15 nt, Human
cugcauaauguuucu

SEQ ID NO: 2642697 - RNA, 22 nt, Human
cugcauaauguuucuggauuuc

SEQ ID NO: 2642698 - RNA, 12 nt, Human
cugcagcaccuc

SEQ ID NO: 2642699 - RNA, 14 nt, Human
cugcagcaccucca

SEQ ID NO: 2642700 - RNA, 15 nt, Human
cugcagcaccuccag

SEQ ID NO: 2642701 - RNA, 17 nt, Human
cugcagcaccuccaggc

SEQ ID NO: 2642702 - RNA, 18 nt, Human
cugcagcaccuccaggcc

SEQ ID NO: 2642703 - RNA, 19 nt, Human
cugcagcaccuccaggccu

SEQ ID NO: 2642704 - RNA, 20 nt, Human
cugcagcaccuccaggccug

SEQ ID NO: 2642705 - RNA, 17 nt, Human
cugcagcaaacacucca

SEQ ID NO: 2642706 - RNA, 18 nt, Human
cugcagcaaacacuccac

SEQ ID NO: 2642707 - RNA, 20 nt, Human
cugcagcaaacacuccaccc

SEQ ID NO: 2642708 - RNA, 16 nt, Human
cugcucuagugggaca

SEQ ID NO: 2642709 - RNA, 17 nt, Human
cugcucuagugggacag

SEQ ID NO: 2642710 - RNA, 21 nt, Human
cugcucuagugggacagccca

SEQ ID NO: 2642711 - RNA, 23 nt, Human
cugcucuagugggacagcccaga

SEQ ID NO: 2642712 - RNA, 18 nt, Human
cuugcuuggggaacuugu

SEQ ID NO: 2642713 - RNA, 22 nt, Human
cuuuuuccaacucagaaauuca

SEQ ID NO: 2642714 - RNA, 19 nt, Human
gaaauuaccuguggauauu

SEQ ID NO: 2642715 - RNA, 16 nt, Human
gaaauuaccuguggau

SEQ ID NO: 2642716 - RNA, 17 nt, Human
gaaauuaccuguggaua

SEQ ID NO: 2642717 - RNA, 18 nt, Human
gaaauuaccuguggauau

SEQ ID NO: 2642718 - RNA, 19 nt, Human
gaaggugauguugccaucc

SEQ ID NO: 2642719 - RNA, 22 nt, Human
gaagccgacucuggcccuggcc

SEQ ID NO: 2642720 - RNA, 22 nt, Human
gaagagcgagagaucaaagaug

SEQ ID NO: 2642721 - RNA, 20 nt, Human
gaacuugugucccuaaugug

SEQ ID NO: 2642722 - RNA, 23 nt, Human
gaagaaggaggaaugcuggacug

SEQ ID NO: 2642723 - RNA, 21 nt, Human
gagagaguuguuuuaauaacu

SEQ ID NO: 2642724 - RNA, 20 nt, Human
gagccuaccuguaugucaau

SEQ ID NO: 2642725 - RNA, 15 nt, Human
gacucccaacccugg

SEQ ID NO: 2642726 - RNA, 18 nt, Human
gcagugucuguguuuuga

SEQ ID NO: 2642727 - RNA, 13 nt, Human
gauuuuucuuuaa

SEQ ID NO: 2642728 - RNA, 15 nt, Human
gauuuuucuuuaacu

SEQ ID NO: 2642729 - RNA, 14 nt, Human
gcaaacacuccacc

SEQ ID NO: 2642730 - RNA, 15 nt, Human
gcaaacacuccaccc

SEQ ID NO: 2642731 - RNA, 17 nt, Human
gcaaacacuccacccuc

SEQ ID NO: 2642732 - RNA, 21 nt, Human
gccaaauuuaaaacuguugga

SEQ ID NO: 2642733 - RNA, 15 nt, Human
gccccugucccaccc

SEQ ID NO: 2642734 - RNA, 19 nt, Human
gcccauccauuaggccagc

SEQ ID NO: 2642735 - RNA, 20 nt, Human
gcccauccauuaggccagca

SEQ ID NO: 2642736 - RNA, 22 nt, Human
gcccauccauuaggccagcaac

SEQ ID NO: 2642737 - RNA, 20 nt, Human
gcgguuuacucacugcugca

SEQ ID NO: 2642738 - RNA, 13 nt, Human
gccguaauuuaac

SEQ ID NO: 2642739 - RNA, 14 nt, Human
gccguaauuuaacu

SEQ ID NO: 2642740 - RNA, 23 nt, Human
gccguccuaaccucgggccugcu

SEQ ID NO: 2642741 - RNA, 21 nt, Human
uuuuucuuuucggaaaucuua

SEQ ID NO: 2642742 - RNA, 20 nt, Human
uuuguauaaaagugugaaau

SEQ ID NO: 2642743 - RNA, 14 nt, Human
uuuguauaaaagug

SEQ ID NO: 2642744 - RNA, 16 nt, Human
guauaugguauuuauu

SEQ ID NO: 2642745 - RNA, 19 nt, Human
guagguugggacaccaggg

SEQ ID NO: 2642746 - RNA, 16 nt, Human
guccccacccuccacu

SEQ ID NO: 2642747 - RNA, 17 nt, Human
guccccacccuccacuc

SEQ ID NO: 2642748 - RNA, 18 nt, Human
guccccacccuccacuca

SEQ ID NO: 2642749 - RNA, 17 nt, Human
gucaauaaacaacagcu

SEQ ID NO: 2642750 - RNA, 18 nt, Human
gucaauaaacaacagcug

SEQ ID NO: 2642751 - RNA, 20 nt, Human
gucaauaaacaacagcugaa

SEQ ID NO: 2642752 - RNA, 22 nt, Human
gucaauaaacaacagcugaagc

SEQ ID NO: 2642753 - RNA, 17 nt, Human
gucuguguuuugaaaga

SEQ ID NO: 2642754 - RNA, 14 nt, Human
gugucccuaaugug

SEQ ID NO: 2642755 - RNA, 15 nt, Human
guguuuugaaagaau

SEQ ID NO: 2642756 - RNA, 20 nt, Human
guguuuugaaagaauagaac

SEQ ID NO: 2642757 - RNA, 14 nt, Human
guguucauuguuuc

SEQ ID NO: 2642758 - RNA, 20 nt, Human
guguuacuaaaaaaaagaug

SEQ ID NO: 2642759 - RNA, 21 nt, Human
guguuacuaaaaaaaagauga

SEQ ID NO: 2642760 - RNA, 23 nt, Human
guugccauccuaccgucuuuucc

SEQ ID NO: 2642761 - RNA, 22 nt, Human
guuggaauggauuuuucuuuaa

SEQ ID NO: 2642762 - RNA, 18 nt, Human
guuacguagccuaaggcu

SEQ ID NO: 2642763 - RNA, 22 nt, Human
guuuguagugccacuguuguuu

SEQ ID NO: 2642764 - RNA, 14 nt, Human
uaaaacacacaggu

SEQ ID NO: 2642765 - RNA, 21 nt, Human
uaaaacagguuauaacagugu

SEQ ID NO: 2642766 - RNA, 19 nt, Human
uaaaugugcaauagaaggu

SEQ ID NO: 2642767 - RNA, 22 nt, Human
uaaaugugcaauagaaggugau

SEQ ID NO: 2642768 - RNA, 22 nt, Human
uaauguuucuggauuucauacu

SEQ ID NO: 2642769 - RNA, 17 nt, Human
uauauuuuguuuacaaa

SEQ ID NO: 2642770 - RNA, 11 nt, Human
uagauuuaugg

SEQ ID NO: 2642771 - RNA, 20 nt, Human
uagccuaaggcuccuguuuu

SEQ ID NO: 2642772 - RNA, 21 nt, Human
uagccuaaggcuccuguuuug

SEQ ID NO: 2642773 - RNA, 22 nt, Human
uagaauuauaacuguaaagaug

SEQ ID NO: 2642774 - RNA, 22 nt, Human
uacgaaccuacaguuuuaacug

SEQ ID NO: 2642775 - RNA, 16 nt, Human
uacuaaggacguuguu

SEQ ID NO: 2642776 - RNA, 15 nt, Human
uacugcagcaccucc

SEQ ID NO: 2642777 - RNA, 16 nt, Human
uacugcagcaccucca

SEQ ID NO: 2642778 - RNA, 21 nt, Human
uacugcagcaccuccaggccu

SEQ ID NO: 2642779 - RNA, 16 nt, Human
uacugcaaaaagaaaa

SEQ ID NO: 2642780 - RNA, 14 nt, Human
uacaguuuuaacug

SEQ ID NO: 2642781 - RNA, 15 nt, Human
uacaguuuuaacugu

SEQ ID NO: 2642782 - RNA, 20 nt, Human
uacaguuuuaacuguggaua

SEQ ID NO: 2642783 - RNA, 17 nt, Human
uacaguuuuaacugugg

SEQ ID NO: 2642784 - RNA, 19 nt, Human
uacaguuuuaacuguggau

SEQ ID NO: 2642785 - RNA, 21 nt, Human
uacaguuuuaacuguggauau

SEQ ID NO: 2642786 - RNA, 17 nt, Human
ugacuaacaggccaaag

SEQ ID NO: 2642787 - RNA, 21 nt, Human
ugacuaacaggccaaagaguc

SEQ ID NO: 2642788 - RNA, 13 nt, Human
ucuguaauugugu

SEQ ID NO: 2642789 - RNA, 16 nt, Human
ucaggacuugaaagaa

SEQ ID NO: 2642790 - RNA, 17 nt, Human
ucaggacuugaaagaaa

SEQ ID NO: 2642791 - RNA, 15 nt, Human
ucccaacccuggcuu

SEQ ID NO: 2642792 - RNA, 12 nt, Human
uccggaaagaag

SEQ ID NO: 2642793 - RNA, 14 nt, Human
ucuaggccucucca

SEQ ID NO: 2642794 - RNA, 15 nt, Human
ucuaggccucuccag

SEQ ID NO: 2642795 - RNA, 21 nt, Human
ucuagguacgaugacaguguu

SEQ ID NO: 2642796 - RNA, 15 nt, Human
uggaauggauuuuuc

SEQ ID NO: 2642797 - RNA, 21 nt, Human
ugcuggacuggaggccccugg

SEQ ID NO: 2642798 - RNA, 15 nt, Human
uggauuuuucuuuaa

SEQ ID NO: 2642799 - RNA, 20 nt, Human
ugggcuguaacguggcacug

SEQ ID NO: 2642800 - RNA, 13 nt, Human
ugggacaccaggg

SEQ ID NO: 2642801 - RNA, 14 nt, Human
ugggacaccaggga

SEQ ID NO: 2642802 - RNA, 18 nt, Human
ugggacaccagggaagaa

SEQ ID NO: 2642803 - RNA, 18 nt, Human
ugcccaucauguggcccc

SEQ ID NO: 2642804 - RNA, 21 nt, Human
ugcccaucauguggccccacc

SEQ ID NO: 2642805 - RNA, 22 nt, Human
ugcccaucauguggccccaccc

SEQ ID NO: 2642806 - RNA, 12 nt, Human
ugcagcaccucc

SEQ ID NO: 2642807 - RNA, 14 nt, Human
ugcagcaccuccag

SEQ ID NO: 2642808 - RNA, 15 nt, Human
ugcagcaccuccagg

SEQ ID NO: 2642809 - RNA, 16 nt, Human
ugcagcaccuccaggc

SEQ ID NO: 2642810 - RNA, 18 nt, Human
ugcagcaccuccaggccu

SEQ ID NO: 2642811 - RNA, 19 nt, Human
ugcagcaccuccaggccug

SEQ ID NO: 2642812 - RNA, 20 nt, Human
ugcagcaccuccaggccugu

SEQ ID NO: 2642813 - RNA, 15 nt, Human
uguagcugaggaggc

SEQ ID NO: 2642814 - RNA, 19 nt, Human
ugucccacccccuuccccc

SEQ ID NO: 2642815 - RNA, 20 nt, Human
ugucccacccccuuccccca

SEQ ID NO: 2642816 - RNA, 14 nt, Human
uuaaacuaaaugug

SEQ ID NO: 2642817 - RNA, 16 nt, Human
uguuuuaauaacuuau

SEQ ID NO: 2642818 - RNA, 13 nt, Human
uguuuuaauugua

SEQ ID NO: 2642819 - RNA, 17 nt, Human
uguuucuggauuucaua

SEQ ID NO: 2642820 - RNA, 16 nt, Human
uguuuccuagcugugu

SEQ ID NO: 2642821 - RNA, 16 nt, Human
uguguuuugaaagaau

SEQ ID NO: 2642822 - RNA, 14 nt, Human
uguguggauucuuu

SEQ ID NO: 2642823 - RNA, 14 nt, Human
uguuaaaaauguca

SEQ ID NO: 2642824 - RNA, 16 nt, Human
uguuacguagccuaag

SEQ ID NO: 2642825 - RNA, 20 nt, Human
uguuacuaaaaaaaagauga

SEQ ID NO: 2642826 - RNA, 19 nt, Human
agugcgguuuacucacugc

SEQ ID NO: 2642827 - RNA, 18 nt, Human
aguacgaaccuacaguuu

SEQ ID NO: 2642828 - RNA, 16 nt, Human
aguacgaaccuacagu

SEQ ID NO: 2642829 - RNA, 21 nt, Human
aguauauugauaaccuugaaa

SEQ ID NO: 2642830 - RNA, 14 nt, Human
augcauacaaguuu

SEQ ID NO: 2642831 - RNA, 15 nt, Human
agauaugaaagcuga

SEQ ID NO: 2642832 - RNA, 17 nt, Human
agaugaauguccugaaa

SEQ ID NO: 2642833 - RNA, 24 nt, Human
agaagagcgagagaucaaagauga

SEQ ID NO: 2642834 - RNA, 20 nt, Human
agaagaucaacgccucacug

SEQ ID NO: 2642835 - RNA, 11 nt, Human
agaacacaguu

SEQ ID NO: 2642836 - RNA, 24 nt, Human
agacugaauagauaugaaagcuga

SEQ ID NO: 2642837 - RNA, 21 nt, Human
agacugaauagauaugaaagc

SEQ ID NO: 2642838 - RNA, 22 nt, Human
agacugaauagauaugaaagcu

SEQ ID NO: 2642839 - RNA, 15 nt, Human
acucuaaaauuauaa

SEQ ID NO: 2642840 - RNA, 21 nt, Human
acucuaaaauuauaaaugaca

SEQ ID NO: 2642841 - RNA, 16 nt, Human
acucccaacccuggcu

SEQ ID NO: 2642842 - RNA, 15 nt, Human
acuggaggccccugg

SEQ ID NO: 2642843 - RNA, 18 nt, Human
acuggaggccccuggagc

SEQ ID NO: 2642844 - RNA, 21 nt, Human
acuggaggccccuggagccag

SEQ ID NO: 2642845 - RNA, 22 nt, Human
acuggaggccccuggagccaga

SEQ ID NO: 2642846 - RNA, 15 nt, Human
acugccguaauuuaa

SEQ ID NO: 2642847 - RNA, 16 nt, Human
acugccguaauuuaac

SEQ ID NO: 2642848 - RNA, 17 nt, Human
acugccguaauuuaacu

SEQ ID NO: 2642849 - RNA, 13 nt, Human
acuguaaagaugu

SEQ ID NO: 2642850 - RNA, 15 nt, Human
acuguaacauucagg

SEQ ID NO: 2642851 - RNA, 13 nt, Human
accuguggauauu

SEQ ID NO: 2642852 - RNA, 14 nt, Human
accuguggauauuu

SEQ ID NO: 2642853 - RNA, 10 nt, Human
accuguggau

SEQ ID NO: 2642854 - RNA, 20 nt, Human
acgcuuguagaacucacucu

SEQ ID NO: 2642855 - RNA, 21 nt, Human
acgcuuguagaacucacucug

SEQ ID NO: 2642856 - RNA, 18 nt, Human
acaguggaucacaaagug

SEQ ID NO: 2642857 - RNA, 15 nt, Human
acaguggaucacaaa

SEQ ID NO: 2642858 - RNA, 17 nt, Human
acaguggaucacaaagu

SEQ ID NO: 2642859 - RNA, 20 nt, Human
acacagcauuguauauguga

SEQ ID NO: 2642860 - RNA, 17 nt, Human
acacagcauuguauaug

SEQ ID NO: 2642861 - RNA, 18 nt, Human
acacagcauuguauaugu

SEQ ID NO: 2642862 - RNA, 17 nt, Human
aagaacuuuaaauugug

SEQ ID NO: 2642863 - RNA, 18 nt, Human
aagcugauuuuuuuuaau

SEQ ID NO: 2642864 - RNA, 13 nt, Human
aaagccugcucaa

SEQ ID NO: 2642865 - RNA, 12 nt, Human
aacagccagcaa

SEQ ID NO: 2642866 - RNA, 12 nt, Human
aaagccugcuca

SEQ ID NO: 2642867 - RNA, 22 nt, Human
aaaagaaaaucuuuauaaaugu

SEQ ID NO: 2642868 - RNA, 17 nt, Human
cugcacuaacagagugg

SEQ ID NO: 2642869 - RNA, 19 nt, Human
cugcaaauacuguauauuc

SEQ ID NO: 2642870 - RNA, 18 nt, Human
cugcucacgucaaaugca

SEQ ID NO: 2642871 - RNA, 19 nt, Human
cuggcccuuacuugcuucu

SEQ ID NO: 2642872 - RNA, 23 nt, Human
cuguuggaauggauuuuucuuua

SEQ ID NO: 2642873 - RNA, 18 nt, Human
cuuuggggcuaauuuaac

SEQ ID NO: 2642874 - RNA, 13 nt, Human
cuuuaaaugaaua

SEQ ID NO: 2642875 - RNA, 13 nt, Human
cuuuaaauugugu

SEQ ID NO: 2642876 - RNA, 16 nt, Human
gagugacuacacacag

SEQ ID NO: 2642877 - RNA, 22 nt, Human
gaagggccugcccaguugcacu

SEQ ID NO: 2642878 - RNA, 16 nt, Human
ggccaaagagucucca

SEQ ID NO: 2642879 - RNA, 17 nt, Human
ggccagcaacgcuugua

SEQ ID NO: 2642880 - RNA, 18 nt, Human
gcuuguagaacucacucu

SEQ ID NO: 2642881 - RNA, 19 nt, Human
gcuuguagaacucacucug

SEQ ID NO: 2642882 - RNA, 22 nt, Human
gcuuguagaacucacucugggc

SEQ ID NO: 2642883 - RNA, 23 nt, Human
gcuuguagaacucacucugggcu

SEQ ID NO: 2642884 - RNA, 12 nt, Human
aaaaaaaacagu

SEQ ID NO: 2642885 - RNA, 11 nt, Human
aaaaaagauga

SEQ ID NO: 2642886 - RNA, 13 nt, Human
aaaaaaaagcuuc

SEQ ID NO: 2642887 - RNA, 19 nt, Human
ggcugcccaucauguggcc

SEQ ID NO: 2642888 - RNA, 11 nt, Human
aaaagccugcu

SEQ ID NO: 2642889 - RNA, 20 nt, Human
ggggccuuagggcacugggc

SEQ ID NO: 2642890 - RNA, 23 nt, Human
ggggccuuagggcacugggcugu

SEQ ID NO: 2642891 - RNA, 12 nt, Human
aaacaaagaugu

SEQ ID NO: 2642892 - RNA, 15 nt, Human
aaacaacagcugaag

SEQ ID NO: 2642893 - RNA, 21 nt, Human
aaaauggcaggggguggaauu

SEQ ID NO: 2642894 - RNA, 16 nt, Human
aaagcuucacaguacc

SEQ ID NO: 2642895 - RNA, 18 nt, Human
gguagguugggacaccag

SEQ ID NO: 2642896 - RNA, 19 nt, Human
gguagguugggacaccagg

SEQ ID NO: 2642897 - RNA, 23 nt, Human
gcuuccuuuccuguguguacucu

SEQ ID NO: 2642898 - RNA, 23 nt, Human
gcuguaaggauccggaaagaaga

SEQ ID NO: 2642899 - RNA, 16 nt, Human
gcuguaacguggcacu

SEQ ID NO: 2642900 - RNA, 18 nt, Human
gcuguaacguggcacugg

SEQ ID NO: 2642901 - RNA, 20 nt, Human
gcuggacuggaggccccugg

SEQ ID NO: 2642902 - RNA, 23 nt, Human
gcuggacuggaggccccuggagc

SEQ ID NO: 2642903 - RNA, 17 nt, Human
gcugcccaucauguggc

SEQ ID NO: 2642904 - RNA, 19 nt, Human
gcugcccaucauguggccc

SEQ ID NO: 2642905 - RNA, 21 nt, Human
gcugcccaucauguggcccca

SEQ ID NO: 2642906 - RNA, 18 nt, Human
gcugaggaggcaccuaca

SEQ ID NO: 2642907 - RNA, 16 nt, Human
gccacuguuguuuugg

SEQ ID NO: 2642908 - RNA, 19 nt, Human
gccagcaagaguuaggggc

SEQ ID NO: 2642909 - RNA, 12 nt, Human
gccagcaacgcu

SEQ ID NO: 2642910 - RNA, 13 nt, Human
gccagcaacgcuu

SEQ ID NO: 2642911 - RNA, 14 nt, Human
gccagcaacgcuug

SEQ ID NO: 2642912 - RNA, 18 nt, Human
gccagcaacgcuuguaga

SEQ ID NO: 2642913 - RNA, 22 nt, Human
gccagcaacgcuuguagaacuc

SEQ ID NO: 2642914 - RNA, 14 nt, Human
gccuaccuguaugu

SEQ ID NO: 2642915 - RNA, 19 nt, Human
ccaaaagguuuaagaaaua

SEQ ID NO: 2642916 - RNA, 23 nt, Human
ccaaaagguuuaagaaauagaau

SEQ ID NO: 2642917 - RNA, 23 nt, Human
cauugggguaguuguguuucaac

SEQ ID NO: 2642918 - RNA, 18 nt, Human
cauuggauauuuuuuacu

SEQ ID NO: 2642919 - RNA, 11 nt, Human
cauuggauauu

SEQ ID NO: 2642920 - RNA, 14 nt, Human
caguuuuaacugug

SEQ ID NO: 2642921 - RNA, 15 nt, Human
caguuuuaacugugg

SEQ ID NO: 2642922 - RNA, 16 nt, Human
caguuuuaacugugga

SEQ ID NO: 2642923 - RNA, 17 nt, Human
caguuuuaacuguggau

SEQ ID NO: 2642924 - RNA, 18 nt, Human
caguuuuaacuguggaua

SEQ ID NO: 2642925 - RNA, 20 nt, Human
caguuuuaacuguggauauu

SEQ ID NO: 2642926 - RNA, 22 nt, Human
caguuuuaacuguggauauugu

SEQ ID NO: 2642927 - RNA, 23 nt, Human
caguuuuaacuguggauauuguu

SEQ ID NO: 2642928 - RNA, 18 nt, Human
cauaauguuucuggauuu

SEQ ID NO: 2642929 - RNA, 23 nt, Human
cauaauguuucuggauuucauac

SEQ ID NO: 2642930 - RNA, 21 nt, Human
cauaauguuucuggauuucau

SEQ ID NO: 2642931 - RNA, 22 nt, Human
cauaauguuucuggauuucaua

SEQ ID NO: 2642932 - RNA, 12 nt, Human
caguuuuaacug

SEQ ID NO: 2642933 - RNA, 13 nt, Human
caguuuuaacugu

SEQ ID NO: 2642934 - RNA, 15 nt, Human
caucacuuugaccua

SEQ ID NO: 2642935 - RNA, 18 nt, Human
cagauaguguagcugagg

SEQ ID NO: 2642936 - RNA, 20 nt, Human
cagauaguguagcugaggag

SEQ ID NO: 2642937 - RNA, 14 nt, Human
cagcaccuccaggc

SEQ ID NO: 2642938 - RNA, 16 nt, Human
cagcaccuccaggccu

SEQ ID NO: 2642939 - RNA, 18 nt, Human
cagcaccuccaggccugu

SEQ ID NO: 2642940 - RNA, 13 nt, Human
caggccuguugcu

SEQ ID NO: 2642941 - RNA, 23 nt, Human
caggccuguugcuauagagccua

SEQ ID NO: 2642942 - RNA, 12 nt, Human
cacuccacccuc

SEQ ID NO: 2642943 - RNA, 15 nt, Human
cacuccacccuccac

SEQ ID NO: 2642944 - RNA, 17 nt, Human
cacuccacccuccaccu

SEQ ID NO: 2642945 - RNA, 18 nt, Human
cacuccacccuccaccuu

SEQ ID NO: 2642946 - RNA, 21 nt, Human
cacuccacccuccaccuucca

SEQ ID NO: 2642947 - RNA, 19 nt, Human
auuucaggcauuggauauu

SEQ ID NO: 2642948 - RNA, 14 nt, Human
cucacgucaaaugc

SEQ ID NO: 2642949 - RNA, 15 nt, Human
cucaaucccugagga

SEQ ID NO: 2642950 - RNA, 24 nt, Human
ccuuuccuguguguacucugucca

SEQ ID NO: 2642951 - RNA, 19 nt, Human
cuaauuuguuuuggauaua

SEQ ID NO: 2642952 - RNA, 14 nt, Human
ccuucccccagccc

SEQ ID NO: 2642953 - RNA, 15 nt, Human
ccuucccccagccca

SEQ ID NO: 2642954 - RNA, 17 nt, Human
ccuucccccagcccauc

SEQ ID NO: 2642955 - RNA, 21 nt, Human
ccuuuauuuuuggcguggcug

SEQ ID NO: 2642956 - RNA, 16 nt, Human
ccuuagggcacugggc

SEQ ID NO: 2642957 - RNA, 19 nt, Human
ccuguugcuauagagccua

SEQ ID NO: 2642958 - RNA, 23 nt, Human
ccucuccuucaugacagccucca

SEQ ID NO: 2642959 - RNA, 13 nt, Human
ccucgggccugcu

SEQ ID NO: 2642960 - RNA, 22 nt, Human
ccuagcugugugaauaccugcu

SEQ ID NO: 2642961 - RNA, 16 nt, Human
ccuagcugugugaaua

SEQ ID NO: 2642962 - RNA, 17 nt, Human
ccagauaguguagcuga

SEQ ID NO: 2642963 - RNA, 20 nt, Human
ccagauaguguagcugagga

SEQ ID NO: 2642964 - RNA, 22 nt, Human
cccagcccauccauuaggccag

SEQ ID NO: 2642965 - RNA, 14 nt, Human
cccauccauuaggc

SEQ ID NO: 2642966 - RNA, 15 nt, Human
cccauccauuaggcc

SEQ ID NO: 2642967 - RNA, 19 nt, Human
cccauccauuaggccagca

SEQ ID NO: 2642968 - RNA, 14 nt, Human
cccaucauguggcc

SEQ ID NO: 2642969 - RNA, 19 nt, Human
cccaucauguggccccacc

SEQ ID NO: 2642970 - RNA, 22 nt, Human
gucaaaugcauacaaguuucau

SEQ ID NO: 2642971 - RNA, 15 nt, Human
aaauuaccuguggau

SEQ ID NO: 2642972 - RNA, 18 nt, Human
aaauuaccuguggauauu

SEQ ID NO: 2642973 - RNA, 23 nt, Human
guauauucaggacuugaaagaaa

SEQ ID NO: 2642974 - RNA, 12 nt, Human
guauauucagga

SEQ ID NO: 2642975 - RNA, 13 nt, Human
aaaugaaagcuac

SEQ ID NO: 2642976 - RNA, 14 nt, Human
aaaugaaagcuacu

SEQ ID NO: 2642977 - RNA, 13 nt, Human
aacaguguuuaaa

SEQ ID NO: 2642978 - RNA, 14 nt, Human
aacaguggaucaca

SEQ ID NO: 2642979 - RNA, 14 nt, Human
gucucaguuucuug

SEQ ID NO: 2642980 - RNA, 15 nt, Human
aacuagcauuguaaa

SEQ ID NO: 2642981 - RNA, 21 nt, Human
aacuaaaugugcaauagaagg

SEQ ID NO: 2642982 - RNA, 21 nt, Human
guuccauugaagccgacucug

SEQ ID NO: 2642983 - RNA, 22 nt, Human
guuccauugaagccgacucugg

SEQ ID NO: 2642984 - RNA, 23 nt, Human
guuccauugaagccgacucuggc

SEQ ID NO: 2642985 - RNA, 16 nt, Human
guguuuuaauuguaaa

SEQ ID NO: 2642986 - RNA, 14 nt, Human
guguuuuaauugua

SEQ ID NO: 2642987 - RNA, 22 nt, Human
guuaggggccuuagggcacugg

SEQ ID NO: 2642988 - RNA, 20 nt, Human
guuuacaaaaauuucuguaa

SEQ ID NO: 2642989 - RNA, 18 nt, Human
guuguacuuuggaauucu

SEQ ID NO: 2642990 - RNA, 15 nt, Human
guuugcaccuguccc

SEQ ID NO: 2642991 - RNA, 15 nt, Human
guguguacucugucc

SEQ ID NO: 2642992 - RNA, 17 nt, Human
guguguacucuguccag

SEQ ID NO: 2642993 - RNA, 13 nt, Human
gugggacagccca

SEQ ID NO: 2642994 - RNA, 18 nt, Human
gugggacagcccagagcc

SEQ ID NO: 2642995 - RNA, 21 nt, Human
gugggacagcccagagccugg

SEQ ID NO: 2642996 - RNA, 23 nt, Human
aagagcgagagaucaaagaugaa

SEQ ID NO: 2642997 - RNA, 18 nt, Human
aagagcgagagaucaaag

SEQ ID NO: 2642998 - RNA, 21 nt, Human
aagagcgagagaucaaagaug

SEQ ID NO: 2642999 - RNA, 13 nt, Human
guggauucuuuaa

SEQ ID NO: 2643000 - RNA, 11 nt, Human
aagaauagaac

SEQ ID NO: 2643001 - RNA, 12 nt, Human
aagaaauagaau

SEQ ID NO: 2643002 - RNA, 14 nt, Human
aaugcauacaaguu

SEQ ID NO: 2643003 - RNA, 13 nt, Human
aaucagaauuaga

SEQ ID NO: 2643004 - RNA, 16 nt, Human
uaaccucgggccugcu

SEQ ID NO: 2643005 - RNA, 18 nt, Human
aauagauaugaaagcuga

SEQ ID NO: 2643006 - RNA, 19 nt, Human
aauagauaugaaagcugau

SEQ ID NO: 2643007 - RNA, 15 nt, Human
acaacagcugaagca

SEQ ID NO: 2643008 - RNA, 16 nt, Human
acaacagcugaagcac

SEQ ID NO: 2643009 - RNA, 16 nt, Human
uacuucuguaauugug

SEQ ID NO: 2643010 - RNA, 17 nt, Human
uacuucuguaauugugu

SEQ ID NO: 2643011 - RNA, 20 nt, Human
uacuucuguaauugugugga

SEQ ID NO: 2643012 - RNA, 22 nt, Human
uacuucuguaauuguguggauu

SEQ ID NO: 2643013 - RNA, 20 nt, Human
uacuuugacaguguuuuuag

SEQ ID NO: 2643014 - RNA, 15 nt, Human
uacuuugacaguguu

SEQ ID NO: 2643015 - RNA, 18 nt, Human
uacuuauuuguauauggu

SEQ ID NO: 2643016 - RNA, 15 nt, Human
acagcaaacaggugc

SEQ ID NO: 2643017 - RNA, 22 nt, Human
acagcaaacaggugcuaauuug

SEQ ID NO: 2643018 - RNA, 22 nt, Human
uauauucaggacuugaaagaaa

SEQ ID NO: 2643019 - RNA, 15 nt, Human
acacuccacccucca

SEQ ID NO: 2643020 - RNA, 18 nt, Human
acacuccacccuccaccu

SEQ ID NO: 2643021 - RNA, 22 nt, Human
acacuccacccuccaccuucca

SEQ ID NO: 2643022 - RNA, 13 nt, Human
uagguugggacac

SEQ ID NO: 2643023 - RNA, 12 nt, Human
acacacaguacg

SEQ ID NO: 2643024 - RNA, 17 nt, Human
ucacaaaguggaacgaa

SEQ ID NO: 2643025 - RNA, 23 nt, Human
accagggaagaagaucaacgccu

SEQ ID NO: 2643026 - RNA, 13 nt, Human
ucaccugcacuaa

SEQ ID NO: 2643027 - RNA, 12 nt, Human
ucaagaaacagc

SEQ ID NO: 2643028 - RNA, 13 nt, Human
ucaagaaacagcc

SEQ ID NO: 2643029 - RNA, 15 nt, Human
ucaagaaacagccag

SEQ ID NO: 2643030 - RNA, 16 nt, Human
ucaagaaacagccagc

SEQ ID NO: 2643031 - RNA, 17 nt, Human
ucaagaaacagccagca

SEQ ID NO: 2643032 - RNA, 18 nt, Human
ucaagaaacagccagcaa

SEQ ID NO: 2643033 - RNA, 20 nt, Human
ucaagaaacagccagcaaga

SEQ ID NO: 2643034 - RNA, 19 nt, Human
acauucaggaauucuugga

SEQ ID NO: 2643035 - RNA, 16 nt, Human
ucaacagagacugaau

SEQ ID NO: 2643036 - RNA, 14 nt, Human
acaucacaagacua

SEQ ID NO: 2643037 - RNA, 17 nt, Human
acaguuuuaacugugga

SEQ ID NO: 2643038 - RNA, 19 nt, Human
acaguuuuaacuguggaua

SEQ ID NO: 2643039 - RNA, 21 nt, Human
acaguuuuaacuguggauauu

SEQ ID NO: 2643040 - RNA, 13 nt, Human
acaguuuuaacug

SEQ ID NO: 2643041 - RNA, 21 nt, Human
uccacucagcuguccugcagc

SEQ ID NO: 2643042 - RNA, 22 nt, Human
uccacucagcuguccugcagca

SEQ ID NO: 2643043 - RNA, 18 nt, Human
accuacaguuuuaacugu

SEQ ID NO: 2643044 - RNA, 19 nt, Human
accuacaguuuuaacugug

SEQ ID NO: 2643045 - RNA, 11 nt, Human
accuacaguuu

SEQ ID NO: 2643046 - RNA, 16 nt, Human
accuacaguuuuaacu

SEQ ID NO: 2643047 - RNA, 17 nt, Human
accuacaguuuuaacug

SEQ ID NO: 2643048 - RNA, 23 nt, Human
ucaugauuagaaauuaccugugg

SEQ ID NO: 2643049 - RNA, 17 nt, Human
accugcacuaacagagu

SEQ ID NO: 2643050 - RNA, 18 nt, Human
accugcacuaacagagug

SEQ ID NO: 2643051 - RNA, 21 nt, Human
uccauugaagccgacucuggc

SEQ ID NO: 2643052 - RNA, 22 nt, Human
uccauugaagccgacucuggcc

SEQ ID NO: 2643053 - RNA, 13 nt, Human
uccccacccucca

SEQ ID NO: 2643054 - RNA, 14 nt, Human
uccccacccuccac

SEQ ID NO: 2643055 - RNA, 15 nt, Human
uccccacccuccacu

SEQ ID NO: 2643056 - RNA, 16 nt, Human
uccccacccuccacuc

SEQ ID NO: 2643057 - RNA, 19 nt, Human
uccccacccuccacucagc

SEQ ID NO: 2643058 - RNA, 13 nt, Human
acuacacacagua

SEQ ID NO: 2643059 - RNA, 18 nt, Human
acuaacaggccaaagagu

SEQ ID NO: 2643060 - RNA, 15 nt, Human
ucccugaggacugau

SEQ ID NO: 2643061 - RNA, 20 nt, Human
ucccugaggacugauuucag

SEQ ID NO: 2643062 - RNA, 21 nt, Human
ucccugaggacugauuucaga

SEQ ID NO: 2643063 - RNA, 13 nt, Human
acucacucugggc

SEQ ID NO: 2643064 - RNA, 14 nt, Human
acucacucugggcu

SEQ ID NO: 2643065 - RNA, 15 nt, Human
acucacucugggcug

SEQ ID NO: 2643066 - RNA, 16 nt, Human
acucacucugggcugu

SEQ ID NO: 2643067 - RNA, 12 nt, Human
acuguuggaaug

SEQ ID NO: 2643068 - RNA, 21 nt, Human
acuguuggaauggauuuuucu

SEQ ID NO: 2643069 - RNA, 13 nt, Human
acuuuaaauugug

SEQ ID NO: 2643070 - RNA, 18 nt, Human
ucuccaguuugcaccugu

SEQ ID NO: 2643071 - RNA, 24 nt, Human
acuugaaugcuaguuauacuuauu

SEQ ID NO: 2643072 - RNA, 13 nt, Human
agaaacagccagc

SEQ ID NO: 2643073 - RNA, 15 nt, Human
agaaacagccagcaa

SEQ ID NO: 2643074 - RNA, 21 nt, Human
ucugggcuguaacguggcacu

SEQ ID NO: 2643075 - RNA, 22 nt, Human
ucugggcuguaacguggcacug

SEQ ID NO: 2643076 - RNA, 23 nt, Human
ucugggcuguaacguggcacugg

SEQ ID NO: 2643077 - RNA, 15 nt, Human
ucuggguugccuuua

SEQ ID NO: 2643078 - RNA, 19 nt, Human
agaaauucaauuuggauuu

SEQ ID NO: 2643079 - RNA, 22 nt, Human
agaaauucaauuuggauuuaaa

SEQ ID NO: 2643080 - RNA, 14 nt, Human
ugacaguguuuuua

SEQ ID NO: 2643081 - RNA, 18 nt, Human
agauacuaaggacguugu

SEQ ID NO: 2643082 - RNA, 19 nt, Human
agagcgagagaucaaagau

SEQ ID NO: 2643083 - RNA, 22 nt, Human
ugaagcaaacucuaaaauuaua

SEQ ID NO: 2643084 - RNA, 14 nt, Human
ugauacauuuuugu

SEQ ID NO: 2643085 - RNA, 21 nt, Human
ugaucuacuucuguaauugug

SEQ ID NO: 2643086 - RNA, 18 nt, Human
ugaucuacuucuguaauu

SEQ ID NO: 2643087 - RNA, 20 nt, Human
ugaucuacuucuguaauugu

SEQ ID NO: 2643088 - RNA, 16 nt, Human
ugcaacagacuugaau

SEQ ID NO: 2643089 - RNA, 23 nt, Human
ugcaaauacuguauauucaggac

SEQ ID NO: 2643090 - RNA, 13 nt, Human
agccccuccucca

SEQ ID NO: 2643091 - RNA, 20 nt, Human
agccccuccuccagccccug

SEQ ID NO: 2643092 - RNA, 21 nt, Human
agccccuccuccagccccugu

SEQ ID NO: 2643093 - RNA, 22 nt, Human
agccccuccuccagccccuguc

SEQ ID NO: 2643094 - RNA, 23 nt, Human
agccccuccuccagccccugucc

SEQ ID NO: 2643095 - RNA, 11 nt, Human
agccccugucc

SEQ ID NO: 2643096 - RNA, 12 nt, Human
agccccuguccc

SEQ ID NO: 2643097 - RNA, 13 nt, Human
agccccuguccca

SEQ ID NO: 2643098 - RNA, 17 nt, Human
aggacucccaacccugg

SEQ ID NO: 2643099 - RNA, 18 nt, Human
aggacucccaacccuggc

SEQ ID NO: 2643100 - RNA, 19 nt, Human
aggacucccaacccuggcu

SEQ ID NO: 2643101 - RNA, 20 nt, Human
aggacucccaacccuggcuu

SEQ ID NO: 2643102 - RNA, 18 nt, Human
aggacugauuucagagug

SEQ ID NO: 2643103 - RNA, 13 nt, Human
aggacuugaaaga

SEQ ID NO: 2643104 - RNA, 16 nt, Human
aggacuugaaagaaau

SEQ ID NO: 2643105 - RNA, 14 nt, Human
ugcuuuuuccaacu

SEQ ID NO: 2643106 - RNA, 21 nt, Human
ugcuuuuuccaacucagaaau

SEQ ID NO: 2643107 - RNA, 17 nt, Human
aggaggaaugcuggacu

SEQ ID NO: 2643108 - RNA, 19 nt, Human
aggaggaaugcuggacugg

SEQ ID NO: 2643109 - RNA, 22 nt, Human
aggaggaaugcuggacuggagg

SEQ ID NO: 2643110 - RNA, 13 nt, Human
uggagaaaauggg

SEQ ID NO: 2643111 - RNA, 22 nt, Human
uggagaaaauggguuuauucac

SEQ ID NO: 2643112 - RNA, 13 nt, Human
aggcauuggauau

SEQ ID NO: 2643113 - RNA, 14 nt, Human
aggcauuggauauu

SEQ ID NO: 2643114 - RNA, 13 nt, Human
ugcuaauuuguuu

SEQ ID NO: 2643115 - RNA, 21 nt, Human
agcugugugaauaccugcuca

SEQ ID NO: 2643116 - RNA, 22 nt, Human
uguaugucaauaaacaacagcu

SEQ ID NO: 2643117 - RNA, 20 nt, Human
uggggucaagaaacagccag

SEQ ID NO: 2643118 - RNA, 21 nt, Human
uggggucaagaaacagccagc

SEQ ID NO: 2643119 - RNA, 22 nt, Human
uggggucaagaaacagccagca

SEQ ID NO: 2643120 - RNA, 15 nt, Human
agggaagaaggagga

SEQ ID NO: 2643121 - RNA, 18 nt, Human
agggaagaaggaggaaug

SEQ ID NO: 2643122 - RNA, 13 nt, Human
agggcacugggcu

SEQ ID NO: 2643123 - RNA, 14 nt, Human
agggcacugggcug

SEQ ID NO: 2643124 - RNA, 15 nt, Human
agggcacugggcugu

SEQ ID NO: 2643125 - RNA, 16 nt, Human
agggcacugggcuguu

SEQ ID NO: 2643126 - RNA, 18 nt, Human
agggcacugggcuguugu

SEQ ID NO: 2643127 - RNA, 16 nt, Human
auaaacaacagcugaa

SEQ ID NO: 2643128 - RNA, 13 nt, Human
uuagaagccugca

SEQ ID NO: 2643129 - RNA, 12 nt, Human
uuaccuguggau

SEQ ID NO: 2643130 - RNA, 13 nt, Human
uuaccuguggaua

SEQ ID NO: 2643131 - RNA, 20 nt, Human
uuaccuguggauauuuguau

SEQ ID NO: 2643132 - RNA, 12 nt, Human
uuacucacugcu

SEQ ID NO: 2643133 - RNA, 18 nt, Human
auaaauguaccagagaga

SEQ ID NO: 2643134 - RNA, 18 nt, Human
uguuuugcacagccaaau

SEQ ID NO: 2643135 - RNA, 17 nt, Human
uguuugcagccugcucu

SEQ ID NO: 2643136 - RNA, 13 nt, Human
uguuuauuucagg

SEQ ID NO: 2643137 - RNA, 14 nt, Human
uuaacaagaacuuu

SEQ ID NO: 2643138 - RNA, 15 nt, Human
uuaaauuguguuuua

SEQ ID NO: 2643139 - RNA, 15 nt, Human
aguugcacucaggug

SEQ ID NO: 2643140 - RNA, 21 nt, Human
uguuccauugaagccgacucu

SEQ ID NO: 2643141 - RNA, 23 nt, Human
agugcugucuuaaacuaaaugug

SEQ ID NO: 2643142 - RNA, 17 nt, Human
uuccuguguguacucug

SEQ ID NO: 2643143 - RNA, 21 nt, Human
uuccuguguguacucugucca

SEQ ID NO: 2643144 - RNA, 14 nt, Human
aucacaaaguggaa

SEQ ID NO: 2643145 - RNA, 24 nt, Human
aucacaaaguggaacgaaaaugaa

SEQ ID NO: 2643146 - RNA, 15 nt, Human
aucacaaaguggaac

SEQ ID NO: 2643147 - RNA, 15 nt, Human
auccauuaggccagc

SEQ ID NO: 2643148 - RNA, 16 nt, Human
auccauuaggccagca

SEQ ID NO: 2643149 - RNA, 17 nt, Human
auccauuaggccagcaa

SEQ ID NO: 2643150 - RNA, 18 nt, Human
auccauuaggccagcaac

SEQ ID NO: 2643151 - RNA, 19 nt, Human
auccauuaggccagcaacg

SEQ ID NO: 2643152 - RNA, 13 nt, Human
uucuguaauugug

SEQ ID NO: 2643153 - RNA, 19 nt, Human
uuauuucaugauuagaaau

SEQ ID NO: 2643154 - RNA, 19 nt, Human
uucacaguacccaaacugc

SEQ ID NO: 2643155 - RNA, 23 nt, Human
uucacaguacccaaacugcuuuu

SEQ ID NO: 2643156 - RNA, 22 nt, Human
uucauacuguaacauucaggaa

SEQ ID NO: 2643157 - RNA, 19 nt, Human
aucuuaaaccuuaagauac

SEQ ID NO: 2643158 - RNA, 13 nt, Human
uuuacccuucagg

SEQ ID NO: 2643159 - RNA, 16 nt, Human
augcuggacuggaggc

SEQ ID NO: 2643160 - RNA, 20 nt, Human
augcuggacuggaggccccu

SEQ ID NO: 2643161 - RNA, 22 nt, Human
augcuggacuggaggccccugg

SEQ ID NO: 2643162 - RNA, 16 nt, Human
uugugucccuaaugug

SEQ ID NO: 2643163 - RNA, 20 nt, Human
uuuuuggcguggcugacuua

SEQ ID NO: 2643164 - RNA, 12 nt, Human
auuauaacugua

SEQ ID NO: 2643165 - RNA, 15 nt, Human
auuauaaaugacaac

SEQ ID NO: 2643166 - RNA, 18 nt, Human
auucaggacuugaaagaa

SEQ ID NO: 2643167 - RNA, 19 nt, Human
auucaggacuugaaagaaa

SEQ ID NO: 2643168 - RNA, 20 nt, Human
uuuggauuuaaaagccugcu

SEQ ID NO: 2643169 - RNA, 18 nt, Human
auuuggauuuaaaagccu

SEQ ID NO: 2643170 - RNA, 20 nt, Human
auuuggauuuaaaagccugc

SEQ ID NO: 2643171 - RNA, 23 nt, Human
auuuggauuuaaaagccugcuca

SEQ ID NO: 2643172 - RNA, 14 nt, Human
auuuaaaagccugc

SEQ ID NO: 2643173 - RNA, 15 nt, Human
auuuaaaagccugcu

SEQ ID NO: 2643174 - RNA, 17 nt, Human
auuuaaaagccugcuca

SEQ ID NO: 2643175 - RNA, 15 nt, Human
auuuaugguuguuaa

SEQ ID NO: 2643176 - RNA, 23 nt, Human
auuuaugguuguuaaaaauguca

SEQ ID NO: 2643177 - RNA, 17 nt, Human
auuuauuuuuucuuuuc

SEQ ID NO: 2643178 - RNA, 22 nt, Human
auuuauuuuuucuuuucuuuac

SEQ ID NO: 2643179 - RNA, 15 nt, Human
auuucaugauuagaa

SEQ ID NO: 2643180 - RNA, 21 nt, Human
caagagggugacagcuuccuu

SEQ ID NO: 2643181 - RNA, 14 nt, Human
cauuguauauguga

SEQ ID NO: 2643182 - RNA, 17 nt, Human
cauuguuucguaacaca

SEQ ID NO: 2643183 - RNA, 17 nt, Human
ccaaacugauccaguau

SEQ ID NO: 2643184 - RNA, 15 nt, Human
ccacucagcuguccu

SEQ ID NO: 2643185 - RNA, 12 nt, Human
cggaaagaagag

SEQ ID NO: 2643186 - RNA, 18 nt, Human
cggaaagaagagcgagag

SEQ ID NO: 2643187 - RNA, 23 nt, Human
cguccaucacguuagcuguccca

SEQ ID NO: 2643188 - RNA, 12 nt, Human
ccuggagccaga

SEQ ID NO: 2643189 - RNA, 17 nt, Human
ccuuccauuuuccccca

SEQ ID NO: 2643190 - RNA, 19 nt, Human
ccuuccauuuucccccacu

SEQ ID NO: 2643191 - RNA, 20 nt, Human
ccuuccauuuucccccacua

SEQ ID NO: 2643192 - RNA, 20 nt, Human
ccuuacuugcuucucuagcu

SEQ ID NO: 2643193 - RNA, 17 nt, Human
ccuugaaaaaaaacagu

SEQ ID NO: 2643194 - RNA, 15 nt, Human
cccugucccaccccc

SEQ ID NO: 2643195 - RNA, 19 nt, Human
cccugucccacccccuucc

SEQ ID NO: 2643196 - RNA, 22 nt, Human
cccugucccacccccuuccccc

SEQ ID NO: 2643197 - RNA, 11 nt, Human
ccggaaagaag

SEQ ID NO: 2643198 - RNA, 17 nt, Human
cuggguugccuuuauuu

SEQ ID NO: 2643199 - RNA, 13 nt, Human
cuggaggccccug

SEQ ID NO: 2643200 - RNA, 14 nt, Human
cuggaggccccugg

SEQ ID NO: 2643201 - RNA, 17 nt, Human
cuggaggccccuggagc

SEQ ID NO: 2643202 - RNA, 19 nt, Human
cuggaggccccuggagcca

SEQ ID NO: 2643203 - RNA, 20 nt, Human
cuggaggccccuggagccag

SEQ ID NO: 2643204 - RNA, 21 nt, Human
cuggaggccccuggagccaga

SEQ ID NO: 2643205 - RNA, 20 nt, Human
cugauacuuugacaguguuu

SEQ ID NO: 2643206 - RNA, 15 nt, Human
cucccuuucacuaaa

SEQ ID NO: 2643207 - RNA, 19 nt, Human
cuccuguuuugcacagcca

SEQ ID NO: 2643208 - RNA, 19 nt, Human
cuccuucaugacagccucc

SEQ ID NO: 2643209 - RNA, 13 nt, Human
cuccaggccuguu

SEQ ID NO: 2643210 - RNA, 20 nt, Human
cuccaggccuguugcuauag

SEQ ID NO: 2643211 - RNA, 14 nt, Human
cuccacccuccacc

SEQ ID NO: 2643212 - RNA, 15 nt, Human
cuccacccuccaccu

SEQ ID NO: 2643213 - RNA, 16 nt, Human
cuccacccuccaccuu

SEQ ID NO: 2643214 - RNA, 13 nt, Human
cuccagccccugu

SEQ ID NO: 2643215 - RNA, 14 nt, Human
cuccagccccuguc

SEQ ID NO: 2643216 - RNA, 15 nt, Human
cuccagccccugucc

SEQ ID NO: 2643217 - RNA, 16 nt, Human
cuccagccccuguccc

SEQ ID NO: 2643218 - RNA, 17 nt, Human
cuccagccccuguccca

SEQ ID NO: 2643219 - RNA, 17 nt, Human
cucuccaguuugcaccu

SEQ ID NO: 2643220 - RNA, 19 nt, Human
cucuccaguuugcaccugu

SEQ ID NO: 2643221 - RNA, 20 nt, Human
cucuccaguuugcaccuguc

SEQ ID NO: 2643222 - RNA, 22 nt, Human
cucuccaguuugcaccuguccc

SEQ ID NO: 2643223 - RNA, 23 nt, Human
cucuccaguuugcaccugucccc

SEQ ID NO: 2643224 - RNA, 15 nt, Human
cugaaucugcuacca

SEQ ID NO: 2643225 - RNA, 17 nt, Human
cugaaucugcuaccaaa

SEQ ID NO: 2643226 - RNA, 22 nt, Human
cugaaucugcuaccaaaacagu

SEQ ID NO: 2643227 - RNA, 15 nt, Human
cugaauagauaugaa

SEQ ID NO: 2643228 - RNA, 17 nt, Human
cuguuuccuagcugugu

SEQ ID NO: 2643229 - RNA, 16 nt, Human
cuguuuccuagcugug

SEQ ID NO: 2643230 - RNA, 21 nt, Human
cuuugaccuaaauuauuuacu

SEQ ID NO: 2643231 - RNA, 20 nt, Human
gaaaaguauauugauaaccu

SEQ ID NO: 2643232 - RNA, 19 nt, Human
cuugcuucucuagcucucu

SEQ ID NO: 2643233 - RNA, 17 nt, Human
cuuguagaacucacucu

SEQ ID NO: 2643234 - RNA, 18 nt, Human
cuuguagaacucacucug

SEQ ID NO: 2643235 - RNA, 19 nt, Human
cuuguagaacucacucugg

SEQ ID NO: 2643236 - RNA, 20 nt, Human
cuuguagaacucacucuggg

SEQ ID NO: 2643237 - RNA, 21 nt, Human
cuuguagaacucacucugggc

SEQ ID NO: 2643238 - RNA, 23 nt, Human
cuuguagaacucacucugggcug

SEQ ID NO: 2643239 - RNA, 16 nt, Human
gacugauuucagagug

SEQ ID NO: 2643240 - RNA, 14 nt, Human
gacugauuucagag

SEQ ID NO: 2643241 - RNA, 16 nt, Human
gaacgaaaaugaaagc

SEQ ID NO: 2643242 - RNA, 13 nt, Human
gaacucacucugg

SEQ ID NO: 2643243 - RNA, 14 nt, Human
gaacucacucuggg

SEQ ID NO: 2643244 - RNA, 15 nt, Human
gaacucacucugggc

SEQ ID NO: 2643245 - RNA, 16 nt, Human
gaacucacucugggcu

SEQ ID NO: 2643246 - RNA, 17 nt, Human
gaacucacucugggcug

SEQ ID NO: 2643247 - RNA, 18 nt, Human
gaacucacucugggcugu

SEQ ID NO: 2643248 - RNA, 13 nt, Human
gaagccgacucug

SEQ ID NO: 2643249 - RNA, 14 nt, Human
gaagccgacucugg

SEQ ID NO: 2643250 - RNA, 15 nt, Human
gaagccgacucuggc

SEQ ID NO: 2643251 - RNA, 16 nt, Human
gaagccgacucuggcc

SEQ ID NO: 2643252 - RNA, 17 nt, Human
gaagccgacucuggccc

SEQ ID NO: 2643253 - RNA, 19 nt, Human
gaagccgacucuggcccug

SEQ ID NO: 2643254 - RNA, 21 nt, Human
gaagccgacucuggcccuggc

SEQ ID NO: 2643255 - RNA, 13 nt, Human
gaauaccugcuca

SEQ ID NO: 2643256 - RNA, 21 nt, Human
gaauggauuuuucuuuaacug

SEQ ID NO: 2643257 - RNA, 16 nt, Human
gauaaccuugaaaaaa

SEQ ID NO: 2643258 - RNA, 20 nt, Human
gaucuacuucuguaauugug

SEQ ID NO: 2643259 - RNA, 14 nt, Human
gauccggaaagaag

SEQ ID NO: 2643260 - RNA, 22 nt, Human
gauguucuauuuuuuguuuugu

SEQ ID NO: 2643261 - RNA, 16 nt, Human
gauuuaaaagccugcu

SEQ ID NO: 2643262 - RNA, 18 nt, Human
gauuuaaaagccugcuca

SEQ ID NO: 2643263 - RNA, 16 nt, Human
gcagccugcucuagug

SEQ ID NO: 2643264 - RNA, 21 nt, Human
gcagccugcucuagugggaca

SEQ ID NO: 2643265 - RNA, 16 nt, Human
gcagcaaacacuccac

SEQ ID NO: 2643266 - RNA, 22 nt, Human
gcagcaaacacuccacccucca

SEQ ID NO: 2643267 - RNA, 14 nt, Human
gcagcaccuccagg

SEQ ID NO: 2643268 - RNA, 15 nt, Human
gcagcaccuccaggc

SEQ ID NO: 2643269 - RNA, 16 nt, Human
gcagcaccuccaggcc

SEQ ID NO: 2643270 - RNA, 17 nt, Human
gcagcaccuccaggccu

SEQ ID NO: 2643271 - RNA, 18 nt, Human
gcagcaccuccaggccug

SEQ ID NO: 2643272 - RNA, 19 nt, Human
gcagcaccuccaggccugu

SEQ ID NO: 2643273 - RNA, 12 nt, Human
gcauuggauauu

SEQ ID NO: 2643274 - RNA, 18 nt, Human
gcauuggauauuuuuuac

SEQ ID NO: 2643275 - RNA, 12 nt, Human
gccgacucuggc

SEQ ID NO: 2643276 - RNA, 14 nt, Human
gccgacucuggccc

SEQ ID NO: 2643277 - RNA, 15 nt, Human
gccgacucuggcccu

SEQ ID NO: 2643278 - RNA, 16 nt, Human
gccgacucuggcccug

SEQ ID NO: 2643279 - RNA, 17 nt, Human
gccgacucuggcccugg

SEQ ID NO: 2643280 - RNA, 18 nt, Human
gccgacucuggcccuggc

SEQ ID NO: 2643281 - RNA, 21 nt, Human
gccucuccaguuugcaccugu

SEQ ID NO: 2643282 - RNA, 14 nt, Human
gcuaccaaaacagu

SEQ ID NO: 2643283 - RNA, 17 nt, Human
gccuuagggcacugggc

SEQ ID NO: 2643284 - RNA, 19 nt, Human
gccuuagggcacugggcug

SEQ ID NO: 2643285 - RNA, 23 nt, Human
gccuuuauuuuuggcguggcuga

SEQ ID NO: 2643286 - RNA, 14 nt, Human
gggcuuuuuucuuu

SEQ ID NO: 2643287 - RNA, 14 nt, Human
ggggcuaauuuaac

SEQ ID NO: 2643288 - RNA, 16 nt, Human
gggaagggccugccca

SEQ ID NO: 2643289 - RNA, 14 nt, Human
gggcacugggcugu

SEQ ID NO: 2643290 - RNA, 18 nt, Human
gcuucucuagcucucuag

SEQ ID NO: 2643291 - RNA, 19 nt, Human
gcuucucuagcucucuagg

SEQ ID NO: 2643292 - RNA, 21 nt, Human
gcuucucuagcucucuaggcc

SEQ ID NO: 2643293 - RNA, 22 nt, Human
gcuucucuagcucucuaggccu

SEQ ID NO: 2643294 - RNA, 19 nt, Human
ggaaagugcugucuuaaac

SEQ ID NO: 2643295 - RNA, 21 nt, Human
gcugucuuaaacuaaaugugc

SEQ ID NO: 2643296 - RNA, 21 nt, Human
ggcaccuacacucaccugcac

SEQ ID NO: 2643297 - RNA, 17 nt, Human
ggauccaaacugaucca

SEQ ID NO: 2643298 - RNA, 15 nt, Human
uaguuguguuucaac

SEQ ID NO: 2643299 - RNA, 13 nt, Human
uagcucucuaggc

SEQ ID NO: 2643300 - RNA, 14 nt, Human
uagcucucuaggcc

SEQ ID NO: 2643301 - RNA, 15 nt, Human
uagcucucuaggccu

SEQ ID NO: 2643302 - RNA, 17 nt, Human
uagcucucuaggccucu

SEQ ID NO: 2643303 - RNA, 14 nt, Human
uacccaaacugcuu

SEQ ID NO: 2643304 - RNA, 15 nt, Human
uacccaaacugcuuu

SEQ ID NO: 2643305 - RNA, 16 nt, Human
uagaaauuaccugugg

SEQ ID NO: 2643306 - RNA, 18 nt, Human
uagaaauuaccuguggau

SEQ ID NO: 2643307 - RNA, 17 nt, Human
uacuuuagaagccugca

SEQ ID NO: 2643308 - RNA, 21 nt, Human
uacuuuagaagccugcauaau

SEQ ID NO: 2643309 - RNA, 14 nt, Human
uaauuguguggauu

SEQ ID NO: 2643310 - RNA, 20 nt, Human
uaauuguguggauucuuuaa

SEQ ID NO: 2643311 - RNA, 17 nt, Human
uaauuuguuuuggauau

SEQ ID NO: 2643312 - RNA, 13 nt, Human
uaagaaauagaau

SEQ ID NO: 2643313 - RNA, 21 nt, Human
uaacacagcauuguauaugug

SEQ ID NO: 2643314 - RNA, 21 nt, Human
uaacauucaggaauucuugga

SEQ ID NO: 2643315 - RNA, 15 nt, Human
uaacaggccaaagag

SEQ ID NO: 2643316 - RNA, 17 nt, Human
uaacugccguaauuuaa

SEQ ID NO: 2643317 - RNA, 15 nt, Human
uaacuguaaagaugu

SEQ ID NO: 2643318 - RNA, 23 nt, Human
uaacuguaaagauguuuauuuca

SEQ ID NO: 2643319 - RNA, 15 nt, Human
uaaacaacagcugaa

SEQ ID NO: 2643320 - RNA, 18 nt, Human
uaaacaacagcugaagca

SEQ ID NO: 2643321 - RNA, 23 nt, Human
uaaaaauggcaggggguggaauu

SEQ ID NO: 2643322 - RNA, 14 nt, Human
uaaaagccugcuca

SEQ ID NO: 2643323 - RNA, 12 nt, Human
uaaaagccugcu

SEQ ID NO: 2643324 - RNA, 15 nt, Human
uaaaaaaaagaugaa

SEQ ID NO: 2643325 - RNA, 20 nt, Human
guuuagauuuaugguuguua

SEQ ID NO: 2643326 - RNA, 21 nt, Human
ucaacggaaagugcugucuua

SEQ ID NO: 2643327 - RNA, 12 nt, Human
ucacucugggcu

SEQ ID NO: 2643328 - RNA, 13 nt, Human
ucacucugggcug

SEQ ID NO: 2643329 - RNA, 20 nt, Human
ucagagugacuacacacagu

SEQ ID NO: 2643330 - RNA, 23 nt, Human
uccccgauaccaugcuguaagga

SEQ ID NO: 2643331 - RNA, 15 nt, Human
ucggaaaucuuaaac

SEQ ID NO: 2643332 - RNA, 12 nt, Human
ucuuuucuuuac

SEQ ID NO: 2643333 - RNA, 16 nt, Human
ugaaagcugauuuuuu

SEQ ID NO: 2643334 - RNA, 18 nt, Human
ucuguguuuugaaagaau

SEQ ID NO: 2643335 - RNA, 13 nt, Human
uggaggccccugg

SEQ ID NO: 2643336 - RNA, 16 nt, Human
uggaggccccuggagc

SEQ ID NO: 2643337 - RNA, 17 nt, Human
uggaggccccuggagcc

SEQ ID NO: 2643338 - RNA, 20 nt, Human
uggaggccccuggagccaga

SEQ ID NO: 2643339 - RNA, 21 nt, Human
uggcacugguagguugggaca

SEQ ID NO: 2643340 - RNA, 22 nt, Human
uggcacugguagguugggacac

SEQ ID NO: 2643341 - RNA, 15 nt, Human
uggaugcccagagga

SEQ ID NO: 2643342 - RNA, 18 nt, Human
ugcagcaaacacuccacc

SEQ ID NO: 2643343 - RNA, 19 nt, Human
ugcagcaaacacuccaccc

SEQ ID NO: 2643344 - RNA, 22 nt, Human
ugcagcaaacacuccacccucc

SEQ ID NO: 2643345 - RNA, 21 nt, Human
uguuuacaaaaauuucuguaa

SEQ ID NO: 2643346 - RNA, 16 nt, Human
uguguuugcagccugc

SEQ ID NO: 2643347 - RNA, 16 nt, Human
uguacuaacuagcauu

SEQ ID NO: 2643348 - RNA, 16 nt, Human
uguaacguggcacugg

SEQ ID NO: 2643349 - RNA, 14 nt, Human
ugguagguugggac

SEQ ID NO: 2643350 - RNA, 18 nt, Human
ugguagguugggacacca

SEQ ID NO: 2643351 - RNA, 21 nt, Human
ugguagguugggacaccaggg

SEQ ID NO: 2643352 - RNA, 21 nt, Human
ugugaauaccugcucacguca

SEQ ID NO: 2643353 - RNA, 13 nt, Human
ugugcaauagaag

SEQ ID NO: 2643354 - RNA, 16 nt, Human
ugugcaauagaaggug

SEQ ID NO: 2643355 - RNA, 17 nt, Human
uguccccacccuccacu

SEQ ID NO: 2643356 - RNA, 18 nt, Human
uguccccacccuccacuc

SEQ ID NO: 2643357 - RNA, 19 nt, Human
uguccccacccuccacuca

SEQ ID NO: 2643358 - RNA, 22 nt, Human
uguccccacccuccacucagcu

SEQ ID NO: 2643359 - RNA, 14 nt, Human
uguguacucugucc

SEQ ID NO: 2643360 - RNA, 14 nt, Human
uugaaagaauagaa

SEQ ID NO: 2643361 - RNA, 15 nt, Human
uucuauuuuuuguuu

SEQ ID NO: 2643362 - RNA, 23 nt, Human
uucuauuuuuuguuuuguuuccu

SEQ ID NO: 2643363 - RNA, 18 nt, Human
uuccuagcugugugaaua

SEQ ID NO: 2643364 - RNA, 23 nt, Human
uuccuuuccuguguguacucugu

SEQ ID NO: 2643365 - RNA, 14 nt, Human
uuccauuuuccccc

SEQ ID NO: 2643366 - RNA, 16 nt, Human
uuccauuuucccccac

SEQ ID NO: 2643367 - RNA, 18 nt, Human
uuccauuuucccccacua

SEQ ID NO: 2643368 - RNA, 16 nt, Human
uucaugacagccucca

SEQ ID NO: 2643369 - RNA, 15 nt, Human
uucaugauuagaaau

SEQ ID NO: 2643370 - RNA, 23 nt, Human
uucaugauuagaaauuaccugug

SEQ ID NO: 2643371 - RNA, 15 nt, Human
uucaugacagccucc

SEQ ID NO: 2643372 - RNA, 22 nt, Human
uucaacaaagaaacaaagaugu

SEQ ID NO: 2643373 - RNA, 21 nt, Human
uucaacaaagaaacaaagaug

SEQ ID NO: 2643374 - RNA, 17 nt, Human
uuacuaaaaaaaagaug

SEQ ID NO: 2643375 - RNA, 18 nt, Human
uuacuaaaaaaaagauga

SEQ ID NO: 2643376 - RNA, 18 nt, Human
uuuacuuuagaagccugc

SEQ ID NO: 2643377 - RNA, 14 nt, Human
uuuagaagccugca

SEQ ID NO: 2643378 - RNA, 22 nt, Human
uuuauaaaaguguucauuguuu

SEQ ID NO: 2643379 - RNA, 23 nt, Human
uuuagaaaaaauggaugcccaga

SEQ ID NO: 2643380 - RNA, 22 nt, Human
uuucagagugacuacacacagu

SEQ ID NO: 2643381 - RNA, 19 nt, Human
uuucaggcauuggauauuu

SEQ ID NO: 2643382 - RNA, 14 nt, Human
uuugauacauuuuu

SEQ ID NO: 2643383 - RNA, 12 nt, Human
uuuugaaagaau

SEQ ID NO: 2643384 - RNA, 15 nt, Human papillomavirus type 18
gagacagcacaggca

SEQ ID NO: 2643385 - RNA, 12 nt, Human papillomavirus type 18
gugaagccagaa

SEQ ID NO: 2643386 - RNA, 19 nt, Human papillomavirus type 18
caguguauuguacauugua

SEQ ID NO: 2643387 - RNA, 13 nt, Human papillomavirus type 18
guguuuguauguc

SEQ ID NO: 2643388 - RNA, 17 nt, Human papillomavirus type 18
aaaggcggcuguuuaca

SEQ ID NO: 2643389 - RNA, 16 nt, Human papillomavirus type 18
ugaacacccuguccuu

SEQ ID NO: 2643390 - RNA, 21 nt, Human papillomavirus type 18
gcagagcuagagacagcacag

SEQ ID NO: 2643391 - RNA, 16 nt, Human papillomavirus type 18
augguaucccaccgug

SEQ ID NO: 2643392 - RNA, 16 nt, Human papillomavirus type 18
auugauacacaaggaa

SEQ ID NO: 2643393 - RNA, 11 nt, Human papillomavirus type 18
uauugcccaug

SEQ ID NO: 2643394 - RNA, 19 nt, Human papillomavirus type 18
cagaugacgaggacgaaaa

SEQ ID NO: 2643395 - RNA, 13 nt, Human papillomavirus type 18
auggcaacaaaga

SEQ ID NO: 2643396 - RNA, 20 nt, Human papillomavirus type 18
aaacaggaauacugacugua

SEQ ID NO: 2643397 - RNA, 20 nt, Human papillomavirus type 18
guguguauauauauauacau

SEQ ID NO: 2643398 - RNA, 18 nt, Human papillomavirus type 18
ggcagagcuagagacagc

SEQ ID NO: 2643399 - RNA, 19 nt, Human papillomavirus type 18
aaguauauuuugauggcaa

SEQ ID NO: 2643400 - RNA, 17 nt, Human papillomavirus type 18
guccacaaugaugcaca

SEQ ID NO: 2643401 - RNA, 13 nt, Human papillomavirus type 18
accuucgagcauu

SEQ ID NO: 2643402 - RNA, 12 nt, Human papillomavirus type 18
uguauguccugu

SEQ ID NO: 2643403 - RNA, 19 nt, Human papillomavirus type 18
gcagaaaaaggcaaaaagg

SEQ ID NO: 2643404 - RNA, 18 nt, Human papillomavirus type 18
uuaaauacuguugcaauu

SEQ ID NO: 2643405 - RNA, 20 nt, Human papillomavirus type 18
uugcuuuuguguaugcaugu

SEQ ID NO: 2643406 - RNA, 12 nt, Human papillomavirus type 18
guguaugcaugu

SEQ ID NO: 2643407 - RNA, 21 nt, Human papillomavirus type 18
ggcugauccagaagguacaga

SEQ ID NO: 2643408 - RNA, 17 nt, Human papillomavirus type 18
ugccaucugucuguaug

SEQ ID NO: 2643409 - RNA, 20 nt, Human papillomavirus type 18
uguuacuauugcauauacau

SEQ ID NO: 2643410 - RNA, 14 nt, Human papillomavirus type 18
ggaggcagcacaga

SEQ ID NO: 2643411 - RNA, 18 nt, Human papillomavirus type 18
ccuuacagcauccauuuu

SEQ ID NO: 2643412 - RNA, 23 nt, Human papillomavirus type 18
gucuguaugugugcguaugcaug

SEQ ID NO: 2643413 - RNA, 17 nt, Human papillomavirus type 18
cacauaaagcuauugaa

SEQ ID NO: 2643414 - RNA, 19 nt, Human papillomavirus type 18
uggcuuaugucugugguuu

SEQ ID NO: 2643415 - RNA, 19 nt, Human papillomavirus type 18
guuuuauguacaagcuauu

SEQ ID NO: 2643416 - RNA, 16 nt, Human papillomavirus type 18
uuuagguguuggccuu

SEQ ID NO: 2643417 - RNA, 13 nt, Human papillomavirus type 18
agagacagcacag

SEQ ID NO: 2643418 - RNA, 17 nt, Human papillomavirus type 18
gguuguuguuguauguu

SEQ ID NO: 2643419 - RNA, 18 nt, Human papillomavirus type 18
aaauaucuuuaaauagug

SEQ ID NO: 2643420 - RNA, 21 nt, Human papillomavirus type 18
guaacugacuuauauaaaaca

SEQ ID NO: 2643421 - RNA, 21 nt, Human papillomavirus type 18
auauugcaauggucaagccuu

SEQ ID NO: 2643422 - RNA, 21 nt, Human papillomavirus type 18
ugaugcacaaguguugcaugu

SEQ ID NO: 2643423 - RNA, 15 nt, Human papillomavirus type 18
ggagcggcuggaggu

SEQ ID NO: 2643424 - RNA, 17 nt, Human papillomavirus type 18
cuagauuauuaacuguu

SEQ ID NO: 2643425 - RNA, 11 nt, Human papillomavirus type 18
guaauaaaagu

SEQ ID NO: 2643426 - RNA, 15 nt, Human papillomavirus type 18
cguuuagugugggcc

SEQ ID NO: 2643427 - RNA, 14 nt, Human papillomavirus type 18
gcaacagacacagg

SEQ ID NO: 2643428 - RNA, 17 nt, Human papillomavirus type 18
uagaguauuuagggugc

SEQ ID NO: 2643429 - RNA, 14 nt, Human papillomavirus type 18
caugcuauauuguc

SEQ ID NO: 2643430 - RNA, 16 nt, Human papillomavirus type 18
caucugucuguaugug

SEQ ID NO: 2643431 - RNA, 14 nt, Human papillomavirus type 18
ggcagcacagaaaa

SEQ ID NO: 2643432 - RNA, 18 nt, Human papillomavirus type 18
aagguggagggcaccacg

SEQ ID NO: 2643433 - RNA, 16 nt, Human papillomavirus type 18
uacaguguauuguaca

SEQ ID NO: 2643434 - RNA, 17 nt, Human papillomavirus type 18
gcuuuuguguaugcaug

SEQ ID NO: 2643435 - RNA, 13 nt, Human papillomavirus type 18
augcgcaggaggu

SEQ ID NO: 2643436 - RNA, 18 nt, Human papillomavirus type 18
agauaguguacaaauauu

SEQ ID NO: 2643437 - RNA, 13 nt, Human papillomavirus type 18
ugugaacaggcag

SEQ ID NO: 2643438 - RNA, 19 nt, Human papillomavirus type 18
agcuagagacagcacaggc

SEQ ID NO: 2643439 - RNA, 14 nt, Human papillomavirus type 18
aggcagagcuagag

SEQ ID NO: 2643440 - RNA, 15 nt, Human papillomavirus type 18
aguaagcaacaaugg

SEQ ID NO: 2643441 - RNA, 14 nt, Human papillomavirus type 18
gcugauccagaagg

SEQ ID NO: 2643442 - RNA, 23 nt, Human papillomavirus type 18
gacacagggucggauaugguaga

SEQ ID NO: 2643443 - RNA, 23 nt, Human papillomavirus type 18
ugcgaggaacuauggaauacaga

SEQ ID NO: 2643444 - RNA, 16 nt, Human papillomavirus type 18
gcagcucuagauuauu

SEQ ID NO: 2643445 - RNA, 15 nt, Human papillomavirus type 18
aaaaguaaagcacau

SEQ ID NO: 2643446 - RNA, 20 nt, Human papillomavirus type 18
agguccacaaugaugcacaa

SEQ ID NO: 2643447 - RNA, 16 nt, Human papillomavirus type 18
gaaccacaacgucaca

SEQ ID NO: 2643448 - RNA, 12 nt, Human papillomavirus type 18
uuaaauacuguu

SEQ ID NO: 2643449 - RNA, 21 nt, Human papillomavirus type 18
uacuauugcauauacaugcua

SEQ ID NO: 2643450 - RNA, 20 nt, Human papillomavirus type 18
agcagauaaaauauugcaau

SEQ ID NO: 2643451 - RNA, 15 nt, Human papillomavirus type 18
guuuguauguccugu

SEQ ID NO: 2643452 - RNA, 15 nt, Human papillomavirus type 18
cuagagacagcacag

SEQ ID NO: 2643453 - RNA, 13 nt, Human papillomavirus type 18
caugggacaaaac

SEQ ID NO: 2643454 - RNA, 17 nt, Human papillomavirus type 18
aaugcaacagacacagg

SEQ ID NO: 2643455 - RNA, 14 nt, Human papillomavirus type 18
gucuguaugugugc

SEQ ID NO: 2643456 - RNA, 14 nt, Human papillomavirus type 18
aguuugcaggaggc

SEQ ID NO: 2643457 - RNA, 16 nt, Human papillomavirus type 18
caacuguauuuguguu

SEQ ID NO: 2643458 - RNA, 22 nt, Human papillomavirus type 18
ugccaucugucuguaugugugc

SEQ ID NO: 2643459 - RNA, 13 nt, Human papillomavirus type 18
ugugcguaugcau

SEQ ID NO: 2643460 - RNA, 15 nt, Human papillomavirus type 18
uccaauacaguggug

SEQ ID NO: 2643461 - RNA, 14 nt, Human papillomavirus type 18
aaaugcaacagaca

SEQ ID NO: 2643462 - RNA, 15 nt, Human papillomavirus type 18
agacggggagggcac

SEQ ID NO: 2643463 - RNA, 22 nt, Human papillomavirus type 18
aggaacauuuugugaacaggca

SEQ ID NO: 2643464 - RNA, 14 nt, Human papillomavirus type 18
ugggauacaugaca

SEQ ID NO: 2643465 - RNA, 20 nt, Human papillomavirus type 18
auacagaaccuacucacugc

SEQ ID NO: 2643466 - RNA, 21 nt, Human papillomavirus type 18
cagagcuagagacagcacagg

SEQ ID NO: 2643467 - RNA, 18 nt, Human papillomavirus type 18
uaucauccaccuggcauu

SEQ ID NO: 2643468 - RNA, 12 nt, Human papillomavirus type 18
ugcuuuuuguau

SEQ ID NO: 2643469 - RNA, 13 nt, Human papillomavirus type 18
gaggcagcacaga

SEQ ID NO: 2643470 - RNA, 19 nt, Human papillomavirus type 18
ccuucgagcauuccagcag

SEQ ID NO: 2643471 - RNA, 15 nt, Human papillomavirus type 18
aggguacauuccauu

SEQ ID NO: 2643472 - RNA, 18 nt, Human papillomavirus type 18
acaacuguauuuguguuu

SEQ ID NO: 2643473 - RNA, 15 nt, Human papillomavirus type 18
uaagcgacucagagg

SEQ ID NO: 2643474 - RNA, 15 nt, Human papillomavirus type 18
uuacaguaauuguau

SEQ ID NO: 2643475 - RNA, 14 nt, Human papillomavirus type 18
auaugacugaugca

SEQ ID NO: 2643476 - RNA, 12 nt, Human papillomavirus type 18
agcauuccagca

SEQ ID NO: 2643477 - RNA, 15 nt, Human papillomavirus type 18
cauuuugcugugcaa

SEQ ID NO: 2643478 - RNA, 16 nt, Human papillomavirus type 18
ugcauaccaauauaga

SEQ ID NO: 2643479 - RNA, 14 nt, Human papillomavirus type 18
acaguaauuguaua

SEQ ID NO: 2643480 - RNA, 16 nt, Human papillomavirus type 18
uccuaagguuucugca

SEQ ID NO: 2643481 - RNA, 19 nt, Human papillomavirus type 18
ugaaauuccgguugaccuu

SEQ ID NO: 2643482 - RNA, 16 nt, Human papillomavirus type 18
uagacagccaaauaca

SEQ ID NO: 2643483 - RNA, 21 nt, Human papillomavirus type 18
auagguuguuuuauacagugu

SEQ ID NO: 2643484 - RNA, 22 nt, Human papillomavirus type 18
cuuagugggcauccauuuuaua

SEQ ID NO: 2643485 - RNA, 19 nt, Human papillomavirus type 18
guacgcuggcacuauugca

SEQ ID NO: 2643486 - RNA, 16 nt, Human papillomavirus type 18
uggugggauacaugac

SEQ ID NO: 2643487 - RNA, 15 nt, Human papillomavirus type 18
gguuauugaaccugu

SEQ ID NO: 2643488 - RNA, 16 nt, Human papillomavirus type 18
cugauacuaguauuua

SEQ ID NO: 2643489 - RNA, 14 nt, Human papillomavirus type 18
uguauuguacauug

SEQ ID NO: 2643490 - RNA, 16 nt, Human papillomavirus type 18
cagacggggagggcac

SEQ ID NO: 2643491 - RNA, 21 nt, Human papillomavirus type 18
uucacaguauauguauuuugu

SEQ ID NO: 2643492 - RNA, 18 nt, Human papillomavirus type 18
gaaaaugcaacagacaca

SEQ ID NO: 2643493 - RNA, 16 nt, Human papillomavirus type 18
agcuagagacagcaca

SEQ ID NO: 2643494 - RNA, 15 nt, Human papillomavirus type 18
gacaaaaaaacagga

SEQ ID NO: 2643495 - RNA, 20 nt, Human papillomavirus type 18
cagcaagggaacauggcaua

SEQ ID NO: 2643496 - RNA, 15 nt, Human papillomavirus type 18
acgucuaauguuucu

SEQ ID NO: 2643497 - RNA, 22 nt, Human papillomavirus type 18
gacagcacaggcauuguuccau

SEQ ID NO: 2643498 - RNA, 22 nt, Human papillomavirus type 18
cugcauaccaauauagaguauu

SEQ ID NO: 2643499 - RNA, 19 nt, Human papillomavirus type 18
ccugauacuaguauuuaua

SEQ ID NO: 2643500 - RNA, 20 nt, Human papillomavirus type 18
gcauuuagagccccaaaaug

SEQ ID NO: 2643501 - RNA, 19 nt, Human papillomavirus type 18
guguuuguauguccugugu

SEQ ID NO: 2643502 - RNA, 20 nt, Human papillomavirus type 18
aggauauuccuaagguuucu

SEQ ID NO: 2643503 - RNA, 16 nt, Human papillomavirus type 18
gaccacuauagagaua

SEQ ID NO: 2643504 - RNA, 13 nt, Human papillomavirus type 18
gaaagcucagcag

SEQ ID NO: 2643505 - RNA, 19 nt, Human papillomavirus type 18
uacacgucccccagugguu

SEQ ID NO: 2643506 - RNA, 12 nt, Human papillomavirus type 18
ccaauacagugg

SEQ ID NO: 2643507 - RNA, 20 nt, Human papillomavirus type 18
aaauguuuacgguacagauu

SEQ ID NO: 2643508 - RNA, 13 nt, Human papillomavirus type 18
cauagacagccaa

SEQ ID NO: 2643509 - RNA, 20 nt, Human papillomavirus type 18
uauauuuuguuuuauaccuu

SEQ ID NO: 2643510 - RNA, 17 nt, Human papillomavirus type 18
acuuauauaaaacaugu

SEQ ID NO: 2643511 - RNA, 16 nt, Human papillomavirus type 18
caguauuggcaacuaa

SEQ ID NO: 2643512 - RNA, 21 nt, Human papillomavirus type 18
cauagacagccaaauacagua

SEQ ID NO: 2643513 - RNA, 12 nt, Human papillomavirus type 18
augcaacagaca

SEQ ID NO: 2643514 - RNA, 16 nt, Human papillomavirus type 18
ugucuguaugugugcg

SEQ ID NO: 2643515 - RNA, 17 nt, Human papillomavirus type 18
uguaguaccaauauguu

SEQ ID NO: 2643516 - RNA, 23 nt, Human papillomavirus type 18
aaaguuugcaggaggcagcacag

SEQ ID NO: 2643517 - RNA, 20 nt, Human papillomavirus type 18
cagagcuagagacagcacag

SEQ ID NO: 2643518 - RNA, 16 nt, Human papillomavirus type 18
ccaugucccgcuuuug

SEQ ID NO: 2643519 - RNA, 15 nt, Human papillomavirus type 18
auuucaaaaaguaaa

SEQ ID NO: 2643520 - RNA, 22 nt, Human papillomavirus type 18
gaaaaugcaacagacacagggu

SEQ ID NO: 2643521 - RNA, 18 nt, Human papillomavirus type 18
cacaacguuuaguguggg

SEQ ID NO: 2643522 - RNA, 16 nt, Human papillomavirus type 18
gacgaaaaugcaacag

SEQ ID NO: 2643523 - RNA, 17 nt, Human papillomavirus type 18
uaauaacguccccugcc

SEQ ID NO: 2643524 - RNA, 20 nt, Human papillomavirus type 18
uaaaacgaaaguuugcagga

SEQ ID NO: 2643525 - RNA, 13 nt, Human papillomavirus type 18
guuugcaggaggc

SEQ ID NO: 2643526 - RNA, 22 nt, Human papillomavirus type 18
ugugacucccacaagcauauuu

SEQ ID NO: 2643527 - RNA, 18 nt, Human papillomavirus type 18
acauuuugugaacaggca

SEQ ID NO: 2643528 - RNA, 22 nt, Human papillomavirus type 18
acugaugcaggaacaugggaca

SEQ ID NO: 2643529 - RNA, 20 nt, Human papillomavirus type 18
uggcauuggacaggugcagg

SEQ ID NO: 2643530 - RNA, 21 nt, Human papillomavirus type 18
uuauugauacacaaggaacau

SEQ ID NO: 2643531 - RNA, 13 nt, Human papillomavirus type 18
uacgguacagauu

SEQ ID NO: 2643532 - RNA, 18 nt, Human papillomavirus type 18
ccuacaauccuccauuuu

SEQ ID NO: 2643533 - RNA, 14 nt, Human papillomavirus type 18
gcuauugaacugca

SEQ ID NO: 2643534 - RNA, 12 nt, Human papillomavirus type 18
gcugauccagaa

SEQ ID NO: 2643535 - RNA, 12 nt, Human papillomavirus type 18
acuggcaguggu

SEQ ID NO: 2643536 - RNA, 22 nt, Human papillomavirus type 18
ugugguaauaacguccccugcc

SEQ ID NO: 2643537 - RNA, 21 nt, Human papillomavirus type 18
uggacaggugcaggcaaugaa

SEQ ID NO: 2643538 - RNA, 21 nt, Human papillomavirus type 18
agguuguuuuauacaguguau

SEQ ID NO: 2643539 - RNA, 13 nt, Human papillomavirus type 18
uguaugcauguau

SEQ ID NO: 2643540 - RNA, 15 nt, Human papillomavirus type 18
cuuuuguguaugcau

SEQ ID NO: 2643541 - RNA, 18 nt, Human papillomavirus type 18
auacaucuauuguugugu

SEQ ID NO: 2643542 - RNA, 15 nt, Human papillomavirus type 18
uggaccuaaggcaac

SEQ ID NO: 2643543 - RNA, 22 nt, Human papillomavirus type 18
agggaacauggcauacagacau

SEQ ID NO: 2643544 - RNA, 19 nt, Human papillomavirus type 18
guccacgguuacaagaaau

SEQ ID NO: 2643545 - RNA, 16 nt, Human papillomavirus type 18
cuauauauuguccugu

SEQ ID NO: 2643546 - RNA, 18 nt, Human papillomavirus type 18
cauguuacuauugcauau

SEQ ID NO: 2643547 - RNA, 22 nt, Human papillomavirus type 18
ugggcguuccaauacaguggug

SEQ ID NO: 2643548 - RNA, 18 nt, Human papillomavirus type 18
acaccuuacagcauccau

SEQ ID NO: 2643549 - RNA, 13 nt, Human papillomavirus type 18
acagaaaacaguc

SEQ ID NO: 2643550 - RNA, 14 nt, Human papillomavirus type 18
acguccccugccac

SEQ ID NO: 2643551 - RNA, 17 nt, Human papillomavirus type 18
auccuacaauccuccau

SEQ ID NO: 2643552 - RNA, 13 nt, Human papillomavirus type 18
ccaauacaguggu

SEQ ID NO: 2643553 - RNA, 21 nt, Human papillomavirus type 18
uccccugccacagcauucaca

SEQ ID NO: 2643554 - RNA, 20 nt, Human papillomavirus type 18
uaugcauggaccuaaggcaa

SEQ ID NO: 2643555 - RNA, 19 nt, Human papillomavirus type 18
cgaggaacuauggaauaca

SEQ ID NO: 2643556 - RNA, 12 nt, Human papillomavirus type 18
auccauauuuua

SEQ ID NO: 2643557 - RNA, 16 nt, Human papillomavirus type 18
auguagcaugggacag

SEQ ID NO: 2643558 - RNA, 21 nt, Human papillomavirus type 18
auauguuuugugguucugugu

SEQ ID NO: 2643559 - RNA, 13 nt, Human papillomavirus type 18
augcauguaugug

SEQ ID NO: 2643560 - RNA, 20 nt, Human papillomavirus type 18
uguaaacaaucugguacaug

SEQ ID NO: 2643561 - RNA, 14 nt, Human papillomavirus type 18
ucuauuguuguguu

SEQ ID NO: 2643562 - RNA, 15 nt, Human papillomavirus type 18
caguguauuguacau

SEQ ID NO: 2643563 - RNA, 20 nt, Human papillomavirus type 18
ugcaggugguggcaauaagc

SEQ ID NO: 2643564 - RNA, 21 nt, Human papillomavirus type 18
gcauauuuuaucaugcuggca

SEQ ID NO: 2643565 - RNA, 15 nt, Human papillomavirus type 18
caggcagagcuagag

SEQ ID NO: 2643566 - RNA, 22 nt, Human papillomavirus type 18
gccaugucccgcuuuugccauc

SEQ ID NO: 2643567 - RNA, 19 nt, Human papillomavirus type 18
augcaggaacaugggacaa

SEQ ID NO: 2643568 - RNA, 23 nt, Human papillomavirus type 18
ugcauguaugugugcugccaugu

SEQ ID NO: 2643569 - RNA, 17 nt, Human papillomavirus type 18
gcuauauauuguccugu

SEQ ID NO: 2643570 - RNA, 21 nt, Human papillomavirus type 18
uggcugauccagaagguacag

SEQ ID NO: 2643571 - RNA, 17 nt, Human papillomavirus type 18
ccauuuugcugugcaac

SEQ ID NO: 2643572 - RNA, 15 nt, Human papillomavirus type 18
cacacaauguugugu

SEQ ID NO: 2643573 - RNA, 20 nt, Human papillomavirus type 18
gcagagcuagagacagcaca

SEQ ID NO: 2643574 - RNA, 14 nt, Human papillomavirus type 18
guauuguacauugu

SEQ ID NO: 2643575 - RNA, 16 nt, Human papillomavirus type 18
uuuguauuuuuguaau

SEQ ID NO: 2643576 - RNA, 12 nt, Human papillomavirus type 18
guguauauugug

SEQ ID NO: 2643577 - RNA, 11 nt, Human papillomavirus type 18
guauguccugu

SEQ ID NO: 2643578 - RNA, 16 nt, Human papillomavirus type 18
auggcaacaaagacaa

SEQ ID NO: 2643579 - RNA, 13 nt, Human papillomavirus type 18
aguaagcaacaau

SEQ ID NO: 2643580 - RNA, 21 nt, Human papillomavirus type 18
ccaugucccgcuuuugccauc

SEQ ID NO: 2643581 - RNA, 14 nt, Human papillomavirus type 18
uaccaauauguuau

SEQ ID NO: 2643582 - RNA, 20 nt, Human papillomavirus type 18
uacuguugcaauuccagaua

SEQ ID NO: 2643583 - RNA, 13 nt, Human papillomavirus type 18
acgaggacgaaaa

SEQ ID NO: 2643584 - RNA, 14 nt, Human papillomavirus type 18
uauuguccuguauu

SEQ ID NO: 2643585 - RNA, 14 nt, Human papillomavirus type 18
acuggcagugguac

SEQ ID NO: 2643586 - RNA, 14 nt, Human papillomavirus type 18
caguacgcuggcac

SEQ ID NO: 2643587 - RNA, 16 nt, Human papillomavirus type 18
cuagagacagcacagg

SEQ ID NO: 2643588 - RNA, 18 nt, Human papillomavirus type 18
uguugguaauccauauuu

SEQ ID NO: 2643589 - RNA, 13 nt, Human papillomavirus type 18
ccuaagguuucug

SEQ ID NO: 2643590 - RNA, 23 nt, Human papillomavirus type 18
ccagcaguaagcaacaauggcug

SEQ ID NO: 2643591 - RNA, 13 nt, Human papillomavirus type 18
uggaaauuggccg

SEQ ID NO: 2643592 - RNA, 18 nt, Human papillomavirus type 18
uucugcauaccaauauag

SEQ ID NO: 2643593 - RNA, 16 nt, Human papillomavirus type 18
guuagcagauaaaaua

SEQ ID NO: 2643594 - RNA, 14 nt, Human papillomavirus type 18
ugcuauauugucuu

SEQ ID NO: 2643595 - RNA, 23 nt, Human papillomavirus type 18
ggcacggguuguaacggcugguu

SEQ ID NO: 2643596 - RNA, 18 nt, Human papillomavirus type 18
aggaggcagcacagaaaa

SEQ ID NO: 2643597 - RNA, 16 nt, Human papillomavirus type 18
uucacaguauauguau

SEQ ID NO: 2643598 - RNA, 21 nt, Human papillomavirus type 18
cagauaaaauauugcaauggu

SEQ ID NO: 2643599 - RNA, 23 nt, Human papillomavirus type 18
agaacaaaauuuuuaaauacugu

SEQ ID NO: 2643600 - RNA, 15 nt, Human papillomavirus type 18
gaggauuggacacug

SEQ ID NO: 2643601 - RNA, 17 nt, Human papillomavirus type 18
uuguaugauugcauugu

SEQ ID NO: 2643602 - RNA, 13 nt, Human papillomavirus type 18
uuguauauuuugu

SEQ ID NO: 2643603 - RNA, 19 nt, Human papillomavirus type 18
ggcuggagguggauacaga

SEQ ID NO: 2643604 - RNA, 16 nt, Human papillomavirus type 18
uaaacaaucugguaca

SEQ ID NO: 2643605 - RNA, 19 nt, Human papillomavirus type 18
cuguaacauaccauaguga

SEQ ID NO: 2643606 - RNA, 23 nt, Human papillomavirus type 18
uagugaguaacaacuguauuugu

SEQ ID NO: 2643607 - RNA, 13 nt, Human papillomavirus type 18
ucccccagugguu

SEQ ID NO: 2643608 - RNA, 18 nt, Human papillomavirus type 18
gaacauggcauacagaca

SEQ ID NO: 2643609 - RNA, 16 nt, Human papillomavirus type 18
gagacagcacaggcau

SEQ ID NO: 2643610 - RNA, 18 nt, Human papillomavirus type 18
cagcaagggaacauggca

SEQ ID NO: 2643611 - RNA, 13 nt, Human papillomavirus type 18
auuuuguuuuaua

SEQ ID NO: 2643612 - RNA, 20 nt, Human papillomavirus type 18
uagugaguaacaacuguauu

SEQ ID NO: 2643613 - RNA, 21 nt, Human papillomavirus type 18
caaauauuggugggauacaug

SEQ ID NO: 2643614 - RNA, 15 nt, Human papillomavirus type 18
auuggcaacuaauac

SEQ ID NO: 2643615 - RNA, 22 nt, Human papillomavirus type 18
guaaagacauagacagccaaau

SEQ ID NO: 2643616 - RNA, 17 nt, Human papillomavirus type 18
agggcacggguuguaac

SEQ ID NO: 2643617 - RNA, 17 nt, Human papillomavirus type 18
cuauauauuguccugua

SEQ ID NO: 2643618 - RNA, 21 nt, Human papillomavirus type 18
accgaggauuggacacugcaa

SEQ ID NO: 2643619 - RNA, 11 nt, Human papillomavirus type 18
ccaauacagug

SEQ ID NO: 2643620 - RNA, 15 nt, Human papillomavirus type 18
acaaaaaaacaggag

SEQ ID NO: 2643621 - RNA, 19 nt, Human papillomavirus type 18
auauuuuaggguuccugca

SEQ ID NO: 2643622 - RNA, 22 nt, Human papillomavirus type 18
uauagguuguuuuauacagugu

SEQ ID NO: 2643623 - RNA, 22 nt, Human papillomavirus type 18
augcauguaugugugcugccau

SEQ ID NO: 2643624 - RNA, 23 nt, Human papillomavirus type 18
uccguggugugcaucccagcagu

SEQ ID NO: 2643625 - RNA, 15 nt, Human papillomavirus type 18
auauaaaacauguaa

SEQ ID NO: 2643626 - RNA, 14 nt, Human papillomavirus type 18
uguauuauaugacu

SEQ ID NO: 2643627 - RNA, 15 nt, Human papillomavirus type 18
ugugguucugugugu

SEQ ID NO: 2643628 - RNA, 22 nt, Human papillomavirus type 18
ggcagcacagaaaacaguccau

SEQ ID NO: 2643629 - RNA, 18 nt, Human papillomavirus type 18
uagguacuggcaguggua

SEQ ID NO: 2643630 - RNA, 14 nt, Human papillomavirus type 18
cugauacuaguauu

SEQ ID NO: 2643631 - RNA, 19 nt, Human papillomavirus type 18
ucuauuguuguguuuguau

SEQ ID NO: 2643632 - RNA, 13 nt, Human papillomavirus type 18
cacaguauaugua

SEQ ID NO: 2643633 - RNA, 14 nt, Human papillomavirus type 18
cuguaugugugcgu

SEQ ID NO: 2643634 - RNA, 19 nt, Human papillomavirus type 18
gagcauuccagcagcuguu

SEQ ID NO: 2643635 - RNA, 15 nt, Human papillomavirus type 18
uuuauacaguguauu

SEQ ID NO: 2643636 - RNA, 20 nt, Human papillomavirus type 18
caaguauauuuugauggcaa

SEQ ID NO: 2643637 - RNA, 14 nt, Human papillomavirus type 18
ccugcagguggugg

SEQ ID NO: 2643638 - RNA, 16 nt, Human papillomavirus type 18
auauucuuugcagcaa

SEQ ID NO: 2643639 - RNA, 16 nt, Human papillomavirus type 18
acaauguaauacauau

SEQ ID NO: 2643640 - RNA, 18 nt, Human papillomavirus type 18
auggcugauccagaaggu

SEQ ID NO: 2643641 - RNA, 14 nt, Human papillomavirus type 18
uuaccugauacuag

SEQ ID NO: 2643642 - RNA, 17 nt, Human papillomavirus type 18
caggaggcagcacagaa

SEQ ID NO: 2643643 - RNA, 22 nt, Human papillomavirus type 18
ugugcaucccagcaguaagcaa

SEQ ID NO: 2643644 - RNA, 18 nt, Human papillomavirus type 18
uugcauguuuuaaaacga

SEQ ID NO: 2643645 - RNA, 12 nt, Human papillomavirus type 18
gccaaauacagu

SEQ ID NO: 2643646 - RNA, 16 nt, Human papillomavirus type 18
ugcauguaugugugcu

SEQ ID NO: 2643647 - RNA, 17 nt, Human papillomavirus type 18
uucacaguauauguauu

SEQ ID NO: 2643648 - RNA, 14 nt, Human papillomavirus type 18
uaggguuccugcag

SEQ ID NO: 2643649 - RNA, 14 nt, Human papillomavirus type 18
cuguguuuguguuu

SEQ ID NO: 2643650 - RNA, 19 nt, Human papillomavirus type 18
uaguagaaagcucagcaga

SEQ ID NO: 2643651 - RNA, 10 nt, Human papillomavirus type 18
uuuguuguau

SEQ ID NO: 2643652 - RNA, 15 nt, Human papillomavirus type 18
caacauuuaccagcc

SEQ ID NO: 2643653 - RNA, 16 nt, Human papillomavirus type 18
gcaggaggcagcacag

SEQ ID NO: 2643654 - RNA, 17 nt, Human papillomavirus type 18
ucccgcuuuugccaucu

SEQ ID NO: 2643655 - RNA, 18 nt, Human papillomavirus type 18
ucacacaauguuguguau

SEQ ID NO: 2643656 - RNA, 22 nt, Human papillomavirus type 18
ugaaaaaacaggaauacugacu

SEQ ID NO: 2643657 - RNA, 18 nt, Human papillomavirus type 18
caauggcugauccagaag

SEQ ID NO: 2643658 - RNA, 13 nt, Human papillomavirus type 18
ugcaggaggcagc

SEQ ID NO: 2643659 - RNA, 13 nt, Human papillomavirus type 18
uuugugguucugu

SEQ ID NO: 2643660 - RNA, 21 nt, Human papillomavirus type 18
cugcaggugguggcaauaagc

SEQ ID NO: 2643661 - RNA, 15 nt, Human papillomavirus type 18
ucugguacaugucca

SEQ ID NO: 2643662 - RNA, 18 nt, Human papillomavirus type 18
gaacuauggaauacagaa

SEQ ID NO: 2643663 - RNA, 19 nt, Human papillomavirus type 18
acagaaccuacucacugcu

SEQ ID NO: 2643664 - RNA, 14 nt, Human papillomavirus type 18
guugggaaaaugca

SEQ ID NO: 2643665 - RNA, 20 nt, Human papillomavirus type 18
gguguuggccuuagugggca

SEQ ID NO: 2643666 - RNA, 23 nt, Human papillomavirus type 18
gugguggauguugguccuacacg

SEQ ID NO: 2643667 - RNA, 21 nt, Human papillomavirus type 18
uugggcuauauauuguccugu

SEQ ID NO: 2643668 - RNA, 17 nt, Human papillomavirus type 18
guuugcaggaggcagca

SEQ ID NO: 2643669 - RNA, 12 nt, Human papillomavirus type 18
gcgacucagagg

SEQ ID NO: 2643670 - RNA, 22 nt, Human papillomavirus type 18
cagagcuagagacagcacaggc

SEQ ID NO: 2643671 - RNA, 12 nt, Human papillomavirus type 18
ugcaggaggcag

SEQ ID NO: 2643672 - RNA, 15 nt, Human papillomavirus type 18
guacaggguacauuc

SEQ ID NO: 2643673 - RNA, 17 nt, Human papillomavirus type 18
ccgccacgucuaauguu

SEQ ID NO: 2643674 - RNA, 22 nt, Human papillomavirus type 18
cucccacaagcauauuuuauca

SEQ ID NO: 2643675 - RNA, 17 nt, Human papillomavirus type 18
uauaucauccaccuggc

SEQ ID NO: 2643676 - RNA, 14 nt, Human papillomavirus type 18
gagcuagagacagc

SEQ ID NO: 2643677 - RNA, 22 nt, Human papillomavirus type 18
accuucuaugucacgagcaauu

SEQ ID NO: 2643678 - RNA, 17 nt, Human papillomavirus type 18
agagacagcacaggcau

SEQ ID NO: 2643679 - RNA, 19 nt, Human papillomavirus type 18
uugcaggaggcagcacaga

SEQ ID NO: 2643680 - RNA, 18 nt, Human papillomavirus type 18
ggcaaaaaggcggcuguu

SEQ ID NO: 2643681 - RNA, 15 nt, Human papillomavirus type 18
aauacaguauuggca

SEQ ID NO: 2643682 - RNA, 22 nt, Human papillomavirus type 18
aaaguuugcaggaggcagcaca

SEQ ID NO: 2643683 - RNA, 22 nt, Human papillomavirus type 18
gaaaacaguccauuaggggagc

SEQ ID NO: 2643684 - RNA, 21 nt, Human papillomavirus type 18
auuuugugaacaggcagagcu

SEQ ID NO: 2643685 - RNA, 15 nt, Human papillomavirus type 18
uauugugguaauaac

SEQ ID NO: 2643686 - RNA, 21 nt, Human papillomavirus type 18
ggcguuccaauacaguggugg

SEQ ID NO: 2643687 - RNA, 13 nt, Human papillomavirus type 18
caggaacauggga

SEQ ID NO: 2643688 - RNA, 19 nt, Human papillomavirus type 18
gcaauuaagcgacucagag

SEQ ID NO: 2643689 - RNA, 13 nt, Human papillomavirus type 18
ugcaucccagcag

SEQ ID NO: 2643690 - RNA, 20 nt, Human papillomavirus type 18
uaauaacguccccugccaca

SEQ ID NO: 2643691 - RNA, 14 nt, Human papillomavirus type 18
caagggaacauggc

SEQ ID NO: 2643692 - RNA, 21 nt, Human papillomavirus type 18
acagaaaacaguccauuaggg

SEQ ID NO: 2643693 - RNA, 18 nt, Human papillomavirus type 18
cuuauuuuuuuauuuugc

SEQ ID NO: 2643694 - RNA, 15 nt, Human papillomavirus type 18
cuauagagauauauc

SEQ ID NO: 2643695 - RNA, 22 nt, Human papillomavirus type 18
acaguguauuguacauuguaua

SEQ ID NO: 2643696 - RNA, 22 nt, Human papillomavirus type 18
cuaauacguugggaaaaugcaa

SEQ ID NO: 2643697 - RNA, 22 nt, Human papillomavirus type 18
aguuugcaggaggcagcacaga

SEQ ID NO: 2643698 - RNA, 21 nt, Human papillomavirus type 18
ugcaucccagcaguaagcaac

SEQ ID NO: 2643699 - RNA, 11 nt, Human papillomavirus type 18
ccguggugugc

SEQ ID NO: 2643700 - RNA, 21 nt, Human papillomavirus type 18
uaacggcugguuuuauguaca

SEQ ID NO: 2643701 - RNA, 14 nt, Human papillomavirus type 18
ggccuuagugggca

SEQ ID NO: 2643702 - RNA, 18 nt, Human papillomavirus type 18
augugugcguaugcaugg

SEQ ID NO: 2643703 - RNA, 17 nt, Human papillomavirus type 18
gcuagagacagcacagg

SEQ ID NO: 2643704 - RNA, 17 nt, Human papillomavirus type 18
uaugcauguaugugugc

SEQ ID NO: 2643705 - RNA, 14 nt, Human papillomavirus type 18
guuguuuuauacag

SEQ ID NO: 2643706 - RNA, 15 nt, Human papillomavirus type 18
cuaagguuucugcau

SEQ ID NO: 2643707 - RNA, 22 nt, Human papillomavirus type 18
uaugugacucccacaagcauau

SEQ ID NO: 2643708 - RNA, 21 nt, Human papillomavirus type 18
uagugaguaacaacuguauuu

SEQ ID NO: 2643709 - RNA, 15 nt, Human papillomavirus type 18
cuauggaauacagaa

SEQ ID NO: 2643710 - RNA, 13 nt, Human papillomavirus type 18
aaacaguacaagu

SEQ ID NO: 2643711 - RNA, 14 nt, Human papillomavirus type 18
uuuguauguccugu

SEQ ID NO: 2643712 - RNA, 20 nt, Human papillomavirus type 18
acucccacaagcauauuuua

SEQ ID NO: 2643713 - RNA, 13 nt, Human papillomavirus type 18
ggagcggcuggag

SEQ ID NO: 2643714 - RNA, 19 nt, Human papillomavirus type 18
caggaggcagcacagaaaa

SEQ ID NO: 2643715 - RNA, 20 nt, Human papillomavirus type 18
auauuccuaagguuucugca

SEQ ID NO: 2643716 - RNA, 22 nt, Human papillomavirus type 18
agacgaccuucgagcauuccag

SEQ ID NO: 2643717 - RNA, 20 nt, Human papillomavirus type 18
cauagacagccaaauacagu

SEQ ID NO: 2643718 - RNA, 17 nt, Human papillomavirus type 18
cacugcuuuaaaaaagg

SEQ ID NO: 2643719 - RNA, 18 nt, Human papillomavirus type 18
aaggaacauuuugugaac

SEQ ID NO: 2643720 - RNA, 16 nt, Human papillomavirus type 18
auugcauuuagagccc

SEQ ID NO: 2643721 - RNA, 17 nt, Human papillomavirus type 18
gaguuaaucaucaacau

SEQ ID NO: 2643722 - RNA, 17 nt, Human papillomavirus type 18
uuguauguuacuauauu

SEQ ID NO: 2643723 - RNA, 20 nt, Human papillomavirus type 18
uuaugcuuuuuguauuuuug

SEQ ID NO: 2643724 - RNA, 20 nt, Human papillomavirus type 18
caagccuugguauauuuuug

SEQ ID NO: 2643725 - RNA, 18 nt, Human papillomavirus type 18
cugaugcaggaacauggg

SEQ ID NO: 2643726 - RNA, 13 nt, Human papillomavirus type 18
uacauaugcugua

SEQ ID NO: 2643727 - RNA, 19 nt, Human papillomavirus type 18
ggccugugcuggaguggaa

SEQ ID NO: 2643728 - RNA, 21 nt, Human papillomavirus type 18
gacugaugcaggaacauggga

SEQ ID NO: 2643729 - RNA, 21 nt, Human papillomavirus type 18
auuguuccaugcgcaggaggu

SEQ ID NO: 2643730 - RNA, 16 nt, Human papillomavirus type 18
ccuauguagcauggga

SEQ ID NO: 2643731 - RNA, 16 nt, Human papillomavirus type 18
uugcaagacauuguau

SEQ ID NO: 2643732 - RNA, 22 nt, Human papillomavirus type 18
auagugggcagaaaaaggcaaa

SEQ ID NO: 2643733 - RNA, 16 nt, Human papillomavirus type 18
agagacagcacaggca

SEQ ID NO: 2643734 - RNA, 20 nt, Human papillomavirus type 18
gggaacauggcauacagaca

SEQ ID NO: 2643735 - RNA, 20 nt, Human papillomavirus type 18
ugggcguuccaauacagugg

SEQ ID NO: 2643736 - RNA, 15 nt, Human papillomavirus type 18
uaugugugcugccau

SEQ ID NO: 2643737 - RNA, 16 nt, Human papillomavirus type 18
cggguuguaacggcug

SEQ ID NO: 2643738 - RNA, 16 nt, Human papillomavirus type 18
caauauagaguauuua

SEQ ID NO: 2643739 - RNA, 18 nt, Human papillomavirus type 18
agaaacaguuuaaaaugu

SEQ ID NO: 2643740 - RNA, 14 nt, Human papillomavirus type 18
gagguggauacaga

SEQ ID NO: 2643741 - RNA, 19 nt, Human papillomavirus type 18
cagcagcuguuucugaaca

SEQ ID NO: 2643742 - RNA, 12 nt, Human papillomavirus type 18
cuaauguuucug

SEQ ID NO: 2643743 - RNA, 23 nt, Human papillomavirus type 18
caaggaacauuuugugaacaggc

SEQ ID NO: 2643744 - RNA, 14 nt, Human papillomavirus type 18
aucugucuguaugu

SEQ ID NO: 2643745 - RNA, 21 nt, Human papillomavirus type 18
aauuguauagguuguuuuaua

SEQ ID NO: 2643746 - RNA, 13 nt, Human papillomavirus type 18
gcauauacaugcu

SEQ ID NO: 2643747 - RNA, 14 nt, Human papillomavirus type 18
gauguaauaucaga

SEQ ID NO: 2643748 - RNA, 23 nt, Human papillomavirus type 18
uggcauagguacuggcaguggua

SEQ ID NO: 2643749 - RNA, 17 nt, Human papillomavirus type 18
uagugaaacacaaagaa

SEQ ID NO: 2643750 - RNA, 22 nt, Human papillomavirus type 18
ugccaugucccgcuuuugccau

SEQ ID NO: 2643751 - RNA, 16 nt, Human papillomavirus type 18
guagcaugggacagug

SEQ ID NO: 2643752 - RNA, 21 nt, Human papillomavirus type 18
gggacaaaaccgcuaccugug

SEQ ID NO: 2643753 - RNA, 16 nt, Human papillomavirus type 18
auauauuguccuguau

SEQ ID NO: 2643754 - RNA, 22 nt, Human papillomavirus type 18
gcggcuggagguggauacagag

SEQ ID NO: 2643755 - RNA, 20 nt, Human papillomavirus type 18
gagcuagagacagcacaggc

SEQ ID NO: 2643756 - RNA, 19 nt, Human papillomavirus type 18
ccugcaggugguggcaaua

SEQ ID NO: 2643757 - RNA, 20 nt, Human papillomavirus type 18
auguaugguuguuguuguau

SEQ ID NO: 2643758 - RNA, 17 nt, Human papillomavirus type 18
uggcuuaugucuguggu

SEQ ID NO: 2643759 - RNA, 18 nt, Human papillomavirus type 18
agugggcagaaaaaggca

SEQ ID NO: 2643760 - RNA, 13 nt, Human papillomavirus type 18
ccgacgagccgaa

SEQ ID NO: 2643761 - RNA, 18 nt, Human papillomavirus type 18
augcaacagacacagggu

SEQ ID NO: 2643762 - RNA, 15 nt, Human papillomavirus type 18
cagaaaacaguccau

SEQ ID NO: 2643763 - RNA, 19 nt, Human papillomavirus type 18
caucaacauuuaccagccc

SEQ ID NO: 2643764 - RNA, 13 nt, Human papillomavirus type 18
agccaaauacagu

SEQ ID NO: 2643765 - RNA, 19 nt, Human papillomavirus type 18
accuauguagcaugggaca

SEQ ID NO: 2643766 - RNA, 17 nt, Human papillomavirus type 18
augcgcaggagguccac

SEQ ID NO: 2643767 - RNA, 18 nt, Human papillomavirus type 18
auugauacacaaggaaca

SEQ ID NO: 2643768 - RNA, 19 nt, Human papillomavirus type 18
gagcuagagacagcacagg

SEQ ID NO: 2643769 - RNA, 18 nt, Human papillomavirus type 18
aaugcaauauucuuugca

SEQ ID NO: 2643770 - RNA, 16 nt, Human papillomavirus type 18
accugugggccccaca

SEQ ID NO: 2643771 - RNA, 20 nt, Human papillomavirus type 18
gacgaaaaugcaacagacac

SEQ ID NO: 2643772 - RNA, 18 nt, Human papillomavirus type 18
uucgagcauuccagcagc

SEQ ID NO: 2643773 - RNA, 16 nt, Human papillomavirus type 18
aggaagaaaacgauga

SEQ ID NO: 2643774 - RNA, 16 nt, Human papillomavirus type 18
uaugcuuuuuguauuu

SEQ ID NO: 2643775 - RNA, 19 nt, Human papillomavirus type 18
guacagacggggagggcac

SEQ ID NO: 2643776 - RNA, 21 nt, Human papillomavirus type 18
cuaagguuucugcauaccaau

SEQ ID NO: 2643777 - RNA, 19 nt, Human papillomavirus type 18
uaugguaucccaccgugcc

SEQ ID NO: 2643778 - RNA, 23 nt, Human papillomavirus type 18
caaauaaauuugguuuaccugau

SEQ ID NO: 2643779 - RNA, 21 nt, Human papillomavirus type 18
uacaauccuccauuuugcugu

SEQ ID NO: 2643780 - RNA, 20 nt, Human papillomavirus type 18
uuugcaggaggcagcacaga

SEQ ID NO: 2643781 - RNA, 17 nt, Human papillomavirus type 18
guagaaagcucagcaga

SEQ ID NO: 2643782 - RNA, 18 nt, Human papillomavirus type 18
uaaaauauugcaaugguc

SEQ ID NO: 2643783 - RNA, 17 nt, Human papillomavirus type 18
ugcaggaggcagcacag

SEQ ID NO: 2643784 - RNA, 20 nt, Human papillomavirus type 18
uaaaauguuuacgguacaga

SEQ ID NO: 2643785 - RNA, 21 nt, Human papillomavirus type 18
cagauugcgaaaacauagcga

SEQ ID NO: 2643786 - RNA, 12 nt, Human papillomavirus type 18
acagacacaggg

SEQ ID NO: 2643787 - RNA, 20 nt, Human papillomavirus type 18
uaacuguugguaauccauau

SEQ ID NO: 2643788 - RNA, 17 nt, Human papillomavirus type 18
caaauacaguauuggca

SEQ ID NO: 2643789 - RNA, 13 nt, Human papillomavirus type 18
acaaguguugcau

SEQ ID NO: 2643790 - RNA, 16 nt, Human papillomavirus type 18
gauggcaacaaagaca

SEQ ID NO: 2643791 - RNA, 15 nt, Human papillomavirus type 18
guauauauauauaca

SEQ ID NO: 2643792 - RNA, 14 nt, Human papillomavirus type 18
gcauguaugugugc

SEQ ID NO: 2643793 - RNA, 16 nt, Human papillomavirus type 18
ccuuuuaugcuuuuug

SEQ ID NO: 2643794 - RNA, 20 nt, Human papillomavirus type 18
gcccauguuacuauugcaua

SEQ ID NO: 2643795 - RNA, 20 nt, Human papillomavirus type 18
uaauccauauuuuaggguuc

SEQ ID NO: 2643796 - RNA, 13 nt, Human papillomavirus type 18
guauguccugugu

SEQ ID NO: 2643797 - RNA, 20 nt, Human papillomavirus type 18
auguacaagcuauuguagac

SEQ ID NO: 2643798 - RNA, 15 nt, Human papillomavirus type 18
ccuccuucuguggca

SEQ ID NO: 2643799 - RNA, 18 nt, Human papillomavirus type 18
ucugcauaccaauauaga

SEQ ID NO: 2643800 - RNA, 13 nt, Human papillomavirus type 18
gcaacagacacag

SEQ ID NO: 2643801 - RNA, 14 nt, Human papillomavirus type 18
aggcaacauugcaa

SEQ ID NO: 2643802 - RNA, 14 nt, Human papillomavirus type 18
uauguccuguguuu

SEQ ID NO: 2643803 - RNA, 19 nt, Human papillomavirus type 18
acaggugcaggcaaugaaa

SEQ ID NO: 2643804 - RNA, 17 nt, Human papillomavirus type 18
uagacaaaaaaacagga

SEQ ID NO: 2643805 - RNA, 20 nt, Human papillomavirus type 18
auagguuguuuuauacagug

SEQ ID NO: 2643806 - RNA, 18 nt, Human papillomavirus type 18
uguaugugugcugccaug

SEQ ID NO: 2643807 - RNA, 20 nt, Human papillomavirus type 18
auacaucuauuguuguguuu

SEQ ID NO: 2643808 - RNA, 12 nt, Human papillomavirus type 18
cagcacaggcau

SEQ ID NO: 2643809 - RNA, 23 nt, Human papillomavirus type 18
accauagugaaacacaaagaaca

SEQ ID NO: 2643810 - RNA, 22 nt, Human papillomavirus type 18
caauuccagauaguguacaaau

SEQ ID NO: 2643811 - RNA, 22 nt, Human papillomavirus type 18
gcagagcuagagacagcacagg

SEQ ID NO: 2643812 - RNA, 16 nt, Human papillomavirus type 18
uauauaaaacauguaa

SEQ ID NO: 2643813 - RNA, 19 nt, Human papillomavirus type 18
augucccgcuuuugccauc

SEQ ID NO: 2643814 - RNA, 12 nt, Human papillomavirus type 18
cauguccaccug

SEQ ID NO: 2643815 - RNA, 20 nt, Human papillomavirus type 18
cagcagacgaccuucgagca

SEQ ID NO: 2643816 - RNA, 12 nt, Human papillomavirus type 18
aagacauagaca

SEQ ID NO: 2643817 - RNA, 15 nt, Human papillomavirus type 18
auguuuuaaaacgaa

SEQ ID NO: 2643818 - RNA, 21 nt, Human papillomavirus type 18
aaaccgaggauuggacacugc

SEQ ID NO: 2643819 - RNA, 20 nt, Human papillomavirus type 18
cauaaagcuauugaacugca

SEQ ID NO: 2643820 - RNA, 15 nt, Human papillomavirus type 18
uauauaaaacaugua

SEQ ID NO: 2643821 - RNA, 18 nt, Human
aaaguaacucauuuguua

SEQ ID NO: 2643822 - RNA, 20 nt, Human
aaaguaacucauuuguuaaa

SEQ ID NO: 2643823 - RNA, 14 nt, Human
aaaguaacucauuu

SEQ ID NO: 2643824 - RNA, 15 nt, Human
aaaguaacucauuug

SEQ ID NO: 2643825 - RNA, 22 nt, Human
aaaguaacucauuuguuaaaau

SEQ ID NO: 2643826 - RNA, 17 nt, Human
gguuucgaagucauuaa

SEQ ID NO: 2643827 - RNA, 21 nt, Human
gcugccuccccucuccuuccu

SEQ ID NO: 2643828 - RNA, 14 nt, Human
gcagccaaccuaag

SEQ ID NO: 2643829 - RNA, 17 nt, Human
gaauaucuauuaauaua

SEQ ID NO: 2643830 - RNA, 17 nt, Human
cuuuuguguaaugaaaa

SEQ ID NO: 2643831 - RNA, 16 nt, Human
cuuuuguguaaugaaa

SEQ ID NO: 2643832 - RNA, 19 nt, Human
auuguugacaacugugacu

SEQ ID NO: 2643833 - RNA, 18 nt, Human
auuguugacaacugugac

SEQ ID NO: 2643834 - RNA, 20 nt, Human
auuguugacaacugugacug

SEQ ID NO: 2643835 - RNA, 14 nt, Human
auuuauaauuccua

SEQ ID NO: 2643836 - RNA, 18 nt, Human
ccaccgaagccgccugug

SEQ ID NO: 2643837 - RNA, 13 nt, Human
ccaccgcccagag

SEQ ID NO: 2643838 - RNA, 17 nt, Human
ccaccgcccagagaccc

SEQ ID NO: 2643839 - RNA, 23 nt, Human
ccaagcugccuccccucuccuuc

SEQ ID NO: 2643840 - RNA, 16 nt, Human
ccugugacugucucac

SEQ ID NO: 2643841 - RNA, 21 nt, Human
cuauuaauauauguauuauuu

SEQ ID NO: 2643842 - RNA, 17 nt, Human
cuauuaauauauguauu

SEQ ID NO: 2643843 - RNA, 12 nt, Human
cuauuaauauau

SEQ ID NO: 2643844 - RNA, 14 nt, Human
cuauuaauauaugu

SEQ ID NO: 2643845 - RNA, 15 nt, Human
cuauuaauauaugua

SEQ ID NO: 2643846 - RNA, 11 nt, Human
cuauuaauaua

SEQ ID NO: 2643847 - RNA, 19 nt, Human
cgccuggcugcagccugcg

SEQ ID NO: 2643848 - RNA, 22 nt, Human
cgguuucgaagucauuaaacug

SEQ ID NO: 2643849 - RNA, 18 nt, Human
cgguuucgaagucauuaa

SEQ ID NO: 2643850 - RNA, 13 nt, Human
uuuucugacuaau

SEQ ID NO: 2643851 - RNA, 12 nt, Human
auuuauuaauau

SEQ ID NO: 2643852 - RNA, 14 nt, Human
auuuauuaauauuu

SEQ ID NO: 2643853 - RNA, 15 nt, Human
auuuauuaauauuua

SEQ ID NO: 2643854 - RNA, 23 nt, Human
auuuauuaauauuuaacauuauu

SEQ ID NO: 2643855 - RNA, 20 nt, Human
uuguccugccugcaauauuu

SEQ ID NO: 2643856 - RNA, 20 nt, Human
uuucgaagucauuaaacugg

SEQ ID NO: 2643857 - RNA, 16 nt, Human
uuucgaagucauuaaa

SEQ ID NO: 2643858 - RNA, 16 nt, Human
auauggggaauauauu

SEQ ID NO: 2643859 - RNA, 21 nt, Human
uucacuugaugauacaaugaa

SEQ ID NO: 2643860 - RNA, 22 nt, Human
auauuuaacauuauuuauaugg

SEQ ID NO: 2643861 - RNA, 19 nt, Human
auauuuaacauuauuuaua

SEQ ID NO: 2643862 - RNA, 13 nt, Human
auauuugaauuuu

SEQ ID NO: 2643863 - RNA, 20 nt, Human
auauuugaauuuuaaaucua

SEQ ID NO: 2643864 - RNA, 13 nt, Human
aucuaaaucuauu

SEQ ID NO: 2643865 - RNA, 15 nt, Human
aucuaaaucuauuua

SEQ ID NO: 2643866 - RNA, 16 nt, Human
aucuaaaucuauuuau

SEQ ID NO: 2643867 - RNA, 18 nt, Human
aucuaaaucuauuuauua

SEQ ID NO: 2643868 - RNA, 11 nt, Human
auccugugacu

SEQ ID NO: 2643869 - RNA, 21 nt, Human
auccugugacugucucacuua

SEQ ID NO: 2643870 - RNA, 14 nt, Human
aggaggcaggaccu

SEQ ID NO: 2643871 - RNA, 19 nt, Human
uggaccgcccuuuuccccu

SEQ ID NO: 2643872 - RNA, 21 nt, Human
ugccucaggaggcaggaccuu

SEQ ID NO: 2643873 - RNA, 18 nt, Human
ugccucaggaggcaggac

SEQ ID NO: 2643874 - RNA, 11 nt, Human
uguuguagugu

SEQ ID NO: 2643875 - RNA, 22 nt, Human
auaauuccuauauccugugacu

SEQ ID NO: 2643876 - RNA, 15 nt, Human
aggugaucccguuuu

SEQ ID NO: 2643877 - RNA, 23 nt, Human
aggugaucccguuuuccccauga

SEQ ID NO: 2643878 - RNA, 21 nt, Human
ugaaaaugaauaucuauuaau

SEQ ID NO: 2643879 - RNA, 23 nt, Human
ugaaaaugaauaucuauuaauau

SEQ ID NO: 2643880 - RNA, 19 nt, Human
ugaaaaugaauaucuauua

SEQ ID NO: 2643881 - RNA, 23 nt, Human
agaucccauggguuguguguuua

SEQ ID NO: 2643882 - RNA, 22 nt, Human
ucuauuaauauauguauuauuu

SEQ ID NO: 2643883 - RNA, 10 nt, Human
ucuauuaaua

SEQ ID NO: 2643884 - RNA, 12 nt, Human
ucuauuaauaua

SEQ ID NO: 2643885 - RNA, 13 nt, Human
ucuauuaauauau

SEQ ID NO: 2643886 - RNA, 16 nt, Human
ucuauuaauauaugua

SEQ ID NO: 2643887 - RNA, 21 nt, Human
ucuauuaauauauguauuauu

SEQ ID NO: 2643888 - RNA, 16 nt, Human
ucuauuuauuaauauu

SEQ ID NO: 2643889 - RNA, 16 nt, Human
ucucaggagauuucau

SEQ ID NO: 2643890 - RNA, 21 nt, Human
ucauaguucugagcugccagu

SEQ ID NO: 2643891 - RNA, 13 nt, Human
ucaauaucuaaua

SEQ ID NO: 2643892 - RNA, 15 nt, Human
ucaauaucuaauaua

SEQ ID NO: 2643893 - RNA, 19 nt, Human
ucaauaucuaauauauaug

SEQ ID NO: 2643894 - RNA, 21 nt, Human
ucaauaucuaauauauaugaa

SEQ ID NO: 2643895 - RNA, 14 nt, Human
ucacuugaugauac

SEQ ID NO: 2643896 - RNA, 20 nt, Human
ucacuugaugauacaaugaa

SEQ ID NO: 2643897 - RNA, 23 nt, Human
aauaugccugcaaucugagccag

SEQ ID NO: 2643898 - RNA, 21 nt, Human
aauauuuaacauuauuuauau

SEQ ID NO: 2643899 - RNA, 18 nt, Human
uaaugaaaaugaauaucu

SEQ ID NO: 2643900 - RNA, 21 nt, Human
uaauauuuaacauuauuuaua

SEQ ID NO: 2643901 - RNA, 20 nt, Human
uaauagcaacuuuuguguaa

SEQ ID NO: 2643902 - RNA, 21 nt, Human
uaauagcaacuuuuguguaau

SEQ ID NO: 2643903 - RNA, 23 nt, Human
aauccuuuguuuucugacuaauu

SEQ ID NO: 2643904 - RNA, 22 nt, Human
aauccuuuguuuucugacuaau

SEQ ID NO: 2643905 - RNA, 19 nt, Human
aauggaaaguaacucauuu

SEQ ID NO: 2643906 - RNA, 20 nt, Human
aauuaggcaaggcuauguga

SEQ ID NO: 2643907 - RNA, 23 nt, Human
aauuaggcaaggcuaugugauua

SEQ ID NO: 2643908 - RNA, 17 nt, Human
uacuauccaguuacugc

SEQ ID NO: 2643909 - RNA, 21 nt, Human
aauuccuauauccugugacug

SEQ ID NO: 2643910 - RNA, 12 nt, Human
uaucuauuaaua

SEQ ID NO: 2643911 - RNA, 13 nt, Human
uaucuauuaauau

SEQ ID NO: 2643912 - RNA, 15 nt, Human
uaucuauuaauauau

SEQ ID NO: 2643913 - RNA, 17 nt, Human
uaucuauuaauauaugu

SEQ ID NO: 2643914 - RNA, 18 nt, Human
uaucuauuaauauaugua

SEQ ID NO: 2643915 - RNA, 19 nt, Human
uaucuauuaauauauguau

SEQ ID NO: 2643916 - RNA, 14 nt, Human
uauccaguuacugc

SEQ ID NO: 2643917 - RNA, 19 nt, Human
uaggcaaggcuaugugauu

SEQ ID NO: 2643918 - RNA, 16 nt, Human
aacuugaaugugucag

SEQ ID NO: 2643919 - RNA, 12 nt, Human
aacauuauuuau

SEQ ID NO: 2643920 - RNA, 14 nt, Human
gucaggugacccug

SEQ ID NO: 2643921 - RNA, 12 nt, Human
guauuuauaaua

SEQ ID NO: 2643922 - RNA, 21 nt, Human
aaguaacucauuuguuaaaau

SEQ ID NO: 2643923 - RNA, 14 nt, Human
aaguaacucauuug

SEQ ID NO: 2643924 - RNA, 12 nt, Human
aaguaacucauu

SEQ ID NO: 2643925 - RNA, 16 nt, Human
aaguaacucauuuguu

SEQ ID NO: 2643926 - RNA, 19 nt, Human
augucagacagaacuugaa

SEQ ID NO: 2643927 - RNA, 19 nt, Human
auccuuuguuuucugacua

SEQ ID NO: 2643928 - RNA, 21 nt, Human
auccuuuguuuucugacuaau

SEQ ID NO: 2643929 - RNA, 23 nt, Human
auccuuuguuuucugacuaauua

SEQ ID NO: 2643930 - RNA, 20 nt, Human
auauccugugacugucucac

SEQ ID NO: 2643931 - RNA, 14 nt, Human
auauccugugacug

SEQ ID NO: 2643932 - RNA, 13 nt, Human
auauccugugacu

SEQ ID NO: 2643933 - RNA, 19 nt, Human
auaaguauuuauaauagca

SEQ ID NO: 2643934 - RNA, 15 nt, Human
auaaguauuuauaau

SEQ ID NO: 2643935 - RNA, 22 nt, Human
acaauguuguagugucccccac

SEQ ID NO: 2643936 - RNA, 20 nt, Human
aacuuuuguguaaugaaaau

SEQ ID NO: 2643937 - RNA, 20 nt, Human
aaauggaaaguaacucauuu

SEQ ID NO: 2643938 - RNA, 23 nt, Human
aagcugccuccccucuccuuccu

SEQ ID NO: 2643939 - RNA, 22 nt, Human
caaaacugccucaggaggcagg

SEQ ID NO: 2643940 - RNA, 14 nt, Human
caacuuuuguguaa

SEQ ID NO: 2643941 - RNA, 20 nt, Human
caacuuuuguguaaugaaaa

SEQ ID NO: 2643942 - RNA, 21 nt, Human
caacuuuuguguaaugaaaau

SEQ ID NO: 2643943 - RNA, 21 nt, Human
uugaugauacaaugaacacuu

SEQ ID NO: 2643944 - RNA, 16 nt, Human
uugacaacugugacug

SEQ ID NO: 2643945 - RNA, 16 nt, Human
uugaauuuuaaaucua

SEQ ID NO: 2643946 - RNA, 15 nt, Human
uugaauuuuaaaucu

SEQ ID NO: 2643947 - RNA, 14 nt, Human
uugacaacugugac

SEQ ID NO: 2643948 - RNA, 14 nt, Human
uucgggcugugccc

SEQ ID NO: 2643949 - RNA, 11 nt, Human
uuauaauagca

SEQ ID NO: 2643950 - RNA, 17 nt, Human
uuauaagugaagugaua

SEQ ID NO: 2643951 - RNA, 18 nt, Human
uuauuaauauuuaacauu

SEQ ID NO: 2643952 - RNA, 11 nt, Human
uuauuaauauu

SEQ ID NO: 2643953 - RNA, 18 nt, Human
uuuauaauagcaacuuuu

SEQ ID NO: 2643954 - RNA, 12 nt, Human
uuuaacauuauu

SEQ ID NO: 2643955 - RNA, 20 nt, Human
uuuuccccuaccaauauuag

SEQ ID NO: 2643956 - RNA, 21 nt, Human
ugcccggggaaaggcaagguc

SEQ ID NO: 2643957 - RNA, 18 nt, Human
ugcccggggaaaggcaag

SEQ ID NO: 2643958 - RNA, 18 nt, Human
ugccuccccucuccuucc

SEQ ID NO: 2643959 - RNA, 15 nt, Human
ugacccugaugaaaa

SEQ ID NO: 2643960 - RNA, 22 nt, Human
uguccugccugcaauauuugaa

SEQ ID NO: 2643961 - RNA, 15 nt, Human
uguaaugaaaaugaa

SEQ ID NO: 2643962 - RNA, 18 nt, Human
uguaaugaaaaugaauau

SEQ ID NO: 2643963 - RNA, 21 nt, Human
uguaaugaaaaugaauaucua

SEQ ID NO: 2643964 - RNA, 16 nt, Human
ucccguuuuccccaug

SEQ ID NO: 2643965 - RNA, 17 nt, Human
ucccguuuuccccauga

SEQ ID NO: 2643966 - RNA, 19 nt, Human
ucccguuuuccccaugaca

SEQ ID NO: 2643967 - RNA, 18 nt, Human
uccuauauccugugacug

SEQ ID NO: 2643968 - RNA, 14 nt, Human
ucuaaaucuauuua

SEQ ID NO: 2643969 - RNA, 16 nt, Human
ucuaaaucuauuuauu

SEQ ID NO: 2643970 - RNA, 17 nt, Human
ucuaaaucuauuuauua

SEQ ID NO: 2643971 - RNA, 19 nt, Human
ucuaaaucuauuuauuaau

SEQ ID NO: 2643972 - RNA, 20 nt, Human
ucuaaaucuauuuauuaaua

SEQ ID NO: 2643973 - RNA, 21 nt, Human
ucuaaaucuauuuauuaauau

SEQ ID NO: 2643974 - RNA, 15 nt, Human
ucuaauauauaugaa

SEQ ID NO: 2643975 - RNA, 19 nt, Human
ucuaauauauaugaauaaa

SEQ ID NO: 2643976 - RNA, 22 nt, Human
uccuuuguuuucugacuaauua

SEQ ID NO: 2643977 - RNA, 18 nt, Human
uccuuuguuuucugacua

SEQ ID NO: 2643978 - RNA, 20 nt, Human
uccuuuguuuucugacuaau

SEQ ID NO: 2643979 - RNA, 22 nt, Human
uauuuauaauagcaacuuuugu

SEQ ID NO: 2643980 - RNA, 15 nt, Human
uauuuauaauuccua

SEQ ID NO: 2643981 - RNA, 21 nt, Human
uauguauuauuuauaauuccu

SEQ ID NO: 2643982 - RNA, 13 nt, Human
uauguauuauuua

SEQ ID NO: 2643983 - RNA, 14 nt, Human
uauuaauauaugua

SEQ ID NO: 2643984 - RNA, 13 nt, Human
uauuaauauuuaa

SEQ ID NO: 2643985 - RNA, 15 nt, Human
ucagacagaacuuga

SEQ ID NO: 2643986 - RNA, 16 nt, Human
ucagacagaacuugaa

SEQ ID NO: 2643987 - RNA, 23 nt, Human
ucagacagaacuugaauguguca

SEQ ID NO: 2643988 - RNA, 12 nt, Human
ggcuccccugag

SEQ ID NO: 2643989 - RNA, 13 nt, Human
ggcuccccugagg

SEQ ID NO: 2643990 - RNA, 15 nt, Human
gcuuccaaauauugu

SEQ ID NO: 2643991 - RNA, 20 nt, Human
gcaggaccuucgggcugugc

SEQ ID NO: 2643992 - RNA, 21 nt, Human
gcaggaccuucgggcugugcc

SEQ ID NO: 2643993 - RNA, 19 nt, Human
gcccagagacccaagcugc

SEQ ID NO: 2643994 - RNA, 14 nt, Human
gaugaaaacauagc

SEQ ID NO: 2643995 - RNA, 13 nt, Human
gagcugccagugg

SEQ ID NO: 2643996 - RNA, 11 nt, Human
gagcugccagu

SEQ ID NO: 2643997 - RNA, 20 nt, Human
cuccauaguuuggcauuugc

SEQ ID NO: 2643998 - RNA, 21 nt, Human
cuccauaguuuggcauuugca

SEQ ID NO: 2643999 - RNA, 21 nt, Human
cucaucaaucaaauaaguauu

SEQ ID NO: 2644000 - RNA, 17 nt, Human
cucaucaaucaaauaag

SEQ ID NO: 2644001 - RNA, 13 nt, Human
cuccuuccugugu

SEQ ID NO: 2644002 - RNA, 15 nt, Human
cuccuuccugugugu

SEQ ID NO: 2644003 - RNA, 22 nt, Human
gaacacuuauaagugaagugau

SEQ ID NO: 2644004 - RNA, 22 nt, Human
cuguguguccaaaacugccuca

SEQ ID NO: 2644005 - RNA, 21 nt, Human
cuguguguccaaaacugccuc

SEQ ID NO: 2644006 - RNA, 19 nt, Human
cuguguguccaaaacugcc

SEQ ID NO: 2644007 - RNA, 15 nt, Human
cuguguguccaaaac

SEQ ID NO: 2644008 - RNA, 23 nt, Human
cuuccuguguguccaaaacugcc

SEQ ID NO: 2644009 - RNA, 15 nt, Human
cuuccugugugucca

SEQ ID NO: 2644010 - RNA, 16 nt, Human
cuucgggcugugcccg

SEQ ID NO: 2644011 - RNA, 15 nt, Human
cuucgggcugugccc

SEQ ID NO: 2644012 - RNA, 16 nt, Human
ccuaccaauauuaggu

SEQ ID NO: 2644013 - RNA, 16 nt, Human
ccuauauccugugacu

SEQ ID NO: 2644014 - RNA, 17 nt, Human
cccucuccuuccugugu

SEQ ID NO: 2644015 - RNA, 22 nt, Human
cccggggaaaggcaagguccgg

SEQ ID NO: 2644016 - RNA, 18 nt, Human
ccuggcugcagccugcgc

SEQ ID NO: 2644017 - RNA, 20 nt, Human
ccugcgccaccgcccagaga

SEQ ID NO: 2644018 - RNA, 16 nt, Human
ccugcaauauuugaau

SEQ ID NO: 2644019 - RNA, 13 nt, Human
ccugcaauauuug

SEQ ID NO: 2644020 - RNA, 21 nt, Human
ccuguguguccaaaacugccu

SEQ ID NO: 2644021 - RNA, 20 nt, Human
ccuguguguccaaaacugcc

SEQ ID NO: 2644022 - RNA, 17 nt, Human
ccuuggugccucuugua

SEQ ID NO: 2644023 - RNA, 14 nt, Human
cauuauuuauaugg

SEQ ID NO: 2644024 - RNA, 23 nt, Human
cauuauuuauauggggaauauau

SEQ ID NO: 2644025 - RNA, 15 nt, Human
caggccccaggaaag

SEQ ID NO: 2644026 - RNA, 15 nt, Human
caggcuccccugagg

SEQ ID NO: 2644027 - RNA, 16 nt, Human
caggcuccccugagga

SEQ ID NO: 2644028 - RNA, 14 nt, Human
caggcuccccugag

SEQ ID NO: 2644029 - RNA, 21 nt, Human
cagccaccgaagccgccugug

SEQ ID NO: 2644030 - RNA, 20 nt, Human
caggaccuucgggcugugcc

SEQ ID NO: 2644031 - RNA, 22 nt, Human
caggaccuucgggcugugcccg

SEQ ID NO: 2644032 - RNA, 21 nt, Human
caggaccuucgggcugugccc

SEQ ID NO: 2644033 - RNA, 20 nt, Human
caggaagggaugcaggcucc

SEQ ID NO: 2644034 - RNA, 16 nt, Human
cagaacuugaaugugu

SEQ ID NO: 2644035 - RNA, 15 nt, Human
cagaacuugaaugug

SEQ ID NO: 2644036 - RNA, 15 nt, Human
cagacagaacuugaa

SEQ ID NO: 2644037 - RNA, 21 nt, Human
cacgguuucgaagucauuaaa

SEQ ID NO: 2644038 - RNA, 23 nt, Human
cacgguuucgaagucauuaaacu

SEQ ID NO: 2644039 - RNA, 23 nt, Human
cacuugaugauacaaugaacacu

SEQ ID NO: 2644040 - RNA, 14 nt, Human
aucuauuaauauau

SEQ ID NO: 2644041 - RNA, 12 nt, Human
aucuauuaauau

SEQ ID NO: 2644042 - RNA, 15 nt, Human
aucuauuaauauaug

SEQ ID NO: 2644043 - RNA, 18 nt, Human
aucuauuaauauauguau

SEQ ID NO: 2644044 - RNA, 16 nt, Human
auggaaaguaacucau

SEQ ID NO: 2644045 - RNA, 15 nt, Human
auguauuauuuauaa

SEQ ID NO: 2644046 - RNA, 16 nt, Human
auguauuauuuauaau

SEQ ID NO: 2644047 - RNA, 17 nt, Human
auguauuauuuauaauu

SEQ ID NO: 2644048 - RNA, 18 nt, Human
agugucccccacccccac

SEQ ID NO: 2644049 - RNA, 23 nt, Human
auagcaucucaggagauuucaug

SEQ ID NO: 2644050 - RNA, 16 nt, Human
agccaaccuaagcaag

SEQ ID NO: 2644051 - RNA, 13 nt, Human
aauauauaugaau

SEQ ID NO: 2644052 - RNA, 18 nt, Human
aaguguaaguucacaacu

SEQ ID NO: 2644053 - RNA, 13 nt, Human
aaaggcaaggucc

SEQ ID NO: 2644054 - RNA, 20 nt, Human
acucaucaaucaaauaagua

SEQ ID NO: 2644055 - RNA, 20 nt, Human
cugccuccccucuccuuccu

SEQ ID NO: 2644056 - RNA, 12 nt, Human
cugaugaaaaca

SEQ ID NO: 2644057 - RNA, 15 nt, Human
cuugaaugugucagg

SEQ ID NO: 2644058 - RNA, 21 nt, Human
gcaugucagacagaacuugaa

SEQ ID NO: 2644059 - RNA, 16 nt, Human
gcaggcuccccugagg

SEQ ID NO: 2644060 - RNA, 14 nt, Human
gcaggcuccccuga

SEQ ID NO: 2644061 - RNA, 19 nt, Human
gacugucucacuuaauccu

SEQ ID NO: 2644062 - RNA, 12 nt, Human
gcuccccugagg

SEQ ID NO: 2644063 - RNA, 13 nt, Human
gcuccccugagga

SEQ ID NO: 2644064 - RNA, 23 nt, Human
gccucuuguaucccuagugcucc

SEQ ID NO: 2644065 - RNA, 18 nt, Human
cuccauaguuuggcauuu

SEQ ID NO: 2644066 - RNA, 14 nt, Human
cugagcugccagug

SEQ ID NO: 2644067 - RNA, 13 nt, Human
cugagcugccagu

SEQ ID NO: 2644068 - RNA, 18 nt, Human
ccgaagccgccuguggac

SEQ ID NO: 2644069 - RNA, 14 nt, Human
caaggcuaugugau

SEQ ID NO: 2644070 - RNA, 20 nt, Human
auuaggcaaggcuaugugau

SEQ ID NO: 2644071 - RNA, 21 nt, Human
auuaggcaaggcuaugugauu

SEQ ID NO: 2644072 - RNA, 19 nt, Human
auuuauauggggaauauau

SEQ ID NO: 2644073 - RNA, 20 nt, Human
auuuauauggggaauauauu

SEQ ID NO: 2644074 - RNA, 12 nt, Human
auuucacuugau

SEQ ID NO: 2644075 - RNA, 19 nt, Human
auuucacuugaugauacaa

SEQ ID NO: 2644076 - RNA, 18 nt, Human
caggaaaggcccagccac

SEQ ID NO: 2644077 - RNA, 18 nt, Human
uuguuuucugacuaauua

SEQ ID NO: 2644078 - RNA, 16 nt, Human
uuguuuucugacuaau

SEQ ID NO: 2644079 - RNA, 17 nt, Human
uuguuuucugacuaauu

SEQ ID NO: 2644080 - RNA, 13 nt, Human
augauacaaugaa

SEQ ID NO: 2644081 - RNA, 17 nt, Human
augauacaaugaacacu

SEQ ID NO: 2644082 - RNA, 15 nt, Human
augcaggcuccccug

SEQ ID NO: 2644083 - RNA, 16 nt, Human
augcaggcuccccuga

SEQ ID NO: 2644084 - RNA, 17 nt, Human
augcaggcuccccugag

SEQ ID NO: 2644085 - RNA, 15 nt, Human
augugauuacaaggc

SEQ ID NO: 2644086 - RNA, 22 nt, Human
aucuaaaucuauuuauuaauau

SEQ ID NO: 2644087 - RNA, 20 nt, Human
aucuaaaucuauuuauuaau

SEQ ID NO: 2644088 - RNA, 22 nt, Human
aucuaauauauaugaauaaagu

SEQ ID NO: 2644089 - RNA, 19 nt, Human
aucuaauauauaugaauaa

SEQ ID NO: 2644090 - RNA, 20 nt, Human
aucuaauauauaugaauaaa

SEQ ID NO: 2644091 - RNA, 15 nt, Human
aucuaauauauauga

SEQ ID NO: 2644092 - RNA, 17 nt, Human
aucuaauauauaugaau

SEQ ID NO: 2644093 - RNA, 18 nt, Human
aucuaauauauaugaaua

SEQ ID NO: 2644094 - RNA, 22 nt, Human
augaauaucuauuaauauaugu

SEQ ID NO: 2644095 - RNA, 18 nt, Human
augaauaucuauuaauau

SEQ ID NO: 2644096 - RNA, 19 nt, Human
augaauaucuauuaauaua

SEQ ID NO: 2644097 - RNA, 20 nt, Human
augaauaucuauuaauauau

SEQ ID NO: 2644098 - RNA, 21 nt, Human
augaauaucuauuaauauaug

SEQ ID NO: 2644099 - RNA, 17 nt, Human
augaauaucuauuaaua

SEQ ID NO: 2644100 - RNA, 19 nt, Human
uuacugccgguuugaaaau

SEQ ID NO: 2644101 - RNA, 22 nt, Human
uuaauccuuuguuuucugacua

SEQ ID NO: 2644102 - RNA, 23 nt, Human
uuaauccuuuguuuucugacuaa

SEQ ID NO: 2644103 - RNA, 19 nt, Human
uuaucaauaucuaauauau

SEQ ID NO: 2644104 - RNA, 22 nt, Human
uuaucaauaucuaauauauaug

SEQ ID NO: 2644105 - RNA, 15 nt, Human
uuaucaauaucuaau

SEQ ID NO: 2644106 - RNA, 16 nt, Human
uuaucaauaucuaaua

SEQ ID NO: 2644107 - RNA, 17 nt, Human
uuaucaauaucuaauau

SEQ ID NO: 2644108 - RNA, 20 nt, Human
agugauacuauccaguuacu

SEQ ID NO: 2644109 - RNA, 20 nt, Human
ugugacuguacccaaaugga

SEQ ID NO: 2644110 - RNA, 16 nt, Human
aguggaccgcccuuuu

SEQ ID NO: 2644111 - RNA, 21 nt, Human
aguggaccgcccuuuuccccu

SEQ ID NO: 2644112 - RNA, 22 nt, Human
aguggaccgcccuuuuccccua

SEQ ID NO: 2644113 - RNA, 16 nt, Human
uguguccaaaacugcc

SEQ ID NO: 2644114 - RNA, 16 nt, Human
aguauuuauaauagca

SEQ ID NO: 2644115 - RNA, 16 nt, Human
uguccaaaacugccuc

SEQ ID NO: 2644116 - RNA, 15 nt, Human
uguccaaaacugccu

SEQ ID NO: 2644117 - RNA, 15 nt, Human
aggcuccccugagga

SEQ ID NO: 2644118 - RNA, 14 nt, Human
aggcuccccugagg

SEQ ID NO: 2644119 - RNA, 14 nt, Human
aggcuaugugauua

SEQ ID NO: 2644120 - RNA, 17 nt, Human
aggcuaugugauuacaa

SEQ ID NO: 2644121 - RNA, 23 nt, Human
aggcaggaccuucgggcugugcc

SEQ ID NO: 2644122 - RNA, 22 nt, Human
aggcaggaccuucgggcugugc

SEQ ID NO: 2644123 - RNA, 21 nt, Human
aggcaggaccuucgggcugug

SEQ ID NO: 2644124 - RNA, 20 nt, Human
agcugccuccccucuccuuc

SEQ ID NO: 2644125 - RNA, 23 nt, Human
agcugccuccccucuccuuccug

SEQ ID NO: 2644126 - RNA, 21 nt, Human
agccugcgccaccgcccagag

SEQ ID NO: 2644127 - RNA, 18 nt, Human
acuuuuguguaaugaaaa

SEQ ID NO: 2644128 - RNA, 19 nt, Human
acuuuuguguaaugaaaau

SEQ ID NO: 2644129 - RNA, 14 nt, Human
ucuccuuccugugu

SEQ ID NO: 2644130 - RNA, 13 nt, Human
ucuccuuccugug

SEQ ID NO: 2644131 - RNA, 14 nt, Human
ugaauaucuauuaa

SEQ ID NO: 2644132 - RNA, 16 nt, Human
ugaauaucuauuaaua

SEQ ID NO: 2644133 - RNA, 17 nt, Human
ugaauaucuauuaauau

SEQ ID NO: 2644134 - RNA, 21 nt, Human
ugagccagugcuuuaauggca

SEQ ID NO: 2644135 - RNA, 18 nt, Human
accgcccuuuuccccuac

SEQ ID NO: 2644136 - RNA, 16 nt, Human
accgcccuuuuccccu

SEQ ID NO: 2644137 - RNA, 22 nt, Human
ucauuuguuaaaauuaucaaua

SEQ ID NO: 2644138 - RNA, 22 nt, Human
uccuguguguccaaaacugccu

SEQ ID NO: 2644139 - RNA, 16 nt, Human
acuguacccaaaugga

SEQ ID NO: 2644140 - RNA, 17 nt, Human
acuguacccaaauggaa

SEQ ID NO: 2644141 - RNA, 16 nt, Human
uccccaggcaccucac

SEQ ID NO: 2644142 - RNA, 22 nt, Human
acucauuuguuaaaauuaucaa

SEQ ID NO: 2644143 - RNA, 18 nt, Human
uaguucugagcugccagu

SEQ ID NO: 2644144 - RNA, 14 nt, Human
uauauccugugacu

SEQ ID NO: 2644145 - RNA, 15 nt, Human
uauauccugugacug

SEQ ID NO: 2644146 - RNA, 17 nt, Human
uauauccugugacuguc

SEQ ID NO: 2644147 - RNA, 18 nt, Human
uauauccugugacugucu

SEQ ID NO: 2644148 - RNA, 22 nt, Human
uaucaauaucuaauauauauga

SEQ ID NO: 2644149 - RNA, 18 nt, Human
uaucaauaucuaauauau

SEQ ID NO: 2644150 - RNA, 21 nt, Human
uaucaauaucuaauauauaug

SEQ ID NO: 2644151 - RNA, 17 nt, Human
uaucaauaucuaauaua

SEQ ID NO: 2644152 - RNA, 14 nt, Human
uaucaauaucuaau

SEQ ID NO: 2644153 - RNA, 15 nt, Human
uauuuaacauuauuu

SEQ ID NO: 2644154 - RNA, 16 nt, Human
uauuucacuugaugau

SEQ ID NO: 2644155 - RNA, 15 nt, Human
uacaaugaacacuua

SEQ ID NO: 2644156 - RNA, 20 nt, Human
aaugaauaucuauuaauaua

SEQ ID NO: 2644157 - RNA, 14 nt, Human
aaugaauaucuauu

SEQ ID NO: 2644158 - RNA, 15 nt, Human
aaugaauaucuauua

SEQ ID NO: 2644159 - RNA, 18 nt, Human
aaugaauaucuauuaaua

SEQ ID NO: 2644160 - RNA, 19 nt, Human
aaugaauaucuauuaauau

SEQ ID NO: 2644161 - RNA, 13 nt, Human
uaauauuuaacau

SEQ ID NO: 2644162 - RNA, 14 nt, Human
aagugaagugauac

SEQ ID NO: 2644163 - RNA, 16 nt, Human
guugacaacugugacu

SEQ ID NO: 2644164 - RNA, 14 nt, Human
guugacaacuguga

SEQ ID NO: 2644165 - RNA, 15 nt, Human
guugacaacugugac

SEQ ID NO: 2644166 - RNA, 22 nt, Human
uaaaauuaucaauaucuaauau

SEQ ID NO: 2644167 - RNA, 16 nt, Human
aauaaguauuuauaau

SEQ ID NO: 2644168 - RNA, 18 nt, Human
uaaaguguaaguucacaa

SEQ ID NO: 2644169 - RNA, 14 nt, Human
uaaaucuaaaucua

SEQ ID NO: 2644170 - RNA, 15 nt, Human
uaaaucuaaaucuau

SEQ ID NO: 2644171 - RNA, 19 nt, Human
uaaaucuaaaucuauuuau

SEQ ID NO: 2644172 - RNA, 12 nt, Human
caccccccaggc

SEQ ID NO: 2644173 - RNA, 16 nt, Human
caaauaaguauuuaua

SEQ ID NO: 2644174 - RNA, 18 nt, Human
caaauaaguauuuauaau

SEQ ID NO: 2644175 - RNA, 17 nt, Human
caaauaaguauuuauaa

SEQ ID NO: 2644176 - RNA, 18 nt, Human
caaugaacacuuauaagu

SEQ ID NO: 2644177 - RNA, 13 nt, Human
uugaaugugucag

SEQ ID NO: 2644178 - RNA, 22 nt, Human
uuuagacucaucaaucaaauaa

SEQ ID NO: 2644179 - RNA, 12 nt, Human
uuccccaugaca

SEQ ID NO: 2644180 - RNA, 13 nt, Human
uucgggcugugcc

SEQ ID NO: 2644181 - RNA, 12 nt, Human
uucgggcugugc

SEQ ID NO: 2644182 - RNA, 14 nt, Human
uuccuauauccugu

SEQ ID NO: 2644183 - RNA, 21 nt, Human
uuagacucaucaaucaaauaa

SEQ ID NO: 2644184 - RNA, 20 nt, Human
uuaggcaaggcuaugugauu

SEQ ID NO: 2644185 - RNA, 19 nt, Human
uuaauauauguauuauuua

SEQ ID NO: 2644186 - RNA, 15 nt, Human
uuaauauauguauua

SEQ ID NO: 2644187 - RNA, 18 nt, Human
ugcaggcuccccugagga

SEQ ID NO: 2644188 - RNA, 15 nt, Human
ugcaggcuccccuga

SEQ ID NO: 2644189 - RNA, 17 nt, Human
ugcaggcuccccugagg

SEQ ID NO: 2644190 - RNA, 17 nt, Human
ugcgccaccgcccagag

SEQ ID NO: 2644191 - RNA, 13 nt, Human
ugacaauguugua

SEQ ID NO: 2644192 - RNA, 14 nt, Human
ugacaauguuguag

SEQ ID NO: 2644193 - RNA, 13 nt, Human
ucaucaaucaaau

SEQ ID NO: 2644194 - RNA, 21 nt, Human
ucaucaaucaaauaaguauuu

SEQ ID NO: 2644195 - RNA, 23 nt, Human
ucaucaaucaaauaaguauuuau

SEQ ID NO: 2644196 - RNA, 13 nt, Human
uccaaaacugccu

SEQ ID NO: 2644197 - RNA, 12 nt, Human
uccaaaacugcc

SEQ ID NO: 2644198 - RNA, 23 nt, Human
uaggugaucccguuuuccccaug

SEQ ID NO: 2644199 - RNA, 16 nt, Human
uauauguauuauuuau

SEQ ID NO: 2644200 - RNA, 19 nt, Human
uauauguauuauuuauaau

SEQ ID NO: 2644201 - RNA, 17 nt, Human
uauaauagcaacuuuug

SEQ ID NO: 2644202 - RNA, 12 nt, Human
uaugaauaaagu

SEQ ID NO: 2644203 - RNA, 21 nt, Human
uaucuaauauauaugaauaaa

SEQ ID NO: 2644204 - RNA, 17 nt, Human
uaucuaauauauaugaa

SEQ ID NO: 2644205 - RNA, 18 nt, Human
uaucuaauauauaugaau

SEQ ID NO: 2644206 - RNA, 20 nt, Human
uaucuaauauauaugaauaa

SEQ ID NO: 2644207 - RNA, 15 nt, Human
uauuauuuauaauuc

SEQ ID NO: 2644208 - RNA, 20 nt, Human
uauuguugacaacugugacu

SEQ ID NO: 2644209 - RNA, 23 nt, Human
uauuguugacaacugugacugua

SEQ ID NO: 2644210 - RNA, 19 nt, Human
uauuguugacaacugugac

SEQ ID NO: 2644211 - RNA, 19 nt, Human
uauuugaauuuuaaaucua

SEQ ID NO: 2644212 - RNA, 21 nt, Human
uauuugaauuuuaaaucuaaa

SEQ ID NO: 2644213 - RNA, 12 nt, Human
uauuugaauuuu

SEQ ID NO: 2644214 - RNA, 18 nt, Human
uauuugaauuuuaaaucu

SEQ ID NO: 2644215 - RNA, 18 nt, Human
gugaucccguuuucccca

SEQ ID NO: 2644216 - RNA, 12 nt, Human
guauuauuuaua

SEQ ID NO: 2644217 - RNA, 17 nt, Human
guaaugaaaaugaauau

SEQ ID NO: 2644218 - RNA, 19 nt, Human
gcuccauaguuuggcauuu

SEQ ID NO: 2644219 - RNA, 13 nt, Human
gcccuuuuccccu

SEQ ID NO: 2644220 - RNA, 19 nt, Human
gcccuuuuccccuaccaau

SEQ ID NO: 2644221 - RNA, 18 nt, Human
gccuccccucuccuuccu

SEQ ID NO: 2644222 - RNA, 21 nt, Human
gccuccccucuccuuccugug

SEQ ID NO: 2644223 - RNA, 19 nt, Human
gccuccccucuccuuccug

SEQ ID NO: 2644224 - RNA, 13 nt, Human
gccugagucaccu

SEQ ID NO: 2644225 - RNA, 20 nt, Human
ggaccuucgggcugugcccg

SEQ ID NO: 2644226 - RNA, 19 nt, Human
ggaccuucgggcugugccc

SEQ ID NO: 2644227 - RNA, 18 nt, Human
ggaccuucgggcugugcc

SEQ ID NO: 2644228 - RNA, 17 nt, Human
ggaccuucgggcugugc

SEQ ID NO: 2644229 - RNA, 18 nt, Human
ggaugcaggcuccccuga

SEQ ID NO: 2644230 - RNA, 17 nt, Human
gaccgcccuuuuccccu

SEQ ID NO: 2644231 - RNA, 18 nt, Human
gaccgcccuuuuccccua

SEQ ID NO: 2644232 - RNA, 19 nt, Human
gacaauguuguaguguccc

SEQ ID NO: 2644233 - RNA, 17 nt, Human
gacaauguuguaguguc

SEQ ID NO: 2644234 - RNA, 18 nt, Human
gacaauguuguagugucc

SEQ ID NO: 2644235 - RNA, 13 nt, Human
gacaacugugacu

SEQ ID NO: 2644236 - RNA, 12 nt, Human
gacaacugugac

SEQ ID NO: 2644237 - RNA, 12 nt, Human
gaaugugucagg

SEQ ID NO: 2644238 - RNA, 14 nt, Human
cugccgguuugaaa

SEQ ID NO: 2644239 - RNA, 20 nt, Human
cugccgguuugaaaauaugc

SEQ ID NO: 2644240 - RNA, 20 nt, Human
gaaaaugaauaucuauuaau

SEQ ID NO: 2644241 - RNA, 22 nt, Human
gaaaaugaauaucuauuaauau

SEQ ID NO: 2644242 - RNA, 14 nt, Human
ccuucgggcugugc

SEQ ID NO: 2644243 - RNA, 16 nt, Human
ccuucgggcugugccc

SEQ ID NO: 2644244 - RNA, 15 nt, Human
ccuucgggcugugcc

SEQ ID NO: 2644245 - RNA, 19 nt, Human
cgaagucauuaaacugguu

SEQ ID NO: 2644246 - RNA, 16 nt, Human
cgaagucauuaaacug

SEQ ID NO: 2644247 - RNA, 13 nt, Human
cuaccaauauuag

SEQ ID NO: 2644248 - RNA, 13 nt, Human
cuaauauauauga

SEQ ID NO: 2644249 - RNA, 18 nt, Human
cuaauauauaugaauaaa

SEQ ID NO: 2644250 - RNA, 15 nt, Human
cuaauauauaugaau

SEQ ID NO: 2644251 - RNA, 17 nt, Human
cuaauauauaugaauaa

SEQ ID NO: 2644252 - RNA, 21 nt, Human
cuauuuauuaauauuuaacau

SEQ ID NO: 2644253 - RNA, 13 nt, Human
cuauuuauuaaua

SEQ ID NO: 2644254 - RNA, 14 nt, Human
cuauuuauuaauau

SEQ ID NO: 2644255 - RNA, 15 nt, Human
cuauuuauuaauauu

SEQ ID NO: 2644256 - RNA, 17 nt, Human
cuauuuauuaauauuua

SEQ ID NO: 2644257 - RNA, 20 nt, Human
cuauuuauuaauauuuaaca

SEQ ID NO: 2644258 - RNA, 18 nt, Human
cucaggaggcaggaccuu

SEQ ID NO: 2644259 - RNA, 17 nt, Human
cucaggaggcaggaccu

SEQ ID NO: 2644260 - RNA, 16 nt, Human
cucaggaggcaggacc

SEQ ID NO: 2644261 - RNA, 16 nt, Human
cuccccucuccuuccu

SEQ ID NO: 2644262 - RNA, 12 nt, Human
cuccccugagga

SEQ ID NO: 2644263 - RNA, 11 nt, Human
cuccccugagg

SEQ ID NO: 2644264 - RNA, 17 nt, Human
cucauuuguuaaaauua

SEQ ID NO: 2644265 - RNA, 23 nt, Human
cccaugacaauguuguagugucc

SEQ ID NO: 2644266 - RNA, 19 nt, Human
ccccucuccuuccugugug

SEQ ID NO: 2644267 - RNA, 14 nt, Human
ccccucuccuuccu

SEQ ID NO: 2644268 - RNA, 14 nt, Human
cccucuccuuccug

SEQ ID NO: 2644269 - RNA, 15 nt, Human
ccaccccccaggccu

SEQ ID NO: 2644270 - RNA, 13 nt, Human
ccaccccccaggc

SEQ ID NO: 2644271 - RNA, 16 nt, Human
uuuguguaaugaaaau

SEQ ID NO: 2644272 - RNA, 17 nt, Human
acagaacuugaaugugu

SEQ ID NO: 2644273 - RNA, 20 nt, Human
acagaacuugaaugugucag

SEQ ID NO: 2644274 - RNA, 19 nt, Human
acagaacuugaauguguca

SEQ ID NO: 2644275 - RNA, 16 nt, Human
aagggaugcaggcucc

SEQ ID NO: 2644276 - RNA, 23 nt, Human
aagggaugcaggcuccccugagg

SEQ ID NO: 2644277 - RNA, 15 nt, Human
aucccguuuucccca

SEQ ID NO: 2644278 - RNA, 16 nt, Human
aucccguuuuccccau

SEQ ID NO: 2644279 - RNA, 18 nt, Human
aucccguuuuccccauga

SEQ ID NO: 2644280 - RNA, 20 nt, Human
aucccguuuuccccaugaca

SEQ ID NO: 2644281 - RNA, 13 nt, Human
aucuauuuauuaa

SEQ ID NO: 2644282 - RNA, 15 nt, Human
aucuauuuauuaaua

SEQ ID NO: 2644283 - RNA, 19 nt, Human
aucuauuuauuaauauuua

SEQ ID NO: 2644284 - RNA, 14 nt, Human
agucauuaaacugg

SEQ ID NO: 2644285 - RNA, 15 nt, Human
aguuuggcauuugca

SEQ ID NO: 2644286 - RNA, 17 nt, Human
auacaaugaacacuuau

SEQ ID NO: 2644287 - RNA, 18 nt, Human
auacaaugaacacuuaua

SEQ ID NO: 2644288 - RNA, 22 nt, Human
gaagugauacuauccaguuacu

SEQ ID NO: 2644289 - RNA, 12 nt, Human
aaauaaguauuu

SEQ ID NO: 2644290 - RNA, 14 nt, Human
aaauaaguauuuau

SEQ ID NO: 2644291 - RNA, 22 nt, Human
aaauaaguauuuauaauagcaa

SEQ ID NO: 2644292 - RNA, 15 nt, Human
aaauaaguauuuaua

SEQ ID NO: 2644293 - RNA, 17 nt, Human
aaauaaguauuuauaau

SEQ ID NO: 2644294 - RNA, 14 nt, Human
aaaaugaauaucua

SEQ ID NO: 2644295 - RNA, 18 nt, Human
aaaaugaauaucuauuaa

SEQ ID NO: 2644296 - RNA, 22 nt, Human
aaaaugaauaucuauuaauaua

SEQ ID NO: 2644297 - RNA, 16 nt, Human
aaaacauagcaucuca

SEQ ID NO: 2644298 - RNA, 21 nt, Human
gcugcagccugcgccaccgcc

SEQ ID NO: 2644299 - RNA, 16 nt, Human
gcugcagccugcgcca

SEQ ID NO: 2644300 - RNA, 14 nt, Human
cgcccuuuuccccu

SEQ ID NO: 2644301 - RNA, 20 nt, Human
ccaugacaauguuguagugu

SEQ ID NO: 2644302 - RNA, 16 nt, Human
cccaggaaaggcccag

SEQ ID NO: 2644303 - RNA, 15 nt, Human
caggaggcaggaccu

SEQ ID NO: 2644304 - RNA, 18 nt, Human
caggaggcaggaccuucg

SEQ ID NO: 2644305 - RNA, 16 nt, Human
caugacaauguuguag

SEQ ID NO: 2644306 - RNA, 23 nt, Human
auuaggugaucccguuuucccca

SEQ ID NO: 2644307 - RNA, 22 nt, Human
caaauggaaaguaacucauuug

SEQ ID NO: 2644308 - RNA, 18 nt, Human
aucucaggagauuucaug

SEQ ID NO: 2644309 - RNA, 15 nt, Human
aucugagccagugcu

SEQ ID NO: 2644310 - RNA, 15 nt, Human
uuguuuucugacuaa

SEQ ID NO: 2644311 - RNA, 18 nt, Human
uuguguguuuauuucacu

SEQ ID NO: 2644312 - RNA, 13 nt, Human
uucgaagucauua

SEQ ID NO: 2644313 - RNA, 14 nt, Human
uucgaagucauuaa

SEQ ID NO: 2644314 - RNA, 15 nt, Human
uucgaagucauuaaa

SEQ ID NO: 2644315 - RNA, 18 nt, Human
uucgaagucauuaaacug

SEQ ID NO: 2644316 - RNA, 16 nt, Human
auauuuuuagacucau

SEQ ID NO: 2644317 - RNA, 19 nt, Human
auauauguauuauuuauaa

SEQ ID NO: 2644318 - RNA, 20 nt, Human
auauauguauuauuuauaau

SEQ ID NO: 2644319 - RNA, 13 nt, Human
auaucuauuaaua

SEQ ID NO: 2644320 - RNA, 14 nt, Human
auaucuauuaauau

SEQ ID NO: 2644321 - RNA, 15 nt, Human
auaucuauuaauaua

SEQ ID NO: 2644322 - RNA, 18 nt, Human
auaucuauuaauauaugu

SEQ ID NO: 2644323 - RNA, 22 nt, Human
auaucuauuaauauauguauua

SEQ ID NO: 2644324 - RNA, 19 nt, Human
auaguucugagcugccagu

SEQ ID NO: 2644325 - RNA, 12 nt, Human
auauaugaauaa

SEQ ID NO: 2644326 - RNA, 14 nt, Human
auauauaugaauaa

SEQ ID NO: 2644327 - RNA, 15 nt, Human
auauauaugaauaaa

SEQ ID NO: 2644328 - RNA, 15 nt, Human
auuuaacauuauuua

SEQ ID NO: 2644329 - RNA, 16 nt, Human
auuuaacauuauuuau

SEQ ID NO: 2644330 - RNA, 17 nt, Human
auuuaacauuauuuaua

SEQ ID NO: 2644331 - RNA, 20 nt, Human
auuuaacauuauuuauaugg

SEQ ID NO: 2644332 - RNA, 20 nt, Human
auuaauauauguauuauuua

SEQ ID NO: 2644333 - RNA, 16 nt, Human
auuaauauauguauua

SEQ ID NO: 2644334 - RNA, 21 nt, Human
auuaauauauguauuauuuau

SEQ ID NO: 2644335 - RNA, 22 nt, Human
auuaauauauguauuauuuaua

SEQ ID NO: 2644336 - RNA, 13 nt, Human
auuauuuauaugg

SEQ ID NO: 2644337 - RNA, 12 nt, Human
auuauuuauaau

SEQ ID NO: 2644338 - RNA, 22 nt, Human
auuauuuauauggggaauauau

SEQ ID NO: 2644339 - RNA, 15 nt, Human
auuaucaauaucuaa

SEQ ID NO: 2644340 - RNA, 17 nt, Human
auuaucaauaucuaaua

SEQ ID NO: 2644341 - RNA, 19 nt, Human
auuaucaauaucuaauaua

SEQ ID NO: 2644342 - RNA, 19 nt, Human
auguuguagugucccccac

SEQ ID NO: 2644343 - RNA, 12 nt, Human
auguuguagugu

SEQ ID NO: 2644344 - RNA, 18 nt, Human
auguuguaguguccccca

SEQ ID NO: 2644345 - RNA, 13 nt, Human
uuuggcauuugca

SEQ ID NO: 2644346 - RNA, 21 nt, Human
auaauagcaacuuuuguguaa

SEQ ID NO: 2644347 - RNA, 16 nt, Human
uuaauauuuaacauua

SEQ ID NO: 2644348 - RNA, 17 nt, Human
uuaauauuuaacauuau

SEQ ID NO: 2644349 - RNA, 12 nt, Human
uuaauauuuaac

SEQ ID NO: 2644350 - RNA, 21 nt, Human
aguuacugccgguuugaaaau

SEQ ID NO: 2644351 - RNA, 13 nt, Human
agugcuuuaaugg

SEQ ID NO: 2644352 - RNA, 14 nt, Human
uguauuauuuauaa

SEQ ID NO: 2644353 - RNA, 15 nt, Human
uguauuauuuauaau

SEQ ID NO: 2644354 - RNA, 14 nt, Human
uguaaguucacaac

SEQ ID NO: 2644355 - RNA, 19 nt, Human
uggaaaguaacucauuugu

SEQ ID NO: 2644356 - RNA, 20 nt, Human
aggcaccucacaggccccag

SEQ ID NO: 2644357 - RNA, 14 nt, Human
ugcagccugcgcca

SEQ ID NO: 2644358 - RNA, 17 nt, Human
ugaugauacaaugaaca

SEQ ID NO: 2644359 - RNA, 21 nt, Human
agccaccgaagccgccugugg

SEQ ID NO: 2644360 - RNA, 20 nt, Human
agccaccgaagccgccugug

SEQ ID NO: 2644361 - RNA, 15 nt, Human
agccaccgaagccgc

SEQ ID NO: 2644362 - RNA, 22 nt, Human
agccaccgaagccgccugugga

SEQ ID NO: 2644363 - RNA, 18 nt, Human
ugauacuauccaguuacu

SEQ ID NO: 2644364 - RNA, 15 nt, Human
agcaacuuuugugua

SEQ ID NO: 2644365 - RNA, 20 nt, Human
agcaacuuuuguguaaugaa

SEQ ID NO: 2644366 - RNA, 23 nt, Human
ugaauuuuaaaucuaaaucuauu

SEQ ID NO: 2644367 - RNA, 17 nt, Human
ugaauuuuaaaucuaaa

SEQ ID NO: 2644368 - RNA, 18 nt, Human
ugaauaucuauuaauaua

SEQ ID NO: 2644369 - RNA, 21 nt, Human
ugaauaucuauuaauauaugu

SEQ ID NO: 2644370 - RNA, 12 nt, Human
ugaauaaagugu

SEQ ID NO: 2644371 - RNA, 18 nt, Human
agaacuugaaugugucag

SEQ ID NO: 2644372 - RNA, 16 nt, Human
ucuccuuccugugugu

SEQ ID NO: 2644373 - RNA, 15 nt, Human
acuugaaugugucag

SEQ ID NO: 2644374 - RNA, 12 nt, Human
ucgggcugugcc

SEQ ID NO: 2644375 - RNA, 13 nt, Human
ucgggcugugccc

SEQ ID NO: 2644376 - RNA, 14 nt, Human
acccugaugaaaac

SEQ ID NO: 2644377 - RNA, 18 nt, Human
acauuauuuauaugggga

SEQ ID NO: 2644378 - RNA, 14 nt, Human
acauuauuuauaug

SEQ ID NO: 2644379 - RNA, 21 nt, Human
ucaaucaaauaaguauuuaua

SEQ ID NO: 2644380 - RNA, 15 nt, Human
accuucgggcugugc

SEQ ID NO: 2644381 - RNA, 14 nt, Human
accuucgggcugug

SEQ ID NO: 2644382 - RNA, 17 nt, Human
accuucgggcugugccc

SEQ ID NO: 2644383 - RNA, 16 nt, Human
accuucgggcugugcc

SEQ ID NO: 2644384 - RNA, 18 nt, Human
accuucgggcugugcccg

SEQ ID NO: 2644385 - RNA, 16 nt, Human
uccccucuccuuccug

SEQ ID NO: 2644386 - RNA, 13 nt, Human
uaugugauuacaa

SEQ ID NO: 2644387 - RNA, 14 nt, Human
acacuuauaaguga

SEQ ID NO: 2644388 - RNA, 14 nt, Human
uauaagugaaguga

SEQ ID NO: 2644389 - RNA, 15 nt, Human
uauaagugaagugau

SEQ ID NO: 2644390 - RNA, 18 nt, Human
uauaagugaagugauacu

SEQ ID NO: 2644391 - RNA, 14 nt, Human
aauguuguaguguc

SEQ ID NO: 2644392 - RNA, 21 nt, Human
uaauuccuauauccugugacu

SEQ ID NO: 2644393 - RNA, 21 nt, Human
uacaaugaacacuuauaagug

SEQ ID NO: 2644394 - RNA, 14 nt, Human
uaaguauuuauaau

SEQ ID NO: 2644395 - RNA, 16 nt, Human
aaucuauuuauuaaua

SEQ ID NO: 2644396 - RNA, 17 nt, Human
aaucuauuuauuaauau

SEQ ID NO: 2644397 - RNA, 18 nt, Human
aaucuauuuauuaauauu

SEQ ID NO: 2644398 - RNA, 20 nt, Human
aaucuauuuauuaauauuua

SEQ ID NO: 2644399 - RNA, 21 nt, Human
aaucuauuuauuaauauuuaa

SEQ ID NO: 2644400 - RNA, 14 nt, Human
aaucuaaaucuauu

SEQ ID NO: 2644401 - RNA, 15 nt, Human
aaucuaaaucuauuu

SEQ ID NO: 2644402 - RNA, 19 nt, Human
aaucuaaaucuauuuauua

SEQ ID NO: 2644403 - RNA, 16 nt, Human
aaucuaaaucuauuua

SEQ ID NO: 2644404 - RNA, 17 nt, Human
aaucuaaaucuauuuau

SEQ ID NO: 2644405 - RNA, 14 nt, Human
aauauauuuuuaga

SEQ ID NO: 2644406 - RNA, 18 nt, Human
aauauauuuuuagacuca

SEQ ID NO: 2644407 - RNA, 15 nt, Human
aauauauuuuuagac

SEQ ID NO: 2644408 - RNA, 13 nt, Human
aauagcaacuuuu

SEQ ID NO: 2644409 - RNA, 19 nt, Human
aauagcaacuuuuguguaa

SEQ ID NO: 2644410 - RNA, 15 nt, Human
aauagcaacuuuugu

SEQ ID NO: 2644411 - RNA, 17 nt, Human
aauagcaacuuuugugu

SEQ ID NO: 2644412 - RNA, 18 nt, Human
guguguccaaaacugccu

SEQ ID NO: 2644413 - RNA, 12 nt, Human
aaguauuuauaa

SEQ ID NO: 2644414 - RNA, 13 nt, Human
aaguauuuauaau

SEQ ID NO: 2644415 - RNA, 16 nt, Human
aagucauuaaacuggu

SEQ ID NO: 2644416 - RNA, 17 nt, Human
aagucauuaaacugguu

SEQ ID NO: 2644417 - RNA, 13 nt, Human
aagucauuaaacu

SEQ ID NO: 2644418 - RNA, 14 nt, Human
aagucauuaaacug

SEQ ID NO: 2644419 - RNA, 16 nt, Human
guuuauuucacuugau

SEQ ID NO: 2644420 - RNA, 18 nt, Human
gucagacagaacuugaau

SEQ ID NO: 2644421 - RNA, 19 nt, Human
aacucauuuguuaaaauua

SEQ ID NO: 2644422 - RNA, 15 nt, Human
caauaucuaauauau

SEQ ID NO: 2644423 - RNA, 16 nt, Human
caauaucuaauauaua

SEQ ID NO: 2644424 - RNA, 17 nt, Human
caauaucuaauauauau

SEQ ID NO: 2644425 - RNA, 14 nt, Human
caauguuguagugu

SEQ ID NO: 2644426 - RNA, 21 nt, Human
uguuaaaauuaucaauaucua

SEQ ID NO: 2644427 - RNA, 23 nt, Human
uguuaaaauuaucaauaucuaau

SEQ ID NO: 2644428 - RNA, 14 nt, Human
uguguuuauuucac

SEQ ID NO: 2644429 - RNA, 15 nt, Human
uguguuuauuucacu

SEQ ID NO: 2644430 - RNA, 15 nt, Human
uguugacaacuguga

SEQ ID NO: 2644431 - RNA, 18 nt, Human
uguugacaacugugacug

SEQ ID NO: 2644432 - RNA, 20 nt, Human
uuaaaucuaaaucuauuuau

SEQ ID NO: 2644433 - RNA, 13 nt, Human
uguguaaugaaaa

SEQ ID NO: 2644434 - RNA, 20 nt, Human
ugccuggugcuuccaaauau

SEQ ID NO: 2644435 - RNA, 16 nt, Human
uccauaguuuggcauu

SEQ ID NO: 2644436 - RNA, 20 nt, Human
uccauaguuuggcauuugca

SEQ ID NO: 2644437 - RNA, 19 nt, Human
uccauaguuuggcauuugc

SEQ ID NO: 2644438 - RNA, 17 nt, Human
ucaggaggcaggaccuu

SEQ ID NO: 2644439 - RNA, 20 nt, Human
ucugagccagugcuuuaaug

SEQ ID NO: 2644440 - RNA, 11 nt, Human
ugacuaauuag

SEQ ID NO: 2644441 - RNA, 12 nt, Human
ugagcugccagu

SEQ ID NO: 2644442 - RNA, 14 nt, Human
ugagcugccagugg

SEQ ID NO: 2644443 - RNA, 12 nt, Human
ugacaacuguga

SEQ ID NO: 2644444 - RNA, 13 nt, Human
ugacaacugugac

SEQ ID NO: 2644445 - RNA, 14 nt, Human
ugacaacugugacu

SEQ ID NO: 2644446 - RNA, 15 nt, Human
ugacaacugugacug

SEQ ID NO: 2644447 - RNA, 16 nt, Human
ugacaacugugacugu

SEQ ID NO: 2644448 - RNA, 21 nt, Human
uaauuaggcaaggcuauguga

SEQ ID NO: 2644449 - RNA, 22 nt, Human
uaauuaggcaaggcuaugugau

SEQ ID NO: 2644450 - RNA, 22 nt, Human
uagcaucucaggagauuucaug

SEQ ID NO: 2644451 - RNA, 16 nt, Human
uauaugaauaaagugu

SEQ ID NO: 2644452 - RNA, 17 nt, Human
uaauuaggcaaggcuau

SEQ ID NO: 2644453 - RNA, 16 nt, Human
uaauggcaugucagac

SEQ ID NO: 2644454 - RNA, 15 nt, Human
guuuuccccaugaca

SEQ ID NO: 2644455 - RNA, 16 nt, Human
guucugagcugccagu

SEQ ID NO: 2644456 - RNA, 18 nt, Human
guucugagcugccagugg

SEQ ID NO: 2644457 - RNA, 12 nt, Human
gucauuaaacug

SEQ ID NO: 2644458 - RNA, 13 nt, Human
gucauuaaacugg

SEQ ID NO: 2644459 - RNA, 15 nt, Human
gucauuaaacugguu

SEQ ID NO: 2644460 - RNA, 18 nt, Human
uuuuaaaucuaaaucuau

SEQ ID NO: 2644461 - RNA, 14 nt, Human
uuuuaaaucuaaau

SEQ ID NO: 2644462 - RNA, 21 nt, Human
uuuuaaaucuaaaucuauuua

SEQ ID NO: 2644463 - RNA, 18 nt, Human
gccugcaaucugagccag

SEQ ID NO: 2644464 - RNA, 20 nt, Human
gccuggugcuuccaaauauu

SEQ ID NO: 2644465 - RNA, 15 nt, Human
gcaaggcuaugugau

SEQ ID NO: 2644466 - RNA, 18 nt, Human
gcaauauuugaauuuuaa

SEQ ID NO: 2644467 - RNA, 14 nt, Human
gcaauauuugaauu

SEQ ID NO: 2644468 - RNA, 17 nt, Human
gaucccguuuuccccau

SEQ ID NO: 2644469 - RNA, 16 nt, Human
gaucccguuuucccca

SEQ ID NO: 2644470 - RNA, 22 nt, Human
gacucaucaaucaaauaaguau

SEQ ID NO: 2644471 - RNA, 14 nt, Human
gaacuugaaugugu

SEQ ID NO: 2644472 - RNA, 17 nt, Human
gaacuugaaugugucag

SEQ ID NO: 2644473 - RNA, 22 nt, Human
cugagccagugcuuuaauggca

SEQ ID NO: 2644474 - RNA, 14 nt, Human
cucuccuuccugug

SEQ ID NO: 2644475 - RNA, 22 nt, Human
cgcccagagacccaagcugccu

SEQ ID NO: 2644476 - RNA, 21 nt, Human
cuaaaucuauuuauuaauauu

SEQ ID NO: 2644477 - RNA, 16 nt, Human
cuaaaucuauuuauua

SEQ ID NO: 2644478 - RNA, 19 nt, Human
cuaaaucuauuuauuaaua

SEQ ID NO: 2644479 - RNA, 12 nt, Human
cuaaaucuauuu

SEQ ID NO: 2644480 - RNA, 14 nt, Human
cuaaaucuauuuau

SEQ ID NO: 2644481 - RNA, 15 nt, Human
cuauauccugugacu

SEQ ID NO: 2644482 - RNA, 17 nt, Human
cuauauccugugacugu

SEQ ID NO: 2644483 - RNA, 22 nt, Human
cuagugcuccauaguuuggcau

SEQ ID NO: 2644484 - RNA, 18 nt, Human
cccguuuuccccaugaca

SEQ ID NO: 2644485 - RNA, 12 nt, Human
cccguuuucccc

SEQ ID NO: 2644486 - RNA, 16 nt, Human
cccguuuuccccauga

SEQ ID NO: 2644487 - RNA, 15 nt, Human
ccggggaaaggcaag

SEQ ID NO: 2644488 - RNA, 18 nt, Human
cccaugacaauguuguag

SEQ ID NO: 2644489 - RNA, 22 nt, Human
cccauggguuguguguuuauuu

SEQ ID NO: 2644490 - RNA, 23 nt, Human
cccauggguuguguguuuauuuc

SEQ ID NO: 2644491 - RNA, 10 nt, Human
cauuaaacug

SEQ ID NO: 2644492 - RNA, 20 nt, Human
cauaguucugagcugccagu

SEQ ID NO: 2644493 - RNA, 21 nt, Human
cauaguucugagcugccagug

SEQ ID NO: 2644494 - RNA, 13 nt, Human
cauaguuuggcau

SEQ ID NO: 2644495 - RNA, 16 nt, Human
cauaguuuggcauuug

SEQ ID NO: 2644496 - RNA, 14 nt, Human
cauaguuuggcauu

SEQ ID NO: 2644497 - RNA, 15 nt, Human
cauaguuuggcauuu

SEQ ID NO: 2644498 - RNA, 18 nt, Human
cauaguuuggcauuugca

SEQ ID NO: 2644499 - RNA, 19 nt, Human
caucaaucaaauaaguauu

SEQ ID NO: 2644500 - RNA, 18 nt, Human
caucucaggagauuucau

SEQ ID NO: 2644501 - RNA, 22 nt, Human
caguggaccgcccuuuuccccu

SEQ ID NO: 2644502 - RNA, 21 nt, Human
caguggaccgcccuuuucccc

SEQ ID NO: 2644503 - RNA, 16 nt, Human
cagugcuuuaauggca

SEQ ID NO: 2644504 - RNA, 17 nt, Human
aaauauuguugacaacu

SEQ ID NO: 2644505 - RNA, 21 nt, Human
aaauauuguugacaacuguga

SEQ ID NO: 2644506 - RNA, 19 nt, Human
aaucaaauaaguauuuaua

SEQ ID NO: 2644507 - RNA, 14 nt, Human
aaucaaauaaguau

SEQ ID NO: 2644508 - RNA, 15 nt, Human
aaucaaauaaguauu

SEQ ID NO: 2644509 - RNA, 16 nt, Human
aaucaaauaaguauuu

SEQ ID NO: 2644510 - RNA, 18 nt, Human
aaucaaauaaguauuuau

SEQ ID NO: 2644511 - RNA, 14 nt, Human
acaacugugacugu

SEQ ID NO: 2644512 - RNA, 11 nt, Human
acaacugugac

SEQ ID NO: 2644513 - RNA, 13 nt, Human
acaacugugacug

SEQ ID NO: 2644514 - RNA, 20 nt, Human
aauuaucaauaucuaauaua

SEQ ID NO: 2644515 - RNA, 19 nt, Human
aggcagccaaccuaagcaa

SEQ ID NO: 2644516 - RNA, 20 nt, Human
agggaugcaggcuccccuga

SEQ ID NO: 2644517 - RNA, 18 nt, Human
agggaugcaggcuccccu

SEQ ID NO: 2644518 - RNA, 22 nt, Human
auagcaacuuuuguguaaugaa

SEQ ID NO: 2644519 - RNA, 19 nt, Human
aucaaauaaguauuuauaa

SEQ ID NO: 2644520 - RNA, 20 nt, Human
aucaaauaaguauuuauaau

SEQ ID NO: 2644521 - RNA, 17 nt, Human
aucaaauaaguauuuau

SEQ ID NO: 2644522 - RNA, 18 nt, Human
aucaaauaaguauuuaua

SEQ ID NO: 2644523 - RNA, 22 nt, Human
aguaacucauuuguuaaaauua

SEQ ID NO: 2644524 - RNA, 12 nt, Human
aguaacucauuu

SEQ ID NO: 2644525 - RNA, 20 nt, Human
agugcuccauaguuuggcau

SEQ ID NO: 2644526 - RNA, 15 nt, Human
auaagugaagugaua

SEQ ID NO: 2644527 - RNA, 18 nt, Human
gacagaacuugaaugugu

SEQ ID NO: 2644528 - RNA, 23 nt, Human
ggcaggaccuucgggcugugccc

SEQ ID NO: 2644529 - RNA, 21 nt, Human
ggcaggaccuucgggcugugc

SEQ ID NO: 2644530 - RNA, 18 nt, Human
ggccccaggaaaggccca

SEQ ID NO: 2644531 - RNA, 18 nt, Human
ggaccgcccuuuuccccu

SEQ ID NO: 2644532 - RNA, 19 nt, Human
ggugaucccguuuucccca

SEQ ID NO: 2644533 - RNA, 22 nt, Human
ggggaaaggcaagguccggccc

SEQ ID NO: 2644534 - RNA, 17 nt, Human
ggggaaaggcaaggucc

SEQ ID NO: 2644535 - RNA, 21 nt, Human
gccugcgccaccgcccagaga

SEQ ID NO: 2644536 - RNA, 19 nt, Human
ccucaggaggcaggaccuu

SEQ ID NO: 2644537 - RNA, 15 nt, Human
ccucuccuuccugug

SEQ ID NO: 2644538 - RNA, 13 nt, Human
ccucuccuuccug

SEQ ID NO: 2644539 - RNA, 22 nt, Human
ccgcccagagacccaagcugcc

SEQ ID NO: 2644540 - RNA, 12 nt, Human
cgggcugugccc

SEQ ID NO: 2644541 - RNA, 14 nt, Human
auuuguuaaaauua

SEQ ID NO: 2644542 - RNA, 21 nt, Human
auuuguuaaaauuaucaauau

SEQ ID NO: 2644543 - RNA, 17 nt, Human
caaucaaauaaguauuu

SEQ ID NO: 2644544 - RNA, 22 nt, Human
caaucaaauaaguauuuauaau

SEQ ID NO: 2644545 - RNA, 23 nt, Human
caaucaaauaaguauuuauaaua

SEQ ID NO: 2644546 - RNA, 19 nt, Human
caauauuugaauuuuaaau

SEQ ID NO: 2644547 - RNA, 15 nt, Human
caauauuugaauuuu

SEQ ID NO: 2644548 - RNA, 20 nt, Human
cagacagaacuugaaugugu

SEQ ID NO: 2644549 - RNA, 22 nt, Human
cagacagaacuugaauguguca

SEQ ID NO: 2644550 - RNA, 23 nt, Human
cagacagaacuugaaugugucag

SEQ ID NO: 2644551 - RNA, 22 nt, Human
cauuuguuaaaauuaucaauau

SEQ ID NO: 2644552 - RNA, 18 nt, Human
cauuuguuaaaauuauca

SEQ ID NO: 2644553 - RNA, 15 nt, Human
cauuuguuaaaauua

SEQ ID NO: 2644554 - RNA, 18 nt, Human
auuugaauuuuaaaucua

SEQ ID NO: 2644555 - RNA, 20 nt, Human
auuugaauuuuaaaucuaaa

SEQ ID NO: 2644556 - RNA, 19 nt, Human
auuccuauauccugugacu

SEQ ID NO: 2644557 - RNA, 20 nt, Human
auuccuauauccugugacug

SEQ ID NO: 2644558 - RNA, 17 nt, Human
uuugaauuuuaaaucua

SEQ ID NO: 2644559 - RNA, 17 nt, Human
uuuuguguaaugaaaau

SEQ ID NO: 2644560 - RNA, 23 nt, Human
auuaauauuuaacauuauuuaua

SEQ ID NO: 2644561 - RNA, 12 nt, Human
auuaauauuuaa

SEQ ID NO: 2644562 - RNA, 23 nt, Human
uuguguaaugaaaaugaauaucu

SEQ ID NO: 2644563 - RNA, 24 nt, Human
uuguguaaugaaaaugaauaucua

SEQ ID NO: 2644564 - RNA, 19 nt, Human
uuuaaaucuaaaucuauuu

SEQ ID NO: 2644565 - RNA, 22 nt, Human
uuuaaaucuaaaucuauuuauu

SEQ ID NO: 2644566 - RNA, 18 nt, Human
uuuauauggggaauauau

SEQ ID NO: 2644567 - RNA, 13 nt, Human
augaacacuuaua

SEQ ID NO: 2644568 - RNA, 19 nt, Human
auaucuaauauauaugaau

SEQ ID NO: 2644569 - RNA, 13 nt, Human
auaucuaauauau

SEQ ID NO: 2644570 - RNA, 14 nt, Human
auaucuaauauaua

SEQ ID NO: 2644571 - RNA, 17 nt, Human
auaucuaauauauauga

SEQ ID NO: 2644572 - RNA, 18 nt, Human
auaucuaauauauaugaa

SEQ ID NO: 2644573 - RNA, 16 nt, Human
auauguauuauuuaua

SEQ ID NO: 2644574 - RNA, 17 nt, Human
auauguauuauuuauaa

SEQ ID NO: 2644575 - RNA, 18 nt, Human
auauguauuauuuauaau

SEQ ID NO: 2644576 - RNA, 22 nt, Human
auauguauuauuuauaauuccu

SEQ ID NO: 2644577 - RNA, 23 nt, Human
auauguauuauuuauaauuccua

SEQ ID NO: 2644578 - RNA, 12 nt, Human
auaucuauuaau

SEQ ID NO: 2644579 - RNA, 12 nt, Human
auaguuuggcau

SEQ ID NO: 2644580 - RNA, 17 nt, Human
auaguuuggcauuugca

SEQ ID NO: 2644581 - RNA, 14 nt, Human
auaguuuggcauuu

SEQ ID NO: 2644582 - RNA, 18 nt, Human
auaguuuggcauuugcac

SEQ ID NO: 2644583 - RNA, 14 nt, Human
uuauuucacuugau

SEQ ID NO: 2644584 - RNA, 21 nt, Human
uuauuuauauggggaauauau

SEQ ID NO: 2644585 - RNA, 19 nt, Human
aucaaucaaauaaguauuu

SEQ ID NO: 2644586 - RNA, 13 nt, Human
aucaaucaaauaa

SEQ ID NO: 2644587 - RNA, 15 nt, Human
aucaaucaaauaagu

SEQ ID NO: 2644588 - RNA, 15 nt, Human
aucaauaucuaauau

SEQ ID NO: 2644589 - RNA, 18 nt, Human
aucaauaucuaauauaua

SEQ ID NO: 2644590 - RNA, 22 nt, Human
uuccuguguguccaaaacugcc

SEQ ID NO: 2644591 - RNA, 21 nt, Human
uuccuguguguccaaaacugc

SEQ ID NO: 2644592 - RNA, 13 nt, Human
auauuguugacaa

SEQ ID NO: 2644593 - RNA, 15 nt, Human
auauuguugacaacu

SEQ ID NO: 2644594 - RNA, 21 nt, Human
auauuguugacaacugugacu

SEQ ID NO: 2644595 - RNA, 21 nt, Human
ugucagacagaacuugaaugu

SEQ ID NO: 2644596 - RNA, 23 nt, Human
ugucagacagaacuugaaugugu

SEQ ID NO: 2644597 - RNA, 23 nt, Human
uuaaaauuaucaauaucuaauau

SEQ ID NO: 2644598 - RNA, 16 nt, Human
uguuuucugacuaauu

SEQ ID NO: 2644599 - RNA, 17 nt, Human
uguuuucugacuaauua

SEQ ID NO: 2644600 - RNA, 18 nt, Human
aguucugagcugccagug

SEQ ID NO: 2644601 - RNA, 17 nt, Human
aguucugagcugccagu

SEQ ID NO: 2644602 - RNA, 19 nt, Human
uggugcuuccaaauauugu

SEQ ID NO: 2644603 - RNA, 18 nt, Human
aggugacccugaugaaaa

SEQ ID NO: 2644604 - RNA, 11 nt, Human
agcugccagug

SEQ ID NO: 2644605 - RNA, 18 nt, Human
ugcuccauaguuuggcau

SEQ ID NO: 2644606 - RNA, 23 nt, Human
ugcuccauaguuuggcauuugca

SEQ ID NO: 2644607 - RNA, 18 nt, Human
aggcaaggcuaugugauu

SEQ ID NO: 2644608 - RNA, 20 nt, Human
aggcaaggcuaugugauuac

SEQ ID NO: 2644609 - RNA, 20 nt, Human
aggaccuucgggcugugccc

SEQ ID NO: 2644610 - RNA, 19 nt, Human
aggaccuucgggcugugcc

SEQ ID NO: 2644611 - RNA, 18 nt, Human
aggaccuucgggcugugc

SEQ ID NO: 2644612 - RNA, 14 nt, Human
ugcaauauuugaau

SEQ ID NO: 2644613 - RNA, 19 nt, Human
agccugagucaccugcaga

SEQ ID NO: 2644614 - RNA, 16 nt, Human
agccugagucaccugc

SEQ ID NO: 2644615 - RNA, 21 nt, Human
ugaucccguuuuccccaugac

SEQ ID NO: 2644616 - RNA, 22 nt, Human
ugaucccguuuuccccaugaca

SEQ ID NO: 2644617 - RNA, 17 nt, Human
ugaucccguuuucccca

SEQ ID NO: 2644618 - RNA, 20 nt, Human
ugaucccguuuuccccauga

SEQ ID NO: 2644619 - RNA, 16 nt, Human
ugauacaaugaacacu

SEQ ID NO: 2644620 - RNA, 12 nt, Human
ugaaugugucag

SEQ ID NO: 2644621 - RNA, 14 nt, Human
agacagaacuugaa

SEQ ID NO: 2644622 - RNA, 17 nt, Human
agacagaacuugaaugu

SEQ ID NO: 2644623 - RNA, 13 nt, Human
ucugacuaauuag

SEQ ID NO: 2644624 - RNA, 15 nt, Human
ucugacuaauuaggc

SEQ ID NO: 2644625 - RNA, 23 nt, Human
acuuauaagugaagugauacuau

SEQ ID NO: 2644626 - RNA, 12 nt, Human
ucgaagucauua

SEQ ID NO: 2644627 - RNA, 16 nt, Human
ucgaagucauuaaacu

SEQ ID NO: 2644628 - RNA, 17 nt, Human
ucgaagucauuaaacug

SEQ ID NO: 2644629 - RNA, 18 nt, Human
ucgaagucauuaaacugg

SEQ ID NO: 2644630 - RNA, 20 nt, Human
ucgaagucauuaaacugguu

SEQ ID NO: 2644631 - RNA, 15 nt, Human
uccccucuccuuccu

SEQ ID NO: 2644632 - RNA, 11 nt, Human
uccccaugaca

SEQ ID NO: 2644633 - RNA, 18 nt, Human
acgguuucgaagucauua

SEQ ID NO: 2644634 - RNA, 19 nt, Human
uauuuuuagacucaucaau

SEQ ID NO: 2644635 - RNA, 17 nt, Human
ucaaauaaguauuuaua

SEQ ID NO: 2644636 - RNA, 20 nt, Human
ucaaauaaguauuuauaaua

SEQ ID NO: 2644637 - RNA, 18 nt, Human
ucaaauaaguauuuauaa

SEQ ID NO: 2644638 - RNA, 19 nt, Human
ucaaauaaguauuuauaau

SEQ ID NO: 2644639 - RNA, 17 nt, Human
uagcaacuuuuguguaa

SEQ ID NO: 2644640 - RNA, 13 nt, Human
uagcaacuuuugu

SEQ ID NO: 2644641 - RNA, 16 nt, Human
acaaugaacacuuaua

SEQ ID NO: 2644642 - RNA, 18 nt, Human
aauauauguauuauuuau

SEQ ID NO: 2644643 - RNA, 14 nt, Human
aauauauguauuau

SEQ ID NO: 2644644 - RNA, 12 nt, Human
aauauauguauu

SEQ ID NO: 2644645 - RNA, 21 nt, Human
aauauauguauuauuuauaau

SEQ ID NO: 2644646 - RNA, 20 nt, Human
aauauuguugacaacuguga

SEQ ID NO: 2644647 - RNA, 16 nt, Human
aauauuguugacaacu

SEQ ID NO: 2644648 - RNA, 22 nt, Human
aauauuguugacaacugugacu

SEQ ID NO: 2644649 - RNA, 15 nt, Human
aauaucuauuaauau

SEQ ID NO: 2644650 - RNA, 16 nt, Human
aauaucuauuaauaua

SEQ ID NO: 2644651 - RNA, 14 nt, Human
aauaucuaauauau

SEQ ID NO: 2644652 - RNA, 20 nt, Human
aauaucuaauauauaugaau

SEQ ID NO: 2644653 - RNA, 21 nt, Human
aauaucuaauauauaugaaua

SEQ ID NO: 2644654 - RNA, 22 nt, Human
aauaucuaauauauaugaauaa

SEQ ID NO: 2644655 - RNA, 14 nt, Human
aauaucuauuaaua

SEQ ID NO: 2644656 - RNA, 18 nt, Human
uaaaucuauuuauuaaua

SEQ ID NO: 2644657 - RNA, 19 nt, Human
uaaaucuauuuauuaauau

SEQ ID NO: 2644658 - RNA, 20 nt, Human
uaaaucuauuuauuaauauu

SEQ ID NO: 2644659 - RNA, 16 nt, Human
uaaaucuauuuauuaa

SEQ ID NO: 2644660 - RNA, 13 nt, Human
aaugaaaaugaau

SEQ ID NO: 2644661 - RNA, 16 nt, Human
aaugaaaaugaauauc

SEQ ID NO: 2644662 - RNA, 19 nt, Human
guguguccaaaacugccuc

SEQ ID NO: 2644663 - RNA, 15 nt, Human
aaggcuuuaucucag

SEQ ID NO: 2644664 - RNA, 15 nt, Human
guuguaguguccccc

SEQ ID NO: 2644665 - RNA, 15 nt, Human
aaggcuaugugauua

SEQ ID NO: 2644666 - RNA, 17 nt, Human
guccugccugcaauauu

SEQ ID NO: 2644667 - RNA, 16 nt, Human
aaaugaauaucuauua

SEQ ID NO: 2644668 - RNA, 17 nt, Human
aaaugaauaucuauuaa

SEQ ID NO: 2644669 - RNA, 18 nt, Human
aaaugaauaucuauuaau

SEQ ID NO: 2644670 - RNA, 19 nt, Human
aaaugaauaucuauuaaua

SEQ ID NO: 2644671 - RNA, 20 nt, Human
aaaucuaaaucuauuuauua

SEQ ID NO: 2644672 - RNA, 15 nt, Human
aaaucuaaaucuauu

SEQ ID NO: 2644673 - RNA, 16 nt, Human
aaaucuaaaucuauuu

SEQ ID NO: 2644674 - RNA, 17 nt, Human
aaaucuaaaucuauuua

SEQ ID NO: 2644675 - RNA, 22 nt, Human
aaaucuauuuauuaauauuuaa

SEQ ID NO: 2644676 - RNA, 12 nt, Human
aaaucuauuuau

SEQ ID NO: 2644677 - RNA, 16 nt, Human
aaaucuauuuauuaau

SEQ ID NO: 2644678 - RNA, 17 nt, Human
aaaucuauuuauuaaua

SEQ ID NO: 2644679 - RNA, 19 nt, Human
aaaucuauuuauuaauauu

SEQ ID NO: 2644680 - RNA, 16 nt, Human
aaauuaucaauaucua

SEQ ID NO: 2644681 - RNA, 12 nt, Human
caacugugacug

SEQ ID NO: 2644682 - RNA, 19 nt, Human
auuuuaaaucuaaaucuau

SEQ ID NO: 2644683 - RNA, 21 nt, Human
auuuuaaaucuaaaucuauuu

SEQ ID NO: 2644684 - RNA, 18 nt, Human
caaauauuguugacaacu

SEQ ID NO: 2644685 - RNA, 22 nt, Human
caaauauuguugacaacuguga

SEQ ID NO: 2644686 - RNA, 23 nt, Human
caaauauuguugacaacugugac

SEQ ID NO: 2644687 - RNA, 22 nt, Human
uuuguuaaaauuaucaauaucu

SEQ ID NO: 2644688 - RNA, 11 nt, Human
uuuauuucacu

SEQ ID NO: 2644689 - RNA, 17 nt, Human
uucaggaagggaugcag

SEQ ID NO: 2644690 - RNA, 22 nt, Human
uucaggaagggaugcaggcucc

SEQ ID NO: 2644691 - RNA, 15 nt, Human
uucugagcugccagu

SEQ ID NO: 2644692 - RNA, 12 nt, Human
uuggcauuugca

SEQ ID NO: 2644693 - RNA, 23 nt, Human
ugucauaguucugagcugccagu

SEQ ID NO: 2644694 - RNA, 19 nt, Human
uguguguccaaaacugccu

SEQ ID NO: 2644695 - RNA, 16 nt, Human
uguguguccaaaacug

SEQ ID NO: 2644696 - RNA, 13 nt, Human
uuaacauuauuua

SEQ ID NO: 2644697 - RNA, 22 nt, Human
ugcacgguuucgaagucauuaa

SEQ ID NO: 2644698 - RNA, 23 nt, Human
ugcacgguuucgaagucauuaaa

SEQ ID NO: 2644699 - RNA, 17 nt, Human
ugccuccccucuccuuc

SEQ ID NO: 2644700 - RNA, 13 nt, Human
ugaacacuuauaa

SEQ ID NO: 2644701 - RNA, 14 nt, Human
ucugagcugccagu

SEQ ID NO: 2644702 - RNA, 19 nt, Human
ucacaggccccaggaaagg

SEQ ID NO: 2644703 - RNA, 19 nt, Human
uauuuauuaauauuuaaca

SEQ ID NO: 2644704 - RNA, 13 nt, Human
uauuuauuaauau

SEQ ID NO: 2644705 - RNA, 17 nt, Human
uauuuauuaauauuuaa

SEQ ID NO: 2644706 - RNA, 18 nt, Human
uauuuauuaauauuuaac

SEQ ID NO: 2644707 - RNA, 17 nt, Human
guuucgaagucauuaaa

SEQ ID NO: 2644708 - RNA, 20 nt, Human
uaacucauuuguuaaaauua

SEQ ID NO: 2644709 - RNA, 12 nt, Human
uaacucauuugu

SEQ ID NO: 2644710 - RNA, 15 nt, Human
uaacauuauuuauau

SEQ ID NO: 2644711 - RNA, 16 nt, Human
uaacauuauuuauaug

SEQ ID NO: 2644712 - RNA, 12 nt, Human
uaacauuauuua

SEQ ID NO: 2644713 - RNA, 14 nt, Human
uaacauuauuuaua

SEQ ID NO: 2644714 - RNA, 20 nt, Human
uaauauauguauuauuuaua

SEQ ID NO: 2644715 - RNA, 14 nt, Human
uaauauauaugaau

SEQ ID NO: 2644716 - RNA, 16 nt, Human
uaauauauaugaauaa

SEQ ID NO: 2644717 - RNA, 18 nt, Human
uaauauauaugaauaaag

SEQ ID NO: 2644718 - RNA, 22 nt, Human
uaauccuuuguuuucugacuaa

SEQ ID NO: 2644719 - RNA, 16 nt, Human
uaauccuuuguuuucu

SEQ ID NO: 2644720 - RNA, 18 nt, Human
uaauccuuuguuuucuga

SEQ ID NO: 2644721 - RNA, 20 nt, Human
uaauccuuuguuuucugacu

SEQ ID NO: 2644722 - RNA, 23 nt, Human
uaauccuuuguuuucugacuaau

SEQ ID NO: 2644723 - RNA, 22 nt, Human
uagugcuccauaguuuggcauu

SEQ ID NO: 2644724 - RNA, 16 nt, Human
uaguuuggcauuugca

SEQ ID NO: 2644725 - RNA, 22 nt, Human
uauaauuccuauauccugugac

SEQ ID NO: 2644726 - RNA, 21 nt, Human
uauaauuccuauauccuguga

SEQ ID NO: 2644727 - RNA, 13 nt, Human
uauccugugacug

SEQ ID NO: 2644728 - RNA, 14 nt, Human
uauccugugacugu

SEQ ID NO: 2644729 - RNA, 16 nt, Human
uauccugugacugucu

SEQ ID NO: 2644730 - RNA, 17 nt, Human
uauccugugacugucuc

SEQ ID NO: 2644731 - RNA, 23 nt, Human
uauccugugacugucucacuuaa

SEQ ID NO: 2644732 - RNA, 19 nt, Human
ggcaccucacaggccccag

SEQ ID NO: 2644733 - RNA, 16 nt, Human
ggcaccucacaggccc

SEQ ID NO: 2644734 - RNA, 18 nt, Human
gcccauccccaggcaccu

SEQ ID NO: 2644735 - RNA, 15 nt, Human
gccccaggaaaggcc

SEQ ID NO: 2644736 - RNA, 22 nt, Human
gccccaggaaaggcccagccac

SEQ ID NO: 2644737 - RNA, 23 nt, Human
gcagccugcgccaccgcccagag

SEQ ID NO: 2644738 - RNA, 20 nt, Human
gcaacuuuuguguaaugaaa

SEQ ID NO: 2644739 - RNA, 18 nt, Human
gcaagguccggcccaucc

SEQ ID NO: 2644740 - RNA, 19 nt, Human
gaugcaggcuccccugagg

SEQ ID NO: 2644741 - RNA, 20 nt, Human
gaugcaggcuccccugagga

SEQ ID NO: 2644742 - RNA, 12 nt, Human
gaugcaggcucc

SEQ ID NO: 2644743 - RNA, 16 nt, Human
gaugcaggcuccccug

SEQ ID NO: 2644744 - RNA, 17 nt, Human
gaugcaggcuccccuga

SEQ ID NO: 2644745 - RNA, 17 nt, Human
gaagucauuaaacuggu

SEQ ID NO: 2644746 - RNA, 15 nt, Human
gaagucauuaaacug

SEQ ID NO: 2644747 - RNA, 15 nt, Human
gacuaauuaggcaag

SEQ ID NO: 2644748 - RNA, 19 nt, Human
gaccuucgggcugugcccg

SEQ ID NO: 2644749 - RNA, 18 nt, Human
gaccuucgggcugugccc

SEQ ID NO: 2644750 - RNA, 16 nt, Human
gaccuucgggcugugc

SEQ ID NO: 2644751 - RNA, 20 nt, Human
cuuuguuuucugacuaauua

SEQ ID NO: 2644752 - RNA, 17 nt, Human
cuuuguuuucugacuaa

SEQ ID NO: 2644753 - RNA, 20 nt, Human
cuuauaagugaagugauacu

SEQ ID NO: 2644754 - RNA, 19 nt, Human
cuuauaagugaagugauac

SEQ ID NO: 2644755 - RNA, 14 nt, Human
cuucgggcugugcc

SEQ ID NO: 2644756 - RNA, 21 nt, Human
cucuuguaucccuagugcucc

SEQ ID NO: 2644757 - RNA, 12 nt, Human
cugcaauauuug

SEQ ID NO: 2644758 - RNA, 16 nt, Human
cugcaauauuugaauu

SEQ ID NO: 2644759 - RNA, 18 nt, Human
cugcaauauuugaauuuu

SEQ ID NO: 2644760 - RNA, 19 nt, Human
cugcaauauuugaauuuua

SEQ ID NO: 2644761 - RNA, 23 nt, Human
cugccucaggaggcaggaccuuc

SEQ ID NO: 2644762 - RNA, 22 nt, Human
cugccucaggaggcaggaccuu

SEQ ID NO: 2644763 - RNA, 20 nt, Human
cugccugcaauauuugaauu

SEQ ID NO: 2644764 - RNA, 18 nt, Human
cugccugcaauauuugaa

SEQ ID NO: 2644765 - RNA, 19 nt, Human
cugccugcaauauuugaau

SEQ ID NO: 2644766 - RNA, 17 nt, Human
cugccugcaauauuuga

SEQ ID NO: 2644767 - RNA, 17 nt, Human
cuggugcuuccaaauau

SEQ ID NO: 2644768 - RNA, 12 nt, Human
ccguuuucccca

SEQ ID NO: 2644769 - RNA, 15 nt, Human
ccguuuuccccauga

SEQ ID NO: 2644770 - RNA, 17 nt, Human
ccguuuuccccaugaca

SEQ ID NO: 2644771 - RNA, 15 nt, Human
ccucacaggccccag

SEQ ID NO: 2644772 - RNA, 17 nt, Human
ccccuaccaauauuagg

SEQ ID NO: 2644773 - RNA, 12 nt, Human
cccuuuuccccu

SEQ ID NO: 2644774 - RNA, 13 nt, Human
cccuuuuccccua

SEQ ID NO: 2644775 - RNA, 17 nt, Human
ccuccccucuccuuccu

SEQ ID NO: 2644776 - RNA, 15 nt, Human
ccuggugcuuccaaa

SEQ ID NO: 2644777 - RNA, 14 nt, Human
cguuuuccccauga

SEQ ID NO: 2644778 - RNA, 16 nt, Human
cguuuuccccaugaca

SEQ ID NO: 2644779 - RNA, 20 nt, Human
cggcccauccccaggcaccu

SEQ ID NO: 2644780 - RNA, 18 nt, Human
ccauaguuuggcauuugc

SEQ ID NO: 2644781 - RNA, 17 nt, Human
ccccaccccccaggccu

SEQ ID NO: 2644782 - RNA, 23 nt, Human
caaauauuguugacaacugugac

SEQ ID NO: 2644783 - RNA, 22 nt, Human
caaauauuguugacaacuguga

SEQ ID NO: 2644784 - RNA, 18 nt, Human
caaauauuguugacaacu

SEQ ID NO: 2644785 - RNA, 14 nt, Human
caaauguuuauuuu

SEQ ID NO: 2644786 - RNA, 13 nt, Human
caaauguuuauuu

SEQ ID NO: 2644787 - RNA, 20 nt, Human
caaagggccugcccagacaa

SEQ ID NO: 2644788 - RNA, 21 nt, Human
caaagggccugcccagacaag

SEQ ID NO: 2644789 - RNA, 21 nt, Human
auuuuaaaucuaaaucuauuu

SEQ ID NO: 2644790 - RNA, 19 nt, Human
auuuuaaaucuaaaucuau

SEQ ID NO: 2644791 - RNA, 17 nt, Human
auuuuaaagugcaaaag

SEQ ID NO: 2644792 - RNA, 16 nt, Human
auuuuaagacugauuu

SEQ ID NO: 2644793 - RNA, 20 nt, Human
auuuuaauagggaauauauc

SEQ ID NO: 2644794 - RNA, 19 nt, Human
caaacugggaugaaacuaa

SEQ ID NO: 2644795 - RNA, 12 nt, Human
caaagaaauauu

SEQ ID NO: 2644796 - RNA, 14 nt, Human
caaagaaauauuaa

SEQ ID NO: 2644797 - RNA, 20 nt, Human
caaagaaauccggagaagcu

SEQ ID NO: 2644798 - RNA, 14 nt, Human
caaagacaaaaguc

SEQ ID NO: 2644799 - RNA, 19 nt, Human
caaagacaaaagucugucu

SEQ ID NO: 2644800 - RNA, 21 nt, Human
caaacugcuucccuuacuuug

SEQ ID NO: 2644801 - RNA, 21 nt, Human
caaagagguuuuaaaaaaauc

SEQ ID NO: 2644802 - RNA, 14 nt, Human
caaagagguuuuaa

SEQ ID NO: 2644803 - RNA, 12 nt, Human
caacugugacug

SEQ ID NO: 2644804 - RNA, 19 nt, Human
caacuggguccagaagaga

SEQ ID NO: 2644805 - RNA, 22 nt, Human
caacuucugccucccaugcuua

SEQ ID NO: 2644806 - RNA, 16 nt, Human
caagaccgaucggcgg

SEQ ID NO: 2644807 - RNA, 11 nt, Human
caagcagagga

SEQ ID NO: 2644808 - RNA, 14 nt, Human
caagcagaggacca

SEQ ID NO: 2644809 - RNA, 18 nt, Human
caagcagaggaccagggc

SEQ ID NO: 2644810 - RNA, 19 nt, Human
caagcagaggaccagggcc

SEQ ID NO: 2644811 - RNA, 20 nt, Human
caagcagaggaccagggccu

SEQ ID NO: 2644812 - RNA, 21 nt, Human
caagcagaggaccagggccuu

SEQ ID NO: 2644813 - RNA, 22 nt, Human
caagcagaggaccagggccuuu

SEQ ID NO: 2644814 - RNA, 14 nt, Human
caagagggggugga

SEQ ID NO: 2644815 - RNA, 15 nt, Human
caagaggggguggag

SEQ ID NO: 2644816 - RNA, 17 nt, Human
caagaggggguggaggg

SEQ ID NO: 2644817 - RNA, 18 nt, Human
caagaggggguggagggg

SEQ ID NO: 2644818 - RNA, 21 nt, Human
caagaggggguggaggggugu

SEQ ID NO: 2644819 - RNA, 22 nt, Human
caagagaacucgcgcucaguaa

SEQ ID NO: 2644820 - RNA, 23 nt, Human
caagagaacucgcgcucaguaaa

SEQ ID NO: 2644821 - RNA, 12 nt, Human
caagagccuuaa

SEQ ID NO: 2644822 - RNA, 17 nt, Human
caagagccuuaaaacau

SEQ ID NO: 2644823 - RNA, 16 nt, Human
caagagccuuaaaaca

SEQ ID NO: 2644824 - RNA, 15 nt, Human
caagagccuuaaaac

SEQ ID NO: 2644825 - RNA, 14 nt, Human
caagagccuuaaaa

SEQ ID NO: 2644826 - RNA, 21 nt, Human
caagcagucgugccugugucc

SEQ ID NO: 2644827 - RNA, 15 nt, Human
caagcagucgugccu

SEQ ID NO: 2644828 - RNA, 16 nt, Human
caagcagucgugccug

SEQ ID NO: 2644829 - RNA, 18 nt, Human
caagcagucgugccugug

SEQ ID NO: 2644830 - RNA, 19 nt, Human
caagcagucgugccugugu

SEQ ID NO: 2644831 - RNA, 20 nt, Human
caagcagucgugccuguguc

SEQ ID NO: 2644832 - RNA, 21 nt, Human
caagcaucuuggggggguggc

SEQ ID NO: 2644833 - RNA, 17 nt, Human
caagcaugcagcuuugc

SEQ ID NO: 2644834 - RNA, 20 nt, Human
caagcaugcuugugaaaaug

SEQ ID NO: 2644835 - RNA, 13 nt, Human
caagccaggcuca

SEQ ID NO: 2644836 - RNA, 19 nt, Human
caagccaggcucacucaca

SEQ ID NO: 2644837 - RNA, 20 nt, Human
caagccaggcucacucacag

SEQ ID NO: 2644838 - RNA, 21 nt, Human
caaggcugggggaagaagcuc

SEQ ID NO: 2644839 - RNA, 17 nt, Human
caagguuauaauuuuuu

SEQ ID NO: 2644840 - RNA, 21 nt, Human
caagguuauaauuuuuuuuaa

SEQ ID NO: 2644841 - RNA, 22 nt, Human
caagguuauaauuuuuuuuaaa

SEQ ID NO: 2644842 - RNA, 9 nt, Human
caagguaua

SEQ ID NO: 2644843 - RNA, 14 nt, Human
caagguauaauaaa

SEQ ID NO: 2644844 - RNA, 17 nt, Human
caagguauaauaaaauu

SEQ ID NO: 2644845 - RNA, 19 nt, Human
caagguauaauaaaauuau

SEQ ID NO: 2644846 - RNA, 19 nt, Human
caaggucacuguuuccugg

SEQ ID NO: 2644847 - RNA, 20 nt, Human
caaggucacuguuuccuggg

SEQ ID NO: 2644848 - RNA, 16 nt, Human
caagggcauaaaguaa

SEQ ID NO: 2644849 - RNA, 14 nt, Human
caagggauuugagg

SEQ ID NO: 2644850 - RNA, 19 nt, Human
caagugagacccugucuca

SEQ ID NO: 2644851 - RNA, 15 nt, Human
caagugagacccugu

SEQ ID NO: 2644852 - RNA, 14 nt, Human
caagugagacccug

SEQ ID NO: 2644853 - RNA, 13 nt, Human
caagugaaauuau

SEQ ID NO: 2644854 - RNA, 20 nt, Human
caagugaaauuauuuuggag

SEQ ID NO: 2644855 - RNA, 23 nt, Human
caagugaaaaaggaggaagagaa

SEQ ID NO: 2644856 - RNA, 22 nt, Human
caagugaaaaaggaggaagaga

SEQ ID NO: 2644857 - RNA, 14 nt, Human
caaccucagggcuc

SEQ ID NO: 2644858 - RNA, 15 nt, Human
caaccucagggcucc

SEQ ID NO: 2644859 - RNA, 17 nt, Human
caaccucagggcuccca

SEQ ID NO: 2644860 - RNA, 18 nt, Human
caaccucagggcucccag

SEQ ID NO: 2644861 - RNA, 19 nt, Human
caaccucagggcucccagg

SEQ ID NO: 2644862 - RNA, 20 nt, Human
caaccucagggcucccaggg

SEQ ID NO: 2644863 - RNA, 20 nt, Human
caaccuccgcauccgggguu

SEQ ID NO: 2644864 - RNA, 20 nt, Human
caacugucucucuucucaga

SEQ ID NO: 2644865 - RNA, 15 nt, Human
caacugucuuccuca

SEQ ID NO: 2644866 - RNA, 16 nt, Human
caacugucuuccucaa

SEQ ID NO: 2644867 - RNA, 18 nt, Human
cacaacuugauggcugcg

SEQ ID NO: 2644868 - RNA, 20 nt, Human
cacaagaacacacacauaua

SEQ ID NO: 2644869 - RNA, 15 nt, Human
cacaaaugcucaaag

SEQ ID NO: 2644870 - RNA, 13 nt, Human
cacaaaugacuuu

SEQ ID NO: 2644871 - RNA, 22 nt, Human
cacaaaugacuuuauuauuuau

SEQ ID NO: 2644872 - RNA, 20 nt, Human
cacaaaugacuuuauuauuu

SEQ ID NO: 2644873 - RNA, 15 nt, Human
cacaaaugacuuuau

SEQ ID NO: 2644874 - RNA, 14 nt, Human
cacaaaugacuuua

SEQ ID NO: 2644875 - RNA, 17 nt, Human
caauuaguaacauucau

SEQ ID NO: 2644876 - RNA, 18 nt, Human
caauuaguaacauucaug

SEQ ID NO: 2644877 - RNA, 17 nt, Human
cacaaacgggcucagca

SEQ ID NO: 2644878 - RNA, 22 nt, Human
cacaaacucuaucggagaacau

SEQ ID NO: 2644879 - RNA, 23 nt, Human
cacaaacucuaucggagaacaug

SEQ ID NO: 2644880 - RNA, 15 nt, Human
cacacagcagcaguu

SEQ ID NO: 2644881 - RNA, 22 nt, Human
cacaccuacuagucaccagaga

SEQ ID NO: 2644882 - RNA, 13 nt, Human
caagugcuggagu

SEQ ID NO: 2644883 - RNA, 14 nt, Human
caagugcuggaguc

SEQ ID NO: 2644884 - RNA, 20 nt, Human
caagugcuggagucuccuga

SEQ ID NO: 2644885 - RNA, 21 nt, Human
caagugcuggagucuccugag

SEQ ID NO: 2644886 - RNA, 24 nt, Human
caauauuaaccuaaucaccaugua

SEQ ID NO: 2644887 - RNA, 19 nt, Human
caauauuccagaucuuuca

SEQ ID NO: 2644888 - RNA, 19 nt, Human
caaucuauugcuucaccau

SEQ ID NO: 2644889 - RNA, 16 nt, Human
caaucuuacuuuguaa

SEQ ID NO: 2644890 - RNA, 23 nt, Human
caaucuuacuuuguaaauucuga

SEQ ID NO: 2644891 - RNA, 22 nt, Human
caaucuuacuuuguaaauucug

SEQ ID NO: 2644892 - RNA, 19 nt, Human
caaucuuacuuuguaaauu

SEQ ID NO: 2644893 - RNA, 17 nt, Human
caaucuuacuuuguaaa

SEQ ID NO: 2644894 - RNA, 21 nt, Human
caaugaaaaauagugucuuug

SEQ ID NO: 2644895 - RNA, 15 nt, Human
caaugauuguuaauu

SEQ ID NO: 2644896 - RNA, 22 nt, Human
caaugauuguuaauuuacagcu

SEQ ID NO: 2644897 - RNA, 17 nt, Human
caauguaagcauacuuu

SEQ ID NO: 2644898 - RNA, 14 nt, Human
cacaguuuugaccu

SEQ ID NO: 2644899 - RNA, 15 nt, Human
cacagugaagugcug

SEQ ID NO: 2644900 - RNA, 20 nt, Human
cacaugacucgggggugggg

SEQ ID NO: 2644901 - RNA, 15 nt, Human
cacagccagcaccug

SEQ ID NO: 2644902 - RNA, 16 nt, Human
cacagccagcaccugg

SEQ ID NO: 2644903 - RNA, 17 nt, Human
cacagccagcaccuggc

SEQ ID NO: 2644904 - RNA, 20 nt, Human
cacagccagcaccuggcauc

SEQ ID NO: 2644905 - RNA, 22 nt, Human
cacagcaacgaucacaaaugac

SEQ ID NO: 2644906 - RNA, 21 nt, Human
cacagcaacgaucacaaauga

SEQ ID NO: 2644907 - RNA, 22 nt, Human
cacacggacacucaaaagcugg

SEQ ID NO: 2644908 - RNA, 14 nt, Human
cacacgcuuuugaa

SEQ ID NO: 2644909 - RNA, 20 nt, Human
cacagcaacgaucacaaaug

SEQ ID NO: 2644910 - RNA, 15 nt, Human
cacaggacccucgcc

SEQ ID NO: 2644911 - RNA, 18 nt, Human
cacagucuccggccucuc

SEQ ID NO: 2644912 - RNA, 20 nt, Human
cacagucuccggccucucca

SEQ ID NO: 2644913 - RNA, 15 nt, Human
caccagggguuucuc

SEQ ID NO: 2644914 - RNA, 21 nt, Human
caccauauuggccagucuggu

SEQ ID NO: 2644915 - RNA, 11 nt, Human
caccaugaaac

SEQ ID NO: 2644916 - RNA, 15 nt, Human
caccaucaauccuga

SEQ ID NO: 2644917 - RNA, 14 nt, Human
caccaagccaaggg

SEQ ID NO: 2644918 - RNA, 13 nt, Human
caccaagccaagg

SEQ ID NO: 2644919 - RNA, 19 nt, Human
caccaaucuuacuuuguaa

SEQ ID NO: 2644920 - RNA, 18 nt, Human
caccaaucuuacuuugua

SEQ ID NO: 2644921 - RNA, 22 nt, Human
caccaaucuuacuuuguaaauu

SEQ ID NO: 2644922 - RNA, 17 nt, Human
caccaaucuuacuuugu

SEQ ID NO: 2644923 - RNA, 18 nt, Human
caccaccuucuucuccua

SEQ ID NO: 2644924 - RNA, 12 nt, Human
cacccaaagcug

SEQ ID NO: 2644925 - RNA, 15 nt, Human
cacccaaagcugagc

SEQ ID NO: 2644926 - RNA, 16 nt, Human
cacccaaagcugagcc

SEQ ID NO: 2644927 - RNA, 18 nt, Human
cacccaaagcugagccug

SEQ ID NO: 2644928 - RNA, 19 nt, Human
cacccaaagcugagccugc

SEQ ID NO: 2644929 - RNA, 22 nt, Human
cacccaaagcugagccugcagg

SEQ ID NO: 2644930 - RNA, 15 nt, Human
cacccaaccccaagc

SEQ ID NO: 2644931 - RNA, 24 nt, Human
cacccaacccuaucuccugacaga

SEQ ID NO: 2644932 - RNA, 22 nt, Human
cacccaacccuaucuccugaca

SEQ ID NO: 2644933 - RNA, 23 nt, Human
cacccaacccuaucuccugacag

SEQ ID NO: 2644934 - RNA, 20 nt, Human
cacccaaaccggcaggugcg

SEQ ID NO: 2644935 - RNA, 21 nt, Human
cacccaaaccggcaggugcga

SEQ ID NO: 2644936 - RNA, 14 nt, Human
caccauucugacuc

SEQ ID NO: 2644937 - RNA, 13 nt, Human
caccauucugacu

SEQ ID NO: 2644938 - RNA, 23 nt, Human
caccauucguacauaauacugaa

SEQ ID NO: 2644939 - RNA, 22 nt, Human
caccauucguacauaauacuga

SEQ ID NO: 2644940 - RNA, 20 nt, Human
caccauucguacauaauacu

SEQ ID NO: 2644941 - RNA, 17 nt, Human
caccaugugagcucuuc

SEQ ID NO: 2644942 - RNA, 16 nt, Human
aaauuaucaauaucua

SEQ ID NO: 2644943 - RNA, 16 nt, Human
aaauuccccacccuga

SEQ ID NO: 2644944 - RNA, 12 nt, Human
aaauucauuucu

SEQ ID NO: 2644945 - RNA, 16 nt, Human
aaauucauuucuaauu

SEQ ID NO: 2644946 - RNA, 16 nt, Human
aaauguuauuaucugg

SEQ ID NO: 2644947 - RNA, 14 nt, Human
aaauguuaccucug

SEQ ID NO: 2644948 - RNA, 15 nt, Human
aaauguuaccucuga

SEQ ID NO: 2644949 - RNA, 17 nt, Human
aaauguuaccucugaau

SEQ ID NO: 2644950 - RNA, 19 nt, Human
aaauguuaccucugaauuu

SEQ ID NO: 2644951 - RNA, 19 nt, Human
guauuuaacagaaauugua

SEQ ID NO: 2644952 - RNA, 20 nt, Human
guauuuaacagaaauuguau

SEQ ID NO: 2644953 - RNA, 21 nt, Human
guauuuaacagaaauuguaua

SEQ ID NO: 2644954 - RNA, 21 nt, Human
gucaaccucgcgcuugcuggc

SEQ ID NO: 2644955 - RNA, 21 nt, Human
guauuuuuucaaguuguaaau

SEQ ID NO: 2644956 - RNA, 14 nt, Human
guauuuuuuccuuu

SEQ ID NO: 2644957 - RNA, 18 nt, Human
guauuuuuuuuucuaaga

SEQ ID NO: 2644958 - RNA, 22 nt, Human
guauuuuuuuuucuaagagaag

SEQ ID NO: 2644959 - RNA, 16 nt, Human
guauuuuuuuuucuaa

SEQ ID NO: 2644960 - RNA, 16 nt, Human
gucaaaugaugugcaa

SEQ ID NO: 2644961 - RNA, 17 nt, Human
gucaaaugaugugcaaa

SEQ ID NO: 2644962 - RNA, 18 nt, Human
aaauuucacuacuagauu

SEQ ID NO: 2644963 - RNA, 12 nt, Human
aaauuuagaaca

SEQ ID NO: 2644964 - RNA, 12 nt, Human
aaauuuaguguu

SEQ ID NO: 2644965 - RNA, 16 nt, Human
aaauuuagccgggcgc

SEQ ID NO: 2644966 - RNA, 18 nt, Human
guauauuacaaugaucac

SEQ ID NO: 2644967 - RNA, 15 nt, Human
guauauuacaaugau

SEQ ID NO: 2644968 - RNA, 17 nt, Human
guauauuacaaugauca

SEQ ID NO: 2644969 - RNA, 22 nt, Human
guauaaaauacauagugaaaau

SEQ ID NO: 2644970 - RNA, 12 nt, Human
guauaaauauac

SEQ ID NO: 2644971 - RNA, 13 nt, Human
aaauguaauuuaa

SEQ ID NO: 2644972 - RNA, 14 nt, Human
aaauguaauuuaaa

SEQ ID NO: 2644973 - RNA, 17 nt, Human
aaauguaauuuaaauga

SEQ ID NO: 2644974 - RNA, 18 nt, Human
aaauguaauuuaaaugaa

SEQ ID NO: 2644975 - RNA, 19 nt, Human
aaauguaauuuaaaugaaa

SEQ ID NO: 2644976 - RNA, 21 nt, Human
aaauguaggcaucaugcaugu

SEQ ID NO: 2644977 - RNA, 13 nt, Human
aaauguagguccu

SEQ ID NO: 2644978 - RNA, 20 nt, Human
aaauguaggcuuaguuugug

SEQ ID NO: 2644979 - RNA, 16 nt, Human
guaguucuguauuuga

SEQ ID NO: 2644980 - RNA, 15 nt, Human
guaguucuguauuug

SEQ ID NO: 2644981 - RNA, 14 nt, Human
guaguucuguauuu

SEQ ID NO: 2644982 - RNA, 16 nt, Human
guaguucuaccggcuu

SEQ ID NO: 2644983 - RNA, 17 nt, Human
guaguucuuuaaacugu

SEQ ID NO: 2644984 - RNA, 14 nt, Human
guaguucuuuaaac

SEQ ID NO: 2644985 - RNA, 20 nt, Human
guaguucuguauuugaaagu

SEQ ID NO: 2644986 - RNA, 18 nt, Human
guaguucuguauuugaaa

SEQ ID NO: 2644987 - RNA, 17 nt, Human
guaguucuguauuugaa

SEQ ID NO: 2644988 - RNA, 16 nt, Human
guauggaaguuuuccu

SEQ ID NO: 2644989 - RNA, 17 nt, Human
guauggaaguuuuccua

SEQ ID NO: 2644990 - RNA, 18 nt, Human
guauggacuaucugucug

SEQ ID NO: 2644991 - RNA, 22 nt, Human
guauggcuuuauuuuuuugaac

SEQ ID NO: 2644992 - RNA, 21 nt, Human
guauggcuuuauuuuuuugaa

SEQ ID NO: 2644993 - RNA, 14 nt, Human
guauccccccaucu

SEQ ID NO: 2644994 - RNA, 17 nt, Human
guauccccccaucuugc

SEQ ID NO: 2644995 - RNA, 18 nt, Human
guauccccccaucuugcu

SEQ ID NO: 2644996 - RNA, 14 nt, Human
guaugguaaucuuu

SEQ ID NO: 2644997 - RNA, 16 nt, Human
guauucuucucuuccu

SEQ ID NO: 2644998 - RNA, 22 nt, Human
guauucuucucuuccuuuuauc

SEQ ID NO: 2644999 - RNA, 15 nt, Human
guaugugggauauug

SEQ ID NO: 2645000 - RNA, 20 nt, Human
guaugugggauauugaaugu

SEQ ID NO: 2645001 - RNA, 16 nt, Human
guaugugguuuuguaa

SEQ ID NO: 2645002 - RNA, 19 nt, Human
aaaucuauuuauuaauauu

SEQ ID NO: 2645003 - RNA, 17 nt, Human
aaaucuauuuauuaaua

SEQ ID NO: 2645004 - RNA, 16 nt, Human
aaaucuauuuauuaau

SEQ ID NO: 2645005 - RNA, 12 nt, Human
aaaucuauuuau

SEQ ID NO: 2645006 - RNA, 22 nt, Human
aaaucuauuuauuaauauuuaa

SEQ ID NO: 2645007 - RNA, 21 nt, Human
aaaugaaaacaguguguaaac

SEQ ID NO: 2645008 - RNA, 12 nt, Human
aaaugaaaauug

SEQ ID NO: 2645009 - RNA, 13 nt, Human
aaaugaaaauugu

SEQ ID NO: 2645010 - RNA, 14 nt, Human
aaaugaaaauugua

SEQ ID NO: 2645011 - RNA, 17 nt, Human
aaaucuaaaucuauuua

SEQ ID NO: 2645012 - RNA, 16 nt, Human
aaaucuaaaucuauuu

SEQ ID NO: 2645013 - RNA, 15 nt, Human
aaaucuaaaucuauu

SEQ ID NO: 2645014 - RNA, 20 nt, Human
aaaucuaaaucuauuuauua

SEQ ID NO: 2645015 - RNA, 21 nt, Human
aaaucuaagcagcuuauuguu

SEQ ID NO: 2645016 - RNA, 17 nt, Human
aaauccuuuuaccuuuu

SEQ ID NO: 2645017 - RNA, 15 nt, Human
aaauccugaagagca

SEQ ID NO: 2645018 - RNA, 17 nt, Human
aaauccugaagagcauu

SEQ ID NO: 2645019 - RNA, 16 nt, Human
aaauccggagaagcug

SEQ ID NO: 2645020 - RNA, 18 nt, Human
aaaucccuuaccucggug

SEQ ID NO: 2645021 - RNA, 15 nt, Human
aaaucccauuuaaaa

SEQ ID NO: 2645022 - RNA, 15 nt, Human
guaggacuccuuauu

SEQ ID NO: 2645023 - RNA, 19 nt, Human
guaggaccaagcaucuugg

SEQ ID NO: 2645024 - RNA, 16 nt, Human
guaggaaagaggaagc

SEQ ID NO: 2645025 - RNA, 16 nt, Human
guaggagggugggaag

SEQ ID NO: 2645026 - RNA, 17 nt, Human
guaggagggugggaagg

SEQ ID NO: 2645027 - RNA, 23 nt, Human
guaggagcugccuuggcucagac

SEQ ID NO: 2645028 - RNA, 22 nt, Human
guaggagcugccuuggcucaga

SEQ ID NO: 2645029 - RNA, 14 nt, Human
guaggagcugccuu

SEQ ID NO: 2645030 - RNA, 15 nt, Human
guaggaugaaaagau

SEQ ID NO: 2645031 - RNA, 21 nt, Human
aaaggauaguaagcauagaaa

SEQ ID NO: 2645032 - RNA, 15 nt, Human
aaaggagagcaucgg

SEQ ID NO: 2645033 - RNA, 13 nt, Human
aaaggauaaagaa

SEQ ID NO: 2645034 - RNA, 14 nt, Human
aaaggauaaagaag

SEQ ID NO: 2645035 - RNA, 22 nt, Human
aaaggauaaagaaggaugaugu

SEQ ID NO: 2645036 - RNA, 13 nt, Human
aaaggagagcauc

SEQ ID NO: 2645037 - RNA, 19 nt, Human
aaaugaauaucuauuaaua

SEQ ID NO: 2645038 - RNA, 18 nt, Human
aaaugaauaucuauuaau

SEQ ID NO: 2645039 - RNA, 17 nt, Human
aaaugaauaucuauuaa

SEQ ID NO: 2645040 - RNA, 16 nt, Human
aaaugaauaucuauua

SEQ ID NO: 2645041 - RNA, 14 nt, Human
aaaugacuuuauua

SEQ ID NO: 2645042 - RNA, 21 nt, Human
aaaugacuuuauuauuuauuu

SEQ ID NO: 2645043 - RNA, 20 nt, Human
aaaugacuuuauuauuuauu

SEQ ID NO: 2645044 - RNA, 18 nt, Human
aaaugacuuuauuauuua

SEQ ID NO: 2645045 - RNA, 15 nt, Human
aaaugacuuuauuau

SEQ ID NO: 2645046 - RNA, 12 nt, Human
aaaugaaaugca

SEQ ID NO: 2645047 - RNA, 14 nt, Human
aaaugaaaugcaua

SEQ ID NO: 2645048 - RNA, 15 nt, Human
aaaugaaaugcauau

SEQ ID NO: 2645049 - RNA, 14 nt, Human
aaaugaaagaaaau

SEQ ID NO: 2645050 - RNA, 15 nt, Human
aaaugaaagaaaauu

SEQ ID NO: 2645051 - RNA, 20 nt, Human
aaaugaaagaaaauugaguu

SEQ ID NO: 2645052 - RNA, 15 nt, Human
aaaugaagaauuuaa

SEQ ID NO: 2645053 - RNA, 13 nt, Human
aaaugaagaauuu

SEQ ID NO: 2645054 - RNA, 18 nt, Human
aaaugaagaauuuaaaga

SEQ ID NO: 2645055 - RNA, 16 nt, Human
aaaugaagaauuuaaa

SEQ ID NO: 2645056 - RNA, 15 nt, Human
aaaugaggaggaugc

SEQ ID NO: 2645057 - RNA, 22 nt, Human
aaaugaggaggaugcuaaaaau

SEQ ID NO: 2645058 - RNA, 23 nt, Human
aaaugagcucgcauuugucaaug

SEQ ID NO: 2645059 - RNA, 15 nt, Human
aaaugagcucugaaa

SEQ ID NO: 2645060 - RNA, 19 nt, Human
aaaugagcucugaaaucuu

SEQ ID NO: 2645061 - RNA, 19 nt, Human
aaaugagccuggcaagaau

SEQ ID NO: 2645062 - RNA, 13 nt, Human
aaaugagccuggc

SEQ ID NO: 2645063 - RNA, 13 nt, Human
aaaugcccagcuu

SEQ ID NO: 2645064 - RNA, 19 nt, Human
aaaugccauuuauuuauug

SEQ ID NO: 2645065 - RNA, 18 nt, Human
aaaugccauagaaaugua

SEQ ID NO: 2645066 - RNA, 20 nt, Human
aaaugccauuuauuuauuga

SEQ ID NO: 2645067 - RNA, 21 nt, Human
aaaugccauuuauuuauugau

SEQ ID NO: 2645068 - RNA, 22 nt, Human
aaaugccauuuauuuauugauu

SEQ ID NO: 2645069 - RNA, 13 nt, Human
aaaugcccucuuc

SEQ ID NO: 2645070 - RNA, 22 nt, Human
aaaugcccucuucucgugccuc

SEQ ID NO: 2645071 - RNA, 19 nt, Human
aaaugcaaaaacucuuuga

SEQ ID NO: 2645072 - RNA, 19 nt, Human
aaaugaugauguggaagaa

SEQ ID NO: 2645073 - RNA, 22 nt, Human
aaaugaugauguggaagaacuu

SEQ ID NO: 2645074 - RNA, 16 nt, Human
aaaugaugugcaaaac

SEQ ID NO: 2645075 - RNA, 14 nt, Human
aaaugcaucuuuga

SEQ ID NO: 2645076 - RNA, 16 nt, Human
aaaugcaucuuugaug

SEQ ID NO: 2645077 - RNA, 15 nt, Human
aaaugcaucuuugau

SEQ ID NO: 2645078 - RNA, 21 nt, Human
aaaugcaucuuugauguguug

SEQ ID NO: 2645079 - RNA, 20 nt, Human
aaaugcaucuuugauguguu

SEQ ID NO: 2645080 - RNA, 19 nt, Human
aaaugcaucuuugaugugu

SEQ ID NO: 2645081 - RNA, 18 nt, Human
aaaugcaucuuugaugug

SEQ ID NO: 2645082 - RNA, 17 nt, Human
guccugccugcaauauu

SEQ ID NO: 2645083 - RNA, 14 nt, Human
guccugccuguggc

SEQ ID NO: 2645084 - RNA, 13 nt, Human
guccugccugugg

SEQ ID NO: 2645085 - RNA, 11 nt, Human
guccugccugu

SEQ ID NO: 2645086 - RNA, 13 nt, Human
guccucuggagcc

SEQ ID NO: 2645087 - RNA, 18 nt, Human
guccucuggagcccuaac

SEQ ID NO: 2645088 - RNA, 20 nt, Human
guccugagauggaaaagugu

SEQ ID NO: 2645089 - RNA, 22 nt, Human
aacauuuauuuuuuuuaaagaa

SEQ ID NO: 2645090 - RNA, 23 nt, Human
aacauuuauuuuuuuuaaagaaa

SEQ ID NO: 2645091 - RNA, 12 nt, Human
aacauuugcugc

SEQ ID NO: 2645092 - RNA, 13 nt, Human
aacauuugcugcc

SEQ ID NO: 2645093 - RNA, 16 nt, Human
aacauuugcugccauu

SEQ ID NO: 2645094 - RNA, 19 nt, Human
aacauugaaguaaugaauu

SEQ ID NO: 2645095 - RNA, 18 nt, Human
aacauugaaguaaugaau

SEQ ID NO: 2645096 - RNA, 16 nt, Human
aacauugaaguaauga

SEQ ID NO: 2645097 - RNA, 21 nt, Human
aacauacaaaugcaucuuuga

SEQ ID NO: 2645098 - RNA, 20 nt, Human
aacauacaaaugcaucuuug

SEQ ID NO: 2645099 - RNA, 15 nt, Human
aacauacaaaugcau

SEQ ID NO: 2645100 - RNA, 14 nt, Human
aacauacaaaugca

SEQ ID NO: 2645101 - RNA, 22 nt, Human
aacauacaaaugcaucuuugau

SEQ ID NO: 2645102 - RNA, 15 nt, Human
aacaguggaauauaa

SEQ ID NO: 2645103 - RNA, 20 nt, Human
aacaguaugugggauauuga

SEQ ID NO: 2645104 - RNA, 21 nt, Human
aacaguaugugggauauugaa

SEQ ID NO: 2645105 - RNA, 21 nt, Human
aacaguacccugguugugugu

SEQ ID NO: 2645106 - RNA, 15 nt, Human
aacaguguguaaaca

SEQ ID NO: 2645107 - RNA, 21 nt, Human
aacaguguguaaacaaaauga

SEQ ID NO: 2645108 - RNA, 23 nt, Human
aacaguguguaaacaaaaugaag

SEQ ID NO: 2645109 - RNA, 20 nt, Human
aacaguguggccucuucuga

SEQ ID NO: 2645110 - RNA, 13 nt, Human
aacaguuguauuu

SEQ ID NO: 2645111 - RNA, 16 nt, Human
aacaguuuggaaaagu

SEQ ID NO: 2645112 - RNA, 23 nt, Human
aacaguuguauuuaacagaaauu

SEQ ID NO: 2645113 - RNA, 20 nt, Human
aacaguuguauuuaacagaa

SEQ ID NO: 2645114 - RNA, 14 nt, Human
aacagaaauggaaa

SEQ ID NO: 2645115 - RNA, 15 nt, Human
aacagaaauuguaua

SEQ ID NO: 2645116 - RNA, 17 nt, Human
aacagaaauuguauauu

SEQ ID NO: 2645117 - RNA, 18 nt, Human
aacagaaauuguauauug

SEQ ID NO: 2645118 - RNA, 19 nt, Human
aacagaaauuguauauugu

SEQ ID NO: 2645119 - RNA, 21 nt, Human
aacagaaauuguauauuguaa

SEQ ID NO: 2645120 - RNA, 21 nt, Human
guccggucccugucccagugc

SEQ ID NO: 2645121 - RNA, 13 nt, Human
guccgagcuuuga

SEQ ID NO: 2645122 - RNA, 12 nt, Human
aacaagcuucag

SEQ ID NO: 2645123 - RNA, 14 nt, Human
aacaagcuucagua

SEQ ID NO: 2645124 - RNA, 22 nt, Human
aacaagaccaccacuucgaaac

SEQ ID NO: 2645125 - RNA, 15 nt, Human
gucaaaguugaaaau

SEQ ID NO: 2645126 - RNA, 16 nt, Human
aacaauugguaaaacu

SEQ ID NO: 2645127 - RNA, 17 nt, Human
aacaauugguaaaacuc

SEQ ID NO: 2645128 - RNA, 23 nt, Human
aacaauugguaaaacucacugug

SEQ ID NO: 2645129 - RNA, 24 nt, Human
aacaauugguaaaacucacuguga

SEQ ID NO: 2645130 - RNA, 12 nt, Human
aacaaugaaguu

SEQ ID NO: 2645131 - RNA, 15 nt, Human
aacaaugaaguugaa

SEQ ID NO: 2645132 - RNA, 16 nt, Human
aacaaugaaguugaaa

SEQ ID NO: 2645133 - RNA, 18 nt, Human
aacaaugaaguugaaaau

SEQ ID NO: 2645134 - RNA, 21 nt, Human
aacaauauuuuaugguuaugu

SEQ ID NO: 2645135 - RNA, 22 nt, Human
aacaauauuuuaugguuauguu

SEQ ID NO: 2645136 - RNA, 23 nt, Human
aacaauaggaugggcuucugugc

SEQ ID NO: 2645137 - RNA, 18 nt, Human
aacaauaggcuguuccca

SEQ ID NO: 2645138 - RNA, 11 nt, Human
aacacuuccag

SEQ ID NO: 2645139 - RNA, 23 nt, Human
aacacugccuuuuuauuuauaug

SEQ ID NO: 2645140 - RNA, 14 nt, Human
aacacugccuuuuu

SEQ ID NO: 2645141 - RNA, 15 nt, Human
aacacugccuuuuua

SEQ ID NO: 2645142 - RNA, 21 nt, Human
aacacuccccauuaacagaug

SEQ ID NO: 2645143 - RNA, 13 nt, Human
aacacuccucugc

SEQ ID NO: 2645144 - RNA, 13 nt, Human
aacuaaagcaaua

SEQ ID NO: 2645145 - RNA, 16 nt, Human
aacuaaagcaauagaa

SEQ ID NO: 2645146 - RNA, 19 nt, Human
aacuaaagcaauagaaaca

SEQ ID NO: 2645147 - RNA, 13 nt, Human
aacuaaauuucac

SEQ ID NO: 2645148 - RNA, 22 nt, Human
aacuaaauuucacuacuagauu

SEQ ID NO: 2645149 - RNA, 13 nt, Human
aacuccagcaacu

SEQ ID NO: 2645150 - RNA, 21 nt, Human
aacucuaucggagaacaugaa

SEQ ID NO: 2645151 - RNA, 17 nt, Human
gugaacagagagacccu

SEQ ID NO: 2645152 - RNA, 22 nt, Human
gucugggcagcugucccuugcu

SEQ ID NO: 2645153 - RNA, 18 nt, Human
aaccucucacuucacccu

SEQ ID NO: 2645154 - RNA, 17 nt, Human
aaccucuucuggcucaa

SEQ ID NO: 2645155 - RNA, 16 nt, Human
gucuuugagcucccac

SEQ ID NO: 2645156 - RNA, 20 nt, Human
gucuuacuacagaaaugagg

SEQ ID NO: 2645157 - RNA, 18 nt, Human
gucuuagaucauaguuuu

SEQ ID NO: 2645158 - RNA, 23 nt, Human
gucuuccucaaaauaaagaagua

SEQ ID NO: 2645159 - RNA, 19 nt, Human
guccuugagugcucuugcu

SEQ ID NO: 2645160 - RNA, 14 nt, Human
guccuugauuucaa

SEQ ID NO: 2645161 - RNA, 15 nt, Human
guccuuccugaaacu

SEQ ID NO: 2645162 - RNA, 20 nt, Human
gucuccugacuggugcugca

SEQ ID NO: 2645163 - RNA, 16 nt, Human
gucuccuccccuuccc

SEQ ID NO: 2645164 - RNA, 14 nt, Human
gucuccuccccuuc

SEQ ID NO: 2645165 - RNA, 14 nt, Human
gucuccggccucuc

SEQ ID NO: 2645166 - RNA, 19 nt, Human
gucuccggccucuccagcc

SEQ ID NO: 2645167 - RNA, 16 nt, Human
aaccacaaaacucauc

SEQ ID NO: 2645168 - RNA, 19 nt, Human
aaccacacuugaaaccuuu

SEQ ID NO: 2645169 - RNA, 16 nt, Human
aaccaaaggaaaaugu

SEQ ID NO: 2645170 - RNA, 22 nt, Human
gucuccuauauauuucuauuau

SEQ ID NO: 2645171 - RNA, 20 nt, Human
aaccaagugaucaaacuaca

SEQ ID NO: 2645172 - RNA, 19 nt, Human
aaccaaagagggcuuccuc

SEQ ID NO: 2645173 - RNA, 14 nt, Human
aaccacauugaaga

SEQ ID NO: 2645174 - RNA, 16 nt, Human
aaccacauugaagaau

SEQ ID NO: 2645175 - RNA, 22 nt, Human
aaccacauugaagaauguuaga

SEQ ID NO: 2645176 - RNA, 16 nt, Human
aaccuccccagccugc

SEQ ID NO: 2645177 - RNA, 17 nt, Human
aaccuccccagccugcg

SEQ ID NO: 2645178 - RNA, 23 nt, Human
aaccuccccagccugcgccugcu

SEQ ID NO: 2645179 - RNA, 22 nt, Human
aaccauguagcagugagucaua

SEQ ID NO: 2645180 - RNA, 17 nt, Human
aaccaugucauuucaga

SEQ ID NO: 2645181 - RNA, 23 nt, Human
aacccauuaaggggaagaaugaa

SEQ ID NO: 2645182 - RNA, 14 nt, Human
aaccccaaacagug

SEQ ID NO: 2645183 - RNA, 16 nt, Human
aacccaguuucccguc

SEQ ID NO: 2645184 - RNA, 15 nt, Human
aaggcuaugugauua

SEQ ID NO: 2645185 - RNA, 12 nt, Human
guugauaaaucc

SEQ ID NO: 2645186 - RNA, 19 nt, Human
aaggaugaugucuuuuuau

SEQ ID NO: 2645187 - RNA, 15 nt, Human
guuguaguguccccc

SEQ ID NO: 2645188 - RNA, 14 nt, Human
guuguaccaaguga

SEQ ID NO: 2645189 - RNA, 16 nt, Human
guuguaccaagugaaa

SEQ ID NO: 2645190 - RNA, 16 nt, Human
guuguaagaauucuga

SEQ ID NO: 2645191 - RNA, 16 nt, Human
guuguauuuaacagaa

SEQ ID NO: 2645192 - RNA, 16 nt, Human
guugcugguaaaauga

SEQ ID NO: 2645193 - RNA, 12 nt, Human
guugcugguaaa

SEQ ID NO: 2645194 - RNA, 18 nt, Human
guugguauauuuuauauu

SEQ ID NO: 2645195 - RNA, 14 nt, Human
guugguaaacaguu

SEQ ID NO: 2645196 - RNA, 21 nt, Human
guugggugucuccuuaagcug

SEQ ID NO: 2645197 - RNA, 21 nt, Human
guuuaaaauaaaaugaaaauu

SEQ ID NO: 2645198 - RNA, 22 nt, Human
guuuaaaauaaaaugaaaauug

SEQ ID NO: 2645199 - RNA, 13 nt, Human
guuuaaaauguaa

SEQ ID NO: 2645200 - RNA, 19 nt, Human
guuuaaaauguaauuuaaa

SEQ ID NO: 2645201 - RNA, 20 nt, Human
guuuaaaauguaauuuaaau

SEQ ID NO: 2645202 - RNA, 21 nt, Human
guuuaaaauguaauuuaaaug

SEQ ID NO: 2645203 - RNA, 15 nt, Human
aaggcuuuaucucag

SEQ ID NO: 2645204 - RNA, 22 nt, Human
aaggcuuuucaaccacaaaacu

SEQ ID NO: 2645205 - RNA, 11 nt, Human
aagggaaaaau

SEQ ID NO: 2645206 - RNA, 12 nt, Human
aagggaaaaaua

SEQ ID NO: 2645207 - RNA, 15 nt, Human
aagggaaaaauauau

SEQ ID NO: 2645208 - RNA, 13 nt, Human
aaggcuugaagcu

SEQ ID NO: 2645209 - RNA, 14 nt, Human
aaggcuugaagcug

SEQ ID NO: 2645210 - RNA, 16 nt, Human
aaggcuugaagcugug

SEQ ID NO: 2645211 - RNA, 16 nt, Human
aaggcuuauaaaacag

SEQ ID NO: 2645212 - RNA, 15 nt, Human
guuguacuuaaaugg

SEQ ID NO: 2645213 - RNA, 23 nt, Human
guuuauuuucuacguuucuuuaa

SEQ ID NO: 2645214 - RNA, 14 nt, Human
aaggggugcuuuua

SEQ ID NO: 2645215 - RNA, 17 nt, Human
aaggggugcuuuuauag

SEQ ID NO: 2645216 - RNA, 13 nt, Human
aagguaaugugug

SEQ ID NO: 2645217 - RNA, 19 nt, Human
aagguuuuugauagcauug

SEQ ID NO: 2645218 - RNA, 14 nt, Human
aagguuuuugauag

SEQ ID NO: 2645219 - RNA, 14 nt, Human
aagggguuccucaa

SEQ ID NO: 2645220 - RNA, 18 nt, Human
aagggguuccucaaauuu

SEQ ID NO: 2645221 - RNA, 19 nt, Human
aagggguuccucaaauuuu

SEQ ID NO: 2645222 - RNA, 21 nt, Human
guuucugugguuggcugggaa

SEQ ID NO: 2645223 - RNA, 22 nt, Human
guuucugugguuggcugggaaa

SEQ ID NO: 2645224 - RNA, 14 nt, Human
guuuuauaaaauag

SEQ ID NO: 2645225 - RNA, 20 nt, Human
guuuuacaauaguucugugg

SEQ ID NO: 2645226 - RNA, 16 nt, Human
guuuuacaauaguucu

SEQ ID NO: 2645227 - RNA, 13 nt, Human
guuuuacaauagu

SEQ ID NO: 2645228 - RNA, 11 nt, Human
guuuuacaaua

SEQ ID NO: 2645229 - RNA, 14 nt, Human
guuagcuccugugg

SEQ ID NO: 2645230 - RNA, 15 nt, Human
guuagcuccuguggc

SEQ ID NO: 2645231 - RNA, 13 nt, Human
guuaguggcaccg

SEQ ID NO: 2645232 - RNA, 12 nt, Human
guuagcuccugu

SEQ ID NO: 2645233 - RNA, 19 nt, Human
guguuucgcggguaacugg

SEQ ID NO: 2645234 - RNA, 15 nt, Human
guuaaggugggcccg

SEQ ID NO: 2645235 - RNA, 15 nt, Human
aagccugcugucuug

SEQ ID NO: 2645236 - RNA, 14 nt, Human
guucauagcccagu

SEQ ID NO: 2645237 - RNA, 19 nt, Human
aagccuccuccagccgcca

SEQ ID NO: 2645238 - RNA, 13 nt, Human
guucauagcccag

SEQ ID NO: 2645239 - RNA, 19 nt, Human
aagccuccuuagaaaaaaa

SEQ ID NO: 2645240 - RNA, 20 nt, Human
aagcuuuauuuugagaugua

SEQ ID NO: 2645241 - RNA, 17 nt, Human
guucccauguagccccc

SEQ ID NO: 2645242 - RNA, 22 nt, Human
aagcuuuacuggggcuggggaa

SEQ ID NO: 2645243 - RNA, 19 nt, Human
guucccauguagcccccug

SEQ ID NO: 2645244 - RNA, 18 nt, Human
guucccauguagcccccu

SEQ ID NO: 2645245 - RNA, 14 nt, Human
guucccggcuggac

SEQ ID NO: 2645246 - RNA, 16 nt, Human
guucccgcggggcugu

SEQ ID NO: 2645247 - RNA, 20 nt, Human
aagcuucaugcacuuaaaga

SEQ ID NO: 2645248 - RNA, 21 nt, Human
aagcuucaugcacuuaaagaa

SEQ ID NO: 2645249 - RNA, 22 nt, Human
aagcuucaugcacuuaaagaag

SEQ ID NO: 2645250 - RNA, 15 nt, Human
aagcuucaguugcuu

SEQ ID NO: 2645251 - RNA, 16 nt, Human
aagcuucaguugcuug

SEQ ID NO: 2645252 - RNA, 18 nt, Human
aagcuucaguugcuuguc

SEQ ID NO: 2645253 - RNA, 11 nt, Human
aagcugagccu

SEQ ID NO: 2645254 - RNA, 13 nt, Human
aagcugagccugc

SEQ ID NO: 2645255 - RNA, 15 nt, Human
aagcugagccugcag

SEQ ID NO: 2645256 - RNA, 18 nt, Human
aagcuauucacauuguua

SEQ ID NO: 2645257 - RNA, 21 nt, Human
guugagcuucauauaccagca

SEQ ID NO: 2645258 - RNA, 15 nt, Human
guugagucuguacua

SEQ ID NO: 2645259 - RNA, 12 nt, Human
guugauaaaaac

SEQ ID NO: 2645260 - RNA, 23 nt, Human
guucuuuaaacugucgugucaua

SEQ ID NO: 2645261 - RNA, 14 nt, Human
guucuuuaaacugu

SEQ ID NO: 2645262 - RNA, 15 nt, Human
guucuuaugaggagg

SEQ ID NO: 2645263 - RNA, 20 nt, Human
guucuuaugaggaggggagg

SEQ ID NO: 2645264 - RNA, 20 nt, Human
guucucucaacaagaaauaa

SEQ ID NO: 2645265 - RNA, 14 nt, Human
guucuggggggacc

SEQ ID NO: 2645266 - RNA, 16 nt, Human
guucuggggggaccca

SEQ ID NO: 2645267 - RNA, 19 nt, Human
guucuggggggacccagug

SEQ ID NO: 2645268 - RNA, 20 nt, Human
guucuggggggacccagugc

SEQ ID NO: 2645269 - RNA, 21 nt, Human
guucuggggggacccagugca

SEQ ID NO: 2645270 - RNA, 14 nt, Human
guucuguauuugaa

SEQ ID NO: 2645271 - RNA, 12 nt, Human
guucuguauuug

SEQ ID NO: 2645272 - RNA, 13 nt, Human
guucuacucaggc

SEQ ID NO: 2645273 - RNA, 16 nt, Human
guucuacucaggcugg

SEQ ID NO: 2645274 - RNA, 21 nt, Human
guucuccguuagcuccugugg

SEQ ID NO: 2645275 - RNA, 22 nt, Human
guucuccguuagcuccuguggc

SEQ ID NO: 2645276 - RNA, 23 nt, Human
guucuccguuagcuccuguggcc

SEQ ID NO: 2645277 - RNA, 14 nt, Human
gugugucccaggca

SEQ ID NO: 2645278 - RNA, 18 nt, Human
gugugucccaggcaggga

SEQ ID NO: 2645279 - RNA, 14 nt, Human
guguugccaagcuc

SEQ ID NO: 2645280 - RNA, 18 nt, Human
guguugccaagcuccaag

SEQ ID NO: 2645281 - RNA, 19 nt, Human
guguugccacaguagaacu

SEQ ID NO: 2645282 - RNA, 15 nt, Human
guguugucucuugag

SEQ ID NO: 2645283 - RNA, 21 nt, Human
gugugagaagugaaugcuggg

SEQ ID NO: 2645284 - RNA, 22 nt, Human
gugugagaagugaaugcuggga

SEQ ID NO: 2645285 - RNA, 13 nt, Human
aagcaaugguuga

SEQ ID NO: 2645286 - RNA, 17 nt, Human
gugugacuacuccccca

SEQ ID NO: 2645287 - RNA, 12 nt, Human
gugucuuuggag

SEQ ID NO: 2645288 - RNA, 21 nt, Human
gugucuuugugauuuugagua

SEQ ID NO: 2645289 - RNA, 17 nt, Human
aagcaauauuuuggagu

SEQ ID NO: 2645290 - RNA, 16 nt, Human
aagcaauaaaugaaug

SEQ ID NO: 2645291 - RNA, 14 nt, Human
aagcaauaaaugaa

SEQ ID NO: 2645292 - RNA, 12 nt, Human
aagcaauagaaa

SEQ ID NO: 2645293 - RNA, 13 nt, Human
aagcaauagaaac

SEQ ID NO: 2645294 - RNA, 14 nt, Human
aagcaauagaaaca

SEQ ID NO: 2645295 - RNA, 15 nt, Human
aagcaauagaaacaa

SEQ ID NO: 2645296 - RNA, 17 nt, Human
aagcaauagaaacaaca

SEQ ID NO: 2645297 - RNA, 11 nt, Human
aagaugugaaa

SEQ ID NO: 2645298 - RNA, 13 nt, Human
aagaugugaaaau

SEQ ID NO: 2645299 - RNA, 14 nt, Human
aagaugugaaaauu

SEQ ID NO: 2645300 - RNA, 11 nt, Human
aagaugugaau

SEQ ID NO: 2645301 - RNA, 12 nt, Human
aagaugugaauu

SEQ ID NO: 2645302 - RNA, 13 nt, Human
aagaugugaauua

SEQ ID NO: 2645303 - RNA, 15 nt, Human
aagaugugaauuauu

SEQ ID NO: 2645304 - RNA, 16 nt, Human
aagaugugaauuauug

SEQ ID NO: 2645305 - RNA, 18 nt, Human
aagaugugaauuauugac

SEQ ID NO: 2645306 - RNA, 20 nt, Human
aagaugugaauuauugacac

SEQ ID NO: 2645307 - RNA, 21 nt, Human
aagaugugaauuauugacacu

SEQ ID NO: 2645308 - RNA, 23 nt, Human
aagaugugaauuauugacacuga

SEQ ID NO: 2645309 - RNA, 23 nt, Human
aagaugcuccagcaacacagccu

SEQ ID NO: 2645310 - RNA, 14 nt, Human
gugggggagggagg

SEQ ID NO: 2645311 - RNA, 20 nt, Human
gugguuuuauacugaaggaa

SEQ ID NO: 2645312 - RNA, 18 nt, Human
aagagguuuuaaaaaaau

SEQ ID NO: 2645313 - RNA, 16 nt, Human
aagagccuuaaaacau

SEQ ID NO: 2645314 - RNA, 14 nt, Human
aagagccuuaaaac

SEQ ID NO: 2645315 - RNA, 13 nt, Human
aagagccuuaaaa

SEQ ID NO: 2645316 - RNA, 14 nt, Human
aagaggaagcaaau

SEQ ID NO: 2645317 - RNA, 13 nt, Human
aagaggaagcaaa

SEQ ID NO: 2645318 - RNA, 14 nt, Human
aagagcaaaucaau

SEQ ID NO: 2645319 - RNA, 13 nt, Human
aagagcccuugcc

SEQ ID NO: 2645320 - RNA, 14 nt, Human
aagagcccuugccu

SEQ ID NO: 2645321 - RNA, 16 nt, Human
aagagcccuugccucc

SEQ ID NO: 2645322 - RNA, 18 nt, Human
aagagcccuugccucccc

SEQ ID NO: 2645323 - RNA, 22 nt, Human
aagacucuugggagggaguuac

SEQ ID NO: 2645324 - RNA, 16 nt, Human
aagacuguagauaugu

SEQ ID NO: 2645325 - RNA, 17 nt, Human
aagacuguagauaugua

SEQ ID NO: 2645326 - RNA, 17 nt, Human
aagaccucaccuagaaa

SEQ ID NO: 2645327 - RNA, 16 nt, Human
aagaccucaccuagaa

SEQ ID NO: 2645328 - RNA, 23 nt, Human
aagaccuggggcugcugugaagc

SEQ ID NO: 2645329 - RNA, 15 nt, Human
aagaccgccccccgc

SEQ ID NO: 2645330 - RNA, 18 nt, Human
guggcgugggagccagcc

SEQ ID NO: 2645331 - RNA, 22 nt, Human
guggcgccgucuccaggggcug

SEQ ID NO: 2645332 - RNA, 15 nt, Human
guggcggccccagca

SEQ ID NO: 2645333 - RNA, 17 nt, Human
guggcgccgucuccagg

SEQ ID NO: 2645334 - RNA, 21 nt, Human
guggcgccgucuccaggggcu

SEQ ID NO: 2645335 - RNA, 17 nt, Human
gugggagguggaagaag

SEQ ID NO: 2645336 - RNA, 20 nt, Human
gugggacgggaugguucugg

SEQ ID NO: 2645337 - RNA, 14 nt, Human
guggcgggcaccug

SEQ ID NO: 2645338 - RNA, 23 nt, Human
gugggaggaucucuugagccugg

SEQ ID NO: 2645339 - RNA, 19 nt, Human
gugggacggugcccaagcc

SEQ ID NO: 2645340 - RNA, 20 nt, Human
gugggacggugcccaagcca

SEQ ID NO: 2645341 - RNA, 20 nt, Human
gugggggaucacagccucug

SEQ ID NO: 2645342 - RNA, 14 nt, Human
gugggguuuccugg

SEQ ID NO: 2645343 - RNA, 16 nt, Human
gugggguuuccuggca

SEQ ID NO: 2645344 - RNA, 13 nt, Human
guggggugugcug

SEQ ID NO: 2645345 - RNA, 16 nt, Human
guggggugugcuggga

SEQ ID NO: 2645346 - RNA, 19 nt, Human
guggggugugcugggagcu

SEQ ID NO: 2645347 - RNA, 14 nt, Human
aagaaauaauagaa

SEQ ID NO: 2645348 - RNA, 19 nt, Human
aagaaauaaugcuacaauu

SEQ ID NO: 2645349 - RNA, 13 nt, Human
aagaauagaaaca

SEQ ID NO: 2645350 - RNA, 15 nt, Human
aagaauagaaacaag

SEQ ID NO: 2645351 - RNA, 18 nt, Human
aagaauauccuuuaaaau

SEQ ID NO: 2645352 - RNA, 19 nt, Human
aagaauauccuuuaaaauu

SEQ ID NO: 2645353 - RNA, 23 nt, Human
aagaagucuucucugccuguaag

SEQ ID NO: 2645354 - RNA, 14 nt, Human
aagaaggcaauauu

SEQ ID NO: 2645355 - RNA, 15 nt, Human
aagaaggcaauauua

SEQ ID NO: 2645356 - RNA, 14 nt, Human
aagaaggaugaugu

SEQ ID NO: 2645357 - RNA, 17 nt, Human
aagaaggaugaugucuu

SEQ ID NO: 2645358 - RNA, 16 nt, Human
aagaaaucauguccau

SEQ ID NO: 2645359 - RNA, 23 nt, Human
aagaaaucauguccauacacuuu

SEQ ID NO: 2645360 - RNA, 13 nt, Human
aagaaaaaaaugu

SEQ ID NO: 2645361 - RNA, 14 nt, Human
aagaaaaaaauacu

SEQ ID NO: 2645362 - RNA, 15 nt, Human
aagaaaaaaauacua

SEQ ID NO: 2645363 - RNA, 22 nt, Human
aagaaaaaaauacuauuuaaga

SEQ ID NO: 2645364 - RNA, 20 nt, Human
aagaaaaaaaugucaaaagu

SEQ ID NO: 2645365 - RNA, 21 nt, Human
aacuuggcucgaaucucugug

SEQ ID NO: 2645366 - RNA, 16 nt, Human
aacuccaggcccuccu

SEQ ID NO: 2645367 - RNA, 22 nt, Human
aacuuggcucgaaucucugugc

SEQ ID NO: 2645368 - RNA, 23 nt, Human
aacuuggcucgaaucucugugcc

SEQ ID NO: 2645369 - RNA, 22 nt, Human
gugccgagaaggaagccuccca

SEQ ID NO: 2645370 - RNA, 12 nt, Human
gugccguggcac

SEQ ID NO: 2645371 - RNA, 13 nt, Human
gugccguggcacc

SEQ ID NO: 2645372 - RNA, 14 nt, Human
gugccguggcacca

SEQ ID NO: 2645373 - RNA, 21 nt, Human
gugccgccugcacuccucagg

SEQ ID NO: 2645374 - RNA, 15 nt, Human
gugccucaagaggaa

SEQ ID NO: 2645375 - RNA, 22 nt, Human
gugccucaagaggaaugaaaaa

SEQ ID NO: 2645376 - RNA, 19 nt, Human
guggcaccagcagccugga

SEQ ID NO: 2645377 - RNA, 18 nt, Human
guggcaccagcagccugg

SEQ ID NO: 2645378 - RNA, 17 nt, Human
guggauugccucugaaa

SEQ ID NO: 2645379 - RNA, 19 nt, Human
guggcaccaggcgcugccc

SEQ ID NO: 2645380 - RNA, 16 nt, Human
aagaaugacuauauaa

SEQ ID NO: 2645381 - RNA, 18 nt, Human
aagaaugacuauauaauu

SEQ ID NO: 2645382 - RNA, 13 nt, Human
aagaaugaaagcu

SEQ ID NO: 2645383 - RNA, 17 nt, Human
aagaaugaaagcuguuc

SEQ ID NO: 2645384 - RNA, 19 nt, Human
aagaaugaaagcuguuccu

SEQ ID NO: 2645385 - RNA, 16 nt, Human
aagaauugaagcagga

SEQ ID NO: 2645386 - RNA, 16 nt, Human
aagaauuuaguauuau

SEQ ID NO: 2645387 - RNA, 16 nt, Human
aagaauguacguccag

SEQ ID NO: 2645388 - RNA, 14 nt, Human
aagaauuuaaagaa

SEQ ID NO: 2645389 - RNA, 13 nt, Human
aagaauuuaaaga

SEQ ID NO: 2645390 - RNA, 14 nt, Human
aagacaaaagucug

SEQ ID NO: 2645391 - RNA, 16 nt, Human
aagacaaaagucuguc

SEQ ID NO: 2645392 - RNA, 22 nt, Human
aagacaaaagucugucuuuccu

SEQ ID NO: 2645393 - RNA, 13 nt, Human
aagacaaauauuc

SEQ ID NO: 2645394 - RNA, 20 nt, Human
aagacaaauauuccuuugca

SEQ ID NO: 2645395 - RNA, 16 nt, Human
aagacccucuugccca

SEQ ID NO: 2645396 - RNA, 21 nt, Human
aagacccucuugcccauccug

SEQ ID NO: 2645397 - RNA, 22 nt, Human
aagacccucuugcccauccuga

SEQ ID NO: 2645398 - RNA, 15 nt, Human
guggauggccccagc

SEQ ID NO: 2645399 - RNA, 16 nt, Human
guggauggccccagca

SEQ ID NO: 2645400 - RNA, 19 nt, Human
guggauggccccagcacag

SEQ ID NO: 2645401 - RNA, 22 nt, Human
guggauggccccagcacagcuu

SEQ ID NO: 2645402 - RNA, 13 nt, Human
guggauggcccca

SEQ ID NO: 2645403 - RNA, 21 nt, Human
guggaccuuaggccuuccucu

SEQ ID NO: 2645404 - RNA, 18 nt, Human
guggaccuuaggccuucc

SEQ ID NO: 2645405 - RNA, 17 nt, Human
guggaccuuaggccuuc

SEQ ID NO: 2645406 - RNA, 18 nt, Human
guggaauauaaggaaagc

SEQ ID NO: 2645407 - RNA, 23 nt, Human
gugcugggaggagggagagggag

SEQ ID NO: 2645408 - RNA, 18 nt, Human
gugcugggaggagggaga

SEQ ID NO: 2645409 - RNA, 19 nt, Human
gugcugggaggagggagag

SEQ ID NO: 2645410 - RNA, 23 nt, Human
gugcugggagcuccacucugcuu

SEQ ID NO: 2645411 - RNA, 15 nt, Human
gugcugggaggaggg

SEQ ID NO: 2645412 - RNA, 17 nt, Human
gugcugggaggagggag

SEQ ID NO: 2645413 - RNA, 16 nt, Human
gugcugggagcuccac

SEQ ID NO: 2645414 - RNA, 22 nt, Human
gugcugggagcuccacucugcu

SEQ ID NO: 2645415 - RNA, 13 nt, Human
gugcuaugaauuu

SEQ ID NO: 2645416 - RNA, 24 nt, Human
gugcuauuacgaaguucaagauca

SEQ ID NO: 2645417 - RNA, 16 nt, Human
gugcucagaagggcua

SEQ ID NO: 2645418 - RNA, 16 nt, Human
aaugaaaaugaauauc

SEQ ID NO: 2645419 - RNA, 13 nt, Human
aaugaaaaugaau

SEQ ID NO: 2645420 - RNA, 13 nt, Human
aaugaaaacagug

SEQ ID NO: 2645421 - RNA, 18 nt, Human
aaugaaaacaguguguaa

SEQ ID NO: 2645422 - RNA, 22 nt, Human
aaugaaaacaguguguaaacaa

SEQ ID NO: 2645423 - RNA, 15 nt, Human
aaugagccuggcaag

SEQ ID NO: 2645424 - RNA, 14 nt, Human
uaaugacgaggaac

SEQ ID NO: 2645425 - RNA, 22 nt, Human
uaauggugaugcagucuuagau

SEQ ID NO: 2645426 - RNA, 22 nt, Human
aaucuuuguuucagguucagua

SEQ ID NO: 2645427 - RNA, 16 nt, Human
aaucuuguuucugaaa

SEQ ID NO: 2645428 - RNA, 17 nt, Human
aaucuuguuucugaaaa

SEQ ID NO: 2645429 - RNA, 19 nt, Human
aaucuuguuucugaaaaga

SEQ ID NO: 2645430 - RNA, 19 nt, Human
aaucuuguugguucaccau

SEQ ID NO: 2645431 - RNA, 18 nt, Human
aaucuuguugguucacca

SEQ ID NO: 2645432 - RNA, 21 nt, Human
uaauacugaaccacuuguaga

SEQ ID NO: 2645433 - RNA, 20 nt, Human
uaauacugaaccacuuguag

SEQ ID NO: 2645434 - RNA, 22 nt, Human
uaauacugaaccacuuguagau

SEQ ID NO: 2645435 - RNA, 19 nt, Human
uaauacugaaccacuugua

SEQ ID NO: 2645436 - RNA, 15 nt, Human
uaauacugaaccacu

SEQ ID NO: 2645437 - RNA, 14 nt, Human
uaauacugaaccac

SEQ ID NO: 2645438 - RNA, 13 nt, Human
uaauacugaacca

SEQ ID NO: 2645439 - RNA, 16 nt, Human
aaucuucaaagccuuc

SEQ ID NO: 2645440 - RNA, 17 nt, Human
aaucuucaaagccuucu

SEQ ID NO: 2645441 - RNA, 17 nt, Human
aaucuuauaauuguucu

SEQ ID NO: 2645442 - RNA, 14 nt, Human
aaucuuccuuuuau

SEQ ID NO: 2645443 - RNA, 17 nt, Human
aaucuucccaugcauuc

SEQ ID NO: 2645444 - RNA, 14 nt, Human
uaauagggaauaua

SEQ ID NO: 2645445 - RNA, 15 nt, Human
uaauagggaauauau

SEQ ID NO: 2645446 - RNA, 16 nt, Human
uaauagggaauauauc

SEQ ID NO: 2645447 - RNA, 18 nt, Human
uaauaggcucugccugac

SEQ ID NO: 2645448 - RNA, 20 nt, Human
uaaucaagagccuuaaaaca

SEQ ID NO: 2645449 - RNA, 19 nt, Human
uaaucaagagccuuaaaac

SEQ ID NO: 2645450 - RNA, 18 nt, Human
uaaucaagagccuuaaaa

SEQ ID NO: 2645451 - RNA, 14 nt, Human
uaaucaagagccuu

SEQ ID NO: 2645452 - RNA, 21 nt, Human
uaaucaaguaaggauguaugu

SEQ ID NO: 2645453 - RNA, 23 nt, Human
uaaucaagagccuuaaaacauca

SEQ ID NO: 2645454 - RNA, 22 nt, Human
uaaucacgaguaagauuaagag

SEQ ID NO: 2645455 - RNA, 15 nt, Human
uaaucaccauguaag

SEQ ID NO: 2645456 - RNA, 20 nt, Human
uaaucaccauguaagcacuc

SEQ ID NO: 2645457 - RNA, 16 nt, Human
uaaugaauuuuuauga

SEQ ID NO: 2645458 - RNA, 21 nt, Human
uaaugaauuuuuaugauauuc

SEQ ID NO: 2645459 - RNA, 14 nt, Human
uaaucaucuaaguc

SEQ ID NO: 2645460 - RNA, 23 nt, Human
uaaucaucuaagucaguacccac

SEQ ID NO: 2645461 - RNA, 17 nt, Human
uaaucauaguuacugug

SEQ ID NO: 2645462 - RNA, 23 nt, Human
uaaucauaguuacuguguaaacu

SEQ ID NO: 2645463 - RNA, 13 nt, Human
aaucagagacaaa

SEQ ID NO: 2645464 - RNA, 14 nt, Human
uaaguauguuauuu

SEQ ID NO: 2645465 - RNA, 12 nt, Human
uaaguuauugca

SEQ ID NO: 2645466 - RNA, 14 nt, Human
uaaguuauugcagu

SEQ ID NO: 2645467 - RNA, 15 nt, Human
uaaguuauugcaguu

SEQ ID NO: 2645468 - RNA, 16 nt, Human
uaaguuauugcaguuu

SEQ ID NO: 2645469 - RNA, 20 nt, Human
uaaguuauugcaguuuauca

SEQ ID NO: 2645470 - RNA, 14 nt, Human
aaucaucuaaguca

SEQ ID NO: 2645471 - RNA, 22 nt, Human
aaucauguugaucauguacuuu

SEQ ID NO: 2645472 - RNA, 23 nt, Human
aaucauguugaucauguacuuuu

SEQ ID NO: 2645473 - RNA, 19 nt, Human
aaucauucagaaauguuga

SEQ ID NO: 2645474 - RNA, 23 nt, Human
aaucauucagaaauguugagucu

SEQ ID NO: 2645475 - RNA, 17 nt, Human
aaucauguccauacacu

SEQ ID NO: 2645476 - RNA, 19 nt, Human
aaucauguccauacacuuu

SEQ ID NO: 2645477 - RNA, 22 nt, Human
aaucauguccauacacuuuguu

SEQ ID NO: 2645478 - RNA, 21 nt, Human
uaaguuuugacaagcuggcuu

SEQ ID NO: 2645479 - RNA, 24 nt, Human
aauccuaauuucuccucccuuccu

SEQ ID NO: 2645480 - RNA, 19 nt, Human
aauccuaauuucuccuccc

SEQ ID NO: 2645481 - RNA, 21 nt, Human
aauccuaauuucuccucccuu

SEQ ID NO: 2645482 - RNA, 16 nt, Human
aauccuaauuucuccu

SEQ ID NO: 2645483 - RNA, 17 nt, Human
aaucauucuuacuaaaa

SEQ ID NO: 2645484 - RNA, 18 nt, Human
aaucauucuuacuaaaaa

SEQ ID NO: 2645485 - RNA, 14 nt, Human
aaucuuauaauugu

SEQ ID NO: 2645486 - RNA, 15 nt, Human
aaucuuauaauuguu

SEQ ID NO: 2645487 - RNA, 21 nt, Human
aauccuuccauuccacacaga

SEQ ID NO: 2645488 - RNA, 13 nt, Human
aaucuacugcauu

SEQ ID NO: 2645489 - RNA, 14 nt, Human
aaucuacugcauuu

SEQ ID NO: 2645490 - RNA, 22 nt, Human
aaucuagauaucgacuuguuuu

SEQ ID NO: 2645491 - RNA, 15 nt, Human
aaucuacugcauuua

SEQ ID NO: 2645492 - RNA, 16 nt, Human
aaugcaguuucuucau

SEQ ID NO: 2645493 - RNA, 14 nt, Human
uacaaguaguucug

SEQ ID NO: 2645494 - RNA, 16 nt, Human
uacaaguaguucugua

SEQ ID NO: 2645495 - RNA, 15 nt, Human
uacaaguaguucugu

SEQ ID NO: 2645496 - RNA, 21 nt, Human
uacaaguaguucuguauuuga

SEQ ID NO: 2645497 - RNA, 19 nt, Human
uacaaguaguucuguauuu

SEQ ID NO: 2645498 - RNA, 18 nt, Human
uacaaguaguucuguauu

SEQ ID NO: 2645499 - RNA, 17 nt, Human
uacaaguaguucuguau

SEQ ID NO: 2645500 - RNA, 23 nt, Human
uacaaguaguucuguauuugaaa

SEQ ID NO: 2645501 - RNA, 22 nt, Human
uacaaguaguucuguauuugaa

SEQ ID NO: 2645502 - RNA, 14 nt, Human
uacaaaauuaagca

SEQ ID NO: 2645503 - RNA, 15 nt, Human
uacaaaauuaagcaa

SEQ ID NO: 2645504 - RNA, 23 nt, Human
uacaaaauuaagcaaauguuaaa

SEQ ID NO: 2645505 - RNA, 16 nt, Human
uacaagguauaauaaa

SEQ ID NO: 2645506 - RNA, 17 nt, Human
uacaagguauaauaaaa

SEQ ID NO: 2645507 - RNA, 18 nt, Human
uacaagguauaauaaaau

SEQ ID NO: 2645508 - RNA, 19 nt, Human
uacaagguauaauaaaauu

SEQ ID NO: 2645509 - RNA, 20 nt, Human
uacaagguauaauaaaauua

SEQ ID NO: 2645510 - RNA, 19 nt, Human
uacaagggaagauuuaugu

SEQ ID NO: 2645511 - RNA, 18 nt, Human
uacaagggcauaaaguaa

SEQ ID NO: 2645512 - RNA, 19 nt, Human
uacaagggcauaaaguaaa

SEQ ID NO: 2645513 - RNA, 15 nt, Human
aaugcuuuccaaaac

SEQ ID NO: 2645514 - RNA, 14 nt, Human
aaugcuuuauuugu

SEQ ID NO: 2645515 - RNA, 16 nt, Human
aaugcuuuauuuguaa

SEQ ID NO: 2645516 - RNA, 17 nt, Human
aaugcuuuauuuguaaa

SEQ ID NO: 2645517 - RNA, 18 nt, Human
aaugcuuuauuuguaaau

SEQ ID NO: 2645518 - RNA, 19 nt, Human
aaugcuuuauuuguaaauu

SEQ ID NO: 2645519 - RNA, 21 nt, Human
aaugcuuuauuuguaaauuua

SEQ ID NO: 2645520 - RNA, 22 nt, Human
aaugcuuuauuuguaaauuuag

SEQ ID NO: 2645521 - RNA, 22 nt, Human
aauggaauaaaaggcuugaagc

SEQ ID NO: 2645522 - RNA, 18 nt, Human
aauggaauaaaaggcuug

SEQ ID NO: 2645523 - RNA, 15 nt, Human
uacaaaaagcauaaa

SEQ ID NO: 2645524 - RNA, 20 nt, Human
uacaaaaagcauaaaaauua

SEQ ID NO: 2645525 - RNA, 22 nt, Human
uacaaaaauaaacuauaaaaca

SEQ ID NO: 2645526 - RNA, 20 nt, Human
uaauuucauguaaaacagaa

SEQ ID NO: 2645527 - RNA, 12 nt, Human
uaauuucagggu

SEQ ID NO: 2645528 - RNA, 19 nt, Human
uaauuuauuuccacuaaaa

SEQ ID NO: 2645529 - RNA, 20 nt, Human
uaauuuauuuaauauuuaau

SEQ ID NO: 2645530 - RNA, 14 nt, Human
uaauuuaaaaauau

SEQ ID NO: 2645531 - RNA, 22 nt, Human
uaauuuaaaaauauauuuauaa

SEQ ID NO: 2645532 - RNA, 12 nt, Human
uaauuguuuaaa

SEQ ID NO: 2645533 - RNA, 13 nt, Human
uaauuguuuaaaa

SEQ ID NO: 2645534 - RNA, 15 nt, Human
uaauuguuucagaau

SEQ ID NO: 2645535 - RNA, 22 nt, Human
aaugagcucgcauuugucaaug

SEQ ID NO: 2645536 - RNA, 14 nt, Human
aaugagcucugaaa

SEQ ID NO: 2645537 - RNA, 17 nt, Human
aaugaggaaaauucuua

SEQ ID NO: 2645538 - RNA, 19 nt, Human
aaugaggaaaauucuuaaa

SEQ ID NO: 2645539 - RNA, 14 nt, Human
uacacuaguuguuu

SEQ ID NO: 2645540 - RNA, 21 nt, Human
uacaggcuggcgcagaacgaa

SEQ ID NO: 2645541 - RNA, 12 nt, Human
uacaggcuggcg

SEQ ID NO: 2645542 - RNA, 17 nt, Human
uacaguagauuuuccaa

SEQ ID NO: 2645543 - RNA, 21 nt, Human
uacaguagauuuuccaaaugu

SEQ ID NO: 2645544 - RNA, 22 nt, Human
aauggacccuuuuuguuaugau

SEQ ID NO: 2645545 - RNA, 15 nt, Human
aauggagaagcugca

SEQ ID NO: 2645546 - RNA, 16 nt, Human
aauggagaagcugcag

SEQ ID NO: 2645547 - RNA, 17 nt, Human
aauggagaagcugcagg

SEQ ID NO: 2645548 - RNA, 19 nt, Human
aauggaggaucucuaaaga

SEQ ID NO: 2645549 - RNA, 20 nt, Human
aauggaggaucucuaaagag

SEQ ID NO: 2645550 - RNA, 15 nt, Human
aaugugacccuccaa

SEQ ID NO: 2645551 - RNA, 19 nt, Human
aaugugacccuccaaaugg

SEQ ID NO: 2645552 - RNA, 23 nt, Human
aaugugagugguugaauaugauu

SEQ ID NO: 2645553 - RNA, 22 nt, Human
aaugugagugguugaauaugau

SEQ ID NO: 2645554 - RNA, 15 nt, Human
aaugugagaagccag

SEQ ID NO: 2645555 - RNA, 21 nt, Human
aaugugagaagccagccagag

SEQ ID NO: 2645556 - RNA, 18 nt, Human
aauguacguccagccugc

SEQ ID NO: 2645557 - RNA, 20 nt, Human
uacauauaaaauguaauuac

SEQ ID NO: 2645558 - RNA, 15 nt, Human
uacaguauagauuuu

SEQ ID NO: 2645559 - RNA, 15 nt, Human
uacaguaucucaggg

SEQ ID NO: 2645560 - RNA, 13 nt, Human
uacauagugaaaa

SEQ ID NO: 2645561 - RNA, 16 nt, Human
uaaaucuauuuauuaa

SEQ ID NO: 2645562 - RNA, 20 nt, Human
uaaaucuauuuauuaauauu

SEQ ID NO: 2645563 - RNA, 19 nt, Human
uaaaucuauuuauuaauau

SEQ ID NO: 2645564 - RNA, 18 nt, Human
uaaaucuauuuauuaaua

SEQ ID NO: 2645565 - RNA, 15 nt, Human
uaaaucuuaauguuc

SEQ ID NO: 2645566 - RNA, 16 nt, Human
uaaaucuuaauguucc

SEQ ID NO: 2645567 - RNA, 17 nt, Human
uaaaucuuaauguuccu

SEQ ID NO: 2645568 - RNA, 19 nt, Human
uaaaucuuaauguuccuca

SEQ ID NO: 2645569 - RNA, 13 nt, Human
uaaauguuauuau

SEQ ID NO: 2645570 - RNA, 21 nt, Human
aauacaaaaaauuagccgggc

SEQ ID NO: 2645571 - RNA, 20 nt, Human
aauacaaaaauuagccgggc

SEQ ID NO: 2645572 - RNA, 18 nt, Human
aauacaacuuaaauaaua

SEQ ID NO: 2645573 - RNA, 12 nt, Human
aauacaagguau

SEQ ID NO: 2645574 - RNA, 13 nt, Human
aauacaagguaua

SEQ ID NO: 2645575 - RNA, 16 nt, Human
uaaauacauauggaug

SEQ ID NO: 2645576 - RNA, 15 nt, Human
uaaauacaugcauau

SEQ ID NO: 2645577 - RNA, 16 nt, Human
uaaauacaugcauaua

SEQ ID NO: 2645578 - RNA, 20 nt, Human
uaaauacaugcauauaauga

SEQ ID NO: 2645579 - RNA, 21 nt, Human
uaaauacaugcauauaaugaa

SEQ ID NO: 2645580 - RNA, 20 nt, Human
uaaauacaugccacaucaaa

SEQ ID NO: 2645581 - RNA, 13 nt, Human
uaaauaauucuuu

SEQ ID NO: 2645582 - RNA, 12 nt, Human
uaaauaauucuu

SEQ ID NO: 2645583 - RNA, 18 nt, Human
aauaauuuucauuuugca

SEQ ID NO: 2645584 - RNA, 12 nt, Human
aauaacugugua

SEQ ID NO: 2645585 - RNA, 15 nt, Human
aauaacuguguacug

SEQ ID NO: 2645586 - RNA, 16 nt, Human
aauaacuguguacugu

SEQ ID NO: 2645587 - RNA, 23 nt, Human
aauaauucuuuuuuauuaaucac

SEQ ID NO: 2645588 - RNA, 21 nt, Human
aauaauucuuuuuuauuaauc

SEQ ID NO: 2645589 - RNA, 20 nt, Human
aauaauucuuuuuuauuaau

SEQ ID NO: 2645590 - RNA, 15 nt, Human
aauaauucuuuuuua

SEQ ID NO: 2645591 - RNA, 14 nt, Human
aauaauucuuuuuu

SEQ ID NO: 2645592 - RNA, 12 nt, Human
aauaagaauuug

SEQ ID NO: 2645593 - RNA, 15 nt, Human
aauaagaauuugcau

SEQ ID NO: 2645594 - RNA, 16 nt, Human
aauaagaauuugcaua

SEQ ID NO: 2645595 - RNA, 18 nt, Human
aauaacccuuugguuuuu

SEQ ID NO: 2645596 - RNA, 18 nt, Human
aauaacccauaauugaag

SEQ ID NO: 2645597 - RNA, 20 nt, Human
aauaacuggaacaaauuauu

SEQ ID NO: 2645598 - RNA, 21 nt, Human
aauaacuggaacaaauuauuu

SEQ ID NO: 2645599 - RNA, 15 nt, Human
aauaaaacauagcaa

SEQ ID NO: 2645600 - RNA, 21 nt, Human
aauaaaucauucuuacuaaaa

SEQ ID NO: 2645601 - RNA, 15 nt, Human
aauaaaugcccucuu

SEQ ID NO: 2645602 - RNA, 16 nt, Human
aauaaaugcccucuuc

SEQ ID NO: 2645603 - RNA, 21 nt, Human
aauaaaaccgaaggugaaaaa

SEQ ID NO: 2645604 - RNA, 12 nt, Human
aaguuuuguugu

SEQ ID NO: 2645605 - RNA, 13 nt, Human
aaguuuuguugua

SEQ ID NO: 2645606 - RNA, 22 nt, Human
aaguuuuguuguacuuaaaugg

SEQ ID NO: 2645607 - RNA, 15 nt, Human
aaguuuuuguuugga

SEQ ID NO: 2645608 - RNA, 12 nt, Human
aaguuuuuuugc

SEQ ID NO: 2645609 - RNA, 13 nt, Human
aaguuuuuuugcu

SEQ ID NO: 2645610 - RNA, 23 nt, Human
aaguuuuuuugcugcugccucuu

SEQ ID NO: 2645611 - RNA, 19 nt, Human
aaguuuuguaaaagaaauc

SEQ ID NO: 2645612 - RNA, 13 nt, Human
uaaaguauucuuc

SEQ ID NO: 2645613 - RNA, 14 nt, Human
uaaaguauucuucu

SEQ ID NO: 2645614 - RNA, 18 nt, Human
uaaaguauucuucucuuc

SEQ ID NO: 2645615 - RNA, 19 nt, Human
uaaaguauguauuauuuac

SEQ ID NO: 2645616 - RNA, 21 nt, Human
uaaaguauguauuauuuacau

SEQ ID NO: 2645617 - RNA, 20 nt, Human
uaaagguggugaggcaauaa

SEQ ID NO: 2645618 - RNA, 13 nt, Human
uaaagguggauuu

SEQ ID NO: 2645619 - RNA, 21 nt, Human
uaaagguggugaggcaauaaa

SEQ ID NO: 2645620 - RNA, 17 nt, Human
uaaaguaguccugugaa

SEQ ID NO: 2645621 - RNA, 21 nt, Human
uaaaguaaaaagggaauuaug

SEQ ID NO: 2645622 - RNA, 13 nt, Human
uaaaguaaauaca

SEQ ID NO: 2645623 - RNA, 14 nt, Human
aauaucuauuaaua

SEQ ID NO: 2645624 - RNA, 22 nt, Human
aauaucuaauauauaugaauaa

SEQ ID NO: 2645625 - RNA, 21 nt, Human
aauaucuaauauauaugaaua

SEQ ID NO: 2645626 - RNA, 20 nt, Human
aauaucuaauauauaugaau

SEQ ID NO: 2645627 - RNA, 14 nt, Human
aauaucuaauauau

SEQ ID NO: 2645628 - RNA, 16 nt, Human
aauaucuauuaauaua

SEQ ID NO: 2645629 - RNA, 15 nt, Human
aauaucuauuaauau

SEQ ID NO: 2645630 - RNA, 15 nt, Human
aauaucuuggccuaa

SEQ ID NO: 2645631 - RNA, 19 nt, Human
aauaugacuuuuuauaaaa

SEQ ID NO: 2645632 - RNA, 20 nt, Human
aauaugacuuuuuauaaaau

SEQ ID NO: 2645633 - RNA, 22 nt, Human
aauauuguugacaacugugacu

SEQ ID NO: 2645634 - RNA, 16 nt, Human
aauauuguugacaacu

SEQ ID NO: 2645635 - RNA, 14 nt, Human
aauauuguuucugc

SEQ ID NO: 2645636 - RNA, 15 nt, Human
aauauuguuucugca

SEQ ID NO: 2645637 - RNA, 23 nt, Human
aauauuguuucugcauucauuuu

SEQ ID NO: 2645638 - RNA, 17 nt, Human
aauauuguuuuacaaua

SEQ ID NO: 2645639 - RNA, 16 nt, Human
aauauuguuugguaaa

SEQ ID NO: 2645640 - RNA, 20 nt, Human
aauauuguuugguaaauguu

SEQ ID NO: 2645641 - RNA, 21 nt, Human
aauauuguuugguaaauguuu

SEQ ID NO: 2645642 - RNA, 22 nt, Human
aauauuguuugguaaauguuuc

SEQ ID NO: 2645643 - RNA, 23 nt, Human
aauauuguuugguaaauguuucu

SEQ ID NO: 2645644 - RNA, 20 nt, Human
aauauuguugacaacuguga

SEQ ID NO: 2645645 - RNA, 18 nt, Human
aauauuguuuuacaauag

SEQ ID NO: 2645646 - RNA, 12 nt, Human
aauauuguuucu

SEQ ID NO: 2645647 - RNA, 20 nt, Human
aauauuucagguucuucaga

SEQ ID NO: 2645648 - RNA, 21 nt, Human
aaucacuguguauauuugauu

SEQ ID NO: 2645649 - RNA, 12 nt, Human
aauauuuuaugg

SEQ ID NO: 2645650 - RNA, 21 nt, Human
aauauuuuaugguuauguuuu

SEQ ID NO: 2645651 - RNA, 22 nt, Human
aaucacuguguauauuugauuu

SEQ ID NO: 2645652 - RNA, 23 nt, Human
aaucacuguguauauuugauuua

SEQ ID NO: 2645653 - RNA, 12 nt, Human
aauauuuucaac

SEQ ID NO: 2645654 - RNA, 18 nt, Human
aauaugauuaaaaauauc

SEQ ID NO: 2645655 - RNA, 17 nt, Human
aauaugcaacauugucc

SEQ ID NO: 2645656 - RNA, 16 nt, Human
aauauugauugggaaa

SEQ ID NO: 2645657 - RNA, 20 nt, Human
aauauugauugggaaaacau

SEQ ID NO: 2645658 - RNA, 21 nt, Human
aauauugauugggaaaacauu

SEQ ID NO: 2645659 - RNA, 22 nt, Human
aauauugauugggaaaacauuu

SEQ ID NO: 2645660 - RNA, 23 nt, Human
aauauugauugggaaaacauuug

SEQ ID NO: 2645661 - RNA, 13 nt, Human
aauauugcaaaau

SEQ ID NO: 2645662 - RNA, 14 nt, Human
aauauugcaaaaua

SEQ ID NO: 2645663 - RNA, 16 nt, Human
aauauugcaaaauaca

SEQ ID NO: 2645664 - RNA, 17 nt, Human
aauauugcaaaauacau

SEQ ID NO: 2645665 - RNA, 18 nt, Human
aauauugcaaaauacaug

SEQ ID NO: 2645666 - RNA, 19 nt, Human
aauauugcaaaauacauga

SEQ ID NO: 2645667 - RNA, 20 nt, Human
aauauugcaaaauacaugaa

SEQ ID NO: 2645668 - RNA, 23 nt, Human
aauauugcaaaauacaugaagcu

SEQ ID NO: 2645669 - RNA, 21 nt, Human
aauauauguauuauuuauaau

SEQ ID NO: 2645670 - RNA, 12 nt, Human
aauauauguauu

SEQ ID NO: 2645671 - RNA, 14 nt, Human
aauaguaugaaaau

SEQ ID NO: 2645672 - RNA, 17 nt, Human
aauaguaugaaaaugga

SEQ ID NO: 2645673 - RNA, 18 nt, Human
aauaguaugaaaauggaa

SEQ ID NO: 2645674 - RNA, 14 nt, Human
aauauauguauuau

SEQ ID NO: 2645675 - RNA, 18 nt, Human
aauauauguauuauuuau

SEQ ID NO: 2645676 - RNA, 21 nt, Human
aauaucaaauuaauuguguga

SEQ ID NO: 2645677 - RNA, 19 nt, Human
aauaucaaauuaauugugu

SEQ ID NO: 2645678 - RNA, 17 nt, Human
aauaucaaauuaauugu

SEQ ID NO: 2645679 - RNA, 17 nt, Human
uaaccucgcccucuccu

SEQ ID NO: 2645680 - RNA, 14 nt, Human
uaaccucgcccucu

SEQ ID NO: 2645681 - RNA, 16 nt, Human
uaaccucgcccucucc

SEQ ID NO: 2645682 - RNA, 15 nt, Human
uaaccucgcccucuc

SEQ ID NO: 2645683 - RNA, 12 nt, Human
uaacauaaauuu

SEQ ID NO: 2645684 - RNA, 22 nt, Human
uaacaugcuggugaauauuuuc

SEQ ID NO: 2645685 - RNA, 20 nt, Human
aauagccugccucuucucua

SEQ ID NO: 2645686 - RNA, 22 nt, Human
aauagauauaaauuuuuaagag

SEQ ID NO: 2645687 - RNA, 13 nt, Human
aauagacaucaaa

SEQ ID NO: 2645688 - RNA, 15 nt, Human
aauagacaucaaacu

SEQ ID NO: 2645689 - RNA, 15 nt, Human
aauagacacauacau

SEQ ID NO: 2645690 - RNA, 13 nt, Human
uaaauuuuuaaga

SEQ ID NO: 2645691 - RNA, 17 nt, Human
uaaauuuuguaugaaaa

SEQ ID NO: 2645692 - RNA, 15 nt, Human
uaaaugccauagaaa

SEQ ID NO: 2645693 - RNA, 20 nt, Human
aauaggaugggcuucugugc

SEQ ID NO: 2645694 - RNA, 14 nt, Human
aauaggaugggcuu

SEQ ID NO: 2645695 - RNA, 21 nt, Human
aauaggaguggugauuugaaa

SEQ ID NO: 2645696 - RNA, 19 nt, Human
aauaggaaucauucagaaa

SEQ ID NO: 2645697 - RNA, 20 nt, Human
aauaggaaucauucagaaau

SEQ ID NO: 2645698 - RNA, 22 nt, Human
aauaggaaucauucagaaaugu

SEQ ID NO: 2645699 - RNA, 23 nt, Human
aauaggaaucauucagaaauguu

SEQ ID NO: 2645700 - RNA, 13 nt, Human
aauaguaauguuu

SEQ ID NO: 2645701 - RNA, 13 nt, Human
aauaguagaugug

SEQ ID NO: 2645702 - RNA, 22 nt, Human
aauaguagauguggccuuugaa

SEQ ID NO: 2645703 - RNA, 15 nt, Human
aauaggauuuuuaga

SEQ ID NO: 2645704 - RNA, 16 nt, Human
aauaggauuuuuagaa

SEQ ID NO: 2645705 - RNA, 13 nt, Human
aauaggaaacaag

SEQ ID NO: 2645706 - RNA, 16 nt, Human
acaaugaacacuuaua

SEQ ID NO: 2645707 - RNA, 17 nt, Human
acaaugaaguugaaaau

SEQ ID NO: 2645708 - RNA, 20 nt, Human
acaaugaaguugaaaaucau

SEQ ID NO: 2645709 - RNA, 21 nt, Human
acaaugaaguugaaaaucaua

SEQ ID NO: 2645710 - RNA, 19 nt, Human
acaaucucuuuuuguuugc

SEQ ID NO: 2645711 - RNA, 20 nt, Human
uagcgaacccuuuauuugaa

SEQ ID NO: 2645712 - RNA, 14 nt, Human
acaauaaaauuuuu

SEQ ID NO: 2645713 - RNA, 22 nt, Human
acaauaggaguggugauuugaa

SEQ ID NO: 2645714 - RNA, 23 nt, Human
acaauaggaguggugauuugaaa

SEQ ID NO: 2645715 - RNA, 22 nt, Human
acaauaggaugggcuucugugc

SEQ ID NO: 2645716 - RNA, 17 nt, Human
acaauauuccagaucuu

SEQ ID NO: 2645717 - RNA, 16 nt, Human
acaaguuuauauauau

SEQ ID NO: 2645718 - RNA, 18 nt, Human
acaaguugcuuuuaccug

SEQ ID NO: 2645719 - RNA, 21 nt, Human
acaaguugagcuaugacuuaa

SEQ ID NO: 2645720 - RNA, 20 nt, Human
acaaguugagcuaugacuua

SEQ ID NO: 2645721 - RNA, 22 nt, Human
acaaguucgagucaaaguugaa

SEQ ID NO: 2645722 - RNA, 13 nt, Human
uagcaacuuuugu

SEQ ID NO: 2645723 - RNA, 17 nt, Human
uagcaacuuuuguguaa

SEQ ID NO: 2645724 - RNA, 16 nt, Human
uagcaacaacaauugg

SEQ ID NO: 2645725 - RNA, 18 nt, Human
uagcaacaacaauuggua

SEQ ID NO: 2645726 - RNA, 19 nt, Human
uagcaacaacaauugguaa

SEQ ID NO: 2645727 - RNA, 17 nt, Human
acaaaugacuuuauuau

SEQ ID NO: 2645728 - RNA, 16 nt, Human
acaaaugacuuuauua

SEQ ID NO: 2645729 - RNA, 17 nt, Human
acaaaugcucaaagaaa

SEQ ID NO: 2645730 - RNA, 21 nt, Human
acaaaugcucaaagaaaucua

SEQ ID NO: 2645731 - RNA, 20 nt, Human
acaaaugcaucuuugaugug

SEQ ID NO: 2645732 - RNA, 18 nt, Human
acaaaugcaucuuugaug

SEQ ID NO: 2645733 - RNA, 16 nt, Human
acaaaugcaucuuuga

SEQ ID NO: 2645734 - RNA, 15 nt, Human
acaaaugcaucuuug

SEQ ID NO: 2645735 - RNA, 23 nt, Human
acaaaugacuuuauuauuuauuu

SEQ ID NO: 2645736 - RNA, 21 nt, Human
acaaaugacuuuauuauuuau

SEQ ID NO: 2645737 - RNA, 18 nt, Human
acaaaugacuuuauuauu

SEQ ID NO: 2645738 - RNA, 15 nt, Human
acaagauuuuuuaau

SEQ ID NO: 2645739 - RNA, 20 nt, Human
acaagauuuuuuaauuguuu

SEQ ID NO: 2645740 - RNA, 21 nt, Human
acaagauuuuuuaauuguuua

SEQ ID NO: 2645741 - RNA, 22 nt, Human
acaagauuuuuuaauuguuuaa

SEQ ID NO: 2645742 - RNA, 19 nt, Human
acaagaccaccacuucgaa

SEQ ID NO: 2645743 - RNA, 13 nt, Human
aauuuuuugacuu

SEQ ID NO: 2645744 - RNA, 23 nt, Human
aauuuuuuuuaguauuuauuuau

SEQ ID NO: 2645745 - RNA, 15 nt, Human
aauuuuuuuuaguau

SEQ ID NO: 2645746 - RNA, 20 nt, Human
aauuuuuuuuaguauuuauu

SEQ ID NO: 2645747 - RNA, 19 nt, Human
aauuuuuuuguaugaaaac

SEQ ID NO: 2645748 - RNA, 18 nt, Human
aauuuuuuuguaugaaaa

SEQ ID NO: 2645749 - RNA, 17 nt, Human
aauuuuuuuguaugaaa

SEQ ID NO: 2645750 - RNA, 15 nt, Human
aauuuuuuuguauga

SEQ ID NO: 2645751 - RNA, 19 nt, Human
aauuuuuuuuaaaauagaa

SEQ ID NO: 2645752 - RNA, 20 nt, Human
aauuuuuuuuaaaauagaaa

SEQ ID NO: 2645753 - RNA, 14 nt, Human
aauuuuuaagagaa

SEQ ID NO: 2645754 - RNA, 11 nt, Human
aauuuuuaagc

SEQ ID NO: 2645755 - RNA, 14 nt, Human
aauuuuuaaugaug

SEQ ID NO: 2645756 - RNA, 17 nt, Human
aauuuuuaagcugcaaa

SEQ ID NO: 2645757 - RNA, 12 nt, Human
aauuuuuaaaaa

SEQ ID NO: 2645758 - RNA, 12 nt, Human
aauuuguugcau

SEQ ID NO: 2645759 - RNA, 14 nt, Human
uacuuuuaaaaaca

SEQ ID NO: 2645760 - RNA, 15 nt, Human
uacuuuuaaaaacau

SEQ ID NO: 2645761 - RNA, 18 nt, Human
uacuuuuaaaaacauaac

SEQ ID NO: 2645762 - RNA, 14 nt, Human
aauuugcauacuua

SEQ ID NO: 2645763 - RNA, 19 nt, Human
uacuuuguuaggauuuuca

SEQ ID NO: 2645764 - RNA, 16 nt, Human
aauuugcacuguuuaa

SEQ ID NO: 2645765 - RNA, 20 nt, Human
aauuugcacuaaaucagaga

SEQ ID NO: 2645766 - RNA, 13 nt, Human
uacuuuuuuaaau

SEQ ID NO: 2645767 - RNA, 18 nt, Human
uacuuuuuuaaauauuuu

SEQ ID NO: 2645768 - RNA, 20 nt, Human
uacuuuuuuaaauauuuucu

SEQ ID NO: 2645769 - RNA, 21 nt, Human
uacuuuuuuaaauauuuucua

SEQ ID NO: 2645770 - RNA, 22 nt, Human
uacuuuuuuaaauauuuucuau

SEQ ID NO: 2645771 - RNA, 23 nt, Human
uacuuuuuuaaauauuuucuauu

SEQ ID NO: 2645772 - RNA, 12 nt, Human
uagaucuccagc

SEQ ID NO: 2645773 - RNA, 13 nt, Human
uagaucuccagcg

SEQ ID NO: 2645774 - RNA, 15 nt, Human
uagauccauuuccau

SEQ ID NO: 2645775 - RNA, 18 nt, Human
uagauccauuuccauugc

SEQ ID NO: 2645776 - RNA, 21 nt, Human
uagauccauuuccauugcuua

SEQ ID NO: 2645777 - RNA, 23 nt, Human
uagauauaaauuuuuaagagaaa

SEQ ID NO: 2645778 - RNA, 19 nt, Human
acaaauauucacuggcccc

SEQ ID NO: 2645779 - RNA, 14 nt, Human
acaaaacuuuucua

SEQ ID NO: 2645780 - RNA, 13 nt, Human
acaaaagagcagu

SEQ ID NO: 2645781 - RNA, 18 nt, Human
acaaaguuaaaauuguua

SEQ ID NO: 2645782 - RNA, 14 nt, Human
acaaagugccaaag

SEQ ID NO: 2645783 - RNA, 15 nt, Human
acaaagugccaaaga

SEQ ID NO: 2645784 - RNA, 16 nt, Human
acaaagugccaaagaa

SEQ ID NO: 2645785 - RNA, 17 nt, Human
acaaagugccaaagaaa

SEQ ID NO: 2645786 - RNA, 18 nt, Human
acaaagugccaaagaaag

SEQ ID NO: 2645787 - RNA, 23 nt, Human
acaaagugccaaagaaagugguc

SEQ ID NO: 2645788 - RNA, 22 nt, Human
aauuucuuuuuuuccuuuuuaa

SEQ ID NO: 2645789 - RNA, 14 nt, Human
uacuuccaugaauu

SEQ ID NO: 2645790 - RNA, 16 nt, Human
uacuuuguauuuugau

SEQ ID NO: 2645791 - RNA, 21 nt, Human
uacuuuguauuuugauuauuu

SEQ ID NO: 2645792 - RNA, 22 nt, Human
uacuucuuuuuucaaaagaaag

SEQ ID NO: 2645793 - RNA, 20 nt, Human
uacuucuuuuuucaaaagaa

SEQ ID NO: 2645794 - RNA, 13 nt, Human
uacuucugaggua

SEQ ID NO: 2645795 - RNA, 13 nt, Human
aauuuaguguuuu

SEQ ID NO: 2645796 - RNA, 22 nt, Human
aauuuaguguuuuuuuauuucu

SEQ ID NO: 2645797 - RNA, 23 nt, Human
aauuuaguguuuuuuuauuucua

SEQ ID NO: 2645798 - RNA, 16 nt, Human
aauuuaccugauuucu

SEQ ID NO: 2645799 - RNA, 13 nt, Human
aauuuacuuguuu

SEQ ID NO: 2645800 - RNA, 15 nt, Human
aauuuacuuguuuug

SEQ ID NO: 2645801 - RNA, 16 nt, Human
aauuuacuuguuuugg

SEQ ID NO: 2645802 - RNA, 23 nt, Human
aauuggacagauugccuguuucu

SEQ ID NO: 2645803 - RNA, 23 nt, Human
aauugcuugguuguaauuaaauu

SEQ ID NO: 2645804 - RNA, 12 nt, Human
aauuuaaaugaa

SEQ ID NO: 2645805 - RNA, 16 nt, Human
aauuuaaaugaaagaa

SEQ ID NO: 2645806 - RNA, 18 nt, Human
aauuuaaaugaaagaaaa

SEQ ID NO: 2645807 - RNA, 19 nt, Human
aauuuaaaugaaagaaaau

SEQ ID NO: 2645808 - RNA, 22 nt, Human
aauuuaaaugaaagaaaauuga

SEQ ID NO: 2645809 - RNA, 14 nt, Human
aauuucuuauguga

SEQ ID NO: 2645810 - RNA, 15 nt, Human
aauuucuuaugugac

SEQ ID NO: 2645811 - RNA, 16 nt, Human
aauuucuuaugugaca

SEQ ID NO: 2645812 - RNA, 18 nt, Human
aauuucuuaugugacauu

SEQ ID NO: 2645813 - RNA, 20 nt, Human
aauuucuuaugugacauuaa

SEQ ID NO: 2645814 - RNA, 12 nt, Human
aauuuaguauua

SEQ ID NO: 2645815 - RNA, 16 nt, Human
aauugcauacuuugua

SEQ ID NO: 2645816 - RNA, 22 nt, Human
aauugcauacuuuguauuuuga

SEQ ID NO: 2645817 - RNA, 20 nt, Human
aauugcaaaaacauagaaau

SEQ ID NO: 2645818 - RNA, 14 nt, Human
uacugacauuucuu

SEQ ID NO: 2645819 - RNA, 16 nt, Human
uacugacauuucuucu

SEQ ID NO: 2645820 - RNA, 22 nt, Human
uacucucacacugguucucaau

SEQ ID NO: 2645821 - RNA, 15 nt, Human
uacuggggcugggga

SEQ ID NO: 2645822 - RNA, 21 nt, Human
uacuggggcuggggaaggaag

SEQ ID NO: 2645823 - RNA, 18 nt, Human
uacugggcccugagucug

SEQ ID NO: 2645824 - RNA, 23 nt, Human
uacugggcccugagucugggcag

SEQ ID NO: 2645825 - RNA, 19 nt, Human
uacuaaaaaguauaaaaua

SEQ ID NO: 2645826 - RNA, 21 nt, Human
uacuaaaaaguauaaaauagu

SEQ ID NO: 2645827 - RNA, 23 nt, Human
uacuaggaagaacguuuuuuccu

SEQ ID NO: 2645828 - RNA, 14 nt, Human
uacuagcaaaauaa

SEQ ID NO: 2645829 - RNA, 17 nt, Human
uacuagcaaaauaaaac

SEQ ID NO: 2645830 - RNA, 18 nt, Human
uacuagcaaaauaaaaca

SEQ ID NO: 2645831 - RNA, 19 nt, Human
uacuagcaaaauaaaacau

SEQ ID NO: 2645832 - RNA, 21 nt, Human
uacuagcaaaauaaaacauag

SEQ ID NO: 2645833 - RNA, 24 nt, Human
uacuagcaaaauaaaacauagcaa

SEQ ID NO: 2645834 - RNA, 11 nt, Human
uacuauuucca

SEQ ID NO: 2645835 - RNA, 12 nt, Human
uacuauuuaaga

SEQ ID NO: 2645836 - RNA, 15 nt, Human
uacuauuuaagaugu

SEQ ID NO: 2645837 - RNA, 17 nt, Human
uacuauuuaagauguga

SEQ ID NO: 2645838 - RNA, 18 nt, Human
uacuauuuaagaugugaa

SEQ ID NO: 2645839 - RNA, 19 nt, Human
uacuauuuaagaugugaaa

SEQ ID NO: 2645840 - RNA, 21 nt, Human
uacuauuuaagaugugaaaau

SEQ ID NO: 2645841 - RNA, 22 nt, Human
uacucuacccucuuagaaaaac

SEQ ID NO: 2645842 - RNA, 16 nt, Human
uacucuacccucuuag

SEQ ID NO: 2645843 - RNA, 16 nt, Human
aauguguggccugcac

SEQ ID NO: 2645844 - RNA, 22 nt, Human
aauugaaguguauaauauaaaa

SEQ ID NO: 2645845 - RNA, 23 nt, Human
aauguguggauugccucugaaaa

SEQ ID NO: 2645846 - RNA, 11 nt, Human
acacaccugua

SEQ ID NO: 2645847 - RNA, 20 nt, Human
acacaccuguagcacuuacu

SEQ ID NO: 2645848 - RNA, 16 nt, Human
acacacauauacacga

SEQ ID NO: 2645849 - RNA, 17 nt, Human
acaaugcugauuuggug

SEQ ID NO: 2645850 - RNA, 21 nt, Human
uagguuggcaaaaaggcagga

SEQ ID NO: 2645851 - RNA, 18 nt, Human
uaguaagaagacaaacug

SEQ ID NO: 2645852 - RNA, 11 nt, Human
uaguaagaaua

SEQ ID NO: 2645853 - RNA, 22 nt, Human
uaguaagaauaccacaucaaau

SEQ ID NO: 2645854 - RNA, 21 nt, Human
uaguaagauugauaucuauaa

SEQ ID NO: 2645855 - RNA, 22 nt, Human
uaguaagauugauaucuauaaa

SEQ ID NO: 2645856 - RNA, 11 nt, Human
uaguaagcaua

SEQ ID NO: 2645857 - RNA, 12 nt, Human
uaguaagcauag

SEQ ID NO: 2645858 - RNA, 15 nt, Human
uaguaagcauagaaa

SEQ ID NO: 2645859 - RNA, 16 nt, Human
uaguaagcauagaaac

SEQ ID NO: 2645860 - RNA, 15 nt, Human
uagucuuuugcuuuu

SEQ ID NO: 2645861 - RNA, 16 nt, Human
uagucuuuugcuuuug

SEQ ID NO: 2645862 - RNA, 21 nt, Human
uagucuuuugcuuuuggcaaa

SEQ ID NO: 2645863 - RNA, 18 nt, Human
uagucuuugccagucauu

SEQ ID NO: 2645864 - RNA, 14 nt, Human
uagucuuuugcuuu

SEQ ID NO: 2645865 - RNA, 13 nt, Human
uagucuaagacua

SEQ ID NO: 2645866 - RNA, 17 nt, Human
uagucuaagacuauaua

SEQ ID NO: 2645867 - RNA, 11 nt, Human
uaguccuguga

SEQ ID NO: 2645868 - RNA, 12 nt, Human
uaguccugugaa

SEQ ID NO: 2645869 - RNA, 22 nt, Human
uaguccugugaaugccacugcc

SEQ ID NO: 2645870 - RNA, 23 nt, Human
uauaaggaaagcaauaaaugaau

SEQ ID NO: 2645871 - RNA, 22 nt, Human
uauaaggaaagcaauaaaugaa

SEQ ID NO: 2645872 - RNA, 16 nt, Human
uauaaggaaagcaaua

SEQ ID NO: 2645873 - RNA, 18 nt, Human
acaccucugcacaagcug

SEQ ID NO: 2645874 - RNA, 17 nt, Human
uauaaaauccugugcaa

SEQ ID NO: 2645875 - RNA, 21 nt, Human
uauaaaauccugugcaauaga

SEQ ID NO: 2645876 - RNA, 14 nt, Human
acacauuacaaagu

SEQ ID NO: 2645877 - RNA, 18 nt, Human
acacauuacaaaguuaaa

SEQ ID NO: 2645878 - RNA, 22 nt, Human
acacauuacaaaguuaaaauug

SEQ ID NO: 2645879 - RNA, 23 nt, Human
acacauuacaaaguuaaaauugu

SEQ ID NO: 2645880 - RNA, 16 nt, Human
acacauuugcuacugu

SEQ ID NO: 2645881 - RNA, 17 nt, Human
acacauuugcuacuguu

SEQ ID NO: 2645882 - RNA, 19 nt, Human
acacauuugcuacuguugu

SEQ ID NO: 2645883 - RNA, 20 nt, Human
acacauuugcuacuguugua

SEQ ID NO: 2645884 - RNA, 14 nt, Human
acacccaaagcuga

SEQ ID NO: 2645885 - RNA, 19 nt, Human
acacccaaagcugagccug

SEQ ID NO: 2645886 - RNA, 19 nt, Human
uaguucaauauuuguuacu

SEQ ID NO: 2645887 - RNA, 13 nt, Human
uaguuuugucaaa

SEQ ID NO: 2645888 - RNA, 15 nt, Human
uaguuuugucaaacu

SEQ ID NO: 2645889 - RNA, 21 nt, Human
uaguuauguaaauaauucuuu

SEQ ID NO: 2645890 - RNA, 20 nt, Human
uaguuauguaaauaauucuu

SEQ ID NO: 2645891 - RNA, 19 nt, Human
uaguuauguaaauaauucu

SEQ ID NO: 2645892 - RNA, 15 nt, Human
uaguuauguaaauaa

SEQ ID NO: 2645893 - RNA, 13 nt, Human
uaguuauguaaau

SEQ ID NO: 2645894 - RNA, 14 nt, Human
uauaaaagaaacac

SEQ ID NO: 2645895 - RNA, 12 nt, Human
uauaaaauacau

SEQ ID NO: 2645896 - RNA, 15 nt, Human
uauaaaauacauagu

SEQ ID NO: 2645897 - RNA, 21 nt, Human
uauaaaauacauagugaaaau

SEQ ID NO: 2645898 - RNA, 18 nt, Human
uauaaaauauaaacaaag

SEQ ID NO: 2645899 - RNA, 19 nt, Human
uauaaaauauaaacaaaga

SEQ ID NO: 2645900 - RNA, 21 nt, Human
uauaaaacagaguaaucuugu

SEQ ID NO: 2645901 - RNA, 10 nt, Human
uauaaaacaa

SEQ ID NO: 2645902 - RNA, 14 nt, Human
acacuccagggaca

SEQ ID NO: 2645903 - RNA, 20 nt, Human
acacuccagggacacacagc

SEQ ID NO: 2645904 - RNA, 13 nt, Human
acacugaaaguuu

SEQ ID NO: 2645905 - RNA, 14 nt, Human
acacugaaaguuuu

SEQ ID NO: 2645906 - RNA, 17 nt, Human
acacugaaaguuuugua

SEQ ID NO: 2645907 - RNA, 18 nt, Human
acacugaaaguuuuguaa

SEQ ID NO: 2645908 - RNA, 20 nt, Human
acacugaaaguuuuguaaaa

SEQ ID NO: 2645909 - RNA, 23 nt, Human
acacugaaaguuuuguaaaagaa

SEQ ID NO: 2645910 - RNA, 12 nt, Human
acacugaacuua

SEQ ID NO: 2645911 - RNA, 12 nt, Human
uauauuauuaua

SEQ ID NO: 2645912 - RNA, 17 nt, Human
acacuguugauaaaaac

SEQ ID NO: 2645913 - RNA, 19 nt, Human
acacuguugauaaaaacuc

SEQ ID NO: 2645914 - RNA, 15 nt, Human
acagaaacacugccu

SEQ ID NO: 2645915 - RNA, 18 nt, Human
acagaaacacugccuuuu

SEQ ID NO: 2645916 - RNA, 12 nt, Human
acagaaacacug

SEQ ID NO: 2645917 - RNA, 13 nt, Human
acagaaacacugc

SEQ ID NO: 2645918 - RNA, 14 nt, Human
acagaaacacugcc

SEQ ID NO: 2645919 - RNA, 20 nt, Human
acagaaagagacuccgucuc

SEQ ID NO: 2645920 - RNA, 19 nt, Human
acagaaacacugccuuuuu

SEQ ID NO: 2645921 - RNA, 23 nt, Human
acacuuuguugcaagaugugaau

SEQ ID NO: 2645922 - RNA, 16 nt, Human
acagcaaaugcaaaaa

SEQ ID NO: 2645923 - RNA, 15 nt, Human
acagauucuuucagu

SEQ ID NO: 2645924 - RNA, 19 nt, Human
acagauucuuucaguucuu

SEQ ID NO: 2645925 - RNA, 20 nt, Human
acagauucuuucaguucuuu

SEQ ID NO: 2645926 - RNA, 21 nt, Human
acagauucuuucaguucuuug

SEQ ID NO: 2645927 - RNA, 17 nt, Human
acagaugugcugacaag

SEQ ID NO: 2645928 - RNA, 19 nt, Human
acagauggaaaaacugagg

SEQ ID NO: 2645929 - RNA, 21 nt, Human
acagauggaaaaacugaggcu

SEQ ID NO: 2645930 - RNA, 13 nt, Human
acagauaccucca

SEQ ID NO: 2645931 - RNA, 16 nt, Human
acagauaccuccaacc

SEQ ID NO: 2645932 - RNA, 19 nt, Human
acagauaccuccaacccug

SEQ ID NO: 2645933 - RNA, 21 nt, Human
acagauaccuccaacccugcc

SEQ ID NO: 2645934 - RNA, 22 nt, Human
acagauaccuccaacccugccg

SEQ ID NO: 2645935 - RNA, 22 nt, Human
acagcaacgaucacaaaugacu

SEQ ID NO: 2645936 - RNA, 21 nt, Human
acagcaacgaucacaaaugac

SEQ ID NO: 2645937 - RNA, 20 nt, Human
acagcaacgaucacaaauga

SEQ ID NO: 2645938 - RNA, 11 nt, Human
uaucuuggccu

SEQ ID NO: 2645939 - RNA, 15 nt, Human
uaucuuugaauaugu

SEQ ID NO: 2645940 - RNA, 19 nt, Human
uaugaaagcaacaaagaaa

SEQ ID NO: 2645941 - RNA, 15 nt, Human
uauauuuauaaggaa

SEQ ID NO: 2645942 - RNA, 15 nt, Human
uaucucagggccugg

SEQ ID NO: 2645943 - RNA, 13 nt, Human
uaucucagggccu

SEQ ID NO: 2645944 - RNA, 16 nt, Human
uaucucaaugaaccau

SEQ ID NO: 2645945 - RNA, 22 nt, Human
uaucucaaugaaccauaaauuc

SEQ ID NO: 2645946 - RNA, 21 nt, Human
acagagcaagugagacccugu

SEQ ID NO: 2645947 - RNA, 16 nt, Human
uaucucuauuugagaa

SEQ ID NO: 2645948 - RNA, 17 nt, Human
uaucucuauuugagaau

SEQ ID NO: 2645949 - RNA, 19 nt, Human
ucaaauaaguauuuauaau

SEQ ID NO: 2645950 - RNA, 18 nt, Human
ucaaauaaguauuuauaa

SEQ ID NO: 2645951 - RNA, 20 nt, Human
ucaaauaaguauuuauaaua

SEQ ID NO: 2645952 - RNA, 17 nt, Human
ucaaauaaguauuuaua

SEQ ID NO: 2645953 - RNA, 12 nt, Human
ucaaauaagaaa

SEQ ID NO: 2645954 - RNA, 13 nt, Human
ucaaauaagaaau

SEQ ID NO: 2645955 - RNA, 23 nt, Human
ucaaauaaagagagaacaggacu

SEQ ID NO: 2645956 - RNA, 14 nt, Human
ucaaauacacauuu

SEQ ID NO: 2645957 - RNA, 16 nt, Human
ucaaauacacauuugc

SEQ ID NO: 2645958 - RNA, 17 nt, Human
ucaaauacacauuugcu

SEQ ID NO: 2645959 - RNA, 17 nt, Human
ucaaagggauaaagaaa

SEQ ID NO: 2645960 - RNA, 13 nt, Human
ucaaaguuuuguu

SEQ ID NO: 2645961 - RNA, 18 nt, Human
acaugaagaauagaaaca

SEQ ID NO: 2645962 - RNA, 15 nt, Human
acaugaagcuucaug

SEQ ID NO: 2645963 - RNA, 16 nt, Human
acaugaagcuucaugc

SEQ ID NO: 2645964 - RNA, 20 nt, Human
acaugaagcuucaugcacuu

SEQ ID NO: 2645965 - RNA, 17 nt, Human
ucaaaauaaagaaguau

SEQ ID NO: 2645966 - RNA, 18 nt, Human
ucaaagggcccacaguga

SEQ ID NO: 2645967 - RNA, 19 nt, Human
ucaaagcacuguugagaag

SEQ ID NO: 2645968 - RNA, 11 nt, Human
ucaaagccuuc

SEQ ID NO: 2645969 - RNA, 20 nt, Human
ucaaaggagcgagcaugucg

SEQ ID NO: 2645970 - RNA, 21 nt, Human
ucaaagcuuggauuaaauaca

SEQ ID NO: 2645971 - RNA, 22 nt, Human
ucaaagcuuggauuaaauacau

SEQ ID NO: 2645972 - RNA, 19 nt, Human
uauuuuuagacucaucaau

SEQ ID NO: 2645973 - RNA, 20 nt, Human
uauuuuuauaauuguacaaa

SEQ ID NO: 2645974 - RNA, 17 nt, Human
uauuuuuauacaaaccu

SEQ ID NO: 2645975 - RNA, 14 nt, Human
uauuuuuagaauaa

SEQ ID NO: 2645976 - RNA, 20 nt, Human
uauuuuuagaauaagaauuu

SEQ ID NO: 2645977 - RNA, 20 nt, Human
uauuuguaaauuuaguguuu

SEQ ID NO: 2645978 - RNA, 21 nt, Human
uauuuguaaauuuaguguuuu

SEQ ID NO: 2645979 - RNA, 19 nt, Human
uauuuuuauaucaugcaaa

SEQ ID NO: 2645980 - RNA, 20 nt, Human
uauuuuuauaucaugcaaaa

SEQ ID NO: 2645981 - RNA, 16 nt, Human
uauuuuuauauuuccu

SEQ ID NO: 2645982 - RNA, 17 nt, Human
uauuuuuauauuuccuu

SEQ ID NO: 2645983 - RNA, 21 nt, Human
uauuuuuauauuuccuuuaug

SEQ ID NO: 2645984 - RNA, 12 nt, Human
uauuuuucuuga

SEQ ID NO: 2645985 - RNA, 23 nt, Human
ucaaaauccaaaaagaaaugaug

SEQ ID NO: 2645986 - RNA, 16 nt, Human
ucaaaauccaaaaaga

SEQ ID NO: 2645987 - RNA, 16 nt, Human
ucaacagcaaguguga

SEQ ID NO: 2645988 - RNA, 15 nt, Human
ucaacagcaagugug

SEQ ID NO: 2645989 - RNA, 22 nt, Human
ucaacagcaagugugaauacug

SEQ ID NO: 2645990 - RNA, 17 nt, Human
ucaacaauaaaauuuuu

SEQ ID NO: 2645991 - RNA, 18 nt, Human
ucaacaauaaaauuuuuu

SEQ ID NO: 2645992 - RNA, 21 nt, Human
acaugcuggugaauauuuuca

SEQ ID NO: 2645993 - RNA, 14 nt, Human
acauuaacaaauaa

SEQ ID NO: 2645994 - RNA, 15 nt, Human
acauuaacaaauaaa

SEQ ID NO: 2645995 - RNA, 17 nt, Human
acauguccagcaccuug

SEQ ID NO: 2645996 - RNA, 20 nt, Human
acauguccagcaccuugugc

SEQ ID NO: 2645997 - RNA, 23 nt, Human
acauguccagcaccuugugccug

SEQ ID NO: 2645998 - RNA, 14 nt, Human
acauuagagaacau

SEQ ID NO: 2645999 - RNA, 11 nt, Human
ucaagagccuu

SEQ ID NO: 2646000 - RNA, 24 nt, Human
ucaagaucaaaaaggcuuauaaaa

SEQ ID NO: 2646001 - RNA, 23 nt, Human
ucaagaucaaaaaggcuuauaaa

SEQ ID NO: 2646002 - RNA, 15 nt, Human
ucaagagccuuaaaa

SEQ ID NO: 2646003 - RNA, 17 nt, Human
ucaagagccuuaaaaca

SEQ ID NO: 2646004 - RNA, 16 nt, Human
ucaagagccuuaaaac

SEQ ID NO: 2646005 - RNA, 21 nt, Human
ucaagagccuuaaaacaucau

SEQ ID NO: 2646006 - RNA, 20 nt, Human
ucaagagccuuaaaacauca

SEQ ID NO: 2646007 - RNA, 19 nt, Human
ucaagagccuuaaaacauc

SEQ ID NO: 2646008 - RNA, 18 nt, Human
ucaagagccuuaaaacau

SEQ ID NO: 2646009 - RNA, 19 nt, Human
ucaagaucaaaaaggcuua

SEQ ID NO: 2646010 - RNA, 17 nt, Human
ucaagaucaaaaaggcu

SEQ ID NO: 2646011 - RNA, 15 nt, Human
ucaagggcugucauu

SEQ ID NO: 2646012 - RNA, 15 nt, Human
ucaaggucacuguuu

SEQ ID NO: 2646013 - RNA, 18 nt, Human
ucaaggucacuguuuccu

SEQ ID NO: 2646014 - RNA, 19 nt, Human
ucaaggucacuguuuccug

SEQ ID NO: 2646015 - RNA, 14 nt, Human
acaguuuucagaaa

SEQ ID NO: 2646016 - RNA, 21 nt, Human
acaguuuucagaaaaagaaau

SEQ ID NO: 2646017 - RNA, 14 nt, Human
acaguuuuuccugg

SEQ ID NO: 2646018 - RNA, 15 nt, Human
acauacgauuuaagg

SEQ ID NO: 2646019 - RNA, 18 nt, Human
acauacgauuuaagguau

SEQ ID NO: 2646020 - RNA, 19 nt, Human
acauacgauuuaagguauu

SEQ ID NO: 2646021 - RNA, 24 nt, Human
acauacuccuuccaucaaauagaa

SEQ ID NO: 2646022 - RNA, 14 nt, Human
acauacuguucacu

SEQ ID NO: 2646023 - RNA, 21 nt, Human
uaugaagcuaccucaaacuuc

SEQ ID NO: 2646024 - RNA, 14 nt, Human
uauuuccacuaaaa

SEQ ID NO: 2646025 - RNA, 15 nt, Human
uauuuccacuaaaaa

SEQ ID NO: 2646026 - RNA, 17 nt, Human
uauuuccacuaaaaaua

SEQ ID NO: 2646027 - RNA, 19 nt, Human
uauuuccacuaaaaauauu

SEQ ID NO: 2646028 - RNA, 21 nt, Human
uauuucccauuugugccagag

SEQ ID NO: 2646029 - RNA, 18 nt, Human
uauuucccucucauuuug

SEQ ID NO: 2646030 - RNA, 11 nt, Human
uauuuccuuua

SEQ ID NO: 2646031 - RNA, 14 nt, Human
uauuuccuuuaugu

SEQ ID NO: 2646032 - RNA, 16 nt, Human
uauuuccuuuauguga

SEQ ID NO: 2646033 - RNA, 17 nt, Human
uauuuccuuuaugugaa

SEQ ID NO: 2646034 - RNA, 18 nt, Human
uauuuccuuuaugugaau

SEQ ID NO: 2646035 - RNA, 11 nt, Human
uauuucuacug

SEQ ID NO: 2646036 - RNA, 12 nt, Human
uauuucuacugu

SEQ ID NO: 2646037 - RNA, 16 nt, Human
uauuucuacugucaaa

SEQ ID NO: 2646038 - RNA, 18 nt, Human
uauuucuacugucaaaug

SEQ ID NO: 2646039 - RNA, 19 nt, Human
acaguuucuuuuuucuuac

SEQ ID NO: 2646040 - RNA, 12 nt, Human
acaguuguauuu

SEQ ID NO: 2646041 - RNA, 13 nt, Human
acaguuguauuua

SEQ ID NO: 2646042 - RNA, 18 nt, Human
acaguuguauuuaacaga

SEQ ID NO: 2646043 - RNA, 22 nt, Human
acaguuguauuuaacagaaauu

SEQ ID NO: 2646044 - RNA, 16 nt, Human
acaguugaaaaacagc

SEQ ID NO: 2646045 - RNA, 15 nt, Human
acaguugaaaaacag

SEQ ID NO: 2646046 - RNA, 19 nt, Human
acaguugcucuaugcuuuc

SEQ ID NO: 2646047 - RNA, 16 nt, Human
acaguugcucuaugcu

SEQ ID NO: 2646048 - RNA, 18 nt, Human
acaguugcagcccuugug

SEQ ID NO: 2646049 - RNA, 20 nt, Human
acaguugaaaaacagcugag

SEQ ID NO: 2646050 - RNA, 13 nt, Human
acaucaaaccuuu

SEQ ID NO: 2646051 - RNA, 17 nt, Human
acaucaaaccuuugagu

SEQ ID NO: 2646052 - RNA, 19 nt, Human
acaucaaacucaaugcuuu

SEQ ID NO: 2646053 - RNA, 20 nt, Human
acaucaaacucaaugcuuua

SEQ ID NO: 2646054 - RNA, 13 nt, Human
acaucaaauaaga

SEQ ID NO: 2646055 - RNA, 14 nt, Human
acaucaaauaagaa

SEQ ID NO: 2646056 - RNA, 18 nt, Human
acaucaaauaagaaauaa

SEQ ID NO: 2646057 - RNA, 14 nt, Human
acaucacagggugg

SEQ ID NO: 2646058 - RNA, 15 nt, Human
acaucacaggguggg

SEQ ID NO: 2646059 - RNA, 18 nt, Human
acaucacagggugggccu

SEQ ID NO: 2646060 - RNA, 19 nt, Human
acaucacagggugggccuc

SEQ ID NO: 2646061 - RNA, 20 nt, Human
acaucucaauaaagugcuuu

SEQ ID NO: 2646062 - RNA, 18 nt, Human
acaucuaauaaguauaua

SEQ ID NO: 2646063 - RNA, 11 nt, Human
acaucugccuu

SEQ ID NO: 2646064 - RNA, 12 nt, Human
acaucugccuua

SEQ ID NO: 2646065 - RNA, 23 nt, Human
acaucugagguuuuauuucauuu

SEQ ID NO: 2646066 - RNA, 18 nt, Human
acaucugaccuggcaucu

SEQ ID NO: 2646067 - RNA, 21 nt, Human
acaucugagguuuuauuucau

SEQ ID NO: 2646068 - RNA, 14 nt, Human
acaucuugaauccu

SEQ ID NO: 2646069 - RNA, 19 nt, Human
acaucuugaauccuuccau

SEQ ID NO: 2646070 - RNA, 23 nt, Human
acaucugccuuaaaaccaaagag

SEQ ID NO: 2646071 - RNA, 17 nt, Human
uauuugguacuguauuu

SEQ ID NO: 2646072 - RNA, 13 nt, Human
uauuuguaaagcu

SEQ ID NO: 2646073 - RNA, 14 nt, Human
uauuuguaaagcua

SEQ ID NO: 2646074 - RNA, 20 nt, Human
acauauacacgaauagacau

SEQ ID NO: 2646075 - RNA, 15 nt, Human
acauacaugucacau

SEQ ID NO: 2646076 - RNA, 13 nt, Human
acauagugaaaau

SEQ ID NO: 2646077 - RNA, 14 nt, Human
acauagugaaaauu

SEQ ID NO: 2646078 - RNA, 18 nt, Human
acauagugaaaauuguuu

SEQ ID NO: 2646079 - RNA, 23 nt, Human
acauagugaaaauuguuuaguga

SEQ ID NO: 2646080 - RNA, 12 nt, Human
acauagaaaugg

SEQ ID NO: 2646081 - RNA, 20 nt, Human
acauagaaauggaaauuuug

SEQ ID NO: 2646082 - RNA, 22 nt, Human
acauagaaauggaaauuuugcu

SEQ ID NO: 2646083 - RNA, 19 nt, Human
acauagccaaaaugugagu

SEQ ID NO: 2646084 - RNA, 16 nt, Human
acauagccaaaaugug

SEQ ID NO: 2646085 - RNA, 15 nt, Human
acauaugaaaauaca

SEQ ID NO: 2646086 - RNA, 13 nt, Human
acauauggaauuu

SEQ ID NO: 2646087 - RNA, 17 nt, Human
acauauggaauuuugca

SEQ ID NO: 2646088 - RNA, 14 nt, Human
acauauaguguaca

SEQ ID NO: 2646089 - RNA, 23 nt, Human
acauaucuacacuucgcaccgga

SEQ ID NO: 2646090 - RNA, 14 nt, Human
acauauauauuaca

SEQ ID NO: 2646091 - RNA, 15 nt, Human
acauauauauauaua

SEQ ID NO: 2646092 - RNA, 16 nt, Human
acauauauauauauaa

SEQ ID NO: 2646093 - RNA, 17 nt, Human
acauauauauauauaac

SEQ ID NO: 2646094 - RNA, 16 nt, Human
acauaucaucugugga

SEQ ID NO: 2646095 - RNA, 15 nt, Human
acauaucccuuccag

SEQ ID NO: 2646096 - RNA, 16 nt, Human
acauaucccuuccaga

SEQ ID NO: 2646097 - RNA, 13 nt, Human
acauauggauguu

SEQ ID NO: 2646098 - RNA, 14 nt, Human
acauauggauguua

SEQ ID NO: 2646099 - RNA, 15 nt, Human
acauauggauguuac

SEQ ID NO: 2646100 - RNA, 16 nt, Human
acauauggauguuacu

SEQ ID NO: 2646101 - RNA, 18 nt, Human
acauauggauguuacucu

SEQ ID NO: 2646102 - RNA, 20 nt, Human
acauauggaauuuugcaaag

SEQ ID NO: 2646103 - RNA, 17 nt, Human
accaggcugccucccuu

SEQ ID NO: 2646104 - RNA, 19 nt, Human
ucacuaggcccccacuugc

SEQ ID NO: 2646105 - RNA, 21 nt, Human
ucacuaggcccccacuugccu

SEQ ID NO: 2646106 - RNA, 22 nt, Human
ucacuaggcccccacuugccuc

SEQ ID NO: 2646107 - RNA, 13 nt, Human
accacuucgaaac

SEQ ID NO: 2646108 - RNA, 21 nt, Human
accacugcacuccagccuggg

SEQ ID NO: 2646109 - RNA, 20 nt, Human
accacugcacuccagccugg

SEQ ID NO: 2646110 - RNA, 17 nt, Human
accacugcacuccagcc

SEQ ID NO: 2646111 - RNA, 16 nt, Human
accacuuguagauuug

SEQ ID NO: 2646112 - RNA, 14 nt, Human
accacuuguagauu

SEQ ID NO: 2646113 - RNA, 13 nt, Human
accacuuguagau

SEQ ID NO: 2646114 - RNA, 16 nt, Human
accacuugaggccuga

SEQ ID NO: 2646115 - RNA, 20 nt, Human
accacuugaggccugaucug

SEQ ID NO: 2646116 - RNA, 19 nt, Human
accacuuguagauuugauu

SEQ ID NO: 2646117 - RNA, 22 nt, Human
accagaccuggaagaacaggcc

SEQ ID NO: 2646118 - RNA, 23 nt, Human
accagaccuggaagaacaggccu

SEQ ID NO: 2646119 - RNA, 11 nt, Human
accagacaggu

SEQ ID NO: 2646120 - RNA, 15 nt, Human
accaauguucucucu

SEQ ID NO: 2646121 - RNA, 23 nt, Human
ucaagugaaaaaggaggaagaga

SEQ ID NO: 2646122 - RNA, 15 nt, Human
ucaagugaaaaagga

SEQ ID NO: 2646123 - RNA, 19 nt, Human
ucacccaggcuggacugca

SEQ ID NO: 2646124 - RNA, 19 nt, Human
ucacccaugcaagcagagg

SEQ ID NO: 2646125 - RNA, 20 nt, Human
ucacccaugcaagcagagga

SEQ ID NO: 2646126 - RNA, 21 nt, Human
ucacccaugcaagcagaggac

SEQ ID NO: 2646127 - RNA, 15 nt, Human
ucaccaucaauccug

SEQ ID NO: 2646128 - RNA, 19 nt, Human
ucaccaucaauccugauuc

SEQ ID NO: 2646129 - RNA, 20 nt, Human
ucaccaucaauccugauucc

SEQ ID NO: 2646130 - RNA, 20 nt, Human
ucacaaaugacuuuauuauu

SEQ ID NO: 2646131 - RNA, 19 nt, Human
ucacaaaugacuuuauuau

SEQ ID NO: 2646132 - RNA, 18 nt, Human
ucacaaaugacuuuauua

SEQ ID NO: 2646133 - RNA, 11 nt, Human
ucacaaaugac

SEQ ID NO: 2646134 - RNA, 15 nt, Human
ucacaaaugacuuua

SEQ ID NO: 2646135 - RNA, 14 nt, Human
ucacaaaugacuuu

SEQ ID NO: 2646136 - RNA, 13 nt, Human
ucacaaaugacuu

SEQ ID NO: 2646137 - RNA, 12 nt, Human
ucacaaaugacu

SEQ ID NO: 2646138 - RNA, 18 nt, Human
accauguaagcacucugg

SEQ ID NO: 2646139 - RNA, 21 nt, Human
accauguaagcacucuggaug

SEQ ID NO: 2646140 - RNA, 24 nt, Human
accauucugacucgguuucuccaa

SEQ ID NO: 2646141 - RNA, 22 nt, Human
accauugagaccgugaagauac

SEQ ID NO: 2646142 - RNA, 23 nt, Human
accauugagaccgugaagauacu

SEQ ID NO: 2646143 - RNA, 16 nt, Human
accauggugaagugcu

SEQ ID NO: 2646144 - RNA, 13 nt, Human
ucagaagggcuau

SEQ ID NO: 2646145 - RNA, 15 nt, Human
ucagaaggagcuaca

SEQ ID NO: 2646146 - RNA, 17 nt, Human
ucagaaguuaguuugua

SEQ ID NO: 2646147 - RNA, 14 nt, Human
ucagaagcaaacaa

SEQ ID NO: 2646148 - RNA, 18 nt, Human
ucagaagcacagaauauu

SEQ ID NO: 2646149 - RNA, 20 nt, Human
ucagaagcacagaauauuuu

SEQ ID NO: 2646150 - RNA, 14 nt, Human
ucagagcucucucu

SEQ ID NO: 2646151 - RNA, 22 nt, Human
ucagccaagguuuuauaaggcu

SEQ ID NO: 2646152 - RNA, 23 nt, Human
ucagccguguaaccauggaccca

SEQ ID NO: 2646153 - RNA, 11 nt, Human
accccaggacg

SEQ ID NO: 2646154 - RNA, 17 nt, Human
accccaggacgccacuc

SEQ ID NO: 2646155 - RNA, 20 nt, Human
accccaggacgccacucauu

SEQ ID NO: 2646156 - RNA, 21 nt, Human
accccaggacgccacucauuu

SEQ ID NO: 2646157 - RNA, 23 nt, Human
accccaggacgccacucauuuca

SEQ ID NO: 2646158 - RNA, 17 nt, Human
acccaggaguguggcca

SEQ ID NO: 2646159 - RNA, 15 nt, Human
acccagcguggccuc

SEQ ID NO: 2646160 - RNA, 16 nt, Human
ucagcucaaugcaguu

SEQ ID NO: 2646161 - RNA, 14 nt, Human
accccccgugggcu

SEQ ID NO: 2646162 - RNA, 23 nt, Human
ucagcgacuccguuggccacucc

SEQ ID NO: 2646163 - RNA, 19 nt, Human
ucagcgacuccguuggcca

SEQ ID NO: 2646164 - RNA, 20 nt, Human
ucagcgacuccguuggccac

SEQ ID NO: 2646165 - RNA, 18 nt, Human
acgguuucgaagucauua

SEQ ID NO: 2646166 - RNA, 13 nt, Human
acguacauguuua

SEQ ID NO: 2646167 - RNA, 17 nt, Human
acgguuuuacugcagcu

SEQ ID NO: 2646168 - RNA, 15 nt, Human
acgguuuuacugcag

SEQ ID NO: 2646169 - RNA, 16 nt, Human
acgugggcaaacaggc

SEQ ID NO: 2646170 - RNA, 19 nt, Human
acgugggcaaacaggcagu

SEQ ID NO: 2646171 - RNA, 12 nt, Human
ucccacacccaa

SEQ ID NO: 2646172 - RNA, 17 nt, Human
ucccacacccaaagcug

SEQ ID NO: 2646173 - RNA, 13 nt, Human
ucccacaccccaa

SEQ ID NO: 2646174 - RNA, 16 nt, Human
ucccacaaaggagagc

SEQ ID NO: 2646175 - RNA, 22 nt, Human
acgggaugguucuggcuguuug

SEQ ID NO: 2646176 - RNA, 14 nt, Human
acgguuuccaggga

SEQ ID NO: 2646177 - RNA, 15 nt, Human
acgguuuccagggag

SEQ ID NO: 2646178 - RNA, 17 nt, Human
acgguuuccagggaggg

SEQ ID NO: 2646179 - RNA, 15 nt, Human
acgguguuuugccau

SEQ ID NO: 2646180 - RNA, 17 nt, Human
acgguguuuugccaugu

SEQ ID NO: 2646181 - RNA, 21 nt, Human
acgguggucggugggacccug

SEQ ID NO: 2646182 - RNA, 14 nt, Human
uccauucucccagg

SEQ ID NO: 2646183 - RNA, 15 nt, Human
uccauucucccaggu

SEQ ID NO: 2646184 - RNA, 16 nt, Human
uccauucucccaggua

SEQ ID NO: 2646185 - RNA, 12 nt, Human
uccauuugagaa

SEQ ID NO: 2646186 - RNA, 13 nt, Human
uccauuugagaaa

SEQ ID NO: 2646187 - RNA, 14 nt, Human
uccauuugagaaaa

SEQ ID NO: 2646188 - RNA, 14 nt, Human
ucccaaaaaacuac

SEQ ID NO: 2646189 - RNA, 15 nt, Human
uccauuuccauugcu

SEQ ID NO: 2646190 - RNA, 19 nt, Human
uccauuuccauugcuuauu

SEQ ID NO: 2646191 - RNA, 14 nt, Human
uccauuuccccucu

SEQ ID NO: 2646192 - RNA, 20 nt, Human
ucccaaaccacgccucuuga

SEQ ID NO: 2646193 - RNA, 21 nt, Human
ucccaaacgccuccccugccc

SEQ ID NO: 2646194 - RNA, 15 nt, Human
ucccaaacgccuccc

SEQ ID NO: 2646195 - RNA, 11 nt, Human
uccccaugaca

SEQ ID NO: 2646196 - RNA, 13 nt, Human
uccccauggagcc

SEQ ID NO: 2646197 - RNA, 18 nt, Human
uccccaugcuuccuugcc

SEQ ID NO: 2646198 - RNA, 16 nt, Human
uccccauggagccagc

SEQ ID NO: 2646199 - RNA, 15 nt, Human
uccccauggagccag

SEQ ID NO: 2646200 - RNA, 15 nt, Human
uccccaccccugccc

SEQ ID NO: 2646201 - RNA, 16 nt, Human
uccccaccccugcccc

SEQ ID NO: 2646202 - RNA, 18 nt, Human
uccccaccccugccccca

SEQ ID NO: 2646203 - RNA, 22 nt, Human
uccccaccccugcccccagccc

SEQ ID NO: 2646204 - RNA, 20 nt, Human
uccccauuucccaucugcac

SEQ ID NO: 2646205 - RNA, 15 nt, Human
uccccauuucccauc

SEQ ID NO: 2646206 - RNA, 16 nt, Human
uccccauuucccaucu

SEQ ID NO: 2646207 - RNA, 17 nt, Human
uccccauuucccaucug

SEQ ID NO: 2646208 - RNA, 18 nt, Human
uccccauuucccaucugc

SEQ ID NO: 2646209 - RNA, 19 nt, Human
uccccauuucccaucugca

SEQ ID NO: 2646210 - RNA, 15 nt, Human
acuacccauagacau

SEQ ID NO: 2646211 - RNA, 19 nt, Human
acuacccauagacaugaaa

SEQ ID NO: 2646212 - RNA, 17 nt, Human
uccccacagcgucccug

SEQ ID NO: 2646213 - RNA, 18 nt, Human
uccccacagcgucccugg

SEQ ID NO: 2646214 - RNA, 19 nt, Human
uccccacagcgucccuggc

SEQ ID NO: 2646215 - RNA, 20 nt, Human
uccccacagcgucccuggcg

SEQ ID NO: 2646216 - RNA, 13 nt, Human
uccccaccccugc

SEQ ID NO: 2646217 - RNA, 14 nt, Human
uccccaccccugcc

SEQ ID NO: 2646218 - RNA, 13 nt, Human
acuacaagucagc

SEQ ID NO: 2646219 - RNA, 14 nt, Human
acuacagaaaugag

SEQ ID NO: 2646220 - RNA, 23 nt, Human
acuacagaaaugaggaggaugcu

SEQ ID NO: 2646221 - RNA, 16 nt, Human
ucccagcacuuuggga

SEQ ID NO: 2646222 - RNA, 18 nt, Human
ucccagcacuuugggagg

SEQ ID NO: 2646223 - RNA, 19 nt, Human
ucccagcacuuugggaggc

SEQ ID NO: 2646224 - RNA, 21 nt, Human
uccccuuguuugucccuucua

SEQ ID NO: 2646225 - RNA, 14 nt, Human
acucaccagcccca

SEQ ID NO: 2646226 - RNA, 20 nt, Human
acucaccagccccacugcca

SEQ ID NO: 2646227 - RNA, 21 nt, Human
acucaccagccccacugccag

SEQ ID NO: 2646228 - RNA, 22 nt, Human
acucaccagccccacugccagc

SEQ ID NO: 2646229 - RNA, 23 nt, Human
acucaccagccccacugccagca

SEQ ID NO: 2646230 - RNA, 17 nt, Human
acuacucccccaggugg

SEQ ID NO: 2646231 - RNA, 22 nt, Human
acucacuggggccuacagcuuu

SEQ ID NO: 2646232 - RNA, 13 nt, Human
acucacucuaaag

SEQ ID NO: 2646233 - RNA, 21 nt, Human
acucacuaggcccccacuugc

SEQ ID NO: 2646234 - RNA, 22 nt, Human
acucacuaggcccccacuugcc

SEQ ID NO: 2646235 - RNA, 14 nt, Human
acucacuaggcccc

SEQ ID NO: 2646236 - RNA, 15 nt, Human
acucacuaggccccc

SEQ ID NO: 2646237 - RNA, 17 nt, Human
acucacuaggcccccac

SEQ ID NO: 2646238 - RNA, 19 nt, Human
acucacguggguccugagg

SEQ ID NO: 2646239 - RNA, 12 nt, Human
acucaccuucua

SEQ ID NO: 2646240 - RNA, 15 nt, Human
ucccugagacaggga

SEQ ID NO: 2646241 - RNA, 18 nt, Human
acucacugugaucaauau

SEQ ID NO: 2646242 - RNA, 13 nt, Human
acuccagccuggg

SEQ ID NO: 2646243 - RNA, 12 nt, Human
acuccagccugg

SEQ ID NO: 2646244 - RNA, 20 nt, Human
acuccagccagcgccucccu

SEQ ID NO: 2646245 - RNA, 21 nt, Human
acuccagccagcgccucccuc

SEQ ID NO: 2646246 - RNA, 22 nt, Human
acuccagccagcgccucccucc

SEQ ID NO: 2646247 - RNA, 23 nt, Human
acuccagccagcgccucccucca

SEQ ID NO: 2646248 - RNA, 15 nt, Human
acuccucugcgucua

SEQ ID NO: 2646249 - RNA, 20 nt, Human
acuccucugcgucuauccug

SEQ ID NO: 2646250 - RNA, 23 nt, Human
acuccucugcgucuauccugugu

SEQ ID NO: 2646251 - RNA, 18 nt, Human
acuccucgguacucccau

SEQ ID NO: 2646252 - RNA, 12 nt, Human
ucccugucccag

SEQ ID NO: 2646253 - RNA, 20 nt, Human
ucccuguguuaauuuaaguu

SEQ ID NO: 2646254 - RNA, 20 nt, Human
ucccuuaagggguaucaugu

SEQ ID NO: 2646255 - RNA, 22 nt, Human
ucccuuaacaguuguauuuaac

SEQ ID NO: 2646256 - RNA, 17 nt, Human
ucccuuaacaguuguau

SEQ ID NO: 2646257 - RNA, 20 nt, Human
ucccuuaacaguuguauuua

SEQ ID NO: 2646258 - RNA, 16 nt, Human
ucccuuaacaguugua

SEQ ID NO: 2646259 - RNA, 16 nt, Human
uccuagaaauucccca

SEQ ID NO: 2646260 - RNA, 20 nt, Human
ucccuuuuucauaaauuauu

SEQ ID NO: 2646261 - RNA, 17 nt, Human
uccggucccugucccag

SEQ ID NO: 2646262 - RNA, 20 nt, Human
uccggucggaucucucuccu

SEQ ID NO: 2646263 - RNA, 21 nt, Human
uccggcucccagccucagcgc

SEQ ID NO: 2646264 - RNA, 18 nt, Human
uccggcucccagccucag

SEQ ID NO: 2646265 - RNA, 17 nt, Human
uccggcucccagccuca

SEQ ID NO: 2646266 - RNA, 16 nt, Human
uccggcucccagccuc

SEQ ID NO: 2646267 - RNA, 14 nt, Human
accugcauaaaaag

SEQ ID NO: 2646268 - RNA, 16 nt, Human
accugacuaagaaauu

SEQ ID NO: 2646269 - RNA, 14 nt, Human
ucaugauuagcaag

SEQ ID NO: 2646270 - RNA, 13 nt, Human
ucaugauuagcaa

SEQ ID NO: 2646271 - RNA, 17 nt, Human
ucauuacuuguugccua

SEQ ID NO: 2646272 - RNA, 12 nt, Human
ucauuacuuguu

SEQ ID NO: 2646273 - RNA, 15 nt, Human
ucauucuuacuaaaa

SEQ ID NO: 2646274 - RNA, 20 nt, Human
ucauucuuacuaaaaaguau

SEQ ID NO: 2646275 - RNA, 19 nt, Human
accucggugccuuccucuu

SEQ ID NO: 2646276 - RNA, 22 nt, Human
ucauugcugagccucugcuccc

SEQ ID NO: 2646277 - RNA, 17 nt, Human
ucauugcugagccucug

SEQ ID NO: 2646278 - RNA, 23 nt, Human
ucauugcugagccucugcucccc

SEQ ID NO: 2646279 - RNA, 19 nt, Human
ucauugccaagggcccaaa

SEQ ID NO: 2646280 - RNA, 16 nt, Human
ucauugcugagccucu

SEQ ID NO: 2646281 - RNA, 15 nt, Human
ucauugcugagccuc

SEQ ID NO: 2646282 - RNA, 17 nt, Human
ucauugcacauaagcuu

SEQ ID NO: 2646283 - RNA, 23 nt, Human
ucauugcacauaagcuuccauuu

SEQ ID NO: 2646284 - RNA, 14 nt, Human
accuaccaaaaugg

SEQ ID NO: 2646285 - RNA, 17 nt, Human
accuacccucagugagc

SEQ ID NO: 2646286 - RNA, 23 nt, Human
accucaaacuuccagucagguag

SEQ ID NO: 2646287 - RNA, 13 nt, Human
accuagugaaacu

SEQ ID NO: 2646288 - RNA, 14 nt, Human
accuagugaaacuu

SEQ ID NO: 2646289 - RNA, 19 nt, Human
accuagugaaacuuuucua

SEQ ID NO: 2646290 - RNA, 20 nt, Human
accuagugaaacuuuucuag

SEQ ID NO: 2646291 - RNA, 15 nt, Human
accuaaauggccuca

SEQ ID NO: 2646292 - RNA, 18 nt, Human
accgcgggugugggaaag

SEQ ID NO: 2646293 - RNA, 19 nt, Human
accgcgggugugggaaagc

SEQ ID NO: 2646294 - RNA, 15 nt, Human
accuaggucuccagu

SEQ ID NO: 2646295 - RNA, 14 nt, Human
ucaucccauuccag

SEQ ID NO: 2646296 - RNA, 16 nt, Human
ucaucccauuccaggc

SEQ ID NO: 2646297 - RNA, 17 nt, Human
ucaucccauuccaggca

SEQ ID NO: 2646298 - RNA, 20 nt, Human
ucaucccauuccaggcagcc

SEQ ID NO: 2646299 - RNA, 23 nt, Human
ucaucccauuccaggcagccucu

SEQ ID NO: 2646300 - RNA, 20 nt, Human
uccagacuuccuugagacac

SEQ ID NO: 2646301 - RNA, 19 nt, Human
uccagacuuccuugagaca

SEQ ID NO: 2646302 - RNA, 14 nt, Human
uccagacuuccuug

SEQ ID NO: 2646303 - RNA, 14 nt, Human
uccagacucagagc

SEQ ID NO: 2646304 - RNA, 18 nt, Human
uccagacucagagcucuc

SEQ ID NO: 2646305 - RNA, 18 nt, Human
uccaggcuuucccacuuc

SEQ ID NO: 2646306 - RNA, 20 nt, Human
uccaggcuuucccacuuccc

SEQ ID NO: 2646307 - RNA, 22 nt, Human
uccaggcuuucccacuucccac

SEQ ID NO: 2646308 - RNA, 14 nt, Human
acgagaccccggcu

SEQ ID NO: 2646309 - RNA, 15 nt, Human
acgaggaaccgaaaa

SEQ ID NO: 2646310 - RNA, 15 nt, Human
uccacuccauugucg

SEQ ID NO: 2646311 - RNA, 13 nt, Human
uccaggccugccu

SEQ ID NO: 2646312 - RNA, 18 nt, Human
uccaggccgcgcccuuuc

SEQ ID NO: 2646313 - RNA, 20 nt, Human
uccaggccgcgcccuuuccc

SEQ ID NO: 2646314 - RNA, 21 nt, Human
uccaggccgcgcccuuucccc

SEQ ID NO: 2646315 - RNA, 15 nt, Human
uccaggcagccucug

SEQ ID NO: 2646316 - RNA, 18 nt, Human
uccaggcagccucuguca

SEQ ID NO: 2646317 - RNA, 14 nt, Human
uccagccccucugg

SEQ ID NO: 2646318 - RNA, 15 nt, Human
uccagccccucuggu

SEQ ID NO: 2646319 - RNA, 16 nt, Human
uccagccccucugguc

SEQ ID NO: 2646320 - RNA, 18 nt, Human
uccagccccucuggucgc

SEQ ID NO: 2646321 - RNA, 23 nt, Human
uccagccccucuggucgcuccug

SEQ ID NO: 2646322 - RNA, 13 nt, Human
accuggcugaggu

SEQ ID NO: 2646323 - RNA, 19 nt, Human
accuggcugagguuccucu

SEQ ID NO: 2646324 - RNA, 21 nt, Human
accuggcugagguuccucugc

SEQ ID NO: 2646325 - RNA, 22 nt, Human
accuggcugagguuccucugcc

SEQ ID NO: 2646326 - RNA, 21 nt, Human
accuggcaucgcaccauucug

SEQ ID NO: 2646327 - RNA, 21 nt, Human
accuggcaucuaauucugauu

SEQ ID NO: 2646328 - RNA, 12 nt, Human
uccaacccugcc

SEQ ID NO: 2646329 - RNA, 13 nt, Human
uccaacccugccg

SEQ ID NO: 2646330 - RNA, 21 nt, Human
uccaacccugccgucaccacc

SEQ ID NO: 2646331 - RNA, 22 nt, Human
uccaacccugccgucaccacca

SEQ ID NO: 2646332 - RNA, 13 nt, Human
uccaaccuuccca

SEQ ID NO: 2646333 - RNA, 14 nt, Human
uccaacuccagcaa

SEQ ID NO: 2646334 - RNA, 12 nt, Human
uccaacuccagc

SEQ ID NO: 2646335 - RNA, 13 nt, Human
uccaacuccagca

SEQ ID NO: 2646336 - RNA, 18 nt, Human
uccaacucccuuaaaaua

SEQ ID NO: 2646337 - RNA, 20 nt, Human
ucgaagucauuaaacugguu

SEQ ID NO: 2646338 - RNA, 18 nt, Human
ucgaagucauuaaacugg

SEQ ID NO: 2646339 - RNA, 17 nt, Human
ucgaagucauuaaacug

SEQ ID NO: 2646340 - RNA, 16 nt, Human
ucgaagucauuaaacu

SEQ ID NO: 2646341 - RNA, 13 nt, Human
ucgaagugcugag

SEQ ID NO: 2646342 - RNA, 12 nt, Human
ucgaagugcuga

SEQ ID NO: 2646343 - RNA, 12 nt, Human
ucgaagucauua

SEQ ID NO: 2646344 - RNA, 23 nt, Human
ucgaauuuugucuuuaaaauuca

SEQ ID NO: 2646345 - RNA, 19 nt, Human
ucgagaaagaggcaccagg

SEQ ID NO: 2646346 - RNA, 20 nt, Human
ucgagaaagaggcaccagga

SEQ ID NO: 2646347 - RNA, 14 nt, Human
ucgaaucucugugc

SEQ ID NO: 2646348 - RNA, 16 nt, Human
ucgaaucucugugccu

SEQ ID NO: 2646349 - RNA, 17 nt, Human
ucgaaucucugugccuu

SEQ ID NO: 2646350 - RNA, 22 nt, Human
ucgaaucucugugccuucgucu

SEQ ID NO: 2646351 - RNA, 21 nt, Human
ucgagaaagaggcaccaggaa

SEQ ID NO: 2646352 - RNA, 21 nt, Human
acuggcugucaguaugacauu

SEQ ID NO: 2646353 - RNA, 17 nt, Human
acuggcugucaguauga

SEQ ID NO: 2646354 - RNA, 14 nt, Human
acuggcuuuuauua

SEQ ID NO: 2646355 - RNA, 18 nt, Human
acuggcuuuuauuaaugc

SEQ ID NO: 2646356 - RNA, 19 nt, Human
acuggcuuuuauuaaugca

SEQ ID NO: 2646357 - RNA, 14 nt, Human
ucgcgcucaguaaa

SEQ ID NO: 2646358 - RNA, 15 nt, Human
ucgcgcucaguaaac

SEQ ID NO: 2646359 - RNA, 15 nt, Human
ucgagaccauccugg

SEQ ID NO: 2646360 - RNA, 16 nt, Human
ucgagaccauccuggc

SEQ ID NO: 2646361 - RNA, 18 nt, Human
ucgagaccauccuggcua

SEQ ID NO: 2646362 - RNA, 19 nt, Human
ucgagaccauccuggcuaa

SEQ ID NO: 2646363 - RNA, 21 nt, Human
acuggccccuacuuuguggca

SEQ ID NO: 2646364 - RNA, 14 nt, Human
uccuuccauuccac

SEQ ID NO: 2646365 - RNA, 15 nt, Human
uccuuccaguauaac

SEQ ID NO: 2646366 - RNA, 18 nt, Human
uccuuccaguauaaccag

SEQ ID NO: 2646367 - RNA, 15 nt, Human
uccuuccaucaaaua

SEQ ID NO: 2646368 - RNA, 22 nt, Human
acuggccauuugccaauuuucc

SEQ ID NO: 2646369 - RNA, 20 nt, Human
uccuuguagcgacuaaacua

SEQ ID NO: 2646370 - RNA, 13 nt, Human
uccuuuaauugua

SEQ ID NO: 2646371 - RNA, 15 nt, Human
uccuuuaauuguaaa

SEQ ID NO: 2646372 - RNA, 14 nt, Human
acugccugaauaaa

SEQ ID NO: 2646373 - RNA, 15 nt, Human
acugccugaauaaag

SEQ ID NO: 2646374 - RNA, 17 nt, Human
acugccugaauaaagag

SEQ ID NO: 2646375 - RNA, 19 nt, Human
acugccugaauaaagagcc

SEQ ID NO: 2646376 - RNA, 11 nt, Human
acugccugggc

SEQ ID NO: 2646377 - RNA, 18 nt, Human
acugccugccuuaaguga

SEQ ID NO: 2646378 - RNA, 15 nt, Human
acugccugccuuaag

SEQ ID NO: 2646379 - RNA, 14 nt, Human
acugccugccuuaa

SEQ ID NO: 2646380 - RNA, 13 nt, Human
acugccugccuua

SEQ ID NO: 2646381 - RNA, 15 nt, Human
acugccuucgcuucu

SEQ ID NO: 2646382 - RNA, 12 nt, Human
acugccugggcu

SEQ ID NO: 2646383 - RNA, 16 nt, Human
acugccuucgcuucuu

SEQ ID NO: 2646384 - RNA, 17 nt, Human
acugccuucgcuucuug

SEQ ID NO: 2646385 - RNA, 21 nt, Human
acugccuucgcuucuugccuc

SEQ ID NO: 2646386 - RNA, 22 nt, Human
acugccuucgcuucuugccucu

SEQ ID NO: 2646387 - RNA, 21 nt, Human
uccuagaggcccuuugcuguc

SEQ ID NO: 2646388 - RNA, 20 nt, Human
uccuagaggcccuuugcugu

SEQ ID NO: 2646389 - RNA, 19 nt, Human
uccuagaggcccuuugcug

SEQ ID NO: 2646390 - RNA, 18 nt, Human
uccuagaggcccuuugcu

SEQ ID NO: 2646391 - RNA, 22 nt, Human
uccuagaaauuccccacccuga

SEQ ID NO: 2646392 - RNA, 21 nt, Human
uccuagaaauuccccacccug

SEQ ID NO: 2646393 - RNA, 15 nt, Human
acugcauccagccug

SEQ ID NO: 2646394 - RNA, 14 nt, Human
acugcauccagccu

SEQ ID NO: 2646395 - RNA, 23 nt, Human
acugccuucgcuucuugccucug

SEQ ID NO: 2646396 - RNA, 13 nt, Human
acugcuaaauaaa

SEQ ID NO: 2646397 - RNA, 14 nt, Human
acugcuaaauaaaa

SEQ ID NO: 2646398 - RNA, 15 nt, Human
acugcuaaauaaaau

SEQ ID NO: 2646399 - RNA, 19 nt, Human
acugcuaccuuucaaagcu

SEQ ID NO: 2646400 - RNA, 20 nt, Human
acugcuaccuuucaaagcuu

SEQ ID NO: 2646401 - RNA, 16 nt, Human
acugcuaaauaaaauu

SEQ ID NO: 2646402 - RNA, 17 nt, Human
acugcuaaauaaaauuu

SEQ ID NO: 2646403 - RNA, 19 nt, Human
acugcuaaauaaaauuugu

SEQ ID NO: 2646404 - RNA, 20 nt, Human
acugcuaaauaaaauuuguu

SEQ ID NO: 2646405 - RNA, 23 nt, Human
acuggcaaugguaguuucugugg

SEQ ID NO: 2646406 - RNA, 18 nt, Human
acuggaugcagaaacagu

SEQ ID NO: 2646407 - RNA, 17 nt, Human
acuggaugcagaaacag

SEQ ID NO: 2646408 - RNA, 21 nt, Human
acuggcaaugguaguuucugu

SEQ ID NO: 2646409 - RNA, 23 nt, Human
acuuauaagugaagugauacuau

SEQ ID NO: 2646410 - RNA, 14 nt, Human
acuuacuugcuuau

SEQ ID NO: 2646411 - RNA, 16 nt, Human
acuuacuugcuuauuu

SEQ ID NO: 2646412 - RNA, 18 nt, Human
acuuagaaucccuguguu

SEQ ID NO: 2646413 - RNA, 22 nt, Human
acuuagaaucccuguguuaauu

SEQ ID NO: 2646414 - RNA, 20 nt, Human
acuuagaaucccuguguuaa

SEQ ID NO: 2646415 - RNA, 19 nt, Human
acuuagaaucccuguguua

SEQ ID NO: 2646416 - RNA, 21 nt, Human
acuuagaaucccuguguuaau

SEQ ID NO: 2646417 - RNA, 17 nt, Human
acuuagucaauaagaaa

SEQ ID NO: 2646418 - RNA, 15 nt, Human
acuuacuugcuuauu

SEQ ID NO: 2646419 - RNA, 15 nt, Human
acuuaccuagugaaa

SEQ ID NO: 2646420 - RNA, 16 nt, Human
acuuaccuagugaaac

SEQ ID NO: 2646421 - RNA, 23 nt, Human
acuuaauaaucaagagccuuaaa

SEQ ID NO: 2646422 - RNA, 14 nt, Human
acuguuguaagaau

SEQ ID NO: 2646423 - RNA, 15 nt, Human
acuguuguaagaauu

SEQ ID NO: 2646424 - RNA, 21 nt, Human
acuguuguaagaauucugauu

SEQ ID NO: 2646425 - RNA, 22 nt, Human
acuguuguaagaauucugauug

SEQ ID NO: 2646426 - RNA, 13 nt, Human
acuuaauaacugu

SEQ ID NO: 2646427 - RNA, 15 nt, Human
acuuaauaacugugu

SEQ ID NO: 2646428 - RNA, 17 nt, Human
acuuaauaacuguguac

SEQ ID NO: 2646429 - RNA, 18 nt, Human
acuuaauaacuguguacu

SEQ ID NO: 2646430 - RNA, 22 nt, Human
acuuaauaaucaagagccuuaa

SEQ ID NO: 2646431 - RNA, 19 nt, Human
acuuaauaaucaagagccu

SEQ ID NO: 2646432 - RNA, 15 nt, Human
acuuaauaaucaaga

SEQ ID NO: 2646433 - RNA, 13 nt, Human
acuuaauaaucaa

SEQ ID NO: 2646434 - RNA, 19 nt, Human
acuguuguagaagacaaaa

SEQ ID NO: 2646435 - RNA, 12 nt, Human
ucuacagugguu

SEQ ID NO: 2646436 - RNA, 13 nt, Human
ucuacagugguuu

SEQ ID NO: 2646437 - RNA, 21 nt, Human
ucuacagugguuuuauacuga

SEQ ID NO: 2646438 - RNA, 15 nt, Human
acuguuacugggccc

SEQ ID NO: 2646439 - RNA, 16 nt, Human
acuguuacugggcccu

SEQ ID NO: 2646440 - RNA, 18 nt, Human
acuguuacugggcccuga

SEQ ID NO: 2646441 - RNA, 23 nt, Human
ucuacagugguuuuauacugaag

SEQ ID NO: 2646442 - RNA, 22 nt, Human
ucuacagugguuuuauacugaa

SEQ ID NO: 2646443 - RNA, 23 nt, Human
acuguucggaagggguuccucaa

SEQ ID NO: 2646444 - RNA, 23 nt, Human
acuggcuuuuauuaaugcacuuu

SEQ ID NO: 2646445 - RNA, 20 nt, Human
acuggcuuuuauuaaugcac

SEQ ID NO: 2646446 - RNA, 21 nt, Human
acuggcuuuuauuaaugcacu

SEQ ID NO: 2646447 - RNA, 23 nt, Human
acugucacucauugcugagccuc

SEQ ID NO: 2646448 - RNA, 24 nt, Human
acugucacucauugcugagccucu

SEQ ID NO: 2646449 - RNA, 18 nt, Human
acuggcuuaccuccucau

SEQ ID NO: 2646450 - RNA, 17 nt, Human
acugugcuguuguucuc

SEQ ID NO: 2646451 - RNA, 12 nt, Human
acuguguaaacu

SEQ ID NO: 2646452 - RNA, 14 nt, Human
acuguguaaacuca

SEQ ID NO: 2646453 - RNA, 19 nt, Human
acuguguauauuugauuua

SEQ ID NO: 2646454 - RNA, 18 nt, Human
acuguguauauuugauuu

SEQ ID NO: 2646455 - RNA, 17 nt, Human
acuguguauauuugauu

SEQ ID NO: 2646456 - RNA, 13 nt, Human
acuguguauauuu

SEQ ID NO: 2646457 - RNA, 16 nt, Human
acuguguauauuugau

SEQ ID NO: 2646458 - RNA, 15 nt, Human
acuguguauauuuga

SEQ ID NO: 2646459 - RNA, 14 nt, Human
acuguguacuguuc

SEQ ID NO: 2646460 - RNA, 18 nt, Human
ucggguuucucuguggcu

SEQ ID NO: 2646461 - RNA, 19 nt, Human
ucgggcaggggcuggaggg

SEQ ID NO: 2646462 - RNA, 21 nt, Human
ucgggaggucgaggcaggagg

SEQ ID NO: 2646463 - RNA, 19 nt, Human
ucgggaggucgaggcagga

SEQ ID NO: 2646464 - RNA, 16 nt, Human
ucggcugaccaugcuc

SEQ ID NO: 2646465 - RNA, 17 nt, Human
ucgggaggucgaggcag

SEQ ID NO: 2646466 - RNA, 15 nt, Human
ucggcugaccaugcu

SEQ ID NO: 2646467 - RNA, 21 nt, Human
ucggcucugcaguccuacuca

SEQ ID NO: 2646468 - RNA, 14 nt, Human
ucggcucagcucgg

SEQ ID NO: 2646469 - RNA, 17 nt, Human
ucggcguggcccaaggc

SEQ ID NO: 2646470 - RNA, 18 nt, Human
ucggcguggcccaaggcu

SEQ ID NO: 2646471 - RNA, 22 nt, Human
ucggcguggcccaaggcuggca

SEQ ID NO: 2646472 - RNA, 14 nt, Human
ucuaaaaucaugaa

SEQ ID NO: 2646473 - RNA, 17 nt, Human
ucuaaaagguaaugugu

SEQ ID NO: 2646474 - RNA, 18 nt, Human
ucuaaaagguaaugugug

SEQ ID NO: 2646475 - RNA, 13 nt, Human
ucuaaaaacuucu

SEQ ID NO: 2646476 - RNA, 11 nt, Human
ucguuuuugua

SEQ ID NO: 2646477 - RNA, 20 nt, Human
ucguuuuuguauuuucauga

SEQ ID NO: 2646478 - RNA, 13 nt, Human
ucgguuucuccaa

SEQ ID NO: 2646479 - RNA, 22 nt, Human
ucgguuugccaaaauucauuuc

SEQ ID NO: 2646480 - RNA, 13 nt, Human
ucgguacucccau

SEQ ID NO: 2646481 - RNA, 16 nt, Human
ucgguagguucagcca

SEQ ID NO: 2646482 - RNA, 22 nt, Human
ucgguacccggggcccagggca

SEQ ID NO: 2646483 - RNA, 21 nt, Human
ucgguacccggggcccagggc

SEQ ID NO: 2646484 - RNA, 20 nt, Human
ucgguauccccccaucuugc

SEQ ID NO: 2646485 - RNA, 15 nt, Human
ucugacuaauuaggc

SEQ ID NO: 2646486 - RNA, 13 nt, Human
ucugacuaauuag

SEQ ID NO: 2646487 - RNA, 13 nt, Human
ucugauggccuua

SEQ ID NO: 2646488 - RNA, 15 nt, Human
ucugauggccuuaau

SEQ ID NO: 2646489 - RNA, 20 nt, Human
ucugauggccuuaauuuccu

SEQ ID NO: 2646490 - RNA, 21 nt, Human
ucugauggccuuaauuuccuu

SEQ ID NO: 2646491 - RNA, 22 nt, Human
ucugauggccuuaauuuccuuu

SEQ ID NO: 2646492 - RNA, 23 nt, Human
ucugauggccuuaauuuccuuuu

SEQ ID NO: 2646493 - RNA, 16 nt, Human
agaaaugaaaacagug

SEQ ID NO: 2646494 - RNA, 23 nt, Human
ucugaccuggcaucuaauucuga

SEQ ID NO: 2646495 - RNA, 20 nt, Human
ucugaauuuacuuccuugca

SEQ ID NO: 2646496 - RNA, 21 nt, Human
ucugaauuuacuuccuugcau

SEQ ID NO: 2646497 - RNA, 16 nt, Human
agaaaucauguccaua

SEQ ID NO: 2646498 - RNA, 13 nt, Human
agaaacuugugaa

SEQ ID NO: 2646499 - RNA, 23 nt, Human
agaaacuugugaaguggaaaugu

SEQ ID NO: 2646500 - RNA, 23 nt, Human
agaaacuuuuaucuauucugaga

SEQ ID NO: 2646501 - RNA, 22 nt, Human
agaaacuuuuaucuauucugag

SEQ ID NO: 2646502 - RNA, 16 nt, Human
agaaauauaacacauu

SEQ ID NO: 2646503 - RNA, 17 nt, Human
agaaauauaacacauuu

SEQ ID NO: 2646504 - RNA, 18 nt, Human
agaaauauaacacauuuu

SEQ ID NO: 2646505 - RNA, 19 nt, Human
agaaauauaacacauuuuu

SEQ ID NO: 2646506 - RNA, 13 nt, Human
agaaacacugccu

SEQ ID NO: 2646507 - RNA, 15 nt, Human
agaaacacugccuuu

SEQ ID NO: 2646508 - RNA, 11 nt, Human
agaaacacugc

SEQ ID NO: 2646509 - RNA, 12 nt, Human
agaaacacugcc

SEQ ID NO: 2646510 - RNA, 20 nt, Human
agaaacuuauuucucauauc

SEQ ID NO: 2646511 - RNA, 21 nt, Human
agaaacuuauuucucauauca

SEQ ID NO: 2646512 - RNA, 22 nt, Human
agaaacuuauuucucauaucaa

SEQ ID NO: 2646513 - RNA, 17 nt, Human
agaaaagaacuggaaac

SEQ ID NO: 2646514 - RNA, 13 nt, Human
agaaaaagaaaug

SEQ ID NO: 2646515 - RNA, 17 nt, Human
ucucuugagccugggag

SEQ ID NO: 2646516 - RNA, 16 nt, Human
ucucuugagcuggccu

SEQ ID NO: 2646517 - RNA, 17 nt, Human
ucucuugagcuggccuc

SEQ ID NO: 2646518 - RNA, 14 nt, Human
ucucuugagcuggc

SEQ ID NO: 2646519 - RNA, 15 nt, Human
ucucuugagcuggcc

SEQ ID NO: 2646520 - RNA, 18 nt, Human
ucucuugagccugggagg

SEQ ID NO: 2646521 - RNA, 13 nt, Human
agaaaaagaaaaa

SEQ ID NO: 2646522 - RNA, 14 nt, Human
ucucuugaguuugu

SEQ ID NO: 2646523 - RNA, 22 nt, Human
ucucuugcaccaaauuaucuug

SEQ ID NO: 2646524 - RNA, 15 nt, Human
ucucuugaguuuguc

SEQ ID NO: 2646525 - RNA, 13 nt, Human
ucucuccacugug

SEQ ID NO: 2646526 - RNA, 18 nt, Human
ucucuuuaaaaggaaaga

SEQ ID NO: 2646527 - RNA, 21 nt, Human
ucucuuuaaaaggaaagaaaa

SEQ ID NO: 2646528 - RNA, 19 nt, Human
ucucuuuaaaaggaaagaa

SEQ ID NO: 2646529 - RNA, 13 nt, Human
ucucuccucccca

SEQ ID NO: 2646530 - RNA, 11 nt, Human
ucucuccuggc

SEQ ID NO: 2646531 - RNA, 12 nt, Human
ucucuccuggcc

SEQ ID NO: 2646532 - RNA, 13 nt, Human
ucucuccuggccu

SEQ ID NO: 2646533 - RNA, 16 nt, Human
ucucuccuggccuauc

SEQ ID NO: 2646534 - RNA, 22 nt, Human
acuugaaccauaaaauguccag

SEQ ID NO: 2646535 - RNA, 20 nt, Human
acuugaaccauaaaaugucc

SEQ ID NO: 2646536 - RNA, 19 nt, Human
acuugaaccauaaaauguc

SEQ ID NO: 2646537 - RNA, 17 nt, Human
acuugaaccauaaaaug

SEQ ID NO: 2646538 - RNA, 16 nt, Human
acuugaaccauaaaau

SEQ ID NO: 2646539 - RNA, 15 nt, Human
acuugaaccauaaaa

SEQ ID NO: 2646540 - RNA, 14 nt, Human
acuugaaccauaaa

SEQ ID NO: 2646541 - RNA, 18 nt, Human
acuuggcucgaaucucug

SEQ ID NO: 2646542 - RNA, 19 nt, Human
acuuggcucgaaucucugu

SEQ ID NO: 2646543 - RNA, 20 nt, Human
acuuggcucgaaucucugug

SEQ ID NO: 2646544 - RNA, 21 nt, Human
acuuggcucgaaucucugugc

SEQ ID NO: 2646545 - RNA, 13 nt, Human
acuugccuggguc

SEQ ID NO: 2646546 - RNA, 14 nt, Human
acuugccuggguca

SEQ ID NO: 2646547 - RNA, 12 nt, Human
acuugccugggu

SEQ ID NO: 2646548 - RNA, 13 nt, Human
acuugccucuucc

SEQ ID NO: 2646549 - RNA, 17 nt, Human
acuugccucuuccuuga

SEQ ID NO: 2646550 - RNA, 14 nt, Human
acuuccuuuuaacu

SEQ ID NO: 2646551 - RNA, 14 nt, Human
acuucuaccugccc

SEQ ID NO: 2646552 - RNA, 16 nt, Human
acuucuaccugcccuc

SEQ ID NO: 2646553 - RNA, 17 nt, Human
acuucuaccugcccuca

SEQ ID NO: 2646554 - RNA, 17 nt, Human
acuucuaagaaaagccu

SEQ ID NO: 2646555 - RNA, 22 nt, Human
acuucgggaggucgaggcagga

SEQ ID NO: 2646556 - RNA, 22 nt, Human
acuuccuugagacacggagccc

SEQ ID NO: 2646557 - RNA, 14 nt, Human
acuuccuugagaca

SEQ ID NO: 2646558 - RNA, 19 nt, Human
ucucacacugguucucaau

SEQ ID NO: 2646559 - RNA, 20 nt, Human
ucucacacugguucucaaug

SEQ ID NO: 2646560 - RNA, 21 nt, Human
ucucacacugguucucaauga

SEQ ID NO: 2646561 - RNA, 22 nt, Human
ucucacacugguucucaaugaa

SEQ ID NO: 2646562 - RNA, 23 nt, Human
ucucacacugguucucaaugaaa

SEQ ID NO: 2646563 - RNA, 22 nt, Human
ucucacagcuaugcaaaaagcu

SEQ ID NO: 2646564 - RNA, 18 nt, Human
ucucacagcuaugcaaaa

SEQ ID NO: 2646565 - RNA, 17 nt, Human
ucucacagcuaugcaaa

SEQ ID NO: 2646566 - RNA, 14 nt, Human
ucucacagcuaugc

SEQ ID NO: 2646567 - RNA, 18 nt, Human
ucucacuaaagcaugaaa

SEQ ID NO: 2646568 - RNA, 23 nt, Human
ucucacuaaagcaugaaauguga

SEQ ID NO: 2646569 - RNA, 16 nt, Human
acuucagcugacuuuu

SEQ ID NO: 2646570 - RNA, 11 nt, Human
acuucagcuga

SEQ ID NO: 2646571 - RNA, 21 nt, Human
ucuccauaaacaugaaaacac

SEQ ID NO: 2646572 - RNA, 20 nt, Human
ucuccaucacccucuuccug

SEQ ID NO: 2646573 - RNA, 21 nt, Human
ucuccaucacccucuuccugu

SEQ ID NO: 2646574 - RNA, 23 nt, Human
ucuccaggggcugcuuccuccug

SEQ ID NO: 2646575 - RNA, 17 nt, Human
ucuccaggggcugcuuc

SEQ ID NO: 2646576 - RNA, 18 nt, Human
ucuccaggggcugcuucc

SEQ ID NO: 2646577 - RNA, 20 nt, Human
ucuccaggggcugcuuccuc

SEQ ID NO: 2646578 - RNA, 22 nt, Human
ucuccaggggcugcuuccuccu

SEQ ID NO: 2646579 - RNA, 23 nt, Human
ucuccaaacugaagcagccucuc

SEQ ID NO: 2646580 - RNA, 22 nt, Human
ucuccaaacugaagcagccucu

SEQ ID NO: 2646581 - RNA, 19 nt, Human
ucucagcuuugagaagccu

SEQ ID NO: 2646582 - RNA, 13 nt, Human
ucucagggccugg

SEQ ID NO: 2646583 - RNA, 12 nt, Human
ucucagggccug

SEQ ID NO: 2646584 - RNA, 13 nt, Human
ucucagcuuugag

SEQ ID NO: 2646585 - RNA, 22 nt, Human
ucucauugacuuuuauaaagca

SEQ ID NO: 2646586 - RNA, 14 nt, Human
ucucauuacuuguu

SEQ ID NO: 2646587 - RNA, 19 nt, Human
ucucauuaauacucuuuau

SEQ ID NO: 2646588 - RNA, 23 nt, Human
ucucauuaauacucuuuauuuau

SEQ ID NO: 2646589 - RNA, 15 nt, Human
ucucagggccugguc

SEQ ID NO: 2646590 - RNA, 14 nt, Human
ucucagggccuggu

SEQ ID NO: 2646591 - RNA, 19 nt, Human
ucucagggccuggucguuu

SEQ ID NO: 2646592 - RNA, 12 nt, Human
acuuuaaaagug

SEQ ID NO: 2646593 - RNA, 17 nt, Human
acuuucuauccucugua

SEQ ID NO: 2646594 - RNA, 19 nt, Human
acuuucuauuuuaaucuug

SEQ ID NO: 2646595 - RNA, 10 nt, Human
acuuguguuu

SEQ ID NO: 2646596 - RNA, 17 nt, Human
acuuguguuuuaaaaua

SEQ ID NO: 2646597 - RNA, 14 nt, Human
ucuccuccccuucc

SEQ ID NO: 2646598 - RNA, 13 nt, Human
ucuccucccuucc

SEQ ID NO: 2646599 - RNA, 14 nt, Human
ucuccucccuuccu

SEQ ID NO: 2646600 - RNA, 23 nt, Human
ucuccucccuuccuuuucccugc

SEQ ID NO: 2646601 - RNA, 20 nt, Human
ucuccguuagcuccuguggc

SEQ ID NO: 2646602 - RNA, 21 nt, Human
ucuccguuagcuccuguggcc

SEQ ID NO: 2646603 - RNA, 22 nt, Human
ucuccguuagcuccuguggccc

SEQ ID NO: 2646604 - RNA, 23 nt, Human
ucuccguuagcuccuguggcccc

SEQ ID NO: 2646605 - RNA, 20 nt, Human
ucuccuacauaucccuucca

SEQ ID NO: 2646606 - RNA, 15 nt, Human
ucuccuauauauuuc

SEQ ID NO: 2646607 - RNA, 18 nt, Human
ucuccuauauauuucuau

SEQ ID NO: 2646608 - RNA, 19 nt, Human
ucuccuauauauuucuauu

SEQ ID NO: 2646609 - RNA, 22 nt, Human
ucuccuauauauuucuauuauu

SEQ ID NO: 2646610 - RNA, 23 nt, Human
ucuccuauauauuucuauuauua

SEQ ID NO: 2646611 - RNA, 17 nt, Human
agacagaacuugaaugu

SEQ ID NO: 2646612 - RNA, 14 nt, Human
agacagaacuugaa

SEQ ID NO: 2646613 - RNA, 21 nt, Human
agacacggagcccagcccucc

SEQ ID NO: 2646614 - RNA, 22 nt, Human
agacaccuuggacauccuccuc

SEQ ID NO: 2646615 - RNA, 19 nt, Human
ucuguggacugaccuugua

SEQ ID NO: 2646616 - RNA, 15 nt, Human
agaauucugauugau

SEQ ID NO: 2646617 - RNA, 18 nt, Human
agaauucugauugauuug

SEQ ID NO: 2646618 - RNA, 23 nt, Human
agaauucugauugauuugauugg

SEQ ID NO: 2646619 - RNA, 22 nt, Human
ucuuacuuuguaaauucugauu

SEQ ID NO: 2646620 - RNA, 20 nt, Human
ucuuacuuuguaaauucuga

SEQ ID NO: 2646621 - RNA, 18 nt, Human
ucuuacuuuguaaauucu

SEQ ID NO: 2646622 - RNA, 13 nt, Human
ucuuacuuuguaa

SEQ ID NO: 2646623 - RNA, 11 nt, Human
ucuuacuuugu

SEQ ID NO: 2646624 - RNA, 17 nt, Human
ucuuacuuuguaaauuc

SEQ ID NO: 2646625 - RNA, 16 nt, Human
ucuuacuuuguaaauu

SEQ ID NO: 2646626 - RNA, 15 nt, Human
ucuuacuuuguaaau

SEQ ID NO: 2646627 - RNA, 14 nt, Human
ucuuacuuuguaaa

SEQ ID NO: 2646628 - RNA, 12 nt, Human
ucuuaugugaca

SEQ ID NO: 2646629 - RNA, 13 nt, Human
ucuuaugugacau

SEQ ID NO: 2646630 - RNA, 16 nt, Human
ucuuaugugacauuaa

SEQ ID NO: 2646631 - RNA, 19 nt, Human
ucuuaugugacauuaacaa

SEQ ID NO: 2646632 - RNA, 21 nt, Human
ucuuaugugacauuaacaaau

SEQ ID NO: 2646633 - RNA, 16 nt, Human
ucuuacuaaaaaguau

SEQ ID NO: 2646634 - RNA, 17 nt, Human
ucuuacuaaaaaguaua

SEQ ID NO: 2646635 - RNA, 21 nt, Human
ucuuacaauauugauugggaa

SEQ ID NO: 2646636 - RNA, 13 nt, Human
ucuuaauguuccu

SEQ ID NO: 2646637 - RNA, 15 nt, Human
ucuuaauguuccuca

SEQ ID NO: 2646638 - RNA, 20 nt, Human
ucuuaauguuccucaaagcu

SEQ ID NO: 2646639 - RNA, 21 nt, Human
ucuuaauguuccucaaagcuu

SEQ ID NO: 2646640 - RNA, 16 nt, Human
agacaguguauguaga

SEQ ID NO: 2646641 - RNA, 17 nt, Human
agacaguguauguagaa

SEQ ID NO: 2646642 - RNA, 21 nt, Human
agacaguguauguagaagcau

SEQ ID NO: 2646643 - RNA, 23 nt, Human
agacaguguauguagaagcauga

SEQ ID NO: 2646644 - RNA, 12 nt, Human
agacagucuugc

SEQ ID NO: 2646645 - RNA, 21 nt, Human
agaauuaagcccuaagguccu

SEQ ID NO: 2646646 - RNA, 15 nt, Human
agaauguuagaguaa

SEQ ID NO: 2646647 - RNA, 16 nt, Human
agaauguuagaguaau

SEQ ID NO: 2646648 - RNA, 21 nt, Human
agaauguguuuaaacuugguu

SEQ ID NO: 2646649 - RNA, 16 nt, Human
ucuggguuugagaaau

SEQ ID NO: 2646650 - RNA, 15 nt, Human
ucugguacuuucugu

SEQ ID NO: 2646651 - RNA, 21 nt, Human
ucugguaaucgggguauaaua

SEQ ID NO: 2646652 - RNA, 15 nt, Human
ucuggguccuuccug

SEQ ID NO: 2646653 - RNA, 18 nt, Human
ucuggggggacccagugc

SEQ ID NO: 2646654 - RNA, 19 nt, Human
ucuggggggacccagugca

SEQ ID NO: 2646655 - RNA, 20 nt, Human
ucuggggggacccagugcag

SEQ ID NO: 2646656 - RNA, 21 nt, Human
ucuggggggacccagugcaga

SEQ ID NO: 2646657 - RNA, 20 nt, Human
ucuggggaaagacacugccu

SEQ ID NO: 2646658 - RNA, 23 nt, Human
ucuggggaaagacacugccuggg

SEQ ID NO: 2646659 - RNA, 21 nt, Human
ucuggggaaagacacugccug

SEQ ID NO: 2646660 - RNA, 22 nt, Human
ucuggggaaagacacugccugg

SEQ ID NO: 2646661 - RNA, 20 nt, Human
ucugggcuuauaucuggccu

SEQ ID NO: 2646662 - RNA, 21 nt, Human
ucugggcuuauaucuggccuc

SEQ ID NO: 2646663 - RNA, 20 nt, Human
agaauuagauuucuauagga

SEQ ID NO: 2646664 - RNA, 20 nt, Human
agaauuauaauuaguuccuc

SEQ ID NO: 2646665 - RNA, 14 nt, Human
ucuguacuuuucau

SEQ ID NO: 2646666 - RNA, 20 nt, Human
ucuguacuuuucauucucuu

SEQ ID NO: 2646667 - RNA, 23 nt, Human
ucuguacuguuacugggcccuga

SEQ ID NO: 2646668 - RNA, 20 nt, Human
ucuguauccuggaacaauau

SEQ ID NO: 2646669 - RNA, 22 nt, Human
ucuguacuaaacaguaagauau

SEQ ID NO: 2646670 - RNA, 12 nt, Human
ucuguauuugaa

SEQ ID NO: 2646671 - RNA, 14 nt, Human
ucugugaugagcug

SEQ ID NO: 2646672 - RNA, 17 nt, Human
ucugugaugagcugauc

SEQ ID NO: 2646673 - RNA, 12 nt, Human
ucugugcugugu

SEQ ID NO: 2646674 - RNA, 19 nt, Human
ucuguggaugccagggccg

SEQ ID NO: 2646675 - RNA, 20 nt, Human
ucugugggcuacaugcuggg

SEQ ID NO: 2646676 - RNA, 23 nt, Human
ucugugggcuacaugcugggguc

SEQ ID NO: 2646677 - RNA, 18 nt, Human
agagacagauaccuccaa

SEQ ID NO: 2646678 - RNA, 23 nt, Human
agagacagauaccuccaacccug

SEQ ID NO: 2646679 - RNA, 13 nt, Human
agagacaaaauau

SEQ ID NO: 2646680 - RNA, 22 nt, Human
agagaaaaaauauuuuccugcc

SEQ ID NO: 2646681 - RNA, 21 nt, Human
agacuuguauagcaugaaaua

SEQ ID NO: 2646682 - RNA, 17 nt, Human
agacucgacucugugcc

SEQ ID NO: 2646683 - RNA, 22 nt, Human
agacuggguaggaaagaggaag

SEQ ID NO: 2646684 - RNA, 18 nt, Human
agacuggguaggaaagag

SEQ ID NO: 2646685 - RNA, 17 nt, Human
agacuguagauauguau

SEQ ID NO: 2646686 - RNA, 23 nt, Human
agacuguagauauguauucuuuu

SEQ ID NO: 2646687 - RNA, 23 nt, Human
agacuuacagggauaaggccugu

SEQ ID NO: 2646688 - RNA, 16 nt, Human
agacuuagggcaccag

SEQ ID NO: 2646689 - RNA, 17 nt, Human
agacuuagggcaccagg

SEQ ID NO: 2646690 - RNA, 16 nt, Human
agacuuccuugagaca

SEQ ID NO: 2646691 - RNA, 14 nt, Human
agacuuccuugaga

SEQ ID NO: 2646692 - RNA, 13 nt, Human
ucuuguaaagacu

SEQ ID NO: 2646693 - RNA, 14 nt, Human
ucuuguaaagacug

SEQ ID NO: 2646694 - RNA, 15 nt, Human
ucuuguaaagacugg

SEQ ID NO: 2646695 - RNA, 17 nt, Human
ucuuguaaagacugguu

SEQ ID NO: 2646696 - RNA, 23 nt, Human
ucuuguaaagacugguuuucugc

SEQ ID NO: 2646697 - RNA, 12 nt, Human
ucuuuaguuuuu

SEQ ID NO: 2646698 - RNA, 22 nt, Human
ucuuuaguuuuugguugggaau

SEQ ID NO: 2646699 - RNA, 23 nt, Human
ucuuuaguuuuugguugggaaug

SEQ ID NO: 2646700 - RNA, 14 nt, Human
ucuugguguaauuu

SEQ ID NO: 2646701 - RNA, 13 nt, Human
ucuugauacauuc

SEQ ID NO: 2646702 - RNA, 14 nt, Human
ucuugauacauuca

SEQ ID NO: 2646703 - RNA, 18 nt, Human
ucuugauacauucaaauu

SEQ ID NO: 2646704 - RNA, 19 nt, Human
ucuugauacauucaaauuu

SEQ ID NO: 2646705 - RNA, 20 nt, Human
ucuucugagcuuacguaguu

SEQ ID NO: 2646706 - RNA, 13 nt, Human
ucuucuggcucaa

SEQ ID NO: 2646707 - RNA, 12 nt, Human
ucuucuggcuca

SEQ ID NO: 2646708 - RNA, 21 nt, Human
ucuucuggcucaaaaagagaa

SEQ ID NO: 2646709 - RNA, 18 nt, Human
ucuucuggcucaaaaaga

SEQ ID NO: 2646710 - RNA, 22 nt, Human
ucuucugagcuuacguaguucu

SEQ ID NO: 2646711 - RNA, 19 nt, Human
agacauuuuaaaaaauggu

SEQ ID NO: 2646712 - RNA, 22 nt, Human
agacauuuuaaaaaauggucac

SEQ ID NO: 2646713 - RNA, 22 nt, Human
agacauacuccuuccaucaaau

SEQ ID NO: 2646714 - RNA, 22 nt, Human
ucuucuuaauauguucuuuuaa

SEQ ID NO: 2646715 - RNA, 20 nt, Human
agaccuggaagaacaggccu

SEQ ID NO: 2646716 - RNA, 21 nt, Human
agaccuggaagaacaggccuc

SEQ ID NO: 2646717 - RNA, 14 nt, Human
agacuauuuuuaga

SEQ ID NO: 2646718 - RNA, 21 nt, Human
agacuauuuuuagauuuucuu

SEQ ID NO: 2646719 - RNA, 16 nt, Human
agacucagugcagaug

SEQ ID NO: 2646720 - RNA, 18 nt, Human
agacucagugcagaugga

SEQ ID NO: 2646721 - RNA, 22 nt, Human
ucuugaguuugucgcucaugug

SEQ ID NO: 2646722 - RNA, 21 nt, Human
ucuugaguuugucgcucaugu

SEQ ID NO: 2646723 - RNA, 20 nt, Human
ucuugaguuugucgcucaug

SEQ ID NO: 2646724 - RNA, 18 nt, Human
agaccgugaagauacuuu

SEQ ID NO: 2646725 - RNA, 20 nt, Human
agacauuuuaaaaaaugguc

SEQ ID NO: 2646726 - RNA, 17 nt, Human
agaccgggcccuggguu

SEQ ID NO: 2646727 - RNA, 15 nt, Human
agaccgaucggcggc

SEQ ID NO: 2646728 - RNA, 12 nt, Human
ugaaugugucag

SEQ ID NO: 2646729 - RNA, 14 nt, Human
agagucagccagga

SEQ ID NO: 2646730 - RNA, 18 nt, Human
agagucagccaggaccau

SEQ ID NO: 2646731 - RNA, 20 nt, Human
agaggcccagauauuagaaa

SEQ ID NO: 2646732 - RNA, 18 nt, Human
ugaauggggucucaaagu

SEQ ID NO: 2646733 - RNA, 19 nt, Human
agaguugggugucuccuua

SEQ ID NO: 2646734 - RNA, 22 nt, Human
agaguugggugucuccuuaagc

SEQ ID NO: 2646735 - RNA, 16 nt, Human
agagugaaaaagagaa

SEQ ID NO: 2646736 - RNA, 21 nt, Human
agagucugagggcuuguaguu

SEQ ID NO: 2646737 - RNA, 14 nt, Human
agagucugagggcu

SEQ ID NO: 2646738 - RNA, 12 nt, Human
agagucugaggg

SEQ ID NO: 2646739 - RNA, 15 nt, Human
agagucuggcccuag

SEQ ID NO: 2646740 - RNA, 23 nt, Human
agagucugagggcuuguaguucu

SEQ ID NO: 2646741 - RNA, 22 nt, Human
agagucugagggcuuguaguuc

SEQ ID NO: 2646742 - RNA, 13 nt, Human
agagucuggcccu

SEQ ID NO: 2646743 - RNA, 14 nt, Human
agauauguauucuu

SEQ ID NO: 2646744 - RNA, 15 nt, Human
agauauguauucuuu

SEQ ID NO: 2646745 - RNA, 20 nt, Human
agauauugaggccaagaaua

SEQ ID NO: 2646746 - RNA, 22 nt, Human
agauauugaggccaagaauauu

SEQ ID NO: 2646747 - RNA, 15 nt, Human
ugaauuuuuuuguaa

SEQ ID NO: 2646748 - RNA, 16 nt, Human
ugaauuuuuuuguaau

SEQ ID NO: 2646749 - RNA, 18 nt, Human
ugaauuuuuuuguaauaa

SEQ ID NO: 2646750 - RNA, 22 nt, Human
ugaauuuuuuuguaauaagcaa

SEQ ID NO: 2646751 - RNA, 15 nt, Human
ugaauuuuucucuuc

SEQ ID NO: 2646752 - RNA, 18 nt, Human
ugacaaaaaauguuuuaa

SEQ ID NO: 2646753 - RNA, 21 nt, Human
ugacaaaaaauguuuuaaaga

SEQ ID NO: 2646754 - RNA, 11 nt, Human
ugacauugucu

SEQ ID NO: 2646755 - RNA, 12 nt, Human
ugacauugucuc

SEQ ID NO: 2646756 - RNA, 14 nt, Human
ugacauugucuccu

SEQ ID NO: 2646757 - RNA, 15 nt, Human
agaucagccugggca

SEQ ID NO: 2646758 - RNA, 13 nt, Human
agaucagccuggg

SEQ ID NO: 2646759 - RNA, 22 nt, Human
agaucauaguuuuauuuauauu

SEQ ID NO: 2646760 - RNA, 20 nt, Human
agaucauaguuuuauuuaua

SEQ ID NO: 2646761 - RNA, 19 nt, Human
agaucauaguuuuauuuau

SEQ ID NO: 2646762 - RNA, 17 nt, Human
agaucauaguuuuauuu

SEQ ID NO: 2646763 - RNA, 16 nt, Human
agaucauaguuuuauu

SEQ ID NO: 2646764 - RNA, 14 nt, Human
agaucauaguuuua

SEQ ID NO: 2646765 - RNA, 13 nt, Human
agaucauaguuuu

SEQ ID NO: 2646766 - RNA, 23 nt, Human
agaucauaguuuuauuuauauuu

SEQ ID NO: 2646767 - RNA, 23 nt, Human
agaugcgucccaagauguugauu

SEQ ID NO: 2646768 - RNA, 20 nt, Human
agaugcgucccaagauguug

SEQ ID NO: 2646769 - RNA, 15 nt, Human
agaugcgucccaaga

SEQ ID NO: 2646770 - RNA, 23 nt, Human
agaugcacuuaaguuagccucca

SEQ ID NO: 2646771 - RNA, 21 nt, Human
agaugcaccaccaagccaagg

SEQ ID NO: 2646772 - RNA, 23 nt, Human
agaugcaccaccaagccaaggga

SEQ ID NO: 2646773 - RNA, 18 nt, Human
agauccauuuccauugcu

SEQ ID NO: 2646774 - RNA, 19 nt, Human
agauccauuuccauugcuu

SEQ ID NO: 2646775 - RNA, 15 nt, Human
agauguuagauauuu

SEQ ID NO: 2646776 - RNA, 12 nt, Human
ugaccauuuuuu

SEQ ID NO: 2646777 - RNA, 22 nt, Human
ugaccauuuuuuaauuuacuug

SEQ ID NO: 2646778 - RNA, 16 nt, Human
agauguggcuacugac

SEQ ID NO: 2646779 - RNA, 23 nt, Human
agauguuacaaguuuauauauau

SEQ ID NO: 2646780 - RNA, 15 nt, Human
agaugugcugacaag

SEQ ID NO: 2646781 - RNA, 21 nt, Human
agaugugauuaaagcuaagga

SEQ ID NO: 2646782 - RNA, 16 nt, Human
agauguggauuuggca

SEQ ID NO: 2646783 - RNA, 15 nt, Human
agaugcuucucacug

SEQ ID NO: 2646784 - RNA, 16 nt, Human
agaugcuguguauaug

SEQ ID NO: 2646785 - RNA, 18 nt, Human
agaugcuguguauauggu

SEQ ID NO: 2646786 - RNA, 19 nt, Human
agaugcuguguauauggua

SEQ ID NO: 2646787 - RNA, 15 nt, Human
ugaagcaaaucagaa

SEQ ID NO: 2646788 - RNA, 14 nt, Human
ugaagcaaaucaga

SEQ ID NO: 2646789 - RNA, 18 nt, Human
ugaagcaaaucagaaacu

SEQ ID NO: 2646790 - RNA, 18 nt, Human
agaguaaucuuguugguu

SEQ ID NO: 2646791 - RNA, 19 nt, Human
agaguacacugccugccuu

SEQ ID NO: 2646792 - RNA, 15 nt, Human
agaguacacugccug

SEQ ID NO: 2646793 - RNA, 13 nt, Human
agaguacacugcc

SEQ ID NO: 2646794 - RNA, 12 nt, Human
agaguacacugc

SEQ ID NO: 2646795 - RNA, 19 nt, Human
agagguucuaaaaucauga

SEQ ID NO: 2646796 - RNA, 18 nt, Human
agagguccucuggagccc

SEQ ID NO: 2646797 - RNA, 17 nt, Human
agagguccucuggagcc

SEQ ID NO: 2646798 - RNA, 14 nt, Human
agagguacccuggg

SEQ ID NO: 2646799 - RNA, 15 nt, Human
agagguacccugggu

SEQ ID NO: 2646800 - RNA, 17 nt, Human
agagguacccugggugu

SEQ ID NO: 2646801 - RNA, 16 nt, Human
agagguauuaaaacua

SEQ ID NO: 2646802 - RNA, 17 nt, Human
agagguauuaaaacuaa

SEQ ID NO: 2646803 - RNA, 17 nt, Human
agagcuuugucguauuu

SEQ ID NO: 2646804 - RNA, 12 nt, Human
ugaacuuuugua

SEQ ID NO: 2646805 - RNA, 13 nt, Human
ugaacuuuuguac

SEQ ID NO: 2646806 - RNA, 14 nt, Human
ugaacuuuuguacu

SEQ ID NO: 2646807 - RNA, 15 nt, Human
ugaacuuuuguacug

SEQ ID NO: 2646808 - RNA, 16 nt, Human
ugaacuuuuguacuga

SEQ ID NO: 2646809 - RNA, 18 nt, Human
ugaacuuuuguacugaau

SEQ ID NO: 2646810 - RNA, 14 nt, Human
ugaaccgcacagcu

SEQ ID NO: 2646811 - RNA, 15 nt, Human
agagccuuuugugca

SEQ ID NO: 2646812 - RNA, 20 nt, Human
agagcgcgccccuagccggu

SEQ ID NO: 2646813 - RNA, 15 nt, Human
agagcgcgccccuag

SEQ ID NO: 2646814 - RNA, 16 nt, Human
agagcugccaucgcug

SEQ ID NO: 2646815 - RNA, 17 nt, Human
ugaaagugccuuugcag

SEQ ID NO: 2646816 - RNA, 16 nt, Human
ugaaagugccuuugca

SEQ ID NO: 2646817 - RNA, 14 nt, Human
ugaaagugccuuug

SEQ ID NO: 2646818 - RNA, 13 nt, Human
ugaaagugccuuu

SEQ ID NO: 2646819 - RNA, 14 nt, Human
ugaaagugcauuuu

SEQ ID NO: 2646820 - RNA, 18 nt, Human
ugaaagugcauuuuugua

SEQ ID NO: 2646821 - RNA, 20 nt, Human
ugaaagugcauuuuuguaaa

SEQ ID NO: 2646822 - RNA, 21 nt, Human
ugaaagugcauuuuuguaaau

SEQ ID NO: 2646823 - RNA, 13 nt, Human
ugaaaguuuugua

SEQ ID NO: 2646824 - RNA, 14 nt, Human
ugaaaguuuuguaa

SEQ ID NO: 2646825 - RNA, 16 nt, Human
ugaaaguuuuguaaaa

SEQ ID NO: 2646826 - RNA, 21 nt, Human
ugaaagugccuuugcagcuca

SEQ ID NO: 2646827 - RNA, 21 nt, Human
agagacagcuacacagagcuu

SEQ ID NO: 2646828 - RNA, 12 nt, Human
agagauuucuca

SEQ ID NO: 2646829 - RNA, 13 nt, Human
agagauuucucau

SEQ ID NO: 2646830 - RNA, 15 nt, Human
ucuuuggauucuaaa

SEQ ID NO: 2646831 - RNA, 16 nt, Human
ucuuuggauucuaaau

SEQ ID NO: 2646832 - RNA, 17 nt, Human
agagcagugguaagaau

SEQ ID NO: 2646833 - RNA, 13 nt, Human
agagccuucucag

SEQ ID NO: 2646834 - RNA, 15 nt, Human
agagccuucucagaa

SEQ ID NO: 2646835 - RNA, 16 nt, Human
agagccuucucagaag

SEQ ID NO: 2646836 - RNA, 18 nt, Human
agagccuucucagaagca

SEQ ID NO: 2646837 - RNA, 19 nt, Human
agagccuucucagaagcac

SEQ ID NO: 2646838 - RNA, 21 nt, Human
agagccuugcggaagguucua

SEQ ID NO: 2646839 - RNA, 11 nt, Human
agagccuugcg

SEQ ID NO: 2646840 - RNA, 20 nt, Human
agagcaagagauaagucuuu

SEQ ID NO: 2646841 - RNA, 16 nt, Human
ugauacaaugaacacu

SEQ ID NO: 2646842 - RNA, 14 nt, Human
ugauaccagcugga

SEQ ID NO: 2646843 - RNA, 18 nt, Human
ugauacauuuuuuaagcu

SEQ ID NO: 2646844 - RNA, 13 nt, Human
ugauacauucaaa

SEQ ID NO: 2646845 - RNA, 16 nt, Human
ugauacauucaaauuu

SEQ ID NO: 2646846 - RNA, 20 nt, Human
ugauacauucaaauuugucu

SEQ ID NO: 2646847 - RNA, 16 nt, Human
ugaucaauauuuuuau

SEQ ID NO: 2646848 - RNA, 21 nt, Human
ugaucaauauuuuuauaucau

SEQ ID NO: 2646849 - RNA, 19 nt, Human
ugaucaccgacugaaaaua

SEQ ID NO: 2646850 - RNA, 17 nt, Human
ugaucaccgacugaaaa

SEQ ID NO: 2646851 - RNA, 22 nt, Human
agcaucacuuaaaacacguuuu

SEQ ID NO: 2646852 - RNA, 18 nt, Human
agcaucacuuaaaacacg

SEQ ID NO: 2646853 - RNA, 15 nt, Human
agcaucaccugccug

SEQ ID NO: 2646854 - RNA, 17 nt, Human
agcaucacuuaaaacac

SEQ ID NO: 2646855 - RNA, 16 nt, Human
agcaucacuuaaaaca

SEQ ID NO: 2646856 - RNA, 14 nt, Human
agcaucacuuaaaa

SEQ ID NO: 2646857 - RNA, 13 nt, Human
agcaucaccugcc

SEQ ID NO: 2646858 - RNA, 22 nt, Human
agcaucaggguuaagaagacuu

SEQ ID NO: 2646859 - RNA, 16 nt, Human
agcauuccagccccuc

SEQ ID NO: 2646860 - RNA, 19 nt, Human
agcauuccagccccucugg

SEQ ID NO: 2646861 - RNA, 20 nt, Human
agcauuccagccccucuggu

SEQ ID NO: 2646862 - RNA, 21 nt, Human
agcaugguacuuggccuuugg

SEQ ID NO: 2646863 - RNA, 13 nt, Human
agcauguaauggu

SEQ ID NO: 2646864 - RNA, 17 nt, Human
agccaaaauguaggcuu

SEQ ID NO: 2646865 - RNA, 22 nt, Human
agccaaaauguaggcuuaguuu

SEQ ID NO: 2646866 - RNA, 15 nt, Human
agccaaaauuaaggu

SEQ ID NO: 2646867 - RNA, 23 nt, Human
agccaaaaugugagugguugaau

SEQ ID NO: 2646868 - RNA, 18 nt, Human
agccaaaauuaagguguu

SEQ ID NO: 2646869 - RNA, 17 nt, Human
agccaaaauuaaggugu

SEQ ID NO: 2646870 - RNA, 15 nt, Human
agcauuuugcuaaau

SEQ ID NO: 2646871 - RNA, 12 nt, Human
agcauuuuucaa

SEQ ID NO: 2646872 - RNA, 13 nt, Human
agcauuuuucaau

SEQ ID NO: 2646873 - RNA, 16 nt, Human
agcauuuuucaauaua

SEQ ID NO: 2646874 - RNA, 20 nt, Human
agcauuuuucaauauauuga

SEQ ID NO: 2646875 - RNA, 22 nt, Human
agcauuuuucaauauauugaac

SEQ ID NO: 2646876 - RNA, 23 nt, Human
agcauuuuucaauauauugaacu

SEQ ID NO: 2646877 - RNA, 22 nt, Human
agcauuuugcuaaaugugaaug

SEQ ID NO: 2646878 - RNA, 16 nt, Human
agcauuuagcuggcca

SEQ ID NO: 2646879 - RNA, 18 nt, Human
agcauuuagucuugccag

SEQ ID NO: 2646880 - RNA, 20 nt, Human
ugaucccguuuuccccauga

SEQ ID NO: 2646881 - RNA, 17 nt, Human
ugaucccguuuucccca

SEQ ID NO: 2646882 - RNA, 22 nt, Human
ugaucccguuuuccccaugaca

SEQ ID NO: 2646883 - RNA, 21 nt, Human
ugaucccguuuuccccaugac

SEQ ID NO: 2646884 - RNA, 15 nt, Human
ugaucccauuuuccu

SEQ ID NO: 2646885 - RNA, 17 nt, Human
ugaucccuugagauaug

SEQ ID NO: 2646886 - RNA, 19 nt, Human
ugaucccuugagauaugga

SEQ ID NO: 2646887 - RNA, 15 nt, Human
ugaucuacaugagga

SEQ ID NO: 2646888 - RNA, 23 nt, Human
ugauccacuuugggggaggagaa

SEQ ID NO: 2646889 - RNA, 16 nt, Human
agccaaugucuccucc

SEQ ID NO: 2646890 - RNA, 19 nt, Human
agccaaucuacaaucucuu

SEQ ID NO: 2646891 - RNA, 22 nt, Human
agccaaucuacaaucucuuuuu

SEQ ID NO: 2646892 - RNA, 20 nt, Human
agccaaugucuccuccccuu

SEQ ID NO: 2646893 - RNA, 13 nt, Human
ugaugggaaaacu

SEQ ID NO: 2646894 - RNA, 16 nt, Human
ugauggccuuaauuuc

SEQ ID NO: 2646895 - RNA, 18 nt, Human
ugauggccuuaauuuccu

SEQ ID NO: 2646896 - RNA, 19 nt, Human
ugauggccuuaauuuccuu

SEQ ID NO: 2646897 - RNA, 20 nt, Human
ugauggccuuaauuuccuuu

SEQ ID NO: 2646898 - RNA, 20 nt, Human
ugauuaaccacuucagcuga

SEQ ID NO: 2646899 - RNA, 19 nt, Human
agcaggcacgggugguccc

SEQ ID NO: 2646900 - RNA, 20 nt, Human
agcaggcacggguggucccc

SEQ ID NO: 2646901 - RNA, 12 nt, Human
agcagcagguga

SEQ ID NO: 2646902 - RNA, 13 nt, Human
agcagcaggugau

SEQ ID NO: 2646903 - RNA, 12 nt, Human
agcagcagcagg

SEQ ID NO: 2646904 - RNA, 13 nt, Human
agcagcagcaggu

SEQ ID NO: 2646905 - RNA, 16 nt, Human
agcagcagcaggugau

SEQ ID NO: 2646906 - RNA, 16 nt, Human
agcagcagggagggcu

SEQ ID NO: 2646907 - RNA, 13 nt, Human
agcagcaccuccu

SEQ ID NO: 2646908 - RNA, 20 nt, Human
agcagggagggcuucugcca

SEQ ID NO: 2646909 - RNA, 23 nt, Human
agcaggugauuggaccaggccau

SEQ ID NO: 2646910 - RNA, 19 nt, Human
agcaggugauuggaccagg

SEQ ID NO: 2646911 - RNA, 20 nt, Human
agcaggugauuggaccaggc

SEQ ID NO: 2646912 - RNA, 22 nt, Human
agcaggugauuggaccaggcca

SEQ ID NO: 2646913 - RNA, 15 nt, Human
agcauagauaauauu

SEQ ID NO: 2646914 - RNA, 19 nt, Human
agcauagauaauauuguuu

SEQ ID NO: 2646915 - RNA, 17 nt, Human
agcauacuuuguaaaua

SEQ ID NO: 2646916 - RNA, 22 nt, Human
agcauacuuuguaaauaggauu

SEQ ID NO: 2646917 - RNA, 16 nt, Human
agcauagaaaccacua

SEQ ID NO: 2646918 - RNA, 20 nt, Human
agcauagaaaccacuagaaa

SEQ ID NO: 2646919 - RNA, 20 nt, Human
agcauaauuuaaaaauauau

SEQ ID NO: 2646920 - RNA, 21 nt, Human
agcauaauuuaaaaauauauu

SEQ ID NO: 2646921 - RNA, 22 nt, Human
agcauaauuuaaaaauauauuu

SEQ ID NO: 2646922 - RNA, 23 nt, Human
agcauaaaaauuagccaagugug

SEQ ID NO: 2646923 - RNA, 16 nt, Human
agcagucgugccugug

SEQ ID NO: 2646924 - RNA, 17 nt, Human
agcagucgugccugugu

SEQ ID NO: 2646925 - RNA, 14 nt, Human
agcagucgugccug

SEQ ID NO: 2646926 - RNA, 19 nt, Human
agcauaaaaauuagccaag

SEQ ID NO: 2646927 - RNA, 15 nt, Human
agcaguaagggaaca

SEQ ID NO: 2646928 - RNA, 12 nt, Human
agcaguauuuuu

SEQ ID NO: 2646929 - RNA, 13 nt, Human
ugaguggcagggg

SEQ ID NO: 2646930 - RNA, 21 nt, Human
ugaguggcaggggacaggagu

SEQ ID NO: 2646931 - RNA, 12 nt, Human
ugagugggaagc

SEQ ID NO: 2646932 - RNA, 13 nt, Human
ugagugggaagcc

SEQ ID NO: 2646933 - RNA, 14 nt, Human
ugagugggaagccc

SEQ ID NO: 2646934 - RNA, 18 nt, Human
ugagucauaucuuaauau

SEQ ID NO: 2646935 - RNA, 23 nt, Human
ugagucacuaugggaugagaaaa

SEQ ID NO: 2646936 - RNA, 15 nt, Human
ugaguacagcagaaa

SEQ ID NO: 2646937 - RNA, 21 nt, Human
ugagugggggaucacagccuc

SEQ ID NO: 2646938 - RNA, 22 nt, Human
agccugaguaaaguuaaaagaa

SEQ ID NO: 2646939 - RNA, 19 nt, Human
agccuguaacacuccucug

SEQ ID NO: 2646940 - RNA, 20 nt, Human
agccuguaacacuccucugc

SEQ ID NO: 2646941 - RNA, 19 nt, Human
agccuugcggaagguucua

SEQ ID NO: 2646942 - RNA, 22 nt, Human
agccuuaaaacaucauuccuuu

SEQ ID NO: 2646943 - RNA, 19 nt, Human
agccuuaaaacaucauucc

SEQ ID NO: 2646944 - RNA, 17 nt, Human
ugccaguuacuugcuuu

SEQ ID NO: 2646945 - RNA, 18 nt, Human
ugccaguuacuugcuuua

SEQ ID NO: 2646946 - RNA, 17 nt, Human
ugccagccuugagcccu

SEQ ID NO: 2646947 - RNA, 19 nt, Human
ugccagccuugagcccugg

SEQ ID NO: 2646948 - RNA, 21 nt, Human
ugccagccuugagcccuggcu

SEQ ID NO: 2646949 - RNA, 23 nt, Human
ugccagccuugagcccuggcugu

SEQ ID NO: 2646950 - RNA, 19 nt, Human
ugccagcccccuaaaagca

SEQ ID NO: 2646951 - RNA, 21 nt, Human
ugccagcccccuaaaagcacu

SEQ ID NO: 2646952 - RNA, 22 nt, Human
ugccagcccccuaaaagcacuc

SEQ ID NO: 2646953 - RNA, 23 nt, Human
ugccagcccccuaaaagcacucc

SEQ ID NO: 2646954 - RNA, 13 nt, Human
ugccaagcuccaa

SEQ ID NO: 2646955 - RNA, 15 nt, Human
ugccaagcuccaagc

SEQ ID NO: 2646956 - RNA, 16 nt, Human
ugccaagcuccaagcc

SEQ ID NO: 2646957 - RNA, 23 nt, Human
ugccaagcuccaagccccaucuu

SEQ ID NO: 2646958 - RNA, 20 nt, Human
ugcauacuuaccuagugaaa

SEQ ID NO: 2646959 - RNA, 22 nt, Human
ugcauacuuaccuagugaaacu

SEQ ID NO: 2646960 - RNA, 17 nt, Human
ugcagucacuggagguu

SEQ ID NO: 2646961 - RNA, 13 nt, Human
ugcauacuuugua

SEQ ID NO: 2646962 - RNA, 20 nt, Human
ugcauacuuuguauuuugau

SEQ ID NO: 2646963 - RNA, 22 nt, Human
ugcauacuuuguauuuugauua

SEQ ID NO: 2646964 - RNA, 14 nt, Human
ugcagucacuggag

SEQ ID NO: 2646965 - RNA, 15 nt, Human
ugcagucacuggagg

SEQ ID NO: 2646966 - RNA, 19 nt, Human
ugcagggccauggcucagg

SEQ ID NO: 2646967 - RNA, 14 nt, Human
ugcagguuuucugu

SEQ ID NO: 2646968 - RNA, 17 nt, Human
ugcaucguuucaucuuc

SEQ ID NO: 2646969 - RNA, 18 nt, Human
ugcaucuuugauguguug

SEQ ID NO: 2646970 - RNA, 11 nt, Human
ugcaugaaaau

SEQ ID NO: 2646971 - RNA, 12 nt, Human
ugcaucuuugau

SEQ ID NO: 2646972 - RNA, 17 nt, Human
ugcaucuuugauguguu

SEQ ID NO: 2646973 - RNA, 16 nt, Human
ugcaucuuugaugugu

SEQ ID NO: 2646974 - RNA, 12 nt, Human
ugcauggaaauc

SEQ ID NO: 2646975 - RNA, 14 nt, Human
ugcauggaaaucag

SEQ ID NO: 2646976 - RNA, 15 nt, Human
ugcauggaaaucagc

SEQ ID NO: 2646977 - RNA, 17 nt, Human
ugcauggaaaucagcca

SEQ ID NO: 2646978 - RNA, 22 nt, Human
ugcauggaaaucagccaaguuu

SEQ ID NO: 2646979 - RNA, 16 nt, Human
ugcaugcccucucagg

SEQ ID NO: 2646980 - RNA, 15 nt, Human
ugcaugcaaaugagc

SEQ ID NO: 2646981 - RNA, 22 nt, Human
ugcaugcaaaugagcucugaaa

SEQ ID NO: 2646982 - RNA, 18 nt, Human
ugcaugcaugcaaaugag

SEQ ID NO: 2646983 - RNA, 15 nt, Human
ugcaugcccucucag

SEQ ID NO: 2646984 - RNA, 14 nt, Human
ugcaugcccucuca

SEQ ID NO: 2646985 - RNA, 21 nt, Human
ugcaggucaaguugucagguu

SEQ ID NO: 2646986 - RNA, 16 nt, Human
agccucugucaggccu

SEQ ID NO: 2646987 - RNA, 17 nt, Human
agccucugucaggccuu

SEQ ID NO: 2646988 - RNA, 17 nt, Human
agccuccuuagaaaaaa

SEQ ID NO: 2646989 - RNA, 23 nt, Human
agccucuccccagguccagcucu

SEQ ID NO: 2646990 - RNA, 18 nt, Human
agccucuccccaggucca

SEQ ID NO: 2646991 - RNA, 22 nt, Human
agccucuccccagguccagcuc

SEQ ID NO: 2646992 - RNA, 17 nt, Human
agccuccugcugccaca

SEQ ID NO: 2646993 - RNA, 18 nt, Human
agccucucagugcccucc

SEQ ID NO: 2646994 - RNA, 20 nt, Human
agccucucagugcccuccag

SEQ ID NO: 2646995 - RNA, 16 nt, Human
agccucuccccagguc

SEQ ID NO: 2646996 - RNA, 14 nt, Human
ugcaauauuugaau

SEQ ID NO: 2646997 - RNA, 14 nt, Human
ugcaauaaaauuua

SEQ ID NO: 2646998 - RNA, 15 nt, Human
ugcaauaaaauuuaa

SEQ ID NO: 2646999 - RNA, 16 nt, Human
ugcaauaaaauuuaaa

SEQ ID NO: 2647000 - RNA, 17 nt, Human
ugcaauaaaauuuaaaa

SEQ ID NO: 2647001 - RNA, 24 nt, Human
ugcaauaaaaaugauacugauggu

SEQ ID NO: 2647002 - RNA, 23 nt, Human
ugcaaggccugguguuucuugau

SEQ ID NO: 2647003 - RNA, 21 nt, Human
ugcaaggccugguguuucuug

SEQ ID NO: 2647004 - RNA, 18 nt, Human
ugcaaaugagcucugaaa

SEQ ID NO: 2647005 - RNA, 20 nt, Human
ugcaaaugagcucugaaauc

SEQ ID NO: 2647006 - RNA, 21 nt, Human
ugcaaaugagcucugaaaucu

SEQ ID NO: 2647007 - RNA, 14 nt, Human
ugcaaaucugaugg

SEQ ID NO: 2647008 - RNA, 15 nt, Human
ugcaacaagcaugca

SEQ ID NO: 2647009 - RNA, 12 nt, Human
ugcaaauuucau

SEQ ID NO: 2647010 - RNA, 13 nt, Human
ugcaagaugugaa

SEQ ID NO: 2647011 - RNA, 14 nt, Human
ugcaagaugugaau

SEQ ID NO: 2647012 - RNA, 15 nt, Human
ugcaagaugugaauu

SEQ ID NO: 2647013 - RNA, 16 nt, Human
ugcaagaugugaauua

SEQ ID NO: 2647014 - RNA, 18 nt, Human
ugcaagaugugaauuauu

SEQ ID NO: 2647015 - RNA, 13 nt, Human
ugcaagcagagga

SEQ ID NO: 2647016 - RNA, 15 nt, Human
ugcaagcagaggacc

SEQ ID NO: 2647017 - RNA, 16 nt, Human
ugcaagcagaggacca

SEQ ID NO: 2647018 - RNA, 17 nt, Human
ugcaagcagaggaccag

SEQ ID NO: 2647019 - RNA, 21 nt, Human
ugcaagcagaggaccagggcc

SEQ ID NO: 2647020 - RNA, 22 nt, Human
ugcaagcagaggaccagggccu

SEQ ID NO: 2647021 - RNA, 20 nt, Human
ugauuucaaaguuuuguugu

SEQ ID NO: 2647022 - RNA, 21 nt, Human
ugauuucaaaguuuuguugua

SEQ ID NO: 2647023 - RNA, 22 nt, Human
ugauuuauuaacuuaauaauca

SEQ ID NO: 2647024 - RNA, 19 nt, Human
ugauuuauuaacuuaauaa

SEQ ID NO: 2647025 - RNA, 20 nt, Human
ugauuuauaaaugccauuua

SEQ ID NO: 2647026 - RNA, 12 nt, Human
ugauuuauuaac

SEQ ID NO: 2647027 - RNA, 16 nt, Human
ugauuuauuaacuuaa

SEQ ID NO: 2647028 - RNA, 15 nt, Human
ugauuuauuaacuua

SEQ ID NO: 2647029 - RNA, 17 nt, Human
ugauuugcaauaaaaau

SEQ ID NO: 2647030 - RNA, 17 nt, Human
ugauuugcugcucuuca

SEQ ID NO: 2647031 - RNA, 12 nt, Human
agccccucuggu

SEQ ID NO: 2647032 - RNA, 13 nt, Human
agccccucugguc

SEQ ID NO: 2647033 - RNA, 16 nt, Human
agccccucuggucgcu

SEQ ID NO: 2647034 - RNA, 24 nt, Human
agccccggggugaguccauucucc

SEQ ID NO: 2647035 - RNA, 19 nt, Human
agcccccuggccucugugc

SEQ ID NO: 2647036 - RNA, 17 nt, Human
agcccccuggccucugu

SEQ ID NO: 2647037 - RNA, 12 nt, Human
agcccccugguc

SEQ ID NO: 2647038 - RNA, 22 nt, Human
agcccccuggucuuugagcucc

SEQ ID NO: 2647039 - RNA, 18 nt, Human
agcccccuggucuuugag

SEQ ID NO: 2647040 - RNA, 16 nt, Human
agcccccuggccucug

SEQ ID NO: 2647041 - RNA, 15 nt, Human
agcccccuggccucu

SEQ ID NO: 2647042 - RNA, 20 nt, Human
agccccgcgaccauguggcc

SEQ ID NO: 2647043 - RNA, 23 nt, Human
agccccgcgaccauguggccaca

SEQ ID NO: 2647044 - RNA, 14 nt, Human
agccccgacuccag

SEQ ID NO: 2647045 - RNA, 15 nt, Human
agccccgacuccagc

SEQ ID NO: 2647046 - RNA, 16 nt, Human
agccccgacuccagcc

SEQ ID NO: 2647047 - RNA, 17 nt, Human
agccccgacuccagcca

SEQ ID NO: 2647048 - RNA, 18 nt, Human
agccccgacuccagccag

SEQ ID NO: 2647049 - RNA, 19 nt, Human
agccccgacuccagccagc

SEQ ID NO: 2647050 - RNA, 20 nt, Human
agccccgacuccagccagcg

SEQ ID NO: 2647051 - RNA, 21 nt, Human
agccccgacuccagccagcgc

SEQ ID NO: 2647052 - RNA, 22 nt, Human
agccccgacuccagccagcgcc

SEQ ID NO: 2647053 - RNA, 23 nt, Human
agccccgacuccagccagcgccu

SEQ ID NO: 2647054 - RNA, 11 nt, Human
ugcagaaugua

SEQ ID NO: 2647055 - RNA, 12 nt, Human
ugcagaauguaa

SEQ ID NO: 2647056 - RNA, 19 nt, Human
ugcagaauguaagugggcc

SEQ ID NO: 2647057 - RNA, 20 nt, Human
ugcagaauguaagugggccc

SEQ ID NO: 2647058 - RNA, 21 nt, Human
ugcagaauguaagugggccca

SEQ ID NO: 2647059 - RNA, 15 nt, Human
ugcacuccagccugg

SEQ ID NO: 2647060 - RNA, 13 nt, Human
ugcacuccagccu

SEQ ID NO: 2647061 - RNA, 16 nt, Human
ugcacuccagccuggg

SEQ ID NO: 2647062 - RNA, 14 nt, Human
ugcacuccagccug

SEQ ID NO: 2647063 - RNA, 13 nt, Human
ugcacauguuucc

SEQ ID NO: 2647064 - RNA, 14 nt, Human
ugcacauguuuccu

SEQ ID NO: 2647065 - RNA, 16 nt, Human
ugcacauguuuccucu

SEQ ID NO: 2647066 - RNA, 17 nt, Human
ugcacauguuuccucua

SEQ ID NO: 2647067 - RNA, 18 nt, Human
ugcacauguuuccucuag

SEQ ID NO: 2647068 - RNA, 15 nt, Human
ugcaccacugcacuc

SEQ ID NO: 2647069 - RNA, 21 nt, Human
ugcaccacugcacuccagccu

SEQ ID NO: 2647070 - RNA, 16 nt, Human
ugcacccaugguacca

SEQ ID NO: 2647071 - RNA, 21 nt, Human
aggaauuaccaagaauauccu

SEQ ID NO: 2647072 - RNA, 16 nt, Human
aggacaauacuggggu

SEQ ID NO: 2647073 - RNA, 21 nt, Human
aggaccuuuccaccacagcca

SEQ ID NO: 2647074 - RNA, 20 nt, Human
aggacgaacauccaaccuuc

SEQ ID NO: 2647075 - RNA, 22 nt, Human
aggaccuuuccaccacagccag

SEQ ID NO: 2647076 - RNA, 12 nt, Human
aggacgccacuc

SEQ ID NO: 2647077 - RNA, 16 nt, Human
aggacgccacucauuu

SEQ ID NO: 2647078 - RNA, 17 nt, Human
aggacgccacucauuuc

SEQ ID NO: 2647079 - RNA, 18 nt, Human
aggacgccacucauuuca

SEQ ID NO: 2647080 - RNA, 19 nt, Human
aggacgccacucauuucau

SEQ ID NO: 2647081 - RNA, 20 nt, Human
aggacgccacucauuucauc

SEQ ID NO: 2647082 - RNA, 23 nt, Human
aggacgccacucauuucaucuca

SEQ ID NO: 2647083 - RNA, 17 nt, Human
aggaccuuaagacagag

SEQ ID NO: 2647084 - RNA, 15 nt, Human
aggacuuuguacauu

SEQ ID NO: 2647085 - RNA, 20 nt, Human
aggagauaauuacugccuug

SEQ ID NO: 2647086 - RNA, 20 nt, Human
aggagaucgagaccauccug

SEQ ID NO: 2647087 - RNA, 23 nt, Human
aggagaucgagaccauccuggcu

SEQ ID NO: 2647088 - RNA, 14 nt, Human
aggaggaaggcaag

SEQ ID NO: 2647089 - RNA, 17 nt, Human
aggaggaaggcaagagg

SEQ ID NO: 2647090 - RNA, 15 nt, Human
uggaagaggaaaagg

SEQ ID NO: 2647091 - RNA, 17 nt, Human
aggauagcuaacuguaa

SEQ ID NO: 2647092 - RNA, 20 nt, Human
aggauagcuaacuguaaauc

SEQ ID NO: 2647093 - RNA, 23 nt, Human
aggauagcuaacuguaaaucaug

SEQ ID NO: 2647094 - RNA, 20 nt, Human
aggaggcgcccuuggcuucu

SEQ ID NO: 2647095 - RNA, 21 nt, Human
aggauugaaaauguccaggaa

SEQ ID NO: 2647096 - RNA, 24 nt, Human
aggauugaaaauguccaggaaagu

SEQ ID NO: 2647097 - RNA, 24 nt, Human
aggaugaugccaguuacuugcuuu

SEQ ID NO: 2647098 - RNA, 23 nt, Human
aggaugaugucuuuuuauuaaaa

SEQ ID NO: 2647099 - RNA, 14 nt, Human
ugcuuuuucuuguu

SEQ ID NO: 2647100 - RNA, 22 nt, Human
ugcuuuuucuuguuuguuuaaa

SEQ ID NO: 2647101 - RNA, 14 nt, Human
aggagccucacugg

SEQ ID NO: 2647102 - RNA, 22 nt, Human
aggagccucacuggggcagaca

SEQ ID NO: 2647103 - RNA, 12 nt, Human
ugcuugaauaaa

SEQ ID NO: 2647104 - RNA, 20 nt, Human
ugcuugaauaaacaccacug

SEQ ID NO: 2647105 - RNA, 15 nt, Human
ugcuugaauaaacac

SEQ ID NO: 2647106 - RNA, 15 nt, Human
ugcuugagcucagga

SEQ ID NO: 2647107 - RNA, 18 nt, Human
ugcuuuggaccuaaaugg

SEQ ID NO: 2647108 - RNA, 23 nt, Human
ugcuuuggaccuaaauggccuca

SEQ ID NO: 2647109 - RNA, 21 nt, Human
ugcuuuggaccuaaauggccu

SEQ ID NO: 2647110 - RNA, 22 nt, Human
ugcuuuggaccuaaauggccuc

SEQ ID NO: 2647111 - RNA, 20 nt, Human
aggcaaggcuaugugauuac

SEQ ID NO: 2647112 - RNA, 18 nt, Human
aggcaaggcuaugugauu

SEQ ID NO: 2647113 - RNA, 14 nt, Human
aggcaagccaggcu

SEQ ID NO: 2647114 - RNA, 16 nt, Human
aggcaagccaggcuca

SEQ ID NO: 2647115 - RNA, 22 nt, Human
aggcaagccaggcucacucaca

SEQ ID NO: 2647116 - RNA, 13 nt, Human
uggagccagcucc

SEQ ID NO: 2647117 - RNA, 15 nt, Human
uggagaaaugaaaac

SEQ ID NO: 2647118 - RNA, 21 nt, Human
uggagcacugggcucccgggc

SEQ ID NO: 2647119 - RNA, 19 nt, Human
uggagcacugggcucccgg

SEQ ID NO: 2647120 - RNA, 12 nt, Human
uggagcacuggg

SEQ ID NO: 2647121 - RNA, 17 nt, Human
uggagcacugggcuccc

SEQ ID NO: 2647122 - RNA, 15 nt, Human
uggagcacugggcuc

SEQ ID NO: 2647123 - RNA, 14 nt, Human
uggacuucaaagca

SEQ ID NO: 2647124 - RNA, 18 nt, Human
uggacuucaaagcaagcu

SEQ ID NO: 2647125 - RNA, 19 nt, Human
uggacuucaaagcaagcug

SEQ ID NO: 2647126 - RNA, 17 nt, Human
uggacuucuaccugccc

SEQ ID NO: 2647127 - RNA, 18 nt, Human
uggacuucuaccugcccu

SEQ ID NO: 2647128 - RNA, 22 nt, Human
aggcauagaggcuucuccgcca

SEQ ID NO: 2647129 - RNA, 15 nt, Human
aggcauagaggcuuc

SEQ ID NO: 2647130 - RNA, 22 nt, Human
aggcagggguggggguggaggc

SEQ ID NO: 2647131 - RNA, 23 nt, Human
aggcagggguggggguggaggcu

SEQ ID NO: 2647132 - RNA, 17 nt, Human
aggcaggugggauggau

SEQ ID NO: 2647133 - RNA, 23 nt, Human
aggcaggugaucugcugcagagc

SEQ ID NO: 2647134 - RNA, 20 nt, Human
aggcaggugaucugcugcag

SEQ ID NO: 2647135 - RNA, 23 nt, Human
aggcaguuugaggauuaguuuag

SEQ ID NO: 2647136 - RNA, 14 nt, Human
aggcaggauugaaa

SEQ ID NO: 2647137 - RNA, 16 nt, Human
aggcaggauugaaaau

SEQ ID NO: 2647138 - RNA, 18 nt, Human
aggcaggauugaaaaugu

SEQ ID NO: 2647139 - RNA, 22 nt, Human
aggcaggauugaaaauguccag

SEQ ID NO: 2647140 - RNA, 22 nt, Human
aggcaggcauagaggcuucucc

SEQ ID NO: 2647141 - RNA, 14 nt, Human
aggcaggcauggcc

SEQ ID NO: 2647142 - RNA, 15 nt, Human
aggcaggcauggccc

SEQ ID NO: 2647143 - RNA, 17 nt, Human
aggcaggcauggcccug

SEQ ID NO: 2647144 - RNA, 18 nt, Human
aggcaggcauggcccugg

SEQ ID NO: 2647145 - RNA, 19 nt, Human
aggcaggcauggcccuggg

SEQ ID NO: 2647146 - RNA, 20 nt, Human
aggcaggcauggcccugggc

SEQ ID NO: 2647147 - RNA, 20 nt, Human
aggcaaggaaagaaauacag

SEQ ID NO: 2647148 - RNA, 19 nt, Human
aggcaggccuauuucauca

SEQ ID NO: 2647149 - RNA, 15 nt, Human
aggcagggguggggg

SEQ ID NO: 2647150 - RNA, 16 nt, Human
aggcaggggugggggu

SEQ ID NO: 2647151 - RNA, 19 nt, Human
aggcaggggugggggugga

SEQ ID NO: 2647152 - RNA, 20 nt, Human
aggcagggguggggguggag

SEQ ID NO: 2647153 - RNA, 14 nt, Human
uggaguguaugacu

SEQ ID NO: 2647154 - RNA, 17 nt, Human
uggaguguaugacugca

SEQ ID NO: 2647155 - RNA, 19 nt, Human
uggaguguaugacugcaca

SEQ ID NO: 2647156 - RNA, 15 nt, Human
uggagugugagccac

SEQ ID NO: 2647157 - RNA, 20 nt, Human
aggcauuugcugaauacaga

SEQ ID NO: 2647158 - RNA, 16 nt, Human
aggcauuugcugaaua

SEQ ID NO: 2647159 - RNA, 20 nt, Human
uggaggucgguagguucagc

SEQ ID NO: 2647160 - RNA, 18 nt, Human
uggaugcggccauucaag

SEQ ID NO: 2647161 - RNA, 19 nt, Human
uggaguucucaaagaccug

SEQ ID NO: 2647162 - RNA, 15 nt, Human
uggauucuaaauaca

SEQ ID NO: 2647163 - RNA, 16 nt, Human
uggauugccucugaaa

SEQ ID NO: 2647164 - RNA, 23 nt, Human
aggcccccagcccagggcuccug

SEQ ID NO: 2647165 - RNA, 13 nt, Human
aggcccccacuug

SEQ ID NO: 2647166 - RNA, 17 nt, Human
aggcccccacuugccuc

SEQ ID NO: 2647167 - RNA, 18 nt, Human
aggcccccacuugccucu

SEQ ID NO: 2647168 - RNA, 20 nt, Human
aggcccccacuugccucuuc

SEQ ID NO: 2647169 - RNA, 14 nt, Human
aggcccccagccca

SEQ ID NO: 2647170 - RNA, 17 nt, Human
aggcccccagcccaggg

SEQ ID NO: 2647171 - RNA, 18 nt, Human
aggcccccagcccagggc

SEQ ID NO: 2647172 - RNA, 19 nt, Human
aggcccccagcccagggcu

SEQ ID NO: 2647173 - RNA, 22 nt, Human
aggcccccagcccagggcuccu

SEQ ID NO: 2647174 - RNA, 17 nt, Human
aggccaccuccccagca

SEQ ID NO: 2647175 - RNA, 14 nt, Human
aggccaccucccca

SEQ ID NO: 2647176 - RNA, 15 nt, Human
aggccaccuccccag

SEQ ID NO: 2647177 - RNA, 23 nt, Human
ugcuccauaguuuggcauuugca

SEQ ID NO: 2647178 - RNA, 18 nt, Human
ugcuccauaguuuggcau

SEQ ID NO: 2647179 - RNA, 21 nt, Human
ugcuccagcuguucagcuggu

SEQ ID NO: 2647180 - RNA, 20 nt, Human
ugcuccagcuguucagcugg

SEQ ID NO: 2647181 - RNA, 17 nt, Human
ugcucuucaucccauuc

SEQ ID NO: 2647182 - RNA, 15 nt, Human
ugcugacuuagaauc

SEQ ID NO: 2647183 - RNA, 14 nt, Human
ugcugacuuagaau

SEQ ID NO: 2647184 - RNA, 13 nt, Human
ugcugacuuagaa

SEQ ID NO: 2647185 - RNA, 17 nt, Human
ugcucuucagaugccac

SEQ ID NO: 2647186 - RNA, 18 nt, Human
ugcucuucagaugccacu

SEQ ID NO: 2647187 - RNA, 19 nt, Human
aggaaacaaccaugucauu

SEQ ID NO: 2647188 - RNA, 13 nt, Human
aggaaacaaguga

SEQ ID NO: 2647189 - RNA, 14 nt, Human
aggaaacaagugaa

SEQ ID NO: 2647190 - RNA, 17 nt, Human
agcuuuggucugugugu

SEQ ID NO: 2647191 - RNA, 14 nt, Human
aggaaaaugucugu

SEQ ID NO: 2647192 - RNA, 20 nt, Human
aggaaaaugucuguaauaau

SEQ ID NO: 2647193 - RNA, 23 nt, Human
aggaaaaugucuguaauaauaga

SEQ ID NO: 2647194 - RNA, 15 nt, Human
ugcucaaaaaaugag

SEQ ID NO: 2647195 - RNA, 17 nt, Human
ugcuauuugaacaagug

SEQ ID NO: 2647196 - RNA, 20 nt, Human
ugcuauuugaacaagugggc

SEQ ID NO: 2647197 - RNA, 12 nt, Human
ugcuauuuuugu

SEQ ID NO: 2647198 - RNA, 13 nt, Human
ugcuauuuuugua

SEQ ID NO: 2647199 - RNA, 15 nt, Human
ugcuauuuuuguaaa

SEQ ID NO: 2647200 - RNA, 16 nt, Human
ugcuauuuuuguaaag

SEQ ID NO: 2647201 - RNA, 17 nt, Human
ugcuauuuuuguaaagu

SEQ ID NO: 2647202 - RNA, 22 nt, Human
ugcuauuuuuguaaaguuuccg

SEQ ID NO: 2647203 - RNA, 16 nt, Human
aggaaaauucuuaaaa

SEQ ID NO: 2647204 - RNA, 13 nt, Human
ugcucaaagaaau

SEQ ID NO: 2647205 - RNA, 14 nt, Human
ugcucaaagaaauc

SEQ ID NO: 2647206 - RNA, 15 nt, Human
ugcucaaagaaaucu

SEQ ID NO: 2647207 - RNA, 14 nt, Human
ugcugagccucugc

SEQ ID NO: 2647208 - RNA, 12 nt, Human
ugcugagccucu

SEQ ID NO: 2647209 - RNA, 17 nt, Human
ugcugagccucugcucc

SEQ ID NO: 2647210 - RNA, 16 nt, Human
ugcugagccucugcuc

SEQ ID NO: 2647211 - RNA, 20 nt, Human
ugcugagccucugcucccca

SEQ ID NO: 2647212 - RNA, 17 nt, Human
ugcugaggccugggccg

SEQ ID NO: 2647213 - RNA, 13 nt, Human
ugcugaggccugg

SEQ ID NO: 2647214 - RNA, 14 nt, Human
ugcugaggccuggg

SEQ ID NO: 2647215 - RNA, 15 nt, Human
ugcugaggccugggc

SEQ ID NO: 2647216 - RNA, 16 nt, Human
ugcugaggccugggcc

SEQ ID NO: 2647217 - RNA, 19 nt, Human
aggaagcaaauagaagaga

SEQ ID NO: 2647218 - RNA, 14 nt, Human
aggaaggcaagagg

SEQ ID NO: 2647219 - RNA, 13 nt, Human
aggaaggcaagag

SEQ ID NO: 2647220 - RNA, 16 nt, Human
aggaauuacgugcucu

SEQ ID NO: 2647221 - RNA, 16 nt, Human
aggaauguguggccug

SEQ ID NO: 2647222 - RNA, 19 nt, Human
ugccuuuugcaaccaggaa

SEQ ID NO: 2647223 - RNA, 23 nt, Human
ugcggguggggcuuggggcucac

SEQ ID NO: 2647224 - RNA, 20 nt, Human
agcuuaaaggggcuagagug

SEQ ID NO: 2647225 - RNA, 14 nt, Human
agcuuaaugcuaca

SEQ ID NO: 2647226 - RNA, 14 nt, Human
agcuugaccugagg

SEQ ID NO: 2647227 - RNA, 17 nt, Human
agcuuguugacucagcu

SEQ ID NO: 2647228 - RNA, 21 nt, Human
agcuuugcaaacccauuaagg

SEQ ID NO: 2647229 - RNA, 17 nt, Human
agcuuugagaagccuuc

SEQ ID NO: 2647230 - RNA, 19 nt, Human
agcuuugagaagccuucag

SEQ ID NO: 2647231 - RNA, 11 nt, Human
agcugccagug

SEQ ID NO: 2647232 - RNA, 19 nt, Human
agcugccaucgcugugaug

SEQ ID NO: 2647233 - RNA, 19 nt, Human
agcugccaggugagaaacu

SEQ ID NO: 2647234 - RNA, 24 nt, Human
agcugcccacuguuucucuugagc

SEQ ID NO: 2647235 - RNA, 14 nt, Human
agcugccauggcua

SEQ ID NO: 2647236 - RNA, 15 nt, Human
agcugccauggcuag

SEQ ID NO: 2647237 - RNA, 16 nt, Human
agcugcagagauuucu

SEQ ID NO: 2647238 - RNA, 19 nt, Human
agcugcagagauuucucau

SEQ ID NO: 2647239 - RNA, 17 nt, Human
agcugcaauucccugga

SEQ ID NO: 2647240 - RNA, 16 nt, Human
agcugcaaaucugaug

SEQ ID NO: 2647241 - RNA, 18 nt, Human
ugccauagaguacacugc

SEQ ID NO: 2647242 - RNA, 15 nt, Human
ugccauagaguacac

SEQ ID NO: 2647243 - RNA, 14 nt, Human
ugccauagaguaca

SEQ ID NO: 2647244 - RNA, 15 nt, Human
ugccaucagugaaaa

SEQ ID NO: 2647245 - RNA, 14 nt, Human
agcucggcucagcu

SEQ ID NO: 2647246 - RNA, 15 nt, Human
agcucggggagccuu

SEQ ID NO: 2647247 - RNA, 22 nt, Human
agcucgguacccggggcccagg

SEQ ID NO: 2647248 - RNA, 15 nt, Human
agcucgguacccggg

SEQ ID NO: 2647249 - RNA, 16 nt, Human
agcucggggagccuua

SEQ ID NO: 2647250 - RNA, 21 nt, Human
agcucugaccacuugaggccu

SEQ ID NO: 2647251 - RNA, 22 nt, Human
agcucugaccacuugaggccug

SEQ ID NO: 2647252 - RNA, 13 nt, Human
agcucugaaaucu

SEQ ID NO: 2647253 - RNA, 16 nt, Human
agcucugaaaucuucc

SEQ ID NO: 2647254 - RNA, 19 nt, Human
agcuguuacugucuucagu

SEQ ID NO: 2647255 - RNA, 21 nt, Human
ugccuguguccaugcgcucag

SEQ ID NO: 2647256 - RNA, 11 nt, Human
ugccuguggcg

SEQ ID NO: 2647257 - RNA, 21 nt, Human
ugccuguggcgccgucuccag

SEQ ID NO: 2647258 - RNA, 22 nt, Human
ugccuguggcgccgucuccagg

SEQ ID NO: 2647259 - RNA, 23 nt, Human
ugccuguggcgccgucuccaggg

SEQ ID NO: 2647260 - RNA, 15 nt, Human
ugccuguguccaugc

SEQ ID NO: 2647261 - RNA, 19 nt, Human
ugccuguguccaugcgcuc

SEQ ID NO: 2647262 - RNA, 15 nt, Human
ugccuuaagugagga

SEQ ID NO: 2647263 - RNA, 22 nt, Human
ugccuuaagugaggaaaucaaa

SEQ ID NO: 2647264 - RNA, 21 nt, Human
ugccuuaagugaggaaaucaa

SEQ ID NO: 2647265 - RNA, 14 nt, Human
agcuguuacugucu

SEQ ID NO: 2647266 - RNA, 18 nt, Human
agcuguuacugucuucag

SEQ ID NO: 2647267 - RNA, 22 nt, Human
agcuguggucaaggcuacagau

SEQ ID NO: 2647268 - RNA, 15 nt, Human
agcugugcucagaag

SEQ ID NO: 2647269 - RNA, 14 nt, Human
ugccuccaggugca

SEQ ID NO: 2647270 - RNA, 15 nt, Human
ugccuccaggugcag

SEQ ID NO: 2647271 - RNA, 14 nt, Human
agcuggcucaccuu

SEQ ID NO: 2647272 - RNA, 15 nt, Human
agcuggccuggacag

SEQ ID NO: 2647273 - RNA, 16 nt, Human
agcuggccucucuagc

SEQ ID NO: 2647274 - RNA, 18 nt, Human
aggugacccugaugaaaa

SEQ ID NO: 2647275 - RNA, 16 nt, Human
aggugagaagcagagg

SEQ ID NO: 2647276 - RNA, 23 nt, Human
aggugagaagcagaggaaggaga

SEQ ID NO: 2647277 - RNA, 21 nt, Human
aggugagaagcagaggaagga

SEQ ID NO: 2647278 - RNA, 19 nt, Human
aggucuucuuaauauguuc

SEQ ID NO: 2647279 - RNA, 15 nt, Human
agguccagcucugga

SEQ ID NO: 2647280 - RNA, 16 nt, Human
agguccagcucuggag

SEQ ID NO: 2647281 - RNA, 17 nt, Human
agguccagcucuggagg

SEQ ID NO: 2647282 - RNA, 13 nt, Human
agguccagcucug

SEQ ID NO: 2647283 - RNA, 14 nt, Human
agguccagcucugg

SEQ ID NO: 2647284 - RNA, 19 nt, Human
uggugcuuccaaauauugu

SEQ ID NO: 2647285 - RNA, 23 nt, Human
uggugcuucucagauuucugagg

SEQ ID NO: 2647286 - RNA, 19 nt, Human
ugguggcaacauucauugc

SEQ ID NO: 2647287 - RNA, 16 nt, Human
uggugugaacccggga

SEQ ID NO: 2647288 - RNA, 17 nt, Human
uggugugaacccgggag

SEQ ID NO: 2647289 - RNA, 14 nt, Human
ugguuacuucuucu

SEQ ID NO: 2647290 - RNA, 15 nt, Human
ugguuacuucuucuc

SEQ ID NO: 2647291 - RNA, 18 nt, Human
ugguuacuucuucucuua

SEQ ID NO: 2647292 - RNA, 21 nt, Human
ugguuacuucuucucuuagau

SEQ ID NO: 2647293 - RNA, 22 nt, Human
aggugaguuugagcugccuucc

SEQ ID NO: 2647294 - RNA, 20 nt, Human
aggugaguuugagcugccuu

SEQ ID NO: 2647295 - RNA, 21 nt, Human
aggugaguuugagcugccuuc

SEQ ID NO: 2647296 - RNA, 19 nt, Human
aggugaguuugagcugccu

SEQ ID NO: 2647297 - RNA, 13 nt, Human
aggugagaaacug

SEQ ID NO: 2647298 - RNA, 13 nt, Human
uggugccugagag

SEQ ID NO: 2647299 - RNA, 19 nt, Human
uggugccugagaggcaggc

SEQ ID NO: 2647300 - RNA, 20 nt, Human
uggugccugagaggcaggca

SEQ ID NO: 2647301 - RNA, 14 nt, Human
uggugccugagagg

SEQ ID NO: 2647302 - RNA, 15 nt, Human
uggugccugagaggc

SEQ ID NO: 2647303 - RNA, 17 nt, Human
uggugccugagaggcag

SEQ ID NO: 2647304 - RNA, 18 nt, Human
uggugccugagaggcagg

SEQ ID NO: 2647305 - RNA, 19 nt, Human
uggugcugcugcugcugug

SEQ ID NO: 2647306 - RNA, 19 nt, Human
uguaaaguauguauuauuu

SEQ ID NO: 2647307 - RNA, 13 nt, Human
uguaaacuuuuug

SEQ ID NO: 2647308 - RNA, 15 nt, Human
uguaaauaauucuuu

SEQ ID NO: 2647309 - RNA, 14 nt, Human
uguaaauaauucuu

SEQ ID NO: 2647310 - RNA, 23 nt, Human
uguaaauaauucuuuuuuauuaa

SEQ ID NO: 2647311 - RNA, 22 nt, Human
uguaaauaauucuuuuuuauua

SEQ ID NO: 2647312 - RNA, 17 nt, Human
uguaaauaggauuuuua

SEQ ID NO: 2647313 - RNA, 18 nt, Human
uguaaauaggauuuuuag

SEQ ID NO: 2647314 - RNA, 18 nt, Human
ugguuauacaaguucuug

SEQ ID NO: 2647315 - RNA, 14 nt, Human
ugguuauggagagg

SEQ ID NO: 2647316 - RNA, 22 nt, Human
ugguuuccuccauuugagaaaa

SEQ ID NO: 2647317 - RNA, 18 nt, Human
aggugggggcggggagua

SEQ ID NO: 2647318 - RNA, 14 nt, Human
agguuuaagcuguu

SEQ ID NO: 2647319 - RNA, 15 nt, Human
agguucuucagaagu

SEQ ID NO: 2647320 - RNA, 19 nt, Human
agguucuccguuagcuccu

SEQ ID NO: 2647321 - RNA, 20 nt, Human
agguucuccguuagcuccug

SEQ ID NO: 2647322 - RNA, 21 nt, Human
agguucuccguuagcuccugu

SEQ ID NO: 2647323 - RNA, 22 nt, Human
agguucuccguuagcuccugug

SEQ ID NO: 2647324 - RNA, 20 nt, Human
agguguggagccgaggccua

SEQ ID NO: 2647325 - RNA, 21 nt, Human
aggugcccagaauaaguuauu

SEQ ID NO: 2647326 - RNA, 23 nt, Human
aggugccacuuuacccaccuaga

SEQ ID NO: 2647327 - RNA, 15 nt, Human
uguaaauaauuuauu

SEQ ID NO: 2647328 - RNA, 16 nt, Human
uguaugucagaagugc

SEQ ID NO: 2647329 - RNA, 11 nt, Human
uguauguguuu

SEQ ID NO: 2647330 - RNA, 14 nt, Human
uguauguguuuaga

SEQ ID NO: 2647331 - RNA, 12 nt, Human
uguauguguuua

SEQ ID NO: 2647332 - RNA, 20 nt, Human
uguauguguuuagaauugaa

SEQ ID NO: 2647333 - RNA, 19 nt, Human
uguauguguuuagaauuga

SEQ ID NO: 2647334 - RNA, 16 nt, Human
uguauguguuuagaau

SEQ ID NO: 2647335 - RNA, 15 nt, Human
uguauguguuuagaa

SEQ ID NO: 2647336 - RNA, 15 nt, Human
uguauguguguuuuu

SEQ ID NO: 2647337 - RNA, 15 nt, Human
uguauguuaaagaga

SEQ ID NO: 2647338 - RNA, 22 nt, Human
uguauguuaaagagaaugaguc

SEQ ID NO: 2647339 - RNA, 13 nt, Human
uguauguuucucu

SEQ ID NO: 2647340 - RNA, 22 nt, Human
ugucaaaaguagaacuuuguau

SEQ ID NO: 2647341 - RNA, 21 nt, Human
ugucaaaaguagaacuuugua

SEQ ID NO: 2647342 - RNA, 20 nt, Human
ugucaaaaguagaacuuugu

SEQ ID NO: 2647343 - RNA, 17 nt, Human
ugucaaaaguagaacuu

SEQ ID NO: 2647344 - RNA, 12 nt, Human
ugucaaaaguag

SEQ ID NO: 2647345 - RNA, 21 nt, Human
uguauuuuuuuuucuaagaga

SEQ ID NO: 2647346 - RNA, 22 nt, Human
uguauuuuuuuuucuaagagaa

SEQ ID NO: 2647347 - RNA, 13 nt, Human
agucaccucuguc

SEQ ID NO: 2647348 - RNA, 18 nt, Human
agucacacauuacaaagu

SEQ ID NO: 2647349 - RNA, 12 nt, Human
aguauucuucuc

SEQ ID NO: 2647350 - RNA, 14 nt, Human
aguauucuucucuu

SEQ ID NO: 2647351 - RNA, 21 nt, Human
uguagaaaugaugauguggaa

SEQ ID NO: 2647352 - RNA, 20 nt, Human
uguagaaaagaacuggaaac

SEQ ID NO: 2647353 - RNA, 17 nt, Human
agguuuuauaaggcuga

SEQ ID NO: 2647354 - RNA, 22 nt, Human
agguuuacaauaggagugguga

SEQ ID NO: 2647355 - RNA, 20 nt, Human
agguuuuauuucauuuuuca

SEQ ID NO: 2647356 - RNA, 23 nt, Human
agguuuuugauagcauuguaagc

SEQ ID NO: 2647357 - RNA, 23 nt, Human
aguagaccuuguuacuucugagg

SEQ ID NO: 2647358 - RNA, 20 nt, Human
aguagaccuuguuacuucug

SEQ ID NO: 2647359 - RNA, 21 nt, Human
aguagaccuuguuacuucuga

SEQ ID NO: 2647360 - RNA, 17 nt, Human
uguaggcuuaguuugug

SEQ ID NO: 2647361 - RNA, 17 nt, Human
uguaggcaucaugcaug

SEQ ID NO: 2647362 - RNA, 18 nt, Human
uguaggcaucaugcaugu

SEQ ID NO: 2647363 - RNA, 22 nt, Human
aguacccaccaccuucuucucc

SEQ ID NO: 2647364 - RNA, 19 nt, Human
aguacccugguuguguguc

SEQ ID NO: 2647365 - RNA, 18 nt, Human
aguacccugguugugugu

SEQ ID NO: 2647366 - RNA, 12 nt, Human
aguacccugguu

SEQ ID NO: 2647367 - RNA, 19 nt, Human
agggcaccagggguuucuc

SEQ ID NO: 2647368 - RNA, 21 nt, Human
agggcaccagggguuucucgc

SEQ ID NO: 2647369 - RNA, 12 nt, Human
agggcagcugcu

SEQ ID NO: 2647370 - RNA, 13 nt, Human
agggcagcugcua

SEQ ID NO: 2647371 - RNA, 14 nt, Human
agggcaccaggggu

SEQ ID NO: 2647372 - RNA, 23 nt, Human
agggccacugguccccaacaaug

SEQ ID NO: 2647373 - RNA, 19 nt, Human
agggccaugcugaggccug

SEQ ID NO: 2647374 - RNA, 20 nt, Human
agggccaugcugaggccugg

SEQ ID NO: 2647375 - RNA, 21 nt, Human
agggccaugcugaggccuggg

SEQ ID NO: 2647376 - RNA, 22 nt, Human
agggccaugcugaggccugggc

SEQ ID NO: 2647377 - RNA, 23 nt, Human
agggccaugcugaggccugggcc

SEQ ID NO: 2647378 - RNA, 14 nt, Human
agggccauggcuca

SEQ ID NO: 2647379 - RNA, 16 nt, Human
agggccauggcucagg

SEQ ID NO: 2647380 - RNA, 21 nt, Human
agggccauggcucaggguggu

SEQ ID NO: 2647381 - RNA, 19 nt, Human
agggccgacuaagagaagu

SEQ ID NO: 2647382 - RNA, 22 nt, Human
agggccgaccagaggagccuuu

SEQ ID NO: 2647383 - RNA, 20 nt, Human
ugggaggccaaggugggagg

SEQ ID NO: 2647384 - RNA, 19 nt, Human
ugggaggccaaggugggag

SEQ ID NO: 2647385 - RNA, 22 nt, Human
ugggaggaucucuugagccugg

SEQ ID NO: 2647386 - RNA, 21 nt, Human
ugggaggaucucuugagccug

SEQ ID NO: 2647387 - RNA, 20 nt, Human
ugggaggaucucuugagccu

SEQ ID NO: 2647388 - RNA, 12 nt, Human
ugggccccagcu

SEQ ID NO: 2647389 - RNA, 20 nt, Human
ugggccagucuguggaucag

SEQ ID NO: 2647390 - RNA, 16 nt, Human
ugggccagucugugga

SEQ ID NO: 2647391 - RNA, 14 nt, Human
ugggccauguccaa

SEQ ID NO: 2647392 - RNA, 17 nt, Human
ugggccauguccaaaga

SEQ ID NO: 2647393 - RNA, 18 nt, Human
ugggccauguccaaagag

SEQ ID NO: 2647394 - RNA, 19 nt, Human
ugggccauguccaaagagg

SEQ ID NO: 2647395 - RNA, 23 nt, Human
ugggccauguccaaagaggcugc

SEQ ID NO: 2647396 - RNA, 11 nt, Human
agggaggcccc

SEQ ID NO: 2647397 - RNA, 15 nt, Human
agggaggccccaggg

SEQ ID NO: 2647398 - RNA, 16 nt, Human
agggaggccccagggg

SEQ ID NO: 2647399 - RNA, 18 nt, Human
agggaggcgggggcugcc

SEQ ID NO: 2647400 - RNA, 20 nt, Human
agggaggcgggggcugcccu

SEQ ID NO: 2647401 - RNA, 12 nt, Human
agggaagaaacu

SEQ ID NO: 2647402 - RNA, 13 nt, Human
agggaagaaacug

SEQ ID NO: 2647403 - RNA, 14 nt, Human
agggaagaacuauu

SEQ ID NO: 2647404 - RNA, 15 nt, Human
agggaagaacuauug

SEQ ID NO: 2647405 - RNA, 13 nt, Human
agggaacugggga

SEQ ID NO: 2647406 - RNA, 14 nt, Human
agggaaccuguguc

SEQ ID NO: 2647407 - RNA, 20 nt, Human
agggaacaaguugagcuaug

SEQ ID NO: 2647408 - RNA, 21 nt, Human
agggaacaaguugagcuauga

SEQ ID NO: 2647409 - RNA, 21 nt, Human
aggcccuccucucccauccuu

SEQ ID NO: 2647410 - RNA, 23 nt, Human
aggcccuccucucccauccuuga

SEQ ID NO: 2647411 - RNA, 15 nt, Human
agggacacacagccu

SEQ ID NO: 2647412 - RNA, 17 nt, Human
agggacacacagccuag

SEQ ID NO: 2647413 - RNA, 18 nt, Human
agggacacacagccuagc

SEQ ID NO: 2647414 - RNA, 19 nt, Human
agggacacacagccuagca

SEQ ID NO: 2647415 - RNA, 17 nt, Human
agggaaggguuucucua

SEQ ID NO: 2647416 - RNA, 15 nt, Human
agggaauccaagccu

SEQ ID NO: 2647417 - RNA, 16 nt, Human
agggaauccaagccuc

SEQ ID NO: 2647418 - RNA, 19 nt, Human
agggaauccaagccuccac

SEQ ID NO: 2647419 - RNA, 22 nt, Human
agggaauccaagccuccacagc

SEQ ID NO: 2647420 - RNA, 13 nt, Human
agggagagggagg

SEQ ID NO: 2647421 - RNA, 14 nt, Human
agggagagggaggu

SEQ ID NO: 2647422 - RNA, 14 nt, Human
agggagcugggccc

SEQ ID NO: 2647423 - RNA, 15 nt, Human
agggagcugggcccg

SEQ ID NO: 2647424 - RNA, 16 nt, Human
agggagcugggcccga

SEQ ID NO: 2647425 - RNA, 23 nt, Human
agggagagagagagagagaggac

SEQ ID NO: 2647426 - RNA, 22 nt, Human
agggagagagagagagagagga

SEQ ID NO: 2647427 - RNA, 18 nt, Human
ugggaggaucucuugagc

SEQ ID NO: 2647428 - RNA, 16 nt, Human
ugggagagccauacau

SEQ ID NO: 2647429 - RNA, 17 nt, Human
ugggacugcuaaauaaa

SEQ ID NO: 2647430 - RNA, 18 nt, Human
ugggacugcuaaauaaaa

SEQ ID NO: 2647431 - RNA, 17 nt, Human
ugggacucagccuucag

SEQ ID NO: 2647432 - RNA, 23 nt, Human
ugggacucagccuucagacagag

SEQ ID NO: 2647433 - RNA, 18 nt, Human
ugggacucguggcuguca

SEQ ID NO: 2647434 - RNA, 13 nt, Human
ugggacucagccu

SEQ ID NO: 2647435 - RNA, 14 nt, Human
uggggcugcuguga

SEQ ID NO: 2647436 - RNA, 23 nt, Human
uggggucucaaaguuugacagga

SEQ ID NO: 2647437 - RNA, 17 nt, Human
aggggaaggagaaguaa

SEQ ID NO: 2647438 - RNA, 13 nt, Human
aggggaagaauga

SEQ ID NO: 2647439 - RNA, 15 nt, Human
aggggaagaaugaaa

SEQ ID NO: 2647440 - RNA, 22 nt, Human
aggggaaaaucagccugcucca

SEQ ID NO: 2647441 - RNA, 18 nt, Human
aggggaaaaucagccugc

SEQ ID NO: 2647442 - RNA, 13 nt, Human
uggggugcuggga

SEQ ID NO: 2647443 - RNA, 18 nt, Human
uggggugcugggaggagg

SEQ ID NO: 2647444 - RNA, 18 nt, Human
uggggagggauucugguu

SEQ ID NO: 2647445 - RNA, 17 nt, Human
uggggccugaggucauc

SEQ ID NO: 2647446 - RNA, 20 nt, Human
uggggccuccagaacucacu

SEQ ID NO: 2647447 - RNA, 14 nt, Human
uggggccuccagaa

SEQ ID NO: 2647448 - RNA, 21 nt, Human
uggggccuagcgaucucuccu

SEQ ID NO: 2647449 - RNA, 22 nt, Human
uggggccuagcgaucucuccug

SEQ ID NO: 2647450 - RNA, 12 nt, Human
uggggcccagug

SEQ ID NO: 2647451 - RNA, 13 nt, Human
uggggcccagugc

SEQ ID NO: 2647452 - RNA, 14 nt, Human
uggggcccagugca

SEQ ID NO: 2647453 - RNA, 19 nt, Human
uggggcccagugcauggug

SEQ ID NO: 2647454 - RNA, 22 nt, Human
uggggcccagugcaugguggcc

SEQ ID NO: 2647455 - RNA, 22 nt, Human
uggggagggauucugguuccag

SEQ ID NO: 2647456 - RNA, 17 nt, Human
uggggcucacacaccug

SEQ ID NO: 2647457 - RNA, 21 nt, Human
aggggcugcuuccuccuggaa

SEQ ID NO: 2647458 - RNA, 16 nt, Human
agggggcaagaggaau

SEQ ID NO: 2647459 - RNA, 15 nt, Human
aggggcugcuuccuc

SEQ ID NO: 2647460 - RNA, 16 nt, Human
aggggcugcuuccucc

SEQ ID NO: 2647461 - RNA, 18 nt, Human
aggggcugcuuccuccug

SEQ ID NO: 2647462 - RNA, 20 nt, Human
aggggcugcuuccuccugga

SEQ ID NO: 2647463 - RNA, 22 nt, Human
aggguaaauaaaccacugugcg

SEQ ID NO: 2647464 - RNA, 21 nt, Human
agggguaucauguauggugau

SEQ ID NO: 2647465 - RNA, 15 nt, Human
uggguccuuccugaa

SEQ ID NO: 2647466 - RNA, 17 nt, Human
agggugggggagggagg

SEQ ID NO: 2647467 - RNA, 18 nt, Human
agggugggggagggaggu

SEQ ID NO: 2647468 - RNA, 23 nt, Human
aggguggucucuucuuggggccc

SEQ ID NO: 2647469 - RNA, 21 nt, Human
uggguggcaccagcagccugg

SEQ ID NO: 2647470 - RNA, 17 nt, Human
ugguaaagacuggcuuu

SEQ ID NO: 2647471 - RNA, 20 nt, Human
uggguggcaccagcagccug

SEQ ID NO: 2647472 - RNA, 17 nt, Human
uggguggcaccagcagc

SEQ ID NO: 2647473 - RNA, 13 nt, Human
ugguaaauguuuc

SEQ ID NO: 2647474 - RNA, 14 nt, Human
ugguaaauguuucu

SEQ ID NO: 2647475 - RNA, 15 nt, Human
ugguaaauguuucuu

SEQ ID NO: 2647476 - RNA, 20 nt, Human
ugguagagugugccugaagu

SEQ ID NO: 2647477 - RNA, 12 nt, Human
ugguagaaacaa

SEQ ID NO: 2647478 - RNA, 19 nt, Human
ugguagaaguuuggcugcu

SEQ ID NO: 2647479 - RNA, 20 nt, Human
uggucacguuuggugcuucu

SEQ ID NO: 2647480 - RNA, 21 nt, Human
ugguaccaaucaugaaucuuu

SEQ ID NO: 2647481 - RNA, 17 nt, Human
aguucugagcugccagu

SEQ ID NO: 2647482 - RNA, 15 nt, Human
uguuuugcaagugcu

SEQ ID NO: 2647483 - RNA, 20 nt, Human
uguuuugccaaagacuguaa

SEQ ID NO: 2647484 - RNA, 18 nt, Human
aguucugagcugccagug

SEQ ID NO: 2647485 - RNA, 11 nt, Human
uguuuugcaag

SEQ ID NO: 2647486 - RNA, 17 nt, Human
uguuuucugacuaauua

SEQ ID NO: 2647487 - RNA, 16 nt, Human
uguuuucugacuaauu

SEQ ID NO: 2647488 - RNA, 17 nt, Human
uguuuucuuuugguaaa

SEQ ID NO: 2647489 - RNA, 18 nt, Human
uguuugagauucucaaag

SEQ ID NO: 2647490 - RNA, 19 nt, Human
uguuugaaaauaguuuauu

SEQ ID NO: 2647491 - RNA, 18 nt, Human
uguuugaaaauaguuuau

SEQ ID NO: 2647492 - RNA, 17 nt, Human
uguuugaaaauaguuua

SEQ ID NO: 2647493 - RNA, 16 nt, Human
uguuugaaaauaguuu

SEQ ID NO: 2647494 - RNA, 15 nt, Human
uguuucuuuuguuug

SEQ ID NO: 2647495 - RNA, 18 nt, Human
uguuucuuuuguuuggua

SEQ ID NO: 2647496 - RNA, 21 nt, Human
uguuucuuuuguuugguaaau

SEQ ID NO: 2647497 - RNA, 19 nt, Human
uguuugaaaacuucagaag

SEQ ID NO: 2647498 - RNA, 19 nt, Human
uguugcucaaaaaaugagc

SEQ ID NO: 2647499 - RNA, 23 nt, Human
uguugcucaguguuuuugugaau

SEQ ID NO: 2647500 - RNA, 22 nt, Human
uguuuauaaaauauaaacaaag

SEQ ID NO: 2647501 - RNA, 22 nt, Human
uguuuauaucugcaaaaaaccu

SEQ ID NO: 2647502 - RNA, 19 nt, Human
uguuuauaaaucuuaugcu

SEQ ID NO: 2647503 - RNA, 17 nt, Human
uguuuagugauauuaca

SEQ ID NO: 2647504 - RNA, 23 nt, Human
uguuuauaaaauauaaacaaaga

SEQ ID NO: 2647505 - RNA, 16 nt, Human
uguuuauaauaaaaau

SEQ ID NO: 2647506 - RNA, 18 nt, Human
uguuuauguuguuuauaa

SEQ ID NO: 2647507 - RNA, 22 nt, Human
uguuuauguuguuuauaauaaa

SEQ ID NO: 2647508 - RNA, 13 nt, Human
uguuuauuuacaa

SEQ ID NO: 2647509 - RNA, 14 nt, Human
uguuuauuuacaag

SEQ ID NO: 2647510 - RNA, 23 nt, Human
uuaaaauuaucaauaucuaauau

SEQ ID NO: 2647511 - RNA, 16 nt, Human
uuaaaaagaaugacgu

SEQ ID NO: 2647512 - RNA, 18 nt, Human
uuaaaaagggaagaaacu

SEQ ID NO: 2647513 - RNA, 21 nt, Human
uuaaaaagggaagaaacugcu

SEQ ID NO: 2647514 - RNA, 18 nt, Human
uuaaaaacugaaaaaucu

SEQ ID NO: 2647515 - RNA, 18 nt, Human
uuaaaaaccgaauaaaug

SEQ ID NO: 2647516 - RNA, 19 nt, Human
uuaaaaacauaacauaaau

SEQ ID NO: 2647517 - RNA, 16 nt, Human
uuaaaauuuuguaugu

SEQ ID NO: 2647518 - RNA, 13 nt, Human
uuaaaauucaugu

SEQ ID NO: 2647519 - RNA, 14 nt, Human
uuaaauuucuuaug

SEQ ID NO: 2647520 - RNA, 17 nt, Human
uuaaauuucuuauguga

SEQ ID NO: 2647521 - RNA, 18 nt, Human
uuaaauuucuuaugugac

SEQ ID NO: 2647522 - RNA, 19 nt, Human
uuaaauuucuuaugugaca

SEQ ID NO: 2647523 - RNA, 22 nt, Human
uuaaauuucuuaugugacauua

SEQ ID NO: 2647524 - RNA, 15 nt, Human
uuaaauuuaauacca

SEQ ID NO: 2647525 - RNA, 15 nt, Human
uuaacaguuguauuu

SEQ ID NO: 2647526 - RNA, 13 nt, Human
uuaacaguuguau

SEQ ID NO: 2647527 - RNA, 14 nt, Human
aguucuuaguuaua

SEQ ID NO: 2647528 - RNA, 23 nt, Human
aguugcacuuauugaccauuuuu

SEQ ID NO: 2647529 - RNA, 17 nt, Human
aguucuuaugaggaggg

SEQ ID NO: 2647530 - RNA, 20 nt, Human
aguucuuaugaggaggggag

SEQ ID NO: 2647531 - RNA, 21 nt, Human
aguucuuaugaggaggggagg

SEQ ID NO: 2647532 - RNA, 14 nt, Human
aguugcucuaugcu

SEQ ID NO: 2647533 - RNA, 13 nt, Human
aguugcuauuuuu

SEQ ID NO: 2647534 - RNA, 15 nt, Human
aguugcuauuuuugu

SEQ ID NO: 2647535 - RNA, 19 nt, Human
aguugcuauuuuuguaaag

SEQ ID NO: 2647536 - RNA, 23 nt, Human
aguugcuauuuuuguaaaguuuc

SEQ ID NO: 2647537 - RNA, 17 nt, Human
aguugcucuaugcuuuc

SEQ ID NO: 2647538 - RNA, 16 nt, Human
aguugcucuaugcuuu

SEQ ID NO: 2647539 - RNA, 21 nt, Human
aguugcucuaugcuuuccaaa

SEQ ID NO: 2647540 - RNA, 16 nt, Human
aguuggccagagagcc

SEQ ID NO: 2647541 - RNA, 18 nt, Human
aguuguuuuuguauauug

SEQ ID NO: 2647542 - RNA, 17 nt, Human
aguuguuuuuguauauu

SEQ ID NO: 2647543 - RNA, 16 nt, Human
aguuguuuuuguauau

SEQ ID NO: 2647544 - RNA, 15 nt, Human
aguuguuuuuguaua

SEQ ID NO: 2647545 - RNA, 22 nt, Human
aguuguuuuuguauauugguuu

SEQ ID NO: 2647546 - RNA, 20 nt, Human
aguuguuuuuguauauuggu

SEQ ID NO: 2647547 - RNA, 19 nt, Human
aguuguuuuuguauauugg

SEQ ID NO: 2647548 - RNA, 15 nt, Human
aguugggugucuccu

SEQ ID NO: 2647549 - RNA, 16 nt, Human
aguugggugucuccuu

SEQ ID NO: 2647550 - RNA, 12 nt, Human
aguuguaaagua

SEQ ID NO: 2647551 - RNA, 13 nt, Human
aguuguaaaguau

SEQ ID NO: 2647552 - RNA, 18 nt, Human
aguuguaaaguauguauu

SEQ ID NO: 2647553 - RNA, 18 nt, Human
aguuguaaauaauuuauu

SEQ ID NO: 2647554 - RNA, 22 nt, Human
aguuguaaauaauuuauuuaau

SEQ ID NO: 2647555 - RNA, 16 nt, Human
aguuguaccaagugaa

SEQ ID NO: 2647556 - RNA, 17 nt, Human
auaaauguauaaauaua

SEQ ID NO: 2647557 - RNA, 19 nt, Human
auaaauguauaaauauaca

SEQ ID NO: 2647558 - RNA, 20 nt, Human
auaaauguauaaauauacag

SEQ ID NO: 2647559 - RNA, 11 nt, Human
auaaaugaaug

SEQ ID NO: 2647560 - RNA, 19 nt, Human
uuacagcucauuaaacuuu

SEQ ID NO: 2647561 - RNA, 16 nt, Human
auaaagugcuuuaaaa

SEQ ID NO: 2647562 - RNA, 22 nt, Human
auaaaguggaaguauguauauu

SEQ ID NO: 2647563 - RNA, 20 nt, Human
auaaacaccacuggauuaau

SEQ ID NO: 2647564 - RNA, 18 nt, Human
auaaacaccacuggauua

SEQ ID NO: 2647565 - RNA, 19 nt, Human
auaaaguuugcuuagaaaa

SEQ ID NO: 2647566 - RNA, 12 nt, Human
auaaaguuugcu

SEQ ID NO: 2647567 - RNA, 12 nt, Human
auaaauaauuuu

SEQ ID NO: 2647568 - RNA, 21 nt, Human
auaaauagaugcuguguauau

SEQ ID NO: 2647569 - RNA, 22 nt, Human
auaaauaugguuaauuucaugu

SEQ ID NO: 2647570 - RNA, 14 nt, Human
uuacugacauuucu

SEQ ID NO: 2647571 - RNA, 15 nt, Human
uuaccuguauacagu

SEQ ID NO: 2647572 - RNA, 18 nt, Human
uuaccuguauacagugca

SEQ ID NO: 2647573 - RNA, 19 nt, Human
uuaccuguauacagugcag

SEQ ID NO: 2647574 - RNA, 19 nt, Human
uuacaguccaaaauacugu

SEQ ID NO: 2647575 - RNA, 23 nt, Human
uuagaagcacuacaccuugccuu

SEQ ID NO: 2647576 - RNA, 17 nt, Human
uuagaauugaagguuuu

SEQ ID NO: 2647577 - RNA, 16 nt, Human
uuagaauugaagguuu

SEQ ID NO: 2647578 - RNA, 14 nt, Human
uuagaauugaaggu

SEQ ID NO: 2647579 - RNA, 13 nt, Human
uuagaauugaagg

SEQ ID NO: 2647580 - RNA, 15 nt, Human
uuagaacagguuuuu

SEQ ID NO: 2647581 - RNA, 18 nt, Human
uuagaauugaagguuuuu

SEQ ID NO: 2647582 - RNA, 16 nt, Human
uuagacaagagauggg

SEQ ID NO: 2647583 - RNA, 13 nt, Human
uuacugguugcau

SEQ ID NO: 2647584 - RNA, 14 nt, Human
uuacugguugcaug

SEQ ID NO: 2647585 - RNA, 15 nt, Human
uuacugguugcaugg

SEQ ID NO: 2647586 - RNA, 18 nt, Human
uuacugguugcauggaaa

SEQ ID NO: 2647587 - RNA, 19 nt, Human
uuacugguugcauggaaau

SEQ ID NO: 2647588 - RNA, 14 nt, Human
uuacugggcccuga

SEQ ID NO: 2647589 - RNA, 22 nt, Human
uuacuggggcuggggaaggaag

SEQ ID NO: 2647590 - RNA, 23 nt, Human
uuacuggggcuggggaaggaagc

SEQ ID NO: 2647591 - RNA, 16 nt, Human
auaaacaaagauucau

SEQ ID NO: 2647592 - RNA, 16 nt, Human
auaaaauuuguugcau

SEQ ID NO: 2647593 - RNA, 13 nt, Human
auaaaauuuguug

SEQ ID NO: 2647594 - RNA, 12 nt, Human
auaaaauuuaaa

SEQ ID NO: 2647595 - RNA, 20 nt, Human
auaaaauuuaaaaaauaaau

SEQ ID NO: 2647596 - RNA, 23 nt, Human
uuaauuuaaguuuugacaagcug

SEQ ID NO: 2647597 - RNA, 22 nt, Human
uuacaaaaacaaaauaaaauaa

SEQ ID NO: 2647598 - RNA, 13 nt, Human
uuaauuuaaguuu

SEQ ID NO: 2647599 - RNA, 16 nt, Human
uuaauuuaaguuuuga

SEQ ID NO: 2647600 - RNA, 15 nt, Human
uuaauuuaaguuuug

SEQ ID NO: 2647601 - RNA, 12 nt, Human
uuaauuguuuaa

SEQ ID NO: 2647602 - RNA, 13 nt, Human
uuaauuguuuaaa

SEQ ID NO: 2647603 - RNA, 12 nt, Human
uuaaguucuuau

SEQ ID NO: 2647604 - RNA, 16 nt, Human
auaaaauggcuguaau

SEQ ID NO: 2647605 - RNA, 23 nt, Human
uuaagugaggaaaucaaagugcu

SEQ ID NO: 2647606 - RNA, 20 nt, Human
uuaagugaggaaaucaaagu

SEQ ID NO: 2647607 - RNA, 19 nt, Human
uuaagugaggaaaucaaag

SEQ ID NO: 2647608 - RNA, 17 nt, Human
uuaagugaggaaaucaa

SEQ ID NO: 2647609 - RNA, 16 nt, Human
uuaagugaggaaauca

SEQ ID NO: 2647610 - RNA, 13 nt, Human
auaaaaugaaaau

SEQ ID NO: 2647611 - RNA, 16 nt, Human
auaaaaugaaaauugu

SEQ ID NO: 2647612 - RNA, 17 nt, Human
auaaaaugaaaauugua

SEQ ID NO: 2647613 - RNA, 18 nt, Human
auaaaaugaaaauuguau

SEQ ID NO: 2647614 - RNA, 19 nt, Human
auaaaaugaaaauuguauu

SEQ ID NO: 2647615 - RNA, 14 nt, Human
auaaaauccugugc

SEQ ID NO: 2647616 - RNA, 16 nt, Human
auaaaauccugugcaa

SEQ ID NO: 2647617 - RNA, 17 nt, Human
auaaaauguaauuacuu

SEQ ID NO: 2647618 - RNA, 23 nt, Human
auaaaauguccaguaagaucacu

SEQ ID NO: 2647619 - RNA, 21 nt, Human
auaaaauguccaguaagauca

SEQ ID NO: 2647620 - RNA, 19 nt, Human
auaaaauguccaguaagau

SEQ ID NO: 2647621 - RNA, 23 nt, Human
ugucagacagaacuugaaugugu

SEQ ID NO: 2647622 - RNA, 21 nt, Human
ugucuugggcagagcuggcuc

SEQ ID NO: 2647623 - RNA, 22 nt, Human
ugucuugggcagagcuggcucu

SEQ ID NO: 2647624 - RNA, 12 nt, Human
ugucuugggcag

SEQ ID NO: 2647625 - RNA, 13 nt, Human
ugucuugggcaga

SEQ ID NO: 2647626 - RNA, 16 nt, Human
ugucuugggcagagcu

SEQ ID NO: 2647627 - RNA, 21 nt, Human
ugucagacagaacuugaaugu

SEQ ID NO: 2647628 - RNA, 12 nt, Human
ugucagaagugc

SEQ ID NO: 2647629 - RNA, 17 nt, Human
ugucagaagugcagaau

SEQ ID NO: 2647630 - RNA, 12 nt, Human
ugucacuuuuua

SEQ ID NO: 2647631 - RNA, 16 nt, Human
ugucacuuuuuaugcu

SEQ ID NO: 2647632 - RNA, 13 nt, Human
ugugaaauugcau

SEQ ID NO: 2647633 - RNA, 18 nt, Human
ugugaaauugcauacuuu

SEQ ID NO: 2647634 - RNA, 11 nt, Human
ugugacccucc

SEQ ID NO: 2647635 - RNA, 13 nt, Human
ugugacccuccaa

SEQ ID NO: 2647636 - RNA, 15 nt, Human
ugugacccuccaaau

SEQ ID NO: 2647637 - RNA, 17 nt, Human
ugugacccuccaaaugg

SEQ ID NO: 2647638 - RNA, 18 nt, Human
ugugaacuuggaagcaca

SEQ ID NO: 2647639 - RNA, 15 nt, Human
ugugaacuuggaagc

SEQ ID NO: 2647640 - RNA, 23 nt, Human
ugugaacaagcuucaguaaguua

SEQ ID NO: 2647641 - RNA, 15 nt, Human
ugugaacagagagac

SEQ ID NO: 2647642 - RNA, 23 nt, Human
ugugaacagagagacccuugugg

SEQ ID NO: 2647643 - RNA, 13 nt, Human
ugugagagaaagu

SEQ ID NO: 2647644 - RNA, 15 nt, Human
agucuuucauggcug

SEQ ID NO: 2647645 - RNA, 17 nt, Human
agucuuucauggcugcu

SEQ ID NO: 2647646 - RNA, 12 nt, Human
agugaaacuuuu

SEQ ID NO: 2647647 - RNA, 15 nt, Human
agugaaacuuuucua

SEQ ID NO: 2647648 - RNA, 17 nt, Human
agucuuugccagucauu

SEQ ID NO: 2647649 - RNA, 22 nt, Human
agucuuugccagucauucagca

SEQ ID NO: 2647650 - RNA, 17 nt, Human
agugaaauuauuuugga

SEQ ID NO: 2647651 - RNA, 12 nt, Human
ugugccaucugu

SEQ ID NO: 2647652 - RNA, 13 nt, Human
ugugccaucugua

SEQ ID NO: 2647653 - RNA, 14 nt, Human
ugugauuucuuuaa

SEQ ID NO: 2647654 - RNA, 19 nt, Human
ugugauuucuuuaaaagaa

SEQ ID NO: 2647655 - RNA, 21 nt, Human
ugugauuucuuuaaaagaaug

SEQ ID NO: 2647656 - RNA, 22 nt, Human
ugugauuucuuuaaaagaauga

SEQ ID NO: 2647657 - RNA, 17 nt, Human
ugugccaccaugccuca

SEQ ID NO: 2647658 - RNA, 20 nt, Human
ugugccagaggaauccuggc

SEQ ID NO: 2647659 - RNA, 21 nt, Human
ugugccagaggaauccuggca

SEQ ID NO: 2647660 - RNA, 22 nt, Human
ugugccagaggaauccuggcag

SEQ ID NO: 2647661 - RNA, 23 nt, Human
ugugccagaggaauccuggcagc

SEQ ID NO: 2647662 - RNA, 21 nt, Human
ugugccacuaaacuacauugu

SEQ ID NO: 2647663 - RNA, 21 nt, Human
ugugcugggagcuccacucug

SEQ ID NO: 2647664 - RNA, 11 nt, Human
uguggcagugg

SEQ ID NO: 2647665 - RNA, 12 nt, Human
uguggcaguggu

SEQ ID NO: 2647666 - RNA, 15 nt, Human
uguggcagugguuuu

SEQ ID NO: 2647667 - RNA, 16 nt, Human
uguggcagugguuuug

SEQ ID NO: 2647668 - RNA, 23 nt, Human
uguggcauaaauugcaucacugu

SEQ ID NO: 2647669 - RNA, 21 nt, Human
ugugcccagaauacugaugga

SEQ ID NO: 2647670 - RNA, 18 nt, Human
ugugcccagaauacugau

SEQ ID NO: 2647671 - RNA, 17 nt, Human
ugugcccagaauacuga

SEQ ID NO: 2647672 - RNA, 10 nt, Human
ugugcuggga

SEQ ID NO: 2647673 - RNA, 12 nt, Human
ugugcugggagc

SEQ ID NO: 2647674 - RNA, 17 nt, Human
ugugcugggagcuccac

SEQ ID NO: 2647675 - RNA, 12 nt, Human
uguggccaggcu

SEQ ID NO: 2647676 - RNA, 20 nt, Human
ugugucuuuggaggugcugc

SEQ ID NO: 2647677 - RNA, 18 nt, Human
uguguucucggagugugu

SEQ ID NO: 2647678 - RNA, 14 nt, Human
uguuaaaugaaacc

SEQ ID NO: 2647679 - RNA, 16 nt, Human
uguuaauuuaaguuuu

SEQ ID NO: 2647680 - RNA, 15 nt, Human
uguuaauuuaaguuu

SEQ ID NO: 2647681 - RNA, 16 nt, Human
uguucccacaccccaa

SEQ ID NO: 2647682 - RNA, 21 nt, Human
uguucuggggggacccagugc

SEQ ID NO: 2647683 - RNA, 22 nt, Human
uguucuggggggacccagugca

SEQ ID NO: 2647684 - RNA, 23 nt, Human
uguucuggggggacccagugcag

SEQ ID NO: 2647685 - RNA, 19 nt, Human
uguucugugguuccucugc

SEQ ID NO: 2647686 - RNA, 23 nt, Human
uguucugugguuccucugcucac

SEQ ID NO: 2647687 - RNA, 15 nt, Human
uguugcaagauguga

SEQ ID NO: 2647688 - RNA, 16 nt, Human
uguugcaagaugugaa

SEQ ID NO: 2647689 - RNA, 17 nt, Human
uguugcaagaugugaau

SEQ ID NO: 2647690 - RNA, 18 nt, Human
uguugcaagaugugaauu

SEQ ID NO: 2647691 - RNA, 19 nt, Human
uguugcaagaugugaauua

SEQ ID NO: 2647692 - RNA, 23 nt, Human
uguugcaagaugugaauuauuga

SEQ ID NO: 2647693 - RNA, 22 nt, Human
uguugauuuuuacuguguuuua

SEQ ID NO: 2647694 - RNA, 18 nt, Human
uguugauuuuuacugugu

SEQ ID NO: 2647695 - RNA, 20 nt, Human
uguugauuuuuacuguguuu

SEQ ID NO: 2647696 - RNA, 22 nt, Human
aguguagaaaagaacuggaaac

SEQ ID NO: 2647697 - RNA, 14 nt, Human
aguguaaaauauuu

SEQ ID NO: 2647698 - RNA, 18 nt, Human
aguguaaaauauuuugaa

SEQ ID NO: 2647699 - RNA, 21 nt, Human
aguguaaaauauuuugaauca

SEQ ID NO: 2647700 - RNA, 20 nt, Human
aguggaaguauguauauuaa

SEQ ID NO: 2647701 - RNA, 21 nt, Human
aguggaaguauguauauuaaa

SEQ ID NO: 2647702 - RNA, 22 nt, Human
aguggaaguauguauauuaaaa

SEQ ID NO: 2647703 - RNA, 14 nt, Human
aguggugggggaag

SEQ ID NO: 2647704 - RNA, 16 nt, Human
aguggugggggaaggc

SEQ ID NO: 2647705 - RNA, 21 nt, Human
auauuguugacaacugugacu

SEQ ID NO: 2647706 - RNA, 15 nt, Human
auauuguugacaacu

SEQ ID NO: 2647707 - RNA, 13 nt, Human
auauuguugacaa

SEQ ID NO: 2647708 - RNA, 15 nt, Human
auauugcaaaauaca

SEQ ID NO: 2647709 - RNA, 16 nt, Human
auauugcaaaauacau

SEQ ID NO: 2647710 - RNA, 18 nt, Human
auauugcaaaauacauga

SEQ ID NO: 2647711 - RNA, 19 nt, Human
auauugcaaaauacaugaa

SEQ ID NO: 2647712 - RNA, 23 nt, Human
auauugcaaaauacaugaagcuu

SEQ ID NO: 2647713 - RNA, 14 nt, Human
auauuugaaggguc

SEQ ID NO: 2647714 - RNA, 15 nt, Human
auauuuguaaagcua

SEQ ID NO: 2647715 - RNA, 16 nt, Human
auauuuguaaagcuau

SEQ ID NO: 2647716 - RNA, 15 nt, Human
auauuccagaucuuu

SEQ ID NO: 2647717 - RNA, 17 nt, Human
auauuccagaucuuuca

SEQ ID NO: 2647718 - RNA, 21 nt, Human
auauuccagaucuuucagaaa

SEQ ID NO: 2647719 - RNA, 15 nt, Human
auauugauugggaaa

SEQ ID NO: 2647720 - RNA, 19 nt, Human
auauugauugggaaaacau

SEQ ID NO: 2647721 - RNA, 21 nt, Human
auauugauugggaaaacauuu

SEQ ID NO: 2647722 - RNA, 15 nt, Human
auauucuuucaaagg

SEQ ID NO: 2647723 - RNA, 12 nt, Human
auauugaacuuu

SEQ ID NO: 2647724 - RNA, 18 nt, Human
auauugaacuuuuguacu

SEQ ID NO: 2647725 - RNA, 20 nt, Human
auauugaacuuuuguacuga

SEQ ID NO: 2647726 - RNA, 17 nt, Human
auauguuuuuaaaggug

SEQ ID NO: 2647727 - RNA, 22 nt, Human
auauuaaggaagacaaugugaa

SEQ ID NO: 2647728 - RNA, 15 nt, Human
uuccucuugucugau

SEQ ID NO: 2647729 - RNA, 14 nt, Human
uuccuguucaguaa

SEQ ID NO: 2647730 - RNA, 19 nt, Human
uuccuguucaguaauaaaa

SEQ ID NO: 2647731 - RNA, 17 nt, Human
uuccucuagaagccaag

SEQ ID NO: 2647732 - RNA, 17 nt, Human
uuccucuaguucuuugu

SEQ ID NO: 2647733 - RNA, 14 nt, Human
uuccucugcucacc

SEQ ID NO: 2647734 - RNA, 15 nt, Human
uuccucuagaagcca

SEQ ID NO: 2647735 - RNA, 14 nt, Human
uuccuccuggaaau

SEQ ID NO: 2647736 - RNA, 20 nt, Human
auauuuuaugugagagaaag

SEQ ID NO: 2647737 - RNA, 15 nt, Human
auauuuuauuacugu

SEQ ID NO: 2647738 - RNA, 16 nt, Human
auauuuuauuacuguu

SEQ ID NO: 2647739 - RNA, 15 nt, Human
auauuuuaugugaga

SEQ ID NO: 2647740 - RNA, 14 nt, Human
auauuuuauauuac

SEQ ID NO: 2647741 - RNA, 14 nt, Human
auauuuuaugguua

SEQ ID NO: 2647742 - RNA, 15 nt, Human
auauuuuaugguuau

SEQ ID NO: 2647743 - RNA, 19 nt, Human
auauuuuaugguuauguuu

SEQ ID NO: 2647744 - RNA, 16 nt, Human
auauuuuaaccugcau

SEQ ID NO: 2647745 - RNA, 19 nt, Human
auauuuuaaccugcauaaa

SEQ ID NO: 2647746 - RNA, 18 nt, Human
aucaauaucuaauauaua

SEQ ID NO: 2647747 - RNA, 15 nt, Human
aucaauaucuaauau

SEQ ID NO: 2647748 - RNA, 19 nt, Human
aucaauacacuaguuguuu

SEQ ID NO: 2647749 - RNA, 15 nt, Human
aucaaucaaauaagu

SEQ ID NO: 2647750 - RNA, 13 nt, Human
aucaaucaaauaa

SEQ ID NO: 2647751 - RNA, 16 nt, Human
aucaauaauauauuuu

SEQ ID NO: 2647752 - RNA, 18 nt, Human
aucaauaauauauuuucu

SEQ ID NO: 2647753 - RNA, 20 nt, Human
aucaauaauauauuuucugu

SEQ ID NO: 2647754 - RNA, 21 nt, Human
aucaauaauauauuuucuguu

SEQ ID NO: 2647755 - RNA, 12 nt, Human
aucaauacacua

SEQ ID NO: 2647756 - RNA, 17 nt, Human
aucaauacacuaguugu

SEQ ID NO: 2647757 - RNA, 12 nt, Human
auauuuugaauc

SEQ ID NO: 2647758 - RNA, 13 nt, Human
auauuuugaauca

SEQ ID NO: 2647759 - RNA, 19 nt, Human
auauuuugaaucaauaaua

SEQ ID NO: 2647760 - RNA, 14 nt, Human
auauuuugaaucaa

SEQ ID NO: 2647761 - RNA, 21 nt, Human
aucaagagccuuaaaacauca

SEQ ID NO: 2647762 - RNA, 15 nt, Human
aucaagagccuuaaa

SEQ ID NO: 2647763 - RNA, 18 nt, Human
aucaagagccuuaaaaca

SEQ ID NO: 2647764 - RNA, 16 nt, Human
aucaagagccuuaaaa

SEQ ID NO: 2647765 - RNA, 17 nt, Human
aucaagaagacuuuagg

SEQ ID NO: 2647766 - RNA, 21 nt, Human
aucaagaagacuuuaggaaug

SEQ ID NO: 2647767 - RNA, 14 nt, Human
aucaagagccuuaa

SEQ ID NO: 2647768 - RNA, 19 nt, Human
aucaaucaaauaaguauuu

SEQ ID NO: 2647769 - RNA, 11 nt, Human
aucacaaauga

SEQ ID NO: 2647770 - RNA, 13 nt, Human
aucacaaaugacu

SEQ ID NO: 2647771 - RNA, 12 nt, Human
aucacaaaugac

SEQ ID NO: 2647772 - RNA, 20 nt, Human
aucacaaaugacuuuauuau

SEQ ID NO: 2647773 - RNA, 19 nt, Human
aucacaaaugacuuuauua

SEQ ID NO: 2647774 - RNA, 16 nt, Human
aucacaaaugacuuua

SEQ ID NO: 2647775 - RNA, 15 nt, Human
aucacaaaugacuuu

SEQ ID NO: 2647776 - RNA, 14 nt, Human
aucacaaaugacuu

SEQ ID NO: 2647777 - RNA, 15 nt, Human
aucacuguuuagauu

SEQ ID NO: 2647778 - RNA, 20 nt, Human
aucacuguguauauuugauu

SEQ ID NO: 2647779 - RNA, 23 nt, Human
aucacuacaguauuacucuuaca

SEQ ID NO: 2647780 - RNA, 14 nt, Human
aucacuguuuagau

SEQ ID NO: 2647781 - RNA, 19 nt, Human
aucacuguguauauuugau

SEQ ID NO: 2647782 - RNA, 18 nt, Human
aucacuguguauauuuga

SEQ ID NO: 2647783 - RNA, 17 nt, Human
aucacuguguauauuug

SEQ ID NO: 2647784 - RNA, 15 nt, Human
aucacuguguauauu

SEQ ID NO: 2647785 - RNA, 18 nt, Human
aucacuguaucauuuucu

SEQ ID NO: 2647786 - RNA, 19 nt, Human
aucacuguaucauuuucuu

SEQ ID NO: 2647787 - RNA, 12 nt, Human
uuccuuuuauca

SEQ ID NO: 2647788 - RNA, 14 nt, Human
uuccuuuucccugc

SEQ ID NO: 2647789 - RNA, 15 nt, Human
uuccuuuucccugcu

SEQ ID NO: 2647790 - RNA, 16 nt, Human
aucacuguuuagauuu

SEQ ID NO: 2647791 - RNA, 11 nt, Human
uucugguaauc

SEQ ID NO: 2647792 - RNA, 15 nt, Human
uucugguacuuucug

SEQ ID NO: 2647793 - RNA, 17 nt, Human
uucugguacuuucuguu

SEQ ID NO: 2647794 - RNA, 22 nt, Human
uucuggucaagggcugucauug

SEQ ID NO: 2647795 - RNA, 22 nt, Human
uucugccagauguccuaauggu

SEQ ID NO: 2647796 - RNA, 15 nt, Human
uucugccgcccccuc

SEQ ID NO: 2647797 - RNA, 21 nt, Human
uucugccgcccccuccugaac

SEQ ID NO: 2647798 - RNA, 22 nt, Human
uucugccgcccccuccugaacc

SEQ ID NO: 2647799 - RNA, 21 nt, Human
uucugccacccugcugagucu

SEQ ID NO: 2647800 - RNA, 19 nt, Human
uucugcauucauuuuuaua

SEQ ID NO: 2647801 - RNA, 21 nt, Human
uucugcauucauuuuuauagc

SEQ ID NO: 2647802 - RNA, 18 nt, Human
uucucuuagcaacucaga

SEQ ID NO: 2647803 - RNA, 23 nt, Human
aucauuccuuuuuauuuauaugu

SEQ ID NO: 2647804 - RNA, 14 nt, Human
aucccaagccuccu

SEQ ID NO: 2647805 - RNA, 22 nt, Human
aucccaaccaggcaccucuucc

SEQ ID NO: 2647806 - RNA, 15 nt, Human
uucuguacuguuacu

SEQ ID NO: 2647807 - RNA, 21 nt, Human
uucuguacuguuacugggccc

SEQ ID NO: 2647808 - RNA, 23 nt, Human
aucccucuaaugagacugaccau

SEQ ID NO: 2647809 - RNA, 15 nt, Human
aucccucuccuaacu

SEQ ID NO: 2647810 - RNA, 20 nt, Human
aucccuguguuaauuuaagu

SEQ ID NO: 2647811 - RNA, 15 nt, Human
aucccuguguuaauu

SEQ ID NO: 2647812 - RNA, 17 nt, Human
uucuauaaauagaugcu

SEQ ID NO: 2647813 - RNA, 13 nt, Human
uucuaguuuuguc

SEQ ID NO: 2647814 - RNA, 21 nt, Human
uucuauaaaacucugcaugua

SEQ ID NO: 2647815 - RNA, 11 nt, Human
uucucaaugaa

SEQ ID NO: 2647816 - RNA, 12 nt, Human
uucucaaugaaa

SEQ ID NO: 2647817 - RNA, 13 nt, Human
uucucaaugaaaa

SEQ ID NO: 2647818 - RNA, 14 nt, Human
uucucaaugaaaaa

SEQ ID NO: 2647819 - RNA, 18 nt, Human
uucucaaugaaaaauagu

SEQ ID NO: 2647820 - RNA, 16 nt, Human
uuccuuuucccugcuu

SEQ ID NO: 2647821 - RNA, 17 nt, Human
uuccuuuucccugcuuc

SEQ ID NO: 2647822 - RNA, 18 nt, Human
uuccuuuuuauuuauaug

SEQ ID NO: 2647823 - RNA, 13 nt, Human
uucuaggccuggg

SEQ ID NO: 2647824 - RNA, 20 nt, Human
uuccuuuuuauuuauaugua

SEQ ID NO: 2647825 - RNA, 15 nt, Human
uuccuuuuugacacu

SEQ ID NO: 2647826 - RNA, 16 nt, Human
uuccuuuuugacacug

SEQ ID NO: 2647827 - RNA, 17 nt, Human
uuccuuuuugacacuga

SEQ ID NO: 2647828 - RNA, 18 nt, Human
uuccuuuuugacacugaa

SEQ ID NO: 2647829 - RNA, 16 nt, Human
uuccuuuuuucaaaau

SEQ ID NO: 2647830 - RNA, 22 nt, Human
aucagagaugcaccaccaagcc

SEQ ID NO: 2647831 - RNA, 22 nt, Human
aucagagacaaaauauuuccca

SEQ ID NO: 2647832 - RNA, 21 nt, Human
aucauuccuuuuuauuuauau

SEQ ID NO: 2647833 - RNA, 20 nt, Human
aucauuccuuuuuauuuaua

SEQ ID NO: 2647834 - RNA, 15 nt, Human
aucauuccuuuuuau

SEQ ID NO: 2647835 - RNA, 14 nt, Human
aucauuccuuuuua

SEQ ID NO: 2647836 - RNA, 12 nt, Human
aucauucaagug

SEQ ID NO: 2647837 - RNA, 12 nt, Human
aucauucagaaa

SEQ ID NO: 2647838 - RNA, 13 nt, Human
aucauucagaaau

SEQ ID NO: 2647839 - RNA, 14 nt, Human
aucauucagaaaug

SEQ ID NO: 2647840 - RNA, 16 nt, Human
aucauucagaaauguu

SEQ ID NO: 2647841 - RNA, 16 nt, Human
aucauguugaucaugu

SEQ ID NO: 2647842 - RNA, 19 nt, Human
aucauguugaucauguacu

SEQ ID NO: 2647843 - RNA, 21 nt, Human
aucauaggcaccuuuuacugu

SEQ ID NO: 2647844 - RNA, 22 nt, Human
aucauaggcaccuuuuacugug

SEQ ID NO: 2647845 - RNA, 23 nt, Human
aucauaggcaccuuuuacuguga

SEQ ID NO: 2647846 - RNA, 21 nt, Human
uuauuuauauggggaauauau

SEQ ID NO: 2647847 - RNA, 13 nt, Human
uuauuuauaugua

SEQ ID NO: 2647848 - RNA, 14 nt, Human
uuauuuauauguac

SEQ ID NO: 2647849 - RNA, 15 nt, Human
uuauuuauauguacu

SEQ ID NO: 2647850 - RNA, 14 nt, Human
uuauuuauauguau

SEQ ID NO: 2647851 - RNA, 21 nt, Human
uuauuuauauguacuguuuua

SEQ ID NO: 2647852 - RNA, 17 nt, Human
uuauuuauauguacugu

SEQ ID NO: 2647853 - RNA, 18 nt, Human
uuauuuauauguacuguu

SEQ ID NO: 2647854 - RNA, 16 nt, Human
uuauuuaguuccuuga

SEQ ID NO: 2647855 - RNA, 13 nt, Human
uuauuuacauuua

SEQ ID NO: 2647856 - RNA, 15 nt, Human
uuauuuacauuuaau

SEQ ID NO: 2647857 - RNA, 20 nt, Human
uuauuuacagaugaauguau

SEQ ID NO: 2647858 - RNA, 15 nt, Human
uuauuuacagaugaa

SEQ ID NO: 2647859 - RNA, 14 nt, Human
uuauuuagacaaga

SEQ ID NO: 2647860 - RNA, 16 nt, Human
uuauuuacauuuaaua

SEQ ID NO: 2647861 - RNA, 15 nt, Human
uuauuuagacaagag

SEQ ID NO: 2647862 - RNA, 16 nt, Human
uuauuuagacaagaga

SEQ ID NO: 2647863 - RNA, 18 nt, Human
uuauuuagacaagagaug

SEQ ID NO: 2647864 - RNA, 14 nt, Human
uuauuucacuugau

SEQ ID NO: 2647865 - RNA, 23 nt, Human
uuauuucaaaauauacauucaaa

SEQ ID NO: 2647866 - RNA, 15 nt, Human
uuauuuccacuaaaa

SEQ ID NO: 2647867 - RNA, 18 nt, Human
uuauuuccacuaaaaaua

SEQ ID NO: 2647868 - RNA, 19 nt, Human
uuauuuccacuaaaaauau

SEQ ID NO: 2647869 - RNA, 22 nt, Human
uuauuuauccagaaaacuguga

SEQ ID NO: 2647870 - RNA, 23 nt, Human
uuauuuauccagaaaacugugau

SEQ ID NO: 2647871 - RNA, 17 nt, Human
uuauuuauauuuauuga

SEQ ID NO: 2647872 - RNA, 16 nt, Human
uuauuuauauuuauug

SEQ ID NO: 2647873 - RNA, 15 nt, Human
uuauuuauauuuauu

SEQ ID NO: 2647874 - RNA, 16 nt, Human
uuauuuauauguaugu

SEQ ID NO: 2647875 - RNA, 15 nt, Human
uuauuuauauguaug

SEQ ID NO: 2647876 - RNA, 16 nt, Human
uuauuuauguacuuuu

SEQ ID NO: 2647877 - RNA, 13 nt, Human
uuauuuauguacu

SEQ ID NO: 2647878 - RNA, 14 nt, Human
uuauuguuaauaca

SEQ ID NO: 2647879 - RNA, 12 nt, Human
uuauuuaaauua

SEQ ID NO: 2647880 - RNA, 14 nt, Human
uuauuuaagacuaa

SEQ ID NO: 2647881 - RNA, 15 nt, Human
uuauuuaagacuaaa

SEQ ID NO: 2647882 - RNA, 23 nt, Human
auagcuccccgcuucugccugca

SEQ ID NO: 2647883 - RNA, 20 nt, Human
auagcuccccgcuucugccu

SEQ ID NO: 2647884 - RNA, 11 nt, Human
auagccuggac

SEQ ID NO: 2647885 - RNA, 18 nt, Human
auagccuggacugcuacc

SEQ ID NO: 2647886 - RNA, 14 nt, Human
auagcuaacuguaa

SEQ ID NO: 2647887 - RNA, 15 nt, Human
auagcuaacuguaaa

SEQ ID NO: 2647888 - RNA, 16 nt, Human
auagcuaacuguaaau

SEQ ID NO: 2647889 - RNA, 17 nt, Human
auagcuaacuguaaauc

SEQ ID NO: 2647890 - RNA, 18 nt, Human
auagccugccucuucucu

SEQ ID NO: 2647891 - RNA, 18 nt, Human
auaacuuuuacacgacca

SEQ ID NO: 2647892 - RNA, 15 nt, Human
uucacaguagagcca

SEQ ID NO: 2647893 - RNA, 17 nt, Human
uucacaguagagccagc

SEQ ID NO: 2647894 - RNA, 18 nt, Human
uucacaguagagccagcu

SEQ ID NO: 2647895 - RNA, 20 nt, Human
uucacaguagagccagcuug

SEQ ID NO: 2647896 - RNA, 19 nt, Human
uucacaguagagccagcuu

SEQ ID NO: 2647897 - RNA, 17 nt, Human
uucacauuguuaagaaa

SEQ ID NO: 2647898 - RNA, 21 nt, Human
uucacauuguuaagaaaaaua

SEQ ID NO: 2647899 - RNA, 17 nt, Human
auagcuugcagaacugu

SEQ ID NO: 2647900 - RNA, 13 nt, Human
uucaccauucgua

SEQ ID NO: 2647901 - RNA, 17 nt, Human
uucaccaucaauccuga

SEQ ID NO: 2647902 - RNA, 19 nt, Human
uucaccaucaauccugauu

SEQ ID NO: 2647903 - RNA, 21 nt, Human
auaggaguggugauuugaaaa

SEQ ID NO: 2647904 - RNA, 17 nt, Human
auagggaauauaucucu

SEQ ID NO: 2647905 - RNA, 19 nt, Human
auaggaugggcuucugugc

SEQ ID NO: 2647906 - RNA, 18 nt, Human
auaggaaucauucagaaa

SEQ ID NO: 2647907 - RNA, 20 nt, Human
auaggaaucauucagaaaug

SEQ ID NO: 2647908 - RNA, 21 nt, Human
auaggaaucauucagaaaugu

SEQ ID NO: 2647909 - RNA, 16 nt, Human
auaggauuuuuagaau

SEQ ID NO: 2647910 - RNA, 15 nt, Human
auaggcaccuuuuac

SEQ ID NO: 2647911 - RNA, 19 nt, Human
auaggcaccuuuuacugug

SEQ ID NO: 2647912 - RNA, 20 nt, Human
auaggcaccuuuuacuguga

SEQ ID NO: 2647913 - RNA, 15 nt, Human
uucaacugucuuccu

SEQ ID NO: 2647914 - RNA, 19 nt, Human
uucaacugucuuccucaaa

SEQ ID NO: 2647915 - RNA, 21 nt, Human
uucaaacuggggccuccagaa

SEQ ID NO: 2647916 - RNA, 16 nt, Human
uucaaacuggggccuc

SEQ ID NO: 2647917 - RNA, 15 nt, Human
uucaaacuggggccu

SEQ ID NO: 2647918 - RNA, 15 nt, Human
uucaaaauccaaaaa

SEQ ID NO: 2647919 - RNA, 17 nt, Human
uuauuuccuuuguccuu

SEQ ID NO: 2647920 - RNA, 19 nt, Human
uuauuuuuuuuaauuguau

SEQ ID NO: 2647921 - RNA, 13 nt, Human
uuauuuuuuugaa

SEQ ID NO: 2647922 - RNA, 24 nt, Human
uucaaggggagccaaaaucucaag

SEQ ID NO: 2647923 - RNA, 22 nt, Human
uucaaguuguaaauaauuuauu

SEQ ID NO: 2647924 - RNA, 19 nt, Human
uucaaguguaaaauauuuu

SEQ ID NO: 2647925 - RNA, 18 nt, Human
auaguuuggcauuugcac

SEQ ID NO: 2647926 - RNA, 14 nt, Human
auaguuuggcauuu

SEQ ID NO: 2647927 - RNA, 17 nt, Human
auaguuuggcauuugca

SEQ ID NO: 2647928 - RNA, 12 nt, Human
auaguuuggcau

SEQ ID NO: 2647929 - RNA, 13 nt, Human
auaguuucuuuau

SEQ ID NO: 2647930 - RNA, 18 nt, Human
auaguuucuuuauuuugu

SEQ ID NO: 2647931 - RNA, 19 nt, Human
auaguuucuuuauuuugug

SEQ ID NO: 2647932 - RNA, 22 nt, Human
auaguuucuuuauuuuguguaa

SEQ ID NO: 2647933 - RNA, 19 nt, Human
auaguuuauuuuaaaacaa

SEQ ID NO: 2647934 - RNA, 12 nt, Human
auagucccugcc

SEQ ID NO: 2647935 - RNA, 18 nt, Human
auagucuaagacuauaua

SEQ ID NO: 2647936 - RNA, 12 nt, Human
auauaaaauuau

SEQ ID NO: 2647937 - RNA, 19 nt, Human
auagucaauggcuuguuca

SEQ ID NO: 2647938 - RNA, 18 nt, Human
auauaaauguauaaauau

SEQ ID NO: 2647939 - RNA, 13 nt, Human
auauaggcuauuu

SEQ ID NO: 2647940 - RNA, 22 nt, Human
auauaggcuauuuucuaaagac

SEQ ID NO: 2647941 - RNA, 23 nt, Human
auauaaggaaagcaauaaaugaa

SEQ ID NO: 2647942 - RNA, 13 nt, Human
auauaagacaaau

SEQ ID NO: 2647943 - RNA, 20 nt, Human
auauaaauuuuuaagagaaa

SEQ ID NO: 2647944 - RNA, 11 nt, Human
uucagccaagg

SEQ ID NO: 2647945 - RNA, 13 nt, Human
uucagaugccacu

SEQ ID NO: 2647946 - RNA, 18 nt, Human
uucagaugccacuucuaa

SEQ ID NO: 2647947 - RNA, 13 nt, Human
uucagauguaugu

SEQ ID NO: 2647948 - RNA, 17 nt, Human
uucagaagucacacauu

SEQ ID NO: 2647949 - RNA, 22 nt, Human
uucagaagucacacauuacaaa

SEQ ID NO: 2647950 - RNA, 20 nt, Human
uucagaagugcccuuccugc

SEQ ID NO: 2647951 - RNA, 15 nt, Human
uucagaaguuaguuu

SEQ ID NO: 2647952 - RNA, 20 nt, Human
uucagaaguuaguuuguaua

SEQ ID NO: 2647953 - RNA, 22 nt, Human
uucacuggccccuacuuugugg

SEQ ID NO: 2647954 - RNA, 14 nt, Human
auauauacauauau

SEQ ID NO: 2647955 - RNA, 13 nt, Human
auauaguguacag

SEQ ID NO: 2647956 - RNA, 20 nt, Human
auauauaggcuauuuucuaa

SEQ ID NO: 2647957 - RNA, 12 nt, Human
auaucuauuaau

SEQ ID NO: 2647958 - RNA, 13 nt, Human
auaucuaucuauu

SEQ ID NO: 2647959 - RNA, 14 nt, Human
auaucuaucuauuu

SEQ ID NO: 2647960 - RNA, 16 nt, Human
auaucuaucuauuuga

SEQ ID NO: 2647961 - RNA, 17 nt, Human
auaucuaucuauuugag

SEQ ID NO: 2647962 - RNA, 18 nt, Human
auaucuaucuauuugagg

SEQ ID NO: 2647963 - RNA, 12 nt, Human
auaucugcaaaa

SEQ ID NO: 2647964 - RNA, 13 nt, Human
auaucugcaaaaa

SEQ ID NO: 2647965 - RNA, 19 nt, Human
auaucuucugauuuguccc

SEQ ID NO: 2647966 - RNA, 20 nt, Human
auaugauuuaaaucagccgu

SEQ ID NO: 2647967 - RNA, 13 nt, Human
auaucuggccucu

SEQ ID NO: 2647968 - RNA, 19 nt, Human
auaucuggccucugcuuuc

SEQ ID NO: 2647969 - RNA, 17 nt, Human
auaucuuaauauauuuc

SEQ ID NO: 2647970 - RNA, 23 nt, Human
auauguauuauuuauaauuccua

SEQ ID NO: 2647971 - RNA, 13 nt, Human
auauguauucuuu

SEQ ID NO: 2647972 - RNA, 14 nt, Human
auauguauucuuuu

SEQ ID NO: 2647973 - RNA, 18 nt, Human
auauguauucuuuucuca

SEQ ID NO: 2647974 - RNA, 20 nt, Human
auauguauucuuuucucagu

SEQ ID NO: 2647975 - RNA, 18 nt, Human
uucauggcugcuguugcu

SEQ ID NO: 2647976 - RNA, 19 nt, Human
uucauggcugcuguugcuu

SEQ ID NO: 2647977 - RNA, 21 nt, Human
uucauggcugcuguugcuuaa

SEQ ID NO: 2647978 - RNA, 22 nt, Human
uucauggcugcuguugcuuaaa

SEQ ID NO: 2647979 - RNA, 16 nt, Human
uucauguaaaguguca

SEQ ID NO: 2647980 - RNA, 20 nt, Human
uucauguaaagugucagaag

SEQ ID NO: 2647981 - RNA, 22 nt, Human
auauguauuauuuauaauuccu

SEQ ID NO: 2647982 - RNA, 18 nt, Human
auauguauuauuuauaau

SEQ ID NO: 2647983 - RNA, 17 nt, Human
auauguauuauuuauaa

SEQ ID NO: 2647984 - RNA, 16 nt, Human
auauguauuauuuaua

SEQ ID NO: 2647985 - RNA, 23 nt, Human
auauguauguguuuagaauugaa

SEQ ID NO: 2647986 - RNA, 22 nt, Human
auauguauguguuuagaauuga

SEQ ID NO: 2647987 - RNA, 21 nt, Human
auauguauguguuuagaauug

SEQ ID NO: 2647988 - RNA, 20 nt, Human
auauguauguguuuagaauu

SEQ ID NO: 2647989 - RNA, 19 nt, Human
auauguauguguuuagaau

SEQ ID NO: 2647990 - RNA, 18 nt, Human
auauguauguguuuagaa

SEQ ID NO: 2647991 - RNA, 17 nt, Human
auauguauguguuuaga

SEQ ID NO: 2647992 - RNA, 15 nt, Human
auauguauguguuua

SEQ ID NO: 2647993 - RNA, 14 nt, Human
auauguauguguuu

SEQ ID NO: 2647994 - RNA, 11 nt, Human
auauguaugug

SEQ ID NO: 2647995 - RNA, 13 nt, Human
auauguauguguu

SEQ ID NO: 2647996 - RNA, 14 nt, Human
auaugcaacauugu

SEQ ID NO: 2647997 - RNA, 18 nt, Human
auaucuaauauauaugaa

SEQ ID NO: 2647998 - RNA, 17 nt, Human
auaucuaauauauauga

SEQ ID NO: 2647999 - RNA, 14 nt, Human
auaucuaauauaua

SEQ ID NO: 2648000 - RNA, 13 nt, Human
auaucuaauauau

SEQ ID NO: 2648001 - RNA, 19 nt, Human
auaucuaauauauaugaau

SEQ ID NO: 2648002 - RNA, 17 nt, Human
auaucgacuuguuuuug

SEQ ID NO: 2648003 - RNA, 13 nt, Human
auauauuauuaua

SEQ ID NO: 2648004 - RNA, 14 nt, Human
auauauuauuauaa

SEQ ID NO: 2648005 - RNA, 16 nt, Human
auauauuauuauaauc

SEQ ID NO: 2648006 - RNA, 18 nt, Human
auauauuauuauaaucuu

SEQ ID NO: 2648007 - RNA, 17 nt, Human
auauauuacaagggaua

SEQ ID NO: 2648008 - RNA, 23 nt, Human
uucauacuccuuuuaagcaguga

SEQ ID NO: 2648009 - RNA, 20 nt, Human
uucaguauuauguaguuguu

SEQ ID NO: 2648010 - RNA, 14 nt, Human
uucaguacuuuuuu

SEQ ID NO: 2648011 - RNA, 19 nt, Human
uucaguacuuuuuuaaaua

SEQ ID NO: 2648012 - RNA, 21 nt, Human
uucaguacuuuuuuaaauauu

SEQ ID NO: 2648013 - RNA, 13 nt, Human
uucauagcccagu

SEQ ID NO: 2648014 - RNA, 14 nt, Human
uucaggguaaauag

SEQ ID NO: 2648015 - RNA, 23 nt, Human
uucaggguaaauaggaaucauuc

SEQ ID NO: 2648016 - RNA, 20 nt, Human
uucagggcuggcuccugauc

SEQ ID NO: 2648017 - RNA, 13 nt, Human
augaacacuuaua

SEQ ID NO: 2648018 - RNA, 15 nt, Human
augaaccauaaauuc

SEQ ID NO: 2648019 - RNA, 20 nt, Human
augaauguauuuauuuggga

SEQ ID NO: 2648020 - RNA, 17 nt, Human
augaauguauuuauuug

SEQ ID NO: 2648021 - RNA, 15 nt, Human
augaauguauuuauu

SEQ ID NO: 2648022 - RNA, 23 nt, Human
augaaucuuuguuucagguucag

SEQ ID NO: 2648023 - RNA, 16 nt, Human
augaaauaaaauauau

SEQ ID NO: 2648024 - RNA, 14 nt, Human
augaacacucccca

SEQ ID NO: 2648025 - RNA, 21 nt, Human
uugguguggcccauggcuguu

SEQ ID NO: 2648026 - RNA, 15 nt, Human
uugguguaauuugaa

SEQ ID NO: 2648027 - RNA, 17 nt, Human
uugguguaauuugaaga

SEQ ID NO: 2648028 - RNA, 20 nt, Human
uugguguaauuugaagauug

SEQ ID NO: 2648029 - RNA, 14 nt, Human
uugguguacagacu

SEQ ID NO: 2648030 - RNA, 13 nt, Human
uugguuuccccaa

SEQ ID NO: 2648031 - RNA, 12 nt, Human
uugguuuuauga

SEQ ID NO: 2648032 - RNA, 12 nt, Human
uuggugguuuuu

SEQ ID NO: 2648033 - RNA, 17 nt, Human
uugguuuuccuguggca

SEQ ID NO: 2648034 - RNA, 13 nt, Human
uugguuuuauggu

SEQ ID NO: 2648035 - RNA, 23 nt, Human
uugguuuuaugguuacuucuucu

SEQ ID NO: 2648036 - RNA, 19 nt, Human
uugguuuuaugaugacgua

SEQ ID NO: 2648037 - RNA, 16 nt, Human
uugguuuuaugaugac

SEQ ID NO: 2648038 - RNA, 15 nt, Human
uuguaaauuuagugu

SEQ ID NO: 2648039 - RNA, 16 nt, Human
uuguaaauuuaguguu

SEQ ID NO: 2648040 - RNA, 13 nt, Human
uuguaagaaggca

SEQ ID NO: 2648041 - RNA, 15 nt, Human
uuguaagaaggcaau

SEQ ID NO: 2648042 - RNA, 19 nt, Human
uuguaagaaggcaauauua

SEQ ID NO: 2648043 - RNA, 20 nt, Human
uuguaagaaggcaauauuaa

SEQ ID NO: 2648044 - RNA, 24 nt, Human
uuguaagaaggcaauauuaaccua

SEQ ID NO: 2648045 - RNA, 16 nt, Human
uuguaauuuaaaauaa

SEQ ID NO: 2648046 - RNA, 13 nt, Human
uuguaauaagcaa

SEQ ID NO: 2648047 - RNA, 14 nt, Human
uuguaauaagcaau

SEQ ID NO: 2648048 - RNA, 20 nt, Human
uuguaauaagcaaucaaggu

SEQ ID NO: 2648049 - RNA, 19 nt, Human
aucugugggcauggucaaa

SEQ ID NO: 2648050 - RNA, 22 nt, Human
aucugugggcauggucaaaggc

SEQ ID NO: 2648051 - RNA, 19 nt, Human
aucuuaaaguguguuucua

SEQ ID NO: 2648052 - RNA, 12 nt, Human
aucuuaauguuc

SEQ ID NO: 2648053 - RNA, 14 nt, Human
aucuuaauguuccu

SEQ ID NO: 2648054 - RNA, 21 nt, Human
aucuuaauguuccucaaagcu

SEQ ID NO: 2648055 - RNA, 14 nt, Human
aucuuaauauauuu

SEQ ID NO: 2648056 - RNA, 23 nt, Human
aucuuaauauauuucuaaauguu

SEQ ID NO: 2648057 - RNA, 19 nt, Human
aucuuaaucuguuuauuua

SEQ ID NO: 2648058 - RNA, 22 nt, Human
aucuuaaucuguuuauuuacaa

SEQ ID NO: 2648059 - RNA, 21 nt, Human
aucuuaaugaaugagucuguu

SEQ ID NO: 2648060 - RNA, 15 nt, Human
aucuuguuucugaaa

SEQ ID NO: 2648061 - RNA, 16 nt, Human
aucuuguuucugaaaa

SEQ ID NO: 2648062 - RNA, 16 nt, Human
aucuuggggggguggc

SEQ ID NO: 2648063 - RNA, 20 nt, Human
aucuuggggggguggccgcu

SEQ ID NO: 2648064 - RNA, 23 nt, Human
aucuuggggggguggccgcugag

SEQ ID NO: 2648065 - RNA, 20 nt, Human
aucuuggccuaaaccucagu

SEQ ID NO: 2648066 - RNA, 21 nt, Human
aucuuggccuaaaccucaguu

SEQ ID NO: 2648067 - RNA, 17 nt, Human
uugcucuucagaugcca

SEQ ID NO: 2648068 - RNA, 17 nt, Human
uugcuucaccauggccu

SEQ ID NO: 2648069 - RNA, 22 nt, Human
uugcuucaccauggccuuauga

SEQ ID NO: 2648070 - RNA, 18 nt, Human
uuggagaaaugaaaacag

SEQ ID NO: 2648071 - RNA, 20 nt, Human
uuggagccccaggggacaag

SEQ ID NO: 2648072 - RNA, 20 nt, Human
uuggagaagcccgugugaga

SEQ ID NO: 2648073 - RNA, 20 nt, Human
uuggacuucaaagcaagcug

SEQ ID NO: 2648074 - RNA, 20 nt, Human
uugcuuuguauuguauauua

SEQ ID NO: 2648075 - RNA, 12 nt, Human
aucuagccagcc

SEQ ID NO: 2648076 - RNA, 19 nt, Human
aucuagccagccccucuuc

SEQ ID NO: 2648077 - RNA, 21 nt, Human
aucuagccagccccucuuccc

SEQ ID NO: 2648078 - RNA, 12 nt, Human
aucuacugcauu

SEQ ID NO: 2648079 - RNA, 10 nt, Human
aucuacugca

SEQ ID NO: 2648080 - RNA, 16 nt, Human
aucuagauaucgacuu

SEQ ID NO: 2648081 - RNA, 13 nt, Human
aucuaauucugau

SEQ ID NO: 2648082 - RNA, 15 nt, Human
aucuaauucugauuc

SEQ ID NO: 2648083 - RNA, 15 nt, Human
uugaguguaugagua

SEQ ID NO: 2648084 - RNA, 14 nt, Human
uugacacugaacuu

SEQ ID NO: 2648085 - RNA, 15 nt, Human
uugacacugaacuua

SEQ ID NO: 2648086 - RNA, 11 nt, Human
uugacacugaa

SEQ ID NO: 2648087 - RNA, 12 nt, Human
uugacacugaaa

SEQ ID NO: 2648088 - RNA, 17 nt, Human
uugacacugaaaguuuu

SEQ ID NO: 2648089 - RNA, 21 nt, Human
uugacacugaaaguuuuguaa

SEQ ID NO: 2648090 - RNA, 22 nt, Human
uugacacugaaaguuuuguaaa

SEQ ID NO: 2648091 - RNA, 14 nt, Human
aucccuuuauuacc

SEQ ID NO: 2648092 - RNA, 13 nt, Human
aucccuuuauuac

SEQ ID NO: 2648093 - RNA, 18 nt, Human
uugacacaaguggaccuu

SEQ ID NO: 2648094 - RNA, 17 nt, Human
uugacacaaguggaccu

SEQ ID NO: 2648095 - RNA, 14 nt, Human
uugacacaagugga

SEQ ID NO: 2648096 - RNA, 22 nt, Human
aucccuuuuucauaaauuauuu

SEQ ID NO: 2648097 - RNA, 22 nt, Human
aucccuuuauuacccccuccuu

SEQ ID NO: 2648098 - RNA, 18 nt, Human
uugacuuuuauaaagcau

SEQ ID NO: 2648099 - RNA, 20 nt, Human
uugacuuuuauaaagcaugu

SEQ ID NO: 2648100 - RNA, 21 nt, Human
uugacuuuuauaaagcauguu

SEQ ID NO: 2648101 - RNA, 17 nt, Human
uugagaaaauaaagcua

SEQ ID NO: 2648102 - RNA, 17 nt, Human
uugacuuuuuuuguaug

SEQ ID NO: 2648103 - RNA, 22 nt, Human
uugagcacuuuucaaacaauca

SEQ ID NO: 2648104 - RNA, 22 nt, Human
uugagacacggagcccagcccu

SEQ ID NO: 2648105 - RNA, 22 nt, Human
uugccaagcuccaagccccauc

SEQ ID NO: 2648106 - RNA, 23 nt, Human
uugccaagggcccaaagaaagag

SEQ ID NO: 2648107 - RNA, 11 nt, Human
uugcaugcaug

SEQ ID NO: 2648108 - RNA, 13 nt, Human
uugcaugcaugca

SEQ ID NO: 2648109 - RNA, 15 nt, Human
uugcaugcaugcaaa

SEQ ID NO: 2648110 - RNA, 16 nt, Human
uugcaugcaugcaaau

SEQ ID NO: 2648111 - RNA, 17 nt, Human
uugcaugcaugcaaaug

SEQ ID NO: 2648112 - RNA, 21 nt, Human
uugcauggaaaucagccaagu

SEQ ID NO: 2648113 - RNA, 23 nt, Human
uugcauggaaaucagccaaguuu

SEQ ID NO: 2648114 - RNA, 14 nt, Human
uugcaagugcugga

SEQ ID NO: 2648115 - RNA, 16 nt, Human
uugcaagugcuggagu

SEQ ID NO: 2648116 - RNA, 14 nt, Human
uugcaauaacagcu

SEQ ID NO: 2648117 - RNA, 16 nt, Human
uugcaauaacagcugc

SEQ ID NO: 2648118 - RNA, 17 nt, Human
uugcaauaacagcugca

SEQ ID NO: 2648119 - RNA, 18 nt, Human
uugcaauaacagcugcaa

SEQ ID NO: 2648120 - RNA, 20 nt, Human
uugcaauaacagcugcaauu

SEQ ID NO: 2648121 - RNA, 15 nt, Human
uugcaauaccaagua

SEQ ID NO: 2648122 - RNA, 21 nt, Human
uugcaccacugcacuccagcc

SEQ ID NO: 2648123 - RNA, 17 nt, Human
uugccacaguagaacug

SEQ ID NO: 2648124 - RNA, 18 nt, Human
uugccacaguagaacugu

SEQ ID NO: 2648125 - RNA, 20 nt, Human
uugccacaguagaacugucu

SEQ ID NO: 2648126 - RNA, 14 nt, Human
uugccaauuuuccu

SEQ ID NO: 2648127 - RNA, 13 nt, Human
uugcccauccuga

SEQ ID NO: 2648128 - RNA, 14 nt, Human
uugcccauccugac

SEQ ID NO: 2648129 - RNA, 16 nt, Human
uugcccauccugacug

SEQ ID NO: 2648130 - RNA, 17 nt, Human
uugcccauccugacuga

SEQ ID NO: 2648131 - RNA, 14 nt, Human
uugcaagaugugaa

SEQ ID NO: 2648132 - RNA, 15 nt, Human
uugcaagaugugaau

SEQ ID NO: 2648133 - RNA, 16 nt, Human
uugcaagaugugaauu

SEQ ID NO: 2648134 - RNA, 19 nt, Human
uugcaagaugugaauuauu

SEQ ID NO: 2648135 - RNA, 20 nt, Human
uugcaagaugugaauuauug

SEQ ID NO: 2648136 - RNA, 21 nt, Human
uugcaagaugugaauuauuga

SEQ ID NO: 2648137 - RNA, 22 nt, Human
uugcaagaugugaauuauugac

SEQ ID NO: 2648138 - RNA, 23 nt, Human
uugcaagaugugaauuauugaca

SEQ ID NO: 2648139 - RNA, 19 nt, Human
uugcaagcaugcuugugaa

SEQ ID NO: 2648140 - RNA, 15 nt, Human
aucucuuuuuguuug

SEQ ID NO: 2648141 - RNA, 16 nt, Human
aucucuuuuuguuugc

SEQ ID NO: 2648142 - RNA, 10 nt, Human
aucucuuuuc

SEQ ID NO: 2648143 - RNA, 23 nt, Human
aucucuuuuccacuccauugucg

SEQ ID NO: 2648144 - RNA, 21 nt, Human
aucugaagagcuauuauauaa

SEQ ID NO: 2648145 - RNA, 13 nt, Human
aucugaaauguua

SEQ ID NO: 2648146 - RNA, 16 nt, Human
aucugaaauguuacaa

SEQ ID NO: 2648147 - RNA, 15 nt, Human
aucucacagcuaugc

SEQ ID NO: 2648148 - RNA, 12 nt, Human
aucucacagcua

SEQ ID NO: 2648149 - RNA, 19 nt, Human
aucucaauaaagugcuuua

SEQ ID NO: 2648150 - RNA, 22 nt, Human
aucucaauaaagugcuuuaaaa

SEQ ID NO: 2648151 - RNA, 18 nt, Human
uuuauauggggaauauau

SEQ ID NO: 2648152 - RNA, 12 nt, Human
uuuauauguacu

SEQ ID NO: 2648153 - RNA, 12 nt, Human
uuuauaugcuuu

SEQ ID NO: 2648154 - RNA, 14 nt, Human
uuuauauguacugu

SEQ ID NO: 2648155 - RNA, 15 nt, Human
uuuauauguaugugu

SEQ ID NO: 2648156 - RNA, 18 nt, Human
uuuaguguuuuuuuauuu

SEQ ID NO: 2648157 - RNA, 20 nt, Human
uuuaguguuuuuuuauuucu

SEQ ID NO: 2648158 - RNA, 21 nt, Human
uuuaguguuuuuuuauuucua

SEQ ID NO: 2648159 - RNA, 18 nt, Human
uuuagggaguauucuaau

SEQ ID NO: 2648160 - RNA, 15 nt, Human
uuuagggaguauucu

SEQ ID NO: 2648161 - RNA, 19 nt, Human
augccuuuuuuucucugca

SEQ ID NO: 2648162 - RNA, 19 nt, Human
augcuaccccacuaugaca

SEQ ID NO: 2648163 - RNA, 11 nt, Human
uuuacuuaaac

SEQ ID NO: 2648164 - RNA, 23 nt, Human
uuuacugucuauuaauauucagg

SEQ ID NO: 2648165 - RNA, 16 nt, Human
uuuacugguugcaugg

SEQ ID NO: 2648166 - RNA, 19 nt, Human
uuuacugguugcauggaaa

SEQ ID NO: 2648167 - RNA, 22 nt, Human
uuuacugguugcauggaaauca

SEQ ID NO: 2648168 - RNA, 15 nt, Human
uuuacugugauguuu

SEQ ID NO: 2648169 - RNA, 12 nt, Human
uuuacuguguuu

SEQ ID NO: 2648170 - RNA, 17 nt, Human
uuuacugccugaauaaa

SEQ ID NO: 2648171 - RNA, 22 nt, Human
uuuacugccugaauaaagagcc

SEQ ID NO: 2648172 - RNA, 16 nt, Human
uuuacugcagcuuugu

SEQ ID NO: 2648173 - RNA, 22 nt, Human
augccauagaaauguagguccu

SEQ ID NO: 2648174 - RNA, 17 nt, Human
augccacugccuucgcu

SEQ ID NO: 2648175 - RNA, 15 nt, Human
augccacugccuucg

SEQ ID NO: 2648176 - RNA, 18 nt, Human
augccacugccuucgcuu

SEQ ID NO: 2648177 - RNA, 12 nt, Human
augccacuuccu

SEQ ID NO: 2648178 - RNA, 20 nt, Human
augccacuuccuuuuaacug

SEQ ID NO: 2648179 - RNA, 18 nt, Human
augccacuucuaagaaaa

SEQ ID NO: 2648180 - RNA, 12 nt, Human
augccagcuggc

SEQ ID NO: 2648181 - RNA, 13 nt, Human
augccagcuggcc

SEQ ID NO: 2648182 - RNA, 21 nt, Human
augccagggccgaccagagga

SEQ ID NO: 2648183 - RNA, 18 nt, Human
augccagggccgaccaga

SEQ ID NO: 2648184 - RNA, 19 nt, Human
augcuccuggcccacugca

SEQ ID NO: 2648185 - RNA, 14 nt, Human
augcuccuggccca

SEQ ID NO: 2648186 - RNA, 15 nt, Human
augcucaaagaaauc

SEQ ID NO: 2648187 - RNA, 16 nt, Human
augcucaaagaaaucu

SEQ ID NO: 2648188 - RNA, 17 nt, Human
augcucaaagaaaucua

SEQ ID NO: 2648189 - RNA, 13 nt, Human
augcucaucugcu

SEQ ID NO: 2648190 - RNA, 14 nt, Human
augcucaucugcug

SEQ ID NO: 2648191 - RNA, 16 nt, Human
augcucaucugcuggu

SEQ ID NO: 2648192 - RNA, 20 nt, Human
augcuucucacugccaugcc

SEQ ID NO: 2648193 - RNA, 16 nt, Human
augcuucucacugcca

SEQ ID NO: 2648194 - RNA, 20 nt, Human
auggaagaggaaaaggcugg

SEQ ID NO: 2648195 - RNA, 16 nt, Human
uuucacauucuuggcu

SEQ ID NO: 2648196 - RNA, 15 nt, Human
uuucacgggagauuu

SEQ ID NO: 2648197 - RNA, 14 nt, Human
uuucacggaaacuc

SEQ ID NO: 2648198 - RNA, 18 nt, Human
uuucacggaaacucccga

SEQ ID NO: 2648199 - RNA, 13 nt, Human
uuucagaaauaua

SEQ ID NO: 2648200 - RNA, 14 nt, Human
uuucagaaauauaa

SEQ ID NO: 2648201 - RNA, 20 nt, Human
uuucagaaauauaacacauu

SEQ ID NO: 2648202 - RNA, 21 nt, Human
uuucagaaauauaacacauuu

SEQ ID NO: 2648203 - RNA, 22 nt, Human
uuucagaaauauaacacauuuu

SEQ ID NO: 2648204 - RNA, 12 nt, Human
uuucaucucauu

SEQ ID NO: 2648205 - RNA, 21 nt, Human
uuucaucucauuuaagggaaa

SEQ ID NO: 2648206 - RNA, 22 nt, Human
uuucaucucauuuaagggaaaa

SEQ ID NO: 2648207 - RNA, 23 nt, Human
uuucaucucauuuaagggaaaaa

SEQ ID NO: 2648208 - RNA, 20 nt, Human
uuucauggcugcuguugcuu

SEQ ID NO: 2648209 - RNA, 14 nt, Human
uuucauguaaaaca

SEQ ID NO: 2648210 - RNA, 10 nt, Human
uuucccaagc

SEQ ID NO: 2648211 - RNA, 16 nt, Human
uuucccuauuagagaa

SEQ ID NO: 2648212 - RNA, 22 nt, Human
uuuaaaucuaaaucuauuuauu

SEQ ID NO: 2648213 - RNA, 19 nt, Human
uuuaaaucuaaaucuauuu

SEQ ID NO: 2648214 - RNA, 19 nt, Human
uuuaaauccugaagagcau

SEQ ID NO: 2648215 - RNA, 13 nt, Human
uuuaaauauuuuc

SEQ ID NO: 2648216 - RNA, 14 nt, Human
uuuaaauauuuucu

SEQ ID NO: 2648217 - RNA, 15 nt, Human
uuuaaauauuuucua

SEQ ID NO: 2648218 - RNA, 17 nt, Human
uuuaaauauuuucuauu

SEQ ID NO: 2648219 - RNA, 19 nt, Human
uuuaaauauuuucuauuuu

SEQ ID NO: 2648220 - RNA, 17 nt, Human
uuuaaaaagggaagaaa

SEQ ID NO: 2648221 - RNA, 19 nt, Human
uuuaaaaagggaagaaacu

SEQ ID NO: 2648222 - RNA, 20 nt, Human
uuuaaaaagggaagaaacug

SEQ ID NO: 2648223 - RNA, 19 nt, Human
uuuaaaaaccgaauaaaug

SEQ ID NO: 2648224 - RNA, 14 nt, Human
uuuaagcuucaguu

SEQ ID NO: 2648225 - RNA, 21 nt, Human
uuuaagcuucaguugcuuguc

SEQ ID NO: 2648226 - RNA, 21 nt, Human
uuuaagcuguuacugucuuca

SEQ ID NO: 2648227 - RNA, 22 nt, Human
uuuaagcuguggucaaggcuac

SEQ ID NO: 2648228 - RNA, 12 nt, Human
uuuaaaugccau

SEQ ID NO: 2648229 - RNA, 14 nt, Human
uuuaaggaaaacua

SEQ ID NO: 2648230 - RNA, 18 nt, Human
uuuaaggcuaaaacuuaa

SEQ ID NO: 2648231 - RNA, 15 nt, Human
uuuaagggaaagaaa

SEQ ID NO: 2648232 - RNA, 17 nt, Human
uuuaagggaaagaaaau

SEQ ID NO: 2648233 - RNA, 22 nt, Human
uuuaaggcagauuuuacagagc

SEQ ID NO: 2648234 - RNA, 19 nt, Human
uuuaaggacugacugaggc

SEQ ID NO: 2648235 - RNA, 18 nt, Human
uuuaaggacugacugagg

SEQ ID NO: 2648236 - RNA, 15 nt, Human
augcacuuaaagaag

SEQ ID NO: 2648237 - RNA, 19 nt, Human
augcacuuaaagaaguauu

SEQ ID NO: 2648238 - RNA, 21 nt, Human
augcacuuaaagaaguauuuu

SEQ ID NO: 2648239 - RNA, 23 nt, Human
augcaaaaagcuagucaacagua

SEQ ID NO: 2648240 - RNA, 17 nt, Human
augcaaaaacucuuuga

SEQ ID NO: 2648241 - RNA, 23 nt, Human
augcaaaaacucuuugagagggu

SEQ ID NO: 2648242 - RNA, 14 nt, Human
augcaaaagguuua

SEQ ID NO: 2648243 - RNA, 17 nt, Human
augcaaaauauguuuaa

SEQ ID NO: 2648244 - RNA, 21 nt, Human
uuguucuuggcaauaaauuuu

SEQ ID NO: 2648245 - RNA, 19 nt, Human
uuguucuuggcaauaaauu

SEQ ID NO: 2648246 - RNA, 18 nt, Human
uuguucuuauucuggcau

SEQ ID NO: 2648247 - RNA, 24 nt, Human
uuguguaaugaaaaugaauaucua

SEQ ID NO: 2648248 - RNA, 23 nt, Human
uuguguaaugaaaaugaauaucu

SEQ ID NO: 2648249 - RNA, 22 nt, Human
augaguagauaauuucagggug

SEQ ID NO: 2648250 - RNA, 13 nt, Human
augaguagccagg

SEQ ID NO: 2648251 - RNA, 22 nt, Human
augagucacuaugggaugagaa

SEQ ID NO: 2648252 - RNA, 12 nt, Human
auuaauauuuaa

SEQ ID NO: 2648253 - RNA, 23 nt, Human
auuaauauuuaacauuauuuaua

SEQ ID NO: 2648254 - RNA, 15 nt, Human
auuaaucacugugua

SEQ ID NO: 2648255 - RNA, 14 nt, Human
auuaaucacugugu

SEQ ID NO: 2648256 - RNA, 13 nt, Human
auuaaucacugug

SEQ ID NO: 2648257 - RNA, 12 nt, Human
auuaaucacugu

SEQ ID NO: 2648258 - RNA, 23 nt, Human
auuaaucacuguguauauuugau

SEQ ID NO: 2648259 - RNA, 22 nt, Human
auuaaucacuguguauauuuga

SEQ ID NO: 2648260 - RNA, 21 nt, Human
auuaaucacuguguauauuug

SEQ ID NO: 2648261 - RNA, 20 nt, Human
auuaaucacuguguauauuu

SEQ ID NO: 2648262 - RNA, 19 nt, Human
auuaaucacuguguauauu

SEQ ID NO: 2648263 - RNA, 18 nt, Human
auuaaucacuguguauau

SEQ ID NO: 2648264 - RNA, 17 nt, Human
auuaaucacuguguaua

SEQ ID NO: 2648265 - RNA, 16 nt, Human
auuaaucacuguguau

SEQ ID NO: 2648266 - RNA, 17 nt, Human
auuacuguuuauuacuu

SEQ ID NO: 2648267 - RNA, 18 nt, Human
auuacuguuuauuacuuc

SEQ ID NO: 2648268 - RNA, 20 nt, Human
auuacuguuuauuacuucca

SEQ ID NO: 2648269 - RNA, 13 nt, Human
auuagagaagaga

SEQ ID NO: 2648270 - RNA, 15 nt, Human
auuacuuguugccua

SEQ ID NO: 2648271 - RNA, 17 nt, Human
uuuuguguaaugaaaau

SEQ ID NO: 2648272 - RNA, 14 nt, Human
uuuugugugaaauu

SEQ ID NO: 2648273 - RNA, 15 nt, Human
uuuugugugaaauug

SEQ ID NO: 2648274 - RNA, 16 nt, Human
uuuuguuaacugauuu

SEQ ID NO: 2648275 - RNA, 15 nt, Human
uuuuguuaacugauu

SEQ ID NO: 2648276 - RNA, 18 nt, Human
uuuuggagauuauaauaa

SEQ ID NO: 2648277 - RNA, 14 nt, Human
uuuucuguuucugu

SEQ ID NO: 2648278 - RNA, 12 nt, Human
auuaaaauauuu

SEQ ID NO: 2648279 - RNA, 13 nt, Human
auuaaaauauuuc

SEQ ID NO: 2648280 - RNA, 14 nt, Human
auuaaaauauuuca

SEQ ID NO: 2648281 - RNA, 17 nt, Human
auuaaaauauuucaggu

SEQ ID NO: 2648282 - RNA, 21 nt, Human
uuuugcuuuuggcaaaacucu

SEQ ID NO: 2648283 - RNA, 17 nt, Human
uuuuggacuucaaagca

SEQ ID NO: 2648284 - RNA, 19 nt, Human
uuuuguuguacuuaaaugg

SEQ ID NO: 2648285 - RNA, 16 nt, Human
uuuuguuuuugucuua

SEQ ID NO: 2648286 - RNA, 22 nt, Human
uuuuguuuuaaaacuggaccug

SEQ ID NO: 2648287 - RNA, 15 nt, Human
uuuuguuuuggcuga

SEQ ID NO: 2648288 - RNA, 14 nt, Human
uuuuuacaagaugu

SEQ ID NO: 2648289 - RNA, 16 nt, Human
uuuuuaauuuacuugu

SEQ ID NO: 2648290 - RNA, 13 nt, Human
uuuuuaauuguau

SEQ ID NO: 2648291 - RNA, 16 nt, Human
uuuuuaauuguuuaaa

SEQ ID NO: 2648292 - RNA, 18 nt, Human
uuuuguuuuucugcuuua

SEQ ID NO: 2648293 - RNA, 18 nt, Human
uuuuuauagcaacaacaa

SEQ ID NO: 2648294 - RNA, 21 nt, Human
uuuuuauaucaugcaaaauau

SEQ ID NO: 2648295 - RNA, 21 nt, Human
uuuuugggggguuuucuugcc

SEQ ID NO: 2648296 - RNA, 22 nt, Human
uuuuugggggguuuucuugccu

SEQ ID NO: 2648297 - RNA, 22 nt, Human
uuuuuguauauugguuuuauga

SEQ ID NO: 2648298 - RNA, 9 nt, Human
uuuuuguau

SEQ ID NO: 2648299 - RNA, 14 nt, Human
uuuuugguugggaa

SEQ ID NO: 2648300 - RNA, 12 nt, Human
uuuuuguaugug

SEQ ID NO: 2648301 - RNA, 14 nt, Human
uuuuuguaugugug

SEQ ID NO: 2648302 - RNA, 22 nt, Human
auuaagcuguuccuguucagua

SEQ ID NO: 2648303 - RNA, 13 nt, Human
auuaaggaagaca

SEQ ID NO: 2648304 - RNA, 15 nt, Human
auuaaggggaagaau

SEQ ID NO: 2648305 - RNA, 18 nt, Human
auuaaggggaagaaugaa

SEQ ID NO: 2648306 - RNA, 19 nt, Human
auuaaggggaagaaugaaa

SEQ ID NO: 2648307 - RNA, 21 nt, Human
uuuuucaaaauccaaaaagaa

SEQ ID NO: 2648308 - RNA, 17 nt, Human
uuuuucaaguuguaaau

SEQ ID NO: 2648309 - RNA, 19 nt, Human
uuuuucaaguuguaaauaa

SEQ ID NO: 2648310 - RNA, 21 nt, Human
uuuuucaaguuguaaauaauu

SEQ ID NO: 2648311 - RNA, 12 nt, Human
uuuuucaauaua

SEQ ID NO: 2648312 - RNA, 16 nt, Human
uuuuucaauauauuga

SEQ ID NO: 2648313 - RNA, 17 nt, Human
uuuuucaauauauugaa

SEQ ID NO: 2648314 - RNA, 19 nt, Human
uuuuucaauauauugaacu

SEQ ID NO: 2648315 - RNA, 20 nt, Human
uuuuucaauauauugaacuu

SEQ ID NO: 2648316 - RNA, 12 nt, Human
uuuuugacacug

SEQ ID NO: 2648317 - RNA, 13 nt, Human
uuuuugacacuga

SEQ ID NO: 2648318 - RNA, 15 nt, Human
uuuuugacacugaaa

SEQ ID NO: 2648319 - RNA, 18 nt, Human
uuuuugacacugaaaguu

SEQ ID NO: 2648320 - RNA, 19 nt, Human
uuuuugacacugaaaguuu

SEQ ID NO: 2648321 - RNA, 22 nt, Human
uuuuugacacugaaaguuuugu

SEQ ID NO: 2648322 - RNA, 13 nt, Human
uuuuuauuuauau

SEQ ID NO: 2648323 - RNA, 15 nt, Human
uuuuuauauuuccuu

SEQ ID NO: 2648324 - RNA, 22 nt, Human
uuuuuauauuuccuuuauguga

SEQ ID NO: 2648325 - RNA, 17 nt, Human
uuuuuauuuauauguau

SEQ ID NO: 2648326 - RNA, 18 nt, Human
uuuuuauuuauauguacu

SEQ ID NO: 2648327 - RNA, 14 nt, Human
uuuuuauuuauaug

SEQ ID NO: 2648328 - RNA, 13 nt, Human
uuuuuauuuaaau

SEQ ID NO: 2648329 - RNA, 13 nt, Human
uuuuucaaaagaa

SEQ ID NO: 2648330 - RNA, 21 nt, Human
uuuuuauuuauauguaugugu

SEQ ID NO: 2648331 - RNA, 15 nt, Human
uuuuuauuucuacug

SEQ ID NO: 2648332 - RNA, 16 nt, Human
uuuuuauuucuacugu

SEQ ID NO: 2648333 - RNA, 12 nt, Human
uuuuuggacuuc

SEQ ID NO: 2648334 - RNA, 18 nt, Human
uuuuuggacuucaaagca

SEQ ID NO: 2648335 - RNA, 23 nt, Human
uuuuugcugcugccucuuucccu

SEQ ID NO: 2648336 - RNA, 20 nt, Human
uuuuugcacauguuuccucu

SEQ ID NO: 2648337 - RNA, 19 nt, Human
uuuuugcaugcaugcaaau

SEQ ID NO: 2648338 - RNA, 19 nt, Human
uuuuugauagcauuguaag

SEQ ID NO: 2648339 - RNA, 14 nt, Human
uuuuugauagcauu

SEQ ID NO: 2648340 - RNA, 13 nt, Human
uuuuugauagcau

SEQ ID NO: 2648341 - RNA, 12 nt, Human
uuuuugacuuuu

SEQ ID NO: 2648342 - RNA, 20 nt, Human
uuuuugacuuuuuuuguaug

SEQ ID NO: 2648343 - RNA, 23 nt, Human
uuuuugacuuuuuuuguaugugu

SEQ ID NO: 2648344 - RNA, 18 nt, Human
auucaggguaaauaggaa

SEQ ID NO: 2648345 - RNA, 14 nt, Human
auucagguaacacu

SEQ ID NO: 2648346 - RNA, 19 nt, Human
auucaguggcgagaaauaa

SEQ ID NO: 2648347 - RNA, 13 nt, Human
auucacuggcccc

SEQ ID NO: 2648348 - RNA, 21 nt, Human
auucacucccacacccaagaa

SEQ ID NO: 2648349 - RNA, 18 nt, Human
auucagcagcaaauuuuc

SEQ ID NO: 2648350 - RNA, 19 nt, Human
auucagcagcaaauuuuca

SEQ ID NO: 2648351 - RNA, 20 nt, Human
auucagcagcaaauuuucag

SEQ ID NO: 2648352 - RNA, 12 nt, Human
auucagauguau

SEQ ID NO: 2648353 - RNA, 14 nt, Human
auucagauguaugu

SEQ ID NO: 2648354 - RNA, 12 nt, Human
auuccaauaaac

SEQ ID NO: 2648355 - RNA, 17 nt, Human
auuccuaaagaaaaaua

SEQ ID NO: 2648356 - RNA, 18 nt, Human
auuccuaaagaaaaauau

SEQ ID NO: 2648357 - RNA, 18 nt, Human
auuauaaaggauaaagaa

SEQ ID NO: 2648358 - RNA, 22 nt, Human
auuauaaaggauaaagaaggau

SEQ ID NO: 2648359 - RNA, 14 nt, Human
auuagagaacaucc

SEQ ID NO: 2648360 - RNA, 15 nt, Human
auuagagaacauccu

SEQ ID NO: 2648361 - RNA, 17 nt, Human
auuauaaauaucauugu

SEQ ID NO: 2648362 - RNA, 19 nt, Human
auucaaacuggggccucca

SEQ ID NO: 2648363 - RNA, 17 nt, Human
auucaaacuggggccuc

SEQ ID NO: 2648364 - RNA, 22 nt, Human
auucaaacuggggccuccagaa

SEQ ID NO: 2648365 - RNA, 12 nt, Human
auucacucccac

SEQ ID NO: 2648366 - RNA, 13 nt, Human
auucacucccaca

SEQ ID NO: 2648367 - RNA, 14 nt, Human
auuauuuaagacua

SEQ ID NO: 2648368 - RNA, 19 nt, Human
auuauuuaagacuaaaagu

SEQ ID NO: 2648369 - RNA, 17 nt, Human
auuauuuuuuuaaaauu

SEQ ID NO: 2648370 - RNA, 18 nt, Human
auuauuuuuuuaaaauuu

SEQ ID NO: 2648371 - RNA, 19 nt, Human
auuauuuuuuuaaaauuuu

SEQ ID NO: 2648372 - RNA, 20 nt, Human
auuauuuuuuuaaaauuuug

SEQ ID NO: 2648373 - RNA, 21 nt, Human
auuauuuuuuuaaaauuuugu

SEQ ID NO: 2648374 - RNA, 22 nt, Human
auuauuuuuuuaaaauuuugua

SEQ ID NO: 2648375 - RNA, 14 nt, Human
auuauuuuuguaga

SEQ ID NO: 2648376 - RNA, 14 nt, Human
auuauuuuuauaau

SEQ ID NO: 2648377 - RNA, 18 nt, Human
auuauuuuuauaauugua

SEQ ID NO: 2648378 - RNA, 19 nt, Human
auuauuuuuauaauuguac

SEQ ID NO: 2648379 - RNA, 17 nt, Human
auuauuuuucacucuaa

SEQ ID NO: 2648380 - RNA, 17 nt, Human
uuugaauuuuaaaucua

SEQ ID NO: 2648381 - RNA, 22 nt, Human
uuugaauuauccacaugaaaau

SEQ ID NO: 2648382 - RNA, 15 nt, Human
uuucccucacccccu

SEQ ID NO: 2648383 - RNA, 19 nt, Human
uuucccucacccccuccca

SEQ ID NO: 2648384 - RNA, 20 nt, Human
uuugacaacguuucagcgac

SEQ ID NO: 2648385 - RNA, 23 nt, Human
uuugacaagcuggcuuacacugg

SEQ ID NO: 2648386 - RNA, 12 nt, Human
uuugacacugaa

SEQ ID NO: 2648387 - RNA, 13 nt, Human
uuugacacugaaa

SEQ ID NO: 2648388 - RNA, 17 nt, Human
uuugacacugaaaguuu

SEQ ID NO: 2648389 - RNA, 18 nt, Human
uuugacacugaaaguuuu

SEQ ID NO: 2648390 - RNA, 19 nt, Human
uuugacacugaaaguuuug

SEQ ID NO: 2648391 - RNA, 22 nt, Human
uuugacacugaaaguuuuguaa

SEQ ID NO: 2648392 - RNA, 22 nt, Human
uuugacuuuuuuuguaugugug

SEQ ID NO: 2648393 - RNA, 16 nt, Human
uuugagaaaauaaagc

SEQ ID NO: 2648394 - RNA, 20 nt, Human
uuugagaaaugaaauauugu

SEQ ID NO: 2648395 - RNA, 13 nt, Human
uuugagacaggag

SEQ ID NO: 2648396 - RNA, 17 nt, Human
uuugauuauuuaagacu

SEQ ID NO: 2648397 - RNA, 14 nt, Human
uuugauuauuugca

SEQ ID NO: 2648398 - RNA, 15 nt, Human
uuugauuauuugcau

SEQ ID NO: 2648399 - RNA, 16 nt, Human
uuugauuauuugcaug

SEQ ID NO: 2648400 - RNA, 17 nt, Human
uuugauuauuugcaugu

SEQ ID NO: 2648401 - RNA, 20 nt, Human
uuugauuauuugcauguuau

SEQ ID NO: 2648402 - RNA, 22 nt, Human
uuugauuauuugcauguuaugu

SEQ ID NO: 2648403 - RNA, 21 nt, Human
uuugaugagguauuuuuuccu

SEQ ID NO: 2648404 - RNA, 16 nt, Human
uuugaugcaugucuuu

SEQ ID NO: 2648405 - RNA, 17 nt, Human
uuugaugcaugucuuuu

SEQ ID NO: 2648406 - RNA, 22 nt, Human
uuugaugcaugucuuuuaaaau

SEQ ID NO: 2648407 - RNA, 19 nt, Human
uuuggcaaacgcuaaagag

SEQ ID NO: 2648408 - RNA, 20 nt, Human
uuuggcugaaauucuccugg

SEQ ID NO: 2648409 - RNA, 21 nt, Human
uuuggcugaaauucuccugga

SEQ ID NO: 2648410 - RNA, 15 nt, Human
uuugggaguuuuuau

SEQ ID NO: 2648411 - RNA, 22 nt, Human
uuuggcugaaauucuccuggag

SEQ ID NO: 2648412 - RNA, 23 nt, Human
uuugggaguuuuuaugagaaacu

SEQ ID NO: 2648413 - RNA, 23 nt, Human
uuuggguggggggcauugaguau

SEQ ID NO: 2648414 - RNA, 20 nt, Human
uuugggggguuuucuugccu

SEQ ID NO: 2648415 - RNA, 15 nt, Human
uuuggauucuaaaua

SEQ ID NO: 2648416 - RNA, 18 nt, Human
uuuggauucuaaauacau

SEQ ID NO: 2648417 - RNA, 19 nt, Human
uuuggauucuaaauacaug

SEQ ID NO: 2648418 - RNA, 21 nt, Human
uuugauugaauaaugccacca

SEQ ID NO: 2648419 - RNA, 16 nt, Human
uuugauuuauuaacuu

SEQ ID NO: 2648420 - RNA, 13 nt, Human
uuugauuuauuaa

SEQ ID NO: 2648421 - RNA, 21 nt, Human
uuugauuuauuaacuuaauaa

SEQ ID NO: 2648422 - RNA, 17 nt, Human
uuugauugggaugaaug

SEQ ID NO: 2648423 - RNA, 23 nt, Human
uuuguaauaagcaaucaagguua

SEQ ID NO: 2648424 - RNA, 20 nt, Human
uuuguaagaaggcaauauua

SEQ ID NO: 2648425 - RNA, 19 nt, Human
augugaggggucccuagca

SEQ ID NO: 2648426 - RNA, 11 nt, Human
uuuguuuguuu

SEQ ID NO: 2648427 - RNA, 15 nt, Human
uuugugcaaagccaa

SEQ ID NO: 2648428 - RNA, 13 nt, Human
uuugugccagagg

SEQ ID NO: 2648429 - RNA, 14 nt, Human
uuugugcuagaaau

SEQ ID NO: 2648430 - RNA, 20 nt, Human
uuugugcuagaaauuuucaa

SEQ ID NO: 2648431 - RNA, 21 nt, Human
uuugugcuagaaauuuucaag

SEQ ID NO: 2648432 - RNA, 14 nt, Human
uuugucuuaaaaag

SEQ ID NO: 2648433 - RNA, 13 nt, Human
uuugucuuaaaaa

SEQ ID NO: 2648434 - RNA, 23 nt, Human
uuugucuuaaaaaguggaaaaau

SEQ ID NO: 2648435 - RNA, 15 nt, Human
augugacauuaacaa

SEQ ID NO: 2648436 - RNA, 18 nt, Human
augugacauuaacaaaua

SEQ ID NO: 2648437 - RNA, 21 nt, Human
augugacauuaacaaauaaaa

SEQ ID NO: 2648438 - RNA, 21 nt, Human
augugacaauuuuguacaaau

SEQ ID NO: 2648439 - RNA, 20 nt, Human
augugacaauuuuguacaaa

SEQ ID NO: 2648440 - RNA, 18 nt, Human
augugacaauuuuguaca

SEQ ID NO: 2648441 - RNA, 19 nt, Human
augucguggacacacacag

SEQ ID NO: 2648442 - RNA, 20 nt, Human
augucguggacacacacaga

SEQ ID NO: 2648443 - RNA, 10 nt, Human
augugaauuu

SEQ ID NO: 2648444 - RNA, 11 nt, Human
augugaauuuu

SEQ ID NO: 2648445 - RNA, 12 nt, Human
augugaauuuuu

SEQ ID NO: 2648446 - RNA, 13 nt, Human
augugaauuuuua

SEQ ID NO: 2648447 - RNA, 14 nt, Human
augugaauuuuuaa

SEQ ID NO: 2648448 - RNA, 15 nt, Human
augugaauuuuuaag

SEQ ID NO: 2648449 - RNA, 16 nt, Human
augugaauuuuuaagc

SEQ ID NO: 2648450 - RNA, 17 nt, Human
augugaauuuuuaagcu

SEQ ID NO: 2648451 - RNA, 18 nt, Human
augugaauuuuuaagcug

SEQ ID NO: 2648452 - RNA, 19 nt, Human
augugaauuuuuaagcugc

SEQ ID NO: 2648453 - RNA, 21 nt, Human
augugaauuuuuaagcugcaa

SEQ ID NO: 2648454 - RNA, 17 nt, Human
augugaauuuuuauugu

SEQ ID NO: 2648455 - RNA, 18 nt, Human
augugaauuuuuauuguu

SEQ ID NO: 2648456 - RNA, 15 nt, Human
augugagcucuuccu

SEQ ID NO: 2648457 - RNA, 14 nt, Human
augugagaagccag

SEQ ID NO: 2648458 - RNA, 15 nt, Human
augugagaagccagc

SEQ ID NO: 2648459 - RNA, 19 nt, Human
augugagugguugaauaug

SEQ ID NO: 2648460 - RNA, 16 nt, Human
augugagugguugaau

SEQ ID NO: 2648461 - RNA, 15 nt, Human
augugagugguugaa

SEQ ID NO: 2648462 - RNA, 20 nt, Human
augugagugacgaugaugua

SEQ ID NO: 2648463 - RNA, 22 nt, Human
augugagugguugaauaugauu

SEQ ID NO: 2648464 - RNA, 15 nt, Human
augugauacauuuuu

SEQ ID NO: 2648465 - RNA, 21 nt, Human
augugauacauuuuuuaagcu

SEQ ID NO: 2648466 - RNA, 22 nt, Human
augugauacauuuuuuaagcuu

SEQ ID NO: 2648467 - RNA, 15 nt, Human
augugagagaaagug

SEQ ID NO: 2648468 - RNA, 14 nt, Human
augugagagaaagu

SEQ ID NO: 2648469 - RNA, 14 nt, Human
auguauauuaaaaa

SEQ ID NO: 2648470 - RNA, 16 nt, Human
auguauauuaaaaaag

SEQ ID NO: 2648471 - RNA, 17 nt, Human
auguauauuaaaaaaga

SEQ ID NO: 2648472 - RNA, 20 nt, Human
auguauauuaaaaaagagac

SEQ ID NO: 2648473 - RNA, 21 nt, Human
auguauauuaaaaaagagaca

SEQ ID NO: 2648474 - RNA, 22 nt, Human
auguauauuaaaaaagagacau

SEQ ID NO: 2648475 - RNA, 16 nt, Human
uuuggggucuuugugg

SEQ ID NO: 2648476 - RNA, 16 nt, Human
augucauuucagaagu

SEQ ID NO: 2648477 - RNA, 17 nt, Human
augucauuucagaaguu

SEQ ID NO: 2648478 - RNA, 15 nt, Human
auguccuaaugguga

SEQ ID NO: 2648479 - RNA, 16 nt, Human
auguccuaauggugau

SEQ ID NO: 2648480 - RNA, 12 nt, Human
auguccaaagag

SEQ ID NO: 2648481 - RNA, 15 nt, Human
auguccaaagaggcu

SEQ ID NO: 2648482 - RNA, 16 nt, Human
auguccaaagaggcug

SEQ ID NO: 2648483 - RNA, 18 nt, Human
auguccaaagaggcugcc

SEQ ID NO: 2648484 - RNA, 19 nt, Human
auguccaaagaggcugccc

SEQ ID NO: 2648485 - RNA, 20 nt, Human
auguccaaagaggcugcccc

SEQ ID NO: 2648486 - RNA, 21 nt, Human
auguccaaagaggcugccccu

SEQ ID NO: 2648487 - RNA, 22 nt, Human
auguccaaagaggcugccccuc

SEQ ID NO: 2648488 - RNA, 16 nt, Human
augugcauaguuucuu

SEQ ID NO: 2648489 - RNA, 17 nt, Human
augugcauaguuucuuu

SEQ ID NO: 2648490 - RNA, 18 nt, Human
augugcauaguuucuuua

SEQ ID NO: 2648491 - RNA, 18 nt, Human
uuuuaaaaaacugcugac

SEQ ID NO: 2648492 - RNA, 18 nt, Human
uuuguuuuuuguuuuucu

SEQ ID NO: 2648493 - RNA, 18 nt, Human
uuuguuuuuauuuaaauu

SEQ ID NO: 2648494 - RNA, 15 nt, Human
uuuguuuuuuaaaaa

SEQ ID NO: 2648495 - RNA, 15 nt, Human
uuuguuuuucugcuu

SEQ ID NO: 2648496 - RNA, 13 nt, Human
auguguuuagaau

SEQ ID NO: 2648497 - RNA, 16 nt, Human
auguguuuagaauuga

SEQ ID NO: 2648498 - RNA, 14 nt, Human
auguguuuagaauu

SEQ ID NO: 2648499 - RNA, 20 nt, Human
auguguuuagaauugaaggu

SEQ ID NO: 2648500 - RNA, 17 nt, Human
auguguuuagaauugaa

SEQ ID NO: 2648501 - RNA, 16 nt, Human
auguuaaagagaauga

SEQ ID NO: 2648502 - RNA, 17 nt, Human
auguuaaagagaaugag

SEQ ID NO: 2648503 - RNA, 18 nt, Human
auguuaaagagaaugagu

SEQ ID NO: 2648504 - RNA, 22 nt, Human
auguuaaagagaaugaguccuu

SEQ ID NO: 2648505 - RNA, 15 nt, Human
auguguuuuagaugg

SEQ ID NO: 2648506 - RNA, 14 nt, Human
auguguggccugca

SEQ ID NO: 2648507 - RNA, 21 nt, Human
uuuuagacccuauugcugcuu

SEQ ID NO: 2648508 - RNA, 20 nt, Human
auguucuuuuaaaugauuga

SEQ ID NO: 2648509 - RNA, 19 nt, Human
auguuacaaaaauaaacua

SEQ ID NO: 2648510 - RNA, 17 nt, Human
auguuacaaguuuauau

SEQ ID NO: 2648511 - RNA, 20 nt, Human
auguuacaaguuuauauaua

SEQ ID NO: 2648512 - RNA, 21 nt, Human
auguuauuuucuguugaaguu

SEQ ID NO: 2648513 - RNA, 18 nt, Human
auguuauuuucuguugaa

SEQ ID NO: 2648514 - RNA, 13 nt, Human
auguuauuaucug

SEQ ID NO: 2648515 - RNA, 12 nt, Human
auguuauguuua

SEQ ID NO: 2648516 - RNA, 13 nt, Human
auguuauguuuaa

SEQ ID NO: 2648517 - RNA, 16 nt, Human
auguuauguuuaauaa

SEQ ID NO: 2648518 - RNA, 19 nt, Human
auguuauguuuaauaagcu

SEQ ID NO: 2648519 - RNA, 15 nt, Human
auguuauuagauguu

SEQ ID NO: 2648520 - RNA, 14 nt, Human
uuuuaguaauuucu

SEQ ID NO: 2648521 - RNA, 19 nt, Human
uuuuaguauuuauuuaugu

SEQ ID NO: 2648522 - RNA, 20 nt, Human
uuuuaguauuuauuuaugua

SEQ ID NO: 2648523 - RNA, 23 nt, Human
uuuuaguauuuauuuauguacuu

SEQ ID NO: 2648524 - RNA, 23 nt, Human
uuuuauuaaucacuguguauauu

SEQ ID NO: 2648525 - RNA, 11 nt, Human
uuuuauuaaug

SEQ ID NO: 2648526 - RNA, 22 nt, Human
uuuuauuaaucacuguguauau

SEQ ID NO: 2648527 - RNA, 21 nt, Human
uuuuauuaaucacuguguaua

SEQ ID NO: 2648528 - RNA, 20 nt, Human
uuuuauuaaucacuguguau

SEQ ID NO: 2648529 - RNA, 18 nt, Human
uuuuauuaaucacugugu

SEQ ID NO: 2648530 - RNA, 15 nt, Human
uuuuauuaaucacug

SEQ ID NO: 2648531 - RNA, 14 nt, Human
uuuuauuaaucacu

SEQ ID NO: 2648532 - RNA, 13 nt, Human
uuuuauuaaucac

SEQ ID NO: 2648533 - RNA, 12 nt, Human
uuuuauuaauca

SEQ ID NO: 2648534 - RNA, 14 nt, Human
uuuuauuaaaacau

SEQ ID NO: 2648535 - RNA, 19 nt, Human
uuuuauuaaaauauuucag

SEQ ID NO: 2648536 - RNA, 22 nt, Human
uuuuauuaaaauauuucagguu

SEQ ID NO: 2648537 - RNA, 10 nt, Human
uuuuauuguu

SEQ ID NO: 2648538 - RNA, 13 nt, Human
uuuuauuguugua

SEQ ID NO: 2648539 - RNA, 22 nt, Human
uuuucagggcuggcuccugauc

SEQ ID NO: 2648540 - RNA, 19 nt, Human
uuuuccaaagagugauagu

SEQ ID NO: 2648541 - RNA, 11 nt, Human
uuuuccaaaug

SEQ ID NO: 2648542 - RNA, 22 nt, Human
uuuuccaaauguaauaaacuuu

SEQ ID NO: 2648543 - RNA, 18 nt, Human
uuuuccacuccauugucg

SEQ ID NO: 2648544 - RNA, 17 nt, Human
uuuucuacuuuuuuuaa

SEQ ID NO: 2648545 - RNA, 14 nt, Human
uuuucuagaauuau

SEQ ID NO: 2648546 - RNA, 15 nt, Human
uuuucuagaauuauu

SEQ ID NO: 2648547 - RNA, 20 nt, Human
uuuucuagaauuauuuuuca

SEQ ID NO: 2648548 - RNA, 22 nt, Human
uuuucuagaauuauuuuucacu

SEQ ID NO: 2648549 - RNA, 14 nt, Human
uuuucucuguacuu

SEQ ID NO: 2648550 - RNA, 18 nt, Human
uuuucucuguacuuuuca

SEQ ID NO: 2648551 - RNA, 20 nt, Human
uuuucucugcauuuaaaaaa

SEQ ID NO: 2648552 - RNA, 23 nt, Human
uuuucuguugaaguuuacaauca

SEQ ID NO: 2648553 - RNA, 12 nt, Human
uuuucugcccug

SEQ ID NO: 2648554 - RNA, 13 nt, Human
uuuucugcccugg

SEQ ID NO: 2648555 - RNA, 15 nt, Human
uuuucugcccuggcu

SEQ ID NO: 2648556 - RNA, 16 nt, Human
uuuucugcccuggcug

SEQ ID NO: 2648557 - RNA, 12 nt, Human
uuuucugcuuua

SEQ ID NO: 2648558 - RNA, 19 nt, Human
uuuucugcuuuagacuuga

SEQ ID NO: 2648559 - RNA, 15 nt, Human
uuuucugcuuuagac

SEQ ID NO: 2648560 - RNA, 22 nt, Human
uuuucugcuuuagacuugaaaa

SEQ ID NO: 2648561 - RNA, 19 nt, Human
auguugggaaacuuggcuc

SEQ ID NO: 2648562 - RNA, 20 nt, Human
auguugggaaacuuggcucg

SEQ ID NO: 2648563 - RNA, 12 nt, Human
auguugggacug

SEQ ID NO: 2648564 - RNA, 12 nt, Human
auguuuaaaaua

SEQ ID NO: 2648565 - RNA, 15 nt, Human
auguuuaaaauaaaa

SEQ ID NO: 2648566 - RNA, 17 nt, Human
auguuuaaaauaaaaug

SEQ ID NO: 2648567 - RNA, 18 nt, Human
auguuuaaaauaaaauga

SEQ ID NO: 2648568 - RNA, 19 nt, Human
auguuuaaaauaaaaugaa

SEQ ID NO: 2648569 - RNA, 22 nt, Human
auguuuuuuaaaauauuuaucu

SEQ ID NO: 2648570 - RNA, 13 nt, Human
auuaaaaaagaga

SEQ ID NO: 2648571 - RNA, 16 nt, Human
auuaaaaaagagacau

SEQ ID NO: 2648572 - RNA, 22 nt, Human
auuaaaaaagagacauccaaau

SEQ ID NO: 2648573 - RNA, 14 nt, Human
auguuuuuauacaa

SEQ ID NO: 2648574 - RNA, 15 nt, Human
auguuuuuauacaaa

SEQ ID NO: 2648575 - RNA, 18 nt, Human
auguuuuuauacaaaaua

SEQ ID NO: 2648576 - RNA, 12 nt, Human
auguuuuuauac

SEQ ID NO: 2648577 - RNA, 20 nt, Human
auuccuauauccugugacug

SEQ ID NO: 2648578 - RNA, 19 nt, Human
auuccuauauccugugacu

SEQ ID NO: 2648579 - RNA, 17 nt, Human
auugaagguuuuugaua

SEQ ID NO: 2648580 - RNA, 13 nt, Human
auugaagguuuuu

SEQ ID NO: 2648581 - RNA, 19 nt, Human
auugaagguuuuugauagc

SEQ ID NO: 2648582 - RNA, 18 nt, Human
auugaagguuuuugauag

SEQ ID NO: 2648583 - RNA, 22 nt, Human
auugaaugauauauaaauauau

SEQ ID NO: 2648584 - RNA, 16 nt, Human
auugaaguaaugaauu

SEQ ID NO: 2648585 - RNA, 22 nt, Human
auugaaguguauaauauaaaaa

SEQ ID NO: 2648586 - RNA, 15 nt, Human
auugaaguaaugaau

SEQ ID NO: 2648587 - RNA, 14 nt, Human
auugaaguaaugaa

SEQ ID NO: 2648588 - RNA, 20 nt, Human
auugaagguuuuugauagca

SEQ ID NO: 2648589 - RNA, 23 nt, Human
auugcaguuuaucauucaagugu

SEQ ID NO: 2648590 - RNA, 14 nt, Human
auugauuugauugg

SEQ ID NO: 2648591 - RNA, 12 nt, Human
auugcaccacug

SEQ ID NO: 2648592 - RNA, 21 nt, Human
auugauguggcccuggcugcc

SEQ ID NO: 2648593 - RNA, 14 nt, Human
auugcaaaauacau

SEQ ID NO: 2648594 - RNA, 16 nt, Human
auugcaaaauacauga

SEQ ID NO: 2648595 - RNA, 17 nt, Human
auugcaaaauacaugaa

SEQ ID NO: 2648596 - RNA, 18 nt, Human
auugcaaaauacaugaag

SEQ ID NO: 2648597 - RNA, 19 nt, Human
auugcaaaauacaugaagc

SEQ ID NO: 2648598 - RNA, 12 nt, Human
auuggggaggag

SEQ ID NO: 2648599 - RNA, 14 nt, Human
auuggggaggaggg

SEQ ID NO: 2648600 - RNA, 21 nt, Human
auuggggaggagggggccggg

SEQ ID NO: 2648601 - RNA, 14 nt, Human
auugccuguuucug

SEQ ID NO: 2648602 - RNA, 15 nt, Human
auugccuguuucuga

SEQ ID NO: 2648603 - RNA, 21 nt, Human
auugccuguuucugauuugcu

SEQ ID NO: 2648604 - RNA, 17 nt, Human
auugccuuuuaauuuuu

SEQ ID NO: 2648605 - RNA, 15 nt, Human
auugcauacuuugua

SEQ ID NO: 2648606 - RNA, 21 nt, Human
auugcauacuuuguauuuuga

SEQ ID NO: 2648607 - RNA, 14 nt, Human
auugcaucacugua

SEQ ID NO: 2648608 - RNA, 15 nt, Human
auugcaucacuguau

SEQ ID NO: 2648609 - RNA, 16 nt, Human
auugcaucacuguauc

SEQ ID NO: 2648610 - RNA, 19 nt, Human
auugcaucacuguaucauu

SEQ ID NO: 2648611 - RNA, 20 nt, Human
auuugaauuuuaaaucuaaa

SEQ ID NO: 2648612 - RNA, 18 nt, Human
auuugaauuuuaaaucua

SEQ ID NO: 2648613 - RNA, 23 nt, Human
auuugagaauagacccuuacuag

SEQ ID NO: 2648614 - RNA, 19 nt, Human
auuugagaaaauaaagcua

SEQ ID NO: 2648615 - RNA, 15 nt, Human
auuucuucagggcug

SEQ ID NO: 2648616 - RNA, 13 nt, Human
auuucuuauguga

SEQ ID NO: 2648617 - RNA, 14 nt, Human
auuucuuaugugac

SEQ ID NO: 2648618 - RNA, 16 nt, Human
auuucuuaugugacau

SEQ ID NO: 2648619 - RNA, 17 nt, Human
auuucuuaugugacauu

SEQ ID NO: 2648620 - RNA, 18 nt, Human
auuucuuaugugacauua

SEQ ID NO: 2648621 - RNA, 19 nt, Human
auuucuuaugugacauuaa

SEQ ID NO: 2648622 - RNA, 21 nt, Human
auuucuuaugugacauuaaca

SEQ ID NO: 2648623 - RNA, 18 nt, Human
auuucuuuaaaagaauga

SEQ ID NO: 2648624 - RNA, 20 nt, Human
auuucuuuaaaagaaugacu

SEQ ID NO: 2648625 - RNA, 21 nt, Human
auuucuuuaaaagaaugacua

SEQ ID NO: 2648626 - RNA, 23 nt, Human
auuuauuuuuuuuaauuguauuu

SEQ ID NO: 2648627 - RNA, 22 nt, Human
auuuauuuuuuuuaauuguauu

SEQ ID NO: 2648628 - RNA, 13 nt, Human
auuuccauugcuu

SEQ ID NO: 2648629 - RNA, 17 nt, Human
auuuauuuuuuuuaaag

SEQ ID NO: 2648630 - RNA, 18 nt, Human
auuuauuuuuuuuaaaga

SEQ ID NO: 2648631 - RNA, 19 nt, Human
auuuauuuuuuuuaaagaa

SEQ ID NO: 2648632 - RNA, 21 nt, Human
auuuauuuuuuuuaauuguau

SEQ ID NO: 2648633 - RNA, 19 nt, Human
auuuauuuuuuuuaauugu

SEQ ID NO: 2648634 - RNA, 19 nt, Human
auuuauuuuccuaaagaga

SEQ ID NO: 2648635 - RNA, 15 nt, Human
auuuauuuuccuaaa

SEQ ID NO: 2648636 - RNA, 16 nt, Human
auuuauuuuccuaaag

SEQ ID NO: 2648637 - RNA, 17 nt, Human
auuuauuuuccuaaaga

SEQ ID NO: 2648638 - RNA, 10 nt, Human
auuuccuuua

SEQ ID NO: 2648639 - RNA, 17 nt, Human
auuuccucgcagccucu

SEQ ID NO: 2648640 - RNA, 19 nt, Human
auuuccucgcagccucuca

SEQ ID NO: 2648641 - RNA, 19 nt, Human
auuuccucccucugccccu

SEQ ID NO: 2648642 - RNA, 21 nt, Human
auuuccucccucugccccucc

SEQ ID NO: 2648643 - RNA, 15 nt, Human
auuuccuuuuugaca

SEQ ID NO: 2648644 - RNA, 17 nt, Human
auuuccuuuuugacacu

SEQ ID NO: 2648645 - RNA, 18 nt, Human
auuuccuuuuugacacug

SEQ ID NO: 2648646 - RNA, 19 nt, Human
auuuccuuuuugacacuga

SEQ ID NO: 2648647 - RNA, 20 nt, Human
auuuccuuuuugacacugaa

SEQ ID NO: 2648648 - RNA, 13 nt, Human
auuuccuuuaugu

SEQ ID NO: 2648649 - RNA, 14 nt, Human
auuuccuuuaugug

SEQ ID NO: 2648650 - RNA, 15 nt, Human
auuuccuuuauguga

SEQ ID NO: 2648651 - RNA, 16 nt, Human
auuuccuuuaugugaa

SEQ ID NO: 2648652 - RNA, 17 nt, Human
auuuccuuuaugugaau

SEQ ID NO: 2648653 - RNA, 18 nt, Human
auuuccuuuaugugaauu

SEQ ID NO: 2648654 - RNA, 19 nt, Human
auuuccuuuaugugaauuu

SEQ ID NO: 2648655 - RNA, 20 nt, Human
auuuccuuuaugugaauuuu

SEQ ID NO: 2648656 - RNA, 21 nt, Human
auuuccuuuaugugaauuuuu

SEQ ID NO: 2648657 - RNA, 20 nt, Human
auuucauguaaaacagaaaa

SEQ ID NO: 2648658 - RNA, 14 nt, Human
auuuauugaguuuu

SEQ ID NO: 2648659 - RNA, 23 nt, Human
auuuauugauuccuuuuuucaaa

SEQ ID NO: 2648660 - RNA, 14 nt, Human
auuuauugacucuu

SEQ ID NO: 2648661 - RNA, 13 nt, Human
auuuauugacucu

SEQ ID NO: 2648662 - RNA, 22 nt, Human
auuuauugacucuugaguuguu

SEQ ID NO: 2648663 - RNA, 20 nt, Human
auuuauugacucuugaguug

SEQ ID NO: 2648664 - RNA, 19 nt, Human
auuuauugacucuugaguu

SEQ ID NO: 2648665 - RNA, 16 nt, Human
auuuauugacucuuga

SEQ ID NO: 2648666 - RNA, 15 nt, Human
auuuauguguauaug

SEQ ID NO: 2648667 - RNA, 16 nt, Human
auuuauguguauaugg

SEQ ID NO: 2648668 - RNA, 16 nt, Human
auuuaguuguaaacca

SEQ ID NO: 2648669 - RNA, 22 nt, Human
auuuaguguuuuuuuauuucua

SEQ ID NO: 2648670 - RNA, 23 nt, Human
auuuaguguuuuuuuauuucuac

SEQ ID NO: 2648671 - RNA, 12 nt, Human
auuuacuuguuu

SEQ ID NO: 2648672 - RNA, 15 nt, Human
auuuacuuguuuugg

SEQ ID NO: 2648673 - RNA, 16 nt, Human
auuuacuuguuuugga

SEQ ID NO: 2648674 - RNA, 23 nt, Human
auuuacuuguuuuggauggcuug

SEQ ID NO: 2648675 - RNA, 23 nt, Human
auuuaaaaggauggcaaguugca

SEQ ID NO: 2648676 - RNA, 16 nt, Human
auuuaaaauaauuaua

SEQ ID NO: 2648677 - RNA, 14 nt, Human
auuuaaaaaaaauc

SEQ ID NO: 2648678 - RNA, 19 nt, Human
auuguuuuacaauaguucu

SEQ ID NO: 2648679 - RNA, 15 nt, Human
auuuacauuuaauag

SEQ ID NO: 2648680 - RNA, 16 nt, Human
auuuacucuaaaaacu

SEQ ID NO: 2648681 - RNA, 17 nt, Human
auuuacucuaaaaacug

SEQ ID NO: 2648682 - RNA, 15 nt, Human
auuuacuacuuuugc

SEQ ID NO: 2648683 - RNA, 15 nt, Human
auuuacuacaguagu

SEQ ID NO: 2648684 - RNA, 19 nt, Human
auuuacagaugaauguauu

SEQ ID NO: 2648685 - RNA, 18 nt, Human
auuuacaagggaagauuu

SEQ ID NO: 2648686 - RNA, 21 nt, Human
auuuacaagggaagauuuaug

SEQ ID NO: 2648687 - RNA, 20 nt, Human
auuuaaauccugaagagcau

SEQ ID NO: 2648688 - RNA, 13 nt, Human
auuuaaaugccau

SEQ ID NO: 2648689 - RNA, 13 nt, Human
auuuaaaugaaag

SEQ ID NO: 2648690 - RNA, 17 nt, Human
auuuaaaugaaagaaaa

SEQ ID NO: 2648691 - RNA, 15 nt, Human
cauuuguuaaaauua

SEQ ID NO: 2648692 - RNA, 18 nt, Human
cauuuguuaaaauuauca

SEQ ID NO: 2648693 - RNA, 22 nt, Human
cauuuguuaaaauuaucaauau

SEQ ID NO: 2648694 - RNA, 20 nt, Human
cauuuguuuacauuugaugc

SEQ ID NO: 2648695 - RNA, 17 nt, Human
cauuugggguaauacuu

SEQ ID NO: 2648696 - RNA, 23 nt, Human
cauuugggaguuuuuaugagaaa

SEQ ID NO: 2648697 - RNA, 12 nt, Human
ccaaaaaacuac

SEQ ID NO: 2648698 - RNA, 14 nt, Human
cauuuaguaagaau

SEQ ID NO: 2648699 - RNA, 15 nt, Human
cauuuaguaagaaua

SEQ ID NO: 2648700 - RNA, 13 nt, Human
ccaacuccagcaa

SEQ ID NO: 2648701 - RNA, 14 nt, Human
ccaacuccagcaac

SEQ ID NO: 2648702 - RNA, 15 nt, Human
ccaacuccagcaacu

SEQ ID NO: 2648703 - RNA, 16 nt, Human
ccaacuauuuauugac

SEQ ID NO: 2648704 - RNA, 11 nt, Human
ccaacuauuua

SEQ ID NO: 2648705 - RNA, 23 nt, Human
ccaacuauuuauugacucugggu

SEQ ID NO: 2648706 - RNA, 21 nt, Human
ccaacuccagcaacuucuucu

SEQ ID NO: 2648707 - RNA, 21 nt, Human
ccaaagugccggugagaccca

SEQ ID NO: 2648708 - RNA, 20 nt, Human
ccaaauauuaggcuuaaaaa

SEQ ID NO: 2648709 - RNA, 21 nt, Human
cauguccaaagaggcugcccc

SEQ ID NO: 2648710 - RNA, 22 nt, Human
cauguaugucagaagugcagaa

SEQ ID NO: 2648711 - RNA, 12 nt, Human
cauguauguuuc

SEQ ID NO: 2648712 - RNA, 13 nt, Human
cauguauguuucu

SEQ ID NO: 2648713 - RNA, 18 nt, Human
caugucauuucagaaguu

SEQ ID NO: 2648714 - RNA, 19 nt, Human
cauguccaaacguccucuu

SEQ ID NO: 2648715 - RNA, 12 nt, Human
cauguccaaaga

SEQ ID NO: 2648716 - RNA, 13 nt, Human
cauguccaaagag

SEQ ID NO: 2648717 - RNA, 14 nt, Human
cauguccaaagagg

SEQ ID NO: 2648718 - RNA, 15 nt, Human
cauguccaaagaggc

SEQ ID NO: 2648719 - RNA, 16 nt, Human
cauguccaaagaggcu

SEQ ID NO: 2648720 - RNA, 17 nt, Human
cauguccaaagaggcug

SEQ ID NO: 2648721 - RNA, 18 nt, Human
cauguccaaagaggcugc

SEQ ID NO: 2648722 - RNA, 19 nt, Human
cauguccaaagaggcugcc

SEQ ID NO: 2648723 - RNA, 20 nt, Human
cauguccaaagaggcugccc

SEQ ID NO: 2648724 - RNA, 13 nt, Human
cauucucuuuuaa

SEQ ID NO: 2648725 - RNA, 14 nt, Human
cauucucuuuuaau

SEQ ID NO: 2648726 - RNA, 16 nt, Human
caugcuccuggcccac

SEQ ID NO: 2648727 - RNA, 14 nt, Human
caugcuccuggccc

SEQ ID NO: 2648728 - RNA, 17 nt, Human
caugcuccuggcccacu

SEQ ID NO: 2648729 - RNA, 13 nt, Human
cauggcccugggc

SEQ ID NO: 2648730 - RNA, 14 nt, Human
cauggcccugggcg

SEQ ID NO: 2648731 - RNA, 12 nt, Human
cauggcccuggg

SEQ ID NO: 2648732 - RNA, 14 nt, Human
caugcaagcagagg

SEQ ID NO: 2648733 - RNA, 15 nt, Human
caugcaagcagagga

SEQ ID NO: 2648734 - RNA, 17 nt, Human
caugcaagcagaggacc

SEQ ID NO: 2648735 - RNA, 22 nt, Human
caugcaagcagaggaccagggc

SEQ ID NO: 2648736 - RNA, 23 nt, Human
caugcaagcagaggaccagggcc

SEQ ID NO: 2648737 - RNA, 16 nt, Human
caugcaaaugagcucu

SEQ ID NO: 2648738 - RNA, 20 nt, Human
caugcaaaugagcucugaaa

SEQ ID NO: 2648739 - RNA, 22 nt, Human
caugcaaaugagcucugaaauc

SEQ ID NO: 2648740 - RNA, 15 nt, Human
caugaauuuuaaaau

SEQ ID NO: 2648741 - RNA, 17 nt, Human
caugaaucuuuguuuca

SEQ ID NO: 2648742 - RNA, 16 nt, Human
caugaaucaaaagugc

SEQ ID NO: 2648743 - RNA, 17 nt, Human
caugaaucaaaagugcc

SEQ ID NO: 2648744 - RNA, 18 nt, Human
caugaaucaaaagugccu

SEQ ID NO: 2648745 - RNA, 15 nt, Human
caucagaaagcuuua

SEQ ID NO: 2648746 - RNA, 22 nt, Human
caucagaaagcuuuauuuugag

SEQ ID NO: 2648747 - RNA, 18 nt, Human
caucccaaccaggcaccu

SEQ ID NO: 2648748 - RNA, 20 nt, Human
caucccaaccaggcaccucu

SEQ ID NO: 2648749 - RNA, 23 nt, Human
caucccaaccaggcaccucuucc

SEQ ID NO: 2648750 - RNA, 19 nt, Human
cauccugaccagcugcucc

SEQ ID NO: 2648751 - RNA, 16 nt, Human
caucuggaguucucaa

SEQ ID NO: 2648752 - RNA, 15 nt, Human
caucuggaguucuca

SEQ ID NO: 2648753 - RNA, 14 nt, Human
caguuuguuggaaa

SEQ ID NO: 2648754 - RNA, 15 nt, Human
caguuuguuggaaag

SEQ ID NO: 2648755 - RNA, 21 nt, Human
caguuugaggauuaguuuaga

SEQ ID NO: 2648756 - RNA, 15 nt, Human
caguuugagacagga

SEQ ID NO: 2648757 - RNA, 18 nt, Human
caguuugagacaggagac

SEQ ID NO: 2648758 - RNA, 16 nt, Human
caguuugagacaggag

SEQ ID NO: 2648759 - RNA, 19 nt, Human
caguuuaucauucaagugu

SEQ ID NO: 2648760 - RNA, 14 nt, Human
caguuuaucauuca

SEQ ID NO: 2648761 - RNA, 15 nt, Human
caguuuaucauucaa

SEQ ID NO: 2648762 - RNA, 16 nt, Human
caguuuaucauucaag

SEQ ID NO: 2648763 - RNA, 18 nt, Human
caguuuaucauucaagug

SEQ ID NO: 2648764 - RNA, 13 nt, Human
cauacauaaaaga

SEQ ID NO: 2648765 - RNA, 14 nt, Human
cauacauaaaagaa

SEQ ID NO: 2648766 - RNA, 15 nt, Human
cauacauaaaagaaa

SEQ ID NO: 2648767 - RNA, 18 nt, Human
cauacauaaaagaaauaa

SEQ ID NO: 2648768 - RNA, 20 nt, Human
cauacauaaaagaaauaaac

SEQ ID NO: 2648769 - RNA, 13 nt, Human
caguuuucagaaa

SEQ ID NO: 2648770 - RNA, 14 nt, Human
caguuuucagaaaa

SEQ ID NO: 2648771 - RNA, 13 nt, Human
caguuuucauagu

SEQ ID NO: 2648772 - RNA, 15 nt, Human
caguuuucauaguau

SEQ ID NO: 2648773 - RNA, 17 nt, Human
cauauuauaaaggauaa

SEQ ID NO: 2648774 - RNA, 21 nt, Human
cauauuauaaaggauaaagaa

SEQ ID NO: 2648775 - RNA, 22 nt, Human
cauauuauaaaggauaaagaag

SEQ ID NO: 2648776 - RNA, 22 nt, Human
cauagguucacaccauuuuguu

SEQ ID NO: 2648777 - RNA, 13 nt, Human
cagugcaaaugca

SEQ ID NO: 2648778 - RNA, 18 nt, Human
cagugcaaaugcaugcuu

SEQ ID NO: 2648779 - RNA, 20 nt, Human
cagugcaaaugcaugcuucu

SEQ ID NO: 2648780 - RNA, 14 nt, Human
caguggguuaacau

SEQ ID NO: 2648781 - RNA, 21 nt, Human
caguggguuaacaucaguuuu

SEQ ID NO: 2648782 - RNA, 16 nt, Human
cagugguaagaauagu

SEQ ID NO: 2648783 - RNA, 17 nt, Human
cagugguaagaauagua

SEQ ID NO: 2648784 - RNA, 15 nt, Human
cagucuccggccucu

SEQ ID NO: 2648785 - RNA, 17 nt, Human
cagucuccggccucucc

SEQ ID NO: 2648786 - RNA, 18 nt, Human
cagucuccggccucucca

SEQ ID NO: 2648787 - RNA, 20 nt, Human
cagucuccggccucuccagc

SEQ ID NO: 2648788 - RNA, 21 nt, Human
cagucuccggccucuccagcc

SEQ ID NO: 2648789 - RNA, 22 nt, Human
cagucuccggccucuccagccu

SEQ ID NO: 2648790 - RNA, 14 nt, Human
cagucgugccugug

SEQ ID NO: 2648791 - RNA, 17 nt, Human
cagucgugccugugucc

SEQ ID NO: 2648792 - RNA, 15 nt, Human
cagucgugccugugu

SEQ ID NO: 2648793 - RNA, 15 nt, Human
caguuauuacaugua

SEQ ID NO: 2648794 - RNA, 18 nt, Human
caguuauuacauguaauu

SEQ ID NO: 2648795 - RNA, 15 nt, Human
caguuauaagaagaa

SEQ ID NO: 2648796 - RNA, 16 nt, Human
caguucaucgauuuuc

SEQ ID NO: 2648797 - RNA, 19 nt, Human
caguucaucgauuuucuau

SEQ ID NO: 2648798 - RNA, 23 nt, Human
cagacagaacuugaaugugucag

SEQ ID NO: 2648799 - RNA, 22 nt, Human
cagacagaacuugaauguguca

SEQ ID NO: 2648800 - RNA, 20 nt, Human
cagacagaacuugaaugugu

SEQ ID NO: 2648801 - RNA, 15 nt, Human
cagacagaacuugaa

SEQ ID NO: 2648802 - RNA, 14 nt, Human
cagacuggggcauc

SEQ ID NO: 2648803 - RNA, 16 nt, Human
cagacuggggcauccu

SEQ ID NO: 2648804 - RNA, 18 nt, Human
cagacuggggcauccugu

SEQ ID NO: 2648805 - RNA, 21 nt, Human
cagacuggggcauccugugcc

SEQ ID NO: 2648806 - RNA, 22 nt, Human
cagacuggggcauccugugcca

SEQ ID NO: 2648807 - RNA, 14 nt, Human
cagauuucugagga

SEQ ID NO: 2648808 - RNA, 17 nt, Human
cagauuucugaggaaau

SEQ ID NO: 2648809 - RNA, 15 nt, Human
cagauuucugaggaa

SEQ ID NO: 2648810 - RNA, 23 nt, Human
cagccagaccagauuaaacuuca

SEQ ID NO: 2648811 - RNA, 12 nt, Human
cagcaccuggca

SEQ ID NO: 2648812 - RNA, 13 nt, Human
cagcaccuugugc

SEQ ID NO: 2648813 - RNA, 15 nt, Human
cagcaccuugugccu

SEQ ID NO: 2648814 - RNA, 16 nt, Human
cagcaccuugugccug

SEQ ID NO: 2648815 - RNA, 17 nt, Human
cagcaccuugugccugg

SEQ ID NO: 2648816 - RNA, 18 nt, Human
cagcaccuugugccuggg

SEQ ID NO: 2648817 - RNA, 19 nt, Human
cagcaccuugugccugggg

SEQ ID NO: 2648818 - RNA, 20 nt, Human
cagcaccuugugccuggggu

SEQ ID NO: 2648819 - RNA, 20 nt, Human
cagauauacuggaacccuuu

SEQ ID NO: 2648820 - RNA, 19 nt, Human
cagauacuuggggggcuga

SEQ ID NO: 2648821 - RNA, 15 nt, Human
cagagcuuuggucug

SEQ ID NO: 2648822 - RNA, 17 nt, Human
cagagcuuuggucugug

SEQ ID NO: 2648823 - RNA, 20 nt, Human
cagagcuuuggucugugugu

SEQ ID NO: 2648824 - RNA, 12 nt, Human
cagagcucucuc

SEQ ID NO: 2648825 - RNA, 17 nt, Human
cagagcucucucuacag

SEQ ID NO: 2648826 - RNA, 18 nt, Human
cagagcucucucuacaga

SEQ ID NO: 2648827 - RNA, 16 nt, Human
cagagagacccuugug

SEQ ID NO: 2648828 - RNA, 17 nt, Human
cagagacuuuagggggu

SEQ ID NO: 2648829 - RNA, 14 nt, Human
cagagacuuuguag

SEQ ID NO: 2648830 - RNA, 12 nt, Human
caggccucucca

SEQ ID NO: 2648831 - RNA, 13 nt, Human
caggccucuccau

SEQ ID NO: 2648832 - RNA, 17 nt, Human
caggccucuccauuugc

SEQ ID NO: 2648833 - RNA, 21 nt, Human
cagggagacgguuuccaggga

SEQ ID NO: 2648834 - RNA, 22 nt, Human
cagggagacgguuuccagggag

SEQ ID NO: 2648835 - RNA, 23 nt, Human
cagggagacgguuuccagggagg

SEQ ID NO: 2648836 - RNA, 22 nt, Human
cagggagacuggguaggaaaga

SEQ ID NO: 2648837 - RNA, 10 nt, Human
caggcugggc

SEQ ID NO: 2648838 - RNA, 11 nt, Human
cagggcuccug

SEQ ID NO: 2648839 - RNA, 12 nt, Human
cagggcuccugc

SEQ ID NO: 2648840 - RNA, 14 nt, Human
cagggcuccugcac

SEQ ID NO: 2648841 - RNA, 17 nt, Human
caggggaaaaucagccu

SEQ ID NO: 2648842 - RNA, 23 nt, Human
caggaccucaggugagaagcaga

SEQ ID NO: 2648843 - RNA, 16 nt, Human
caggaccucaggugag

SEQ ID NO: 2648844 - RNA, 17 nt, Human
caggaggcgcccuuggc

SEQ ID NO: 2648845 - RNA, 22 nt, Human
caggaggcgcccuuggcuucug

SEQ ID NO: 2648846 - RNA, 13 nt, Human
caggaggcgcccu

SEQ ID NO: 2648847 - RNA, 19 nt, Human
caggaggaucacuugaguc

SEQ ID NO: 2648848 - RNA, 16 nt, Human
caggcacggguggucc

SEQ ID NO: 2648849 - RNA, 17 nt, Human
caggcacgggugguccc

SEQ ID NO: 2648850 - RNA, 18 nt, Human
caggcacggguggucccc

SEQ ID NO: 2648851 - RNA, 19 nt, Human
caggcacgggugguccccg

SEQ ID NO: 2648852 - RNA, 20 nt, Human
caggcacgggugguccccgu

SEQ ID NO: 2648853 - RNA, 23 nt, Human
caggcacgggugguccccguucc

SEQ ID NO: 2648854 - RNA, 14 nt, Human
caggcaccucuucc

SEQ ID NO: 2648855 - RNA, 15 nt, Human
caggcaccucuuccu

SEQ ID NO: 2648856 - RNA, 12 nt, Human
cagcuuauuguu

SEQ ID NO: 2648857 - RNA, 13 nt, Human
cagcuuauuguuu

SEQ ID NO: 2648858 - RNA, 20 nt, Human
caggaaacuccacaucugcc

SEQ ID NO: 2648859 - RNA, 21 nt, Human
caggaaacuccacaucugccu

SEQ ID NO: 2648860 - RNA, 22 nt, Human
caggaaacuccacaucugccuu

SEQ ID NO: 2648861 - RNA, 23 nt, Human
caggaaacuccacaucugccuua

SEQ ID NO: 2648862 - RNA, 23 nt, Human
caggaaaauuguuugaacccagg

SEQ ID NO: 2648863 - RNA, 19 nt, Human
caggaaacuccacaucugc

SEQ ID NO: 2648864 - RNA, 13 nt, Human
caggaaaccgagu

SEQ ID NO: 2648865 - RNA, 21 nt, Human
cagcugacuuuucuguccgag

SEQ ID NO: 2648866 - RNA, 22 nt, Human
cagcggagguguggagccgagg

SEQ ID NO: 2648867 - RNA, 16 nt, Human
cagccugcuccagcug

SEQ ID NO: 2648868 - RNA, 15 nt, Human
cagccugcuccagcu

SEQ ID NO: 2648869 - RNA, 17 nt, Human
cagcgcggcccucccga

SEQ ID NO: 2648870 - RNA, 19 nt, Human
cagccugcuccagcuguuc

SEQ ID NO: 2648871 - RNA, 17 nt, Human
cagccugcuccagcugu

SEQ ID NO: 2648872 - RNA, 15 nt, Human
caauauuugaauuuu

SEQ ID NO: 2648873 - RNA, 16 nt, Human
caauauugucucccuu

SEQ ID NO: 2648874 - RNA, 22 nt, Human
caauauugucucccuuccagca

SEQ ID NO: 2648875 - RNA, 19 nt, Human
caauauuugaauuuuaaau

SEQ ID NO: 2648876 - RNA, 15 nt, Human
caauauuuuaugguu

SEQ ID NO: 2648877 - RNA, 17 nt, Human
caauauuuuaugguuau

SEQ ID NO: 2648878 - RNA, 21 nt, Human
caauauuuuaugguuauguuu

SEQ ID NO: 2648879 - RNA, 22 nt, Human
caauauuuuaugguuauguuuu

SEQ ID NO: 2648880 - RNA, 23 nt, Human
caauauuuuaugguuauguuuuu

SEQ ID NO: 2648881 - RNA, 16 nt, Human
caauauuuuuauauca

SEQ ID NO: 2648882 - RNA, 20 nt, Human
caauauuuuuauaucaugca

SEQ ID NO: 2648883 - RNA, 22 nt, Human
caauauuuuuauaucaugcaaa

SEQ ID NO: 2648884 - RNA, 23 nt, Human
caauauuuuuauaucaugcaaaa

SEQ ID NO: 2648885 - RNA, 23 nt, Human
caaucaaauaaguauuuauaaua

SEQ ID NO: 2648886 - RNA, 18 nt, Human
caaucaagguuauaauuu

SEQ ID NO: 2648887 - RNA, 19 nt, Human
caaucaagguuauaauuuu

SEQ ID NO: 2648888 - RNA, 20 nt, Human
caaucaagguuauaauuuuu

SEQ ID NO: 2648889 - RNA, 22 nt, Human
caaucaaauaaguauuuauaau

SEQ ID NO: 2648890 - RNA, 17 nt, Human
caaucaaauaaguauuu

SEQ ID NO: 2648891 - RNA, 18 nt, Human
caaucaaaggaaaauagu

SEQ ID NO: 2648892 - RNA, 21 nt, Human
caauauuuuggaguauguuaa

SEQ ID NO: 2648893 - RNA, 16 nt, Human
caauauuuguuacugu

SEQ ID NO: 2648894 - RNA, 21 nt, Human
caauugguaaaacucacugug

SEQ ID NO: 2648895 - RNA, 15 nt, Human
caauugucacuuuuu

SEQ ID NO: 2648896 - RNA, 16 nt, Human
caauugucacuuuuua

SEQ ID NO: 2648897 - RNA, 17 nt, Human
caauugucacuuuuuau

SEQ ID NO: 2648898 - RNA, 13 nt, Human
caauugucuuuuu

SEQ ID NO: 2648899 - RNA, 21 nt, Human
caaugcugauuuggugaccaa

SEQ ID NO: 2648900 - RNA, 16 nt, Human
caaugcugauuuggug

SEQ ID NO: 2648901 - RNA, 14 nt, Human
caaugcugauuugg

SEQ ID NO: 2648902 - RNA, 19 nt, Human
caagguuuuauaaggcuga

SEQ ID NO: 2648903 - RNA, 15 nt, Human
caaguaaaaaggcua

SEQ ID NO: 2648904 - RNA, 10 nt, Human
caaguaaaaa

SEQ ID NO: 2648905 - RNA, 17 nt, Human
caagcuccgcaggacuu

SEQ ID NO: 2648906 - RNA, 16 nt, Human
caagcuccgcaggacu

SEQ ID NO: 2648907 - RNA, 15 nt, Human
caagcuccgcaggac

SEQ ID NO: 2648908 - RNA, 14 nt, Human
caagcuccgcagga

SEQ ID NO: 2648909 - RNA, 12 nt, Human
caaguucaaucu

SEQ ID NO: 2648910 - RNA, 17 nt, Human
caaguucaaucuguuuu

SEQ ID NO: 2648911 - RNA, 21 nt, Human
caacuagugggguuuccuggc

SEQ ID NO: 2648912 - RNA, 22 nt, Human
caacuauuuauugacucugggu

SEQ ID NO: 2648913 - RNA, 21 nt, Human
caacuauuuauugacucuggg

SEQ ID NO: 2648914 - RNA, 20 nt, Human
caacuccagcaacuucuucu

SEQ ID NO: 2648915 - RNA, 22 nt, Human
caacuccagcaacuucuucucc

SEQ ID NO: 2648916 - RNA, 13 nt, Human
caacuccagcaac

SEQ ID NO: 2648917 - RNA, 18 nt, Human
caagaauauccuuuaaaa

SEQ ID NO: 2648918 - RNA, 13 nt, Human
caagaauauugca

SEQ ID NO: 2648919 - RNA, 15 nt, Human
caagaauauugcaaa

SEQ ID NO: 2648920 - RNA, 18 nt, Human
caagaauauugcaaaaua

SEQ ID NO: 2648921 - RNA, 20 nt, Human
caagaauauugcaaaauaca

SEQ ID NO: 2648922 - RNA, 21 nt, Human
caagaauauugcaaaauacau

SEQ ID NO: 2648923 - RNA, 23 nt, Human
caagaauauugcaaaauacauga

SEQ ID NO: 2648924 - RNA, 17 nt, Human
caagauuuucuacuuuu

SEQ ID NO: 2648925 - RNA, 16 nt, Human
caagauuuuuuaauug

SEQ ID NO: 2648926 - RNA, 18 nt, Human
caagauuuuuuaauuguu

SEQ ID NO: 2648927 - RNA, 19 nt, Human
caagauuuuuuaauuguuu

SEQ ID NO: 2648928 - RNA, 21 nt, Human
caagauuuuuuaauuguuuaa

SEQ ID NO: 2648929 - RNA, 18 nt, Human
caagauuuuccucuugug

SEQ ID NO: 2648930 - RNA, 19 nt, Human
caagauuuuccucuuguga

SEQ ID NO: 2648931 - RNA, 19 nt, Human
caagaccaccacuucgaaa

SEQ ID NO: 2648932 - RNA, 16 nt, Human
caagaucaaaaaggcu

SEQ ID NO: 2648933 - RNA, 21 nt, Human
caagaucaaaaaggcuuauaa

SEQ ID NO: 2648934 - RNA, 17 nt, Human
caagaucaaaaaggcuu

SEQ ID NO: 2648935 - RNA, 15 nt, Human
caagcaaguucugag

SEQ ID NO: 2648936 - RNA, 22 nt, Human
cacuccacauaagggguuuagu

SEQ ID NO: 2648937 - RNA, 22 nt, Human
cacggaagagccuugcggaagg

SEQ ID NO: 2648938 - RNA, 16 nt, Human
cacggaagagccuugc

SEQ ID NO: 2648939 - RNA, 14 nt, Human
cacgcuucuccgga

SEQ ID NO: 2648940 - RNA, 12 nt, Human
cacccugagccg

SEQ ID NO: 2648941 - RNA, 14 nt, Human
cacccugagccggc

SEQ ID NO: 2648942 - RNA, 17 nt, Human
cacccugccccucagag

SEQ ID NO: 2648943 - RNA, 13 nt, Human
cacccugccugcc

SEQ ID NO: 2648944 - RNA, 16 nt, Human
cacccugcugagucug

SEQ ID NO: 2648945 - RNA, 17 nt, Human
cacccugcugcuggugc

SEQ ID NO: 2648946 - RNA, 20 nt, Human
cacccugcugcuggugcaca

SEQ ID NO: 2648947 - RNA, 22 nt, Human
cacccugggcccugggcuggaa

SEQ ID NO: 2648948 - RNA, 12 nt, Human
cacccugggccc

SEQ ID NO: 2648949 - RNA, 14 nt, Human
cacccugggcccug

SEQ ID NO: 2648950 - RNA, 17 nt, Human
cacccugggcccugggc

SEQ ID NO: 2648951 - RNA, 21 nt, Human
cacccugggcccugggcugga

SEQ ID NO: 2648952 - RNA, 19 nt, Human
cacauccaacuccagcaac

SEQ ID NO: 2648953 - RNA, 12 nt, Human
cacauccaacuc

SEQ ID NO: 2648954 - RNA, 16 nt, Human
cacauccaacuccagc

SEQ ID NO: 2648955 - RNA, 18 nt, Human
cacauccaacuccagcaa

SEQ ID NO: 2648956 - RNA, 13 nt, Human
caccaggaagccg

SEQ ID NO: 2648957 - RNA, 20 nt, Human
cacccaggcuggacugcaau

SEQ ID NO: 2648958 - RNA, 21 nt, Human
auuuguuaaaauuaucaauau

SEQ ID NO: 2648959 - RNA, 14 nt, Human
auuuguuaaaauua

SEQ ID NO: 2648960 - RNA, 16 nt, Human
auuuucuauuuuaaga

SEQ ID NO: 2648961 - RNA, 23 nt, Human
auuuucuauuuuaagacugauuu

SEQ ID NO: 2648962 - RNA, 14 nt, Human
auuuucucuguacu

SEQ ID NO: 2648963 - RNA, 16 nt, Human
auuuucucuguacuuu

SEQ ID NO: 2648964 - RNA, 17 nt, Human
auuuucucuguacuuuu

SEQ ID NO: 2648965 - RNA, 12 nt, Human
auuuugaaaagu

SEQ ID NO: 2648966 - RNA, 21 nt, Human
auuuugaaaaguaauauuuau

SEQ ID NO: 2648967 - RNA, 17 nt, Human
auuuugaaaaguaauau

SEQ ID NO: 2648968 - RNA, 16 nt, Human
auuuugaaaaguaaua

SEQ ID NO: 2648969 - RNA, 14 nt, Human
auuuugaaaaguaa

SEQ ID NO: 2648970 - RNA, 16 nt, Human
auuuuuuuuaaagaaa

SEQ ID NO: 2648971 - RNA, 20 nt, Human
auuuuuuuuaauuguauuuu

SEQ ID NO: 2648972 - RNA, 18 nt, Human
auuuuuuuuaauuguauu

SEQ ID NO: 2648973 - RNA, 17 nt, Human
auuuuuuuuaauuguau

SEQ ID NO: 2648974 - RNA, 18 nt, Human
auuuuuuuuaguauuuau

SEQ ID NO: 2648975 - RNA, 22 nt, Human
auuuuuuuuaauuguauuuuug

SEQ ID NO: 2648976 - RNA, 14 nt, Human
auuuuuuuuaguau

SEQ ID NO: 2648977 - RNA, 22 nt, Human
auuuuguuuuugucuuaaaaag

SEQ ID NO: 2648978 - RNA, 14 nt, Human
auuuuuaaaaaaua

SEQ ID NO: 2648979 - RNA, 15 nt, Human
auuuuuaaaaaauau

SEQ ID NO: 2648980 - RNA, 18 nt, Human
auuuuuaaaaaauauuuu

SEQ ID NO: 2648981 - RNA, 19 nt, Human
auuuuuaaaaaauauuuuc

SEQ ID NO: 2648982 - RNA, 20 nt, Human
auuuuuaaaaaauauuuucu

SEQ ID NO: 2648983 - RNA, 23 nt, Human
auuuuuaaaaaauauuuucucug

SEQ ID NO: 2648984 - RNA, 13 nt, Human
auuuuuuucuauu

SEQ ID NO: 2648985 - RNA, 19 nt, Human
auuuuuuuuaaaauagaaa

SEQ ID NO: 2648986 - RNA, 22 nt, Human
auuuuuuuuaaaauagaaauuu

SEQ ID NO: 2648987 - RNA, 14 nt, Human
auuuuuauuucaaa

SEQ ID NO: 2648988 - RNA, 12 nt, Human
auuuuuauuguu

SEQ ID NO: 2648989 - RNA, 23 nt, Human
caaacaugagauguguggacugu

SEQ ID NO: 2648990 - RNA, 15 nt, Human
caaacaugagaugug

SEQ ID NO: 2648991 - RNA, 18 nt, Human
auuucacuacuagauuga

SEQ ID NO: 2648992 - RNA, 16 nt, Human
auuuauccagaaaacu

SEQ ID NO: 2648993 - RNA, 20 nt, Human
auuuauccagaaaacuguga

SEQ ID NO: 2648994 - RNA, 22 nt, Human
auuuauccagaaaacugugauu

SEQ ID NO: 2648995 - RNA, 12 nt, Human
auuuaagguauu

SEQ ID NO: 2648996 - RNA, 16 nt, Human
auuuaagcuuuccugu

SEQ ID NO: 2648997 - RNA, 13 nt, Human
auuuaagggaaaa

SEQ ID NO: 2648998 - RNA, 14 nt, Human
auuuaagggaaaaa

SEQ ID NO: 2648999 - RNA, 15 nt, Human
auuuaagggaaaaau

SEQ ID NO: 2649000 - RNA, 16 nt, Human
auuuaagggaaaaaua

SEQ ID NO: 2649001 - RNA, 18 nt, Human
auuuaagggaaaaauaua

SEQ ID NO: 2649002 - RNA, 16 nt, Human
auuuaagggaaagaaa

SEQ ID NO: 2649003 - RNA, 17 nt, Human
auuuaagggaaagaaaa

SEQ ID NO: 2649004 - RNA, 19 nt, Human
auuuaagggaaagaaaaug

SEQ ID NO: 2649005 - RNA, 13 nt, Human
auuuaagauguga

SEQ ID NO: 2649006 - RNA, 14 nt, Human
auuuaagaugugaa

SEQ ID NO: 2649007 - RNA, 15 nt, Human
auuuaagaugugaaa

SEQ ID NO: 2649008 - RNA, 20 nt, Human
auuuaaguuuugacaagcug

SEQ ID NO: 2649009 - RNA, 12 nt, Human
auuuaaguuuug

SEQ ID NO: 2649010 - RNA, 19 nt, Human
auuuaauaccagauaccuu

SEQ ID NO: 2649011 - RNA, 12 nt, Human
auuucagggugc

SEQ ID NO: 2649012 - RNA, 15 nt, Human
auuucagggugcagc

SEQ ID NO: 2649013 - RNA, 16 nt, Human
auuugcaauaacagcu

SEQ ID NO: 2649014 - RNA, 18 nt, Human
auuugcaauaacagcugc

SEQ ID NO: 2649015 - RNA, 19 nt, Human
auuugcaauaacagcugca

SEQ ID NO: 2649016 - RNA, 20 nt, Human
auuugcaauaacagcugcaa

SEQ ID NO: 2649017 - RNA, 17 nt, Human
auugaggccaagaauau

SEQ ID NO: 2649018 - RNA, 18 nt, Human
auugaggccaagaauauu

SEQ ID NO: 2649019 - RNA, 21 nt, Human
auugaggccaagaauauugca

SEQ ID NO: 2649020 - RNA, 22 nt, Human
auugaggccaagaauauugcaa

SEQ ID NO: 2649021 - RNA, 14 nt, Human
auuccuuugcauau

SEQ ID NO: 2649022 - RNA, 15 nt, Human
auuccuuuuuauuua

SEQ ID NO: 2649023 - RNA, 18 nt, Human
auuccuuuuuauuuauau

SEQ ID NO: 2649024 - RNA, 16 nt, Human
auuccuuuuuauuuau

SEQ ID NO: 2649025 - RNA, 21 nt, Human
auuccuuuuuauuuauaugua

SEQ ID NO: 2649026 - RNA, 20 nt, Human
auuccuuuuuauuuauaugu

SEQ ID NO: 2649027 - RNA, 23 nt, Human
auucguacauaauacugaaccac

SEQ ID NO: 2649028 - RNA, 22 nt, Human
auucguacauaauacugaacca

SEQ ID NO: 2649029 - RNA, 18 nt, Human
auucguacauaauacuga

SEQ ID NO: 2649030 - RNA, 16 nt, Human
auucguacauaauacu

SEQ ID NO: 2649031 - RNA, 21 nt, Human
auucgguauccccccaucuug

SEQ ID NO: 2649032 - RNA, 19 nt, Human
auucguuguguuuuuuaag

SEQ ID NO: 2649033 - RNA, 20 nt, Human
auucguuguguuuuuuaaga

SEQ ID NO: 2649034 - RNA, 22 nt, Human
auucguuguguuuuuuaagaua

SEQ ID NO: 2649035 - RNA, 15 nt, Human
auucuuucaguucuu

SEQ ID NO: 2649036 - RNA, 17 nt, Human
auucuuucaguucuuug

SEQ ID NO: 2649037 - RNA, 17 nt, Human
auucauaguaagauuga

SEQ ID NO: 2649038 - RNA, 20 nt, Human
auucaaguguaaaauauuuu

SEQ ID NO: 2649039 - RNA, 21 nt, Human
auucaaguguaaaauauuuug

SEQ ID NO: 2649040 - RNA, 22 nt, Human
auuagauguuacaaguuuauau

SEQ ID NO: 2649041 - RNA, 13 nt, Human
auuacaauuuuau

SEQ ID NO: 2649042 - RNA, 14 nt, Human
auuacaauuuuauc

SEQ ID NO: 2649043 - RNA, 15 nt, Human
auuacaauuuuaucu

SEQ ID NO: 2649044 - RNA, 18 nt, Human
auuacaauuuuaucuguu

SEQ ID NO: 2649045 - RNA, 13 nt, Human
auuaaugcacuuu

SEQ ID NO: 2649046 - RNA, 14 nt, Human
auuaaugcacuuuc

SEQ ID NO: 2649047 - RNA, 15 nt, Human
auuaaugcacuuucu

SEQ ID NO: 2649048 - RNA, 16 nt, Human
auuaaugcacuuucua

SEQ ID NO: 2649049 - RNA, 12 nt, Human
auuaaugcacuu

SEQ ID NO: 2649050 - RNA, 16 nt, Human
auuaauugugugaacu

SEQ ID NO: 2649051 - RNA, 14 nt, Human
auuaauugugugaa

SEQ ID NO: 2649052 - RNA, 11 nt, Human
auuaauugugu

SEQ ID NO: 2649053 - RNA, 21 nt, Human
auuaauugugugaacuuggaa

SEQ ID NO: 2649054 - RNA, 20 nt, Human
auuaauugugugaacuugga

SEQ ID NO: 2649055 - RNA, 18 nt, Human
auuaauugugugaacuug

SEQ ID NO: 2649056 - RNA, 15 nt, Human
auuaauuugcaucug

SEQ ID NO: 2649057 - RNA, 21 nt, Human
auuaauuugcaucugaaauag

SEQ ID NO: 2649058 - RNA, 23 nt, Human
auuaaauuuuuuuguaugaaaac

SEQ ID NO: 2649059 - RNA, 22 nt, Human
auuaaauuuuuuuguaugaaaa

SEQ ID NO: 2649060 - RNA, 21 nt, Human
auuaaauuuuuuuguaugaaa

SEQ ID NO: 2649061 - RNA, 20 nt, Human
auuaaauuuuuuuguaugaa

SEQ ID NO: 2649062 - RNA, 19 nt, Human
auuaaauuuuuuuguauga

SEQ ID NO: 2649063 - RNA, 18 nt, Human
auuaaauuuuuuuguaug

SEQ ID NO: 2649064 - RNA, 17 nt, Human
auuaaauuuuuuuguau

SEQ ID NO: 2649065 - RNA, 16 nt, Human
auuaaauuuuuuugua

SEQ ID NO: 2649066 - RNA, 15 nt, Human
auuaaauuuuuuugu

SEQ ID NO: 2649067 - RNA, 17 nt, Human
cgguggcggccccagca

SEQ ID NO: 2649068 - RNA, 15 nt, Human
cgguggcgggcaccu

SEQ ID NO: 2649069 - RNA, 20 nt, Human
cgguggcucacgccuguaau

SEQ ID NO: 2649070 - RNA, 18 nt, Human
cggugggacccccguggg

SEQ ID NO: 2649071 - RNA, 16 nt, Human
cggugggacucguggc

SEQ ID NO: 2649072 - RNA, 22 nt, Human
cggugggacucguggcugucaa

SEQ ID NO: 2649073 - RNA, 13 nt, Human
cguacauguuuau

SEQ ID NO: 2649074 - RNA, 20 nt, Human
cguacauaauacugaaccac

SEQ ID NO: 2649075 - RNA, 16 nt, Human
cguacauaauacugaa

SEQ ID NO: 2649076 - RNA, 15 nt, Human
cguacauaauacuga

SEQ ID NO: 2649077 - RNA, 17 nt, Human
cguacaggcuggcgcag

SEQ ID NO: 2649078 - RNA, 19 nt, Human
cgggcucagcaaaagaugc

SEQ ID NO: 2649079 - RNA, 15 nt, Human
cgggccccugggcuu

SEQ ID NO: 2649080 - RNA, 23 nt, Human
cgggccccugggcuuggccugcu

SEQ ID NO: 2649081 - RNA, 15 nt, Human
cgggcccuggguucc

SEQ ID NO: 2649082 - RNA, 15 nt, Human
cggaggccgaggcca

SEQ ID NO: 2649083 - RNA, 18 nt, Human
cggaggccugcgacccug

SEQ ID NO: 2649084 - RNA, 20 nt, Human
cggaggccugcgacccuggg

SEQ ID NO: 2649085 - RNA, 21 nt, Human
cggaggccugcgacccugggg

SEQ ID NO: 2649086 - RNA, 22 nt, Human
cggaggccugcgacccuggggg

SEQ ID NO: 2649087 - RNA, 12 nt, Human
cggagggcugcg

SEQ ID NO: 2649088 - RNA, 15 nt, Human
cggagucguggggug

SEQ ID NO: 2649089 - RNA, 16 nt, Human
cggcguggcccaaggc

SEQ ID NO: 2649090 - RNA, 17 nt, Human
cggcguggcccaaggcu

SEQ ID NO: 2649091 - RNA, 22 nt, Human
cggcguggcccaaggcuggcag

SEQ ID NO: 2649092 - RNA, 16 nt, Human
cggcguacaggcuggc

SEQ ID NO: 2649093 - RNA, 15 nt, Human
cggcguacaggcugg

SEQ ID NO: 2649094 - RNA, 13 nt, Human
ccuuuucccugcu

SEQ ID NO: 2649095 - RNA, 14 nt, Human
ccuuuucccugcuu

SEQ ID NO: 2649096 - RNA, 15 nt, Human
ccuuuucccugcuuc

SEQ ID NO: 2649097 - RNA, 19 nt, Human
ccuuuucccugcuuccagg

SEQ ID NO: 2649098 - RNA, 23 nt, Human
cgccaaggcugggggaagaagcu

SEQ ID NO: 2649099 - RNA, 13 nt, Human
cgccacaggaccc

SEQ ID NO: 2649100 - RNA, 12 nt, Human
cgccacaggacc

SEQ ID NO: 2649101 - RNA, 20 nt, Human
cgagugccgcaucucacagc

SEQ ID NO: 2649102 - RNA, 13 nt, Human
cgagucugaggcc

SEQ ID NO: 2649103 - RNA, 13 nt, Human
cgcaggugggcug

SEQ ID NO: 2649104 - RNA, 14 nt, Human
cgcaggugggcugg

SEQ ID NO: 2649105 - RNA, 18 nt, Human
cgcaggugggcuggacuu

SEQ ID NO: 2649106 - RNA, 22 nt, Human
cgaggggccuuuguucuggggg

SEQ ID NO: 2649107 - RNA, 18 nt, Human
cgaggggugucuugggca

SEQ ID NO: 2649108 - RNA, 19 nt, Human
cgaggggugucuugggcag

SEQ ID NO: 2649109 - RNA, 20 nt, Human
cgcucuguggaugccagggc

SEQ ID NO: 2649110 - RNA, 21 nt, Human
cgcucuguggaugccagggcc

SEQ ID NO: 2649111 - RNA, 13 nt, Human
cgcugaguggcag

SEQ ID NO: 2649112 - RNA, 16 nt, Human
cgcugagacugugcug

SEQ ID NO: 2649113 - RNA, 17 nt, Human
cgcugagacugugcugu

SEQ ID NO: 2649114 - RNA, 14 nt, Human
cgcugaguggcagg

SEQ ID NO: 2649115 - RNA, 16 nt, Human
cgcugaguggcagggg

SEQ ID NO: 2649116 - RNA, 16 nt, Human
cgcaguguuuugcaag

SEQ ID NO: 2649117 - RNA, 23 nt, Human
cgccaccgcgggugugggaaagc

SEQ ID NO: 2649118 - RNA, 22 nt, Human
cgccugcacuccucagggcagc

SEQ ID NO: 2649119 - RNA, 15 nt, Human
cgcucucuuugcaac

SEQ ID NO: 2649120 - RNA, 20 nt, Human
cgcugaguggcaggggacag

SEQ ID NO: 2649121 - RNA, 19 nt, Human
cuaauuuuacauguuuaua

SEQ ID NO: 2649122 - RNA, 20 nt, Human
cuaauuuuacauguuuauaa

SEQ ID NO: 2649123 - RNA, 19 nt, Human
cuaauuucuccucccuucc

SEQ ID NO: 2649124 - RNA, 19 nt, Human
cuacaaaaagcauaaaaau

SEQ ID NO: 2649125 - RNA, 20 nt, Human
cuaauuucuccucccuuccu

SEQ ID NO: 2649126 - RNA, 18 nt, Human
cuaauuucuccucccuuc

SEQ ID NO: 2649127 - RNA, 19 nt, Human
cuaaguccaguguuucuuu

SEQ ID NO: 2649128 - RNA, 12 nt, Human
cuaagucaguac

SEQ ID NO: 2649129 - RNA, 15 nt, Human
cuaagucaguaccca

SEQ ID NO: 2649130 - RNA, 15 nt, Human
cuaagucauguaugu

SEQ ID NO: 2649131 - RNA, 18 nt, Human
cuaagucauguauguuuc

SEQ ID NO: 2649132 - RNA, 13 nt, Human
cuaagacuauaua

SEQ ID NO: 2649133 - RNA, 22 nt, Human
cuaagacuauauauauaaaugu

SEQ ID NO: 2649134 - RNA, 17 nt, Human
cuaagaauucaaacugg

SEQ ID NO: 2649135 - RNA, 16 nt, Human
cuaagagaaguuauuu

SEQ ID NO: 2649136 - RNA, 11 nt, Human
cuaagagaagu

SEQ ID NO: 2649137 - RNA, 21 nt, Human
cuaaaguaaaaagggaauuau

SEQ ID NO: 2649138 - RNA, 20 nt, Human
cuaaaguguauuuucagagc

SEQ ID NO: 2649139 - RNA, 11 nt, Human
cguuauauuaa

SEQ ID NO: 2649140 - RNA, 13 nt, Human
cguuagcuccugu

SEQ ID NO: 2649141 - RNA, 14 nt, Human
cguuagcuccugug

SEQ ID NO: 2649142 - RNA, 15 nt, Human
cguuagcuccugugg

SEQ ID NO: 2649143 - RNA, 16 nt, Human
cguuagcuccuguggc

SEQ ID NO: 2649144 - RNA, 17 nt, Human
cguuagcuccuguggcc

SEQ ID NO: 2649145 - RNA, 14 nt, Human
cuaaagcaauagaa

SEQ ID NO: 2649146 - RNA, 15 nt, Human
cuaaagcaauagaaa

SEQ ID NO: 2649147 - RNA, 16 nt, Human
cuaaagcaauagaaac

SEQ ID NO: 2649148 - RNA, 17 nt, Human
cuaaagcaauagaaaca

SEQ ID NO: 2649149 - RNA, 14 nt, Human
cuaaagcaugaaau

SEQ ID NO: 2649150 - RNA, 19 nt, Human
cuaaagcaugaaaugugaa

SEQ ID NO: 2649151 - RNA, 20 nt, Human
cuaaagcaugaaaugugaau

SEQ ID NO: 2649152 - RNA, 22 nt, Human
cuaaagcaugaaaugugaauuu

SEQ ID NO: 2649153 - RNA, 16 nt, Human
ccuuagcaaauucugu

SEQ ID NO: 2649154 - RNA, 19 nt, Human
ccuuauggaugauuuaagu

SEQ ID NO: 2649155 - RNA, 23 nt, Human
ccuuaucuccacaaccucuuccc

SEQ ID NO: 2649156 - RNA, 13 nt, Human
ccuuaggccuucc

SEQ ID NO: 2649157 - RNA, 15 nt, Human
ccuuaggccuuccuc

SEQ ID NO: 2649158 - RNA, 14 nt, Human
ccuuaggccuuccu

SEQ ID NO: 2649159 - RNA, 23 nt, Human
ccuuaggccuuccucucuccaga

SEQ ID NO: 2649160 - RNA, 12 nt, Human
ccuuauaaaauc

SEQ ID NO: 2649161 - RNA, 17 nt, Human
ccuuauagucuaagacu

SEQ ID NO: 2649162 - RNA, 19 nt, Human
ccuguuaggagaagcugca

SEQ ID NO: 2649163 - RNA, 14 nt, Human
ccugcugcuggugc

SEQ ID NO: 2649164 - RNA, 15 nt, Human
ccugcugcuggugca

SEQ ID NO: 2649165 - RNA, 18 nt, Human
ccugcugcuggugcacag

SEQ ID NO: 2649166 - RNA, 19 nt, Human
ccugcugcuggugcacagc

SEQ ID NO: 2649167 - RNA, 19 nt, Human
ccugcuggcacccaccgug

SEQ ID NO: 2649168 - RNA, 15 nt, Human
ccugcuggcacccac

SEQ ID NO: 2649169 - RNA, 9 nt, Human
ccugcuggc

SEQ ID NO: 2649170 - RNA, 16 nt, Human
ccuuucccucaccccc

SEQ ID NO: 2649171 - RNA, 17 nt, Human
ccuuucccucacccccu

SEQ ID NO: 2649172 - RNA, 19 nt, Human
ccuuucccucacccccucc

SEQ ID NO: 2649173 - RNA, 20 nt, Human
ccuuucccucacccccuccc

SEQ ID NO: 2649174 - RNA, 21 nt, Human
ccuuucccucacccccuccca

SEQ ID NO: 2649175 - RNA, 13 nt, Human
ccuuuauuuuaga

SEQ ID NO: 2649176 - RNA, 12 nt, Human
ccuuucaaagcu

SEQ ID NO: 2649177 - RNA, 13 nt, Human
ccuuucaaagcuu

SEQ ID NO: 2649178 - RNA, 23 nt, Human
ccuuuauuacccccuccuucaga

SEQ ID NO: 2649179 - RNA, 12 nt, Human
ccuuuaugugaa

SEQ ID NO: 2649180 - RNA, 13 nt, Human
ccuuuaugugaau

SEQ ID NO: 2649181 - RNA, 14 nt, Human
ccuuuaugugaauu

SEQ ID NO: 2649182 - RNA, 17 nt, Human
ccuuuaugugaauuuuu

SEQ ID NO: 2649183 - RNA, 23 nt, Human
ccuuuaugugaauuuuuaagcug

SEQ ID NO: 2649184 - RNA, 21 nt, Human
ccuucccccaccgguccagcu

SEQ ID NO: 2649185 - RNA, 22 nt, Human
ccuucccccaccgguccagcug

SEQ ID NO: 2649186 - RNA, 22 nt, Human
ccuuccccagcuuugcugccug

SEQ ID NO: 2649187 - RNA, 14 nt, Human
ccuuccccaugcuu

SEQ ID NO: 2649188 - RNA, 21 nt, Human
ccuuccccaugcuuccuugcc

SEQ ID NO: 2649189 - RNA, 23 nt, Human
ccuuccccaugcuuccuugccug

SEQ ID NO: 2649190 - RNA, 12 nt, Human
ccuucccuagcu

SEQ ID NO: 2649191 - RNA, 15 nt, Human
ccuucccuagcuuua

SEQ ID NO: 2649192 - RNA, 18 nt, Human
ccuuccgcaguguggcca

SEQ ID NO: 2649193 - RNA, 22 nt, Human
ccuuccgcaguguggccaggcu

SEQ ID NO: 2649194 - RNA, 15 nt, Human
ccuucucuccucccc

SEQ ID NO: 2649195 - RNA, 16 nt, Human
ccuucucuccucccca

SEQ ID NO: 2649196 - RNA, 17 nt, Human
ccuucucuccuccccaa

SEQ ID NO: 2649197 - RNA, 20 nt, Human
ccuucucuccuccccaaauc

SEQ ID NO: 2649198 - RNA, 14 nt, Human
cucaauccuaauuu

SEQ ID NO: 2649199 - RNA, 19 nt, Human
cucaauccuaauuucuccu

SEQ ID NO: 2649200 - RNA, 20 nt, Human
cucaauccuaauuucuccuc

SEQ ID NO: 2649201 - RNA, 22 nt, Human
cucaauccuaauuucuccuccc

SEQ ID NO: 2649202 - RNA, 23 nt, Human
cucaauccuaauuucuccucccu

SEQ ID NO: 2649203 - RNA, 12 nt, Human
cucaaugaaaaa

SEQ ID NO: 2649204 - RNA, 13 nt, Human
cucaaugaaaaau

SEQ ID NO: 2649205 - RNA, 22 nt, Human
cucaaugaaaaauagugucuuu

SEQ ID NO: 2649206 - RNA, 19 nt, Human
cucaaugaaccauaaauuc

SEQ ID NO: 2649207 - RNA, 20 nt, Human
cucaaugaaccauaaauuca

SEQ ID NO: 2649208 - RNA, 22 nt, Human
cuaucggagaacaugaaucaaa

SEQ ID NO: 2649209 - RNA, 12 nt, Human
cuaugugacaau

SEQ ID NO: 2649210 - RNA, 18 nt, Human
cuaucucaauccuaauuu

SEQ ID NO: 2649211 - RNA, 21 nt, Human
cuaucucaucuaucucaaucc

SEQ ID NO: 2649212 - RNA, 12 nt, Human
cuaucucaucua

SEQ ID NO: 2649213 - RNA, 13 nt, Human
cuauccuacccca

SEQ ID NO: 2649214 - RNA, 14 nt, Human
cuauccgcugccag

SEQ ID NO: 2649215 - RNA, 15 nt, Human
cuauccgcugccagc

SEQ ID NO: 2649216 - RNA, 17 nt, Human
cuauccgcugccagccu

SEQ ID NO: 2649217 - RNA, 22 nt, Human
cuauccgcugccagccuugagc

SEQ ID NO: 2649218 - RNA, 12 nt, Human
cuauccucugua

SEQ ID NO: 2649219 - RNA, 13 nt, Human
cuauccucuguaa

SEQ ID NO: 2649220 - RNA, 11 nt, Human
cuauccugauu

SEQ ID NO: 2649221 - RNA, 22 nt, Human
cuacaaaaccuacccucaguga

SEQ ID NO: 2649222 - RNA, 14 nt, Human
cucacuaaagcaug

SEQ ID NO: 2649223 - RNA, 19 nt, Human
cucacuaaagcaugaaaug

SEQ ID NO: 2649224 - RNA, 20 nt, Human
cucacuaaagcaugaaaugu

SEQ ID NO: 2649225 - RNA, 13 nt, Human
cucacuaauuuuu

SEQ ID NO: 2649226 - RNA, 15 nt, Human
cucacuaauuuuugu

SEQ ID NO: 2649227 - RNA, 17 nt, Human
cucacuaauuuuuguau

SEQ ID NO: 2649228 - RNA, 23 nt, Human
cucacuaauuuuuguauuauuuu

SEQ ID NO: 2649229 - RNA, 21 nt, Human
cucacgccuguaaucccagca

SEQ ID NO: 2649230 - RNA, 18 nt, Human
cucacgccuguaauccca

SEQ ID NO: 2649231 - RNA, 14 nt, Human
cucagaaccacagc

SEQ ID NO: 2649232 - RNA, 15 nt, Human
cucacuaggccccca

SEQ ID NO: 2649233 - RNA, 18 nt, Human
cucacuaggcccccacuu

SEQ ID NO: 2649234 - RNA, 22 nt, Human
cucacuaggcccccacuugccu

SEQ ID NO: 2649235 - RNA, 23 nt, Human
cucagaaaguguauaauaagaaa

SEQ ID NO: 2649236 - RNA, 20 nt, Human
cucaggccggcagccccagc

SEQ ID NO: 2649237 - RNA, 19 nt, Human
cucaggccggcagccccag

SEQ ID NO: 2649238 - RNA, 24 nt, Human
cucaggccggcagccccagccugc

SEQ ID NO: 2649239 - RNA, 23 nt, Human
cucaggccggcagccccagccug

SEQ ID NO: 2649240 - RNA, 22 nt, Human
cucaggccggcagccccagccu

SEQ ID NO: 2649241 - RNA, 21 nt, Human
cucaggccggcagccccagcc

SEQ ID NO: 2649242 - RNA, 11 nt, Human
cucagccugca

SEQ ID NO: 2649243 - RNA, 16 nt, Human
cucagccucucgaagu

SEQ ID NO: 2649244 - RNA, 13 nt, Human
cucagccugcaca

SEQ ID NO: 2649245 - RNA, 13 nt, Human
cucagaagcacag

SEQ ID NO: 2649246 - RNA, 14 nt, Human
cucagugcauuugu

SEQ ID NO: 2649247 - RNA, 16 nt, Human
cucagugcauuugugc

SEQ ID NO: 2649248 - RNA, 17 nt, Human
cucagugcauuugugcu

SEQ ID NO: 2649249 - RNA, 10 nt, Human
cucagugcag

SEQ ID NO: 2649250 - RNA, 11 nt, Human
cucagugcaga

SEQ ID NO: 2649251 - RNA, 12 nt, Human
cucagugcagau

SEQ ID NO: 2649252 - RNA, 15 nt, Human
cucagugcagaugga

SEQ ID NO: 2649253 - RNA, 14 nt, Human
cuccggccucucca

SEQ ID NO: 2649254 - RNA, 19 nt, Human
cuccggccucugccuuugc

SEQ ID NO: 2649255 - RNA, 17 nt, Human
cuccggcucccagccuc

SEQ ID NO: 2649256 - RNA, 14 nt, Human
cuccggcucccagc

SEQ ID NO: 2649257 - RNA, 16 nt, Human
cuccggcucccagccu

SEQ ID NO: 2649258 - RNA, 15 nt, Human
cuccggcucccagcc

SEQ ID NO: 2649259 - RNA, 19 nt, Human
cuccuggcccacugcaucg

SEQ ID NO: 2649260 - RNA, 13 nt, Human
cuccuggccuauc

SEQ ID NO: 2649261 - RNA, 18 nt, Human
cuccuggccuauccgcug

SEQ ID NO: 2649262 - RNA, 22 nt, Human
cuccuggccuauccgcugccag

SEQ ID NO: 2649263 - RNA, 23 nt, Human
cuccuggccuauccgcugccagc

SEQ ID NO: 2649264 - RNA, 21 nt, Human
cuccucuggacggcaggcuca

SEQ ID NO: 2649265 - RNA, 15 nt, Human
cuccuuuaauuguaa

SEQ ID NO: 2649266 - RNA, 16 nt, Human
cuccuggggcguccag

SEQ ID NO: 2649267 - RNA, 12 nt, Human
cucccucccaca

SEQ ID NO: 2649268 - RNA, 23 nt, Human
cuccccggcaugagacucagugc

SEQ ID NO: 2649269 - RNA, 22 nt, Human
cucccccuaguuugugagaaac

SEQ ID NO: 2649270 - RNA, 15 nt, Human
cucccccggcucuac

SEQ ID NO: 2649271 - RNA, 18 nt, Human
cucccaggagccugccca

SEQ ID NO: 2649272 - RNA, 20 nt, Human
cucccaggagccugcccagc

SEQ ID NO: 2649273 - RNA, 19 nt, Human
cucccaggagccugcccag

SEQ ID NO: 2649274 - RNA, 21 nt, Human
cucccaggagccugcccagcc

SEQ ID NO: 2649275 - RNA, 16 nt, Human
cucccaggaagcccag

SEQ ID NO: 2649276 - RNA, 21 nt, Human
cucccaggaagcccaggagcc

SEQ ID NO: 2649277 - RNA, 14 nt, Human
cucccucuauuuau

SEQ ID NO: 2649278 - RNA, 15 nt, Human
cucccacuucugcca

SEQ ID NO: 2649279 - RNA, 17 nt, Human
cucccacuucugccaga

SEQ ID NO: 2649280 - RNA, 16 nt, Human
cucccacuucugccag

SEQ ID NO: 2649281 - RNA, 12 nt, Human
cucccacuuugc

SEQ ID NO: 2649282 - RNA, 20 nt, Human
cucccacuuugcuguuccuu

SEQ ID NO: 2649283 - RNA, 13 nt, Human
cuccaggugcaga

SEQ ID NO: 2649284 - RNA, 14 nt, Human
cuccaggugcagag

SEQ ID NO: 2649285 - RNA, 15 nt, Human
cuccaggugcagagg

SEQ ID NO: 2649286 - RNA, 16 nt, Human
cuccaggugcagaggu

SEQ ID NO: 2649287 - RNA, 18 nt, Human
cuccaggugcagagguac

SEQ ID NO: 2649288 - RNA, 11 nt, Human
cucuccucccc

SEQ ID NO: 2649289 - RNA, 17 nt, Human
cucucuucucagagugg

SEQ ID NO: 2649290 - RNA, 19 nt, Human
cucucuucucagaguggug

SEQ ID NO: 2649291 - RNA, 16 nt, Human
cucuaugcuuuccaaa

SEQ ID NO: 2649292 - RNA, 14 nt, Human
cucuaugcuuucca

SEQ ID NO: 2649293 - RNA, 13 nt, Human
cuccuuuaauugu

SEQ ID NO: 2649294 - RNA, 14 nt, Human
cucggugggagcca

SEQ ID NO: 2649295 - RNA, 16 nt, Human
cucgguguggagaagc

SEQ ID NO: 2649296 - RNA, 17 nt, Human
cucgguguggagaagcg

SEQ ID NO: 2649297 - RNA, 16 nt, Human
cucgugcaucccugag

SEQ ID NO: 2649298 - RNA, 17 nt, Human
cucgugcaucccugaga

SEQ ID NO: 2649299 - RNA, 19 nt, Human
cucgugcaucccugagaca

SEQ ID NO: 2649300 - RNA, 21 nt, Human
cucugcacaagcugcacccuc

SEQ ID NO: 2649301 - RNA, 20 nt, Human
cucugcacaagcugcacccu

SEQ ID NO: 2649302 - RNA, 11 nt, Human
ccgaauaaaug

SEQ ID NO: 2649303 - RNA, 17 nt, Human
cccuuccuuuucccugc

SEQ ID NO: 2649304 - RNA, 18 nt, Human
cccuuccuuuucccugcu

SEQ ID NO: 2649305 - RNA, 20 nt, Human
cccuuccucuugucugauuu

SEQ ID NO: 2649306 - RNA, 22 nt, Human
cccuuccugcugcgcaguucuc

SEQ ID NO: 2649307 - RNA, 16 nt, Human
ccguccugccuguggc

SEQ ID NO: 2649308 - RNA, 12 nt, Human
ccggccucucca

SEQ ID NO: 2649309 - RNA, 13 nt, Human
ccggccucuccag

SEQ ID NO: 2649310 - RNA, 14 nt, Human
ccggccucuccagc

SEQ ID NO: 2649311 - RNA, 18 nt, Human
ccggccucuccagccuca

SEQ ID NO: 2649312 - RNA, 21 nt, Human
ccggccucuccagccucagcc

SEQ ID NO: 2649313 - RNA, 17 nt, Human
ccggccgcuccaccagc

SEQ ID NO: 2649314 - RNA, 20 nt, Human
ccggccacccaggaggcagg

SEQ ID NO: 2649315 - RNA, 16 nt, Human
ccggccggccacccag

SEQ ID NO: 2649316 - RNA, 17 nt, Human
ccuagcacuuugggagg

SEQ ID NO: 2649317 - RNA, 15 nt, Human
ccuagcagcccaccc

SEQ ID NO: 2649318 - RNA, 17 nt, Human
ccuagcagcccacccug

SEQ ID NO: 2649319 - RNA, 20 nt, Human
ccuagcagcccacccugcug

SEQ ID NO: 2649320 - RNA, 22 nt, Human
ccuagcagcccacccugcugcu

SEQ ID NO: 2649321 - RNA, 23 nt, Human
ccuagcagcccacccugcugcug

SEQ ID NO: 2649322 - RNA, 17 nt, Human
ccuagccgguuccuguc

SEQ ID NO: 2649323 - RNA, 20 nt, Human
ccuaaucuauggucgggaga

SEQ ID NO: 2649324 - RNA, 17 nt, Human
ccggcccgcgccacagg

SEQ ID NO: 2649325 - RNA, 18 nt, Human
ccggcccgcgccacagga

SEQ ID NO: 2649326 - RNA, 15 nt, Human
ccggccgcuccacca

SEQ ID NO: 2649327 - RNA, 13 nt, Human
ccggcccugugug

SEQ ID NO: 2649328 - RNA, 14 nt, Human
ccggcccugugugc

SEQ ID NO: 2649329 - RNA, 15 nt, Human
ccggcccugugugca

SEQ ID NO: 2649330 - RNA, 17 nt, Human
ccggcccugugugcagg

SEQ ID NO: 2649331 - RNA, 20 nt, Human
ccggcaugagacucagugca

SEQ ID NO: 2649332 - RNA, 21 nt, Human
ccggcaugagacucagugcag

SEQ ID NO: 2649333 - RNA, 22 nt, Human
ccggcaugagacucagugcaga

SEQ ID NO: 2649334 - RNA, 23 nt, Human
ccggcaugagacucagugcagau

SEQ ID NO: 2649335 - RNA, 18 nt, Human
ccggcaggguccuagaaa

SEQ ID NO: 2649336 - RNA, 12 nt, Human
cccugagccggc

SEQ ID NO: 2649337 - RNA, 16 nt, Human
cccugagcuuucugcu

SEQ ID NO: 2649338 - RNA, 20 nt, Human
cccugcccguucuugaaaug

SEQ ID NO: 2649339 - RNA, 18 nt, Human
cccugcccccagccccgg

SEQ ID NO: 2649340 - RNA, 12 nt, Human
cccugcccugca

SEQ ID NO: 2649341 - RNA, 13 nt, Human
cccugcccugcac

SEQ ID NO: 2649342 - RNA, 21 nt, Human
cccuggauagacgaguugauu

SEQ ID NO: 2649343 - RNA, 11 nt, Human
cccuggccucc

SEQ ID NO: 2649344 - RNA, 13 nt, Human
cccuggccucccc

SEQ ID NO: 2649345 - RNA, 14 nt, Human
cccuggccuccccu

SEQ ID NO: 2649346 - RNA, 20 nt, Human
cccuggccgcgcuccgggcu

SEQ ID NO: 2649347 - RNA, 12 nt, Human
cccuggcucccu

SEQ ID NO: 2649348 - RNA, 13 nt, Human
cccuggcucccuc

SEQ ID NO: 2649349 - RNA, 15 nt, Human
cccuggcucccuccu

SEQ ID NO: 2649350 - RNA, 16 nt, Human
cccuggcucccuccuc

SEQ ID NO: 2649351 - RNA, 18 nt, Human
cccuggcucccuccucca

SEQ ID NO: 2649352 - RNA, 20 nt, Human
cccuggcucccuccuccagg

SEQ ID NO: 2649353 - RNA, 23 nt, Human
cccuggcucccuccuccaggccu

SEQ ID NO: 2649354 - RNA, 19 nt, Human
cccuggccucugugccuuc

SEQ ID NO: 2649355 - RNA, 18 nt, Human
cccuggccucugugccuu

SEQ ID NO: 2649356 - RNA, 15 nt, Human
cccuggccucugugc

SEQ ID NO: 2649357 - RNA, 13 nt, Human
cccuggccucugu

SEQ ID NO: 2649358 - RNA, 19 nt, Human
cccuggccuccccugccac

SEQ ID NO: 2649359 - RNA, 20 nt, Human
cccuggccuccccugccacc

SEQ ID NO: 2649360 - RNA, 18 nt, Human
cccugaaagcccugagcu

SEQ ID NO: 2649361 - RNA, 16 nt, Human
cccucggugggagcca

SEQ ID NO: 2649362 - RNA, 14 nt, Human
cccuccgcccugcc

SEQ ID NO: 2649363 - RNA, 15 nt, Human
cccuccgcccugcca

SEQ ID NO: 2649364 - RNA, 16 nt, Human
cccuccgcccugccac

SEQ ID NO: 2649365 - RNA, 19 nt, Human
cccuccgcccugccacuca

SEQ ID NO: 2649366 - RNA, 13 nt, Human
cccuccgcccugc

SEQ ID NO: 2649367 - RNA, 14 nt, Human
ccucuccuuuguuc

SEQ ID NO: 2649368 - RNA, 22 nt, Human
ccucgccggacccucuaaccuc

SEQ ID NO: 2649369 - RNA, 19 nt, Human
ccucgccggaucugaggga

SEQ ID NO: 2649370 - RNA, 18 nt, Human
ccucgccggaucugaggg

SEQ ID NO: 2649371 - RNA, 19 nt, Human
ccucucuauauuucggguc

SEQ ID NO: 2649372 - RNA, 20 nt, Human
ccucugccccucccccagcc

SEQ ID NO: 2649373 - RNA, 17 nt, Human
ccucgcgcuugcuggcc

SEQ ID NO: 2649374 - RNA, 13 nt, Human
ccuccguuuuucu

SEQ ID NO: 2649375 - RNA, 12 nt, Human
ccuccgcccugc

SEQ ID NO: 2649376 - RNA, 13 nt, Human
ccuccgcccugcc

SEQ ID NO: 2649377 - RNA, 14 nt, Human
ccuccgcccugcca

SEQ ID NO: 2649378 - RNA, 15 nt, Human
ccuccgcccugccac

SEQ ID NO: 2649379 - RNA, 16 nt, Human
ccuccgcccugccacu

SEQ ID NO: 2649380 - RNA, 18 nt, Human
ccuccgcccugccacuca

SEQ ID NO: 2649381 - RNA, 12 nt, Human
ccucagccugca

SEQ ID NO: 2649382 - RNA, 14 nt, Human
ccucagccugcaca

SEQ ID NO: 2649383 - RNA, 17 nt, Human
ccuagcuuuagacccug

SEQ ID NO: 2649384 - RNA, 21 nt, Human
ccuagcuugggaggcuucccc

SEQ ID NO: 2649385 - RNA, 20 nt, Human
ccuagcuugggaggcuuccc

SEQ ID NO: 2649386 - RNA, 23 nt, Human
ccuagcuuuagacccuggguggg

SEQ ID NO: 2649387 - RNA, 16 nt, Human
ccuaggaaacucacac

SEQ ID NO: 2649388 - RNA, 22 nt, Human
ccuaggaaacucacacuccccu

SEQ ID NO: 2649389 - RNA, 18 nt, Human
ccuagcuuuagacccugg

SEQ ID NO: 2649390 - RNA, 20 nt, Human
ccuagcuuuagacccugggu

SEQ ID NO: 2649391 - RNA, 21 nt, Human
ccuagcuuuagacccugggug

SEQ ID NO: 2649392 - RNA, 22 nt, Human
ccuagcuuuagacccugggugg

SEQ ID NO: 2649393 - RNA, 23 nt, Human
ccuagccgguuccugucccugcg

SEQ ID NO: 2649394 - RNA, 22 nt, Human
ccuagccgguuccugucccugc

SEQ ID NO: 2649395 - RNA, 21 nt, Human
ccuagccgguuccugucccug

SEQ ID NO: 2649396 - RNA, 20 nt, Human
ccuagccgguuccugucccu

SEQ ID NO: 2649397 - RNA, 17 nt, Human
ccuagcgaucucuccug

SEQ ID NO: 2649398 - RNA, 19 nt, Human
ccuagcgaucucuccuggc

SEQ ID NO: 2649399 - RNA, 21 nt, Human
ccuagcgaucucuccuggccu

SEQ ID NO: 2649400 - RNA, 22 nt, Human
ccuagcgaucucuccuggccua

SEQ ID NO: 2649401 - RNA, 15 nt, Human
ccuagcuaauuauuu

SEQ ID NO: 2649402 - RNA, 20 nt, Human
ccuagcuccuccccuuccuc

SEQ ID NO: 2649403 - RNA, 16 nt, Human
ccucccacuucacugc

SEQ ID NO: 2649404 - RNA, 12 nt, Human
ccucccacuuug

SEQ ID NO: 2649405 - RNA, 19 nt, Human
ccucccacuuugcuguucc

SEQ ID NO: 2649406 - RNA, 21 nt, Human
ccucaugcccacccccugccc

SEQ ID NO: 2649407 - RNA, 22 nt, Human
ccucaugcccacccccugcccu

SEQ ID NO: 2649408 - RNA, 23 nt, Human
ccucaugcccacccccugcccug

SEQ ID NO: 2649409 - RNA, 22 nt, Human
ccuccccagccugcgccugcug

SEQ ID NO: 2649410 - RNA, 21 nt, Human
ccuccccagccugcgccugcu

SEQ ID NO: 2649411 - RNA, 16 nt, Human
ccuccccagccugcgc

SEQ ID NO: 2649412 - RNA, 15 nt, Human
ccuccccagccugcg

SEQ ID NO: 2649413 - RNA, 14 nt, Human
ccuccccagccugc

SEQ ID NO: 2649414 - RNA, 13 nt, Human
ccuccccagccug

SEQ ID NO: 2649415 - RNA, 12 nt, Human
ccuccccagccu

SEQ ID NO: 2649416 - RNA, 22 nt, Human
ccuccccagcauuccagccccu

SEQ ID NO: 2649417 - RNA, 13 nt, Human
ccucaugcccacc

SEQ ID NO: 2649418 - RNA, 14 nt, Human
ccucaugcccaccc

SEQ ID NO: 2649419 - RNA, 15 nt, Human
ccucaugcccacccc

SEQ ID NO: 2649420 - RNA, 20 nt, Human
ccucaugcccacccccugcc

SEQ ID NO: 2649421 - RNA, 24 nt, Human
ccucaugcccacccccugcccugc

SEQ ID NO: 2649422 - RNA, 11 nt, Human
ccucaggcagg

SEQ ID NO: 2649423 - RNA, 15 nt, Human
ccugccucuucucua

SEQ ID NO: 2649424 - RNA, 21 nt, Human
ccugcugcaugcccucucagg

SEQ ID NO: 2649425 - RNA, 20 nt, Human
ccugcugcaugcccucucag

SEQ ID NO: 2649426 - RNA, 16 nt, Human
ccugcugcaugcccuc

SEQ ID NO: 2649427 - RNA, 13 nt, Human
ccugcugcaugcc

SEQ ID NO: 2649428 - RNA, 23 nt, Human
ccugcugcaugcccucucaggcc

SEQ ID NO: 2649429 - RNA, 13 nt, Human
ccucuugaccagg

SEQ ID NO: 2649430 - RNA, 14 nt, Human
ccucuugaccaggc

SEQ ID NO: 2649431 - RNA, 14 nt, Human
ccucuucugagcuu

SEQ ID NO: 2649432 - RNA, 15 nt, Human
ccucuucuggcucaa

SEQ ID NO: 2649433 - RNA, 19 nt, Human
ccucuucucgugccucccc

SEQ ID NO: 2649434 - RNA, 23 nt, Human
ccucugccuuugcaccacgggac

SEQ ID NO: 2649435 - RNA, 19 nt, Human
ccucugcgucuauccugug

SEQ ID NO: 2649436 - RNA, 13 nt, Human
ccucugcucaccg

SEQ ID NO: 2649437 - RNA, 15 nt, Human
ccucugcucaccgcc

SEQ ID NO: 2649438 - RNA, 18 nt, Human
ccucugcucaccgcccau

SEQ ID NO: 2649439 - RNA, 20 nt, Human
ccucugcucaccgcccauca

SEQ ID NO: 2649440 - RNA, 21 nt, Human
ccucugcucaccgcccaucag

SEQ ID NO: 2649441 - RNA, 23 nt, Human
ccucugcucaccgcccaucaggg

SEQ ID NO: 2649442 - RNA, 13 nt, Human
ccugagucugggc

SEQ ID NO: 2649443 - RNA, 16 nt, Human
ccugagucugggcagc

SEQ ID NO: 2649444 - RNA, 17 nt, Human
ccugagucugggcagcu

SEQ ID NO: 2649445 - RNA, 14 nt, Human
ccugaggcuguggu

SEQ ID NO: 2649446 - RNA, 20 nt, Human
cccauccagucucccaacuu

SEQ ID NO: 2649447 - RNA, 15 nt, Human
cccagggcaagcucc

SEQ ID NO: 2649448 - RNA, 20 nt, Human
cccagggcaagcuccgcagg

SEQ ID NO: 2649449 - RNA, 18 nt, Human
cccagggcaagcuccgca

SEQ ID NO: 2649450 - RNA, 18 nt, Human
cccagcccagggcuccug

SEQ ID NO: 2649451 - RNA, 11 nt, Human
cccagcccagg

SEQ ID NO: 2649452 - RNA, 22 nt, Human
cccagcauuccagccccucugg

SEQ ID NO: 2649453 - RNA, 19 nt, Human
cccagcauuccagccccuc

SEQ ID NO: 2649454 - RNA, 20 nt, Human
cccagcauuccagccccucu

SEQ ID NO: 2649455 - RNA, 18 nt, Human
cccagcauuccagccccu

SEQ ID NO: 2649456 - RNA, 16 nt, Human
cccccuuaaauuuaau

SEQ ID NO: 2649457 - RNA, 13 nt, Human
ccccgcagcccug

SEQ ID NO: 2649458 - RNA, 12 nt, Human
ccccgcccccag

SEQ ID NO: 2649459 - RNA, 16 nt, Human
ccccgcccccaguccc

SEQ ID NO: 2649460 - RNA, 13 nt, Human
ccccgccuggcca

SEQ ID NO: 2649461 - RNA, 14 nt, Human
ccccgccuggccag

SEQ ID NO: 2649462 - RNA, 16 nt, Human
ccccgccuggccagga

SEQ ID NO: 2649463 - RNA, 17 nt, Human
ccccgccuggccaggag

SEQ ID NO: 2649464 - RNA, 22 nt, Human
ccccgcgaccauguggccacaa

SEQ ID NO: 2649465 - RNA, 12 nt, Human
cccauugcuguu

SEQ ID NO: 2649466 - RNA, 19 nt, Human
ccccagcauuccagccccu

SEQ ID NO: 2649467 - RNA, 14 nt, Human
ccccaaaacccggg

SEQ ID NO: 2649468 - RNA, 17 nt, Human
ccccagccauccagggg

SEQ ID NO: 2649469 - RNA, 19 nt, Human
ccccagccaugccagcugg

SEQ ID NO: 2649470 - RNA, 20 nt, Human
ccccagccaugccagcuggc

SEQ ID NO: 2649471 - RNA, 22 nt, Human
ccccagccaugccagcuggccu

SEQ ID NO: 2649472 - RNA, 23 nt, Human
ccccagccaugccagcuggccuu

SEQ ID NO: 2649473 - RNA, 20 nt, Human
ccauggggagggauucuggu

SEQ ID NO: 2649474 - RNA, 12 nt, Human
ccauggggaggg

SEQ ID NO: 2649475 - RNA, 18 nt, Human
ccauggggagggauucug

SEQ ID NO: 2649476 - RNA, 20 nt, Human
ccauugugccuaaguccagu

SEQ ID NO: 2649477 - RNA, 15 nt, Human
cccaaccuuucccuc

SEQ ID NO: 2649478 - RNA, 16 nt, Human
cccaaccuuucccuca

SEQ ID NO: 2649479 - RNA, 17 nt, Human
cccaaccuuucccucac

SEQ ID NO: 2649480 - RNA, 20 nt, Human
cccaaccuuucccucacccc

SEQ ID NO: 2649481 - RNA, 14 nt, Human
cccaagccagaggc

SEQ ID NO: 2649482 - RNA, 15 nt, Human
cccaagccagaggcu

SEQ ID NO: 2649483 - RNA, 16 nt, Human
cccaagccagaggcug

SEQ ID NO: 2649484 - RNA, 22 nt, Human
cccaagccuucgggcgucugug

SEQ ID NO: 2649485 - RNA, 14 nt, Human
cccaagcuuagaac

SEQ ID NO: 2649486 - RNA, 13 nt, Human
cccaccccgggga

SEQ ID NO: 2649487 - RNA, 14 nt, Human
cccaccccggggac

SEQ ID NO: 2649488 - RNA, 17 nt, Human
cccaccccggggacccu

SEQ ID NO: 2649489 - RNA, 18 nt, Human
cccaccccggggacccug

SEQ ID NO: 2649490 - RNA, 18 nt, Human
cccacccccugcccugca

SEQ ID NO: 2649491 - RNA, 19 nt, Human
cccacccccugcccugcac

SEQ ID NO: 2649492 - RNA, 13 nt, Human
cccacccccugcc

SEQ ID NO: 2649493 - RNA, 14 nt, Human
cccacccccugccc

SEQ ID NO: 2649494 - RNA, 15 nt, Human
cccacccccugcccu

SEQ ID NO: 2649495 - RNA, 16 nt, Human
cccacccccugcccug

SEQ ID NO: 2649496 - RNA, 17 nt, Human
cccacccccugcccugc

SEQ ID NO: 2649497 - RNA, 20 nt, Human
cccaccccggggacccugug

SEQ ID NO: 2649498 - RNA, 21 nt, Human
cccaccccggggacccuguga

SEQ ID NO: 2649499 - RNA, 13 nt, Human
cccacccugggcc

SEQ ID NO: 2649500 - RNA, 14 nt, Human
cccacccugggccc

SEQ ID NO: 2649501 - RNA, 15 nt, Human
ccagaucacugccac

SEQ ID NO: 2649502 - RNA, 16 nt, Human
ccagaucacugccaca

SEQ ID NO: 2649503 - RNA, 18 nt, Human
ccagaucacugccacacu

SEQ ID NO: 2649504 - RNA, 20 nt, Human
ccagaucacugccacacucu

SEQ ID NO: 2649505 - RNA, 16 nt, Human
ccagaucuuucagaaa

SEQ ID NO: 2649506 - RNA, 21 nt, Human
ccagaucuuucagaaauauaa

SEQ ID NO: 2649507 - RNA, 22 nt, Human
ccagagagccuggugcugcugc

SEQ ID NO: 2649508 - RNA, 21 nt, Human
ccagagagccuggugcugcug

SEQ ID NO: 2649509 - RNA, 17 nt, Human
ccagagguugugcacug

SEQ ID NO: 2649510 - RNA, 19 nt, Human
ccagagguugugcacuguu

SEQ ID NO: 2649511 - RNA, 16 nt, Human
ccagacucagagcucu

SEQ ID NO: 2649512 - RNA, 17 nt, Human
ccagacucagagcucuc

SEQ ID NO: 2649513 - RNA, 22 nt, Human
ccagacucagagcucucucuac

SEQ ID NO: 2649514 - RNA, 23 nt, Human
ccagacucagagcucucucuaca

SEQ ID NO: 2649515 - RNA, 14 nt, Human
ccagacuuccuuga

SEQ ID NO: 2649516 - RNA, 13 nt, Human
ccagacuuccuug

SEQ ID NO: 2649517 - RNA, 15 nt, Human
ccagacuuccuugag

SEQ ID NO: 2649518 - RNA, 14 nt, Human
ccagagacuuuagg

SEQ ID NO: 2649519 - RNA, 16 nt, Human
ccagagacuuuguaga

SEQ ID NO: 2649520 - RNA, 19 nt, Human
ccacuucugccagaugucc

SEQ ID NO: 2649521 - RNA, 12 nt, Human
ccacuugccucu

SEQ ID NO: 2649522 - RNA, 13 nt, Human
ccacuugccucuu

SEQ ID NO: 2649523 - RNA, 13 nt, Human
ccacuugaggccu

SEQ ID NO: 2649524 - RNA, 14 nt, Human
ccacuugaggccug

SEQ ID NO: 2649525 - RNA, 15 nt, Human
ccacuugaggccuga

SEQ ID NO: 2649526 - RNA, 18 nt, Human
ccacuugaggccugaucu

SEQ ID NO: 2649527 - RNA, 19 nt, Human
ccacuugaggccugaucug

SEQ ID NO: 2649528 - RNA, 20 nt, Human
ccacuugaggccugaucugc

SEQ ID NO: 2649529 - RNA, 22 nt, Human
ccacuugaggccugaucugccc

SEQ ID NO: 2649530 - RNA, 24 nt, Human
ccacuugaggccugaucugcccau

SEQ ID NO: 2649531 - RNA, 16 nt, Human
ccacuugccucuuccu

SEQ ID NO: 2649532 - RNA, 17 nt, Human
ccacuugccucuuccuu

SEQ ID NO: 2649533 - RNA, 19 nt, Human
ccacuugccucuuccuuga

SEQ ID NO: 2649534 - RNA, 22 nt, Human
ccacuugccucuuccuugaaga

SEQ ID NO: 2649535 - RNA, 14 nt, Human
ccacuucugccaga

SEQ ID NO: 2649536 - RNA, 13 nt, Human
ccacuucugccag

SEQ ID NO: 2649537 - RNA, 13 nt, Human
ccacuuccuuuua

SEQ ID NO: 2649538 - RNA, 15 nt, Human
ccacuucccacccug

SEQ ID NO: 2649539 - RNA, 20 nt, Human
ccacuuguagauuugauuuu

SEQ ID NO: 2649540 - RNA, 12 nt, Human
ccacuuguagau

SEQ ID NO: 2649541 - RNA, 18 nt, Human
ccacuuguagauuugauu

SEQ ID NO: 2649542 - RNA, 17 nt, Human
ccacuuguagauuugau

SEQ ID NO: 2649543 - RNA, 16 nt, Human
ccacuuugcuguuccu

SEQ ID NO: 2649544 - RNA, 17 nt, Human
ccacuuugcuguuccuu

SEQ ID NO: 2649545 - RNA, 22 nt, Human
ccacuuuguuucguggggaggu

SEQ ID NO: 2649546 - RNA, 19 nt, Human
ccacuuuacccaccuagaa

SEQ ID NO: 2649547 - RNA, 18 nt, Human
ccacuuuacccaccuaga

SEQ ID NO: 2649548 - RNA, 12 nt, Human
ccagaccuggaa

SEQ ID NO: 2649549 - RNA, 22 nt, Human
ccagaccuggaagaacaggccu

SEQ ID NO: 2649550 - RNA, 10 nt, Human
ccaggcaggg

SEQ ID NO: 2649551 - RNA, 12 nt, Human
ccaggcagggag

SEQ ID NO: 2649552 - RNA, 13 nt, Human
ccaggcagggaga

SEQ ID NO: 2649553 - RNA, 22 nt, Human
ccaggcagccucugucaggccu

SEQ ID NO: 2649554 - RNA, 23 nt, Human
ccaggcagccucugucaggccuu

SEQ ID NO: 2649555 - RNA, 14 nt, Human
ccaggcagccucug

SEQ ID NO: 2649556 - RNA, 15 nt, Human
ccaggcagggguggg

SEQ ID NO: 2649557 - RNA, 21 nt, Human
ccaggcaggggugggggugga

SEQ ID NO: 2649558 - RNA, 22 nt, Human
ccaggcagggguggggguggag

SEQ ID NO: 2649559 - RNA, 13 nt, Human
ccagcgccucccu

SEQ ID NO: 2649560 - RNA, 14 nt, Human
ccagcgccucccuc

SEQ ID NO: 2649561 - RNA, 15 nt, Human
ccagcgccucccucc

SEQ ID NO: 2649562 - RNA, 16 nt, Human
ccagcgccucccucca

SEQ ID NO: 2649563 - RNA, 17 nt, Human
ccagcgccucccuccac

SEQ ID NO: 2649564 - RNA, 18 nt, Human
ccagcgccucccuccacc

SEQ ID NO: 2649565 - RNA, 19 nt, Human
ccagcgccucccuccaccc

SEQ ID NO: 2649566 - RNA, 20 nt, Human
ccagcgccucccuccacccc

SEQ ID NO: 2649567 - RNA, 21 nt, Human
ccagcgccucccuccacccca

SEQ ID NO: 2649568 - RNA, 22 nt, Human
ccagcgccucccuccaccccag

SEQ ID NO: 2649569 - RNA, 23 nt, Human
ccagcgccucccuccaccccagg

SEQ ID NO: 2649570 - RNA, 23 nt, Human
ccagcgucagcugcucccuggca

SEQ ID NO: 2649571 - RNA, 14 nt, Human
ccagcuuggggcca

SEQ ID NO: 2649572 - RNA, 16 nt, Human
ccagcuuggggccacc

SEQ ID NO: 2649573 - RNA, 22 nt, Human
ccagcuuggggccaccaaagcu

SEQ ID NO: 2649574 - RNA, 19 nt, Human
ccagcuuggggccaccaaa

SEQ ID NO: 2649575 - RNA, 21 nt, Human
ccagcuuggggccaccaaagc

SEQ ID NO: 2649576 - RNA, 12 nt, Human
ccagcagccugg

SEQ ID NO: 2649577 - RNA, 11 nt, Human
ccagcagccug

SEQ ID NO: 2649578 - RNA, 13 nt, Human
ccagcagccugga

SEQ ID NO: 2649579 - RNA, 14 nt, Human
ccagccccgacucc

SEQ ID NO: 2649580 - RNA, 15 nt, Human
ccagccccgacucca

SEQ ID NO: 2649581 - RNA, 16 nt, Human
ccagccccgacuccag

SEQ ID NO: 2649582 - RNA, 17 nt, Human
ccagccccgacuccagc

SEQ ID NO: 2649583 - RNA, 18 nt, Human
ccagccccgacuccagcc

SEQ ID NO: 2649584 - RNA, 19 nt, Human
ccagccccgacuccagcca

SEQ ID NO: 2649585 - RNA, 20 nt, Human
ccagccccgacuccagccag

SEQ ID NO: 2649586 - RNA, 21 nt, Human
ccagccccgacuccagccagc

SEQ ID NO: 2649587 - RNA, 22 nt, Human
ccagccccgacuccagccagcg

SEQ ID NO: 2649588 - RNA, 18 nt, Human
ccagcgaucucuccacug

SEQ ID NO: 2649589 - RNA, 19 nt, Human
ccagcgaucucuccacugu

SEQ ID NO: 2649590 - RNA, 20 nt, Human
ccagcgaucucuccacugug

SEQ ID NO: 2649591 - RNA, 21 nt, Human
ccagcgaucucuccacugugc

SEQ ID NO: 2649592 - RNA, 14 nt, Human
gccugcgacccugg

SEQ ID NO: 2649593 - RNA, 15 nt, Human
gccugcgacccuggg

SEQ ID NO: 2649594 - RNA, 16 nt, Human
gccugcgacccugggg

SEQ ID NO: 2649595 - RNA, 23 nt, Human
gccugcgacccugggggcacagg

SEQ ID NO: 2649596 - RNA, 21 nt, Human
gccugccuuaagugaggaaau

SEQ ID NO: 2649597 - RNA, 20 nt, Human
gccugccuuaagugaggaaa

SEQ ID NO: 2649598 - RNA, 16 nt, Human
gccugccucuucucua

SEQ ID NO: 2649599 - RNA, 13 nt, Human
gccugccucccac

SEQ ID NO: 2649600 - RNA, 21 nt, Human
gccuguguccaugcgcucagg

SEQ ID NO: 2649601 - RNA, 23 nt, Human
gccuguguccaugcgcucagggc

SEQ ID NO: 2649602 - RNA, 19 nt, Human
gccuguguccaugcgcuca

SEQ ID NO: 2649603 - RNA, 20 nt, Human
gccuguguccaugcgcucag

SEQ ID NO: 2649604 - RNA, 22 nt, Human
gccugggaggucaaggcugcag

SEQ ID NO: 2649605 - RNA, 21 nt, Human
gccugggaggucaaggcugca

SEQ ID NO: 2649606 - RNA, 18 nt, Human
gccugggaaauaagcccc

SEQ ID NO: 2649607 - RNA, 13 nt, Human
gccuccuccagcc

SEQ ID NO: 2649608 - RNA, 12 nt, Human
gccucugugccu

SEQ ID NO: 2649609 - RNA, 23 nt, Human
gccucuucucuacucuagggaaa

SEQ ID NO: 2649610 - RNA, 12 nt, Human
gccucuucucua

SEQ ID NO: 2649611 - RNA, 15 nt, Human
gccucuucugagcuu

SEQ ID NO: 2649612 - RNA, 18 nt, Human
gccucugugcugugugug

SEQ ID NO: 2649613 - RNA, 11 nt, Human
gccucugugcu

SEQ ID NO: 2649614 - RNA, 12 nt, Human
gccucugugcug

SEQ ID NO: 2649615 - RNA, 14 nt, Human
gccucugugcugug

SEQ ID NO: 2649616 - RNA, 17 nt, Human
gccucugugcugugugu

SEQ ID NO: 2649617 - RNA, 22 nt, Human
gccucuugaccaggcugccucc

SEQ ID NO: 2649618 - RNA, 17 nt, Human
gccucuugaccaggcug

SEQ ID NO: 2649619 - RNA, 20 nt, Human
gccucuugaccaggcugccu

SEQ ID NO: 2649620 - RNA, 13 nt, Human
gccucuugaccag

SEQ ID NO: 2649621 - RNA, 14 nt, Human
gccucuugaccagg

SEQ ID NO: 2649622 - RNA, 15 nt, Human
gccucuugaccaggc

SEQ ID NO: 2649623 - RNA, 16 nt, Human
gccucuugaccaggcu

SEQ ID NO: 2649624 - RNA, 21 nt, Human
gccuaccccgcagacaccuug

SEQ ID NO: 2649625 - RNA, 14 nt, Human
gccuaccccgcaga

SEQ ID NO: 2649626 - RNA, 17 nt, Human
gccuaccccgcagacac

SEQ ID NO: 2649627 - RNA, 13 nt, Human
gccggcccugugu

SEQ ID NO: 2649628 - RNA, 14 nt, Human
gccggcccugugug

SEQ ID NO: 2649629 - RNA, 15 nt, Human
gccggcccugugugc

SEQ ID NO: 2649630 - RNA, 16 nt, Human
gccggcccugugugca

SEQ ID NO: 2649631 - RNA, 17 nt, Human
gccggcccugugugcag

SEQ ID NO: 2649632 - RNA, 18 nt, Human
gccggcccugugugcagg

SEQ ID NO: 2649633 - RNA, 12 nt, Human
gccggccccagg

SEQ ID NO: 2649634 - RNA, 14 nt, Human
gccggccccaggcu

SEQ ID NO: 2649635 - RNA, 16 nt, Human
gccggcccgccucucc

SEQ ID NO: 2649636 - RNA, 12 nt, Human
gcccugugugca

SEQ ID NO: 2649637 - RNA, 13 nt, Human
gcccugugugcag

SEQ ID NO: 2649638 - RNA, 14 nt, Human
gcccugugugcagg

SEQ ID NO: 2649639 - RNA, 15 nt, Human
gcccugugugcaggu

SEQ ID NO: 2649640 - RNA, 16 nt, Human
gccgccaugcuccugg

SEQ ID NO: 2649641 - RNA, 15 nt, Human
gccgccaugcuccug

SEQ ID NO: 2649642 - RNA, 16 nt, Human
gccgcgcguccagcug

SEQ ID NO: 2649643 - RNA, 18 nt, Human
gccgcgcguccagcugcc

SEQ ID NO: 2649644 - RNA, 15 nt, Human
gccgcggagccugca

SEQ ID NO: 2649645 - RNA, 22 nt, Human
gccgccugcacuccucagggca

SEQ ID NO: 2649646 - RNA, 18 nt, Human
gccgccugcacuccucag

SEQ ID NO: 2649647 - RNA, 19 nt, Human
gccgccugcacuccucagg

SEQ ID NO: 2649648 - RNA, 13 nt, Human
gccgccugcacuc

SEQ ID NO: 2649649 - RNA, 21 nt, Human
gccggcagccccagccugcua

SEQ ID NO: 2649650 - RNA, 20 nt, Human
gccggcagccccagccugcu

SEQ ID NO: 2649651 - RNA, 19 nt, Human
gccggcagccccagccugc

SEQ ID NO: 2649652 - RNA, 18 nt, Human
gccggcagccccagccug

SEQ ID NO: 2649653 - RNA, 12 nt, Human
gccgcugccacg

SEQ ID NO: 2649654 - RNA, 16 nt, Human
gccgcugaguggcagg

SEQ ID NO: 2649655 - RNA, 15 nt, Human
gcccccaguccccac

SEQ ID NO: 2649656 - RNA, 17 nt, Human
gcccccaguccccaccc

SEQ ID NO: 2649657 - RNA, 18 nt, Human
gcccccaguccccacccc

SEQ ID NO: 2649658 - RNA, 20 nt, Human
gcccccaguccccaccccug

SEQ ID NO: 2649659 - RNA, 22 nt, Human
gcccccuccugaaccgcacagc

SEQ ID NO: 2649660 - RNA, 16 nt, Human
gcccccuccgcccugc

SEQ ID NO: 2649661 - RNA, 21 nt, Human
gcccccaguccccaccccugc

SEQ ID NO: 2649662 - RNA, 22 nt, Human
gcccccaguccccaccccugcc

SEQ ID NO: 2649663 - RNA, 18 nt, Human
gcccccuccgcccugcca

SEQ ID NO: 2649664 - RNA, 20 nt, Human
gcccccuccgcccugccacu

SEQ ID NO: 2649665 - RNA, 22 nt, Human
gcccccuccgcccugccacuca

SEQ ID NO: 2649666 - RNA, 12 nt, Human
gcccccuccuga

SEQ ID NO: 2649667 - RNA, 13 nt, Human
gcccccuccugaa

SEQ ID NO: 2649668 - RNA, 15 nt, Human
gcccccuccugaacc

SEQ ID NO: 2649669 - RNA, 21 nt, Human
gcccccuccugaaccgcacag

SEQ ID NO: 2649670 - RNA, 18 nt, Human
gcccuaaccccuuccaga

SEQ ID NO: 2649671 - RNA, 14 nt, Human
gcccuacuauucag

SEQ ID NO: 2649672 - RNA, 20 nt, Human
gcccuacucccugcagaugc

SEQ ID NO: 2649673 - RNA, 22 nt, Human
gcccuacucccugcagaugcca

SEQ ID NO: 2649674 - RNA, 16 nt, Human
gcccuacucccugcag

SEQ ID NO: 2649675 - RNA, 17 nt, Human
gcccuacucccugcaga

SEQ ID NO: 2649676 - RNA, 23 nt, Human
gcccguguaguccccaaccgugu

SEQ ID NO: 2649677 - RNA, 12 nt, Human
gccccuggcacu

SEQ ID NO: 2649678 - RNA, 13 nt, Human
gccccuggcacuc

SEQ ID NO: 2649679 - RNA, 17 nt, Human
gccccuggcacucuugu

SEQ ID NO: 2649680 - RNA, 18 nt, Human
gccacuuccuuuuaacug

SEQ ID NO: 2649681 - RNA, 22 nt, Human
gccacuuuacccaccuagaaca

SEQ ID NO: 2649682 - RNA, 19 nt, Human
gccacuuuacccaccuaga

SEQ ID NO: 2649683 - RNA, 20 nt, Human
gccacuuuacccaccuagaa

SEQ ID NO: 2649684 - RNA, 18 nt, Human
gccacuuuacccaccuag

SEQ ID NO: 2649685 - RNA, 23 nt, Human
gccacuuuacccaccuagaacac

SEQ ID NO: 2649686 - RNA, 19 nt, Human
gccacugugaagagaacca

SEQ ID NO: 2649687 - RNA, 18 nt, Human
gccacugugaagagaacc

SEQ ID NO: 2649688 - RNA, 18 nt, Human
gccacugccuucgcuucu

SEQ ID NO: 2649689 - RNA, 23 nt, Human
gccacugccuucgcuucuugccu

SEQ ID NO: 2649690 - RNA, 22 nt, Human
gccacugccuucgcuucuugcc

SEQ ID NO: 2649691 - RNA, 22 nt, Human
gccacccuagccaaugucuccu

SEQ ID NO: 2649692 - RNA, 12 nt, Human
gccacccuagcc

SEQ ID NO: 2649693 - RNA, 15 nt, Human
gccacccaggaggca

SEQ ID NO: 2649694 - RNA, 16 nt, Human
gccacccaggaggcag

SEQ ID NO: 2649695 - RNA, 17 nt, Human
gccacccaggaggcagg

SEQ ID NO: 2649696 - RNA, 14 nt, Human
gccaccaaagcugc

SEQ ID NO: 2649697 - RNA, 20 nt, Human
gccaccaaagcugcccacug

SEQ ID NO: 2649698 - RNA, 15 nt, Human
gccaccaaagcugcc

SEQ ID NO: 2649699 - RNA, 16 nt, Human
gccaccaaagcugccc

SEQ ID NO: 2649700 - RNA, 17 nt, Human
gccaccaaagcugccca

SEQ ID NO: 2649701 - RNA, 19 nt, Human
gccaccaaagcugcccacu

SEQ ID NO: 2649702 - RNA, 22 nt, Human
gccaccaugccucacuaauuuu

SEQ ID NO: 2649703 - RNA, 15 nt, Human
gccaccagcucugcc

SEQ ID NO: 2649704 - RNA, 17 nt, Human
gccaccagcucugccgu

SEQ ID NO: 2649705 - RNA, 12 nt, Human
gccaccaggcca

SEQ ID NO: 2649706 - RNA, 19 nt, Human
gccaccagcucugccgucu

SEQ ID NO: 2649707 - RNA, 15 nt, Human
gccaccaggccaccu

SEQ ID NO: 2649708 - RNA, 18 nt, Human
gccaccaggccaccuccc

SEQ ID NO: 2649709 - RNA, 20 nt, Human
gccaccaggccaccucccca

SEQ ID NO: 2649710 - RNA, 17 nt, Human
gccaugugcaccuuggg

SEQ ID NO: 2649711 - RNA, 12 nt, Human
gccaugugcaua

SEQ ID NO: 2649712 - RNA, 19 nt, Human
gccaugugcauaguuucuu

SEQ ID NO: 2649713 - RNA, 20 nt, Human
gccaugugcauaguuucuuu

SEQ ID NO: 2649714 - RNA, 22 nt, Human
gccauguccaaagaggcugccc

SEQ ID NO: 2649715 - RNA, 18 nt, Human
gccauguccaaagaggcu

SEQ ID NO: 2649716 - RNA, 19 nt, Human
gccauguccaaagaggcug

SEQ ID NO: 2649717 - RNA, 15 nt, Human
gccauguaugaagcc

SEQ ID NO: 2649718 - RNA, 14 nt, Human
gccauguccaaaga

SEQ ID NO: 2649719 - RNA, 15 nt, Human
gccauguccaaagag

SEQ ID NO: 2649720 - RNA, 19 nt, Human
gccauucauguaugucaga

SEQ ID NO: 2649721 - RNA, 19 nt, Human
gccauguuggccaggcugg

SEQ ID NO: 2649722 - RNA, 20 nt, Human
gccauucuccugccucagcc

SEQ ID NO: 2649723 - RNA, 22 nt, Human
gccauucugccgcccccuccug

SEQ ID NO: 2649724 - RNA, 13 nt, Human
gccacuucuaaga

SEQ ID NO: 2649725 - RNA, 19 nt, Human
gccagcagcagcaggugau

SEQ ID NO: 2649726 - RNA, 15 nt, Human
gccagcagcagcagg

SEQ ID NO: 2649727 - RNA, 16 nt, Human
gccagcagcagcaggu

SEQ ID NO: 2649728 - RNA, 13 nt, Human
gccagcagcagca

SEQ ID NO: 2649729 - RNA, 14 nt, Human
gccagcaccuggca

SEQ ID NO: 2649730 - RNA, 18 nt, Human
gccagccaacucugggaa

SEQ ID NO: 2649731 - RNA, 19 nt, Human
gcuccccacagcgucccug

SEQ ID NO: 2649732 - RNA, 20 nt, Human
gcuccccacagcgucccugg

SEQ ID NO: 2649733 - RNA, 21 nt, Human
gcuccccacagcgucccuggc

SEQ ID NO: 2649734 - RNA, 22 nt, Human
gcuccccacagcgucccuggcg

SEQ ID NO: 2649735 - RNA, 12 nt, Human
gcuccugcccac

SEQ ID NO: 2649736 - RNA, 19 nt, Human
gcucggagaagagcgcagu

SEQ ID NO: 2649737 - RNA, 23 nt, Human
gcucggagaagagcgcaguguuu

SEQ ID NO: 2649738 - RNA, 13 nt, Human
gcucggcucagcu

SEQ ID NO: 2649739 - RNA, 16 nt, Human
gcucggcucagcucgg

SEQ ID NO: 2649740 - RNA, 14 nt, Human
gcucugaccacuug

SEQ ID NO: 2649741 - RNA, 21 nt, Human
gcucugaccacuugaggccug

SEQ ID NO: 2649742 - RNA, 22 nt, Human
gcucugaccacuugaggccuga

SEQ ID NO: 2649743 - RNA, 13 nt, Human
gcucuggagggga

SEQ ID NO: 2649744 - RNA, 15 nt, Human
gcucuggaggggagg

SEQ ID NO: 2649745 - RNA, 16 nt, Human
gcucuggaggggaggg

SEQ ID NO: 2649746 - RNA, 18 nt, Human
gcucugcaguccuacuca

SEQ ID NO: 2649747 - RNA, 21 nt, Human
gcucugcaguccuacucaagc

SEQ ID NO: 2649748 - RNA, 14 nt, Human
gcugaaauucuccu

SEQ ID NO: 2649749 - RNA, 15 nt, Human
gcugaaauucuccug

SEQ ID NO: 2649750 - RNA, 16 nt, Human
gcugaaauucuccugg

SEQ ID NO: 2649751 - RNA, 18 nt, Human
gcucuucaucccauucca

SEQ ID NO: 2649752 - RNA, 19 nt, Human
gcucuucaucccauuccag

SEQ ID NO: 2649753 - RNA, 15 nt, Human
gcucuucagaugcca

SEQ ID NO: 2649754 - RNA, 20 nt, Human
gcugaauguugggacugcua

SEQ ID NO: 2649755 - RNA, 23 nt, Human
gcugaauguugggacugcuaaau

SEQ ID NO: 2649756 - RNA, 17 nt, Human
gcugaauguugggacug

SEQ ID NO: 2649757 - RNA, 22 nt, Human
gcugaauacagaggcaacugca

SEQ ID NO: 2649758 - RNA, 17 nt, Human
gcugaaauucuccugga

SEQ ID NO: 2649759 - RNA, 18 nt, Human
gcugaaauucuccuggag

SEQ ID NO: 2649760 - RNA, 12 nt, Human
gcucaggguggu

SEQ ID NO: 2649761 - RNA, 23 nt, Human
gcucagggccaugcugaggccug

SEQ ID NO: 2649762 - RNA, 20 nt, Human
gcucagggccaugcugaggc

SEQ ID NO: 2649763 - RNA, 22 nt, Human
gcuagucaacaguacccugguu

SEQ ID NO: 2649764 - RNA, 13 nt, Human
gcuagucaacagu

SEQ ID NO: 2649765 - RNA, 13 nt, Human
gcuaggaagaguc

SEQ ID NO: 2649766 - RNA, 21 nt, Human
gcuaggaagagucuacccgac

SEQ ID NO: 2649767 - RNA, 15 nt, Human
gcuaugucaguacua

SEQ ID NO: 2649768 - RNA, 15 nt, Human
gcuauguauaaaaua

SEQ ID NO: 2649769 - RNA, 16 nt, Human
gcuauguauaaaauac

SEQ ID NO: 2649770 - RNA, 22 nt, Human
gcuauuuauuuuccuaaagaga

SEQ ID NO: 2649771 - RNA, 16 nt, Human
gcuauuuauuuuccua

SEQ ID NO: 2649772 - RNA, 20 nt, Human
gcuauuuauuuuccuaaaga

SEQ ID NO: 2649773 - RNA, 16 nt, Human
gcuauuuaugggcccc

SEQ ID NO: 2649774 - RNA, 17 nt, Human
gcuauuuaugggccccu

SEQ ID NO: 2649775 - RNA, 18 nt, Human
gcuauuuaugggccccug

SEQ ID NO: 2649776 - RNA, 19 nt, Human
gcuauuuaugggccccugg

SEQ ID NO: 2649777 - RNA, 22 nt, Human
gcuauuuaugggccccuggcac

SEQ ID NO: 2649778 - RNA, 15 nt, Human
gcuauuuauuuuccu

SEQ ID NO: 2649779 - RNA, 20 nt, Human
gccuguuaggagaagcugca

SEQ ID NO: 2649780 - RNA, 19 nt, Human
gcuucuugccucugugcug

SEQ ID NO: 2649781 - RNA, 20 nt, Human
gcuucuugccucugugcugu

SEQ ID NO: 2649782 - RNA, 21 nt, Human
gcuucuugccucugugcugug

SEQ ID NO: 2649783 - RNA, 15 nt, Human
gcuucccuuacuuug

SEQ ID NO: 2649784 - RNA, 14 nt, Human
gcuuccuugccuga

SEQ ID NO: 2649785 - RNA, 24 nt, Human
gcuuccuuucccaagccuucgggc

SEQ ID NO: 2649786 - RNA, 23 nt, Human
gcuuccuuguagcgacuaaacua

SEQ ID NO: 2649787 - RNA, 16 nt, Human
gcuuccuuucccaagc

SEQ ID NO: 2649788 - RNA, 14 nt, Human
gcuuggccugcugu

SEQ ID NO: 2649789 - RNA, 15 nt, Human
gcuuggccugcugug

SEQ ID NO: 2649790 - RNA, 16 nt, Human
gcuuggccugcuguga

SEQ ID NO: 2649791 - RNA, 23 nt, Human
gcuuggggccaccaaagcugccc

SEQ ID NO: 2649792 - RNA, 16 nt, Human
gcuuggggcucacaca

SEQ ID NO: 2649793 - RNA, 20 nt, Human
gcuuggggcucacacaccug

SEQ ID NO: 2649794 - RNA, 19 nt, Human
gcuuggggccaccaaagcu

SEQ ID NO: 2649795 - RNA, 20 nt, Human
gcuuggggccaccaaagcug

SEQ ID NO: 2649796 - RNA, 22 nt, Human
gcuuggggccaccaaagcugcc

SEQ ID NO: 2649797 - RNA, 19 nt, Human
gcuuccauuuuaauuuuaa

SEQ ID NO: 2649798 - RNA, 13 nt, Human
gcuucccuaaucu

SEQ ID NO: 2649799 - RNA, 14 nt, Human
gcuucccuaaucua

SEQ ID NO: 2649800 - RNA, 15 nt, Human
gcuguaaucauuugu

SEQ ID NO: 2649801 - RNA, 22 nt, Human
gcuguaaucauuuguuuacauu

SEQ ID NO: 2649802 - RNA, 15 nt, Human
gcuguuggugggacc

SEQ ID NO: 2649803 - RNA, 20 nt, Human
gcuucacggaagagccuugc

SEQ ID NO: 2649804 - RNA, 13 nt, Human
gcuuaaauuucuu

SEQ ID NO: 2649805 - RNA, 15 nt, Human
gcuuaaauuucuuau

SEQ ID NO: 2649806 - RNA, 16 nt, Human
gcuuaaauuucuuaug

SEQ ID NO: 2649807 - RNA, 21 nt, Human
gcuuaaauuucuuaugugaca

SEQ ID NO: 2649808 - RNA, 19 nt, Human
gcuucacaguagagccagc

SEQ ID NO: 2649809 - RNA, 20 nt, Human
gcuucacaguagagccagcu

SEQ ID NO: 2649810 - RNA, 21 nt, Human
gcuucacaguagagccagcuu

SEQ ID NO: 2649811 - RNA, 22 nt, Human
gcuucacaguagagccagcuug

SEQ ID NO: 2649812 - RNA, 17 nt, Human
gcuucaccauggccuua

SEQ ID NO: 2649813 - RNA, 20 nt, Human
gcuucaccauggccuuauga

SEQ ID NO: 2649814 - RNA, 17 nt, Human
gcuucacaguagagcca

SEQ ID NO: 2649815 - RNA, 18 nt, Human
gcuucacaguagagccag

SEQ ID NO: 2649816 - RNA, 13 nt, Human
gcugugcugcccu

SEQ ID NO: 2649817 - RNA, 19 nt, Human
gcuggacggguuagacagc

SEQ ID NO: 2649818 - RNA, 20 nt, Human
gcuggacuucuaccugcccu

SEQ ID NO: 2649819 - RNA, 21 nt, Human
gcuggacuucuaccugcccuc

SEQ ID NO: 2649820 - RNA, 22 nt, Human
gcuggacuucuaccugcccuca

SEQ ID NO: 2649821 - RNA, 16 nt, Human
gcuggguucauuugug

SEQ ID NO: 2649822 - RNA, 16 nt, Human
gcugagggcagacugg

SEQ ID NO: 2649823 - RNA, 17 nt, Human
gcugccaggugagaaac

SEQ ID NO: 2649824 - RNA, 16 nt, Human
gcugccagccuugagc

SEQ ID NO: 2649825 - RNA, 19 nt, Human
gcugccagccuugagcccu

SEQ ID NO: 2649826 - RNA, 20 nt, Human
gcugccagccuugagcccug

SEQ ID NO: 2649827 - RNA, 21 nt, Human
gcugccagccuugagcccugg

SEQ ID NO: 2649828 - RNA, 22 nt, Human
gcugccagccuugagcccuggc

SEQ ID NO: 2649829 - RNA, 23 nt, Human
gcugccagccuugagcccuggcu

SEQ ID NO: 2649830 - RNA, 22 nt, Human
gcugcccacuguuucucuugag

SEQ ID NO: 2649831 - RNA, 23 nt, Human
gcugcccacuguuucucuugagc

SEQ ID NO: 2649832 - RNA, 18 nt, Human
gcugcccacuguuucucu

SEQ ID NO: 2649833 - RNA, 22 nt, Human
gcugccccaucuccccucagcu

SEQ ID NO: 2649834 - RNA, 21 nt, Human
gcugccccaucuccccucagc

SEQ ID NO: 2649835 - RNA, 23 nt, Human
gcugccccaucuccccucagcuc

SEQ ID NO: 2649836 - RNA, 13 nt, Human
gcugccguggggc

SEQ ID NO: 2649837 - RNA, 22 nt, Human
gcugccguggggccgccgccuc

SEQ ID NO: 2649838 - RNA, 18 nt, Human
gcugccgugccgccugca

SEQ ID NO: 2649839 - RNA, 22 nt, Human
gcugccgugccgccugcacucc

SEQ ID NO: 2649840 - RNA, 13 nt, Human
gcugcugccucuu

SEQ ID NO: 2649841 - RNA, 12 nt, Human
gcugcugcugcu

SEQ ID NO: 2649842 - RNA, 17 nt, Human
gcugcugcccccacccc

SEQ ID NO: 2649843 - RNA, 24 nt, Human
ggggaaaaucagccugcuccagcu

SEQ ID NO: 2649844 - RNA, 23 nt, Human
ggggaaagacacugccugggcug

SEQ ID NO: 2649845 - RNA, 22 nt, Human
ggggaaagacacugccugggcu

SEQ ID NO: 2649846 - RNA, 22 nt, Human
aaacaguuuuuauuaaaacaug

SEQ ID NO: 2649847 - RNA, 14 nt, Human
aaacauagaaaugg

SEQ ID NO: 2649848 - RNA, 21 nt, Human
aaacauagaaauggaaauuuu

SEQ ID NO: 2649849 - RNA, 17 nt, Human
aaacauaacauaaauuu

SEQ ID NO: 2649850 - RNA, 14 nt, Human
aaaauggaauaaaa

SEQ ID NO: 2649851 - RNA, 14 nt, Human
aaaauguaauuuaa

SEQ ID NO: 2649852 - RNA, 18 nt, Human
aaaauguaauuuaaauga

SEQ ID NO: 2649853 - RNA, 19 nt, Human
aaaauguaauuuaaaugaa

SEQ ID NO: 2649854 - RNA, 21 nt, Human
aaaauguaggcuuaguuugug

SEQ ID NO: 2649855 - RNA, 18 nt, Human
gggcuggacuucuaccug

SEQ ID NO: 2649856 - RNA, 17 nt, Human
gggcugcuuccuccugg

SEQ ID NO: 2649857 - RNA, 18 nt, Human
gggcugcuuccuccugga

SEQ ID NO: 2649858 - RNA, 19 nt, Human
gggcugcuuccuccuggaa

SEQ ID NO: 2649859 - RNA, 20 nt, Human
gggcugcuuccuccuggaaa

SEQ ID NO: 2649860 - RNA, 13 nt, Human
aaacaaaaugaag

SEQ ID NO: 2649861 - RNA, 12 nt, Human
aaacaaaauuug

SEQ ID NO: 2649862 - RNA, 13 nt, Human
aaacaaaauuuga

SEQ ID NO: 2649863 - RNA, 15 nt, Human
aaacaaaauuugacu

SEQ ID NO: 2649864 - RNA, 17 nt, Human
aaacaaaauuugacuaa

SEQ ID NO: 2649865 - RNA, 15 nt, Human
aaacaaccaugucau

SEQ ID NO: 2649866 - RNA, 17 nt, Human
aaacaaccaugucauuu

SEQ ID NO: 2649867 - RNA, 13 nt, Human
aaaauuguuauuu

SEQ ID NO: 2649868 - RNA, 16 nt, Human
aaaauuguuuagugau

SEQ ID NO: 2649869 - RNA, 17 nt, Human
ggggucucacccaugca

SEQ ID NO: 2649870 - RNA, 13 nt, Human
ggggucucccugg

SEQ ID NO: 2649871 - RNA, 14 nt, Human
ggggucucccuggc

SEQ ID NO: 2649872 - RNA, 21 nt, Human
ggggucucccuggcucccucc

SEQ ID NO: 2649873 - RNA, 24 nt, Human
ggguaggggaagaagagcuaucag

SEQ ID NO: 2649874 - RNA, 19 nt, Human
ggguaggagggugggaagg

SEQ ID NO: 2649875 - RNA, 16 nt, Human
aaacauugaaguaaug

SEQ ID NO: 2649876 - RNA, 12 nt, Human
aaacauuuauuu

SEQ ID NO: 2649877 - RNA, 20 nt, Human
aaacauugaaguaaugaauu

SEQ ID NO: 2649878 - RNA, 21 nt, Human
aaaccaaagagggcuuccucu

SEQ ID NO: 2649879 - RNA, 17 nt, Human
aaaccaaagagggcuuc

SEQ ID NO: 2649880 - RNA, 19 nt, Human
aaaccaaagagggcuuccu

SEQ ID NO: 2649881 - RNA, 20 nt, Human
aaaccaaagagggcuuccuc

SEQ ID NO: 2649882 - RNA, 23 nt, Human
aaacauuuauuuuuuuuaaagaa

SEQ ID NO: 2649883 - RNA, 19 nt, Human
gggucgggggcaggugcug

SEQ ID NO: 2649884 - RNA, 20 nt, Human
gggucggcugaccaugcuca

SEQ ID NO: 2649885 - RNA, 21 nt, Human
aaacuaccuguauuuaaaaau

SEQ ID NO: 2649886 - RNA, 16 nt, Human
aaacuccacaucugcc

SEQ ID NO: 2649887 - RNA, 19 nt, Human
aaacuccacaucugccuua

SEQ ID NO: 2649888 - RNA, 17 nt, Human
aaacuccacaucugccu

SEQ ID NO: 2649889 - RNA, 18 nt, Human
aaacuccacaucugccuu

SEQ ID NO: 2649890 - RNA, 20 nt, Human
aaacuggggccuccagaacu

SEQ ID NO: 2649891 - RNA, 19 nt, Human
aaacugggaugaaacuaaa

SEQ ID NO: 2649892 - RNA, 23 nt, Human
aaacugggaugaaacuaaagcaa

SEQ ID NO: 2649893 - RNA, 18 nt, Human
aaacuggggccuccagaa

SEQ ID NO: 2649894 - RNA, 17 nt, Human
aaacuggggccuccaga

SEQ ID NO: 2649895 - RNA, 15 nt, Human
aaacuacauauugua

SEQ ID NO: 2649896 - RNA, 13 nt, Human
aaacuaaauuuca

SEQ ID NO: 2649897 - RNA, 16 nt, Human
aaacuaauauuuuaug

SEQ ID NO: 2649898 - RNA, 17 nt, Human
aaaccaccaaaaacaaa

SEQ ID NO: 2649899 - RNA, 19 nt, Human
ggugaucccguuuucccca

SEQ ID NO: 2649900 - RNA, 17 nt, Human
ggucuuugagcucccac

SEQ ID NO: 2649901 - RNA, 18 nt, Human
ggucuuuaaaauauuguu

SEQ ID NO: 2649902 - RNA, 19 nt, Human
ggucuugauucagucacau

SEQ ID NO: 2649903 - RNA, 20 nt, Human
ggucuuucaguacuuuuuua

SEQ ID NO: 2649904 - RNA, 10 nt, Human
ggucuuugag

SEQ ID NO: 2649905 - RNA, 16 nt, Human
ggucuguuggcaggcu

SEQ ID NO: 2649906 - RNA, 18 nt, Human
ggucuguuggcaggcugg

SEQ ID NO: 2649907 - RNA, 18 nt, Human
ggugauuggaccaggcca

SEQ ID NO: 2649908 - RNA, 11 nt, Human
aaagcuucccc

SEQ ID NO: 2649909 - RNA, 19 nt, Human
aaagcuagucaacaguacc

SEQ ID NO: 2649910 - RNA, 20 nt, Human
aaagcuauaaagcaguauuu

SEQ ID NO: 2649911 - RNA, 17 nt, Human
aaagcuauauaagacaa

SEQ ID NO: 2649912 - RNA, 19 nt, Human
aaagcuuggauuaaauaca

SEQ ID NO: 2649913 - RNA, 20 nt, Human
aaagcuuggauuaaauacau

SEQ ID NO: 2649914 - RNA, 21 nt, Human
aaagcuuggauuaaauacaua

SEQ ID NO: 2649915 - RNA, 18 nt, Human
aaagcuugguucugugaa

SEQ ID NO: 2649916 - RNA, 16 nt, Human
aaaggaaagaaaacau

SEQ ID NO: 2649917 - RNA, 18 nt, Human
aaaggaaaauaguaaugu

SEQ ID NO: 2649918 - RNA, 16 nt, Human
aaaggaaaaugucugu

SEQ ID NO: 2649919 - RNA, 15 nt, Human
aaaggaaagaaaaca

SEQ ID NO: 2649920 - RNA, 23 nt, Human
ggugcccagaauaaguuauugca

SEQ ID NO: 2649921 - RNA, 14 nt, Human
ggugcccaagccag

SEQ ID NO: 2649922 - RNA, 17 nt, Human
ggugcccaagccagagg

SEQ ID NO: 2649923 - RNA, 18 nt, Human
ggugcccaagccagaggc

SEQ ID NO: 2649924 - RNA, 22 nt, Human
ggugccaugaagggacccuuug

SEQ ID NO: 2649925 - RNA, 23 nt, Human
ggugcccaagccagaggcugggu

SEQ ID NO: 2649926 - RNA, 21 nt, Human
ggugcccaagccagaggcugg

SEQ ID NO: 2649927 - RNA, 22 nt, Human
ggugcccaagccagaggcuggg

SEQ ID NO: 2649928 - RNA, 18 nt, Human
aaacuguagaaaugauga

SEQ ID NO: 2649929 - RNA, 16 nt, Human
aaacuguagaaaugau

SEQ ID NO: 2649930 - RNA, 15 nt, Human
aaacuguagaaauga

SEQ ID NO: 2649931 - RNA, 18 nt, Human
gguaguugcaauugaauu

SEQ ID NO: 2649932 - RNA, 13 nt, Human
gguaguuucugug

SEQ ID NO: 2649933 - RNA, 20 nt, Human
gguccaaccagaccuggaag

SEQ ID NO: 2649934 - RNA, 19 nt, Human
gguauuaaaacuaaauuuc

SEQ ID NO: 2649935 - RNA, 22 nt, Human
ggucauccagacucagagcucu

SEQ ID NO: 2649936 - RNA, 16 nt, Human
aaacuuguuucacuga

SEQ ID NO: 2649937 - RNA, 17 nt, Human
aaacuuguuucacugaa

SEQ ID NO: 2649938 - RNA, 18 nt, Human
aaacuuguuucacugaaa

SEQ ID NO: 2649939 - RNA, 13 nt, Human
aaacuuuaauaua

SEQ ID NO: 2649940 - RNA, 14 nt, Human
gguccagaagagaa

SEQ ID NO: 2649941 - RNA, 14 nt, Human
aaagaauuuaguau

SEQ ID NO: 2649942 - RNA, 16 nt, Human
aaagaauuuaguauua

SEQ ID NO: 2649943 - RNA, 12 nt, Human
aaagagaaugag

SEQ ID NO: 2649944 - RNA, 14 nt, Human
aaagagaaugaguc

SEQ ID NO: 2649945 - RNA, 20 nt, Human
aaagagaaugaguccuugau

SEQ ID NO: 2649946 - RNA, 21 nt, Human
aaagagaauugggggcuuagg

SEQ ID NO: 2649947 - RNA, 14 nt, Human
aaagagacaggcag

SEQ ID NO: 2649948 - RNA, 18 nt, Human
aaagacuuuaaaagugau

SEQ ID NO: 2649949 - RNA, 18 nt, Human
aaagacaaaagucugucu

SEQ ID NO: 2649950 - RNA, 18 nt, Human
aaagagagaacaggacua

SEQ ID NO: 2649951 - RNA, 20 nt, Human
aaagaugguaucauauauuu

SEQ ID NO: 2649952 - RNA, 15 nt, Human
aaagauucaugauuu

SEQ ID NO: 2649953 - RNA, 16 nt, Human
aaaagcgcuuuuccuu

SEQ ID NO: 2649954 - RNA, 14 nt, Human
aaaacuaaauuuca

SEQ ID NO: 2649955 - RNA, 19 nt, Human
aaaacuugguuuuaugguu

SEQ ID NO: 2649956 - RNA, 21 nt, Human
aaaagcuauaaagcaguauuu

SEQ ID NO: 2649957 - RNA, 17 nt, Human
aaaagcuauaaagcagu

SEQ ID NO: 2649958 - RNA, 13 nt, Human
aaaagcucuuuua

SEQ ID NO: 2649959 - RNA, 14 nt, Human
aaaagcucuuuuaa

SEQ ID NO: 2649960 - RNA, 15 nt, Human
aaaagcucuuuuaau

SEQ ID NO: 2649961 - RNA, 15 nt, Human
aaaagcuccuggggc

SEQ ID NO: 2649962 - RNA, 14 nt, Human
aaaagcugggcagg

SEQ ID NO: 2649963 - RNA, 21 nt, Human
gggagggcggcaggggccugg

SEQ ID NO: 2649964 - RNA, 22 nt, Human
gggagggcggcaggggccugga

SEQ ID NO: 2649965 - RNA, 23 nt, Human
gggagagagagagagagaggaca

SEQ ID NO: 2649966 - RNA, 14 nt, Human
gggagagagagaga

SEQ ID NO: 2649967 - RNA, 22 nt, Human
gggagagagagagagagaggac

SEQ ID NO: 2649968 - RNA, 14 nt, Human
gggagacuuugaug

SEQ ID NO: 2649969 - RNA, 18 nt, Human
gggagacgguuuccaggg

SEQ ID NO: 2649970 - RNA, 20 nt, Human
gggagacgguuuccagggag

SEQ ID NO: 2649971 - RNA, 21 nt, Human
gggagacgguuuccagggagg

SEQ ID NO: 2649972 - RNA, 22 nt, Human
gggagacgguuuccagggaggg

SEQ ID NO: 2649973 - RNA, 15 nt, Human
gggacugcuaaauaa

SEQ ID NO: 2649974 - RNA, 16 nt, Human
gggacugcuaaauaaa

SEQ ID NO: 2649975 - RNA, 23 nt, Human
aaaaaugucaaaaguagaacuuu

SEQ ID NO: 2649976 - RNA, 18 nt, Human
aaaaaugucaaaaguaga

SEQ ID NO: 2649977 - RNA, 23 nt, Human
gggaaauguuuuguaaacauuua

SEQ ID NO: 2649978 - RNA, 23 nt, Human
gggaaauauauacaaaaagaaaa

SEQ ID NO: 2649979 - RNA, 23 nt, Human
gggaaaucgagugccgcaucuca

SEQ ID NO: 2649980 - RNA, 13 nt, Human
gggaaaggggugc

SEQ ID NO: 2649981 - RNA, 12 nt, Human
aaaacauuugcu

SEQ ID NO: 2649982 - RNA, 13 nt, Human
aaaacauuugcug

SEQ ID NO: 2649983 - RNA, 15 nt, Human
aaaaccaauguucuc

SEQ ID NO: 2649984 - RNA, 13 nt, Human
aaaaccaaagagg

SEQ ID NO: 2649985 - RNA, 22 nt, Human
aaaaccaaagagggcuuccucu

SEQ ID NO: 2649986 - RNA, 15 nt, Human
aaaaccaaauguuua

SEQ ID NO: 2649987 - RNA, 18 nt, Human
aaaaccaaauguuuauuu

SEQ ID NO: 2649988 - RNA, 17 nt, Human
aaaacuacuucuuuuuu

SEQ ID NO: 2649989 - RNA, 12 nt, Human
gggcagcugcua

SEQ ID NO: 2649990 - RNA, 15 nt, Human
aaaagggaagaaacu

SEQ ID NO: 2649991 - RNA, 16 nt, Human
aaaagggaagaaacug

SEQ ID NO: 2649992 - RNA, 14 nt, Human
aaaaggcuugaagc

SEQ ID NO: 2649993 - RNA, 16 nt, Human
aaaaggcugugcugcc

SEQ ID NO: 2649994 - RNA, 19 nt, Human
aaaaggcugugcugcccug

SEQ ID NO: 2649995 - RNA, 20 nt, Human
aaaaggcuuauaaaacagag

SEQ ID NO: 2649996 - RNA, 19 nt, Human
aaaaggcuuauaaaacaga

SEQ ID NO: 2649997 - RNA, 17 nt, Human
aaaaggcuuauaaaaca

SEQ ID NO: 2649998 - RNA, 20 nt, Human
aaaaggcugugcugcccuga

SEQ ID NO: 2649999 - RNA, 15 nt, Human
gggcagcugucccuu

SEQ ID NO: 2650000 - RNA, 15 nt, Human
aaaaggcgcaucuaa

SEQ ID NO: 2650001 - RNA, 20 nt, Human
aaaaggcgcaucuaacgcgu

SEQ ID NO: 2650002 - RNA, 17 nt, Human
gggaggggccggcccug

SEQ ID NO: 2650003 - RNA, 16 nt, Human
gggaggggagacuuug

SEQ ID NO: 2650004 - RNA, 16 nt, Human
gggaggggaaaagcau

SEQ ID NO: 2650005 - RNA, 14 nt, Human
gggcaaacaggcag

SEQ ID NO: 2650006 - RNA, 19 nt, Human
gggauucugguuccagggu

SEQ ID NO: 2650007 - RNA, 11 nt, Human
gggcagagcug

SEQ ID NO: 2650008 - RNA, 16 nt, Human
gggcagagcuggcucu

SEQ ID NO: 2650009 - RNA, 17 nt, Human
gggcagagcuggcucug

SEQ ID NO: 2650010 - RNA, 19 nt, Human
gggcagagcuggcucugag

SEQ ID NO: 2650011 - RNA, 15 nt, Human
gggcaaacaggcagu

SEQ ID NO: 2650012 - RNA, 20 nt, Human
aaaauaaauaaaaacuaauu

SEQ ID NO: 2650013 - RNA, 13 nt, Human
aaaaguaauauuu

SEQ ID NO: 2650014 - RNA, 15 nt, Human
aaaaguaauauuuau

SEQ ID NO: 2650015 - RNA, 13 nt, Human
aaaaguagaacuu

SEQ ID NO: 2650016 - RNA, 15 nt, Human
aaaaguagaacuuug

SEQ ID NO: 2650017 - RNA, 16 nt, Human
aaaauacuauuuaaga

SEQ ID NO: 2650018 - RNA, 17 nt, Human
aaaauacuauuuaagau

SEQ ID NO: 2650019 - RNA, 18 nt, Human
aaaauacuauuuaagaug

SEQ ID NO: 2650020 - RNA, 21 nt, Human
aaaauacuauuuaagauguga

SEQ ID NO: 2650021 - RNA, 22 nt, Human
aaaauacuauuuaagaugugaa

SEQ ID NO: 2650022 - RNA, 23 nt, Human
aaaauacuauuuaagaugugaaa

SEQ ID NO: 2650023 - RNA, 23 nt, Human
aaaauagauauaaauuuuuaaga

SEQ ID NO: 2650024 - RNA, 18 nt, Human
aaaauagauuuuauaaga

SEQ ID NO: 2650025 - RNA, 21 nt, Human
aaaauagauuuuauaagauga

SEQ ID NO: 2650026 - RNA, 12 nt, Human
aaaauagccugc

SEQ ID NO: 2650027 - RNA, 16 nt, Human
aaaauauaaacaaaga

SEQ ID NO: 2650028 - RNA, 14 nt, Human
aaaauauaaaauua

SEQ ID NO: 2650029 - RNA, 15 nt, Human
aaaauauaaacaaag

SEQ ID NO: 2650030 - RNA, 13 nt, Human
aaaauaguuuauu

SEQ ID NO: 2650031 - RNA, 14 nt, Human
aaaauaguuuauuu

SEQ ID NO: 2650032 - RNA, 12 nt, Human
aaaauauaucuu

SEQ ID NO: 2650033 - RNA, 13 nt, Human
aaaauauauaucu

SEQ ID NO: 2650034 - RNA, 14 nt, Human
aaaauauauaucua

SEQ ID NO: 2650035 - RNA, 13 nt, Human
ggcugccccucuc

SEQ ID NO: 2650036 - RNA, 13 nt, Human
ggcuggcuccuga

SEQ ID NO: 2650037 - RNA, 15 nt, Human
ggcuggcuccugauc

SEQ ID NO: 2650038 - RNA, 11 nt, Human
ggcugggaaau

SEQ ID NO: 2650039 - RNA, 20 nt, Human
ggcucgaaucucugugccuu

SEQ ID NO: 2650040 - RNA, 18 nt, Human
ggcucgaaucucugugcc

SEQ ID NO: 2650041 - RNA, 19 nt, Human
ggcucgaaucucugugccu

SEQ ID NO: 2650042 - RNA, 13 nt, Human
ggcucgaaucucu

SEQ ID NO: 2650043 - RNA, 15 nt, Human
ggcucgaaucucugu

SEQ ID NO: 2650044 - RNA, 17 nt, Human
ggcucgaaucucugugc

SEQ ID NO: 2650045 - RNA, 14 nt, Human
ggcugaaauucucc

SEQ ID NO: 2650046 - RNA, 16 nt, Human
ggcugaaauucuccug

SEQ ID NO: 2650047 - RNA, 17 nt, Human
ggcugaaauucuccugg

SEQ ID NO: 2650048 - RNA, 18 nt, Human
ggcugaaauucuccugga

SEQ ID NO: 2650049 - RNA, 19 nt, Human
ggcugaaauucuccuggag

SEQ ID NO: 2650050 - RNA, 21 nt, Human
ggcugaaauucuccuggaggu

SEQ ID NO: 2650051 - RNA, 22 nt, Human
ggcugaaauucuccuggagguc

SEQ ID NO: 2650052 - RNA, 17 nt, Human
ggcugcaguucuacuca

SEQ ID NO: 2650053 - RNA, 9 nt, Human
ggcuccugc

SEQ ID NO: 2650054 - RNA, 11 nt, Human
ggcuccugauc

SEQ ID NO: 2650055 - RNA, 14 nt, Human
ggcuccggccucug

SEQ ID NO: 2650056 - RNA, 15 nt, Human
ggcuccggccucugc

SEQ ID NO: 2650057 - RNA, 17 nt, Human
ggcuccggccucugccu

SEQ ID NO: 2650058 - RNA, 12 nt, Human
aaaaaaaaguca

SEQ ID NO: 2650059 - RNA, 13 nt, Human
aaaaaaaagucag

SEQ ID NO: 2650060 - RNA, 12 nt, Human
aaaaaagagaca

SEQ ID NO: 2650061 - RNA, 12 nt, Human
aaaaaagucaga

SEQ ID NO: 2650062 - RNA, 13 nt, Human
aaaaaagucagag

SEQ ID NO: 2650063 - RNA, 13 nt, Human
aaaaaauacuauu

SEQ ID NO: 2650064 - RNA, 12 nt, Human
aaaaagccuucc

SEQ ID NO: 2650065 - RNA, 19 nt, Human
aaaaagcuagucaacagua

SEQ ID NO: 2650066 - RNA, 13 nt, Human
aaaaagcuucccc

SEQ ID NO: 2650067 - RNA, 20 nt, Human
aaaaaggcuuauaaaacaga

SEQ ID NO: 2650068 - RNA, 14 nt, Human
aaaaaguauaaaau

SEQ ID NO: 2650069 - RNA, 18 nt, Human
aaaaagucagagacagau

SEQ ID NO: 2650070 - RNA, 19 nt, Human
aaaaagucagagacagaua

SEQ ID NO: 2650071 - RNA, 23 nt, Human
gggaaaagcauuuuucaauauau

SEQ ID NO: 2650072 - RNA, 22 nt, Human
gggaaaacugccaauauagaaa

SEQ ID NO: 2650073 - RNA, 23 nt, Human
gggaaaaucagccugcuccagcu

SEQ ID NO: 2650074 - RNA, 14 nt, Human
gggaaacuuggcuc

SEQ ID NO: 2650075 - RNA, 13 nt, Human
gggaaagacacug

SEQ ID NO: 2650076 - RNA, 17 nt, Human
gggaaagacacugccug

SEQ ID NO: 2650077 - RNA, 18 nt, Human
gggaaagacacugccugg

SEQ ID NO: 2650078 - RNA, 22 nt, Human
gggaaagacacugccugggcug

SEQ ID NO: 2650079 - RNA, 13 nt, Human
gggaaaaucagcc

SEQ ID NO: 2650080 - RNA, 16 nt, Human
ggcuucuccgccagcc

SEQ ID NO: 2650081 - RNA, 17 nt, Human
ggcuucuccgccagccu

SEQ ID NO: 2650082 - RNA, 18 nt, Human
ggcuucuccgccagccuc

SEQ ID NO: 2650083 - RNA, 21 nt, Human
ggcuucuccgccagccuccuc

SEQ ID NO: 2650084 - RNA, 23 nt, Human
ggcuucuccgccagccuccucug

SEQ ID NO: 2650085 - RNA, 21 nt, Human
ggcuuccucuagaagccaagg

SEQ ID NO: 2650086 - RNA, 19 nt, Human
ggcuuccugcguccuccuc

SEQ ID NO: 2650087 - RNA, 20 nt, Human
ggcuuccugcguccuccuca

SEQ ID NO: 2650088 - RNA, 22 nt, Human
ggcugguggagaacucuggcuu

SEQ ID NO: 2650089 - RNA, 18 nt, Human
ggcugucaguaugacauu

SEQ ID NO: 2650090 - RNA, 23 nt, Human
ggcugucaaugggaccuguggcu

SEQ ID NO: 2650091 - RNA, 18 nt, Human
ggaccgcccuuuuccccu

SEQ ID NO: 2650092 - RNA, 17 nt, Human
ggaccuaaauggccuca

SEQ ID NO: 2650093 - RNA, 22 nt, Human
ggaccuaaauggccucaugugg

SEQ ID NO: 2650094 - RNA, 21 nt, Human
ggaccccagcaagugguccua

SEQ ID NO: 2650095 - RNA, 17 nt, Human
ggaccccagccauccag

SEQ ID NO: 2650096 - RNA, 23 nt, Human
ggacccgaccccccgugggcucc

SEQ ID NO: 2650097 - RNA, 15 nt, Human
ggagagcuagcagca

SEQ ID NO: 2650098 - RNA, 16 nt, Human
ggagagccugcuggca

SEQ ID NO: 2650099 - RNA, 13 nt, Human
ggagagccugcug

SEQ ID NO: 2650100 - RNA, 14 nt, Human
ggagagccugcugg

SEQ ID NO: 2650101 - RNA, 11 nt, Human
ggagagccugc

SEQ ID NO: 2650102 - RNA, 12 nt, Human
ggagagccugcu

SEQ ID NO: 2650103 - RNA, 21 nt, Human
ggagagccauacauaaaagaa

SEQ ID NO: 2650104 - RNA, 18 nt, Human
ggagagcaucggccuagg

SEQ ID NO: 2650105 - RNA, 20 nt, Human
ggagagcaucggccuagggc

SEQ ID NO: 2650106 - RNA, 19 nt, Human
ggagagagagagagagagg

SEQ ID NO: 2650107 - RNA, 22 nt, Human
ggagacuuagggcaccaggggu

SEQ ID NO: 2650108 - RNA, 16 nt, Human
ggagacuugccagagc

SEQ ID NO: 2650109 - RNA, 20 nt, Human
ggacuuccccggagggcugc

SEQ ID NO: 2650110 - RNA, 19 nt, Human
ggacuuccccggagggcug

SEQ ID NO: 2650111 - RNA, 20 nt, Human
ggagaaccaaaucuggaagc

SEQ ID NO: 2650112 - RNA, 23 nt, Human
ggagaacaugaaucaaaagugcc

SEQ ID NO: 2650113 - RNA, 19 nt, Human
ggacuucaaagcaagcugg

SEQ ID NO: 2650114 - RNA, 17 nt, Human
ggacuucuaccugcccu

SEQ ID NO: 2650115 - RNA, 23 nt, Human
ggacuucuaccugcccucaaggg

SEQ ID NO: 2650116 - RNA, 13 nt, Human
ggacuuuucugca

SEQ ID NO: 2650117 - RNA, 12 nt, Human
ggacuuuguaca

SEQ ID NO: 2650118 - RNA, 20 nt, Human
ggagcacugggcucccgggc

SEQ ID NO: 2650119 - RNA, 22 nt, Human
ggagccaugcgcccccuccgcc

SEQ ID NO: 2650120 - RNA, 23 nt, Human
ggagccaugcgcccccuccgccc

SEQ ID NO: 2650121 - RNA, 14 nt, Human
ggaggucgaggcag

SEQ ID NO: 2650122 - RNA, 16 nt, Human
ggaggucgaggcagga

SEQ ID NO: 2650123 - RNA, 15 nt, Human
ggaggucgaggcagg

SEQ ID NO: 2650124 - RNA, 18 nt, Human
ggagguguggagccgagg

SEQ ID NO: 2650125 - RNA, 18 nt, Human
ggaggucgaggcaggagg

SEQ ID NO: 2650126 - RNA, 14 nt, Human
ggagguugaagcca

SEQ ID NO: 2650127 - RNA, 16 nt, Human
ggagguugaagccaag

SEQ ID NO: 2650128 - RNA, 14 nt, Human
ggagguugcaguga

SEQ ID NO: 2650129 - RNA, 16 nt, Human
ggagcaggcacgggug

SEQ ID NO: 2650130 - RNA, 21 nt, Human
ggagcugccuuggcucagaca

SEQ ID NO: 2650131 - RNA, 18 nt, Human
ggagcugccuuggcucag

SEQ ID NO: 2650132 - RNA, 16 nt, Human
ggagcugaguggggga

SEQ ID NO: 2650133 - RNA, 17 nt, Human
ggagcugccuuggcuca

SEQ ID NO: 2650134 - RNA, 20 nt, Human
ggagcuccacucugcuucuc

SEQ ID NO: 2650135 - RNA, 17 nt, Human
ggagcuccacucugcuu

SEQ ID NO: 2650136 - RNA, 18 nt, Human
ggaggccaaggugggagg

SEQ ID NO: 2650137 - RNA, 21 nt, Human
ggaggaagaacugaaaggcuu

SEQ ID NO: 2650138 - RNA, 18 nt, Human
ggaggaacacugcacucu

SEQ ID NO: 2650139 - RNA, 19 nt, Human
ggaggaaccagagugcuga

SEQ ID NO: 2650140 - RNA, 12 nt, Human
ggaggaagagaa

SEQ ID NO: 2650141 - RNA, 23 nt, Human
ggcccauggcuguuggugggacc

SEQ ID NO: 2650142 - RNA, 19 nt, Human
ggcccgccucuccucgguu

SEQ ID NO: 2650143 - RNA, 14 nt, Human
ggcccgcgccacag

SEQ ID NO: 2650144 - RNA, 16 nt, Human
ggcccccaaccucagg

SEQ ID NO: 2650145 - RNA, 20 nt, Human
ggcccccaaccucagggcuc

SEQ ID NO: 2650146 - RNA, 18 nt, Human
ggcccgcgccacaggacc

SEQ ID NO: 2650147 - RNA, 17 nt, Human
ggcccgcgccacaggac

SEQ ID NO: 2650148 - RNA, 20 nt, Human
ggcccagggcaagcuccgca

SEQ ID NO: 2650149 - RNA, 22 nt, Human
ggcccagggcaagcuccgcagg

SEQ ID NO: 2650150 - RNA, 19 nt, Human
ggcccagggcaagcuccgc

SEQ ID NO: 2650151 - RNA, 17 nt, Human
ggcccagggcaagcucc

SEQ ID NO: 2650152 - RNA, 22 nt, Human
ggccuccccugccaccaggcca

SEQ ID NO: 2650153 - RNA, 15 nt, Human
ggccuccccugccac

SEQ ID NO: 2650154 - RNA, 17 nt, Human
ggccuccccugccacca

SEQ ID NO: 2650155 - RNA, 19 nt, Human
ggccuccccugccaccagg

SEQ ID NO: 2650156 - RNA, 13 nt, Human
ggcccgacauggc

SEQ ID NO: 2650157 - RNA, 13 nt, Human
ggccaagguggga

SEQ ID NO: 2650158 - RNA, 23 nt, Human
ggccaaagugccggugagaccca

SEQ ID NO: 2650159 - RNA, 11 nt, Human
ggcauugagua

SEQ ID NO: 2650160 - RNA, 19 nt, Human
ggcauugaguauuguuuaa

SEQ ID NO: 2650161 - RNA, 20 nt, Human
ggccaguccacccugccugc

SEQ ID NO: 2650162 - RNA, 16 nt, Human
ggccagccuccgagag

SEQ ID NO: 2650163 - RNA, 19 nt, Human
ggccagccuccgagaggga

SEQ ID NO: 2650164 - RNA, 20 nt, Human
ggccagccuccgagagggag

SEQ ID NO: 2650165 - RNA, 14 nt, Human
ggccaguccaggcu

SEQ ID NO: 2650166 - RNA, 15 nt, Human
ggccaguccaggcug

SEQ ID NO: 2650167 - RNA, 16 nt, Human
ggccaguccaggcugc

SEQ ID NO: 2650168 - RNA, 13 nt, Human
ggcaggcugggcc

SEQ ID NO: 2650169 - RNA, 20 nt, Human
ggcaggcuggccaguccagg

SEQ ID NO: 2650170 - RNA, 12 nt, Human
ggcaggcugggc

SEQ ID NO: 2650171 - RNA, 11 nt, Human
ggcaggcuggc

SEQ ID NO: 2650172 - RNA, 12 nt, Human
ggcaggcuggcc

SEQ ID NO: 2650173 - RNA, 13 nt, Human
ggcaggcuggcca

SEQ ID NO: 2650174 - RNA, 17 nt, Human
ggcaggcuggccagucc

SEQ ID NO: 2650175 - RNA, 15 nt, Human
ggcaggcauggcccu

SEQ ID NO: 2650176 - RNA, 16 nt, Human
ggcaggcauggcccug

SEQ ID NO: 2650177 - RNA, 17 nt, Human
ggcaggcauggcccugg

SEQ ID NO: 2650178 - RNA, 18 nt, Human
ggcaggcauggcccuggg

SEQ ID NO: 2650179 - RNA, 20 nt, Human
ggcaggcauggcccugggcg

SEQ ID NO: 2650180 - RNA, 10 nt, Human
ggcaggcugg

SEQ ID NO: 2650181 - RNA, 15 nt, Human
ggcaggcucacugcc

SEQ ID NO: 2650182 - RNA, 16 nt, Human
ggcaggcucacugcca

SEQ ID NO: 2650183 - RNA, 19 nt, Human
ggcaggcucacugccaggc

SEQ ID NO: 2650184 - RNA, 22 nt, Human
ggcaggcucacugccaggccag

SEQ ID NO: 2650185 - RNA, 13 nt, Human
ggcaggcucacug

SEQ ID NO: 2650186 - RNA, 19 nt, Human
ggcaaccacuaagaauuca

SEQ ID NO: 2650187 - RNA, 16 nt, Human
ggcaaccacuaagaau

SEQ ID NO: 2650188 - RNA, 18 nt, Human
ggauguuacucucuugca

SEQ ID NO: 2650189 - RNA, 15 nt, Human
ggauuuguugccaug

SEQ ID NO: 2650190 - RNA, 13 nt, Human
ggcaaacaggcag

SEQ ID NO: 2650191 - RNA, 23 nt, Human
ggcaaacaggcaguuggccagag

SEQ ID NO: 2650192 - RNA, 16 nt, Human
ggcaaaggaaggugga

SEQ ID NO: 2650193 - RNA, 17 nt, Human
ggcaaaggaagguggau

SEQ ID NO: 2650194 - RNA, 19 nt, Human
ggcaaaggaagguggaugg

SEQ ID NO: 2650195 - RNA, 18 nt, Human
gacagaacuugaaugugu

SEQ ID NO: 2650196 - RNA, 23 nt, Human
gacauugaccuauuuccagaaau

SEQ ID NO: 2650197 - RNA, 21 nt, Human
gacauugucuccuauauauuu

SEQ ID NO: 2650198 - RNA, 16 nt, Human
gaccaggcuuggccuu

SEQ ID NO: 2650199 - RNA, 23 nt, Human
gaccagcugcuccgaggacccag

SEQ ID NO: 2650200 - RNA, 13 nt, Human
gaccagcugcucc

SEQ ID NO: 2650201 - RNA, 15 nt, Human
gaccagcugcuccga

SEQ ID NO: 2650202 - RNA, 19 nt, Human
gaccagcugcuccgaggac

SEQ ID NO: 2650203 - RNA, 20 nt, Human
gaccagcugcuccgaggacc

SEQ ID NO: 2650204 - RNA, 21 nt, Human
gaccagcugcuccgaggaccc

SEQ ID NO: 2650205 - RNA, 11 nt, Human
gaccagggccu

SEQ ID NO: 2650206 - RNA, 14 nt, Human
gaccagggccuuuu

SEQ ID NO: 2650207 - RNA, 19 nt, Human
gaccagggccuuuucuggc

SEQ ID NO: 2650208 - RNA, 22 nt, Human
gaccagggagccuuugguucug

SEQ ID NO: 2650209 - RNA, 15 nt, Human
gaccagggagccuuu

SEQ ID NO: 2650210 - RNA, 14 nt, Human
gaccagggagccuu

SEQ ID NO: 2650211 - RNA, 13 nt, Human
gaccauccuggcu

SEQ ID NO: 2650212 - RNA, 14 nt, Human
gaccauccuggcua

SEQ ID NO: 2650213 - RNA, 12 nt, Human
gaccauccuggc

SEQ ID NO: 2650214 - RNA, 15 nt, Human
gacuuuauuauuuau

SEQ ID NO: 2650215 - RNA, 14 nt, Human
gacuuuauuauuua

SEQ ID NO: 2650216 - RNA, 13 nt, Human
gacuuuauuauuu

SEQ ID NO: 2650217 - RNA, 14 nt, Human
gacucuugggaggg

SEQ ID NO: 2650218 - RNA, 19 nt, Human
gacugaaaauauuguuuua

SEQ ID NO: 2650219 - RNA, 15 nt, Human
gacugaaaguagggg

SEQ ID NO: 2650220 - RNA, 19 nt, Human
gacugaaauuacggguacc

SEQ ID NO: 2650221 - RNA, 16 nt, Human
gacucuugaguuguuu

SEQ ID NO: 2650222 - RNA, 18 nt, Human
gacuuguuuuugcacaug

SEQ ID NO: 2650223 - RNA, 16 nt, Human
gacuuguuuuugcaca

SEQ ID NO: 2650224 - RNA, 17 nt, Human
gacuguggcacuugccu

SEQ ID NO: 2650225 - RNA, 21 nt, Human
gacuguggcacuugccugggu

SEQ ID NO: 2650226 - RNA, 20 nt, Human
gacuguagauauguauucuu

SEQ ID NO: 2650227 - RNA, 13 nt, Human
gacuguagggagg

SEQ ID NO: 2650228 - RNA, 22 nt, Human
gacuguagggagggcggcaggg

SEQ ID NO: 2650229 - RNA, 23 nt, Human
gacuguagggagggcggcagggg

SEQ ID NO: 2650230 - RNA, 15 nt, Human
gaagcagaggaagga

SEQ ID NO: 2650231 - RNA, 23 nt, Human
gaagcacaccaaucuuacuuugu

SEQ ID NO: 2650232 - RNA, 23 nt, Human
gaagacaaugugaaaagaaaaau

SEQ ID NO: 2650233 - RNA, 20 nt, Human
gaagcaaguaaaaaggcuaa

SEQ ID NO: 2650234 - RNA, 22 nt, Human
gaagcacaccaaucuuacuuug

SEQ ID NO: 2650235 - RNA, 13 nt, Human
gaacccuuuauuu

SEQ ID NO: 2650236 - RNA, 17 nt, Human
gaacucgcgcucaguaa

SEQ ID NO: 2650237 - RNA, 18 nt, Human
gaacucgcgcucaguaaa

SEQ ID NO: 2650238 - RNA, 19 nt, Human
gaacucgcgcucaguaaac

SEQ ID NO: 2650239 - RNA, 18 nt, Human
gaacccuuuuaaaguuga

SEQ ID NO: 2650240 - RNA, 21 nt, Human
gaaccgcacagcucaggaggc

SEQ ID NO: 2650241 - RNA, 16 nt, Human
gaaccgcacagcucag

SEQ ID NO: 2650242 - RNA, 17 nt, Human
gaaccgcacagcucagg

SEQ ID NO: 2650243 - RNA, 13 nt, Human
gaaccgcacagcu

SEQ ID NO: 2650244 - RNA, 14 nt, Human
gaaccgcacagcuc

SEQ ID NO: 2650245 - RNA, 15 nt, Human
gaaccgcacagcuca

SEQ ID NO: 2650246 - RNA, 12 nt, Human
gaagaaugaaag

SEQ ID NO: 2650247 - RNA, 16 nt, Human
gaagaaugaaagcugu

SEQ ID NO: 2650248 - RNA, 12 nt, Human
gaagaauuuaaa

SEQ ID NO: 2650249 - RNA, 13 nt, Human
gaagaauuuaaag

SEQ ID NO: 2650250 - RNA, 17 nt, Human
gaagaauugaaaaguuu

SEQ ID NO: 2650251 - RNA, 18 nt, Human
gaagaauugaaaaguuuu

SEQ ID NO: 2650252 - RNA, 21 nt, Human
gaagaauugaaaaguuuuugu

SEQ ID NO: 2650253 - RNA, 22 nt, Human
gaagaauugaaaaguuuuuguu

SEQ ID NO: 2650254 - RNA, 19 nt, Human
gaagaauguuagaguaaug

SEQ ID NO: 2650255 - RNA, 19 nt, Human
gaauauguaguaucuauau

SEQ ID NO: 2650256 - RNA, 23 nt, Human
gaauauguaguaucuauaugacu

SEQ ID NO: 2650257 - RNA, 16 nt, Human
gaaguguuuauguugu

SEQ ID NO: 2650258 - RNA, 21 nt, Human
gaaguuauuuucuacaguggu

SEQ ID NO: 2650259 - RNA, 15 nt, Human
gaaguucaagaucaa

SEQ ID NO: 2650260 - RNA, 16 nt, Human
gaaguuaguuuguaua

SEQ ID NO: 2650261 - RNA, 17 nt, Human
gaaguuaguuuguauau

SEQ ID NO: 2650262 - RNA, 15 nt, Human
gaaguuaguuuguau

SEQ ID NO: 2650263 - RNA, 12 nt, Human
gaaggcuguacg

SEQ ID NO: 2650264 - RNA, 15 nt, Human
gaagcugcaggcuuu

SEQ ID NO: 2650265 - RNA, 13 nt, Human
gaagcugcaucca

SEQ ID NO: 2650266 - RNA, 12 nt, Human
gaucugcugcag

SEQ ID NO: 2650267 - RNA, 17 nt, Human
gaucugcggaucucagc

SEQ ID NO: 2650268 - RNA, 18 nt, Human
gaucugcggaucucagcu

SEQ ID NO: 2650269 - RNA, 19 nt, Human
gaucugcggaucucagcuu

SEQ ID NO: 2650270 - RNA, 21 nt, Human
gaucugcggaucucagcuuug

SEQ ID NO: 2650271 - RNA, 16 nt, Human
gaugagguauuuuuuc

SEQ ID NO: 2650272 - RNA, 18 nt, Human
gaugauaaauaugguuaa

SEQ ID NO: 2650273 - RNA, 18 nt, Human
gaugguucuucaccuccu

SEQ ID NO: 2650274 - RNA, 14 nt, Human
gaugguuucuugca

SEQ ID NO: 2650275 - RNA, 16 nt, Human
gaugguuuuaaacuuu

SEQ ID NO: 2650276 - RNA, 17 nt, Human
gaugguuuuaaacuuuc

SEQ ID NO: 2650277 - RNA, 20 nt, Human
gauggaauuuuuuuguacga

SEQ ID NO: 2650278 - RNA, 14 nt, Human
gauggacacuccag

SEQ ID NO: 2650279 - RNA, 15 nt, Human
gauggacacuccagg

SEQ ID NO: 2650280 - RNA, 23 nt, Human
gaugcugccagggcgccaucgcc

SEQ ID NO: 2650281 - RNA, 16 nt, Human
gauucuggcuuuaagc

SEQ ID NO: 2650282 - RNA, 20 nt, Human
gauucuggcuuuaagccuuc

SEQ ID NO: 2650283 - RNA, 17 nt, Human
gauucugguuccagggu

SEQ ID NO: 2650284 - RNA, 12 nt, Human
gauuuauuaacu

SEQ ID NO: 2650285 - RNA, 18 nt, Human
gauuuuuuaauuguuuaa

SEQ ID NO: 2650286 - RNA, 15 nt, Human
gaugucaauuucugu

SEQ ID NO: 2650287 - RNA, 18 nt, Human
gaugucaauuucuguguu

SEQ ID NO: 2650288 - RNA, 12 nt, Human
gcaagugcugga

SEQ ID NO: 2650289 - RNA, 15 nt, Human
gcaagugcuggaguc

SEQ ID NO: 2650290 - RNA, 21 nt, Human
gcaagugcuggagucuccuga

SEQ ID NO: 2650291 - RNA, 19 nt, Human
gcaagugugaauacugcuu

SEQ ID NO: 2650292 - RNA, 16 nt, Human
gcaagugugaauacug

SEQ ID NO: 2650293 - RNA, 13 nt, Human
gcaagugugaaua

SEQ ID NO: 2650294 - RNA, 23 nt, Human
gcacauauggaauuuugcaaaga

SEQ ID NO: 2650295 - RNA, 16 nt, Human
gcacagugucccccag

SEQ ID NO: 2650296 - RNA, 22 nt, Human
gcacaagcugcacccucaggca

SEQ ID NO: 2650297 - RNA, 21 nt, Human
gcacaccaaucuuacuuugua

SEQ ID NO: 2650298 - RNA, 20 nt, Human
gcacaccaaucuuacuuugu

SEQ ID NO: 2650299 - RNA, 22 nt, Human
gcacaccaaucuuacuuuguaa

SEQ ID NO: 2650300 - RNA, 17 nt, Human
gcacaccaaucuuacuu

SEQ ID NO: 2650301 - RNA, 16 nt, Human
gcacaccaaucuuacu

SEQ ID NO: 2650302 - RNA, 19 nt, Human
gcacuccucgguacuccca

SEQ ID NO: 2650303 - RNA, 20 nt, Human
gcacuccucgguacucccau

SEQ ID NO: 2650304 - RNA, 18 nt, Human
gcacuugccugggucaca

SEQ ID NO: 2650305 - RNA, 13 nt, Human
gcacuugccuggg

SEQ ID NO: 2650306 - RNA, 14 nt, Human
gcacuugccugggu

SEQ ID NO: 2650307 - RNA, 15 nt, Human
gcacuugccuggguc

SEQ ID NO: 2650308 - RNA, 15 nt, Human
gcaccucagccugca

SEQ ID NO: 2650309 - RNA, 16 nt, Human
gcaccucagccugcac

SEQ ID NO: 2650310 - RNA, 13 nt, Human
gcaccucagccug

SEQ ID NO: 2650311 - RNA, 19 nt, Human
gcacauccgcgugugccug

SEQ ID NO: 2650312 - RNA, 20 nt, Human
gcacauccgcgugugccugu

SEQ ID NO: 2650313 - RNA, 23 nt, Human
gcacauccgcgugugccugugug

SEQ ID NO: 2650314 - RNA, 17 nt, Human
gaggggccggcccugug

SEQ ID NO: 2650315 - RNA, 21 nt, Human
gaggggccggcccugugugca

SEQ ID NO: 2650316 - RNA, 22 nt, Human
gaggggccggcccugugugcag

SEQ ID NO: 2650317 - RNA, 12 nt, Human
gagggcugcagu

SEQ ID NO: 2650318 - RNA, 15 nt, Human
gaggcaggugagaga

SEQ ID NO: 2650319 - RNA, 15 nt, Human
gaggcaguuugagga

SEQ ID NO: 2650320 - RNA, 22 nt, Human
gaggccaaggugggaggauugc

SEQ ID NO: 2650321 - RNA, 17 nt, Human
gaggccaaggugggagg

SEQ ID NO: 2650322 - RNA, 15 nt, Human
gaggcugaggcagga

SEQ ID NO: 2650323 - RNA, 20 nt, Human
gaggcauccuacccuuuucu

SEQ ID NO: 2650324 - RNA, 16 nt, Human
gaggcaguuugaggau

SEQ ID NO: 2650325 - RNA, 19 nt, Human
gaggcauccuacccuuuuc

SEQ ID NO: 2650326 - RNA, 22 nt, Human
gagcugccuuggcucagacaug

SEQ ID NO: 2650327 - RNA, 21 nt, Human
gagcugccuuggcucagacau

SEQ ID NO: 2650328 - RNA, 19 nt, Human
gagcgcaguguuuugcaag

SEQ ID NO: 2650329 - RNA, 13 nt, Human
gagccuucucaga

SEQ ID NO: 2650330 - RNA, 17 nt, Human
gagccuucucagaagca

SEQ ID NO: 2650331 - RNA, 18 nt, Human
gagccuucucagaagcac

SEQ ID NO: 2650332 - RNA, 18 nt, Human
gagcugccuuggcucaga

SEQ ID NO: 2650333 - RNA, 15 nt, Human
gagcugccuuggcuc

SEQ ID NO: 2650334 - RNA, 19 nt, Human
gagcgccuccauccaaggc

SEQ ID NO: 2650335 - RNA, 23 nt, Human
gagcgccuccauccaaggccagg

SEQ ID NO: 2650336 - RNA, 18 nt, Human
gaguuguuuuuguauauu

SEQ ID NO: 2650337 - RNA, 16 nt, Human
gaguuguuuuuguaua

SEQ ID NO: 2650338 - RNA, 14 nt, Human
gaguuguuuuugua

SEQ ID NO: 2650339 - RNA, 13 nt, Human
gaguuguuuuugu

SEQ ID NO: 2650340 - RNA, 18 nt, Human
gaguugauucagcucugc

SEQ ID NO: 2650341 - RNA, 15 nt, Human
gaggucgaggcagga

SEQ ID NO: 2650342 - RNA, 21 nt, Human
gaggucgguagguucagccaa

SEQ ID NO: 2650343 - RNA, 22 nt, Human
gaggucgguagguucagccaag

SEQ ID NO: 2650344 - RNA, 23 nt, Human
gaggucgguagguucagccaagg

SEQ ID NO: 2650345 - RNA, 13 nt, Human
gaggucuaaucua

SEQ ID NO: 2650346 - RNA, 19 nt, Human
gagugauagucuuuugcuu

SEQ ID NO: 2650347 - RNA, 20 nt, Human
gaguccauucucccagguac

SEQ ID NO: 2650348 - RNA, 14 nt, Human
gaguggcaggggac

SEQ ID NO: 2650349 - RNA, 16 nt, Human
gaguggcaggggacag

SEQ ID NO: 2650350 - RNA, 19 nt, Human
gaguggcaggggacaggag

SEQ ID NO: 2650351 - RNA, 17 nt, Human
gaguugauucagcucug

SEQ ID NO: 2650352 - RNA, 16 nt, Human
gaguugauucagcucu

SEQ ID NO: 2650353 - RNA, 15 nt, Human
gaguugauucagcuc

SEQ ID NO: 2650354 - RNA, 19 nt, Human
gagguggaagaagggagaa

SEQ ID NO: 2650355 - RNA, 17 nt, Human
gagguggaagaagggag

SEQ ID NO: 2650356 - RNA, 18 nt, Human
gagguggaagaagggaga

SEQ ID NO: 2650357 - RNA, 13 nt, Human
gagguggaagaag

SEQ ID NO: 2650358 - RNA, 15 nt, Human
gagguggaagaaggg

SEQ ID NO: 2650359 - RNA, 16 nt, Human
gagguggaagaaggga

SEQ ID NO: 2650360 - RNA, 13 nt, Human
gaggugauuccag

SEQ ID NO: 2650361 - RNA, 21 nt, Human
gaggugauuccagugaagaua

SEQ ID NO: 2650362 - RNA, 17 nt, Human
gaguccauucucccagg

SEQ ID NO: 2650363 - RNA, 18 nt, Human
gaguccauucucccaggu

SEQ ID NO: 2650364 - RNA, 15 nt, Human
gaguccauucuccca

SEQ ID NO: 2650365 - RNA, 16 nt, Human
gaguccauucucccag

SEQ ID NO: 2650366 - RNA, 13 nt, Human
cugcauuggcuuu

SEQ ID NO: 2650367 - RNA, 15 nt, Human
cugcauuuaaaaaaa

SEQ ID NO: 2650368 - RNA, 21 nt, Human
cugccccaucuccccucagcu

SEQ ID NO: 2650369 - RNA, 18 nt, Human
cugccaggugagaaacug

SEQ ID NO: 2650370 - RNA, 19 nt, Human
cugccccggagcuggagga

SEQ ID NO: 2650371 - RNA, 23 nt, Human
cugccccgcccccaguccccacc

SEQ ID NO: 2650372 - RNA, 14 nt, Human
cugccccgccccca

SEQ ID NO: 2650373 - RNA, 16 nt, Human
cugccccgcccccagu

SEQ ID NO: 2650374 - RNA, 17 nt, Human
cugccccgcccccaguc

SEQ ID NO: 2650375 - RNA, 18 nt, Human
cugccccgcccccagucc

SEQ ID NO: 2650376 - RNA, 22 nt, Human
cugccccaucuccccucagcuc

SEQ ID NO: 2650377 - RNA, 16 nt, Human
cugcccccagccccgg

SEQ ID NO: 2650378 - RNA, 15 nt, Human
cugcccccaccccgg

SEQ ID NO: 2650379 - RNA, 19 nt, Human
cugcaaaucugauggccuu

SEQ ID NO: 2650380 - RNA, 20 nt, Human
cugcaaaucugauggccuua

SEQ ID NO: 2650381 - RNA, 18 nt, Human
cugcaagaauugaagcag

SEQ ID NO: 2650382 - RNA, 20 nt, Human
cugcaagaauugaagcagga

SEQ ID NO: 2650383 - RNA, 17 nt, Human
cugaugagauuuuuaaa

SEQ ID NO: 2650384 - RNA, 17 nt, Human
cugaugacaauaaagcu

SEQ ID NO: 2650385 - RNA, 18 nt, Human
cugaugacaauaaagcuu

SEQ ID NO: 2650386 - RNA, 20 nt, Human
cugaugacaauaaagcuugu

SEQ ID NO: 2650387 - RNA, 18 nt, Human
cugauggaauuuuuuugu

SEQ ID NO: 2650388 - RNA, 22 nt, Human
cugaugggaaaacugccaauau

SEQ ID NO: 2650389 - RNA, 14 nt, Human
cugauggccuuaau

SEQ ID NO: 2650390 - RNA, 19 nt, Human
cugauggccuuaauuuccu

SEQ ID NO: 2650391 - RNA, 20 nt, Human
cugauggccuuaauuuccuu

SEQ ID NO: 2650392 - RNA, 21 nt, Human
cugauggccuuaauuuccuuu

SEQ ID NO: 2650393 - RNA, 12 nt, Human
cugcacgucaug

SEQ ID NO: 2650394 - RNA, 15 nt, Human
cugcacuccagccug

SEQ ID NO: 2650395 - RNA, 13 nt, Human
cugcacuccagcc

SEQ ID NO: 2650396 - RNA, 17 nt, Human
cugcacuccagccuggg

SEQ ID NO: 2650397 - RNA, 16 nt, Human
cugcacuccagccugg

SEQ ID NO: 2650398 - RNA, 14 nt, Human
cugcacuccagccu

SEQ ID NO: 2650399 - RNA, 18 nt, Human
cugcacuccagccugggu

SEQ ID NO: 2650400 - RNA, 20 nt, Human
cugcacuccagccuggggga

SEQ ID NO: 2650401 - RNA, 19 nt, Human
cugcacuccagccugggug

SEQ ID NO: 2650402 - RNA, 13 nt, Human
cugcaggcccugg

SEQ ID NO: 2650403 - RNA, 14 nt, Human
cugcaggcccuggc

SEQ ID NO: 2650404 - RNA, 15 nt, Human
cugcaggcccuggcc

SEQ ID NO: 2650405 - RNA, 16 nt, Human
cugcaggcccuggccu

SEQ ID NO: 2650406 - RNA, 17 nt, Human
cugcaggcccuggccuc

SEQ ID NO: 2650407 - RNA, 18 nt, Human
cugcaggcccuggccucc

SEQ ID NO: 2650408 - RNA, 18 nt, Human
cugcaggaaauagucacu

SEQ ID NO: 2650409 - RNA, 23 nt, Human
cugcaggacuugagaagaccuca

SEQ ID NO: 2650410 - RNA, 19 nt, Human
cugcaggacuugagaagac

SEQ ID NO: 2650411 - RNA, 12 nt, Human
cugcagcuuugu

SEQ ID NO: 2650412 - RNA, 19 nt, Human
cugcugugaagcuggaacu

SEQ ID NO: 2650413 - RNA, 16 nt, Human
cugcugugauuccacu

SEQ ID NO: 2650414 - RNA, 22 nt, Human
cugcugugauuccacuacaccu

SEQ ID NO: 2650415 - RNA, 11 nt, Human
cugcugugcaa

SEQ ID NO: 2650416 - RNA, 14 nt, Human
cugcugugcaacgg

SEQ ID NO: 2650417 - RNA, 22 nt, Human
cugcuuaaucuucaaagccuuc

SEQ ID NO: 2650418 - RNA, 23 nt, Human
cugcuuaaucuucaaagccuucu

SEQ ID NO: 2650419 - RNA, 15 nt, Human
cugcucaccgcccau

SEQ ID NO: 2650420 - RNA, 19 nt, Human
cugcucaccgcccaucagg

SEQ ID NO: 2650421 - RNA, 20 nt, Human
cugcucaccgcccaucaggg

SEQ ID NO: 2650422 - RNA, 23 nt, Human
cugcucaccgcccaucaggguuc

SEQ ID NO: 2650423 - RNA, 22 nt, Human
cugcugagucuguucugguaau

SEQ ID NO: 2650424 - RNA, 17 nt, Human
cugcugagucuguucug

SEQ ID NO: 2650425 - RNA, 15 nt, Human
cuggacuucuaccug

SEQ ID NO: 2650426 - RNA, 18 nt, Human
cuggacuucuaccugccc

SEQ ID NO: 2650427 - RNA, 19 nt, Human
cuggacuucuaccugcccu

SEQ ID NO: 2650428 - RNA, 20 nt, Human
cuggacuucuaccugcccuc

SEQ ID NO: 2650429 - RNA, 23 nt, Human
cuggacuucuaccugcccucaag

SEQ ID NO: 2650430 - RNA, 16 nt, Human
cuggaugauggauucc

SEQ ID NO: 2650431 - RNA, 21 nt, Human
cuggguggcaccagcagccug

SEQ ID NO: 2650432 - RNA, 20 nt, Human
cuggguguccccgcugcugu

SEQ ID NO: 2650433 - RNA, 21 nt, Human
cuggguguccccgcugcugug

SEQ ID NO: 2650434 - RNA, 16 nt, Human
cugggcagcugucccu

SEQ ID NO: 2650435 - RNA, 17 nt, Human
cugggcagcugucccuu

SEQ ID NO: 2650436 - RNA, 19 nt, Human
cugggcagcugucccuugc

SEQ ID NO: 2650437 - RNA, 20 nt, Human
cugggcagguuggugggggc

SEQ ID NO: 2650438 - RNA, 17 nt, Human
cugggccauguccaaag

SEQ ID NO: 2650439 - RNA, 18 nt, Human
cugggccauguccaaaga

SEQ ID NO: 2650440 - RNA, 19 nt, Human
cugggccauguccaaagag

SEQ ID NO: 2650441 - RNA, 22 nt, Human
cugggccauguccaaagaggcu

SEQ ID NO: 2650442 - RNA, 23 nt, Human
cugggccauguccaaagaggcug

SEQ ID NO: 2650443 - RNA, 20 nt, Human
cuggguggcaccagcagccu

SEQ ID NO: 2650444 - RNA, 18 nt, Human
cuggguggcaccagcagc

SEQ ID NO: 2650445 - RNA, 19 nt, Human
cuggggacgcuccgcugcc

SEQ ID NO: 2650446 - RNA, 21 nt, Human
cuggggacgcuccgcugccgu

SEQ ID NO: 2650447 - RNA, 13 nt, Human
cuggcuccugauc

SEQ ID NO: 2650448 - RNA, 13 nt, Human
cuuaugugacauu

SEQ ID NO: 2650449 - RNA, 23 nt, Human
cuuaugugacauuaacaaauaaa

SEQ ID NO: 2650450 - RNA, 15 nt, Human
cuucaucccauucca

SEQ ID NO: 2650451 - RNA, 16 nt, Human
cuucaucccauuccag

SEQ ID NO: 2650452 - RNA, 17 nt, Human
cuucaucccauuccagg

SEQ ID NO: 2650453 - RNA, 23 nt, Human
cuucaucccauuccaggcagccu

SEQ ID NO: 2650454 - RNA, 19 nt, Human
cuucagacagagaggacug

SEQ ID NO: 2650455 - RNA, 20 nt, Human
cuucagacagagaggacugu

SEQ ID NO: 2650456 - RNA, 14 nt, Human
cuucaccuccugcc

SEQ ID NO: 2650457 - RNA, 13 nt, Human
cuguguacuguuc

SEQ ID NO: 2650458 - RNA, 20 nt, Human
cugugucagcauagaaguaa

SEQ ID NO: 2650459 - RNA, 11 nt, Human
cuguguacugu

SEQ ID NO: 2650460 - RNA, 23 nt, Human
cugugagaacccaguuucccguc

SEQ ID NO: 2650461 - RNA, 17 nt, Human
cugugagaagguuuauu

SEQ ID NO: 2650462 - RNA, 19 nt, Human
cugugagaagguuuauugu

SEQ ID NO: 2650463 - RNA, 20 nt, Human
cugugagaagguuuauuguu

SEQ ID NO: 2650464 - RNA, 22 nt, Human
cugugagaagguuuauuguuaa

SEQ ID NO: 2650465 - RNA, 16 nt, Human
cugugcuaugaauuuu

SEQ ID NO: 2650466 - RNA, 15 nt, Human
cugugcuaugaauuu

SEQ ID NO: 2650467 - RNA, 13 nt, Human
cugugcucagaag

SEQ ID NO: 2650468 - RNA, 17 nt, Human
cugugcucagaagggcu

SEQ ID NO: 2650469 - RNA, 13 nt, Human
cugugcuaugaau

SEQ ID NO: 2650470 - RNA, 21 nt, Human
cugugcgucuugguguaauuu

SEQ ID NO: 2650471 - RNA, 22 nt, Human
cugugcgucuugguguaauuug

SEQ ID NO: 2650472 - RNA, 23 nt, Human
cugugaccaggaaggaagucagc

SEQ ID NO: 2650473 - RNA, 18 nt, Human
cugugaccaggaaggaag

SEQ ID NO: 2650474 - RNA, 24 nt, Human
cugugacauggugccugagaggca

SEQ ID NO: 2650475 - RNA, 16 nt, Human
cugugacauggugccu

SEQ ID NO: 2650476 - RNA, 17 nt, Human
cugugacauggugccug

SEQ ID NO: 2650477 - RNA, 18 nt, Human
cugugacauggugccuga

SEQ ID NO: 2650478 - RNA, 19 nt, Human
cugugacauggugccugag

SEQ ID NO: 2650479 - RNA, 20 nt, Human
cugugacauggugccugaga

SEQ ID NO: 2650480 - RNA, 21 nt, Human
cugugacauggugccugagag

SEQ ID NO: 2650481 - RNA, 22 nt, Human
cugugacauggugccugagagg

SEQ ID NO: 2650482 - RNA, 23 nt, Human
cugugacauggugccugagaggc

SEQ ID NO: 2650483 - RNA, 21 nt, Human
cuuacacuggcaaugguaguu

SEQ ID NO: 2650484 - RNA, 14 nt, Human
cuuaccuagugaaa

SEQ ID NO: 2650485 - RNA, 16 nt, Human
cuuaccuagugaaacu

SEQ ID NO: 2650486 - RNA, 18 nt, Human
cuuaccuagugaaacuuu

SEQ ID NO: 2650487 - RNA, 21 nt, Human
cuuaccuagugaaacuuuucu

SEQ ID NO: 2650488 - RNA, 22 nt, Human
cuuaccuagugaaacuuuucua

SEQ ID NO: 2650489 - RNA, 13 nt, Human
cuuaccucggugc

SEQ ID NO: 2650490 - RNA, 15 nt, Human
cuuaccuaacaucug

SEQ ID NO: 2650491 - RNA, 14 nt, Human
cuuagauucuuaau

SEQ ID NO: 2650492 - RNA, 16 nt, Human
cuuagauucuuaauuc

SEQ ID NO: 2650493 - RNA, 21 nt, Human
cuuaccucggugccuuccucu

SEQ ID NO: 2650494 - RNA, 19 nt, Human
cuuaccucggugccuuccu

SEQ ID NO: 2650495 - RNA, 14 nt, Human
cuucuuaaaguauu

SEQ ID NO: 2650496 - RNA, 19 nt, Human
cuucuuaaaguauucuucu

SEQ ID NO: 2650497 - RNA, 23 nt, Human
cuugaauaaacaccacuggauua

SEQ ID NO: 2650498 - RNA, 22 nt, Human
cuuggcauuccgcaucccuacc

SEQ ID NO: 2650499 - RNA, 14 nt, Human
cuuggcauuccgca

SEQ ID NO: 2650500 - RNA, 14 nt, Human
cuugaauccuucca

SEQ ID NO: 2650501 - RNA, 15 nt, Human
cuugaauccuuccau

SEQ ID NO: 2650502 - RNA, 20 nt, Human
cuugaauccuuccauuccac

SEQ ID NO: 2650503 - RNA, 21 nt, Human
cuugaauccuuccauuccaca

SEQ ID NO: 2650504 - RNA, 23 nt, Human
cuugaauccuuccauuccacaca

SEQ ID NO: 2650505 - RNA, 13 nt, Human
cuugccucugugc

SEQ ID NO: 2650506 - RNA, 14 nt, Human
cuugccucugugcu

SEQ ID NO: 2650507 - RNA, 15 nt, Human
cuugccucugugcug

SEQ ID NO: 2650508 - RNA, 16 nt, Human
cuugccucugugcugu

SEQ ID NO: 2650509 - RNA, 19 nt, Human
cuugccucugugcugugug

SEQ ID NO: 2650510 - RNA, 20 nt, Human
cuugccucugugcugugugu

SEQ ID NO: 2650511 - RNA, 12 nt, Human
cuugccucuucc

SEQ ID NO: 2650512 - RNA, 13 nt, Human
cuugccucuuccu

SEQ ID NO: 2650513 - RNA, 16 nt, Human
cuugccucuuccuuga

SEQ ID NO: 2650514 - RNA, 18 nt, Human
cuugccucuuccuugaag

SEQ ID NO: 2650515 - RNA, 17 nt, Human
cuugugauuauuuauua

SEQ ID NO: 2650516 - RNA, 15 nt, Human
cuugugauuauuuau

SEQ ID NO: 2650517 - RNA, 23 nt, Human
cuugugauccacucgccucagcc

SEQ ID NO: 2650518 - RNA, 15 nt, Human
cuuuaaccuuguaua

SEQ ID NO: 2650519 - RNA, 17 nt, Human
cuuuaaccuuguauaaa

SEQ ID NO: 2650520 - RNA, 18 nt, Human
cuuuaaccuuguauaaau

SEQ ID NO: 2650521 - RNA, 16 nt, Human
cuugugauuucuuuaa

SEQ ID NO: 2650522 - RNA, 21 nt, Human
cuugugauuucuuuaaaagaa

SEQ ID NO: 2650523 - RNA, 22 nt, Human
cuugugauuucuuuaaaagaau

SEQ ID NO: 2650524 - RNA, 23 nt, Human
cuugugauuucuuuaaaagaaug

SEQ ID NO: 2650525 - RNA, 20 nt, Human
cuuuaaggggaggaaccaga

SEQ ID NO: 2650526 - RNA, 10 nt, Human
cuuucagaaa

SEQ ID NO: 2650527 - RNA, 11 nt, Human
cuuucagaaag

SEQ ID NO: 2650528 - RNA, 14 nt, Human
cuuucagaaagcuu

SEQ ID NO: 2650529 - RNA, 15 nt, Human
cuuucagaaauauaa

SEQ ID NO: 2650530 - RNA, 21 nt, Human
cuuucagaaauauaacacauu

SEQ ID NO: 2650531 - RNA, 22 nt, Human
cuuucagaaauauaacacauuu

SEQ ID NO: 2650532 - RNA, 23 nt, Human
cuuucagaaauauaacacauuuu

SEQ ID NO: 2650533 - RNA, 21 nt, Human
cuuucagaagugcccuuccug

SEQ ID NO: 2650534 - RNA, 23 nt, Human
cuuugggggaggagaacaugagu

SEQ ID NO: 2650535 - RNA, 16 nt, Human
cuuugguacuaauaau

SEQ ID NO: 2650536 - RNA, 21 nt, Human
cuuugguacuaauaaucuugu

SEQ ID NO: 2650537 - RNA, 15 nt, Human
cuuuuacugguugca

SEQ ID NO: 2650538 - RNA, 16 nt, Human
cuuuuacugguugcau

SEQ ID NO: 2650539 - RNA, 17 nt, Human
cuuuuacugguugcaug

SEQ ID NO: 2650540 - RNA, 18 nt, Human
cuuuuacugguugcaugg

SEQ ID NO: 2650541 - RNA, 21 nt, Human
cuuuuacugguugcauggaaa

SEQ ID NO: 2650542 - RNA, 22 nt, Human
cuuuuacugguugcauggaaau

SEQ ID NO: 2650543 - RNA, 11 nt, Human
cuuuuacugug

SEQ ID NO: 2650544 - RNA, 12 nt, Human
cuuuuacuguga

SEQ ID NO: 2650545 - RNA, 20 nt, Human
cuuuuauuuuacacagaaac

SEQ ID NO: 2650546 - RNA, 21 nt, Human
cuuuuauuuuacacagaaaca

SEQ ID NO: 2650547 - RNA, 22 nt, Human
cuuuuauuuuacacagaaacac

SEQ ID NO: 2650548 - RNA, 21 nt, Human
cuuuccuuuucgccuuuccuc

SEQ ID NO: 2650549 - RNA, 18 nt, Human
cuuucuccuuuaauugua

SEQ ID NO: 2650550 - RNA, 17 nt, Human
cuuucuauccucuguaa

SEQ ID NO: 2650551 - RNA, 16 nt, Human
cuuucuauccucugua

SEQ ID NO: 2650552 - RNA, 21 nt, Human
cuuugaguagauccauuucca

SEQ ID NO: 2650553 - RNA, 23 nt, Human
cuuugaguagauccauuuccauu

SEQ ID NO: 2650554 - RNA, 15 nt, Human
cuuugauuauuugca

SEQ ID NO: 2650555 - RNA, 16 nt, Human
cuuugauuauuugcau

SEQ ID NO: 2650556 - RNA, 17 nt, Human
cuuugauuauuugcaug

SEQ ID NO: 2650557 - RNA, 18 nt, Human
cuuugauuauuugcaugu

SEQ ID NO: 2650558 - RNA, 19 nt, Human
cuuugauuauuugcauguu

SEQ ID NO: 2650559 - RNA, 20 nt, Human
cuuugauuauuugcauguua

SEQ ID NO: 2650560 - RNA, 21 nt, Human
cuuugauuauuugcauguuau

SEQ ID NO: 2650561 - RNA, 22 nt, Human
cuuugauuauuugcauguuaug

SEQ ID NO: 2650562 - RNA, 24 nt, Human
cuuugauuauuugcauguuauguu

SEQ ID NO: 2650563 - RNA, 23 nt, Human
cuuugagcucccacuucugccag

SEQ ID NO: 2650564 - RNA, 14 nt, Human
cuuugagcucccac

SEQ ID NO: 2650565 - RNA, 17 nt, Human
cuuugagccugggaaau

SEQ ID NO: 2650566 - RNA, 19 nt, Human
cuuugagccugggaaauaa

SEQ ID NO: 2650567 - RNA, 15 nt, Human
auaagugaagugaua

SEQ ID NO: 2650568 - RNA, 16 nt, Human
auaagcuacuagcaaa

SEQ ID NO: 2650569 - RNA, 17 nt, Human
auaagcuacuagcaaaa

SEQ ID NO: 2650570 - RNA, 19 nt, Human
auaagcuacuagcaaaaua

SEQ ID NO: 2650571 - RNA, 22 nt, Human
auaagcuacuagcaaaauaaaa

SEQ ID NO: 2650572 - RNA, 15 nt, Human
auaagcuaguugaau

SEQ ID NO: 2650573 - RNA, 14 nt, Human
auaagcuaguugaa

SEQ ID NO: 2650574 - RNA, 21 nt, Human
auaagcuaguugaauacuuga

SEQ ID NO: 2650575 - RNA, 20 nt, Human
auaagcuaguugaauacuug

SEQ ID NO: 2650576 - RNA, 18 nt, Human
auaagcuaguugaauacu

SEQ ID NO: 2650577 - RNA, 17 nt, Human
auaagcuaguugaauac

SEQ ID NO: 2650578 - RNA, 23 nt, Human
auaagcuaguugaauacuugaac

SEQ ID NO: 2650579 - RNA, 22 nt, Human
auaagcuaguugaauacuugaa

SEQ ID NO: 2650580 - RNA, 20 nt, Human
auaaagagagaacaggacua

SEQ ID NO: 2650581 - RNA, 16 nt, Human
auagcaacaacaauug

SEQ ID NO: 2650582 - RNA, 17 nt, Human
auagcaacaacaauugg

SEQ ID NO: 2650583 - RNA, 18 nt, Human
auagcaacaacaauuggu

SEQ ID NO: 2650584 - RNA, 19 nt, Human
auagcaacaacaauuggua

SEQ ID NO: 2650585 - RNA, 14 nt, Human
auagcaaaugacau

SEQ ID NO: 2650586 - RNA, 22 nt, Human
auacuugaaccauaaaaugucc

SEQ ID NO: 2650587 - RNA, 20 nt, Human
auacuugaaccauaaaaugu

SEQ ID NO: 2650588 - RNA, 18 nt, Human
auacuugaaccauaaaau

SEQ ID NO: 2650589 - RNA, 17 nt, Human
auacuugaaccauaaaa

SEQ ID NO: 2650590 - RNA, 16 nt, Human
auacuugaaccauaaa

SEQ ID NO: 2650591 - RNA, 13 nt, Human
auacuugaaccau

SEQ ID NO: 2650592 - RNA, 12 nt, Human
auacuugaacca

SEQ ID NO: 2650593 - RNA, 19 nt, Human
auacacgaauagacaucaa

SEQ ID NO: 2650594 - RNA, 20 nt, Human
auacacgaauagacaucaaa

SEQ ID NO: 2650595 - RNA, 15 nt, Human
auacacauauagugu

SEQ ID NO: 2650596 - RNA, 14 nt, Human
auacacauuugcua

SEQ ID NO: 2650597 - RNA, 22 nt, Human
auacacauuugcuacuguugua

SEQ ID NO: 2650598 - RNA, 20 nt, Human
agugcuccauaguuuggcau

SEQ ID NO: 2650599 - RNA, 23 nt, Human
agugcuauuacgaaguucaagau

SEQ ID NO: 2650600 - RNA, 19 nt, Human
agugcuauuacgaaguuca

SEQ ID NO: 2650601 - RNA, 18 nt, Human
aguggccaagaagcagug

SEQ ID NO: 2650602 - RNA, 11 nt, Human
aguguuucuuu

SEQ ID NO: 2650603 - RNA, 18 nt, Human
aguuaaauguuaccucug

SEQ ID NO: 2650604 - RNA, 13 nt, Human
aguguuuugcaag

SEQ ID NO: 2650605 - RNA, 21 nt, Human
aguucuuuguucauagcccag

SEQ ID NO: 2650606 - RNA, 22 nt, Human
aguucuuuguucauagcccagu

SEQ ID NO: 2650607 - RNA, 18 nt, Human
aguugaaaaacagcugag

SEQ ID NO: 2650608 - RNA, 17 nt, Human
aguugaaaaacagcuga

SEQ ID NO: 2650609 - RNA, 19 nt, Human
aguucuuuguucauagccc

SEQ ID NO: 2650610 - RNA, 19 nt, Human
aguucaucagaguuauggu

SEQ ID NO: 2650611 - RNA, 20 nt, Human
aguucaucagaguuauggug

SEQ ID NO: 2650612 - RNA, 14 nt, Human
aguugaauacuuga

SEQ ID NO: 2650613 - RNA, 19 nt, Human
aguugaauacuugaaccau

SEQ ID NO: 2650614 - RNA, 18 nt, Human
aguugaauacuugaacca

SEQ ID NO: 2650615 - RNA, 17 nt, Human
aguugaauacuugaacc

SEQ ID NO: 2650616 - RNA, 16 nt, Human
aguugaauacuugaac

SEQ ID NO: 2650617 - RNA, 15 nt, Human
aguugaauacuugaa

SEQ ID NO: 2650618 - RNA, 12 nt, Human
auaaaaauggau

SEQ ID NO: 2650619 - RNA, 14 nt, Human
auaaaaaugucuug

SEQ ID NO: 2650620 - RNA, 15 nt, Human
auaaaacauagcaaa

SEQ ID NO: 2650621 - RNA, 21 nt, Human
auaaaacagaguaaucuuguu

SEQ ID NO: 2650622 - RNA, 19 nt, Human
auaaaacagaguaaucuug

SEQ ID NO: 2650623 - RNA, 16 nt, Human
auaaaacagaguaauc

SEQ ID NO: 2650624 - RNA, 16 nt, Human
auaaaaaaagaaagca

SEQ ID NO: 2650625 - RNA, 21 nt, Human
auaaaaacucaggcaaagaaa

SEQ ID NO: 2650626 - RNA, 13 nt, Human
auaaaaagaauga

SEQ ID NO: 2650627 - RNA, 13 nt, Human
auaaaaaauuuua

SEQ ID NO: 2650628 - RNA, 18 nt, Human
aguuugaggauuaguuua

SEQ ID NO: 2650629 - RNA, 23 nt, Human
aguuugagcugccuucccuagcu

SEQ ID NO: 2650630 - RNA, 15 nt, Human
aguuugagcugccuu

SEQ ID NO: 2650631 - RNA, 16 nt, Human
aguuugagcugccuuc

SEQ ID NO: 2650632 - RNA, 17 nt, Human
aguuugaggauuaguuu

SEQ ID NO: 2650633 - RNA, 23 nt, Human
aguuucugugguuggcugggaaa

SEQ ID NO: 2650634 - RNA, 21 nt, Human
aguuucugugguuggcuggga

SEQ ID NO: 2650635 - RNA, 17 nt, Human
aguuucugugguuggcu

SEQ ID NO: 2650636 - RNA, 13 nt, Human
aguuucugugguu

SEQ ID NO: 2650637 - RNA, 12 nt, Human
aguaacucauuu

SEQ ID NO: 2650638 - RNA, 22 nt, Human
aguaacucauuuguuaaaauua

SEQ ID NO: 2650639 - RNA, 17 nt, Human
aguaacugucaggcuga

SEQ ID NO: 2650640 - RNA, 23 nt, Human
aguaacugucaggcugaaaacaa

SEQ ID NO: 2650641 - RNA, 17 nt, Human
aguaacuuacuuaggug

SEQ ID NO: 2650642 - RNA, 19 nt, Human
aguaacccccuuaaauuua

SEQ ID NO: 2650643 - RNA, 21 nt, Human
aguaacccccuuaaauuuaau

SEQ ID NO: 2650644 - RNA, 15 nt, Human
aguaaaguuaaaaga

SEQ ID NO: 2650645 - RNA, 14 nt, Human
aguaaacgggaaca

SEQ ID NO: 2650646 - RNA, 16 nt, Human
aguaaacgggaacaug

SEQ ID NO: 2650647 - RNA, 19 nt, Human
aguaaacgggaacaugccc

SEQ ID NO: 2650648 - RNA, 21 nt, Human
aguaaacgggaacaugccccc

SEQ ID NO: 2650649 - RNA, 23 nt, Human
aguaaacgggaacaugcccccug

SEQ ID NO: 2650650 - RNA, 21 nt, Human
agugccuuugcagcucagaac

SEQ ID NO: 2650651 - RNA, 20 nt, Human
agugccuuugcagcucagaa

SEQ ID NO: 2650652 - RNA, 18 nt, Human
agugccuuugcagcucag

SEQ ID NO: 2650653 - RNA, 17 nt, Human
agugccuuugcagcuca

SEQ ID NO: 2650654 - RNA, 16 nt, Human
agucugucuuuccuga

SEQ ID NO: 2650655 - RNA, 21 nt, Human
agucugucuuuccugaaccau

SEQ ID NO: 2650656 - RNA, 14 nt, Human
agugaaugcuggga

SEQ ID NO: 2650657 - RNA, 22 nt, Human
aguccugugaaugccacugccu

SEQ ID NO: 2650658 - RNA, 21 nt, Human
aguccugugaaugccacugcc

SEQ ID NO: 2650659 - RNA, 17 nt, Human
agucuguacuaaacagu

SEQ ID NO: 2650660 - RNA, 22 nt, Human
agucuguacuaaacaguaagau

SEQ ID NO: 2650661 - RNA, 22 nt, Human
agucuggcccuagacucggggu

SEQ ID NO: 2650662 - RNA, 13 nt, Human
agucuggcccuag

SEQ ID NO: 2650663 - RNA, 18 nt, Human
aucaaauaaguauuuaua

SEQ ID NO: 2650664 - RNA, 17 nt, Human
aucaaauaaguauuuau

SEQ ID NO: 2650665 - RNA, 17 nt, Human
aucaaauaaagagagaa

SEQ ID NO: 2650666 - RNA, 14 nt, Human
aucaaauaagaaau

SEQ ID NO: 2650667 - RNA, 15 nt, Human
aucaaauaagaaaua

SEQ ID NO: 2650668 - RNA, 20 nt, Human
aucaaauaaguauuuauaau

SEQ ID NO: 2650669 - RNA, 19 nt, Human
aucaaauaaguauuuauaa

SEQ ID NO: 2650670 - RNA, 19 nt, Human
aucaaagucauuaaagaca

SEQ ID NO: 2650671 - RNA, 22 nt, Human
aucaaagucauuaaagacagga

SEQ ID NO: 2650672 - RNA, 11 nt, Human
aucaaagugcu

SEQ ID NO: 2650673 - RNA, 15 nt, Human
aucaaauaaagagag

SEQ ID NO: 2650674 - RNA, 12 nt, Human
aucaugcaaaau

SEQ ID NO: 2650675 - RNA, 12 nt, Human
aucaucuaaguc

SEQ ID NO: 2650676 - RNA, 19 nt, Human
aucaucuaauucucugugg

SEQ ID NO: 2650677 - RNA, 17 nt, Human
aucauccagauguggcu

SEQ ID NO: 2650678 - RNA, 15 nt, Human
auccacuuuggggga

SEQ ID NO: 2650679 - RNA, 12 nt, Human
auccagaaaacu

SEQ ID NO: 2650680 - RNA, 15 nt, Human
auccagaaaacugug

SEQ ID NO: 2650681 - RNA, 17 nt, Human
auccagaaaacugugau

SEQ ID NO: 2650682 - RNA, 19 nt, Human
auccagccggaggccagag

SEQ ID NO: 2650683 - RNA, 19 nt, Human
auccagccuggggcugagg

SEQ ID NO: 2650684 - RNA, 14 nt, Human
auccagauguggcu

SEQ ID NO: 2650685 - RNA, 15 nt, Human
auccagauguggcua

SEQ ID NO: 2650686 - RNA, 23 nt, Human
auccagauguggcuacugacaua

SEQ ID NO: 2650687 - RNA, 21 nt, Human
auccagccuggggcugaggcu

SEQ ID NO: 2650688 - RNA, 20 nt, Human
auccccccaucuugcuuccc

SEQ ID NO: 2650689 - RNA, 15 nt, Human
auccccccaucuugc

SEQ ID NO: 2650690 - RNA, 17 nt, Human
auccccccaucuugcuu

SEQ ID NO: 2650691 - RNA, 17 nt, Human
auccagggggcaagagg

SEQ ID NO: 2650692 - RNA, 13 nt, Human
auccccaucuccc

SEQ ID NO: 2650693 - RNA, 15 nt, Human
auccccaucucccug

SEQ ID NO: 2650694 - RNA, 16 nt, Human
auccccaucucccugc

SEQ ID NO: 2650695 - RNA, 18 nt, Human
auccccaucucccugccu

SEQ ID NO: 2650696 - RNA, 19 nt, Human
auccccaucucccugccug

SEQ ID NO: 2650697 - RNA, 20 nt, Human
auccccaucucccugccugg

SEQ ID NO: 2650698 - RNA, 22 nt, Human
auagcaacuuuuguguaaugaa

SEQ ID NO: 2650699 - RNA, 23 nt, Human
aucaaaaaggcuuauaaaacaga

SEQ ID NO: 2650700 - RNA, 21 nt, Human
aucaaaaaggcuuauaaaaca

SEQ ID NO: 2650701 - RNA, 17 nt, Human
aucaaaaaggcuuauaa

SEQ ID NO: 2650702 - RNA, 16 nt, Human
aucaaaaaggcuuaua

SEQ ID NO: 2650703 - RNA, 13 nt, Human
aucaaaaaggcuu

SEQ ID NO: 2650704 - RNA, 12 nt, Human
aucaaaaaggcu

SEQ ID NO: 2650705 - RNA, 15 nt, Human
aucaaaccuuugagu

SEQ ID NO: 2650706 - RNA, 16 nt, Human
aucaaacucaaugcuu

SEQ ID NO: 2650707 - RNA, 19 nt, Human
aucaaagagguuuuaaaaa

SEQ ID NO: 2650708 - RNA, 21 nt, Human
aucaaaggaaaauaguaaugu

SEQ ID NO: 2650709 - RNA, 20 nt, Human
aucaaagggauaaagaaaaa

SEQ ID NO: 2650710 - RNA, 17 nt, Human
augcaucauuucaggag

SEQ ID NO: 2650711 - RNA, 23 nt, Human
augcaucauuucaggaguuacug

SEQ ID NO: 2650712 - RNA, 12 nt, Human
augcauauuugc

SEQ ID NO: 2650713 - RNA, 17 nt, Human
augcauauuugcaaagu

SEQ ID NO: 2650714 - RNA, 21 nt, Human
augcauauuugcaaaguguau

SEQ ID NO: 2650715 - RNA, 16 nt, Human
augcaugucaaacaug

SEQ ID NO: 2650716 - RNA, 22 nt, Human
augcaugucaaacaugagaugu

SEQ ID NO: 2650717 - RNA, 13 nt, Human
auggcuugucuau

SEQ ID NO: 2650718 - RNA, 20 nt, Human
auggcuugucuauacuccuu

SEQ ID NO: 2650719 - RNA, 14 nt, Human
auggcuuguucauc

SEQ ID NO: 2650720 - RNA, 23 nt, Human
auggcuuguucaucauccagaug

SEQ ID NO: 2650721 - RNA, 23 nt, Human
auggcuuuauuuuuuugaacucu

SEQ ID NO: 2650722 - RNA, 18 nt, Human
auggcuuuauuuuuuuga

SEQ ID NO: 2650723 - RNA, 18 nt, Human
augggaaaacugccaaua

SEQ ID NO: 2650724 - RNA, 17 nt, Human
augggaaugagguggga

SEQ ID NO: 2650725 - RNA, 18 nt, Human
augggaaugaggugggag

SEQ ID NO: 2650726 - RNA, 15 nt, Human
augcuuuccaaaacc

SEQ ID NO: 2650727 - RNA, 15 nt, Human
augcuuuccaaaccu

SEQ ID NO: 2650728 - RNA, 18 nt, Human
augcuuuauuaauguuuu

SEQ ID NO: 2650729 - RNA, 19 nt, Human
augcuuuauuaauguuuuc

SEQ ID NO: 2650730 - RNA, 22 nt, Human
augcuuuauuaauguuuucaaa

SEQ ID NO: 2650731 - RNA, 14 nt, Human
augcuuuauuugua

SEQ ID NO: 2650732 - RNA, 15 nt, Human
augcuuuauuuguaa

SEQ ID NO: 2650733 - RNA, 16 nt, Human
augcuuuauuuguaaa

SEQ ID NO: 2650734 - RNA, 17 nt, Human
augcuuuauuuguaaau

SEQ ID NO: 2650735 - RNA, 18 nt, Human
augcuuuauuuguaaauu

SEQ ID NO: 2650736 - RNA, 19 nt, Human
augcuuuauuuguaaauuu

SEQ ID NO: 2650737 - RNA, 21 nt, Human
augcuuuauuuguaaauuuag

SEQ ID NO: 2650738 - RNA, 20 nt, Human
augcuuuccaaaccuuaucu

SEQ ID NO: 2650739 - RNA, 18 nt, Human
auggagccagcucccucu

SEQ ID NO: 2650740 - RNA, 15 nt, Human
auggagccagcuccc

SEQ ID NO: 2650741 - RNA, 11 nt, Human
auggagccagc

SEQ ID NO: 2650742 - RNA, 12 nt, Human
augagccuggca

SEQ ID NO: 2650743 - RNA, 17 nt, Human
augagcucugaaaucuu

SEQ ID NO: 2650744 - RNA, 19 nt, Human
augagcucugaaaucuucc

SEQ ID NO: 2650745 - RNA, 22 nt, Human
augagcucugaaaucuucccau

SEQ ID NO: 2650746 - RNA, 11 nt, Human
augagccuggc

SEQ ID NO: 2650747 - RNA, 17 nt, Human
augagcugaucugcgga

SEQ ID NO: 2650748 - RNA, 15 nt, Human
augaggaaaauucuu

SEQ ID NO: 2650749 - RNA, 19 nt, Human
augaggaaaauucuuaaaa

SEQ ID NO: 2650750 - RNA, 21 nt, Human
augaggaaaauucuuaaaagg

SEQ ID NO: 2650751 - RNA, 16 nt, Human
augaggaacuguagau

SEQ ID NO: 2650752 - RNA, 13 nt, Human
augaaacuaaagc

SEQ ID NO: 2650753 - RNA, 15 nt, Human
augaaacuaaagcaa

SEQ ID NO: 2650754 - RNA, 16 nt, Human
augaaacuaaagcaau

SEQ ID NO: 2650755 - RNA, 19 nt, Human
augaaacuaaagcaauaga

SEQ ID NO: 2650756 - RNA, 20 nt, Human
augaaacuaaagcaauagaa

SEQ ID NO: 2650757 - RNA, 21 nt, Human
augaaacuaaagcaauagaaa

SEQ ID NO: 2650758 - RNA, 22 nt, Human
augaaacuaaagcaauagaaac

SEQ ID NO: 2650759 - RNA, 23 nt, Human
augaaacuaaagcaauagaaaca

SEQ ID NO: 2650760 - RNA, 14 nt, Human
augaagcuaccuca

SEQ ID NO: 2650761 - RNA, 20 nt, Human
augaagccuccuuagaaaaa

SEQ ID NO: 2650762 - RNA, 19 nt, Human
augaaacuuguuucacuga

SEQ ID NO: 2650763 - RNA, 15 nt, Human
augaagcuaccucaa

SEQ ID NO: 2650764 - RNA, 12 nt, Human
augaaagaaaau

SEQ ID NO: 2650765 - RNA, 14 nt, Human
augaauacauuucc

SEQ ID NO: 2650766 - RNA, 21 nt, Human
augaauacauuuccaaaaugg

SEQ ID NO: 2650767 - RNA, 18 nt, Human
agggaugcaggcuccccu

SEQ ID NO: 2650768 - RNA, 20 nt, Human
agggaugcaggcuccccuga

SEQ ID NO: 2650769 - RNA, 16 nt, Human
agggauggaggaagaa

SEQ ID NO: 2650770 - RNA, 20 nt, Human
agggauucugguuccagggu

SEQ ID NO: 2650771 - RNA, 14 nt, Human
aggcuuaaaaacug

SEQ ID NO: 2650772 - RNA, 20 nt, Human
aggcuguucccauguagccc

SEQ ID NO: 2650773 - RNA, 19 nt, Human
aggcugcagugagccgaga

SEQ ID NO: 2650774 - RNA, 17 nt, Human
aggcugcagugagccga

SEQ ID NO: 2650775 - RNA, 18 nt, Human
aggcuagcuucugcuuuu

SEQ ID NO: 2650776 - RNA, 15 nt, Human
aggcuagcuucugcu

SEQ ID NO: 2650777 - RNA, 17 nt, Human
aggcuagcuucugcuuu

SEQ ID NO: 2650778 - RNA, 19 nt, Human
aggcagccaaccuaagcaa

SEQ ID NO: 2650779 - RNA, 19 nt, Human
aggcaucugugggcauggu

SEQ ID NO: 2650780 - RNA, 14 nt, Human
aggcaucugagggg

SEQ ID NO: 2650781 - RNA, 13 nt, Human
aggcaucuaucug

SEQ ID NO: 2650782 - RNA, 23 nt, Human
aggcaugugucaccaugcccagc

SEQ ID NO: 2650783 - RNA, 17 nt, Human
aggcacuucauguaaag

SEQ ID NO: 2650784 - RNA, 21 nt, Human
aggagaccuggcacuggaugc

SEQ ID NO: 2650785 - RNA, 19 nt, Human
aggagagcaucggccuagg

SEQ ID NO: 2650786 - RNA, 15 nt, Human
aggagggugggaagg

SEQ ID NO: 2650787 - RNA, 13 nt, Human
aggaggguggggg

SEQ ID NO: 2650788 - RNA, 21 nt, Human
aggagggugggggagggaggu

SEQ ID NO: 2650789 - RNA, 14 nt, Human
aggagggugggaag

SEQ ID NO: 2650790 - RNA, 20 nt, Human
aggagguggaggcugcagug

SEQ ID NO: 2650791 - RNA, 16 nt, Human
aggaugggcuucugug

SEQ ID NO: 2650792 - RNA, 17 nt, Human
aggaugggcuucugugc

SEQ ID NO: 2650793 - RNA, 15 nt, Human
agcuaacuguaaauc

SEQ ID NO: 2650794 - RNA, 16 nt, Human
agcuaacuguaaauca

SEQ ID NO: 2650795 - RNA, 19 nt, Human
agccuuuaccuuuuaugca

SEQ ID NO: 2650796 - RNA, 22 nt, Human
agcgaacccuuuauuugaacaa

SEQ ID NO: 2650797 - RNA, 16 nt, Human
agccuuuuuaaaacac

SEQ ID NO: 2650798 - RNA, 21 nt, Human
agccuuuuuaaaacacauguu

SEQ ID NO: 2650799 - RNA, 22 nt, Human
agccuuuuuaaaacacauguuu

SEQ ID NO: 2650800 - RNA, 17 nt, Human
agccuuuuuaaaacaca

SEQ ID NO: 2650801 - RNA, 18 nt, Human
agccuuuuuaaaacacau

SEQ ID NO: 2650802 - RNA, 19 nt, Human
agccuuuuuaaaacacaug

SEQ ID NO: 2650803 - RNA, 20 nt, Human
agccuuuuuaaaacacaugu

SEQ ID NO: 2650804 - RNA, 18 nt, Human
agccugggcaaugugaua

SEQ ID NO: 2650805 - RNA, 20 nt, Human
agccugggaggucaaggcug

SEQ ID NO: 2650806 - RNA, 10 nt, Human
agccugcugg

SEQ ID NO: 2650807 - RNA, 17 nt, Human
agccugcuggcacccac

SEQ ID NO: 2650808 - RNA, 11 nt, Human
agccugcuggc

SEQ ID NO: 2650809 - RNA, 18 nt, Human
agccugcuggcacccacc

SEQ ID NO: 2650810 - RNA, 14 nt, Human
agccuggacccugu

SEQ ID NO: 2650811 - RNA, 19 nt, Human
agcccacccugcugcuggu

SEQ ID NO: 2650812 - RNA, 22 nt, Human
agcccacccugcugcuggugca

SEQ ID NO: 2650813 - RNA, 17 nt, Human
agcugcgcuugcuuuuc

SEQ ID NO: 2650814 - RNA, 20 nt, Human
agcugccuuggcucagacau

SEQ ID NO: 2650815 - RNA, 19 nt, Human
agcugccuuggcucagaca

SEQ ID NO: 2650816 - RNA, 17 nt, Human
agcugccuuggcucaga

SEQ ID NO: 2650817 - RNA, 16 nt, Human
agcugccuuggcucag

SEQ ID NO: 2650818 - RNA, 14 nt, Human
agcugccuuggcuc

SEQ ID NO: 2650819 - RNA, 16 nt, Human
agcugccuucccuagc

SEQ ID NO: 2650820 - RNA, 17 nt, Human
agcugccuucccuagcu

SEQ ID NO: 2650821 - RNA, 18 nt, Human
agcugccuucccuagcuu

SEQ ID NO: 2650822 - RNA, 19 nt, Human
agcugccuucccuagcuuu

SEQ ID NO: 2650823 - RNA, 10 nt, Human
agcugccuuc

SEQ ID NO: 2650824 - RNA, 12 nt, Human
agcugccuuccc

SEQ ID NO: 2650825 - RNA, 13 nt, Human
agcugccuucccu

SEQ ID NO: 2650826 - RNA, 14 nt, Human
agcugccuucccua

SEQ ID NO: 2650827 - RNA, 18 nt, Human
agcugcgcuugcuuuucu

SEQ ID NO: 2650828 - RNA, 21 nt, Human
agcugacuuuucuguccgagc

SEQ ID NO: 2650829 - RNA, 15 nt, Human
agcugacuuuucugu

SEQ ID NO: 2650830 - RNA, 17 nt, Human
aggaaaaacacaagcaa

SEQ ID NO: 2650831 - RNA, 19 nt, Human
aggaaaaacacaagcaaaa

SEQ ID NO: 2650832 - RNA, 21 nt, Human
agcuuuguuuguugucagcug

SEQ ID NO: 2650833 - RNA, 22 nt, Human
agcuuuguuuguugucagcuga

SEQ ID NO: 2650834 - RNA, 15 nt, Human
agcuuugucguauuu

SEQ ID NO: 2650835 - RNA, 19 nt, Human
agcuuugucguauuuggca

SEQ ID NO: 2650836 - RNA, 16 nt, Human
aggaacauaugaaaau

SEQ ID NO: 2650837 - RNA, 13 nt, Human
aggaaaacuaccu

SEQ ID NO: 2650838 - RNA, 17 nt, Human
aggaacaaucggcugca

SEQ ID NO: 2650839 - RNA, 19 nt, Human
aggaagaacugaaaggcuu

SEQ ID NO: 2650840 - RNA, 16 nt, Human
aggaagaacguuuuuu

SEQ ID NO: 2650841 - RNA, 15 nt, Human
aggaagguggauggc

SEQ ID NO: 2650842 - RNA, 16 nt, Human
aggaagguggauggcc

SEQ ID NO: 2650843 - RNA, 19 nt, Human
aggaaggugaaucugcccu

SEQ ID NO: 2650844 - RNA, 14 nt, Human
agagaacaggacua

SEQ ID NO: 2650845 - RNA, 13 nt, Human
agagaacaggacu

SEQ ID NO: 2650846 - RNA, 12 nt, Human
agagaaguugua

SEQ ID NO: 2650847 - RNA, 11 nt, Human
agagccugcug

SEQ ID NO: 2650848 - RNA, 16 nt, Human
agacucuuuggacacu

SEQ ID NO: 2650849 - RNA, 20 nt, Human
agacaagauuuuuuaauugu

SEQ ID NO: 2650850 - RNA, 21 nt, Human
agacaagauuuuuuaauuguu

SEQ ID NO: 2650851 - RNA, 22 nt, Human
agacaagauuuuuuaauuguuu

SEQ ID NO: 2650852 - RNA, 23 nt, Human
agacaagauuuuuuaauuguuua

SEQ ID NO: 2650853 - RNA, 15 nt, Human
agacaaaagagcagu

SEQ ID NO: 2650854 - RNA, 17 nt, Human
agacaaaagucugucuu

SEQ ID NO: 2650855 - RNA, 22 nt, Human
agacaaaagucugucuuuccug

SEQ ID NO: 2650856 - RNA, 18 nt, Human
agacaauggacccuuuuu

SEQ ID NO: 2650857 - RNA, 20 nt, Human
agacaaugugaaaagaaaaa

SEQ ID NO: 2650858 - RNA, 22 nt, Human
agaccuuuuggcccaaucucug

SEQ ID NO: 2650859 - RNA, 14 nt, Human
agaccauccuggcu

SEQ ID NO: 2650860 - RNA, 15 nt, Human
agaccauccuggcua

SEQ ID NO: 2650861 - RNA, 19 nt, Human
agaccacgcccguccugcc

SEQ ID NO: 2650862 - RNA, 20 nt, Human
agaccacgcccguccugccu

SEQ ID NO: 2650863 - RNA, 21 nt, Human
agaccacgcccguccugccug

SEQ ID NO: 2650864 - RNA, 23 nt, Human
agaccacgcccguccugccugug

SEQ ID NO: 2650865 - RNA, 24 nt, Human
agaccacgcccguccugccugugg

SEQ ID NO: 2650866 - RNA, 19 nt, Human
agacuauauauauaaaugu

SEQ ID NO: 2650867 - RNA, 21 nt, Human
agacuauauauauaaauguau

SEQ ID NO: 2650868 - RNA, 17 nt, Human
agacuagcaaucucuuc

SEQ ID NO: 2650869 - RNA, 23 nt, Human
agacuagcaaucucuucauuauu

SEQ ID NO: 2650870 - RNA, 18 nt, Human
agaacacuaacucaccag

SEQ ID NO: 2650871 - RNA, 20 nt, Human
agaacacuaacucaccagcc

SEQ ID NO: 2650872 - RNA, 22 nt, Human
agaacacacacauauacacgaa

SEQ ID NO: 2650873 - RNA, 21 nt, Human
agaacagguuuuuuuguuugu

SEQ ID NO: 2650874 - RNA, 18 nt, Human
agaacagguuuuuuuguu

SEQ ID NO: 2650875 - RNA, 17 nt, Human
agaacagguuuuuuugu

SEQ ID NO: 2650876 - RNA, 17 nt, Human
agaacaggccucuccau

SEQ ID NO: 2650877 - RNA, 12 nt, Human
agaacaggacua

SEQ ID NO: 2650878 - RNA, 11 nt, Human
agaacaggacu

SEQ ID NO: 2650879 - RNA, 15 nt, Human
agaacagcauugucc

SEQ ID NO: 2650880 - RNA, 14 nt, Human
agaacaugaaucaa

SEQ ID NO: 2650881 - RNA, 17 nt, Human
agaacaugaaucaaaag

SEQ ID NO: 2650882 - RNA, 12 nt, Human
agaagagcgcag

SEQ ID NO: 2650883 - RNA, 14 nt, Human
agaagagcgcagug

SEQ ID NO: 2650884 - RNA, 23 nt, Human
agaagagcgcaguguuuugcaag

SEQ ID NO: 2650885 - RNA, 13 nt, Human
agaaccacuauga

SEQ ID NO: 2650886 - RNA, 23 nt, Human
agaaccaccccggcccccugccc

SEQ ID NO: 2650887 - RNA, 22 nt, Human
agaaccaccccggcccccugcc

SEQ ID NO: 2650888 - RNA, 16 nt, Human
agaaccacacuugaaa

SEQ ID NO: 2650889 - RNA, 19 nt, Human
agaaccacacuugaaaccu

SEQ ID NO: 2650890 - RNA, 20 nt, Human
agaaccacacuugaaaccuu

SEQ ID NO: 2650891 - RNA, 21 nt, Human
agaaccacacuugaaaccuuu

SEQ ID NO: 2650892 - RNA, 18 nt, Human
agaaccaaaucuggaagc

SEQ ID NO: 2650893 - RNA, 13 nt, Human
agaaccaaaucug

SEQ ID NO: 2650894 - RNA, 16 nt, Human
agaaccaaaucuggaa

SEQ ID NO: 2650895 - RNA, 16 nt, Human
agaagggagaagaaag

SEQ ID NO: 2650896 - RNA, 14 nt, Human
agaagaugcuccag

SEQ ID NO: 2650897 - RNA, 15 nt, Human
agaagggagaagaaa

SEQ ID NO: 2650898 - RNA, 23 nt, Human
agaagaugcuccagcaacacagc

SEQ ID NO: 2650899 - RNA, 14 nt, Human
agaagggagaagaa

SEQ ID NO: 2650900 - RNA, 22 nt, Human
agaaucccuuaacaguuguauu

SEQ ID NO: 2650901 - RNA, 16 nt, Human
agaaugaaagcuguuc

SEQ ID NO: 2650902 - RNA, 21 nt, Human
agaaugaaagcuguuccuugg

SEQ ID NO: 2650903 - RNA, 20 nt, Human
agaaucccuuaacaguugua

SEQ ID NO: 2650904 - RNA, 20 nt, Human
agaaugaguccuugauuuca

SEQ ID NO: 2650905 - RNA, 21 nt, Human
agaaugaguccuugauuucaa

SEQ ID NO: 2650906 - RNA, 22 nt, Human
agaaugaguccuugauuucaaa

SEQ ID NO: 2650907 - RNA, 15 nt, Human
agcaaauuuucagca

SEQ ID NO: 2650908 - RNA, 13 nt, Human
agcaacaaagaaa

SEQ ID NO: 2650909 - RNA, 23 nt, Human
agcaacaacaauugguaaaacuc

SEQ ID NO: 2650910 - RNA, 20 nt, Human
agcaaaucagaaacuuguga

SEQ ID NO: 2650911 - RNA, 16 nt, Human
agcaaaucagaaacuu

SEQ ID NO: 2650912 - RNA, 19 nt, Human
agcaaauucuguuuuucua

SEQ ID NO: 2650913 - RNA, 17 nt, Human
agauugauaucuauaaa

SEQ ID NO: 2650914 - RNA, 18 nt, Human
agauugauaucuauaaaa

SEQ ID NO: 2650915 - RNA, 19 nt, Human
agauugauaucuauaaaau

SEQ ID NO: 2650916 - RNA, 20 nt, Human
agauugauaucuauaaaaua

SEQ ID NO: 2650917 - RNA, 21 nt, Human
agauugauaucuauaaaauag

SEQ ID NO: 2650918 - RNA, 22 nt, Human
agauugauaucuauaaaauaga

SEQ ID NO: 2650919 - RNA, 17 nt, Human
agauugacuaacucaaa

SEQ ID NO: 2650920 - RNA, 19 nt, Human
agauugacuaacucaaaua

SEQ ID NO: 2650921 - RNA, 21 nt, Human
agauugacuaacucaaauaca

SEQ ID NO: 2650922 - RNA, 16 nt, Human
agauugcaccacugca

SEQ ID NO: 2650923 - RNA, 21 nt, Human
agauucuuucaguucuuugga

SEQ ID NO: 2650924 - RNA, 11 nt, Human
agauauacugg

SEQ ID NO: 2650925 - RNA, 19 nt, Human
agauauacuggaacccuuu

SEQ ID NO: 2650926 - RNA, 15 nt, Human
agauauaaauuuuua

SEQ ID NO: 2650927 - RNA, 13 nt, Human
agagugguggggg

SEQ ID NO: 2650928 - RNA, 21 nt, Human
agaguggugggggaaggcugu

SEQ ID NO: 2650929 - RNA, 20 nt, Human
agaguguaguuuacagaaaa

SEQ ID NO: 2650930 - RNA, 18 nt, Human
agaguguagacuguggcu

SEQ ID NO: 2650931 - RNA, 14 nt, Human
agauagacaggucc

SEQ ID NO: 2650932 - RNA, 15 nt, Human
agauagacagguccu

SEQ ID NO: 2650933 - RNA, 16 nt, Human
agaggguauuuuugua

SEQ ID NO: 2650934 - RNA, 16 nt, Human
agcagccuggacccug

SEQ ID NO: 2650935 - RNA, 21 nt, Human
agcacuccucgguacucccau

SEQ ID NO: 2650936 - RNA, 16 nt, Human
agcacuccugcuuaau

SEQ ID NO: 2650937 - RNA, 20 nt, Human
agcacuccugcuuaaucuuc

SEQ ID NO: 2650938 - RNA, 18 nt, Human
agcacuacaccuugccuu

SEQ ID NO: 2650939 - RNA, 20 nt, Human
agcagccuggacccugugga

SEQ ID NO: 2650940 - RNA, 12 nt, Human
agcaguggccuu

SEQ ID NO: 2650941 - RNA, 19 nt, Human
agcaguggccuuauugcau

SEQ ID NO: 2650942 - RNA, 22 nt, Human
agccaagguuuuauaaggcuga

SEQ ID NO: 2650943 - RNA, 23 nt, Human
agcccaccccucaacaccucugc

SEQ ID NO: 2650944 - RNA, 12 nt, Human
agcccacccugc

SEQ ID NO: 2650945 - RNA, 13 nt, Human
agcccacccugcu

SEQ ID NO: 2650946 - RNA, 14 nt, Human
agcccacccugcug

SEQ ID NO: 2650947 - RNA, 23 nt, Human
agccaagggaaaggggugcuuuu

SEQ ID NO: 2650948 - RNA, 16 nt, Human
agccaagggaaccugu

SEQ ID NO: 2650949 - RNA, 17 nt, Human
agccaagggaaccugug

SEQ ID NO: 2650950 - RNA, 19 nt, Human
agccaagggaaccuguguc

SEQ ID NO: 2650951 - RNA, 20 nt, Human
agccaagggaaccugugucc

SEQ ID NO: 2650952 - RNA, 21 nt, Human
agccaagggaaccuguguccg

SEQ ID NO: 2650953 - RNA, 23 nt, Human
agcaucuggaagaucauuuugaa

SEQ ID NO: 2650954 - RNA, 13 nt, Human
agccaacucuggg

SEQ ID NO: 2650955 - RNA, 15 nt, Human
agcaucggccuaggg

SEQ ID NO: 2650956 - RNA, 14 nt, Human
agcaucggccuagg

SEQ ID NO: 2650957 - RNA, 21 nt, Human
agcaucggccuagggccccca

SEQ ID NO: 2650958 - RNA, 19 nt, Human
agcaucggccuagggcccc

SEQ ID NO: 2650959 - RNA, 15 nt, Human
agcaucuaucucauc

SEQ ID NO: 2650960 - RNA, 20 nt, Human
aauuaucaauaucuaauaua

SEQ ID NO: 2650961 - RNA, 17 nt, Human
aauuaucuugauacauu

SEQ ID NO: 2650962 - RNA, 18 nt, Human
aauuaucuugauacauuc

SEQ ID NO: 2650963 - RNA, 19 nt, Human
aauuaucuugauacauuca

SEQ ID NO: 2650964 - RNA, 20 nt, Human
aauuaucuugauacauucaa

SEQ ID NO: 2650965 - RNA, 21 nt, Human
aauuaucuugauacauucaaa

SEQ ID NO: 2650966 - RNA, 17 nt, Human
aauuaugagauugguuu

SEQ ID NO: 2650967 - RNA, 23 nt, Human
aauuaugagauugguuuuccugu

SEQ ID NO: 2650968 - RNA, 20 nt, Human
aauuaugaguuuuucaauua

SEQ ID NO: 2650969 - RNA, 19 nt, Human
aauuauaguguagaaaaga

SEQ ID NO: 2650970 - RNA, 14 nt, Human
aauuauauaacugu

SEQ ID NO: 2650971 - RNA, 17 nt, Human
aauuauauaacuguauu

SEQ ID NO: 2650972 - RNA, 19 nt, Human
aauuauauaacuguauuug

SEQ ID NO: 2650973 - RNA, 21 nt, Human
aauuauauaacuguauuugaa

SEQ ID NO: 2650974 - RNA, 14 nt, Human
aauuauacuacuuu

SEQ ID NO: 2650975 - RNA, 23 nt, Human
aauucuaccaaggucuucuuaau

SEQ ID NO: 2650976 - RNA, 20 nt, Human
aauucucuguggaaugaaua

SEQ ID NO: 2650977 - RNA, 13 nt, Human
aauucuccacugu

SEQ ID NO: 2650978 - RNA, 14 nt, Human
aauucuccacugug

SEQ ID NO: 2650979 - RNA, 15 nt, Human
aauucuccacugugc

SEQ ID NO: 2650980 - RNA, 15 nt, Human
aauucuccuggaggu

SEQ ID NO: 2650981 - RNA, 12 nt, Human
aauucuccugga

SEQ ID NO: 2650982 - RNA, 13 nt, Human
aauucuccuggag

SEQ ID NO: 2650983 - RNA, 11 nt, Human
aauucuuaaaa

SEQ ID NO: 2650984 - RNA, 23 nt, Human
aauucuuaaaaggcccauagcag

SEQ ID NO: 2650985 - RNA, 18 nt, Human
aauucuguuuuucuaggc

SEQ ID NO: 2650986 - RNA, 14 nt, Human
aauucuguuuuucu

SEQ ID NO: 2650987 - RNA, 22 nt, Human
aauucugauuucuuuucaccau

SEQ ID NO: 2650988 - RNA, 16 nt, Human
aauucugauuucuuuu

SEQ ID NO: 2650989 - RNA, 15 nt, Human
aauucugauuucuuu

SEQ ID NO: 2650990 - RNA, 14 nt, Human
aauucugauuucuu

SEQ ID NO: 2650991 - RNA, 13 nt, Human
aauucugauuucu

SEQ ID NO: 2650992 - RNA, 11 nt, Human
aauucugauuu

SEQ ID NO: 2650993 - RNA, 23 nt, Human
aauucugauucuggcuuuaagcc

SEQ ID NO: 2650994 - RNA, 15 nt, Human
aauucugauugauuu

SEQ ID NO: 2650995 - RNA, 19 nt, Human
aauucuguuuuuaaugcua

SEQ ID NO: 2650996 - RNA, 21 nt, Human
aauucuguuuuuaaugcuauu

SEQ ID NO: 2650997 - RNA, 22 nt, Human
aauucuguuuuuaaugcuauuu

SEQ ID NO: 2650998 - RNA, 16 nt, Human
aauuggggaggagggg

SEQ ID NO: 2650999 - RNA, 12 nt, Human
aauuguacaaaa

SEQ ID NO: 2651000 - RNA, 13 nt, Human
aauuguacaaaau

SEQ ID NO: 2651001 - RNA, 18 nt, Human
aauuguacaaaauuaagc

SEQ ID NO: 2651002 - RNA, 19 nt, Human
aauuguacaaaauuaagca

SEQ ID NO: 2651003 - RNA, 20 nt, Human
aauuguacaaaauuaagcaa

SEQ ID NO: 2651004 - RNA, 15 nt, Human
aauucuguuuaauuu

SEQ ID NO: 2651005 - RNA, 16 nt, Human
aauuucauguaaaaca

SEQ ID NO: 2651006 - RNA, 18 nt, Human
aauuucauguaaaacaga

SEQ ID NO: 2651007 - RNA, 13 nt, Human
acaacugugacug

SEQ ID NO: 2651008 - RNA, 11 nt, Human
acaacugugac

SEQ ID NO: 2651009 - RNA, 14 nt, Human
acaacuuaaauaau

SEQ ID NO: 2651010 - RNA, 14 nt, Human
acaacugugacugu

SEQ ID NO: 2651011 - RNA, 15 nt, Human
acaacuuaaauaaua

SEQ ID NO: 2651012 - RNA, 14 nt, Human
acaaccaugucauu

SEQ ID NO: 2651013 - RNA, 18 nt, Human
acaagguauaauaaaauu

SEQ ID NO: 2651014 - RNA, 22 nt, Human
acaaacaucuaauaaguauaua

SEQ ID NO: 2651015 - RNA, 22 nt, Human
acaaacugcuucccuuacuuug

SEQ ID NO: 2651016 - RNA, 22 nt, Human
acaaccaugucauuucagaagu

SEQ ID NO: 2651017 - RNA, 19 nt, Human
acaacauguuuaauaaaua

SEQ ID NO: 2651018 - RNA, 14 nt, Human
acacagcagcaguu

SEQ ID NO: 2651019 - RNA, 13 nt, Human
acacagccugggc

SEQ ID NO: 2651020 - RNA, 14 nt, Human
acacagccugggcc

SEQ ID NO: 2651021 - RNA, 18 nt, Human
acaccaaucuuacuuugu

SEQ ID NO: 2651022 - RNA, 14 nt, Human
acaccaaucuuacu

SEQ ID NO: 2651023 - RNA, 22 nt, Human
acacguuuuaaggacugacuga

SEQ ID NO: 2651024 - RNA, 17 nt, Human
acacguuuuaaggacug

SEQ ID NO: 2651025 - RNA, 16 nt, Human
acacguuuuaaggacu

SEQ ID NO: 2651026 - RNA, 15 nt, Human
acacguuuuaaggac

SEQ ID NO: 2651027 - RNA, 14 nt, Human
acacguuuuaagga

SEQ ID NO: 2651028 - RNA, 18 nt, Human
acaguggaauauaaggaa

SEQ ID NO: 2651029 - RNA, 21 nt, Human
acagugcuuuuaagugaaaau

SEQ ID NO: 2651030 - RNA, 24 nt, Human
acagugaugcugugcuaugaauuu

SEQ ID NO: 2651031 - RNA, 17 nt, Human
acauuugcuacuguugu

SEQ ID NO: 2651032 - RNA, 19 nt, Human
acauuugcuacuguuguaa

SEQ ID NO: 2651033 - RNA, 19 nt, Human
acauuucuucuagugauga

SEQ ID NO: 2651034 - RNA, 17 nt, Human
acauuugaugcaugucu

SEQ ID NO: 2651035 - RNA, 20 nt, Human
acauuugaugcaugucuuuu

SEQ ID NO: 2651036 - RNA, 22 nt, Human
acauuugaugcaugucuuuuaa

SEQ ID NO: 2651037 - RNA, 22 nt, Human
accacgggacaucacagggugg

SEQ ID NO: 2651038 - RNA, 19 nt, Human
acauccaacuccagcaacu

SEQ ID NO: 2651039 - RNA, 16 nt, Human
acauccaacuccagca

SEQ ID NO: 2651040 - RNA, 18 nt, Human
acauccaacuccagcaac

SEQ ID NO: 2651041 - RNA, 16 nt, Human
acauaacauaaauuuu

SEQ ID NO: 2651042 - RNA, 16 nt, Human
acauaauacugaacca

SEQ ID NO: 2651043 - RNA, 14 nt, Human
acauaauacugaac

SEQ ID NO: 2651044 - RNA, 18 nt, Human
acauaauacugaaccacu

SEQ ID NO: 2651045 - RNA, 17 nt, Human
acauaauacugaaccac

SEQ ID NO: 2651046 - RNA, 21 nt, Human
acaucauuccuuuuuauuuau

SEQ ID NO: 2651047 - RNA, 17 nt, Human
acaucauuccuuuuuau

SEQ ID NO: 2651048 - RNA, 16 nt, Human
acaucauuccuuuuua

SEQ ID NO: 2651049 - RNA, 13 nt, Human
acaucauuccuuu

SEQ ID NO: 2651050 - RNA, 22 nt, Human
acaucauuccuuuuuauuuaua

SEQ ID NO: 2651051 - RNA, 17 nt, Human
acauguuuuuauacaaa

SEQ ID NO: 2651052 - RNA, 19 nt, Human
acauguuuuuauacaaaau

SEQ ID NO: 2651053 - RNA, 17 nt, Human
acggacacucaaaagcu

SEQ ID NO: 2651054 - RNA, 17 nt, Human
acuaauuauacuacuuu

SEQ ID NO: 2651055 - RNA, 21 nt, Human
acuaauuauacuacuuuguua

SEQ ID NO: 2651056 - RNA, 18 nt, Human
acgugcucugugggucuc

SEQ ID NO: 2651057 - RNA, 13 nt, Human
acgcuucuccgga

SEQ ID NO: 2651058 - RNA, 20 nt, Human
accuguaacuuuuguaaaua

SEQ ID NO: 2651059 - RNA, 17 nt, Human
accuguaacuuuuguaa

SEQ ID NO: 2651060 - RNA, 15 nt, Human
accuguaacuuuugu

SEQ ID NO: 2651061 - RNA, 13 nt, Human
accugccaggcag

SEQ ID NO: 2651062 - RNA, 18 nt, Human
accuuggacauccuccuc

SEQ ID NO: 2651063 - RNA, 19 nt, Human
accuuggacauccuccucc

SEQ ID NO: 2651064 - RNA, 14 nt, Human
accuuggccugggc

SEQ ID NO: 2651065 - RNA, 13 nt, Human
accuuggccuggg

SEQ ID NO: 2651066 - RNA, 16 nt, Human
accuuggccugggccg

SEQ ID NO: 2651067 - RNA, 15 nt, Human
accuuggccugggcc

SEQ ID NO: 2651068 - RNA, 13 nt, Human
acccucagagccu

SEQ ID NO: 2651069 - RNA, 14 nt, Human
acccucagagccuc

SEQ ID NO: 2651070 - RNA, 14 nt, Human
acccucaggcaggu

SEQ ID NO: 2651071 - RNA, 13 nt, Human
acccucaggcagg

SEQ ID NO: 2651072 - RNA, 16 nt, Human
acccucaggcaggugg

SEQ ID NO: 2651073 - RNA, 15 nt, Human
acccucaggcaggug

SEQ ID NO: 2651074 - RNA, 21 nt, Human
acccuaguuaguguuuugccu

SEQ ID NO: 2651075 - RNA, 19 nt, Human
acccucagugagcauggua

SEQ ID NO: 2651076 - RNA, 13 nt, Human
acccuggagccca

SEQ ID NO: 2651077 - RNA, 14 nt, Human
acccugguugugug

SEQ ID NO: 2651078 - RNA, 14 nt, Human
acccugggggcaca

SEQ ID NO: 2651079 - RNA, 16 nt, Human
acccugggggcacagg

SEQ ID NO: 2651080 - RNA, 18 nt, Human
acccugggggcacaggag

SEQ ID NO: 2651081 - RNA, 22 nt, Human
acccugggggcacaggaggcag

SEQ ID NO: 2651082 - RNA, 18 nt, Human
acccugggugggcucugu

SEQ ID NO: 2651083 - RNA, 19 nt, Human
acccugggugggcucugug

SEQ ID NO: 2651084 - RNA, 20 nt, Human
acccugggugggcucugugc

SEQ ID NO: 2651085 - RNA, 20 nt, Human
acccuggguguccccgcugc

SEQ ID NO: 2651086 - RNA, 23 nt, Human
acccuggguguccccgcugcugu

SEQ ID NO: 2651087 - RNA, 14 nt, Human
acccugggcccugg

SEQ ID NO: 2651088 - RNA, 15 nt, Human
acccugggcccuggg

SEQ ID NO: 2651089 - RNA, 17 nt, Human
acccugggcccugggcu

SEQ ID NO: 2651090 - RNA, 22 nt, Human
acccugggcccugggcuggaau

SEQ ID NO: 2651091 - RNA, 18 nt, Human
acccugggcccugggcug

SEQ ID NO: 2651092 - RNA, 20 nt, Human
acccugggcccugggcugga

SEQ ID NO: 2651093 - RNA, 16 nt, Human
acccuagccaaugucu

SEQ ID NO: 2651094 - RNA, 19 nt, Human
acccuagccaaugucuccu

SEQ ID NO: 2651095 - RNA, 19 nt, Human
acccuauugcugcuugagg

SEQ ID NO: 2651096 - RNA, 14 nt, Human
acccuauugcugcu

SEQ ID NO: 2651097 - RNA, 21 nt, Human
acccucaaccucuucuggcuc

SEQ ID NO: 2651098 - RNA, 15 nt, Human
acccuaucuccugac

SEQ ID NO: 2651099 - RNA, 18 nt, Human
acccuaucuccugacaga

SEQ ID NO: 2651100 - RNA, 13 nt, Human
acccuauugcugc

SEQ ID NO: 2651101 - RNA, 14 nt, Human
acccuaucuccuga

SEQ ID NO: 2651102 - RNA, 19 nt, Human
accuccacacccgugagaa

SEQ ID NO: 2651103 - RNA, 14 nt, Human
accuccaacccugc

SEQ ID NO: 2651104 - RNA, 15 nt, Human
accuccaacccugcc

SEQ ID NO: 2651105 - RNA, 16 nt, Human
accuccaacccugccg

SEQ ID NO: 2651106 - RNA, 22 nt, Human
accuccaacccugccgucacca

SEQ ID NO: 2651107 - RNA, 23 nt, Human
accuccaacccugccgucaccac

SEQ ID NO: 2651108 - RNA, 21 nt, Human
accucaugcccacccccugcc

SEQ ID NO: 2651109 - RNA, 22 nt, Human
accucaugcccacccccugccc

SEQ ID NO: 2651110 - RNA, 15 nt, Human
accgggcccuggguu

SEQ ID NO: 2651111 - RNA, 19 nt, Human
accgggcccuggguuccuc

SEQ ID NO: 2651112 - RNA, 19 nt, Human
acccugugacauggugccu

SEQ ID NO: 2651113 - RNA, 21 nt, Human
acccugugacauggugccuga

SEQ ID NO: 2651114 - RNA, 15 nt, Human
accguggaggaggaa

SEQ ID NO: 2651115 - RNA, 22 nt, Human
accguggaggaggaaggcaaga

SEQ ID NO: 2651116 - RNA, 12 nt, Human
accucagccugc

SEQ ID NO: 2651117 - RNA, 18 nt, Human
accguggaggaggaaggc

SEQ ID NO: 2651118 - RNA, 20 nt, Human
accucagccugcacaguguc

SEQ ID NO: 2651119 - RNA, 23 nt, Human
accucagccugcacagugucccc

SEQ ID NO: 2651120 - RNA, 13 nt, Human
accucaugcccac

SEQ ID NO: 2651121 - RNA, 16 nt, Human
accucaugcccacccc

SEQ ID NO: 2651122 - RNA, 20 nt, Human
accucaugcccacccccugc

SEQ ID NO: 2651123 - RNA, 23 nt, Human
accucaugcccacccccugcccu

SEQ ID NO: 2651124 - RNA, 22 nt, Human
acuguaaauauuuauuuaugug

SEQ ID NO: 2651125 - RNA, 11 nt, Human
acuguaaauca

SEQ ID NO: 2651126 - RNA, 12 nt, Human
acuguaaaucau

SEQ ID NO: 2651127 - RNA, 13 nt, Human
acugguuuucugc

SEQ ID NO: 2651128 - RNA, 14 nt, Human
acugguuuucugcc

SEQ ID NO: 2651129 - RNA, 15 nt, Human
acugguuuucugcca

SEQ ID NO: 2651130 - RNA, 19 nt, Human
acugguuuucugccaauga

SEQ ID NO: 2651131 - RNA, 17 nt, Human
acuguaaacuucugcaa

SEQ ID NO: 2651132 - RNA, 16 nt, Human
acugugaagagaacca

SEQ ID NO: 2651133 - RNA, 20 nt, Human
acuguaacuuccaaauaaau

SEQ ID NO: 2651134 - RNA, 22 nt, Human
acuguaacuuccaaauaaauaa

SEQ ID NO: 2651135 - RNA, 14 nt, Human
acugccaugccagc

SEQ ID NO: 2651136 - RNA, 15 nt, Human
acuggagcucaucug

SEQ ID NO: 2651137 - RNA, 13 nt, Human
acuggaacccuuu

SEQ ID NO: 2651138 - RNA, 14 nt, Human
acuggaacccuuuu

SEQ ID NO: 2651139 - RNA, 16 nt, Human
acuggaacccuuuuaa

SEQ ID NO: 2651140 - RNA, 22 nt, Human
acuggaacccuuuuaaaguuga

SEQ ID NO: 2651141 - RNA, 20 nt, Human
acuggaaaggggagagccug

SEQ ID NO: 2651142 - RNA, 21 nt, Human
acuggaaaggggagagccugc

SEQ ID NO: 2651143 - RNA, 22 nt, Human
acuggaaaggggagagccugcu

SEQ ID NO: 2651144 - RNA, 23 nt, Human
acuggaaaggggagagccugcug

SEQ ID NO: 2651145 - RNA, 17 nt, Human
acuggaaaggggagagc

SEQ ID NO: 2651146 - RNA, 15 nt, Human
acuggaaaggggaga

SEQ ID NO: 2651147 - RNA, 19 nt, Human
acuggagguugaagccaag

SEQ ID NO: 2651148 - RNA, 17 nt, Human
acuggagguugaagcca

SEQ ID NO: 2651149 - RNA, 18 nt, Human
acuggagguugaagccaa

SEQ ID NO: 2651150 - RNA, 16 nt, Human
acuggagguugaagcc

SEQ ID NO: 2651151 - RNA, 18 nt, Human
acuuaaaacacguuuuaa

SEQ ID NO: 2651152 - RNA, 14 nt, Human
acuuaaaacacguu

SEQ ID NO: 2651153 - RNA, 12 nt, Human
acuuaaaacacg

SEQ ID NO: 2651154 - RNA, 13 nt, Human
acuguuuccuggg

SEQ ID NO: 2651155 - RNA, 17 nt, Human
acuguuuccugggcacg

SEQ ID NO: 2651156 - RNA, 23 nt, Human
acuuggggggcugaggugggagg

SEQ ID NO: 2651157 - RNA, 22 nt, Human
acuugaaaagagacaggcaggu

SEQ ID NO: 2651158 - RNA, 11 nt, Human
acuugaaaaga

SEQ ID NO: 2651159 - RNA, 23 nt, Human
acuucuuuuuucaaaagaaaguc

SEQ ID NO: 2651160 - RNA, 22 nt, Human
acuucuuuuuucaaaagaaagu

SEQ ID NO: 2651161 - RNA, 21 nt, Human
acuucuuuuuucaaaagaaag

SEQ ID NO: 2651162 - RNA, 21 nt, Human
acuugaaaagagacaggcagg

SEQ ID NO: 2651163 - RNA, 20 nt, Human
acuugaaaagagacaggcag

SEQ ID NO: 2651164 - RNA, 17 nt, Human
acuugaaaagagacagg

SEQ ID NO: 2651165 - RNA, 15 nt, Human
acuugaaaagagaca

SEQ ID NO: 2651166 - RNA, 15 nt, Human
acuucaaagcaagcu

SEQ ID NO: 2651167 - RNA, 16 nt, Human
acuucaaagcaagcug

SEQ ID NO: 2651168 - RNA, 18 nt, Human
acuuguagauuugauuuu

SEQ ID NO: 2651169 - RNA, 17 nt, Human
acuuguagauuugauuu

SEQ ID NO: 2651170 - RNA, 16 nt, Human
acuuguagauuugauu

SEQ ID NO: 2651171 - RNA, 15 nt, Human
acuuguagauuugau

SEQ ID NO: 2651172 - RNA, 14 nt, Human
acuuguagauuuga

SEQ ID NO: 2651173 - RNA, 13 nt, Human
acuuguagauuug

SEQ ID NO: 2651174 - RNA, 12 nt, Human
acuuguagauuu

SEQ ID NO: 2651175 - RNA, 16 nt, Human
acucccacacccaaga

SEQ ID NO: 2651176 - RNA, 22 nt, Human
acuccgagaggugggccagucu

SEQ ID NO: 2651177 - RNA, 23 nt, Human
acuccgagaggugggccagucug

SEQ ID NO: 2651178 - RNA, 17 nt, Human
acucccugcagaugcca

SEQ ID NO: 2651179 - RNA, 14 nt, Human
acucccugcagaug

SEQ ID NO: 2651180 - RNA, 15 nt, Human
acuccguuggccacu

SEQ ID NO: 2651181 - RNA, 17 nt, Human
acuccguuggccacucc

SEQ ID NO: 2651182 - RNA, 12 nt, Human
acuccauugucg

SEQ ID NO: 2651183 - RNA, 18 nt, Human
acuccguuggccacuccg

SEQ ID NO: 2651184 - RNA, 21 nt, Human
acuccguuggccacuccgaga

SEQ ID NO: 2651185 - RNA, 12 nt, Human
acucuaaaaacu

SEQ ID NO: 2651186 - RNA, 15 nt, Human
acugaauuuuuuugu

SEQ ID NO: 2651187 - RNA, 16 nt, Human
acugaauuuuuuugua

SEQ ID NO: 2651188 - RNA, 17 nt, Human
acugaauuuuuuuguaa

SEQ ID NO: 2651189 - RNA, 18 nt, Human
acugaauuuuuuuguaau

SEQ ID NO: 2651190 - RNA, 20 nt, Human
acugaauuuuuuuguaauaa

SEQ ID NO: 2651191 - RNA, 22 nt, Human
acugauuugcaauaaaaaugau

SEQ ID NO: 2651192 - RNA, 18 nt, Human
aaucaaauaaguauuuau

SEQ ID NO: 2651193 - RNA, 16 nt, Human
aaucaaauaaguauuu

SEQ ID NO: 2651194 - RNA, 15 nt, Human
aaucaaauaaguauu

SEQ ID NO: 2651195 - RNA, 14 nt, Human
aaucaaauaaguau

SEQ ID NO: 2651196 - RNA, 13 nt, Human
aaucaaagugcua

SEQ ID NO: 2651197 - RNA, 19 nt, Human
aaucaaauaaguauuuaua

SEQ ID NO: 2651198 - RNA, 12 nt, Human
aaucaauaauau

SEQ ID NO: 2651199 - RNA, 14 nt, Human
aaucaauacacuag

SEQ ID NO: 2651200 - RNA, 18 nt, Human
aaucaauacacuaguugu

SEQ ID NO: 2651201 - RNA, 20 nt, Human
aaucaauacacuaguuguuu

SEQ ID NO: 2651202 - RNA, 19 nt, Human
aaucaauacacuaguuguu

SEQ ID NO: 2651203 - RNA, 14 nt, Human
aaucaaaagugccu

SEQ ID NO: 2651204 - RNA, 19 nt, Human
aaucaaaagugccucaaga

SEQ ID NO: 2651205 - RNA, 22 nt, Human
aauauuaaccuaaucaccaugu

SEQ ID NO: 2651206 - RNA, 19 nt, Human
aauauguggaagcaaccaa

SEQ ID NO: 2651207 - RNA, 14 nt, Human
aaucugauggccuu

SEQ ID NO: 2651208 - RNA, 15 nt, Human
aaucugauggccuua

SEQ ID NO: 2651209 - RNA, 16 nt, Human
aaucugauggccuuaa

SEQ ID NO: 2651210 - RNA, 17 nt, Human
aaucugauggccuuaau

SEQ ID NO: 2651211 - RNA, 18 nt, Human
aaucugauggccuuaauu

SEQ ID NO: 2651212 - RNA, 19 nt, Human
aaucugauggccuuaauuu

SEQ ID NO: 2651213 - RNA, 20 nt, Human
aaucugauggccuuaauuuc

SEQ ID NO: 2651214 - RNA, 21 nt, Human
aaucugauggccuuaauuucc

SEQ ID NO: 2651215 - RNA, 22 nt, Human
aaucugauggccuuaauuuccu

SEQ ID NO: 2651216 - RNA, 23 nt, Human
aaucugauggccuuaauuuccuu

SEQ ID NO: 2651217 - RNA, 15 nt, Human
aaucugagggaaaug

SEQ ID NO: 2651218 - RNA, 18 nt, Human
aaucugagggaaauguuu

SEQ ID NO: 2651219 - RNA, 19 nt, Human
aaucugagggaaauguuuu

SEQ ID NO: 2651220 - RNA, 20 nt, Human
aaucugagggaaauguuuug

SEQ ID NO: 2651221 - RNA, 21 nt, Human
aaucugagggaaauguuuugu

SEQ ID NO: 2651222 - RNA, 22 nt, Human
aaucugagggaaauguuuugua

SEQ ID NO: 2651223 - RNA, 22 nt, Human
aagugcuggcaaccacuaagaa

SEQ ID NO: 2651224 - RNA, 19 nt, Human
aagugcuggagucuccuga

SEQ ID NO: 2651225 - RNA, 23 nt, Human
aagugcuggcaaccacuaagaau

SEQ ID NO: 2651226 - RNA, 19 nt, Human
aaguggccaagaagcagug

SEQ ID NO: 2651227 - RNA, 20 nt, Human
aaguggcgugggagccagcc

SEQ ID NO: 2651228 - RNA, 21 nt, Human
aaguugaaaaucauaggcacc

SEQ ID NO: 2651229 - RNA, 22 nt, Human
aaguggaccuuaggccuuccuc

SEQ ID NO: 2651230 - RNA, 14 nt, Human
aaguuguaaaguau

SEQ ID NO: 2651231 - RNA, 17 nt, Human
aaguuguaaaguaugua

SEQ ID NO: 2651232 - RNA, 13 nt, Human
aauaaacuuuaau

SEQ ID NO: 2651233 - RNA, 18 nt, Human
aauaaaccaaaggaaaau

SEQ ID NO: 2651234 - RNA, 20 nt, Human
aauaaagaaguaugguaauc

SEQ ID NO: 2651235 - RNA, 15 nt, Human
aagcugcaaaucuga

SEQ ID NO: 2651236 - RNA, 19 nt, Human
aagcugcaaaucugauggc

SEQ ID NO: 2651237 - RNA, 19 nt, Human
aagcugcacccucaggcag

SEQ ID NO: 2651238 - RNA, 13 nt, Human
aagcugcacccuc

SEQ ID NO: 2651239 - RNA, 13 nt, Human
aaggcaagagggg

SEQ ID NO: 2651240 - RNA, 19 nt, Human
aaggcaagaggggguggag

SEQ ID NO: 2651241 - RNA, 11 nt, Human
aaggcaagcca

SEQ ID NO: 2651242 - RNA, 15 nt, Human
aaggcaagccaggcu

SEQ ID NO: 2651243 - RNA, 16 nt, Human
aaggcaagccaggcuc

SEQ ID NO: 2651244 - RNA, 23 nt, Human
aaggcaagccaggcucacucaca

SEQ ID NO: 2651245 - RNA, 14 nt, Human
aaggacuuuguaca

SEQ ID NO: 2651246 - RNA, 15 nt, Human
aaggacuuuguacau

SEQ ID NO: 2651247 - RNA, 17 nt, Human
aaggacuuuguacauuu

SEQ ID NO: 2651248 - RNA, 21 nt, Human
aaggcaagaggggguggaggg

SEQ ID NO: 2651249 - RNA, 23 nt, Human
aaggcaguagaacuccaggcccu

SEQ ID NO: 2651250 - RNA, 15 nt, Human
aagcguauggcuuua

SEQ ID NO: 2651251 - RNA, 13 nt, Human
aagcguauggcuu

SEQ ID NO: 2651252 - RNA, 14 nt, Human
aagcggcuggcagc

SEQ ID NO: 2651253 - RNA, 21 nt, Human
aagauaauauuaaggaagaca

SEQ ID NO: 2651254 - RNA, 19 nt, Human
aagauaauauuaaggaaga

SEQ ID NO: 2651255 - RNA, 16 nt, Human
aagccaggcucacuca

SEQ ID NO: 2651256 - RNA, 18 nt, Human
aagccaggcucacucaca

SEQ ID NO: 2651257 - RNA, 19 nt, Human
aagccaggcucacucacag

SEQ ID NO: 2651258 - RNA, 22 nt, Human
aagccaggcucacucacagagu

SEQ ID NO: 2651259 - RNA, 13 nt, Human
aagaagaaguuca

SEQ ID NO: 2651260 - RNA, 20 nt, Human
aagacaaugugaaaagaaaa

SEQ ID NO: 2651261 - RNA, 14 nt, Human
aagacaccugguug

SEQ ID NO: 2651262 - RNA, 19 nt, Human
aagacaaugugaaaagaaa

SEQ ID NO: 2651263 - RNA, 22 nt, Human
aagacaagaacuccccuuuuuu

SEQ ID NO: 2651264 - RNA, 17 nt, Human
aacgccuccccugcccc

SEQ ID NO: 2651265 - RNA, 21 nt, Human
aagaacguuuuuuccucagug

SEQ ID NO: 2651266 - RNA, 23 nt, Human
aagaacuauugugcucagagaca

SEQ ID NO: 2651267 - RNA, 18 nt, Human
aagaacugcaggcccugg

SEQ ID NO: 2651268 - RNA, 22 nt, Human
aagaacugcaggcccuggccuc

SEQ ID NO: 2651269 - RNA, 23 nt, Human
aagaacugcaggcccuggccucc

SEQ ID NO: 2651270 - RNA, 13 nt, Human
aagaacuggaaac

SEQ ID NO: 2651271 - RNA, 11 nt, Human
aagacacugcc

SEQ ID NO: 2651272 - RNA, 12 nt, Human
aagacacugccu

SEQ ID NO: 2651273 - RNA, 13 nt, Human
aagacacugccug

SEQ ID NO: 2651274 - RNA, 14 nt, Human
aagacacugccugg

SEQ ID NO: 2651275 - RNA, 15 nt, Human
aagacacugccuggg

SEQ ID NO: 2651276 - RNA, 16 nt, Human
aagacacugccugggc

SEQ ID NO: 2651277 - RNA, 17 nt, Human
aagacacugccugggcu

SEQ ID NO: 2651278 - RNA, 20 nt, Human
aagacaguguauguagaagc

SEQ ID NO: 2651279 - RNA, 21 nt, Human
aagacaguguauguagaagca

SEQ ID NO: 2651280 - RNA, 23 nt, Human
aagacauacuccuuccaucaaau

SEQ ID NO: 2651281 - RNA, 13 nt, Human
aagagaaaaaaua

SEQ ID NO: 2651282 - RNA, 18 nt, Human
aagaccaccacuucgaaa

SEQ ID NO: 2651283 - RNA, 22 nt, Human
aagagaguauuuuuauacaaac

SEQ ID NO: 2651284 - RNA, 15 nt, Human
aagagauaagucuuu

SEQ ID NO: 2651285 - RNA, 15 nt, Human
aagagacauccaaau

SEQ ID NO: 2651286 - RNA, 14 nt, Human
aagagauccaaaga

SEQ ID NO: 2651287 - RNA, 15 nt, Human
aagagauccaaagac

SEQ ID NO: 2651288 - RNA, 16 nt, Human
aagagauccaaagacu

SEQ ID NO: 2651289 - RNA, 17 nt, Human
aagagauccaaagacuc

SEQ ID NO: 2651290 - RNA, 18 nt, Human
aagaguuucaguuuguug

SEQ ID NO: 2651291 - RNA, 19 nt, Human
aagaguuucaguuuguugg

SEQ ID NO: 2651292 - RNA, 21 nt, Human
aagaguuucaguuuguuggaa

SEQ ID NO: 2651293 - RNA, 16 nt, Human
aagaguucccuugaaa

SEQ ID NO: 2651294 - RNA, 20 nt, Human
aagaguucccuugaaacuuu

SEQ ID NO: 2651295 - RNA, 21 nt, Human
aaauauuguugacaacuguga

SEQ ID NO: 2651296 - RNA, 17 nt, Human
aaauauuguugacaacu

SEQ ID NO: 2651297 - RNA, 15 nt, Human
aaauauuguuucugc

SEQ ID NO: 2651298 - RNA, 16 nt, Human
aaauauuguuucugca

SEQ ID NO: 2651299 - RNA, 21 nt, Human
aaauauuguuucugcauucau

SEQ ID NO: 2651300 - RNA, 22 nt, Human
aaauauuguuucugcauucauu

SEQ ID NO: 2651301 - RNA, 22 nt, Human
aaauauuguuuuacaauaguuc

SEQ ID NO: 2651302 - RNA, 21 nt, Human
aaauagauuuuauaagaugac

SEQ ID NO: 2651303 - RNA, 15 nt, Human
aaauagaugcugugu

SEQ ID NO: 2651304 - RNA, 22 nt, Human
aaauagaugcuguguauauggu

SEQ ID NO: 2651305 - RNA, 14 nt, Human
aaauagauauaaau

SEQ ID NO: 2651306 - RNA, 15 nt, Human
aaauagauauaaauu

SEQ ID NO: 2651307 - RNA, 14 nt, Human
aaauagaguguagu

SEQ ID NO: 2651308 - RNA, 18 nt, Human
aaauagaguguaguuuac

SEQ ID NO: 2651309 - RNA, 16 nt, Human
aaauauuucagugaau

SEQ ID NO: 2651310 - RNA, 12 nt, Human
aaauauuuaucu

SEQ ID NO: 2651311 - RNA, 22 nt, Human
aaauauuuugaaucaauaauau

SEQ ID NO: 2651312 - RNA, 13 nt, Human
aaauggauacugg

SEQ ID NO: 2651313 - RNA, 16 nt, Human
aaauggagaagcugca

SEQ ID NO: 2651314 - RNA, 17 nt, Human
aaauggagaagcugcag

SEQ ID NO: 2651315 - RNA, 18 nt, Human
aaauggagaagcugcagg

SEQ ID NO: 2651316 - RNA, 20 nt, Human
aaauggaggaucucuaaaga

SEQ ID NO: 2651317 - RNA, 22 nt, Human
aaauggaggaucucuaaagagc

SEQ ID NO: 2651318 - RNA, 23 nt, Human
aaauggaggaucucuaaagagca

SEQ ID NO: 2651319 - RNA, 15 nt, Human
aaaucuuuugaagca

SEQ ID NO: 2651320 - RNA, 17 nt, Human
aaaucuuuugaagcaua

SEQ ID NO: 2651321 - RNA, 10 nt, Human
aaauguuugg

SEQ ID NO: 2651322 - RNA, 19 nt, Human
aaauguuuggcauguaaau

SEQ ID NO: 2651323 - RNA, 20 nt, Human
aaauguuuggcauguaaaug

SEQ ID NO: 2651324 - RNA, 22 nt, Human
aaauguuuggcauguaaaugua

SEQ ID NO: 2651325 - RNA, 11 nt, Human
aaauguuucuu

SEQ ID NO: 2651326 - RNA, 15 nt, Human
aaauguuucuuuuaa

SEQ ID NO: 2651327 - RNA, 18 nt, Human
aaauguuucuuuuaaaga

SEQ ID NO: 2651328 - RNA, 14 nt, Human
aaauguuucuuuug

SEQ ID NO: 2651329 - RNA, 19 nt, Human
aaauguuucuuuuguuugg

SEQ ID NO: 2651330 - RNA, 17 nt, Human
aaauguuuuguaaacau

SEQ ID NO: 2651331 - RNA, 18 nt, Human
aaauguuuuguaaacauu

SEQ ID NO: 2651332 - RNA, 20 nt, Human
aaauguuuuguaaacauuua

SEQ ID NO: 2651333 - RNA, 14 nt, Human
aaauguuuuguaaa

SEQ ID NO: 2651334 - RNA, 13 nt, Human
aaauguuuuguaa

SEQ ID NO: 2651335 - RNA, 18 nt, Human
aacagccaagauuuuccu

SEQ ID NO: 2651336 - RNA, 13 nt, Human
aacaugaaucaaa

SEQ ID NO: 2651337 - RNA, 20 nt, Human
aacaugaaucaaaagugccu

SEQ ID NO: 2651338 - RNA, 16 nt, Human
aacagccucuuuuuga

SEQ ID NO: 2651339 - RNA, 12 nt, Human
aacaucuuuaag

SEQ ID NO: 2651340 - RNA, 18 nt, Human
aacaucuuuaaggggagg

SEQ ID NO: 2651341 - RNA, 15 nt, Human
aacaggccucuccau

SEQ ID NO: 2651342 - RNA, 21 nt, Human
aaauucuucuaauugcugugu

SEQ ID NO: 2651343 - RNA, 13 nt, Human
aaccuuuuacugg

SEQ ID NO: 2651344 - RNA, 19 nt, Human
aaccuuuuacugguugcau

SEQ ID NO: 2651345 - RNA, 20 nt, Human
aaccuuuuacugguugcaug

SEQ ID NO: 2651346 - RNA, 21 nt, Human
aaccuuuuacugguugcaugg

SEQ ID NO: 2651347 - RNA, 10 nt, Human
aaaagaaaca

SEQ ID NO: 2651348 - RNA, 13 nt, Human
aaaagaaaugaug

SEQ ID NO: 2651349 - RNA, 14 nt, Human
aaaagaaaugaaca

SEQ ID NO: 2651350 - RNA, 11 nt, Human
aaaagaaagca

SEQ ID NO: 2651351 - RNA, 11 nt, Human
aaaagaaugac

SEQ ID NO: 2651352 - RNA, 23 nt, Human
aaaagaaugacguuuacauauaa

SEQ ID NO: 2651353 - RNA, 19 nt, Human
aaaagacaguguauguaga

SEQ ID NO: 2651354 - RNA, 15 nt, Human
aaaacaccuucuaua

SEQ ID NO: 2651355 - RNA, 11 nt, Human
aaaagaaaaag

SEQ ID NO: 2651356 - RNA, 18 nt, Human
aaaacagaguaaucuugu

SEQ ID NO: 2651357 - RNA, 22 nt, Human
aaaacagaguaaucuuguuggu

SEQ ID NO: 2651358 - RNA, 19 nt, Human
aaaacagaguaaucuuguu

SEQ ID NO: 2651359 - RNA, 21 nt, Human
aaaagagcagugguaagaaua

SEQ ID NO: 2651360 - RNA, 19 nt, Human
aaaagaaaucauguccaua

SEQ ID NO: 2651361 - RNA, 21 nt, Human
aaaaucagccugcuccagcug

SEQ ID NO: 2651362 - RNA, 17 nt, Human
aaaaucagccugcucca

SEQ ID NO: 2651363 - RNA, 13 nt, Human
aaaaucagccugc

SEQ ID NO: 2651364 - RNA, 17 nt, Human
aaaaguugcauuuuaac

SEQ ID NO: 2651365 - RNA, 12 nt, Human
aaaauaaaacau

SEQ ID NO: 2651366 - RNA, 13 nt, Human
aaaauaaaacaua

SEQ ID NO: 2651367 - RNA, 16 nt, Human
aaaauaaaacauagca

SEQ ID NO: 2651368 - RNA, 17 nt, Human
aaaauaaaacauagcaa

SEQ ID NO: 2651369 - RNA, 18 nt, Human
aaaauaaaacauagcaaa

SEQ ID NO: 2651370 - RNA, 19 nt, Human
aaaaguauuuuuucaaguu

SEQ ID NO: 2651371 - RNA, 14 nt, Human
aaaagucugucuuu

SEQ ID NO: 2651372 - RNA, 18 nt, Human
aaaagucugucuuuccug

SEQ ID NO: 2651373 - RNA, 14 nt, Human
aaaagucagagaca

SEQ ID NO: 2651374 - RNA, 16 nt, Human
aaaagucagagacaga

SEQ ID NO: 2651375 - RNA, 22 nt, Human
aaagcauguucacccuuauagu

SEQ ID NO: 2651376 - RNA, 19 nt, Human
aaagaaaaaaaugucaaaa

SEQ ID NO: 2651377 - RNA, 16 nt, Human
aaagaaaaaaauguca

SEQ ID NO: 2651378 - RNA, 15 nt, Human
aaagaaaaaaauguc

SEQ ID NO: 2651379 - RNA, 23 nt, Human
aaacucuuaaaacccaagugccu

SEQ ID NO: 2651380 - RNA, 12 nt, Human
aaacucuuaaaa

SEQ ID NO: 2651381 - RNA, 13 nt, Human
aaaccgaauaaau

SEQ ID NO: 2651382 - RNA, 14 nt, Human
aaaccgaauaaaug

SEQ ID NO: 2651383 - RNA, 16 nt, Human
aaaccgaauaaauguu

SEQ ID NO: 2651384 - RNA, 20 nt, Human
aaaccgaguagaaaauguga

SEQ ID NO: 2651385 - RNA, 16 nt, Human
aaaccgccaaggcugg

SEQ ID NO: 2651386 - RNA, 15 nt, Human
aaaccgccaaggcug

SEQ ID NO: 2651387 - RNA, 17 nt, Human
ccccaccccccaggccu

SEQ ID NO: 2651388 - RNA, 19 nt, Human
ccccaccccggggacccug

SEQ ID NO: 2651389 - RNA, 23 nt, Human
ccccaccccggggacccugugac

SEQ ID NO: 2651390 - RNA, 22 nt, Human
ccccaacaucucccucccacau

SEQ ID NO: 2651391 - RNA, 19 nt, Human
ccccaacaucucccuccca

SEQ ID NO: 2651392 - RNA, 17 nt, Human
cccagugcaaaugcaug

SEQ ID NO: 2651393 - RNA, 19 nt, Human
cccauggagccagcucccu

SEQ ID NO: 2651394 - RNA, 13 nt, Human
cccauggagccag

SEQ ID NO: 2651395 - RNA, 10 nt, Human
cccagugcag

SEQ ID NO: 2651396 - RNA, 11 nt, Human
cccagugcaga

SEQ ID NO: 2651397 - RNA, 12 nt, Human
cccagugcagaa

SEQ ID NO: 2651398 - RNA, 15 nt, Human
cccagugcagaaugu

SEQ ID NO: 2651399 - RNA, 17 nt, Human
cccagugcagaauguaa

SEQ ID NO: 2651400 - RNA, 12 nt, Human
cccagugcaugg

SEQ ID NO: 2651401 - RNA, 14 nt, Human
cccagugcauggug

SEQ ID NO: 2651402 - RNA, 18 nt, Human
cccagugcaugguggcca

SEQ ID NO: 2651403 - RNA, 19 nt, Human
cccagugcaugguggccag

SEQ ID NO: 2651404 - RNA, 20 nt, Human
cccagugcaugguggccaga

SEQ ID NO: 2651405 - RNA, 21 nt, Human
cccagugcaugguggccagag

SEQ ID NO: 2651406 - RNA, 22 nt, Human
cccagugcaugguggccagagg

SEQ ID NO: 2651407 - RNA, 17 nt, Human
cccagugccgagaagga

SEQ ID NO: 2651408 - RNA, 18 nt, Human
cccagugccgagaaggaa

SEQ ID NO: 2651409 - RNA, 18 nt, Human
cccagguccagcucugga

SEQ ID NO: 2651410 - RNA, 17 nt, Human
cccagguccagcucugg

SEQ ID NO: 2651411 - RNA, 14 nt, Human
cccagguccagcuc

SEQ ID NO: 2651412 - RNA, 19 nt, Human
cccaguccccaccccugcc

SEQ ID NO: 2651413 - RNA, 20 nt, Human
cccaguccccaccccugccc

SEQ ID NO: 2651414 - RNA, 16 nt, Human
cccaguagaccuuguu

SEQ ID NO: 2651415 - RNA, 13 nt, Human
cccaguccccacc

SEQ ID NO: 2651416 - RNA, 14 nt, Human
cccaguccccaccc

SEQ ID NO: 2651417 - RNA, 15 nt, Human
cccaguccccacccc

SEQ ID NO: 2651418 - RNA, 18 nt, Human
cccaguccccaccccugc

SEQ ID NO: 2651419 - RNA, 18 nt, Human
cccaggggacaagggauu

SEQ ID NO: 2651420 - RNA, 17 nt, Human
cccaggcucguggacug

SEQ ID NO: 2651421 - RNA, 22 nt, Human
cccaggcucguggacugagugg

SEQ ID NO: 2651422 - RNA, 19 nt, Human
cccagggggcaugaccaga

SEQ ID NO: 2651423 - RNA, 22 nt, Human
cccagggggucucacccaugca

SEQ ID NO: 2651424 - RNA, 14 nt, Human
cccaggggucuccc

SEQ ID NO: 2651425 - RNA, 16 nt, Human
cccaggggucucccug

SEQ ID NO: 2651426 - RNA, 17 nt, Human
cccaggggucucccugg

SEQ ID NO: 2651427 - RNA, 18 nt, Human
cccaggggucucccuggc

SEQ ID NO: 2651428 - RNA, 19 nt, Human
cccaggggucucccuggcu

SEQ ID NO: 2651429 - RNA, 20 nt, Human
cccaggggucucccuggcuc

SEQ ID NO: 2651430 - RNA, 21 nt, Human
cccaggggucucccuggcucc

SEQ ID NO: 2651431 - RNA, 22 nt, Human
cccaggggucucccuggcuccc

SEQ ID NO: 2651432 - RNA, 23 nt, Human
cccaggggucucccuggcucccu

SEQ ID NO: 2651433 - RNA, 14 nt, Human
cccaggagccucac

SEQ ID NO: 2651434 - RNA, 15 nt, Human
cccaggaggcaggga

SEQ ID NO: 2651435 - RNA, 17 nt, Human
cccaggaggcagggagg

SEQ ID NO: 2651436 - RNA, 21 nt, Human
cccaggaggcagggaggcagc

SEQ ID NO: 2651437 - RNA, 22 nt, Human
cccaggaggcagggaggcagcc

SEQ ID NO: 2651438 - RNA, 23 nt, Human
cccaggaggcagggaggcagccg

SEQ ID NO: 2651439 - RNA, 17 nt, Human
cccaggagccugcccag

SEQ ID NO: 2651440 - RNA, 19 nt, Human
cccaggagccugcccagcc

SEQ ID NO: 2651441 - RNA, 11 nt, Human
cccaggcaggg

SEQ ID NO: 2651442 - RNA, 12 nt, Human
cccaggcaggga

SEQ ID NO: 2651443 - RNA, 17 nt, Human
cccaggcagggagacgg

SEQ ID NO: 2651444 - RNA, 15 nt, Human
cccagcguggccucc

SEQ ID NO: 2651445 - RNA, 16 nt, Human
cccagcucgcgggacc

SEQ ID NO: 2651446 - RNA, 12 nt, Human
cccagccugcua

SEQ ID NO: 2651447 - RNA, 21 nt, Human
cccagccugcuagcuagcuca

SEQ ID NO: 2651448 - RNA, 16 nt, Human
cccagccugcuagcua

SEQ ID NO: 2651449 - RNA, 15 nt, Human
cccagccugcuagcu

SEQ ID NO: 2651450 - RNA, 14 nt, Human
cccagccugcuagc

SEQ ID NO: 2651451 - RNA, 11 nt, Human
cccagccugcu

SEQ ID NO: 2651452 - RNA, 11 nt, Human
cccagccugcg

SEQ ID NO: 2651453 - RNA, 23 nt, Human
cccagccugcgccugcugcaugc

SEQ ID NO: 2651454 - RNA, 22 nt, Human
cccagccugcgccugcugcaug

SEQ ID NO: 2651455 - RNA, 19 nt, Human
cccagccugcgccugcugc

SEQ ID NO: 2651456 - RNA, 18 nt, Human
cccagccugcgccugcug

SEQ ID NO: 2651457 - RNA, 15 nt, Human
cccagccccggggug

SEQ ID NO: 2651458 - RNA, 22 nt, Human
cccagccccgacuccagccagc

SEQ ID NO: 2651459 - RNA, 23 nt, Human
cccagccccgacuccagccagcg

SEQ ID NO: 2651460 - RNA, 16 nt, Human
cccaauguaggagcug

SEQ ID NO: 2651461 - RNA, 16 nt, Human
cccacacccaaagcug

SEQ ID NO: 2651462 - RNA, 18 nt, Human
ccauaguuuggcauuugc

SEQ ID NO: 2651463 - RNA, 13 nt, Human
ccaucaccagaca

SEQ ID NO: 2651464 - RNA, 18 nt, Human
ccagugagggacgucaga

SEQ ID NO: 2651465 - RNA, 15 nt, Human
ccagugaagauauuu

SEQ ID NO: 2651466 - RNA, 22 nt, Human
ccagugagggacgucagacuug

SEQ ID NO: 2651467 - RNA, 13 nt, Human
ccaucucccugcc

SEQ ID NO: 2651468 - RNA, 14 nt, Human
ccaucucccugccu

SEQ ID NO: 2651469 - RNA, 16 nt, Human
ccaucucccugccugg

SEQ ID NO: 2651470 - RNA, 17 nt, Human
ccaucucccugccuggc

SEQ ID NO: 2651471 - RNA, 18 nt, Human
ccaucucccugccuggcc

SEQ ID NO: 2651472 - RNA, 23 nt, Human
ccaucuccccucagcucggcuca

SEQ ID NO: 2651473 - RNA, 18 nt, Human
ccaucuccccucagcucg

SEQ ID NO: 2651474 - RNA, 17 nt, Human
ccaucuccccucagcuc

SEQ ID NO: 2651475 - RNA, 16 nt, Human
ccaucuccccucagcu

SEQ ID NO: 2651476 - RNA, 15 nt, Human
ccaucuccccucagc

SEQ ID NO: 2651477 - RNA, 14 nt, Human
ccaucuccccucag

SEQ ID NO: 2651478 - RNA, 19 nt, Human
ccaucaggguucucuuagc

SEQ ID NO: 2651479 - RNA, 20 nt, Human
ccaucaggguucucuuagca

SEQ ID NO: 2651480 - RNA, 15 nt, Human
ccauccaaggccagg

SEQ ID NO: 2651481 - RNA, 21 nt, Human
ccaugauuaaccacuucagcu

SEQ ID NO: 2651482 - RNA, 19 nt, Human
ccaugauuaaccacuucag

SEQ ID NO: 2651483 - RNA, 15 nt, Human
ccaugcaagcagagg

SEQ ID NO: 2651484 - RNA, 16 nt, Human
ccaugcaagcagagga

SEQ ID NO: 2651485 - RNA, 17 nt, Human
ccaugcaagcagaggac

SEQ ID NO: 2651486 - RNA, 19 nt, Human
ccaugcaagcagaggacca

SEQ ID NO: 2651487 - RNA, 20 nt, Human
ccaugcaagcagaggaccag

SEQ ID NO: 2651488 - RNA, 23 nt, Human
ccaugcaagcagaggaccagggc

SEQ ID NO: 2651489 - RNA, 18 nt, Human
ccaugaagggacccuuug

SEQ ID NO: 2651490 - RNA, 17 nt, Human
ccaugccgucugccgga

SEQ ID NO: 2651491 - RNA, 22 nt, Human
ccaugcgcucagggccaugcug

SEQ ID NO: 2651492 - RNA, 13 nt, Human
ccaugcucaucug

SEQ ID NO: 2651493 - RNA, 16 nt, Human
ccaugcucaucugcug

SEQ ID NO: 2651494 - RNA, 22 nt, Human
ccaugcgcccccuccgcccugc

SEQ ID NO: 2651495 - RNA, 13 nt, Human
ccaugcgcucagg

SEQ ID NO: 2651496 - RNA, 15 nt, Human
ccaugcgcucagggc

SEQ ID NO: 2651497 - RNA, 16 nt, Human
ccaugcgcucagggcc

SEQ ID NO: 2651498 - RNA, 12 nt, Human
ccaugccagcug

SEQ ID NO: 2651499 - RNA, 14 nt, Human
ccaugccagcuggc

SEQ ID NO: 2651500 - RNA, 15 nt, Human
ccaugccagcuggcc

SEQ ID NO: 2651501 - RNA, 20 nt, Human
ccaugcugaggccugggccg

SEQ ID NO: 2651502 - RNA, 18 nt, Human
ccaugcugaggccugggc

SEQ ID NO: 2651503 - RNA, 19 nt, Human
ccaugcugaggccugggcc

SEQ ID NO: 2651504 - RNA, 17 nt, Human
ccaugcucaucugcugg

SEQ ID NO: 2651505 - RNA, 18 nt, Human
ccaugcucaucugcuggu

SEQ ID NO: 2651506 - RNA, 20 nt, Human
ccaugcucaucugcuggucc

SEQ ID NO: 2651507 - RNA, 19 nt, Human
ccaugcuuacgugauccuc

SEQ ID NO: 2651508 - RNA, 23 nt, Human
cccaaacuguugauuauuagcca

SEQ ID NO: 2651509 - RNA, 19 nt, Human
cccaaacccaagugccuuc

SEQ ID NO: 2651510 - RNA, 17 nt, Human
cccaaagauagacaggu

SEQ ID NO: 2651511 - RNA, 21 nt, Human
cccaaagauagacagguccug

SEQ ID NO: 2651512 - RNA, 12 nt, Human
ccagggccuuuu

SEQ ID NO: 2651513 - RNA, 20 nt, Human
ccagggccuuuucuggcacc

SEQ ID NO: 2651514 - RNA, 21 nt, Human
ccagggccuuuucuggcaccg

SEQ ID NO: 2651515 - RNA, 18 nt, Human
ccagguccagcucuggag

SEQ ID NO: 2651516 - RNA, 16 nt, Human
ccagguccagcucugg

SEQ ID NO: 2651517 - RNA, 17 nt, Human
ccagguccagcucugga

SEQ ID NO: 2651518 - RNA, 19 nt, Human
ccagguccagcucuggagg

SEQ ID NO: 2651519 - RNA, 13 nt, Human
ccagguccagcuc

SEQ ID NO: 2651520 - RNA, 14 nt, Human
ccagguccagcucu

SEQ ID NO: 2651521 - RNA, 15 nt, Human
ccagguccagcucug

SEQ ID NO: 2651522 - RNA, 22 nt, Human
ccaguagaccuuguuacuucug

SEQ ID NO: 2651523 - RNA, 21 nt, Human
ccagucuguggaucagagaug

SEQ ID NO: 2651524 - RNA, 12 nt, Human
ccaguaagauca

SEQ ID NO: 2651525 - RNA, 21 nt, Human
ccaguaagaucacuguuuaga

SEQ ID NO: 2651526 - RNA, 17 nt, Human
ccaguaagaucacuguu

SEQ ID NO: 2651527 - RNA, 16 nt, Human
ccaguaagaucacugu

SEQ ID NO: 2651528 - RNA, 15 nt, Human
ccaguaagaucacug

SEQ ID NO: 2651529 - RNA, 14 nt, Human
ccaguaagaucacu

SEQ ID NO: 2651530 - RNA, 14 nt, Human
ccaggcuuggccuu

SEQ ID NO: 2651531 - RNA, 15 nt, Human
ccaggagcaggcacg

SEQ ID NO: 2651532 - RNA, 16 nt, Human
ccaggagcaggcacgg

SEQ ID NO: 2651533 - RNA, 20 nt, Human
ccaggaggcagggaggcagc

SEQ ID NO: 2651534 - RNA, 21 nt, Human
ccaggaggcagggaggcagcc

SEQ ID NO: 2651535 - RNA, 22 nt, Human
ccaggaggcagggaggcagccg

SEQ ID NO: 2651536 - RNA, 13 nt, Human
ccaggcauggugg

SEQ ID NO: 2651537 - RNA, 15 nt, Human
ccagcugccuauuga

SEQ ID NO: 2651538 - RNA, 16 nt, Human
ccagcugcgcuugcuu

SEQ ID NO: 2651539 - RNA, 17 nt, Human
ccagcugcgcuugcuuu

SEQ ID NO: 2651540 - RNA, 18 nt, Human
ccagcugcgcuugcuuuu

SEQ ID NO: 2651541 - RNA, 16 nt, Human
ccagcugcccuuccgc

SEQ ID NO: 2651542 - RNA, 17 nt, Human
ccagcugcccuuccgca

SEQ ID NO: 2651543 - RNA, 20 nt, Human
ccagcugcccuuccgcagug

SEQ ID NO: 2651544 - RNA, 21 nt, Human
ccagcugcccuuccgcagugu

SEQ ID NO: 2651545 - RNA, 22 nt, Human
ccagcugcuccgaggacccagg

SEQ ID NO: 2651546 - RNA, 21 nt, Human
ccagcugcgcuugcuuuucug

SEQ ID NO: 2651547 - RNA, 19 nt, Human
ccagcugcgcuugcuuuuc

SEQ ID NO: 2651548 - RNA, 20 nt, Human
ccagcugcgcuugcuuuucu

SEQ ID NO: 2651549 - RNA, 14 nt, Human
ccagcucuggaggg

SEQ ID NO: 2651550 - RNA, 19 nt, Human
ccagcucuggaggggaggg

SEQ ID NO: 2651551 - RNA, 11 nt, Human
ccaggaagccg

SEQ ID NO: 2651552 - RNA, 22 nt, Human
ccaggaagccguccuggcgccu

SEQ ID NO: 2651553 - RNA, 16 nt, Human
ccaggaagccguccug

SEQ ID NO: 2651554 - RNA, 15 nt, Human
ccaggaagcccagga

SEQ ID NO: 2651555 - RNA, 18 nt, Human
ccaggaagcccaggagcc

SEQ ID NO: 2651556 - RNA, 20 nt, Human
ccaggacaugcaauaaaauu

SEQ ID NO: 2651557 - RNA, 23 nt, Human
ccaggacaugcaauaaaauuuaa

SEQ ID NO: 2651558 - RNA, 22 nt, Human
ccacucacuaggcccccacuug

SEQ ID NO: 2651559 - RNA, 18 nt, Human
ccacuaugacagaggauu

SEQ ID NO: 2651560 - RNA, 17 nt, Human
ccacuacaccuggcuga

SEQ ID NO: 2651561 - RNA, 20 nt, Human
ccacgggacaucacagggug

SEQ ID NO: 2651562 - RNA, 22 nt, Human
ccacgggacaucacaggguggg

SEQ ID NO: 2651563 - RNA, 12 nt, Human
ccaccccaggac

SEQ ID NO: 2651564 - RNA, 13 nt, Human
ccaccccaggacg

SEQ ID NO: 2651565 - RNA, 13 nt, Human
ccaccccaagaga

SEQ ID NO: 2651566 - RNA, 15 nt, Human
ccaccccaagagaac

SEQ ID NO: 2651567 - RNA, 17 nt, Human
ccaccccaagagaacuc

SEQ ID NO: 2651568 - RNA, 19 nt, Human
ccaccccaagagaacucgc

SEQ ID NO: 2651569 - RNA, 15 nt, Human
ccacuacaccuggcu

SEQ ID NO: 2651570 - RNA, 16 nt, Human
ccacuacaccuggcug

SEQ ID NO: 2651571 - RNA, 13 nt, Human
ccacuaaugcaaa

SEQ ID NO: 2651572 - RNA, 13 nt, Human
ccacuacaccugg

SEQ ID NO: 2651573 - RNA, 14 nt, Human
ccacuacaccuggc

SEQ ID NO: 2651574 - RNA, 23 nt, Human
ccacugcacuccagccuggguga

SEQ ID NO: 2651575 - RNA, 18 nt, Human
ccagaaauggugagaugu

SEQ ID NO: 2651576 - RNA, 13 nt, Human
ccacuucacugcg

SEQ ID NO: 2651577 - RNA, 14 nt, Human
ccacuucagcugac

SEQ ID NO: 2651578 - RNA, 13 nt, Human
ccacuucagcuga

SEQ ID NO: 2651579 - RNA, 21 nt, Human
ccagaagagaauuaagcccua

SEQ ID NO: 2651580 - RNA, 22 nt, Human
ccagaaguuugagaucagccug

SEQ ID NO: 2651581 - RNA, 23 nt, Human
ccagaaguuugagaucagccugg

SEQ ID NO: 2651582 - RNA, 17 nt, Human
ccacaggacccucgccg

SEQ ID NO: 2651583 - RNA, 19 nt, Human
ccacaccccaacacuucca

SEQ ID NO: 2651584 - RNA, 21 nt, Human
ccacaccccaacacuuccagc

SEQ ID NO: 2651585 - RNA, 19 nt, Human
ccacaguagaacugucugu

SEQ ID NO: 2651586 - RNA, 20 nt, Human
ccacaguagaacugucugug

SEQ ID NO: 2651587 - RNA, 14 nt, Human
ccacaguugcucua

SEQ ID NO: 2651588 - RNA, 16 nt, Human
ccacauugaagaaugu

SEQ ID NO: 2651589 - RNA, 14 nt, Human
ccaccaaaaacaaa

SEQ ID NO: 2651590 - RNA, 13 nt, Human
ccacauguccagc

SEQ ID NO: 2651591 - RNA, 18 nt, Human
ccacauggcggagaguuu

SEQ ID NO: 2651592 - RNA, 12 nt, Human
ccaccccaacau

SEQ ID NO: 2651593 - RNA, 16 nt, Human
ccacccaggaggcagg

SEQ ID NO: 2651594 - RNA, 21 nt, Human
ccacccaacccuaucuccuga

SEQ ID NO: 2651595 - RNA, 16 nt, Human
ccacccaacccuaucu

SEQ ID NO: 2651596 - RNA, 19 nt, Human
ccacccaacccuaucuccu

SEQ ID NO: 2651597 - RNA, 21 nt, Human
ccacccaaccccaagccagcc

SEQ ID NO: 2651598 - RNA, 13 nt, Human
ccacccaacccua

SEQ ID NO: 2651599 - RNA, 16 nt, Human
ccaccaugccucacua

SEQ ID NO: 2651600 - RNA, 22 nt, Human
ccaaagccuccuccagccgcca

SEQ ID NO: 2651601 - RNA, 17 nt, Human
ccaaagccuccuccagc

SEQ ID NO: 2651602 - RNA, 14 nt, Human
ccaaaggaaaaugu

SEQ ID NO: 2651603 - RNA, 20 nt, Human
ccaaaggaaaaugucuguaa

SEQ ID NO: 2651604 - RNA, 18 nt, Human
ccaaagcugcccacuguu

SEQ ID NO: 2651605 - RNA, 20 nt, Human
ccaaagcugcccacuguuuc

SEQ ID NO: 2651606 - RNA, 21 nt, Human
ccaaagcugcccacuguuucu

SEQ ID NO: 2651607 - RNA, 14 nt, Human
ccaaagcugagccu

SEQ ID NO: 2651608 - RNA, 15 nt, Human
ccaaagcugagccug

SEQ ID NO: 2651609 - RNA, 20 nt, Human
ccaaagcugagccugcaggg

SEQ ID NO: 2651610 - RNA, 21 nt, Human
ccaaagcugagccugcaggga

SEQ ID NO: 2651611 - RNA, 13 nt, Human
ccaaagcugccca

SEQ ID NO: 2651612 - RNA, 21 nt, Human
ccaacaagauugcuuaauaaa

SEQ ID NO: 2651613 - RNA, 14 nt, Human
ccaacaagcagcug

SEQ ID NO: 2651614 - RNA, 12 nt, Human
ccaacacuucca

SEQ ID NO: 2651615 - RNA, 13 nt, Human
ccaacacuuccag

SEQ ID NO: 2651616 - RNA, 17 nt, Human
ccaaccagaccuggaag

SEQ ID NO: 2651617 - RNA, 13 nt, Human
ccaagagaacucg

SEQ ID NO: 2651618 - RNA, 23 nt, Human
ccaagagaacucgcgcucaguaa

SEQ ID NO: 2651619 - RNA, 23 nt, Human
ccaacccuaucuccugacagaag

SEQ ID NO: 2651620 - RNA, 19 nt, Human
ccaacccuaucuccugaca

SEQ ID NO: 2651621 - RNA, 20 nt, Human
ccaacccuaucuccugacag

SEQ ID NO: 2651622 - RNA, 11 nt, Human
ccaagaaugua

SEQ ID NO: 2651623 - RNA, 12 nt, Human
ccaagaauguac

SEQ ID NO: 2651624 - RNA, 17 nt, Human
ccaagaauguacgucca

SEQ ID NO: 2651625 - RNA, 18 nt, Human
ccaagaauguacguccag

SEQ ID NO: 2651626 - RNA, 21 nt, Human
ccaagaauguacguccagccu

SEQ ID NO: 2651627 - RNA, 15 nt, Human
ccaagaauauugcaa

SEQ ID NO: 2651628 - RNA, 16 nt, Human
ccaagaauauugcaaa

SEQ ID NO: 2651629 - RNA, 21 nt, Human
ccaagaauauugcaaaauaca

SEQ ID NO: 2651630 - RNA, 22 nt, Human
ccaagaauauugcaaaauacau

SEQ ID NO: 2651631 - RNA, 23 nt, Human
ccaagaauauugcaaaauacaug

SEQ ID NO: 2651632 - RNA, 12 nt, Human
ccaagaaugcaa

SEQ ID NO: 2651633 - RNA, 20 nt, Human
ccaagaaugcaagauuucag

SEQ ID NO: 2651634 - RNA, 17 nt, Human
ccaagauuuaaaugcca

SEQ ID NO: 2651635 - RNA, 19 nt, Human
ccaagauuuaaaugccaua

SEQ ID NO: 2651636 - RNA, 16 nt, Human
ccaagauuuuccucuu

SEQ ID NO: 2651637 - RNA, 19 nt, Human
ccaagauuuuccucuugug

SEQ ID NO: 2651638 - RNA, 20 nt, Human
ccaagauuuuccucuuguga

SEQ ID NO: 2651639 - RNA, 22 nt, Human
ccaagauuuuccucuugugauu

SEQ ID NO: 2651640 - RNA, 13 nt, Human
ccaagcaucuugg

SEQ ID NO: 2651641 - RNA, 22 nt, Human
ccaagcaucuuggggggguggc

SEQ ID NO: 2651642 - RNA, 23 nt, Human
ccaagcaucuuggggggguggcc

SEQ ID NO: 2651643 - RNA, 22 nt, Human
ccaagauauuuuuaucccaaga

SEQ ID NO: 2651644 - RNA, 16 nt, Human
ccaagccagaggcugg

SEQ ID NO: 2651645 - RNA, 17 nt, Human
ccaagccagaggcuggg

SEQ ID NO: 2651646 - RNA, 19 nt, Human
ccaagccagaggcuggguu

SEQ ID NO: 2651647 - RNA, 18 nt, Human
ccaagccaagggaaccug

SEQ ID NO: 2651648 - RNA, 20 nt, Human
ccaagccaagggaaccugug

SEQ ID NO: 2651649 - RNA, 22 nt, Human
ccaagccaagggaaccuguguc

SEQ ID NO: 2651650 - RNA, 23 nt, Human
ccaagccaagggaaccugugucc

SEQ ID NO: 2651651 - RNA, 20 nt, Human
ccaagccuccacagcgaggg

SEQ ID NO: 2651652 - RNA, 13 nt, Human
ccaagccuccaca

SEQ ID NO: 2651653 - RNA, 14 nt, Human
ccaagccuccacag

SEQ ID NO: 2651654 - RNA, 15 nt, Human
ccaagccuccacagc

SEQ ID NO: 2651655 - RNA, 16 nt, Human
ccaagccuccacagcg

SEQ ID NO: 2651656 - RNA, 18 nt, Human
ccaagccuccacagcgag

SEQ ID NO: 2651657 - RNA, 19 nt, Human
ccaagccuccacagcgagg

SEQ ID NO: 2651658 - RNA, 17 nt, Human
ccaagcuauucaauucu

SEQ ID NO: 2651659 - RNA, 17 nt, Human
ccaagggaaaggggugc

SEQ ID NO: 2651660 - RNA, 21 nt, Human
ccaagggaaaggggugcuuuu

SEQ ID NO: 2651661 - RNA, 22 nt, Human
ccaagggaaaggggugcuuuua

SEQ ID NO: 2651662 - RNA, 16 nt, Human
ccaagggaaccugugu

SEQ ID NO: 2651663 - RNA, 17 nt, Human
ccaagggaaccuguguc

SEQ ID NO: 2651664 - RNA, 18 nt, Human
ccaagggaaccugugucc

SEQ ID NO: 2651665 - RNA, 19 nt, Human
ccaagggaaccuguguccg

SEQ ID NO: 2651666 - RNA, 18 nt, Human
ccaagggccgacuaagag

SEQ ID NO: 2651667 - RNA, 13 nt, Human
ccaagggcccaaa

SEQ ID NO: 2651668 - RNA, 13 nt, Human
ccaaggugggagg

SEQ ID NO: 2651669 - RNA, 18 nt, Human
ccaaggugggaggauugc

SEQ ID NO: 2651670 - RNA, 16 nt, Human
ccaaggucuucuuaau

SEQ ID NO: 2651671 - RNA, 19 nt, Human
ccaagguuuuauaaggcug

SEQ ID NO: 2651672 - RNA, 20 nt, Human
ccaagguuuuauaaggcuga

SEQ ID NO: 2651673 - RNA, 21 nt, Human
ccaagguuuuauaaggcugau

SEQ ID NO: 2651674 - RNA, 20 nt, Human
ccaaguaacugggauuacag

SEQ ID NO: 2651675 - RNA, 21 nt, Human
ccaaguauagccuauggcaga

SEQ ID NO: 2651676 - RNA, 20 nt, Human
ccaagucacacgcuuuugaa

SEQ ID NO: 2651677 - RNA, 20 nt, Human
ccaagucaagugaaaaagga

SEQ ID NO: 2651678 - RNA, 22 nt, Human
ccaauaauaaaugcccucuucu

SEQ ID NO: 2651679 - RNA, 23 nt, Human
ccaauaauaaaugcccucuucuc

SEQ ID NO: 2651680 - RNA, 19 nt, Human
cauuguucuuauucuggca

SEQ ID NO: 2651681 - RNA, 20 nt, Human
cauuguucuuauucuggcau

SEQ ID NO: 2651682 - RNA, 19 nt, Human
cauugucuccuauauauuu

SEQ ID NO: 2651683 - RNA, 21 nt, Human
cauugucuccuauauauuucu

SEQ ID NO: 2651684 - RNA, 22 nt, Human
cauugucguauaggcauguaaa

SEQ ID NO: 2651685 - RNA, 21 nt, Human
cauuuagggaguauucuaaua

SEQ ID NO: 2651686 - RNA, 20 nt, Human
cauuuagggaguauucuaau

SEQ ID NO: 2651687 - RNA, 17 nt, Human
cauuuagggaguauucu

SEQ ID NO: 2651688 - RNA, 14 nt, Human
cauuuagcuggcca

SEQ ID NO: 2651689 - RNA, 21 nt, Human
cauuuagcuggccacauggcg

SEQ ID NO: 2651690 - RNA, 13 nt, Human
cauuuaauagacu

SEQ ID NO: 2651691 - RNA, 14 nt, Human
cauuucuauaaaua

SEQ ID NO: 2651692 - RNA, 13 nt, Human
cauuucuaauuaa

SEQ ID NO: 2651693 - RNA, 23 nt, Human
cauuucuaauuaaccuuacuaau

SEQ ID NO: 2651694 - RNA, 18 nt, Human
cauuuccucgcagccucu

SEQ ID NO: 2651695 - RNA, 12 nt, Human
cauuugcucuuc

SEQ ID NO: 2651696 - RNA, 19 nt, Human
cauuugcucuucagaugcc

SEQ ID NO: 2651697 - RNA, 20 nt, Human
cauuugcucuucagaugcca

SEQ ID NO: 2651698 - RNA, 22 nt, Human
cauuugcucuucagaugccacu

SEQ ID NO: 2651699 - RNA, 15 nt, Human
cauuugcuacuguug

SEQ ID NO: 2651700 - RNA, 18 nt, Human
cauuugcuacuguuguaa

SEQ ID NO: 2651701 - RNA, 22 nt, Human
cauuugcuacuguuguaagaau

SEQ ID NO: 2651702 - RNA, 17 nt, Human
cauuugccaauuuuccu

SEQ ID NO: 2651703 - RNA, 17 nt, Human
cauuuuucaauagcaca

SEQ ID NO: 2651704 - RNA, 14 nt, Human
cauuuuucaauaua

SEQ ID NO: 2651705 - RNA, 15 nt, Human
cauuuuucaauauau

SEQ ID NO: 2651706 - RNA, 21 nt, Human
cauuuuucaauauauugaacu

SEQ ID NO: 2651707 - RNA, 10 nt, Human
cauuuuucaa

SEQ ID NO: 2651708 - RNA, 21 nt, Human
cggcaguauugaagcucguga

SEQ ID NO: 2651709 - RNA, 15 nt, Human
cggcaggggccugga

SEQ ID NO: 2651710 - RNA, 17 nt, Human
cggcaggggccuggaga

SEQ ID NO: 2651711 - RNA, 18 nt, Human
cggcaggggccuggagau

SEQ ID NO: 2651712 - RNA, 19 nt, Human
cggcaggggccuggagauc

SEQ ID NO: 2651713 - RNA, 22 nt, Human
cggccccagcaccucagccugc

SEQ ID NO: 2651714 - RNA, 12 nt, Human
cggcccccugcc

SEQ ID NO: 2651715 - RNA, 15 nt, Human
cggccuuuggcuuca

SEQ ID NO: 2651716 - RNA, 16 nt, Human
cgggaggucgaggcag

SEQ ID NO: 2651717 - RNA, 17 nt, Human
cgggaggucgaggcagg

SEQ ID NO: 2651718 - RNA, 22 nt, Human
cgggaggcggagcuugcaguga

SEQ ID NO: 2651719 - RNA, 17 nt, Human
cggaacccaagcuuaga

SEQ ID NO: 2651720 - RNA, 19 nt, Human
cggaacccaagcuuagaac

SEQ ID NO: 2651721 - RNA, 15 nt, Human
cgcgucgccgccacc

SEQ ID NO: 2651722 - RNA, 19 nt, Human
cggaaacuaguguacauuu

SEQ ID NO: 2651723 - RNA, 21 nt, Human
cgcuagguagagucugagggc

SEQ ID NO: 2651724 - RNA, 20 nt, Human
cgcuagguagagucugaggg

SEQ ID NO: 2651725 - RNA, 13 nt, Human
cggaauuuaccug

SEQ ID NO: 2651726 - RNA, 19 nt, Human
cggaauuuaccugauuucu

SEQ ID NO: 2651727 - RNA, 14 nt, Human
cggcaggcucacug

SEQ ID NO: 2651728 - RNA, 17 nt, Human
cggcaggcucacugcca

SEQ ID NO: 2651729 - RNA, 18 nt, Human
cggcaggcucacugccag

SEQ ID NO: 2651730 - RNA, 19 nt, Human
cggcaggcucacugccagg

SEQ ID NO: 2651731 - RNA, 23 nt, Human
cggcaggcucacugccaggccag

SEQ ID NO: 2651732 - RNA, 20 nt, Human
cggcaggcucacugccaggc

SEQ ID NO: 2651733 - RNA, 22 nt, Human
cggcaggcucacugccaggcca

SEQ ID NO: 2651734 - RNA, 14 nt, Human
cggcaggggccugg

SEQ ID NO: 2651735 - RNA, 20 nt, Human
cggacccggaggccgaggcc

SEQ ID NO: 2651736 - RNA, 16 nt, Human
cggacccucuaaccuc

SEQ ID NO: 2651737 - RNA, 15 nt, Human
cggaccccagccauc

SEQ ID NO: 2651738 - RNA, 20 nt, Human
cgcagaacgaaccuuggccu

SEQ ID NO: 2651739 - RNA, 19 nt, Human
cgcagaacgaaccuuggcc

SEQ ID NO: 2651740 - RNA, 23 nt, Human
cgcagaacgaaccuuggccuggg

SEQ ID NO: 2651741 - RNA, 14 nt, Human
cgauuuaagguauu

SEQ ID NO: 2651742 - RNA, 16 nt, Human
cgagggcagcugcuau

SEQ ID NO: 2651743 - RNA, 13 nt, Human
cgaucucuccugg

SEQ ID NO: 2651744 - RNA, 15 nt, Human
cgaucucuccuggcc

SEQ ID NO: 2651745 - RNA, 16 nt, Human
cgaucucuccuggccu

SEQ ID NO: 2651746 - RNA, 17 nt, Human
cgaucucuccuggccua

SEQ ID NO: 2651747 - RNA, 20 nt, Human
cgaucuugguucacugcaac

SEQ ID NO: 2651748 - RNA, 13 nt, Human
cgagggcagcugc

SEQ ID NO: 2651749 - RNA, 21 nt, Human
ccuuuggaaagcucugaccac

SEQ ID NO: 2651750 - RNA, 14 nt, Human
ccuuuguaagugca

SEQ ID NO: 2651751 - RNA, 16 nt, Human
ccuuuguaagugcagg

SEQ ID NO: 2651752 - RNA, 15 nt, Human
ccuuucucucucuaa

SEQ ID NO: 2651753 - RNA, 15 nt, Human
ccuuguuacuucuga

SEQ ID NO: 2651754 - RNA, 15 nt, Human
ccuuggcucagacau

SEQ ID NO: 2651755 - RNA, 12 nt, Human
ccuuggcucaga

SEQ ID NO: 2651756 - RNA, 15 nt, Human
ccuuugcagcucaga

SEQ ID NO: 2651757 - RNA, 11 nt, Human
ccuuugcuguc

SEQ ID NO: 2651758 - RNA, 18 nt, Human
ccuuugcugucccauagu

SEQ ID NO: 2651759 - RNA, 12 nt, Human
cgcccugccacu

SEQ ID NO: 2651760 - RNA, 16 nt, Human
cgcgaccauguggcca

SEQ ID NO: 2651761 - RNA, 17 nt, Human
cgcgugccguggcacca

SEQ ID NO: 2651762 - RNA, 17 nt, Human
cgcccguccugccugug

SEQ ID NO: 2651763 - RNA, 20 nt, Human
cgcccucuccuuuguucccg

SEQ ID NO: 2651764 - RNA, 11 nt, Human
cgcccucuccu

SEQ ID NO: 2651765 - RNA, 19 nt, Human
cgcccccuccgcccugcca

SEQ ID NO: 2651766 - RNA, 20 nt, Human
cgcccccuccgcccugccac

SEQ ID NO: 2651767 - RNA, 18 nt, Human
cgcccccaguccccaccc

SEQ ID NO: 2651768 - RNA, 22 nt, Human
cgcccccaguccccaccccugc

SEQ ID NO: 2651769 - RNA, 17 nt, Human
cgcccccuccgcccugc

SEQ ID NO: 2651770 - RNA, 11 nt, Human
cgcccugccac

SEQ ID NO: 2651771 - RNA, 16 nt, Human
cgccccaucugcccca

SEQ ID NO: 2651772 - RNA, 17 nt, Human
cgcagacaccuuggaca

SEQ ID NO: 2651773 - RNA, 16 nt, Human
cguuuuccccaugaca

SEQ ID NO: 2651774 - RNA, 14 nt, Human
cguuuuccccauga

SEQ ID NO: 2651775 - RNA, 21 nt, Human
cguuccaccccaagagaacuc

SEQ ID NO: 2651776 - RNA, 21 nt, Human
cguuucuuuaaccuuguauaa

SEQ ID NO: 2651777 - RNA, 22 nt, Human
cguuucuuuaaccuuguauaaa

SEQ ID NO: 2651778 - RNA, 20 nt, Human
cguucuguacuguuacuggg

SEQ ID NO: 2651779 - RNA, 23 nt, Human
cguucuguacuguuacugggccc

SEQ ID NO: 2651780 - RNA, 22 nt, Human
cguuucagcgacuccguuggcc

SEQ ID NO: 2651781 - RNA, 18 nt, Human
cguuuauaaacagaaaug

SEQ ID NO: 2651782 - RNA, 14 nt, Human
cgugaagaagccug

SEQ ID NO: 2651783 - RNA, 21 nt, Human
cguggccucccaaagugcugg

SEQ ID NO: 2651784 - RNA, 20 nt, Human
cguggcucgacuauagaaaa

SEQ ID NO: 2651785 - RNA, 15 nt, Human
cgugccuguguccau

SEQ ID NO: 2651786 - RNA, 12 nt, Human
cgugccuguguc

SEQ ID NO: 2651787 - RNA, 14 nt, Human
cgugccugugucca

SEQ ID NO: 2651788 - RNA, 13 nt, Human
cguccaucucccu

SEQ ID NO: 2651789 - RNA, 15 nt, Human
cgucccaagauguug

SEQ ID NO: 2651790 - RNA, 22 nt, Human
cguccaggccgcgcccuuuccc

SEQ ID NO: 2651791 - RNA, 13 nt, Human
cguccagccugcc

SEQ ID NO: 2651792 - RNA, 16 nt, Human
cguccagcugcccuuc

SEQ ID NO: 2651793 - RNA, 17 nt, Human
cguccagcugcccuucc

SEQ ID NO: 2651794 - RNA, 21 nt, Human
cguccaggccgcgcccuuucc

SEQ ID NO: 2651795 - RNA, 15 nt, Human
cguauggcuuuauuu

SEQ ID NO: 2651796 - RNA, 15 nt, Human
cguaucuccggcucc

SEQ ID NO: 2651797 - RNA, 15 nt, Human
cguauaggcauguaa

SEQ ID NO: 2651798 - RNA, 16 nt, Human
cguauaggcauguaaa

SEQ ID NO: 2651799 - RNA, 22 nt, Human
cguaucuccggcucccagccuc

SEQ ID NO: 2651800 - RNA, 21 nt, Human
cguaucuccggcucccagccu

SEQ ID NO: 2651801 - RNA, 18 nt, Human
cguaucuccggcucccag

SEQ ID NO: 2651802 - RNA, 17 nt, Human
cgucaacgugcauuuua

SEQ ID NO: 2651803 - RNA, 12 nt, Human
cgucaccaccac

SEQ ID NO: 2651804 - RNA, 13 nt, Human
cgucaccaccacc

SEQ ID NO: 2651805 - RNA, 15 nt, Human
cgucaccaccacccc

SEQ ID NO: 2651806 - RNA, 21 nt, Human
cgucaccaccaccccuaccac

SEQ ID NO: 2651807 - RNA, 18 nt, Human
cggugcucggagaagagc

SEQ ID NO: 2651808 - RNA, 16 nt, Human
cggugcugugagggag

SEQ ID NO: 2651809 - RNA, 18 nt, Human
cggugcugugagggaggg

SEQ ID NO: 2651810 - RNA, 19 nt, Human
cggugcugugagggagggg

SEQ ID NO: 2651811 - RNA, 21 nt, Human
cggggcccagggcaagcuccg

SEQ ID NO: 2651812 - RNA, 20 nt, Human
cggggcccagggcaagcucc

SEQ ID NO: 2651813 - RNA, 14 nt, Human
cggggcccagggca

SEQ ID NO: 2651814 - RNA, 21 nt, Human
cguaggaugaaaagauucuuc

SEQ ID NO: 2651815 - RNA, 15 nt, Human
cgugccgccugcacu

SEQ ID NO: 2651816 - RNA, 16 nt, Human
cgugccgccugcacuc

SEQ ID NO: 2651817 - RNA, 15 nt, Human
cgugccguggcacca

SEQ ID NO: 2651818 - RNA, 11 nt, Human
cgucugugugc

SEQ ID NO: 2651819 - RNA, 16 nt, Human
cgugaaagcagaugag

SEQ ID NO: 2651820 - RNA, 17 nt, Human
cgugaaagugcauuuuu

SEQ ID NO: 2651821 - RNA, 19 nt, Human
cgugaaagugcauuuuugu

SEQ ID NO: 2651822 - RNA, 22 nt, Human
cgugaaagugcauuuuuguaaa

SEQ ID NO: 2651823 - RNA, 23 nt, Human
cgugaaagugcauuuuuguaaau

SEQ ID NO: 2651824 - RNA, 22 nt, Human
cgugaagauacuuuguauuguc

SEQ ID NO: 2651825 - RNA, 16 nt, Human
cgugaagauacuuugu

SEQ ID NO: 2651826 - RNA, 21 nt, Human
cgucggggaggcuccugccug

SEQ ID NO: 2651827 - RNA, 21 nt, Human
cgugaagauacuuuguauugu

SEQ ID NO: 2651828 - RNA, 19 nt, Human
cgugaagauacuuuguauu

SEQ ID NO: 2651829 - RNA, 18 nt, Human
cgugaagauacuuuguau

SEQ ID NO: 2651830 - RNA, 17 nt, Human
cgugaagauacuuugua

SEQ ID NO: 2651831 - RNA, 21 nt, Human
cguccuccucaccucaugccc

SEQ ID NO: 2651832 - RNA, 17 nt, Human
cguccuccucaccucau

SEQ ID NO: 2651833 - RNA, 17 nt, Human
cguccccccccaaccuu

SEQ ID NO: 2651834 - RNA, 22 nt, Human
cguccccccccaaccuuucccu

SEQ ID NO: 2651835 - RNA, 11 nt, Human
cgucccuggcg

SEQ ID NO: 2651836 - RNA, 14 nt, Human
cgucccuggcgcag

SEQ ID NO: 2651837 - RNA, 18 nt, Human
cgucugccggacccggag

SEQ ID NO: 2651838 - RNA, 23 nt, Human
cgucucuggagcggaauuuaccu

SEQ ID NO: 2651839 - RNA, 15 nt, Human
ccuggugcuuccaaa

SEQ ID NO: 2651840 - RNA, 13 nt, Human
ccuggugcugcug

SEQ ID NO: 2651841 - RNA, 12 nt, Human
ccuggugcugcu

SEQ ID NO: 2651842 - RNA, 20 nt, Human
ccuguaauccuagcacuuug

SEQ ID NO: 2651843 - RNA, 13 nt, Human
ccuguagucccag

SEQ ID NO: 2651844 - RNA, 22 nt, Human
ccuguaggguccaaccagaccu

SEQ ID NO: 2651845 - RNA, 23 nt, Human
ccuguaggguccaaccagaccug

SEQ ID NO: 2651846 - RNA, 18 nt, Human
ccuguauuuaaaaauaga

SEQ ID NO: 2651847 - RNA, 20 nt, Human
ccuguauuuaaaaauagaaa

SEQ ID NO: 2651848 - RNA, 23 nt, Human
ccuguauuuaaaaauagaaacau

SEQ ID NO: 2651849 - RNA, 23 nt, Human
ccuguagagugggagcugagugg

SEQ ID NO: 2651850 - RNA, 15 nt, Human
ccuguagcacuuacu

SEQ ID NO: 2651851 - RNA, 19 nt, Human
ccuguagagugggagcuga

SEQ ID NO: 2651852 - RNA, 21 nt, Human
ccuguagagugggagcugagu

SEQ ID NO: 2651853 - RNA, 20 nt, Human
ccugugauccacccaacccu

SEQ ID NO: 2651854 - RNA, 12 nt, Human
ccuguccccgca

SEQ ID NO: 2651855 - RNA, 14 nt, Human
ccuguccccgcagc

SEQ ID NO: 2651856 - RNA, 19 nt, Human
ccuggagauccuccugcag

SEQ ID NO: 2651857 - RNA, 14 nt, Human
ccuggacugcuacc

SEQ ID NO: 2651858 - RNA, 15 nt, Human
ccuggacugcuaccu

SEQ ID NO: 2651859 - RNA, 21 nt, Human
ccuggagauccuccugcagac

SEQ ID NO: 2651860 - RNA, 12 nt, Human
ccuggcacugga

SEQ ID NO: 2651861 - RNA, 20 nt, Human
ccuggcacuggaccccagca

SEQ ID NO: 2651862 - RNA, 16 nt, Human
ccuggcacuggacccc

SEQ ID NO: 2651863 - RNA, 15 nt, Human
ccuggcacuggaccc

SEQ ID NO: 2651864 - RNA, 19 nt, Human
ccuggaccuuuuguuuucu

SEQ ID NO: 2651865 - RNA, 20 nt, Human
ccuggaccuuuuguuuucug

SEQ ID NO: 2651866 - RNA, 14 nt, Human
ccuggacccugugg

SEQ ID NO: 2651867 - RNA, 13 nt, Human
ccuggacccugug

SEQ ID NO: 2651868 - RNA, 19 nt, Human
ccuggacaguaucccacau

SEQ ID NO: 2651869 - RNA, 23 nt, Human
ccuggacaguaucccacauccaa

SEQ ID NO: 2651870 - RNA, 20 nt, Human
ccugggcacgcacuggguug

SEQ ID NO: 2651871 - RNA, 23 nt, Human
ccuggcugagguuccucugccug

SEQ ID NO: 2651872 - RNA, 20 nt, Human
ccugggaggucaaggcugca

SEQ ID NO: 2651873 - RNA, 19 nt, Human
ccuggcugagguuccucug

SEQ ID NO: 2651874 - RNA, 20 nt, Human
ccuggcugagguuccucugc

SEQ ID NO: 2651875 - RNA, 21 nt, Human
ccuggcugagguuccucugcc

SEQ ID NO: 2651876 - RNA, 22 nt, Human
ccuggcugagguuccucugccu

SEQ ID NO: 2651877 - RNA, 16 nt, Human
ccuggcugagguuccu

SEQ ID NO: 2651878 - RNA, 23 nt, Human
ccuggcguccccucccucugucu

SEQ ID NO: 2651879 - RNA, 15 nt, Human
ccuggcgccuggcag

SEQ ID NO: 2651880 - RNA, 15 nt, Human
ccuggcgcagguggg

SEQ ID NO: 2651881 - RNA, 19 nt, Human
ccuggcgcaggugggcugg

SEQ ID NO: 2651882 - RNA, 22 nt, Human
ccuggcgcaggugggcuggacu

SEQ ID NO: 2651883 - RNA, 23 nt, Human
ccuggcgcaggugggcuggacuu

SEQ ID NO: 2651884 - RNA, 19 nt, Human
ccuggccuuguccucagcc

SEQ ID NO: 2651885 - RNA, 21 nt, Human
ccuggccuuguccucagccag

SEQ ID NO: 2651886 - RNA, 22 nt, Human
ccuggccuuguccucagccagu

SEQ ID NO: 2651887 - RNA, 16 nt, Human
ccuggcccccaaccuc

SEQ ID NO: 2651888 - RNA, 19 nt, Human
ccuggcccccaaccucagg

SEQ ID NO: 2651889 - RNA, 20 nt, Human
ccuggcccccaaccucaggg

SEQ ID NO: 2651890 - RNA, 22 nt, Human
ccuggcccccaaccucagggcu

SEQ ID NO: 2651891 - RNA, 23 nt, Human
ccuggcccccaaccucagggcuc

SEQ ID NO: 2651892 - RNA, 14 nt, Human
ccuggccaggagca

SEQ ID NO: 2651893 - RNA, 16 nt, Human
ccuggccaggagcagg

SEQ ID NO: 2651894 - RNA, 13 nt, Human
ccuggccaggagc

SEQ ID NO: 2651895 - RNA, 22 nt, Human
ccugcuuccaggaaacuccaca

SEQ ID NO: 2651896 - RNA, 20 nt, Human
ccugcuuugaauaaaugugu

SEQ ID NO: 2651897 - RNA, 16 nt, Human
ccugcuuuuuguguuu

SEQ ID NO: 2651898 - RNA, 14 nt, Human
ccugaaccaugugg

SEQ ID NO: 2651899 - RNA, 15 nt, Human
ccugauuucuucagg

SEQ ID NO: 2651900 - RNA, 20 nt, Human
ccugcguccuccucaccuca

SEQ ID NO: 2651901 - RNA, 22 nt, Human
ccugcguccuccucaccucaug

SEQ ID NO: 2651902 - RNA, 22 nt, Human
ccugcuccagcuguucagcugg

SEQ ID NO: 2651903 - RNA, 14 nt, Human
ccugcuccagcugu

SEQ ID NO: 2651904 - RNA, 13 nt, Human
ccugcuccagcug

SEQ ID NO: 2651905 - RNA, 12 nt, Human
ccugcuccagcu

SEQ ID NO: 2651906 - RNA, 23 nt, Human
ccuugaguugauucagcucugca

SEQ ID NO: 2651907 - RNA, 22 nt, Human
ccuugaguugauucagcucugc

SEQ ID NO: 2651908 - RNA, 11 nt, Human
ccuuuggcuuc

SEQ ID NO: 2651909 - RNA, 21 nt, Human
ccuuacuuuacugccugaaua

SEQ ID NO: 2651910 - RNA, 22 nt, Human
ccuuacuuuacugccugaauaa

SEQ ID NO: 2651911 - RNA, 23 nt, Human
ccuuacuuuacugccugaauaaa

SEQ ID NO: 2651912 - RNA, 20 nt, Human
ccuuaccucggugccuuccu

SEQ ID NO: 2651913 - RNA, 15 nt, Human
ccuguggccccaccc

SEQ ID NO: 2651914 - RNA, 16 nt, Human
ccuguggccccacccu

SEQ ID NO: 2651915 - RNA, 17 nt, Human
ccuguggccccacccug

SEQ ID NO: 2651916 - RNA, 18 nt, Human
ccuguggccccacccugg

SEQ ID NO: 2651917 - RNA, 20 nt, Human
ccuguggccccacccugggc

SEQ ID NO: 2651918 - RNA, 22 nt, Human
ccuguggccccacccugggccc

SEQ ID NO: 2651919 - RNA, 15 nt, Human
ccuguggcauaaauu

SEQ ID NO: 2651920 - RNA, 18 nt, Human
ccuguggcauaaauugca

SEQ ID NO: 2651921 - RNA, 18 nt, Human
ccuuagagguccucugga

SEQ ID NO: 2651922 - RNA, 19 nt, Human
ccuuagagguccucuggag

SEQ ID NO: 2651923 - RNA, 17 nt, Human
ccuuagagguccucugg

SEQ ID NO: 2651924 - RNA, 20 nt, Human
ccuuagagguccucuggagc

SEQ ID NO: 2651925 - RNA, 20 nt, Human
ccuucaaaacuauagcuugc

SEQ ID NO: 2651926 - RNA, 12 nt, Human
ccuuccauucca

SEQ ID NO: 2651927 - RNA, 13 nt, Human
ccuuccauuccac

SEQ ID NO: 2651928 - RNA, 21 nt, Human
ccuuccucuugucugauuucu

SEQ ID NO: 2651929 - RNA, 15 nt, Human
ccuuccugcugcgca

SEQ ID NO: 2651930 - RNA, 12 nt, Human
ccuucagcucca

SEQ ID NO: 2651931 - RNA, 23 nt, Human
ccuccucccacccggcugcagag

SEQ ID NO: 2651932 - RNA, 19 nt, Human
ccuccugcagaccacgccc

SEQ ID NO: 2651933 - RNA, 22 nt, Human
ccucaggugagaagcagaggaa

SEQ ID NO: 2651934 - RNA, 16 nt, Human
ccucaggugagaagca

SEQ ID NO: 2651935 - RNA, 14 nt, Human
ccucagggcuccca

SEQ ID NO: 2651936 - RNA, 15 nt, Human
ccucagggcucccag

SEQ ID NO: 2651937 - RNA, 16 nt, Human
ccucagggcucccagg

SEQ ID NO: 2651938 - RNA, 17 nt, Human
ccucagggcucccaggg

SEQ ID NO: 2651939 - RNA, 18 nt, Human
ccucagggcucccagggg

SEQ ID NO: 2651940 - RNA, 22 nt, Human
ccucugcuuucuccuuuaauug

SEQ ID NO: 2651941 - RNA, 15 nt, Human
ccucuggacggcagg

SEQ ID NO: 2651942 - RNA, 16 nt, Human
ccucuggacggcaggc

SEQ ID NO: 2651943 - RNA, 21 nt, Human
ccucuggacggcaggcucacu

SEQ ID NO: 2651944 - RNA, 22 nt, Human
ccucuggacggcaggcucacug

SEQ ID NO: 2651945 - RNA, 23 nt, Human
ccucuggacggcaggcucacugc

SEQ ID NO: 2651946 - RNA, 17 nt, Human
ccucuggagcccuaacc

SEQ ID NO: 2651947 - RNA, 16 nt, Human
ccucuggucgcuccug

SEQ ID NO: 2651948 - RNA, 19 nt, Human
ccucugcacaagcugcacc

SEQ ID NO: 2651949 - RNA, 17 nt, Human
ccucugcacaagcugca

SEQ ID NO: 2651950 - RNA, 20 nt, Human
ccucugcacaagcugcaccc

SEQ ID NO: 2651951 - RNA, 16 nt, Human
ccucugcacccagaac

SEQ ID NO: 2651952 - RNA, 17 nt, Human
ccucugcacccagaaca

SEQ ID NO: 2651953 - RNA, 15 nt, Human
ccucugcacaagcug

SEQ ID NO: 2651954 - RNA, 11 nt, Human
ccucugcacaa

SEQ ID NO: 2651955 - RNA, 23 nt, Human
ccucuccccagguccagcucugg

SEQ ID NO: 2651956 - RNA, 21 nt, Human
ccucuccccagguccagcucu

SEQ ID NO: 2651957 - RNA, 23 nt, Human
ccucugaaaaccaauguucucuc

SEQ ID NO: 2651958 - RNA, 18 nt, Human
ccucugaaaaguguguau

SEQ ID NO: 2651959 - RNA, 23 nt, Human
ccucucaggccggcagccccagc

SEQ ID NO: 2651960 - RNA, 12 nt, Human
ccuccuucagac

SEQ ID NO: 2651961 - RNA, 15 nt, Human
ccugaucugcccauc

SEQ ID NO: 2651962 - RNA, 16 nt, Human
ccugaugagauuuuua

SEQ ID NO: 2651963 - RNA, 17 nt, Human
ccugaugagauuuuuaa

SEQ ID NO: 2651964 - RNA, 21 nt, Human
ccugaaccgcacagcucagga

SEQ ID NO: 2651965 - RNA, 22 nt, Human
ccugaaccgcacagcucaggag

SEQ ID NO: 2651966 - RNA, 16 nt, Human
ccugaaccgcacagcu

SEQ ID NO: 2651967 - RNA, 18 nt, Human
ccugaaccgcacagcuca

SEQ ID NO: 2651968 - RNA, 20 nt, Human
ccugaaccgcacagcucagg

SEQ ID NO: 2651969 - RNA, 15 nt, Human
ccugaaccgcacagc

SEQ ID NO: 2651970 - RNA, 14 nt, Human
ccucuuagaaaaac

SEQ ID NO: 2651971 - RNA, 15 nt, Human
ccucugugcugugug

SEQ ID NO: 2651972 - RNA, 18 nt, Human
ccucuguguauuugcuuu

SEQ ID NO: 2651973 - RNA, 21 nt, Human
ccucugugccuucuuuugauu

SEQ ID NO: 2651974 - RNA, 13 nt, Human
ccucugugcugug

SEQ ID NO: 2651975 - RNA, 16 nt, Human
ccucugugcugugugu

SEQ ID NO: 2651976 - RNA, 14 nt, Human
ccucugugccuucu

SEQ ID NO: 2651977 - RNA, 20 nt, Human
ccucugucuucagcacccuc

SEQ ID NO: 2651978 - RNA, 17 nt, Human
ccucuggucgcuccugc

SEQ ID NO: 2651979 - RNA, 19 nt, Human
ccucuggucgcuccugccc

SEQ ID NO: 2651980 - RNA, 20 nt, Human
ccucuggucgcuccugccca

SEQ ID NO: 2651981 - RNA, 21 nt, Human
ccucuggucgcuccugcccac

SEQ ID NO: 2651982 - RNA, 14 nt, Human
ccucugucaggccu

SEQ ID NO: 2651983 - RNA, 18 nt, Human
ccucugucaggccuucag

SEQ ID NO: 2651984 - RNA, 13 nt, Human
cccuuuuccccua

SEQ ID NO: 2651985 - RNA, 12 nt, Human
cccuuuuccccu

SEQ ID NO: 2651986 - RNA, 17 nt, Human
ccgagaaggaagccucc

SEQ ID NO: 2651987 - RNA, 17 nt, Human
ccgacugcuuuggaccu

SEQ ID NO: 2651988 - RNA, 13 nt, Human
ccgagaagguuua

SEQ ID NO: 2651989 - RNA, 23 nt, Human
ccgccccuggccgcgcuccgggc

SEQ ID NO: 2651990 - RNA, 11 nt, Human
ccgcccugcca

SEQ ID NO: 2651991 - RNA, 12 nt, Human
ccgcccugccac

SEQ ID NO: 2651992 - RNA, 20 nt, Human
ccgaggcggguggaucacga

SEQ ID NO: 2651993 - RNA, 14 nt, Human
ccgaggggccuuug

SEQ ID NO: 2651994 - RNA, 17 nt, Human
ccgauagagggacggcc

SEQ ID NO: 2651995 - RNA, 18 nt, Human
ccgauagagggacggcca

SEQ ID NO: 2651996 - RNA, 22 nt, Human
ccgaguuaaggugggcccggcc

SEQ ID NO: 2651997 - RNA, 19 nt, Human
cccuuaccucggugccuuc

SEQ ID NO: 2651998 - RNA, 12 nt, Human
cccuugcagccg

SEQ ID NO: 2651999 - RNA, 16 nt, Human
cccuuggcuucuguga

SEQ ID NO: 2652000 - RNA, 18 nt, Human
cccuuggcuucugugaug

SEQ ID NO: 2652001 - RNA, 12 nt, Human
cccuugggccac

SEQ ID NO: 2652002 - RNA, 19 nt, Human
cccuugggccaccccuccu

SEQ ID NO: 2652003 - RNA, 14 nt, Human
ccccucccccagcc

SEQ ID NO: 2652004 - RNA, 10 nt, Human
cccuuguggg

SEQ ID NO: 2652005 - RNA, 12 nt, Human
cccuuugcuguc

SEQ ID NO: 2652006 - RNA, 13 nt, Human
cccuuugcugucc

SEQ ID NO: 2652007 - RNA, 20 nt, Human
cccuuugguuuuuuucuucu

SEQ ID NO: 2652008 - RNA, 15 nt, Human
cccuuuuaaaguuga

SEQ ID NO: 2652009 - RNA, 16 nt, Human
cccuuuuaaaguugau

SEQ ID NO: 2652010 - RNA, 20 nt, Human
cccuuuggggguugaauagg

SEQ ID NO: 2652011 - RNA, 17 nt, Human
ccccuaccaauauuagg

SEQ ID NO: 2652012 - RNA, 14 nt, Human
ccccguuucuggug

SEQ ID NO: 2652013 - RNA, 13 nt, Human
ccccguggggcag

SEQ ID NO: 2652014 - RNA, 21 nt, Human
ccccuaaaagcacuccugcuu

SEQ ID NO: 2652015 - RNA, 13 nt, Human
cccuguguuaauu

SEQ ID NO: 2652016 - RNA, 11 nt, Human
cccugugugca

SEQ ID NO: 2652017 - RNA, 13 nt, Human
cccugugugcagg

SEQ ID NO: 2652018 - RNA, 16 nt, Human
ccccacugccagcagc

SEQ ID NO: 2652019 - RNA, 17 nt, Human
ccccacugccagcagca

SEQ ID NO: 2652020 - RNA, 19 nt, Human
ccccacugccagcagcagc

SEQ ID NO: 2652021 - RNA, 22 nt, Human
ccccacugccagcagcagcagg

SEQ ID NO: 2652022 - RNA, 15 nt, Human
ccccacugccagcag

SEQ ID NO: 2652023 - RNA, 23 nt, Human
ccccaccccugcccccagccccg

SEQ ID NO: 2652024 - RNA, 22 nt, Human
ccccaccccggggacccuguga

SEQ ID NO: 2652025 - RNA, 13 nt, Human
ccccaccccugcc

SEQ ID NO: 2652026 - RNA, 14 nt, Human
ccccaccccugccc

SEQ ID NO: 2652027 - RNA, 17 nt, Human
ccccaccccugccccca

SEQ ID NO: 2652028 - RNA, 13 nt, Human
ccccagcccugcu

SEQ ID NO: 2652029 - RNA, 14 nt, Human
ccccagcccugcug

SEQ ID NO: 2652030 - RNA, 16 nt, Human
ccccagcccugcuggg

SEQ ID NO: 2652031 - RNA, 17 nt, Human
ccccagcccugcugggg

SEQ ID NO: 2652032 - RNA, 20 nt, Human
ccccagcccugcuggggauc

SEQ ID NO: 2652033 - RNA, 14 nt, Human
cccccaaccucagg

SEQ ID NO: 2652034 - RNA, 15 nt, Human
cccccaaccucaggg

SEQ ID NO: 2652035 - RNA, 15 nt, Human
cccccaaccuuuccc

SEQ ID NO: 2652036 - RNA, 20 nt, Human
cccccagguuccgaagaaga

SEQ ID NO: 2652037 - RNA, 15 nt, Human
cccccaguccccacc

SEQ ID NO: 2652038 - RNA, 20 nt, Human
cccccaguccccaccccugc

SEQ ID NO: 2652039 - RNA, 22 nt, Human
cccccaguccccaccccugccc

SEQ ID NO: 2652040 - RNA, 19 nt, Human
cccccagccaugccagcug

SEQ ID NO: 2652041 - RNA, 20 nt, Human
cccccagccaugccagcugg

SEQ ID NO: 2652042 - RNA, 21 nt, Human
cccccagccaugccagcuggc

SEQ ID NO: 2652043 - RNA, 23 nt, Human
cccccagccaugccagcuggccu

SEQ ID NO: 2652044 - RNA, 13 nt, Human
cccccagcccagg

SEQ ID NO: 2652045 - RNA, 14 nt, Human
cccccagcccaggg

SEQ ID NO: 2652046 - RNA, 21 nt, Human
cccccagcccagggcuccugc

SEQ ID NO: 2652047 - RNA, 13 nt, Human
cccccagccccgg

SEQ ID NO: 2652048 - RNA, 23 nt, Human
cccccagccccgacuccagccag

SEQ ID NO: 2652049 - RNA, 24 nt, Human
cccccagccccgacuccagccagc

SEQ ID NO: 2652050 - RNA, 12 nt, Human
cccccugcccug

SEQ ID NO: 2652051 - RNA, 13 nt, Human
cccccugcccugc

SEQ ID NO: 2652052 - RNA, 14 nt, Human
cccccugcccugca

SEQ ID NO: 2652053 - RNA, 22 nt, Human
cccccuggccucugugccuucu

SEQ ID NO: 2652054 - RNA, 19 nt, Human
cccccuggccucugugccu

SEQ ID NO: 2652055 - RNA, 15 nt, Human
cccccuggccucugu

SEQ ID NO: 2652056 - RNA, 13 nt, Human
cccccugcuucag

SEQ ID NO: 2652057 - RNA, 18 nt, Human
cccccugcuucagucccu

SEQ ID NO: 2652058 - RNA, 18 nt, Human
ccucaauagaucuccagc

SEQ ID NO: 2652059 - RNA, 20 nt, Human
ccuagaggcccuuugcuguc

SEQ ID NO: 2652060 - RNA, 17 nt, Human
ccuagaggcccuuugcu

SEQ ID NO: 2652061 - RNA, 23 nt, Human
ccuauggcagaaaaaaugucugu

SEQ ID NO: 2652062 - RNA, 14 nt, Human
ccucacuaauuuuu

SEQ ID NO: 2652063 - RNA, 16 nt, Human
ccucacccccucccac

SEQ ID NO: 2652064 - RNA, 17 nt, Human
ccucacccccucccacc

SEQ ID NO: 2652065 - RNA, 20 nt, Human
ccucacccccucccaccccc

SEQ ID NO: 2652066 - RNA, 21 nt, Human
ccucacccccucccaccccca

SEQ ID NO: 2652067 - RNA, 17 nt, Human
ccguuuuccccaugaca

SEQ ID NO: 2652068 - RNA, 15 nt, Human
ccguuuuccccauga

SEQ ID NO: 2652069 - RNA, 12 nt, Human
ccguuuucccca

SEQ ID NO: 2652070 - RNA, 17 nt, Human
ccguggggccgccgccu

SEQ ID NO: 2652071 - RNA, 13 nt, Human
ccguggggcaggg

SEQ ID NO: 2652072 - RNA, 14 nt, Human
ccguggggcaggga

SEQ ID NO: 2652073 - RNA, 15 nt, Human
ccguggggcagggag

SEQ ID NO: 2652074 - RNA, 22 nt, Human
ccguggggcagggagcugggcc

SEQ ID NO: 2652075 - RNA, 23 nt, Human
ccguggggcagggagcugggccc

SEQ ID NO: 2652076 - RNA, 13 nt, Human
ccgggccccacag

SEQ ID NO: 2652077 - RNA, 14 nt, Human
ccgggccccugggc

SEQ ID NO: 2652078 - RNA, 16 nt, Human
ccgggccccugggcuu

SEQ ID NO: 2652079 - RNA, 19 nt, Human
ccgggccccugggcuuggc

SEQ ID NO: 2652080 - RNA, 21 nt, Human
ccgggccccugggcuuggccu

SEQ ID NO: 2652081 - RNA, 23 nt, Human
ccgggccccugggcuuggccugc

SEQ ID NO: 2652082 - RNA, 21 nt, Human
ccgugccgccugcacuccuca

SEQ ID NO: 2652083 - RNA, 14 nt, Human
ccgugccgccugca

SEQ ID NO: 2652084 - RNA, 17 nt, Human
ccgugccgccugcacuc

SEQ ID NO: 2652085 - RNA, 14 nt, Human
ccgggcgcgguggc

SEQ ID NO: 2652086 - RNA, 21 nt, Human
ccgggcgcgguggcgggcacc

SEQ ID NO: 2652087 - RNA, 23 nt, Human
ccuaaagagaguauuuuuauaca

SEQ ID NO: 2652088 - RNA, 13 nt, Human
ccuaaagagagua

SEQ ID NO: 2652089 - RNA, 13 nt, Human
ccuaaaccucagu

SEQ ID NO: 2652090 - RNA, 20 nt, Human
ccuaaagaaaaauaucuugg

SEQ ID NO: 2652091 - RNA, 22 nt, Human
ccuaaagaaaaauaucuuggcc

SEQ ID NO: 2652092 - RNA, 14 nt, Human
ccuaauuucuccuc

SEQ ID NO: 2652093 - RNA, 15 nt, Human
ccuaauuucuccucc

SEQ ID NO: 2652094 - RNA, 16 nt, Human
ccuaauuucuccuccc

SEQ ID NO: 2652095 - RNA, 17 nt, Human
ccuaauuucuccucccu

SEQ ID NO: 2652096 - RNA, 18 nt, Human
ccuaauuucuccucccuu

SEQ ID NO: 2652097 - RNA, 20 nt, Human
ccuaccccgcagacaccuug

SEQ ID NO: 2652098 - RNA, 12 nt, Human
ccuaccccauag

SEQ ID NO: 2652099 - RNA, 21 nt, Human
ccuaccccgcagacaccuugg

SEQ ID NO: 2652100 - RNA, 15 nt, Human
ccggcugcagaggcc

SEQ ID NO: 2652101 - RNA, 17 nt, Human
ccggacccucuaaccuc

SEQ ID NO: 2652102 - RNA, 13 nt, Human
ccgcccugccacu

SEQ ID NO: 2652103 - RNA, 14 nt, Human
ccgcccugccacuc

SEQ ID NO: 2652104 - RNA, 15 nt, Human
ccgcccugccacuca

SEQ ID NO: 2652105 - RNA, 15 nt, Human
ccgcuucugccugca

SEQ ID NO: 2652106 - RNA, 20 nt, Human
ccguggggccgccgccucuu

SEQ ID NO: 2652107 - RNA, 17 nt, Human
cuggugcuuccaaauau

SEQ ID NO: 2652108 - RNA, 14 nt, Human
cuggugcugcugcu

SEQ ID NO: 2652109 - RNA, 12 nt, Human
cuggugcugcug

SEQ ID NO: 2652110 - RNA, 23 nt, Human
cuggucgcuccugcccacggagu

SEQ ID NO: 2652111 - RNA, 16 nt, Human
cuggucgcuccugccc

SEQ ID NO: 2652112 - RNA, 18 nt, Human
cuggucgcuccugcccac

SEQ ID NO: 2652113 - RNA, 21 nt, Human
cugguggccccguuucuggug

SEQ ID NO: 2652114 - RNA, 22 nt, Human
cugguggccccguuucuggugg

SEQ ID NO: 2652115 - RNA, 20 nt, Human
cugguggccccguuucuggu

SEQ ID NO: 2652116 - RNA, 18 nt, Human
cugguggucuguuggcag

SEQ ID NO: 2652117 - RNA, 20 nt, Human
cugguggucuguuggcaggc

SEQ ID NO: 2652118 - RNA, 22 nt, Human
cugguggucuguuggcaggcug

SEQ ID NO: 2652119 - RNA, 23 nt, Human
cugguggucuguuggcaggcugg

SEQ ID NO: 2652120 - RNA, 13 nt, Human
cugguucucaaug

SEQ ID NO: 2652121 - RNA, 18 nt, Human
cugguucucaaugaaaaa

SEQ ID NO: 2652122 - RNA, 15 nt, Human
cugguucucaaugaa

SEQ ID NO: 2652123 - RNA, 16 nt, Human
cugguucucaaugaaa

SEQ ID NO: 2652124 - RNA, 17 nt, Human
cugguucucaaugaaaa

SEQ ID NO: 2652125 - RNA, 16 nt, Human
cuggguugcgggacag

SEQ ID NO: 2652126 - RNA, 20 nt, Human
cuggguugcgggacagagua

SEQ ID NO: 2652127 - RNA, 14 nt, Human
cugggucacacacg

SEQ ID NO: 2652128 - RNA, 19 nt, Human
cuggguaggaaagaggaag

SEQ ID NO: 2652129 - RNA, 13 nt, Human
cuggucgcuccug

SEQ ID NO: 2652130 - RNA, 14 nt, Human
cuggucgcuccugc

SEQ ID NO: 2652131 - RNA, 15 nt, Human
cuggucgcuccugcc

SEQ ID NO: 2652132 - RNA, 18 nt, Human
cugggcucccgggcccca

SEQ ID NO: 2652133 - RNA, 14 nt, Human
cugggcggcugugc

SEQ ID NO: 2652134 - RNA, 17 nt, Human
cugggcggcugugcuuc

SEQ ID NO: 2652135 - RNA, 21 nt, Human
cugggcucccgggccccacag

SEQ ID NO: 2652136 - RNA, 14 nt, Human
cuggguaggaaaga

SEQ ID NO: 2652137 - RNA, 17 nt, Human
cuggguaggaaagagga

SEQ ID NO: 2652138 - RNA, 15 nt, Human
cuggguaggaaagag

SEQ ID NO: 2652139 - RNA, 21 nt, Human
cuggcuucaccaucaauccug

SEQ ID NO: 2652140 - RNA, 23 nt, Human
cugggagcuccacucugcuucuc

SEQ ID NO: 2652141 - RNA, 20 nt, Human
cugggaggcccugagacagg

SEQ ID NO: 2652142 - RNA, 18 nt, Human
cugggaggucaaggcugc

SEQ ID NO: 2652143 - RNA, 20 nt, Human
cugggcaaugugauaaaacc

SEQ ID NO: 2652144 - RNA, 18 nt, Human
cuggcuuacacuggcaau

SEQ ID NO: 2652145 - RNA, 12 nt, Human
cuggcuguuuga

SEQ ID NO: 2652146 - RNA, 14 nt, Human
cuggcuuacacugg

SEQ ID NO: 2652147 - RNA, 21 nt, Human
cuggcuggguggcaccagcag

SEQ ID NO: 2652148 - RNA, 22 nt, Human
cuggcuggguggcaccagcagc

SEQ ID NO: 2652149 - RNA, 12 nt, Human
cuggcugcugcc

SEQ ID NO: 2652150 - RNA, 13 nt, Human
cuggcugcugccc

SEQ ID NO: 2652151 - RNA, 14 nt, Human
cuggcugcugcccc

SEQ ID NO: 2652152 - RNA, 20 nt, Human
cuggccucugugccuucuuu

SEQ ID NO: 2652153 - RNA, 16 nt, Human
cuggccucugugccuu

SEQ ID NO: 2652154 - RNA, 15 nt, Human
cuggccucugugccu

SEQ ID NO: 2652155 - RNA, 14 nt, Human
cuggccucugugcc

SEQ ID NO: 2652156 - RNA, 22 nt, Human
cuggaggauccccuccaagccu

SEQ ID NO: 2652157 - RNA, 22 nt, Human
cuggcaaugguaguuucugugg

SEQ ID NO: 2652158 - RNA, 21 nt, Human
cuggcaaugguaguuucugug

SEQ ID NO: 2652159 - RNA, 16 nt, Human
cuggcaaugguaguuu

SEQ ID NO: 2652160 - RNA, 22 nt, Human
cuggcaaacaugaaaaaucggc

SEQ ID NO: 2652161 - RNA, 16 nt, Human
cuggcaaacaugaaaa

SEQ ID NO: 2652162 - RNA, 20 nt, Human
cuggcacugacugggcauag

SEQ ID NO: 2652163 - RNA, 19 nt, Human
cuggcacucuuguucccac

SEQ ID NO: 2652164 - RNA, 22 nt, Human
cuggccauuugccaauuuuccu

SEQ ID NO: 2652165 - RNA, 19 nt, Human
cuggccuauccgcugccag

SEQ ID NO: 2652166 - RNA, 22 nt, Human
cuggccuauccgcugccagccu

SEQ ID NO: 2652167 - RNA, 13 nt, Human
cuggccucugugc

SEQ ID NO: 2652168 - RNA, 11 nt, Human
cuggccucugu

SEQ ID NO: 2652169 - RNA, 14 nt, Human
cuggccucugcuuu

SEQ ID NO: 2652170 - RNA, 15 nt, Human
cuggccucugcuuuc

SEQ ID NO: 2652171 - RNA, 16 nt, Human
cuggccuccccugcca

SEQ ID NO: 2652172 - RNA, 17 nt, Human
cuggccuccccugccac

SEQ ID NO: 2652173 - RNA, 18 nt, Human
cuggccuccccugccacc

SEQ ID NO: 2652174 - RNA, 21 nt, Human
cuggccuccccugccaccagg

SEQ ID NO: 2652175 - RNA, 13 nt, Human
cuggcccacugca

SEQ ID NO: 2652176 - RNA, 12 nt, Human
cuggcccacugc

SEQ ID NO: 2652177 - RNA, 14 nt, Human
cugcuuuucugccc

SEQ ID NO: 2652178 - RNA, 15 nt, Human
cugcuuuucugcccu

SEQ ID NO: 2652179 - RNA, 16 nt, Human
cugcuuuucugcccug

SEQ ID NO: 2652180 - RNA, 17 nt, Human
cugcuuuucugcccugg

SEQ ID NO: 2652181 - RNA, 18 nt, Human
cugcuuuucugcccuggc

SEQ ID NO: 2652182 - RNA, 17 nt, Human
cuggaauugccagcuga

SEQ ID NO: 2652183 - RNA, 18 nt, Human
cuggaauugccagcugac

SEQ ID NO: 2652184 - RNA, 15 nt, Human
cuggaauuguggcua

SEQ ID NO: 2652185 - RNA, 22 nt, Human
cuggaauuguggcuauccugau

SEQ ID NO: 2652186 - RNA, 23 nt, Human
cuggaauuguggcuauccugauu

SEQ ID NO: 2652187 - RNA, 23 nt, Human
cugcuuuuaacuuuauaaaucca

SEQ ID NO: 2652188 - RNA, 14 nt, Human
cugcuuucuccuuu

SEQ ID NO: 2652189 - RNA, 14 nt, Human
cuggagcucaucug

SEQ ID NO: 2652190 - RNA, 20 nt, Human
cuggagcucaucugcaaaag

SEQ ID NO: 2652191 - RNA, 21 nt, Human
cuggagcucaucugcaaaagg

SEQ ID NO: 2652192 - RNA, 18 nt, Human
cuggaggaacacuugaug

SEQ ID NO: 2652193 - RNA, 22 nt, Human
cuggacggcaggcucacugcca

SEQ ID NO: 2652194 - RNA, 16 nt, Human
cuggacaguaucccac

SEQ ID NO: 2652195 - RNA, 18 nt, Human
cuggacaguaucccacau

SEQ ID NO: 2652196 - RNA, 20 nt, Human
cuggacaguaucccacaucc

SEQ ID NO: 2652197 - RNA, 20 nt, Human
cuggagcacugggcucccgg

SEQ ID NO: 2652198 - RNA, 19 nt, Human
cuggagcacugggcucccg

SEQ ID NO: 2652199 - RNA, 17 nt, Human
cuggagcacugggcucc

SEQ ID NO: 2652200 - RNA, 16 nt, Human
cuggagcacugggcuc

SEQ ID NO: 2652201 - RNA, 23 nt, Human
cuggagcacugggcucccgggcc

SEQ ID NO: 2652202 - RNA, 21 nt, Human
cuggagcacugggcucccggg

SEQ ID NO: 2652203 - RNA, 15 nt, Human
cuggagacuuagggc

SEQ ID NO: 2652204 - RNA, 21 nt, Human
cuggagacuuagggcaccagg

SEQ ID NO: 2652205 - RNA, 17 nt, Human
cugccugcaauauuuga

SEQ ID NO: 2652206 - RNA, 19 nt, Human
cugccugcaauauuugaau

SEQ ID NO: 2652207 - RNA, 18 nt, Human
cugccugcaauauuugaa

SEQ ID NO: 2652208 - RNA, 20 nt, Human
cugccugcaauauuugaauu

SEQ ID NO: 2652209 - RNA, 20 nt, Human
cugccugacagagggaugga

SEQ ID NO: 2652210 - RNA, 13 nt, Human
cugccugaauaaa

SEQ ID NO: 2652211 - RNA, 18 nt, Human
cugccugaauaaagagcc

SEQ ID NO: 2652212 - RNA, 16 nt, Human
cugccuuaaaaccaaa

SEQ ID NO: 2652213 - RNA, 17 nt, Human
cugccuuaaaaccaaag

SEQ ID NO: 2652214 - RNA, 18 nt, Human
cugccuuaaaaccaaaga

SEQ ID NO: 2652215 - RNA, 19 nt, Human
cugccuuaaaaccaaagag

SEQ ID NO: 2652216 - RNA, 22 nt, Human
cugccuuaaaaccaaagagggc

SEQ ID NO: 2652217 - RNA, 14 nt, Human
cugccucuucucua

SEQ ID NO: 2652218 - RNA, 13 nt, Human
cugccucuucucu

SEQ ID NO: 2652219 - RNA, 17 nt, Human
cugcccuggcugcugcc

SEQ ID NO: 2652220 - RNA, 21 nt, Human
cugcccuggcugcugccccca

SEQ ID NO: 2652221 - RNA, 18 nt, Human
cugcccuggcugcugccc

SEQ ID NO: 2652222 - RNA, 20 nt, Human
cugcccuggcugcugccccc

SEQ ID NO: 2652223 - RNA, 15 nt, Human
cugcuccagcuguuc

SEQ ID NO: 2652224 - RNA, 13 nt, Human
cugcucccuggca

SEQ ID NO: 2652225 - RNA, 15 nt, Human
cugcucccuggcauu

SEQ ID NO: 2652226 - RNA, 19 nt, Human
cugcucccuguagggucca

SEQ ID NO: 2652227 - RNA, 13 nt, Human
cugcgcuugcuuu

SEQ ID NO: 2652228 - RNA, 16 nt, Human
cugccuuaagugagga

SEQ ID NO: 2652229 - RNA, 13 nt, Human
cugccuuaaguga

SEQ ID NO: 2652230 - RNA, 21 nt, Human
cugcggguggggcuuggggcu

SEQ ID NO: 2652231 - RNA, 13 nt, Human
cugcggguggggc

SEQ ID NO: 2652232 - RNA, 17 nt, Human
cugcgcuugcuuuucug

SEQ ID NO: 2652233 - RNA, 23 nt, Human
cugcuaaauaaaauuuguugcau

SEQ ID NO: 2652234 - RNA, 12 nt, Human
cugcuaaauaaa

SEQ ID NO: 2652235 - RNA, 15 nt, Human
cugcuaaauaaaauu

SEQ ID NO: 2652236 - RNA, 14 nt, Human
cugcuccagcuguu

SEQ ID NO: 2652237 - RNA, 18 nt, Human
cugcagggccauggcuca

SEQ ID NO: 2652238 - RNA, 19 nt, Human
cugcagggccauggcucag

SEQ ID NO: 2652239 - RNA, 20 nt, Human
cugcagggccauggcucagg

SEQ ID NO: 2652240 - RNA, 21 nt, Human
cugcagggccauggcucaggg

SEQ ID NO: 2652241 - RNA, 23 nt, Human
cugcagggccauggcucagggug

SEQ ID NO: 2652242 - RNA, 21 nt, Human
cugccacacucuccaucaccc

SEQ ID NO: 2652243 - RNA, 13 nt, Human
cugccaccaggcc

SEQ ID NO: 2652244 - RNA, 14 nt, Human
cugccaccaggcca

SEQ ID NO: 2652245 - RNA, 15 nt, Human
cugccaccaggccac

SEQ ID NO: 2652246 - RNA, 17 nt, Human
cugccaccaggccaccu

SEQ ID NO: 2652247 - RNA, 18 nt, Human
cugccaccaggccaccuc

SEQ ID NO: 2652248 - RNA, 23 nt, Human
cugccaccaggccaccuccccag

SEQ ID NO: 2652249 - RNA, 11 nt, Human
cugccagcagc

SEQ ID NO: 2652250 - RNA, 12 nt, Human
cugccagcagca

SEQ ID NO: 2652251 - RNA, 13 nt, Human
cugccagcagcag

SEQ ID NO: 2652252 - RNA, 15 nt, Human
cugccagcagcagca

SEQ ID NO: 2652253 - RNA, 17 nt, Human
cugccagcagcagcagg

SEQ ID NO: 2652254 - RNA, 19 nt, Human
cugccagcagcagcaggug

SEQ ID NO: 2652255 - RNA, 21 nt, Human
cugccagcagcagcaggugau

SEQ ID NO: 2652256 - RNA, 19 nt, Human
cugccaugccagcuuaucu

SEQ ID NO: 2652257 - RNA, 13 nt, Human
cugccaggcaggg

SEQ ID NO: 2652258 - RNA, 12 nt, Human
cugccaggcagg

SEQ ID NO: 2652259 - RNA, 17 nt, Human
cugccaugccagcuuau

SEQ ID NO: 2652260 - RNA, 15 nt, Human
cugccaggcaggggu

SEQ ID NO: 2652261 - RNA, 15 nt, Human
cugccaugccagcuu

SEQ ID NO: 2652262 - RNA, 11 nt, Human
cugcagggcca

SEQ ID NO: 2652263 - RNA, 13 nt, Human
cugccagccuuga

SEQ ID NO: 2652264 - RNA, 15 nt, Human
cugccagccuugagc

SEQ ID NO: 2652265 - RNA, 17 nt, Human
cugccagccuugagccc

SEQ ID NO: 2652266 - RNA, 20 nt, Human
cugccagccuugagcccugg

SEQ ID NO: 2652267 - RNA, 21 nt, Human
cugccagccuugagcccuggc

SEQ ID NO: 2652268 - RNA, 22 nt, Human
cugccagccuugagcccuggcu

SEQ ID NO: 2652269 - RNA, 17 nt, Human
cugcccugcacgucaug

SEQ ID NO: 2652270 - RNA, 20 nt, Human
cugcccugcacgucauggga

SEQ ID NO: 2652271 - RNA, 16 nt, Human
cugccauuucugagau

SEQ ID NO: 2652272 - RNA, 19 nt, Human
cugcaauauuugaauuuua

SEQ ID NO: 2652273 - RNA, 18 nt, Human
cugcaauauuugaauuuu

SEQ ID NO: 2652274 - RNA, 16 nt, Human
cugcaauauuugaauu

SEQ ID NO: 2652275 - RNA, 12 nt, Human
cugcaauauuug

SEQ ID NO: 2652276 - RNA, 22 nt, Human
cugcaaacaccaacauguuggg

SEQ ID NO: 2652277 - RNA, 15 nt, Human
cugcaaaaggccucu

SEQ ID NO: 2652278 - RNA, 19 nt, Human
cugcaaaaggccucuugua

SEQ ID NO: 2652279 - RNA, 21 nt, Human
cugcaaaaggccucuuguaaa

SEQ ID NO: 2652280 - RNA, 14 nt, Human
cugauucuggcuuu

SEQ ID NO: 2652281 - RNA, 15 nt, Human
cugauucuggcuuua

SEQ ID NO: 2652282 - RNA, 18 nt, Human
cugauucuggcuuuaagc

SEQ ID NO: 2652283 - RNA, 19 nt, Human
cugauucuggcuuuaagcc

SEQ ID NO: 2652284 - RNA, 22 nt, Human
cugauucuggcuuuaagccuuc

SEQ ID NO: 2652285 - RNA, 14 nt, Human
cugcaauucccugg

SEQ ID NO: 2652286 - RNA, 19 nt, Human
cugcaauucccuggauaga

SEQ ID NO: 2652287 - RNA, 18 nt, Human
cugcacccagaacagugg

SEQ ID NO: 2652288 - RNA, 18 nt, Human
cugcacccucaggcaggu

SEQ ID NO: 2652289 - RNA, 16 nt, Human
cugcacccucaggcag

SEQ ID NO: 2652290 - RNA, 17 nt, Human
cugcacccucaggcagg

SEQ ID NO: 2652291 - RNA, 16 nt, Human
cugcacaagcugcacc

SEQ ID NO: 2652292 - RNA, 15 nt, Human
cugcacaagcugcac

SEQ ID NO: 2652293 - RNA, 14 nt, Human
cugcacaagcugca

SEQ ID NO: 2652294 - RNA, 13 nt, Human
cugcacaagcugc

SEQ ID NO: 2652295 - RNA, 18 nt, Human
cugcacaagcugcacccu

SEQ ID NO: 2652296 - RNA, 22 nt, Human
cugauucuuguugcuguacaaa

SEQ ID NO: 2652297 - RNA, 14 nt, Human
cugcagagauuucu

SEQ ID NO: 2652298 - RNA, 23 nt, Human
cugcagagauuucucauugacuu

SEQ ID NO: 2652299 - RNA, 21 nt, Human
cugcagagcaguaagggaaca

SEQ ID NO: 2652300 - RNA, 15 nt, Human
cugcacuuacuugcu

SEQ ID NO: 2652301 - RNA, 16 nt, Human
cugcacuuacuugcuu

SEQ ID NO: 2652302 - RNA, 14 nt, Human
cugcagaugccacc

SEQ ID NO: 2652303 - RNA, 16 nt, Human
cugcagaugccacccu

SEQ ID NO: 2652304 - RNA, 22 nt, Human
cugcagaugccacccuagccaa

SEQ ID NO: 2652305 - RNA, 19 nt, Human
cugcagaugccacccuagc

SEQ ID NO: 2652306 - RNA, 21 nt, Human
cugcagaugccacccuagcca

SEQ ID NO: 2652307 - RNA, 21 nt, Human
cugcaggcccuggccuccccu

SEQ ID NO: 2652308 - RNA, 19 nt, Human
cugcaggcccuggccuccc

SEQ ID NO: 2652309 - RNA, 15 nt, Human
cugcaggcuuugcca

SEQ ID NO: 2652310 - RNA, 21 nt, Human
cugaucuccauaaacaugaaa

SEQ ID NO: 2652311 - RNA, 20 nt, Human
cugaucccauuuuccucuga

SEQ ID NO: 2652312 - RNA, 18 nt, Human
cugaugucaauuucugug

SEQ ID NO: 2652313 - RNA, 19 nt, Human
cugaugucaauuucugugu

SEQ ID NO: 2652314 - RNA, 20 nt, Human
cugaugucaauuucuguguu

SEQ ID NO: 2652315 - RNA, 22 nt, Human
cugaugucaauuucuguguugc

SEQ ID NO: 2652316 - RNA, 21 nt, Human
cugauuaaguugucuaaacaa

SEQ ID NO: 2652317 - RNA, 16 nt, Human
cugauuauaggauuuu

SEQ ID NO: 2652318 - RNA, 18 nt, Human
cugaguggcaggggacag

SEQ ID NO: 2652319 - RNA, 13 nt, Human
cugaguggcaggg

SEQ ID NO: 2652320 - RNA, 16 nt, Human
cugaguggcaggggac

SEQ ID NO: 2652321 - RNA, 13 nt, Human
cugagugggaagc

SEQ ID NO: 2652322 - RNA, 15 nt, Human
cugagugggaagccc

SEQ ID NO: 2652323 - RNA, 17 nt, Human
cugagugggaagcccau

SEQ ID NO: 2652324 - RNA, 22 nt, Human
cugagugggggaucacagccuc

SEQ ID NO: 2652325 - RNA, 21 nt, Human
cugagugggaagcccauccug

SEQ ID NO: 2652326 - RNA, 22 nt, Human
cugaccaugcucaucugcuggu

SEQ ID NO: 2652327 - RNA, 20 nt, Human
cugaccaugcucaucugcug

SEQ ID NO: 2652328 - RNA, 21 nt, Human
cugaccaugcucaucugcugg

SEQ ID NO: 2652329 - RNA, 16 nt, Human
cugagggaaauguuuu

SEQ ID NO: 2652330 - RNA, 17 nt, Human
cugagggaaauguuuug

SEQ ID NO: 2652331 - RNA, 18 nt, Human
cugagggaaauguuuugu

SEQ ID NO: 2652332 - RNA, 21 nt, Human
cugagggaaauguuuuguaaa

SEQ ID NO: 2652333 - RNA, 22 nt, Human
cugagggaaauguuuuguaaac

SEQ ID NO: 2652334 - RNA, 23 nt, Human
cugagggaaauguuuuguaaaca

SEQ ID NO: 2652335 - RNA, 19 nt, Human
cugagggcagacuggggca

SEQ ID NO: 2652336 - RNA, 20 nt, Human
cugagggcagacuggggcau

SEQ ID NO: 2652337 - RNA, 20 nt, Human
cugagggcuuguaguucuuu

SEQ ID NO: 2652338 - RNA, 17 nt, Human
cugagggcuuguaguuc

SEQ ID NO: 2652339 - RNA, 14 nt, Human
cugagggcuuguag

SEQ ID NO: 2652340 - RNA, 21 nt, Human
cucuuguaucccuagugcucc

SEQ ID NO: 2652341 - RNA, 12 nt, Human
cucuugugauuu

SEQ ID NO: 2652342 - RNA, 14 nt, Human
cucuugugauuucu

SEQ ID NO: 2652343 - RNA, 17 nt, Human
cucuugugauuucuuua

SEQ ID NO: 2652344 - RNA, 22 nt, Human
cucuugugauuucuuuaaaaga

SEQ ID NO: 2652345 - RNA, 22 nt, Human
cucuuuccaguggaucauaaga

SEQ ID NO: 2652346 - RNA, 22 nt, Human
cucuuucaagcagucgugccug

SEQ ID NO: 2652347 - RNA, 18 nt, Human
cucuuuggacacucacac

SEQ ID NO: 2652348 - RNA, 15 nt, Human
cucuuuggacacuca

SEQ ID NO: 2652349 - RNA, 16 nt, Human
cucuuucccuaggaaa

SEQ ID NO: 2652350 - RNA, 14 nt, Human
cucuugaccaggcu

SEQ ID NO: 2652351 - RNA, 15 nt, Human
cucuugaccaggcug

SEQ ID NO: 2652352 - RNA, 19 nt, Human
cucuugaccaggcugccuc

SEQ ID NO: 2652353 - RNA, 14 nt, Human
cucuuguaaagacu

SEQ ID NO: 2652354 - RNA, 15 nt, Human
cucuuguaaagacug

SEQ ID NO: 2652355 - RNA, 16 nt, Human
cucuuguaaagacugg

SEQ ID NO: 2652356 - RNA, 22 nt, Human
cucuuguaaagacugguuuucu

SEQ ID NO: 2652357 - RNA, 24 nt, Human
cucuuaaaacccaagugccuuagc

SEQ ID NO: 2652358 - RNA, 13 nt, Human
cucuuaaaaccca

SEQ ID NO: 2652359 - RNA, 14 nt, Human
cucuucuggcucaa

SEQ ID NO: 2652360 - RNA, 11 nt, Human
cucuucuggcu

SEQ ID NO: 2652361 - RNA, 19 nt, Human
cucuucuggggcaggcugg

SEQ ID NO: 2652362 - RNA, 21 nt, Human
cucuucuggggcaggcugggc

SEQ ID NO: 2652363 - RNA, 23 nt, Human
cucuucuggggcaggcugggcca

SEQ ID NO: 2652364 - RNA, 12 nt, Human
cugaagagcauu

SEQ ID NO: 2652365 - RNA, 16 nt, Human
cugacagagggaugga

SEQ ID NO: 2652366 - RNA, 22 nt, Human
cugaccauauugugcuucacag

SEQ ID NO: 2652367 - RNA, 17 nt, Human
cugaccacuugaggccu

SEQ ID NO: 2652368 - RNA, 18 nt, Human
cugaccacuugaggccug

SEQ ID NO: 2652369 - RNA, 19 nt, Human
cugaccacuugaggccuga

SEQ ID NO: 2652370 - RNA, 15 nt, Human
cugaccaugcucauc

SEQ ID NO: 2652371 - RNA, 21 nt, Human
cugaaccuggguaacuaggga

SEQ ID NO: 2652372 - RNA, 23 nt, Human
cugaaccgcacagcucaggaggc

SEQ ID NO: 2652373 - RNA, 15 nt, Human
cugaaccgcacagcu

SEQ ID NO: 2652374 - RNA, 17 nt, Human
cugaaccgcacagcuca

SEQ ID NO: 2652375 - RNA, 18 nt, Human
cugaaccgcacagcucag

SEQ ID NO: 2652376 - RNA, 19 nt, Human
cugaaccgcacagcucagg

SEQ ID NO: 2652377 - RNA, 20 nt, Human
cugaaccgcacagcucagga

SEQ ID NO: 2652378 - RNA, 21 nt, Human
cugaaccgcacagcucaggag

SEQ ID NO: 2652379 - RNA, 20 nt, Human
cugaacuuaauaacugugua

SEQ ID NO: 2652380 - RNA, 20 nt, Human
cugaagagcuauuauauaaa

SEQ ID NO: 2652381 - RNA, 16 nt, Human
cugaauacagaggcaa

SEQ ID NO: 2652382 - RNA, 13 nt, Human
cucucccaaaaaa

SEQ ID NO: 2652383 - RNA, 13 nt, Human
cucuccacugugc

SEQ ID NO: 2652384 - RNA, 19 nt, Human
cucuccacugugcuuucag

SEQ ID NO: 2652385 - RNA, 20 nt, Human
cucuccagauguuuccagac

SEQ ID NO: 2652386 - RNA, 17 nt, Human
cucucagugcccuccag

SEQ ID NO: 2652387 - RNA, 20 nt, Human
cucucagugcccuccagccc

SEQ ID NO: 2652388 - RNA, 16 nt, Human
cucuaagucauguaug

SEQ ID NO: 2652389 - RNA, 17 nt, Human
cucuaagucauguaugu

SEQ ID NO: 2652390 - RNA, 18 nt, Human
cucuaagucauguauguu

SEQ ID NO: 2652391 - RNA, 20 nt, Human
cucuaagucauguauguuuc

SEQ ID NO: 2652392 - RNA, 21 nt, Human
cucuaagucauguauguuucu

SEQ ID NO: 2652393 - RNA, 22 nt, Human
cucuaagucauguauguuucuc

SEQ ID NO: 2652394 - RNA, 18 nt, Human
cucuaagugggcauugcc

SEQ ID NO: 2652395 - RNA, 19 nt, Human
cucuaagugggcauugcca

SEQ ID NO: 2652396 - RNA, 20 nt, Human
cucuaagugggcauugccau

SEQ ID NO: 2652397 - RNA, 21 nt, Human
cucucaggccggcagccccag

SEQ ID NO: 2652398 - RNA, 18 nt, Human
cucucaggccggcagccc

SEQ ID NO: 2652399 - RNA, 18 nt, Human
cucuccuuuguucccggc

SEQ ID NO: 2652400 - RNA, 22 nt, Human
cucucuaagugggcauugccau

SEQ ID NO: 2652401 - RNA, 18 nt, Human
cucucuacagagaggaaa

SEQ ID NO: 2652402 - RNA, 19 nt, Human
cucucuacagagaggaaau

SEQ ID NO: 2652403 - RNA, 20 nt, Human
cucugcaguccuacucaagc

SEQ ID NO: 2652404 - RNA, 22 nt, Human
cucugcaagaauugaagcagga

SEQ ID NO: 2652405 - RNA, 22 nt, Human
cucugaugguucuucaccuccu

SEQ ID NO: 2652406 - RNA, 17 nt, Human
cucugauccuucuuccu

SEQ ID NO: 2652407 - RNA, 22 nt, Human
cucugaucuccauaaacaugaa

SEQ ID NO: 2652408 - RNA, 13 nt, Human
cucugacuucugc

SEQ ID NO: 2652409 - RNA, 14 nt, Human
cucugacuucugcc

SEQ ID NO: 2652410 - RNA, 15 nt, Human
cucugacuucugccu

SEQ ID NO: 2652411 - RNA, 16 nt, Human
cucugacuucugccug

SEQ ID NO: 2652412 - RNA, 17 nt, Human
cucugacuucugccugg

SEQ ID NO: 2652413 - RNA, 18 nt, Human
cucugacuucugccugga

SEQ ID NO: 2652414 - RNA, 19 nt, Human
cucugacuucugccuggag

SEQ ID NO: 2652415 - RNA, 21 nt, Human
cucugacuucugccuggagac

SEQ ID NO: 2652416 - RNA, 13 nt, Human
cucugagcgccuc

SEQ ID NO: 2652417 - RNA, 22 nt, Human
cucugccuuugcaccacgggac

SEQ ID NO: 2652418 - RNA, 23 nt, Human
cucugccuuugcaccacgggaca

SEQ ID NO: 2652419 - RNA, 15 nt, Human
cucugccugccccgc

SEQ ID NO: 2652420 - RNA, 20 nt, Human
cucugccugccccgccccca

SEQ ID NO: 2652421 - RNA, 15 nt, Human
cucuggacggcaggc

SEQ ID NO: 2652422 - RNA, 16 nt, Human
cucuggacggcaggcu

SEQ ID NO: 2652423 - RNA, 17 nt, Human
cucuggacggcaggcuc

SEQ ID NO: 2652424 - RNA, 18 nt, Human
cucuggacggcaggcuca

SEQ ID NO: 2652425 - RNA, 23 nt, Human
cucuggacggcaggcucacugcc

SEQ ID NO: 2652426 - RNA, 12 nt, Human
cuccagccagcg

SEQ ID NO: 2652427 - RNA, 13 nt, Human
cuccagccagcgc

SEQ ID NO: 2652428 - RNA, 14 nt, Human
cuccagccagcgcc

SEQ ID NO: 2652429 - RNA, 15 nt, Human
cuccagccagcgccu

SEQ ID NO: 2652430 - RNA, 17 nt, Human
cuccagccagcgccucc

SEQ ID NO: 2652431 - RNA, 19 nt, Human
cuccagccagcgccucccu

SEQ ID NO: 2652432 - RNA, 20 nt, Human
cuccagccagcgccucccuc

SEQ ID NO: 2652433 - RNA, 21 nt, Human
cuccagccagcgccucccucc

SEQ ID NO: 2652434 - RNA, 22 nt, Human
cuccagccagcgccucccucca

SEQ ID NO: 2652435 - RNA, 23 nt, Human
cuccagccagcgccucccuccac

SEQ ID NO: 2652436 - RNA, 11 nt, Human
cuccagccagc

SEQ ID NO: 2652437 - RNA, 21 nt, Human
cuccagcaacuucuucuccau

SEQ ID NO: 2652438 - RNA, 16 nt, Human
cuccagccucagcccc

SEQ ID NO: 2652439 - RNA, 18 nt, Human
cuccagccucagcccccu

SEQ ID NO: 2652440 - RNA, 12 nt, Human
cuccacucugcu

SEQ ID NO: 2652441 - RNA, 13 nt, Human
cuccacucugcuu

SEQ ID NO: 2652442 - RNA, 14 nt, Human
cuccacucugcuuc

SEQ ID NO: 2652443 - RNA, 15 nt, Human
cuccacucugcuucu

SEQ ID NO: 2652444 - RNA, 16 nt, Human
cuccacucugcuucuc

SEQ ID NO: 2652445 - RNA, 17 nt, Human
cuccacucugcuucucu

SEQ ID NO: 2652446 - RNA, 20 nt, Human
cuccacucugcuucucugac

SEQ ID NO: 2652447 - RNA, 21 nt, Human
cuccacucugcuucucugacu

SEQ ID NO: 2652448 - RNA, 17 nt, Human
cuccagcaacacagccu

SEQ ID NO: 2652449 - RNA, 18 nt, Human
cuccagcaacacagccug

SEQ ID NO: 2652450 - RNA, 20 nt, Human
cuccagcaacacagccuggg

SEQ ID NO: 2652451 - RNA, 21 nt, Human
cuccagcaacacagccugggc

SEQ ID NO: 2652452 - RNA, 15 nt, Human
cuccagcaacuucuu

SEQ ID NO: 2652453 - RNA, 20 nt, Human
cuccacagcgagggcagcug

SEQ ID NO: 2652454 - RNA, 21 nt, Human
cuccacagcgagggcagcugc

SEQ ID NO: 2652455 - RNA, 22 nt, Human
cuccacagcgagggcagcugcu

SEQ ID NO: 2652456 - RNA, 23 nt, Human
cuccacagcgagggcagcugcua

SEQ ID NO: 2652457 - RNA, 16 nt, Human
cucauuuaagggaaaa

SEQ ID NO: 2652458 - RNA, 17 nt, Human
cucauuuaagggaaaaa

SEQ ID NO: 2652459 - RNA, 18 nt, Human
cucauuuaagggaaaaau

SEQ ID NO: 2652460 - RNA, 22 nt, Human
cucauuuaagggaaaaauauau

SEQ ID NO: 2652461 - RNA, 13 nt, Human
cuccacagcgagg

SEQ ID NO: 2652462 - RNA, 14 nt, Human
cuccacagcgaggg

SEQ ID NO: 2652463 - RNA, 16 nt, Human
cuccacagcgagggca

SEQ ID NO: 2652464 - RNA, 19 nt, Human
cuccacagcgagggcagcu

SEQ ID NO: 2652465 - RNA, 13 nt, Human
cuccaggccugcc

SEQ ID NO: 2652466 - RNA, 14 nt, Human
cuccaggccugccu

SEQ ID NO: 2652467 - RNA, 15 nt, Human
cuccaggccugccuc

SEQ ID NO: 2652468 - RNA, 16 nt, Human
cuccaggccugccucc

SEQ ID NO: 2652469 - RNA, 17 nt, Human
cuccaggccugccuccc

SEQ ID NO: 2652470 - RNA, 18 nt, Human
cuccaggccugccuccca

SEQ ID NO: 2652471 - RNA, 19 nt, Human
cuccaggccugccucccac

SEQ ID NO: 2652472 - RNA, 20 nt, Human
cuccaggccugccucccacu

SEQ ID NO: 2652473 - RNA, 22 nt, Human
cuccaggccugccucccacuuc

SEQ ID NO: 2652474 - RNA, 13 nt, Human
cuccagcuguuca

SEQ ID NO: 2652475 - RNA, 19 nt, Human
cuccagcuguucagcuggu

SEQ ID NO: 2652476 - RNA, 18 nt, Human
cuccagcuguucagcugg

SEQ ID NO: 2652477 - RNA, 12 nt, Human
cuccaggccaaa

SEQ ID NO: 2652478 - RNA, 13 nt, Human
cuccaggcccucc

SEQ ID NO: 2652479 - RNA, 18 nt, Human
cuccaggcccuccucucc

SEQ ID NO: 2652480 - RNA, 20 nt, Human
cuccaggcccuccucuccca

SEQ ID NO: 2652481 - RNA, 18 nt, Human
cucauuaugccacuuccu

SEQ ID NO: 2652482 - RNA, 14 nt, Human
cucaucuaucucaa

SEQ ID NO: 2652483 - RNA, 18 nt, Human
cucaucuaucucaauccu

SEQ ID NO: 2652484 - RNA, 21 nt, Human
cucauuagcauuuugcuaaau

SEQ ID NO: 2652485 - RNA, 19 nt, Human
cucauugcugagccucugc

SEQ ID NO: 2652486 - RNA, 18 nt, Human
cucauugcugagccucug

SEQ ID NO: 2652487 - RNA, 20 nt, Human
cucauugcugagccucugcu

SEQ ID NO: 2652488 - RNA, 15 nt, Human
cguuuuuguauuuuc

SEQ ID NO: 2652489 - RNA, 21 nt, Human
cguuuuuguauuuucaugaaa

SEQ ID NO: 2652490 - RNA, 16 nt, Human
cguuuuuuccucagug

SEQ ID NO: 2652491 - RNA, 23 nt, Human
cucaguuauuacauguaauuuga

SEQ ID NO: 2652492 - RNA, 19 nt, Human
cucaguguugguauauuuu

SEQ ID NO: 2652493 - RNA, 21 nt, Human
cucaguguugguauauuuuau

SEQ ID NO: 2652494 - RNA, 22 nt, Human
cucaguguugguauauuuuaua

SEQ ID NO: 2652495 - RNA, 14 nt, Human
cucaggugagaagc

SEQ ID NO: 2652496 - RNA, 12 nt, Human
cuccuucagaca

SEQ ID NO: 2652497 - RNA, 23 nt, Human
cuccuuaagcugcagagauuucu

SEQ ID NO: 2652498 - RNA, 14 nt, Human
cuccuucagacacc

SEQ ID NO: 2652499 - RNA, 13 nt, Human
cuccuucagacac

SEQ ID NO: 2652500 - RNA, 19 nt, Human
cuccuucagacacccucaa

SEQ ID NO: 2652501 - RNA, 20 nt, Human
cuccuucuaaaaacuucuca

SEQ ID NO: 2652502 - RNA, 19 nt, Human
cuccuugaguguaugagua

SEQ ID NO: 2652503 - RNA, 13 nt, Human
cuccuuagaaaaa

SEQ ID NO: 2652504 - RNA, 17 nt, Human
cuccugcccacggaguc

SEQ ID NO: 2652505 - RNA, 13 nt, Human
cuccugcccacgg

SEQ ID NO: 2652506 - RNA, 18 nt, Human
cucggaucaggcucccag

SEQ ID NO: 2652507 - RNA, 15 nt, Human
cucggccccucccac

SEQ ID NO: 2652508 - RNA, 17 nt, Human
cucggagaagagcgcag

SEQ ID NO: 2652509 - RNA, 21 nt, Human
cucgcauuugucaaugacagu

SEQ ID NO: 2652510 - RNA, 22 nt, Human
cucgcauuugucaaugacaguu

SEQ ID NO: 2652511 - RNA, 19 nt, Human
cucgcauaggaccuuucca

SEQ ID NO: 2652512 - RNA, 22 nt, Human
cucgcauaggaccuuuccacca

SEQ ID NO: 2652513 - RNA, 16 nt, Human
cucgcgcucaguaaac

SEQ ID NO: 2652514 - RNA, 16 nt, Human
cucgcgcuugcuggcc

SEQ ID NO: 2652515 - RNA, 15 nt, Human
cucgaaucucugugc

SEQ ID NO: 2652516 - RNA, 16 nt, Human
cucgaaucucugugcc

SEQ ID NO: 2652517 - RNA, 17 nt, Human
cucgaaucucugugccu

SEQ ID NO: 2652518 - RNA, 18 nt, Human
cucgaaucucugugccuu

SEQ ID NO: 2652519 - RNA, 13 nt, Human
cucgaaucucugu

SEQ ID NO: 2652520 - RNA, 14 nt, Human
cucgaaucucugug

SEQ ID NO: 2652521 - RNA, 12 nt, Human
cucgagucugag

SEQ ID NO: 2652522 - RNA, 14 nt, Human
cuccuauauauuuc

SEQ ID NO: 2652523 - RNA, 15 nt, Human
cuccuauauauuucu

SEQ ID NO: 2652524 - RNA, 17 nt, Human
cuccuauauauuucuau

SEQ ID NO: 2652525 - RNA, 18 nt, Human
cuccuauauauuucuauu

SEQ ID NO: 2652526 - RNA, 17 nt, Human
cuccuaguuugggagga

SEQ ID NO: 2652527 - RNA, 12 nt, Human
cucccuugcugg

SEQ ID NO: 2652528 - RNA, 14 nt, Human
cucccuugcuggcc

SEQ ID NO: 2652529 - RNA, 15 nt, Human
cucccuugcuggccc

SEQ ID NO: 2652530 - RNA, 17 nt, Human
cucccuugcuggcccca

SEQ ID NO: 2652531 - RNA, 18 nt, Human
cucccuugcuggccccag

SEQ ID NO: 2652532 - RNA, 22 nt, Human
cucccuugcuggccccagcccu

SEQ ID NO: 2652533 - RNA, 23 nt, Human
cucccuugcuggccccagcccug

SEQ ID NO: 2652534 - RNA, 12 nt, Human
cucccuuccuuu

SEQ ID NO: 2652535 - RNA, 19 nt, Human
cucccuuccuuuucccugc

SEQ ID NO: 2652536 - RNA, 20 nt, Human
cucccuuccuuuucccugcu

SEQ ID NO: 2652537 - RNA, 12 nt, Human
cucccuggcucc

SEQ ID NO: 2652538 - RNA, 14 nt, Human
cucccuggcucccu

SEQ ID NO: 2652539 - RNA, 15 nt, Human
cucccuggcucccuc

SEQ ID NO: 2652540 - RNA, 16 nt, Human
cucccuggcucccucc

SEQ ID NO: 2652541 - RNA, 22 nt, Human
cuccucccuuccuuuucccugc

SEQ ID NO: 2652542 - RNA, 13 nt, Human
cuccucccuuccu

SEQ ID NO: 2652543 - RNA, 14 nt, Human
cuccucccuuccuu

SEQ ID NO: 2652544 - RNA, 15 nt, Human
cuccucccuuccuuu

SEQ ID NO: 2652545 - RNA, 21 nt, Human
cuccucccuuccuuuucccug

SEQ ID NO: 2652546 - RNA, 17 nt, Human
cuccucgguucaagguc

SEQ ID NO: 2652547 - RNA, 20 nt, Human
cuccucgugaaagugcauuu

SEQ ID NO: 2652548 - RNA, 13 nt, Human
cuccugagcuagg

SEQ ID NO: 2652549 - RNA, 20 nt, Human
cuccugagcuaggaagaguc

SEQ ID NO: 2652550 - RNA, 15 nt, Human
cuccugacuggugcu

SEQ ID NO: 2652551 - RNA, 16 nt, Human
cuccugacuggugcug

SEQ ID NO: 2652552 - RNA, 18 nt, Human
cuccugacccauugcugu

SEQ ID NO: 2652553 - RNA, 19 nt, Human
cuccugacccauugcuguu

SEQ ID NO: 2652554 - RNA, 18 nt, Human
cuccugaaccgcacagcu

SEQ ID NO: 2652555 - RNA, 19 nt, Human
cuccugaaccgcacagcuc

SEQ ID NO: 2652556 - RNA, 20 nt, Human
cuccugaaccgcacagcuca

SEQ ID NO: 2652557 - RNA, 21 nt, Human
cuccugaaccgcacagcucag

SEQ ID NO: 2652558 - RNA, 23 nt, Human
cuccugaaccgcacagcucagga

SEQ ID NO: 2652559 - RNA, 19 nt, Human
cuccugacagaaggugcca

SEQ ID NO: 2652560 - RNA, 16 nt, Human
cuccugacagaaggug

SEQ ID NO: 2652561 - RNA, 18 nt, Human
cuccugacagaaggugcc

SEQ ID NO: 2652562 - RNA, 14 nt, Human
cuccugacagaagg

SEQ ID NO: 2652563 - RNA, 18 nt, Human
cuucgggcgucugugugc

SEQ ID NO: 2652564 - RNA, 21 nt, Human
cuucgggaggucgaggcagga

SEQ ID NO: 2652565 - RNA, 20 nt, Human
cuucgggaggucgaggcagg

SEQ ID NO: 2652566 - RNA, 12 nt, Human
cuucuaaaaacu

SEQ ID NO: 2652567 - RNA, 13 nt, Human
cuucuaaaaacuu

SEQ ID NO: 2652568 - RNA, 16 nt, Human
cuucucagaguggugg

SEQ ID NO: 2652569 - RNA, 14 nt, Human
cuucucagauuucu

SEQ ID NO: 2652570 - RNA, 22 nt, Human
cuucucagauuucugaggaaau

SEQ ID NO: 2652571 - RNA, 19 nt, Human
cuucucagauuucugagga

SEQ ID NO: 2652572 - RNA, 15 nt, Human
cuucgaaaccuggga

SEQ ID NO: 2652573 - RNA, 15 nt, Human
cuuccuuuucccugc

SEQ ID NO: 2652574 - RNA, 16 nt, Human
cuuccuuuucccugcu

SEQ ID NO: 2652575 - RNA, 17 nt, Human
cuuccuuuucccugcuu

SEQ ID NO: 2652576 - RNA, 19 nt, Human
cuuccuuuucccugcuucc

SEQ ID NO: 2652577 - RNA, 22 nt, Human
cuuccuuuucccugcuuccagg

SEQ ID NO: 2652578 - RNA, 23 nt, Human
cuuccuugagacacggagcccag

SEQ ID NO: 2652579 - RNA, 20 nt, Human
cuuccuugagacacggagcc

SEQ ID NO: 2652580 - RNA, 18 nt, Human
cuuccuugagacacggag

SEQ ID NO: 2652581 - RNA, 22 nt, Human
cuuccuugaagaacugcaggcc

SEQ ID NO: 2652582 - RNA, 21 nt, Human
cuuccuugaagaacugcaggc

SEQ ID NO: 2652583 - RNA, 23 nt, Human
cuucugcuuuucugcccuggcug

SEQ ID NO: 2652584 - RNA, 14 nt, Human
cuucugcuuuucug

SEQ ID NO: 2652585 - RNA, 16 nt, Human
cuucugcuuuucugcc

SEQ ID NO: 2652586 - RNA, 17 nt, Human
cuucugcuuuucugccc

SEQ ID NO: 2652587 - RNA, 18 nt, Human
cuucugcuuuucugcccu

SEQ ID NO: 2652588 - RNA, 19 nt, Human
cuucugcuuuucugcccug

SEQ ID NO: 2652589 - RNA, 20 nt, Human
cuucugcuuuucugcccugg

SEQ ID NO: 2652590 - RNA, 21 nt, Human
cuucugcuuuucugcccuggc

SEQ ID NO: 2652591 - RNA, 22 nt, Human
cuucugcuuuucugcccuggcu

SEQ ID NO: 2652592 - RNA, 13 nt, Human
cuucagcuccagg

SEQ ID NO: 2652593 - RNA, 15 nt, Human
cuucagcuccaggga

SEQ ID NO: 2652594 - RNA, 23 nt, Human
cuucagcuccagggaauccaagc

SEQ ID NO: 2652595 - RNA, 11 nt, Human
cuucagcugac

SEQ ID NO: 2652596 - RNA, 16 nt, Human
cuucagggcugcuggg

SEQ ID NO: 2652597 - RNA, 14 nt, Human
cuuccaaauaaaua

SEQ ID NO: 2652598 - RNA, 15 nt, Human
cuuccaaauaaauaa

SEQ ID NO: 2652599 - RNA, 18 nt, Human
cuuccagauggucaucca

SEQ ID NO: 2652600 - RNA, 19 nt, Human
cuuccagauggucauccag

SEQ ID NO: 2652601 - RNA, 20 nt, Human
cuuccagauggucauccaga

SEQ ID NO: 2652602 - RNA, 21 nt, Human
cuuccagauggucauccagac

SEQ ID NO: 2652603 - RNA, 13 nt, Human
cuuccagcauuua

SEQ ID NO: 2652604 - RNA, 21 nt, Human
cuuccagcauuuagcuggcca

SEQ ID NO: 2652605 - RNA, 16 nt, Human
cuuccaguauaaccag

SEQ ID NO: 2652606 - RNA, 14 nt, Human
cuuccgcagugugg

SEQ ID NO: 2652607 - RNA, 15 nt, Human
cuuccgcaguguggc

SEQ ID NO: 2652608 - RNA, 17 nt, Human
cuuccgcaguguggcca

SEQ ID NO: 2652609 - RNA, 21 nt, Human
cuuccgcaguguggccaggcu

SEQ ID NO: 2652610 - RNA, 19 nt, Human
cuuauaagugaagugauac

SEQ ID NO: 2652611 - RNA, 21 nt, Human
cuuauaaaacagaguaaucuu

SEQ ID NO: 2652612 - RNA, 18 nt, Human
cuuauaaaauccugugca

SEQ ID NO: 2652613 - RNA, 19 nt, Human
cuuauaaaauccugugcaa

SEQ ID NO: 2652614 - RNA, 18 nt, Human
cuuauaaaguggaaguau

SEQ ID NO: 2652615 - RNA, 20 nt, Human
cuuauaaaguggaaguaugu

SEQ ID NO: 2652616 - RNA, 24 nt, Human
cuuauaaaguggaaguauguauau

SEQ ID NO: 2652617 - RNA, 20 nt, Human
cuuauaaaacagaguaaucu

SEQ ID NO: 2652618 - RNA, 17 nt, Human
cuuagguuggcaaaaag

SEQ ID NO: 2652619 - RNA, 20 nt, Human
cuuauaagugaagugauacu

SEQ ID NO: 2652620 - RNA, 16 nt, Human
cuuauagucuaagacu

SEQ ID NO: 2652621 - RNA, 21 nt, Human
cuuauagucuaagacuauaua

SEQ ID NO: 2652622 - RNA, 14 nt, Human
cuuauaauuguucu

SEQ ID NO: 2652623 - RNA, 21 nt, Human
cuuauaauuguucucagaauc

SEQ ID NO: 2652624 - RNA, 15 nt, Human
cuuauaaugggcucu

SEQ ID NO: 2652625 - RNA, 18 nt, Human
cuuaucuccacaaccucu

SEQ ID NO: 2652626 - RNA, 20 nt, Human
cuuaucuuacaauauugauu

SEQ ID NO: 2652627 - RNA, 18 nt, Human
cuuauuguuucucugaaa

SEQ ID NO: 2652628 - RNA, 20 nt, Human
cuuaugauuaaacuuccuuc

SEQ ID NO: 2652629 - RNA, 21 nt, Human
cuuaugauuaaacuuccuucu

SEQ ID NO: 2652630 - RNA, 19 nt, Human
cuuaugaaugauuugcaua

SEQ ID NO: 2652631 - RNA, 14 nt, Human
cuuaugaggagggg

SEQ ID NO: 2652632 - RNA, 15 nt, Human
cuuaugaggagggga

SEQ ID NO: 2652633 - RNA, 20 nt, Human
cuuaugaaugauuugcauau

SEQ ID NO: 2652634 - RNA, 18 nt, Human
cuuaugaaugauuugcau

SEQ ID NO: 2652635 - RNA, 22 nt, Human
cuuagaucauaguuuuauuuau

SEQ ID NO: 2652636 - RNA, 21 nt, Human
cuuagaucauaguuuuauuua

SEQ ID NO: 2652637 - RNA, 13 nt, Human
cuuagaucauagu

SEQ ID NO: 2652638 - RNA, 19 nt, Human
cuuagaucauaguuuuauu

SEQ ID NO: 2652639 - RNA, 18 nt, Human
cuuagaucauaguuuuau

SEQ ID NO: 2652640 - RNA, 17 nt, Human
cuuagaucauaguuuua

SEQ ID NO: 2652641 - RNA, 16 nt, Human
cuuagaucauaguuuu

SEQ ID NO: 2652642 - RNA, 21 nt, Human
cuuacuuuguaaauucugauu

SEQ ID NO: 2652643 - RNA, 20 nt, Human
cuuacuuuguaaauucugau

SEQ ID NO: 2652644 - RNA, 19 nt, Human
cuuacuuuguaaauucuga

SEQ ID NO: 2652645 - RNA, 17 nt, Human
cuuacuuuguaaauucu

SEQ ID NO: 2652646 - RNA, 15 nt, Human
cuuacuuuguaaauu

SEQ ID NO: 2652647 - RNA, 13 nt, Human
cuuacuaaaaagu

SEQ ID NO: 2652648 - RNA, 15 nt, Human
cuuacuaaaaaguau

SEQ ID NO: 2652649 - RNA, 17 nt, Human
cuuacuaaaaaguauaa

SEQ ID NO: 2652650 - RNA, 18 nt, Human
cuuacuaaaaaguauaaa

SEQ ID NO: 2652651 - RNA, 21 nt, Human
cuuacuaaaaaguauaaaaua

SEQ ID NO: 2652652 - RNA, 17 nt, Human
cuuaauggaguucuugu

SEQ ID NO: 2652653 - RNA, 18 nt, Human
cuuaauggaguucuugug

SEQ ID NO: 2652654 - RNA, 15 nt, Human
cuuacuacagaaaug

SEQ ID NO: 2652655 - RNA, 12 nt, Human
cuuacuaggaag

SEQ ID NO: 2652656 - RNA, 13 nt, Human
cuuacuuugcuga

SEQ ID NO: 2652657 - RNA, 11 nt, Human
cuuacuuugua

SEQ ID NO: 2652658 - RNA, 14 nt, Human
cuuacuuuguaaau

SEQ ID NO: 2652659 - RNA, 12 nt, Human
cuuacuuuguaa

SEQ ID NO: 2652660 - RNA, 15 nt, Human
cuguuucucuugagc

SEQ ID NO: 2652661 - RNA, 16 nt, Human
cuguuucucuugagcu

SEQ ID NO: 2652662 - RNA, 17 nt, Human
cuguuucucuugagcug

SEQ ID NO: 2652663 - RNA, 20 nt, Human
cuguuucucuugagcuggcc

SEQ ID NO: 2652664 - RNA, 21 nt, Human
cuguuucucuugagcuggccu

SEQ ID NO: 2652665 - RNA, 22 nt, Human
cuguuucucuugagcuggccuc

SEQ ID NO: 2652666 - RNA, 19 nt, Human
cuguuuccugacauugucu

SEQ ID NO: 2652667 - RNA, 20 nt, Human
cuguuuccugacauugucuc

SEQ ID NO: 2652668 - RNA, 13 nt, Human
cuguuuccugggc

SEQ ID NO: 2652669 - RNA, 16 nt, Human
cuguuuccugggcacg

SEQ ID NO: 2652670 - RNA, 13 nt, Human
cuguuuauuacuu

SEQ ID NO: 2652671 - RNA, 14 nt, Human
cuguuuauuacuuc

SEQ ID NO: 2652672 - RNA, 18 nt, Human
cuguuuauuacuuccaug

SEQ ID NO: 2652673 - RNA, 19 nt, Human
cuguuuauuacuuccauga

SEQ ID NO: 2652674 - RNA, 21 nt, Human
cuguuuauuacuuccaugaau

SEQ ID NO: 2652675 - RNA, 22 nt, Human
cuguuuaaucauaguuacugug

SEQ ID NO: 2652676 - RNA, 23 nt, Human
cuguuuaaucauaguuacugugu

SEQ ID NO: 2652677 - RNA, 12 nt, Human
cugguugcaugg

SEQ ID NO: 2652678 - RNA, 22 nt, Human
cugguugcauggaaaucagcca

SEQ ID NO: 2652679 - RNA, 17 nt, Human
cuguuucugauuugcug

SEQ ID NO: 2652680 - RNA, 17 nt, Human
cuguuucugcuugcucu

SEQ ID NO: 2652681 - RNA, 14 nt, Human
cuguuuucucuuga

SEQ ID NO: 2652682 - RNA, 13 nt, Human
cuguuuucucuug

SEQ ID NO: 2652683 - RNA, 17 nt, Human
cuguuuucucuugagag

SEQ ID NO: 2652684 - RNA, 14 nt, Human
cuuaaucauuuuca

SEQ ID NO: 2652685 - RNA, 20 nt, Human
cuuaaucauuuucauuccua

SEQ ID NO: 2652686 - RNA, 17 nt, Human
cuuaagaaauguauaaa

SEQ ID NO: 2652687 - RNA, 20 nt, Human
cuuaagaaauguauaaacuu

SEQ ID NO: 2652688 - RNA, 18 nt, Human
cuuaagugaggaaaucaa

SEQ ID NO: 2652689 - RNA, 19 nt, Human
cuuaagugaggaaaucaaa

SEQ ID NO: 2652690 - RNA, 21 nt, Human
cuuaagugaggaaaucaaagu

SEQ ID NO: 2652691 - RNA, 20 nt, Human
cuuaagugaggaaaucaaag

SEQ ID NO: 2652692 - RNA, 20 nt, Human
cuuaaguuagccuccaccac

SEQ ID NO: 2652693 - RNA, 19 nt, Human
cuuaacugcauuuuuagac

SEQ ID NO: 2652694 - RNA, 12 nt, Human
cuuaacugaaau

SEQ ID NO: 2652695 - RNA, 11 nt, Human
cuuaaaucuua

SEQ ID NO: 2652696 - RNA, 12 nt, Human
cuuaaaucuuaa

SEQ ID NO: 2652697 - RNA, 19 nt, Human
cuuaaaucuuaauguuccu

SEQ ID NO: 2652698 - RNA, 14 nt, Human
cuguuuuuuuguua

SEQ ID NO: 2652699 - RNA, 16 nt, Human
cuuaaauguuauuauc

SEQ ID NO: 2652700 - RNA, 12 nt, Human
cuuaaauuuaau

SEQ ID NO: 2652701 - RNA, 16 nt, Human
cuuaaauuuaauacca

SEQ ID NO: 2652702 - RNA, 13 nt, Human
cuuaaauuucuua

SEQ ID NO: 2652703 - RNA, 14 nt, Human
cuuaaauuucuuau

SEQ ID NO: 2652704 - RNA, 18 nt, Human
cuuaaauuucuuauguga

SEQ ID NO: 2652705 - RNA, 19 nt, Human
cuuaaauuucuuaugugac

SEQ ID NO: 2652706 - RNA, 20 nt, Human
cuuaaauuucuuaugugaca

SEQ ID NO: 2652707 - RNA, 22 nt, Human
cuuaaauuucuuaugugacauu

SEQ ID NO: 2652708 - RNA, 17 nt, Human
cuuuguuuucugacuaa

SEQ ID NO: 2652709 - RNA, 20 nt, Human
cuuuguuuucugacuaauua

SEQ ID NO: 2652710 - RNA, 21 nt, Human
cuuuguuuguugucagcugaa

SEQ ID NO: 2652711 - RNA, 18 nt, Human
cuuuguugcaagauguga

SEQ ID NO: 2652712 - RNA, 19 nt, Human
cuuuguugcaagaugugaa

SEQ ID NO: 2652713 - RNA, 20 nt, Human
cuuuguugcaagaugugaau

SEQ ID NO: 2652714 - RNA, 21 nt, Human
cuuuguugcaagaugugaauu

SEQ ID NO: 2652715 - RNA, 20 nt, Human
cuuugggaggccgaggcggg

SEQ ID NO: 2652716 - RNA, 13 nt, Human
cuuuucugcccug

SEQ ID NO: 2652717 - RNA, 14 nt, Human
cuuuucugcccugg

SEQ ID NO: 2652718 - RNA, 15 nt, Human
cuuuucugcccuggc

SEQ ID NO: 2652719 - RNA, 17 nt, Human
cuuuuuuaaauauuuuc

SEQ ID NO: 2652720 - RNA, 18 nt, Human
cuuuuuuaaauauuuucu

SEQ ID NO: 2652721 - RNA, 22 nt, Human
cuuuuuuaaauauuuucuauuu

SEQ ID NO: 2652722 - RNA, 21 nt, Human
cuuuuuguuguaaaacaaaau

SEQ ID NO: 2652723 - RNA, 13 nt, Human
cuuuuugacacug

SEQ ID NO: 2652724 - RNA, 14 nt, Human
cuuuuugacacuga

SEQ ID NO: 2652725 - RNA, 15 nt, Human
cuuuuugacacugaa

SEQ ID NO: 2652726 - RNA, 21 nt, Human
cuuuugaagcauagauaauau

SEQ ID NO: 2652727 - RNA, 12 nt, Human
cuuuuguuuggu

SEQ ID NO: 2652728 - RNA, 14 nt, Human
cuuuuguuugguaa

SEQ ID NO: 2652729 - RNA, 15 nt, Human
cuuuuguuugguaaa

SEQ ID NO: 2652730 - RNA, 16 nt, Human
cuuuuguuugguaaau

SEQ ID NO: 2652731 - RNA, 18 nt, Human
cuuuuguuugguaaaugu

SEQ ID NO: 2652732 - RNA, 18 nt, Human
cuuuuuaaaaauuguuau

SEQ ID NO: 2652733 - RNA, 21 nt, Human
cuuuuuaaaaauuguuauuua

SEQ ID NO: 2652734 - RNA, 14 nt, Human
cuuuuuaaaacaca

SEQ ID NO: 2652735 - RNA, 17 nt, Human
cuuuuuaaaacacaugu

SEQ ID NO: 2652736 - RNA, 17 nt, Human
cuuuuucaggagaauua

SEQ ID NO: 2652737 - RNA, 18 nt, Human
cuuuuucauaaauuauuu

SEQ ID NO: 2652738 - RNA, 20 nt, Human
gaaaaguaauauuuauuaaa

SEQ ID NO: 2652739 - RNA, 19 nt, Human
gaaaaguaauauuuauuaa

SEQ ID NO: 2652740 - RNA, 17 nt, Human
gaaaaguaauauuuauu

SEQ ID NO: 2652741 - RNA, 16 nt, Human
gaaaaguaauauuuau

SEQ ID NO: 2652742 - RNA, 14 nt, Human
gaaaaguaauauuu

SEQ ID NO: 2652743 - RNA, 14 nt, Human
gaaaacggagcuga

SEQ ID NO: 2652744 - RNA, 13 nt, Human
gaaaacggagcug

SEQ ID NO: 2652745 - RNA, 14 nt, Human
gaaaacauguuaau

SEQ ID NO: 2652746 - RNA, 16 nt, Human
gaaaacauguuaauga

SEQ ID NO: 2652747 - RNA, 20 nt, Human
gaaaacauguuaaugacaau

SEQ ID NO: 2652748 - RNA, 16 nt, Human
gaaaacauggaacagu

SEQ ID NO: 2652749 - RNA, 16 nt, Human
gaaaaauaucuuggcc

SEQ ID NO: 2652750 - RNA, 17 nt, Human
gaaaaauagugucuuug

SEQ ID NO: 2652751 - RNA, 20 nt, Human
gaaaaauagugucuuuguga

SEQ ID NO: 2652752 - RNA, 12 nt, Human
gaaaaauauaaa

SEQ ID NO: 2652753 - RNA, 16 nt, Human
gaaaaauauaaaauua

SEQ ID NO: 2652754 - RNA, 17 nt, Human
gaaaaauauaaaauuau

SEQ ID NO: 2652755 - RNA, 16 nt, Human
gaaaaauuggggagga

SEQ ID NO: 2652756 - RNA, 19 nt, Human
gaaaaauuggggaggaggg

SEQ ID NO: 2652757 - RNA, 19 nt, Human
gaaaaaucgcgaguguuuc

SEQ ID NO: 2652758 - RNA, 13 nt, Human
cuuugcauauuau

SEQ ID NO: 2652759 - RNA, 15 nt, Human
cuuugcauauuauaa

SEQ ID NO: 2652760 - RNA, 23 nt, Human
cuuugcauauuauaaaggauaaa

SEQ ID NO: 2652761 - RNA, 23 nt, Human
cuuugggaggccaaggugggagg

SEQ ID NO: 2652762 - RNA, 14 nt, Human
cuuuggauucuaaa

SEQ ID NO: 2652763 - RNA, 18 nt, Human
cuuuggauucuaaauaca

SEQ ID NO: 2652764 - RNA, 20 nt, Human
cuuuggauucuaaauacaug

SEQ ID NO: 2652765 - RNA, 21 nt, Human
cuuuggauucuaaauacaugc

SEQ ID NO: 2652766 - RNA, 22 nt, Human
cuuuaggagauuuauuuuuugg

SEQ ID NO: 2652767 - RNA, 21 nt, Human
cuuuagacuugaaaagagaca

SEQ ID NO: 2652768 - RNA, 17 nt, Human
cuuuagacuugaaaaga

SEQ ID NO: 2652769 - RNA, 18 nt, Human
cuuuccucucuauauuuc

SEQ ID NO: 2652770 - RNA, 17 nt, Human
cuuuccucucuauauuu

SEQ ID NO: 2652771 - RNA, 16 nt, Human
cuuuccucucuauauu

SEQ ID NO: 2652772 - RNA, 21 nt, Human
cuuucugccaucuagccagcc

SEQ ID NO: 2652773 - RNA, 22 nt, Human
cuuucugccaucuagccagccc

SEQ ID NO: 2652774 - RNA, 11 nt, Human
cuuucugccug

SEQ ID NO: 2652775 - RNA, 12 nt, Human
cuuucugccugg

SEQ ID NO: 2652776 - RNA, 14 nt, Human
cuuucugccuggag

SEQ ID NO: 2652777 - RNA, 15 nt, Human
cuuucugccuggagu

SEQ ID NO: 2652778 - RNA, 15 nt, Human
cuuguagauuugauu

SEQ ID NO: 2652779 - RNA, 14 nt, Human
cuuguagauuugau

SEQ ID NO: 2652780 - RNA, 18 nt, Human
cuuggggcucacacaccu

SEQ ID NO: 2652781 - RNA, 15 nt, Human
cuugguugucuggca

SEQ ID NO: 2652782 - RNA, 21 nt, Human
cuugggcuauuuggacucagg

SEQ ID NO: 2652783 - RNA, 12 nt, Human
cuugcuugccug

SEQ ID NO: 2652784 - RNA, 17 nt, Human
cuugcuugccugcaggg

SEQ ID NO: 2652785 - RNA, 19 nt, Human
cuugcuugccugcagggcc

SEQ ID NO: 2652786 - RNA, 16 nt, Human
cuugggaggcuucccc

SEQ ID NO: 2652787 - RNA, 15 nt, Human
cuugggaggcuuccc

SEQ ID NO: 2652788 - RNA, 14 nt, Human
cuugggaggcugag

SEQ ID NO: 2652789 - RNA, 16 nt, Human
cuugggaggcugaggc

SEQ ID NO: 2652790 - RNA, 23 nt, Human
cuugggaggcugaggcaggagaa

SEQ ID NO: 2652791 - RNA, 23 nt, Human
cuuggagaaugugagaagccagc

SEQ ID NO: 2652792 - RNA, 13 nt, Human
cuuggagaaauga

SEQ ID NO: 2652793 - RNA, 15 nt, Human
cuuggagaaaugaaa

SEQ ID NO: 2652794 - RNA, 13 nt, Human
cuugggcagagcu

SEQ ID NO: 2652795 - RNA, 20 nt, Human
cuugggccacugugaagaga

SEQ ID NO: 2652796 - RNA, 18 nt, Human
cuugggccacugugaaga

SEQ ID NO: 2652797 - RNA, 15 nt, Human
cuuguguuuuaaaau

SEQ ID NO: 2652798 - RNA, 14 nt, Human
cuuguuacuucuga

SEQ ID NO: 2652799 - RNA, 15 nt, Human
cuuguuacuucugag

SEQ ID NO: 2652800 - RNA, 17 nt, Human
cuuguuacuucugaggu

SEQ ID NO: 2652801 - RNA, 14 nt, Human
cuuguggguccaug

SEQ ID NO: 2652802 - RNA, 16 nt, Human
cuuguggguccaugcu

SEQ ID NO: 2652803 - RNA, 24 nt, Human
cuuguggguccaugcuaacaaaga

SEQ ID NO: 2652804 - RNA, 17 nt, Human
cuuguagcgacuaaacu

SEQ ID NO: 2652805 - RNA, 22 nt, Human
cuuguagcgacuaaacuagauu

SEQ ID NO: 2652806 - RNA, 17 nt, Human
cuuguagauuugauuuu

SEQ ID NO: 2652807 - RNA, 18 nt, Human
cuuguccuagcuugggag

SEQ ID NO: 2652808 - RNA, 15 nt, Human
cuuguccucagccag

SEQ ID NO: 2652809 - RNA, 16 nt, Human
cuuguccucagccagu

SEQ ID NO: 2652810 - RNA, 14 nt, Human
cuuuaccuguauac

SEQ ID NO: 2652811 - RNA, 17 nt, Human
cuuuaccuuuucagggc

SEQ ID NO: 2652812 - RNA, 20 nt, Human
cuuuaccuuuucagggcugg

SEQ ID NO: 2652813 - RNA, 14 nt, Human
cuuuagacccuggg

SEQ ID NO: 2652814 - RNA, 16 nt, Human
cuuuagacccugggug

SEQ ID NO: 2652815 - RNA, 23 nt, Human
cuuuagacccugggugggcucug

SEQ ID NO: 2652816 - RNA, 15 nt, Human
cuuuagacuugaaaa

SEQ ID NO: 2652817 - RNA, 14 nt, Human
cuuuagacuugaaa

SEQ ID NO: 2652818 - RNA, 13 nt, Human
cuuuagacuugaa

SEQ ID NO: 2652819 - RNA, 12 nt, Human
cuuuagacuuga

SEQ ID NO: 2652820 - RNA, 12 nt, Human
cuuuaaaagaau

SEQ ID NO: 2652821 - RNA, 15 nt, Human
cuuuaaaagaaugac

SEQ ID NO: 2652822 - RNA, 16 nt, Human
cuuuaaaagaaugacu

SEQ ID NO: 2652823 - RNA, 20 nt, Human
cuuuaaaaagggaagaaacu

SEQ ID NO: 2652824 - RNA, 21 nt, Human
cuuuaaaaagggaagaaacug

SEQ ID NO: 2652825 - RNA, 12 nt, Human
cuuguuucugaa

SEQ ID NO: 2652826 - RNA, 15 nt, Human
cuuguuucacugaaa

SEQ ID NO: 2652827 - RNA, 20 nt, Human
cuuguugcucaaaaaaugag

SEQ ID NO: 2652828 - RNA, 20 nt, Human
cuuguugccuauaagccaaa

SEQ ID NO: 2652829 - RNA, 15 nt, Human
cuuguuuaccuuucu

SEQ ID NO: 2652830 - RNA, 19 nt, Human
cuuguuuaccuuucucucu

SEQ ID NO: 2652831 - RNA, 22 nt, Human
cuuguuuaccuuucucucucua

SEQ ID NO: 2652832 - RNA, 17 nt, Human
cuugcuucccuaaucua

SEQ ID NO: 2652833 - RNA, 13 nt, Human
cuugcuucccuaa

SEQ ID NO: 2652834 - RNA, 15 nt, Human
cuugccaucagugaa

SEQ ID NO: 2652835 - RNA, 17 nt, Human
cuugccaucagugaaaa

SEQ ID NO: 2652836 - RNA, 12 nt, Human
cuugcccauccu

SEQ ID NO: 2652837 - RNA, 13 nt, Human
cuugcccauccug

SEQ ID NO: 2652838 - RNA, 14 nt, Human
cuugcccauccuga

SEQ ID NO: 2652839 - RNA, 16 nt, Human
cuugcccauccugacu

SEQ ID NO: 2652840 - RNA, 18 nt, Human
cuugcccauccugacuga

SEQ ID NO: 2652841 - RNA, 15 nt, Human
cuugcaccaaauuau

SEQ ID NO: 2652842 - RNA, 18 nt, Human
cuugcaccaaauuaucuu

SEQ ID NO: 2652843 - RNA, 19 nt, Human
cuugaguugauucagcucu

SEQ ID NO: 2652844 - RNA, 18 nt, Human
cuugaguugauucagcuc

SEQ ID NO: 2652845 - RNA, 20 nt, Human
cuugaguugauucagcucug

SEQ ID NO: 2652846 - RNA, 12 nt, Human
cuucuggcucaa

SEQ ID NO: 2652847 - RNA, 23 nt, Human
cuugagaagaccucaccuagaaa

SEQ ID NO: 2652848 - RNA, 22 nt, Human
cuugagacacggagcccagccc

SEQ ID NO: 2652849 - RNA, 17 nt, Human
cuugagacacggagccc

SEQ ID NO: 2652850 - RNA, 12 nt, Human
cuugagcccugg

SEQ ID NO: 2652851 - RNA, 13 nt, Human
cuugagcccuggc

SEQ ID NO: 2652852 - RNA, 14 nt, Human
cuugagcccuggcu

SEQ ID NO: 2652853 - RNA, 20 nt, Human
cuugagcccuggcuguucug

SEQ ID NO: 2652854 - RNA, 15 nt, Human
cuugagccugggagg

SEQ ID NO: 2652855 - RNA, 12 nt, Human
cuugagccuggg

SEQ ID NO: 2652856 - RNA, 20 nt, Human
cuugagccgggccccugggc

SEQ ID NO: 2652857 - RNA, 17 nt, Human
cuugagccgggccccug

SEQ ID NO: 2652858 - RNA, 19 nt, Human
cuugagccgggccccuggg

SEQ ID NO: 2652859 - RNA, 13 nt, Human
cuugagggcugca

SEQ ID NO: 2652860 - RNA, 14 nt, Human
cuugagggcugcag

SEQ ID NO: 2652861 - RNA, 15 nt, Human
cuugagggcugcagu

SEQ ID NO: 2652862 - RNA, 23 nt, Human
cuugagggcugcaguucuacuca

SEQ ID NO: 2652863 - RNA, 21 nt, Human
gaccuuaggccuuccucucuc

SEQ ID NO: 2652864 - RNA, 18 nt, Human
gaccuuaggccuuccucu

SEQ ID NO: 2652865 - RNA, 16 nt, Human
gaccuuaggccuuccu

SEQ ID NO: 2652866 - RNA, 15 nt, Human
gaccuuaggccuucc

SEQ ID NO: 2652867 - RNA, 13 nt, Human
gaccuuaggccuu

SEQ ID NO: 2652868 - RNA, 17 nt, Human
gaccuguaacuuuugua

SEQ ID NO: 2652869 - RNA, 21 nt, Human
gaccuguauauuuguaaagcu

SEQ ID NO: 2652870 - RNA, 23 nt, Human
gaccuguauauuuguaaagcuau

SEQ ID NO: 2652871 - RNA, 22 nt, Human
gaccuggcacuggaugcagaaa

SEQ ID NO: 2652872 - RNA, 18 nt, Human
gaccuggcacuggaugca

SEQ ID NO: 2652873 - RNA, 19 nt, Human
gaccuggggcugcugugaa

SEQ ID NO: 2652874 - RNA, 20 nt, Human
gaccuggcaucuaauucuga

SEQ ID NO: 2652875 - RNA, 19 nt, Human
gacguuuauaaacagaaau

SEQ ID NO: 2652876 - RNA, 23 nt, Human
gacguuuauaaacagaaauggaa

SEQ ID NO: 2652877 - RNA, 16 nt, Human
gacuaacucaaauaca

SEQ ID NO: 2652878 - RNA, 16 nt, Human
gacuaagagaaguugu

SEQ ID NO: 2652879 - RNA, 23 nt, Human
gacuaagagaaguuguaaaguau

SEQ ID NO: 2652880 - RNA, 19 nt, Human
gacggcaggcucacugcca

SEQ ID NO: 2652881 - RNA, 11 nt, Human
gacggcaggcu

SEQ ID NO: 2652882 - RNA, 16 nt, Human
gacggcaggcucacug

SEQ ID NO: 2652883 - RNA, 20 nt, Human
gacggcaggcucacugccag

SEQ ID NO: 2652884 - RNA, 16 nt, Human
gacggccaagaaugua

SEQ ID NO: 2652885 - RNA, 11 nt, Human
gacgugcuggg

SEQ ID NO: 2652886 - RNA, 22 nt, Human
gacgugaccggacuuuucugca

SEQ ID NO: 2652887 - RNA, 15 nt, Human
gacuaauuaggcaag

SEQ ID NO: 2652888 - RNA, 19 nt, Human
gacucgguuucuccaaacu

SEQ ID NO: 2652889 - RNA, 13 nt, Human
gacugauuuuaau

SEQ ID NO: 2652890 - RNA, 22 nt, Human
gacugagugggaagcccauccu

SEQ ID NO: 2652891 - RNA, 15 nt, Human
gacugagugggaagc

SEQ ID NO: 2652892 - RNA, 16 nt, Human
gacugagugggaagcc

SEQ ID NO: 2652893 - RNA, 17 nt, Human
gacugagugggaagccc

SEQ ID NO: 2652894 - RNA, 16 nt, Human
gacugacugaggcagu

SEQ ID NO: 2652895 - RNA, 21 nt, Human
gacugaccuuguaaaagacag

SEQ ID NO: 2652896 - RNA, 15 nt, Human
gacugacugaggcag

SEQ ID NO: 2652897 - RNA, 14 nt, Human
gacugacugaggca

SEQ ID NO: 2652898 - RNA, 12 nt, Human
gacugcuaaaua

SEQ ID NO: 2652899 - RNA, 14 nt, Human
gacugcuaaauaaa

SEQ ID NO: 2652900 - RNA, 17 nt, Human
gacugcuaaauaaaauu

SEQ ID NO: 2652901 - RNA, 18 nt, Human
gacugcuaaauaaaauuu

SEQ ID NO: 2652902 - RNA, 21 nt, Human
gacugcuaccuuucaaagcuu

SEQ ID NO: 2652903 - RNA, 10 nt, Human
gacuggcuuu

SEQ ID NO: 2652904 - RNA, 20 nt, Human
gacuggcuuuuauuaaugca

SEQ ID NO: 2652905 - RNA, 21 nt, Human
gacuggcuuuuauuaaugcac

SEQ ID NO: 2652906 - RNA, 22 nt, Human
gacuggcuuuuauuaaugcacu

SEQ ID NO: 2652907 - RNA, 23 nt, Human
gacuggcuuuuauuaaugcacuu

SEQ ID NO: 2652908 - RNA, 12 nt, Human
gacuucaaagca

SEQ ID NO: 2652909 - RNA, 17 nt, Human
gacuucaaagcaagcug

SEQ ID NO: 2652910 - RNA, 16 nt, Human
gacuuagggcaccagg

SEQ ID NO: 2652911 - RNA, 17 nt, Human
gacuuagggcaccaggg

SEQ ID NO: 2652912 - RNA, 23 nt, Human
gacuuagaaucccuguguuaauu

SEQ ID NO: 2652913 - RNA, 21 nt, Human
gacuuagaaucccuguguuaa

SEQ ID NO: 2652914 - RNA, 20 nt, Human
gacuuagaaucccuguguua

SEQ ID NO: 2652915 - RNA, 12 nt, Human
gacuuagaaucc

SEQ ID NO: 2652916 - RNA, 15 nt, Human
gaccagaggagccuu

SEQ ID NO: 2652917 - RNA, 18 nt, Human
gaccagaggagccuuuuu

SEQ ID NO: 2652918 - RNA, 19 nt, Human
gaccagaggagccuuuuua

SEQ ID NO: 2652919 - RNA, 21 nt, Human
gaccagaggagccuuuuuaaa

SEQ ID NO: 2652920 - RNA, 15 nt, Human
gaccaagcaucuugg

SEQ ID NO: 2652921 - RNA, 20 nt, Human
gaccaagcaucuuggggggg

SEQ ID NO: 2652922 - RNA, 18 nt, Human
gaccacaaaacuuuucua

SEQ ID NO: 2652923 - RNA, 10 nt, Human
gacccagugc

SEQ ID NO: 2652924 - RNA, 12 nt, Human
gacccagugcag

SEQ ID NO: 2652925 - RNA, 13 nt, Human
gacccagugcaga

SEQ ID NO: 2652926 - RNA, 14 nt, Human
gacccagugcagaa

SEQ ID NO: 2652927 - RNA, 15 nt, Human
gacccccguggggca

SEQ ID NO: 2652928 - RNA, 17 nt, Human
gaccccccgugggcucc

SEQ ID NO: 2652929 - RNA, 19 nt, Human
gaccccagcaagugguccu

SEQ ID NO: 2652930 - RNA, 15 nt, Human
gaccccagccaucca

SEQ ID NO: 2652931 - RNA, 13 nt, Human
gacccauugcugu

SEQ ID NO: 2652932 - RNA, 15 nt, Human
gacccauugcuguug

SEQ ID NO: 2652933 - RNA, 14 nt, Human
gacccauugcuguu

SEQ ID NO: 2652934 - RNA, 15 nt, Human
gacaucacagggugg

SEQ ID NO: 2652935 - RNA, 16 nt, Human
gacaucacaggguggg

SEQ ID NO: 2652936 - RNA, 19 nt, Human
gacaucacagggugggccu

SEQ ID NO: 2652937 - RNA, 15 nt, Human
gacacggagcccagc

SEQ ID NO: 2652938 - RNA, 15 nt, Human
gaagucauuaaacug

SEQ ID NO: 2652939 - RNA, 21 nt, Human
gaaguauguauauuaaaaaag

SEQ ID NO: 2652940 - RNA, 17 nt, Human
gaagucauuaaacuggu

SEQ ID NO: 2652941 - RNA, 18 nt, Human
gaagucucuagguucuga

SEQ ID NO: 2652942 - RNA, 17 nt, Human
gaagucuuaaggacaaa

SEQ ID NO: 2652943 - RNA, 19 nt, Human
gaagucuuacuacagaaau

SEQ ID NO: 2652944 - RNA, 14 nt, Human
gaagcggcuggcag

SEQ ID NO: 2652945 - RNA, 22 nt, Human
gaagguggauggccccagcaca

SEQ ID NO: 2652946 - RNA, 15 nt, Human
gaaguaaugaauuuu

SEQ ID NO: 2652947 - RNA, 13 nt, Human
gaaguaaugaauu

SEQ ID NO: 2652948 - RNA, 16 nt, Human
gaauaccacaucaaau

SEQ ID NO: 2652949 - RNA, 19 nt, Human
gaauaccacaucaaauaag

SEQ ID NO: 2652950 - RNA, 22 nt, Human
gaauaccacaucaaauaagaaa

SEQ ID NO: 2652951 - RNA, 19 nt, Human
gaauauuuuuauauuuccu

SEQ ID NO: 2652952 - RNA, 20 nt, Human
gaauauuuuuauauuuccuu

SEQ ID NO: 2652953 - RNA, 21 nt, Human
gaauauuuuuauauuuccuuu

SEQ ID NO: 2652954 - RNA, 22 nt, Human
gaauauuuuuauauuuccuuua

SEQ ID NO: 2652955 - RNA, 14 nt, Human
gaaucaaaagugcc

SEQ ID NO: 2652956 - RNA, 15 nt, Human
gaaucaaaagugccu

SEQ ID NO: 2652957 - RNA, 23 nt, Human
gaaucaaaagugccucaagagga

SEQ ID NO: 2652958 - RNA, 17 nt, Human
gaauaauacaguaucuc

SEQ ID NO: 2652959 - RNA, 12 nt, Human
gaauaagaauuu

SEQ ID NO: 2652960 - RNA, 14 nt, Human
gaauaagaauuugc

SEQ ID NO: 2652961 - RNA, 15 nt, Human
gaauaagaauuugca

SEQ ID NO: 2652962 - RNA, 16 nt, Human
gaauaagaauuugcau

SEQ ID NO: 2652963 - RNA, 17 nt, Human
gaauaagaauuugcaua

SEQ ID NO: 2652964 - RNA, 21 nt, Human
gaauacagaggcaacugcauu

SEQ ID NO: 2652965 - RNA, 12 nt, Human
gaaguuuuccua

SEQ ID NO: 2652966 - RNA, 21 nt, Human
gaauaaaaggcuugaagcugu

SEQ ID NO: 2652967 - RNA, 14 nt, Human
gaaguuuggcugcu

SEQ ID NO: 2652968 - RNA, 20 nt, Human
gaaguuugagaucagccugg

SEQ ID NO: 2652969 - RNA, 13 nt, Human
gaaugguggugga

SEQ ID NO: 2652970 - RNA, 19 nt, Human
gaauggugugaacccggga

SEQ ID NO: 2652971 - RNA, 19 nt, Human
gaaugccaucuaucuaguu

SEQ ID NO: 2652972 - RNA, 16 nt, Human
gaauguauuuauuugg

SEQ ID NO: 2652973 - RNA, 13 nt, Human
gaauguauuuauu

SEQ ID NO: 2652974 - RNA, 22 nt, Human
gaaugccacugccuucgcuucu

SEQ ID NO: 2652975 - RNA, 21 nt, Human
gaaugccacugccuucgcuuc

SEQ ID NO: 2652976 - RNA, 15 nt, Human
gaauucugauugauu

SEQ ID NO: 2652977 - RNA, 14 nt, Human
gaauugaaaaguuu

SEQ ID NO: 2652978 - RNA, 17 nt, Human
gaauugaaaaguuuuug

SEQ ID NO: 2652979 - RNA, 22 nt, Human
gaauugaaaaguuuuuguuugg

SEQ ID NO: 2652980 - RNA, 13 nt, Human
gaauucagacauc

SEQ ID NO: 2652981 - RNA, 23 nt, Human
gaauucaaacuggggccuccaga

SEQ ID NO: 2652982 - RNA, 12 nt, Human
gaauuguggcua

SEQ ID NO: 2652983 - RNA, 18 nt, Human
gaauuguggcuauccuga

SEQ ID NO: 2652984 - RNA, 20 nt, Human
gaauuguggcuauccugauu

SEQ ID NO: 2652985 - RNA, 17 nt, Human
gaauuuaguauuaucaa

SEQ ID NO: 2652986 - RNA, 18 nt, Human
gaauuuaguauuaucaaa

SEQ ID NO: 2652987 - RNA, 16 nt, Human
gaauuuacuuccuugc

SEQ ID NO: 2652988 - RNA, 22 nt, Human
gaauuuaaagaaaaaaauguca

SEQ ID NO: 2652989 - RNA, 20 nt, Human
gaauuuaaagaaaaaaaugu

SEQ ID NO: 2652990 - RNA, 14 nt, Human
gaagcccaggagcc

SEQ ID NO: 2652991 - RNA, 16 nt, Human
gaagcccauccugacc

SEQ ID NO: 2652992 - RNA, 17 nt, Human
gaagcccauccugacca

SEQ ID NO: 2652993 - RNA, 21 nt, Human
gaagcccauccugaccagcug

SEQ ID NO: 2652994 - RNA, 17 nt, Human
gaagccccacaugucca

SEQ ID NO: 2652995 - RNA, 18 nt, Human
gaagccccacauguccag

SEQ ID NO: 2652996 - RNA, 23 nt, Human
gaagccccacauguccagcaccu

SEQ ID NO: 2652997 - RNA, 19 nt, Human
gaagcccauccugaccagc

SEQ ID NO: 2652998 - RNA, 15 nt, Human
gaagauacuuuguau

SEQ ID NO: 2652999 - RNA, 14 nt, Human
gaagauacuuugua

SEQ ID NO: 2653000 - RNA, 13 nt, Human
gaagauacuuugu

SEQ ID NO: 2653001 - RNA, 12 nt, Human
gaagauacuuug

SEQ ID NO: 2653002 - RNA, 20 nt, Human
gaagauaauauuaaggaaga

SEQ ID NO: 2653003 - RNA, 22 nt, Human
gaagccaaguggggugcuggga

SEQ ID NO: 2653004 - RNA, 23 nt, Human
gaagccaaguggggugcugggag

SEQ ID NO: 2653005 - RNA, 21 nt, Human
gaagccaagggaaaggggugc

SEQ ID NO: 2653006 - RNA, 13 nt, Human
gaagccaaguggg

SEQ ID NO: 2653007 - RNA, 19 nt, Human
gaagccaaguggggugcug

SEQ ID NO: 2653008 - RNA, 21 nt, Human
gaagccaaguggggugcuggg

SEQ ID NO: 2653009 - RNA, 14 nt, Human
gaagccaagggaaa

SEQ ID NO: 2653010 - RNA, 15 nt, Human
gaagccaagggaaag

SEQ ID NO: 2653011 - RNA, 16 nt, Human
gaagccaagggaaagg

SEQ ID NO: 2653012 - RNA, 17 nt, Human
gaagccaagggaaaggg

SEQ ID NO: 2653013 - RNA, 19 nt, Human
gaagccaagggaaaggggu

SEQ ID NO: 2653014 - RNA, 20 nt, Human
gaagccaagggaaaggggug

SEQ ID NO: 2653015 - RNA, 22 nt, Human
gaagaacguuuuuuccucagug

SEQ ID NO: 2653016 - RNA, 13 nt, Human
gaagaacugcagg

SEQ ID NO: 2653017 - RNA, 16 nt, Human
gaagaacugaaaggcu

SEQ ID NO: 2653018 - RNA, 14 nt, Human
gaagaacugcaggc

SEQ ID NO: 2653019 - RNA, 15 nt, Human
gaagaacugcaggcc

SEQ ID NO: 2653020 - RNA, 15 nt, Human
gaacuuuguauaguu

SEQ ID NO: 2653021 - RNA, 12 nt, Human
gaacuuuguaua

SEQ ID NO: 2653022 - RNA, 21 nt, Human
gaacuuuguauaguuauguaa

SEQ ID NO: 2653023 - RNA, 16 nt, Human
gaacuuuuguacugaa

SEQ ID NO: 2653024 - RNA, 20 nt, Human
gaacuuuuguacugaauuuu

SEQ ID NO: 2653025 - RNA, 21 nt, Human
gaacuuuuguacugaauuuuu

SEQ ID NO: 2653026 - RNA, 15 nt, Human
gaagagauccaaaga

SEQ ID NO: 2653027 - RNA, 16 nt, Human
gaagagauccaaagac

SEQ ID NO: 2653028 - RNA, 17 nt, Human
gaagagauccaaagacu

SEQ ID NO: 2653029 - RNA, 16 nt, Human
gaacucacuggggccu

SEQ ID NO: 2653030 - RNA, 14 nt, Human
gaacucacuggggc

SEQ ID NO: 2653031 - RNA, 21 nt, Human
gaacgaaccuuggccugggcc

SEQ ID NO: 2653032 - RNA, 22 nt, Human
gaacgaaccuuggccugggccg

SEQ ID NO: 2653033 - RNA, 19 nt, Human
gaacguuuuuuccucagug

SEQ ID NO: 2653034 - RNA, 16 nt, Human
gaaccuccccagccug

SEQ ID NO: 2653035 - RNA, 15 nt, Human
gaaccuccccagccu

SEQ ID NO: 2653036 - RNA, 22 nt, Human
gaaccuccccagccugcgccug

SEQ ID NO: 2653037 - RNA, 18 nt, Human
gaaccuccccagccugcg

SEQ ID NO: 2653038 - RNA, 17 nt, Human
gaaccuccccagccugc

SEQ ID NO: 2653039 - RNA, 13 nt, Human
gaaauuguauauu

SEQ ID NO: 2653040 - RNA, 19 nt, Human
gaaauuguauauuguaauu

SEQ ID NO: 2653041 - RNA, 23 nt, Human
gaaaauaguuuauuuuaaaacaa

SEQ ID NO: 2653042 - RNA, 20 nt, Human
gaaaauaguuuauuuuaaaa

SEQ ID NO: 2653043 - RNA, 19 nt, Human
gaaaauaguuuauuuuaaa

SEQ ID NO: 2653044 - RNA, 19 nt, Human
gaaaauacaacuuaaauaa

SEQ ID NO: 2653045 - RNA, 13 nt, Human
gaaaauaaagcua

SEQ ID NO: 2653046 - RNA, 15 nt, Human
gaaaauaguuuauuu

SEQ ID NO: 2653047 - RNA, 14 nt, Human
gaaaauaguuuauu

SEQ ID NO: 2653048 - RNA, 13 nt, Human
gaaaauaguuuau

SEQ ID NO: 2653049 - RNA, 23 nt, Human
gaacacugcacucuuaagcuucc

SEQ ID NO: 2653050 - RNA, 18 nt, Human
gaacauccaaccuuccca

SEQ ID NO: 2653051 - RNA, 17 nt, Human
gaacauccaaccuuccc

SEQ ID NO: 2653052 - RNA, 16 nt, Human
gaacauacuguucacu

SEQ ID NO: 2653053 - RNA, 22 nt, Human
gaacauacuguucacucacucu

SEQ ID NO: 2653054 - RNA, 13 nt, Human
gaacauacaaaug

SEQ ID NO: 2653055 - RNA, 23 nt, Human
gaacauacaaaugcaucuuugau

SEQ ID NO: 2653056 - RNA, 22 nt, Human
gaacauacaaaugcaucuuuga

SEQ ID NO: 2653057 - RNA, 17 nt, Human
gaacauacaaaugcauc

SEQ ID NO: 2653058 - RNA, 15 nt, Human
gaacauacaaaugca

SEQ ID NO: 2653059 - RNA, 21 nt, Human
gaacaguguggccucuucuga

SEQ ID NO: 2653060 - RNA, 21 nt, Human
gaacagugguggcaacauuca

SEQ ID NO: 2653061 - RNA, 17 nt, Human
gaugcaggcuccccuga

SEQ ID NO: 2653062 - RNA, 16 nt, Human
gaugcaggcuccccug

SEQ ID NO: 2653063 - RNA, 12 nt, Human
gaugcaggcucc

SEQ ID NO: 2653064 - RNA, 20 nt, Human
gaugcaggcuccccugagga

SEQ ID NO: 2653065 - RNA, 19 nt, Human
gaugcaggcuccccugagg

SEQ ID NO: 2653066 - RNA, 14 nt, Human
gaugaacaucuaac

SEQ ID NO: 2653067 - RNA, 14 nt, Human
gaugaauguauuua

SEQ ID NO: 2653068 - RNA, 20 nt, Human
gauccgacugcuuuggaccu

SEQ ID NO: 2653069 - RNA, 14 nt, Human
gauccgacugcuuu

SEQ ID NO: 2653070 - RNA, 17 nt, Human
gauccgacugcuuugga

SEQ ID NO: 2653071 - RNA, 18 nt, Human
gauccgacugcuuuggac

SEQ ID NO: 2653072 - RNA, 18 nt, Human
gauccuaggcauuugcug

SEQ ID NO: 2653073 - RNA, 22 nt, Human
gaucauaguuuuauuuauauuu

SEQ ID NO: 2653074 - RNA, 12 nt, Human
gaucauaguuuu

SEQ ID NO: 2653075 - RNA, 14 nt, Human
gaucauaguuuuau

SEQ ID NO: 2653076 - RNA, 13 nt, Human
gaucauaguuuua

SEQ ID NO: 2653077 - RNA, 19 nt, Human
gaucauaguuuuauuuaua

SEQ ID NO: 2653078 - RNA, 18 nt, Human
gaucauaguuuuauuuau

SEQ ID NO: 2653079 - RNA, 16 nt, Human
gaucauaguuuuauuu

SEQ ID NO: 2653080 - RNA, 15 nt, Human
gaucauaguuuuauu

SEQ ID NO: 2653081 - RNA, 18 nt, Human
gaucuaccagcauaaaua

SEQ ID NO: 2653082 - RNA, 23 nt, Human
gaucuacaugaggaacuguagau

SEQ ID NO: 2653083 - RNA, 19 nt, Human
gauccugggggccuggguu

SEQ ID NO: 2653084 - RNA, 15 nt, Human
gauccuccugcagac

SEQ ID NO: 2653085 - RNA, 16 nt, Human
gauccuccugcagacc

SEQ ID NO: 2653086 - RNA, 21 nt, Human
gauccuccugcagaccacgcc

SEQ ID NO: 2653087 - RNA, 22 nt, Human
gauccuccugcagaccacgccc

SEQ ID NO: 2653088 - RNA, 15 nt, Human
gauccucucaccuca

SEQ ID NO: 2653089 - RNA, 16 nt, Human
gauccucucaccucag

SEQ ID NO: 2653090 - RNA, 19 nt, Human
gauccucucaccucagccu

SEQ ID NO: 2653091 - RNA, 17 nt, Human
gauaaagaaaaaaauac

SEQ ID NO: 2653092 - RNA, 18 nt, Human
gauaaagaaaaaaauacu

SEQ ID NO: 2653093 - RNA, 18 nt, Human
gacuuccccggagggcug

SEQ ID NO: 2653094 - RNA, 17 nt, Human
gaguguguaugccaaga

SEQ ID NO: 2653095 - RNA, 14 nt, Human
gacuuccuugagac

SEQ ID NO: 2653096 - RNA, 23 nt, Human
gacuuccccggagggcugcggcg

SEQ ID NO: 2653097 - RNA, 20 nt, Human
gacuuccccggagggcugcg

SEQ ID NO: 2653098 - RNA, 19 nt, Human
gacuuccccggagggcugc

SEQ ID NO: 2653099 - RNA, 15 nt, Human
gaucaggcucccagg

SEQ ID NO: 2653100 - RNA, 14 nt, Human
gaucaggcucccag

SEQ ID NO: 2653101 - RNA, 13 nt, Human
gaucacugccaca

SEQ ID NO: 2653102 - RNA, 15 nt, Human
gaucacugccacacu

SEQ ID NO: 2653103 - RNA, 16 nt, Human
gaucacugccacacuc

SEQ ID NO: 2653104 - RNA, 23 nt, Human
gauaucgacuuguuuuugcacau

SEQ ID NO: 2653105 - RNA, 15 nt, Human
gauaucuauaaaaua

SEQ ID NO: 2653106 - RNA, 17 nt, Human
gauaucuauaaaauaga

SEQ ID NO: 2653107 - RNA, 23 nt, Human
gauaucuauaaaauagauauaaa

SEQ ID NO: 2653108 - RNA, 16 nt, Human
gauaucaugcaaauuu

SEQ ID NO: 2653109 - RNA, 14 nt, Human
gaucacagccucug

SEQ ID NO: 2653110 - RNA, 23 nt, Human
gaucaccgacugaaaauauuguu

SEQ ID NO: 2653111 - RNA, 15 nt, Human
gauaauauuguuugg

SEQ ID NO: 2653112 - RNA, 22 nt, Human
gauaauauuguuugguaaaugu

SEQ ID NO: 2653113 - RNA, 15 nt, Human
gauaauuucagggug

SEQ ID NO: 2653114 - RNA, 19 nt, Human
gauauauaggcuauuuucu

SEQ ID NO: 2653115 - RNA, 21 nt, Human
gauauauaggcuauuuucuaa

SEQ ID NO: 2653116 - RNA, 15 nt, Human
gauaguugcuauuuu

SEQ ID NO: 2653117 - RNA, 22 nt, Human
gauaguugcuauuuuuguaaag

SEQ ID NO: 2653118 - RNA, 23 nt, Human
gauaguugcuauuuuuguaaagu

SEQ ID NO: 2653119 - RNA, 17 nt, Human
gcaaucucuucauuauu

SEQ ID NO: 2653120 - RNA, 23 nt, Human
gcaaucucuucauuauucucugc

SEQ ID NO: 2653121 - RNA, 20 nt, Human
gcaacuuuuguguaaugaaa

SEQ ID NO: 2653122 - RNA, 14 nt, Human
gcaacuucuucucc

SEQ ID NO: 2653123 - RNA, 18 nt, Human
gcaacuucuucuccaucc

SEQ ID NO: 2653124 - RNA, 20 nt, Human
gcaacuucuucuccaucccu

SEQ ID NO: 2653125 - RNA, 13 nt, Human
gcaagaugugaau

SEQ ID NO: 2653126 - RNA, 14 nt, Human
gcaagaugugaauu

SEQ ID NO: 2653127 - RNA, 15 nt, Human
gcaagaugugaauua

SEQ ID NO: 2653128 - RNA, 17 nt, Human
gcaagaugugaauuauu

SEQ ID NO: 2653129 - RNA, 21 nt, Human
gcaagaugugaauuauugaca

SEQ ID NO: 2653130 - RNA, 12 nt, Human
gcaagcagagga

SEQ ID NO: 2653131 - RNA, 13 nt, Human
gcaagcagaggac

SEQ ID NO: 2653132 - RNA, 14 nt, Human
gcaagcagaggacc

SEQ ID NO: 2653133 - RNA, 16 nt, Human
gcaagcagaggaccag

SEQ ID NO: 2653134 - RNA, 21 nt, Human
gcaagcagaggaccagggccu

SEQ ID NO: 2653135 - RNA, 11 nt, Human
gcaagcaugcu

SEQ ID NO: 2653136 - RNA, 15 nt, Human
gcaagcaugcuugug

SEQ ID NO: 2653137 - RNA, 16 nt, Human
gcaagcaugcuuguga

SEQ ID NO: 2653138 - RNA, 20 nt, Human
gauuucuuuaaaagaaugac

SEQ ID NO: 2653139 - RNA, 16 nt, Human
gcaaacccauuaaggg

SEQ ID NO: 2653140 - RNA, 14 nt, Human
gcaaacgcuaaaga

SEQ ID NO: 2653141 - RNA, 12 nt, Human
gcaaagaaaaug

SEQ ID NO: 2653142 - RNA, 16 nt, Human
gcaaaugagcucugaa

SEQ ID NO: 2653143 - RNA, 18 nt, Human
gcaacugcauuggcuuug

SEQ ID NO: 2653144 - RNA, 13 nt, Human
gauuguucaucau

SEQ ID NO: 2653145 - RNA, 22 nt, Human
gauuuguugccaugugcaccuu

SEQ ID NO: 2653146 - RNA, 21 nt, Human
gauuuguuguucuuucagaaa

SEQ ID NO: 2653147 - RNA, 19 nt, Human
gauuuccagaaccacacuu

SEQ ID NO: 2653148 - RNA, 22 nt, Human
gauuuccagaaccacacuugaa

SEQ ID NO: 2653149 - RNA, 15 nt, Human
gauuugaaaaauaua

SEQ ID NO: 2653150 - RNA, 16 nt, Human
gauuugaaaaauauaa

SEQ ID NO: 2653151 - RNA, 21 nt, Human
gauuugaaaaauauaaaauua

SEQ ID NO: 2653152 - RNA, 18 nt, Human
gauugcugauaauaaauu

SEQ ID NO: 2653153 - RNA, 17 nt, Human
gauuccacuacaccugg

SEQ ID NO: 2653154 - RNA, 20 nt, Human
gauuccacuacaccuggcug

SEQ ID NO: 2653155 - RNA, 22 nt, Human
gaugcggccauucaaggggagc

SEQ ID NO: 2653156 - RNA, 19 nt, Human
gauguuuccagacuuccuu

SEQ ID NO: 2653157 - RNA, 13 nt, Human
gauguuuccagac

SEQ ID NO: 2653158 - RNA, 12 nt, Human
gauguuuccaga

SEQ ID NO: 2653159 - RNA, 20 nt, Human
gauuaauuugcaucugaaau

SEQ ID NO: 2653160 - RNA, 13 nt, Human
gauucaggaaugu

SEQ ID NO: 2653161 - RNA, 13 nt, Human
gauucagucacau

SEQ ID NO: 2653162 - RNA, 14 nt, Human
gauucagucacaug

SEQ ID NO: 2653163 - RNA, 22 nt, Human
gauucagucacauggcaugguu

SEQ ID NO: 2653164 - RNA, 12 nt, Human
gauucaugauuu

SEQ ID NO: 2653165 - RNA, 17 nt, Human
gauucaugauuuauaaa

SEQ ID NO: 2653166 - RNA, 14 nt, Human
gcagccuggacccu

SEQ ID NO: 2653167 - RNA, 19 nt, Human
gcagccucugucaggccuu

SEQ ID NO: 2653168 - RNA, 21 nt, Human
gcagcaggugauuggaccagg

SEQ ID NO: 2653169 - RNA, 20 nt, Human
gcagcagggagggcuucugc

SEQ ID NO: 2653170 - RNA, 12 nt, Human
gcagcaccuccu

SEQ ID NO: 2653171 - RNA, 16 nt, Human
gcagcaccgaggggcc

SEQ ID NO: 2653172 - RNA, 20 nt, Human
gcagcaccgaggggccuuug

SEQ ID NO: 2653173 - RNA, 14 nt, Human
gcagcaaauuuuca

SEQ ID NO: 2653174 - RNA, 14 nt, Human
gcagaugccacccu

SEQ ID NO: 2653175 - RNA, 16 nt, Human
gcagaugccacccuag

SEQ ID NO: 2653176 - RNA, 17 nt, Human
gcagaugccacccuagc

SEQ ID NO: 2653177 - RNA, 18 nt, Human
gcagaugccacccuagcc

SEQ ID NO: 2653178 - RNA, 14 nt, Human
gcaccucuuccuug

SEQ ID NO: 2653179 - RNA, 20 nt, Human
gcaccucuuccuugauguuu

SEQ ID NO: 2653180 - RNA, 12 nt, Human
gcacagcucagg

SEQ ID NO: 2653181 - RNA, 20 nt, Human
gcacagcucaggaggcgccc

SEQ ID NO: 2653182 - RNA, 15 nt, Human
gcacagcucaggagg

SEQ ID NO: 2653183 - RNA, 15 nt, Human
gcacagcuaauucua

SEQ ID NO: 2653184 - RNA, 15 nt, Human
gcacaggaggcaggc

SEQ ID NO: 2653185 - RNA, 16 nt, Human
gcacaggaggcaggca

SEQ ID NO: 2653186 - RNA, 20 nt, Human
gcacaggaggcaggcauggc

SEQ ID NO: 2653187 - RNA, 21 nt, Human
gcacaggaggcaggcauggcc

SEQ ID NO: 2653188 - RNA, 22 nt, Human
gcacaggaggcaggcauggccc

SEQ ID NO: 2653189 - RNA, 18 nt, Human
gcacccaccguggaggag

SEQ ID NO: 2653190 - RNA, 19 nt, Human
gcacccaccguggaggagg

SEQ ID NO: 2653191 - RNA, 19 nt, Human
gcaccacugcacuccagcc

SEQ ID NO: 2653192 - RNA, 17 nt, Human
gcaccaccaagccaagg

SEQ ID NO: 2653193 - RNA, 23 nt, Human
gcaccacgggacaucacagggug

SEQ ID NO: 2653194 - RNA, 18 nt, Human
gcaccaccaagccaaggg

SEQ ID NO: 2653195 - RNA, 11 nt, Human
gcacccagaac

SEQ ID NO: 2653196 - RNA, 12 nt, Human
gcacccagaaca

SEQ ID NO: 2653197 - RNA, 14 nt, Human
gcacccagaacagu

SEQ ID NO: 2653198 - RNA, 20 nt, Human
gcacccaccguggaggagga

SEQ ID NO: 2653199 - RNA, 17 nt, Human
gcauuugcugaauacag

SEQ ID NO: 2653200 - RNA, 23 nt, Human
gcauuugcugaauacagaggcaa

SEQ ID NO: 2653201 - RNA, 22 nt, Human
gcauucguuguguuuuuuaaga

SEQ ID NO: 2653202 - RNA, 23 nt, Human
gcauucguuguguuuuuuaagau

SEQ ID NO: 2653203 - RNA, 14 nt, Human
gcauuuucccagau

SEQ ID NO: 2653204 - RNA, 22 nt, Human
gcauuuugcuaaaugugaauga

SEQ ID NO: 2653205 - RNA, 17 nt, Human
gcauugccauguggaag

SEQ ID NO: 2653206 - RNA, 21 nt, Human
gccaaaauuaagguguuugaa

SEQ ID NO: 2653207 - RNA, 14 nt, Human
gccaaaauuaaggu

SEQ ID NO: 2653208 - RNA, 17 nt, Human
gccaaaauauuuggaau

SEQ ID NO: 2653209 - RNA, 17 nt, Human
gccaaaauucauuucua

SEQ ID NO: 2653210 - RNA, 23 nt, Human
gccaaaauuaagguguuugaaaa

SEQ ID NO: 2653211 - RNA, 13 nt, Human
gcauggaaaucag

SEQ ID NO: 2653212 - RNA, 16 nt, Human
gcauggaaaucagcca

SEQ ID NO: 2653213 - RNA, 19 nt, Human
gcauggaaaucagccaagu

SEQ ID NO: 2653214 - RNA, 16 nt, Human
gcaugcuucuucucaa

SEQ ID NO: 2653215 - RNA, 15 nt, Human
gcauuauaaaaagaa

SEQ ID NO: 2653216 - RNA, 14 nt, Human
gcauucauuuuuau

SEQ ID NO: 2653217 - RNA, 15 nt, Human
gcauucauuuuuaua

SEQ ID NO: 2653218 - RNA, 17 nt, Human
gcauucauuuuuauagc

SEQ ID NO: 2653219 - RNA, 18 nt, Human
gcauucauuuuuauagca

SEQ ID NO: 2653220 - RNA, 19 nt, Human
gcauucauuuuuauagcaa

SEQ ID NO: 2653221 - RNA, 22 nt, Human
gcauucauuuuuauagcaacaa

SEQ ID NO: 2653222 - RNA, 16 nt, Human
gcauuccagccccucu

SEQ ID NO: 2653223 - RNA, 19 nt, Human
gcauuccagccccucuggu

SEQ ID NO: 2653224 - RNA, 12 nt, Human
gcauuccagccc

SEQ ID NO: 2653225 - RNA, 15 nt, Human
gcauuccagccccuc

SEQ ID NO: 2653226 - RNA, 15 nt, Human
gcauguuuuguugcu

SEQ ID NO: 2653227 - RNA, 14 nt, Human
gcaugcaugcaaau

SEQ ID NO: 2653228 - RNA, 14 nt, Human
gcaugcagcuuugc

SEQ ID NO: 2653229 - RNA, 17 nt, Human
gcaugcagcuuugcaaa

SEQ ID NO: 2653230 - RNA, 16 nt, Human
gcaugcaaaugagcuc

SEQ ID NO: 2653231 - RNA, 18 nt, Human
gcaugcaaaugagcucug

SEQ ID NO: 2653232 - RNA, 21 nt, Human
gcaugcaaaugagcucugaaa

SEQ ID NO: 2653233 - RNA, 14 nt, Human
gcaggcucacugcc

SEQ ID NO: 2653234 - RNA, 15 nt, Human
gcaggcucacugcca

SEQ ID NO: 2653235 - RNA, 22 nt, Human
gcaggcucacugccaggccagc

SEQ ID NO: 2653236 - RNA, 23 nt, Human
gcaggcucacugccaggccagcc

SEQ ID NO: 2653237 - RNA, 17 nt, Human
gcaggcucacugccagg

SEQ ID NO: 2653238 - RNA, 18 nt, Human
gcaggcucacugccaggc

SEQ ID NO: 2653239 - RNA, 19 nt, Human
gcaggcucacugccaggcc

SEQ ID NO: 2653240 - RNA, 21 nt, Human
gcaggcucacugccaggccag

SEQ ID NO: 2653241 - RNA, 22 nt, Human
gcaggauugaaaauguccagga

SEQ ID NO: 2653242 - RNA, 14 nt, Human
gcaggauugaaaau

SEQ ID NO: 2653243 - RNA, 16 nt, Human
gcagggagggcuucug

SEQ ID NO: 2653244 - RNA, 23 nt, Human
gcagggguggggguggaggcuuc

SEQ ID NO: 2653245 - RNA, 21 nt, Human
gcaggugauuggaccaggcca

SEQ ID NO: 2653246 - RNA, 22 nt, Human
gcaggugauuggaccaggccau

SEQ ID NO: 2653247 - RNA, 17 nt, Human
gcaggggugggggugga

SEQ ID NO: 2653248 - RNA, 20 nt, Human
gcagggguggggguggaggc

SEQ ID NO: 2653249 - RNA, 21 nt, Human
gcagggguggggguggaggcu

SEQ ID NO: 2653250 - RNA, 17 nt, Human
gcaggugggcuggacuu

SEQ ID NO: 2653251 - RNA, 16 nt, Human
gcaggugcuggagcac

SEQ ID NO: 2653252 - RNA, 19 nt, Human
gcaggugcuggagcacugg

SEQ ID NO: 2653253 - RNA, 18 nt, Human
gcaggugcuggagcacug

SEQ ID NO: 2653254 - RNA, 21 nt, Human
gcaggugcuggagcacugggc

SEQ ID NO: 2653255 - RNA, 20 nt, Human
gcaggugcuggagcacuggg

SEQ ID NO: 2653256 - RNA, 18 nt, Human
gcaguucuacucaggcug

SEQ ID NO: 2653257 - RNA, 19 nt, Human
gcaguucuacucaggcugg

SEQ ID NO: 2653258 - RNA, 20 nt, Human
gcaguucuacucaggcuggu

SEQ ID NO: 2653259 - RNA, 19 nt, Human
gcauaggaccuuuccacca

SEQ ID NO: 2653260 - RNA, 17 nt, Human
gcauauaaugaauaaau

SEQ ID NO: 2653261 - RNA, 18 nt, Human
gcauauaaugaauaaauc

SEQ ID NO: 2653262 - RNA, 19 nt, Human
gcauauaaugaauaaauca

SEQ ID NO: 2653263 - RNA, 16 nt, Human
gcaguguggccaggcu

SEQ ID NO: 2653264 - RNA, 17 nt, Human
gcaguguggccaggcug

SEQ ID NO: 2653265 - RNA, 17 nt, Human
gcaguuagcugaagaau

SEQ ID NO: 2653266 - RNA, 22 nt, Human
gcaguuagcugaagaauugaaa

SEQ ID NO: 2653267 - RNA, 15 nt, Human
gcaguguuuugcaag

SEQ ID NO: 2653268 - RNA, 22 nt, Human
gcaguguuuugcaagugcugga

SEQ ID NO: 2653269 - RNA, 16 nt, Human
gcauauuauaaaggau

SEQ ID NO: 2653270 - RNA, 23 nt, Human
gcauauuauaaaggauaaagaag

SEQ ID NO: 2653271 - RNA, 22 nt, Human
gccccagccugcuagcuagcuc

SEQ ID NO: 2653272 - RNA, 12 nt, Human
gccccagccugc

SEQ ID NO: 2653273 - RNA, 11 nt, Human
gccccagccug

SEQ ID NO: 2653274 - RNA, 17 nt, Human
gccccagccugcuagcu

SEQ ID NO: 2653275 - RNA, 15 nt, Human
gccccagccugcuag

SEQ ID NO: 2653276 - RNA, 14 nt, Human
gccccagccugcua

SEQ ID NO: 2653277 - RNA, 13 nt, Human
gccccagccugcu

SEQ ID NO: 2653278 - RNA, 14 nt, Human
gccccagcccugcu

SEQ ID NO: 2653279 - RNA, 15 nt, Human
gccccagcccugcug

SEQ ID NO: 2653280 - RNA, 16 nt, Human
gccccagcccugcugg

SEQ ID NO: 2653281 - RNA, 17 nt, Human
gccccagcccugcuggg

SEQ ID NO: 2653282 - RNA, 18 nt, Human
gccccagcccugcugggg

SEQ ID NO: 2653283 - RNA, 20 nt, Human
gccccagcccugcuggggau

SEQ ID NO: 2653284 - RNA, 17 nt, Human
gcccaugcacuggggac

SEQ ID NO: 2653285 - RNA, 18 nt, Human
gcccaucgccacaaacuc

SEQ ID NO: 2653286 - RNA, 17 nt, Human
gcccaucgugaagaagc

SEQ ID NO: 2653287 - RNA, 19 nt, Human
gcccaucgugaagaagccu

SEQ ID NO: 2653288 - RNA, 20 nt, Human
gcccaucgugaagaagccug

SEQ ID NO: 2653289 - RNA, 14 nt, Human
gcccauccugacca

SEQ ID NO: 2653290 - RNA, 15 nt, Human
gcccauccugaccag

SEQ ID NO: 2653291 - RNA, 16 nt, Human
gcccauccugaccagc

SEQ ID NO: 2653292 - RNA, 18 nt, Human
gcccauccugaccagcug

SEQ ID NO: 2653293 - RNA, 15 nt, Human
gcccauccugacuga

SEQ ID NO: 2653294 - RNA, 20 nt, Human
gccccaucuccccucagcuc

SEQ ID NO: 2653295 - RNA, 21 nt, Human
gccccaucuccccucagcucg

SEQ ID NO: 2653296 - RNA, 19 nt, Human
gccccaucuccccucagcu

SEQ ID NO: 2653297 - RNA, 18 nt, Human
gccccaucuccccucagc

SEQ ID NO: 2653298 - RNA, 17 nt, Human
gccccaucuccccucag

SEQ ID NO: 2653299 - RNA, 12 nt, Human
gccccaucuccc

SEQ ID NO: 2653300 - RNA, 11 nt, Human
gcccagugcau

SEQ ID NO: 2653301 - RNA, 12 nt, Human
gcccagugcaug

SEQ ID NO: 2653302 - RNA, 14 nt, Human
gcccagugcauggu

SEQ ID NO: 2653303 - RNA, 20 nt, Human
gcccagugcaugguggccag

SEQ ID NO: 2653304 - RNA, 21 nt, Human
gcccagugcaugguggccaga

SEQ ID NO: 2653305 - RNA, 15 nt, Human
gcccaguagaccuug

SEQ ID NO: 2653306 - RNA, 17 nt, Human
gcccaguagaccuuguu

SEQ ID NO: 2653307 - RNA, 14 nt, Human
gcccaccugccggc

SEQ ID NO: 2653308 - RNA, 15 nt, Human
gcccaccugccggcc

SEQ ID NO: 2653309 - RNA, 14 nt, Human
gcccuccucuccca

SEQ ID NO: 2653310 - RNA, 18 nt, Human
gcccuccccauggagcca

SEQ ID NO: 2653311 - RNA, 19 nt, Human
gcccuccccauggagccag

SEQ ID NO: 2653312 - RNA, 11 nt, Human
gccccugggcu

SEQ ID NO: 2653313 - RNA, 23 nt, Human
gcccgcgccacaggacccucgcc

SEQ ID NO: 2653314 - RNA, 17 nt, Human
gcccgcgccacaggacc

SEQ ID NO: 2653315 - RNA, 15 nt, Human
gccccuggccgcgcu

SEQ ID NO: 2653316 - RNA, 19 nt, Human
gccccuggccgcgcuccgg

SEQ ID NO: 2653317 - RNA, 20 nt, Human
gccccuggccgcgcuccggg

SEQ ID NO: 2653318 - RNA, 21 nt, Human
gccccuggccgcgcuccgggc

SEQ ID NO: 2653319 - RNA, 19 nt, Human
gccccuagccgguuccugu

SEQ ID NO: 2653320 - RNA, 18 nt, Human
gccccuagccgguuccug

SEQ ID NO: 2653321 - RNA, 20 nt, Human
gccccuagccgguuccuguc

SEQ ID NO: 2653322 - RNA, 21 nt, Human
gccccucccacacccaaagcu

SEQ ID NO: 2653323 - RNA, 22 nt, Human
gccccucccacacccaaagcug

SEQ ID NO: 2653324 - RNA, 23 nt, Human
gccccucccacacccaaagcuga

SEQ ID NO: 2653325 - RNA, 19 nt, Human
gccccggggugaguccauu

SEQ ID NO: 2653326 - RNA, 21 nt, Human
gccccgcccccaguccccacc

SEQ ID NO: 2653327 - RNA, 15 nt, Human
gcccaccccucaaca

SEQ ID NO: 2653328 - RNA, 14 nt, Human
gcccacccccugcc

SEQ ID NO: 2653329 - RNA, 15 nt, Human
gcccacccccugccc

SEQ ID NO: 2653330 - RNA, 16 nt, Human
gcccacccccugcccu

SEQ ID NO: 2653331 - RNA, 17 nt, Human
gcccacccccugcccug

SEQ ID NO: 2653332 - RNA, 18 nt, Human
gcccacccccugcccugc

SEQ ID NO: 2653333 - RNA, 19 nt, Human
gcccacccccugcccugca

SEQ ID NO: 2653334 - RNA, 20 nt, Human
gcccacccccugcccugcac

SEQ ID NO: 2653335 - RNA, 18 nt, Human
gcccacccggugggaccc

SEQ ID NO: 2653336 - RNA, 22 nt, Human
gcccacccccugcccugcacgu

SEQ ID NO: 2653337 - RNA, 16 nt, Human
gcccacccugcugcug

SEQ ID NO: 2653338 - RNA, 17 nt, Human
gcccacccugcugcugg

SEQ ID NO: 2653339 - RNA, 18 nt, Human
gcccacccugcugcuggu

SEQ ID NO: 2653340 - RNA, 19 nt, Human
gcccacccugcugcuggug

SEQ ID NO: 2653341 - RNA, 20 nt, Human
gcccacccugcugcuggugc

SEQ ID NO: 2653342 - RNA, 21 nt, Human
gcccacccugcugcuggugca

SEQ ID NO: 2653343 - RNA, 22 nt, Human
gcccacccugcugcuggugcac

SEQ ID NO: 2653344 - RNA, 13 nt, Human
gccauuuauuuau

SEQ ID NO: 2653345 - RNA, 16 nt, Human
gccauuuauuuauuga

SEQ ID NO: 2653346 - RNA, 12 nt, Human
gccauuugcaau

SEQ ID NO: 2653347 - RNA, 17 nt, Human
gccauuugcaauaacag

SEQ ID NO: 2653348 - RNA, 20 nt, Human
gccauuugcaauaacagcug

SEQ ID NO: 2653349 - RNA, 22 nt, Human
gccauuugcaauaacagcugca

SEQ ID NO: 2653350 - RNA, 23 nt, Human
gccauuugcaauaacagcugcaa

SEQ ID NO: 2653351 - RNA, 18 nt, Human
gccauccccagggggcau

SEQ ID NO: 2653352 - RNA, 17 nt, Human
gccauggcucagggugg

SEQ ID NO: 2653353 - RNA, 23 nt, Human
gccauggcucaggguggucucuu

SEQ ID NO: 2653354 - RNA, 16 nt, Human
gccauccccagggggc

SEQ ID NO: 2653355 - RNA, 12 nt, Human
gccagucugugg

SEQ ID NO: 2653356 - RNA, 13 nt, Human
gccagucugugga

SEQ ID NO: 2653357 - RNA, 20 nt, Human
gccagucuguggaucagaga

SEQ ID NO: 2653358 - RNA, 17 nt, Human
gccaggggaaaaucagc

SEQ ID NO: 2653359 - RNA, 22 nt, Human
gccaggggaaaaucagccugcu

SEQ ID NO: 2653360 - RNA, 21 nt, Human
gccaggggaaaaucagccugc

SEQ ID NO: 2653361 - RNA, 15 nt, Human
gccagguaaugugaa

SEQ ID NO: 2653362 - RNA, 21 nt, Human
gccagguaaugugaauaaauu

SEQ ID NO: 2653363 - RNA, 15 nt, Human
gccaggugagaaacu

SEQ ID NO: 2653364 - RNA, 16 nt, Human
gccaggugagaaacug

SEQ ID NO: 2653365 - RNA, 23 nt, Human
gccaggggaaaaucagccugcuc

SEQ ID NO: 2653366 - RNA, 22 nt, Human
gccacguuggagaagcccgugu

SEQ ID NO: 2653367 - RNA, 21 nt, Human
gccacgugggcaaacaggcag

SEQ ID NO: 2653368 - RNA, 14 nt, Human
gccacucacuaggc

SEQ ID NO: 2653369 - RNA, 15 nt, Human
gccacucacuaggcc

SEQ ID NO: 2653370 - RNA, 18 nt, Human
gccacucacuaggccccc

SEQ ID NO: 2653371 - RNA, 19 nt, Human
gccacucacuaggccccca

SEQ ID NO: 2653372 - RNA, 23 nt, Human
gccacucacuaggcccccacuug

SEQ ID NO: 2653373 - RNA, 13 nt, Human
gccaaaggcuggc

SEQ ID NO: 2653374 - RNA, 14 nt, Human
gccagagccgggca

SEQ ID NO: 2653375 - RNA, 12 nt, Human
gccacucauuuc

SEQ ID NO: 2653376 - RNA, 13 nt, Human
gccacucauuuca

SEQ ID NO: 2653377 - RNA, 14 nt, Human
gccacucauuucau

SEQ ID NO: 2653378 - RNA, 15 nt, Human
gccacucauuucauc

SEQ ID NO: 2653379 - RNA, 16 nt, Human
gccacucauuucaucu

SEQ ID NO: 2653380 - RNA, 18 nt, Human
gccacucauuucaucuca

SEQ ID NO: 2653381 - RNA, 20 nt, Human
gccacucauuucaucucauu

SEQ ID NO: 2653382 - RNA, 17 nt, Human
gccagccuugagcccug

SEQ ID NO: 2653383 - RNA, 18 nt, Human
gccagccuugagcccugg

SEQ ID NO: 2653384 - RNA, 19 nt, Human
gccagccuugagcccuggc

SEQ ID NO: 2653385 - RNA, 20 nt, Human
gccagccuugagcccuggcu

SEQ ID NO: 2653386 - RNA, 22 nt, Human
gccagccuugagcccuggcugu

SEQ ID NO: 2653387 - RNA, 14 nt, Human
gccagcgccucccu

SEQ ID NO: 2653388 - RNA, 15 nt, Human
gccagcgccucccuc

SEQ ID NO: 2653389 - RNA, 16 nt, Human
gccagcgccucccucc

SEQ ID NO: 2653390 - RNA, 17 nt, Human
gccagcgccucccucca

SEQ ID NO: 2653391 - RNA, 18 nt, Human
gccagcgccucccuccac

SEQ ID NO: 2653392 - RNA, 20 nt, Human
gccagcgccucccuccaccc

SEQ ID NO: 2653393 - RNA, 21 nt, Human
gccagcgccucccuccacccc

SEQ ID NO: 2653394 - RNA, 22 nt, Human
gccagcgccucccuccacccca

SEQ ID NO: 2653395 - RNA, 23 nt, Human
gccagcgccucccuccaccccag

SEQ ID NO: 2653396 - RNA, 13 nt, Human
gccagcucccucu

SEQ ID NO: 2653397 - RNA, 13 nt, Human
gccagcuggccuu

SEQ ID NO: 2653398 - RNA, 16 nt, Human
gccagcuggccuuugu

SEQ ID NO: 2653399 - RNA, 18 nt, Human
gccagcuggccuuuguaa

SEQ ID NO: 2653400 - RNA, 18 nt, Human
gccagcuuggggccacca

SEQ ID NO: 2653401 - RNA, 22 nt, Human
gccagcuuggggccaccaaagc

SEQ ID NO: 2653402 - RNA, 15 nt, Human
gccagccccucuucc

SEQ ID NO: 2653403 - RNA, 20 nt, Human
gccagccccucuuccccaau

SEQ ID NO: 2653404 - RNA, 21 nt, Human
gccagcccggccgcuccacca

SEQ ID NO: 2653405 - RNA, 22 nt, Human
gccagcccggccgcuccaccag

SEQ ID NO: 2653406 - RNA, 15 nt, Human
gccagauguccuaau

SEQ ID NO: 2653407 - RNA, 17 nt, Human
gccuuuguaagugcagg

SEQ ID NO: 2653408 - RNA, 18 nt, Human
gccuuuugcaaccaggaa

SEQ ID NO: 2653409 - RNA, 14 nt, Human
gccuuuuaauuuuu

SEQ ID NO: 2653410 - RNA, 15 nt, Human
gccuuuucuggcacc

SEQ ID NO: 2653411 - RNA, 16 nt, Human
gccuuuucuggcaccg

SEQ ID NO: 2653412 - RNA, 22 nt, Human
gccuuuucuggcaccgcaguuu

SEQ ID NO: 2653413 - RNA, 14 nt, Human
gccuuuguucuggg

SEQ ID NO: 2653414 - RNA, 22 nt, Human
gccuuuuuaaaacacauguuuu

SEQ ID NO: 2653415 - RNA, 18 nt, Human
gccuuuuuaaaacacaug

SEQ ID NO: 2653416 - RNA, 12 nt, Human
gcgaccaccgcc

SEQ ID NO: 2653417 - RNA, 17 nt, Human
gcgaccauguggccaca

SEQ ID NO: 2653418 - RNA, 13 nt, Human
gcgacccuggggg

SEQ ID NO: 2653419 - RNA, 19 nt, Human
gcgacccugggggcacagg

SEQ ID NO: 2653420 - RNA, 23 nt, Human
gcgacccugggggcacaggaggc

SEQ ID NO: 2653421 - RNA, 17 nt, Human
gccuucgcuucuugccu

SEQ ID NO: 2653422 - RNA, 18 nt, Human
gccuuccauuuccccucu

SEQ ID NO: 2653423 - RNA, 23 nt, Human
gccuucagacagagaggacugua

SEQ ID NO: 2653424 - RNA, 13 nt, Human
gccuucagcucca

SEQ ID NO: 2653425 - RNA, 14 nt, Human
gccuucagcuccag

SEQ ID NO: 2653426 - RNA, 22 nt, Human
gccuucgcuucuugccucugug

SEQ ID NO: 2653427 - RNA, 20 nt, Human
gccuucgcuucuugccucug

SEQ ID NO: 2653428 - RNA, 21 nt, Human
gccuucgcuucuugccucugu

SEQ ID NO: 2653429 - RNA, 22 nt, Human
gccuugggcuauuuggacucag

SEQ ID NO: 2653430 - RNA, 21 nt, Human
gccuuagccgcccaugcacug

SEQ ID NO: 2653431 - RNA, 19 nt, Human
gccuucaaaacuauagcuu

SEQ ID NO: 2653432 - RNA, 22 nt, Human
gccuucaaaacuauagcuugca

SEQ ID NO: 2653433 - RNA, 15 nt, Human
gccuguaaucccagc

SEQ ID NO: 2653434 - RNA, 22 nt, Human
gccuguaacacuccucugcguc

SEQ ID NO: 2653435 - RNA, 13 nt, Human
gccuggacugcua

SEQ ID NO: 2653436 - RNA, 22 nt, Human
gccuggagauccuccugcagac

SEQ ID NO: 2653437 - RNA, 17 nt, Human
gccuggagauccuccug

SEQ ID NO: 2653438 - RNA, 18 nt, Human
gccuggagauccuccugc

SEQ ID NO: 2653439 - RNA, 19 nt, Human
gccuggagauccuccugca

SEQ ID NO: 2653440 - RNA, 20 nt, Human
gccuggagauccuccugcag

SEQ ID NO: 2653441 - RNA, 17 nt, Human
gccuggagacuuagggc

SEQ ID NO: 2653442 - RNA, 19 nt, Human
gccuggagacuuagggcac

SEQ ID NO: 2653443 - RNA, 23 nt, Human
gccuggagacuuagggcaccagg

SEQ ID NO: 2653444 - RNA, 16 nt, Human
gccuggagauccuccu

SEQ ID NO: 2653445 - RNA, 16 nt, Human
gcuacaugcugggguc

SEQ ID NO: 2653446 - RNA, 20 nt, Human
gcuaacauggugaaaccccg

SEQ ID NO: 2653447 - RNA, 13 nt, Human
gcuaacuguaaau

SEQ ID NO: 2653448 - RNA, 14 nt, Human
gcuaacuguaaauc

SEQ ID NO: 2653449 - RNA, 16 nt, Human
gcuaacuguaaaucau

SEQ ID NO: 2653450 - RNA, 20 nt, Human
gcguccuccucaccucaugc

SEQ ID NO: 2653451 - RNA, 11 nt, Human
gcgucccuggc

SEQ ID NO: 2653452 - RNA, 12 nt, Human
gcgucccuggcg

SEQ ID NO: 2653453 - RNA, 14 nt, Human
gcgucccuggcgca

SEQ ID NO: 2653454 - RNA, 18 nt, Human
gcgucccuggcgcaggug

SEQ ID NO: 2653455 - RNA, 13 nt, Human
gcgcuugcuggcc

SEQ ID NO: 2653456 - RNA, 15 nt, Human
gcgcuugcuggccag

SEQ ID NO: 2653457 - RNA, 17 nt, Human
gcgacuaaacuagauuu

SEQ ID NO: 2653458 - RNA, 20 nt, Human
gcgacuccguuggccacucc

SEQ ID NO: 2653459 - RNA, 18 nt, Human
gcgacuccguuggccacu

SEQ ID NO: 2653460 - RNA, 19 nt, Human
gcgacuccguuggccacuc

SEQ ID NO: 2653461 - RNA, 12 nt, Human
gcgacuuucugc

SEQ ID NO: 2653462 - RNA, 14 nt, Human
gcgcuccgggcuuu

SEQ ID NO: 2653463 - RNA, 23 nt, Human
gcgcucuguggaugccagggccg

SEQ ID NO: 2653464 - RNA, 16 nt, Human
gcgcucucuuugcaac

SEQ ID NO: 2653465 - RNA, 19 nt, Human
gcgcucucuuugcaacugu

SEQ ID NO: 2653466 - RNA, 19 nt, Human
gcgcugcccaccugccggc

SEQ ID NO: 2653467 - RNA, 23 nt, Human
gcgcugccccaucuccccucagc

SEQ ID NO: 2653468 - RNA, 16 nt, Human
gccucuccauuugcuc

SEQ ID NO: 2653469 - RNA, 22 nt, Human
gccucuccauuugcucuucaga

SEQ ID NO: 2653470 - RNA, 18 nt, Human
gccucuccccagguccag

SEQ ID NO: 2653471 - RNA, 14 nt, Human
gccucuccagccuc

SEQ ID NO: 2653472 - RNA, 15 nt, Human
gccucuccagccuca

SEQ ID NO: 2653473 - RNA, 14 nt, Human
gccucccuccaccc

SEQ ID NO: 2653474 - RNA, 15 nt, Human
gccucccuccacccc

SEQ ID NO: 2653475 - RNA, 16 nt, Human
gccucccuccacccca

SEQ ID NO: 2653476 - RNA, 17 nt, Human
gccucccuccaccccag

SEQ ID NO: 2653477 - RNA, 18 nt, Human
gccucccuccaccccagg

SEQ ID NO: 2653478 - RNA, 19 nt, Human
gccucccuccaccccagga

SEQ ID NO: 2653479 - RNA, 20 nt, Human
gccucccuccaccccaggac

SEQ ID NO: 2653480 - RNA, 21 nt, Human
gccucccuccaccccaggacg

SEQ ID NO: 2653481 - RNA, 19 nt, Human
gccucccuccccagugcaa

SEQ ID NO: 2653482 - RNA, 20 nt, Human
gccucuccccagguccagcu

SEQ ID NO: 2653483 - RNA, 22 nt, Human
gccucuccccagguccagcucu

SEQ ID NO: 2653484 - RNA, 23 nt, Human
gccucuccccagguccagcucug

SEQ ID NO: 2653485 - RNA, 23 nt, Human
gccuccccauuucccaucugcac

SEQ ID NO: 2653486 - RNA, 21 nt, Human
gccuccccauuucccaucugc

SEQ ID NO: 2653487 - RNA, 22 nt, Human
gccuccccauuucccaucugca

SEQ ID NO: 2653488 - RNA, 13 nt, Human
gccuccccauuuc

SEQ ID NO: 2653489 - RNA, 16 nt, Human
gccuccccauuuccca

SEQ ID NO: 2653490 - RNA, 18 nt, Human
gccuccccauuucccauc

SEQ ID NO: 2653491 - RNA, 19 nt, Human
gccuccccauuucccaucu

SEQ ID NO: 2653492 - RNA, 20 nt, Human
gccuccccauuucccaucug

SEQ ID NO: 2653493 - RNA, 16 nt, Human
gccuccccaccuccag

SEQ ID NO: 2653494 - RNA, 17 nt, Human
gccuccccaccuccagg

SEQ ID NO: 2653495 - RNA, 18 nt, Human
gccuccccaccuccaggc

SEQ ID NO: 2653496 - RNA, 22 nt, Human
gccugagaggcaggcauagagg

SEQ ID NO: 2653497 - RNA, 16 nt, Human
gccucugaaaagugug

SEQ ID NO: 2653498 - RNA, 22 nt, Human
gccugagcccuacucccugcag

SEQ ID NO: 2653499 - RNA, 22 nt, Human
gccugcuggcacccaccgugga

SEQ ID NO: 2653500 - RNA, 13 nt, Human
gccugcuggcacc

SEQ ID NO: 2653501 - RNA, 16 nt, Human
gccugcuggcacccac

SEQ ID NO: 2653502 - RNA, 17 nt, Human
gccugcuggcacccacc

SEQ ID NO: 2653503 - RNA, 19 nt, Human
gccugcuggcacccaccgu

SEQ ID NO: 2653504 - RNA, 14 nt, Human
gccuggacccugug

SEQ ID NO: 2653505 - RNA, 14 nt, Human
gccugcccagacaa

SEQ ID NO: 2653506 - RNA, 15 nt, Human
gccugcccagacaag

SEQ ID NO: 2653507 - RNA, 16 nt, Human
gccugcccagacaaga

SEQ ID NO: 2653508 - RNA, 10 nt, Human
gccugcuggc

SEQ ID NO: 2653509 - RNA, 19 nt, Human
gccgagacucgacucugug

SEQ ID NO: 2653510 - RNA, 21 nt, Human
gccgagacucgacucugugcc

SEQ ID NO: 2653511 - RNA, 23 nt, Human
gccgagacucgacucugugccuc

SEQ ID NO: 2653512 - RNA, 17 nt, Human
gcccuuccugcugcgca

SEQ ID NO: 2653513 - RNA, 14 nt, Human
gccgauagagggac

SEQ ID NO: 2653514 - RNA, 21 nt, Human
gccgauagagggacggccaag

SEQ ID NO: 2653515 - RNA, 22 nt, Human
gccgauagagggacggccaaga

SEQ ID NO: 2653516 - RNA, 12 nt, Human
gccgggccccug

SEQ ID NO: 2653517 - RNA, 22 nt, Human
gccgggcacauugagcugugca

SEQ ID NO: 2653518 - RNA, 12 nt, Human
gccggggaagag

SEQ ID NO: 2653519 - RNA, 22 nt, Human
gccggggaagagauccaaagac

SEQ ID NO: 2653520 - RNA, 14 nt, Human
gccgggccccuggg

SEQ ID NO: 2653521 - RNA, 17 nt, Human
gccgggccccugggcuu

SEQ ID NO: 2653522 - RNA, 19 nt, Human
gccgggccccugggcuugg

SEQ ID NO: 2653523 - RNA, 18 nt, Human
gccguugcugacuuagaa

SEQ ID NO: 2653524 - RNA, 17 nt, Human
gccguugcugacuuaga

SEQ ID NO: 2653525 - RNA, 19 nt, Human
gccguugcugacuuagaau

SEQ ID NO: 2653526 - RNA, 23 nt, Human
gccgucuccaggggcugcuuccu

SEQ ID NO: 2653527 - RNA, 12 nt, Human
gccgucucugga

SEQ ID NO: 2653528 - RNA, 16 nt, Human
gccgucuccaggggcu

SEQ ID NO: 2653529 - RNA, 21 nt, Human
gccgucuccaggggcugcuuc

SEQ ID NO: 2653530 - RNA, 11 nt, Human
gccgucucaac

SEQ ID NO: 2653531 - RNA, 14 nt, Human
gccgucuccagggg

SEQ ID NO: 2653532 - RNA, 16 nt, Human
gccgguaacuguccug

SEQ ID NO: 2653533 - RNA, 17 nt, Human
gccgguaacuguccugu

SEQ ID NO: 2653534 - RNA, 15 nt, Human
gccuauugauacuug

SEQ ID NO: 2653535 - RNA, 11 nt, Human
gccuauuucau

SEQ ID NO: 2653536 - RNA, 15 nt, Human
gccuaaaccucaguu

SEQ ID NO: 2653537 - RNA, 12 nt, Human
ggcaccucuucc

SEQ ID NO: 2653538 - RNA, 19 nt, Human
ggcagagcuggcucugagc

SEQ ID NO: 2653539 - RNA, 15 nt, Human
ggcaauaaauuuuga

SEQ ID NO: 2653540 - RNA, 19 nt, Human
ggcaacuggccauuugcca

SEQ ID NO: 2653541 - RNA, 21 nt, Human
ggaucaucuaauucucugugg

SEQ ID NO: 2653542 - RNA, 16 nt, Human
ggaucccaagccuccu

SEQ ID NO: 2653543 - RNA, 21 nt, Human
ggaucccaagccuccugcugc

SEQ ID NO: 2653544 - RNA, 18 nt, Human
ggaucaggcucccaggag

SEQ ID NO: 2653545 - RNA, 16 nt, Human
ggaucaggcucccagg

SEQ ID NO: 2653546 - RNA, 12 nt, Human
ggcaacuggcca

SEQ ID NO: 2653547 - RNA, 19 nt, Human
ggcaacugcauuggcuuug

SEQ ID NO: 2653548 - RNA, 18 nt, Human
ggcaacugcauuggcuuu

SEQ ID NO: 2653549 - RNA, 16 nt, Human
ggauccccgccuggcc

SEQ ID NO: 2653550 - RNA, 19 nt, Human
ggauccccgccuggccagg

SEQ ID NO: 2653551 - RNA, 21 nt, Human
ggauccccgccuggccaggag

SEQ ID NO: 2653552 - RNA, 22 nt, Human
ggauccccgccuggccaggagc

SEQ ID NO: 2653553 - RNA, 23 nt, Human
ggauccccgccuggccaggagca

SEQ ID NO: 2653554 - RNA, 19 nt, Human
ggcaggugcuggagcacug

SEQ ID NO: 2653555 - RNA, 21 nt, Human
ggcaggugcuggagcacuggg

SEQ ID NO: 2653556 - RNA, 20 nt, Human
ggcaggugcuggagcacugg

SEQ ID NO: 2653557 - RNA, 20 nt, Human
ggcagauuuuacagagcgca

SEQ ID NO: 2653558 - RNA, 21 nt, Human
ggcagauuuuacagagcgcac

SEQ ID NO: 2653559 - RNA, 15 nt, Human
ggcccccacuugccu

SEQ ID NO: 2653560 - RNA, 21 nt, Human
ggcccccaaccucagggcucc

SEQ ID NO: 2653561 - RNA, 23 nt, Human
ggcccccaaccucagggcuccca

SEQ ID NO: 2653562 - RNA, 14 nt, Human
ggccauggcucagg

SEQ ID NO: 2653563 - RNA, 16 nt, Human
ggcccccacuugccuc

SEQ ID NO: 2653564 - RNA, 18 nt, Human
ggcccccacuugccucuu

SEQ ID NO: 2653565 - RNA, 14 nt, Human
ggcccccagcccag

SEQ ID NO: 2653566 - RNA, 17 nt, Human
ggcccccagcccagggc

SEQ ID NO: 2653567 - RNA, 18 nt, Human
ggcccccagcccagggcu

SEQ ID NO: 2653568 - RNA, 20 nt, Human
ggcccccagcccagggcucc

SEQ ID NO: 2653569 - RNA, 18 nt, Human
ggccccguuucugguggu

SEQ ID NO: 2653570 - RNA, 11 nt, Human
ggcccccugcc

SEQ ID NO: 2653571 - RNA, 13 nt, Human
ggcccccugcccg

SEQ ID NO: 2653572 - RNA, 23 nt, Human
ggcccccagcccagggcuccugc

SEQ ID NO: 2653573 - RNA, 14 nt, Human
ggccccucccacac

SEQ ID NO: 2653574 - RNA, 22 nt, Human
ggccccucccacacccaaagcu

SEQ ID NO: 2653575 - RNA, 23 nt, Human
ggccccucccacacccaaagcug

SEQ ID NO: 2653576 - RNA, 16 nt, Human
ggccacugugaagaga

SEQ ID NO: 2653577 - RNA, 11 nt, Human
ggccacuguga

SEQ ID NO: 2653578 - RNA, 15 nt, Human
ggcagguuggugggg

SEQ ID NO: 2653579 - RNA, 21 nt, Human
ggagccgaggccuaccccgca

SEQ ID NO: 2653580 - RNA, 15 nt, Human
ggaggagggggccgg

SEQ ID NO: 2653581 - RNA, 12 nt, Human
ggaggagggaga

SEQ ID NO: 2653582 - RNA, 13 nt, Human
ggaggagggagag

SEQ ID NO: 2653583 - RNA, 13 nt, Human
ggaggaggaaggc

SEQ ID NO: 2653584 - RNA, 15 nt, Human
ggaggaggaaggcaa

SEQ ID NO: 2653585 - RNA, 21 nt, Human
ggaggaucucuugagccuggg

SEQ ID NO: 2653586 - RNA, 17 nt, Human
ggaggaucucuugagcc

SEQ ID NO: 2653587 - RNA, 23 nt, Human
ggaggaucacuugaguccagaag

SEQ ID NO: 2653588 - RNA, 13 nt, Human
ggagggagaggga

SEQ ID NO: 2653589 - RNA, 22 nt, Human
ggagggauucugguuccagggu

SEQ ID NO: 2653590 - RNA, 11 nt, Human
ggagggaggcc

SEQ ID NO: 2653591 - RNA, 13 nt, Human
ggagggaggcccc

SEQ ID NO: 2653592 - RNA, 21 nt, Human
ggagggcaagggguucccuug

SEQ ID NO: 2653593 - RNA, 18 nt, Human
ggauagcuaacuguaaau

SEQ ID NO: 2653594 - RNA, 19 nt, Human
ggauagcuaacuguaaauc

SEQ ID NO: 2653595 - RNA, 16 nt, Human
ggaucacagccucuga

SEQ ID NO: 2653596 - RNA, 22 nt, Human
ggagucguggggugugcuggga

SEQ ID NO: 2653597 - RNA, 24 nt, Human
ggagucguggggugugcugggagc

SEQ ID NO: 2653598 - RNA, 16 nt, Human
ggaggggagacuuuga

SEQ ID NO: 2653599 - RNA, 14 nt, Human
ggaggggagacuuu

SEQ ID NO: 2653600 - RNA, 16 nt, Human
ggaguccacuuuguuu

SEQ ID NO: 2653601 - RNA, 12 nt, Human
ggagacgccaug

SEQ ID NO: 2653602 - RNA, 19 nt, Human
ggagacgccaugugaugga

SEQ ID NO: 2653603 - RNA, 19 nt, Human
ggagacgguuuccagggag

SEQ ID NO: 2653604 - RNA, 21 nt, Human
ggagacgguuuccagggaggg

SEQ ID NO: 2653605 - RNA, 20 nt, Human
ggagaccgggguauccuggg

SEQ ID NO: 2653606 - RNA, 21 nt, Human
ggagagcuagcagcagggagg

SEQ ID NO: 2653607 - RNA, 17 nt, Human
ggagagcuagcagcagg

SEQ ID NO: 2653608 - RNA, 22 nt, Human
ggagacguuuauaaacagaaau

SEQ ID NO: 2653609 - RNA, 13 nt, Human
ggagagggagguc

SEQ ID NO: 2653610 - RNA, 17 nt, Human
ggagagggaggucacug

SEQ ID NO: 2653611 - RNA, 18 nt, Human
ggacugcuaaauaaaauu

SEQ ID NO: 2653612 - RNA, 19 nt, Human
ggacugcuaaauaaaauuu

SEQ ID NO: 2653613 - RNA, 22 nt, Human
ggacugcuaccuuucaaagcuu

SEQ ID NO: 2653614 - RNA, 18 nt, Human
ggacuguagggagggcgg

SEQ ID NO: 2653615 - RNA, 20 nt, Human
ggacuguagggagggcggca

SEQ ID NO: 2653616 - RNA, 15 nt, Human
ggacuguaagggauu

SEQ ID NO: 2653617 - RNA, 12 nt, Human
ggagauuauaau

SEQ ID NO: 2653618 - RNA, 14 nt, Human
ggagauuauaauaa

SEQ ID NO: 2653619 - RNA, 15 nt, Human
ggagaggggcacagg

SEQ ID NO: 2653620 - RNA, 14 nt, Human
ggaccugccaggca

SEQ ID NO: 2653621 - RNA, 16 nt, Human
ggaccugccaggcagg

SEQ ID NO: 2653622 - RNA, 17 nt, Human
ggaccugccaggcaggg

SEQ ID NO: 2653623 - RNA, 21 nt, Human
ggaccuuaggccuuccucucu

SEQ ID NO: 2653624 - RNA, 18 nt, Human
ggaccuuaggccuuccuc

SEQ ID NO: 2653625 - RNA, 12 nt, Human
ggaccuguggcu

SEQ ID NO: 2653626 - RNA, 16 nt, Human
ggaccuguggcugucg

SEQ ID NO: 2653627 - RNA, 15 nt, Human
ggacugagugggaag

SEQ ID NO: 2653628 - RNA, 17 nt, Human
ggacugagugggaagcc

SEQ ID NO: 2653629 - RNA, 18 nt, Human
ggacugagugggaagccc

SEQ ID NO: 2653630 - RNA, 11 nt, Human
ggacccagugc

SEQ ID NO: 2653631 - RNA, 13 nt, Human
ggacccagugcag

SEQ ID NO: 2653632 - RNA, 16 nt, Human
ggacccagugcagaau

SEQ ID NO: 2653633 - RNA, 21 nt, Human
gcuguguauaugguauauaua

SEQ ID NO: 2653634 - RNA, 20 nt, Human
gcugucaaugggaccugugg

SEQ ID NO: 2653635 - RNA, 22 nt, Human
gcugucaaugggaccuguggcu

SEQ ID NO: 2653636 - RNA, 21 nt, Human
gcugguggagaacucuggcuu

SEQ ID NO: 2653637 - RNA, 23 nt, Human
gcugggggaagaagcucucuccu

SEQ ID NO: 2653638 - RNA, 14 nt, Human
gcugggggcaacug

SEQ ID NO: 2653639 - RNA, 18 nt, Human
gcugggggcaacuggcca

SEQ ID NO: 2653640 - RNA, 13 nt, Human
gcugggagcucca

SEQ ID NO: 2653641 - RNA, 14 nt, Human
gcugggagcuccac

SEQ ID NO: 2653642 - RNA, 16 nt, Human
gcugggagcuccacuc

SEQ ID NO: 2653643 - RNA, 18 nt, Human
gcugggagcuccacucug

SEQ ID NO: 2653644 - RNA, 22 nt, Human
gcugggagcuccacucugcuuc

SEQ ID NO: 2653645 - RNA, 20 nt, Human
gcugggagcuccacucugcu

SEQ ID NO: 2653646 - RNA, 21 nt, Human
gcugggagcuccacucugcuu

SEQ ID NO: 2653647 - RNA, 16 nt, Human
gcugggaggagggaga

SEQ ID NO: 2653648 - RNA, 17 nt, Human
gcugggaggagggagag

SEQ ID NO: 2653649 - RNA, 18 nt, Human
gcugggaggagggagagg

SEQ ID NO: 2653650 - RNA, 22 nt, Human
gcugggaggagggagagggagg

SEQ ID NO: 2653651 - RNA, 22 nt, Human
gcuagcagcagggagggcuucu

SEQ ID NO: 2653652 - RNA, 13 nt, Human
gcugcccuugggc

SEQ ID NO: 2653653 - RNA, 18 nt, Human
gcugcccuugggccaccc

SEQ ID NO: 2653654 - RNA, 20 nt, Human
gcugcccuugggccaccccu

SEQ ID NO: 2653655 - RNA, 14 nt, Human
gcugccuuggcuca

SEQ ID NO: 2653656 - RNA, 16 nt, Human
gcugccuuggcucaga

SEQ ID NO: 2653657 - RNA, 19 nt, Human
gcugccuuggcucagacau

SEQ ID NO: 2653658 - RNA, 17 nt, Human
gcugccuuggcucagac

SEQ ID NO: 2653659 - RNA, 23 nt, Human
gcugccuuggcucagacauguuu

SEQ ID NO: 2653660 - RNA, 21 nt, Human
gcugccuuggcucagacaugu

SEQ ID NO: 2653661 - RNA, 15 nt, Human
gcugcgcuugcuuuu

SEQ ID NO: 2653662 - RNA, 19 nt, Human
gcugcuauuuauuuuccua

SEQ ID NO: 2653663 - RNA, 17 nt, Human
gcugcuauccccaucuc

SEQ ID NO: 2653664 - RNA, 21 nt, Human
gcugcuauccccaucucccug

SEQ ID NO: 2653665 - RNA, 22 nt, Human
gcugcuauccccaucucccugc

SEQ ID NO: 2653666 - RNA, 23 nt, Human
gcugcuauccccaucucccugcc

SEQ ID NO: 2653667 - RNA, 18 nt, Human
gcugcuauuuauuuuccu

SEQ ID NO: 2653668 - RNA, 13 nt, Human
gcugcuuccuccu

SEQ ID NO: 2653669 - RNA, 14 nt, Human
gcugcuuccuccug

SEQ ID NO: 2653670 - RNA, 15 nt, Human
gcugcuuccuccugg

SEQ ID NO: 2653671 - RNA, 16 nt, Human
gcugcuuccuccugga

SEQ ID NO: 2653672 - RNA, 17 nt, Human
gcugcuuccuccuggaa

SEQ ID NO: 2653673 - RNA, 21 nt, Human
gcugcuuaauaccaaacaugc

SEQ ID NO: 2653674 - RNA, 12 nt, Human
gcuggccccagc

SEQ ID NO: 2653675 - RNA, 14 nt, Human
gcuggccccagccc

SEQ ID NO: 2653676 - RNA, 15 nt, Human
gcuggccccagcccu

SEQ ID NO: 2653677 - RNA, 16 nt, Human
gcuggccccagcccug

SEQ ID NO: 2653678 - RNA, 17 nt, Human
gcuggccccagcccugc

SEQ ID NO: 2653679 - RNA, 18 nt, Human
gcuggccccagcccugcu

SEQ ID NO: 2653680 - RNA, 19 nt, Human
gcuggccccagcccugcug

SEQ ID NO: 2653681 - RNA, 21 nt, Human
gcuggccccagcccugcuggg

SEQ ID NO: 2653682 - RNA, 22 nt, Human
gcuggccccagcccugcugggg

SEQ ID NO: 2653683 - RNA, 15 nt, Human
gcuggccucucuagc

SEQ ID NO: 2653684 - RNA, 19 nt, Human
gcuggccucucuagcacaa

SEQ ID NO: 2653685 - RNA, 14 nt, Human
gcuggccuggacag

SEQ ID NO: 2653686 - RNA, 22 nt, Human
gcugggacucagccuucagaca

SEQ ID NO: 2653687 - RNA, 23 nt, Human
gcugggacucagccuucagacag

SEQ ID NO: 2653688 - RNA, 14 nt, Human
gcugggacucagcc

SEQ ID NO: 2653689 - RNA, 15 nt, Human
gcugggacucagccu

SEQ ID NO: 2653690 - RNA, 16 nt, Human
gcugggacucagccuu

SEQ ID NO: 2653691 - RNA, 19 nt, Human
gcugggacucagccuucag

SEQ ID NO: 2653692 - RNA, 12 nt, Human
gcugggacucag

SEQ ID NO: 2653693 - RNA, 23 nt, Human
ggaaaguggccaagaagcagugg

SEQ ID NO: 2653694 - RNA, 20 nt, Human
ggaaaucaaagugcuauuac

SEQ ID NO: 2653695 - RNA, 17 nt, Human
ggaaaucaaagugcuau

SEQ ID NO: 2653696 - RNA, 20 nt, Human
ggaaaggggucggcugacca

SEQ ID NO: 2653697 - RNA, 15 nt, Human
ggaaaaucagccugc

SEQ ID NO: 2653698 - RNA, 12 nt, Human
ggaagauccugc

SEQ ID NO: 2653699 - RNA, 22 nt, Human
ggaagauccugcggguggggcu

SEQ ID NO: 2653700 - RNA, 15 nt, Human
ggaagaucauuuuga

SEQ ID NO: 2653701 - RNA, 14 nt, Human
ggaagagauccaaa

SEQ ID NO: 2653702 - RNA, 16 nt, Human
ggaagagauccaaaga

SEQ ID NO: 2653703 - RNA, 17 nt, Human
ggaagagauccaaagac

SEQ ID NO: 2653704 - RNA, 18 nt, Human
ggaagagauccaaagacu

SEQ ID NO: 2653705 - RNA, 20 nt, Human
ggaagagauccaaagacucu

SEQ ID NO: 2653706 - RNA, 13 nt, Human
ggaagagccuugc

SEQ ID NO: 2653707 - RNA, 18 nt, Human
ggaagaggaaaaggcugg

SEQ ID NO: 2653708 - RNA, 22 nt, Human
ggaagccaaaauguaggcuuag

SEQ ID NO: 2653709 - RNA, 24 nt, Human
gcuucuccgccagccuccucugga

SEQ ID NO: 2653710 - RNA, 23 nt, Human
gcuucuccgccagccuccucugg

SEQ ID NO: 2653711 - RNA, 21 nt, Human
gcuucucugacuucugccugg

SEQ ID NO: 2653712 - RNA, 22 nt, Human
gcuucucugacuucugccugga

SEQ ID NO: 2653713 - RNA, 13 nt, Human
gcuucucugacuu

SEQ ID NO: 2653714 - RNA, 14 nt, Human
gcuucucugacuuc

SEQ ID NO: 2653715 - RNA, 17 nt, Human
gcuucucugacuucugc

SEQ ID NO: 2653716 - RNA, 18 nt, Human
gcuucucugacuucugcc

SEQ ID NO: 2653717 - RNA, 20 nt, Human
gcuucucugacuucugccug

SEQ ID NO: 2653718 - RNA, 19 nt, Human
gcuugcagugagccgagau

SEQ ID NO: 2653719 - RNA, 11 nt, Human
gcuugcagaac

SEQ ID NO: 2653720 - RNA, 21 nt, Human
gcuucugugcccagaauacug

SEQ ID NO: 2653721 - RNA, 19 nt, Human
gcuucugugcccagaauac

SEQ ID NO: 2653722 - RNA, 15 nt, Human
gcuucugugcccaga

SEQ ID NO: 2653723 - RNA, 16 nt, Human
gcuucugugaugagcu

SEQ ID NO: 2653724 - RNA, 17 nt, Human
gcuucugugaugagcug

SEQ ID NO: 2653725 - RNA, 18 nt, Human
gcuucugugaugagcuga

SEQ ID NO: 2653726 - RNA, 19 nt, Human
gcuucugugaugagcugau

SEQ ID NO: 2653727 - RNA, 20 nt, Human
gcuucugugaugagcugauc

SEQ ID NO: 2653728 - RNA, 23 nt, Human
gcuuuuaacuuuauaaauccagu

SEQ ID NO: 2653729 - RNA, 14 nt, Human
gcuuuuacuuaaac

SEQ ID NO: 2653730 - RNA, 22 nt, Human
ggaaaacuaccuguauuuaaaa

SEQ ID NO: 2653731 - RNA, 13 nt, Human
ggaaaacuguguu

SEQ ID NO: 2653732 - RNA, 14 nt, Human
ggaaaacuguguug

SEQ ID NO: 2653733 - RNA, 15 nt, Human
ggaaaaauagccugc

SEQ ID NO: 2653734 - RNA, 13 nt, Human
ggaaaaacacaag

SEQ ID NO: 2653735 - RNA, 13 nt, Human
ggaaaaauagccu

SEQ ID NO: 2653736 - RNA, 22 nt, Human
gcuuuggaccuaaauggccuca

SEQ ID NO: 2653737 - RNA, 16 nt, Human
gcuuuauuuguaaauu

SEQ ID NO: 2653738 - RNA, 17 nt, Human
gcuuuauuuguaaauuu

SEQ ID NO: 2653739 - RNA, 18 nt, Human
gcuuuauuuugagaugua

SEQ ID NO: 2653740 - RNA, 20 nt, Human
gcuuuauuuugagauguaaa

SEQ ID NO: 2653741 - RNA, 23 nt, Human
gcuuuacuggggcuggggaagga

SEQ ID NO: 2653742 - RNA, 16 nt, Human
gcuuuauuaauguuuu

SEQ ID NO: 2653743 - RNA, 17 nt, Human
gcuuuaccuuuucaggg

SEQ ID NO: 2653744 - RNA, 18 nt, Human
gcuuuaccuuuucagggc

SEQ ID NO: 2653745 - RNA, 20 nt, Human
gcuuuaccuuuucagggcug

SEQ ID NO: 2653746 - RNA, 21 nt, Human
gcuuuaccuuuucagggcugg

SEQ ID NO: 2653747 - RNA, 22 nt, Human
gcuuuaccuuuucagggcuggc

SEQ ID NO: 2653748 - RNA, 13 nt, Human
gcuuggccugcug

SEQ ID NO: 2653749 - RNA, 13 nt, Human
gcuuuaagccuuc

SEQ ID NO: 2653750 - RNA, 14 nt, Human
gcuuuaagccuuca

SEQ ID NO: 2653751 - RNA, 16 nt, Human
gggcacgcacuggguu

SEQ ID NO: 2653752 - RNA, 13 nt, Human
gggcaggggcugg

SEQ ID NO: 2653753 - RNA, 22 nt, Human
gggcaggugcuggagcacuggg

SEQ ID NO: 2653754 - RNA, 17 nt, Human
gggcagguugguggggg

SEQ ID NO: 2653755 - RNA, 16 nt, Human
gggcacagggucucua

SEQ ID NO: 2653756 - RNA, 13 nt, Human
gggcacagggucu

SEQ ID NO: 2653757 - RNA, 18 nt, Human
gggcaccagggguuucuc

SEQ ID NO: 2653758 - RNA, 20 nt, Human
gggcaccagggguuucucgc

SEQ ID NO: 2653759 - RNA, 13 nt, Human
gggcacaggaggc

SEQ ID NO: 2653760 - RNA, 18 nt, Human
gggcacaggaggcaggca

SEQ ID NO: 2653761 - RNA, 23 nt, Human
gggagguggaagaagggagaaga

SEQ ID NO: 2653762 - RNA, 20 nt, Human
gggacuacccauagacauga

SEQ ID NO: 2653763 - RNA, 22 nt, Human
gggacucagccuucagacagag

SEQ ID NO: 2653764 - RNA, 13 nt, Human
gggcaagaggaau

SEQ ID NO: 2653765 - RNA, 20 nt, Human
gggcaagcuccgcaggacuu

SEQ ID NO: 2653766 - RNA, 20 nt, Human
gggaugaaacuaaagcaaua

SEQ ID NO: 2653767 - RNA, 17 nt, Human
gggauccgacugcuuug

SEQ ID NO: 2653768 - RNA, 17 nt, Human
gggauccccgccuggcc

SEQ ID NO: 2653769 - RNA, 19 nt, Human
gggauccccgccuggccag

SEQ ID NO: 2653770 - RNA, 20 nt, Human
gggauccccgccuggccagg

SEQ ID NO: 2653771 - RNA, 22 nt, Human
gggauccccgccuggccaggag

SEQ ID NO: 2653772 - RNA, 23 nt, Human
gggauccccgccuggccaggagc

SEQ ID NO: 2653773 - RNA, 15 nt, Human
gggauauuuuuuucu

SEQ ID NO: 2653774 - RNA, 21 nt, Human
gggauaugauuuaaaucagcc

SEQ ID NO: 2653775 - RNA, 14 nt, Human
gggccaccccuccu

SEQ ID NO: 2653776 - RNA, 14 nt, Human
gggccaccaaagcu

SEQ ID NO: 2653777 - RNA, 16 nt, Human
gggccaccaaagcugc

SEQ ID NO: 2653778 - RNA, 17 nt, Human
gggccaccaaagcugcc

SEQ ID NO: 2653779 - RNA, 19 nt, Human
gggccaccaaagcugccca

SEQ ID NO: 2653780 - RNA, 13 nt, Human
gggccaccccucc

SEQ ID NO: 2653781 - RNA, 14 nt, Human
gggcccagauucua

SEQ ID NO: 2653782 - RNA, 14 nt, Human
gggcauaaaguaaa

SEQ ID NO: 2653783 - RNA, 11 nt, Human
gggccccagcu

SEQ ID NO: 2653784 - RNA, 13 nt, Human
gggcccagugcau

SEQ ID NO: 2653785 - RNA, 22 nt, Human
gggcccagugcaugguggccag

SEQ ID NO: 2653786 - RNA, 13 nt, Human
gggcccugggcug

SEQ ID NO: 2653787 - RNA, 14 nt, Human
gggcccugagucug

SEQ ID NO: 2653788 - RNA, 18 nt, Human
gggcccgacauggcuccg

SEQ ID NO: 2653789 - RNA, 11 nt, Human
gggccccuggc

SEQ ID NO: 2653790 - RNA, 12 nt, Human
gggccccuggca

SEQ ID NO: 2653791 - RNA, 15 nt, Human
gggccccuggcacuc

SEQ ID NO: 2653792 - RNA, 14 nt, Human
gggccccugggcuu

SEQ ID NO: 2653793 - RNA, 21 nt, Human
gggccccugggcuuggccugc

SEQ ID NO: 2653794 - RNA, 23 nt, Human
gggccccugggcuuggccugcug

SEQ ID NO: 2653795 - RNA, 14 nt, Human
gggcccugggcugg

SEQ ID NO: 2653796 - RNA, 20 nt, Human
gggaccggcggaccccagcc

SEQ ID NO: 2653797 - RNA, 23 nt, Human
gggacccugugacauggugccug

SEQ ID NO: 2653798 - RNA, 13 nt, Human
gggacaagggauu

SEQ ID NO: 2653799 - RNA, 16 nt, Human
ggcuugaagccaaaga

SEQ ID NO: 2653800 - RNA, 22 nt, Human
ggcuuggggcucacacaccugu

SEQ ID NO: 2653801 - RNA, 13 nt, Human
ggcuuguaguucu

SEQ ID NO: 2653802 - RNA, 16 nt, Human
ggcuuguaguucuuua

SEQ ID NO: 2653803 - RNA, 22 nt, Human
ggcuugucuauacuccuucccu

SEQ ID NO: 2653804 - RNA, 19 nt, Human
ggcuuguucaucauccaga

SEQ ID NO: 2653805 - RNA, 17 nt, Human
ggcuuguuuaccuuucu

SEQ ID NO: 2653806 - RNA, 22 nt, Human
ggcuuuauuuuuuugaacucuu

SEQ ID NO: 2653807 - RNA, 17 nt, Human
ggcuuuauuuuuuugaa

SEQ ID NO: 2653808 - RNA, 22 nt, Human
ggcuuucccacuucccacccug

SEQ ID NO: 2653809 - RNA, 23 nt, Human
ggcuuucccacuucccacccugc

SEQ ID NO: 2653810 - RNA, 21 nt, Human
ggcugggccauguccaaagag

SEQ ID NO: 2653811 - RNA, 17 nt, Human
ggcugggccauguccaa

SEQ ID NO: 2653812 - RNA, 20 nt, Human
ggcugggccauguccaaaga

SEQ ID NO: 2653813 - RNA, 22 nt, Human
ggcuuaguuuguguguugucuc

SEQ ID NO: 2653814 - RNA, 14 nt, Human
ggcuuauaaaacag

SEQ ID NO: 2653815 - RNA, 14 nt, Human
ggcuuaaucauuuu

SEQ ID NO: 2653816 - RNA, 18 nt, Human
ggcuuauaucuggccucu

SEQ ID NO: 2653817 - RNA, 12 nt, Human
ggcuugaagcca

SEQ ID NO: 2653818 - RNA, 13 nt, Human
ggcuugaagccaa

SEQ ID NO: 2653819 - RNA, 15 nt, Human
ggcuugaagccaaag

SEQ ID NO: 2653820 - RNA, 20 nt, Human
ggcuugaagccaaagaaaaa

SEQ ID NO: 2653821 - RNA, 13 nt, Human
ggcuugaagcugu

SEQ ID NO: 2653822 - RNA, 14 nt, Human
ggcuugaagcugug

SEQ ID NO: 2653823 - RNA, 23 nt, Human
ggcugagguuccucugccugccc

SEQ ID NO: 2653824 - RNA, 14 nt, Human
ggcugagguuccuc

SEQ ID NO: 2653825 - RNA, 16 nt, Human
ggcugagguuccucug

SEQ ID NO: 2653826 - RNA, 17 nt, Human
ggcugagguuccucugc

SEQ ID NO: 2653827 - RNA, 18 nt, Human
ggcugagguuccucugcc

SEQ ID NO: 2653828 - RNA, 19 nt, Human
ggcugagguuccucugccu

SEQ ID NO: 2653829 - RNA, 20 nt, Human
ggcugagguuccucugccug

SEQ ID NO: 2653830 - RNA, 21 nt, Human
ggcugagguuccucugccugc

SEQ ID NO: 2653831 - RNA, 22 nt, Human
ggcugagguuccucugccugcc

SEQ ID NO: 2653832 - RNA, 18 nt, Human
ggcugaugucaauuucug

SEQ ID NO: 2653833 - RNA, 22 nt, Human
ggcugaugucaauuucuguguu

SEQ ID NO: 2653834 - RNA, 24 nt, Human
ggcugaugucaauuucuguguugc

SEQ ID NO: 2653835 - RNA, 19 nt, Human
ggcugcagaggccagaggc

SEQ ID NO: 2653836 - RNA, 23 nt, Human
ggcugaugguguggccuguggcu

SEQ ID NO: 2653837 - RNA, 13 nt, Human
ggcugcagaggcc

SEQ ID NO: 2653838 - RNA, 16 nt, Human
ggcugcagaggccaga

SEQ ID NO: 2653839 - RNA, 18 nt, Human
ggcugcagaggccagagg

SEQ ID NO: 2653840 - RNA, 15 nt, Human
ggcugaggugggagg

SEQ ID NO: 2653841 - RNA, 13 nt, Human
ggcugagguggga

SEQ ID NO: 2653842 - RNA, 11 nt, Human
ggcugggccau

SEQ ID NO: 2653843 - RNA, 19 nt, Human
ggcuggaagauccugcggg

SEQ ID NO: 2653844 - RNA, 15 nt, Human
ggcuggaagauccug

SEQ ID NO: 2653845 - RNA, 22 nt, Human
ggcuggaagauccugcgggugg

SEQ ID NO: 2653846 - RNA, 13 nt, Human
ggcugcuuccucc

SEQ ID NO: 2653847 - RNA, 19 nt, Human
ggcugcuuccuccuggaaa

SEQ ID NO: 2653848 - RNA, 15 nt, Human
ggcugcuuccuccug

SEQ ID NO: 2653849 - RNA, 16 nt, Human
ggcugcuuccuccugg

SEQ ID NO: 2653850 - RNA, 17 nt, Human
ggcugcuuccuccugga

SEQ ID NO: 2653851 - RNA, 18 nt, Human
ggcugcuuccuccuggaa

SEQ ID NO: 2653852 - RNA, 14 nt, Human
ggcugcugugaagc

SEQ ID NO: 2653853 - RNA, 22 nt, Human
ggcugcugggggcaacuggcca

SEQ ID NO: 2653854 - RNA, 18 nt, Human
ggcugcugcccccacccc

SEQ ID NO: 2653855 - RNA, 15 nt, Human
ggcugcugcuacaau

SEQ ID NO: 2653856 - RNA, 10 nt, Human
ggcugcugcc

SEQ ID NO: 2653857 - RNA, 11 nt, Human
ggcugcugccc

SEQ ID NO: 2653858 - RNA, 13 nt, Human
ggcugcugccccc

SEQ ID NO: 2653859 - RNA, 17 nt, Human
ggcugcugcccccaccc

SEQ ID NO: 2653860 - RNA, 17 nt, Human
ggggcugaggugggagg

SEQ ID NO: 2653861 - RNA, 13 nt, Human
ggggcguccaggc

SEQ ID NO: 2653862 - RNA, 15 nt, Human
ggggcaacuguauga

SEQ ID NO: 2653863 - RNA, 13 nt, Human
ggggcacaggagg

SEQ ID NO: 2653864 - RNA, 14 nt, Human
ggggagggauucug

SEQ ID NO: 2653865 - RNA, 21 nt, Human
ggggaaaaucagccugcucca

SEQ ID NO: 2653866 - RNA, 14 nt, Human
ggggaggagggggc

SEQ ID NO: 2653867 - RNA, 15 nt, Human
gggcuuucuggggcc

SEQ ID NO: 2653868 - RNA, 15 nt, Human
ggggagggggauccg

SEQ ID NO: 2653869 - RNA, 15 nt, Human
ggggagggauucugg

SEQ ID NO: 2653870 - RNA, 19 nt, Human
ggggaaaaucagccugcuc

SEQ ID NO: 2653871 - RNA, 17 nt, Human
ggggaaaaucagccugc

SEQ ID NO: 2653872 - RNA, 16 nt, Human
ggggaaaaucagccug

SEQ ID NO: 2653873 - RNA, 17 nt, Human
gggcuuguaguucuuua

SEQ ID NO: 2653874 - RNA, 19 nt, Human
ggggcugaggugggaggau

SEQ ID NO: 2653875 - RNA, 19 nt, Human
ggggcguggagggaggccc

SEQ ID NO: 2653876 - RNA, 20 nt, Human
ggggugcuuuuauagaggcu

SEQ ID NO: 2653877 - RNA, 17 nt, Human
gggguggaggcuuccug

SEQ ID NO: 2653878 - RNA, 18 nt, Human
gggguggggguggaggcu

SEQ ID NO: 2653879 - RNA, 22 nt, Human
gggggagccgguaacuguccug

SEQ ID NO: 2653880 - RNA, 15 nt, Human
gggggacccagugca

SEQ ID NO: 2653881 - RNA, 16 nt, Human
ggggugcuuccuugua

SEQ ID NO: 2653882 - RNA, 14 nt, Human
ggggugcuuccuug

SEQ ID NO: 2653883 - RNA, 18 nt, Human
gggguguuaguggcaccg

SEQ ID NO: 2653884 - RNA, 19 nt, Human
gggguuuccuggcacugga

SEQ ID NO: 2653885 - RNA, 13 nt, Human
gggucucccuggc

SEQ ID NO: 2653886 - RNA, 14 nt, Human
gggucucccuggcu

SEQ ID NO: 2653887 - RNA, 16 nt, Human
gggucucccuggcucc

SEQ ID NO: 2653888 - RNA, 17 nt, Human
gggucucccuggcuccc

SEQ ID NO: 2653889 - RNA, 18 nt, Human
gggucucccuggcucccu

SEQ ID NO: 2653890 - RNA, 21 nt, Human
gggucucccuggcucccuccu

SEQ ID NO: 2653891 - RNA, 22 nt, Human
gggucucccuggcucccuccuc

SEQ ID NO: 2653892 - RNA, 17 nt, Human
ggguaaucccugcuuuu

SEQ ID NO: 2653893 - RNA, 18 nt, Human
ggguuagauguugccaug

SEQ ID NO: 2653894 - RNA, 18 nt, Human
gggugcugggaggaggga

SEQ ID NO: 2653895 - RNA, 16 nt, Human
ggguuaagaagacuuu

SEQ ID NO: 2653896 - RNA, 19 nt, Human
gggugacagagcaagugag

SEQ ID NO: 2653897 - RNA, 19 nt, Human
gggucuugauucagucaca

SEQ ID NO: 2653898 - RNA, 22 nt, Human
gggucuuugugguagcuuaucu

SEQ ID NO: 2653899 - RNA, 13 nt, Human
gggugcagcccaa

SEQ ID NO: 2653900 - RNA, 15 nt, Human
gggugcugggaggag

SEQ ID NO: 2653901 - RNA, 19 nt, Human
gggugaguccauucuccca

SEQ ID NO: 2653902 - RNA, 15 nt, Human
gguaccagcugcgcu

SEQ ID NO: 2653903 - RNA, 12 nt, Human
gguaccagcugc

SEQ ID NO: 2653904 - RNA, 14 nt, Human
gguaccagcugcgc

SEQ ID NO: 2653905 - RNA, 16 nt, Human
gguacuugucauuucg

SEQ ID NO: 2653906 - RNA, 14 nt, Human
gguauuuaaaguau

SEQ ID NO: 2653907 - RNA, 19 nt, Human
gguauuuaaaguauuuucu

SEQ ID NO: 2653908 - RNA, 17 nt, Human
ggucaggagaucgagac

SEQ ID NO: 2653909 - RNA, 13 nt, Human
ggucacuggaaag

SEQ ID NO: 2653910 - RNA, 15 nt, Human
ggucacuggaaaggg

SEQ ID NO: 2653911 - RNA, 18 nt, Human
ggucacuguuuccugggc

SEQ ID NO: 2653912 - RNA, 20 nt, Human
ggucacguuuggugcuucuc

SEQ ID NO: 2653913 - RNA, 15 nt, Human
ggucaccaugaaacu

SEQ ID NO: 2653914 - RNA, 14 nt, Human
ggucaccaugaaac

SEQ ID NO: 2653915 - RNA, 21 nt, Human
ggucacagcggagguguggag

SEQ ID NO: 2653916 - RNA, 16 nt, Human
gguauuuuuuccuuuu

SEQ ID NO: 2653917 - RNA, 15 nt, Human
ggugagaagcagagg

SEQ ID NO: 2653918 - RNA, 18 nt, Human
ggugagacccauggcugu

SEQ ID NO: 2653919 - RNA, 19 nt, Human
ggugccugagaggcaggca

SEQ ID NO: 2653920 - RNA, 17 nt, Human
gguggccagagguguca

SEQ ID NO: 2653921 - RNA, 16 nt, Human
gguggcggccccagca

SEQ ID NO: 2653922 - RNA, 13 nt, Human
gguggccacagcg

SEQ ID NO: 2653923 - RNA, 17 nt, Human
gguggccacagcgccag

SEQ ID NO: 2653924 - RNA, 21 nt, Human
ggugcugcagcaccgaggggc

SEQ ID NO: 2653925 - RNA, 13 nt, Human
ggucucacccaug

SEQ ID NO: 2653926 - RNA, 23 nt, Human
ggucucacccaugcaagcagagg

SEQ ID NO: 2653927 - RNA, 20 nt, Human
ggucucuucuuggggcccag

SEQ ID NO: 2653928 - RNA, 21 nt, Human
ggucucuucuuggggcccagu

SEQ ID NO: 2653929 - RNA, 19 nt, Human
ggucucggaucaggcuccc

SEQ ID NO: 2653930 - RNA, 22 nt, Human
gguggucuguuggcaggcuggc

SEQ ID NO: 2653931 - RNA, 16 nt, Human
gguggucuguuggcag

SEQ ID NO: 2653932 - RNA, 21 nt, Human
gguggucuguuggcaggcugg

SEQ ID NO: 2653933 - RNA, 19 nt, Human
gguggcucacgccuguaau

SEQ ID NO: 2653934 - RNA, 17 nt, Human
gguguagcccucccacu

SEQ ID NO: 2653935 - RNA, 20 nt, Human
gguguagcccucccacuuug

SEQ ID NO: 2653936 - RNA, 21 nt, Human
ggugguuauggagaggguguc

SEQ ID NO: 2653937 - RNA, 20 nt, Human
gguguccccgcugcugugca

SEQ ID NO: 2653938 - RNA, 21 nt, Human
ggugucacccaaaccggcagg

SEQ ID NO: 2653939 - RNA, 24 nt, Human
ggugucacccaaaccggcaggugc

SEQ ID NO: 2653940 - RNA, 21 nt, Human
gguuacccaguuagcucucaa

SEQ ID NO: 2653941 - RNA, 13 nt, Human
gguuauggagagg

SEQ ID NO: 2653942 - RNA, 15 nt, Human
gguuacuucuucucu

SEQ ID NO: 2653943 - RNA, 17 nt, Human
gguuacuucuucucuua

SEQ ID NO: 2653944 - RNA, 22 nt, Human
gguuagacagccaaaggcuggc

SEQ ID NO: 2653945 - RNA, 13 nt, Human
gguuagauguugc

SEQ ID NO: 2653946 - RNA, 18 nt, Human
gguuagauguugccaugu

SEQ ID NO: 2653947 - RNA, 11 nt, Human
gguuauguuuu

SEQ ID NO: 2653948 - RNA, 12 nt, Human
gguuauaauuuu

SEQ ID NO: 2653949 - RNA, 16 nt, Human
gguucaccauugagac

SEQ ID NO: 2653950 - RNA, 16 nt, Human
gguucaaggucacugu

SEQ ID NO: 2653951 - RNA, 18 nt, Human
gguucaaggucacuguuu

SEQ ID NO: 2653952 - RNA, 13 nt, Human
gguugagguuuca

SEQ ID NO: 2653953 - RNA, 23 nt, Human
uauccugugacugucucacuuaa

SEQ ID NO: 2653954 - RNA, 17 nt, Human
uauccugugacugucuc

SEQ ID NO: 2653955 - RNA, 16 nt, Human
uauccugugacugucu

SEQ ID NO: 2653956 - RNA, 14 nt, Human
uauccugugacugu

SEQ ID NO: 2653957 - RNA, 12 nt, Human
uaucauguaugg

SEQ ID NO: 2653958 - RNA, 13 nt, Human
uauccugugacug

SEQ ID NO: 2653959 - RNA, 22 nt, Human
uauccugggggacccaauguag

SEQ ID NO: 2653960 - RNA, 16 nt, Human
uauccuggaacaauau

SEQ ID NO: 2653961 - RNA, 21 nt, Human
uauccuggaacaauauuuuau

SEQ ID NO: 2653962 - RNA, 20 nt, Human
uaucaucuguggacugaccu

SEQ ID NO: 2653963 - RNA, 12 nt, Human
uaucguuuuugu

SEQ ID NO: 2653964 - RNA, 18 nt, Human
uaucguuuuuguauuuuc

SEQ ID NO: 2653965 - RNA, 20 nt, Human
uaucguuuuuguauuuucau

SEQ ID NO: 2653966 - RNA, 23 nt, Human
uaucgacuuguuuuugcacaugu

SEQ ID NO: 2653967 - RNA, 22 nt, Human
uauauuuuaaccugcauaaaaa

SEQ ID NO: 2653968 - RNA, 21 nt, Human
uaucaguugagcuucauauac

SEQ ID NO: 2653969 - RNA, 13 nt, Human
uauauguaugugu

SEQ ID NO: 2653970 - RNA, 18 nt, Human
uauaugagacuuuaugug

SEQ ID NO: 2653971 - RNA, 21 nt, Human
uauauuuauugacucuugagu

SEQ ID NO: 2653972 - RNA, 13 nt, Human
uauauuuauugac

SEQ ID NO: 2653973 - RNA, 12 nt, Human
uauauuuauuga

SEQ ID NO: 2653974 - RNA, 15 nt, Human
uauaugguauauaua

SEQ ID NO: 2653975 - RNA, 18 nt, Human
uauaugguauauauacau

SEQ ID NO: 2653976 - RNA, 22 nt, Human
uauaugguauauauacauauau

SEQ ID NO: 2653977 - RNA, 14 nt, Human
uauauguacuguuu

SEQ ID NO: 2653978 - RNA, 11 nt, Human
uauauuuccuu

SEQ ID NO: 2653979 - RNA, 13 nt, Human
uauauuuccuuua

SEQ ID NO: 2653980 - RNA, 14 nt, Human
uauauuuccuuuau

SEQ ID NO: 2653981 - RNA, 16 nt, Human
uauauuuccuuuaugu

SEQ ID NO: 2653982 - RNA, 17 nt, Human
uauauuuccuuuaugug

SEQ ID NO: 2653983 - RNA, 18 nt, Human
uauauuuccuuuauguga

SEQ ID NO: 2653984 - RNA, 19 nt, Human
uauauuuccuuuaugugaa

SEQ ID NO: 2653985 - RNA, 20 nt, Human
uauauuuccuuuaugugaau

SEQ ID NO: 2653986 - RNA, 22 nt, Human
uauauuuccuuuaugugaauuu

SEQ ID NO: 2653987 - RNA, 13 nt, Human
uauauuucuaaau

SEQ ID NO: 2653988 - RNA, 16 nt, Human
uauauuucuaaauguu

SEQ ID NO: 2653989 - RNA, 13 nt, Human
uauauuucuauua

SEQ ID NO: 2653990 - RNA, 16 nt, Human
uauaugaauaaagugu

SEQ ID NO: 2653991 - RNA, 16 nt, Human
uauauacaaaaagaaa

SEQ ID NO: 2653992 - RNA, 18 nt, Human
uauauacaaaaagaaaau

SEQ ID NO: 2653993 - RNA, 21 nt, Human
uauaauuccuauauccuguga

SEQ ID NO: 2653994 - RNA, 22 nt, Human
uauaauuccuauauccugugac

SEQ ID NO: 2653995 - RNA, 16 nt, Human
uaguuuggcauuugca

SEQ ID NO: 2653996 - RNA, 13 nt, Human
uaguuugugagaa

SEQ ID NO: 2653997 - RNA, 14 nt, Human
uaguuugugagaaa

SEQ ID NO: 2653998 - RNA, 15 nt, Human
uaguuugugagaaac

SEQ ID NO: 2653999 - RNA, 19 nt, Human
uaguuuguguguugucucu

SEQ ID NO: 2654000 - RNA, 14 nt, Human
uauaaauauacagu

SEQ ID NO: 2654001 - RNA, 15 nt, Human
uauaaauauacagua

SEQ ID NO: 2654002 - RNA, 15 nt, Human
uauaaauaucauugu

SEQ ID NO: 2654003 - RNA, 14 nt, Human
uauaaauccaguga

SEQ ID NO: 2654004 - RNA, 13 nt, Human
uauaaugaauaaa

SEQ ID NO: 2654005 - RNA, 15 nt, Human
uauaaugaauaaauc

SEQ ID NO: 2654006 - RNA, 16 nt, Human
uauaaugaauaaauca

SEQ ID NO: 2654007 - RNA, 22 nt, Human
uauaaauuuuuaagagaaagaa

SEQ ID NO: 2654008 - RNA, 22 nt, Human
uagugcuccauaguuuggcauu

SEQ ID NO: 2654009 - RNA, 23 nt, Human
uagucaacaguacccugguugug

SEQ ID NO: 2654010 - RNA, 18 nt, Human
uagucaauggcuuguuca

SEQ ID NO: 2654011 - RNA, 15 nt, Human
uagucaauaagaaaa

SEQ ID NO: 2654012 - RNA, 15 nt, Human
uaggcgaccaccgcc

SEQ ID NO: 2654013 - RNA, 17 nt, Human
uaguuuauuuuaaaaca

SEQ ID NO: 2654014 - RNA, 14 nt, Human
uagugucacugcuu

SEQ ID NO: 2654015 - RNA, 14 nt, Human
uaguuucugugguu

SEQ ID NO: 2654016 - RNA, 13 nt, Human
uaguugcuauuuu

SEQ ID NO: 2654017 - RNA, 19 nt, Human
uaguugcuauuuuuguaaa

SEQ ID NO: 2654018 - RNA, 18 nt, Human
uaguuguaaaccaaguga

SEQ ID NO: 2654019 - RNA, 23 nt, Human
uaguguaacuugcuuaaauuucu

SEQ ID NO: 2654020 - RNA, 18 nt, Human
uaguguacauuucuauaa

SEQ ID NO: 2654021 - RNA, 21 nt, Human
uaguguacauuucuauaaaua

SEQ ID NO: 2654022 - RNA, 23 nt, Human
uaguguacauuucuauaaauaga

SEQ ID NO: 2654023 - RNA, 20 nt, Human
uagcuccuguggccccaccc

SEQ ID NO: 2654024 - RNA, 22 nt, Human
uagcuccuguggccccacccug

SEQ ID NO: 2654025 - RNA, 12 nt, Human
uagcuccugugg

SEQ ID NO: 2654026 - RNA, 13 nt, Human
uagcuccuguggc

SEQ ID NO: 2654027 - RNA, 14 nt, Human
uagcuccuguggcc

SEQ ID NO: 2654028 - RNA, 16 nt, Human
uagcuccuguggcccc

SEQ ID NO: 2654029 - RNA, 21 nt, Human
uagcuccccgcuucugccugc

SEQ ID NO: 2654030 - RNA, 16 nt, Human
uagcuccuccccuucc

SEQ ID NO: 2654031 - RNA, 19 nt, Human
uagcuccuccccuuccucu

SEQ ID NO: 2654032 - RNA, 17 nt, Human
uagccugccucuucucu

SEQ ID NO: 2654033 - RNA, 14 nt, Human
uagcccaaaaccaa

SEQ ID NO: 2654034 - RNA, 17 nt, Human
uagcagugagucauauc

SEQ ID NO: 2654035 - RNA, 13 nt, Human
uagccugaugaga

SEQ ID NO: 2654036 - RNA, 13 nt, Human
uagcccucccacu

SEQ ID NO: 2654037 - RNA, 16 nt, Human
uagcccucccacuuug

SEQ ID NO: 2654038 - RNA, 17 nt, Human
uagcccucccacuuugc

SEQ ID NO: 2654039 - RNA, 20 nt, Human
uaggaagucaauauguggaa

SEQ ID NO: 2654040 - RNA, 12 nt, Human
uaggaauaaaua

SEQ ID NO: 2654041 - RNA, 23 nt, Human
uaggaagaacguuuuuuccucag

SEQ ID NO: 2654042 - RNA, 16 nt, Human
uaggaacauaugaaaa

SEQ ID NO: 2654043 - RNA, 22 nt, Human
uagaguacacugccugccuuaa

SEQ ID NO: 2654044 - RNA, 21 nt, Human
uagaguacacugccugccuua

SEQ ID NO: 2654045 - RNA, 17 nt, Human
uagaguacacugccugc

SEQ ID NO: 2654046 - RNA, 13 nt, Human
uagaguacacugc

SEQ ID NO: 2654047 - RNA, 12 nt, Human
uagaguaaugaa

SEQ ID NO: 2654048 - RNA, 14 nt, Human
uagaguaaugaaau

SEQ ID NO: 2654049 - RNA, 15 nt, Human
uagaguaaugaaaug

SEQ ID NO: 2654050 - RNA, 17 nt, Human
uagaguaaugaaaugga

SEQ ID NO: 2654051 - RNA, 21 nt, Human
uagagaggacaauacuggggu

SEQ ID NO: 2654052 - RNA, 22 nt, Human
uagagaggacaauacugggguu

SEQ ID NO: 2654053 - RNA, 15 nt, Human
uagaaccacuaugaa

SEQ ID NO: 2654054 - RNA, 16 nt, Human
uagaaccacuaugaag

SEQ ID NO: 2654055 - RNA, 12 nt, Human
uagacccugggu

SEQ ID NO: 2654056 - RNA, 16 nt, Human
uagacccugggugggc

SEQ ID NO: 2654057 - RNA, 20 nt, Human
uagacccugggugggcucug

SEQ ID NO: 2654058 - RNA, 23 nt, Human
uagacuugaaaagagacaggcag

SEQ ID NO: 2654059 - RNA, 20 nt, Human
uagacuugaaaagagacagg

SEQ ID NO: 2654060 - RNA, 19 nt, Human
uagacuugaaaagagacag

SEQ ID NO: 2654061 - RNA, 18 nt, Human
uagacuugaaaagagaca

SEQ ID NO: 2654062 - RNA, 14 nt, Human
uagacuugaaaaga

SEQ ID NO: 2654063 - RNA, 13 nt, Human
uagacuugaaaag

SEQ ID NO: 2654064 - RNA, 19 nt, Human
uagaugguuugagccugag

SEQ ID NO: 2654065 - RNA, 13 nt, Human
uagauaauauugu

SEQ ID NO: 2654066 - RNA, 15 nt, Human
uagauaauauuguuu

SEQ ID NO: 2654067 - RNA, 14 nt, Human
uagcagcaccuccu

SEQ ID NO: 2654068 - RNA, 16 nt, Human
uagcagccaguucaaa

SEQ ID NO: 2654069 - RNA, 18 nt, Human
uagcagccaguucaaaaa

SEQ ID NO: 2654070 - RNA, 14 nt, Human
uagcagcccacccu

SEQ ID NO: 2654071 - RNA, 15 nt, Human
uagcagcccacccug

SEQ ID NO: 2654072 - RNA, 16 nt, Human
uagcagcccacccugc

SEQ ID NO: 2654073 - RNA, 17 nt, Human
uagcagcccacccugcu

SEQ ID NO: 2654074 - RNA, 21 nt, Human
uagcagcccacccugcugcug

SEQ ID NO: 2654075 - RNA, 14 nt, Human
uagauguugccaug

SEQ ID NO: 2654076 - RNA, 15 nt, Human
uagauguugccaugu

SEQ ID NO: 2654077 - RNA, 22 nt, Human
uagauugacuaacucaaauaca

SEQ ID NO: 2654078 - RNA, 16 nt, Human
uagcacuuugggaggc

SEQ ID NO: 2654079 - RNA, 15 nt, Human
uacuuuacugccuga

SEQ ID NO: 2654080 - RNA, 11 nt, Human
uagaaagcuau

SEQ ID NO: 2654081 - RNA, 13 nt, Human
uagaaauuuucaa

SEQ ID NO: 2654082 - RNA, 13 nt, Human
uagaaauuuugua

SEQ ID NO: 2654083 - RNA, 14 nt, Human
uagaaauuuuguaa

SEQ ID NO: 2654084 - RNA, 15 nt, Human
uagaaauuuuguaag

SEQ ID NO: 2654085 - RNA, 16 nt, Human
uagaaauuuuguaaga

SEQ ID NO: 2654086 - RNA, 17 nt, Human
uagaaauuuuguaagaa

SEQ ID NO: 2654087 - RNA, 18 nt, Human
uagaaauuuuguaagaag

SEQ ID NO: 2654088 - RNA, 22 nt, Human
uagaaauuuuguaagaaggcaa

SEQ ID NO: 2654089 - RNA, 16 nt, Human
uagaacacuaacucac

SEQ ID NO: 2654090 - RNA, 13 nt, Human
uagaacagguuuu

SEQ ID NO: 2654091 - RNA, 14 nt, Human
uagaacagguuuuu

SEQ ID NO: 2654092 - RNA, 12 nt, Human
uagaacagguuu

SEQ ID NO: 2654093 - RNA, 19 nt, Human
uagaaaugaugauguggaa

SEQ ID NO: 2654094 - RNA, 16 nt, Human
uagaaauggaaauuuu

SEQ ID NO: 2654095 - RNA, 17 nt, Human
uagaaauggaaauuuug

SEQ ID NO: 2654096 - RNA, 21 nt, Human
uagaaauggaaauuuugcuau

SEQ ID NO: 2654097 - RNA, 16 nt, Human
uagaaauguagguccu

SEQ ID NO: 2654098 - RNA, 20 nt, Human
uagaaauguagguccucaga

SEQ ID NO: 2654099 - RNA, 19 nt, Human
uacuugcuuuaccuuuuca

SEQ ID NO: 2654100 - RNA, 23 nt, Human
uacuugcuuuaccuuuucagggc

SEQ ID NO: 2654101 - RNA, 12 nt, Human
uacuugggaggc

SEQ ID NO: 2654102 - RNA, 18 nt, Human
uacuugggaggcugaggc

SEQ ID NO: 2654103 - RNA, 18 nt, Human
uacuuaccuagugaaacu

SEQ ID NO: 2654104 - RNA, 19 nt, Human
uacuuaccuagugaaacuu

SEQ ID NO: 2654105 - RNA, 15 nt, Human
uacuuaauccaaugg

SEQ ID NO: 2654106 - RNA, 13 nt, Human
uacuguguaaacu

SEQ ID NO: 2654107 - RNA, 15 nt, Human
uacuguguaaacuca

SEQ ID NO: 2654108 - RNA, 16 nt, Human
uacuguguaaacucau

SEQ ID NO: 2654109 - RNA, 23 nt, Human
uacuguguaaacucaucugaaau

SEQ ID NO: 2654110 - RNA, 16 nt, Human
uacuguuguaagaauu

SEQ ID NO: 2654111 - RNA, 17 nt, Human
uacuguuguaagaauuc

SEQ ID NO: 2654112 - RNA, 22 nt, Human
uacuguuguaagaauucugauu

SEQ ID NO: 2654113 - RNA, 19 nt, Human
uacugugucucauggauuu

SEQ ID NO: 2654114 - RNA, 23 nt, Human
uacuguugcacaauuuugauaaa

SEQ ID NO: 2654115 - RNA, 14 nt, Human
uacugucaaaugau

SEQ ID NO: 2654116 - RNA, 15 nt, Human
uacugucaaaugaug

SEQ ID NO: 2654117 - RNA, 16 nt, Human
uacugucaaaugaugu

SEQ ID NO: 2654118 - RNA, 17 nt, Human
uacugucaaaugaugug

SEQ ID NO: 2654119 - RNA, 20 nt, Human
uacugucaaaugaugugcaa

SEQ ID NO: 2654120 - RNA, 17 nt, Human
uacgaaguucaagauca

SEQ ID NO: 2654121 - RNA, 16 nt, Human
uacgaaguucaagauc

SEQ ID NO: 2654122 - RNA, 21 nt, Human
uacgacacggguggggaaagg

SEQ ID NO: 2654123 - RNA, 18 nt, Human
uacgaaguucaagaucaa

SEQ ID NO: 2654124 - RNA, 19 nt, Human
uacuaauaaucuuguuucu

SEQ ID NO: 2654125 - RNA, 14 nt, Human
uaccuuucaaagcu

SEQ ID NO: 2654126 - RNA, 15 nt, Human
uaccuuucaaagcuu

SEQ ID NO: 2654127 - RNA, 18 nt, Human
uaccuuucucucucuaag

SEQ ID NO: 2654128 - RNA, 15 nt, Human
uacccauagacauga

SEQ ID NO: 2654129 - RNA, 16 nt, Human
uacccauagacaugaa

SEQ ID NO: 2654130 - RNA, 17 nt, Human
uacccauagacaugaaa

SEQ ID NO: 2654131 - RNA, 18 nt, Human
uacccauagacaugaaag

SEQ ID NO: 2654132 - RNA, 14 nt, Human
uacugauggaauuu

SEQ ID NO: 2654133 - RNA, 23 nt, Human
uacucaggcugguggagaacucu

SEQ ID NO: 2654134 - RNA, 12 nt, Human
uacccaccuaga

SEQ ID NO: 2654135 - RNA, 15 nt, Human
uacccaccuagaaca

SEQ ID NO: 2654136 - RNA, 22 nt, Human
uacccaccuagaacacuaacuc

SEQ ID NO: 2654137 - RNA, 17 nt, Human
uaccacaucaaauaaga

SEQ ID NO: 2654138 - RNA, 18 nt, Human
uaccauuuaguaagaaua

SEQ ID NO: 2654139 - RNA, 19 nt, Human
uaccauuuaguaagaauac

SEQ ID NO: 2654140 - RNA, 14 nt, Human
uaccaagugaaauu

SEQ ID NO: 2654141 - RNA, 18 nt, Human
uaccaaggucuucuuaau

SEQ ID NO: 2654142 - RNA, 20 nt, Human
uaccaaguauagccuauggc

SEQ ID NO: 2654143 - RNA, 21 nt, Human
uacauuugaugcaugucuuuu

SEQ ID NO: 2654144 - RNA, 19 nt, Human
uacauuugggaguuuuuau

SEQ ID NO: 2654145 - RNA, 21 nt, Human
uacauuugggaguuuuuauga

SEQ ID NO: 2654146 - RNA, 20 nt, Human
uacaugaagaauagaaacaa

SEQ ID NO: 2654147 - RNA, 21 nt, Human
uacaugaagaauagaaacaag

SEQ ID NO: 2654148 - RNA, 18 nt, Human
uacaugaagcuucaugca

SEQ ID NO: 2654149 - RNA, 19 nt, Human
uacaugaggaacuguagau

SEQ ID NO: 2654150 - RNA, 20 nt, Human
uacaugaggaacuguagaug

SEQ ID NO: 2654151 - RNA, 23 nt, Human
uacaugaggaacuguagaugaug

SEQ ID NO: 2654152 - RNA, 11 nt, Human
uacagaacuac

SEQ ID NO: 2654153 - RNA, 15 nt, Human
uacagaaaaagacuu

SEQ ID NO: 2654154 - RNA, 13 nt, Human
uacacuuuguugc

SEQ ID NO: 2654155 - RNA, 14 nt, Human
uacacuuuguugca

SEQ ID NO: 2654156 - RNA, 15 nt, Human
uacacuuuguugcaa

SEQ ID NO: 2654157 - RNA, 18 nt, Human
uacacuuuguugcaagau

SEQ ID NO: 2654158 - RNA, 22 nt, Human
uacacuuuguugcaagauguga

SEQ ID NO: 2654159 - RNA, 19 nt, Human
uacagcuuugaucccugac

SEQ ID NO: 2654160 - RNA, 21 nt, Human
uacagugguuuuauacugaag

SEQ ID NO: 2654161 - RNA, 22 nt, Human
uacagugguuuuauacugaagg

SEQ ID NO: 2654162 - RNA, 19 nt, Human
uacagccagaccagauuaa

SEQ ID NO: 2654163 - RNA, 18 nt, Human
uacagcuuucaugauuag

SEQ ID NO: 2654164 - RNA, 22 nt, Human
uacagccgagacucgacucugu

SEQ ID NO: 2654165 - RNA, 24 nt, Human
uacacuggcaaugguaguuucugu

SEQ ID NO: 2654166 - RNA, 23 nt, Human
uacacuggcaaugguaguuucug

SEQ ID NO: 2654167 - RNA, 18 nt, Human
uacacuggcaaugguagu

SEQ ID NO: 2654168 - RNA, 22 nt, Human
uacacuggcaaugguaguuucu

SEQ ID NO: 2654169 - RNA, 20 nt, Human
uacacuggcaaugguaguuu

SEQ ID NO: 2654170 - RNA, 21 nt, Human
uacacugccugccuuaaguga

SEQ ID NO: 2654171 - RNA, 18 nt, Human
uacacugccugccuuaag

SEQ ID NO: 2654172 - RNA, 11 nt, Human
uacacagaaac

SEQ ID NO: 2654173 - RNA, 13 nt, Human
uacacagaaacac

SEQ ID NO: 2654174 - RNA, 14 nt, Human
uacacagaaacacu

SEQ ID NO: 2654175 - RNA, 15 nt, Human
uacacagaaacacug

SEQ ID NO: 2654176 - RNA, 17 nt, Human
uacacugccugccuuaa

SEQ ID NO: 2654177 - RNA, 18 nt, Human
uacacagaaacacugccu

SEQ ID NO: 2654178 - RNA, 23 nt, Human
uaauccuuuguuuucugacuaau

SEQ ID NO: 2654179 - RNA, 20 nt, Human
uaauccuuuguuuucugacu

SEQ ID NO: 2654180 - RNA, 18 nt, Human
uaauccuuuguuuucuga

SEQ ID NO: 2654181 - RNA, 16 nt, Human
uaauccuuuguuuucu

SEQ ID NO: 2654182 - RNA, 14 nt, Human
uaauccuuuggaaa

SEQ ID NO: 2654183 - RNA, 22 nt, Human
uaauccuuuguuuucugacuaa

SEQ ID NO: 2654184 - RNA, 17 nt, Human
uaaucgggguauaauag

SEQ ID NO: 2654185 - RNA, 22 nt, Human
uaauccuuaaaucuuaauguuc

SEQ ID NO: 2654186 - RNA, 18 nt, Human
uaauauauaugaauaaag

SEQ ID NO: 2654187 - RNA, 16 nt, Human
uaauauauaugaauaa

SEQ ID NO: 2654188 - RNA, 14 nt, Human
uaauauauaugaau

SEQ ID NO: 2654189 - RNA, 16 nt, Human
uaauauagcugagacu

SEQ ID NO: 2654190 - RNA, 20 nt, Human
uaauauauguauuauuuaua

SEQ ID NO: 2654191 - RNA, 13 nt, Human
uaauauauuuucu

SEQ ID NO: 2654192 - RNA, 20 nt, Human
uaauauguucuuuuaaauga

SEQ ID NO: 2654193 - RNA, 17 nt, Human
uaauauauuuucuguuu

SEQ ID NO: 2654194 - RNA, 21 nt, Human
uaauauauuuucuguuuucuu

SEQ ID NO: 2654195 - RNA, 12 nt, Human
uaaugcacuuuc

SEQ ID NO: 2654196 - RNA, 13 nt, Human
uaaugcacuuucu

SEQ ID NO: 2654197 - RNA, 14 nt, Human
uaaugcacuuucua

SEQ ID NO: 2654198 - RNA, 22 nt, Human
uaaugaugacaaaaaauguuuu

SEQ ID NO: 2654199 - RNA, 22 nt, Human
uaaucuuauaauuguucucaga

SEQ ID NO: 2654200 - RNA, 16 nt, Human
uaaucuucaaagccuu

SEQ ID NO: 2654201 - RNA, 17 nt, Human
uaaucuucaaagccuuc

SEQ ID NO: 2654202 - RNA, 18 nt, Human
uaaucuguuuauuuacaa

SEQ ID NO: 2654203 - RNA, 17 nt, Human
uaaucuuaaucuguuua

SEQ ID NO: 2654204 - RNA, 15 nt, Human
uaaucuuauaauugu

SEQ ID NO: 2654205 - RNA, 18 nt, Human
uaaucuuauaauuguucu

SEQ ID NO: 2654206 - RNA, 14 nt, Human
uaaucucuaggaag

SEQ ID NO: 2654207 - RNA, 17 nt, Human
uaaucucuaggaaguca

SEQ ID NO: 2654208 - RNA, 14 nt, Human
uaauaauaauguuu

SEQ ID NO: 2654209 - RNA, 13 nt, Human
uaauacaagguau

SEQ ID NO: 2654210 - RNA, 14 nt, Human
uaauacaagguaua

SEQ ID NO: 2654211 - RNA, 19 nt, Human
uaauacaagguauaauaaa

SEQ ID NO: 2654212 - RNA, 20 nt, Human
uaauacaagguauaauaaaa

SEQ ID NO: 2654213 - RNA, 21 nt, Human
uaauacaagguauaauaaaau

SEQ ID NO: 2654214 - RNA, 22 nt, Human
uaauacaagguauaauaaaauu

SEQ ID NO: 2654215 - RNA, 12 nt, Human
uaauauaaaaaa

SEQ ID NO: 2654216 - RNA, 15 nt, Human
uaauauaaaaaauuu

SEQ ID NO: 2654217 - RNA, 21 nt, Human
uaauauaaaguaguccuguga

SEQ ID NO: 2654218 - RNA, 15 nt, Human
uaagugggcccaccc

SEQ ID NO: 2654219 - RNA, 18 nt, Human
uaagugggcccacccggu

SEQ ID NO: 2654220 - RNA, 17 nt, Human
uaauaaacuuuaauaua

SEQ ID NO: 2654221 - RNA, 16 nt, Human
uaaggccugugggggg

SEQ ID NO: 2654222 - RNA, 14 nt, Human
uaauaaaugcccuc

SEQ ID NO: 2654223 - RNA, 18 nt, Human
uaauaaaugcccucuucu

SEQ ID NO: 2654224 - RNA, 12 nt, Human
uaauuuuaaagu

SEQ ID NO: 2654225 - RNA, 14 nt, Human
uaauuuuaaagugc

SEQ ID NO: 2654226 - RNA, 21 nt, Human
uaauuuuacauguuuauaaau

SEQ ID NO: 2654227 - RNA, 22 nt, Human
uaauuuuacauguuuauaaauc

SEQ ID NO: 2654228 - RNA, 16 nt, Human
uaauuguucucagaau

SEQ ID NO: 2654229 - RNA, 17 nt, Human
uaauuguucucagaauc

SEQ ID NO: 2654230 - RNA, 22 nt, Human
uaauuguaaaguaaaagcuaua

SEQ ID NO: 2654231 - RNA, 15 nt, Human
uaauuguacaaaauu

SEQ ID NO: 2654232 - RNA, 17 nt, Human
uaauuguacaaaauuaa

SEQ ID NO: 2654233 - RNA, 22 nt, Human
uaauuguacaaaauuaagcaaa

SEQ ID NO: 2654234 - RNA, 23 nt, Human
uaauuguacaaaauuaagcaaau

SEQ ID NO: 2654235 - RNA, 21 nt, Human
uaauugugaaaaaguuaaaca

SEQ ID NO: 2654236 - RNA, 15 nt, Human
uaauuguauuuuugu

SEQ ID NO: 2654237 - RNA, 12 nt, Human
uaauuguauuuu

SEQ ID NO: 2654238 - RNA, 22 nt, Human
uaauugugugaacuuggaagca

SEQ ID NO: 2654239 - RNA, 21 nt, Human
uaauugugugaacuuggaagc

SEQ ID NO: 2654240 - RNA, 20 nt, Human
uaauugugugaacuuggaag

SEQ ID NO: 2654241 - RNA, 19 nt, Human
uaauugugugaacuuggaa

SEQ ID NO: 2654242 - RNA, 12 nt, Human
uaauugugugaa

SEQ ID NO: 2654243 - RNA, 23 nt, Human
uaauugguacuuuuaaaaacaua

SEQ ID NO: 2654244 - RNA, 21 nt, Human
uaauugcaaaaacauagaaau

SEQ ID NO: 2654245 - RNA, 22 nt, Human
uaauugaugcaaauaacacaaa

SEQ ID NO: 2654246 - RNA, 14 nt, Human
uaauugcugugugu

SEQ ID NO: 2654247 - RNA, 22 nt, Human
uaauugcugugugucccaggca

SEQ ID NO: 2654248 - RNA, 19 nt, Human
uaaugccauuuuaaggaaa

SEQ ID NO: 2654249 - RNA, 20 nt, Human
uaaugccauuuuaaggaaaa

SEQ ID NO: 2654250 - RNA, 21 nt, Human
uaauucuuuuuuauuaaucac

SEQ ID NO: 2654251 - RNA, 20 nt, Human
uaauucuuuuuuauuaauca

SEQ ID NO: 2654252 - RNA, 19 nt, Human
uaauucuuuuuuauuaauc

SEQ ID NO: 2654253 - RNA, 18 nt, Human
uaauucuuuuuuauuaau

SEQ ID NO: 2654254 - RNA, 17 nt, Human
uaauucuuuuuuauuaa

SEQ ID NO: 2654255 - RNA, 16 nt, Human
uaauucuuuuuuauua

SEQ ID NO: 2654256 - RNA, 15 nt, Human
uaauucuuuuuuauu

SEQ ID NO: 2654257 - RNA, 22 nt, Human
uaauugaaguguauaauauaaa

SEQ ID NO: 2654258 - RNA, 16 nt, Human
uaauuacugccuugaa

SEQ ID NO: 2654259 - RNA, 17 nt, Human
uaauuacugccuugaaa

SEQ ID NO: 2654260 - RNA, 22 nt, Human
uaauuacuuauuguauuuaugu

SEQ ID NO: 2654261 - RNA, 14 nt, Human
uaacauuauuuaua

SEQ ID NO: 2654262 - RNA, 12 nt, Human
uaacauuauuua

SEQ ID NO: 2654263 - RNA, 16 nt, Human
uaacauuauuuauaug

SEQ ID NO: 2654264 - RNA, 15 nt, Human
uaacauuauuuauau

SEQ ID NO: 2654265 - RNA, 20 nt, Human
uaacccuuugguuuuuuucu

SEQ ID NO: 2654266 - RNA, 12 nt, Human
uaacucauuugu

SEQ ID NO: 2654267 - RNA, 20 nt, Human
uaacucauuuguuaaaauua

SEQ ID NO: 2654268 - RNA, 22 nt, Human
uaaccuaaucaccauguaagca

SEQ ID NO: 2654269 - RNA, 12 nt, Human
uaacuguaaauc

SEQ ID NO: 2654270 - RNA, 13 nt, Human
uaacuguaaauca

SEQ ID NO: 2654271 - RNA, 14 nt, Human
uaacuguaaaucau

SEQ ID NO: 2654272 - RNA, 14 nt, Human
uaacuguauuugaa

SEQ ID NO: 2654273 - RNA, 11 nt, Human
uaacuguccug

SEQ ID NO: 2654274 - RNA, 12 nt, Human
uaacuguccugu

SEQ ID NO: 2654275 - RNA, 14 nt, Human
uaacuguccugucc

SEQ ID NO: 2654276 - RNA, 15 nt, Human
uaacuguccuguccu

SEQ ID NO: 2654277 - RNA, 17 nt, Human
uaacuguccuguccugc

SEQ ID NO: 2654278 - RNA, 12 nt, Human
uaacuguauuug

SEQ ID NO: 2654279 - RNA, 22 nt, Human
uaacuguauuugaaauaagaau

SEQ ID NO: 2654280 - RNA, 21 nt, Human
uaacugucaggcugaaaacaa

SEQ ID NO: 2654281 - RNA, 22 nt, Human
uaacugucaggcugaaaacaau

SEQ ID NO: 2654282 - RNA, 21 nt, Human
uaacugauuugcaauaaaaau

SEQ ID NO: 2654283 - RNA, 16 nt, Human
uaacugcauuuuuaga

SEQ ID NO: 2654284 - RNA, 18 nt, Human
uaacacaaaugcucaaag

SEQ ID NO: 2654285 - RNA, 13 nt, Human
uaacagaaauugu

SEQ ID NO: 2654286 - RNA, 14 nt, Human
uaacagaaauugua

SEQ ID NO: 2654287 - RNA, 15 nt, Human
uaacagaaauuguau

SEQ ID NO: 2654288 - RNA, 17 nt, Human
uaacagaaauuguauau

SEQ ID NO: 2654289 - RNA, 22 nt, Human
uaacagaaauuguauauuguaa

SEQ ID NO: 2654290 - RNA, 12 nt, Human
uaacagcugcaa

SEQ ID NO: 2654291 - RNA, 12 nt, Human
uaaauugcauca

SEQ ID NO: 2654292 - RNA, 16 nt, Human
uaaauugcaucacugu

SEQ ID NO: 2654293 - RNA, 18 nt, Human
uaaauugcaucacuguau

SEQ ID NO: 2654294 - RNA, 19 nt, Human
uaaauugcaucacuguauc

SEQ ID NO: 2654295 - RNA, 17 nt, Human
uaaaucauucuuacuaa

SEQ ID NO: 2654296 - RNA, 21 nt, Human
uaaauccaucacuauaauaaa

SEQ ID NO: 2654297 - RNA, 14 nt, Human
uaaauuuaauacca

SEQ ID NO: 2654298 - RNA, 17 nt, Human
uaaauuuaauaccagau

SEQ ID NO: 2654299 - RNA, 22 nt, Human
uaagaaagugaagcaaaucaga

SEQ ID NO: 2654300 - RNA, 18 nt, Human
uaagaaagugaagcaaau

SEQ ID NO: 2654301 - RNA, 15 nt, Human
uaagaaagugaagca

SEQ ID NO: 2654302 - RNA, 17 nt, Human
uaagaagaaguucaugu

SEQ ID NO: 2654303 - RNA, 22 nt, Human
uaagaagaaguucauguccaaa

SEQ ID NO: 2654304 - RNA, 15 nt, Human
uaagaacgaggauuu

SEQ ID NO: 2654305 - RNA, 20 nt, Human
uaagaucacuguuuagauuu

SEQ ID NO: 2654306 - RNA, 18 nt, Human
uaagaucacuguuuagau

SEQ ID NO: 2654307 - RNA, 21 nt, Human
uaagaucacuguuuagauuug

SEQ ID NO: 2654308 - RNA, 12 nt, Human
uaagaucacugu

SEQ ID NO: 2654309 - RNA, 17 nt, Human
uaagauaucucaaugaa

SEQ ID NO: 2654310 - RNA, 17 nt, Human
uaagaucacuguuuaga

SEQ ID NO: 2654311 - RNA, 15 nt, Human
uaagaucacuguuua

SEQ ID NO: 2654312 - RNA, 14 nt, Human
uaagaucacuguuu

SEQ ID NO: 2654313 - RNA, 13 nt, Human
uaagaucacuguu

SEQ ID NO: 2654314 - RNA, 15 nt, Human
uaagauaguguaacu

SEQ ID NO: 2654315 - RNA, 16 nt, Human
uaagauaguguaacuu

SEQ ID NO: 2654316 - RNA, 20 nt, Human
uaagauaguguaacuugcuu

SEQ ID NO: 2654317 - RNA, 21 nt, Human
uaagccaaaauuaagguguuu

SEQ ID NO: 2654318 - RNA, 19 nt, Human
uaagccaaaauuaaggugu

SEQ ID NO: 2654319 - RNA, 17 nt, Human
uaagccaaaauuaaggu

SEQ ID NO: 2654320 - RNA, 14 nt, Human
uaagccuucaaaac

SEQ ID NO: 2654321 - RNA, 21 nt, Human
uaaggcagauuuuacagagcg

SEQ ID NO: 2654322 - RNA, 17 nt, Human
guuucgaagucauuaaa

SEQ ID NO: 2654323 - RNA, 19 nt, Human
guuuccuggcacuggaccc

SEQ ID NO: 2654324 - RNA, 15 nt, Human
guuucguggggaggu

SEQ ID NO: 2654325 - RNA, 23 nt, Human
guuucguggggaggucuaaucua

SEQ ID NO: 2654326 - RNA, 15 nt, Human
guuucguuauauuaa

SEQ ID NO: 2654327 - RNA, 15 nt, Human
guuugagauucucaa

SEQ ID NO: 2654328 - RNA, 20 nt, Human
guuucuuuauuuuguguaaa

SEQ ID NO: 2654329 - RNA, 22 nt, Human
guuugaggauuaguuuagaaca

SEQ ID NO: 2654330 - RNA, 18 nt, Human
guuugagcugccuucccu

SEQ ID NO: 2654331 - RNA, 13 nt, Human
guuugagcugccu

SEQ ID NO: 2654332 - RNA, 14 nt, Human
guuugagcugccuu

SEQ ID NO: 2654333 - RNA, 15 nt, Human
guuugagcugccuuc

SEQ ID NO: 2654334 - RNA, 20 nt, Human
guuugucuuggauauauagg

SEQ ID NO: 2654335 - RNA, 22 nt, Human
guuuagauuugccauagaguac

SEQ ID NO: 2654336 - RNA, 12 nt, Human
guuuagauuugc

SEQ ID NO: 2654337 - RNA, 19 nt, Human
gguuggcugggaaaucgag

SEQ ID NO: 2654338 - RNA, 20 nt, Human
guuuccagacuuccuugaga

SEQ ID NO: 2654339 - RNA, 14 nt, Human
guuuccagggaggg

SEQ ID NO: 2654340 - RNA, 19 nt, Human
guuuccagacuuccuugag

SEQ ID NO: 2654341 - RNA, 18 nt, Human
guuucagcgacuccguug

SEQ ID NO: 2654342 - RNA, 17 nt, Human
guuuccuggcacuggac

SEQ ID NO: 2654343 - RNA, 15 nt, Human
guuuccugacauugu

SEQ ID NO: 2654344 - RNA, 17 nt, Human
guuuccugacauugucu

SEQ ID NO: 2654345 - RNA, 12 nt, Human
uaaaaaaaccac

SEQ ID NO: 2654346 - RNA, 22 nt, Human
uaaaaaaaccaccaaaaacaaa

SEQ ID NO: 2654347 - RNA, 20 nt, Human
uaaaaaaauaauaauaaugu

SEQ ID NO: 2654348 - RNA, 14 nt, Human
uaaaaaaaaaguca

SEQ ID NO: 2654349 - RNA, 15 nt, Human
uaaaaaaaaagucag

SEQ ID NO: 2654350 - RNA, 19 nt, Human
uaaaaaaaaagucagagac

SEQ ID NO: 2654351 - RNA, 16 nt, Human
guuuuuauuaaaacau

SEQ ID NO: 2654352 - RNA, 15 nt, Human
guuuuuaugagaaac

SEQ ID NO: 2654353 - RNA, 17 nt, Human
guuuuuaugagaaacuu

SEQ ID NO: 2654354 - RNA, 15 nt, Human
uaaaaaaagaaagca

SEQ ID NO: 2654355 - RNA, 13 nt, Human
uaaaaaagagaca

SEQ ID NO: 2654356 - RNA, 23 nt, Human
uaaaaaacugcugacuguuuucu

SEQ ID NO: 2654357 - RNA, 20 nt, Human
uaaaaaacugcugacuguuu

SEQ ID NO: 2654358 - RNA, 15 nt, Human
uaaaaacauaacaua

SEQ ID NO: 2654359 - RNA, 17 nt, Human
uaaaaacauaacauaaa

SEQ ID NO: 2654360 - RNA, 16 nt, Human
uaaaaaccgaauaaau

SEQ ID NO: 2654361 - RNA, 17 nt, Human
uaaaaaccgaauaaaug

SEQ ID NO: 2654362 - RNA, 18 nt, Human
uaaaaaccgaauaaaugu

SEQ ID NO: 2654363 - RNA, 20 nt, Human
uaaaaaccgaauaaauguuu

SEQ ID NO: 2654364 - RNA, 20 nt, Human
uaaaaacucaggcaaagaaa

SEQ ID NO: 2654365 - RNA, 14 nt, Human
uaaaaaauuuuaaa

SEQ ID NO: 2654366 - RNA, 19 nt, Human
uaaaaaauuuuaaaaaucu

SEQ ID NO: 2654367 - RNA, 13 nt, Human
uaaaaaauauuuu

SEQ ID NO: 2654368 - RNA, 14 nt, Human
uaaaaaauauuuuc

SEQ ID NO: 2654369 - RNA, 16 nt, Human
uaaaaaauauuuucuc

SEQ ID NO: 2654370 - RNA, 18 nt, Human
uaaaaaauauuuucucug

SEQ ID NO: 2654371 - RNA, 18 nt, Human
uaaaaaagcauacuucua

SEQ ID NO: 2654372 - RNA, 14 nt, Human
uaaaaaagccuucc

SEQ ID NO: 2654373 - RNA, 15 nt, Human
uaaaaaagccuuccu

SEQ ID NO: 2654374 - RNA, 18 nt, Human
uaaaaaagcucuuuuaau

SEQ ID NO: 2654375 - RNA, 14 nt, Human
uaaaaaauggucac

SEQ ID NO: 2654376 - RNA, 13 nt, Human
guuuguuggaaag

SEQ ID NO: 2654377 - RNA, 22 nt, Human
guuuucauuuacucuaaaaacu

SEQ ID NO: 2654378 - RNA, 18 nt, Human
guuuugugauguuugucc

SEQ ID NO: 2654379 - RNA, 24 nt, Human
guuuugucaaacuguagaaaugau

SEQ ID NO: 2654380 - RNA, 20 nt, Human
guuuugucauucagagucag

SEQ ID NO: 2654381 - RNA, 17 nt, Human
guuuugucaaacuguag

SEQ ID NO: 2654382 - RNA, 19 nt, Human
guuuucucuugagagggug

SEQ ID NO: 2654383 - RNA, 12 nt, Human
guuuucucuuga

SEQ ID NO: 2654384 - RNA, 17 nt, Human
uaaaaaugauacugaug

SEQ ID NO: 2654385 - RNA, 22 nt, Human
uaaaaauggaaacuauauugac

SEQ ID NO: 2654386 - RNA, 15 nt, Human
uaaaauccugugcaa

SEQ ID NO: 2654387 - RNA, 17 nt, Human
uaaaaucugagggaaau

SEQ ID NO: 2654388 - RNA, 20 nt, Human
uaaaaucugagggaaauguu

SEQ ID NO: 2654389 - RNA, 21 nt, Human
uaaaaucugagggaaauguuu

SEQ ID NO: 2654390 - RNA, 22 nt, Human
uaaaaucugagggaaauguuuu

SEQ ID NO: 2654391 - RNA, 23 nt, Human
uaaaaucugagggaaauguuuug

SEQ ID NO: 2654392 - RNA, 20 nt, Human
uaaaauauuuugaaucaaua

SEQ ID NO: 2654393 - RNA, 22 nt, Human
uaaaaggcccauagcagccagu

SEQ ID NO: 2654394 - RNA, 18 nt, Human
uaaaaggcuugaagcugu

SEQ ID NO: 2654395 - RNA, 14 nt, Human
uaaaauauuuugaa

SEQ ID NO: 2654396 - RNA, 16 nt, Human
uaaaauauuuugaauc

SEQ ID NO: 2654397 - RNA, 15 nt, Human
uaaaaugaaaauugu

SEQ ID NO: 2654398 - RNA, 16 nt, Human
uaaaaugaaaauugua

SEQ ID NO: 2654399 - RNA, 16 nt, Human
uaaaaugaagaauuua

SEQ ID NO: 2654400 - RNA, 15 nt, Human
uaaaaugaagaauuu

SEQ ID NO: 2654401 - RNA, 17 nt, Human
uaaaaugaagaauuuaa

SEQ ID NO: 2654402 - RNA, 15 nt, Human
uaaaaugcaauguaa

SEQ ID NO: 2654403 - RNA, 21 nt, Human
uaaacaaugcugauuugguga

SEQ ID NO: 2654404 - RNA, 22 nt, Human
uaaacaaguucgagucaaaguu

SEQ ID NO: 2654405 - RNA, 12 nt, Human
uaaacagaaaug

SEQ ID NO: 2654406 - RNA, 14 nt, Human
uaaacagaaaugga

SEQ ID NO: 2654407 - RNA, 18 nt, Human
uaaaauggcuguaaucau

SEQ ID NO: 2654408 - RNA, 17 nt, Human
uaaacaguaagauaucu

SEQ ID NO: 2654409 - RNA, 15 nt, Human
uaaagcuaaggaccu

SEQ ID NO: 2654410 - RNA, 14 nt, Human
uaaagcaguauuuu

SEQ ID NO: 2654411 - RNA, 17 nt, Human
uaaagcaguauuuuucu

SEQ ID NO: 2654412 - RNA, 13 nt, Human
uaaagcaguauuu

SEQ ID NO: 2654413 - RNA, 14 nt, Human
uaaagcaugaaaug

SEQ ID NO: 2654414 - RNA, 16 nt, Human
uaaagcaugaaaugug

SEQ ID NO: 2654415 - RNA, 17 nt, Human
uaaagcaugaaauguga

SEQ ID NO: 2654416 - RNA, 18 nt, Human
uaaagcaugaaaugugaa

SEQ ID NO: 2654417 - RNA, 19 nt, Human
uaaagcaugaaaugugaau

SEQ ID NO: 2654418 - RNA, 20 nt, Human
uaaagcaugaaaugugaauu

SEQ ID NO: 2654419 - RNA, 21 nt, Human
uaaagcaugaaaugugaauuu

SEQ ID NO: 2654420 - RNA, 14 nt, Human
uaaauaaaaaugga

SEQ ID NO: 2654421 - RNA, 15 nt, Human
uaaauaaaaaugucu

SEQ ID NO: 2654422 - RNA, 14 nt, Human
uaaauaaaaacuaa

SEQ ID NO: 2654423 - RNA, 19 nt, Human
uaaauaaaaacuaauuaag

SEQ ID NO: 2654424 - RNA, 17 nt, Human
uaaaguuugcuuagaaa

SEQ ID NO: 2654425 - RNA, 14 nt, Human
uaaaguuugcuuag

SEQ ID NO: 2654426 - RNA, 14 nt, Human
uaaaggauaaagaa

SEQ ID NO: 2654427 - RNA, 18 nt, Human
uaaauaucuucugauuug

SEQ ID NO: 2654428 - RNA, 17 nt, Human
uaaauaucuucugauuu

SEQ ID NO: 2654429 - RNA, 14 nt, Human
uaaauaaaccacug

SEQ ID NO: 2654430 - RNA, 15 nt, Human
uaaauaaaccacugu

SEQ ID NO: 2654431 - RNA, 13 nt, Human
uaaauaaaauuug

SEQ ID NO: 2654432 - RNA, 14 nt, Human
uaaauaaaauuugu

SEQ ID NO: 2654433 - RNA, 20 nt, Human
uaaauaaaauuuguugcaua

SEQ ID NO: 2654434 - RNA, 17 nt, Human
uaaauauuuauuuaugu

SEQ ID NO: 2654435 - RNA, 13 nt, Human
uaaauauuuucua

SEQ ID NO: 2654436 - RNA, 14 nt, Human
uaaauauuuucuau

SEQ ID NO: 2654437 - RNA, 16 nt, Human
uaaauauuuucuauuu

SEQ ID NO: 2654438 - RNA, 17 nt, Human
uaaauauuuucuauuuu

SEQ ID NO: 2654439 - RNA, 19 nt, Human
uaaaucagccguguaacca

SEQ ID NO: 2654440 - RNA, 16 nt, Human
uaaaucauguugauca

SEQ ID NO: 2654441 - RNA, 18 nt, Human
uauuuauuaauauuuaac

SEQ ID NO: 2654442 - RNA, 17 nt, Human
uauuuauugacucuuga

SEQ ID NO: 2654443 - RNA, 15 nt, Human
uauuuauugacucuu

SEQ ID NO: 2654444 - RNA, 12 nt, Human
uauuuauugacu

SEQ ID NO: 2654445 - RNA, 17 nt, Human
uauuuauuaauauuuaa

SEQ ID NO: 2654446 - RNA, 24 nt, Human
uauuuauuaaauuuuuuuguauga

SEQ ID NO: 2654447 - RNA, 13 nt, Human
uauuuauuaauau

SEQ ID NO: 2654448 - RNA, 19 nt, Human
uauuuauuaauauuuaaca

SEQ ID NO: 2654449 - RNA, 21 nt, Human
uauuuauugacucuugaguug

SEQ ID NO: 2654450 - RNA, 13 nt, Human
uauuucuauuauu

SEQ ID NO: 2654451 - RNA, 14 nt, Human
uauuucuauuauua

SEQ ID NO: 2654452 - RNA, 21 nt, Human
uauuucuauuauuaauugcaa

SEQ ID NO: 2654453 - RNA, 15 nt, Human
uauuuauuaaauuuu

SEQ ID NO: 2654454 - RNA, 15 nt, Human
uauuucuguauauaa

SEQ ID NO: 2654455 - RNA, 13 nt, Human
uauuugauuauuu

SEQ ID NO: 2654456 - RNA, 14 nt, Human
uauuugauuauuua

SEQ ID NO: 2654457 - RNA, 16 nt, Human
uauuuuauaaugucca

SEQ ID NO: 2654458 - RNA, 11 nt, Human
uauuugcuuuu

SEQ ID NO: 2654459 - RNA, 22 nt, Human
ucaaaacgguuuuacugcagcu

SEQ ID NO: 2654460 - RNA, 18 nt, Human
ucaaacuacauauuguaa

SEQ ID NO: 2654461 - RNA, 16 nt, Human
ucaaacucaaugcuuu

SEQ ID NO: 2654462 - RNA, 18 nt, Human
ucaaacucaaugcuuuau

SEQ ID NO: 2654463 - RNA, 22 nt, Human
ucaaacucaaugcuuuauuugu

SEQ ID NO: 2654464 - RNA, 23 nt, Human
ucaaacucaaugcuuuauuugua

SEQ ID NO: 2654465 - RNA, 14 nt, Human
ucaaacucuuaaaa

SEQ ID NO: 2654466 - RNA, 17 nt, Human
ucaaaaaggcuuauaaa

SEQ ID NO: 2654467 - RNA, 20 nt, Human
ucaaaaaggcuuauaaaaca

SEQ ID NO: 2654468 - RNA, 19 nt, Human
ucaaaaaggcuuauaaaac

SEQ ID NO: 2654469 - RNA, 21 nt, Human
ucaaaaaggcuuauaaaacag

SEQ ID NO: 2654470 - RNA, 11 nt, Human
uauuuuuucaa

SEQ ID NO: 2654471 - RNA, 13 nt, Human
ucaaaaaaugagc

SEQ ID NO: 2654472 - RNA, 13 nt, Human
uauuuuuguuguu

SEQ ID NO: 2654473 - RNA, 16 nt, Human
uauuuucauacaaauu

SEQ ID NO: 2654474 - RNA, 23 nt, Human
uauuuugaaucaauaauauauuu

SEQ ID NO: 2654475 - RNA, 16 nt, Human
uauuuugaaucaauaa

SEQ ID NO: 2654476 - RNA, 22 nt, Human
uauuuugaaucaauaauauauu

SEQ ID NO: 2654477 - RNA, 12 nt, Human
uauuuugaauca

SEQ ID NO: 2654478 - RNA, 13 nt, Human
uauuuugaaucaa

SEQ ID NO: 2654479 - RNA, 15 nt, Human
uauuuugaaucaaua

SEQ ID NO: 2654480 - RNA, 13 nt, Human
uauuuuaugguua

SEQ ID NO: 2654481 - RNA, 16 nt, Human
uauuuuaugguuaugu

SEQ ID NO: 2654482 - RNA, 19 nt, Human
uauuuuaugguuauguuuu

SEQ ID NO: 2654483 - RNA, 23 nt, Human
uauuuuaugguuauguuuuucug

SEQ ID NO: 2654484 - RNA, 14 nt, Human
uauuuucaugaaaa

SEQ ID NO: 2654485 - RNA, 20 nt, Human
uauuuucaugaaaauaccau

SEQ ID NO: 2654486 - RNA, 22 nt, Human
ucaacuagugggguuuccuggc

SEQ ID NO: 2654487 - RNA, 21 nt, Human
ucaacuagugggguuuccugg

SEQ ID NO: 2654488 - RNA, 16 nt, Human
ucaagcagucgugccu

SEQ ID NO: 2654489 - RNA, 17 nt, Human
ucaagcagucgugccug

SEQ ID NO: 2654490 - RNA, 18 nt, Human
ucaagcagucgugccugu

SEQ ID NO: 2654491 - RNA, 15 nt, Human
ucaaagaaauauuaa

SEQ ID NO: 2654492 - RNA, 15 nt, Human
ucaaccguacaaugg

SEQ ID NO: 2654493 - RNA, 23 nt, Human
ucaagcagucgugccugugucca

SEQ ID NO: 2654494 - RNA, 19 nt, Human
ucaagcagucgugccugug

SEQ ID NO: 2654495 - RNA, 20 nt, Human
ucaagcagucgugccugugu

SEQ ID NO: 2654496 - RNA, 21 nt, Human
ucaagcagucgugccuguguc

SEQ ID NO: 2654497 - RNA, 22 nt, Human
ucaagcagucgugccugugucc

SEQ ID NO: 2654498 - RNA, 16 nt, Human
ucaaugggaccugugg

SEQ ID NO: 2654499 - RNA, 16 nt, Human
ucaaugcuuuauuugu

SEQ ID NO: 2654500 - RNA, 17 nt, Human
ucaaugcuuuauuugua

SEQ ID NO: 2654501 - RNA, 18 nt, Human
ucaaugcuuuauuuguaa

SEQ ID NO: 2654502 - RNA, 19 nt, Human
ucaaugcuuuauuuguaaa

SEQ ID NO: 2654503 - RNA, 20 nt, Human
ucaaugcuuuauuuguaaau

SEQ ID NO: 2654504 - RNA, 16 nt, Human
ucaauagaucuccagc

SEQ ID NO: 2654505 - RNA, 18 nt, Human
ucaauacacuaguuguuu

SEQ ID NO: 2654506 - RNA, 15 nt, Human
ucaccuagaaauuga

SEQ ID NO: 2654507 - RNA, 13 nt, Human
ucaccucaugccc

SEQ ID NO: 2654508 - RNA, 20 nt, Human
ucacgccuguaauccuagca

SEQ ID NO: 2654509 - RNA, 19 nt, Human
ucacgccuguaauccuagc

SEQ ID NO: 2654510 - RNA, 22 nt, Human
ucacgggagauuucuuguugcu

SEQ ID NO: 2654511 - RNA, 20 nt, Human
ucaccuucuagucuuggcca

SEQ ID NO: 2654512 - RNA, 20 nt, Human
ucacucggguuucucugugg

SEQ ID NO: 2654513 - RNA, 16 nt, Human
ucacucuaagucaugu

SEQ ID NO: 2654514 - RNA, 20 nt, Human
ucacucuaagucauguaugu

SEQ ID NO: 2654515 - RNA, 21 nt, Human
ucacucuaagucauguauguu

SEQ ID NO: 2654516 - RNA, 17 nt, Human
ucacggaagagccuugc

SEQ ID NO: 2654517 - RNA, 16 nt, Human
ucacggaagagccuug

SEQ ID NO: 2654518 - RNA, 14 nt, Human
ucacggaagagccu

SEQ ID NO: 2654519 - RNA, 18 nt, Human
ucagaaaguguauaauaa

SEQ ID NO: 2654520 - RNA, 15 nt, Human
ucagacauguuuucc

SEQ ID NO: 2654521 - RNA, 14 nt, Human
ucagacauguuuuc

SEQ ID NO: 2654522 - RNA, 19 nt, Human
ucagacaucugagguuuua

SEQ ID NO: 2654523 - RNA, 20 nt, Human
ucagacauguuuuccgugaa

SEQ ID NO: 2654524 - RNA, 22 nt, Human
ucagacaucugagguuuuauuu

SEQ ID NO: 2654525 - RNA, 12 nt, Human
ucagaaagugua

SEQ ID NO: 2654526 - RNA, 18 nt, Human
ucagaaaaugaaaaaucu

SEQ ID NO: 2654527 - RNA, 13 nt, Human
ucagaaauauaac

SEQ ID NO: 2654528 - RNA, 19 nt, Human
ucagaaauauaacacauuu

SEQ ID NO: 2654529 - RNA, 20 nt, Human
ucagaaauauaacacauuuu

SEQ ID NO: 2654530 - RNA, 16 nt, Human
ucagaaagcuuuauuu

SEQ ID NO: 2654531 - RNA, 19 nt, Human
ucagaaagcuuuauuuuga

SEQ ID NO: 2654532 - RNA, 20 nt, Human
ucacuuuuggcaaugacuca

SEQ ID NO: 2654533 - RNA, 21 nt, Human
ucacuuuuuaugcuauuucug

SEQ ID NO: 2654534 - RNA, 22 nt, Human
ucacuuuuuaugcuauuucugu

SEQ ID NO: 2654535 - RNA, 18 nt, Human
uccccgcagcccuggcag

SEQ ID NO: 2654536 - RNA, 13 nt, Human
uccccgccuggcc

SEQ ID NO: 2654537 - RNA, 14 nt, Human
uccccgccuggcca

SEQ ID NO: 2654538 - RNA, 15 nt, Human
uccccgccuggccag

SEQ ID NO: 2654539 - RNA, 16 nt, Human
uccccgccuggccagg

SEQ ID NO: 2654540 - RNA, 17 nt, Human
uccccgccuggccagga

SEQ ID NO: 2654541 - RNA, 18 nt, Human
uccccgccuggccaggag

SEQ ID NO: 2654542 - RNA, 19 nt, Human
uccccgccuggccaggagc

SEQ ID NO: 2654543 - RNA, 20 nt, Human
uccccgccuggccaggagca

SEQ ID NO: 2654544 - RNA, 18 nt, Human
uccccgacgcccacccaa

SEQ ID NO: 2654545 - RNA, 15 nt, Human
uccccgcugcugugc

SEQ ID NO: 2654546 - RNA, 16 nt, Human
uccccgcugcugugca

SEQ ID NO: 2654547 - RNA, 19 nt, Human
uccccugccaccaggccac

SEQ ID NO: 2654548 - RNA, 13 nt, Human
uccccugccacca

SEQ ID NO: 2654549 - RNA, 14 nt, Human
uccccugccaccag

SEQ ID NO: 2654550 - RNA, 16 nt, Human
uccccugccaccaggc

SEQ ID NO: 2654551 - RNA, 17 nt, Human
uccccugccaccaggcc

SEQ ID NO: 2654552 - RNA, 11 nt, Human
uccccagccug

SEQ ID NO: 2654553 - RNA, 17 nt, Human
uccccagccugcgccug

SEQ ID NO: 2654554 - RNA, 14 nt, Human
uccccagccugcgc

SEQ ID NO: 2654555 - RNA, 13 nt, Human
uccccagccugcg

SEQ ID NO: 2654556 - RNA, 12 nt, Human
uccccagccugc

SEQ ID NO: 2654557 - RNA, 20 nt, Human
uccccagccugcgccugcug

SEQ ID NO: 2654558 - RNA, 19 nt, Human
uccccagccugcgccugcu

SEQ ID NO: 2654559 - RNA, 22 nt, Human
uccccuguagagugggagcuga

SEQ ID NO: 2654560 - RNA, 19 nt, Human
uccccuguagagugggagc

SEQ ID NO: 2654561 - RNA, 23 nt, Human
ucccaaagugcugggauuacaga

SEQ ID NO: 2654562 - RNA, 15 nt, Human
ucccaacaagcagcu

SEQ ID NO: 2654563 - RNA, 20 nt, Human
uccagcauuuagcuggccac

SEQ ID NO: 2654564 - RNA, 21 nt, Human
uccagcauuuagcuggccaca

SEQ ID NO: 2654565 - RNA, 21 nt, Human
uccauccaaggccagguucuc

SEQ ID NO: 2654566 - RNA, 13 nt, Human
uccauccaaggcc

SEQ ID NO: 2654567 - RNA, 21 nt, Human
ucccauguagcccccuggccu

SEQ ID NO: 2654568 - RNA, 15 nt, Human
ucccauguagccccc

SEQ ID NO: 2654569 - RNA, 13 nt, Human
ucccauguagccc

SEQ ID NO: 2654570 - RNA, 11 nt, Human
ucccauuccag

SEQ ID NO: 2654571 - RNA, 13 nt, Human
ucccauuccaggc

SEQ ID NO: 2654572 - RNA, 14 nt, Human
ucccauuccaggca

SEQ ID NO: 2654573 - RNA, 13 nt, Human
ucccaucugcacc

SEQ ID NO: 2654574 - RNA, 19 nt, Human
ucccaucugcaccccuucu

SEQ ID NO: 2654575 - RNA, 14 nt, Human
ucccauggggaggg

SEQ ID NO: 2654576 - RNA, 18 nt, Human
ucccaggagccugcccag

SEQ ID NO: 2654577 - RNA, 17 nt, Human
ucccaggagccugccca

SEQ ID NO: 2654578 - RNA, 13 nt, Human
ucccaggagccug

SEQ ID NO: 2654579 - RNA, 20 nt, Human
ucccaaguaacugggauuac

SEQ ID NO: 2654580 - RNA, 21 nt, Human
ucccaaguaacugggauuaca

SEQ ID NO: 2654581 - RNA, 13 nt, Human
ucauucagaaaug

SEQ ID NO: 2654582 - RNA, 14 nt, Human
ucauucagaaaugu

SEQ ID NO: 2654583 - RNA, 14 nt, Human
ucauucagagucag

SEQ ID NO: 2654584 - RNA, 20 nt, Human
ucauucagagucagccagga

SEQ ID NO: 2654585 - RNA, 22 nt, Human
ucauucagagucagccaggacc

SEQ ID NO: 2654586 - RNA, 19 nt, Human
ucauucagcagcaaauuuu

SEQ ID NO: 2654587 - RNA, 21 nt, Human
ucauucagcagcaaauuuuca

SEQ ID NO: 2654588 - RNA, 23 nt, Human
ucauucagcagcaaauuuucagc

SEQ ID NO: 2654589 - RNA, 23 nt, Human
ucauguaaauuuuguaugaaaaa

SEQ ID NO: 2654590 - RNA, 19 nt, Human
uccaaacugaagcagccuc

SEQ ID NO: 2654591 - RNA, 22 nt, Human
uccacaaccucuuccccccaaa

SEQ ID NO: 2654592 - RNA, 20 nt, Human
uccaagauuuaaaugccaua

SEQ ID NO: 2654593 - RNA, 19 nt, Human
uccagaaccacacuugaaa

SEQ ID NO: 2654594 - RNA, 19 nt, Human
uccagaaauacaauuuuag

SEQ ID NO: 2654595 - RNA, 22 nt, Human
uccagaacucacuggggccuac

SEQ ID NO: 2654596 - RNA, 18 nt, Human
ucagcagcaaauuuucag

SEQ ID NO: 2654597 - RNA, 17 nt, Human
ucaguggguuaacauca

SEQ ID NO: 2654598 - RNA, 20 nt, Human
ucaguggguuaacaucaguu

SEQ ID NO: 2654599 - RNA, 23 nt, Human
ucaguggguuaacaucaguuuug

SEQ ID NO: 2654600 - RNA, 13 nt, Human
ucaguugcuuguc

SEQ ID NO: 2654601 - RNA, 15 nt, Human
ucaguugcuugucuu

SEQ ID NO: 2654602 - RNA, 23 nt, Human
ucaguugagcuucauauaccagc

SEQ ID NO: 2654603 - RNA, 19 nt, Human
ucaguucauugugguccuu

SEQ ID NO: 2654604 - RNA, 14 nt, Human
ucaucugaaauguu

SEQ ID NO: 2654605 - RNA, 15 nt, Human
ucaucugaaauguua

SEQ ID NO: 2654606 - RNA, 20 nt, Human
ucaucugucuauauuuuauu

SEQ ID NO: 2654607 - RNA, 23 nt, Human
ucaugcccacccccugcccugca

SEQ ID NO: 2654608 - RNA, 20 nt, Human
ucauaguacucuuuguagca

SEQ ID NO: 2654609 - RNA, 13 nt, Human
ucauguaaaacag

SEQ ID NO: 2654610 - RNA, 15 nt, Human
ucauguaaaacagaa

SEQ ID NO: 2654611 - RNA, 18 nt, Human
ucauguaaaacagaaaaa

SEQ ID NO: 2654612 - RNA, 16 nt, Human
ucauguaaauuuugua

SEQ ID NO: 2654613 - RNA, 17 nt, Human
ucauguaaauuuuguau

SEQ ID NO: 2654614 - RNA, 14 nt, Human
ucugagcugccagu

SEQ ID NO: 2654615 - RNA, 19 nt, Human
ucugagcuuacguaguucu

SEQ ID NO: 2654616 - RNA, 17 nt, Human
ucugagcuuacguaguu

SEQ ID NO: 2654617 - RNA, 15 nt, Human
ucugauucuggcuuu

SEQ ID NO: 2654618 - RNA, 19 nt, Human
ucugauucuggcuuuaagc

SEQ ID NO: 2654619 - RNA, 23 nt, Human
ucugauucuggcuuuaagccuuc

SEQ ID NO: 2654620 - RNA, 22 nt, Human
ucugauugauuugauugggaug

SEQ ID NO: 2654621 - RNA, 14 nt, Human
ucugcacaagcugc

SEQ ID NO: 2654622 - RNA, 19 nt, Human
ucugcacaagcugcacccu

SEQ ID NO: 2654623 - RNA, 12 nt, Human
ucugaacuugcc

SEQ ID NO: 2654624 - RNA, 17 nt, Human
ucugaacuugccuuaaa

SEQ ID NO: 2654625 - RNA, 19 nt, Human
ucugaccacuugaggccug

SEQ ID NO: 2654626 - RNA, 20 nt, Human
ucugaccacuugaggccuga

SEQ ID NO: 2654627 - RNA, 18 nt, Human
ucucuuugauuauuugca

SEQ ID NO: 2654628 - RNA, 19 nt, Human
ucucuuugauuauuugcau

SEQ ID NO: 2654629 - RNA, 20 nt, Human
ucucuuccuuuuaucaguag

SEQ ID NO: 2654630 - RNA, 14 nt, Human
ucucuucucagagu

SEQ ID NO: 2654631 - RNA, 17 nt, Human
ucucuucucagaguggu

SEQ ID NO: 2654632 - RNA, 19 nt, Human
ucucuucucagaguggugg

SEQ ID NO: 2654633 - RNA, 19 nt, Human
ucucuucauuauucucugc

SEQ ID NO: 2654634 - RNA, 15 nt, Human
ucugaaauguuacaa

SEQ ID NO: 2654635 - RNA, 18 nt, Human
ucugaaauguuacaaaaa

SEQ ID NO: 2654636 - RNA, 20 nt, Human
ucugaaauguuacaaaaaua

SEQ ID NO: 2654637 - RNA, 22 nt, Human
ucugaaauguuacaaaaauaaa

SEQ ID NO: 2654638 - RNA, 22 nt, Human
ucugaaaucuucccaugcauuc

SEQ ID NO: 2654639 - RNA, 20 nt, Human
ucugaaauaggaaacaagug

SEQ ID NO: 2654640 - RNA, 17 nt, Human
ucugaaauaggaaacaa

SEQ ID NO: 2654641 - RNA, 18 nt, Human
ucugaaauaggaaacaag

SEQ ID NO: 2654642 - RNA, 12 nt, Human
ucucuuuuccac

SEQ ID NO: 2654643 - RNA, 22 nt, Human
ucucuuuuccacuccauugucg

SEQ ID NO: 2654644 - RNA, 13 nt, Human
ucucuagcacaau

SEQ ID NO: 2654645 - RNA, 15 nt, Human
ucucuacaaaaagca

SEQ ID NO: 2654646 - RNA, 19 nt, Human
ucucugacuucugccugga

SEQ ID NO: 2654647 - RNA, 17 nt, Human
ucucugacuucugccug

SEQ ID NO: 2654648 - RNA, 18 nt, Human
ucucugacuucugccugg

SEQ ID NO: 2654649 - RNA, 15 nt, Human
ucucucuucucagag

SEQ ID NO: 2654650 - RNA, 16 nt, Human
ucucucuucucagagu

SEQ ID NO: 2654651 - RNA, 13 nt, Human
ucucugacuucug

SEQ ID NO: 2654652 - RNA, 14 nt, Human
ucucugaaagugug

SEQ ID NO: 2654653 - RNA, 14 nt, Human
ucucugacuucugc

SEQ ID NO: 2654654 - RNA, 16 nt, Human
ucucugacuucugccu

SEQ ID NO: 2654655 - RNA, 14 nt, Human
ucucuauuaaaaug

SEQ ID NO: 2654656 - RNA, 13 nt, Human
ucucuauuugaga

SEQ ID NO: 2654657 - RNA, 14 nt, Human
ucucagugcccucc

SEQ ID NO: 2654658 - RNA, 16 nt, Human
ucucagugcccuccag

SEQ ID NO: 2654659 - RNA, 13 nt, Human
ucucaguguuggu

SEQ ID NO: 2654660 - RNA, 14 nt, Human
ucucaguguuggua

SEQ ID NO: 2654661 - RNA, 14 nt, Human
ucuccugagcuagg

SEQ ID NO: 2654662 - RNA, 13 nt, Human
ucuccugacuggu

SEQ ID NO: 2654663 - RNA, 15 nt, Human
ucuccugacuggugc

SEQ ID NO: 2654664 - RNA, 15 nt, Human
ucuccugacagaagg

SEQ ID NO: 2654665 - RNA, 15 nt, Human
ucucccuagcuccuc

SEQ ID NO: 2654666 - RNA, 16 nt, Human
ucucccuagcuccucc

SEQ ID NO: 2654667 - RNA, 20 nt, Human
ucucccuagcuccuccccuu

SEQ ID NO: 2654668 - RNA, 17 nt, Human
ucgcuucuugccucugu

SEQ ID NO: 2654669 - RNA, 20 nt, Human
ucggaacccaagcuuagaac

SEQ ID NO: 2654670 - RNA, 19 nt, Human
ucggaacccaagcuuagaa

SEQ ID NO: 2654671 - RNA, 14 nt, Human
ucgcuucuugccuc

SEQ ID NO: 2654672 - RNA, 15 nt, Human
ucgcuucuugccucu

SEQ ID NO: 2654673 - RNA, 16 nt, Human
ucgcuucuugccucug

SEQ ID NO: 2654674 - RNA, 19 nt, Human
ucgcccaggcuggagugca

SEQ ID NO: 2654675 - RNA, 16 nt, Human
ucgcaccauucugacu

SEQ ID NO: 2654676 - RNA, 13 nt, Human
ucgcaccggagug

SEQ ID NO: 2654677 - RNA, 22 nt, Human
ucgcaccggagugucuggaauu

SEQ ID NO: 2654678 - RNA, 17 nt, Human
ucgcaccauucugacuc

SEQ ID NO: 2654679 - RNA, 13 nt, Human
ucgagucugaggc

SEQ ID NO: 2654680 - RNA, 14 nt, Human
uccuuuuugacacu

SEQ ID NO: 2654681 - RNA, 16 nt, Human
uccuuuuugacacuga

SEQ ID NO: 2654682 - RNA, 17 nt, Human
uccuuuuugacacugaa

SEQ ID NO: 2654683 - RNA, 23 nt, Human
uccuuuuuauuuauauguaugug

SEQ ID NO: 2654684 - RNA, 22 nt, Human
uccuuuuuauuuauauguaugu

SEQ ID NO: 2654685 - RNA, 23 nt, Human
ucgagugccgcaucucacagcua

SEQ ID NO: 2654686 - RNA, 22 nt, Human
ucgagugccgcaucucacagcu

SEQ ID NO: 2654687 - RNA, 20 nt, Human
ucgagugccgcaucucacag

SEQ ID NO: 2654688 - RNA, 14 nt, Human
ucgagucugaggcc

SEQ ID NO: 2654689 - RNA, 14 nt, Human
ucgauacugcgacu

SEQ ID NO: 2654690 - RNA, 18 nt, Human
uccuuuuuauuuauaugu

SEQ ID NO: 2654691 - RNA, 15 nt, Human
uccuuuuuauuuaua

SEQ ID NO: 2654692 - RNA, 14 nt, Human
uccuuuuuauuuau

SEQ ID NO: 2654693 - RNA, 13 nt, Human
uccuuuuuauuua

SEQ ID NO: 2654694 - RNA, 12 nt, Human
uccuuuuuaagg

SEQ ID NO: 2654695 - RNA, 14 nt, Human
uccuugauuucaaa

SEQ ID NO: 2654696 - RNA, 22 nt, Human
uccuugauuucaaaguuuuguu

SEQ ID NO: 2654697 - RNA, 12 nt, Human
uccuucuuuaaa

SEQ ID NO: 2654698 - RNA, 17 nt, Human
uccuuaauucacuccca

SEQ ID NO: 2654699 - RNA, 18 nt, Human
uccuuaauucacucccac

SEQ ID NO: 2654700 - RNA, 19 nt, Human
uccuuaauucacucccaca

SEQ ID NO: 2654701 - RNA, 20 nt, Human
uccuuauuuggcgugacccg

SEQ ID NO: 2654702 - RNA, 17 nt, Human
uccuggcccacugcauc

SEQ ID NO: 2654703 - RNA, 18 nt, Human
uccccuuccucuugucug

SEQ ID NO: 2654704 - RNA, 19 nt, Human
uccuggcagcccagagacu

SEQ ID NO: 2654705 - RNA, 17 nt, Human
uccuggcagcccagaga

SEQ ID NO: 2654706 - RNA, 18 nt, Human
ucuaaccucgcccucucc

SEQ ID NO: 2654707 - RNA, 21 nt, Human
ucuaaauguuuggcauguaaa

SEQ ID NO: 2654708 - RNA, 22 nt, Human
ucuaaauguuuggcauguaaau

SEQ ID NO: 2654709 - RNA, 22 nt, Human
ucuagggaaaaaccagcgugug

SEQ ID NO: 2654710 - RNA, 23 nt, Human
ucuagaagccaagggaaaggggu

SEQ ID NO: 2654711 - RNA, 19 nt, Human
ucuagggaaaaaccagcgu

SEQ ID NO: 2654712 - RNA, 17 nt, Human
ucuagaauuauuuuuca

SEQ ID NO: 2654713 - RNA, 19 nt, Human
ucuagaauuauuuuucacu

SEQ ID NO: 2654714 - RNA, 17 nt, Human
ucuagaagccaagggaa

SEQ ID NO: 2654715 - RNA, 20 nt, Human
ucuagaagccaagggaaagg

SEQ ID NO: 2654716 - RNA, 21 nt, Human
ucuagaagccaagggaaaggg

SEQ ID NO: 2654717 - RNA, 24 nt, Human
ucuacugcauuuagggaguauucu

SEQ ID NO: 2654718 - RNA, 17 nt, Human
ucucaaagaaauauuaa

SEQ ID NO: 2654719 - RNA, 15 nt, Human
ucucacuguuuguuu

SEQ ID NO: 2654720 - RNA, 19 nt, Human
ucucacuguuuguuuuuau

SEQ ID NO: 2654721 - RNA, 12 nt, Human
ucucagaagcac

SEQ ID NO: 2654722 - RNA, 14 nt, Human
ucucagaagcacag

SEQ ID NO: 2654723 - RNA, 15 nt, Human
ucucagaagcacaga

SEQ ID NO: 2654724 - RNA, 16 nt, Human
ucucagaagcacagaa

SEQ ID NO: 2654725 - RNA, 12 nt, Human
ucucagaauccc

SEQ ID NO: 2654726 - RNA, 21 nt, Human
ucucagaaucccuuaacaguu

SEQ ID NO: 2654727 - RNA, 13 nt, Human
ugaacacuuauaa

SEQ ID NO: 2654728 - RNA, 17 nt, Human
ugaaaccuuuuuuuauc

SEQ ID NO: 2654729 - RNA, 23 nt, Human
ugaacauacaaaugcaucuuuga

SEQ ID NO: 2654730 - RNA, 16 nt, Human
ugaacauacaaaugca

SEQ ID NO: 2654731 - RNA, 15 nt, Human
ugaacauacaaaugc

SEQ ID NO: 2654732 - RNA, 17 nt, Human
ugaaaugccugcuuuga

SEQ ID NO: 2654733 - RNA, 13 nt, Human
ugaaaugcauauu

SEQ ID NO: 2654734 - RNA, 21 nt, Human
ugaacucuucucauuacuugu

SEQ ID NO: 2654735 - RNA, 18 nt, Human
ugaacucuucucauuacu

SEQ ID NO: 2654736 - RNA, 14 nt, Human
ugaacucuucucau

SEQ ID NO: 2654737 - RNA, 16 nt, Human
ugaacuuggaagcaca

SEQ ID NO: 2654738 - RNA, 16 nt, Human
ugaagauccagcugcc

SEQ ID NO: 2654739 - RNA, 17 nt, Human
ugaagauccagcugccu

SEQ ID NO: 2654740 - RNA, 15 nt, Human
ugaagaugggagccu

SEQ ID NO: 2654741 - RNA, 18 nt, Human
ugaaaagaugguaucaua

SEQ ID NO: 2654742 - RNA, 16 nt, Human
ugaaaagagacaggca

SEQ ID NO: 2654743 - RNA, 18 nt, Human
ugaaaucuucccaugcau

SEQ ID NO: 2654744 - RNA, 19 nt, Human
ugaaaucuucccaugcauu

SEQ ID NO: 2654745 - RNA, 22 nt, Human
ugaaaucuucccaugcauucug

SEQ ID NO: 2654746 - RNA, 19 nt, Human
ugaaaggcaggccuauuuc

SEQ ID NO: 2654747 - RNA, 20 nt, Human
ugaaaggcaggccuauuuca

SEQ ID NO: 2654748 - RNA, 21 nt, Human
ugaaaggcaggccuauuucau

SEQ ID NO: 2654749 - RNA, 22 nt, Human
ugaaaggcaggccuauuucauc

SEQ ID NO: 2654750 - RNA, 23 nt, Human
ugaaaggcaggccuauuucauca

SEQ ID NO: 2654751 - RNA, 22 nt, Human
ugaaaggagagcaucggccuag

SEQ ID NO: 2654752 - RNA, 22 nt, Human
ucuuuugguaaagacuggcuuu

SEQ ID NO: 2654753 - RNA, 23 nt, Human
ucuuuugccuuuugcaaccagga

SEQ ID NO: 2654754 - RNA, 16 nt, Human
ucuuuugauuauguuu

SEQ ID NO: 2654755 - RNA, 13 nt, Human
ucuuuugcuuuug

SEQ ID NO: 2654756 - RNA, 18 nt, Human
ucuuuugcuuuuggcaaa

SEQ ID NO: 2654757 - RNA, 12 nt, Human
ucuuuugaagca

SEQ ID NO: 2654758 - RNA, 14 nt, Human
ucuuuugaagcaua

SEQ ID NO: 2654759 - RNA, 15 nt, Human
ugaaaacuucagaag

SEQ ID NO: 2654760 - RNA, 12 nt, Human
ucuuuuuuaacc

SEQ ID NO: 2654761 - RNA, 21 nt, Human
ucuuuuuuaaccgguaagagu

SEQ ID NO: 2654762 - RNA, 23 nt, Human
ucuuuuuuaaccgguaagaguuu

SEQ ID NO: 2654763 - RNA, 15 nt, Human
ucuuuuuguuguaaa

SEQ ID NO: 2654764 - RNA, 16 nt, Human
ucuuuuuguuguaaaa

SEQ ID NO: 2654765 - RNA, 12 nt, Human
ucuuuuuguuug

SEQ ID NO: 2654766 - RNA, 15 nt, Human
ucuuuuuuauuaauc

SEQ ID NO: 2654767 - RNA, 24 nt, Human
ucuuuuuuauuaaucacuguguau

SEQ ID NO: 2654768 - RNA, 21 nt, Human
ucuuuuuuauuaaucacugug

SEQ ID NO: 2654769 - RNA, 16 nt, Human
ucuuuuuuauuaauca

SEQ ID NO: 2654770 - RNA, 13 nt, Human
ucuguguuuauaa

SEQ ID NO: 2654771 - RNA, 14 nt, Human
ucuguguugccaag

SEQ ID NO: 2654772 - RNA, 16 nt, Human
ucuguguugccaagcu

SEQ ID NO: 2654773 - RNA, 20 nt, Human
ucugugugugugugugugcg

SEQ ID NO: 2654774 - RNA, 15 nt, Human
ucuguuaugggcuuu

SEQ ID NO: 2654775 - RNA, 21 nt, Human
ucuguuaugggcuuuugggga

SEQ ID NO: 2654776 - RNA, 18 nt, Human
ucuuaaaaaguggaaaaa

SEQ ID NO: 2654777 - RNA, 20 nt, Human
ucugugguuggcugggaaau

SEQ ID NO: 2654778 - RNA, 19 nt, Human
ucugugguuggcugggaaa

SEQ ID NO: 2654779 - RNA, 14 nt, Human
ucugugguuggcug

SEQ ID NO: 2654780 - RNA, 13 nt, Human
ucugugguuggcu

SEQ ID NO: 2654781 - RNA, 12 nt, Human
ucugugguuggc

SEQ ID NO: 2654782 - RNA, 16 nt, Human
ucugugguuccucugc

SEQ ID NO: 2654783 - RNA, 17 nt, Human
ucugugguuccucugcu

SEQ ID NO: 2654784 - RNA, 18 nt, Human
ucugugguuccucugcuc

SEQ ID NO: 2654785 - RNA, 19 nt, Human
ucugugguuccucugcuca

SEQ ID NO: 2654786 - RNA, 20 nt, Human
ucugugguuccucugcucac

SEQ ID NO: 2654787 - RNA, 19 nt, Human
ucuguccgagcuuugaaaa

SEQ ID NO: 2654788 - RNA, 14 nt, Human
ucuggaggggaggg

SEQ ID NO: 2654789 - RNA, 21 nt, Human
ucuggaggggagggggauccg

SEQ ID NO: 2654790 - RNA, 16 nt, Human
ucuggagcccuaaccc

SEQ ID NO: 2654791 - RNA, 21 nt, Human
ucuggagcccuaaccccuucc

SEQ ID NO: 2654792 - RNA, 23 nt, Human
ucuggagcccuaaccccuuccag

SEQ ID NO: 2654793 - RNA, 21 nt, Human
ucugcaccccuucucuccucc

SEQ ID NO: 2654794 - RNA, 22 nt, Human
ucugcaccccuucucuccuccc

SEQ ID NO: 2654795 - RNA, 15 nt, Human
ucugcaccccuucuc

SEQ ID NO: 2654796 - RNA, 18 nt, Human
ucugcaccccuucucucc

SEQ ID NO: 2654797 - RNA, 19 nt, Human
ucugcaccccuucucuccu

SEQ ID NO: 2654798 - RNA, 20 nt, Human
ucugcaccccuucucuccuc

SEQ ID NO: 2654799 - RNA, 14 nt, Human
ucugcacccagaac

SEQ ID NO: 2654800 - RNA, 15 nt, Human
ucugcacccagaaca

SEQ ID NO: 2654801 - RNA, 21 nt, Human
ucuggagaccagggagccuuu

SEQ ID NO: 2654802 - RNA, 20 nt, Human
ucuggagaccagggagccuu

SEQ ID NO: 2654803 - RNA, 19 nt, Human
ucuggagaccagggagccu

SEQ ID NO: 2654804 - RNA, 15 nt, Human
ucuggagaccaggga

SEQ ID NO: 2654805 - RNA, 12 nt, Human
ucuguaauaaua

SEQ ID NO: 2654806 - RNA, 13 nt, Human
ucuguaauaauag

SEQ ID NO: 2654807 - RNA, 15 nt, Human
ucuguaauaauagac

SEQ ID NO: 2654808 - RNA, 16 nt, Human
ucuguaauaauagacu

SEQ ID NO: 2654809 - RNA, 19 nt, Human
ucuguaauaauagacugua

SEQ ID NO: 2654810 - RNA, 14 nt, Human
ucuggcuuuaagcc

SEQ ID NO: 2654811 - RNA, 17 nt, Human
ucuggcuuuaagccuuc

SEQ ID NO: 2654812 - RNA, 12 nt, Human
ucuugccucugu

SEQ ID NO: 2654813 - RNA, 14 nt, Human
ucuugccuccaggu

SEQ ID NO: 2654814 - RNA, 15 nt, Human
ucuugccuccaggug

SEQ ID NO: 2654815 - RNA, 17 nt, Human
ucuugccuccaggugca

SEQ ID NO: 2654816 - RNA, 18 nt, Human
ucuugccuccaggugcag

SEQ ID NO: 2654817 - RNA, 19 nt, Human
ucuugccuccaggugcaga

SEQ ID NO: 2654818 - RNA, 13 nt, Human
ucuugccucugug

SEQ ID NO: 2654819 - RNA, 14 nt, Human
ucuugccucugugc

SEQ ID NO: 2654820 - RNA, 15 nt, Human
ucuugccucugugcu

SEQ ID NO: 2654821 - RNA, 16 nt, Human
ucuugccucugugcug

SEQ ID NO: 2654822 - RNA, 19 nt, Human
ucuugccucugugcugugu

SEQ ID NO: 2654823 - RNA, 16 nt, Human
ucuuuaaaaggaaaga

SEQ ID NO: 2654824 - RNA, 15 nt, Human
ucuuuaaaagaauga

SEQ ID NO: 2654825 - RNA, 16 nt, Human
ucuuuaaaagaaugac

SEQ ID NO: 2654826 - RNA, 17 nt, Human
ucuuuaaaagaaugacu

SEQ ID NO: 2654827 - RNA, 16 nt, Human
ucuugucugauuucuu

SEQ ID NO: 2654828 - RNA, 16 nt, Human
ucuucaguaagccgug

SEQ ID NO: 2654829 - RNA, 12 nt, Human
ucuucuaaaugg

SEQ ID NO: 2654830 - RNA, 15 nt, Human
ucuucuaauugcugu

SEQ ID NO: 2654831 - RNA, 14 nt, Human
ucuucucagagugg

SEQ ID NO: 2654832 - RNA, 19 nt, Human
ucuucuagugaugaugguu

SEQ ID NO: 2654833 - RNA, 21 nt, Human
ucuuauaauuguucucagaau

SEQ ID NO: 2654834 - RNA, 21 nt, Human
ucuuaugcucucacuguuugu

SEQ ID NO: 2654835 - RNA, 15 nt, Human
ucuucaguaagccgu

SEQ ID NO: 2654836 - RNA, 14 nt, Human
ucuuaguuauauag

SEQ ID NO: 2654837 - RNA, 21 nt, Human
ucuuauaaaguggaaguaugu

SEQ ID NO: 2654838 - RNA, 13 nt, Human
ucuuaaaaagugg

SEQ ID NO: 2654839 - RNA, 22 nt, Human
ugccauggcuagguagaaguga

SEQ ID NO: 2654840 - RNA, 22 nt, Human
ugcccagcccccuggucuuuga

SEQ ID NO: 2654841 - RNA, 22 nt, Human
ugccuaaguccaguguuucuuu

SEQ ID NO: 2654842 - RNA, 18 nt, Human
ugccugauccuccaacag

SEQ ID NO: 2654843 - RNA, 12 nt, Human
ugccugaauaaa

SEQ ID NO: 2654844 - RNA, 13 nt, Human
ugccugaauaaag

SEQ ID NO: 2654845 - RNA, 17 nt, Human
ugccugaauaaagagcc

SEQ ID NO: 2654846 - RNA, 14 nt, Human
ugccucugugcugu

SEQ ID NO: 2654847 - RNA, 16 nt, Human
ugccucugugcugugu

SEQ ID NO: 2654848 - RNA, 11 nt, Human
ugccucugugc

SEQ ID NO: 2654849 - RNA, 12 nt, Human
ugccucugugcu

SEQ ID NO: 2654850 - RNA, 13 nt, Human
ugccucugugcug

SEQ ID NO: 2654851 - RNA, 13 nt, Human
ugccuucgcuucu

SEQ ID NO: 2654852 - RNA, 14 nt, Human
ugccuucgcuucuu

SEQ ID NO: 2654853 - RNA, 16 nt, Human
ugccuucgcuucuugc

SEQ ID NO: 2654854 - RNA, 17 nt, Human
ugccuucgcuucuugcc

SEQ ID NO: 2654855 - RNA, 16 nt, Human
ugccuucccuagcuuu

SEQ ID NO: 2654856 - RNA, 21 nt, Human
ugcgcccccuccgcccugcca

SEQ ID NO: 2654857 - RNA, 23 nt, Human
ugcgcccccuccgcccugccacu

SEQ ID NO: 2654858 - RNA, 21 nt, Human
ugcgcccuuaacugcauccag

SEQ ID NO: 2654859 - RNA, 13 nt, Human
ugccuucccuagc

SEQ ID NO: 2654860 - RNA, 14 nt, Human
ugccuucccuagcu

SEQ ID NO: 2654861 - RNA, 17 nt, Human
ugccuucccuagcuuua

SEQ ID NO: 2654862 - RNA, 16 nt, Human
ugccugaugacaauaa

SEQ ID NO: 2654863 - RNA, 22 nt, Human
ugccuggccuuguccucagcca

SEQ ID NO: 2654864 - RNA, 11 nt, Human
ugccuggcccc

SEQ ID NO: 2654865 - RNA, 12 nt, Human
ugccuggccccc

SEQ ID NO: 2654866 - RNA, 13 nt, Human
ugcucaucugcug

SEQ ID NO: 2654867 - RNA, 14 nt, Human
ugcucaucugcugg

SEQ ID NO: 2654868 - RNA, 15 nt, Human
ugcucaucugcuggu

SEQ ID NO: 2654869 - RNA, 16 nt, Human
ugcucaucugcugguc

SEQ ID NO: 2654870 - RNA, 18 nt, Human
ugcucaucugcugguccg

SEQ ID NO: 2654871 - RNA, 15 nt, Human
ugcuagaagcuguaa

SEQ ID NO: 2654872 - RNA, 13 nt, Human
ugcuagcuagcuc

SEQ ID NO: 2654873 - RNA, 21 nt, Human
ugcugagucuguucugguaau

SEQ ID NO: 2654874 - RNA, 19 nt, Human
ugcugagucuguucuggua

SEQ ID NO: 2654875 - RNA, 16 nt, Human
ugcugagucuguucug

SEQ ID NO: 2654876 - RNA, 20 nt, Human
ugcugaauguugggacugcu

SEQ ID NO: 2654877 - RNA, 18 nt, Human
ugcugaauguugggacug

SEQ ID NO: 2654878 - RNA, 21 nt, Human
ugcugcaggacuugagaagac

SEQ ID NO: 2654879 - RNA, 19 nt, Human
ugcuccuggcccacugcau

SEQ ID NO: 2654880 - RNA, 23 nt, Human
ugcugaauacagaggcaacugca

SEQ ID NO: 2654881 - RNA, 18 nt, Human
ugcugaauacagaggcaa

SEQ ID NO: 2654882 - RNA, 23 nt, Human
ugcacgguuucgaagucauuaaa

SEQ ID NO: 2654883 - RNA, 22 nt, Human
ugcacgguuucgaagucauuaa

SEQ ID NO: 2654884 - RNA, 17 nt, Human
ugcacuugugauuauuu

SEQ ID NO: 2654885 - RNA, 20 nt, Human
ugcacuugugauuauuuauu

SEQ ID NO: 2654886 - RNA, 14 nt, Human
ugcaggaccucagg

SEQ ID NO: 2654887 - RNA, 14 nt, Human
ugcagcuuugcaaa

SEQ ID NO: 2654888 - RNA, 15 nt, Human
ugcagcuuugcaaac

SEQ ID NO: 2654889 - RNA, 16 nt, Human
ugcaggaccucaggug

SEQ ID NO: 2654890 - RNA, 15 nt, Human
ugcaggaccucaggu

SEQ ID NO: 2654891 - RNA, 18 nt, Human
ugcaggaccucaggugag

SEQ ID NO: 2654892 - RNA, 20 nt, Human
ugcacauccgcgugugccug

SEQ ID NO: 2654893 - RNA, 21 nt, Human
ugcacauccgcgugugccugu

SEQ ID NO: 2654894 - RNA, 22 nt, Human
ugcacauccgcgugugccugug

SEQ ID NO: 2654895 - RNA, 21 nt, Human
ugcacauaagcuuccauuuua

SEQ ID NO: 2654896 - RNA, 22 nt, Human
ugcacauaagcuuccauuuuaa

SEQ ID NO: 2654897 - RNA, 19 nt, Human
ugaagucuuuaauaaauaa

SEQ ID NO: 2654898 - RNA, 23 nt, Human
ugaagucuuaaggacaaagugcc

SEQ ID NO: 2654899 - RNA, 21 nt, Human
ugaagucuuacuacagaaaug

SEQ ID NO: 2654900 - RNA, 20 nt, Human
ugcacagccacuccccggca

SEQ ID NO: 2654901 - RNA, 12 nt, Human
ugccaucuguag

SEQ ID NO: 2654902 - RNA, 14 nt, Human
ugccaucgcuguga

SEQ ID NO: 2654903 - RNA, 16 nt, Human
ugccaucuagccagcc

SEQ ID NO: 2654904 - RNA, 17 nt, Human
ugccaucuagccagccc

SEQ ID NO: 2654905 - RNA, 18 nt, Human
ugccaucuagccagcccc

SEQ ID NO: 2654906 - RNA, 16 nt, Human
ugccaucuaucuaguu

SEQ ID NO: 2654907 - RNA, 11 nt, Human
ugcccaccccc

SEQ ID NO: 2654908 - RNA, 13 nt, Human
ugcccacccccug

SEQ ID NO: 2654909 - RNA, 14 nt, Human
ugcccacccccugc

SEQ ID NO: 2654910 - RNA, 15 nt, Human
ugcccacccccugcc

SEQ ID NO: 2654911 - RNA, 16 nt, Human
ugcccacccccugccc

SEQ ID NO: 2654912 - RNA, 18 nt, Human
ugcccacccccugcccug

SEQ ID NO: 2654913 - RNA, 19 nt, Human
ugcccacccccugcccugc

SEQ ID NO: 2654914 - RNA, 20 nt, Human
ugcccacccccugcccugca

SEQ ID NO: 2654915 - RNA, 18 nt, Human
ugcaggacuugagaagac

SEQ ID NO: 2654916 - RNA, 15 nt, Human
ugcaggacuugagaa

SEQ ID NO: 2654917 - RNA, 13 nt, Human
ugcaggacuugag

SEQ ID NO: 2654918 - RNA, 15 nt, Human
ugcaucguuucaucu

SEQ ID NO: 2654919 - RNA, 14 nt, Human
ugcaugucuuuuaa

SEQ ID NO: 2654920 - RNA, 20 nt, Human
ugcaugucaaacaugagaug

SEQ ID NO: 2654921 - RNA, 14 nt, Human
ugcauccagaggca

SEQ ID NO: 2654922 - RNA, 21 nt, Human
ugcauccagccuggggcugag

SEQ ID NO: 2654923 - RNA, 11 nt, Human
ugcauuuuugu

SEQ ID NO: 2654924 - RNA, 14 nt, Human
ugcauuuuuguaaa

SEQ ID NO: 2654925 - RNA, 15 nt, Human
ugcauuuuuguaaau

SEQ ID NO: 2654926 - RNA, 22 nt, Human
ugcauuuuuguaaauguguaca

SEQ ID NO: 2654927 - RNA, 14 nt, Human
uggcacuugccugg

SEQ ID NO: 2654928 - RNA, 15 nt, Human
uggcacuugccuggg

SEQ ID NO: 2654929 - RNA, 16 nt, Human
uggcacuugccugggu

SEQ ID NO: 2654930 - RNA, 17 nt, Human
uggcacuugccuggguc

SEQ ID NO: 2654931 - RNA, 18 nt, Human
uggcacuugccuggguca

SEQ ID NO: 2654932 - RNA, 20 nt, Human
uggcagaaaaaaugucugua

SEQ ID NO: 2654933 - RNA, 21 nt, Human
uggcagaaaaaaugucuguaa

SEQ ID NO: 2654934 - RNA, 22 nt, Human
uggaugccagggccgaccagag

SEQ ID NO: 2654935 - RNA, 12 nt, Human
uggcaggcuggc

SEQ ID NO: 2654936 - RNA, 13 nt, Human
uggcaggcuggcc

SEQ ID NO: 2654937 - RNA, 14 nt, Human
uggcaggcuggcca

SEQ ID NO: 2654938 - RNA, 15 nt, Human
uggcaggcuggccag

SEQ ID NO: 2654939 - RNA, 18 nt, Human
uggcaggcuggccagucc

SEQ ID NO: 2654940 - RNA, 23 nt, Human
uggccagagagccuggugcugcu

SEQ ID NO: 2654941 - RNA, 13 nt, Human
uggccagagagcc

SEQ ID NO: 2654942 - RNA, 20 nt, Human
uggccacuccgagagguggg

SEQ ID NO: 2654943 - RNA, 23 nt, Human
uggccacuccgagaggugggcca

SEQ ID NO: 2654944 - RNA, 12 nt, Human
uggcagugguuu

SEQ ID NO: 2654945 - RNA, 14 nt, Human
uggccacuccgaga

SEQ ID NO: 2654946 - RNA, 18 nt, Human
uggccacuccgagaggug

SEQ ID NO: 2654947 - RNA, 13 nt, Human
uggaggcuuccug

SEQ ID NO: 2654948 - RNA, 15 nt, Human
uggaggcuuccugcg

SEQ ID NO: 2654949 - RNA, 16 nt, Human
uggaggcuuccugcgu

SEQ ID NO: 2654950 - RNA, 17 nt, Human
uggaggcuuccugcguc

SEQ ID NO: 2654951 - RNA, 15 nt, Human
uggagauuauaauaa

SEQ ID NO: 2654952 - RNA, 16 nt, Human
uggagauuauaauaaa

SEQ ID NO: 2654953 - RNA, 19 nt, Human
uggagauuauaauaaauau

SEQ ID NO: 2654954 - RNA, 21 nt, Human
uggagacuuagggcaccaggg

SEQ ID NO: 2654955 - RNA, 16 nt, Human
uggagacuuagggcac

SEQ ID NO: 2654956 - RNA, 16 nt, Human
uggaaaaguguccuuc

SEQ ID NO: 2654957 - RNA, 22 nt, Human
uggaacccuuuuaaaguugaua

SEQ ID NO: 2654958 - RNA, 23 nt, Human
uggaaucccacuaaugcaaacug

SEQ ID NO: 2654959 - RNA, 23 nt, Human
uggaaucaggaauauuuuccaaa

SEQ ID NO: 2654960 - RNA, 21 nt, Human
uggaaucaggaauauuuucca

SEQ ID NO: 2654961 - RNA, 22 nt, Human
uggaaucaggaauauuuuccaa

SEQ ID NO: 2654962 - RNA, 18 nt, Human
uggaaucuggagaccagg

SEQ ID NO: 2654963 - RNA, 17 nt, Human
uggaaucuggagaccag

SEQ ID NO: 2654964 - RNA, 23 nt, Human
ugcuucucugacuucugccugga

SEQ ID NO: 2654965 - RNA, 21 nt, Human
ugcuucucugacuucugccug

SEQ ID NO: 2654966 - RNA, 22 nt, Human
ugcuucucugacuucugccugg

SEQ ID NO: 2654967 - RNA, 13 nt, Human
ugcuucugccacc

SEQ ID NO: 2654968 - RNA, 12 nt, Human
ugcuucugccac

SEQ ID NO: 2654969 - RNA, 23 nt, Human
ugcugcagcaccgaggggccuuu

SEQ ID NO: 2654970 - RNA, 14 nt, Human
ugcuucucugacuu

SEQ ID NO: 2654971 - RNA, 17 nt, Human
ugcuucucugacuucug

SEQ ID NO: 2654972 - RNA, 19 nt, Human
ugcuucucugacuucugcc

SEQ ID NO: 2654973 - RNA, 20 nt, Human
ugcuucucugacuucugccu

SEQ ID NO: 2654974 - RNA, 19 nt, Human
ugcuuuagacuugaaaaga

SEQ ID NO: 2654975 - RNA, 21 nt, Human
ugcuuuagacuugaaaagaga

SEQ ID NO: 2654976 - RNA, 20 nt, Human
ugcuuuccaaaccuuaucuc

SEQ ID NO: 2654977 - RNA, 14 nt, Human
ugcuuuccaaaccu

SEQ ID NO: 2654978 - RNA, 16 nt, Human
ugcuuucagaagugcc

SEQ ID NO: 2654979 - RNA, 23 nt, Human
ugcuuucagaagugcccuuccug

SEQ ID NO: 2654980 - RNA, 13 nt, Human
ugcuuuauuugua

SEQ ID NO: 2654981 - RNA, 14 nt, Human
ugcuuuauuuguaa

SEQ ID NO: 2654982 - RNA, 15 nt, Human
ugcuuuauuuguaaa

SEQ ID NO: 2654983 - RNA, 16 nt, Human
ugcuuuauuuguaaau

SEQ ID NO: 2654984 - RNA, 23 nt, Human
ugcuuuauuuguaaauuuagugu

SEQ ID NO: 2654985 - RNA, 17 nt, Human
ugcuuuuuuguuuuggc

SEQ ID NO: 2654986 - RNA, 16 nt, Human
ugcuuuuuguguuuuu

SEQ ID NO: 2654987 - RNA, 15 nt, Human
ugcuuuauuaauguu

SEQ ID NO: 2654988 - RNA, 17 nt, Human
ugcuuuauuaauguuuu

SEQ ID NO: 2654989 - RNA, 18 nt, Human
ugcuuuauuaauguuuuc

SEQ ID NO: 2654990 - RNA, 20 nt, Human
ugcuuuauuaauguuuucaa

SEQ ID NO: 2654991 - RNA, 21 nt, Human
ugcuuuauuaauguuuucaaa

SEQ ID NO: 2654992 - RNA, 23 nt, Human
ugcuuuauuaauguuuucaaaag

SEQ ID NO: 2654993 - RNA, 21 nt, Human
ugggguggggggggguccuaa

SEQ ID NO: 2654994 - RNA, 23 nt, Human
uggguaggaaagaggaagcaaau

SEQ ID NO: 2654995 - RNA, 14 nt, Human
uggggcaggcuggg

SEQ ID NO: 2654996 - RNA, 15 nt, Human
uggggcaggcugggc

SEQ ID NO: 2654997 - RNA, 16 nt, Human
uggggcaggcugggcc

SEQ ID NO: 2654998 - RNA, 17 nt, Human
uggggcaggcugggcca

SEQ ID NO: 2654999 - RNA, 18 nt, Human
uggggcaggcugggccau

SEQ ID NO: 2655000 - RNA, 20 nt, Human
uggggcaggcugggccaugu

SEQ ID NO: 2655001 - RNA, 12 nt, Human
uggggcagggag

SEQ ID NO: 2655002 - RNA, 13 nt, Human
uggggcagggagc

SEQ ID NO: 2655003 - RNA, 14 nt, Human
uggggcagggagcu

SEQ ID NO: 2655004 - RNA, 21 nt, Human
uggggcagggagcugggcccg

SEQ ID NO: 2655005 - RNA, 17 nt, Human
uggggcauccugugcca

SEQ ID NO: 2655006 - RNA, 14 nt, Human
uggguuccuccucu

SEQ ID NO: 2655007 - RNA, 17 nt, Human
ugggugucuccuuaagc

SEQ ID NO: 2655008 - RNA, 14 nt, Human
ugggcggcugugcu

SEQ ID NO: 2655009 - RNA, 15 nt, Human
ugggcuuggccugcu

SEQ ID NO: 2655010 - RNA, 16 nt, Human
ugggcuuggccugcug

SEQ ID NO: 2655011 - RNA, 14 nt, Human
ugggcuuggccugc

SEQ ID NO: 2655012 - RNA, 19 nt, Human
ugggcuuggccugcuguga

SEQ ID NO: 2655013 - RNA, 17 nt, Human
ugggcuuggccugcugu

SEQ ID NO: 2655014 - RNA, 18 nt, Human
ugggcuuggccugcugug

SEQ ID NO: 2655015 - RNA, 13 nt, Human
ugggagccagccu

SEQ ID NO: 2655016 - RNA, 14 nt, Human
ugggaggagggaga

SEQ ID NO: 2655017 - RNA, 13 nt, Human
ugggaggagcaga

SEQ ID NO: 2655018 - RNA, 13 nt, Human
ugggaggagggag

SEQ ID NO: 2655019 - RNA, 18 nt, Human
ugggaggagcagauuuuu

SEQ ID NO: 2655020 - RNA, 22 nt, Human
uggcuuuuauuaaugcacuuuc

SEQ ID NO: 2655021 - RNA, 14 nt, Human
ugggaaugaggugg

SEQ ID NO: 2655022 - RNA, 17 nt, Human
ugggaaugaggugggag

SEQ ID NO: 2655023 - RNA, 13 nt, Human
uggcuguaaucau

SEQ ID NO: 2655024 - RNA, 16 nt, Human
uggcuguaaucauuug

SEQ ID NO: 2655025 - RNA, 22 nt, Human
uggcuguaaucauuuguuuaca

SEQ ID NO: 2655026 - RNA, 18 nt, Human
uggcugucaaugggaccu

SEQ ID NO: 2655027 - RNA, 22 nt, Human
uggcugucaaugggaccugugg

SEQ ID NO: 2655028 - RNA, 17 nt, Human
uggcuuuuauuaaugca

SEQ ID NO: 2655029 - RNA, 20 nt, Human
uggcuuuuauuaaugcacuu

SEQ ID NO: 2655030 - RNA, 21 nt, Human
uggcuuuuauuaaugcacuuu

SEQ ID NO: 2655031 - RNA, 14 nt, Human
ugggacccccgugg

SEQ ID NO: 2655032 - RNA, 17 nt, Human
ugggacccccguggggc

SEQ ID NO: 2655033 - RNA, 22 nt, Human
ugggacccccguggggcaggga

SEQ ID NO: 2655034 - RNA, 16 nt, Human
ugggaaugaggaaaau

SEQ ID NO: 2655035 - RNA, 16 nt, Human
ugggagcuccacucug

SEQ ID NO: 2655036 - RNA, 19 nt, Human
ugggagcuccacucugcuu

SEQ ID NO: 2655037 - RNA, 22 nt, Human
ugggagcuccacucugcuucuc

SEQ ID NO: 2655038 - RNA, 20 nt, Human
ugggagccaugccgucugcc

SEQ ID NO: 2655039 - RNA, 18 nt, Human
uggccagaggugucaccc

SEQ ID NO: 2655040 - RNA, 20 nt, Human
uggccuuguccucagccagu

SEQ ID NO: 2655041 - RNA, 15 nt, Human
uggcauaaauugcau

SEQ ID NO: 2655042 - RNA, 17 nt, Human
uggccuuuguaagugca

SEQ ID NO: 2655043 - RNA, 18 nt, Human
uggccuuuguaagugcag

SEQ ID NO: 2655044 - RNA, 19 nt, Human
uggccuuuguaagugcagg

SEQ ID NO: 2655045 - RNA, 20 nt, Human
uggccuuuguaagugcagga

SEQ ID NO: 2655046 - RNA, 18 nt, Human
uggcgccgucuccagggg

SEQ ID NO: 2655047 - RNA, 15 nt, Human
uggcgccgucuccag

SEQ ID NO: 2655048 - RNA, 17 nt, Human
uggcgccgucuccaggg

SEQ ID NO: 2655049 - RNA, 17 nt, Human
uggcgccaccagcucug

SEQ ID NO: 2655050 - RNA, 14 nt, Human
uggcgcaggugggc

SEQ ID NO: 2655051 - RNA, 16 nt, Human
uggcgcaggugggcug

SEQ ID NO: 2655052 - RNA, 21 nt, Human
uggcgcaggugggcuggacuu

SEQ ID NO: 2655053 - RNA, 12 nt, Human
uggcgugacccg

SEQ ID NO: 2655054 - RNA, 21 nt, Human
uggcgugacccgaccuggccg

SEQ ID NO: 2655055 - RNA, 17 nt, Human
uggcgugggagccagcc

SEQ ID NO: 2655056 - RNA, 18 nt, Human
uggcgugggagccagccu

SEQ ID NO: 2655057 - RNA, 14 nt, Human
uggcucaggguggu

SEQ ID NO: 2655058 - RNA, 12 nt, Human
uggcuccugauc

SEQ ID NO: 2655059 - RNA, 18 nt, Human
uggcucgaaucucugugc

SEQ ID NO: 2655060 - RNA, 19 nt, Human
uggcucgaaucucugugcc

SEQ ID NO: 2655061 - RNA, 20 nt, Human
uggcucgaaucucugugccu

SEQ ID NO: 2655062 - RNA, 21 nt, Human
uggcucgaaucucugugccuu

SEQ ID NO: 2655063 - RNA, 15 nt, Human
uggcucugggauccu

SEQ ID NO: 2655064 - RNA, 18 nt, Human
uggcucugggauccuggg

SEQ ID NO: 2655065 - RNA, 13 nt, Human
uuaacauuauuua

SEQ ID NO: 2655066 - RNA, 15 nt, Human
uuaacauucauagag

SEQ ID NO: 2655067 - RNA, 13 nt, Human
uuaacaucaguuu

SEQ ID NO: 2655068 - RNA, 22 nt, Human
uuaaaugguaauaagcacugua

SEQ ID NO: 2655069 - RNA, 12 nt, Human
uguuuuugugaa

SEQ ID NO: 2655070 - RNA, 23 nt, Human
uuaaaacaucauuccuuuuuauu

SEQ ID NO: 2655071 - RNA, 14 nt, Human
uuaaaaccaaagag

SEQ ID NO: 2655072 - RNA, 18 nt, Human
uuaaaacaucauuccuuu

SEQ ID NO: 2655073 - RNA, 16 nt, Human
uuaaaacaucauuccu

SEQ ID NO: 2655074 - RNA, 14 nt, Human
uuaaagagaaugag

SEQ ID NO: 2655075 - RNA, 15 nt, Human
uuaaagagaaugagu

SEQ ID NO: 2655076 - RNA, 13 nt, Human
uguuuuguaaaca

SEQ ID NO: 2655077 - RNA, 16 nt, Human
uguuuuguaaacauuu

SEQ ID NO: 2655078 - RNA, 17 nt, Human
uguuuuguaaacauuua

SEQ ID NO: 2655079 - RNA, 18 nt, Human
uguuuuguaaacauuuau

SEQ ID NO: 2655080 - RNA, 21 nt, Human
uguuuuuauacaaaauaagaa

SEQ ID NO: 2655081 - RNA, 12 nt, Human
uguuuuaaagaa

SEQ ID NO: 2655082 - RNA, 19 nt, Human
uguuuuaaagaauaugacu

SEQ ID NO: 2655083 - RNA, 22 nt, Human
uguuuuaaagaauaugacuuuu

SEQ ID NO: 2655084 - RNA, 18 nt, Human
uguuuuaaaacuggaccu

SEQ ID NO: 2655085 - RNA, 17 nt, Human
uguuuuggauggcuugu

SEQ ID NO: 2655086 - RNA, 18 nt, Human
uguuuuggcugaaauucu

SEQ ID NO: 2655087 - RNA, 23 nt, Human
uguuuuggcugaaauucuccugg

SEQ ID NO: 2655088 - RNA, 13 nt, Human
uguuuuugucuua

SEQ ID NO: 2655089 - RNA, 12 nt, Human
uguuuuuuaaga

SEQ ID NO: 2655090 - RNA, 14 nt, Human
uguuuuuuaagaua

SEQ ID NO: 2655091 - RNA, 16 nt, Human
uguuuuuuaagauagu

SEQ ID NO: 2655092 - RNA, 20 nt, Human
uguuuuuuaagauaguguaa

SEQ ID NO: 2655093 - RNA, 21 nt, Human
uguuuuuuaagauaguguaac

SEQ ID NO: 2655094 - RNA, 20 nt, Human
uuaaaacacauguuuuuaua

SEQ ID NO: 2655095 - RNA, 13 nt, Human
uuaaaacacguuu

SEQ ID NO: 2655096 - RNA, 21 nt, Human
uuaaaacacguuuuaaggacu

SEQ ID NO: 2655097 - RNA, 19 nt, Human
uuaaaacacguuuuaagga

SEQ ID NO: 2655098 - RNA, 23 nt, Human
uuaaaacacguuuuaaggacuga

SEQ ID NO: 2655099 - RNA, 22 nt, Human
uuaaaacacguuuuaaggacug

SEQ ID NO: 2655100 - RNA, 22 nt, Human
uguuuuuucuuuuuuuuuaagu

SEQ ID NO: 2655101 - RNA, 17 nt, Human
uguuuuaaaauaaggau

SEQ ID NO: 2655102 - RNA, 21 nt, Human
uguuuaaucauaguuacugug

SEQ ID NO: 2655103 - RNA, 13 nt, Human
uguuucucugaaa

SEQ ID NO: 2655104 - RNA, 18 nt, Human
uguuucucuugagcuggc

SEQ ID NO: 2655105 - RNA, 16 nt, Human
uguuuguugucagcug

SEQ ID NO: 2655106 - RNA, 17 nt, Human
uguuuguugucagcuga

SEQ ID NO: 2655107 - RNA, 22 nt, Human
uguuucucuuugauuauuugca

SEQ ID NO: 2655108 - RNA, 20 nt, Human
uguuucucuugagcuggccu

SEQ ID NO: 2655109 - RNA, 13 nt, Human
uguuucugaaaag

SEQ ID NO: 2655110 - RNA, 16 nt, Human
uguuucuauuuuuuga

SEQ ID NO: 2655111 - RNA, 22 nt, Human
uguuucuauuuuuugaaaagca

SEQ ID NO: 2655112 - RNA, 15 nt, Human
uguuucuccugagcu

SEQ ID NO: 2655113 - RNA, 13 nt, Human
uuaagggaaaaau

SEQ ID NO: 2655114 - RNA, 15 nt, Human
uuaagggaaaaauau

SEQ ID NO: 2655115 - RNA, 16 nt, Human
uuaagggaaaaauaua

SEQ ID NO: 2655116 - RNA, 15 nt, Human
uuaagggaaagaaaa

SEQ ID NO: 2655117 - RNA, 23 nt, Human
uuaaggaaaacuaccuguauuua

SEQ ID NO: 2655118 - RNA, 21 nt, Human
uuaaggaagacaaugugaaaa

SEQ ID NO: 2655119 - RNA, 22 nt, Human
uuaaggacaaagugccaaagaa

SEQ ID NO: 2655120 - RNA, 18 nt, Human
uuaaggacugacugaggc

SEQ ID NO: 2655121 - RNA, 16 nt, Human
uuaaggacugacugag

SEQ ID NO: 2655122 - RNA, 15 nt, Human
uuaaggacugacuga

SEQ ID NO: 2655123 - RNA, 20 nt, Human
uuaauggaaguguauuuauu

SEQ ID NO: 2655124 - RNA, 14 nt, Human
uuaaugcuacaugu

SEQ ID NO: 2655125 - RNA, 14 nt, Human
uuaaugcuauuuga

SEQ ID NO: 2655126 - RNA, 16 nt, Human
uuaaugcuauuugaac

SEQ ID NO: 2655127 - RNA, 20 nt, Human
uuaaugcuauuugaacaagu

SEQ ID NO: 2655128 - RNA, 21 nt, Human
uuaaugcuauuugaacaagug

SEQ ID NO: 2655129 - RNA, 17 nt, Human
uuaauagggaauauauc

SEQ ID NO: 2655130 - RNA, 23 nt, Human
uuaauagucaucacauuucuaug

SEQ ID NO: 2655131 - RNA, 22 nt, Human
uuaauauaaaguaguccuguga

SEQ ID NO: 2655132 - RNA, 16 nt, Human
uuacauguuuauaaau

SEQ ID NO: 2655133 - RNA, 20 nt, Human
uuacauuugaugcaugucuu

SEQ ID NO: 2655134 - RNA, 15 nt, Human
uuacauguaauuuga

SEQ ID NO: 2655135 - RNA, 16 nt, Human
uuacauguaauuugau

SEQ ID NO: 2655136 - RNA, 20 nt, Human
uuacauguaauuugaugagg

SEQ ID NO: 2655137 - RNA, 21 nt, Human
uuacagagguauuaaaacuaa

SEQ ID NO: 2655138 - RNA, 20 nt, Human
uuacagaugaauguauuuau

SEQ ID NO: 2655139 - RNA, 15 nt, Human
uuaauucacucccac

SEQ ID NO: 2655140 - RNA, 15 nt, Human
uuaauucaugaggag

SEQ ID NO: 2655141 - RNA, 17 nt, Human
uuacaauaguucugugg

SEQ ID NO: 2655142 - RNA, 21 nt, Human
uuacaauauugauugggaaaa

SEQ ID NO: 2655143 - RNA, 15 nt, Human
uuacaauaguucugu

SEQ ID NO: 2655144 - RNA, 12 nt, Human
uuacaaucaaag

SEQ ID NO: 2655145 - RNA, 17 nt, Human
uuacaaguuuauauaua

SEQ ID NO: 2655146 - RNA, 17 nt, Human
uuacaauaggaguggug

SEQ ID NO: 2655147 - RNA, 22 nt, Human
uuaccagagguugugcacuguu

SEQ ID NO: 2655148 - RNA, 19 nt, Human
uuaccuuuuuuuuuucuug

SEQ ID NO: 2655149 - RNA, 14 nt, Human
uuacggguaccuga

SEQ ID NO: 2655150 - RNA, 20 nt, Human
uuacgguuuuccagguuuaa

SEQ ID NO: 2655151 - RNA, 20 nt, Human
uuacgaaguucaagaucaaa

SEQ ID NO: 2655152 - RNA, 19 nt, Human
uuacgaaguucaagaucaa

SEQ ID NO: 2655153 - RNA, 17 nt, Human
ugugugucaguuuucau

SEQ ID NO: 2655154 - RNA, 18 nt, Human
ugugugucaugccaguga

SEQ ID NO: 2655155 - RNA, 22 nt, Human
uguguuuagaauugaagguuuu

SEQ ID NO: 2655156 - RNA, 14 nt, Human
uguguuuauaaaau

SEQ ID NO: 2655157 - RNA, 18 nt, Human
uguguuuagaauugaagg

SEQ ID NO: 2655158 - RNA, 17 nt, Human
uguguuuagaauugaag

SEQ ID NO: 2655159 - RNA, 19 nt, Human
uguguguccccuugcagcc

SEQ ID NO: 2655160 - RNA, 15 nt, Human
ugugugucccaggca

SEQ ID NO: 2655161 - RNA, 16 nt, Human
ugugugucccaggcag

SEQ ID NO: 2655162 - RNA, 19 nt, Human
ugugugucccaggcaggga

SEQ ID NO: 2655163 - RNA, 14 nt, Human
ugugugacaauucu

SEQ ID NO: 2655164 - RNA, 15 nt, Human
ugugugacaauucug

SEQ ID NO: 2655165 - RNA, 20 nt, Human
ugugugacaauucuguuuuu

SEQ ID NO: 2655166 - RNA, 19 nt, Human
uguguagcauacuggcuuc

SEQ ID NO: 2655167 - RNA, 19 nt, Human
uguguauauauuuugugug

SEQ ID NO: 2655168 - RNA, 22 nt, Human
uguguauauauuuugugugaaa

SEQ ID NO: 2655169 - RNA, 21 nt, Human
uguguauauuugauuuauuaa

SEQ ID NO: 2655170 - RNA, 15 nt, Human
uguguauauuugauu

SEQ ID NO: 2655171 - RNA, 13 nt, Human
uguguauauggua

SEQ ID NO: 2655172 - RNA, 12 nt, Human
uguguuuuauaa

SEQ ID NO: 2655173 - RNA, 16 nt, Human
uguuacugucuucagu

SEQ ID NO: 2655174 - RNA, 15 nt, Human
uguuacugucuucag

SEQ ID NO: 2655175 - RNA, 15 nt, Human
uguuacuuuauacag

SEQ ID NO: 2655176 - RNA, 12 nt, Human
uguuaaagagaa

SEQ ID NO: 2655177 - RNA, 16 nt, Human
uguuaaagagaaugag

SEQ ID NO: 2655178 - RNA, 16 nt, Human
uguucacaauauauuu

SEQ ID NO: 2655179 - RNA, 11 nt, Human
uguucagcugg

SEQ ID NO: 2655180 - RNA, 19 nt, Human
uguuagauauuuuucauaa

SEQ ID NO: 2655181 - RNA, 20 nt, Human
uguuagauauuuuucauaaa

SEQ ID NO: 2655182 - RNA, 23 nt, Human
uguuagauauuuuucauaaacaa

SEQ ID NO: 2655183 - RNA, 14 nt, Human
uguuaguggcaccg

SEQ ID NO: 2655184 - RNA, 12 nt, Human
uguuuaaaauaa

SEQ ID NO: 2655185 - RNA, 14 nt, Human
uguuuaaaauaaaa

SEQ ID NO: 2655186 - RNA, 15 nt, Human
uguuuaaaauaaaau

SEQ ID NO: 2655187 - RNA, 18 nt, Human
uguuuaaaauaaaaugaa

SEQ ID NO: 2655188 - RNA, 19 nt, Human
uguuuaaaauaaaaugaaa

SEQ ID NO: 2655189 - RNA, 21 nt, Human
uguuuaaaauaaaaugaaaau

SEQ ID NO: 2655190 - RNA, 22 nt, Human
uguuuaaaauaaaaugaaaauu

SEQ ID NO: 2655191 - RNA, 20 nt, Human
uguuuaauauugagaaagaa

SEQ ID NO: 2655192 - RNA, 15 nt, Human
uguuguuuauaauaa

SEQ ID NO: 2655193 - RNA, 20 nt, Human
uguuguuuauaauaaaaaua

SEQ ID NO: 2655194 - RNA, 21 nt, Human
uguuguuuauaauaaaaauau

SEQ ID NO: 2655195 - RNA, 23 nt, Human
uguuguucuuggcaauaaauuuu

SEQ ID NO: 2655196 - RNA, 16 nt, Human
uguuguucuuucagaa

SEQ ID NO: 2655197 - RNA, 18 nt, Human
uguuguucuuucagaaag

SEQ ID NO: 2655198 - RNA, 19 nt, Human
uguuguucuuggcaauaaa

SEQ ID NO: 2655199 - RNA, 20 nt, Human
uguuuaaaaaccgaauaaau

SEQ ID NO: 2655200 - RNA, 21 nt, Human
uguuuaaaaaccgaauaaaug

SEQ ID NO: 2655201 - RNA, 22 nt, Human
uguuuaaaaaccgaauaaaugu

SEQ ID NO: 2655202 - RNA, 12 nt, Human
uguuuaaaacac

SEQ ID NO: 2655203 - RNA, 20 nt, Human
uguuuaaaacaccuucuaua

SEQ ID NO: 2655204 - RNA, 19 nt, Human
uguugcuguacaaaagcaa

SEQ ID NO: 2655205 - RNA, 23 nt, Human
uguugagcaagcaguagcauuug

SEQ ID NO: 2655206 - RNA, 14 nt, Human
uguugagcaagcag

SEQ ID NO: 2655207 - RNA, 13 nt, Human
uguugagagguuc

SEQ ID NO: 2655208 - RNA, 13 nt, Human
uguucaguaauaa

SEQ ID NO: 2655209 - RNA, 18 nt, Human
uguucacucacucuaaag

SEQ ID NO: 2655210 - RNA, 22 nt, Human
uguucucagaaucccuuaacag

SEQ ID NO: 2655211 - RNA, 23 nt, Human
ugucauaguucugagcugccagu

SEQ ID NO: 2655212 - RNA, 20 nt, Human
uguccaugcgcucagggcca

SEQ ID NO: 2655213 - RNA, 22 nt, Human
uguccaugcgcucagggccaug

SEQ ID NO: 2655214 - RNA, 17 nt, Human
ugucauugcacauaagc

SEQ ID NO: 2655215 - RNA, 21 nt, Human
ugucauugcacauaagcuucc

SEQ ID NO: 2655216 - RNA, 19 nt, Human
ugucauucagagucagcca

SEQ ID NO: 2655217 - RNA, 22 nt, Human
ugucauucagagucagccagga

SEQ ID NO: 2655218 - RNA, 19 nt, Human
ugucccauagucccugcca

SEQ ID NO: 2655219 - RNA, 18 nt, Human
ugucccauagucccugcc

SEQ ID NO: 2655220 - RNA, 14 nt, Human
ugucccaggcaggg

SEQ ID NO: 2655221 - RNA, 17 nt, Human
ugucccaggcagggaga

SEQ ID NO: 2655222 - RNA, 20 nt, Human
ugucauacucgagucugagg

SEQ ID NO: 2655223 - RNA, 21 nt, Human
ugucauaacauccagagcuuu

SEQ ID NO: 2655224 - RNA, 23 nt, Human
ugucauaacauccagagcuuugu

SEQ ID NO: 2655225 - RNA, 14 nt, Human
ugucaguuuucaua

SEQ ID NO: 2655226 - RNA, 14 nt, Human
uguauuugcuuuuu

SEQ ID NO: 2655227 - RNA, 16 nt, Human
ugucacucauugcuga

SEQ ID NO: 2655228 - RNA, 15 nt, Human
ugucacucauugcug

SEQ ID NO: 2655229 - RNA, 23 nt, Human
ugucacucauugcugagccucug

SEQ ID NO: 2655230 - RNA, 22 nt, Human
ugucacucauugcugagccucu

SEQ ID NO: 2655231 - RNA, 21 nt, Human
ugucacucauugcugagccuc

SEQ ID NO: 2655232 - RNA, 16 nt, Human
uguauucuuuucucag

SEQ ID NO: 2655233 - RNA, 18 nt, Human
uguauucuuuucucagug

SEQ ID NO: 2655234 - RNA, 19 nt, Human
uguauucuuuucucagugu

SEQ ID NO: 2655235 - RNA, 16 nt, Human
uguaugcacaguaaaa

SEQ ID NO: 2655236 - RNA, 14 nt, Human
uguauuuaacagaa

SEQ ID NO: 2655237 - RNA, 15 nt, Human
uguauuuaacagaaa

SEQ ID NO: 2655238 - RNA, 16 nt, Human
uguauuuaacagaaau

SEQ ID NO: 2655239 - RNA, 21 nt, Human
uguauuuaacagaaauuguau

SEQ ID NO: 2655240 - RNA, 13 nt, Human
uguauuugaaagu

SEQ ID NO: 2655241 - RNA, 12 nt, Human
uguauuugaaag

SEQ ID NO: 2655242 - RNA, 17 nt, Human
uguauuugaaauaagaa

SEQ ID NO: 2655243 - RNA, 15 nt, Human
uguauuugagcauau

SEQ ID NO: 2655244 - RNA, 16 nt, Human
uguauuguauauuaca

SEQ ID NO: 2655245 - RNA, 18 nt, Human
uguauuguauauuacaau

SEQ ID NO: 2655246 - RNA, 13 nt, Human
uguauaauauaaa

SEQ ID NO: 2655247 - RNA, 16 nt, Human
uguauaauauaaaaaa

SEQ ID NO: 2655248 - RNA, 14 nt, Human
uguauaauaagaaa

SEQ ID NO: 2655249 - RNA, 20 nt, Human
uguagcaaccuucugcauuc

SEQ ID NO: 2655250 - RNA, 19 nt, Human
uguagcacuuacugguagg

SEQ ID NO: 2655251 - RNA, 15 nt, Human
uguagcacuuacugg

SEQ ID NO: 2655252 - RNA, 13 nt, Human
uguagauuugauu

SEQ ID NO: 2655253 - RNA, 16 nt, Human
uguagauuugauuuuu

SEQ ID NO: 2655254 - RNA, 22 nt, Human
uguagcaaaauucuuaaguaug

SEQ ID NO: 2655255 - RNA, 17 nt, Human
uguauccuggaacaaua

SEQ ID NO: 2655256 - RNA, 18 nt, Human
uguauccuggaacaauau

SEQ ID NO: 2655257 - RNA, 19 nt, Human
uguauccuggaacaauauu

SEQ ID NO: 2655258 - RNA, 13 nt, Human
uguauacagugca

SEQ ID NO: 2655259 - RNA, 16 nt, Human
uguauacagugcagag

SEQ ID NO: 2655260 - RNA, 22 nt, Human
uguauacagugcagagccuucu

SEQ ID NO: 2655261 - RNA, 23 nt, Human
uguauacagugcagagccuucuc

SEQ ID NO: 2655262 - RNA, 15 nt, Human
ugguaguuucugugg

SEQ ID NO: 2655263 - RNA, 14 nt, Human
ugguaguuucugug

SEQ ID NO: 2655264 - RNA, 18 nt, Human
uguaaacagccucuuuuu

SEQ ID NO: 2655265 - RNA, 11 nt, Human
uguaaacauuu

SEQ ID NO: 2655266 - RNA, 13 nt, Human
uguaaacauuuau

SEQ ID NO: 2655267 - RNA, 14 nt, Human
uguaaauguaaacu

SEQ ID NO: 2655268 - RNA, 15 nt, Human
uguaaauguaaacuc

SEQ ID NO: 2655269 - RNA, 16 nt, Human
uguaaauguaaacuca

SEQ ID NO: 2655270 - RNA, 15 nt, Human
uguaaauguguacau

SEQ ID NO: 2655271 - RNA, 14 nt, Human
uguaaauuuagugu

SEQ ID NO: 2655272 - RNA, 15 nt, Human
uguaaauuuaguguu

SEQ ID NO: 2655273 - RNA, 16 nt, Human
uguaaauuauuuaugu

SEQ ID NO: 2655274 - RNA, 12 nt, Human
uguaaauucuga

SEQ ID NO: 2655275 - RNA, 14 nt, Human
uguaaauucugauu

SEQ ID NO: 2655276 - RNA, 13 nt, Human
uguaaauucugau

SEQ ID NO: 2655277 - RNA, 22 nt, Human
uguaaauucugauuucuuuuca

SEQ ID NO: 2655278 - RNA, 19 nt, Human
uguaaauucugauuucuuu

SEQ ID NO: 2655279 - RNA, 18 nt, Human
uguaaauucugauuucuu

SEQ ID NO: 2655280 - RNA, 15 nt, Human
uguaaauucugauuu

SEQ ID NO: 2655281 - RNA, 14 nt, Human
uguaaucauuuguu

SEQ ID NO: 2655282 - RNA, 19 nt, Human
uguaaucauuuguuuacau

SEQ ID NO: 2655283 - RNA, 23 nt, Human
uguacguggccauguaugaagcc

SEQ ID NO: 2655284 - RNA, 14 nt, Human
uguacuaaacagua

SEQ ID NO: 2655285 - RNA, 20 nt, Human
uguacuaaacaguaagauau

SEQ ID NO: 2655286 - RNA, 20 nt, Human
uguagaguuuugucauucag

SEQ ID NO: 2655287 - RNA, 12 nt, Human
uguagauuugau

SEQ ID NO: 2655288 - RNA, 14 nt, Human
uguacugaauuuuu

SEQ ID NO: 2655289 - RNA, 20 nt, Human
uguacugaauuuuuuuguaa

SEQ ID NO: 2655290 - RNA, 23 nt, Human
uguacugaauuuuuuuguaauaa

SEQ ID NO: 2655291 - RNA, 17 nt, Human
uguagaguguagacugu

SEQ ID NO: 2655292 - RNA, 14 nt, Human
uguacaguagauuu

SEQ ID NO: 2655293 - RNA, 20 nt, Human
uguaaugguaucuuaaagug

SEQ ID NO: 2655294 - RNA, 20 nt, Human
uguacaguagauuuuccaaa

SEQ ID NO: 2655295 - RNA, 17 nt, Human
uguacaguagauuuucc

SEQ ID NO: 2655296 - RNA, 18 nt, Human
uguacaguagauuuucca

SEQ ID NO: 2655297 - RNA, 19 nt, Human
ugugggggguaaucccugc

SEQ ID NO: 2655298 - RNA, 22 nt, Human
ugugggggguaaucccugcuuu

SEQ ID NO: 2655299 - RNA, 16 nt, Human
ugugggcuugaccagg

SEQ ID NO: 2655300 - RNA, 11 nt, Human
ugugggaaagc

SEQ ID NO: 2655301 - RNA, 15 nt, Human
ugugcuuccuccugc

SEQ ID NO: 2655302 - RNA, 21 nt, Human
uguggagaagcggcuggcagc

SEQ ID NO: 2655303 - RNA, 12 nt, Human
uguggagaagcg

SEQ ID NO: 2655304 - RNA, 23 nt, Human
uguggacuguggcacuugccugg

SEQ ID NO: 2655305 - RNA, 13 nt, Human
ugugccugugugc

SEQ ID NO: 2655306 - RNA, 15 nt, Human
ugugcgcucugugga

SEQ ID NO: 2655307 - RNA, 12 nt, Human
ugugccuggggu

SEQ ID NO: 2655308 - RNA, 15 nt, Human
ugugcuucacaguag

SEQ ID NO: 2655309 - RNA, 22 nt, Human
ugugcuucacaguagagccagc

SEQ ID NO: 2655310 - RNA, 15 nt, Human
ugugcuucugccacc

SEQ ID NO: 2655311 - RNA, 23 nt, Human
ugugcuucacaguagagccagcu

SEQ ID NO: 2655312 - RNA, 14 nt, Human
ugugcauaguuucu

SEQ ID NO: 2655313 - RNA, 15 nt, Human
ugugcauaguuucuu

SEQ ID NO: 2655314 - RNA, 16 nt, Human
ugugcauaguuucuuu

SEQ ID NO: 2655315 - RNA, 18 nt, Human
ugugcagucacuggaggu

SEQ ID NO: 2655316 - RNA, 17 nt, Human
ugugcagucacuggagg

SEQ ID NO: 2655317 - RNA, 13 nt, Human
ugucugguggccc

SEQ ID NO: 2655318 - RNA, 16 nt, Human
ugucuggguuugagaa

SEQ ID NO: 2655319 - RNA, 17 nt, Human
ugucuggguuugagaaa

SEQ ID NO: 2655320 - RNA, 19 nt, Human
ugucuggguuugagaaaug

SEQ ID NO: 2655321 - RNA, 14 nt, Human
ugucugguggcccc

SEQ ID NO: 2655322 - RNA, 16 nt, Human
ugucugguggccccgu

SEQ ID NO: 2655323 - RNA, 14 nt, Human
ugucugguuaaaaa

SEQ ID NO: 2655324 - RNA, 16 nt, Human
ugucugguuaaaaaau

SEQ ID NO: 2655325 - RNA, 14 nt, Human
ugugaaaauguguu

SEQ ID NO: 2655326 - RNA, 20 nt, Human
ugugcaauagacacauacau

SEQ ID NO: 2655327 - RNA, 21 nt, Human
ugugauacauuuuuuaagcuu

SEQ ID NO: 2655328 - RNA, 22 nt, Human
ugugauacauuuuuuaagcuuc

SEQ ID NO: 2655329 - RNA, 14 nt, Human
ugugagggagggga

SEQ ID NO: 2655330 - RNA, 22 nt, Human
ugugagggaggggaaaagcauu

SEQ ID NO: 2655331 - RNA, 12 nt, Human
ugugaauaaauu

SEQ ID NO: 2655332 - RNA, 18 nt, Human
ugugaauacugcuugaau

SEQ ID NO: 2655333 - RNA, 14 nt, Human
ugugaauacugcuu

SEQ ID NO: 2655334 - RNA, 21 nt, Human
ugugaauacugcuugaauaaa

SEQ ID NO: 2655335 - RNA, 17 nt, Human
ugugaaugccacugccu

SEQ ID NO: 2655336 - RNA, 14 nt, Human
ugugaauuuuuaag

SEQ ID NO: 2655337 - RNA, 15 nt, Human
ugugaauuuuuaagc

SEQ ID NO: 2655338 - RNA, 16 nt, Human
ugugaauuuuuaagcu

SEQ ID NO: 2655339 - RNA, 17 nt, Human
ugugaauuuuuaagcug

SEQ ID NO: 2655340 - RNA, 19 nt, Human
ugugaauuuuuaagcugca

SEQ ID NO: 2655341 - RNA, 22 nt, Human
ugugaauuuuuaagcugcaaau

SEQ ID NO: 2655342 - RNA, 15 nt, Human
ugugaauuuuuauug

SEQ ID NO: 2655343 - RNA, 16 nt, Human
ugugaauuuuuauugu

SEQ ID NO: 2655344 - RNA, 17 nt, Human
ugugaauuuuuauuguu

SEQ ID NO: 2655345 - RNA, 20 nt, Human
ugugaauuuuuauuguugua

SEQ ID NO: 2655346 - RNA, 16 nt, Human
ugugacauggugccug

SEQ ID NO: 2655347 - RNA, 17 nt, Human
ugugacauggugccuga

SEQ ID NO: 2655348 - RNA, 18 nt, Human
ugugacauggugccugag

SEQ ID NO: 2655349 - RNA, 20 nt, Human
ugugacauggugccugagag

SEQ ID NO: 2655350 - RNA, 22 nt, Human
ugugacauggugccugagaggc

SEQ ID NO: 2655351 - RNA, 19 nt, Human
ugugacaauuuuguacaaa

SEQ ID NO: 2655352 - RNA, 15 nt, Human
ugugacaauucuguu

SEQ ID NO: 2655353 - RNA, 19 nt, Human
ugugacaauucuguuuuua

SEQ ID NO: 2655354 - RNA, 21 nt, Human
ugugacaauucuguuuuuaau

SEQ ID NO: 2655355 - RNA, 12 nt, Human
uuggcauuugca

SEQ ID NO: 2655356 - RNA, 13 nt, Human
uuggcauuccgca

SEQ ID NO: 2655357 - RNA, 14 nt, Human
uuggccacuccgag

SEQ ID NO: 2655358 - RNA, 21 nt, Human
uuggccacuccgagagguggg

SEQ ID NO: 2655359 - RNA, 22 nt, Human
uuggccacuccgagaggugggc

SEQ ID NO: 2655360 - RNA, 20 nt, Human
uuggcauguaaauguaaacu

SEQ ID NO: 2655361 - RNA, 22 nt, Human
uuggccagccaacucugggaau

SEQ ID NO: 2655362 - RNA, 16 nt, Human
uugggaggccgaggcg

SEQ ID NO: 2655363 - RNA, 16 nt, Human
uugggaaacuuggcuc

SEQ ID NO: 2655364 - RNA, 16 nt, Human
uuggcuuaaucauuuu

SEQ ID NO: 2655365 - RNA, 12 nt, Human
uugggaaaacau

SEQ ID NO: 2655366 - RNA, 13 nt, Human
uugggaaaacaug

SEQ ID NO: 2655367 - RNA, 16 nt, Human
uugggaaaacauguua

SEQ ID NO: 2655368 - RNA, 15 nt, Human
uugggaaaacauuug

SEQ ID NO: 2655369 - RNA, 16 nt, Human
uugggaaaacauuugc

SEQ ID NO: 2655370 - RNA, 17 nt, Human
uugggaaaacauuugcu

SEQ ID NO: 2655371 - RNA, 22 nt, Human
uuggcuuuggguugcaggaccu

SEQ ID NO: 2655372 - RNA, 18 nt, Human
uugguaaaacucacugug

SEQ ID NO: 2655373 - RNA, 19 nt, Human
uugguaaaacucacuguga

SEQ ID NO: 2655374 - RNA, 20 nt, Human
uugguaaaacucacugugau

SEQ ID NO: 2655375 - RNA, 14 nt, Human
uugguaaauguuuc

SEQ ID NO: 2655376 - RNA, 17 nt, Human
uugguaaauguuucuuu

SEQ ID NO: 2655377 - RNA, 16 nt, Human
uugguaaagacuggcu

SEQ ID NO: 2655378 - RNA, 19 nt, Human
uugguaaagacuggcuuuu

SEQ ID NO: 2655379 - RNA, 21 nt, Human
uuggguggggggcauugagua

SEQ ID NO: 2655380 - RNA, 14 nt, Human
uuguagauuugauu

SEQ ID NO: 2655381 - RNA, 12 nt, Human
uuguagauuuga

SEQ ID NO: 2655382 - RNA, 18 nt, Human
uuguagaguguagacugu

SEQ ID NO: 2655383 - RNA, 12 nt, Human
uuguaaaguuuc

SEQ ID NO: 2655384 - RNA, 12 nt, Human
uuguaaagacug

SEQ ID NO: 2655385 - RNA, 13 nt, Human
uuguaaagacugg

SEQ ID NO: 2655386 - RNA, 21 nt, Human
uuguaaagacugguuuucugc

SEQ ID NO: 2655387 - RNA, 17 nt, Human
uuguaaaguauguauua

SEQ ID NO: 2655388 - RNA, 13 nt, Human
uugccugcagggc

SEQ ID NO: 2655389 - RNA, 15 nt, Human
uugccugcagggcca

SEQ ID NO: 2655390 - RNA, 20 nt, Human
uugccugaugacaauaaagc

SEQ ID NO: 2655391 - RNA, 14 nt, Human
uugccucugugcug

SEQ ID NO: 2655392 - RNA, 19 nt, Human
uugccucugugcugugugu

SEQ ID NO: 2655393 - RNA, 14 nt, Human
uugcgggacagagu

SEQ ID NO: 2655394 - RNA, 12 nt, Human
uugccucugugc

SEQ ID NO: 2655395 - RNA, 13 nt, Human
uugccucugugcu

SEQ ID NO: 2655396 - RNA, 22 nt, Human
uugccuccccauuucccaucug

SEQ ID NO: 2655397 - RNA, 21 nt, Human
uugccuccccauuucccaucu

SEQ ID NO: 2655398 - RNA, 17 nt, Human
uugccauagaguacacu

SEQ ID NO: 2655399 - RNA, 23 nt, Human
uugccauagaguacacugccugc

SEQ ID NO: 2655400 - RNA, 17 nt, Human
uuggcaaaaaggcagga

SEQ ID NO: 2655401 - RNA, 17 nt, Human
uuggauucuaaauacau

SEQ ID NO: 2655402 - RNA, 13 nt, Human
uugcuguacaaaa

SEQ ID NO: 2655403 - RNA, 17 nt, Human
uugcuguacaaaagcaa

SEQ ID NO: 2655404 - RNA, 15 nt, Human
uugcugguaaaauga

SEQ ID NO: 2655405 - RNA, 23 nt, Human
uugcugguaaaaugaagaauuua

SEQ ID NO: 2655406 - RNA, 16 nt, Human
uugcugguaaaaugaa

SEQ ID NO: 2655407 - RNA, 20 nt, Human
uugcugccauuacagaggua

SEQ ID NO: 2655408 - RNA, 14 nt, Human
uugcuuaaauuucu

SEQ ID NO: 2655409 - RNA, 23 nt, Human
uugcuuaaauuucuuaugugaca

SEQ ID NO: 2655410 - RNA, 18 nt, Human
uugcuuaaaccacuuaaa

SEQ ID NO: 2655411 - RNA, 11 nt, Human
uuggaaauucc

SEQ ID NO: 2655412 - RNA, 18 nt, Human
uuggaaauuccuguacug

SEQ ID NO: 2655413 - RNA, 15 nt, Human
uucugagcugccagu

SEQ ID NO: 2655414 - RNA, 14 nt, Human
uucugagaaaacaa

SEQ ID NO: 2655415 - RNA, 21 nt, Human
uucugagaaaacaagcaaguu

SEQ ID NO: 2655416 - RNA, 21 nt, Human
uucuguccgagcuuugaaaau

SEQ ID NO: 2655417 - RNA, 17 nt, Human
uucuguccgagcuuuga

SEQ ID NO: 2655418 - RNA, 13 nt, Human
uucugagaaaaca

SEQ ID NO: 2655419 - RNA, 12 nt, Human
uucugagaaaac

SEQ ID NO: 2655420 - RNA, 20 nt, Human
uucugagcuuacguaguucu

SEQ ID NO: 2655421 - RNA, 16 nt, Human
uucugugguuccucug

SEQ ID NO: 2655422 - RNA, 17 nt, Human
uucugugguuccucugc

SEQ ID NO: 2655423 - RNA, 20 nt, Human
uucugugguuccucugcuca

SEQ ID NO: 2655424 - RNA, 21 nt, Human
uucugugguuccucugcucac

SEQ ID NO: 2655425 - RNA, 20 nt, Human
uucugugguuggcugggaaa

SEQ ID NO: 2655426 - RNA, 18 nt, Human
uucuucacacagacacua

SEQ ID NO: 2655427 - RNA, 20 nt, Human
uugaacucuucucauuacuu

SEQ ID NO: 2655428 - RNA, 19 nt, Human
uugaacucuucucauuacu

SEQ ID NO: 2655429 - RNA, 16 nt, Human
uugaacucuucucauu

SEQ ID NO: 2655430 - RNA, 21 nt, Human
uugaacucuucucauuacuug

SEQ ID NO: 2655431 - RNA, 13 nt, Human
uugaacuuuugua

SEQ ID NO: 2655432 - RNA, 14 nt, Human
uugaacuuuuguac

SEQ ID NO: 2655433 - RNA, 19 nt, Human
uugaacuuuuguacugaau

SEQ ID NO: 2655434 - RNA, 23 nt, Human
uugaacuuuuguacugaauuuuu

SEQ ID NO: 2655435 - RNA, 19 nt, Human
uugaagaacugcaggcccu

SEQ ID NO: 2655436 - RNA, 16 nt, Human
uugaagaacugcaggc

SEQ ID NO: 2655437 - RNA, 20 nt, Human
uugaagaacugcaggcccug

SEQ ID NO: 2655438 - RNA, 20 nt, Human
uugaaacuuugggaaaacau

SEQ ID NO: 2655439 - RNA, 22 nt, Human
uugaaacuuugggaaaacaugu

SEQ ID NO: 2655440 - RNA, 13 nt, Human
uugagggcugcag

SEQ ID NO: 2655441 - RNA, 14 nt, Human
uugagggcugcagu

SEQ ID NO: 2655442 - RNA, 15 nt, Human
uugagggcugcaguu

SEQ ID NO: 2655443 - RNA, 12 nt, Human
uugagcuggccu

SEQ ID NO: 2655444 - RNA, 13 nt, Human
uugagcuggccuc

SEQ ID NO: 2655445 - RNA, 11 nt, Human
uugagcuggcc

SEQ ID NO: 2655446 - RNA, 20 nt, Human
uugacuaacucaaauacaca

SEQ ID NO: 2655447 - RNA, 22 nt, Human
uugacuaacucaaauacacauu

SEQ ID NO: 2655448 - RNA, 23 nt, Human
uugacuaacucaaauacacauuu

SEQ ID NO: 2655449 - RNA, 14 nt, Human
uugacuaauuuuac

SEQ ID NO: 2655450 - RNA, 15 nt, Human
uugacuaauuuuaca

SEQ ID NO: 2655451 - RNA, 11 nt, Human
uugagcugccu

SEQ ID NO: 2655452 - RNA, 12 nt, Human
uugagcugccuu

SEQ ID NO: 2655453 - RNA, 13 nt, Human
uugagcugccuuc

SEQ ID NO: 2655454 - RNA, 14 nt, Human
uugagcugccuucc

SEQ ID NO: 2655455 - RNA, 15 nt, Human
uugagcugccuuccc

SEQ ID NO: 2655456 - RNA, 16 nt, Human
uugagcugccuucccu

SEQ ID NO: 2655457 - RNA, 19 nt, Human
uugagcugccuucccuagc

SEQ ID NO: 2655458 - RNA, 13 nt, Human
uugaccugaggcu

SEQ ID NO: 2655459 - RNA, 19 nt, Human
uugaccugaggcugugguc

SEQ ID NO: 2655460 - RNA, 16 nt, Human
uugcauacuuuguauu

SEQ ID NO: 2655461 - RNA, 17 nt, Human
uugcauacuuuguauuu

SEQ ID NO: 2655462 - RNA, 21 nt, Human
uugcauacuuuguauuuugau

SEQ ID NO: 2655463 - RNA, 16 nt, Human
uugcagugagcugaga

SEQ ID NO: 2655464 - RNA, 16 nt, Human
uugcagaacuguagcu

SEQ ID NO: 2655465 - RNA, 13 nt, Human
uugcaaccaggaa

SEQ ID NO: 2655466 - RNA, 18 nt, Human
uugcaaccaggaacagca

SEQ ID NO: 2655467 - RNA, 20 nt, Human
uugaugaaacgucauguguu

SEQ ID NO: 2655468 - RNA, 21 nt, Human
uugauuggugauuagguggug

SEQ ID NO: 2655469 - RNA, 13 nt, Human
uugauuuauuaac

SEQ ID NO: 2655470 - RNA, 20 nt, Human
uugauuuauuaacuuaauaa

SEQ ID NO: 2655471 - RNA, 17 nt, Human
uugauuuauuaacuuaa

SEQ ID NO: 2655472 - RNA, 15 nt, Human
uugauuuauuaacuu

SEQ ID NO: 2655473 - RNA, 14 nt, Human
uugauuuauuaacu

SEQ ID NO: 2655474 - RNA, 16 nt, Human
uugauuuuuacugugu

SEQ ID NO: 2655475 - RNA, 19 nt, Human
uugauuuuuuuuuuuaauc

SEQ ID NO: 2655476 - RNA, 17 nt, Human
uugauuuuuacuguguu

SEQ ID NO: 2655477 - RNA, 11 nt, Human
uugauuuccuc

SEQ ID NO: 2655478 - RNA, 21 nt, Human
uugauuuauuaacuuaauaau

SEQ ID NO: 2655479 - RNA, 14 nt, Human
uugauuucaaaguu

SEQ ID NO: 2655480 - RNA, 20 nt, Human
uugauuucaaaguuuuguug

SEQ ID NO: 2655481 - RNA, 13 nt, Human
uugcaaaauacau

SEQ ID NO: 2655482 - RNA, 14 nt, Human
uugcaaaauacaug

SEQ ID NO: 2655483 - RNA, 16 nt, Human
uugcaaaauacaugaa

SEQ ID NO: 2655484 - RNA, 17 nt, Human
uugcaaaauacaugaag

SEQ ID NO: 2655485 - RNA, 22 nt, Human
uucaggaagggaugcaggcucc

SEQ ID NO: 2655486 - RNA, 17 nt, Human
uucaggaagggaugcag

SEQ ID NO: 2655487 - RNA, 21 nt, Human
uucaggagaaccuaacaugcu

SEQ ID NO: 2655488 - RNA, 19 nt, Human
uucaggaauguguggccug

SEQ ID NO: 2655489 - RNA, 17 nt, Human
uucagcugacuuuucug

SEQ ID NO: 2655490 - RNA, 24 nt, Human
uucagcucugcaagaauugaagca

SEQ ID NO: 2655491 - RNA, 17 nt, Human
uucagcucugcaagaau

SEQ ID NO: 2655492 - RNA, 22 nt, Human
uucagaggauaaauaucaaugg

SEQ ID NO: 2655493 - RNA, 15 nt, Human
uuacuaaaaaguaua

SEQ ID NO: 2655494 - RNA, 17 nt, Human
uuacuaaaaaguauaaa

SEQ ID NO: 2655495 - RNA, 15 nt, Human
uuacgugcucugugg

SEQ ID NO: 2655496 - RNA, 12 nt, Human
uuauuuucuaca

SEQ ID NO: 2655497 - RNA, 18 nt, Human
uuauuuucuacguuucuu

SEQ ID NO: 2655498 - RNA, 19 nt, Human
uuauuuucuacguuucuuu

SEQ ID NO: 2655499 - RNA, 18 nt, Human
uuaccuuuucagggcugg

SEQ ID NO: 2655500 - RNA, 21 nt, Human
uuauuuugagauguaaaaaga

SEQ ID NO: 2655501 - RNA, 22 nt, Human
uucaaauuugucugguuaaaaa

SEQ ID NO: 2655502 - RNA, 22 nt, Human
uucaacaaauauucacuggccc

SEQ ID NO: 2655503 - RNA, 20 nt, Human
uucaacagcaagugugaaua

SEQ ID NO: 2655504 - RNA, 19 nt, Human
uucaacagcaagugugaau

SEQ ID NO: 2655505 - RNA, 20 nt, Human
uucaucuuccaacucaaacu

SEQ ID NO: 2655506 - RNA, 16 nt, Human
uucaugaccaguaaag

SEQ ID NO: 2655507 - RNA, 12 nt, Human
uucaucucauuu

SEQ ID NO: 2655508 - RNA, 13 nt, Human
uucaucucauuua

SEQ ID NO: 2655509 - RNA, 16 nt, Human
uucaucucauuuaagg

SEQ ID NO: 2655510 - RNA, 19 nt, Human
uucaucucauuuaagggaa

SEQ ID NO: 2655511 - RNA, 23 nt, Human
uucaucucauuuaagggaaaaau

SEQ ID NO: 2655512 - RNA, 17 nt, Human
uucaguugcuugucuuc

SEQ ID NO: 2655513 - RNA, 18 nt, Human
uucaguugcuugucuucu

SEQ ID NO: 2655514 - RNA, 19 nt, Human
uucaguugcuugucuucug

SEQ ID NO: 2655515 - RNA, 22 nt, Human
uucaguugguucguucuguacu

SEQ ID NO: 2655516 - RNA, 13 nt, Human
uuccauuuuaauu

SEQ ID NO: 2655517 - RNA, 18 nt, Human
uuccauuuuaauuuuaaa

SEQ ID NO: 2655518 - RNA, 17 nt, Human
uucccauuugugccaga

SEQ ID NO: 2655519 - RNA, 20 nt, Human
uucccauuugugccagagga

SEQ ID NO: 2655520 - RNA, 16 nt, Human
uucccaaacgccuccc

SEQ ID NO: 2655521 - RNA, 13 nt, Human
uuccaugaauuuu

SEQ ID NO: 2655522 - RNA, 16 nt, Human
uuccaugaaggcagag

SEQ ID NO: 2655523 - RNA, 22 nt, Human
uucauuuugcacugaggauauu

SEQ ID NO: 2655524 - RNA, 21 nt, Human
uuccagaaccacacuugaaac

SEQ ID NO: 2655525 - RNA, 20 nt, Human
uuccagcauuuagcuggcca

SEQ ID NO: 2655526 - RNA, 21 nt, Human
uuccagcauuuagcuggccac

SEQ ID NO: 2655527 - RNA, 14 nt, Human
uuccagccccucug

SEQ ID NO: 2655528 - RNA, 20 nt, Human
uuccagccccucuggucgcu

SEQ ID NO: 2655529 - RNA, 16 nt, Human
uuccagccccucuggu

SEQ ID NO: 2655530 - RNA, 17 nt, Human
uuccagccccucugguc

SEQ ID NO: 2655531 - RNA, 14 nt, Human
uuccuuucccaagc

SEQ ID NO: 2655532 - RNA, 14 nt, Human
uuccuuugcauauu

SEQ ID NO: 2655533 - RNA, 19 nt, Human
uuccuuugcauauuauaaa

SEQ ID NO: 2655534 - RNA, 18 nt, Human
uucuaaaaucaugaaacu

SEQ ID NO: 2655535 - RNA, 23 nt, Human
uucuaauaagcuaguugaauacu

SEQ ID NO: 2655536 - RNA, 20 nt, Human
uucuaauaagcuaguugaau

SEQ ID NO: 2655537 - RNA, 19 nt, Human
uucuaauaagcuaguugaa

SEQ ID NO: 2655538 - RNA, 17 nt, Human
uucuaauaagcuaguug

SEQ ID NO: 2655539 - RNA, 11 nt, Human
uuccuccugga

SEQ ID NO: 2655540 - RNA, 13 nt, Human
uuccuccuggaaa

SEQ ID NO: 2655541 - RNA, 22 nt, Human
uucccuuaagggguaucaugua

SEQ ID NO: 2655542 - RNA, 22 nt, Human
uucuauuuuaagacugauuuua

SEQ ID NO: 2655543 - RNA, 20 nt, Human
uucuccaaacugaagcagcc

SEQ ID NO: 2655544 - RNA, 18 nt, Human
uucucaaaggagcgagca

SEQ ID NO: 2655545 - RNA, 22 nt, Human
uucuaugugacaauuuuguaca

SEQ ID NO: 2655546 - RNA, 16 nt, Human
uucuaugcaaaguucu

SEQ ID NO: 2655547 - RNA, 15 nt, Human
uucuauuauggaaaa

SEQ ID NO: 2655548 - RNA, 18 nt, Human
uucuauuauggaaaacug

SEQ ID NO: 2655549 - RNA, 19 nt, Human
uucuauuauggaaaacugu

SEQ ID NO: 2655550 - RNA, 19 nt, Human
uucuauuauuuuuauaauu

SEQ ID NO: 2655551 - RNA, 12 nt, Human
uucucuccuccc

SEQ ID NO: 2655552 - RNA, 14 nt, Human
uucucuccucccca

SEQ ID NO: 2655553 - RNA, 15 nt, Human
uucucuccuccccaa

SEQ ID NO: 2655554 - RNA, 17 nt, Human
uucucuccuccccaaau

SEQ ID NO: 2655555 - RNA, 13 nt, Human
uucucucucuaag

SEQ ID NO: 2655556 - RNA, 19 nt, Human
uucucccagguaccagcug

SEQ ID NO: 2655557 - RNA, 20 nt, Human
uucucccagguaccagcugc

SEQ ID NO: 2655558 - RNA, 12 nt, Human
uucuccaucccu

SEQ ID NO: 2655559 - RNA, 11 nt, Human
uucucugacuu

SEQ ID NO: 2655560 - RNA, 12 nt, Human
uucucugacuuc

SEQ ID NO: 2655561 - RNA, 16 nt, Human
uucucugacuucugcc

SEQ ID NO: 2655562 - RNA, 21 nt, Human
uucucugcuauauauaaaacg

SEQ ID NO: 2655563 - RNA, 18 nt, Human
uucugacucgguuucucc

SEQ ID NO: 2655564 - RNA, 19 nt, Human
uucugacucgguuucucca

SEQ ID NO: 2655565 - RNA, 13 nt, Human
uucucuguacuuu

SEQ ID NO: 2655566 - RNA, 14 nt, Human
uucucuguacuuuu

SEQ ID NO: 2655567 - RNA, 18 nt, Human
uucucuguacuuuucauu

SEQ ID NO: 2655568 - RNA, 21 nt, Human
uucucuguacuuuucauucuc

SEQ ID NO: 2655569 - RNA, 11 nt, Human
uuuauuucacu

SEQ ID NO: 2655570 - RNA, 15 nt, Human
uuuauuuauguacuu

SEQ ID NO: 2655571 - RNA, 14 nt, Human
uuuauuuauguacu

SEQ ID NO: 2655572 - RNA, 14 nt, Human
uuuauuuauuuaca

SEQ ID NO: 2655573 - RNA, 12 nt, Human
uuuauuuccacu

SEQ ID NO: 2655574 - RNA, 20 nt, Human
uuuauuuccacuaaaaauau

SEQ ID NO: 2655575 - RNA, 20 nt, Human
uuuauuucauuuuucaauag

SEQ ID NO: 2655576 - RNA, 14 nt, Human
uuuauuucuacugu

SEQ ID NO: 2655577 - RNA, 16 nt, Human
uuuauuucuacuguca

SEQ ID NO: 2655578 - RNA, 21 nt, Human
uuuauuucuacugucaaauga

SEQ ID NO: 2655579 - RNA, 20 nt, Human
uuuauuugaacaaugaaguu

SEQ ID NO: 2655580 - RNA, 23 nt, Human
uuuauuugaacaaugaaguugaa

SEQ ID NO: 2655581 - RNA, 16 nt, Human
uuuauuuguaaauuua

SEQ ID NO: 2655582 - RNA, 13 nt, Human
uuuauuuuaaaac

SEQ ID NO: 2655583 - RNA, 13 nt, Human
uuucaauauauug

SEQ ID NO: 2655584 - RNA, 14 nt, Human
uuucaauauauuga

SEQ ID NO: 2655585 - RNA, 17 nt, Human
uuucaauauauugaacu

SEQ ID NO: 2655586 - RNA, 18 nt, Human
uuucaauauauugaacuu

SEQ ID NO: 2655587 - RNA, 19 nt, Human
uuucaauauauugaacuuu

SEQ ID NO: 2655588 - RNA, 22 nt, Human
uuucaauauauugaacuuuugu

SEQ ID NO: 2655589 - RNA, 13 nt, Human
uuucagggcuggc

SEQ ID NO: 2655590 - RNA, 15 nt, Human
uuucagggcuggcuc

SEQ ID NO: 2655591 - RNA, 18 nt, Human
uuucagggcuggcuccug

SEQ ID NO: 2655592 - RNA, 22 nt, Human
uuucauugcugggcuugucugu

SEQ ID NO: 2655593 - RNA, 18 nt, Human
uuucagcauuaagcuguu

SEQ ID NO: 2655594 - RNA, 16 nt, Human
uuuccaaaccuuaucu

SEQ ID NO: 2655595 - RNA, 21 nt, Human
uuuccagaaccacacuugaaa

SEQ ID NO: 2655596 - RNA, 19 nt, Human
uuuccagacuuccuugaga

SEQ ID NO: 2655597 - RNA, 18 nt, Human
uuuccagacuuccuugag

SEQ ID NO: 2655598 - RNA, 18 nt, Human
uuucuccuuuaauuguaa

SEQ ID NO: 2655599 - RNA, 15 nt, Human
uuucuccucccuucc

SEQ ID NO: 2655600 - RNA, 16 nt, Human
uuucuccucccuuccu

SEQ ID NO: 2655601 - RNA, 16 nt, Human
uuucucuguggcucca

SEQ ID NO: 2655602 - RNA, 19 nt, Human
uuucuccuuuaauuguaaa

SEQ ID NO: 2655603 - RNA, 22 nt, Human
uuucuccuuuaauuguaaagua

SEQ ID NO: 2655604 - RNA, 18 nt, Human
uuucucuugagcuggccu

SEQ ID NO: 2655605 - RNA, 16 nt, Human
uuucucuugagcuggc

SEQ ID NO: 2655606 - RNA, 17 nt, Human
uuucucuugagcuggcc

SEQ ID NO: 2655607 - RNA, 15 nt, Human
uuucucuugagcugg

SEQ ID NO: 2655608 - RNA, 12 nt, Human
uuuccucuugug

SEQ ID NO: 2655609 - RNA, 13 nt, Human
uuuccucuuguga

SEQ ID NO: 2655610 - RNA, 22 nt, Human
uuuccaggcuauguauaaaaua

SEQ ID NO: 2655611 - RNA, 23 nt, Human
uuuccaggcuauguauaaaauac

SEQ ID NO: 2655612 - RNA, 13 nt, Human
uuucuaagagaag

SEQ ID NO: 2655613 - RNA, 11 nt, Human
uuucuaagaga

SEQ ID NO: 2655614 - RNA, 16 nt, Human
uuucuaagagaaguua

SEQ ID NO: 2655615 - RNA, 18 nt, Human
uuuccugaaccaugugga

SEQ ID NO: 2655616 - RNA, 16 nt, Human
uuuauaaaauggcugu

SEQ ID NO: 2655617 - RNA, 17 nt, Human
uuuauaaaauauaaaca

SEQ ID NO: 2655618 - RNA, 15 nt, Human
uuuauaaacagaaau

SEQ ID NO: 2655619 - RNA, 16 nt, Human
uuuauaaacagaaaug

SEQ ID NO: 2655620 - RNA, 23 nt, Human
uuuauaaacagaaauggaaagca

SEQ ID NO: 2655621 - RNA, 21 nt, Human
uuuauaaaauagaguguaguu

SEQ ID NO: 2655622 - RNA, 14 nt, Human
uuuaucguuuuugu

SEQ ID NO: 2655623 - RNA, 20 nt, Human
uuuaucuauucugagaaaac

SEQ ID NO: 2655624 - RNA, 16 nt, Human
uuuaugcaaaagguuu

SEQ ID NO: 2655625 - RNA, 18 nt, Human
uuuaugcaaaagguuuau

SEQ ID NO: 2655626 - RNA, 23 nt, Human
uuuauugccuuuuaauuuuuaau

SEQ ID NO: 2655627 - RNA, 16 nt, Human
uuuauuauuuauuuau

SEQ ID NO: 2655628 - RNA, 23 nt, Human
uuuauuauuuauuuuuuuuaauu

SEQ ID NO: 2655629 - RNA, 15 nt, Human
uuuauuguuaauaca

SEQ ID NO: 2655630 - RNA, 17 nt, Human
uuuauuguuaauacaag

SEQ ID NO: 2655631 - RNA, 19 nt, Human
uuuauuguuaauacaaggu

SEQ ID NO: 2655632 - RNA, 15 nt, Human
uuuauuuauauguau

SEQ ID NO: 2655633 - RNA, 19 nt, Human
uuuauuuauauguacuguu

SEQ ID NO: 2655634 - RNA, 21 nt, Human
uuuauuuauccagaaaacugu

SEQ ID NO: 2655635 - RNA, 22 nt, Human
uuuauuuauccagaaaacugug

SEQ ID NO: 2655636 - RNA, 17 nt, Human
uuuauuuauauuuauug

SEQ ID NO: 2655637 - RNA, 15 nt, Human
uuuauuuauauuuau

SEQ ID NO: 2655638 - RNA, 19 nt, Human
uuuauuuaguuccuugagu

SEQ ID NO: 2655639 - RNA, 12 nt, Human
uuuagacuugaa

SEQ ID NO: 2655640 - RNA, 15 nt, Human
uuuagaauaagaauu

SEQ ID NO: 2655641 - RNA, 19 nt, Human
uuuagaauaagaauuugca

SEQ ID NO: 2655642 - RNA, 20 nt, Human
uuuagaauaagaauuugcau

SEQ ID NO: 2655643 - RNA, 21 nt, Human
uuuagaauaagaauuugcaua

SEQ ID NO: 2655644 - RNA, 23 nt, Human
uuuagacuugaaaagagacaggc

SEQ ID NO: 2655645 - RNA, 22 nt, Human
uuuagacuugaaaagagacagg

SEQ ID NO: 2655646 - RNA, 21 nt, Human
uuuagacuugaaaagagacag

SEQ ID NO: 2655647 - RNA, 20 nt, Human
uuuagacuugaaaagagaca

SEQ ID NO: 2655648 - RNA, 19 nt, Human
uuuagacuugaaaagagac

SEQ ID NO: 2655649 - RNA, 15 nt, Human
uuuagacuugaaaag

SEQ ID NO: 2655650 - RNA, 14 nt, Human
uuuagacuugaaaa

SEQ ID NO: 2655651 - RNA, 13 nt, Human
uuuagacuugaaa

SEQ ID NO: 2655652 - RNA, 16 nt, Human
uuuagaacagcauugu

SEQ ID NO: 2655653 - RNA, 15 nt, Human
uuuagaacagguuuu

SEQ ID NO: 2655654 - RNA, 14 nt, Human
uuuagaacagguuu

SEQ ID NO: 2655655 - RNA, 13 nt, Human
uuuaaucuacugc

SEQ ID NO: 2655656 - RNA, 17 nt, Human
uuuaaucuacugcauuu

SEQ ID NO: 2655657 - RNA, 16 nt, Human
uuuaaucuacugcauu

SEQ ID NO: 2655658 - RNA, 18 nt, Human
uuuaaucuacugcauuua

SEQ ID NO: 2655659 - RNA, 12 nt, Human
uuuaauccaguu

SEQ ID NO: 2655660 - RNA, 17 nt, Human
uuguauuauuuuuguag

SEQ ID NO: 2655661 - RNA, 20 nt, Human
uuuacaagggcauaaaguaa

SEQ ID NO: 2655662 - RNA, 17 nt, Human
uuuacaauaguucugug

SEQ ID NO: 2655663 - RNA, 16 nt, Human
uuguauuguccuauua

SEQ ID NO: 2655664 - RNA, 18 nt, Human
uuguauuguauauuacaa

SEQ ID NO: 2655665 - RNA, 19 nt, Human
uuguauuguauauuacaau

SEQ ID NO: 2655666 - RNA, 9 nt, Human
uuguauuuu

SEQ ID NO: 2655667 - RNA, 13 nt, Human
uuguauuuaacag

SEQ ID NO: 2655668 - RNA, 17 nt, Human
uuguauuuaacagaaau

SEQ ID NO: 2655669 - RNA, 18 nt, Human
uuguauuuaacagaaauu

SEQ ID NO: 2655670 - RNA, 22 nt, Human
uuguauuuaacagaaauuguau

SEQ ID NO: 2655671 - RNA, 16 nt, Human
uuguauuuauguguau

SEQ ID NO: 2655672 - RNA, 22 nt, Human
uuuguuaaaauuaucaauaucu

SEQ ID NO: 2655673 - RNA, 16 nt, Human
uuuguugucagcugaa

SEQ ID NO: 2655674 - RNA, 13 nt, Human
uuugucccuucua

SEQ ID NO: 2655675 - RNA, 13 nt, Human
uuugucauaucaa

SEQ ID NO: 2655676 - RNA, 12 nt, Human
uuugucauucag

SEQ ID NO: 2655677 - RNA, 13 nt, Human
uuugucauucaga

SEQ ID NO: 2655678 - RNA, 11 nt, Human
uuugucaauga

SEQ ID NO: 2655679 - RNA, 23 nt, Human
uuugucaaacuguagaaaugaug

SEQ ID NO: 2655680 - RNA, 17 nt, Human
uuugucaaacuguagaa

SEQ ID NO: 2655681 - RNA, 16 nt, Human
uuugucaaacuguaga

SEQ ID NO: 2655682 - RNA, 14 nt, Human
uuugucaaacugua

SEQ ID NO: 2655683 - RNA, 17 nt, Human
uuugucaaugacaguuu

SEQ ID NO: 2655684 - RNA, 15 nt, Human
uuugguguacagacu

SEQ ID NO: 2655685 - RNA, 21 nt, Human
uuugauacaguuuucagaaaa

SEQ ID NO: 2655686 - RNA, 22 nt, Human
uuugauacaguuuucagaaaaa

SEQ ID NO: 2655687 - RNA, 17 nt, Human
uuugagcugccuucccu

SEQ ID NO: 2655688 - RNA, 12 nt, Human
uuugagcugccu

SEQ ID NO: 2655689 - RNA, 14 nt, Human
uuugagcugccuuc

SEQ ID NO: 2655690 - RNA, 19 nt, Human
uuugagcucccacuucugc

SEQ ID NO: 2655691 - RNA, 10 nt, Human
uuugagcucc

SEQ ID NO: 2655692 - RNA, 16 nt, Human
uuugagccugggaaau

SEQ ID NO: 2655693 - RNA, 17 nt, Human
uuugccaggacaugcaa

SEQ ID NO: 2655694 - RNA, 22 nt, Human
uuugcauacuuaccuagugaaa

SEQ ID NO: 2655695 - RNA, 14 nt, Human
uuugccaugugcuu

SEQ ID NO: 2655696 - RNA, 22 nt, Human
uuugccauagaguacacugccu

SEQ ID NO: 2655697 - RNA, 20 nt, Human
uuugccaugugcuucugcca

SEQ ID NO: 2655698 - RNA, 19 nt, Human
uuugauagggaacugggga

SEQ ID NO: 2655699 - RNA, 14 nt, Human
uuugcacuguuuaa

SEQ ID NO: 2655700 - RNA, 21 nt, Human
uuugcacuugugauuauuuau

SEQ ID NO: 2655701 - RNA, 14 nt, Human
uuugcagcucagaa

SEQ ID NO: 2655702 - RNA, 19 nt, Human
uuuuauauuacugacauuu

SEQ ID NO: 2655703 - RNA, 12 nt, Human
uuuuaucaguag

SEQ ID NO: 2655704 - RNA, 13 nt, Human
uuuuauaugcuuu

SEQ ID NO: 2655705 - RNA, 15 nt, Human
uuuuacugguugcau

SEQ ID NO: 2655706 - RNA, 17 nt, Human
uuuuacugguugcaugg

SEQ ID NO: 2655707 - RNA, 18 nt, Human
uuuuacugguugcaugga

SEQ ID NO: 2655708 - RNA, 21 nt, Human
uuuuacugguugcauggaaau

SEQ ID NO: 2655709 - RNA, 13 nt, Human
uuuuacugucuau

SEQ ID NO: 2655710 - RNA, 15 nt, Human
uuuuacuguguuuua

SEQ ID NO: 2655711 - RNA, 12 nt, Human
uuuuaauuuuua

SEQ ID NO: 2655712 - RNA, 18 nt, Human
uuuuacauguuuauaaau

SEQ ID NO: 2655713 - RNA, 18 nt, Human
uuuuaauuuacuuguuuu

SEQ ID NO: 2655714 - RNA, 16 nt, Human
uuuuaaaaugcaaugu

SEQ ID NO: 2655715 - RNA, 19 nt, Human
uuuguuguucuuucagaaa

SEQ ID NO: 2655716 - RNA, 14 nt, Human
uuuucacuuaugaa

SEQ ID NO: 2655717 - RNA, 14 nt, Human
uuuucgccuuuccu

SEQ ID NO: 2655718 - RNA, 16 nt, Human
uuuucuucuugggaua

SEQ ID NO: 2655719 - RNA, 14 nt, Human
uuuuccucuuguga

SEQ ID NO: 2655720 - RNA, 16 nt, Human
uuuuccucuugugauu

SEQ ID NO: 2655721 - RNA, 19 nt, Human
uuuucacucuaagucaugu

SEQ ID NO: 2655722 - RNA, 21 nt, Human
uuuucacucuaagucauguau

SEQ ID NO: 2655723 - RNA, 23 nt, Human
uuuucacucuaagucauguaugu

SEQ ID NO: 2655724 - RNA, 17 nt, Human
uuuucagaaaaagaaau

SEQ ID NO: 2655725 - RNA, 18 nt, Human
uuuucagaaaaagaaaug

SEQ ID NO: 2655726 - RNA, 13 nt, Human
uuuucaaguugua

SEQ ID NO: 2655727 - RNA, 14 nt, Human
uuuucaauauauug

SEQ ID NO: 2655728 - RNA, 15 nt, Human
uuuucaauauauuga

SEQ ID NO: 2655729 - RNA, 18 nt, Human
uuuucaauauauugaacu

SEQ ID NO: 2655730 - RNA, 20 nt, Human
uuuucaauauauugaacuuu

SEQ ID NO: 2655731 - RNA, 21 nt, Human
uuuucaauauauugaacuuuu

SEQ ID NO: 2655732 - RNA, 22 nt, Human
uuuucaauauauugaacuuuug

SEQ ID NO: 2655733 - RNA, 23 nt, Human
uuuucaauauauugaacuuuugu

SEQ ID NO: 2655734 - RNA, 13 nt, Human
uuuuaugaugacg

SEQ ID NO: 2655735 - RNA, 20 nt, Human
uuuuaugaugacguacaagu

SEQ ID NO: 2655736 - RNA, 20 nt, Human
uuuugaaaaguaauauuuau

SEQ ID NO: 2655737 - RNA, 11 nt, Human
uuuugaaaagu

SEQ ID NO: 2655738 - RNA, 20 nt, Human
uuuugaaaagcagacauuuu

SEQ ID NO: 2655739 - RNA, 20 nt, Human
uuuuucugcuuuagacuuga

SEQ ID NO: 2655740 - RNA, 13 nt, Human
uuuuucugcuuua

SEQ ID NO: 2655741 - RNA, 18 nt, Human
uuuuucugugugucaguu

SEQ ID NO: 2655742 - RNA, 16 nt, Human
uuuuucuucuguauuu

SEQ ID NO: 2655743 - RNA, 21 nt, Human
uuuuuuaguauuuauuuaugu

SEQ ID NO: 2655744 - RNA, 15 nt, Human
uuuuuucuaagagaa

SEQ ID NO: 2655745 - RNA, 12 nt, Human
uuuuuucuaaga

SEQ ID NO: 2655746 - RNA, 11 nt, Human
uuuuuuauuau

SEQ ID NO: 2655747 - RNA, 19 nt, Human
uuuuuugaacucuucucau

SEQ ID NO: 2655748 - RNA, 14 nt, Human
caauguuguagugu

SEQ ID NO: 2655749 - RNA, 17 nt, Human
caauaucuaauauauau

SEQ ID NO: 2655750 - RNA, 16 nt, Human
caauaucuaauauaua

SEQ ID NO: 2655751 - RNA, 15 nt, Human
caauaucuaauauau

SEQ ID NO: 2655752 - RNA, 19 nt, Human
caaugugaaaagaaaaaug

SEQ ID NO: 2655753 - RNA, 22 nt, Human
caaugugaaaagaaaaaugagc

SEQ ID NO: 2655754 - RNA, 13 nt, Human
cacaaaggagagc

SEQ ID NO: 2655755 - RNA, 13 nt, Human
cacaauuugcacu

SEQ ID NO: 2655756 - RNA, 18 nt, Human
cacaauuuugauaaaaau

SEQ ID NO: 2655757 - RNA, 11 nt, Human
cacacaccugu

SEQ ID NO: 2655758 - RNA, 13 nt, Human
cacacaccuguag

SEQ ID NO: 2655759 - RNA, 20 nt, Human
cacacacggaggcauccuac

SEQ ID NO: 2655760 - RNA, 22 nt, Human
cacacucuccaucacccucuuc

SEQ ID NO: 2655761 - RNA, 21 nt, Human
cacagagcuuuggucugugug

SEQ ID NO: 2655762 - RNA, 22 nt, Human
cacagagcuuuggucugugugu

SEQ ID NO: 2655763 - RNA, 15 nt, Human
cacagagucaaggcc

SEQ ID NO: 2655764 - RNA, 16 nt, Human
cacagagucaaggccu

SEQ ID NO: 2655765 - RNA, 17 nt, Human
cacagagucaaggccug

SEQ ID NO: 2655766 - RNA, 18 nt, Human
cacagagucaaggccugc

SEQ ID NO: 2655767 - RNA, 19 nt, Human
cacagagucaaggccugcu

SEQ ID NO: 2655768 - RNA, 20 nt, Human
cacagagucaaggccugcuc

SEQ ID NO: 2655769 - RNA, 21 nt, Human
cacagagucaaggccugcucc

SEQ ID NO: 2655770 - RNA, 12 nt, Human
caauaaaugaau

SEQ ID NO: 2655771 - RNA, 18 nt, Human
caauaaauuuugaaaagu

SEQ ID NO: 2655772 - RNA, 17 nt, Human
caauaaauuuugaaaag

SEQ ID NO: 2655773 - RNA, 16 nt, Human
caauaaauuuugaaaa

SEQ ID NO: 2655774 - RNA, 15 nt, Human
caauaaauuuugaaa

SEQ ID NO: 2655775 - RNA, 14 nt, Human
caauaaauuuugaa

SEQ ID NO: 2655776 - RNA, 13 nt, Human
caauaaauuuuga

SEQ ID NO: 2655777 - RNA, 11 nt, Human
caauaaauuuu

SEQ ID NO: 2655778 - RNA, 21 nt, Human
caagggaaaggggugcuuuua

SEQ ID NO: 2655779 - RNA, 12 nt, Human
caagggaaaggg

SEQ ID NO: 2655780 - RNA, 14 nt, Human
caagggaaaggggu

SEQ ID NO: 2655781 - RNA, 16 nt, Human
caagggaaaggggugc

SEQ ID NO: 2655782 - RNA, 20 nt, Human
caagggaaaggggugcuuuu

SEQ ID NO: 2655783 - RNA, 15 nt, Human
caagggaaccugugu

SEQ ID NO: 2655784 - RNA, 16 nt, Human
caagggaaccuguguc

SEQ ID NO: 2655785 - RNA, 18 nt, Human
caaggcugggggaagaag

SEQ ID NO: 2655786 - RNA, 13 nt, Human
caaggcuggcagg

SEQ ID NO: 2655787 - RNA, 17 nt, Human
caauagcacauauggaa

SEQ ID NO: 2655788 - RNA, 16 nt, Human
caauagcacauaugga

SEQ ID NO: 2655789 - RNA, 15 nt, Human
caauagaucuccagc

SEQ ID NO: 2655790 - RNA, 16 nt, Human
caauagaucuccagcg

SEQ ID NO: 2655791 - RNA, 16 nt, Human
caauagacacauacau

SEQ ID NO: 2655792 - RNA, 12 nt, Human
caauagaaacaa

SEQ ID NO: 2655793 - RNA, 21 nt, Human
caauaagugugugguagaaac

SEQ ID NO: 2655794 - RNA, 23 nt, Human
caauaagugugugguagaaacaa

SEQ ID NO: 2655795 - RNA, 12 nt, Human
caauaacagcug

SEQ ID NO: 2655796 - RNA, 13 nt, Human
caauaacagcugc

SEQ ID NO: 2655797 - RNA, 14 nt, Human
caauaacagcugca

SEQ ID NO: 2655798 - RNA, 15 nt, Human
caauaacagcugcaa

SEQ ID NO: 2655799 - RNA, 22 nt, Human
caauaaauuuugaaaaguaaua

SEQ ID NO: 2655800 - RNA, 16 nt, Human
caaggacuuuguacau

SEQ ID NO: 2655801 - RNA, 20 nt, Human
caagagucuaauagucuuug

SEQ ID NO: 2655802 - RNA, 22 nt, Human
caaggcugcagugagccgagau

SEQ ID NO: 2655803 - RNA, 17 nt, Human
caaggcugcagugagcc

SEQ ID NO: 2655804 - RNA, 22 nt, Human
caagcugcacccucaggcaggu

SEQ ID NO: 2655805 - RNA, 21 nt, Human
caagcugcacccucaggcagg

SEQ ID NO: 2655806 - RNA, 24 nt, Human
caacacuuccagcauuuagcuggc

SEQ ID NO: 2655807 - RNA, 22 nt, Human
caaauuugucugguuaaaaaau

SEQ ID NO: 2655808 - RNA, 20 nt, Human
caaauuaauugugugaacuu

SEQ ID NO: 2655809 - RNA, 19 nt, Human
caaauuaauugugugaacu

SEQ ID NO: 2655810 - RNA, 16 nt, Human
caaauuaauuguguga

SEQ ID NO: 2655811 - RNA, 12 nt, Human
caaauuaauugu

SEQ ID NO: 2655812 - RNA, 14 nt, Human
caaaucaauacacu

SEQ ID NO: 2655813 - RNA, 15 nt, Human
caaaucaauacacua

SEQ ID NO: 2655814 - RNA, 17 nt, Human
caaauaaauaauuuuca

SEQ ID NO: 2655815 - RNA, 23 nt, Human
caaauaaagagagaacaggacua

SEQ ID NO: 2655816 - RNA, 17 nt, Human
caaauggagaagcugca

SEQ ID NO: 2655817 - RNA, 18 nt, Human
caaauggagaagcugcag

SEQ ID NO: 2655818 - RNA, 19 nt, Human
caaauggagaagcugcagg

SEQ ID NO: 2655819 - RNA, 16 nt, Human
caaaucaauucuaguc

SEQ ID NO: 2655820 - RNA, 19 nt, Human
caaaucaauucuagucaua

SEQ ID NO: 2655821 - RNA, 17 nt, Human
caaaucaauacacuagu

SEQ ID NO: 2655822 - RNA, 22 nt, Human
caaaguguauuaggaaguguuu

SEQ ID NO: 2655823 - RNA, 17 nt, Human
caaaguuaaaauuguua

SEQ ID NO: 2655824 - RNA, 23 nt, Human
caacuuguauuaaagacagaggc

SEQ ID NO: 2655825 - RNA, 13 nt, Human
caagaagcagugg

SEQ ID NO: 2655826 - RNA, 14 nt, Human
caagaagcaguggc

SEQ ID NO: 2655827 - RNA, 18 nt, Human
caagaagcaguggccuua

SEQ ID NO: 2655828 - RNA, 15 nt, Human
caaccuuucccucac

SEQ ID NO: 2655829 - RNA, 18 nt, Human
caaccuuucccucacccc

SEQ ID NO: 2655830 - RNA, 19 nt, Human
caaccuuucccucaccccc

SEQ ID NO: 2655831 - RNA, 17 nt, Human
caacuaaaauuugaagu

SEQ ID NO: 2655832 - RNA, 19 nt, Human
caacuaaaauuugaaguag

SEQ ID NO: 2655833 - RNA, 12 nt, Human
caagaggaauga

SEQ ID NO: 2655834 - RNA, 15 nt, Human
caagaggaaugaaaa

SEQ ID NO: 2655835 - RNA, 24 nt, Human
caagagaacucgcgcucaguaaac

SEQ ID NO: 2655836 - RNA, 16 nt, Human
caagagauaagucuuu

SEQ ID NO: 2655837 - RNA, 16 nt, Human
caagagaugggaauga

SEQ ID NO: 2655838 - RNA, 23 nt, Human
caaacugaagcagccucucccca

SEQ ID NO: 2655839 - RNA, 17 nt, Human
caaacugaagcagccuc

SEQ ID NO: 2655840 - RNA, 14 nt, Human
caaaccuuugagua

SEQ ID NO: 2655841 - RNA, 15 nt, Human
caaaccuuugaguag

SEQ ID NO: 2655842 - RNA, 18 nt, Human
caaacucuaucggagaac

SEQ ID NO: 2655843 - RNA, 21 nt, Human
caaaccuuaucuccacaaccu

SEQ ID NO: 2655844 - RNA, 17 nt, Human
caaaccuuaucuccaca

SEQ ID NO: 2655845 - RNA, 15 nt, Human
caaaccuuaucucca

SEQ ID NO: 2655846 - RNA, 20 nt, Human
caaaccuuuauuuuagaauu

SEQ ID NO: 2655847 - RNA, 18 nt, Human
caaaccuuuauuuuagaa

SEQ ID NO: 2655848 - RNA, 13 nt, Human
caaaauuugacua

SEQ ID NO: 2655849 - RNA, 14 nt, Human
caaaauuugacuaa

SEQ ID NO: 2655850 - RNA, 23 nt, Human
caaaauuugacuaauuuuacaug

SEQ ID NO: 2655851 - RNA, 16 nt, Human
caaaauauguuuaaaa

SEQ ID NO: 2655852 - RNA, 16 nt, Human
caaaaucaauuaaaau

SEQ ID NO: 2655853 - RNA, 15 nt, Human
caaaauauuucccau

SEQ ID NO: 2655854 - RNA, 16 nt, Human
caaaauccaaaaagaa

SEQ ID NO: 2655855 - RNA, 22 nt, Human
caaaauccaaaaagaaaugaug

SEQ ID NO: 2655856 - RNA, 13 nt, Human
caaaauacaugaa

SEQ ID NO: 2655857 - RNA, 14 nt, Human
caaaauacaugaag

SEQ ID NO: 2655858 - RNA, 17 nt, Human
caaaauacaugaagcuu

SEQ ID NO: 2655859 - RNA, 22 nt, Human
caaaauacaugaagcuucaugc

SEQ ID NO: 2655860 - RNA, 11 nt, Human
caaaacucuac

SEQ ID NO: 2655861 - RNA, 19 nt, Human
caaaacucuacuuaaucca

SEQ ID NO: 2655862 - RNA, 21 nt, Human
caaaacgguuuuacugcagcu

SEQ ID NO: 2655863 - RNA, 15 nt, Human
caaaacgguuuuacu

SEQ ID NO: 2655864 - RNA, 15 nt, Human
caaaaccuuuuacug

SEQ ID NO: 2655865 - RNA, 21 nt, Human
caaaaccuuuuacugguugca

SEQ ID NO: 2655866 - RNA, 22 nt, Human
cacagcuugaccugaggcugug

SEQ ID NO: 2655867 - RNA, 20 nt, Human
cacagcuugaccugaggcug

SEQ ID NO: 2655868 - RNA, 21 nt, Human
cacagcuugaccugaggcugu

SEQ ID NO: 2655869 - RNA, 18 nt, Human
cacagcuugaccugaggc

SEQ ID NO: 2655870 - RNA, 19 nt, Human
cacagcuugaccugaggcu

SEQ ID NO: 2655871 - RNA, 19 nt, Human
aacucauuuguuaaaauua

SEQ ID NO: 2655872 - RNA, 16 nt, Human
aacucgcgcucaguaa

SEQ ID NO: 2655873 - RNA, 20 nt, Human
aacucaucuggaguucucaa

SEQ ID NO: 2655874 - RNA, 14 nt, Human
aacucaucugaaau

SEQ ID NO: 2655875 - RNA, 17 nt, Human
aacucaucugaaauguu

SEQ ID NO: 2655876 - RNA, 18 nt, Human
aacucaucugaaauguua

SEQ ID NO: 2655877 - RNA, 19 nt, Human
aacucaucugaaauguuac

SEQ ID NO: 2655878 - RNA, 20 nt, Human
aacucaucugaaauguuaca

SEQ ID NO: 2655879 - RNA, 15 nt, Human
aacuaccuguauuua

SEQ ID NO: 2655880 - RNA, 21 nt, Human
aacuaccuguauuuaaaaaua

SEQ ID NO: 2655881 - RNA, 23 nt, Human
aacuaccuguauuuaaaaauaga

SEQ ID NO: 2655882 - RNA, 17 nt, Human
aaccuuggccugggccg

SEQ ID NO: 2655883 - RNA, 12 nt, Human
gucuuuugcuuu

SEQ ID NO: 2655884 - RNA, 13 nt, Human
gucuuuugcuuuu

SEQ ID NO: 2655885 - RNA, 14 nt, Human
gucuuuugcuuuug

SEQ ID NO: 2655886 - RNA, 16 nt, Human
gucuuuugcuuuuggc

SEQ ID NO: 2655887 - RNA, 20 nt, Human
gucuggcccuagacucgggg

SEQ ID NO: 2655888 - RNA, 20 nt, Human
gucuguaauaauagacugua

SEQ ID NO: 2655889 - RNA, 20 nt, Human
aaccucgcccucuccuuugu

SEQ ID NO: 2655890 - RNA, 19 nt, Human
aaccucgcgcuugcuggcc

SEQ ID NO: 2655891 - RNA, 17 nt, Human
aaccucgcccucuccuu

SEQ ID NO: 2655892 - RNA, 14 nt, Human
aaccucgcccucuc

SEQ ID NO: 2655893 - RNA, 15 nt, Human
aaccugaaguuuuuu

SEQ ID NO: 2655894 - RNA, 23 nt, Human
aacccgggagcggagguugcagu

SEQ ID NO: 2655895 - RNA, 17 nt, Human
aaccucagggcucccag

SEQ ID NO: 2655896 - RNA, 18 nt, Human
aaccucagggcucccagg

SEQ ID NO: 2655897 - RNA, 19 nt, Human
aaccucagggcucccaggg

SEQ ID NO: 2655898 - RNA, 15 nt, Human
aaccuccccagccug

SEQ ID NO: 2655899 - RNA, 14 nt, Human
aaccuccccagccu

SEQ ID NO: 2655900 - RNA, 16 nt, Human
aacccaagcuuagaac

SEQ ID NO: 2655901 - RNA, 15 nt, Human
aacccaagcuuagaa

SEQ ID NO: 2655902 - RNA, 16 nt, Human
aaccaccaaaaacaaa

SEQ ID NO: 2655903 - RNA, 11 nt, Human
gucucccuggc

SEQ ID NO: 2655904 - RNA, 12 nt, Human
gucucccuggcu

SEQ ID NO: 2655905 - RNA, 14 nt, Human
gucucccuggcucc

SEQ ID NO: 2655906 - RNA, 15 nt, Human
gucucccuggcuccc

SEQ ID NO: 2655907 - RNA, 15 nt, Human
aaccaagucaaguga

SEQ ID NO: 2655908 - RNA, 11 nt, Human
aacuguaaauc

SEQ ID NO: 2655909 - RNA, 12 nt, Human
aacuguaaauca

SEQ ID NO: 2655910 - RNA, 19 nt, Human
aacuggucaccaugaaacu

SEQ ID NO: 2655911 - RNA, 16 nt, Human
aacugggguugagggc

SEQ ID NO: 2655912 - RNA, 18 nt, Human
aacugggguugagggcca

SEQ ID NO: 2655913 - RNA, 17 nt, Human
aacuguagaaaugauga

SEQ ID NO: 2655914 - RNA, 16 nt, Human
aacuguagaaaugaug

SEQ ID NO: 2655915 - RNA, 15 nt, Human
aacuguagaaaugau

SEQ ID NO: 2655916 - RNA, 14 nt, Human
aacuguagaaauga

SEQ ID NO: 2655917 - RNA, 16 nt, Human
aacuuccaaauaaaua

SEQ ID NO: 2655918 - RNA, 23 nt, Human
aacuuccaaauaaauaauuuuca

SEQ ID NO: 2655919 - RNA, 20 nt, Human
aacuguagaugauguauuuu

SEQ ID NO: 2655920 - RNA, 19 nt, Human
aacuguagaaaugaugaug

SEQ ID NO: 2655921 - RNA, 17 nt, Human
aacuucauauguaaucu

SEQ ID NO: 2655922 - RNA, 21 nt, Human
aacuucuucuccaucccucua

SEQ ID NO: 2655923 - RNA, 19 nt, Human
aacuucugcaacaagcaug

SEQ ID NO: 2655924 - RNA, 20 nt, Human
aacuucugcaacaagcaugc

SEQ ID NO: 2655925 - RNA, 22 nt, Human
aacuucugcaacaagcaugcag

SEQ ID NO: 2655926 - RNA, 12 nt, Human
gugaugagcuga

SEQ ID NO: 2655927 - RNA, 20 nt, Human
gugccucccuccccagugca

SEQ ID NO: 2655928 - RNA, 23 nt, Human
gugccacuuuacccaccuagaac

SEQ ID NO: 2655929 - RNA, 13 nt, Human
gugccugugucca

SEQ ID NO: 2655930 - RNA, 22 nt, Human
gugccuguguccaugcgcucag

SEQ ID NO: 2655931 - RNA, 14 nt, Human
gugccugugugcgu

SEQ ID NO: 2655932 - RNA, 16 nt, Human
gugaugguguagcccu

SEQ ID NO: 2655933 - RNA, 16 nt, Human
gugccaccaugccuca

SEQ ID NO: 2655934 - RNA, 24 nt, Human
gugcaacaggguauggacuaucug

SEQ ID NO: 2655935 - RNA, 19 nt, Human
gugcaaccucgcugagggc

SEQ ID NO: 2655936 - RNA, 16 nt, Human
gugcaacgccgugggc

SEQ ID NO: 2655937 - RNA, 15 nt, Human
gugcaugguggccag

SEQ ID NO: 2655938 - RNA, 16 nt, Human
gugcaugguggccaga

SEQ ID NO: 2655939 - RNA, 21 nt, Human
gugcacauccgcgugugccug

SEQ ID NO: 2655940 - RNA, 13 nt, Human
gugcacagccacu

SEQ ID NO: 2655941 - RNA, 23 nt, Human
aacugggaugaaacuaaagcaau

SEQ ID NO: 2655942 - RNA, 17 nt, Human
aacuggaccuguauauu

SEQ ID NO: 2655943 - RNA, 15 nt, Human
aacugcugacuguuu

SEQ ID NO: 2655944 - RNA, 21 nt, Human
aacugcugacuguuuucucuu

SEQ ID NO: 2655945 - RNA, 20 nt, Human
aacugcugacuguuuucucu

SEQ ID NO: 2655946 - RNA, 22 nt, Human
aacugcuucccuuacuuugcug

SEQ ID NO: 2655947 - RNA, 23 nt, Human
aacugcuucccuuacuuugcuga

SEQ ID NO: 2655948 - RNA, 23 nt, Human
aacugcugacuguuuucucuuga

SEQ ID NO: 2655949 - RNA, 16 nt, Human
aacugaaacaugcuua

SEQ ID NO: 2655950 - RNA, 13 nt, Human
gugaggggucccu

SEQ ID NO: 2655951 - RNA, 18 nt, Human
gugagugacgaugaugua

SEQ ID NO: 2655952 - RNA, 14 nt, Human
gugaacuuggaagc

SEQ ID NO: 2655953 - RNA, 19 nt, Human
gugaacuugggccacugug

SEQ ID NO: 2655954 - RNA, 17 nt, Human
gugaacuugggccacug

SEQ ID NO: 2655955 - RNA, 13 nt, Human
gugagggagggga

SEQ ID NO: 2655956 - RNA, 21 nt, Human
gugagggaggggaaaagcauu

SEQ ID NO: 2655957 - RNA, 18 nt, Human
gucagacagaacuugaau

SEQ ID NO: 2655958 - RNA, 16 nt, Human
gucaggcugaaaacaa

SEQ ID NO: 2655959 - RNA, 17 nt, Human
gucaggcugaaaacaau

SEQ ID NO: 2655960 - RNA, 18 nt, Human
gucacacgcuuuugaauu

SEQ ID NO: 2655961 - RNA, 20 nt, Human
gucacacgcuuuugaauuau

SEQ ID NO: 2655962 - RNA, 19 nt, Human
gucacacauuacaaaguua

SEQ ID NO: 2655963 - RNA, 21 nt, Human
aaauuugucugguuaaaaaau

SEQ ID NO: 2655964 - RNA, 15 nt, Human
aaauuuuaaaaaucu

SEQ ID NO: 2655965 - RNA, 14 nt, Human
aaauuuguugcaua

SEQ ID NO: 2655966 - RNA, 13 nt, Human
aaauuuguugcau

SEQ ID NO: 2655967 - RNA, 11 nt, Human
gucaguuuuca

SEQ ID NO: 2655968 - RNA, 13 nt, Human
gucaguuuucaua

SEQ ID NO: 2655969 - RNA, 14 nt, Human
gucaguaugacauu

SEQ ID NO: 2655970 - RNA, 20 nt, Human
gucaguaguuuaaaaguucu

SEQ ID NO: 2655971 - RNA, 12 nt, Human
aaauuuuguaag

SEQ ID NO: 2655972 - RNA, 14 nt, Human
aaauuuuguaagaa

SEQ ID NO: 2655973 - RNA, 21 nt, Human
aaauuuugcuaucaacaauaa

SEQ ID NO: 2655974 - RNA, 21 nt, Human
aaauuuuacaagggcauaaag

SEQ ID NO: 2655975 - RNA, 13 nt, Human
aaauuuucagcau

SEQ ID NO: 2655976 - RNA, 13 nt, Human
aaauuuugaaaag

SEQ ID NO: 2655977 - RNA, 21 nt, Human
aaauuuugaaaaguaauauuu

SEQ ID NO: 2655978 - RNA, 18 nt, Human
aaauuuugaaaaguaaua

SEQ ID NO: 2655979 - RNA, 17 nt, Human
aaauuuugaaaaguaau

SEQ ID NO: 2655980 - RNA, 14 nt, Human
aaauuuugaaaagu

SEQ ID NO: 2655981 - RNA, 19 nt, Human
aaauuuuuuuguaugaaaa

SEQ ID NO: 2655982 - RNA, 20 nt, Human
aaauuuuuuuguaugaaaac

SEQ ID NO: 2655983 - RNA, 18 nt, Human
aaauuuuuuuguaugaaa

SEQ ID NO: 2655984 - RNA, 17 nt, Human
aaauuuuuuuguaugaa

SEQ ID NO: 2655985 - RNA, 14 nt, Human
aaauuuuuuuguau

SEQ ID NO: 2655986 - RNA, 13 nt, Human
aaauuuuuuugua

SEQ ID NO: 2655987 - RNA, 12 nt, Human
aaauuuuuuugu

SEQ ID NO: 2655988 - RNA, 12 nt, Human
aaauuuuuugac

SEQ ID NO: 2655989 - RNA, 13 nt, Human
aaauuuuuugacu

SEQ ID NO: 2655990 - RNA, 23 nt, Human
aaauuuuuugacuuuuuuuguau

SEQ ID NO: 2655991 - RNA, 14 nt, Human
aacaaguugagcua

SEQ ID NO: 2655992 - RNA, 22 nt, Human
aacaaguugagcuaugacuuaa

SEQ ID NO: 2655993 - RNA, 21 nt, Human
aacaaguugagcuaugacuua

SEQ ID NO: 2655994 - RNA, 17 nt, Human
aacaaguugagcuauga

SEQ ID NO: 2655995 - RNA, 13 nt, Human
aacaagcaugcag

SEQ ID NO: 2655996 - RNA, 15 nt, Human
aacaauggaguauuc

SEQ ID NO: 2655997 - RNA, 16 nt, Human
aacaauggaguauucu

SEQ ID NO: 2655998 - RNA, 17 nt, Human
aacaauggaguauucuc

SEQ ID NO: 2655999 - RNA, 14 nt, Human
aacaauaaaauuuu

SEQ ID NO: 2656000 - RNA, 16 nt, Human
aacaauaaaauuuuuu

SEQ ID NO: 2656001 - RNA, 15 nt, Human
guccaguguuucuuu

SEQ ID NO: 2656002 - RNA, 20 nt, Human
guccaaaaagcuccuggggc

SEQ ID NO: 2656003 - RNA, 15 nt, Human
guccauacacuuugu

SEQ ID NO: 2656004 - RNA, 20 nt, Human
gucccuugcuugccugcagg

SEQ ID NO: 2656005 - RNA, 22 nt, Human
gucccuugcuugccugcagggc

SEQ ID NO: 2656006 - RNA, 23 nt, Human
aaaugucaaaaguagaacuuugu

SEQ ID NO: 2656007 - RNA, 20 nt, Human
aaaugucaaaaguagaacuu

SEQ ID NO: 2656008 - RNA, 16 nt, Human
guauguagaagcauga

SEQ ID NO: 2656009 - RNA, 23 nt, Human
guauguauauuaaaaaagagaca

SEQ ID NO: 2656010 - RNA, 13 nt, Human
guauguauuauuu

SEQ ID NO: 2656011 - RNA, 19 nt, Human
aaaugucuaguuguaacac

SEQ ID NO: 2656012 - RNA, 22 nt, Human
aaauguccaguaagaucacugu

SEQ ID NO: 2656013 - RNA, 21 nt, Human
aaauguccaguaagaucacug

SEQ ID NO: 2656014 - RNA, 24 nt, Human
aaaugucuaguuguaacaccauga

SEQ ID NO: 2656015 - RNA, 20 nt, Human
aaaugugagugguugaauau

SEQ ID NO: 2656016 - RNA, 18 nt, Human
aaaugugaauuuuuauug

SEQ ID NO: 2656017 - RNA, 20 nt, Human
aaaugugaauuuuuauuguu

SEQ ID NO: 2656018 - RNA, 21 nt, Human
aaaugugaauuuuuauuguug

SEQ ID NO: 2656019 - RNA, 12 nt, Human
aaauuaaggugu

SEQ ID NO: 2656020 - RNA, 13 nt, Human
aaauuaagcaaau

SEQ ID NO: 2656021 - RNA, 16 nt, Human
aaauuaagcaaauguu

SEQ ID NO: 2656022 - RNA, 17 nt, Human
aaauuaagcaaauguua

SEQ ID NO: 2656023 - RNA, 23 nt, Human
aaauuaagguguuugaaaauagu

SEQ ID NO: 2656024 - RNA, 21 nt, Human
aaauuaagguguuugaaaaua

SEQ ID NO: 2656025 - RNA, 19 nt, Human
aaauuaagguguuugaaaa

SEQ ID NO: 2656026 - RNA, 17 nt, Human
aaauuaagguguuugaa

SEQ ID NO: 2656027 - RNA, 14 nt, Human
aaauguuaaaaguu

SEQ ID NO: 2656028 - RNA, 16 nt, Human
aaauguuaaaaguuuu

SEQ ID NO: 2656029 - RNA, 18 nt, Human
aaauguuaaaaguuuuau

SEQ ID NO: 2656030 - RNA, 19 nt, Human
aaauguuaaaaguuuuaua

SEQ ID NO: 2656031 - RNA, 23 nt, Human
aaauguuaaaaguuuuauaugcu

SEQ ID NO: 2656032 - RNA, 13 nt, Human
aaauguguacaua

SEQ ID NO: 2656033 - RNA, 20 nt, Human
gucaaacuguagaaaugaug

SEQ ID NO: 2656034 - RNA, 16 nt, Human
gucaaacuguagaaau

SEQ ID NO: 2656035 - RNA, 23 nt, Human
gucaaaaguagaacuuuguauag

SEQ ID NO: 2656036 - RNA, 17 nt, Human
gucaaaaguagaacuuu

SEQ ID NO: 2656037 - RNA, 16 nt, Human
gucaaaaguagaacuu

SEQ ID NO: 2656038 - RNA, 13 nt, Human
guauuuuucuuga

SEQ ID NO: 2656039 - RNA, 22 nt, Human
guauuuuguuuuugucuuaaaa

SEQ ID NO: 2656040 - RNA, 21 nt, Human
guauuuuuagaauaagaauuu

SEQ ID NO: 2656041 - RNA, 22 nt, Human
guauuuuuagaauaagaauuug

SEQ ID NO: 2656042 - RNA, 18 nt, Human
guauuuuuauacaaaccu

SEQ ID NO: 2656043 - RNA, 23 nt, Human
aaauuuaugguuuugguauuuuu

SEQ ID NO: 2656044 - RNA, 13 nt, Human
aaauuguuuagug

SEQ ID NO: 2656045 - RNA, 15 nt, Human
aaauuguuuagugau

SEQ ID NO: 2656046 - RNA, 23 nt, Human
aaauuguuuagugauauuacauu

SEQ ID NO: 2656047 - RNA, 16 nt, Human
aaauuguuaucaaaau

SEQ ID NO: 2656048 - RNA, 19 nt, Human
aaauuguuaucaaaauagu

SEQ ID NO: 2656049 - RNA, 17 nt, Human
aaauuauuugauuauuu

SEQ ID NO: 2656050 - RNA, 16 nt, Human
aaauucugauuucuuu

SEQ ID NO: 2656051 - RNA, 14 nt, Human
aaauucugauuucu

SEQ ID NO: 2656052 - RNA, 12 nt, Human
aaauucugauuu

SEQ ID NO: 2656053 - RNA, 16 nt, Human
aaauucuccuggaggu

SEQ ID NO: 2656054 - RNA, 20 nt, Human
aaauucugauuucuuuucac

SEQ ID NO: 2656055 - RNA, 17 nt, Human
aaauucugauuucuuuu

SEQ ID NO: 2656056 - RNA, 22 nt, Human
aaauucugauuucuuuucacca

SEQ ID NO: 2656057 - RNA, 20 nt, Human
aaauggucucuaacauuucc

SEQ ID NO: 2656058 - RNA, 22 nt, Human
guaaauuuaguguuuuuuuauu

SEQ ID NO: 2656059 - RNA, 20 nt, Human
guaacacuagggccuuggaa

SEQ ID NO: 2656060 - RNA, 15 nt, Human
guaacacuccucugc

SEQ ID NO: 2656061 - RNA, 17 nt, Human
guaguugccuuaaaaua

SEQ ID NO: 2656062 - RNA, 12 nt, Human
guaguugaaugg

SEQ ID NO: 2656063 - RNA, 11 nt, Human
aaauguaaacu

SEQ ID NO: 2656064 - RNA, 22 nt, Human
aaauguaaacucagcaucaaaa

SEQ ID NO: 2656065 - RNA, 19 nt, Human
guauauugguuuuaugaug

SEQ ID NO: 2656066 - RNA, 17 nt, Human
guauauuugauuuauua

SEQ ID NO: 2656067 - RNA, 22 nt, Human
guauauuguauaggggcaacug

SEQ ID NO: 2656068 - RNA, 17 nt, Human
guauauuuguaaagcua

SEQ ID NO: 2656069 - RNA, 23 nt, Human
guauauuugauuuauuaacuuaa

SEQ ID NO: 2656070 - RNA, 20 nt, Human
guauauuugauuuauuaacu

SEQ ID NO: 2656071 - RNA, 19 nt, Human
guauauuugauuuauuaac

SEQ ID NO: 2656072 - RNA, 18 nt, Human
guauauuugauuuauuaa

SEQ ID NO: 2656073 - RNA, 21 nt, Human
guauauuuuauauuacugaca

SEQ ID NO: 2656074 - RNA, 12 nt, Human
guauaaaauaca

SEQ ID NO: 2656075 - RNA, 14 nt, Human
guauaaaauacaua

SEQ ID NO: 2656076 - RNA, 18 nt, Human
guauaaaauacauaguga

SEQ ID NO: 2656077 - RNA, 20 nt, Human
guauaaaauacauagugaaa

SEQ ID NO: 2656078 - RNA, 12 nt, Human
guauaauaggcu

SEQ ID NO: 2656079 - RNA, 12 nt, Human
guauaauauaaa

SEQ ID NO: 2656080 - RNA, 13 nt, Human
guauaauauaaaa

SEQ ID NO: 2656081 - RNA, 14 nt, Human
guauaauauaaaaa

SEQ ID NO: 2656082 - RNA, 13 nt, Human
guauaauaaaauu

SEQ ID NO: 2656083 - RNA, 14 nt, Human
guauaauaaaauua

SEQ ID NO: 2656084 - RNA, 13 nt, Human
guauauugguuuu

SEQ ID NO: 2656085 - RNA, 14 nt, Human
guaucauauauuua

SEQ ID NO: 2656086 - RNA, 16 nt, Human
guaucauauauuuaau

SEQ ID NO: 2656087 - RNA, 14 nt, Human
guauccauauuuua

SEQ ID NO: 2656088 - RNA, 15 nt, Human
guauccauauuuuau

SEQ ID NO: 2656089 - RNA, 20 nt, Human
guauccauauuuuauuacug

SEQ ID NO: 2656090 - RNA, 21 nt, Human
guauccauauuuuauuacugu

SEQ ID NO: 2656091 - RNA, 16 nt, Human
guuuauuucacuugau

SEQ ID NO: 2656092 - RNA, 13 nt, Human
guuuacagaaaaa

SEQ ID NO: 2656093 - RNA, 19 nt, Human
guuuaauauugagaaagaa

SEQ ID NO: 2656094 - RNA, 17 nt, Human
guuuaauauugagaaag

SEQ ID NO: 2656095 - RNA, 15 nt, Human
guuuaauauugagaa

SEQ ID NO: 2656096 - RNA, 20 nt, Human
guuuaaucauaguuacugug

SEQ ID NO: 2656097 - RNA, 16 nt, Human
guuuauuuuaaaacaa

SEQ ID NO: 2656098 - RNA, 15 nt, Human
guuuauuuuaaaaca

SEQ ID NO: 2656099 - RNA, 17 nt, Human
guuuauuuucuacguuu

SEQ ID NO: 2656100 - RNA, 21 nt, Human
guuuauuuucuacguuucuuu

SEQ ID NO: 2656101 - RNA, 19 nt, Human
aagguauuuaaaguauuuu

SEQ ID NO: 2656102 - RNA, 22 nt, Human
aagguauuauacaugugauaca

SEQ ID NO: 2656103 - RNA, 20 nt, Human
guuucucuugagcuggccuc

SEQ ID NO: 2656104 - RNA, 19 nt, Human
guuucucuuugauuauuug

SEQ ID NO: 2656105 - RNA, 21 nt, Human
guuucucuuugauuauuugca

SEQ ID NO: 2656106 - RNA, 22 nt, Human
guuucucuuugauuauuugcau

SEQ ID NO: 2656107 - RNA, 17 nt, Human
guuucucuugagcuggc

SEQ ID NO: 2656108 - RNA, 18 nt, Human
guuucucuugagcuggcc

SEQ ID NO: 2656109 - RNA, 18 nt, Human
guuucuaugcaaaguucu

SEQ ID NO: 2656110 - RNA, 14 nt, Human
guuucucuguggcu

SEQ ID NO: 2656111 - RNA, 17 nt, Human
guuucuauuuuuugaaa

SEQ ID NO: 2656112 - RNA, 20 nt, Human
aaguaagaaagugaagcaaa

SEQ ID NO: 2656113 - RNA, 21 nt, Human
aaguaagaaagugaagcaaau

SEQ ID NO: 2656114 - RNA, 14 nt, Human
aaggucacuguuuc

SEQ ID NO: 2656115 - RNA, 15 nt, Human
aaggucacuguuucc

SEQ ID NO: 2656116 - RNA, 18 nt, Human
aaggucacuguuuccugg

SEQ ID NO: 2656117 - RNA, 13 nt, Human
guugcuugucuuc

SEQ ID NO: 2656118 - RNA, 14 nt, Human
guugcuugucuucu

SEQ ID NO: 2656119 - RNA, 13 nt, Human
guugcgggacaga

SEQ ID NO: 2656120 - RNA, 23 nt, Human
guugccuauaagccaaaauuaag

SEQ ID NO: 2656121 - RNA, 12 nt, Human
aaggauaaagaa

SEQ ID NO: 2656122 - RNA, 13 nt, Human
aaggauaaagaag

SEQ ID NO: 2656123 - RNA, 19 nt, Human
aaggcauuauaaaaagaau

SEQ ID NO: 2656124 - RNA, 17 nt, Human
aaggcaucuaucugugc

SEQ ID NO: 2656125 - RNA, 18 nt, Human
aaggcaucuaucugugcu

SEQ ID NO: 2656126 - RNA, 11 nt, Human
aaggagagcua

SEQ ID NO: 2656127 - RNA, 20 nt, Human
aaggaagcacucuguauauu

SEQ ID NO: 2656128 - RNA, 18 nt, Human
aaggaggaagagaaaaaa

SEQ ID NO: 2656129 - RNA, 19 nt, Human
aaggaagccggggaagaga

SEQ ID NO: 2656130 - RNA, 13 nt, Human
aaggaaauuuuac

SEQ ID NO: 2656131 - RNA, 20 nt, Human
aaggaaagcaauaaaugaau

SEQ ID NO: 2656132 - RNA, 16 nt, Human
aaggaaagcaauaaau

SEQ ID NO: 2656133 - RNA, 13 nt, Human
aaggaaagcaaua

SEQ ID NO: 2656134 - RNA, 15 nt, Human
aaggaaagaaaacau

SEQ ID NO: 2656135 - RNA, 13 nt, Human
aagcuccaagccc

SEQ ID NO: 2656136 - RNA, 12 nt, Human
aaggaaagaaaa

SEQ ID NO: 2656137 - RNA, 14 nt, Human
aagucauuaaacug

SEQ ID NO: 2656138 - RNA, 13 nt, Human
aagucauuaaacu

SEQ ID NO: 2656139 - RNA, 13 nt, Human
aagucauguaugu

SEQ ID NO: 2656140 - RNA, 16 nt, Human
aagucauguauguuuc

SEQ ID NO: 2656141 - RNA, 17 nt, Human
aagucauguauguuucu

SEQ ID NO: 2656142 - RNA, 19 nt, Human
aagucauguauguuucucu

SEQ ID NO: 2656143 - RNA, 17 nt, Human
aagucauuaaacugguu

SEQ ID NO: 2656144 - RNA, 15 nt, Human
aagucauuaaagaca

SEQ ID NO: 2656145 - RNA, 16 nt, Human
aagucauuaaacuggu

SEQ ID NO: 2656146 - RNA, 15 nt, Human
aagucuuucauggcu

SEQ ID NO: 2656147 - RNA, 14 nt, Human
aagucuuuaauaaa

SEQ ID NO: 2656148 - RNA, 16 nt, Human
aagucuuuaauaaaua

SEQ ID NO: 2656149 - RNA, 18 nt, Human
aagucuuuaauaaauaac

SEQ ID NO: 2656150 - RNA, 14 nt, Human
guuuuuccuggaau

SEQ ID NO: 2656151 - RNA, 18 nt, Human
guuuuucugugugucagu

SEQ ID NO: 2656152 - RNA, 20 nt, Human
guuuuucugugugucaguuu

SEQ ID NO: 2656153 - RNA, 21 nt, Human
aagugaaaaaggaggaagaga

SEQ ID NO: 2656154 - RNA, 16 nt, Human
aagucuuuuuugauca

SEQ ID NO: 2656155 - RNA, 15 nt, Human
aagucuuuuuuuucc

SEQ ID NO: 2656156 - RNA, 14 nt, Human
aagugaaaaugguc

SEQ ID NO: 2656157 - RNA, 13 nt, Human
aaguauuuauaau

SEQ ID NO: 2656158 - RNA, 12 nt, Human
aaguauuuauaa

SEQ ID NO: 2656159 - RNA, 21 nt, Human
aaguaaugaauuuuuaugaua

SEQ ID NO: 2656160 - RNA, 20 nt, Human
guuucugcauucauuuuuau

SEQ ID NO: 2656161 - RNA, 21 nt, Human
guuucugauuugcugcucuuc

SEQ ID NO: 2656162 - RNA, 20 nt, Human
guuuuggcaaacgcuaaaga

SEQ ID NO: 2656163 - RNA, 14 nt, Human
aaguaauauuuauu

SEQ ID NO: 2656164 - RNA, 22 nt, Human
aaguaauauuuauuaaauuuuu

SEQ ID NO: 2656165 - RNA, 15 nt, Human
aaguaaucaucuaag

SEQ ID NO: 2656166 - RNA, 17 nt, Human
aaguaaucaucuaaguc

SEQ ID NO: 2656167 - RNA, 23 nt, Human
guuuuggcugaaauucuccugga

SEQ ID NO: 2656168 - RNA, 20 nt, Human
guuuuggcugaaauucuccu

SEQ ID NO: 2656169 - RNA, 22 nt, Human
guuuuggcugaaauucuccugg

SEQ ID NO: 2656170 - RNA, 23 nt, Human
uaaaacggugcugugagggaggg

SEQ ID NO: 2656171 - RNA, 15 nt, Human
uaaaagaaugacuau

SEQ ID NO: 2656172 - RNA, 17 nt, Human
uaaaacuaaauuucacu

SEQ ID NO: 2656173 - RNA, 21 nt, Human
uaaaaccgaaggugaaaaaaa

SEQ ID NO: 2656174 - RNA, 22 nt, Human
uaaaaaucuaagcagcuuauug

SEQ ID NO: 2656175 - RNA, 15 nt, Human
uaaaaaucauaguac

SEQ ID NO: 2656176 - RNA, 15 nt, Human
uaaaaaguggaaaaa

SEQ ID NO: 2656177 - RNA, 19 nt, Human
guuuuugauagcauuguaa

SEQ ID NO: 2656178 - RNA, 23 nt, Human
guuuuugaggcuuucuguugcca

SEQ ID NO: 2656179 - RNA, 19 nt, Human
uaaaaauauuguuucugca

SEQ ID NO: 2656180 - RNA, 18 nt, Human
uaaaagacaguguaugua

SEQ ID NO: 2656181 - RNA, 21 nt, Human
uaaaagacaguguauguagaa

SEQ ID NO: 2656182 - RNA, 23 nt, Human
uaaaagacaguguauguagaagc

SEQ ID NO: 2656183 - RNA, 17 nt, Human
uaaaaguugcauuuuaa

SEQ ID NO: 2656184 - RNA, 18 nt, Human
uaaaauaauuauauaacu

SEQ ID NO: 2656185 - RNA, 21 nt, Human
uaaaauaauuauauaacugua

SEQ ID NO: 2656186 - RNA, 19 nt, Human
uaaaauaauuauauaacug

SEQ ID NO: 2656187 - RNA, 20 nt, Human
uaaaauaauuauauaacugu

SEQ ID NO: 2656188 - RNA, 17 nt, Human
uaaaaguuuuauaugcu

SEQ ID NO: 2656189 - RNA, 19 nt, Human
uaaaaguuuuauaugcuuu

SEQ ID NO: 2656190 - RNA, 14 nt, Human
uaaaauaaaaugaa

SEQ ID NO: 2656191 - RNA, 15 nt, Human
uaaaauaaaaugaaa

SEQ ID NO: 2656192 - RNA, 16 nt, Human
uaaaauaaaaugaaaa

SEQ ID NO: 2656193 - RNA, 17 nt, Human
uaaaauaaaaugaaaau

SEQ ID NO: 2656194 - RNA, 19 nt, Human
uaaaauaaaaugaaaauug

SEQ ID NO: 2656195 - RNA, 20 nt, Human
uaaaauaaaaugaaaauugu

SEQ ID NO: 2656196 - RNA, 21 nt, Human
uaaaauaaaaugaaaauugua

SEQ ID NO: 2656197 - RNA, 22 nt, Human
uaaaauaaaaugaaaauuguau

SEQ ID NO: 2656198 - RNA, 19 nt, Human
uaaaauagaaauuuuguaa

SEQ ID NO: 2656199 - RNA, 22 nt, Human
uaaaauagaaauuuuguaagaa

SEQ ID NO: 2656200 - RNA, 16 nt, Human
uaaaauagaguguagu

SEQ ID NO: 2656201 - RNA, 17 nt, Human
uaaaauagaguguaguu

SEQ ID NO: 2656202 - RNA, 21 nt, Human
uaaaauagaguguaguuuaca

SEQ ID NO: 2656203 - RNA, 23 nt, Human
uaaaauagaguguaguuuacaga

SEQ ID NO: 2656204 - RNA, 19 nt, Human
aagugccucaagaggaaug

SEQ ID NO: 2656205 - RNA, 20 nt, Human
aagugccucaagaggaauga

SEQ ID NO: 2656206 - RNA, 21 nt, Human
aagugccucaagaggaaugaa

SEQ ID NO: 2656207 - RNA, 15 nt, Human
aagugcccuuccugc

SEQ ID NO: 2656208 - RNA, 21 nt, Human
aagugaggaaaucaaagugcu

SEQ ID NO: 2656209 - RNA, 18 nt, Human
aagugaggaaaucaaagu

SEQ ID NO: 2656210 - RNA, 21 nt, Human
aagugaucaaacuacauauug

SEQ ID NO: 2656211 - RNA, 15 nt, Human
uaaaauauuuaucug

SEQ ID NO: 2656212 - RNA, 23 nt, Human
uaaaauauuguugaacacuugaa

SEQ ID NO: 2656213 - RNA, 16 nt, Human
gugugguagagugugc

SEQ ID NO: 2656214 - RNA, 22 nt, Human
gugugacaauucuguuuuuaau

SEQ ID NO: 2656215 - RNA, 16 nt, Human
aagaugguauauuugg

SEQ ID NO: 2656216 - RNA, 18 nt, Human
aagaugguaucauauauu

SEQ ID NO: 2656217 - RNA, 14 nt, Human
guguauuugcuuuu

SEQ ID NO: 2656218 - RNA, 12 nt, Human
guguauuuauuu

SEQ ID NO: 2656219 - RNA, 19 nt, Human
guguauuuauuuuacagcu

SEQ ID NO: 2656220 - RNA, 16 nt, Human
gugucagcauagaagu

SEQ ID NO: 2656221 - RNA, 16 nt, Human
aagaucgaauuuuuca

SEQ ID NO: 2656222 - RNA, 19 nt, Human
aagaugaaaggcaggccua

SEQ ID NO: 2656223 - RNA, 21 nt, Human
aagaugaaaggcaggccuauu

SEQ ID NO: 2656224 - RNA, 16 nt, Human
aagaugcuucucacug

SEQ ID NO: 2656225 - RNA, 17 nt, Human
aagaugcuucucacugc

SEQ ID NO: 2656226 - RNA, 19 nt, Human
aagaugcuucucacugcca

SEQ ID NO: 2656227 - RNA, 17 nt, Human
aagaggcugccccucuc

SEQ ID NO: 2656228 - RNA, 21 nt, Human
aagaggcugccccucucacca

SEQ ID NO: 2656229 - RNA, 22 nt, Human
aagaggcugccccucucaccaa

SEQ ID NO: 2656230 - RNA, 23 nt, Human
aagaggcugccccucucaccaaa

SEQ ID NO: 2656231 - RNA, 16 nt, Human
aagaggggguggaggg

SEQ ID NO: 2656232 - RNA, 13 nt, Human
aagagggggugga

SEQ ID NO: 2656233 - RNA, 20 nt, Human
guggggguggaggcuuccug

SEQ ID NO: 2656234 - RNA, 14 nt, Human
aagacuauauauau

SEQ ID NO: 2656235 - RNA, 20 nt, Human
aagacuauauauauaaaugu

SEQ ID NO: 2656236 - RNA, 21 nt, Human
aagacuauauauauaaaugua

SEQ ID NO: 2656237 - RNA, 22 nt, Human
aagacuauauauauaaauguau

SEQ ID NO: 2656238 - RNA, 12 nt, Human
aagacuaaaagu

SEQ ID NO: 2656239 - RNA, 18 nt, Human
aagagcagugguaagaau

SEQ ID NO: 2656240 - RNA, 14 nt, Human
aagagcaucugauu

SEQ ID NO: 2656241 - RNA, 19 nt, Human
aagaggaauuacgugcucu

SEQ ID NO: 2656242 - RNA, 20 nt, Human
aagaggaaugaaaaaagcuu

SEQ ID NO: 2656243 - RNA, 13 nt, Human
guggccuguggcu

SEQ ID NO: 2656244 - RNA, 17 nt, Human
guggccuguggcugucg

SEQ ID NO: 2656245 - RNA, 18 nt, Human
guggccuguggcugucgg

SEQ ID NO: 2656246 - RNA, 21 nt, Human
gugggaagcccauccugacca

SEQ ID NO: 2656247 - RNA, 20 nt, Human
gugggaagcccauccugacc

SEQ ID NO: 2656248 - RNA, 12 nt, Human
guggggcuuggg

SEQ ID NO: 2656249 - RNA, 15 nt, Human
guggggguggaggcu

SEQ ID NO: 2656250 - RNA, 17 nt, Human
guggggccgccgccucu

SEQ ID NO: 2656251 - RNA, 17 nt, Human
guuauuaucugggcuua

SEQ ID NO: 2656252 - RNA, 22 nt, Human
guuauuaucugggcuuauaucu

SEQ ID NO: 2656253 - RNA, 22 nt, Human
guuauucaacagcaagugugaa

SEQ ID NO: 2656254 - RNA, 16 nt, Human
guuagcuccuguggcc

SEQ ID NO: 2656255 - RNA, 20 nt, Human
guuagcuccuguggccccac

SEQ ID NO: 2656256 - RNA, 17 nt, Human
guuagcugaagaauuga

SEQ ID NO: 2656257 - RNA, 14 nt, Human
guuacuucugaggu

SEQ ID NO: 2656258 - RNA, 14 nt, Human
guuacuucuucucu

SEQ ID NO: 2656259 - RNA, 15 nt, Human
guuacuucuucucuu

SEQ ID NO: 2656260 - RNA, 16 nt, Human
guuacuucuucucuua

SEQ ID NO: 2656261 - RNA, 17 nt, Human
aagcuauuuaugggccc

SEQ ID NO: 2656262 - RNA, 18 nt, Human
aagcuauuuaugggcccc

SEQ ID NO: 2656263 - RNA, 22 nt, Human
aagcuauuuaugggccccuggc

SEQ ID NO: 2656264 - RNA, 20 nt, Human
guucaagaucaaaaaggcuu

SEQ ID NO: 2656265 - RNA, 14 nt, Human
guucaagaucaaaa

SEQ ID NO: 2656266 - RNA, 22 nt, Human
aagccucaaagagagaaaguuu

SEQ ID NO: 2656267 - RNA, 20 nt, Human
aagccuagaagagcuucuga

SEQ ID NO: 2656268 - RNA, 22 nt, Human
aagccuaaucacaguuuuuccu

SEQ ID NO: 2656269 - RNA, 17 nt, Human
aagccgagagccuuuug

SEQ ID NO: 2656270 - RNA, 21 nt, Human
aagccggggaagagauccaaa

SEQ ID NO: 2656271 - RNA, 22 nt, Human
aagccggggaagagauccaaag

SEQ ID NO: 2656272 - RNA, 19 nt, Human
aagcccugagcuuucugcu

SEQ ID NO: 2656273 - RNA, 14 nt, Human
aagcccauccugac

SEQ ID NO: 2656274 - RNA, 15 nt, Human
aagcccauccugacc

SEQ ID NO: 2656275 - RNA, 16 nt, Human
aagcccauccugacca

SEQ ID NO: 2656276 - RNA, 18 nt, Human
aagcccauccugaccagc

SEQ ID NO: 2656277 - RNA, 20 nt, Human
aagcccauccugaccagcug

SEQ ID NO: 2656278 - RNA, 13 nt, Human
aagccccacaugu

SEQ ID NO: 2656279 - RNA, 16 nt, Human
aagccccacaugucca

SEQ ID NO: 2656280 - RNA, 15 nt, Human
aagccaaagaaaaau

SEQ ID NO: 2656281 - RNA, 21 nt, Human
aagccaaagaaaaauaacccu

SEQ ID NO: 2656282 - RNA, 11 nt, Human
aagccaaagaa

SEQ ID NO: 2656283 - RNA, 13 nt, Human
aagccaaagaaaa

SEQ ID NO: 2656284 - RNA, 12 nt, Human
aagccaaagaaa

SEQ ID NO: 2656285 - RNA, 22 nt, Human
aagccaaaauuaagguguuuga

SEQ ID NO: 2656286 - RNA, 20 nt, Human
aagccaaaauuaagguguuu

SEQ ID NO: 2656287 - RNA, 17 nt, Human
aagccaaaauuaaggug

SEQ ID NO: 2656288 - RNA, 14 nt, Human
aagccaaaauuaag

SEQ ID NO: 2656289 - RNA, 18 nt, Human
aagcauuuuucaauauau

SEQ ID NO: 2656290 - RNA, 19 nt, Human
aagcauuuuucaauauauu

SEQ ID NO: 2656291 - RNA, 17 nt, Human
gugugugacaauucugu

SEQ ID NO: 2656292 - RNA, 17 nt, Human
aagcaguauuuuucuug

SEQ ID NO: 2656293 - RNA, 17 nt, Human
aagcagucgugccugug

SEQ ID NO: 2656294 - RNA, 18 nt, Human
aagcaguauuuuucuuga

SEQ ID NO: 2656295 - RNA, 18 nt, Human
aagcagucgugccugugu

SEQ ID NO: 2656296 - RNA, 19 nt, Human
aagcagucgugccuguguc

SEQ ID NO: 2656297 - RNA, 14 nt, Human
aagcauacuuugua

SEQ ID NO: 2656298 - RNA, 17 nt, Human
aagcauacuuuguaaau

SEQ ID NO: 2656299 - RNA, 18 nt, Human
aagcauacuuuguaaaua

SEQ ID NO: 2656300 - RNA, 20 nt, Human
aagcauagauaauauuguuu

SEQ ID NO: 2656301 - RNA, 21 nt, Human
aagcauagauaauauuguuug

SEQ ID NO: 2656302 - RNA, 22 nt, Human
aagcauagauaauauuguuugg

SEQ ID NO: 2656303 - RNA, 17 nt, Human
aauagcaacuuuugugu

SEQ ID NO: 2656304 - RNA, 15 nt, Human
aauagcaacuuuugu

SEQ ID NO: 2656305 - RNA, 21 nt, Human
aauagauuuuauaagaugacu

SEQ ID NO: 2656306 - RNA, 19 nt, Human
aauagcaacuuuuguguaa

SEQ ID NO: 2656307 - RNA, 13 nt, Human
aauagcaacuuuu

SEQ ID NO: 2656308 - RNA, 21 nt, Human
aauagacuguaacuuccaaau

SEQ ID NO: 2656309 - RNA, 23 nt, Human
aauagaguguaguuuacagaaaa

SEQ ID NO: 2656310 - RNA, 15 nt, Human
aauaccauuuaguaa

SEQ ID NO: 2656311 - RNA, 18 nt, Human
aauaccauuuaguaagaa

SEQ ID NO: 2656312 - RNA, 17 nt, Human
aauacaugaagcuucau

SEQ ID NO: 2656313 - RNA, 19 nt, Human
aauacaugaagcuucaugc

SEQ ID NO: 2656314 - RNA, 15 nt, Human
aauacaugcauauaa

SEQ ID NO: 2656315 - RNA, 18 nt, Human
aauacaugccacaucaaa

SEQ ID NO: 2656316 - RNA, 19 nt, Human
aauaccacaucaaauaaga

SEQ ID NO: 2656317 - RNA, 21 nt, Human
aauaccacaucaaauaagaaa

SEQ ID NO: 2656318 - RNA, 16 nt, Human
aauacacuaguuguuu

SEQ ID NO: 2656319 - RNA, 17 nt, Human
aauacacuaguuguuuc

SEQ ID NO: 2656320 - RNA, 13 nt, Human
aauacagaggcaa

SEQ ID NO: 2656321 - RNA, 12 nt, Human
uaacaaauaaaa

SEQ ID NO: 2656322 - RNA, 21 nt, Human
uaacaaauaaaaaagcucuuu

SEQ ID NO: 2656323 - RNA, 17 nt, Human
uaaauuauaguguagaa

SEQ ID NO: 2656324 - RNA, 19 nt, Human
uaaauuauaguguagaaaa

SEQ ID NO: 2656325 - RNA, 13 nt, Human
uaacaaagacaaa

SEQ ID NO: 2656326 - RNA, 10 nt, Human
uaaauuauuu

SEQ ID NO: 2656327 - RNA, 13 nt, Human
uaaauuauuuaug

SEQ ID NO: 2656328 - RNA, 20 nt, Human
uaaauuauuugauuauuuaa

SEQ ID NO: 2656329 - RNA, 22 nt, Human
uaaauuauuugauuauuuaaga

SEQ ID NO: 2656330 - RNA, 23 nt, Human
uaaauuauuugauuauuuaagac

SEQ ID NO: 2656331 - RNA, 22 nt, Human
uaaauguuaauggauuucagaa

SEQ ID NO: 2656332 - RNA, 23 nt, Human
uaaauguuaauggauuucagaag

SEQ ID NO: 2656333 - RNA, 16 nt, Human
uaaauguuaccucuga

SEQ ID NO: 2656334 - RNA, 17 nt, Human
uaaauguuaccucugaa

SEQ ID NO: 2656335 - RNA, 18 nt, Human
uaaauguuaccucugaau

SEQ ID NO: 2656336 - RNA, 16 nt, Human
aagugccuuugcagcu

SEQ ID NO: 2656337 - RNA, 22 nt, Human
aagugcgggguaggggaagaag

SEQ ID NO: 2656338 - RNA, 17 nt, Human
aagugcggugcuuuagc

SEQ ID NO: 2656339 - RNA, 14 nt, Human
uaaaugaaagaaaa

SEQ ID NO: 2656340 - RNA, 22 nt, Human
uaaaugaaagaaaauugaguug

SEQ ID NO: 2656341 - RNA, 15 nt, Human
aauauauuuuuagac

SEQ ID NO: 2656342 - RNA, 18 nt, Human
aauauauuuuuagacuca

SEQ ID NO: 2656343 - RNA, 14 nt, Human
aauaucaaagucau

SEQ ID NO: 2656344 - RNA, 20 nt, Human
aauaucaaagucauuaaaga

SEQ ID NO: 2656345 - RNA, 21 nt, Human
aauaucaaagucauuaaagac

SEQ ID NO: 2656346 - RNA, 14 nt, Human
aauaucaaauuaau

SEQ ID NO: 2656347 - RNA, 13 nt, Human
aauaucaaauuaa

SEQ ID NO: 2656348 - RNA, 14 nt, Human
aauauauuuuuaga

SEQ ID NO: 2656349 - RNA, 15 nt, Human
aauauauuuucuguu

SEQ ID NO: 2656350 - RNA, 21 nt, Human
aauauauuuucuguuuucuuu

SEQ ID NO: 2656351 - RNA, 21 nt, Human
aauauauuuauaaggaaauuu

SEQ ID NO: 2656352 - RNA, 21 nt, Human
uaacaguaugugggauauuga

SEQ ID NO: 2656353 - RNA, 16 nt, Human
aauagucuuugccagu

SEQ ID NO: 2656354 - RNA, 15 nt, Human
aauagucuauauuuu

SEQ ID NO: 2656355 - RNA, 13 nt, Human
aauauauugaacu

SEQ ID NO: 2656356 - RNA, 18 nt, Human
aauauauugaacuuuugu

SEQ ID NO: 2656357 - RNA, 19 nt, Human
aauauauugaacuuuugua

SEQ ID NO: 2656358 - RNA, 20 nt, Human
aauauauugaacuuuuguac

SEQ ID NO: 2656359 - RNA, 23 nt, Human
aauauauugaacuuuuguacuga

SEQ ID NO: 2656360 - RNA, 18 nt, Human
uaagaauucaaacugggg

SEQ ID NO: 2656361 - RNA, 14 nt, Human
uaagaauucaaacu

SEQ ID NO: 2656362 - RNA, 15 nt, Human
uaagaaggcaauauu

SEQ ID NO: 2656363 - RNA, 17 nt, Human
uaagaaggcaauauuaa

SEQ ID NO: 2656364 - RNA, 20 nt, Human
uaagaaggcaauauuaaccu

SEQ ID NO: 2656365 - RNA, 22 nt, Human
uaagaauucaaacuggggccuc

SEQ ID NO: 2656366 - RNA, 15 nt, Human
uaagaauucagacau

SEQ ID NO: 2656367 - RNA, 16 nt, Human
uaagaauucagacauc

SEQ ID NO: 2656368 - RNA, 13 nt, Human
uaagaauucugau

SEQ ID NO: 2656369 - RNA, 18 nt, Human
uaagaauucugauugauu

SEQ ID NO: 2656370 - RNA, 19 nt, Human
uaagaauucugauugauuu

SEQ ID NO: 2656371 - RNA, 20 nt, Human
uaagaauucugauugauuug

SEQ ID NO: 2656372 - RNA, 12 nt, Human
uaagaauuugca

SEQ ID NO: 2656373 - RNA, 13 nt, Human
uaagaauuugcau

SEQ ID NO: 2656374 - RNA, 14 nt, Human
uaagaauuugcaua

SEQ ID NO: 2656375 - RNA, 18 nt, Human
uaagaauuugcauacuua

SEQ ID NO: 2656376 - RNA, 22 nt, Human
uaacgcguaucuaggcuuuggu

SEQ ID NO: 2656377 - RNA, 17 nt, Human
aaucuaaaucuauuuau

SEQ ID NO: 2656378 - RNA, 16 nt, Human
aaucuaaaucuauuua

SEQ ID NO: 2656379 - RNA, 19 nt, Human
aaucuaaaucuauuuauua

SEQ ID NO: 2656380 - RNA, 20 nt, Human
aauccuccaaccaggcuccu

SEQ ID NO: 2656381 - RNA, 15 nt, Human
aaucuaaaucuauuu

SEQ ID NO: 2656382 - RNA, 14 nt, Human
aaucuaaaucuauu

SEQ ID NO: 2656383 - RNA, 15 nt, Human
aaucgggguauaaua

SEQ ID NO: 2656384 - RNA, 19 nt, Human
aaucgggguauaauaggcu

SEQ ID NO: 2656385 - RNA, 17 nt, Human
aauccugauuccucucu

SEQ ID NO: 2656386 - RNA, 19 nt, Human
aauccugauuccucucuaa

SEQ ID NO: 2656387 - RNA, 21 nt, Human
aauccuggagaggguauuuuu

SEQ ID NO: 2656388 - RNA, 12 nt, Human
aauccuggcagc

SEQ ID NO: 2656389 - RNA, 13 nt, Human
aauccuggcagcc

SEQ ID NO: 2656390 - RNA, 20 nt, Human
aaucccuguguuaauuuaag

SEQ ID NO: 2656391 - RNA, 21 nt, Human
aaucuauuuauuaauauuuaa

SEQ ID NO: 2656392 - RNA, 20 nt, Human
aaucuauuuauuaauauuua

SEQ ID NO: 2656393 - RNA, 18 nt, Human
aaucuauuuauuaauauu

SEQ ID NO: 2656394 - RNA, 17 nt, Human
aaucuauuuauuaauau

SEQ ID NO: 2656395 - RNA, 16 nt, Human
aaucuauuuauuaaua

SEQ ID NO: 2656396 - RNA, 21 nt, Human
aaucuauggucgggagacagc

SEQ ID NO: 2656397 - RNA, 19 nt, Human
aaucccuguguuaauuuaa

SEQ ID NO: 2656398 - RNA, 18 nt, Human
aaucccuguguuaauuua

SEQ ID NO: 2656399 - RNA, 22 nt, Human
aaucccugcuuuuuguguuuuu

SEQ ID NO: 2656400 - RNA, 13 nt, Human
aaucccugcuuuu

SEQ ID NO: 2656401 - RNA, 14 nt, Human
aaucccugcuuuuu

SEQ ID NO: 2656402 - RNA, 14 nt, Human
aauccccuaaaaua

SEQ ID NO: 2656403 - RNA, 17 nt, Human
aauccccuaaaauaaca

SEQ ID NO: 2656404 - RNA, 20 nt, Human
aaucccagcacuuugggagg

SEQ ID NO: 2656405 - RNA, 17 nt, Human
aaucccauuuaaaaaaa

SEQ ID NO: 2656406 - RNA, 21 nt, Human
uaauaaaaaggaguauacaaa

SEQ ID NO: 2656407 - RNA, 23 nt, Human
uaauaaaaaggaguauacaaaca

SEQ ID NO: 2656408 - RNA, 14 nt, Human
uaaguauuuauaau

SEQ ID NO: 2656409 - RNA, 20 nt, Human
uaagugugugguagaaacaa

SEQ ID NO: 2656410 - RNA, 21 nt, Human
uaagugugugguagaaacaaa

SEQ ID NO: 2656411 - RNA, 13 nt, Human
uaaguuaucuuug

SEQ ID NO: 2656412 - RNA, 16 nt, Human
uaauaaaaaaagaaag

SEQ ID NO: 2656413 - RNA, 17 nt, Human
uaauaaaaaaagaaagc

SEQ ID NO: 2656414 - RNA, 19 nt, Human
uaauaaaaaaagaaagcau

SEQ ID NO: 2656415 - RNA, 17 nt, Human
uaagcagcuuauuguuu

SEQ ID NO: 2656416 - RNA, 22 nt, Human
aaucagucauguguaauaugca

SEQ ID NO: 2656417 - RNA, 17 nt, Human
uaagcauacuuuguaaa

SEQ ID NO: 2656418 - RNA, 18 nt, Human
uaagcauacuuuguaaau

SEQ ID NO: 2656419 - RNA, 19 nt, Human
uaagcauacuuuguaaaua

SEQ ID NO: 2656420 - RNA, 17 nt, Human
uaagauuaagagcaaau

SEQ ID NO: 2656421 - RNA, 13 nt, Human
uaaggaagacaau

SEQ ID NO: 2656422 - RNA, 21 nt, Human
uaaggaaagcaauaaaugaau

SEQ ID NO: 2656423 - RNA, 18 nt, Human
uaaggaaagcaauaaaug

SEQ ID NO: 2656424 - RNA, 16 nt, Human
uaaggaaagcaauaaa

SEQ ID NO: 2656425 - RNA, 15 nt, Human
uaaggacaaagugcc

SEQ ID NO: 2656426 - RNA, 16 nt, Human
uaaggacaaagugcca

SEQ ID NO: 2656427 - RNA, 20 nt, Human
uaaggacaaagugccaaaga

SEQ ID NO: 2656428 - RNA, 21 nt, Human
uaaggacaaagugccaaagaa

SEQ ID NO: 2656429 - RNA, 23 nt, Human
uaaggacaaagugccaaagaaag

SEQ ID NO: 2656430 - RNA, 16 nt, Human
uaaggaccuuaagaca

SEQ ID NO: 2656431 - RNA, 14 nt, Human
uaaggacugacuga

SEQ ID NO: 2656432 - RNA, 19 nt, Human
uaaggacugacugaggcag

SEQ ID NO: 2656433 - RNA, 18 nt, Human
uaaggacugacugaggca

SEQ ID NO: 2656434 - RNA, 11 nt, Human
aaucagccugc

SEQ ID NO: 2656435 - RNA, 18 nt, Human
aaucacuguguauauuug

SEQ ID NO: 2656436 - RNA, 17 nt, Human
aaucacuguguauauuu

SEQ ID NO: 2656437 - RNA, 16 nt, Human
aaucacuguguauauu

SEQ ID NO: 2656438 - RNA, 15 nt, Human
aaucacuguguauau

SEQ ID NO: 2656439 - RNA, 14 nt, Human
aaucagcauuuagu

SEQ ID NO: 2656440 - RNA, 15 nt, Human
aaucagccaaguuuu

SEQ ID NO: 2656441 - RNA, 17 nt, Human
aaucagccaaguuuuau

SEQ ID NO: 2656442 - RNA, 18 nt, Human
aaucagccaaguuuuaua

SEQ ID NO: 2656443 - RNA, 10 nt, Human
aaucacugug

SEQ ID NO: 2656444 - RNA, 14 nt, Human
aaucacuguguaua

SEQ ID NO: 2656445 - RNA, 13 nt, Human
aaucacuguguau

SEQ ID NO: 2656446 - RNA, 18 nt, Human
aaucagccugcuccagcu

SEQ ID NO: 2656447 - RNA, 13 nt, Human
aaucagccugcuc

SEQ ID NO: 2656448 - RNA, 19 nt, Human
aaucagccugcuccagcug

SEQ ID NO: 2656449 - RNA, 19 nt, Human
aaucacuguguauauuuga

SEQ ID NO: 2656450 - RNA, 20 nt, Human
aaucaggaauauuuuccaaa

SEQ ID NO: 2656451 - RNA, 18 nt, Human
aaucaggaauauuuucca

SEQ ID NO: 2656452 - RNA, 13 nt, Human
aauauuuucuauu

SEQ ID NO: 2656453 - RNA, 16 nt, Human
aauauuuucuauuuua

SEQ ID NO: 2656454 - RNA, 19 nt, Human
aauauuuucucuguacuuu

SEQ ID NO: 2656455 - RNA, 22 nt, Human
aauauuuucucuguacuuuuca

SEQ ID NO: 2656456 - RNA, 23 nt, Human
aauauuuucucuguacuuuucau

SEQ ID NO: 2656457 - RNA, 16 nt, Human
aauauuuauuaaauuu

SEQ ID NO: 2656458 - RNA, 20 nt, Human
aauauuuugaaucaauaaua

SEQ ID NO: 2656459 - RNA, 13 nt, Human
aauauuuugaauc

SEQ ID NO: 2656460 - RNA, 14 nt, Human
aauauuuugaauca

SEQ ID NO: 2656461 - RNA, 15 nt, Human
aauauuuugaaucaa

SEQ ID NO: 2656462 - RNA, 16 nt, Human
aauauuuugaaucaau

SEQ ID NO: 2656463 - RNA, 18 nt, Human
aauauuuugaaucaauaa

SEQ ID NO: 2656464 - RNA, 22 nt, Human
aauauuuugaaucaauaauaua

SEQ ID NO: 2656465 - RNA, 18 nt, Human
uaagacuauauauauaaa

SEQ ID NO: 2656466 - RNA, 19 nt, Human
uaagacuauauauauaaau

SEQ ID NO: 2656467 - RNA, 20 nt, Human
uaagacuauauauauaaaug

SEQ ID NO: 2656468 - RNA, 23 nt, Human
uaagacuauauauauaaauguau

SEQ ID NO: 2656469 - RNA, 15 nt, Human
uaagacuguguauuc

SEQ ID NO: 2656470 - RNA, 17 nt, Human
uaagacuguagauaugu

SEQ ID NO: 2656471 - RNA, 15 nt, Human
aauauuuauuaaauu

SEQ ID NO: 2656472 - RNA, 12 nt, Human
aauauuuauuaa

SEQ ID NO: 2656473 - RNA, 21 nt, Human
uacaaugaacacuuauaagug

SEQ ID NO: 2656474 - RNA, 17 nt, Human
uaauuuuuguauuauuu

SEQ ID NO: 2656475 - RNA, 21 nt, Human
uaauuuuuguauuauuuuugu

SEQ ID NO: 2656476 - RNA, 13 nt, Human
uaauuuuuuuuaa

SEQ ID NO: 2656477 - RNA, 17 nt, Human
uaauuuuuuuuaaaaua

SEQ ID NO: 2656478 - RNA, 20 nt, Human
uaauuuuuuuuaaaauagaa

SEQ ID NO: 2656479 - RNA, 16 nt, Human
uaauuuuuuuuaguau

SEQ ID NO: 2656480 - RNA, 18 nt, Human
aaugcugggacucagccu

SEQ ID NO: 2656481 - RNA, 14 nt, Human
aaugcauauuugca

SEQ ID NO: 2656482 - RNA, 17 nt, Human
aaugcauauuugcaaag

SEQ ID NO: 2656483 - RNA, 18 nt, Human
aaugcauauuugcaaagu

SEQ ID NO: 2656484 - RNA, 23 nt, Human
aaugcauauuugcaaaguguauu

SEQ ID NO: 2656485 - RNA, 14 nt, Human
aaugcaucuuugau

SEQ ID NO: 2656486 - RNA, 20 nt, Human
aaugcaucuuugauguguug

SEQ ID NO: 2656487 - RNA, 19 nt, Human
aaugcaucuuugauguguu

SEQ ID NO: 2656488 - RNA, 18 nt, Human
aaugcaucuuugaugugu

SEQ ID NO: 2656489 - RNA, 15 nt, Human
aaugcaucuuugaug

SEQ ID NO: 2656490 - RNA, 15 nt, Human
aauguaagugggccc

SEQ ID NO: 2656491 - RNA, 13 nt, Human
aauguaauuuaaa

SEQ ID NO: 2656492 - RNA, 16 nt, Human
aauguaauuuaaauga

SEQ ID NO: 2656493 - RNA, 17 nt, Human
aauguaauuuaaaugaa

SEQ ID NO: 2656494 - RNA, 21 nt, Human
uaauuccuauauccugugacu

SEQ ID NO: 2656495 - RNA, 12 nt, Human
uaauuuaaauga

SEQ ID NO: 2656496 - RNA, 13 nt, Human
uaauuuaaaugaa

SEQ ID NO: 2656497 - RNA, 16 nt, Human
uaauuuaaaugaaaga

SEQ ID NO: 2656498 - RNA, 17 nt, Human
uaauuauuauuuccagu

SEQ ID NO: 2656499 - RNA, 16 nt, Human
uaauuuacuuguuuug

SEQ ID NO: 2656500 - RNA, 20 nt, Human
uaauuuacuuguuuuggaug

SEQ ID NO: 2656501 - RNA, 17 nt, Human
aaugcaaaaacucuuug

SEQ ID NO: 2656502 - RNA, 22 nt, Human
aaugcacuuucuauccucugua

SEQ ID NO: 2656503 - RNA, 11 nt, Human
aaugcacuuuc

SEQ ID NO: 2656504 - RNA, 13 nt, Human
aaugcacuuucua

SEQ ID NO: 2656505 - RNA, 15 nt, Human
aaugcacuuucuauc

SEQ ID NO: 2656506 - RNA, 14 nt, Human
aaugacguuuacau

SEQ ID NO: 2656507 - RNA, 12 nt, Human
aaugagagcaua

SEQ ID NO: 2656508 - RNA, 11 nt, Human
aaugagccugg

SEQ ID NO: 2656509 - RNA, 15 nt, Human
aaugacuauauaauu

SEQ ID NO: 2656510 - RNA, 21 nt, Human
aaugacuauauaauuuauuuc

SEQ ID NO: 2656511 - RNA, 23 nt, Human
aaugacuauauaauuuauuucca

SEQ ID NO: 2656512 - RNA, 15 nt, Human
aaugacucaaagucu

SEQ ID NO: 2656513 - RNA, 16 nt, Human
aaugacucaaagucug

SEQ ID NO: 2656514 - RNA, 11 nt, Human
aaugacuuuau

SEQ ID NO: 2656515 - RNA, 17 nt, Human
aaugacuuuauuauuua

SEQ ID NO: 2656516 - RNA, 15 nt, Human
aaugacuuuauuauu

SEQ ID NO: 2656517 - RNA, 14 nt, Human
aaugacuuuauuau

SEQ ID NO: 2656518 - RNA, 13 nt, Human
aaugacuuuauua

SEQ ID NO: 2656519 - RNA, 19 nt, Human
aaugagucuguuguguguc

SEQ ID NO: 2656520 - RNA, 23 nt, Human
aaugaggugggagguggaagaag

SEQ ID NO: 2656521 - RNA, 14 nt, Human
aaugagucuguugu

SEQ ID NO: 2656522 - RNA, 13 nt, Human
aaugagccuggca

SEQ ID NO: 2656523 - RNA, 12 nt, Human
aaugagccuggc

SEQ ID NO: 2656524 - RNA, 14 nt, Human
aaugagccuggcaa

SEQ ID NO: 2656525 - RNA, 14 nt, Human
aauguuguaguguc

SEQ ID NO: 2656526 - RNA, 22 nt, Human
aauguugggacugcuaaauaaa

SEQ ID NO: 2656527 - RNA, 21 nt, Human
aauguuccucaaagcuuggau

SEQ ID NO: 2656528 - RNA, 22 nt, Human
aauguuccucaaagcuuggauu

SEQ ID NO: 2656529 - RNA, 13 nt, Human
aauguugggacug

SEQ ID NO: 2656530 - RNA, 21 nt, Human
aauguugggacugcuaaauaa

SEQ ID NO: 2656531 - RNA, 18 nt, Human
aauguucacaauauauuu

SEQ ID NO: 2656532 - RNA, 12 nt, Human
aauguuagagua

SEQ ID NO: 2656533 - RNA, 20 nt, Human
aauguuagaguaaugaaaug

SEQ ID NO: 2656534 - RNA, 15 nt, Human
aauguuaccucugaa

SEQ ID NO: 2656535 - RNA, 16 nt, Human
aauguuaccucugaau

SEQ ID NO: 2656536 - RNA, 17 nt, Human
uacccccuccuucagac

SEQ ID NO: 2656537 - RNA, 16 nt, Human
uacccccuccuucaga

SEQ ID NO: 2656538 - RNA, 13 nt, Human
uacccccuccuuc

SEQ ID NO: 2656539 - RNA, 13 nt, Human
uaccagcugcgcu

SEQ ID NO: 2656540 - RNA, 14 nt, Human
uaccagcugcgcuu

SEQ ID NO: 2656541 - RNA, 21 nt, Human
uaccagcugcgcuugcuuuuc

SEQ ID NO: 2656542 - RNA, 22 nt, Human
uaccagcugcgcuugcuuuucu

SEQ ID NO: 2656543 - RNA, 13 nt, Human
uacauucaaauuu

SEQ ID NO: 2656544 - RNA, 14 nt, Human
uacauucaaauuug

SEQ ID NO: 2656545 - RNA, 15 nt, Human
uacauucaaauuugu

SEQ ID NO: 2656546 - RNA, 17 nt, Human
uacauucaaauuugucu

SEQ ID NO: 2656547 - RNA, 18 nt, Human
uacauucaaauuugucug

SEQ ID NO: 2656548 - RNA, 21 nt, Human
uacauucaaauuugucugguu

SEQ ID NO: 2656549 - RNA, 14 nt, Human
uacauuuauuuauc

SEQ ID NO: 2656550 - RNA, 17 nt, Human
uacauuuauuuauccag

SEQ ID NO: 2656551 - RNA, 20 nt, Human
uacauuuauuuauccagaaa

SEQ ID NO: 2656552 - RNA, 23 nt, Human
uacauuuauuuauccagaaaacu

SEQ ID NO: 2656553 - RNA, 19 nt, Human
uacauuugaugcaugucuu

SEQ ID NO: 2656554 - RNA, 19 nt, Human
uaccagagguugugcacug

SEQ ID NO: 2656555 - RNA, 16 nt, Human
aauuauuuaauugucc

SEQ ID NO: 2656556 - RNA, 14 nt, Human
aauuauuugauuau

SEQ ID NO: 2656557 - RNA, 20 nt, Human
aauuauuugauuauuuaaga

SEQ ID NO: 2656558 - RNA, 14 nt, Human
aauucaacuuugua

SEQ ID NO: 2656559 - RNA, 15 nt, Human
aauucaacuuuguaa

SEQ ID NO: 2656560 - RNA, 16 nt, Human
aauucaacuuuguaaa

SEQ ID NO: 2656561 - RNA, 22 nt, Human
aauucaacuuuguaaaaaucuu

SEQ ID NO: 2656562 - RNA, 16 nt, Human
aauucagacaucugag

SEQ ID NO: 2656563 - RNA, 21 nt, Human
aauucagacaucugagguuuu

SEQ ID NO: 2656564 - RNA, 22 nt, Human
aauucagacaucugagguuuua

SEQ ID NO: 2656565 - RNA, 16 nt, Human
aauucaucugucuaua

SEQ ID NO: 2656566 - RNA, 18 nt, Human
aauucauaguaagauuga

SEQ ID NO: 2656567 - RNA, 19 nt, Human
aauuacaguccaaaauacu

SEQ ID NO: 2656568 - RNA, 21 nt, Human
uaccugauuucuucagggcug

SEQ ID NO: 2656569 - RNA, 18 nt, Human
uacccggggcccagggca

SEQ ID NO: 2656570 - RNA, 18 nt, Human
uacccccuccuucagaca

SEQ ID NO: 2656571 - RNA, 18 nt, Human
uauaagugaagugauacu

SEQ ID NO: 2656572 - RNA, 21 nt, Human
uauaauuguucucagaauccc

SEQ ID NO: 2656573 - RNA, 15 nt, Human
uauacaugugauaca

SEQ ID NO: 2656574 - RNA, 18 nt, Human
uauacaugugauacauuu

SEQ ID NO: 2656575 - RNA, 20 nt, Human
uauacaugugauacauuuuu

SEQ ID NO: 2656576 - RNA, 21 nt, Human
uauacaugaagaauagaaaca

SEQ ID NO: 2656577 - RNA, 22 nt, Human
uauacaugaagaauagaaacaa

SEQ ID NO: 2656578 - RNA, 19 nt, Human
uauacauauauauauauaa

SEQ ID NO: 2656579 - RNA, 15 nt, Human
uauaagugaagugau

SEQ ID NO: 2656580 - RNA, 14 nt, Human
uauaagugaaguga

SEQ ID NO: 2656581 - RNA, 13 nt, Human
uauaacuguauuu

SEQ ID NO: 2656582 - RNA, 23 nt, Human
uauaacuguauuugaaauaagaa

SEQ ID NO: 2656583 - RNA, 21 nt, Human
acacucaaaagcugggcaggu

SEQ ID NO: 2656584 - RNA, 18 nt, Human
uagucaccagagacuuua

SEQ ID NO: 2656585 - RNA, 15 nt, Human
uagucaccagagacu

SEQ ID NO: 2656586 - RNA, 13 nt, Human
uauaggcuauuuu

SEQ ID NO: 2656587 - RNA, 17 nt, Human
uauaggcuauuuucuaa

SEQ ID NO: 2656588 - RNA, 21 nt, Human
uauaggcuauuuucuaaagac

SEQ ID NO: 2656589 - RNA, 15 nt, Human
uauagcuugcagaac

SEQ ID NO: 2656590 - RNA, 19 nt, Human
uauaggaacauaugaaaau

SEQ ID NO: 2656591 - RNA, 21 nt, Human
uauagcugagacuacaagugu

SEQ ID NO: 2656592 - RNA, 18 nt, Human
uauagcaucacuuaaaac

SEQ ID NO: 2656593 - RNA, 17 nt, Human
uauagcaucacuuaaaa

SEQ ID NO: 2656594 - RNA, 16 nt, Human
uauagcaucacuuaaa

SEQ ID NO: 2656595 - RNA, 15 nt, Human
uauagcaucacuuaa

SEQ ID NO: 2656596 - RNA, 16 nt, Human
uauagcaugaaauaaa

SEQ ID NO: 2656597 - RNA, 20 nt, Human
uauagcaugaaauaaaauau

SEQ ID NO: 2656598 - RNA, 14 nt, Human
uauagcaucacuua

SEQ ID NO: 2656599 - RNA, 16 nt, Human
uauauauuuuguguga

SEQ ID NO: 2656600 - RNA, 18 nt, Human
uauauauuuugugugaaa

SEQ ID NO: 2656601 - RNA, 23 nt, Human
uauauauuuugugugaaauugca

SEQ ID NO: 2656602 - RNA, 13 nt, Human
uauauauuucuau

SEQ ID NO: 2656603 - RNA, 17 nt, Human
uauauauuucuauuauu

SEQ ID NO: 2656604 - RNA, 17 nt, Human
uauaucuauauauauaa

SEQ ID NO: 2656605 - RNA, 23 nt, Human
uauauauguguaugcacaguaaa

SEQ ID NO: 2656606 - RNA, 21 nt, Human
uauauauguguaugcacagua

SEQ ID NO: 2656607 - RNA, 21 nt, Human
uauauagcaucuggaagauca

SEQ ID NO: 2656608 - RNA, 14 nt, Human
uauauaggcuauuu

SEQ ID NO: 2656609 - RNA, 18 nt, Human
uauauaggcuauuuucua

SEQ ID NO: 2656610 - RNA, 23 nt, Human
uauauaggcuauuuucuaaagac

SEQ ID NO: 2656611 - RNA, 14 nt, Human
acacuuauaaguga

SEQ ID NO: 2656612 - RNA, 13 nt, Human
acagaaaugagga

SEQ ID NO: 2656613 - RNA, 17 nt, Human
acagaaauggaaagcag

SEQ ID NO: 2656614 - RNA, 15 nt, Human
acagaaauggacugg

SEQ ID NO: 2656615 - RNA, 15 nt, Human
acagaaaaagacuuu

SEQ ID NO: 2656616 - RNA, 23 nt, Human
acacuugauggagugugagccac

SEQ ID NO: 2656617 - RNA, 13 nt, Human
acacuugaaaccu

SEQ ID NO: 2656618 - RNA, 14 nt, Human
acacuugaaaccuu

SEQ ID NO: 2656619 - RNA, 19 nt, Human
acacuucuuacgcaaugcu

SEQ ID NO: 2656620 - RNA, 20 nt, Human
acacuucuuacgcaaugcuu

SEQ ID NO: 2656621 - RNA, 12 nt, Human
uaucaaagucau

SEQ ID NO: 2656622 - RNA, 18 nt, Human
uaucaaagucauuaaaga

SEQ ID NO: 2656623 - RNA, 20 nt, Human
uaucaaagucauuaaagaca

SEQ ID NO: 2656624 - RNA, 14 nt, Human
uaucaaauuaauug

SEQ ID NO: 2656625 - RNA, 16 nt, Human
uaucaaauuaauugug

SEQ ID NO: 2656626 - RNA, 15 nt, Human
uaucaaauuaauugu

SEQ ID NO: 2656627 - RNA, 17 nt, Human
uaucaaauuaauugugu

SEQ ID NO: 2656628 - RNA, 12 nt, Human
uaucuauaaaau

SEQ ID NO: 2656629 - RNA, 13 nt, Human
uaucuauaaaaua

SEQ ID NO: 2656630 - RNA, 18 nt, Human
uaucuauaaaauagauau

SEQ ID NO: 2656631 - RNA, 22 nt, Human
uaucuauaaaauagauauaaau

SEQ ID NO: 2656632 - RNA, 18 nt, Human
uaucccaagaaugcaaga

SEQ ID NO: 2656633 - RNA, 13 nt, Human
uauccccaucucc

SEQ ID NO: 2656634 - RNA, 17 nt, Human
uauccccaucucccugc

SEQ ID NO: 2656635 - RNA, 20 nt, Human
uauccccaucucccugccug

SEQ ID NO: 2656636 - RNA, 21 nt, Human
uauccccaucucccugccugg

SEQ ID NO: 2656637 - RNA, 22 nt, Human
uauccccaucucccugccuggc

SEQ ID NO: 2656638 - RNA, 16 nt, Human
uaucccacauccaacu

SEQ ID NO: 2656639 - RNA, 15 nt, Human
uauccccccaucuug

SEQ ID NO: 2656640 - RNA, 17 nt, Human
uauccccccaucuugcu

SEQ ID NO: 2656641 - RNA, 19 nt, Human
uauccccccaucuugcuuc

SEQ ID NO: 2656642 - RNA, 20 nt, Human
uauccccccaucuugcuucc

SEQ ID NO: 2656643 - RNA, 16 nt, Human
uauccacaugaaaaua

SEQ ID NO: 2656644 - RNA, 18 nt, Human
uauccacaugaaaauaaa

SEQ ID NO: 2656645 - RNA, 13 nt, Human
uaugugauuacaa

SEQ ID NO: 2656646 - RNA, 23 nt, Human
acaggccucuccauuugcucuuc

SEQ ID NO: 2656647 - RNA, 22 nt, Human
acagcuugagccgggccccugg

SEQ ID NO: 2656648 - RNA, 23 nt, Human
acagcuugaccugaggcuguggu

SEQ ID NO: 2656649 - RNA, 16 nt, Human
acagcuugagccgggc

SEQ ID NO: 2656650 - RNA, 21 nt, Human
acagcuugagccgggccccug

SEQ ID NO: 2656651 - RNA, 15 nt, Human
acaggagacaaaaga

SEQ ID NO: 2656652 - RNA, 18 nt, Human
acaggagacaaaagagca

SEQ ID NO: 2656653 - RNA, 14 nt, Human
acaggagaccuggc

SEQ ID NO: 2656654 - RNA, 15 nt, Human
acagcuugaccugag

SEQ ID NO: 2656655 - RNA, 17 nt, Human
acagcuugaccugaggc

SEQ ID NO: 2656656 - RNA, 19 nt, Human
acagcuugaccugaggcug

SEQ ID NO: 2656657 - RNA, 21 nt, Human
acagcuugaccugaggcugug

SEQ ID NO: 2656658 - RNA, 22 nt, Human
acagcuugaccugaggcugugg

SEQ ID NO: 2656659 - RNA, 21 nt, Human
acagcuaauucuacucacagu

SEQ ID NO: 2656660 - RNA, 14 nt, Human
acagcuaugcaaaa

SEQ ID NO: 2656661 - RNA, 21 nt, Human
acagcuaugcaaaaagcuagu

SEQ ID NO: 2656662 - RNA, 17 nt, Human
uaugguauauauacaua

SEQ ID NO: 2656663 - RNA, 15 nt, Human
acagcggaggugugg

SEQ ID NO: 2656664 - RNA, 18 nt, Human
acagcgagggcagcugcu

SEQ ID NO: 2656665 - RNA, 19 nt, Human
acagcgagggcagcugcua

SEQ ID NO: 2656666 - RNA, 23 nt, Human
acagcgagggcagcugcuauuua

SEQ ID NO: 2656667 - RNA, 15 nt, Human
acagcgccagccuca

SEQ ID NO: 2656668 - RNA, 18 nt, Human
acagcgccagccucagac

SEQ ID NO: 2656669 - RNA, 14 nt, Human
acagcgagggcagc

SEQ ID NO: 2656670 - RNA, 15 nt, Human
acagcgagggcagcu

SEQ ID NO: 2656671 - RNA, 16 nt, Human
acagcgagggcagcug

SEQ ID NO: 2656672 - RNA, 17 nt, Human
acagcgagggcagcugc

SEQ ID NO: 2656673 - RNA, 16 nt, Human
acagcggaggugugga

SEQ ID NO: 2656674 - RNA, 14 nt, Human
uaugccacuuccuu

SEQ ID NO: 2656675 - RNA, 15 nt, Human
uaugccacuuccuuu

SEQ ID NO: 2656676 - RNA, 20 nt, Human
uaugccacuuccuuuuaacu

SEQ ID NO: 2656677 - RNA, 18 nt, Human
uaugcucucacuguuugu

SEQ ID NO: 2656678 - RNA, 13 nt, Human
uaugcuauuucug

SEQ ID NO: 2656679 - RNA, 14 nt, Human
uaugcuauuucugu

SEQ ID NO: 2656680 - RNA, 19 nt, Human
uaugaaaaauuggggagga

SEQ ID NO: 2656681 - RNA, 18 nt, Human
uaugaaaacauggaacag

SEQ ID NO: 2656682 - RNA, 13 nt, Human
uaugaaaacaugg

SEQ ID NO: 2656683 - RNA, 21 nt, Human
uaugaaaacauggaacagugu

SEQ ID NO: 2656684 - RNA, 20 nt, Human
uaugaaaacauggaacagug

SEQ ID NO: 2656685 - RNA, 14 nt, Human
uaugaaaauggaaa

SEQ ID NO: 2656686 - RNA, 15 nt, Human
acagcaagugugaau

SEQ ID NO: 2656687 - RNA, 16 nt, Human
acagcaagugugaaua

SEQ ID NO: 2656688 - RNA, 14 nt, Human
uacuuuguaaauuc

SEQ ID NO: 2656689 - RNA, 13 nt, Human
uacuuuguaaaua

SEQ ID NO: 2656690 - RNA, 23 nt, Human
uacuuuguaaauaggauuuuuag

SEQ ID NO: 2656691 - RNA, 12 nt, Human
uacuuuguauug

SEQ ID NO: 2656692 - RNA, 22 nt, Human
uacuuuguaaauucugauuucu

SEQ ID NO: 2656693 - RNA, 19 nt, Human
uacuuuguaaauucugauu

SEQ ID NO: 2656694 - RNA, 18 nt, Human
uacuuuguaaauucugau

SEQ ID NO: 2656695 - RNA, 17 nt, Human
uacuuuguaaauucuga

SEQ ID NO: 2656696 - RNA, 23 nt, Human
uacuuuuauuuuacacagaaaca

SEQ ID NO: 2656697 - RNA, 16 nt, Human
uacuuuucauucucuu

SEQ ID NO: 2656698 - RNA, 16 nt, Human
uacuuuguauuguccu

SEQ ID NO: 2656699 - RNA, 14 nt, Human
uacuuuguauuguc

SEQ ID NO: 2656700 - RNA, 18 nt, Human
uacuuuguauuguccuau

SEQ ID NO: 2656701 - RNA, 19 nt, Human
uacuuuuuaguaauuucuu

SEQ ID NO: 2656702 - RNA, 17 nt, Human
uacuuuugcaugaaaau

SEQ ID NO: 2656703 - RNA, 15 nt, Human
uagaaaaauaaaaau

SEQ ID NO: 2656704 - RNA, 15 nt, Human
uagaaaaaaaauuau

SEQ ID NO: 2656705 - RNA, 17 nt, Human
uagaaacaaacaucuaa

SEQ ID NO: 2656706 - RNA, 16 nt, Human
uagaaaagaacuggaa

SEQ ID NO: 2656707 - RNA, 18 nt, Human
uagaaaagaacuggaaac

SEQ ID NO: 2656708 - RNA, 12 nt, Human
uagaaaauguga

SEQ ID NO: 2656709 - RNA, 18 nt, Human
uagaaaaugugacccucc

SEQ ID NO: 2656710 - RNA, 20 nt, Human
uagaaaaugugacccuccaa

SEQ ID NO: 2656711 - RNA, 21 nt, Human
uagaaaaugugacccuccaaa

SEQ ID NO: 2656712 - RNA, 16 nt, Human
uagaacuuuguauagu

SEQ ID NO: 2656713 - RNA, 18 nt, Human
uagaagacaaaauguuca

SEQ ID NO: 2656714 - RNA, 14 nt, Human
uagaacuuuguaua

SEQ ID NO: 2656715 - RNA, 13 nt, Human
uagaacuuuguau

SEQ ID NO: 2656716 - RNA, 12 nt, Human
uagaacuuugua

SEQ ID NO: 2656717 - RNA, 19 nt, Human
uagaacuuuaagcaacaag

SEQ ID NO: 2656718 - RNA, 11 nt, Human
uagacaugaaa

SEQ ID NO: 2656719 - RNA, 12 nt, Human
uagacaugaaag

SEQ ID NO: 2656720 - RNA, 13 nt, Human
uagacaucaaacu

SEQ ID NO: 2656721 - RNA, 14 nt, Human
uagacaucaaacuc

SEQ ID NO: 2656722 - RNA, 22 nt, Human
uagacaucaaacucaaugcuuu

SEQ ID NO: 2656723 - RNA, 23 nt, Human
uagacaucaaacucaaugcuuua

SEQ ID NO: 2656724 - RNA, 23 nt, Human
aauuuuacaagggcauaaaguaa

SEQ ID NO: 2656725 - RNA, 15 nt, Human
acaaaaagcuucccc

SEQ ID NO: 2656726 - RNA, 14 nt, Human
acaaaaagcuuccc

SEQ ID NO: 2656727 - RNA, 14 nt, Human
acaaaaaauguuuu

SEQ ID NO: 2656728 - RNA, 20 nt, Human
aauuuuacauguuuauaaau

SEQ ID NO: 2656729 - RNA, 15 nt, Human
acaaaagucugucuu

SEQ ID NO: 2656730 - RNA, 21 nt, Human
acaaaagucugucuuuccuga

SEQ ID NO: 2656731 - RNA, 16 nt, Human
acaaaauaaaauaaua

SEQ ID NO: 2656732 - RNA, 16 nt, Human
acaaaauauuucccau

SEQ ID NO: 2656733 - RNA, 14 nt, Human
acaaauaauuuaga

SEQ ID NO: 2656734 - RNA, 13 nt, Human
acaaauaauuuag

SEQ ID NO: 2656735 - RNA, 22 nt, Human
uagaggcuucuccgccagccuc

SEQ ID NO: 2656736 - RNA, 21 nt, Human
uagagggacggccaagaaugu

SEQ ID NO: 2656737 - RNA, 22 nt, Human
uagagggacggccaagaaugua

SEQ ID NO: 2656738 - RNA, 23 nt, Human
uagagggacggccaagaauguac

SEQ ID NO: 2656739 - RNA, 13 nt, Human
uagaggcuagcuu

SEQ ID NO: 2656740 - RNA, 14 nt, Human
uagaggcuucuccg

SEQ ID NO: 2656741 - RNA, 18 nt, Human
uagaggcuucuccgccag

SEQ ID NO: 2656742 - RNA, 19 nt, Human
uagaggcuucuccgccagc

SEQ ID NO: 2656743 - RNA, 20 nt, Human
uagaggcuucuccgccagcc

SEQ ID NO: 2656744 - RNA, 21 nt, Human
uagaggcuucuccgccagccu

SEQ ID NO: 2656745 - RNA, 23 nt, Human
uagaggcuucuccgccagccucc

SEQ ID NO: 2656746 - RNA, 15 nt, Human
uagcaaaauaaaaca

SEQ ID NO: 2656747 - RNA, 16 nt, Human
uagcaaaauaaaacau

SEQ ID NO: 2656748 - RNA, 17 nt, Human
uagcaaaauaaaacaua

SEQ ID NO: 2656749 - RNA, 19 nt, Human
uagcaaaauaaaacauagc

SEQ ID NO: 2656750 - RNA, 21 nt, Human
uagcaaaauaaaacauagcaa

SEQ ID NO: 2656751 - RNA, 23 nt, Human
uagcaaaauaaaacauagcaaau

SEQ ID NO: 2656752 - RNA, 14 nt, Human
uagcaaucucuuca

SEQ ID NO: 2656753 - RNA, 18 nt, Human
uagcaaguuacagugaug

SEQ ID NO: 2656754 - RNA, 21 nt, Human
uagcaaaauucuuaaguaugu

SEQ ID NO: 2656755 - RNA, 23 nt, Human
uagccaaaaugugagugguugaa

SEQ ID NO: 2656756 - RNA, 16 nt, Human
uagccaaaaugugagu

SEQ ID NO: 2656757 - RNA, 15 nt, Human
uagccaaaaugugag

SEQ ID NO: 2656758 - RNA, 15 nt, Human
uagggggcuuucugg

SEQ ID NO: 2656759 - RNA, 18 nt, Human
uaggggaaggagaaguaa

SEQ ID NO: 2656760 - RNA, 13 nt, Human
uagggaagauaau

SEQ ID NO: 2656761 - RNA, 18 nt, Human
uagggagggcggcagggg

SEQ ID NO: 2656762 - RNA, 15 nt, Human
uagggcaccaggggu

SEQ ID NO: 2656763 - RNA, 20 nt, Human
uagggcaccagggguuucuc

SEQ ID NO: 2656764 - RNA, 15 nt, Human
uagggaacuggggaa

SEQ ID NO: 2656765 - RNA, 15 nt, Human
uagggaguauucuaa

SEQ ID NO: 2656766 - RNA, 23 nt, Human
uaggauuuuaacuuaacugaaau

SEQ ID NO: 2656767 - RNA, 13 nt, Human
uaggauuuucaca

SEQ ID NO: 2656768 - RNA, 22 nt, Human
uaggauuuucacauucuuggcu

SEQ ID NO: 2656769 - RNA, 22 nt, Human
uaggauuuuggauguugagagg

SEQ ID NO: 2656770 - RNA, 13 nt, Human
uaggauuuuuaga

SEQ ID NO: 2656771 - RNA, 14 nt, Human
uaggauuuuuagaa

SEQ ID NO: 2656772 - RNA, 14 nt, Human
uaggcauguaaaca

SEQ ID NO: 2656773 - RNA, 18 nt, Human
uaggauagcuaacuguaa

SEQ ID NO: 2656774 - RNA, 19 nt, Human
uaggauagcuaacuguaaa

SEQ ID NO: 2656775 - RNA, 21 nt, Human
uaggauagcuaacuguaaauc

SEQ ID NO: 2656776 - RNA, 18 nt, Human
uaggaugaaaagauucuu

SEQ ID NO: 2656777 - RNA, 17 nt, Human
uaggaugggcuucugug

SEQ ID NO: 2656778 - RNA, 16 nt, Human
uaggagggugggaagg

SEQ ID NO: 2656779 - RNA, 13 nt, Human
uaggaaacaagug

SEQ ID NO: 2656780 - RNA, 22 nt, Human
uaggaguuaaccccugcgcucu

SEQ ID NO: 2656781 - RNA, 19 nt, Human
uaggaguggugauuugaaa

SEQ ID NO: 2656782 - RNA, 18 nt, Human
acaauauugauugggaaa

SEQ ID NO: 2656783 - RNA, 15 nt, Human
acaaaugacuuuauu

SEQ ID NO: 2656784 - RNA, 13 nt, Human
acaaaugacuuua

SEQ ID NO: 2656785 - RNA, 12 nt, Human
acaaaugacuuu

SEQ ID NO: 2656786 - RNA, 19 nt, Human
acaaucaaaggaaaauagu

SEQ ID NO: 2656787 - RNA, 14 nt, Human
acaaucaaaggaaa

SEQ ID NO: 2656788 - RNA, 15 nt, Human
acaauauuuuauggu

SEQ ID NO: 2656789 - RNA, 16 nt, Human
uagcgaucucuccugg

SEQ ID NO: 2656790 - RNA, 17 nt, Human
uagcgaucucuccuggc

SEQ ID NO: 2656791 - RNA, 19 nt, Human
uagcgaucucuccuggccu

SEQ ID NO: 2656792 - RNA, 20 nt, Human
uagcgaucucuccuggccua

SEQ ID NO: 2656793 - RNA, 20 nt, Human
uagcgacuaaacuagauuuu

SEQ ID NO: 2656794 - RNA, 17 nt, Human
uagcuugcagaacugua

SEQ ID NO: 2656795 - RNA, 19 nt, Human
uagcuugggaggcuucccc

SEQ ID NO: 2656796 - RNA, 16 nt, Human
uagcuuuagacccugg

SEQ ID NO: 2656797 - RNA, 17 nt, Human
uagcuuuagacccuggg

SEQ ID NO: 2656798 - RNA, 18 nt, Human
uagcuuuagacccugggu

SEQ ID NO: 2656799 - RNA, 13 nt, Human
uagcuucugcuuu

SEQ ID NO: 2656800 - RNA, 15 nt, Human
uagcuucugcuuuuc

SEQ ID NO: 2656801 - RNA, 16 nt, Human
uagcuucugcuuuucu

SEQ ID NO: 2656802 - RNA, 22 nt, Human
uagcuucugcuuuucugcccug

SEQ ID NO: 2656803 - RNA, 15 nt, Human
uagcuaacuguaaau

SEQ ID NO: 2656804 - RNA, 17 nt, Human
uagcuaacuguaaauca

SEQ ID NO: 2656805 - RNA, 20 nt, Human
acacaaaugcucaaagaaau

SEQ ID NO: 2656806 - RNA, 22 nt, Human
acacaaaugcucaaagaaaucu

SEQ ID NO: 2656807 - RNA, 15 nt, Human
uagggucggaaccca

SEQ ID NO: 2656808 - RNA, 21 nt, Human
acaaugaucaccgacugaaaa

SEQ ID NO: 2656809 - RNA, 15 nt, Human
uaguaauguuuuaua

SEQ ID NO: 2656810 - RNA, 14 nt, Human
uaguaauuucuuuu

SEQ ID NO: 2656811 - RNA, 20 nt, Human
uaguaauuucuuuuuuuccu

SEQ ID NO: 2656812 - RNA, 21 nt, Human
uaguaauuucuuuuuuuccuu

SEQ ID NO: 2656813 - RNA, 17 nt, Human
acucacauuagagaaca

SEQ ID NO: 2656814 - RNA, 17 nt, Human
uccccgcugcugugcaa

SEQ ID NO: 2656815 - RNA, 22 nt, Human
uccccggcaugagacucagugc

SEQ ID NO: 2656816 - RNA, 18 nt, Human
uccccgcuucugccugca

SEQ ID NO: 2656817 - RNA, 15 nt, Human
uccccggagggcugc

SEQ ID NO: 2656818 - RNA, 19 nt, Human
ucccccaccgguccagcug

SEQ ID NO: 2656819 - RNA, 20 nt, Human
ucccccaccgguccagcugg

SEQ ID NO: 2656820 - RNA, 21 nt, Human
ucccccaccgguccagcuggc

SEQ ID NO: 2656821 - RNA, 22 nt, Human
ucccccaccgguccagcuggcc

SEQ ID NO: 2656822 - RNA, 23 nt, Human
ucccccaccgguccagcuggccu

SEQ ID NO: 2656823 - RNA, 14 nt, Human
uccccaucucccug

SEQ ID NO: 2656824 - RNA, 15 nt, Human
uccccaucucccugc

SEQ ID NO: 2656825 - RNA, 16 nt, Human
uccccaucucccugcc

SEQ ID NO: 2656826 - RNA, 19 nt, Human
uccccaucucccugccugg

SEQ ID NO: 2656827 - RNA, 20 nt, Human
uccccaucucccugccuggc

SEQ ID NO: 2656828 - RNA, 22 nt, Human
uccccaucucccugccuggccc

SEQ ID NO: 2656829 - RNA, 20 nt, Human
ucccccaccucggucacucc

SEQ ID NO: 2656830 - RNA, 18 nt, Human
acuaccuguauuuaaaaa

SEQ ID NO: 2656831 - RNA, 22 nt, Human
acuaccuguauuuaaaaauaga

SEQ ID NO: 2656832 - RNA, 23 nt, Human
acuaccuguauuuaaaaauagaa

SEQ ID NO: 2656833 - RNA, 20 nt, Human
ucccccagccaugccagcug

SEQ ID NO: 2656834 - RNA, 21 nt, Human
ucccccagccaugccagcugg

SEQ ID NO: 2656835 - RNA, 22 nt, Human
ucccccagccaugccagcuggc

SEQ ID NO: 2656836 - RNA, 23 nt, Human
ucccccagccaugccagcuggcc

SEQ ID NO: 2656837 - RNA, 19 nt, Human
acuacuuuguuaggauuuu

SEQ ID NO: 2656838 - RNA, 22 nt, Human
acuacuuuguuaggauuuucac

SEQ ID NO: 2656839 - RNA, 14 nt, Human
acuacuagauugac

SEQ ID NO: 2656840 - RNA, 23 nt, Human
acuacuucuuuuuucaaaagaaa

SEQ ID NO: 2656841 - RNA, 17 nt, Human
acuccacaucugccuua

SEQ ID NO: 2656842 - RNA, 12 nt, Human
acucaucuuaua

SEQ ID NO: 2656843 - RNA, 19 nt, Human
acucaucuuauaugggaaa

SEQ ID NO: 2656844 - RNA, 12 nt, Human
acucaucuuagg

SEQ ID NO: 2656845 - RNA, 22 nt, Human
acucaucuggaguucucaaaga

SEQ ID NO: 2656846 - RNA, 19 nt, Human
acucaucuggaguucucaa

SEQ ID NO: 2656847 - RNA, 13 nt, Human
acucaucugaaau

SEQ ID NO: 2656848 - RNA, 15 nt, Human
acucaucugaaaugu

SEQ ID NO: 2656849 - RNA, 16 nt, Human
acucaucugaaauguu

SEQ ID NO: 2656850 - RNA, 17 nt, Human
acucaucugaaauguua

SEQ ID NO: 2656851 - RNA, 19 nt, Human
acucaucugaaauguuaca

SEQ ID NO: 2656852 - RNA, 23 nt, Human
acucaucugaaauguuacaaaaa

SEQ ID NO: 2656853 - RNA, 21 nt, Human
acucagagaaaaaugcucccc

SEQ ID NO: 2656854 - RNA, 22 nt, Human
acucagagaaaaaugcucccca

SEQ ID NO: 2656855 - RNA, 14 nt, Human
acucagagcucucu

SEQ ID NO: 2656856 - RNA, 20 nt, Human
acucagagcucucucuacag

SEQ ID NO: 2656857 - RNA, 21 nt, Human
acucagagcucucucuacaga

SEQ ID NO: 2656858 - RNA, 11 nt, Human
ucccuccaccc

SEQ ID NO: 2656859 - RNA, 13 nt, Human
ucccuccacccca

SEQ ID NO: 2656860 - RNA, 14 nt, Human
ucccuccaccccag

SEQ ID NO: 2656861 - RNA, 15 nt, Human
ucccuccaccccagg

SEQ ID NO: 2656862 - RNA, 16 nt, Human
ucccuccaccccagga

SEQ ID NO: 2656863 - RNA, 17 nt, Human
ucccuccaccccaggac

SEQ ID NO: 2656864 - RNA, 18 nt, Human
ucccuccaccccaggacg

SEQ ID NO: 2656865 - RNA, 16 nt, Human
uccuacucggcucugc

SEQ ID NO: 2656866 - RNA, 19 nt, Human
uccuacucggcucugcagu

SEQ ID NO: 2656867 - RNA, 22 nt, Human
uccuacucucacacugguucuc

SEQ ID NO: 2656868 - RNA, 15 nt, Human
acucgagucugaggc

SEQ ID NO: 2656869 - RNA, 14 nt, Human
acucgagucugagg

SEQ ID NO: 2656870 - RNA, 15 nt, Human
acucgacucugugcc

SEQ ID NO: 2656871 - RNA, 15 nt, Human
acuccuuauuuggcg

SEQ ID NO: 2656872 - RNA, 22 nt, Human
acuccuuauuuggcgugacccg

SEQ ID NO: 2656873 - RNA, 16 nt, Human
acuccacaucugccuu

SEQ ID NO: 2656874 - RNA, 15 nt, Human
uccggccucuccagc

SEQ ID NO: 2656875 - RNA, 16 nt, Human
uccggccucuccagcc

SEQ ID NO: 2656876 - RNA, 19 nt, Human
uccggccucuccagccuca

SEQ ID NO: 2656877 - RNA, 14 nt, Human
uccggccucugccu

SEQ ID NO: 2656878 - RNA, 18 nt, Human
uccggccucugccuuugc

SEQ ID NO: 2656879 - RNA, 19 nt, Human
uccggccucugccuuugca

SEQ ID NO: 2656880 - RNA, 16 nt, Human
uccguuagcuccugug

SEQ ID NO: 2656881 - RNA, 17 nt, Human
uccguuagcuccugugg

SEQ ID NO: 2656882 - RNA, 14 nt, Human
uccuacccuuuucu

SEQ ID NO: 2656883 - RNA, 13 nt, Human
uccuacccuuuuc

SEQ ID NO: 2656884 - RNA, 15 nt, Human
uccguuagcuccugu

SEQ ID NO: 2656885 - RNA, 17 nt, Human
uccgugggacggugccc

SEQ ID NO: 2656886 - RNA, 16 nt, Human
uccgugggacggugcc

SEQ ID NO: 2656887 - RNA, 23 nt, Human
uccgugggacggugcccaagcca

SEQ ID NO: 2656888 - RNA, 15 nt, Human
uccggcucccagccu

SEQ ID NO: 2656889 - RNA, 12 nt, Human
uccggcucccag

SEQ ID NO: 2656890 - RNA, 12 nt, Human
acucuucucauu

SEQ ID NO: 2656891 - RNA, 24 nt, Human
acucuucucauuacuuguugccua

SEQ ID NO: 2656892 - RNA, 18 nt, Human
acucuucucauuacuugu

SEQ ID NO: 2656893 - RNA, 17 nt, Human
acucuucucauuacuug

SEQ ID NO: 2656894 - RNA, 15 nt, Human
acucuucagagaaau

SEQ ID NO: 2656895 - RNA, 16 nt, Human
acucuucagagaaauc

SEQ ID NO: 2656896 - RNA, 14 nt, Human
acucugcuucucug

SEQ ID NO: 2656897 - RNA, 15 nt, Human
acucugcuucucuga

SEQ ID NO: 2656898 - RNA, 15 nt, Human
acucguggcugucaa

SEQ ID NO: 2656899 - RNA, 12 nt, Human
acucugcuucuc

SEQ ID NO: 2656900 - RNA, 22 nt, Human
acucucacacugguucucaaug

SEQ ID NO: 2656901 - RNA, 21 nt, Human
acucucacacugguucucaau

SEQ ID NO: 2656902 - RNA, 23 nt, Human
acucguguguuucuauuuuuuga

SEQ ID NO: 2656903 - RNA, 15 nt, Human
acucguguguuucua

SEQ ID NO: 2656904 - RNA, 12 nt, Human
acucgguuucuc

SEQ ID NO: 2656905 - RNA, 14 nt, Human
acucgguuucucca

SEQ ID NO: 2656906 - RNA, 16 nt, Human
acucgguuucuccaaa

SEQ ID NO: 2656907 - RNA, 16 nt, Human
acucucaucacuacag

SEQ ID NO: 2656908 - RNA, 17 nt, Human
acucucaucacuacagu

SEQ ID NO: 2656909 - RNA, 18 nt, Human
acucucaucacuacagua

SEQ ID NO: 2656910 - RNA, 17 nt, Human
acugaaaggcuuuucaa

SEQ ID NO: 2656911 - RNA, 20 nt, Human
uccucugcucaccgcccauc

SEQ ID NO: 2656912 - RNA, 18 nt, Human
acugaaaauauuguuuua

SEQ ID NO: 2656913 - RNA, 12 nt, Human
acucuuugagag

SEQ ID NO: 2656914 - RNA, 18 nt, Human
uccugacccauugcuguu

SEQ ID NO: 2656915 - RNA, 17 nt, Human
uccugacccauugcugu

SEQ ID NO: 2656916 - RNA, 16 nt, Human
uccugacccauugcug

SEQ ID NO: 2656917 - RNA, 11 nt, Human
uccugaccagc

SEQ ID NO: 2656918 - RNA, 18 nt, Human
uccucuuuaguuuuuggu

SEQ ID NO: 2656919 - RNA, 19 nt, Human
uccucuuuaguuuuugguu

SEQ ID NO: 2656920 - RNA, 13 nt, Human
uccucuuguccua

SEQ ID NO: 2656921 - RNA, 19 nt, Human
uccucuuguccuacaauga

SEQ ID NO: 2656922 - RNA, 20 nt, Human
uccucuugucugauuucuua

SEQ ID NO: 2656923 - RNA, 20 nt, Human
uccucuugugauuucuuuaa

SEQ ID NO: 2656924 - RNA, 11 nt, Human
uccucugccug

SEQ ID NO: 2656925 - RNA, 12 nt, Human
uccucugccugc

SEQ ID NO: 2656926 - RNA, 13 nt, Human
uccucugccugcc

SEQ ID NO: 2656927 - RNA, 14 nt, Human
uccucugccugccc

SEQ ID NO: 2656928 - RNA, 22 nt, Human
uccucugccugccccgccccca

SEQ ID NO: 2656929 - RNA, 17 nt, Human
uccucucccauccuuga

SEQ ID NO: 2656930 - RNA, 18 nt, Human
uccucucuaagugggcau

SEQ ID NO: 2656931 - RNA, 19 nt, Human
uccucucuccagauguuuc

SEQ ID NO: 2656932 - RNA, 14 nt, Human
uccucucuccagau

SEQ ID NO: 2656933 - RNA, 13 nt, Human
uccucucuauauu

SEQ ID NO: 2656934 - RNA, 14 nt, Human
uccucucuauauuu

SEQ ID NO: 2656935 - RNA, 22 nt, Human
uccucccuuccuuuucccugcu

SEQ ID NO: 2656936 - RNA, 19 nt, Human
uccucccuuccuuuucccu

SEQ ID NO: 2656937 - RNA, 21 nt, Human
uccucccuuccuuuucccugc

SEQ ID NO: 2656938 - RNA, 13 nt, Human
uccucccuuccuu

SEQ ID NO: 2656939 - RNA, 17 nt, Human
uccucccuuccuuuucc

SEQ ID NO: 2656940 - RNA, 18 nt, Human
uccucccuuccuuuuccc

SEQ ID NO: 2656941 - RNA, 16 nt, Human
uccuccccaaaucaau

SEQ ID NO: 2656942 - RNA, 21 nt, Human
uccuccccaaaucaauacacu

SEQ ID NO: 2656943 - RNA, 20 nt, Human
accuggggcugcugugaagc

SEQ ID NO: 2656944 - RNA, 21 nt, Human
accuggguaacuagggaagau

SEQ ID NO: 2656945 - RNA, 19 nt, Human
accuggggcugcugugaag

SEQ ID NO: 2656946 - RNA, 23 nt, Human
accuggcugagguuccucugccu

SEQ ID NO: 2656947 - RNA, 18 nt, Human
accugggauucaggaaug

SEQ ID NO: 2656948 - RNA, 20 nt, Human
accuggccgcggagccugca

SEQ ID NO: 2656949 - RNA, 12 nt, Human
uccaccccagga

SEQ ID NO: 2656950 - RNA, 13 nt, Human
uccaccccaggac

SEQ ID NO: 2656951 - RNA, 19 nt, Human
uccaccccaggacgccacu

SEQ ID NO: 2656952 - RNA, 18 nt, Human
uccaccccaagagaacuc

SEQ ID NO: 2656953 - RNA, 19 nt, Human
uccaccccaagagaacucg

SEQ ID NO: 2656954 - RNA, 19 nt, Human
uccacccaacccuaucucc

SEQ ID NO: 2656955 - RNA, 23 nt, Human
uccacccaacccuaucuccugac

SEQ ID NO: 2656956 - RNA, 15 nt, Human
uccacccaacccuau

SEQ ID NO: 2656957 - RNA, 21 nt, Human
uccaaauuuuuuuuuaaagca

SEQ ID NO: 2656958 - RNA, 19 nt, Human
uccaaauggagaagcugca

SEQ ID NO: 2656959 - RNA, 20 nt, Human
uccaaauggagaagcugcag

SEQ ID NO: 2656960 - RNA, 21 nt, Human
uccaaauggagaagcugcagg

SEQ ID NO: 2656961 - RNA, 12 nt, Human
uccacaucugcc

SEQ ID NO: 2656962 - RNA, 13 nt, Human
uccacaucugccu

SEQ ID NO: 2656963 - RNA, 14 nt, Human
uccacaucugccuu

SEQ ID NO: 2656964 - RNA, 15 nt, Human
uccacaucugccuua

SEQ ID NO: 2656965 - RNA, 18 nt, Human
uccacaucugccuuaaaa

SEQ ID NO: 2656966 - RNA, 19 nt, Human
ucauuuuucaauagcacau

SEQ ID NO: 2656967 - RNA, 13 nt, Human
ucauuuuuauagc

SEQ ID NO: 2656968 - RNA, 14 nt, Human
ucauuuuuauagca

SEQ ID NO: 2656969 - RNA, 16 nt, Human
ucauuuuuauagcaac

SEQ ID NO: 2656970 - RNA, 21 nt, Human
ucauuuuuauagcaacaacaa

SEQ ID NO: 2656971 - RNA, 16 nt, Human
ucauuuucuuuuuuaa

SEQ ID NO: 2656972 - RNA, 14 nt, Human
ucauuuugaaauug

SEQ ID NO: 2656973 - RNA, 16 nt, Human
ucauuuugaaauuguu

SEQ ID NO: 2656974 - RNA, 14 nt, Human
accugaggcugugg

SEQ ID NO: 2656975 - RNA, 12 nt, Human
accugaggcugu

SEQ ID NO: 2656976 - RNA, 19 nt, Human
accugaagaugggagccuu

SEQ ID NO: 2656977 - RNA, 18 nt, Human
acgaaccuuggccugggc

SEQ ID NO: 2656978 - RNA, 11 nt, Human
uccagggaggg

SEQ ID NO: 2656979 - RNA, 22 nt, Human
uccagggaggggccggcccugu

SEQ ID NO: 2656980 - RNA, 17 nt, Human
uccagggacacacagcc

SEQ ID NO: 2656981 - RNA, 19 nt, Human
uccagggaauccaagccuc

SEQ ID NO: 2656982 - RNA, 20 nt, Human
uccagggaauccaagccucc

SEQ ID NO: 2656983 - RNA, 21 nt, Human
acgaagguaaaaaguauuuuu

SEQ ID NO: 2656984 - RNA, 15 nt, Human
acgaauagacaucaa

SEQ ID NO: 2656985 - RNA, 16 nt, Human
acgaauagacaucaaa

SEQ ID NO: 2656986 - RNA, 18 nt, Human
acgaauagacaucaaacu

SEQ ID NO: 2656987 - RNA, 18 nt, Human
acgaauauggacauauca

SEQ ID NO: 2656988 - RNA, 15 nt, Human
uccacgcgugccgug

SEQ ID NO: 2656989 - RNA, 21 nt, Human
uccacgcgugccguggcacca

SEQ ID NO: 2656990 - RNA, 14 nt, Human
uccagggaauccaa

SEQ ID NO: 2656991 - RNA, 18 nt, Human
uccagggaauccaagccu

SEQ ID NO: 2656992 - RNA, 16 nt, Human
uccaggcugccguggg

SEQ ID NO: 2656993 - RNA, 23 nt, Human
acgccaggggaaaaucagccugc

SEQ ID NO: 2656994 - RNA, 20 nt, Human
acgcccacccaaccccaagc

SEQ ID NO: 2656995 - RNA, 18 nt, Human
acgaucacaaaugacuuu

SEQ ID NO: 2656996 - RNA, 17 nt, Human
acgaucacaaaugacuu

SEQ ID NO: 2656997 - RNA, 16 nt, Human
acgaucacaaaugacu

SEQ ID NO: 2656998 - RNA, 15 nt, Human
acgaucacaaaugac

SEQ ID NO: 2656999 - RNA, 21 nt, Human
acgaggggugucuugggcaga

SEQ ID NO: 2657000 - RNA, 20 nt, Human
acgaggucaggagaucgaga

SEQ ID NO: 2657001 - RNA, 18 nt, Human
acgaggggugucuugggc

SEQ ID NO: 2657002 - RNA, 20 nt, Human
acgaggggugucuugggcag

SEQ ID NO: 2657003 - RNA, 18 nt, Human
acgccaggggaaaaucag

SEQ ID NO: 2657004 - RNA, 14 nt, Human
acgaucacaaauga

SEQ ID NO: 2657005 - RNA, 15 nt, Human
acgacugcccggcag

SEQ ID NO: 2657006 - RNA, 20 nt, Human
acgacacggguggggaaagg

SEQ ID NO: 2657007 - RNA, 21 nt, Human
acgcuaaagagcccuugccuc

SEQ ID NO: 2657008 - RNA, 18 nt, Human
acgcuaaagagcccuugc

SEQ ID NO: 2657009 - RNA, 20 nt, Human
acgcuaaagagcccuugccu

SEQ ID NO: 2657010 - RNA, 23 nt, Human
acggaggcaaagcuggcucaccu

SEQ ID NO: 2657011 - RNA, 18 nt, Human
acggaggcauccuacccu

SEQ ID NO: 2657012 - RNA, 20 nt, Human
acggaggccugcgacccugg

SEQ ID NO: 2657013 - RNA, 21 nt, Human
acggaggccugcgacccuggg

SEQ ID NO: 2657014 - RNA, 20 nt, Human
acggagcccagcccucccca

SEQ ID NO: 2657015 - RNA, 15 nt, Human
acggagcccagcccu

SEQ ID NO: 2657016 - RNA, 16 nt, Human
acgcuaaagagcccuu

SEQ ID NO: 2657017 - RNA, 17 nt, Human
acgcuaaagagcccuug

SEQ ID NO: 2657018 - RNA, 19 nt, Human
acgccaugugauggacacu

SEQ ID NO: 2657019 - RNA, 16 nt, Human
acgcgugccguggcac

SEQ ID NO: 2657020 - RNA, 20 nt, Human
acgcccguccugccuguggc

SEQ ID NO: 2657021 - RNA, 16 nt, Human
acgcccguccugccug

SEQ ID NO: 2657022 - RNA, 18 nt, Human
acgcccguccugccugug

SEQ ID NO: 2657023 - RNA, 19 nt, Human
acgcccguccugccugugg

SEQ ID NO: 2657024 - RNA, 14 nt, Human
uccauuugcucuuc

SEQ ID NO: 2657025 - RNA, 15 nt, Human
uccauuugcucuuca

SEQ ID NO: 2657026 - RNA, 17 nt, Human
uccauuuuaauuuuaaa

SEQ ID NO: 2657027 - RNA, 14 nt, Human
ucccacaaaggaga

SEQ ID NO: 2657028 - RNA, 19 nt, Human
ucccacauccaacuccagc

SEQ ID NO: 2657029 - RNA, 23 nt, Human
acggguuagacagccaaaggcug

SEQ ID NO: 2657030 - RNA, 14 nt, Human
acggguggggaaag

SEQ ID NO: 2657031 - RNA, 13 nt, Human
acggguggucccc

SEQ ID NO: 2657032 - RNA, 14 nt, Human
acgggugguccccg

SEQ ID NO: 2657033 - RNA, 12 nt, Human
ucccacccccag

SEQ ID NO: 2657034 - RNA, 13 nt, Human
ucccacccccagc

SEQ ID NO: 2657035 - RNA, 14 nt, Human
ucccacccccagcc

SEQ ID NO: 2657036 - RNA, 15 nt, Human
ucccacccccagccc

SEQ ID NO: 2657037 - RNA, 17 nt, Human
ucccacccccagccccg

SEQ ID NO: 2657038 - RNA, 23 nt, Human
ucccacccccagccccgacucca

SEQ ID NO: 2657039 - RNA, 23 nt, Human
ucccacauccaacuccagcaacu

SEQ ID NO: 2657040 - RNA, 20 nt, Human
ucccacauccaacuccagca

SEQ ID NO: 2657041 - RNA, 22 nt, Human
ucccacauccaacuccagcaac

SEQ ID NO: 2657042 - RNA, 12 nt, Human
uccaucccucua

SEQ ID NO: 2657043 - RNA, 15 nt, Human
uccaucccucuaaug

SEQ ID NO: 2657044 - RNA, 23 nt, Human
uccaucccucuaaugagacugac

SEQ ID NO: 2657045 - RNA, 14 nt, Human
uccagugaccucuc

SEQ ID NO: 2657046 - RNA, 17 nt, Human
uccagugaccucucucu

SEQ ID NO: 2657047 - RNA, 15 nt, Human
uccaugaaggcagag

SEQ ID NO: 2657048 - RNA, 17 nt, Human
uccaugaauuuuaaaau

SEQ ID NO: 2657049 - RNA, 21 nt, Human
ucaaucaaauaaguauuuaua

SEQ ID NO: 2657050 - RNA, 16 nt, Human
ucaauauuuuuauauc

SEQ ID NO: 2657051 - RNA, 16 nt, Human
ucaaguaauugugaaa

SEQ ID NO: 2657052 - RNA, 15 nt, Human
ucaaguaauugugaa

SEQ ID NO: 2657053 - RNA, 14 nt, Human
acauuauuuauaug

SEQ ID NO: 2657054 - RNA, 18 nt, Human
acauuauuuauaugggga

SEQ ID NO: 2657055 - RNA, 19 nt, Human
acauucaaauuugucuggu

SEQ ID NO: 2657056 - RNA, 22 nt, Human
acauuacaaaguuaaaauuguu

SEQ ID NO: 2657057 - RNA, 18 nt, Human
ucaagaggaaugaaaaaa

SEQ ID NO: 2657058 - RNA, 22 nt, Human
ucaagaggaaugaaaaaagcuu

SEQ ID NO: 2657059 - RNA, 13 nt, Human
ucaaggccugcuc

SEQ ID NO: 2657060 - RNA, 20 nt, Human
ucaaggcuacagaugugcug

SEQ ID NO: 2657061 - RNA, 21 nt, Human
ucaauccuaauuucuccuccc

SEQ ID NO: 2657062 - RNA, 22 nt, Human
ucaauccuaauuucuccucccu

SEQ ID NO: 2657063 - RNA, 18 nt, Human
acauuuuuuugcaugcau

SEQ ID NO: 2657064 - RNA, 23 nt, Human
acauuuuuuugcaugcaugcaaa

SEQ ID NO: 2657065 - RNA, 14 nt, Human
acauuuuuuaagcu

SEQ ID NO: 2657066 - RNA, 17 nt, Human
acauuuuuuaagcuuca

SEQ ID NO: 2657067 - RNA, 12 nt, Human
ucacagagucaa

SEQ ID NO: 2657068 - RNA, 16 nt, Human
ucacagagucaaggcc

SEQ ID NO: 2657069 - RNA, 17 nt, Human
ucacagagucaaggccu

SEQ ID NO: 2657070 - RNA, 18 nt, Human
ucacagagucaaggccug

SEQ ID NO: 2657071 - RNA, 19 nt, Human
ucacagagucaaggccugc

SEQ ID NO: 2657072 - RNA, 21 nt, Human
ucacagagucaaggccugcuc

SEQ ID NO: 2657073 - RNA, 20 nt, Human
ucacagcuaugcaaaaagcu

SEQ ID NO: 2657074 - RNA, 16 nt, Human
accaaucuuacuuugu

SEQ ID NO: 2657075 - RNA, 15 nt, Human
accaaucuuacuuug

SEQ ID NO: 2657076 - RNA, 20 nt, Human
accaaucuuacuuuguaaau

SEQ ID NO: 2657077 - RNA, 19 nt, Human
accaaucuuacuuuguaaa

SEQ ID NO: 2657078 - RNA, 18 nt, Human
accaaucuuacuuuguaa

SEQ ID NO: 2657079 - RNA, 17 nt, Human
accaaucuuacuuugua

SEQ ID NO: 2657080 - RNA, 23 nt, Human
accaaucuuacuuuguaaauucu

SEQ ID NO: 2657081 - RNA, 21 nt, Human
accaaucuuacuuuguaaauu

SEQ ID NO: 2657082 - RNA, 14 nt, Human
accaaauuaucuug

SEQ ID NO: 2657083 - RNA, 15 nt, Human
accaaauuaucuuga

SEQ ID NO: 2657084 - RNA, 16 nt, Human
accaaauuaucuugau

SEQ ID NO: 2657085 - RNA, 18 nt, Human
accaaauguuuauuuucu

SEQ ID NO: 2657086 - RNA, 12 nt, Human
accaaaaacaaa

SEQ ID NO: 2657087 - RNA, 15 nt, Human
accaaaucuggaagc

SEQ ID NO: 2657088 - RNA, 13 nt, Human
accaaaucuggaa

SEQ ID NO: 2657089 - RNA, 13 nt, Human
uauuuuaaaacaa

SEQ ID NO: 2657090 - RNA, 14 nt, Human
uauuuuaaaaauau

SEQ ID NO: 2657091 - RNA, 20 nt, Human
acaucuuuaaggggaggaac

SEQ ID NO: 2657092 - RNA, 11 nt, Human
acaucuuuaag

SEQ ID NO: 2657093 - RNA, 15 nt, Human
uaugugguuuuguaa

SEQ ID NO: 2657094 - RNA, 17 nt, Human
uaugugguuuuguaauu

SEQ ID NO: 2657095 - RNA, 18 nt, Human
uauuuuaaccugcauaaa

SEQ ID NO: 2657096 - RNA, 18 nt, Human
uauuuuaagacugauuuu

SEQ ID NO: 2657097 - RNA, 23 nt, Human
uauuuuaagacugauuuuaauag

SEQ ID NO: 2657098 - RNA, 14 nt, Human
uauuuuacacagaa

SEQ ID NO: 2657099 - RNA, 15 nt, Human
uauuuuacacagaaa

SEQ ID NO: 2657100 - RNA, 17 nt, Human
uauuuuacacagaaaca

SEQ ID NO: 2657101 - RNA, 18 nt, Human
uauuuuacacagaaacac

SEQ ID NO: 2657102 - RNA, 19 nt, Human
uauuuuacacagaaacacu

SEQ ID NO: 2657103 - RNA, 18 nt, Human
uauuuuacagcucauuaa

SEQ ID NO: 2657104 - RNA, 21 nt, Human
uauuuuacagcucauuaaacu

SEQ ID NO: 2657105 - RNA, 23 nt, Human
uauuuuacacagaaacacugccu

SEQ ID NO: 2657106 - RNA, 24 nt, Human
uauuuuacacagaaacacugccuu

SEQ ID NO: 2657107 - RNA, 18 nt, Human
uauuuugucauaucaaau

SEQ ID NO: 2657108 - RNA, 16 nt, Human
uauuuugucauaucaa

SEQ ID NO: 2657109 - RNA, 12 nt, Human
uauuuuguguaa

SEQ ID NO: 2657110 - RNA, 13 nt, Human
uauuuuguguaaa

SEQ ID NO: 2657111 - RNA, 16 nt, Human
uauuuuguguaaaaaa

SEQ ID NO: 2657112 - RNA, 14 nt, Human
uauuuugugugaaa

SEQ ID NO: 2657113 - RNA, 15 nt, Human
uauuuugugugaaau

SEQ ID NO: 2657114 - RNA, 17 nt, Human
uauuuugugugaaauug

SEQ ID NO: 2657115 - RNA, 12 nt, Human
uauuuuucacuc

SEQ ID NO: 2657116 - RNA, 22 nt, Human
uauuuuucacucuaagucaugu

SEQ ID NO: 2657117 - RNA, 16 nt, Human
uauuuuucauaaacaa

SEQ ID NO: 2657118 - RNA, 18 nt, Human
uauuuuucauaaacaagu

SEQ ID NO: 2657119 - RNA, 16 nt, Human
uauuuuuguaaaguuu

SEQ ID NO: 2657120 - RNA, 12 nt, Human
uauuuuuguaaa

SEQ ID NO: 2657121 - RNA, 12 nt, Human
ucaaaagugccu

SEQ ID NO: 2657122 - RNA, 16 nt, Human
ucaaaagugccucaag

SEQ ID NO: 2657123 - RNA, 16 nt, Human
ucaaaagcugggcagg

SEQ ID NO: 2657124 - RNA, 20 nt, Human
ucaaaagguauuauacaugu

SEQ ID NO: 2657125 - RNA, 21 nt, Human
ucaaaagguauuauacaugug

SEQ ID NO: 2657126 - RNA, 23 nt, Human
ucaaaaguagaacuuuguauagu

SEQ ID NO: 2657127 - RNA, 18 nt, Human
ucaaaaguagaacuuugu

SEQ ID NO: 2657128 - RNA, 17 nt, Human
ucaaaaguagaacuuug

SEQ ID NO: 2657129 - RNA, 21 nt, Human
ucaaagucugcucucauauaa

SEQ ID NO: 2657130 - RNA, 14 nt, Human
ucaaagugcuauua

SEQ ID NO: 2657131 - RNA, 14 nt, Human
ucaaaguugaaaau

SEQ ID NO: 2657132 - RNA, 15 nt, Human
ucaaaguugaaaauu

SEQ ID NO: 2657133 - RNA, 17 nt, Human
ucaaaguugaaaauuca

SEQ ID NO: 2657134 - RNA, 18 nt, Human
ucaaaguugaaaauucau

SEQ ID NO: 2657135 - RNA, 13 nt, Human
ucaaagucauuaa

SEQ ID NO: 2657136 - RNA, 17 nt, Human
ucaaagucauuaaagac

SEQ ID NO: 2657137 - RNA, 18 nt, Human
ucaaagucauuaaagaca

SEQ ID NO: 2657138 - RNA, 19 nt, Human
acauuacucugccucugua

SEQ ID NO: 2657139 - RNA, 20 nt, Human
acauggugccugagaggcag

SEQ ID NO: 2657140 - RNA, 23 nt, Human
acauggugccugagaggcaggca

SEQ ID NO: 2657141 - RNA, 22 nt, Human
acaugaggaacuguagaugaug

SEQ ID NO: 2657142 - RNA, 17 nt, Human
acaugaggaacuguaga

SEQ ID NO: 2657143 - RNA, 18 nt, Human
acaugaggaacuguagau

SEQ ID NO: 2657144 - RNA, 21 nt, Human
acaugaggaacuguagaugau

SEQ ID NO: 2657145 - RNA, 23 nt, Human
acaugagauguguggacuguggc

SEQ ID NO: 2657146 - RNA, 18 nt, Human
acaugagauguguggacu

SEQ ID NO: 2657147 - RNA, 20 nt, Human
acaugagauguguggacugu

SEQ ID NO: 2657148 - RNA, 14 nt, Human
acaugaggaacugu

SEQ ID NO: 2657149 - RNA, 19 nt, Human
acauggugccugagaggca

SEQ ID NO: 2657150 - RNA, 22 nt, Human
acauggcuccggccucugccuu

SEQ ID NO: 2657151 - RNA, 14 nt, Human
acccugaugaaaac

SEQ ID NO: 2657152 - RNA, 10 nt, Human
acccugcccc

SEQ ID NO: 2657153 - RNA, 17 nt, Human
acccugccccucagaga

SEQ ID NO: 2657154 - RNA, 12 nt, Human
acccugagccgg

SEQ ID NO: 2657155 - RNA, 14 nt, Human
acccggaggccgag

SEQ ID NO: 2657156 - RNA, 11 nt, Human
acccuccaaau

SEQ ID NO: 2657157 - RNA, 22 nt, Human
acccuccaaauggagaagcugc

SEQ ID NO: 2657158 - RNA, 23 nt, Human
acccuccaaauggagaagcugca

SEQ ID NO: 2657159 - RNA, 11 nt, Human
acccccagccc

SEQ ID NO: 2657160 - RNA, 12 nt, Human
acccccagcccc

SEQ ID NO: 2657161 - RNA, 13 nt, Human
acccccagccccg

SEQ ID NO: 2657162 - RNA, 14 nt, Human
acccccagccccga

SEQ ID NO: 2657163 - RNA, 20 nt, Human
acccccagccccgacuccag

SEQ ID NO: 2657164 - RNA, 21 nt, Human
acccccagccccgacuccagc

SEQ ID NO: 2657165 - RNA, 22 nt, Human
acccccagccccgacuccagcc

SEQ ID NO: 2657166 - RNA, 23 nt, Human
acccccagccccgacuccagcca

SEQ ID NO: 2657167 - RNA, 18 nt, Human
ucaggcaggugggaugga

SEQ ID NO: 2657168 - RNA, 17 nt, Human
ucaggcaggugggaugg

SEQ ID NO: 2657169 - RNA, 23 nt, Human
ucaggggugugcggccuuuggcu

SEQ ID NO: 2657170 - RNA, 19 nt, Human
ucaggggugugcggccuuu

SEQ ID NO: 2657171 - RNA, 12 nt, Human
ucaggggugugc

SEQ ID NO: 2657172 - RNA, 19 nt, Human
ucagguaguugcaauugaa

SEQ ID NO: 2657173 - RNA, 19 nt, Human
ucaguaguuuaaaaguucu

SEQ ID NO: 2657174 - RNA, 18 nt, Human
ucaguaggacuccuuauu

SEQ ID NO: 2657175 - RNA, 17 nt, Human
ucaguauuauguaguug

SEQ ID NO: 2657176 - RNA, 14 nt, Human
ucaguuuguuggaa

SEQ ID NO: 2657177 - RNA, 15 nt, Human
ucaguuuguuggaaa

SEQ ID NO: 2657178 - RNA, 16 nt, Human
ucaguuuguuggaaag

SEQ ID NO: 2657179 - RNA, 19 nt, Human
ucaguuuguuggaaaguaa

SEQ ID NO: 2657180 - RNA, 20 nt, Human
ucaguauuagaugcacuuaa

SEQ ID NO: 2657181 - RNA, 14 nt, Human
acccugcugagucu

SEQ ID NO: 2657182 - RNA, 16 nt, Human
acccugcugcuggugc

SEQ ID NO: 2657183 - RNA, 19 nt, Human
acccugcugcuggugcaca

SEQ ID NO: 2657184 - RNA, 13 nt, Human
ucaguaagccgug

SEQ ID NO: 2657185 - RNA, 14 nt, Human
ucaguaaguuaucu

SEQ ID NO: 2657186 - RNA, 23 nt, Human
ucaguaaguuaucuuugaauaug

SEQ ID NO: 2657187 - RNA, 23 nt, Human
ucaguaggugcccagaauaaguu

SEQ ID NO: 2657188 - RNA, 14 nt, Human
ucaguacuuuuuua

SEQ ID NO: 2657189 - RNA, 23 nt, Human
ucaguacuuuuuuaaauauuuuc

SEQ ID NO: 2657190 - RNA, 21 nt, Human
ucaguaacccccuuaaauuua

SEQ ID NO: 2657191 - RNA, 22 nt, Human
ucaguaacccccuuaaauuuaa

SEQ ID NO: 2657192 - RNA, 23 nt, Human
ucaguaacccccuuaaauuuaau

SEQ ID NO: 2657193 - RNA, 15 nt, Human
ucaguaacugucagg

SEQ ID NO: 2657194 - RNA, 21 nt, Human
ucaguaaacgggaacaugccc

SEQ ID NO: 2657195 - RNA, 22 nt, Human
ucaguaaacgggaacaugcccc

SEQ ID NO: 2657196 - RNA, 20 nt, Human
ucagguuauuuauuuuauaa

SEQ ID NO: 2657197 - RNA, 18 nt, Human
ucagguucaguauuaugu

SEQ ID NO: 2657198 - RNA, 14 nt, Human
ucagagacaaaaua

SEQ ID NO: 2657199 - RNA, 21 nt, Human
ucagagacaaaauauuuccca

SEQ ID NO: 2657200 - RNA, 22 nt, Human
ucagagacaaaauauuucccau

SEQ ID NO: 2657201 - RNA, 12 nt, Human
ucagagacacug

SEQ ID NO: 2657202 - RNA, 12 nt, Human
ucagagacagau

SEQ ID NO: 2657203 - RNA, 18 nt, Human
ucagaaucccuuaacagu

SEQ ID NO: 2657204 - RNA, 22 nt, Human
ucagagaugcaccaccaagcca

SEQ ID NO: 2657205 - RNA, 16 nt, Human
ucagagaugcaccacc

SEQ ID NO: 2657206 - RNA, 21 nt, Human
ucagagaugcaccaccaagcc

SEQ ID NO: 2657207 - RNA, 15 nt, Human
ucagauuucugagga

SEQ ID NO: 2657208 - RNA, 18 nt, Human
ucagagaugaacaucuaa

SEQ ID NO: 2657209 - RNA, 22 nt, Human
acccaggguucccgcggggcug

SEQ ID NO: 2657210 - RNA, 21 nt, Human
acccaggguucccgcggggcu

SEQ ID NO: 2657211 - RNA, 14 nt, Human
ucacuccagccugg

SEQ ID NO: 2657212 - RNA, 17 nt, Human
ucacugaaaauuggaca

SEQ ID NO: 2657213 - RNA, 22 nt, Human
ucacugaaaauuggacagauug

SEQ ID NO: 2657214 - RNA, 22 nt, Human
ucacucauugcugagccucugc

SEQ ID NO: 2657215 - RNA, 20 nt, Human
ucacucauugcugagccucu

SEQ ID NO: 2657216 - RNA, 19 nt, Human
ucacucauugcugagccuc

SEQ ID NO: 2657217 - RNA, 18 nt, Human
ucacucauugcugagccu

SEQ ID NO: 2657218 - RNA, 17 nt, Human
ucacucauugcugagcc

SEQ ID NO: 2657219 - RNA, 15 nt, Human
ucacucauugcugag

SEQ ID NO: 2657220 - RNA, 13 nt, Human
ucacucauugcug

SEQ ID NO: 2657221 - RNA, 15 nt, Human
ucacucacucuaaag

SEQ ID NO: 2657222 - RNA, 14 nt, Human
ucacucacagaguc

SEQ ID NO: 2657223 - RNA, 16 nt, Human
ucacucacagagucaa

SEQ ID NO: 2657224 - RNA, 22 nt, Human
ucacucacagagucaaggccug

SEQ ID NO: 2657225 - RNA, 23 nt, Human
ucacucacagagucaaggccugc

SEQ ID NO: 2657226 - RNA, 15 nt, Human
ucacuucacccugga

SEQ ID NO: 2657227 - RNA, 22 nt, Human
ucacuuaugaaugauuugcaua

SEQ ID NO: 2657228 - RNA, 16 nt, Human
ucacuguuuguuuuua

SEQ ID NO: 2657229 - RNA, 15 nt, Human
ucacuuaaaacacgu

SEQ ID NO: 2657230 - RNA, 13 nt, Human
ucacuuaaaacac

SEQ ID NO: 2657231 - RNA, 16 nt, Human
ucacugaugggaaaac

SEQ ID NO: 2657232 - RNA, 18 nt, Human
ucacugaugggaaaacug

SEQ ID NO: 2657233 - RNA, 11 nt, Human
acccaaagcug

SEQ ID NO: 2657234 - RNA, 16 nt, Human
acccaaagcugagccu

SEQ ID NO: 2657235 - RNA, 17 nt, Human
acccaaagcugagccug

SEQ ID NO: 2657236 - RNA, 18 nt, Human
acccaaagcugagccugc

SEQ ID NO: 2657237 - RNA, 22 nt, Human
acccaaagcugagccugcaggg

SEQ ID NO: 2657238 - RNA, 13 nt, Human
accauucugacuc

SEQ ID NO: 2657239 - RNA, 21 nt, Human
accauucugacucgguuucuc

SEQ ID NO: 2657240 - RNA, 17 nt, Human
accaugccucacuaauu

SEQ ID NO: 2657241 - RNA, 19 nt, Human
accaugccucacuaauuuu

SEQ ID NO: 2657242 - RNA, 20 nt, Human
accaugccucacuaauuuuu

SEQ ID NO: 2657243 - RNA, 19 nt, Human
accaugcucaucugcuggu

SEQ ID NO: 2657244 - RNA, 20 nt, Human
accaugcucaucugcugguc

SEQ ID NO: 2657245 - RNA, 14 nt, Human
accagggguuucuc

SEQ ID NO: 2657246 - RNA, 16 nt, Human
accagggguuucucgc

SEQ ID NO: 2657247 - RNA, 17 nt, Human
accagggguuucucgca

SEQ ID NO: 2657248 - RNA, 16 nt, Human
accaugugagcucuuc

SEQ ID NO: 2657249 - RNA, 18 nt, Human
accaugugagcucuuccu

SEQ ID NO: 2657250 - RNA, 19 nt, Human
accaugugagcucuuccua

SEQ ID NO: 2657251 - RNA, 22 nt, Human
accauguggauaacuuuacaga

SEQ ID NO: 2657252 - RNA, 14 nt, Human
accauguggccaca

SEQ ID NO: 2657253 - RNA, 12 nt, Human
accaugucauuu

SEQ ID NO: 2657254 - RNA, 15 nt, Human
accaugucauuucag

SEQ ID NO: 2657255 - RNA, 18 nt, Human
accaugucauuucagaag

SEQ ID NO: 2657256 - RNA, 13 nt, Human
ucggggagccuua

SEQ ID NO: 2657257 - RNA, 22 nt, Human
ucguacauaauacugaaccacu

SEQ ID NO: 2657258 - RNA, 15 nt, Human
ucguacauaauacug

SEQ ID NO: 2657259 - RNA, 14 nt, Human
ucguacauaauacu

SEQ ID NO: 2657260 - RNA, 20 nt, Human
ucuaaacaaugcugauuugg

SEQ ID NO: 2657261 - RNA, 18 nt, Human
ucgucacuaauacacagu

SEQ ID NO: 2657262 - RNA, 21 nt, Human
ucguucuguacuguuacuggg

SEQ ID NO: 2657263 - RNA, 22 nt, Human
ucguugguuauacaaguucuug

SEQ ID NO: 2657264 - RNA, 20 nt, Human
acuguggcacuugccugggu

SEQ ID NO: 2657265 - RNA, 19 nt, Human
acuguggcacuugccuggg

SEQ ID NO: 2657266 - RNA, 22 nt, Human
acuguggcacuugccuggguca

SEQ ID NO: 2657267 - RNA, 14 nt, Human
acuguguugccaca

SEQ ID NO: 2657268 - RNA, 21 nt, Human
acuguguuguaccaaaauuca

SEQ ID NO: 2657269 - RNA, 17 nt, Human
acuguguuuuauaaaau

SEQ ID NO: 2657270 - RNA, 18 nt, Human
acuguguuuuauaaaaua

SEQ ID NO: 2657271 - RNA, 19 nt, Human
acuguguuuuauaaaauag

SEQ ID NO: 2657272 - RNA, 16 nt, Human
ucgggagacagcauca

SEQ ID NO: 2657273 - RNA, 21 nt, Human
ucgggagacagcaucaggguu

SEQ ID NO: 2657274 - RNA, 21 nt, Human
ucuacaugaggaacuguagau

SEQ ID NO: 2657275 - RNA, 21 nt, Human
ucuacccucuuagaaaaacca

SEQ ID NO: 2657276 - RNA, 20 nt, Human
ucuacaugaggaacuguaga

SEQ ID NO: 2657277 - RNA, 18 nt, Human
ucuaagcagcuuauuguu

SEQ ID NO: 2657278 - RNA, 21 nt, Human
ucuaagucaguacccaccacc

SEQ ID NO: 2657279 - RNA, 15 nt, Human
ucuaagucauguaug

SEQ ID NO: 2657280 - RNA, 16 nt, Human
ucuaagucauguaugu

SEQ ID NO: 2657281 - RNA, 18 nt, Human
ucuaagucauguauguuu

SEQ ID NO: 2657282 - RNA, 19 nt, Human
ucuaagucauguauguuuc

SEQ ID NO: 2657283 - RNA, 20 nt, Human
ucuaagucauguauguuucu

SEQ ID NO: 2657284 - RNA, 18 nt, Human
ucuaagugggcauugcca

SEQ ID NO: 2657285 - RNA, 21 nt, Human
ucuaagugggcauugccaugu

SEQ ID NO: 2657286 - RNA, 12 nt, Human
ucuaaagagcau

SEQ ID NO: 2657287 - RNA, 13 nt, Human
ucuaaagagcauc

SEQ ID NO: 2657288 - RNA, 14 nt, Human
ucuaaagagcaucu

SEQ ID NO: 2657289 - RNA, 12 nt, Human
ucuaagagaagu

SEQ ID NO: 2657290 - RNA, 16 nt, Human
ucuaagacuauauaua

SEQ ID NO: 2657291 - RNA, 21 nt, Human
ucuaagacuauauauauaaau

SEQ ID NO: 2657292 - RNA, 23 nt, Human
ucuaagacuauauauauaaaugu

SEQ ID NO: 2657293 - RNA, 15 nt, Human
acuggggcauccugu

SEQ ID NO: 2657294 - RNA, 15 nt, Human
acugggguugagggc

SEQ ID NO: 2657295 - RNA, 15 nt, Human
acugucaaaugaugu

SEQ ID NO: 2657296 - RNA, 20 nt, Human
acugucaaaugaugugcaaa

SEQ ID NO: 2657297 - RNA, 22 nt, Human
acugucaaaugaugugcaaaac

SEQ ID NO: 2657298 - RNA, 15 nt, Human
acugucacucauugc

SEQ ID NO: 2657299 - RNA, 14 nt, Human
acugucacucauug

SEQ ID NO: 2657300 - RNA, 20 nt, Human
acugucaggcugaaaacaau

SEQ ID NO: 2657301 - RNA, 14 nt, Human
acuguaucauuuuc

SEQ ID NO: 2657302 - RNA, 15 nt, Human
acuguaucauuuucu

SEQ ID NO: 2657303 - RNA, 16 nt, Human
acuguaucauuuucuu

SEQ ID NO: 2657304 - RNA, 12 nt, Human
acuguauuugaa

SEQ ID NO: 2657305 - RNA, 23 nt, Human
acuguauuugaaauaagaauuca

SEQ ID NO: 2657306 - RNA, 15 nt, Human
acugaaaguuuugua

SEQ ID NO: 2657307 - RNA, 16 nt, Human
acugaaaguuuuguaa

SEQ ID NO: 2657308 - RNA, 17 nt, Human
acugaaaguuuuguaaa

SEQ ID NO: 2657309 - RNA, 18 nt, Human
acugaaaguuuuguaaaa

SEQ ID NO: 2657310 - RNA, 23 nt, Human
acugaaaguuuuguaaaagaaau

SEQ ID NO: 2657311 - RNA, 21 nt, Human
acugaagcagccucuccccag

SEQ ID NO: 2657312 - RNA, 13 nt, Human
acugaagcagccu

SEQ ID NO: 2657313 - RNA, 14 nt, Human
acugaagcagccuc

SEQ ID NO: 2657314 - RNA, 16 nt, Human
acugaaaggcuuuuca

SEQ ID NO: 2657315 - RNA, 17 nt, Human
ucgccggaucugaggga

SEQ ID NO: 2657316 - RNA, 16 nt, Human
ucgccggaucugaggg

SEQ ID NO: 2657317 - RNA, 12 nt, Human
ucgccucagccu

SEQ ID NO: 2657318 - RNA, 12 nt, Human
acugggcccuga

SEQ ID NO: 2657319 - RNA, 14 nt, Human
acugggcccugagu

SEQ ID NO: 2657320 - RNA, 17 nt, Human
acugggcccugagucug

SEQ ID NO: 2657321 - RNA, 22 nt, Human
acugggcucccgggccccacag

SEQ ID NO: 2657322 - RNA, 16 nt, Human
acugggcucccgggcc

SEQ ID NO: 2657323 - RNA, 23 nt, Human
ucgcugugucagcauagaaguaa

SEQ ID NO: 2657324 - RNA, 17 nt, Human
acugaaaugccugcuuu

SEQ ID NO: 2657325 - RNA, 22 nt, Human
ucgcugagggcagacuggggca

SEQ ID NO: 2657326 - RNA, 19 nt, Human
acuggggcuggggaaggaa

SEQ ID NO: 2657327 - RNA, 21 nt, Human
acuggggcuggggaaggaagc

SEQ ID NO: 2657328 - RNA, 22 nt, Human
acuggggcuggggaaggaagcc

SEQ ID NO: 2657329 - RNA, 17 nt, Human
acuggggccuccagaac

SEQ ID NO: 2657330 - RNA, 16 nt, Human
acuggggccuccagaa

SEQ ID NO: 2657331 - RNA, 13 nt, Human
acuggggccucca

SEQ ID NO: 2657332 - RNA, 12 nt, Human
acuggggccucc

SEQ ID NO: 2657333 - RNA, 21 nt, Human
acuggggccuacagcuuugau

SEQ ID NO: 2657334 - RNA, 15 nt, Human
acuugaaugugucag

SEQ ID NO: 2657335 - RNA, 20 nt, Human
acuugaagccaucuaaagua

SEQ ID NO: 2657336 - RNA, 17 nt, Human
acuugacuuuuaaggcu

SEQ ID NO: 2657337 - RNA, 13 nt, Human
acuugaggccuga

SEQ ID NO: 2657338 - RNA, 12 nt, Human
acuugccucuuc

SEQ ID NO: 2657339 - RNA, 23 nt, Human
acuuggaagcacaccaaucuuac

SEQ ID NO: 2657340 - RNA, 18 nt, Human
acuuguauuaaagacaga

SEQ ID NO: 2657341 - RNA, 20 nt, Human
ucuauuuuuugaaaagcaga

SEQ ID NO: 2657342 - RNA, 14 nt, Human
ucuauauauauaau

SEQ ID NO: 2657343 - RNA, 16 nt, Human
ucucaaaaaaagaaaa

SEQ ID NO: 2657344 - RNA, 20 nt, Human
acuucgggaggucgaggcag

SEQ ID NO: 2657345 - RNA, 17 nt, Human
acuucgggaggucgagg

SEQ ID NO: 2657346 - RNA, 22 nt, Human
acuucgcaccggagugucugga

SEQ ID NO: 2657347 - RNA, 16 nt, Human
ucuagcagcaccuccu

SEQ ID NO: 2657348 - RNA, 21 nt, Human
ucuagccagccccucuucccc

SEQ ID NO: 2657349 - RNA, 22 nt, Human
ucuagcacaauuugcacuaaau

SEQ ID NO: 2657350 - RNA, 15 nt, Human
ucuagauaucgacuu

SEQ ID NO: 2657351 - RNA, 13 nt, Human
ucuaguuuuguca

SEQ ID NO: 2657352 - RNA, 12 nt, Human
ucuauaaaacuc

SEQ ID NO: 2657353 - RNA, 16 nt, Human
ucuauaaaacucugca

SEQ ID NO: 2657354 - RNA, 16 nt, Human
ucuauaaaagaaacac

SEQ ID NO: 2657355 - RNA, 14 nt, Human
ucuauaaaauagau

SEQ ID NO: 2657356 - RNA, 17 nt, Human
ucuauaaaauagauaua

SEQ ID NO: 2657357 - RNA, 19 nt, Human
ucuauaaaauagauauaaa

SEQ ID NO: 2657358 - RNA, 21 nt, Human
ucuauaggaacauaugaaaau

SEQ ID NO: 2657359 - RNA, 20 nt, Human
ucuauaggaacauaugaaaa

SEQ ID NO: 2657360 - RNA, 18 nt, Human
ucuauaggaacauaugaa

SEQ ID NO: 2657361 - RNA, 20 nt, Human
ucuauagcaucacuuaaaac

SEQ ID NO: 2657362 - RNA, 19 nt, Human
ucuauagcaucacuuaaaa

SEQ ID NO: 2657363 - RNA, 13 nt, Human
acuucccacccug

SEQ ID NO: 2657364 - RNA, 14 nt, Human
acuucccacccugc

SEQ ID NO: 2657365 - RNA, 17 nt, Human
acuucccacccugcccc

SEQ ID NO: 2657366 - RNA, 19 nt, Human
acuucccacccugccccuc

SEQ ID NO: 2657367 - RNA, 13 nt, Human
acuuccaugaauu

SEQ ID NO: 2657368 - RNA, 14 nt, Human
acuuccaugaauuu

SEQ ID NO: 2657369 - RNA, 15 nt, Human
acuuccaugaauuuu

SEQ ID NO: 2657370 - RNA, 17 nt, Human
acuuagcgaacccuuua

SEQ ID NO: 2657371 - RNA, 12 nt, Human
acuucauguaaa

SEQ ID NO: 2657372 - RNA, 13 nt, Human
acuucauguaaag

SEQ ID NO: 2657373 - RNA, 16 nt, Human
acuucauguaaagugu

SEQ ID NO: 2657374 - RNA, 21 nt, Human
acuucauuauuuuaaaaauau

SEQ ID NO: 2657375 - RNA, 12 nt, Human
ucuaccugcccu

SEQ ID NO: 2657376 - RNA, 18 nt, Human
ucuaccugcccucaaggg

SEQ ID NO: 2657377 - RNA, 19 nt, Human
ucuccuucuaaaaacuucu

SEQ ID NO: 2657378 - RNA, 12 nt, Human
ucuccuuaagcu

SEQ ID NO: 2657379 - RNA, 20 nt, Human
ucuccuuaagcugcagagau

SEQ ID NO: 2657380 - RNA, 22 nt, Human
ucuccuuaagcugcagagauuu

SEQ ID NO: 2657381 - RNA, 13 nt, Human
agaaaaaaauguc

SEQ ID NO: 2657382 - RNA, 19 nt, Human
agaaaaaaaugucaaaagu

SEQ ID NO: 2657383 - RNA, 20 nt, Human
agaaaaaaaugucaaaagua

SEQ ID NO: 2657384 - RNA, 19 nt, Human
acuuugcuguuccuuacuu

SEQ ID NO: 2657385 - RNA, 14 nt, Human
acuuuguauuuuga

SEQ ID NO: 2657386 - RNA, 23 nt, Human
acuuuguauaguuauguaaauaa

SEQ ID NO: 2657387 - RNA, 24 nt, Human
acuuuguauuguccuauuaguguu

SEQ ID NO: 2657388 - RNA, 15 nt, Human
acuuuguauuguccu

SEQ ID NO: 2657389 - RNA, 16 nt, Human
agaaaaaaauacuauu

SEQ ID NO: 2657390 - RNA, 16 nt, Human
ucucgcauaggaccuu

SEQ ID NO: 2657391 - RNA, 23 nt, Human
ucucgcauaggaccuuuccacca

SEQ ID NO: 2657392 - RNA, 16 nt, Human
ucuccuugaguguaug

SEQ ID NO: 2657393 - RNA, 18 nt, Human
ucucggauaguugcuauu

SEQ ID NO: 2657394 - RNA, 23 nt, Human
ucucggauaguugcuauuuuugu

SEQ ID NO: 2657395 - RNA, 20 nt, Human
ucucggaucaggcucccagg

SEQ ID NO: 2657396 - RNA, 19 nt, Human
acuuuacugccugaauaaa

SEQ ID NO: 2657397 - RNA, 18 nt, Human
acuuguuuuggauggcuu

SEQ ID NO: 2657398 - RNA, 19 nt, Human
acuuguuuuggauggcuug

SEQ ID NO: 2657399 - RNA, 20 nt, Human
acuuguuuuggauggcuugu

SEQ ID NO: 2657400 - RNA, 16 nt, Human
acuugugauuauuuau

SEQ ID NO: 2657401 - RNA, 20 nt, Human
acuugugauuauuuauuauu

SEQ ID NO: 2657402 - RNA, 17 nt, Human
acuugugauuauuuauu

SEQ ID NO: 2657403 - RNA, 11 nt, Human
acuuugauguc

SEQ ID NO: 2657404 - RNA, 10 nt, Human
acuuugaugu

SEQ ID NO: 2657405 - RNA, 22 nt, Human
acuuugaugucagcaguugcug

SEQ ID NO: 2657406 - RNA, 17 nt, Human
acuuugaugucagcagu

SEQ ID NO: 2657407 - RNA, 16 nt, Human
acuuugaugucagcag

SEQ ID NO: 2657408 - RNA, 12 nt, Human
acuuugauguca

SEQ ID NO: 2657409 - RNA, 21 nt, Human
acuuuguauaguuauguaaau

SEQ ID NO: 2657410 - RNA, 18 nt, Human
acuuuguauaguuaugua

SEQ ID NO: 2657411 - RNA, 17 nt, Human
acuuuguauaguuaugu

SEQ ID NO: 2657412 - RNA, 14 nt, Human
acuuuguauaguua

SEQ ID NO: 2657413 - RNA, 12 nt, Human
acuuuguauagu

SEQ ID NO: 2657414 - RNA, 17 nt, Human
agaaauacaguacuguu

SEQ ID NO: 2657415 - RNA, 16 nt, Human
agaaauggaaagcaga

SEQ ID NO: 2657416 - RNA, 16 nt, Human
agaaauggaaauuuug

SEQ ID NO: 2657417 - RNA, 23 nt, Human
ucugaaggcgucaacgugcauuu

SEQ ID NO: 2657418 - RNA, 23 nt, Human
agaaacuuaaauguuauuaucug

SEQ ID NO: 2657419 - RNA, 12 nt, Human
agaaagagcuac

SEQ ID NO: 2657420 - RNA, 15 nt, Human
agaaagagcuaccug

SEQ ID NO: 2657421 - RNA, 22 nt, Human
agaaagaggcaccaggaagccg

SEQ ID NO: 2657422 - RNA, 13 nt, Human
agaaaagaugaaa

SEQ ID NO: 2657423 - RNA, 21 nt, Human
agaaaacaagcaaguucugag

SEQ ID NO: 2657424 - RNA, 22 nt, Human
agaaaacaagcaaguucugaga

SEQ ID NO: 2657425 - RNA, 19 nt, Human
agaaaagccuaaucacagu

SEQ ID NO: 2657426 - RNA, 18 nt, Human
agaaacuuaaauguuauu

SEQ ID NO: 2657427 - RNA, 20 nt, Human
agaaacuuaaauguuauuau

SEQ ID NO: 2657428 - RNA, 17 nt, Human
agaaacuuaaauguuau

SEQ ID NO: 2657429 - RNA, 18 nt, Human
agaaaaaugagccuggca

SEQ ID NO: 2657430 - RNA, 16 nt, Human
agaaaacaagcaaguu

SEQ ID NO: 2657431 - RNA, 23 nt, Human
agaaaaaauauuuuccugccagg

SEQ ID NO: 2657432 - RNA, 17 nt, Human
agaaaaaauauuuuccu

SEQ ID NO: 2657433 - RNA, 19 nt, Human
agaaaaaauauuuucccua

SEQ ID NO: 2657434 - RNA, 18 nt, Human
agaacuugaaugugucag

SEQ ID NO: 2657435 - RNA, 12 nt, Human
agaacuuuguau

SEQ ID NO: 2657436 - RNA, 13 nt, Human
agaagcaaguaaa

SEQ ID NO: 2657437 - RNA, 15 nt, Human
agaacuuuguauagu

SEQ ID NO: 2657438 - RNA, 13 nt, Human
agaacuuuguaua

SEQ ID NO: 2657439 - RNA, 17 nt, Human
agaacuuuguauaguua

SEQ ID NO: 2657440 - RNA, 16 nt, Human
agaagcagaggaagga

SEQ ID NO: 2657441 - RNA, 15 nt, Human
agaagcaguggccuu

SEQ ID NO: 2657442 - RNA, 23 nt, Human
agaagcaguuguaccaagugaaa

SEQ ID NO: 2657443 - RNA, 17 nt, Human
agaagcaugaagucuua

SEQ ID NO: 2657444 - RNA, 16 nt, Human
agaagcacagaauauu

SEQ ID NO: 2657445 - RNA, 19 nt, Human
agaagcacagaauauuuuu

SEQ ID NO: 2657446 - RNA, 21 nt, Human
agaagcacagaauauuuuuau

SEQ ID NO: 2657447 - RNA, 20 nt, Human
agaagcccgugugagaagug

SEQ ID NO: 2657448 - RNA, 13 nt, Human
ucugcccuggcug

SEQ ID NO: 2657449 - RNA, 14 nt, Human
ucugcccuggcugc

SEQ ID NO: 2657450 - RNA, 15 nt, Human
ucugcccuggcugcu

SEQ ID NO: 2657451 - RNA, 16 nt, Human
ucugcccuggcugcug

SEQ ID NO: 2657452 - RNA, 21 nt, Human
ucugcccuggcugcugccccc

SEQ ID NO: 2657453 - RNA, 14 nt, Human
agaacucacugggg

SEQ ID NO: 2657454 - RNA, 12 nt, Human
agaacugcaggc

SEQ ID NO: 2657455 - RNA, 15 nt, Human
agaacugcaggcccu

SEQ ID NO: 2657456 - RNA, 20 nt, Human
agaacugcaggcccuggccu

SEQ ID NO: 2657457 - RNA, 16 nt, Human
agaacugcaggcccug

SEQ ID NO: 2657458 - RNA, 18 nt, Human
agaacugcaggcccuggc

SEQ ID NO: 2657459 - RNA, 21 nt, Human
agaacuauugugcucagagac

SEQ ID NO: 2657460 - RNA, 23 nt, Human
agaacuauugugcucagagacac

SEQ ID NO: 2657461 - RNA, 18 nt, Human
agaacgaggauuuuaauu

SEQ ID NO: 2657462 - RNA, 13 nt, Human
agaaggaugaugu

SEQ ID NO: 2657463 - RNA, 17 nt, Human
agaaguucauguccaaa

SEQ ID NO: 2657464 - RNA, 17 nt, Human
agaagugcccuuccugc

SEQ ID NO: 2657465 - RNA, 14 nt, Human
agaagugagcaaaa

SEQ ID NO: 2657466 - RNA, 18 nt, Human
agaagugagcaaaaaaga

SEQ ID NO: 2657467 - RNA, 22 nt, Human
agaaguuugagaucagccuggg

SEQ ID NO: 2657468 - RNA, 21 nt, Human
agaaguuguaaaguauguauu

SEQ ID NO: 2657469 - RNA, 21 nt, Human
agaauauuuuuauauuuccuu

SEQ ID NO: 2657470 - RNA, 22 nt, Human
agaauauuuuuauauuuccuuu

SEQ ID NO: 2657471 - RNA, 23 nt, Human
agaauauuuuuauauuuccuuua

SEQ ID NO: 2657472 - RNA, 11 nt, Human
agaauacugau

SEQ ID NO: 2657473 - RNA, 14 nt, Human
agaauacugaugga

SEQ ID NO: 2657474 - RNA, 16 nt, Human
agaauaccacaucaaa

SEQ ID NO: 2657475 - RNA, 17 nt, Human
agaauaccacaucaaau

SEQ ID NO: 2657476 - RNA, 18 nt, Human
agaauaccacaucaaaua

SEQ ID NO: 2657477 - RNA, 21 nt, Human
agaaguuuggcugcugucaua

SEQ ID NO: 2657478 - RNA, 22 nt, Human
agaaguuuggcugcugucauaa

SEQ ID NO: 2657479 - RNA, 15 nt, Human
ucuggccucugcuuu

SEQ ID NO: 2657480 - RNA, 21 nt, Human
agaagccgagagccuuuugug

SEQ ID NO: 2657481 - RNA, 12 nt, Human
ucuggcaaggac

SEQ ID NO: 2657482 - RNA, 18 nt, Human
ucuggcaaggacuuugua

SEQ ID NO: 2657483 - RNA, 23 nt, Human
ucuggcaaggacuuuguacauuu

SEQ ID NO: 2657484 - RNA, 21 nt, Human
ucugcuuuucugcccuggcug

SEQ ID NO: 2657485 - RNA, 22 nt, Human
ucugcuuuucugcccuggcugc

SEQ ID NO: 2657486 - RNA, 15 nt, Human
ucugcuuuucugccc

SEQ ID NO: 2657487 - RNA, 16 nt, Human
ucugcuuuucugcccu

SEQ ID NO: 2657488 - RNA, 17 nt, Human
ucugcuuuucugcccug

SEQ ID NO: 2657489 - RNA, 18 nt, Human
ucugcuuuucugcccugg

SEQ ID NO: 2657490 - RNA, 19 nt, Human
ucugcuuuucugcccuggc

SEQ ID NO: 2657491 - RNA, 20 nt, Human
ucugcuuuucugcccuggcu

SEQ ID NO: 2657492 - RNA, 16 nt, Human
ucugccuuaaaaccaa

SEQ ID NO: 2657493 - RNA, 17 nt, Human
ucugccuuaaaaccaaa

SEQ ID NO: 2657494 - RNA, 20 nt, Human
ucugccuuaaaaccaaagag

SEQ ID NO: 2657495 - RNA, 17 nt, Human
ucugcccuggcugcugc

SEQ ID NO: 2657496 - RNA, 12 nt, Human
ugaauaaagugu

SEQ ID NO: 2657497 - RNA, 21 nt, Human
ugaauacugcuugaauaaaca

SEQ ID NO: 2657498 - RNA, 18 nt, Human
ugaauacugcuugaauaa

SEQ ID NO: 2657499 - RNA, 16 nt, Human
ugaauacugcuugaau

SEQ ID NO: 2657500 - RNA, 15 nt, Human
ugaauacugcuugaa

SEQ ID NO: 2657501 - RNA, 13 nt, Human
ugaauacugcuug

SEQ ID NO: 2657502 - RNA, 19 nt, Human
ugaauacuugaaccauaaa

SEQ ID NO: 2657503 - RNA, 16 nt, Human
ugaauacuugaaccau

SEQ ID NO: 2657504 - RNA, 15 nt, Human
ugaauacuugaacca

SEQ ID NO: 2657505 - RNA, 13 nt, Human
ugaauacuugaac

SEQ ID NO: 2657506 - RNA, 21 nt, Human
ugaauaucuauuaauauaugu

SEQ ID NO: 2657507 - RNA, 18 nt, Human
ugaauaucuauuaauaua

SEQ ID NO: 2657508 - RNA, 13 nt, Human
ugaauaugauuaa

SEQ ID NO: 2657509 - RNA, 22 nt, Human
ugaauaugauuaaaaauaucaa

SEQ ID NO: 2657510 - RNA, 21 nt, Human
ugaauaugauuaaaaauauca

SEQ ID NO: 2657511 - RNA, 15 nt, Human
ugaauaugauuaaaa

SEQ ID NO: 2657512 - RNA, 14 nt, Human
ugaauaugauuaaa

SEQ ID NO: 2657513 - RNA, 23 nt, Human
ugaauauguaguaucuauaugac

SEQ ID NO: 2657514 - RNA, 13 nt, Human
ugaauaaagagcc

SEQ ID NO: 2657515 - RNA, 11 nt, Human
ugaauguauuu

SEQ ID NO: 2657516 - RNA, 21 nt, Human
ugaaggggguaccuuaagaga

SEQ ID NO: 2657517 - RNA, 23 nt, Human
ugaagccaaguggggugcuggga

SEQ ID NO: 2657518 - RNA, 21 nt, Human
ugaagccaaguggggugcugg

SEQ ID NO: 2657519 - RNA, 22 nt, Human
ugaagccaaguggggugcuggg

SEQ ID NO: 2657520 - RNA, 11 nt, Human
ugaagccaaag

SEQ ID NO: 2657521 - RNA, 12 nt, Human
ugaagccaaaga

SEQ ID NO: 2657522 - RNA, 14 nt, Human
ugaagccaaagaaa

SEQ ID NO: 2657523 - RNA, 14 nt, Human
ugaagccaaguggg

SEQ ID NO: 2657524 - RNA, 24 nt, Human
agaggugggccagucuguggauca

SEQ ID NO: 2657525 - RNA, 14 nt, Human
agaggcccccagcc

SEQ ID NO: 2657526 - RNA, 16 nt, Human
agaggcccccagccca

SEQ ID NO: 2657527 - RNA, 17 nt, Human
agaggcccccagcccag

SEQ ID NO: 2657528 - RNA, 20 nt, Human
agaggcccccagcccagggc

SEQ ID NO: 2657529 - RNA, 21 nt, Human
agaggcccccagcccagggcu

SEQ ID NO: 2657530 - RNA, 22 nt, Human
agaggcccccagcccagggcuc

SEQ ID NO: 2657531 - RNA, 14 nt, Human
agaggcuggguuca

SEQ ID NO: 2657532 - RNA, 15 nt, Human
ugaaaguagggggcu

SEQ ID NO: 2657533 - RNA, 12 nt, Human
agaggcuucucc

SEQ ID NO: 2657534 - RNA, 16 nt, Human
agaggcuucuccgcca

SEQ ID NO: 2657535 - RNA, 17 nt, Human
agaggcuucuccgccag

SEQ ID NO: 2657536 - RNA, 19 nt, Human
agaggcuucuccgccagcc

SEQ ID NO: 2657537 - RNA, 20 nt, Human
agaggcuucuccgccagccu

SEQ ID NO: 2657538 - RNA, 21 nt, Human
agaggcuucuccgccagccuc

SEQ ID NO: 2657539 - RNA, 22 nt, Human
agaggcuucuccgccagccucc

SEQ ID NO: 2657540 - RNA, 12 nt, Human
agagggagagag

SEQ ID NO: 2657541 - RNA, 13 nt, Human
agagggagagaga

SEQ ID NO: 2657542 - RNA, 23 nt, Human
agaggcuucuccgccagccuccu

SEQ ID NO: 2657543 - RNA, 21 nt, Human
agaggugggccagucugugga

SEQ ID NO: 2657544 - RNA, 17 nt, Human
ugaauuuuaaaucuaaa

SEQ ID NO: 2657545 - RNA, 13 nt, Human
ugaauuuuuaagc

SEQ ID NO: 2657546 - RNA, 14 nt, Human
ugaauuuuuauugu

SEQ ID NO: 2657547 - RNA, 15 nt, Human
ugaauuuuuauuguu

SEQ ID NO: 2657548 - RNA, 16 nt, Human
ugaauuuuuauuguug

SEQ ID NO: 2657549 - RNA, 23 nt, Human
ugaauuuuaaaucuaaaucuauu

SEQ ID NO: 2657550 - RNA, 15 nt, Human
ugaauuuuaaaaucu

SEQ ID NO: 2657551 - RNA, 20 nt, Human
agaguuucaguuuguuggaa

SEQ ID NO: 2657552 - RNA, 21 nt, Human
agaguuucaguuuguuggaaa

SEQ ID NO: 2657553 - RNA, 15 nt, Human
agagucaaggccugc

SEQ ID NO: 2657554 - RNA, 16 nt, Human
agagucaaggccugcu

SEQ ID NO: 2657555 - RNA, 23 nt, Human
agaguuuuauagccuggacugcu

SEQ ID NO: 2657556 - RNA, 15 nt, Human
agaucaaaaaggcuu

SEQ ID NO: 2657557 - RNA, 14 nt, Human
agaucaaaaaggcu

SEQ ID NO: 2657558 - RNA, 20 nt, Human
agaucaaaaaggcuuauaaa

SEQ ID NO: 2657559 - RNA, 19 nt, Human
agaucaaaaaggcuuauaa

SEQ ID NO: 2657560 - RNA, 16 nt, Human
agaucaaaaaggcuua

SEQ ID NO: 2657561 - RNA, 22 nt, Human
agauaauauuaaggaagacaau

SEQ ID NO: 2657562 - RNA, 18 nt, Human
agauaauauuaaggaaga

SEQ ID NO: 2657563 - RNA, 14 nt, Human
agauaauauuguuu

SEQ ID NO: 2657564 - RNA, 17 nt, Human
agauaauauuguuuggu

SEQ ID NO: 2657565 - RNA, 20 nt, Human
agauaauauuguuugguaaa

SEQ ID NO: 2657566 - RNA, 20 nt, Human
agcaacuuuuguguaaugaa

SEQ ID NO: 2657567 - RNA, 15 nt, Human
agcaacuuuugugua

SEQ ID NO: 2657568 - RNA, 21 nt, Human
agcaacuucuucuccaucccu

SEQ ID NO: 2657569 - RNA, 15 nt, Human
agcaacuucuucucc

SEQ ID NO: 2657570 - RNA, 16 nt, Human
agcaacuucuucucca

SEQ ID NO: 2657571 - RNA, 18 nt, Human
agcaacuucuucuccauc

SEQ ID NO: 2657572 - RNA, 13 nt, Human
agcaacggcacag

SEQ ID NO: 2657573 - RNA, 23 nt, Human
agcaaaaaaaaaaaaaagcaucu

SEQ ID NO: 2657574 - RNA, 14 nt, Human
agcaaaaaagaguu

SEQ ID NO: 2657575 - RNA, 13 nt, Human
agauuuuugcaau

SEQ ID NO: 2657576 - RNA, 17 nt, Human
agauuuuuuaauuguuu

SEQ ID NO: 2657577 - RNA, 23 nt, Human
agauuuuuuaauuguuuaaaaac

SEQ ID NO: 2657578 - RNA, 14 nt, Human
agauuuuugcaaua

SEQ ID NO: 2657579 - RNA, 15 nt, Human
ugagaagguuuauug

SEQ ID NO: 2657580 - RNA, 16 nt, Human
ugagaagguuuauugu

SEQ ID NO: 2657581 - RNA, 17 nt, Human
ugagaagguuuauuguu

SEQ ID NO: 2657582 - RNA, 18 nt, Human
ugagaagguuuauuguua

SEQ ID NO: 2657583 - RNA, 19 nt, Human
ugagaagguuuauuguuaa

SEQ ID NO: 2657584 - RNA, 20 nt, Human
ugagaagguuuauuguuaau

SEQ ID NO: 2657585 - RNA, 18 nt, Human
ugagaagugaaugcuggg

SEQ ID NO: 2657586 - RNA, 19 nt, Human
ugagaagugaaugcuggga

SEQ ID NO: 2657587 - RNA, 21 nt, Human
ugagaagugaaugcugggacu

SEQ ID NO: 2657588 - RNA, 22 nt, Human
ugagaagugaaugcugggacuc

SEQ ID NO: 2657589 - RNA, 20 nt, Human
ugagaagcagaggaaggaga

SEQ ID NO: 2657590 - RNA, 18 nt, Human
agauucaugauuuauaaa

SEQ ID NO: 2657591 - RNA, 16 nt, Human
agauuucucauugacu

SEQ ID NO: 2657592 - RNA, 18 nt, Human
agauuucucauugacuuu

SEQ ID NO: 2657593 - RNA, 15 nt, Human
agauuucugaggaaa

SEQ ID NO: 2657594 - RNA, 14 nt, Human
agauuucugaggaa

SEQ ID NO: 2657595 - RNA, 22 nt, Human
agauuuucuuuugccuuuugca

SEQ ID NO: 2657596 - RNA, 19 nt, Human
agauuuuuaaaaaauauuu

SEQ ID NO: 2657597 - RNA, 21 nt, Human
agauuuuuaaaaaauauuuuc

SEQ ID NO: 2657598 - RNA, 16 nt, Human
agauguuuaaaacacc

SEQ ID NO: 2657599 - RNA, 15 nt, Human
agauguuuaaaacac

SEQ ID NO: 2657600 - RNA, 14 nt, Human
agauguuuaaaaca

SEQ ID NO: 2657601 - RNA, 17 nt, Human
agauguugccauguguu

SEQ ID NO: 2657602 - RNA, 18 nt, Human
agauguugccauguguuu

SEQ ID NO: 2657603 - RNA, 14 nt, Human
agauguuuccagac

SEQ ID NO: 2657604 - RNA, 23 nt, Human
agauguuuccagacuuccuugag

SEQ ID NO: 2657605 - RNA, 21 nt, Human
agauguuuccagacuuccuug

SEQ ID NO: 2657606 - RNA, 16 nt, Human
agauguugauuuuuac

SEQ ID NO: 2657607 - RNA, 22 nt, Human
agauguugauuuuuacuguguu

SEQ ID NO: 2657608 - RNA, 23 nt, Human
agauguugauuuuuacuguguuu

SEQ ID NO: 2657609 - RNA, 14 nt, Human
agauguugccaugu

SEQ ID NO: 2657610 - RNA, 16 nt, Human
agauuaaacuucauau

SEQ ID NO: 2657611 - RNA, 15 nt, Human
ugacccauugcuguu

SEQ ID NO: 2657612 - RNA, 14 nt, Human
ugacccauugcugu

SEQ ID NO: 2657613 - RNA, 13 nt, Human
ugacccauugcug

SEQ ID NO: 2657614 - RNA, 10 nt, Human
ugacacugaa

SEQ ID NO: 2657615 - RNA, 12 nt, Human
ugacacugaaag

SEQ ID NO: 2657616 - RNA, 18 nt, Human
ugacacugaaaguuuugu

SEQ ID NO: 2657617 - RNA, 19 nt, Human
ugacacugaaaguuuugua

SEQ ID NO: 2657618 - RNA, 20 nt, Human
ugacacugaaaguuuuguaa

SEQ ID NO: 2657619 - RNA, 22 nt, Human
ugacacugaaaguuuuguaaaa

SEQ ID NO: 2657620 - RNA, 14 nt, Human
ugacucaaagucug

SEQ ID NO: 2657621 - RNA, 16 nt, Human
ugacucgggggugggg

SEQ ID NO: 2657622 - RNA, 17 nt, Human
ugacucgggggugggga

SEQ ID NO: 2657623 - RNA, 17 nt, Human
ugaccugaggcuguggu

SEQ ID NO: 2657624 - RNA, 12 nt, Human
ugaccugaggcu

SEQ ID NO: 2657625 - RNA, 15 nt, Human
ugaccugaggcugug

SEQ ID NO: 2657626 - RNA, 16 nt, Human
ucuuuaaccuuguaua

SEQ ID NO: 2657627 - RNA, 17 nt, Human
ucuuuaaccuuguauaa

SEQ ID NO: 2657628 - RNA, 18 nt, Human
ucuuuaaccuuguauaaa

SEQ ID NO: 2657629 - RNA, 15 nt, Human
ucuuuaauaaauaac

SEQ ID NO: 2657630 - RNA, 12 nt, Human
ucuuuauuuugu

SEQ ID NO: 2657631 - RNA, 16 nt, Human
ucuuuauuuuguguaa

SEQ ID NO: 2657632 - RNA, 15 nt, Human
ucuuggcuuaaucau

SEQ ID NO: 2657633 - RNA, 16 nt, Human
ucuuggcuuaaucauu

SEQ ID NO: 2657634 - RNA, 18 nt, Human
ucuuggcuuaaucauuuu

SEQ ID NO: 2657635 - RNA, 19 nt, Human
ucuuggcuuaaucauuuuc

SEQ ID NO: 2657636 - RNA, 20 nt, Human
ucuuggcuuaaucauuuuca

SEQ ID NO: 2657637 - RNA, 21 nt, Human
ucuuggcuuaaucauuuucau

SEQ ID NO: 2657638 - RNA, 13 nt, Human
ucuuggccagcca

SEQ ID NO: 2657639 - RNA, 14 nt, Human
ucuuggccagccaa

SEQ ID NO: 2657640 - RNA, 23 nt, Human
ucuugggcagagcuggcucugag

SEQ ID NO: 2657641 - RNA, 13 nt, Human
ucuuggggcccag

SEQ ID NO: 2657642 - RNA, 17 nt, Human
ucuuggggcccagugca

SEQ ID NO: 2657643 - RNA, 18 nt, Human
ucuuggggcccagugcau

SEQ ID NO: 2657644 - RNA, 19 nt, Human
ucuugggcagagcuggcuc

SEQ ID NO: 2657645 - RNA, 20 nt, Human
ucuugggcagagcuggcucu

SEQ ID NO: 2657646 - RNA, 21 nt, Human
ucuugggcagagcuggcucug

SEQ ID NO: 2657647 - RNA, 20 nt, Human
ucuuggggggguggccgcug

SEQ ID NO: 2657648 - RNA, 19 nt, Human
ucuuggggggguggccgcu

SEQ ID NO: 2657649 - RNA, 18 nt, Human
agaccuuguuacuucuga

SEQ ID NO: 2657650 - RNA, 19 nt, Human
agaccuuguuacuucugag

SEQ ID NO: 2657651 - RNA, 21 nt, Human
agaccuuguuacuucugaggu

SEQ ID NO: 2657652 - RNA, 22 nt, Human
agaccuuguuacuucugaggua

SEQ ID NO: 2657653 - RNA, 20 nt, Human
agaccuggggcugcugugaa

SEQ ID NO: 2657654 - RNA, 23 nt, Human
ucuugagcuggccucucuagcac

SEQ ID NO: 2657655 - RNA, 17 nt, Human
ucuugagcuggccucuc

SEQ ID NO: 2657656 - RNA, 21 nt, Human
ucuugagcuggccucucuagc

SEQ ID NO: 2657657 - RNA, 12 nt, Human
ucuugagcuggc

SEQ ID NO: 2657658 - RNA, 13 nt, Human
ucuugagcuggcc

SEQ ID NO: 2657659 - RNA, 14 nt, Human
ucuugagcuggccu

SEQ ID NO: 2657660 - RNA, 13 nt, Human
ucuugaguuuguc

SEQ ID NO: 2657661 - RNA, 21 nt, Human
ucuugaguuguuuuuguauau

SEQ ID NO: 2657662 - RNA, 20 nt, Human
ucuugaguuguuuuuguaua

SEQ ID NO: 2657663 - RNA, 14 nt, Human
ucuugaguuugucg

SEQ ID NO: 2657664 - RNA, 15 nt, Human
ucuugauucagucac

SEQ ID NO: 2657665 - RNA, 17 nt, Human
ucuugauucagucacau

SEQ ID NO: 2657666 - RNA, 17 nt, Human
agacucagagcucucuc

SEQ ID NO: 2657667 - RNA, 18 nt, Human
agacucagagcucucucu

SEQ ID NO: 2657668 - RNA, 16 nt, Human
ucuugagccugggagg

SEQ ID NO: 2657669 - RNA, 13 nt, Human
ucuugagccuggg

SEQ ID NO: 2657670 - RNA, 12 nt, Human
ucuucaaccagu

SEQ ID NO: 2657671 - RNA, 13 nt, Human
ucuucccaugcau

SEQ ID NO: 2657672 - RNA, 17 nt, Human
ucuucccaugcauucug

SEQ ID NO: 2657673 - RNA, 22 nt, Human
ucuucccuacaguugaaaaaca

SEQ ID NO: 2657674 - RNA, 19 nt, Human
ucuucccuacaguugaaaa

SEQ ID NO: 2657675 - RNA, 22 nt, Human
agacauccaaauuuuuuuuuaa

SEQ ID NO: 2657676 - RNA, 19 nt, Human
agacaucugagguuuuauu

SEQ ID NO: 2657677 - RNA, 18 nt, Human
agacauguuuuccgugaa

SEQ ID NO: 2657678 - RNA, 21 nt, Human
agaccccggcuuccuuuccca

SEQ ID NO: 2657679 - RNA, 21 nt, Human
ucuucuguguuuauaaaauau

SEQ ID NO: 2657680 - RNA, 22 nt, Human
ucuucuguauuuuuuuuucuaa

SEQ ID NO: 2657681 - RNA, 14 nt, Human
ucuucuguauuuuu

SEQ ID NO: 2657682 - RNA, 22 nt, Human
ucuucugguacuuucuguuaug

SEQ ID NO: 2657683 - RNA, 22 nt, Human
ucuucuggggcaggcugggcca

SEQ ID NO: 2657684 - RNA, 21 nt, Human
ucuucucuuccuuuuaucagu

SEQ ID NO: 2657685 - RNA, 19 nt, Human
ucuucucuuccuuuuauca

SEQ ID NO: 2657686 - RNA, 14 nt, Human
ucuucucugugaga

SEQ ID NO: 2657687 - RNA, 18 nt, Human
ucuucucugugagaaggu

SEQ ID NO: 2657688 - RNA, 18 nt, Human
ucuucuggggcaggcugg

SEQ ID NO: 2657689 - RNA, 20 nt, Human
ucuucuggggcaggcugggc

SEQ ID NO: 2657690 - RNA, 21 nt, Human
ucuucuggggcaggcugggcc

SEQ ID NO: 2657691 - RNA, 16 nt, Human
agagagaacaggacua

SEQ ID NO: 2657692 - RNA, 19 nt, Human
agagaugggaaugaggugg

SEQ ID NO: 2657693 - RNA, 15 nt, Human
agagacgguguuuug

SEQ ID NO: 2657694 - RNA, 20 nt, Human
ugaaacuuguuucacugaaa

SEQ ID NO: 2657695 - RNA, 15 nt, Human
ugaaacuuugggaaa

SEQ ID NO: 2657696 - RNA, 16 nt, Human
ugaaacuuugggaaaa

SEQ ID NO: 2657697 - RNA, 19 nt, Human
ugaaacuuugggaaaacau

SEQ ID NO: 2657698 - RNA, 21 nt, Human
ugaaacuuugggaaaacaugu

SEQ ID NO: 2657699 - RNA, 22 nt, Human
ugaaacuuugggaaaacauguu

SEQ ID NO: 2657700 - RNA, 23 nt, Human
ugaaacuuugggaaaacauguua

SEQ ID NO: 2657701 - RNA, 15 nt, Human
ugaaacuuuucuaga

SEQ ID NO: 2657702 - RNA, 16 nt, Human
ugaaacuuuucuagaa

SEQ ID NO: 2657703 - RNA, 17 nt, Human
ugaaacuuuucuagaau

SEQ ID NO: 2657704 - RNA, 21 nt, Human
ugaaacuuuucuagaauuauu

SEQ ID NO: 2657705 - RNA, 23 nt, Human
ugaaacuuuucuagaauuauuuu

SEQ ID NO: 2657706 - RNA, 19 nt, Human
agagcagugguaagaauag

SEQ ID NO: 2657707 - RNA, 14 nt, Human
agagcauaauuuaa

SEQ ID NO: 2657708 - RNA, 18 nt, Human
agagcauaauuuaaaaau

SEQ ID NO: 2657709 - RNA, 20 nt, Human
agagcauaauuuaaaaauau

SEQ ID NO: 2657710 - RNA, 21 nt, Human
agagcauaauuuaaaaauaua

SEQ ID NO: 2657711 - RNA, 23 nt, Human
agagcauaauuuaaaaauauauu

SEQ ID NO: 2657712 - RNA, 16 nt, Human
agagcaucggccuagg

SEQ ID NO: 2657713 - RNA, 12 nt, Human
agagccagcuug

SEQ ID NO: 2657714 - RNA, 11 nt, Human
agagccagcuu

SEQ ID NO: 2657715 - RNA, 13 nt, Human
agagccagcuugg

SEQ ID NO: 2657716 - RNA, 13 nt, Human
agagcucucucua

SEQ ID NO: 2657717 - RNA, 14 nt, Human
agagcucucucuac

SEQ ID NO: 2657718 - RNA, 22 nt, Human
agagcucucucuacagagagga

SEQ ID NO: 2657719 - RNA, 17 nt, Human
agagcuaucaggagaaa

SEQ ID NO: 2657720 - RNA, 14 nt, Human
agagcuauugccaa

SEQ ID NO: 2657721 - RNA, 20 nt, Human
agagcuagcagcagggaggg

SEQ ID NO: 2657722 - RNA, 13 nt, Human
ucuuuuaaagacc

SEQ ID NO: 2657723 - RNA, 18 nt, Human
ucuuuuaaagacccuccu

SEQ ID NO: 2657724 - RNA, 21 nt, Human
ucuuuuaaugaggaccaaugu

SEQ ID NO: 2657725 - RNA, 20 nt, Human
ucuuuuaauuguuucagaau

SEQ ID NO: 2657726 - RNA, 16 nt, Human
ucuuuguucauagccc

SEQ ID NO: 2657727 - RNA, 23 nt, Human
ucuuuguucauagcccaguagac

SEQ ID NO: 2657728 - RNA, 16 nt, Human
ugaaaaaggaggaaga

SEQ ID NO: 2657729 - RNA, 13 nt, Human
ugaaaaacugagu

SEQ ID NO: 2657730 - RNA, 17 nt, Human
ucuuugguguacagacu

SEQ ID NO: 2657731 - RNA, 24 nt, Human
agagacaucuuugggccugucccu

SEQ ID NO: 2657732 - RNA, 12 nt, Human
agagacaggcag

SEQ ID NO: 2657733 - RNA, 22 nt, Human
agagacaggcaggugaucugcu

SEQ ID NO: 2657734 - RNA, 13 nt, Human
agagacaggcagg

SEQ ID NO: 2657735 - RNA, 20 nt, Human
ugaaaaguaauauuuauuaa

SEQ ID NO: 2657736 - RNA, 19 nt, Human
ugaaaaguaauauuuauua

SEQ ID NO: 2657737 - RNA, 18 nt, Human
ugaaaaguaauauuuauu

SEQ ID NO: 2657738 - RNA, 23 nt, Human
ugaaaauaguuuauuuuaaaaca

SEQ ID NO: 2657739 - RNA, 22 nt, Human
ugaaaauaguuuauuuuaaaac

SEQ ID NO: 2657740 - RNA, 21 nt, Human
ugaaaaguaauauuuauuaaa

SEQ ID NO: 2657741 - RNA, 20 nt, Human
ugaaaauaguuuauuuuaaa

SEQ ID NO: 2657742 - RNA, 14 nt, Human
ugaaaaguguguau

SEQ ID NO: 2657743 - RNA, 18 nt, Human
ugaaaaguguguauauau

SEQ ID NO: 2657744 - RNA, 19 nt, Human
ugaaaaguguguauauauu

SEQ ID NO: 2657745 - RNA, 16 nt, Human
ugaaaauauuguuuua

SEQ ID NO: 2657746 - RNA, 23 nt, Human
ugaaaauauuguuuuacaauagu

SEQ ID NO: 2657747 - RNA, 20 nt, Human
ugaaaauauuguuuuacaau

SEQ ID NO: 2657748 - RNA, 18 nt, Human
ugaaaaaucggcuuacca

SEQ ID NO: 2657749 - RNA, 23 nt, Human
ugaaaaaucuguugauaaaucca

SEQ ID NO: 2657750 - RNA, 12 nt, Human
ugaaaaauauaa

SEQ ID NO: 2657751 - RNA, 13 nt, Human
ugaaaaauauaaa

SEQ ID NO: 2657752 - RNA, 17 nt, Human
ugaaaaauauaaaauua

SEQ ID NO: 2657753 - RNA, 19 nt, Human
ugaaaaauauaaaauuaug

SEQ ID NO: 2657754 - RNA, 20 nt, Human
ugaaaaauauaaaauuauga

SEQ ID NO: 2657755 - RNA, 22 nt, Human
ugaaaaauauaaaauuaugaga

SEQ ID NO: 2657756 - RNA, 22 nt, Human
ugaaaaaggaggaagagaaaaa

SEQ ID NO: 2657757 - RNA, 20 nt, Human
ugaaaaaggaggaagagaaa

SEQ ID NO: 2657758 - RNA, 21 nt, Human
ugaaacuauauuuugucauau

SEQ ID NO: 2657759 - RNA, 19 nt, Human
ugaaacuauauuuugucau

SEQ ID NO: 2657760 - RNA, 13 nt, Human
ugaaacuauauuu

SEQ ID NO: 2657761 - RNA, 14 nt, Human
ugaaacuaaagcaa

SEQ ID NO: 2657762 - RNA, 19 nt, Human
ugaaacuaaagcaauagaa

SEQ ID NO: 2657763 - RNA, 20 nt, Human
ugaaacuaaagcaauagaaa

SEQ ID NO: 2657764 - RNA, 22 nt, Human
ugaaacuaaagcaauagaaaca

SEQ ID NO: 2657765 - RNA, 16 nt, Human
ugaaaauguccaggaa

SEQ ID NO: 2657766 - RNA, 20 nt, Human
ugaaaauguccaggaaagug

SEQ ID NO: 2657767 - RNA, 18 nt, Human
ugauacuauccaguuacu

SEQ ID NO: 2657768 - RNA, 13 nt, Human
ugauacugauggu

SEQ ID NO: 2657769 - RNA, 18 nt, Human
ugauacuggaggaacacu

SEQ ID NO: 2657770 - RNA, 17 nt, Human
ugauauuacauuuauuu

SEQ ID NO: 2657771 - RNA, 22 nt, Human
ugauauuacauuuauuuaucca

SEQ ID NO: 2657772 - RNA, 21 nt, Human
ugauauuccccccacuuaaga

SEQ ID NO: 2657773 - RNA, 19 nt, Human
ugaucaaaaucaauuaaaa

SEQ ID NO: 2657774 - RNA, 17 nt, Human
agcaucaaaauauuuca

SEQ ID NO: 2657775 - RNA, 22 nt, Human
agcauuguaagcguauggcuuu

SEQ ID NO: 2657776 - RNA, 20 nt, Human
agcauuaagcuguuccuguu

SEQ ID NO: 2657777 - RNA, 21 nt, Human
ugaguaaaauagauuuuauaa

SEQ ID NO: 2657778 - RNA, 22 nt, Human
ugagguuuuauuucauuuuuca

SEQ ID NO: 2657779 - RNA, 20 nt, Human
agcauauggguuagauguug

SEQ ID NO: 2657780 - RNA, 17 nt, Human
ugaguagaguugaucaa

SEQ ID NO: 2657781 - RNA, 14 nt, Human
ugaguagaguugau

SEQ ID NO: 2657782 - RNA, 16 nt, Human
agcauaauuuaaaaau

SEQ ID NO: 2657783 - RNA, 17 nt, Human
agcauaauuuaaaaaua

SEQ ID NO: 2657784 - RNA, 18 nt, Human
agcauaauuuaaaaauau

SEQ ID NO: 2657785 - RNA, 21 nt, Human
agcauacuggcuucaccauca

SEQ ID NO: 2657786 - RNA, 15 nt, Human
agcauacuucuagga

SEQ ID NO: 2657787 - RNA, 13 nt, Human
agcauacuuugua

SEQ ID NO: 2657788 - RNA, 14 nt, Human
agcauacuuuguaa

SEQ ID NO: 2657789 - RNA, 14 nt, Human
ugaguguaugagua

SEQ ID NO: 2657790 - RNA, 18 nt, Human
ugaguguaugaguagcca

SEQ ID NO: 2657791 - RNA, 21 nt, Human
ugagugggugaauaauacagu

SEQ ID NO: 2657792 - RNA, 23 nt, Human
ugagugggggaucacagccucug

SEQ ID NO: 2657793 - RNA, 12 nt, Human
ugaguauuguuu

SEQ ID NO: 2657794 - RNA, 15 nt, Human
ugaguauuguuuaaa

SEQ ID NO: 2657795 - RNA, 19 nt, Human
ugaguauuguuuaaaaugu

SEQ ID NO: 2657796 - RNA, 21 nt, Human
ugaguauuguuuaaaauguaa

SEQ ID NO: 2657797 - RNA, 23 nt, Human
ugaguauuguuuaaaauguaauu

SEQ ID NO: 2657798 - RNA, 19 nt, Human
ugaguagauccauuuccau

SEQ ID NO: 2657799 - RNA, 21 nt, Human
ugaguagauccauuuccauug

SEQ ID NO: 2657800 - RNA, 17 nt, Human
ugaugacaauaaagcuu

SEQ ID NO: 2657801 - RNA, 18 nt, Human
ugaugacaaaaaauguuu

SEQ ID NO: 2657802 - RNA, 20 nt, Human
ugaugacaaaaaauguuuua

SEQ ID NO: 2657803 - RNA, 17 nt, Human
ugaugauacaaugaaca

SEQ ID NO: 2657804 - RNA, 13 nt, Human
ugauguuuguccu

SEQ ID NO: 2657805 - RNA, 15 nt, Human
ugauuaaaaauauca

SEQ ID NO: 2657806 - RNA, 20 nt, Human
ugauuaaaaauaucaaauua

SEQ ID NO: 2657807 - RNA, 19 nt, Human
ugauuaaaaauaucaaauu

SEQ ID NO: 2657808 - RNA, 22 nt, Human
ugauuaaaaauaucaaauuaau

SEQ ID NO: 2657809 - RNA, 20 nt, Human
ugaugauccuaggcauuugc

SEQ ID NO: 2657810 - RNA, 13 nt, Human
ugaugagguauuu

SEQ ID NO: 2657811 - RNA, 16 nt, Human
ugaugagguauuuuuu

SEQ ID NO: 2657812 - RNA, 19 nt, Human
ugaugagguauuuuuuccu

SEQ ID NO: 2657813 - RNA, 22 nt, Human
ugaugagguauuuuuuccuuuu

SEQ ID NO: 2657814 - RNA, 14 nt, Human
ugaugauccuaggc

SEQ ID NO: 2657815 - RNA, 13 nt, Human
agcccagcccucc

SEQ ID NO: 2657816 - RNA, 12 nt, Human
agcccagagacu

SEQ ID NO: 2657817 - RNA, 20 nt, Human
agcccagagacuuuguagau

SEQ ID NO: 2657818 - RNA, 17 nt, Human
ugauuccuuuuuucaaa

SEQ ID NO: 2657819 - RNA, 19 nt, Human
ugauuccacuacaccuggc

SEQ ID NO: 2657820 - RNA, 20 nt, Human
ugauuccacuacaccuggcu

SEQ ID NO: 2657821 - RNA, 21 nt, Human
ugauuccacuacaccuggcug

SEQ ID NO: 2657822 - RNA, 22 nt, Human
ugauuccacuacaccuggcuga

SEQ ID NO: 2657823 - RNA, 23 nt, Human
ugauuccacuacaccuggcugag

SEQ ID NO: 2657824 - RNA, 14 nt, Human
ugauucagcucugc

SEQ ID NO: 2657825 - RNA, 13 nt, Human
ugauucagcucug

SEQ ID NO: 2657826 - RNA, 13 nt, Human
ugauucagucaca

SEQ ID NO: 2657827 - RNA, 14 nt, Human
ugauucagucacau

SEQ ID NO: 2657828 - RNA, 15 nt, Human
ugauucagucacaug

SEQ ID NO: 2657829 - RNA, 15 nt, Human
agccagaccagauua

SEQ ID NO: 2657830 - RNA, 12 nt, Human
agccagcuuggg

SEQ ID NO: 2657831 - RNA, 15 nt, Human
agccaggcucacuca

SEQ ID NO: 2657832 - RNA, 18 nt, Human
agccaggcucacucacag

SEQ ID NO: 2657833 - RNA, 13 nt, Human
agccauaaaugau

SEQ ID NO: 2657834 - RNA, 16 nt, Human
agccauacauaaaaga

SEQ ID NO: 2657835 - RNA, 17 nt, Human
agccauacauaaaagaa

SEQ ID NO: 2657836 - RNA, 18 nt, Human
agccauacauaaaagaaa

SEQ ID NO: 2657837 - RNA, 21 nt, Human
agccauacauaaaagaaauaa

SEQ ID NO: 2657838 - RNA, 22 nt, Human
agccauacauaaaagaaauaaa

SEQ ID NO: 2657839 - RNA, 23 nt, Human
agccauacauaaaagaaauaaac

SEQ ID NO: 2657840 - RNA, 17 nt, Human
agccuagcacagcagcu

SEQ ID NO: 2657841 - RNA, 16 nt, Human
agccucuuuuugauac

SEQ ID NO: 2657842 - RNA, 17 nt, Human
ugcaguccuacucaagc

SEQ ID NO: 2657843 - RNA, 22 nt, Human
agccgagacucgacucugugcc

SEQ ID NO: 2657844 - RNA, 13 nt, Human
agccuacucuccu

SEQ ID NO: 2657845 - RNA, 14 nt, Human
agccuacucuccuu

SEQ ID NO: 2657846 - RNA, 19 nt, Human
agccuagaagagcuucuga

SEQ ID NO: 2657847 - RNA, 17 nt, Human
agccuagaagagcuucu

SEQ ID NO: 2657848 - RNA, 14 nt, Human
agcccauccugacc

SEQ ID NO: 2657849 - RNA, 15 nt, Human
agcccauccugacca

SEQ ID NO: 2657850 - RNA, 16 nt, Human
agcccauccugaccag

SEQ ID NO: 2657851 - RNA, 23 nt, Human
agcccauccugaccagcugcucc

SEQ ID NO: 2657852 - RNA, 17 nt, Human
agcccauccugaccagc

SEQ ID NO: 2657853 - RNA, 18 nt, Human
agcccaucgccacaaacu

SEQ ID NO: 2657854 - RNA, 19 nt, Human
agcccaucgccacaaacuc

SEQ ID NO: 2657855 - RNA, 15 nt, Human
agcccaguagaccuu

SEQ ID NO: 2657856 - RNA, 18 nt, Human
agcccaguagaccuuguu

SEQ ID NO: 2657857 - RNA, 13 nt, Human
ugcacccagaaca

SEQ ID NO: 2657858 - RNA, 14 nt, Human
ugcacccagaacag

SEQ ID NO: 2657859 - RNA, 17 nt, Human
ugcacccagaacagugg

SEQ ID NO: 2657860 - RNA, 18 nt, Human
ugcacccacccaggagug

SEQ ID NO: 2657861 - RNA, 17 nt, Human
ugcacccacccaggagu

SEQ ID NO: 2657862 - RNA, 22 nt, Human
ugcacaccuacuagucaccaga

SEQ ID NO: 2657863 - RNA, 20 nt, Human
ugcacaccuacuagucacca

SEQ ID NO: 2657864 - RNA, 17 nt, Human
ugcacccucaggcaggu

SEQ ID NO: 2657865 - RNA, 16 nt, Human
ugcacccucaggcagg

SEQ ID NO: 2657866 - RNA, 15 nt, Human
ugcaccccuucucuc

SEQ ID NO: 2657867 - RNA, 19 nt, Human
ugcaccccuucucuccucc

SEQ ID NO: 2657868 - RNA, 20 nt, Human
ugcaccccuucucuccuccc

SEQ ID NO: 2657869 - RNA, 21 nt, Human
ugcacaagcugcacccucagg

SEQ ID NO: 2657870 - RNA, 18 nt, Human
ugcacaagcugcacccuc

SEQ ID NO: 2657871 - RNA, 15 nt, Human
ugcacaagcugcacc

SEQ ID NO: 2657872 - RNA, 14 nt, Human
agcgggggaggccc

SEQ ID NO: 2657873 - RNA, 20 nt, Human
agcgggggaggcccgcagag

SEQ ID NO: 2657874 - RNA, 16 nt, Human
agcuaccucaaacuuc

SEQ ID NO: 2657875 - RNA, 18 nt, Human
agcuacuugggaggcuga

SEQ ID NO: 2657876 - RNA, 17 nt, Human
agcuacuugggaggcug

SEQ ID NO: 2657877 - RNA, 21 nt, Human
agcuacuugggaggcugaggc

SEQ ID NO: 2657878 - RNA, 16 nt, Human
agcuagcucaacuagu

SEQ ID NO: 2657879 - RNA, 15 nt, Human
agcuagcucaacuag

SEQ ID NO: 2657880 - RNA, 20 nt, Human
ugcccaagccagaggcuggg

SEQ ID NO: 2657881 - RNA, 16 nt, Human
ugcccaagccagaggc

SEQ ID NO: 2657882 - RNA, 18 nt, Human
ugcccaagccagaggcug

SEQ ID NO: 2657883 - RNA, 16 nt, Human
agcucauuaaacuuuu

SEQ ID NO: 2657884 - RNA, 18 nt, Human
agcucauuaaacuuuuuu

SEQ ID NO: 2657885 - RNA, 19 nt, Human
agcucauuaaacuuuuuua

SEQ ID NO: 2657886 - RNA, 21 nt, Human
agcucauuaaacuuuuuuaac

SEQ ID NO: 2657887 - RNA, 11 nt, Human
ugcccaagcca

SEQ ID NO: 2657888 - RNA, 13 nt, Human
ugcccaagccaga

SEQ ID NO: 2657889 - RNA, 14 nt, Human
ugcccaagccagag

SEQ ID NO: 2657890 - RNA, 15 nt, Human
ugcccaagccagagg

SEQ ID NO: 2657891 - RNA, 22 nt, Human
agcgccuccauccaaggccagg

SEQ ID NO: 2657892 - RNA, 18 nt, Human
agcgccuccauccaaggc

SEQ ID NO: 2657893 - RNA, 20 nt, Human
agcgccuccauccaaggcca

SEQ ID NO: 2657894 - RNA, 23 nt, Human
agcgccuccauccaaggccaggu

SEQ ID NO: 2657895 - RNA, 12 nt, Human
agcgccucccuc

SEQ ID NO: 2657896 - RNA, 13 nt, Human
agcgccucccucc

SEQ ID NO: 2657897 - RNA, 14 nt, Human
agcgccucccucca

SEQ ID NO: 2657898 - RNA, 15 nt, Human
agcgccucccuccac

SEQ ID NO: 2657899 - RNA, 18 nt, Human
agcgccucccuccacccc

SEQ ID NO: 2657900 - RNA, 19 nt, Human
agcgccucccuccacccca

SEQ ID NO: 2657901 - RNA, 20 nt, Human
agcgccucccuccaccccag

SEQ ID NO: 2657902 - RNA, 21 nt, Human
agcgccucccuccaccccagg

SEQ ID NO: 2657903 - RNA, 22 nt, Human
agcgccucccuccaccccagga

SEQ ID NO: 2657904 - RNA, 23 nt, Human
agcgccucccuccaccccaggac

SEQ ID NO: 2657905 - RNA, 14 nt, Human
agcggaggugugga

SEQ ID NO: 2657906 - RNA, 23 nt, Human
ugccaagucauagccauaaauga

SEQ ID NO: 2657907 - RNA, 12 nt, Human
ugcauugaagau

SEQ ID NO: 2657908 - RNA, 17 nt, Human
agccugcuccagcuguu

SEQ ID NO: 2657909 - RNA, 16 nt, Human
agccugcuccagcugu

SEQ ID NO: 2657910 - RNA, 15 nt, Human
agccugcuccagcug

SEQ ID NO: 2657911 - RNA, 14 nt, Human
agccugcuccagcu

SEQ ID NO: 2657912 - RNA, 22 nt, Human
agccugcuccagcuguucagcu

SEQ ID NO: 2657913 - RNA, 19 nt, Human
agccugcuccagcuguuca

SEQ ID NO: 2657914 - RNA, 22 nt, Human
agccugggugacagagcaagug

SEQ ID NO: 2657915 - RNA, 14 nt, Human
agccuucagcucca

SEQ ID NO: 2657916 - RNA, 20 nt, Human
agccuucaaaacuauagcuu

SEQ ID NO: 2657917 - RNA, 21 nt, Human
agccuucaaaacuauagcuug

SEQ ID NO: 2657918 - RNA, 22 nt, Human
agccuucaaaacuauagcuugc

SEQ ID NO: 2657919 - RNA, 16 nt, Human
agccuggugcugcugc

SEQ ID NO: 2657920 - RNA, 15 nt, Human
agccuggugcugcug

SEQ ID NO: 2657921 - RNA, 14 nt, Human
agccuggugcugcu

SEQ ID NO: 2657922 - RNA, 17 nt, Human
aggcaauaaaaaucaua

SEQ ID NO: 2657923 - RNA, 22 nt, Human
aggcaaugauuguuaauuuaca

SEQ ID NO: 2657924 - RNA, 14 nt, Human
aggcaauaaaaauc

SEQ ID NO: 2657925 - RNA, 23 nt, Human
uggagcggaauuuaccugauuuc

SEQ ID NO: 2657926 - RNA, 15 nt, Human
uggagaacucuggcu

SEQ ID NO: 2657927 - RNA, 22 nt, Human
uggagaagcggcuggcagccca

SEQ ID NO: 2657928 - RNA, 13 nt, Human
uggagaagcggcu

SEQ ID NO: 2657929 - RNA, 13 nt, Human
uggagccccaggg

SEQ ID NO: 2657930 - RNA, 16 nt, Human
uggacacacacagacu

SEQ ID NO: 2657931 - RNA, 17 nt, Human
aggcaaagaaaaugaaa

SEQ ID NO: 2657932 - RNA, 14 nt, Human
aggcaaagcuggcu

SEQ ID NO: 2657933 - RNA, 18 nt, Human
aggaucucuugagccugg

SEQ ID NO: 2657934 - RNA, 17 nt, Human
aggaucucuugagccug

SEQ ID NO: 2657935 - RNA, 19 nt, Human
aggaucucuugagccuggg

SEQ ID NO: 2657936 - RNA, 12 nt, Human
aggaucucuuga

SEQ ID NO: 2657937 - RNA, 20 nt, Human
uggacacacacagacuauuu

SEQ ID NO: 2657938 - RNA, 23 nt, Human
uggacccuguggaugauaaaaca

SEQ ID NO: 2657939 - RNA, 21 nt, Human
uggaccuuaggccuuccucuc

SEQ ID NO: 2657940 - RNA, 19 nt, Human
uggaccuuaggccuuccuc

SEQ ID NO: 2657941 - RNA, 17 nt, Human
uggaccuuaggccuucc

SEQ ID NO: 2657942 - RNA, 16 nt, Human
uggaccuuaggccuuc

SEQ ID NO: 2657943 - RNA, 15 nt, Human
uggaccuuaggccuu

SEQ ID NO: 2657944 - RNA, 23 nt, Human
uggaccuguauauuuguaaagcu

SEQ ID NO: 2657945 - RNA, 19 nt, Human
uggaaaguaacucauuugu

SEQ ID NO: 2657946 - RNA, 23 nt, Human
uggaaaggggagagccugcuggc

SEQ ID NO: 2657947 - RNA, 13 nt, Human
uggaaaggggaga

SEQ ID NO: 2657948 - RNA, 14 nt, Human
uggaaaggggagag

SEQ ID NO: 2657949 - RNA, 15 nt, Human
uggaaaggggagagc

SEQ ID NO: 2657950 - RNA, 17 nt, Human
uggaaaggggagagccu

SEQ ID NO: 2657951 - RNA, 19 nt, Human
uggaaaggggagagccugc

SEQ ID NO: 2657952 - RNA, 21 nt, Human
uggaaaggggagagccugcug

SEQ ID NO: 2657953 - RNA, 22 nt, Human
uggaaaggggagagccugcugg

SEQ ID NO: 2657954 - RNA, 16 nt, Human
ugcuuuucugcccugg

SEQ ID NO: 2657955 - RNA, 18 nt, Human
ugcuuuucugcccuggcu

SEQ ID NO: 2657956 - RNA, 15 nt, Human
ugcuuuucugcccug

SEQ ID NO: 2657957 - RNA, 17 nt, Human
ugcuuuucuguauuuua

SEQ ID NO: 2657958 - RNA, 19 nt, Human
ugcuuuuggcaaaacucua

SEQ ID NO: 2657959 - RNA, 21 nt, Human
ugcuuuuggcaaaacucuacu

SEQ ID NO: 2657960 - RNA, 15 nt, Human
ugcuugucuucuggu

SEQ ID NO: 2657961 - RNA, 20 nt, Human
ugcuugucuucugguacuuu

SEQ ID NO: 2657962 - RNA, 17 nt, Human
ugcuuggaacauacugu

SEQ ID NO: 2657963 - RNA, 22 nt, Human
ugcuuggaacauacuguucacu

SEQ ID NO: 2657964 - RNA, 21 nt, Human
ugcuugaggcaacucaucuua

SEQ ID NO: 2657965 - RNA, 16 nt, Human
aggauccccuccaagc

SEQ ID NO: 2657966 - RNA, 18 nt, Human
aggauccccuccaagccu

SEQ ID NO: 2657967 - RNA, 19 nt, Human
uggaaggcaagccaggcuc

SEQ ID NO: 2657968 - RNA, 23 nt, Human
uggaagcacaccaaucuuacuuu

SEQ ID NO: 2657969 - RNA, 22 nt, Human
uggaagcacaccaaucuuacuu

SEQ ID NO: 2657970 - RNA, 21 nt, Human
uggaagcacaccaaucuuacu

SEQ ID NO: 2657971 - RNA, 13 nt, Human
uggaagauccugc

SEQ ID NO: 2657972 - RNA, 21 nt, Human
uggaagauccugcgggugggg

SEQ ID NO: 2657973 - RNA, 17 nt, Human
uggaagaucauuuugaa

SEQ ID NO: 2657974 - RNA, 16 nt, Human
uggaaaucagccaagu

SEQ ID NO: 2657975 - RNA, 18 nt, Human
uggaaaucagccaaguuu

SEQ ID NO: 2657976 - RNA, 20 nt, Human
uggaaaucagccaaguuuua

SEQ ID NO: 2657977 - RNA, 15 nt, Human
uggaaaguaacugug

SEQ ID NO: 2657978 - RNA, 12 nt, Human
uggcccugggcg

SEQ ID NO: 2657979 - RNA, 21 nt, Human
uggcccugggcggggcguggg

SEQ ID NO: 2657980 - RNA, 23 nt, Human
uggccgggcgcgguggcucacgc

SEQ ID NO: 2657981 - RNA, 13 nt, Human
uggcccacgcacu

SEQ ID NO: 2657982 - RNA, 14 nt, Human
uggccauguaugaa

SEQ ID NO: 2657983 - RNA, 12 nt, Human
uggcccaaggcu

SEQ ID NO: 2657984 - RNA, 16 nt, Human
uggcccaaggcuggca

SEQ ID NO: 2657985 - RNA, 17 nt, Human
uggcccaaggcuggcag

SEQ ID NO: 2657986 - RNA, 18 nt, Human
uggcccaaggcuggcagg

SEQ ID NO: 2657987 - RNA, 23 nt, Human
uggcccaaggcuggcaggucaac

SEQ ID NO: 2657988 - RNA, 19 nt, Human
aggccugggccgcugccac

SEQ ID NO: 2657989 - RNA, 20 nt, Human
aggccugggccgcugccacg

SEQ ID NO: 2657990 - RNA, 21 nt, Human
aggccugggccgcugccacgu

SEQ ID NO: 2657991 - RNA, 15 nt, Human
uggccuuaauuuccu

SEQ ID NO: 2657992 - RNA, 16 nt, Human
uggccuuaauuuccuu

SEQ ID NO: 2657993 - RNA, 12 nt, Human
aggccuggggac

SEQ ID NO: 2657994 - RNA, 14 nt, Human
uggcccuggcugcc

SEQ ID NO: 2657995 - RNA, 21 nt, Human
uggccuaaaccucaguuauua

SEQ ID NO: 2657996 - RNA, 21 nt, Human
uggccaguccacccugccugc

SEQ ID NO: 2657997 - RNA, 22 nt, Human
uggccaguccacccugccugcc

SEQ ID NO: 2657998 - RNA, 14 nt, Human
uggccaguccaggc

SEQ ID NO: 2657999 - RNA, 15 nt, Human
uggccaguccaggcu

SEQ ID NO: 2658000 - RNA, 13 nt, Human
uggccacagcgcc

SEQ ID NO: 2658001 - RNA, 18 nt, Human
uggccacagcgccagccu

SEQ ID NO: 2658002 - RNA, 20 nt, Human
uggccacagcgccagccuca

SEQ ID NO: 2658003 - RNA, 16 nt, Human
uggccacauggcggag

SEQ ID NO: 2658004 - RNA, 21 nt, Human
uggcaucgcaccauucugacu

SEQ ID NO: 2658005 - RNA, 22 nt, Human
uggcaucgcaccauucugacuc

SEQ ID NO: 2658006 - RNA, 23 nt, Human
uggcaucgcaccauucugacucg

SEQ ID NO: 2658007 - RNA, 20 nt, Human
uggcaucuuagaccuccaca

SEQ ID NO: 2658008 - RNA, 18 nt, Human
aggccagaggcccccagc

SEQ ID NO: 2658009 - RNA, 22 nt, Human
aggccagaggcccccagcccag

SEQ ID NO: 2658010 - RNA, 10 nt, Human
aggccagccu

SEQ ID NO: 2658011 - RNA, 23 nt, Human
aggccagccuccgagagggagag

SEQ ID NO: 2658012 - RNA, 18 nt, Human
aggccagccuccgagagg

SEQ ID NO: 2658013 - RNA, 22 nt, Human
aggccagccuccgagagggaga

SEQ ID NO: 2658014 - RNA, 11 nt, Human
aggccagccuc

SEQ ID NO: 2658015 - RNA, 13 nt, Human
aggccagccuccg

SEQ ID NO: 2658016 - RNA, 14 nt, Human
aggccagccuccga

SEQ ID NO: 2658017 - RNA, 17 nt, Human
aggccagccuccgagag

SEQ ID NO: 2658018 - RNA, 13 nt, Human
aggcccauagcag

SEQ ID NO: 2658019 - RNA, 19 nt, Human
uggcaaugacucaaagucu

SEQ ID NO: 2658020 - RNA, 16 nt, Human
uggcaauuuaacaugu

SEQ ID NO: 2658021 - RNA, 21 nt, Human
uggcaaugguaguuucugugg

SEQ ID NO: 2658022 - RNA, 19 nt, Human
uggcaaugguaguuucugu

SEQ ID NO: 2658023 - RNA, 18 nt, Human
uggcaaugguaguuucug

SEQ ID NO: 2658024 - RNA, 17 nt, Human
uggcaaugguaguuucu

SEQ ID NO: 2658025 - RNA, 16 nt, Human
uggcaaugguaguuuc

SEQ ID NO: 2658026 - RNA, 16 nt, Human
aggccaaggugggagg

SEQ ID NO: 2658027 - RNA, 14 nt, Human
uggagggguguggc

SEQ ID NO: 2658028 - RNA, 11 nt, Human
uggaggggugu

SEQ ID NO: 2658029 - RNA, 17 nt, Human
uggagggguguggcagu

SEQ ID NO: 2658030 - RNA, 18 nt, Human
uggagggguguggcagug

SEQ ID NO: 2658031 - RNA, 19 nt, Human
uggagggguguggcagugg

SEQ ID NO: 2658032 - RNA, 14 nt, Human
uggauuaaauacau

SEQ ID NO: 2658033 - RNA, 15 nt, Human
uggauuaaauacaua

SEQ ID NO: 2658034 - RNA, 21 nt, Human
uggauuaaauacauauggaug

SEQ ID NO: 2658035 - RNA, 15 nt, Human
uggagguugaagcca

SEQ ID NO: 2658036 - RNA, 17 nt, Human
uggagguugaagccaag

SEQ ID NO: 2658037 - RNA, 18 nt, Human
uggagguugaagccaagu

SEQ ID NO: 2658038 - RNA, 22 nt, Human
uggagguugaagccaagugggg

SEQ ID NO: 2658039 - RNA, 23 nt, Human
uggauggcuugucuauacuccuu

SEQ ID NO: 2658040 - RNA, 21 nt, Human
uggauggccccagcacagcuu

SEQ ID NO: 2658041 - RNA, 14 nt, Human
uggauggccccagc

SEQ ID NO: 2658042 - RNA, 15 nt, Human
uggauggccccagca

SEQ ID NO: 2658043 - RNA, 16 nt, Human
uggauggccccagcac

SEQ ID NO: 2658044 - RNA, 17 nt, Human
uggauggccccagcaca

SEQ ID NO: 2658045 - RNA, 18 nt, Human
uggauggccccagcacag

SEQ ID NO: 2658046 - RNA, 23 nt, Human
agcuggcucugagcgccuccauc

SEQ ID NO: 2658047 - RNA, 13 nt, Human
agcuggcucugag

SEQ ID NO: 2658048 - RNA, 14 nt, Human
agcuggcucugagc

SEQ ID NO: 2658049 - RNA, 19 nt, Human
agcuggcucugagcgccuc

SEQ ID NO: 2658050 - RNA, 20 nt, Human
agcuggcucugagcgccucc

SEQ ID NO: 2658051 - RNA, 14 nt, Human
agcugucccuugcu

SEQ ID NO: 2658052 - RNA, 18 nt, Human
agcugucacaacuugugu

SEQ ID NO: 2658053 - RNA, 15 nt, Human
agcugcccuuccgca

SEQ ID NO: 2658054 - RNA, 20 nt, Human
agcuggcuuacacuggcaau

SEQ ID NO: 2658055 - RNA, 15 nt, Human
agcugucacaacuug

SEQ ID NO: 2658056 - RNA, 14 nt, Human
agcuguucagcugg

SEQ ID NO: 2658057 - RNA, 13 nt, Human
agcuguucagcug

SEQ ID NO: 2658058 - RNA, 19 nt, Human
ugccuuaaacacucaccuu

SEQ ID NO: 2658059 - RNA, 22 nt, Human
ugccuuaaacacucaccuucua

SEQ ID NO: 2658060 - RNA, 15 nt, Human
ugccuuaaaaccaaa

SEQ ID NO: 2658061 - RNA, 16 nt, Human
ugccuguuucugauuu

SEQ ID NO: 2658062 - RNA, 16 nt, Human
ugccuuaaaaccaaag

SEQ ID NO: 2658063 - RNA, 18 nt, Human
ugccuuaaaaccaaagag

SEQ ID NO: 2658064 - RNA, 20 nt, Human
ugccuuaaaaccaaagaggg

SEQ ID NO: 2658065 - RNA, 22 nt, Human
ugccuuaaaaccaaagagggcu

SEQ ID NO: 2658066 - RNA, 20 nt, Human
ugccuggagacuuagggcac

SEQ ID NO: 2658067 - RNA, 23 nt, Human
ugccuggaguguaugacugcaca

SEQ ID NO: 2658068 - RNA, 17 nt, Human
ugccugccccgccccca

SEQ ID NO: 2658069 - RNA, 12 nt, Human
ugccugccccgc

SEQ ID NO: 2658070 - RNA, 16 nt, Human
agcucaucugcaaaag

SEQ ID NO: 2658071 - RNA, 12 nt, Human
ugcuacaauguc

SEQ ID NO: 2658072 - RNA, 14 nt, Human
ugcuacaauuuuaa

SEQ ID NO: 2658073 - RNA, 16 nt, Human
agcuguuccuguucag

SEQ ID NO: 2658074 - RNA, 18 nt, Human
agcuguuccuguucagua

SEQ ID NO: 2658075 - RNA, 19 nt, Human
agcuguuccuguucaguaa

SEQ ID NO: 2658076 - RNA, 20 nt, Human
agcuguuccuugguccuagu

SEQ ID NO: 2658077 - RNA, 10 nt, Human
agcuuagaac

SEQ ID NO: 2658078 - RNA, 15 nt, Human
agcuuacguaguucu

SEQ ID NO: 2658079 - RNA, 13 nt, Human
agcuuacguaguu

SEQ ID NO: 2658080 - RNA, 21 nt, Human
agcuugagccgggccccuggg

SEQ ID NO: 2658081 - RNA, 20 nt, Human
agcuugaccugaggcugugg

SEQ ID NO: 2658082 - RNA, 23 nt, Human
agcuugagccgggccccugggcu

SEQ ID NO: 2658083 - RNA, 24 nt, Human
agcuugagccgggccccugggcuu

SEQ ID NO: 2658084 - RNA, 18 nt, Human
agcuugggaggcuucccc

SEQ ID NO: 2658085 - RNA, 18 nt, Human
agcuugguucugugaaca

SEQ ID NO: 2658086 - RNA, 23 nt, Human
agcuuggggccaccaaagcugcc

SEQ ID NO: 2658087 - RNA, 16 nt, Human
agcuugaccugaggcu

SEQ ID NO: 2658088 - RNA, 20 nt, Human
agcuuggggccaccaaagcu

SEQ ID NO: 2658089 - RNA, 21 nt, Human
agcuuggggccaccaaagcug

SEQ ID NO: 2658090 - RNA, 22 nt, Human
agcuuggggccaccaaagcugc

SEQ ID NO: 2658091 - RNA, 18 nt, Human
ugccuuugcagcucagaa

SEQ ID NO: 2658092 - RNA, 19 nt, Human
ugccuuugcaccacgggac

SEQ ID NO: 2658093 - RNA, 16 nt, Human
ugccuuuuaauuuuua

SEQ ID NO: 2658094 - RNA, 17 nt, Human
ugcggaucucagcuuug

SEQ ID NO: 2658095 - RNA, 15 nt, Human
ugcggaucucagcuu

SEQ ID NO: 2658096 - RNA, 14 nt, Human
ugcgggacagagua

SEQ ID NO: 2658097 - RNA, 19 nt, Human
ugcggccuuuggcuucacg

SEQ ID NO: 2658098 - RNA, 17 nt, Human
ugcggccuuuggcuuca

SEQ ID NO: 2658099 - RNA, 18 nt, Human
ugcggcguacaggcuggc

SEQ ID NO: 2658100 - RNA, 16 nt, Human
ugcggcguacaggcug

SEQ ID NO: 2658101 - RNA, 14 nt, Human
aggaauggaagucc

SEQ ID NO: 2658102 - RNA, 19 nt, Human
aggaagccggggaagagau

SEQ ID NO: 2658103 - RNA, 18 nt, Human
ugcuggagucuccugagg

SEQ ID NO: 2658104 - RNA, 16 nt, Human
ugcugggauuacagac

SEQ ID NO: 2658105 - RNA, 16 nt, Human
ugcugggacucagccu

SEQ ID NO: 2658106 - RNA, 18 nt, Human
ugcugggacucagccuuc

SEQ ID NO: 2658107 - RNA, 22 nt, Human
ugcugggacucagccuucagac

SEQ ID NO: 2658108 - RNA, 23 nt, Human
ugcugggacucagccuucagaca

SEQ ID NO: 2658109 - RNA, 19 nt, Human
ugcuuccaggaaacuccac

SEQ ID NO: 2658110 - RNA, 16 nt, Human
ugcuuccaggaaacuc

SEQ ID NO: 2658111 - RNA, 22 nt, Human
ugcuguauauggaauucuuuua

SEQ ID NO: 2658112 - RNA, 23 nt, Human
ugcuuauuugacaacguuucagc

SEQ ID NO: 2658113 - RNA, 14 nt, Human
ugcuuagaaaagaa

SEQ ID NO: 2658114 - RNA, 14 nt, Human
aggaagccguccug

SEQ ID NO: 2658115 - RNA, 20 nt, Human
aggaagcccaggagccucac

SEQ ID NO: 2658116 - RNA, 17 nt, Human
ugcucauuaugccacuu

SEQ ID NO: 2658117 - RNA, 21 nt, Human
agcuuuacuggggcuggggaa

SEQ ID NO: 2658118 - RNA, 13 nt, Human
agcuuuagacccu

SEQ ID NO: 2658119 - RNA, 16 nt, Human
agcuuuagacccuggg

SEQ ID NO: 2658120 - RNA, 17 nt, Human
agcuuuagacccugggu

SEQ ID NO: 2658121 - RNA, 19 nt, Human
agcuuuagacccugggugg

SEQ ID NO: 2658122 - RNA, 22 nt, Human
agcuuuagacccugggugggcu

SEQ ID NO: 2658123 - RNA, 21 nt, Human
agcuuuauuuugagauguaaa

SEQ ID NO: 2658124 - RNA, 19 nt, Human
ugcuauuacgaaguucaag

SEQ ID NO: 2658125 - RNA, 18 nt, Human
ugcuauuacgaaguucaa

SEQ ID NO: 2658126 - RNA, 14 nt, Human
uguaaguucacaac

SEQ ID NO: 2658127 - RNA, 17 nt, Human
uguaagaauucugauug

SEQ ID NO: 2658128 - RNA, 14 nt, Human
uguaagugggccca

SEQ ID NO: 2658129 - RNA, 17 nt, Human
uguaagcguauggcuuu

SEQ ID NO: 2658130 - RNA, 20 nt, Human
uguaagcauacuuuguaaau

SEQ ID NO: 2658131 - RNA, 22 nt, Human
uguaagcauacuuuguaaauag

SEQ ID NO: 2658132 - RNA, 21 nt, Human
uguaagcguauggcuuuauuu

SEQ ID NO: 2658133 - RNA, 17 nt, Human
uguaagcacucuggaug

SEQ ID NO: 2658134 - RNA, 18 nt, Human
uguaagcacucuggauga

SEQ ID NO: 2658135 - RNA, 17 nt, Human
uguaauuacuuauugua

SEQ ID NO: 2658136 - RNA, 15 nt, Human
uguaacuuccaaaua

SEQ ID NO: 2658137 - RNA, 17 nt, Human
uguaacuuccaaauaaa

SEQ ID NO: 2658138 - RNA, 19 nt, Human
uguaacuuccaaauaaaua

SEQ ID NO: 2658139 - RNA, 20 nt, Human
uguaacuuccaaauaaauaa

SEQ ID NO: 2658140 - RNA, 21 nt, Human
uguaacuuccaaauaaauaau

SEQ ID NO: 2658141 - RNA, 16 nt, Human
uguaacuugcuuaaau

SEQ ID NO: 2658142 - RNA, 20 nt, Human
uguaacuugcuuaaauuucu

SEQ ID NO: 2658143 - RNA, 22 nt, Human
uguaacuugcuuaaauuucuua

SEQ ID NO: 2658144 - RNA, 14 nt, Human
agguuggugggggc

SEQ ID NO: 2658145 - RNA, 14 nt, Human
uguaagaaggcaau

SEQ ID NO: 2658146 - RNA, 17 nt, Human
uguaagaaggcaauauu

SEQ ID NO: 2658147 - RNA, 17 nt, Human
agguugagcucuucuua

SEQ ID NO: 2658148 - RNA, 24 nt, Human
agguugagcucuucuuaaaguauu

SEQ ID NO: 2658149 - RNA, 17 nt, Human
aggugguuauggagagg

SEQ ID NO: 2658150 - RNA, 18 nt, Human
aggucuuucaguacuuuu

SEQ ID NO: 2658151 - RNA, 21 nt, Human
agguggugguagagaagcaag

SEQ ID NO: 2658152 - RNA, 12 nt, Human
aggugggcccgg

SEQ ID NO: 2658153 - RNA, 11 nt, Human
aggugcagagg

SEQ ID NO: 2658154 - RNA, 12 nt, Human
aggugcagaggu

SEQ ID NO: 2658155 - RNA, 21 nt, Human
aggugcagagguacccugggu

SEQ ID NO: 2658156 - RNA, 18 nt, Human
aguagauaauuucagggu

SEQ ID NO: 2658157 - RNA, 19 nt, Human
aguagauaauuucagggug

SEQ ID NO: 2658158 - RNA, 20 nt, Human
aguagauaauuucagggugc

SEQ ID NO: 2658159 - RNA, 16 nt, Human
aguagauccauuucca

SEQ ID NO: 2658160 - RNA, 23 nt, Human
aguagauccauuuccauugcuua

SEQ ID NO: 2658161 - RNA, 14 nt, Human
uguagguccucaga

SEQ ID NO: 2658162 - RNA, 22 nt, Human
uguaggagcugccuuggcucag

SEQ ID NO: 2658163 - RNA, 15 nt, Human
uguaggagcugccuu

SEQ ID NO: 2658164 - RNA, 12 nt, Human
uguaggagcugc

SEQ ID NO: 2658165 - RNA, 18 nt, Human
uguaggagacuugccaga

SEQ ID NO: 2658166 - RNA, 22 nt, Human
uguaggagacuugccagagccg

SEQ ID NO: 2658167 - RNA, 13 nt, Human
uguaggagacuug

SEQ ID NO: 2658168 - RNA, 18 nt, Human
aguagauguggccuuuga

SEQ ID NO: 2658169 - RNA, 20 nt, Human
aguagauguggccuuugaau

SEQ ID NO: 2658170 - RNA, 13 nt, Human
aguagagccagcu

SEQ ID NO: 2658171 - RNA, 12 nt, Human
aguagagccagc

SEQ ID NO: 2658172 - RNA, 15 nt, Human
aguagagccagcuug

SEQ ID NO: 2658173 - RNA, 11 nt, Human
aguagaacugu

SEQ ID NO: 2658174 - RNA, 21 nt, Human
aguagaacuuuguauaguuau

SEQ ID NO: 2658175 - RNA, 19 nt, Human
aguagaacuuuguauaguu

SEQ ID NO: 2658176 - RNA, 18 nt, Human
aguagaacuuuguauagu

SEQ ID NO: 2658177 - RNA, 16 nt, Human
aguagaacuuuguaua

SEQ ID NO: 2658178 - RNA, 15 nt, Human
aguagaacuuuguau

SEQ ID NO: 2658179 - RNA, 14 nt, Human
aguagaacuuugua

SEQ ID NO: 2658180 - RNA, 13 nt, Human
aguacuuuuuuaa

SEQ ID NO: 2658181 - RNA, 15 nt, Human
aguacuuuuuuaaau

SEQ ID NO: 2658182 - RNA, 16 nt, Human
aguacuuuuuuaaaua

SEQ ID NO: 2658183 - RNA, 23 nt, Human
aguacuuuuuuaaauauuuucua

SEQ ID NO: 2658184 - RNA, 12 nt, Human
aguagaaaaugu

SEQ ID NO: 2658185 - RNA, 14 nt, Human
aguagaaaauguga

SEQ ID NO: 2658186 - RNA, 18 nt, Human
aguagaaaaugugacccu

SEQ ID NO: 2658187 - RNA, 22 nt, Human
aguagaaaaugugacccuccaa

SEQ ID NO: 2658188 - RNA, 19 nt, Human
aguacacugccugccuuaa

SEQ ID NO: 2658189 - RNA, 17 nt, Human
aguacacugccugccuu

SEQ ID NO: 2658190 - RNA, 12 nt, Human
aguacacugccu

SEQ ID NO: 2658191 - RNA, 14 nt, Human
aguaauuucuuuuu

SEQ ID NO: 2658192 - RNA, 21 nt, Human
aguaauuucuuuuuuuccuuu

SEQ ID NO: 2658193 - RNA, 12 nt, Human
aguaaucaucua

SEQ ID NO: 2658194 - RNA, 17 nt, Human
aguaaucaucuaaguca

SEQ ID NO: 2658195 - RNA, 22 nt, Human
aguaaucaucuaagucaguacc

SEQ ID NO: 2658196 - RNA, 13 nt, Human
aguaauauuuauu

SEQ ID NO: 2658197 - RNA, 19 nt, Human
aguaauauuuauuaaauuu

SEQ ID NO: 2658198 - RNA, 15 nt, Human
aguaauauuuauuaa

SEQ ID NO: 2658199 - RNA, 22 nt, Human
aguaauauuuauuaaauuuuuu

SEQ ID NO: 2658200 - RNA, 20 nt, Human
aguaagccgugauuuucauu

SEQ ID NO: 2658201 - RNA, 14 nt, Human
aguaaaaaggcuaa

SEQ ID NO: 2658202 - RNA, 21 nt, Human
aguaagggaacaaguugagcu

SEQ ID NO: 2658203 - RNA, 14 nt, Human
uguagagugggagc

SEQ ID NO: 2658204 - RNA, 13 nt, Human
uguagagugggag

SEQ ID NO: 2658205 - RNA, 12 nt, Human
uguacuuuucau

SEQ ID NO: 2658206 - RNA, 13 nt, Human
uguacuuuucauu

SEQ ID NO: 2658207 - RNA, 17 nt, Human
uguacuuuucauucucu

SEQ ID NO: 2658208 - RNA, 18 nt, Human
uguacuuuucauucucuu

SEQ ID NO: 2658209 - RNA, 22 nt, Human
uguacuuuucauucucuuuuaa

SEQ ID NO: 2658210 - RNA, 15 nt, Human
uguacuuuuuaguaa

SEQ ID NO: 2658211 - RNA, 20 nt, Human
uguacuuuuuaguaauuucu

SEQ ID NO: 2658212 - RNA, 21 nt, Human
uguacuuuuuaguaauuucuu

SEQ ID NO: 2658213 - RNA, 23 nt, Human
uguacuuuuauuuuacacagaaa

SEQ ID NO: 2658214 - RNA, 14 nt, Human
uguaccaagugaaa

SEQ ID NO: 2658215 - RNA, 16 nt, Human
uguaccaagugaaauu

SEQ ID NO: 2658216 - RNA, 19 nt, Human
uguaauuugaugagguauu

SEQ ID NO: 2658217 - RNA, 14 nt, Human
uguaccaaaauuca

SEQ ID NO: 2658218 - RNA, 23 nt, Human
uguaccaaaauucaucugucuau

SEQ ID NO: 2658219 - RNA, 15 nt, Human
uguaauuuaaaugaa

SEQ ID NO: 2658220 - RNA, 16 nt, Human
uguaauuuaaaugaaa

SEQ ID NO: 2658221 - RNA, 17 nt, Human
uguaauuuaaaugaaag

SEQ ID NO: 2658222 - RNA, 15 nt, Human
uguauuauuuauaau

SEQ ID NO: 2658223 - RNA, 14 nt, Human
uguauuauuuauaa

SEQ ID NO: 2658224 - RNA, 18 nt, Human
uguauuauuuacauuuaa

SEQ ID NO: 2658225 - RNA, 21 nt, Human
uguauuauuuacauuuaauag

SEQ ID NO: 2658226 - RNA, 17 nt, Human
uguauuuuuaguagaga

SEQ ID NO: 2658227 - RNA, 17 nt, Human
ugucaaugagagcauaa

SEQ ID NO: 2658228 - RNA, 23 nt, Human
aguaggacuccuuauuuggcgug

SEQ ID NO: 2658229 - RNA, 14 nt, Human
aguaguccugugaa

SEQ ID NO: 2658230 - RNA, 12 nt, Human
aguaguccugug

SEQ ID NO: 2658231 - RNA, 13 nt, Human
aguaguccuguga

SEQ ID NO: 2658232 - RNA, 23 nt, Human
aguagugucacugcuuguuaugc

SEQ ID NO: 2658233 - RNA, 13 nt, Human
aguaguucuguau

SEQ ID NO: 2658234 - RNA, 21 nt, Human
aguaguucuguauuugaaagu

SEQ ID NO: 2658235 - RNA, 18 nt, Human
aguaguucuguauuugaa

SEQ ID NO: 2658236 - RNA, 17 nt, Human
aguaguucuguauuuga

SEQ ID NO: 2658237 - RNA, 16 nt, Human
aguaguucuguauuug

SEQ ID NO: 2658238 - RNA, 15 nt, Human
aguaguucuguauuu

SEQ ID NO: 2658239 - RNA, 14 nt, Human
aguaguucuguauu

SEQ ID NO: 2658240 - RNA, 21 nt, Human
aguaugugguuuuguaauuug

SEQ ID NO: 2658241 - RNA, 13 nt, Human
aguauguauuauu

SEQ ID NO: 2658242 - RNA, 15 nt, Human
aguauguauauuaaa

SEQ ID NO: 2658243 - RNA, 18 nt, Human
aguauguauauuaaaaaa

SEQ ID NO: 2658244 - RNA, 20 nt, Human
aguauguauauuaaaaaaga

SEQ ID NO: 2658245 - RNA, 22 nt, Human
aguauguauauuaaaaaagaga

SEQ ID NO: 2658246 - RNA, 23 nt, Human
aguauguauauuaaaaaagagac

SEQ ID NO: 2658247 - RNA, 13 nt, Human
aguauguaugugu

SEQ ID NO: 2658248 - RNA, 13 nt, Human
aguauaaaauagu

SEQ ID NO: 2658249 - RNA, 22 nt, Human
aguauaaaauaguaugaaaaug

SEQ ID NO: 2658250 - RNA, 17 nt, Human
ugucaguacuauucagg

SEQ ID NO: 2658251 - RNA, 11 nt, Human
ugucaggccuu

SEQ ID NO: 2658252 - RNA, 14 nt, Human
ugucaggccuucag

SEQ ID NO: 2658253 - RNA, 19 nt, Human
ugucaggccuucaggguuc

SEQ ID NO: 2658254 - RNA, 17 nt, Human
ugucaggcugaaaacaa

SEQ ID NO: 2658255 - RNA, 18 nt, Human
ugucaggcugaaaacaau

SEQ ID NO: 2658256 - RNA, 16 nt, Human
ugucagcugaaccugg

SEQ ID NO: 2658257 - RNA, 19 nt, Human
ugucagcugaaccugggua

SEQ ID NO: 2658258 - RNA, 13 nt, Human
agucagagacaga

SEQ ID NO: 2658259 - RNA, 15 nt, Human
agucagagacagaua

SEQ ID NO: 2658260 - RNA, 17 nt, Human
agucagagacagauacc

SEQ ID NO: 2658261 - RNA, 19 nt, Human
agucagagacagauaccuc

SEQ ID NO: 2658262 - RNA, 17 nt, Human
ugucuaaacaaugcuga

SEQ ID NO: 2658263 - RNA, 16 nt, Human
ugucuaaacaaugcug

SEQ ID NO: 2658264 - RNA, 20 nt, Human
ugucguggacacacacagac

SEQ ID NO: 2658265 - RNA, 21 nt, Human
ugucuaaacaaugcugauuug

SEQ ID NO: 2658266 - RNA, 20 nt, Human
ugucuaaacaaugcugauuu

SEQ ID NO: 2658267 - RNA, 22 nt, Human
ugucguauuuggcacacagcag

SEQ ID NO: 2658268 - RNA, 14 nt, Human
uguccgagcuuuga

SEQ ID NO: 2658269 - RNA, 13 nt, Human
uguccgagcuuug

SEQ ID NO: 2658270 - RNA, 18 nt, Human
uguccuaauggugaugca

SEQ ID NO: 2658271 - RNA, 15 nt, Human
uguccuaauggugau

SEQ ID NO: 2658272 - RNA, 14 nt, Human
aguccaggcugccg

SEQ ID NO: 2658273 - RNA, 17 nt, Human
aguccaggcugccgugg

SEQ ID NO: 2658274 - RNA, 18 nt, Human
aguccaggcugccguggg

SEQ ID NO: 2658275 - RNA, 23 nt, Human
aguccgugggacgggaugguucu

SEQ ID NO: 2658276 - RNA, 13 nt, Human
aguccgugggacg

SEQ ID NO: 2658277 - RNA, 12 nt, Human
agucgugccugu

SEQ ID NO: 2658278 - RNA, 13 nt, Human
agucgugccugug

SEQ ID NO: 2658279 - RNA, 14 nt, Human
agucgugccugugu

SEQ ID NO: 2658280 - RNA, 15 nt, Human
agucgugccuguguc

SEQ ID NO: 2658281 - RNA, 17 nt, Human
agucguggggugugcug

SEQ ID NO: 2658282 - RNA, 18 nt, Human
agucguggggugugcugg

SEQ ID NO: 2658283 - RNA, 19 nt, Human
agucguggggugugcuggg

SEQ ID NO: 2658284 - RNA, 20 nt, Human
agucguggggugugcuggga

SEQ ID NO: 2658285 - RNA, 21 nt, Human
agucguggggugugcugggag

SEQ ID NO: 2658286 - RNA, 18 nt, Human
ugggcuggaaucaggaau

SEQ ID NO: 2658287 - RNA, 12 nt, Human
ugggcuggacuu

SEQ ID NO: 2658288 - RNA, 23 nt, Human
ugggcuggacuucuaccugcccu

SEQ ID NO: 2658289 - RNA, 21 nt, Human
ugggcugaccccgguggcggc

SEQ ID NO: 2658290 - RNA, 18 nt, Human
ugggcucugugcagucac

SEQ ID NO: 2658291 - RNA, 12 nt, Human
ugggcucugugc

SEQ ID NO: 2658292 - RNA, 17 nt, Human
ugggcucugugcaguca

SEQ ID NO: 2658293 - RNA, 23 nt, Human
agggcuucugccauuucugagau

SEQ ID NO: 2658294 - RNA, 12 nt, Human
agggcuuccucu

SEQ ID NO: 2658295 - RNA, 20 nt, Human
agggcuuccucuagaagcca

SEQ ID NO: 2658296 - RNA, 21 nt, Human
agggcuuccucuagaagccaa

SEQ ID NO: 2658297 - RNA, 22 nt, Human
agggcuuccucuagaagccaag

SEQ ID NO: 2658298 - RNA, 17 nt, Human
agggcuuguaguucuuu

SEQ ID NO: 2658299 - RNA, 16 nt, Human
agggcuuguaguucuu

SEQ ID NO: 2658300 - RNA, 15 nt, Human
agggcuuguaguucu

SEQ ID NO: 2658301 - RNA, 14 nt, Human
agggcuuguaguuc

SEQ ID NO: 2658302 - RNA, 19 nt, Human
agggcuuguaguucuuuaa

SEQ ID NO: 2658303 - RNA, 21 nt, Human
uggggacgcuccgcugccgug

SEQ ID NO: 2658304 - RNA, 19 nt, Human
uggggccgccgccucuuuc

SEQ ID NO: 2658305 - RNA, 18 nt, Human
uggggccuacagcuuuga

SEQ ID NO: 2658306 - RNA, 19 nt, Human
uggggcuggggaaggaagc

SEQ ID NO: 2658307 - RNA, 22 nt, Human
ugggagguggaagaagggagaa

SEQ ID NO: 2658308 - RNA, 17 nt, Human
ugggauucaggaaugug

SEQ ID NO: 2658309 - RNA, 19 nt, Human
ugggagguggaagaaggga

SEQ ID NO: 2658310 - RNA, 18 nt, Human
ugggagguggaagaaggg

SEQ ID NO: 2658311 - RNA, 22 nt, Human
ugggauuuccagaaccacacuu

SEQ ID NO: 2658312 - RNA, 15 nt, Human
aggccuuccucucuc

SEQ ID NO: 2658313 - RNA, 21 nt, Human
aggccuucaggguucagcagu

SEQ ID NO: 2658314 - RNA, 17 nt, Human
ugggaggucaaggcugc

SEQ ID NO: 2658315 - RNA, 19 nt, Human
aggccuuccucucuccaga

SEQ ID NO: 2658316 - RNA, 18 nt, Human
aggccuuccucucuccag

SEQ ID NO: 2658317 - RNA, 16 nt, Human
aggccuuccucucucc

SEQ ID NO: 2658318 - RNA, 23 nt, Human
ugggaggucaaggcugcagugag

SEQ ID NO: 2658319 - RNA, 20 nt, Human
ugggaggucaaggcugcagu

SEQ ID NO: 2658320 - RNA, 19 nt, Human
ugggaggucaaggcugcag

SEQ ID NO: 2658321 - RNA, 18 nt, Human
ugggaggucaaggcugca

SEQ ID NO: 2658322 - RNA, 24 nt, Human
ugggccauguccaaagaggcugcc

SEQ ID NO: 2658323 - RNA, 20 nt, Human
agggccgacuaagagaaguu

SEQ ID NO: 2658324 - RNA, 17 nt, Human
agggaggggccggcccu

SEQ ID NO: 2658325 - RNA, 18 nt, Human
agggaggggccggcccug

SEQ ID NO: 2658326 - RNA, 19 nt, Human
agggaggggccggcccugu

SEQ ID NO: 2658327 - RNA, 23 nt, Human
agggaggggccggcccugugugc

SEQ ID NO: 2658328 - RNA, 15 nt, Human
agggagggcuucugc

SEQ ID NO: 2658329 - RNA, 21 nt, Human
agggaggggaaaagcauuuuu

SEQ ID NO: 2658330 - RNA, 21 nt, Human
agggaggucacuggaaagggg

SEQ ID NO: 2658331 - RNA, 20 nt, Human
agggaggucacuggaaaggg

SEQ ID NO: 2658332 - RNA, 22 nt, Human
aggggagagccugcuggcaccc

SEQ ID NO: 2658333 - RNA, 15 nt, Human
aggggagagccugcu

SEQ ID NO: 2658334 - RNA, 15 nt, Human
aggggagacuuugau

SEQ ID NO: 2658335 - RNA, 16 nt, Human
aggggagagccugcug

SEQ ID NO: 2658336 - RNA, 17 nt, Human
aggggagagccugcugg

SEQ ID NO: 2658337 - RNA, 13 nt, Human
aggggagacuuug

SEQ ID NO: 2658338 - RNA, 23 nt, Human
agggggagccgguaacuguccug

SEQ ID NO: 2658339 - RNA, 15 nt, Human
aggggguggaggggu

SEQ ID NO: 2658340 - RNA, 19 nt, Human
agggguggggguggaggcu

SEQ ID NO: 2658341 - RNA, 19 nt, Human
agggggauccgacugcuuu

SEQ ID NO: 2658342 - RNA, 20 nt, Human
agggggauccgacugcuuug

SEQ ID NO: 2658343 - RNA, 14 nt, Human
aggggugucuuggg

SEQ ID NO: 2658344 - RNA, 22 nt, Human
aggggugucuugggcagagcug

SEQ ID NO: 2658345 - RNA, 24 nt, Human
aggggugucuugggcagagcuggc

SEQ ID NO: 2658346 - RNA, 16 nt, Human
agggguguggcagugg

SEQ ID NO: 2658347 - RNA, 18 nt, Human
agggguguggcagugguu

SEQ ID NO: 2658348 - RNA, 14 nt, Human
agggguuccucaaa

SEQ ID NO: 2658349 - RNA, 20 nt, Human
agggguuccucaaauuuuuu

SEQ ID NO: 2658350 - RNA, 18 nt, Human
agggguucccuugagggc

SEQ ID NO: 2658351 - RNA, 20 nt, Human
agggguucccuugagggcug

SEQ ID NO: 2658352 - RNA, 21 nt, Human
agggguucccuugagggcugc

SEQ ID NO: 2658353 - RNA, 23 nt, Human
agggguucccuugagggcugcag

SEQ ID NO: 2658354 - RNA, 16 nt, Human
ugguaauaagcacugu

SEQ ID NO: 2658355 - RNA, 17 nt, Human
ugguaaucuuuaccugu

SEQ ID NO: 2658356 - RNA, 22 nt, Human
ugguaaucuuuaccuguauaca

SEQ ID NO: 2658357 - RNA, 23 nt, Human
ugguaaucuuuaccuguauacag

SEQ ID NO: 2658358 - RNA, 21 nt, Human
ugguaauccccuaaaauaaca

SEQ ID NO: 2658359 - RNA, 23 nt, Human
ugguaauccccuaaaauaacagu

SEQ ID NO: 2658360 - RNA, 20 nt, Human
uggguggggggcauugagua

SEQ ID NO: 2658361 - RNA, 15 nt, Human
ugggugggcucugug

SEQ ID NO: 2658362 - RNA, 16 nt, Human
ugggugggcucugugc

SEQ ID NO: 2658363 - RNA, 19 nt, Human
ugggugggcucugugcagu

SEQ ID NO: 2658364 - RNA, 16 nt, Human
ugguaggaccaagcau

SEQ ID NO: 2658365 - RNA, 22 nt, Human
ugguaggaccaagcaucuuggg

SEQ ID NO: 2658366 - RNA, 22 nt, Human
uggguggcaccagcagccugga

SEQ ID NO: 2658367 - RNA, 12 nt, Human
agggugggaagg

SEQ ID NO: 2658368 - RNA, 19 nt, Human
agggugucugcgucgucac

SEQ ID NO: 2658369 - RNA, 22 nt, Human
aggguguccggucccuguccca

SEQ ID NO: 2658370 - RNA, 11 nt, Human
uggucuuugag

SEQ ID NO: 2658371 - RNA, 10 nt, Human
uggucuuuga

SEQ ID NO: 2658372 - RNA, 12 nt, Human
agguagaaacuu

SEQ ID NO: 2658373 - RNA, 13 nt, Human
agguauuauacau

SEQ ID NO: 2658374 - RNA, 19 nt, Human
agguauuaaaacuaaauuu

SEQ ID NO: 2658375 - RNA, 20 nt, Human
agguauuaaaacuaaauuuc

SEQ ID NO: 2658376 - RNA, 16 nt, Human
aggucaaguugucagg

SEQ ID NO: 2658377 - RNA, 17 nt, Human
aggucaaguugucaggu

SEQ ID NO: 2658378 - RNA, 19 nt, Human
aggucaaguugucagguua

SEQ ID NO: 2658379 - RNA, 20 nt, Human
agguauuuaaaguauuuucu

SEQ ID NO: 2658380 - RNA, 16 nt, Human
aggucacuggaaaggg

SEQ ID NO: 2658381 - RNA, 20 nt, Human
aggucacuggaaaggggaga

SEQ ID NO: 2658382 - RNA, 21 nt, Human
aggucacuggaaaggggagag

SEQ ID NO: 2658383 - RNA, 23 nt, Human
agguccagcucuggaggggaggg

SEQ ID NO: 2658384 - RNA, 18 nt, Human
agguccagcucuggaggg

SEQ ID NO: 2658385 - RNA, 15 nt, Human
agguauaauaaaauu

SEQ ID NO: 2658386 - RNA, 14 nt, Human
aggucacuguuucc

SEQ ID NO: 2658387 - RNA, 16 nt, Human
aggucacuguuuccug

SEQ ID NO: 2658388 - RNA, 18 nt, Human
aggucacuguuuccuggg

SEQ ID NO: 2658389 - RNA, 13 nt, Human
agugcuuuaaugg

SEQ ID NO: 2658390 - RNA, 19 nt, Human
uguuaauggauuucagaag

SEQ ID NO: 2658391 - RNA, 23 nt, Human
uguuaauggauuucagaagccua

SEQ ID NO: 2658392 - RNA, 19 nt, Human
aguggaaaaauagccugcc

SEQ ID NO: 2658393 - RNA, 18 nt, Human
aguggaaaaauagccugc

SEQ ID NO: 2658394 - RNA, 19 nt, Human
agugcuuuuaagugaaaau

SEQ ID NO: 2658395 - RNA, 23 nt, Human
agugcuuuuaagugaaaaugguc

SEQ ID NO: 2658396 - RNA, 11 nt, Human
aguggaaaaau

SEQ ID NO: 2658397 - RNA, 22 nt, Human
uguguugccacaguagaacugu

SEQ ID NO: 2658398 - RNA, 16 nt, Human
uguguugccaagcucc

SEQ ID NO: 2658399 - RNA, 17 nt, Human
uguguugguguggccca

SEQ ID NO: 2658400 - RNA, 19 nt, Human
uguguugucucuugaguuu

SEQ ID NO: 2658401 - RNA, 12 nt, Human
ugugugugugca

SEQ ID NO: 2658402 - RNA, 15 nt, Human
ugugugugugcacau

SEQ ID NO: 2658403 - RNA, 14 nt, Human
ugugugugugugca

SEQ ID NO: 2658404 - RNA, 14 nt, Human
ugugugugugugcg

SEQ ID NO: 2658405 - RNA, 16 nt, Human
ugugugugugugugca

SEQ ID NO: 2658406 - RNA, 16 nt, Human
ugugugugugugugcg

SEQ ID NO: 2658407 - RNA, 13 nt, Human
uguguugccaagc

SEQ ID NO: 2658408 - RNA, 14 nt, Human
agugccuauugaua

SEQ ID NO: 2658409 - RNA, 21 nt, Human
agugccucaagaggaaugaaa

SEQ ID NO: 2658410 - RNA, 23 nt, Human
agugccgcaucucacagcuaugc

SEQ ID NO: 2658411 - RNA, 19 nt, Human
agugccgcaucucacagcu

SEQ ID NO: 2658412 - RNA, 18 nt, Human
agugccgcaucucacagc

SEQ ID NO: 2658413 - RNA, 20 nt, Human
agugcccuuccugcugcgca

SEQ ID NO: 2658414 - RNA, 16 nt, Human
agugccgcaucucaca

SEQ ID NO: 2658415 - RNA, 19 nt, Human
agugcuggagucuccugag

SEQ ID NO: 2658416 - RNA, 22 nt, Human
agugcuggagucuccugaggac

SEQ ID NO: 2658417 - RNA, 18 nt, Human
ugugguuuacuagcagga

SEQ ID NO: 2658418 - RNA, 13 nt, Human
ugugguuccucug

SEQ ID NO: 2658419 - RNA, 17 nt, Human
ugugguuccucugcuca

SEQ ID NO: 2658420 - RNA, 12 nt, Human
ugugguuucauu

SEQ ID NO: 2658421 - RNA, 19 nt, Human
ugugucagcauagaaguaa

SEQ ID NO: 2658422 - RNA, 13 nt, Human
uguggugaugaaa

SEQ ID NO: 2658423 - RNA, 13 nt, Human
agugcuuggaaca

SEQ ID NO: 2658424 - RNA, 22 nt, Human
agugcuuggaacauacuguuca

SEQ ID NO: 2658425 - RNA, 13 nt, Human
uguggccccaccc

SEQ ID NO: 2658426 - RNA, 12 nt, Human
uguggccccacc

SEQ ID NO: 2658427 - RNA, 17 nt, Human
uguggccccacccuggg

SEQ ID NO: 2658428 - RNA, 19 nt, Human
uguggccccacccugggcc

SEQ ID NO: 2658429 - RNA, 15 nt, Human
uguggcacuugccug

SEQ ID NO: 2658430 - RNA, 16 nt, Human
uguggcacuugccugg

SEQ ID NO: 2658431 - RNA, 18 nt, Human
uguggcacuugccugggu

SEQ ID NO: 2658432 - RNA, 19 nt, Human
uguggcacuugccuggguc

SEQ ID NO: 2658433 - RNA, 17 nt, Human
uguggcaaucugugggc

SEQ ID NO: 2658434 - RNA, 18 nt, Human
uguggcaaucugugggcu

SEQ ID NO: 2658435 - RNA, 20 nt, Human
uguggagccgaggccuaccc

SEQ ID NO: 2658436 - RNA, 16 nt, Human
uguggagccgaggccu

SEQ ID NO: 2658437 - RNA, 19 nt, Human
uguggagccgaggccuacc

SEQ ID NO: 2658438 - RNA, 12 nt, Human
ugugcugcccug

SEQ ID NO: 2658439 - RNA, 16 nt, Human
ugugcugcccugaaga

SEQ ID NO: 2658440 - RNA, 17 nt, Human
ugugcugcccugaagaa

SEQ ID NO: 2658441 - RNA, 18 nt, Human
ugugcugcccugaagaau

SEQ ID NO: 2658442 - RNA, 12 nt, Human
agugccaaagaa

SEQ ID NO: 2658443 - RNA, 13 nt, Human
agugccaaagaaa

SEQ ID NO: 2658444 - RNA, 23 nt, Human
uguggccccacccugggcccugg

SEQ ID NO: 2658445 - RNA, 16 nt, Human
uguggcccuggcugcc

SEQ ID NO: 2658446 - RNA, 21 nt, Human
aguuacugccgguuugaaaau

SEQ ID NO: 2658447 - RNA, 14 nt, Human
aguuacuguguaaa

SEQ ID NO: 2658448 - RNA, 15 nt, Human
aguuacuguguaaac

SEQ ID NO: 2658449 - RNA, 16 nt, Human
aguuacuguguaaacu

SEQ ID NO: 2658450 - RNA, 13 nt, Human
aguguuauaugaa

SEQ ID NO: 2658451 - RNA, 20 nt, Human
aguguuauaugaacauacaa

SEQ ID NO: 2658452 - RNA, 16 nt, Human
aguguuauaugaacau

SEQ ID NO: 2658453 - RNA, 15 nt, Human
aguguuauaugaaca

SEQ ID NO: 2658454 - RNA, 14 nt, Human
aguguuauaugaac

SEQ ID NO: 2658455 - RNA, 15 nt, Human
aguggaaauguucua

SEQ ID NO: 2658456 - RNA, 12 nt, Human
uguuauaugaac

SEQ ID NO: 2658457 - RNA, 14 nt, Human
uguuauaugaacau

SEQ ID NO: 2658458 - RNA, 13 nt, Human
uguuauaugaaca

SEQ ID NO: 2658459 - RNA, 13 nt, Human
uguuaucaaaaua

SEQ ID NO: 2658460 - RNA, 15 nt, Human
uguuauaugaacaua

SEQ ID NO: 2658461 - RNA, 14 nt, Human
uguuauuagauguu

SEQ ID NO: 2658462 - RNA, 16 nt, Human
uguuauuaucugggcu

SEQ ID NO: 2658463 - RNA, 23 nt, Human
uguuauuaucugggcuuauaucu

SEQ ID NO: 2658464 - RNA, 16 nt, Human
uguuauucaacagcaa

SEQ ID NO: 2658465 - RNA, 14 nt, Human
aguucuaccggcuu

SEQ ID NO: 2658466 - RNA, 16 nt, Human
aguucuacucaggcug

SEQ ID NO: 2658467 - RNA, 17 nt, Human
aguucuacucaggcugg

SEQ ID NO: 2658468 - RNA, 23 nt, Human
aguuccucauuagcauuuugcua

SEQ ID NO: 2658469 - RNA, 20 nt, Human
aguucaagaucaaaaaggcu

SEQ ID NO: 2658470 - RNA, 15 nt, Human
aguucaagaucaaaa

SEQ ID NO: 2658471 - RNA, 17 nt, Human
uguuuagauuugccaua

SEQ ID NO: 2658472 - RNA, 12 nt, Human
uguuuagauuug

SEQ ID NO: 2658473 - RNA, 15 nt, Human
uguugucucuugagu

SEQ ID NO: 2658474 - RNA, 15 nt, Human
uguuuauuacuucca

SEQ ID NO: 2658475 - RNA, 18 nt, Human
uguuuauuacuuccauga

SEQ ID NO: 2658476 - RNA, 21 nt, Human
uguuuauuacuuccaugaauu

SEQ ID NO: 2658477 - RNA, 22 nt, Human
uguuuauggcaauuuaacaugu

SEQ ID NO: 2658478 - RNA, 12 nt, Human
uguuuauuuucu

SEQ ID NO: 2658479 - RNA, 20 nt, Human
uguuuauuuucuacguuucu

SEQ ID NO: 2658480 - RNA, 22 nt, Human
uguuuauuuucuacguuucuuu

SEQ ID NO: 2658481 - RNA, 12 nt, Human
uuaauauuuaac

SEQ ID NO: 2658482 - RNA, 17 nt, Human
uuaauauuuaacauuau

SEQ ID NO: 2658483 - RNA, 16 nt, Human
uuaauauuuaacauua

SEQ ID NO: 2658484 - RNA, 12 nt, Human
uuaauauuuccu

SEQ ID NO: 2658485 - RNA, 13 nt, Human
uuaaucauuuuca

SEQ ID NO: 2658486 - RNA, 15 nt, Human
uuaaucauuuucauu

SEQ ID NO: 2658487 - RNA, 19 nt, Human
uuaaucauuuucauuccua

SEQ ID NO: 2658488 - RNA, 21 nt, Human
uuaaucuacugcauuuaggga

SEQ ID NO: 2658489 - RNA, 20 nt, Human
uuaaucuguuuauuuacaag

SEQ ID NO: 2658490 - RNA, 19 nt, Human
uuaagaaauguauaaacuu

SEQ ID NO: 2658491 - RNA, 24 nt, Human
uuaaggggaggaaccagagugcug

SEQ ID NO: 2658492 - RNA, 18 nt, Human
uuaagggguaucauguau

SEQ ID NO: 2658493 - RNA, 17 nt, Human
uuaaggggaagaaugaa

SEQ ID NO: 2658494 - RNA, 18 nt, Human
uuaaggggaagaaugaaa

SEQ ID NO: 2658495 - RNA, 20 nt, Human
uuaaggggaagaaugaaagc

SEQ ID NO: 2658496 - RNA, 16 nt, Human
uuaaggucuuucagua

SEQ ID NO: 2658497 - RNA, 22 nt, Human
uuaagguguuugaaaauaguuu

SEQ ID NO: 2658498 - RNA, 17 nt, Human
uuaagguguuugaaaau

SEQ ID NO: 2658499 - RNA, 16 nt, Human
uuaagguguuugaaaa

SEQ ID NO: 2658500 - RNA, 14 nt, Human
uuaagguguuugaa

SEQ ID NO: 2658501 - RNA, 18 nt, Human
aguuuugacaagcuggcu

SEQ ID NO: 2658502 - RNA, 15 nt, Human
aguuuugacaagcug

SEQ ID NO: 2658503 - RNA, 14 nt, Human
aguuuugacaagcu

SEQ ID NO: 2658504 - RNA, 17 nt, Human
aguuuccgugcguggca

SEQ ID NO: 2658505 - RNA, 20 nt, Human
aguuuccgugcguggcacuc

SEQ ID NO: 2658506 - RNA, 14 nt, Human
aguuuugucauuca

SEQ ID NO: 2658507 - RNA, 17 nt, Human
aguuuuuacaagaugua

SEQ ID NO: 2658508 - RNA, 19 nt, Human
aguuuugacaagcuggcuu

SEQ ID NO: 2658509 - RNA, 16 nt, Human
aguuuuguaaaagaaa

SEQ ID NO: 2658510 - RNA, 22 nt, Human
aguuuuguaaaagaaaucaugu

SEQ ID NO: 2658511 - RNA, 17 nt, Human
auaaaauacauagugaa

SEQ ID NO: 2658512 - RNA, 18 nt, Human
auaaaauacauagugaaa

SEQ ID NO: 2658513 - RNA, 22 nt, Human
auaaaauagauauaaauuuuua

SEQ ID NO: 2658514 - RNA, 18 nt, Human
auaaaauaguaugaaaau

SEQ ID NO: 2658515 - RNA, 17 nt, Human
auaaaauauaucuuaua

SEQ ID NO: 2658516 - RNA, 15 nt, Human
auaaaauauaaacaa

SEQ ID NO: 2658517 - RNA, 18 nt, Human
aguuuuuaugagaaacuu

SEQ ID NO: 2658518 - RNA, 16 nt, Human
aguuuuuaugagaaac

SEQ ID NO: 2658519 - RNA, 21 nt, Human
aguugcugguaaaaugaagaa

SEQ ID NO: 2658520 - RNA, 18 nt, Human
aguugcugguaaaaugaa

SEQ ID NO: 2658521 - RNA, 17 nt, Human
aguugcugguaaaauga

SEQ ID NO: 2658522 - RNA, 15 nt, Human
aguugcugguaaaau

SEQ ID NO: 2658523 - RNA, 19 nt, Human
aguugcuugucuucuggua

SEQ ID NO: 2658524 - RNA, 22 nt, Human
aguuuaaaaguucuuaguuaua

SEQ ID NO: 2658525 - RNA, 13 nt, Human
uuaaaaaaaaucc

SEQ ID NO: 2658526 - RNA, 13 nt, Human
aguuuacagaaaa

SEQ ID NO: 2658527 - RNA, 20 nt, Human
uuaaaauuuuguauguuaaa

SEQ ID NO: 2658528 - RNA, 14 nt, Human
uuaaaguauuuucu

SEQ ID NO: 2658529 - RNA, 13 nt, Human
uuaaaguauucuu

SEQ ID NO: 2658530 - RNA, 15 nt, Human
uuaaacauugaagua

SEQ ID NO: 2658531 - RNA, 13 nt, Human
uuaaacauugaag

SEQ ID NO: 2658532 - RNA, 20 nt, Human
aguuucaguauuagaugcac

SEQ ID NO: 2658533 - RNA, 22 nt, Human
aguuucaguauuagaugcacuu

SEQ ID NO: 2658534 - RNA, 18 nt, Human
aguuucaguuuguuggaa

SEQ ID NO: 2658535 - RNA, 19 nt, Human
aguuucaguuuguuggaaa

SEQ ID NO: 2658536 - RNA, 13 nt, Human
uuaacagaaauug

SEQ ID NO: 2658537 - RNA, 15 nt, Human
uuaacagaaauugua

SEQ ID NO: 2658538 - RNA, 16 nt, Human
uuaacagaaauuguau

SEQ ID NO: 2658539 - RNA, 17 nt, Human
uuaacagaaauuguaua

SEQ ID NO: 2658540 - RNA, 19 nt, Human
uuaacagaaauuguauauu

SEQ ID NO: 2658541 - RNA, 21 nt, Human
uuaacagaaauuguauauugu

SEQ ID NO: 2658542 - RNA, 16 nt, Human
uuaaauacauauggau

SEQ ID NO: 2658543 - RNA, 18 nt, Human
uuaaauacauauggaugu

SEQ ID NO: 2658544 - RNA, 19 nt, Human
uuaaauacauauggauguu

SEQ ID NO: 2658545 - RNA, 23 nt, Human
uuaaauacauauggauguuacuc

SEQ ID NO: 2658546 - RNA, 21 nt, Human
auaauagcaacuuuuguguaa

SEQ ID NO: 2658547 - RNA, 20 nt, Human
auaauccugugaaaauauga

SEQ ID NO: 2658548 - RNA, 16 nt, Human
auaauccuuaaaucuu

SEQ ID NO: 2658549 - RNA, 17 nt, Human
auaauucuuuuuuauua

SEQ ID NO: 2658550 - RNA, 14 nt, Human
auaauucuuuuuua

SEQ ID NO: 2658551 - RNA, 22 nt, Human
auaauucuuuuuuauuaaucac

SEQ ID NO: 2658552 - RNA, 21 nt, Human
auaauucuuuuuuauuaauca

SEQ ID NO: 2658553 - RNA, 19 nt, Human
auaauucuuuuuuauuaau

SEQ ID NO: 2658554 - RNA, 17 nt, Human
auaaugaggaguuuaug

SEQ ID NO: 2658555 - RNA, 18 nt, Human
auaaugaggaguuuauga

SEQ ID NO: 2658556 - RNA, 20 nt, Human
auaaugccauuuuaaggaaa

SEQ ID NO: 2658557 - RNA, 14 nt, Human
auaauacugaacca

SEQ ID NO: 2658558 - RNA, 13 nt, Human
auaauacugaacc

SEQ ID NO: 2658559 - RNA, 16 nt, Human
auaauacugaaccacu

SEQ ID NO: 2658560 - RNA, 15 nt, Human
auaauacugaaccac

SEQ ID NO: 2658561 - RNA, 20 nt, Human
auaauacugaaccacuugua

SEQ ID NO: 2658562 - RNA, 13 nt, Human
auaauagacugua

SEQ ID NO: 2658563 - RNA, 12 nt, Human
auaauagaaaug

SEQ ID NO: 2658564 - RNA, 13 nt, Human
auaauagaaaugu

SEQ ID NO: 2658565 - RNA, 15 nt, Human
auaauagaaaugucu

SEQ ID NO: 2658566 - RNA, 14 nt, Human
uuagaacagguuuu

SEQ ID NO: 2658567 - RNA, 13 nt, Human
uuagaacagguuu

SEQ ID NO: 2658568 - RNA, 13 nt, Human
uuagacagccaaa

SEQ ID NO: 2658569 - RNA, 16 nt, Human
auaagaauucagacau

SEQ ID NO: 2658570 - RNA, 12 nt, Human
auaagaauuugc

SEQ ID NO: 2658571 - RNA, 13 nt, Human
auaagaauuugca

SEQ ID NO: 2658572 - RNA, 14 nt, Human
auaagaauuugcau

SEQ ID NO: 2658573 - RNA, 15 nt, Human
auaagaauuugcaua

SEQ ID NO: 2658574 - RNA, 17 nt, Human
auaagaauuugcauacu

SEQ ID NO: 2658575 - RNA, 23 nt, Human
auaagacaaauauuccuuugcau

SEQ ID NO: 2658576 - RNA, 13 nt, Human
auaauaaaauuau

SEQ ID NO: 2658577 - RNA, 13 nt, Human
auaauaaaaauau

SEQ ID NO: 2658578 - RNA, 15 nt, Human
auaauaaaaauauau

SEQ ID NO: 2658579 - RNA, 19 nt, Human
auaauaaaaauauauuuuc

SEQ ID NO: 2658580 - RNA, 13 nt, Human
auaauaaauauau

SEQ ID NO: 2658581 - RNA, 23 nt, Human
uuagggacuacccauagacauga

SEQ ID NO: 2658582 - RNA, 18 nt, Human
uuagguuggcaaaaaggc

SEQ ID NO: 2658583 - RNA, 16 nt, Human
uuaguuuagaacaggu

SEQ ID NO: 2658584 - RNA, 20 nt, Human
uuaguuuagaacagguuuuu

SEQ ID NO: 2658585 - RNA, 22 nt, Human
uuaguuuguaugccaagugaga

SEQ ID NO: 2658586 - RNA, 15 nt, Human
uuaguuuguguguug

SEQ ID NO: 2658587 - RNA, 15 nt, Human
uuaguuuguauauau

SEQ ID NO: 2658588 - RNA, 18 nt, Human
uuagcaaauucuguuuuu

SEQ ID NO: 2658589 - RNA, 17 nt, Human
auaauuuaaaaauauau

SEQ ID NO: 2658590 - RNA, 19 nt, Human
auaauuuaaaaauauauuu

SEQ ID NO: 2658591 - RNA, 21 nt, Human
auaauuuaaaaauauauuuau

SEQ ID NO: 2658592 - RNA, 15 nt, Human
auaauuguucucaga

SEQ ID NO: 2658593 - RNA, 23 nt, Human
auaauuguucucagaaucccuua

SEQ ID NO: 2658594 - RNA, 19 nt, Human
uuagccagguaaugugaau

SEQ ID NO: 2658595 - RNA, 15 nt, Human
auaauugaaguguau

SEQ ID NO: 2658596 - RNA, 17 nt, Human
uuagccagauuugucuu

SEQ ID NO: 2658597 - RNA, 18 nt, Human
uuagccaagugugguaga

SEQ ID NO: 2658598 - RNA, 23 nt, Human
uuacucucuugcaccaaauuauc

SEQ ID NO: 2658599 - RNA, 14 nt, Human
uuaccuuucucucu

SEQ ID NO: 2658600 - RNA, 18 nt, Human
uuaccuagcuaauuauuu

SEQ ID NO: 2658601 - RNA, 21 nt, Human
uuaccuagcuaauuauuuaau

SEQ ID NO: 2658602 - RNA, 13 nt, Human
uuaccuagugaaa

SEQ ID NO: 2658603 - RNA, 15 nt, Human
uuaccuagugaaacu

SEQ ID NO: 2658604 - RNA, 19 nt, Human
uuaccuagugaaacuuuuc

SEQ ID NO: 2658605 - RNA, 21 nt, Human
uuaccuagugaaacuuuucua

SEQ ID NO: 2658606 - RNA, 22 nt, Human
uuaccuagugaaacuuuucuag

SEQ ID NO: 2658607 - RNA, 15 nt, Human
auaacuguguacugu

SEQ ID NO: 2658608 - RNA, 16 nt, Human
auaacuguguacuguu

SEQ ID NO: 2658609 - RNA, 17 nt, Human
auaaauuauuugauuau

SEQ ID NO: 2658610 - RNA, 19 nt, Human
auaaauuauuugauuauuu

SEQ ID NO: 2658611 - RNA, 15 nt, Human
auaaauucaacuuug

SEQ ID NO: 2658612 - RNA, 20 nt, Human
auaaauucaacuuuguaaaa

SEQ ID NO: 2658613 - RNA, 19 nt, Human
auaaaucauucuuacuaaa

SEQ ID NO: 2658614 - RNA, 20 nt, Human
auaaaucauucuuacuaaaa

SEQ ID NO: 2658615 - RNA, 21 nt, Human
auaaaucauucuuacuaaaaa

SEQ ID NO: 2658616 - RNA, 13 nt, Human
auaaauccaguga

SEQ ID NO: 2658617 - RNA, 14 nt, Human
auaaauccagugac

SEQ ID NO: 2658618 - RNA, 15 nt, Human
auaaauccagugacc

SEQ ID NO: 2658619 - RNA, 20 nt, Human
auaaauccagugaccucucu

SEQ ID NO: 2658620 - RNA, 22 nt, Human
auaaauccagugaccucucucu

SEQ ID NO: 2658621 - RNA, 23 nt, Human
auaaauccagugaccucucucuc

SEQ ID NO: 2658622 - RNA, 16 nt, Human
auaaaguaaauacaug

SEQ ID NO: 2658623 - RNA, 18 nt, Human
auaaaguaaauacaugca

SEQ ID NO: 2658624 - RNA, 21 nt, Human
uuaauugugugaacuuggaag

SEQ ID NO: 2658625 - RNA, 16 nt, Human
uuaauugugugaacuu

SEQ ID NO: 2658626 - RNA, 15 nt, Human
uuaauuguaaaguaa

SEQ ID NO: 2658627 - RNA, 13 nt, Human
uuaauuguauuuu

SEQ ID NO: 2658628 - RNA, 14 nt, Human
uuaauuguaaagua

SEQ ID NO: 2658629 - RNA, 15 nt, Human
auaaauauauacauu

SEQ ID NO: 2658630 - RNA, 13 nt, Human
uuuggcauuugca

SEQ ID NO: 2658631 - RNA, 23 nt, Human
uuuggcauguaaauguaaacuca

SEQ ID NO: 2658632 - RNA, 19 nt, Human
uuuggcccaaucucugcca

SEQ ID NO: 2658633 - RNA, 23 nt, Human
uuugcugucccauagucccugcc

SEQ ID NO: 2658634 - RNA, 16 nt, Human
uuugcuuagaaaagaa

SEQ ID NO: 2658635 - RNA, 12 nt, Human
uuugcuuagaaa

SEQ ID NO: 2658636 - RNA, 22 nt, Human
uuugggaggccaaggugggagg

SEQ ID NO: 2658637 - RNA, 20 nt, Human
uuugcuaauuaacugaaaca

SEQ ID NO: 2658638 - RNA, 15 nt, Human
uuugcaauaacagcu

SEQ ID NO: 2658639 - RNA, 16 nt, Human
uuugcaauaacagcug

SEQ ID NO: 2658640 - RNA, 17 nt, Human
uuugcaauaacagcugc

SEQ ID NO: 2658641 - RNA, 19 nt, Human
uuugcaauaacagcugcaa

SEQ ID NO: 2658642 - RNA, 14 nt, Human
uuugcaagugcugg

SEQ ID NO: 2658643 - RNA, 18 nt, Human
uuugcaauaaaaaugaua

SEQ ID NO: 2658644 - RNA, 14 nt, Human
uuugccauugugaa

SEQ ID NO: 2658645 - RNA, 17 nt, Human
uuugccauugugaacca

SEQ ID NO: 2658646 - RNA, 19 nt, Human
uuugcacauguuuccucua

SEQ ID NO: 2658647 - RNA, 21 nt, Human
uuugcuacuguuguaagaauu

SEQ ID NO: 2658648 - RNA, 12 nt, Human
auguauaaauau

SEQ ID NO: 2658649 - RNA, 14 nt, Human
auguauaaauauac

SEQ ID NO: 2658650 - RNA, 16 nt, Human
auguauaaauauacag

SEQ ID NO: 2658651 - RNA, 17 nt, Human
auguauaaauauacagu

SEQ ID NO: 2658652 - RNA, 14 nt, Human
auguauaaaauaca

SEQ ID NO: 2658653 - RNA, 15 nt, Human
auguauaaaauacau

SEQ ID NO: 2658654 - RNA, 20 nt, Human
auguauaaaauacauaguga

SEQ ID NO: 2658655 - RNA, 22 nt, Human
auguauaaaauacauagugaaa

SEQ ID NO: 2658656 - RNA, 21 nt, Human
auguauaaacuuuagaguaga

SEQ ID NO: 2658657 - RNA, 22 nt, Human
augucagcaguugcugguaaaa

SEQ ID NO: 2658658 - RNA, 21 nt, Human
augucagcaguugcugguaaa

SEQ ID NO: 2658659 - RNA, 13 nt, Human
auguccauacacu

SEQ ID NO: 2658660 - RNA, 21 nt, Human
auguccauacacuuuguugca

SEQ ID NO: 2658661 - RNA, 21 nt, Human
auguccaguaagaucacuguu

SEQ ID NO: 2658662 - RNA, 22 nt, Human
uuuuaaccgguaagaguuucag

SEQ ID NO: 2658663 - RNA, 13 nt, Human
uuuuaaggucuuu

SEQ ID NO: 2658664 - RNA, 17 nt, Human
uuuuaaggucuuucagu

SEQ ID NO: 2658665 - RNA, 18 nt, Human
uuuuaaggucuuucagua

SEQ ID NO: 2658666 - RNA, 21 nt, Human
uuuuaaggucuuucaguacuu

SEQ ID NO: 2658667 - RNA, 23 nt, Human
uuuuaaggucuuucaguacuuuu

SEQ ID NO: 2658668 - RNA, 15 nt, Human
uuuuaaggaaaacua

SEQ ID NO: 2658669 - RNA, 15 nt, Human
uuuuaaggacugacu

SEQ ID NO: 2658670 - RNA, 21 nt, Human
uuuuaagcugcaaaucugaug

SEQ ID NO: 2658671 - RNA, 22 nt, Human
uuuuaaggacugacugaggcag

SEQ ID NO: 2658672 - RNA, 19 nt, Human
uuuuaaggacugacugagg

SEQ ID NO: 2658673 - RNA, 16 nt, Human
uuuuaaggacugacug

SEQ ID NO: 2658674 - RNA, 13 nt, Human
uuuuaagauagug

SEQ ID NO: 2658675 - RNA, 14 nt, Human
uuuuaagauagugu

SEQ ID NO: 2658676 - RNA, 15 nt, Human
uuuuaagauagugua

SEQ ID NO: 2658677 - RNA, 16 nt, Human
uuuuaagauaguguaa

SEQ ID NO: 2658678 - RNA, 23 nt, Human
uuuuaagauaguguaacuugcuu

SEQ ID NO: 2658679 - RNA, 13 nt, Human
uuuuaaaaaccua

SEQ ID NO: 2658680 - RNA, 15 nt, Human
uuuuaaaacuggacc

SEQ ID NO: 2658681 - RNA, 17 nt, Human
uuuuaaaacuggaccug

SEQ ID NO: 2658682 - RNA, 20 nt, Human
uuuuaaaacuggaccuguau

SEQ ID NO: 2658683 - RNA, 21 nt, Human
uuuuaaaaaucuaagcagcuu

SEQ ID NO: 2658684 - RNA, 19 nt, Human
uuuuaaaaauuguuauuua

SEQ ID NO: 2658685 - RNA, 13 nt, Human
uuuuaaaacacau

SEQ ID NO: 2658686 - RNA, 11 nt, Human
uuuuaaaacac

SEQ ID NO: 2658687 - RNA, 20 nt, Human
uuuuaaaacacauguuuuua

SEQ ID NO: 2658688 - RNA, 21 nt, Human
uuuuaaaaaacugcugacugu

SEQ ID NO: 2658689 - RNA, 18 nt, Human
uuuuaaaaaauauuuucu

SEQ ID NO: 2658690 - RNA, 20 nt, Human
uuuuaaaaacauaacauaaa

SEQ ID NO: 2658691 - RNA, 17 nt, Human
uuuuaaaaaauggucac

SEQ ID NO: 2658692 - RNA, 16 nt, Human
uuuuaaaaaaugguca

SEQ ID NO: 2658693 - RNA, 12 nt, Human
augucuguaaau

SEQ ID NO: 2658694 - RNA, 20 nt, Human
augucucaaggcaguuaauu

SEQ ID NO: 2658695 - RNA, 16 nt, Human
uuuguaaauuuagugu

SEQ ID NO: 2658696 - RNA, 16 nt, Human
uuuguaaauucugauu

SEQ ID NO: 2658697 - RNA, 15 nt, Human
uuuguaaauucugau

SEQ ID NO: 2658698 - RNA, 12 nt, Human
uuuguaaauucu

SEQ ID NO: 2658699 - RNA, 18 nt, Human
uuuguaaauuauuuaugu

SEQ ID NO: 2658700 - RNA, 20 nt, Human
uuuguaaauucugauuucuu

SEQ ID NO: 2658701 - RNA, 19 nt, Human
uuuguaaauucugauuucu

SEQ ID NO: 2658702 - RNA, 18 nt, Human
uuuguacauuugggaguu

SEQ ID NO: 2658703 - RNA, 20 nt, Human
uuuguacgacgucagauguu

SEQ ID NO: 2658704 - RNA, 15 nt, Human
uuuguacugaauuuu

SEQ ID NO: 2658705 - RNA, 16 nt, Human
uuuguacugaauuuuu

SEQ ID NO: 2658706 - RNA, 22 nt, Human
uuuguacugaauuuuuuuguaa

SEQ ID NO: 2658707 - RNA, 19 nt, Human
uuugucgcucaugugugca

SEQ ID NO: 2658708 - RNA, 13 nt, Human
uuugucugguuaa

SEQ ID NO: 2658709 - RNA, 22 nt, Human
uuugugagaaacaucucaauaa

SEQ ID NO: 2658710 - RNA, 18 nt, Human
auguuguaguguccccca

SEQ ID NO: 2658711 - RNA, 12 nt, Human
auguuguagugu

SEQ ID NO: 2658712 - RNA, 19 nt, Human
auguuguagugucccccac

SEQ ID NO: 2658713 - RNA, 19 nt, Human
uuuucuauuauggaaaacu

SEQ ID NO: 2658714 - RNA, 23 nt, Human
uuuucuauuauggaaaacugugu

SEQ ID NO: 2658715 - RNA, 19 nt, Human
uuuucuauuauuuuuauaa

SEQ ID NO: 2658716 - RNA, 18 nt, Human
auuaaaaaagcauacuuc

SEQ ID NO: 2658717 - RNA, 19 nt, Human
auuaaaaaagcauacuucu

SEQ ID NO: 2658718 - RNA, 17 nt, Human
auuaaaaauaucaaauu

SEQ ID NO: 2658719 - RNA, 19 nt, Human
auuaacuuaauaaucaaga

SEQ ID NO: 2658720 - RNA, 14 nt, Human
auuaacuuaauaau

SEQ ID NO: 2658721 - RNA, 16 nt, Human
auuaacuuaauaauca

SEQ ID NO: 2658722 - RNA, 17 nt, Human
auuaaccuuacuaauua

SEQ ID NO: 2658723 - RNA, 14 nt, Human
auuaacugaaacau

SEQ ID NO: 2658724 - RNA, 19 nt, Human
auuaaaggcauaaaugacu

SEQ ID NO: 2658725 - RNA, 18 nt, Human
auuaaaggaagcacucug

SEQ ID NO: 2658726 - RNA, 17 nt, Human
auuaaccacuucagcug

SEQ ID NO: 2658727 - RNA, 20 nt, Human
auuaaccacuucagcugacu

SEQ ID NO: 2658728 - RNA, 18 nt, Human
auuaaccacuucagcuga

SEQ ID NO: 2658729 - RNA, 12 nt, Human
uuuuaaguucuu

SEQ ID NO: 2658730 - RNA, 13 nt, Human
uuuuaaguucuua

SEQ ID NO: 2658731 - RNA, 15 nt, Human
uuuuaaguucuuaug

SEQ ID NO: 2658732 - RNA, 21 nt, Human
auguugauuuuuacuguguuu

SEQ ID NO: 2658733 - RNA, 17 nt, Human
uuuuagaugguuucuug

SEQ ID NO: 2658734 - RNA, 18 nt, Human
auguugaucauguacuuu

SEQ ID NO: 2658735 - RNA, 16 nt, Human
auguugauuuuuacug

SEQ ID NO: 2658736 - RNA, 17 nt, Human
auguugauuuuuacugu

SEQ ID NO: 2658737 - RNA, 20 nt, Human
auguugauuuuuacuguguu

SEQ ID NO: 2658738 - RNA, 23 nt, Human
auguugauuuuuacuguguuuua

SEQ ID NO: 2658739 - RNA, 16 nt, Human
uuuuauaauuguacaa

SEQ ID NO: 2658740 - RNA, 18 nt, Human
uuuuaugugagagaaagu

SEQ ID NO: 2658741 - RNA, 17 nt, Human
uuuuaugguuacuucuu

SEQ ID NO: 2658742 - RNA, 15 nt, Human
uuuuaugguuauguu

SEQ ID NO: 2658743 - RNA, 22 nt, Human
uuuuauaaaauggcuguaauca

SEQ ID NO: 2658744 - RNA, 15 nt, Human
auguugagagguucu

SEQ ID NO: 2658745 - RNA, 12 nt, Human
uuuuauaaagca

SEQ ID NO: 2658746 - RNA, 15 nt, Human
uuuuauaaagcaugu

SEQ ID NO: 2658747 - RNA, 19 nt, Human
uuuuccagguuuaagcugu

SEQ ID NO: 2658748 - RNA, 17 nt, Human
uuuucauuccuaaagaa

SEQ ID NO: 2658749 - RNA, 21 nt, Human
uuuucauucagguauuuguaa

SEQ ID NO: 2658750 - RNA, 19 nt, Human
auuaucaauaucuaauaua

SEQ ID NO: 2658751 - RNA, 17 nt, Human
auuaucaauaucuaaua

SEQ ID NO: 2658752 - RNA, 15 nt, Human
auuaucaauaucuaa

SEQ ID NO: 2658753 - RNA, 14 nt, Human
auuaucugggcuua

SEQ ID NO: 2658754 - RNA, 15 nt, Human
auuaucuugauacau

SEQ ID NO: 2658755 - RNA, 16 nt, Human
auuaucuugauacauu

SEQ ID NO: 2658756 - RNA, 18 nt, Human
auuaucuugauacauuca

SEQ ID NO: 2658757 - RNA, 20 nt, Human
auuaucuugauacauucaaa

SEQ ID NO: 2658758 - RNA, 23 nt, Human
auuaucuugauacauucaaauuu

SEQ ID NO: 2658759 - RNA, 16 nt, Human
auuauguuuuuuaaaa

SEQ ID NO: 2658760 - RNA, 20 nt, Human
auuauguuuuuuaaaauauu

SEQ ID NO: 2658761 - RNA, 22 nt, Human
auuauuuauauggggaauauau

SEQ ID NO: 2658762 - RNA, 13 nt, Human
auuauuuauuauu

SEQ ID NO: 2658763 - RNA, 13 nt, Human
auuauuuuaaaaa

SEQ ID NO: 2658764 - RNA, 12 nt, Human
auuauuuauaau

SEQ ID NO: 2658765 - RNA, 15 nt, Human
auuauuuaauugucc

SEQ ID NO: 2658766 - RNA, 13 nt, Human
auuauuuauaugg

SEQ ID NO: 2658767 - RNA, 12 nt, Human
auuauucucugc

SEQ ID NO: 2658768 - RNA, 12 nt, Human
auuauugacacu

SEQ ID NO: 2658769 - RNA, 13 nt, Human
auuauugacacug

SEQ ID NO: 2658770 - RNA, 14 nt, Human
auuauugacacuga

SEQ ID NO: 2658771 - RNA, 15 nt, Human
auuauugacacugaa

SEQ ID NO: 2658772 - RNA, 16 nt, Human
auuauugacacugaac

SEQ ID NO: 2658773 - RNA, 18 nt, Human
auuauugacacugaacuu

SEQ ID NO: 2658774 - RNA, 17 nt, Human
auuacuuguugccuaua

SEQ ID NO: 2658775 - RNA, 18 nt, Human
auuacuuguugccuauaa

SEQ ID NO: 2658776 - RNA, 15 nt, Human
auuagaagacaacag

SEQ ID NO: 2658777 - RNA, 14 nt, Human
auuauaaucuuaua

SEQ ID NO: 2658778 - RNA, 15 nt, Human
auuauaauaaauaua

SEQ ID NO: 2658779 - RNA, 19 nt, Human
auuauaauaaauauauaca

SEQ ID NO: 2658780 - RNA, 18 nt, Human
auuauaaucuuauaauug

SEQ ID NO: 2658781 - RNA, 22 nt, Human
auuaauauauguauuauuuaua

SEQ ID NO: 2658782 - RNA, 21 nt, Human
auuaauauauguauuauuuau

SEQ ID NO: 2658783 - RNA, 16 nt, Human
auuaauauauguauua

SEQ ID NO: 2658784 - RNA, 20 nt, Human
auuaauauauguauuauuua

SEQ ID NO: 2658785 - RNA, 20 nt, Human
auuaagguguuugaaaauag

SEQ ID NO: 2658786 - RNA, 18 nt, Human
auuaagguguuugaaaau

SEQ ID NO: 2658787 - RNA, 17 nt, Human
auuaagguguuugaaaa

SEQ ID NO: 2658788 - RNA, 15 nt, Human
auuaagguguuugaa

SEQ ID NO: 2658789 - RNA, 12 nt, Human
uuuuuguuugcc

SEQ ID NO: 2658790 - RNA, 11 nt, Human
uuuuuguuugg

SEQ ID NO: 2658791 - RNA, 14 nt, Human
uuuuuguuuggaga

SEQ ID NO: 2658792 - RNA, 16 nt, Human
uuuuuguuuuucugcu

SEQ ID NO: 2658793 - RNA, 14 nt, Human
uuuuuguuuuucug

SEQ ID NO: 2658794 - RNA, 14 nt, Human
auuacugccuugaa

SEQ ID NO: 2658795 - RNA, 15 nt, Human
auuacugccuugaaa

SEQ ID NO: 2658796 - RNA, 13 nt, Human
auuacugacauuu

SEQ ID NO: 2658797 - RNA, 15 nt, Human
auuacugacauuucu

SEQ ID NO: 2658798 - RNA, 16 nt, Human
auuacugacauuucuu

SEQ ID NO: 2658799 - RNA, 21 nt, Human
auuacugacauuucuucuagu

SEQ ID NO: 2658800 - RNA, 23 nt, Human
auuaauauucaggguaaauagga

SEQ ID NO: 2658801 - RNA, 11 nt, Human
auuaaugcacu

SEQ ID NO: 2658802 - RNA, 13 nt, Human
auuauuaauugca

SEQ ID NO: 2658803 - RNA, 18 nt, Human
auucagcucugcaagaau

SEQ ID NO: 2658804 - RNA, 14 nt, Human
auucagcucugcaa

SEQ ID NO: 2658805 - RNA, 21 nt, Human
auucaggaauguguggccugc

SEQ ID NO: 2658806 - RNA, 16 nt, Human
auuccacuacaccugg

SEQ ID NO: 2658807 - RNA, 12 nt, Human
auucauaaaucu

SEQ ID NO: 2658808 - RNA, 17 nt, Human
auuccacuacaccuggc

SEQ ID NO: 2658809 - RNA, 18 nt, Human
auuccacuacaccuggcu

SEQ ID NO: 2658810 - RNA, 19 nt, Human
auuccacuacaccuggcug

SEQ ID NO: 2658811 - RNA, 22 nt, Human
auuccacuacaccuggcugagg

SEQ ID NO: 2658812 - RNA, 16 nt, Human
auucccuuguuauuca

SEQ ID NO: 2658813 - RNA, 14 nt, Human
auuccgcaucccua

SEQ ID NO: 2658814 - RNA, 22 nt, Human
auuccggaaacuaguguacauu

SEQ ID NO: 2658815 - RNA, 23 nt, Human
auuccggaaacuaguguacauuu

SEQ ID NO: 2658816 - RNA, 19 nt, Human
auucccuuguuauucaaca

SEQ ID NO: 2658817 - RNA, 22 nt, Human
auuccccacccugaaagcccug

SEQ ID NO: 2658818 - RNA, 20 nt, Human
auuuaacauuauuuauaugg

SEQ ID NO: 2658819 - RNA, 17 nt, Human
auuuaacauuauuuaua

SEQ ID NO: 2658820 - RNA, 16 nt, Human
auuuaacauuauuuau

SEQ ID NO: 2658821 - RNA, 15 nt, Human
auuuaacauuauuua

SEQ ID NO: 2658822 - RNA, 20 nt, Human
auuuaacagaaauuguauau

SEQ ID NO: 2658823 - RNA, 22 nt, Human
auuuaacagaaauuguauauug

SEQ ID NO: 2658824 - RNA, 14 nt, Human
auuuaacagaaauu

SEQ ID NO: 2658825 - RNA, 16 nt, Human
auuuaacagaaauugu

SEQ ID NO: 2658826 - RNA, 17 nt, Human
auuuaacagaaauugua

SEQ ID NO: 2658827 - RNA, 18 nt, Human
auuuaacagaaauuguau

SEQ ID NO: 2658828 - RNA, 20 nt, Human
auugucuccuauauauuucu

SEQ ID NO: 2658829 - RNA, 22 nt, Human
auugucuccuauauauuucuau

SEQ ID NO: 2658830 - RNA, 23 nt, Human
auugucuccuauauauuucuauu

SEQ ID NO: 2658831 - RNA, 18 nt, Human
auugucuuuggugcuuuu

SEQ ID NO: 2658832 - RNA, 16 nt, Human
auuguuucucugaaag

SEQ ID NO: 2658833 - RNA, 12 nt, Human
auuguuucugca

SEQ ID NO: 2658834 - RNA, 17 nt, Human
auuguuucugcauucau

SEQ ID NO: 2658835 - RNA, 17 nt, Human
auuguggcuauccugau

SEQ ID NO: 2658836 - RNA, 13 nt, Human
auuguuucagaau

SEQ ID NO: 2658837 - RNA, 24 nt, Human
auugugcuucacaguagagccagc

SEQ ID NO: 2658838 - RNA, 15 nt, Human
auugugcucagagac

SEQ ID NO: 2658839 - RNA, 15 nt, Human
auugugcuucacagu

SEQ ID NO: 2658840 - RNA, 20 nt, Human
auugugcuucacaguagagc

SEQ ID NO: 2658841 - RNA, 15 nt, Human
auuguauauuguaau

SEQ ID NO: 2658842 - RNA, 17 nt, Human
auuguauauuguaauuu

SEQ ID NO: 2658843 - RNA, 13 nt, Human
auuguauauugua

SEQ ID NO: 2658844 - RNA, 20 nt, Human
auuguauauuacaaugauca

SEQ ID NO: 2658845 - RNA, 19 nt, Human
auuguauauuacaaugauc

SEQ ID NO: 2658846 - RNA, 18 nt, Human
auuguauauuacaaugau

SEQ ID NO: 2658847 - RNA, 17 nt, Human
auuguauauuacaauga

SEQ ID NO: 2658848 - RNA, 15 nt, Human
auuguauauuacaau

SEQ ID NO: 2658849 - RNA, 18 nt, Human
auugccccaucuagacua

SEQ ID NO: 2658850 - RNA, 23 nt, Human
auuggcuuuggguugcaggaccu

SEQ ID NO: 2658851 - RNA, 22 nt, Human
auugaccuauuuccagaaauac

SEQ ID NO: 2658852 - RNA, 13 nt, Human
auugccucugaaa

SEQ ID NO: 2658853 - RNA, 18 nt, Human
auugccucugaaaagugu

SEQ ID NO: 2658854 - RNA, 12 nt, Human
auugccaugugg

SEQ ID NO: 2658855 - RNA, 21 nt, Human
auugccagcugacaucuugaa

SEQ ID NO: 2658856 - RNA, 14 nt, Human
auugcaguuuauca

SEQ ID NO: 2658857 - RNA, 17 nt, Human
auugcaguuuaucauuc

SEQ ID NO: 2658858 - RNA, 18 nt, Human
auugcaguuuaucauuca

SEQ ID NO: 2658859 - RNA, 19 nt, Human
auugcaguuuaucauucaa

SEQ ID NO: 2658860 - RNA, 14 nt, Human
auuuuacacagaaa

SEQ ID NO: 2658861 - RNA, 15 nt, Human
auuuuacacagaaac

SEQ ID NO: 2658862 - RNA, 17 nt, Human
auuuuacacagaaacac

SEQ ID NO: 2658863 - RNA, 13 nt, Human
auuuuacagagcg

SEQ ID NO: 2658864 - RNA, 18 nt, Human
auuuuacagcucauuaaa

SEQ ID NO: 2658865 - RNA, 22 nt, Human
auuuuacagcucauuaaacuuu

SEQ ID NO: 2658866 - RNA, 23 nt, Human
auuuuacagcucauuaaacuuuu

SEQ ID NO: 2658867 - RNA, 23 nt, Human
auuuuacacagaaacacugccuu

SEQ ID NO: 2658868 - RNA, 18 nt, Human
auuuuacacagaaacacu

SEQ ID NO: 2658869 - RNA, 19 nt, Human
auuuuacacagaaacacug

SEQ ID NO: 2658870 - RNA, 20 nt, Human
auuuuacacagaaacacugc

SEQ ID NO: 2658871 - RNA, 22 nt, Human
auuuuacacagaaacacugccu

SEQ ID NO: 2658872 - RNA, 22 nt, Human
auuuuacaagggcauaaaguaa

SEQ ID NO: 2658873 - RNA, 16 nt, Human
auuugagcauaucagu

SEQ ID NO: 2658874 - RNA, 19 nt, Human
auuuuauuuagacaagaga

SEQ ID NO: 2658875 - RNA, 17 nt, Human
auuuuauuuagacaaga

SEQ ID NO: 2658876 - RNA, 22 nt, Human
auuuuauuuagacaagagaugg

SEQ ID NO: 2658877 - RNA, 15 nt, Human
auuuuauuacuguuu

SEQ ID NO: 2658878 - RNA, 16 nt, Human
auuuuauuacuguuua

SEQ ID NO: 2658879 - RNA, 18 nt, Human
auuuuauuacuguuuauu

SEQ ID NO: 2658880 - RNA, 24 nt, Human
auuuagggaguauucuaauaagcu

SEQ ID NO: 2658881 - RNA, 22 nt, Human
auuuauguuugcacuugugauu

SEQ ID NO: 2658882 - RNA, 14 nt, Human
auuuaguaagaaua

SEQ ID NO: 2658883 - RNA, 15 nt, Human
auuuaguaagaauac

SEQ ID NO: 2658884 - RNA, 13 nt, Human
auuuauguuugca

SEQ ID NO: 2658885 - RNA, 20 nt, Human
auuuagggaguauucuaaua

SEQ ID NO: 2658886 - RNA, 19 nt, Human
auuuagggaguauucuaau

SEQ ID NO: 2658887 - RNA, 18 nt, Human
auuuagggaguauucuaa

SEQ ID NO: 2658888 - RNA, 16 nt, Human
auuuagggaguauucu

SEQ ID NO: 2658889 - RNA, 16 nt, Human
auuuagccgggcgcgg

SEQ ID NO: 2658890 - RNA, 17 nt, Human
auuuguaaagcuauuua

SEQ ID NO: 2658891 - RNA, 19 nt, Human
auuuguaaagcuauuuaug

SEQ ID NO: 2658892 - RNA, 20 nt, Human
auuucuuuucaccauucgua

SEQ ID NO: 2658893 - RNA, 15 nt, Human
auauauaugaauaaa

SEQ ID NO: 2658894 - RNA, 14 nt, Human
auauauaugaauaa

SEQ ID NO: 2658895 - RNA, 17 nt, Human
auauauaauguugccag

SEQ ID NO: 2658896 - RNA, 15 nt, Human
auauauauaaaugua

SEQ ID NO: 2658897 - RNA, 16 nt, Human
auauauauaaauguau

SEQ ID NO: 2658898 - RNA, 16 nt, Human
auauauauaacauaua

SEQ ID NO: 2658899 - RNA, 11 nt, Human
auauauauaau

SEQ ID NO: 2658900 - RNA, 17 nt, Human
auauauacaaaaagaaa

SEQ ID NO: 2658901 - RNA, 15 nt, Human
auauauaucuauaua

SEQ ID NO: 2658902 - RNA, 21 nt, Human
auauauaucuauauauauaau

SEQ ID NO: 2658903 - RNA, 21 nt, Human
auauauaucuaucuauuugag

SEQ ID NO: 2658904 - RNA, 15 nt, Human
auauauauauauaac

SEQ ID NO: 2658905 - RNA, 12 nt, Human
auauaugaauaa

SEQ ID NO: 2658906 - RNA, 19 nt, Human
auauaucuuauaaagugga

SEQ ID NO: 2658907 - RNA, 16 nt, Human
auauaucucuauuuga

SEQ ID NO: 2658908 - RNA, 17 nt, Human
auauaucucuauuugag

SEQ ID NO: 2658909 - RNA, 15 nt, Human
auauaucuaucuauu

SEQ ID NO: 2658910 - RNA, 16 nt, Human
auauaucuaucuauuu

SEQ ID NO: 2658911 - RNA, 18 nt, Human
auauaucuaucuauuuga

SEQ ID NO: 2658912 - RNA, 19 nt, Human
auauaucuaucuauuugag

SEQ ID NO: 2658913 - RNA, 20 nt, Human
auauaucuaucuauuugagg

SEQ ID NO: 2658914 - RNA, 22 nt, Human
uucacuuaugaaugauuugcau

SEQ ID NO: 2658915 - RNA, 17 nt, Human
auauauaaaacggugcu

SEQ ID NO: 2658916 - RNA, 21 nt, Human
auauauaaaacggugcuguga

SEQ ID NO: 2658917 - RNA, 12 nt, Human
auauauaaaugu

SEQ ID NO: 2658918 - RNA, 13 nt, Human
auauauaaaugua

SEQ ID NO: 2658919 - RNA, 14 nt, Human
auauauaaauguau

SEQ ID NO: 2658920 - RNA, 15 nt, Human
auauauaaauguaua

SEQ ID NO: 2658921 - RNA, 16 nt, Human
auauauaaauguauaa

SEQ ID NO: 2658922 - RNA, 18 nt, Human
auauauaacauauaugga

SEQ ID NO: 2658923 - RNA, 12 nt, Human
auauaacacauu

SEQ ID NO: 2658924 - RNA, 14 nt, Human
auauaacacauuuu

SEQ ID NO: 2658925 - RNA, 15 nt, Human
auauaacacauuuuu

SEQ ID NO: 2658926 - RNA, 13 nt, Human
auauaacauauau

SEQ ID NO: 2658927 - RNA, 16 nt, Human
auauaacauauaugga

SEQ ID NO: 2658928 - RNA, 17 nt, Human
auauaacuguauuugaa

SEQ ID NO: 2658929 - RNA, 20 nt, Human
auauaacuguauuugaaaua

SEQ ID NO: 2658930 - RNA, 19 nt, Human
auauaaaguaguccuguga

SEQ ID NO: 2658931 - RNA, 19 nt, Human
auaguucugagcugccagu

SEQ ID NO: 2658932 - RNA, 12 nt, Human
auaguuacugug

SEQ ID NO: 2658933 - RNA, 19 nt, Human
auaguuauguaaauaauuc

SEQ ID NO: 2658934 - RNA, 14 nt, Human
auaguuauguaaau

SEQ ID NO: 2658935 - RNA, 18 nt, Human
auaguuauguaaauaauu

SEQ ID NO: 2658936 - RNA, 17 nt, Human
auaguuauguaaauaau

SEQ ID NO: 2658937 - RNA, 16 nt, Human
auaguuauguaaauaa

SEQ ID NO: 2658938 - RNA, 15 nt, Human
auaguuauguaaaua

SEQ ID NO: 2658939 - RNA, 16 nt, Human
auaguuacuguguaaa

SEQ ID NO: 2658940 - RNA, 17 nt, Human
auaguuacuguguaaac

SEQ ID NO: 2658941 - RNA, 18 nt, Human
auaguuacuguguaaacu

SEQ ID NO: 2658942 - RNA, 20 nt, Human
auaguuacuguguaaacuca

SEQ ID NO: 2658943 - RNA, 23 nt, Human
auaguuggaggugauuccaguga

SEQ ID NO: 2658944 - RNA, 23 nt, Human
auauaaaaaccccaaacuguuga

SEQ ID NO: 2658945 - RNA, 16 nt, Human
auaguuuuauuuauau

SEQ ID NO: 2658946 - RNA, 24 nt, Human
auaguuuuauuuauauuuauugac

SEQ ID NO: 2658947 - RNA, 18 nt, Human
auaguuuuauuuauauuu

SEQ ID NO: 2658948 - RNA, 14 nt, Human
auaguguaacuugc

SEQ ID NO: 2658949 - RNA, 18 nt, Human
auaguguaacuugcuuaa

SEQ ID NO: 2658950 - RNA, 23 nt, Human
auaguguaacuugcuuaaauuuc

SEQ ID NO: 2658951 - RNA, 15 nt, Human
auagugggauuucca

SEQ ID NO: 2658952 - RNA, 12 nt, Human
auagugucuuug

SEQ ID NO: 2658953 - RNA, 21 nt, Human
auaguuaaauguuaccucuga

SEQ ID NO: 2658954 - RNA, 21 nt, Human
auagucuaagacuauauauau

SEQ ID NO: 2658955 - RNA, 23 nt, Human
auagucuaagacuauauauauaa

SEQ ID NO: 2658956 - RNA, 17 nt, Human
auaggcuauuuucuaaa

SEQ ID NO: 2658957 - RNA, 18 nt, Human
auaggcuauuuucuaaag

SEQ ID NO: 2658958 - RNA, 20 nt, Human
auaggcuauuuucuaaagac

SEQ ID NO: 2658959 - RNA, 21 nt, Human
auaggcuauuuucuaaagacu

SEQ ID NO: 2658960 - RNA, 22 nt, Human
auaggcuauuuucuaaagacuu

SEQ ID NO: 2658961 - RNA, 21 nt, Human
auagucucuuuaaaaggaaag

SEQ ID NO: 2658962 - RNA, 14 nt, Human
auagucucuuuaaa

SEQ ID NO: 2658963 - RNA, 14 nt, Human
auagucuuuugcuu

SEQ ID NO: 2658964 - RNA, 16 nt, Human
auagucuuuugcuuuu

SEQ ID NO: 2658965 - RNA, 17 nt, Human
auagucuuuugcuuuug

SEQ ID NO: 2658966 - RNA, 15 nt, Human
auagugaucaagaag

SEQ ID NO: 2658967 - RNA, 20 nt, Human
auagugaucaagaagacuuu

SEQ ID NO: 2658968 - RNA, 16 nt, Human
uucaaguaauugugaa

SEQ ID NO: 2658969 - RNA, 23 nt, Human
auaggaccuuuccaccacagcca

SEQ ID NO: 2658970 - RNA, 14 nt, Human
auaggaccuuucca

SEQ ID NO: 2658971 - RNA, 20 nt, Human
auaggaccuuuccaccacag

SEQ ID NO: 2658972 - RNA, 21 nt, Human
auaggaacauaugaaaauaca

SEQ ID NO: 2658973 - RNA, 18 nt, Human
auaggaacauaugaaaau

SEQ ID NO: 2658974 - RNA, 16 nt, Human
auaggaacauaugaaa

SEQ ID NO: 2658975 - RNA, 15 nt, Human
auaggaacauaugaa

SEQ ID NO: 2658976 - RNA, 15 nt, Human
uucacauucuuggcu

SEQ ID NO: 2658977 - RNA, 16 nt, Human
uucacauucuuggcuu

SEQ ID NO: 2658978 - RNA, 14 nt, Human
uuauuuuuauaauu

SEQ ID NO: 2658979 - RNA, 16 nt, Human
uuauuuuuauaauugu

SEQ ID NO: 2658980 - RNA, 18 nt, Human
uuauuuuuauaauuguac

SEQ ID NO: 2658981 - RNA, 21 nt, Human
uuauuuuuauaauuguacaaa

SEQ ID NO: 2658982 - RNA, 14 nt, Human
uuauuuuucacucu

SEQ ID NO: 2658983 - RNA, 12 nt, Human
uucaaaagaaag

SEQ ID NO: 2658984 - RNA, 21 nt, Human
uuauuuuuuggacuucaaagc

SEQ ID NO: 2658985 - RNA, 16 nt, Human
uuauuuuuuuaaaauu

SEQ ID NO: 2658986 - RNA, 17 nt, Human
uuauuuuuuuaaaauuu

SEQ ID NO: 2658987 - RNA, 18 nt, Human
uuaguuuuugguugggaa

SEQ ID NO: 2658988 - RNA, 19 nt, Human
uuaguuuuugguugggaau

SEQ ID NO: 2658989 - RNA, 23 nt, Human
uuaguuuuugguugggaaugagg

SEQ ID NO: 2658990 - RNA, 16 nt, Human
uuaguuuguguguugu

SEQ ID NO: 2658991 - RNA, 13 nt, Human
uucaaaagaaagu

SEQ ID NO: 2658992 - RNA, 20 nt, Human
uucaaaagguauuauacaug

SEQ ID NO: 2658993 - RNA, 21 nt, Human
uucaaaagguauuauacaugu

SEQ ID NO: 2658994 - RNA, 22 nt, Human
uucaaggucacuguuuccuggg

SEQ ID NO: 2658995 - RNA, 17 nt, Human
uucaagcagucgugccu

SEQ ID NO: 2658996 - RNA, 18 nt, Human
uucaagcagucgugccug

SEQ ID NO: 2658997 - RNA, 22 nt, Human
uucaagcagucgugccuguguc

SEQ ID NO: 2658998 - RNA, 23 nt, Human
uucaagcagucgugccugugucc

SEQ ID NO: 2658999 - RNA, 13 nt, Human
uucaagaucaaaa

SEQ ID NO: 2659000 - RNA, 22 nt, Human
auaucuauuaauauauguauua

SEQ ID NO: 2659001 - RNA, 18 nt, Human
auaucuauuaauauaugu

SEQ ID NO: 2659002 - RNA, 15 nt, Human
auaucuauuaauaua

SEQ ID NO: 2659003 - RNA, 14 nt, Human
auaucuauuaauau

SEQ ID NO: 2659004 - RNA, 13 nt, Human
auaucuauuaaua

SEQ ID NO: 2659005 - RNA, 15 nt, Human
auaucuauauauaua

SEQ ID NO: 2659006 - RNA, 17 nt, Human
auaucuauauauauaau

SEQ ID NO: 2659007 - RNA, 18 nt, Human
auaucuauauauauaauu

SEQ ID NO: 2659008 - RNA, 19 nt, Human
auaucuauauauauaauuu

SEQ ID NO: 2659009 - RNA, 13 nt, Human
auaucuauaaaau

SEQ ID NO: 2659010 - RNA, 14 nt, Human
auaucuauaaaaua

SEQ ID NO: 2659011 - RNA, 15 nt, Human
auaucuauaaaauag

SEQ ID NO: 2659012 - RNA, 17 nt, Human
auaucuauaaaauagau

SEQ ID NO: 2659013 - RNA, 22 nt, Human
auaucuauaaaauagauauaaa

SEQ ID NO: 2659014 - RNA, 23 nt, Human
auaucuauaaaauagauauaaau

SEQ ID NO: 2659015 - RNA, 20 nt, Human
auaugaaaaaaaugcauuuu

SEQ ID NO: 2659016 - RNA, 16 nt, Human
auaugaaaauacaacu

SEQ ID NO: 2659017 - RNA, 13 nt, Human
auaucucuauuug

SEQ ID NO: 2659018 - RNA, 14 nt, Human
auaucucuauuuga

SEQ ID NO: 2659019 - RNA, 16 nt, Human
auaucucuauuugaga

SEQ ID NO: 2659020 - RNA, 23 nt, Human
auaucucaaugaaccauaaauuc

SEQ ID NO: 2659021 - RNA, 22 nt, Human
auaugauuaaaaauaucaaauu

SEQ ID NO: 2659022 - RNA, 21 nt, Human
auaugauuaaaaauaucaaau

SEQ ID NO: 2659023 - RNA, 14 nt, Human
auaugguauauaua

SEQ ID NO: 2659024 - RNA, 15 nt, Human
auaugguauauauac

SEQ ID NO: 2659025 - RNA, 18 nt, Human
auaugguauauauacaua

SEQ ID NO: 2659026 - RNA, 19 nt, Human
auaugguauauauacauau

SEQ ID NO: 2659027 - RNA, 23 nt, Human
auaugaaaauacaacuuaaauaa

SEQ ID NO: 2659028 - RNA, 11 nt, Human
auaugauuaaa

SEQ ID NO: 2659029 - RNA, 17 nt, Human
auaugauuaaaaauauc

SEQ ID NO: 2659030 - RNA, 23 nt, Human
auaucuuggccuaaaccucaguu

SEQ ID NO: 2659031 - RNA, 14 nt, Human
auauguaagggaaa

SEQ ID NO: 2659032 - RNA, 20 nt, Human
auauguaaucucuaggaagu

SEQ ID NO: 2659033 - RNA, 20 nt, Human
auauauguauuauuuauaau

SEQ ID NO: 2659034 - RNA, 19 nt, Human
auauauguauuauuuauaa

SEQ ID NO: 2659035 - RNA, 14 nt, Human
uucaucccauucca

SEQ ID NO: 2659036 - RNA, 15 nt, Human
uucaucccauuccag

SEQ ID NO: 2659037 - RNA, 13 nt, Human
uucauauguaauc

SEQ ID NO: 2659038 - RNA, 18 nt, Human
auauauucuuucaaagga

SEQ ID NO: 2659039 - RNA, 13 nt, Human
auauauugaacuu

SEQ ID NO: 2659040 - RNA, 15 nt, Human
auauauugaacuuuu

SEQ ID NO: 2659041 - RNA, 17 nt, Human
auauauugaacuuuugu

SEQ ID NO: 2659042 - RNA, 18 nt, Human
auauauugaacuuuugua

SEQ ID NO: 2659043 - RNA, 22 nt, Human
auauauugaacuuuuguacuga

SEQ ID NO: 2659044 - RNA, 15 nt, Human
uucagaaauauaaca

SEQ ID NO: 2659045 - RNA, 20 nt, Human
uucagaaauauaacacauuu

SEQ ID NO: 2659046 - RNA, 21 nt, Human
uucagaaauauaacacauuuu

SEQ ID NO: 2659047 - RNA, 22 nt, Human
uucagaaauauaacacauuuuu

SEQ ID NO: 2659048 - RNA, 16 nt, Human
uucauuccuaaagaaa

SEQ ID NO: 2659049 - RNA, 14 nt, Human
uucauucucuuuua

SEQ ID NO: 2659050 - RNA, 15 nt, Human
uucauuuaagggaaa

SEQ ID NO: 2659051 - RNA, 20 nt, Human
uucauuuaagggaaagaaaa

SEQ ID NO: 2659052 - RNA, 17 nt, Human
uuccacacagaaugcaa

SEQ ID NO: 2659053 - RNA, 19 nt, Human
uuccacacagaaugcaacc

SEQ ID NO: 2659054 - RNA, 15 nt, Human
uuccaauaaacuaug

SEQ ID NO: 2659055 - RNA, 15 nt, Human
uuccaccccaagaga

SEQ ID NO: 2659056 - RNA, 18 nt, Human
uuccaccccaagagaacu

SEQ ID NO: 2659057 - RNA, 19 nt, Human
uuccaccccaagagaacuc

SEQ ID NO: 2659058 - RNA, 20 nt, Human
uuccaccccaagagaacucg

SEQ ID NO: 2659059 - RNA, 21 nt, Human
uuccaggaaacuccacaucug

SEQ ID NO: 2659060 - RNA, 22 nt, Human
uuccaggaaacuccacaucugc

SEQ ID NO: 2659061 - RNA, 24 nt, Human
uuccaggaaacuccacaucugccu

SEQ ID NO: 2659062 - RNA, 23 nt, Human
uuccaggaaacuccacaucugcc

SEQ ID NO: 2659063 - RNA, 13 nt, Human
uuccaggcagccu

SEQ ID NO: 2659064 - RNA, 19 nt, Human
uuccaggcagccucuguca

SEQ ID NO: 2659065 - RNA, 11 nt, Human
uucccacccug

SEQ ID NO: 2659066 - RNA, 23 nt, Human
uucccaagccuucgggcgucugu

SEQ ID NO: 2659067 - RNA, 18 nt, Human
uuccaguggaucauaaga

SEQ ID NO: 2659068 - RNA, 22 nt, Human
uuccagugucuauaaaagaaac

SEQ ID NO: 2659069 - RNA, 23 nt, Human
uucccaaaggcauuauaaaaaga

SEQ ID NO: 2659070 - RNA, 20 nt, Human
uuccaggcuauguauaaaau

SEQ ID NO: 2659071 - RNA, 20 nt, Human
uuccagggucccucugugua

SEQ ID NO: 2659072 - RNA, 16 nt, Human
uuccagggucccucug

SEQ ID NO: 2659073 - RNA, 18 nt, Human
uuccagggucccucugug

SEQ ID NO: 2659074 - RNA, 19 nt, Human
uuccagggucccucugugu

SEQ ID NO: 2659075 - RNA, 16 nt, Human
auauuuuuagacucau

SEQ ID NO: 2659076 - RNA, 21 nt, Human
auauuuugucauaucaaauaa

SEQ ID NO: 2659077 - RNA, 13 nt, Human
auauuuuguguga

SEQ ID NO: 2659078 - RNA, 18 nt, Human
auauuuugugugaaauug

SEQ ID NO: 2659079 - RNA, 22 nt, Human
auauuuugugugaaauugcaua

SEQ ID NO: 2659080 - RNA, 13 nt, Human
auauuuucuguuu

SEQ ID NO: 2659081 - RNA, 12 nt, Human
auauuuucuguu

SEQ ID NO: 2659082 - RNA, 13 nt, Human
auauuuucuauuu

SEQ ID NO: 2659083 - RNA, 14 nt, Human
auauuuucuauuuu

SEQ ID NO: 2659084 - RNA, 13 nt, Human
auauuuucucugu

SEQ ID NO: 2659085 - RNA, 18 nt, Human
auauuuucucuguacuuu

SEQ ID NO: 2659086 - RNA, 22 nt, Human
uuccugucccugcgccuuuccu

SEQ ID NO: 2659087 - RNA, 14 nt, Human
uuccugucccugcg

SEQ ID NO: 2659088 - RNA, 21 nt, Human
uuccugucccugcgccuuucc

SEQ ID NO: 2659089 - RNA, 15 nt, Human
uuccugucccugcgc

SEQ ID NO: 2659090 - RNA, 12 nt, Human
uuccuguacugu

SEQ ID NO: 2659091 - RNA, 16 nt, Human
uuccuguacugugucu

SEQ ID NO: 2659092 - RNA, 18 nt, Human
uucccacuucccacccug

SEQ ID NO: 2659093 - RNA, 23 nt, Human
uuccuacguaggaugaaaagauu

SEQ ID NO: 2659094 - RNA, 18 nt, Human
uucgaagucauuaaacug

SEQ ID NO: 2659095 - RNA, 15 nt, Human
uucgaagucauuaaa

SEQ ID NO: 2659096 - RNA, 14 nt, Human
uucgaagucauuaa

SEQ ID NO: 2659097 - RNA, 13 nt, Human
uucgaagucauua

SEQ ID NO: 2659098 - RNA, 14 nt, Human
uucgagaccagccu

SEQ ID NO: 2659099 - RNA, 22 nt, Human
uucgaaaccugggauucaggaa

SEQ ID NO: 2659100 - RNA, 16 nt, Human
aucaaguucuuaaaau

SEQ ID NO: 2659101 - RNA, 16 nt, Human
uucuaagaaaagccua

SEQ ID NO: 2659102 - RNA, 18 nt, Human
uucuaagagaaguuauuu

SEQ ID NO: 2659103 - RNA, 19 nt, Human
uucgcggguaacugggguu

SEQ ID NO: 2659104 - RNA, 22 nt, Human
uucgcggguaacugggguugag

SEQ ID NO: 2659105 - RNA, 16 nt, Human
uucgccuuuccucucu

SEQ ID NO: 2659106 - RNA, 13 nt, Human
uucgccuuuccuc

SEQ ID NO: 2659107 - RNA, 23 nt, Human
uucuaaauacaugccacaucaaa

SEQ ID NO: 2659108 - RNA, 21 nt, Human
uucuagaaacaaacaucuaau

SEQ ID NO: 2659109 - RNA, 18 nt, Human
uucuagaauuauuuuuca

SEQ ID NO: 2659110 - RNA, 22 nt, Human
uucuagaguuuuauagccugga

SEQ ID NO: 2659111 - RNA, 23 nt, Human
uucuagugaugaugguucacguu

SEQ ID NO: 2659112 - RNA, 21 nt, Human
uucucacugccaugccagcuu

SEQ ID NO: 2659113 - RNA, 13 nt, Human
uucucagaagcac

SEQ ID NO: 2659114 - RNA, 21 nt, Human
uucucagaagcacagaauauu

SEQ ID NO: 2659115 - RNA, 20 nt, Human
aucacuuugagccugggaaa

SEQ ID NO: 2659116 - RNA, 22 nt, Human
aucacuuugagccugggaaaua

SEQ ID NO: 2659117 - RNA, 23 nt, Human
aucacuuugagccugggaaauaa

SEQ ID NO: 2659118 - RNA, 16 nt, Human
aucagaaagcuuuauu

SEQ ID NO: 2659119 - RNA, 19 nt, Human
aucagaaagcuuuauuuug

SEQ ID NO: 2659120 - RNA, 15 nt, Human
uucucagauuucuga

SEQ ID NO: 2659121 - RNA, 19 nt, Human
uucucagagugguggggga

SEQ ID NO: 2659122 - RNA, 16 nt, Human
uucucagauuucugag

SEQ ID NO: 2659123 - RNA, 20 nt, Human
uucucagauuucugaggaaa

SEQ ID NO: 2659124 - RNA, 22 nt, Human
aucaggaauauuuuccaaagag

SEQ ID NO: 2659125 - RNA, 19 nt, Human
aucaggaauauuuuccaaa

SEQ ID NO: 2659126 - RNA, 17 nt, Human
uucucuacucuagggaa

SEQ ID NO: 2659127 - RNA, 19 nt, Human
uucucuuugauuauuugca

SEQ ID NO: 2659128 - RNA, 20 nt, Human
uucucuuugauuauuugcau

SEQ ID NO: 2659129 - RNA, 22 nt, Human
uucucuuugauuauuugcaugu

SEQ ID NO: 2659130 - RNA, 19 nt, Human
uucugcccuggcugcugcc

SEQ ID NO: 2659131 - RNA, 18 nt, Human
uucugcccuggcugcugc

SEQ ID NO: 2659132 - RNA, 16 nt, Human
aucauuucaggaguua

SEQ ID NO: 2659133 - RNA, 20 nt, Human
uucuccucccuuccuuuucc

SEQ ID NO: 2659134 - RNA, 19 nt, Human
uucuccucccuuccuuuuc

SEQ ID NO: 2659135 - RNA, 23 nt, Human
aucaggagaaagcuugguucugu

SEQ ID NO: 2659136 - RNA, 16 nt, Human
auccauuuccauugcu

SEQ ID NO: 2659137 - RNA, 17 nt, Human
auccauuuccauugcuu

SEQ ID NO: 2659138 - RNA, 13 nt, Human
aucccacauccaa

SEQ ID NO: 2659139 - RNA, 22 nt, Human
aucccacauccaacuccagcaa

SEQ ID NO: 2659140 - RNA, 10 nt, Human
auccaaagac

SEQ ID NO: 2659141 - RNA, 15 nt, Human
uucugguuccagggu

SEQ ID NO: 2659142 - RNA, 17 nt, Human
uucugguuccagggucc

SEQ ID NO: 2659143 - RNA, 10 nt, Human
uucuggcuca

SEQ ID NO: 2659144 - RNA, 20 nt, Human
uucugcccuggcugcugccc

SEQ ID NO: 2659145 - RNA, 13 nt, Human
uucuuuuguuugg

SEQ ID NO: 2659146 - RNA, 14 nt, Human
uucuuuuguuuggu

SEQ ID NO: 2659147 - RNA, 15 nt, Human
uucuuuuguuuggua

SEQ ID NO: 2659148 - RNA, 17 nt, Human
uugaaagugccuuugca

SEQ ID NO: 2659149 - RNA, 16 nt, Human
uugaaauaagaauuca

SEQ ID NO: 2659150 - RNA, 21 nt, Human
uugaaauaagaauucagacau

SEQ ID NO: 2659151 - RNA, 14 nt, Human
uugaaauaaagcua

SEQ ID NO: 2659152 - RNA, 16 nt, Human
uugaaauaacuggaac

SEQ ID NO: 2659153 - RNA, 21 nt, Human
uugaaauaacuggaacaaauu

SEQ ID NO: 2659154 - RNA, 14 nt, Human
uugaaccauaaaau

SEQ ID NO: 2659155 - RNA, 21 nt, Human
uugaaccauaaaauguccagu

SEQ ID NO: 2659156 - RNA, 17 nt, Human
uugaaccauaaaauguc

SEQ ID NO: 2659157 - RNA, 16 nt, Human
uugaaccauaaaaugu

SEQ ID NO: 2659158 - RNA, 23 nt, Human
uugaacaaugaaguugaaaauca

SEQ ID NO: 2659159 - RNA, 21 nt, Human
auccuaggcauuugcugaaua

SEQ ID NO: 2659160 - RNA, 20 nt, Human
auccuaauuucuccucccuu

SEQ ID NO: 2659161 - RNA, 23 nt, Human
auccuaauuucuccucccuuccu

SEQ ID NO: 2659162 - RNA, 15 nt, Human
auccuaauuucuccu

SEQ ID NO: 2659163 - RNA, 16 nt, Human
auccuaauuucuccuc

SEQ ID NO: 2659164 - RNA, 18 nt, Human
auccuaauuucuccuccc

SEQ ID NO: 2659165 - RNA, 19 nt, Human
auccuaauuucuccucccu

SEQ ID NO: 2659166 - RNA, 13 nt, Human
uucuguuuuuaau

SEQ ID NO: 2659167 - RNA, 19 nt, Human
uucuuaauucaugaggagg

SEQ ID NO: 2659168 - RNA, 20 nt, Human
uucuguuuuucuaggccugg

SEQ ID NO: 2659169 - RNA, 21 nt, Human
uucuuaaaaggcccauagcag

SEQ ID NO: 2659170 - RNA, 14 nt, Human
uucuuuuaaagacc

SEQ ID NO: 2659171 - RNA, 17 nt, Human
uucuuggggcccagugc

SEQ ID NO: 2659172 - RNA, 18 nt, Human
uucuuggggcccagugca

SEQ ID NO: 2659173 - RNA, 19 nt, Human
uucuuggggcccagugcau

SEQ ID NO: 2659174 - RNA, 21 nt, Human
uucuuggcaauaaauuuugaa

SEQ ID NO: 2659175 - RNA, 22 nt, Human
uucuuggcaauaaauuuugaaa

SEQ ID NO: 2659176 - RNA, 22 nt, Human
uucuuggcuuaaucauuuucau

SEQ ID NO: 2659177 - RNA, 22 nt, Human
uucuuccuuaauucacucccac

SEQ ID NO: 2659178 - RNA, 18 nt, Human
uuguguguuuauuucacu

SEQ ID NO: 2659179 - RNA, 15 nt, Human
uuguguguugucucu

SEQ ID NO: 2659180 - RNA, 17 nt, Human
uuguguguugucucuug

SEQ ID NO: 2659181 - RNA, 13 nt, Human
uuguguguugucu

SEQ ID NO: 2659182 - RNA, 13 nt, Human
uugugugaacuug

SEQ ID NO: 2659183 - RNA, 12 nt, Human
uugugugaaauu

SEQ ID NO: 2659184 - RNA, 14 nt, Human
uugugugaaauugc

SEQ ID NO: 2659185 - RNA, 15 nt, Human
uugugugaaauugca

SEQ ID NO: 2659186 - RNA, 16 nt, Human
uugugugaaauugcau

SEQ ID NO: 2659187 - RNA, 16 nt, Human
uugugugaacuuggaa

SEQ ID NO: 2659188 - RNA, 21 nt, Human
uugugagaaacaucucaauaa

SEQ ID NO: 2659189 - RNA, 12 nt, Human
uuguguaaaaaa

SEQ ID NO: 2659190 - RNA, 17 nt, Human
uuguggcuauccugauu

SEQ ID NO: 2659191 - RNA, 21 nt, Human
augauuaaccacuucagcuga

SEQ ID NO: 2659192 - RNA, 20 nt, Human
augauuaaccacuucagcug

SEQ ID NO: 2659193 - RNA, 19 nt, Human
augauuaaccacuucagcu

SEQ ID NO: 2659194 - RNA, 21 nt, Human
uuguuguaaaacaaaauuuga

SEQ ID NO: 2659195 - RNA, 12 nt, Human
uuguuguacuua

SEQ ID NO: 2659196 - RNA, 14 nt, Human
uuguuguacuuaaa

SEQ ID NO: 2659197 - RNA, 23 nt, Human
augauuagcaaguuacagugaug

SEQ ID NO: 2659198 - RNA, 14 nt, Human
augauuagcaaguu

SEQ ID NO: 2659199 - RNA, 16 nt, Human
augcaaauaacacaaa

SEQ ID NO: 2659200 - RNA, 14 nt, Human
augcaaaugagcuc

SEQ ID NO: 2659201 - RNA, 19 nt, Human
augcaaaugagcucugaaa

SEQ ID NO: 2659202 - RNA, 20 nt, Human
augcaaaugagcucugaaau

SEQ ID NO: 2659203 - RNA, 21 nt, Human
augcaaaugagcucugaaauc

SEQ ID NO: 2659204 - RNA, 23 nt, Human
augcaaaugagcucugaaaucuu

SEQ ID NO: 2659205 - RNA, 14 nt, Human
augcaccaccaagc

SEQ ID NO: 2659206 - RNA, 22 nt, Human
augcacuuucuauccucuguaa

SEQ ID NO: 2659207 - RNA, 21 nt, Human
augcaccaccaagccaaggga

SEQ ID NO: 2659208 - RNA, 15 nt, Human
augcaccaccaagcc

SEQ ID NO: 2659209 - RNA, 18 nt, Human
augcaccaccaagccaag

SEQ ID NO: 2659210 - RNA, 14 nt, Human
uuuaagauagugua

SEQ ID NO: 2659211 - RNA, 12 nt, Human
uuuaagauguga

SEQ ID NO: 2659212 - RNA, 13 nt, Human
uuuaagaugugaa

SEQ ID NO: 2659213 - RNA, 14 nt, Human
uuuaagaugugaaa

SEQ ID NO: 2659214 - RNA, 13 nt, Human
uuuaaauuacaau

SEQ ID NO: 2659215 - RNA, 20 nt, Human
uuuaagcugcaaaucugaug

SEQ ID NO: 2659216 - RNA, 15 nt, Human
uuuaaugcuauuuga

SEQ ID NO: 2659217 - RNA, 17 nt, Human
uuuaauuguauuuuugu

SEQ ID NO: 2659218 - RNA, 14 nt, Human
uuuaauuguauuuu

SEQ ID NO: 2659219 - RNA, 13 nt, Human
uuuaauuguauuu

SEQ ID NO: 2659220 - RNA, 15 nt, Human
uuuaauuguaaagua

SEQ ID NO: 2659221 - RNA, 21 nt, Human
uuuaauuguaaaguaaaagcu

SEQ ID NO: 2659222 - RNA, 12 nt, Human
uuuaauuguaaa

SEQ ID NO: 2659223 - RNA, 14 nt, Human
augccacugccuuc

SEQ ID NO: 2659224 - RNA, 12 nt, Human
augcccaccccc

SEQ ID NO: 2659225 - RNA, 15 nt, Human
augcccacccccugc

SEQ ID NO: 2659226 - RNA, 16 nt, Human
augcccacccccugcc

SEQ ID NO: 2659227 - RNA, 17 nt, Human
augcccacccccugccc

SEQ ID NO: 2659228 - RNA, 18 nt, Human
augcccacccccugcccu

SEQ ID NO: 2659229 - RNA, 19 nt, Human
augcccacccccugcccug

SEQ ID NO: 2659230 - RNA, 20 nt, Human
augcccacccccugcccugc

SEQ ID NO: 2659231 - RNA, 20 nt, Human
augccaagagugcacccaug

SEQ ID NO: 2659232 - RNA, 22 nt, Human
augcagucuuagaucauaguuu

SEQ ID NO: 2659233 - RNA, 21 nt, Human
augcagucuuagaucauaguu

SEQ ID NO: 2659234 - RNA, 13 nt, Human
augcagucuuaga

SEQ ID NO: 2659235 - RNA, 18 nt, Human
uuuaagccuucaaaacua

SEQ ID NO: 2659236 - RNA, 14 nt, Human
uuuaauuuucacuu

SEQ ID NO: 2659237 - RNA, 21 nt, Human
uuucaugauuagcaaguuaca

SEQ ID NO: 2659238 - RNA, 24 nt, Human
uuucaugaccaguaaaggcugcug

SEQ ID NO: 2659239 - RNA, 17 nt, Human
uuucaugaccaguaaag

SEQ ID NO: 2659240 - RNA, 14 nt, Human
uuucaugaaaauac

SEQ ID NO: 2659241 - RNA, 17 nt, Human
uuucaugaaaauaccau

SEQ ID NO: 2659242 - RNA, 19 nt, Human
uuucaugaaaauaccauuu

SEQ ID NO: 2659243 - RNA, 16 nt, Human
uuucccauggggaggg

SEQ ID NO: 2659244 - RNA, 21 nt, Human
uuucccauuugugccagagga

SEQ ID NO: 2659245 - RNA, 22 nt, Human
uuucccauuugugccagaggaa

SEQ ID NO: 2659246 - RNA, 16 nt, Human
uuucagaaguuaguuu

SEQ ID NO: 2659247 - RNA, 23 nt, Human
uuucagaaguuaguuuguauaua

SEQ ID NO: 2659248 - RNA, 20 nt, Human
uuucagaaguuaguuuguau

SEQ ID NO: 2659249 - RNA, 22 nt, Human
uuucagaaguuaguuuguauau

SEQ ID NO: 2659250 - RNA, 18 nt, Human
auggcaaaggaaggugga

SEQ ID NO: 2659251 - RNA, 22 nt, Human
auggauuuggcacuagccaaag

SEQ ID NO: 2659252 - RNA, 18 nt, Human
auggauuuccagccaaag

SEQ ID NO: 2659253 - RNA, 20 nt, Human
auggcaaguugcaucagaaa

SEQ ID NO: 2659254 - RNA, 21 nt, Human
auggcagaaaaaaugucugua

SEQ ID NO: 2659255 - RNA, 17 nt, Human
auggccuuaauuuccuu

SEQ ID NO: 2659256 - RNA, 18 nt, Human
auggccuuaauuuccuuu

SEQ ID NO: 2659257 - RNA, 19 nt, Human
auggccuuaauuuccuuuu

SEQ ID NO: 2659258 - RNA, 20 nt, Human
auggcgccaccagcucugcc

SEQ ID NO: 2659259 - RNA, 21 nt, Human
auggccgggcgcgguggcuca

SEQ ID NO: 2659260 - RNA, 22 nt, Human
augcucucacuguuuguuuuua

SEQ ID NO: 2659261 - RNA, 23 nt, Human
uuuauuacccccuccuucagaca

SEQ ID NO: 2659262 - RNA, 17 nt, Human
uuuauuacccccuccuu

SEQ ID NO: 2659263 - RNA, 12 nt, Human
uuuauuaccccc

SEQ ID NO: 2659264 - RNA, 18 nt, Human
uuuaugggccccuggcac

SEQ ID NO: 2659265 - RNA, 13 nt, Human
uuuaugugaauuu

SEQ ID NO: 2659266 - RNA, 15 nt, Human
uuuaugugaauuuuu

SEQ ID NO: 2659267 - RNA, 16 nt, Human
uuuaugugaauuuuua

SEQ ID NO: 2659268 - RNA, 20 nt, Human
uuuaugugaauuuuuaagcu

SEQ ID NO: 2659269 - RNA, 21 nt, Human
uuuaugguuacuucuucucuu

SEQ ID NO: 2659270 - RNA, 15 nt, Human
uuuaugguuauguuu

SEQ ID NO: 2659271 - RNA, 16 nt, Human
uuuaugguuauguuuu

SEQ ID NO: 2659272 - RNA, 19 nt, Human
uuuaugguuauguuuuucu

SEQ ID NO: 2659273 - RNA, 21 nt, Human
uuuaugguuauguuuuucugu

SEQ ID NO: 2659274 - RNA, 23 nt, Human
uuuauguuugcacuugugauuau

SEQ ID NO: 2659275 - RNA, 12 nt, Human
uuuauuaaaaca

SEQ ID NO: 2659276 - RNA, 14 nt, Human
uuuauuaaaauauu

SEQ ID NO: 2659277 - RNA, 18 nt, Human
uuuauuaaaauauuucag

SEQ ID NO: 2659278 - RNA, 19 nt, Human
uuuauuaaaauauuucagg

SEQ ID NO: 2659279 - RNA, 21 nt, Human
uuuauuaaaauauuucagguu

SEQ ID NO: 2659280 - RNA, 19 nt, Human
uuuagauuuucuuuugccu

SEQ ID NO: 2659281 - RNA, 10 nt, Human
augcccccug

SEQ ID NO: 2659282 - RNA, 13 nt, Human
uuuagcuggccac

SEQ ID NO: 2659283 - RNA, 15 nt, Human
uuuaguauuaucaaa

SEQ ID NO: 2659284 - RNA, 15 nt, Human
aucugagccagugcu

SEQ ID NO: 2659285 - RNA, 17 nt, Human
uugccuccccauuuccc

SEQ ID NO: 2659286 - RNA, 20 nt, Human
uugccuccccauuucccauc

SEQ ID NO: 2659287 - RNA, 12 nt, Human
uugccuccaggu

SEQ ID NO: 2659288 - RNA, 15 nt, Human
uugccuccaggugca

SEQ ID NO: 2659289 - RNA, 20 nt, Human
uugccuccaggugcagaggu

SEQ ID NO: 2659290 - RNA, 14 nt, Human
uugccuagacagcu

SEQ ID NO: 2659291 - RNA, 20 nt, Human
uugccuauaagccaaaauua

SEQ ID NO: 2659292 - RNA, 18 nt, Human
aucugaggaugaccagaa

SEQ ID NO: 2659293 - RNA, 14 nt, Human
aucugagggaaaug

SEQ ID NO: 2659294 - RNA, 15 nt, Human
aucugagggaaaugu

SEQ ID NO: 2659295 - RNA, 17 nt, Human
aucugagggaaauguuu

SEQ ID NO: 2659296 - RNA, 18 nt, Human
aucugagggaaauguuuu

SEQ ID NO: 2659297 - RNA, 21 nt, Human
aucugagggaaauguuuugua

SEQ ID NO: 2659298 - RNA, 22 nt, Human
aucugagggaaauguuuuguaa

SEQ ID NO: 2659299 - RNA, 23 nt, Human
aucugagggaaauguuuuguaaa

SEQ ID NO: 2659300 - RNA, 19 nt, Human
aucugauggccuuaauuuc

SEQ ID NO: 2659301 - RNA, 21 nt, Human
aucugauggccuuaauuuccu

SEQ ID NO: 2659302 - RNA, 22 nt, Human
aucugauggccuuaauuuccuu

SEQ ID NO: 2659303 - RNA, 23 nt, Human
aucugauggccuuaauuuccuuu

SEQ ID NO: 2659304 - RNA, 11 nt, Human
aucugcaaaag

SEQ ID NO: 2659305 - RNA, 21 nt, Human
aucugcaaaaggccucuugua

SEQ ID NO: 2659306 - RNA, 22 nt, Human
aucugcaaaaggccucuuguaa

SEQ ID NO: 2659307 - RNA, 17 nt, Human
aucugcaccccuucucu

SEQ ID NO: 2659308 - RNA, 18 nt, Human
aucugcaccccuucucuc

SEQ ID NO: 2659309 - RNA, 20 nt, Human
aucugcaccccuucucuccu

SEQ ID NO: 2659310 - RNA, 10 nt, Human
aucugcaccc

SEQ ID NO: 2659311 - RNA, 21 nt, Human
aucugcaccccuucucuccuc

SEQ ID NO: 2659312 - RNA, 22 nt, Human
aucugcaccccuucucuccucc

SEQ ID NO: 2659313 - RNA, 23 nt, Human
aucugcaccccuucucuccuccc

SEQ ID NO: 2659314 - RNA, 20 nt, Human
uugcaccaaauuaucuugau

SEQ ID NO: 2659315 - RNA, 21 nt, Human
aucuguagcuauaaugagcau

SEQ ID NO: 2659316 - RNA, 14 nt, Human
aucuugcuucccua

SEQ ID NO: 2659317 - RNA, 15 nt, Human
aucuugcuucccuaa

SEQ ID NO: 2659318 - RNA, 13 nt, Human
aucuugauacauu

SEQ ID NO: 2659319 - RNA, 15 nt, Human
aucuugauacauuca

SEQ ID NO: 2659320 - RNA, 16 nt, Human
aucuugauacauucaa

SEQ ID NO: 2659321 - RNA, 20 nt, Human
aucuugauacauucaaauuu

SEQ ID NO: 2659322 - RNA, 21 nt, Human
aucuugauacauucaaauuug

SEQ ID NO: 2659323 - RNA, 15 nt, Human
aucuuacaauauuga

SEQ ID NO: 2659324 - RNA, 17 nt, Human
aucuuacaauauugauu

SEQ ID NO: 2659325 - RNA, 12 nt, Human
aucuuacuuugu

SEQ ID NO: 2659326 - RNA, 14 nt, Human
aucuuacuuuguaa

SEQ ID NO: 2659327 - RNA, 13 nt, Human
aucuuacuuugua

SEQ ID NO: 2659328 - RNA, 20 nt, Human
aucuuacuuuguaaauucug

SEQ ID NO: 2659329 - RNA, 19 nt, Human
aucuuacuuuguaaauucu

SEQ ID NO: 2659330 - RNA, 17 nt, Human
aucuuacuuuguaaauu

SEQ ID NO: 2659331 - RNA, 16 nt, Human
aucuuacuuuguaaau

SEQ ID NO: 2659332 - RNA, 22 nt, Human
aucuuacuuuguaaauucugau

SEQ ID NO: 2659333 - RNA, 21 nt, Human
aucuuacuuuguaaauucuga

SEQ ID NO: 2659334 - RNA, 17 nt, Human
aucuguugauaaaucca

SEQ ID NO: 2659335 - RNA, 18 nt, Human
aucucaggagauuucaug

SEQ ID NO: 2659336 - RNA, 22 nt, Human
aucucagcuuugagaagccuuc

SEQ ID NO: 2659337 - RNA, 13 nt, Human
aucucagcuuuga

SEQ ID NO: 2659338 - RNA, 23 nt, Human
aucucagcuuugagaagccuuca

SEQ ID NO: 2659339 - RNA, 23 nt, Human
aucucaaugaaccauaaauucaa

SEQ ID NO: 2659340 - RNA, 15 nt, Human
aucucaucuaucuca

SEQ ID NO: 2659341 - RNA, 22 nt, Human
aucuccauugugccuaagucca

SEQ ID NO: 2659342 - RNA, 16 nt, Human
aucuccauaaacauga

SEQ ID NO: 2659343 - RNA, 17 nt, Human
uugcaucugaaauagga

SEQ ID NO: 2659344 - RNA, 14 nt, Human
uugcaucugaaaua

SEQ ID NO: 2659345 - RNA, 16 nt, Human
uugcauguuauguuua

SEQ ID NO: 2659346 - RNA, 17 nt, Human
uugcauguuauguuuaa

SEQ ID NO: 2659347 - RNA, 21 nt, Human
uugcauguuauguuuaauaag

SEQ ID NO: 2659348 - RNA, 23 nt, Human
uugcaucccaaaccacgccucuu

SEQ ID NO: 2659349 - RNA, 16 nt, Human
uugcacauguuuccuc

SEQ ID NO: 2659350 - RNA, 13 nt, Human
uugauguggcccu

SEQ ID NO: 2659351 - RNA, 18 nt, Human
uugauguggcccuggcug

SEQ ID NO: 2659352 - RNA, 19 nt, Human
uugauguggcccuggcugc

SEQ ID NO: 2659353 - RNA, 20 nt, Human
uugauguggcccuggcugcc

SEQ ID NO: 2659354 - RNA, 18 nt, Human
uugaugucagcaguugcu

SEQ ID NO: 2659355 - RNA, 12 nt, Human
uugaugucagca

SEQ ID NO: 2659356 - RNA, 14 nt, Human
uugauguguuguuc

SEQ ID NO: 2659357 - RNA, 13 nt, Human
uugauguguuguu

SEQ ID NO: 2659358 - RNA, 12 nt, Human
uugauguguugu

SEQ ID NO: 2659359 - RNA, 12 nt, Human
uugauggcugcg

SEQ ID NO: 2659360 - RNA, 16 nt, Human
uugauggagugugagc

SEQ ID NO: 2659361 - RNA, 21 nt, Human
uugauggagugugagccaccu

SEQ ID NO: 2659362 - RNA, 13 nt, Human
aucucuucauuau

SEQ ID NO: 2659363 - RNA, 20 nt, Human
aucucuucauuauucucugc

SEQ ID NO: 2659364 - RNA, 16 nt, Human
uuggauggcuugucua

SEQ ID NO: 2659365 - RNA, 16 nt, Human
uuggauguugagaggu

SEQ ID NO: 2659366 - RNA, 15 nt, Human
uuggauuaaauacau

SEQ ID NO: 2659367 - RNA, 16 nt, Human
uuggauuaaauacaua

SEQ ID NO: 2659368 - RNA, 21 nt, Human
uuggauuaaauacauauggau

SEQ ID NO: 2659369 - RNA, 23 nt, Human
uuggauuaaauacauauggaugu

SEQ ID NO: 2659370 - RNA, 23 nt, Human
aucuugcuucccuaaucuauggu

SEQ ID NO: 2659371 - RNA, 22 nt, Human
uuggcucgaaucucugugccuu

SEQ ID NO: 2659372 - RNA, 13 nt, Human
uuggcgugacccg

SEQ ID NO: 2659373 - RNA, 22 nt, Human
uuggcugaaauucuccuggagg

SEQ ID NO: 2659374 - RNA, 20 nt, Human
uuggcugaaauucuccugga

SEQ ID NO: 2659375 - RNA, 21 nt, Human
uuggcugaaauucuccuggag

SEQ ID NO: 2659376 - RNA, 19 nt, Human
uuggcugaaauucuccugg

SEQ ID NO: 2659377 - RNA, 17 nt, Human
aucuuuaccuguauaca

SEQ ID NO: 2659378 - RNA, 16 nt, Human
augaaagcuguuccuu

SEQ ID NO: 2659379 - RNA, 18 nt, Human
augaaagcuguuccuugg

SEQ ID NO: 2659380 - RNA, 12 nt, Human
augaaaggagag

SEQ ID NO: 2659381 - RNA, 15 nt, Human
augaaaggagagcau

SEQ ID NO: 2659382 - RNA, 21 nt, Human
augaaaggcaggccuauuuca

SEQ ID NO: 2659383 - RNA, 13 nt, Human
augaaagcaacaa

SEQ ID NO: 2659384 - RNA, 21 nt, Human
augaaagcaacaaagaaaucc

SEQ ID NO: 2659385 - RNA, 15 nt, Human
augaaugauuugcau

SEQ ID NO: 2659386 - RNA, 15 nt, Human
augaaugagucuguu

SEQ ID NO: 2659387 - RNA, 17 nt, Human
augaaugauuugcauau

SEQ ID NO: 2659388 - RNA, 22 nt, Human
uuggggggcugaggugggagga

SEQ ID NO: 2659389 - RNA, 20 nt, Human
uuggggggguggccgcugag

SEQ ID NO: 2659390 - RNA, 13 nt, Human
uuggggggguggc

SEQ ID NO: 2659391 - RNA, 23 nt, Human
uugggggaggggagacuuugaug

SEQ ID NO: 2659392 - RNA, 22 nt, Human
uugggggaggggagacuuugau

SEQ ID NO: 2659393 - RNA, 15 nt, Human
uuggggcccagugca

SEQ ID NO: 2659394 - RNA, 23 nt, Human
uuggggccaccaaagcugcccac

SEQ ID NO: 2659395 - RNA, 21 nt, Human
uuggggccaccaaagcugccc

SEQ ID NO: 2659396 - RNA, 18 nt, Human
uuguacaaaauuaagcaa

SEQ ID NO: 2659397 - RNA, 20 nt, Human
uuguacaaaauuaagcaaau

SEQ ID NO: 2659398 - RNA, 15 nt, Human
uuguaggagacuugc

SEQ ID NO: 2659399 - RNA, 14 nt, Human
uugguucugugaac

SEQ ID NO: 2659400 - RNA, 15 nt, Human
uugguucugugaaca

SEQ ID NO: 2659401 - RNA, 22 nt, Human
uugguugggaaugaggaaaauu

SEQ ID NO: 2659402 - RNA, 18 nt, Human
augaauuuucaaguaauu

SEQ ID NO: 2659403 - RNA, 22 nt, Human
augaauuuucaaguaauuguga

SEQ ID NO: 2659404 - RNA, 17 nt, Human
augaauuuuaaaaucug

SEQ ID NO: 2659405 - RNA, 20 nt, Human
uuguauagcaugaaauaaaa

SEQ ID NO: 2659406 - RNA, 22 nt, Human
uuguauagcaugaaauaaaaua

SEQ ID NO: 2659407 - RNA, 14 nt, Human
uuguauauuguaau

SEQ ID NO: 2659408 - RNA, 22 nt, Human
uuguauauugguuuuaugauga

SEQ ID NO: 2659409 - RNA, 19 nt, Human
uuguauauugguuuuauga

SEQ ID NO: 2659410 - RNA, 16 nt, Human
uuguauauugguuuua

SEQ ID NO: 2659411 - RNA, 14 nt, Human
uuguauauugguuu

SEQ ID NO: 2659412 - RNA, 13 nt, Human
uuguauauugguu

SEQ ID NO: 2659413 - RNA, 21 nt, Human
uuguauaguuauguaaauaau

SEQ ID NO: 2659414 - RNA, 20 nt, Human
uuguauaguuauguaaauaa

SEQ ID NO: 2659415 - RNA, 19 nt, Human
uuguauaguuauguaaaua

SEQ ID NO: 2659416 - RNA, 18 nt, Human
uuguauaguuauguaaau

SEQ ID NO: 2659417 - RNA, 17 nt, Human
uuguauaguuauguaaa

SEQ ID NO: 2659418 - RNA, 16 nt, Human
uuguauaguuauguaa

SEQ ID NO: 2659419 - RNA, 14 nt, Human
uuguauaguuaugu

SEQ ID NO: 2659420 - RNA, 16 nt, Human
augagacucagugcag

SEQ ID NO: 2659421 - RNA, 17 nt, Human
augacacauuuggcagu

SEQ ID NO: 2659422 - RNA, 13 nt, Human
augacuuuuuaua

SEQ ID NO: 2659423 - RNA, 15 nt, Human
augacuuuuuauaaa

SEQ ID NO: 2659424 - RNA, 18 nt, Human
augacuuuuuauaaaaug

SEQ ID NO: 2659425 - RNA, 11 nt, Human
augagaaacuu

SEQ ID NO: 2659426 - RNA, 20 nt, Human
augagaaacuuaaauguuau

SEQ ID NO: 2659427 - RNA, 21 nt, Human
augagaaacuuaaauguuauu

SEQ ID NO: 2659428 - RNA, 17 nt, Human
augacuuuauuauuuau

SEQ ID NO: 2659429 - RNA, 18 nt, Human
augacuuuauuauuuauu

SEQ ID NO: 2659430 - RNA, 22 nt, Human
caaauggaaaguaacucauuug

SEQ ID NO: 2659431 - RNA, 13 nt, Human
caacaaguaacuu

SEQ ID NO: 2659432 - RNA, 15 nt, Human
caacaauaaaauuuu

SEQ ID NO: 2659433 - RNA, 16 nt, Human
caacaauaaaauuuuu

SEQ ID NO: 2659434 - RNA, 20 nt, Human
caacaccucugcacaagcug

SEQ ID NO: 2659435 - RNA, 18 nt, Human
caacaaugugaggggucc

SEQ ID NO: 2659436 - RNA, 21 nt, Human
caaagcacuguugagaaggag

SEQ ID NO: 2659437 - RNA, 13 nt, Human
caaagauucauga

SEQ ID NO: 2659438 - RNA, 13 nt, Human
caaagauuuaauc

SEQ ID NO: 2659439 - RNA, 16 nt, Human
caaagauucaugauuu

SEQ ID NO: 2659440 - RNA, 19 nt, Human
caaagauucaugauuuaua

SEQ ID NO: 2659441 - RNA, 16 nt, Human
caaagauuuaaucugc

SEQ ID NO: 2659442 - RNA, 22 nt, Human
caaagugcuauuacgaaguuca

SEQ ID NO: 2659443 - RNA, 14 nt, Human
caaagugccaaaga

SEQ ID NO: 2659444 - RNA, 15 nt, Human
caaagugccaaagaa

SEQ ID NO: 2659445 - RNA, 16 nt, Human
caaagugccaaagaaa

SEQ ID NO: 2659446 - RNA, 20 nt, Human
caaagucugcucucauauaa

SEQ ID NO: 2659447 - RNA, 23 nt, Human
caaagucugcucucauauaagac

SEQ ID NO: 2659448 - RNA, 21 nt, Human
auuuuuuuuuuuaaucuacug

SEQ ID NO: 2659449 - RNA, 18 nt, Human
auuuuuuuuuuuaaucua

SEQ ID NO: 2659450 - RNA, 16 nt, Human
caaaagaugcuucuca

SEQ ID NO: 2659451 - RNA, 16 nt, Human
caaaaggccucuugua

SEQ ID NO: 2659452 - RNA, 22 nt, Human
caaaaggccucuuguaaagacu

SEQ ID NO: 2659453 - RNA, 23 nt, Human
caaaaggccucuuguaaagacug

SEQ ID NO: 2659454 - RNA, 18 nt, Human
caaaagaugcuucucacu

SEQ ID NO: 2659455 - RNA, 14 nt, Human
auuuuuuuuucuaa

SEQ ID NO: 2659456 - RNA, 15 nt, Human
auuuuuuuuucuaag

SEQ ID NO: 2659457 - RNA, 18 nt, Human
auuuuuuuuucuaagaga

SEQ ID NO: 2659458 - RNA, 19 nt, Human
auuuuuuuuucuaagagaa

SEQ ID NO: 2659459 - RNA, 15 nt, Human
caaacaggaacaauc

SEQ ID NO: 2659460 - RNA, 18 nt, Human
caaacagccaagauuuuc

SEQ ID NO: 2659461 - RNA, 16 nt, Human
auuugcuacuguugua

SEQ ID NO: 2659462 - RNA, 17 nt, Human
auuugcuacuguuguaa

SEQ ID NO: 2659463 - RNA, 18 nt, Human
auuugcucuucagaugcc

SEQ ID NO: 2659464 - RNA, 13 nt, Human
auuugcugccauu

SEQ ID NO: 2659465 - RNA, 14 nt, Human
auuugcugcucuuc

SEQ ID NO: 2659466 - RNA, 11 nt, Human
auuugcuuuuu

SEQ ID NO: 2659467 - RNA, 14 nt, Human
auuugugccagagg

SEQ ID NO: 2659468 - RNA, 20 nt, Human
auuugugcuagaaauuuuca

SEQ ID NO: 2659469 - RNA, 11 nt, Human
auuuguugcau

SEQ ID NO: 2659470 - RNA, 20 nt, Human
auuuguuguucuuucagaaa

SEQ ID NO: 2659471 - RNA, 21 nt, Human
auuugcaucugaaauaggaaa

SEQ ID NO: 2659472 - RNA, 15 nt, Human
auuugcaucugaaau

SEQ ID NO: 2659473 - RNA, 13 nt, Human
auuugcauacuua

SEQ ID NO: 2659474 - RNA, 15 nt, Human
auuugcauacuuacc

SEQ ID NO: 2659475 - RNA, 12 nt, Human
auuugcauguua

SEQ ID NO: 2659476 - RNA, 13 nt, Human
auuugcauguuau

SEQ ID NO: 2659477 - RNA, 14 nt, Human
auuugcauguuaug

SEQ ID NO: 2659478 - RNA, 15 nt, Human
auuugcauguuaugu

SEQ ID NO: 2659479 - RNA, 22 nt, Human
auuugcauguuauguuuaauaa

SEQ ID NO: 2659480 - RNA, 16 nt, Human
auuugauuauuuaaga

SEQ ID NO: 2659481 - RNA, 19 nt, Human
auuugauuauuuaagacua

SEQ ID NO: 2659482 - RNA, 22 nt, Human
auuugauuuauuaacuuaauaa

SEQ ID NO: 2659483 - RNA, 18 nt, Human
auuugauuuauuaacuua

SEQ ID NO: 2659484 - RNA, 17 nt, Human
auuugauuuauuaacuu

SEQ ID NO: 2659485 - RNA, 15 nt, Human
auuugauuuauuaac

SEQ ID NO: 2659486 - RNA, 14 nt, Human
auuugauuuauuaa

SEQ ID NO: 2659487 - RNA, 18 nt, Human
auuugauugggaugaaug

SEQ ID NO: 2659488 - RNA, 21 nt, Human
auuugccuguuucugcuugcu

SEQ ID NO: 2659489 - RNA, 21 nt, Human
auuugccauagaguacacugc

SEQ ID NO: 2659490 - RNA, 15 nt, Human
auuugccauagagua

SEQ ID NO: 2659491 - RNA, 13 nt, Human
auuugccauagag

SEQ ID NO: 2659492 - RNA, 23 nt, Human
auuaggugaucccguuuucccca

SEQ ID NO: 2659493 - RNA, 16 nt, Human
auuaggaauaaauaaa

SEQ ID NO: 2659494 - RNA, 13 nt, Human
auuaggaauaaau

SEQ ID NO: 2659495 - RNA, 15 nt, Human
auuaggaaguguuua

SEQ ID NO: 2659496 - RNA, 20 nt, Human
auuaugaaagcaacaaagaa

SEQ ID NO: 2659497 - RNA, 21 nt, Human
auuaugaaagcaacaaagaaa

SEQ ID NO: 2659498 - RNA, 22 nt, Human
auuaugaaagcaacaaagaaau

SEQ ID NO: 2659499 - RNA, 23 nt, Human
auuaugaaagcaacaaagaaauc

SEQ ID NO: 2659500 - RNA, 20 nt, Human
auuaugagaggcaaugauug

SEQ ID NO: 2659501 - RNA, 23 nt, Human
auuaugagauugguuuuccugug

SEQ ID NO: 2659502 - RNA, 16 nt, Human
auucacacuguuccag

SEQ ID NO: 2659503 - RNA, 15 nt, Human
auuagccagguaaug

SEQ ID NO: 2659504 - RNA, 18 nt, Human
auuacaguccaaaauacu

SEQ ID NO: 2659505 - RNA, 21 nt, Human
auuacagagguauuaaaacua

SEQ ID NO: 2659506 - RNA, 15 nt, Human
auuaauguuuucaaa

SEQ ID NO: 2659507 - RNA, 17 nt, Human
auuaauguuuucaaaag

SEQ ID NO: 2659508 - RNA, 13 nt, Human
auuacaaaguuaa

SEQ ID NO: 2659509 - RNA, 15 nt, Human
auuacaaaguuaaaa

SEQ ID NO: 2659510 - RNA, 23 nt, Human
auuacaaaguuaaaauuguuauc

SEQ ID NO: 2659511 - RNA, 24 nt, Human
auuacaaaguuaaaauuguuauca

SEQ ID NO: 2659512 - RNA, 13 nt, Human
auuacaaaaacaa

SEQ ID NO: 2659513 - RNA, 16 nt, Human
auguuuggcauguaaa

SEQ ID NO: 2659514 - RNA, 17 nt, Human
auguuuggcauguaaau

SEQ ID NO: 2659515 - RNA, 22 nt, Human
auguuuggcauguaaauguaaa

SEQ ID NO: 2659516 - RNA, 13 nt, Human
auguuuggcucug

SEQ ID NO: 2659517 - RNA, 15 nt, Human
auguuuggcucugcu

SEQ ID NO: 2659518 - RNA, 19 nt, Human
auguuuggcucugcuuuua

SEQ ID NO: 2659519 - RNA, 23 nt, Human
auguuuguccugaacacuuuugu

SEQ ID NO: 2659520 - RNA, 12 nt, Human
auguuugggguc

SEQ ID NO: 2659521 - RNA, 18 nt, Human
auguuuggugaacuauau

SEQ ID NO: 2659522 - RNA, 13 nt, Human
auugaguauuguu

SEQ ID NO: 2659523 - RNA, 14 nt, Human
auugaguauuguuu

SEQ ID NO: 2659524 - RNA, 15 nt, Human
auugaguauuguuua

SEQ ID NO: 2659525 - RNA, 16 nt, Human
auugaguauuguuuaa

SEQ ID NO: 2659526 - RNA, 20 nt, Human
auugaguauuguuuaaaaug

SEQ ID NO: 2659527 - RNA, 21 nt, Human
auugaguauuguuuaaaaugu

SEQ ID NO: 2659528 - RNA, 23 nt, Human
auugaguauuguuuaaaauguaa

SEQ ID NO: 2659529 - RNA, 21 nt, Human
auugauauacacggaugacuu

SEQ ID NO: 2659530 - RNA, 19 nt, Human
auucuucuguguuuauaaa

SEQ ID NO: 2659531 - RNA, 14 nt, Human
auucuucuguguuu

SEQ ID NO: 2659532 - RNA, 15 nt, Human
auucuucuguguuua

SEQ ID NO: 2659533 - RNA, 13 nt, Human
auucuucuguguu

SEQ ID NO: 2659534 - RNA, 12 nt, Human
auucucuuuuaa

SEQ ID NO: 2659535 - RNA, 21 nt, Human
auucuucucuuccuuuuauca

SEQ ID NO: 2659536 - RNA, 12 nt, Human
auuguuaucaaa

SEQ ID NO: 2659537 - RNA, 14 nt, Human
auugugugaacuug

SEQ ID NO: 2659538 - RNA, 12 nt, Human
auuguaaaguaa

SEQ ID NO: 2659539 - RNA, 18 nt, Human
auugcuugagcucaggag

SEQ ID NO: 2659540 - RNA, 22 nt, Human
auugcugagccucugcucccca

SEQ ID NO: 2659541 - RNA, 16 nt, Human
auugcugagccucugc

SEQ ID NO: 2659542 - RNA, 14 nt, Human
auugcugagccucu

SEQ ID NO: 2659543 - RNA, 14 nt, Human
auugcuugagcuca

SEQ ID NO: 2659544 - RNA, 12 nt, Human
auugcugcuuga

SEQ ID NO: 2659545 - RNA, 23 nt, Human
auugcugagccucugcuccccag

SEQ ID NO: 2659546 - RNA, 13 nt, Human
cacaguagaacug

SEQ ID NO: 2659547 - RNA, 20 nt, Human
cacaguagaacugucuguga

SEQ ID NO: 2659548 - RNA, 14 nt, Human
cacaguagagccag

SEQ ID NO: 2659549 - RNA, 15 nt, Human
cacaguagagccagc

SEQ ID NO: 2659550 - RNA, 21 nt, Human
cacaguaaaaauggaaacuau

SEQ ID NO: 2659551 - RNA, 16 nt, Human
cacaguagagccagcu

SEQ ID NO: 2659552 - RNA, 17 nt, Human
cacaguagagccagcuu

SEQ ID NO: 2659553 - RNA, 12 nt, Human
cacagccugggc

SEQ ID NO: 2659554 - RNA, 14 nt, Human
cacagccugggccc

SEQ ID NO: 2659555 - RNA, 14 nt, Human
cacagcgagggcag

SEQ ID NO: 2659556 - RNA, 19 nt, Human
cacagccugggccccagcu

SEQ ID NO: 2659557 - RNA, 21 nt, Human
cacagccugggccccagcucg

SEQ ID NO: 2659558 - RNA, 15 nt, Human
cacagcgagggcagc

SEQ ID NO: 2659559 - RNA, 16 nt, Human
cacagcgagggcagcu

SEQ ID NO: 2659560 - RNA, 17 nt, Human
cacagcgagggcagcug

SEQ ID NO: 2659561 - RNA, 14 nt, Human
cacagcgccagccu

SEQ ID NO: 2659562 - RNA, 16 nt, Human
cacagcgccagccuca

SEQ ID NO: 2659563 - RNA, 20 nt, Human
cacagcggagguguggagcc

SEQ ID NO: 2659564 - RNA, 18 nt, Human
cacagcgagggcagcugc

SEQ ID NO: 2659565 - RNA, 19 nt, Human
cacagcgagggcagcugcu

SEQ ID NO: 2659566 - RNA, 20 nt, Human
cacacauauauauuacaagg

SEQ ID NO: 2659567 - RNA, 16 nt, Human
cacagaaacacugccu

SEQ ID NO: 2659568 - RNA, 15 nt, Human
cacagaaacacugcc

SEQ ID NO: 2659569 - RNA, 11 nt, Human
cacagaaacac

SEQ ID NO: 2659570 - RNA, 17 nt, Human
cacagaaacacugccuu

SEQ ID NO: 2659571 - RNA, 18 nt, Human
cacagaaacacugccuuu

SEQ ID NO: 2659572 - RNA, 19 nt, Human
cacagaaacacugccuuuu

SEQ ID NO: 2659573 - RNA, 20 nt, Human
cacagaaacacugccuuuuu

SEQ ID NO: 2659574 - RNA, 11 nt, Human
cacagccucug

SEQ ID NO: 2659575 - RNA, 23 nt, Human
cacaagcugcacccucaggcagg

SEQ ID NO: 2659576 - RNA, 17 nt, Human
cacaagcugcacccuca

SEQ ID NO: 2659577 - RNA, 15 nt, Human
caauggaguauucuc

SEQ ID NO: 2659578 - RNA, 19 nt, Human
caauucuuuuaacuguugu

SEQ ID NO: 2659579 - RNA, 17 nt, Human
caagucaagugaaaaag

SEQ ID NO: 2659580 - RNA, 13 nt, Human
caagucaagugaa

SEQ ID NO: 2659581 - RNA, 18 nt, Human
caaguauagccuauggca

SEQ ID NO: 2659582 - RNA, 23 nt, Human
caaguaguucuguauuugaaagu

SEQ ID NO: 2659583 - RNA, 21 nt, Human
caaguaguucuguauuugaaa

SEQ ID NO: 2659584 - RNA, 20 nt, Human
caaguaguucuguauuugaa

SEQ ID NO: 2659585 - RNA, 19 nt, Human
caaguaguucuguauuuga

SEQ ID NO: 2659586 - RNA, 18 nt, Human
caaguaguucuguauuug

SEQ ID NO: 2659587 - RNA, 17 nt, Human
caaguaguucuguauuu

SEQ ID NO: 2659588 - RNA, 24 nt, Human
caaggcacuucauguaaaguguca

SEQ ID NO: 2659589 - RNA, 20 nt, Human
caagcugcacccucaggcag

SEQ ID NO: 2659590 - RNA, 18 nt, Human
caagcugcacccucaggc

SEQ ID NO: 2659591 - RNA, 14 nt, Human
caagcugcacccuc

SEQ ID NO: 2659592 - RNA, 13 nt, Human
caagcugcacccu

SEQ ID NO: 2659593 - RNA, 13 nt, Human
caagcuccaagcc

SEQ ID NO: 2659594 - RNA, 14 nt, Human
caagcuccaagccc

SEQ ID NO: 2659595 - RNA, 19 nt, Human
caagcuccaagccccaucu

SEQ ID NO: 2659596 - RNA, 15 nt, Human
caagcuauucaauuc

SEQ ID NO: 2659597 - RNA, 13 nt, Human
caauaaagcuugu

SEQ ID NO: 2659598 - RNA, 14 nt, Human
caauaaagcuuguu

SEQ ID NO: 2659599 - RNA, 17 nt, Human
caauaaagcuuguugac

SEQ ID NO: 2659600 - RNA, 14 nt, Human
cacccucaggcagg

SEQ ID NO: 2659601 - RNA, 17 nt, Human
cacccugaaagcccuga

SEQ ID NO: 2659602 - RNA, 23 nt, Human
cacccugggcccugggcuggaau

SEQ ID NO: 2659603 - RNA, 15 nt, Human
cacccucuuccugug

SEQ ID NO: 2659604 - RNA, 14 nt, Human
cacccucuuccugu

SEQ ID NO: 2659605 - RNA, 12 nt, Human
caccucagccug

SEQ ID NO: 2659606 - RNA, 14 nt, Human
caccucagccugca

SEQ ID NO: 2659607 - RNA, 17 nt, Human
caccucagccugcacag

SEQ ID NO: 2659608 - RNA, 18 nt, Human
caccugccuguuaggaga

SEQ ID NO: 2659609 - RNA, 23 nt, Human
caccugccuguuaggagaagcug

SEQ ID NO: 2659610 - RNA, 12 nt, Human
cacucauuucau

SEQ ID NO: 2659611 - RNA, 13 nt, Human
cacucauuucauc

SEQ ID NO: 2659612 - RNA, 14 nt, Human
cacucauuucaucu

SEQ ID NO: 2659613 - RNA, 16 nt, Human
cacucauuucaucuca

SEQ ID NO: 2659614 - RNA, 17 nt, Human
cacucauuucaucucau

SEQ ID NO: 2659615 - RNA, 18 nt, Human
cacucauuucaucucauu

SEQ ID NO: 2659616 - RNA, 19 nt, Human
cacucauuucaucucauuu

SEQ ID NO: 2659617 - RNA, 22 nt, Human
cacucauuucaucucauuuaag

SEQ ID NO: 2659618 - RNA, 23 nt, Human
cacucauugcugagccucugcuc

SEQ ID NO: 2659619 - RNA, 21 nt, Human
cacucauugcugagccucugc

SEQ ID NO: 2659620 - RNA, 19 nt, Human
cacucauugcugagccucu

SEQ ID NO: 2659621 - RNA, 16 nt, Human
cacucauugcugagcc

SEQ ID NO: 2659622 - RNA, 23 nt, Human
cacuaggcccccacuugccucuu

SEQ ID NO: 2659623 - RNA, 17 nt, Human
cacuagggccuuggaaa

SEQ ID NO: 2659624 - RNA, 18 nt, Human
cacuagggccuuggaaau

SEQ ID NO: 2659625 - RNA, 16 nt, Human
cacuccagccugggug

SEQ ID NO: 2659626 - RNA, 15 nt, Human
cacuccagccugggg

SEQ ID NO: 2659627 - RNA, 13 nt, Human
cacuccagggaca

SEQ ID NO: 2659628 - RNA, 20 nt, Human
cacuccagggacacacagcc

SEQ ID NO: 2659629 - RNA, 21 nt, Human
cacuccagggacacacagccu

SEQ ID NO: 2659630 - RNA, 17 nt, Human
cacucuuguucccacac

SEQ ID NO: 2659631 - RNA, 20 nt, Human
cacugcacuccagccugggu

SEQ ID NO: 2659632 - RNA, 19 nt, Human
cacugcacuccagccuggg

SEQ ID NO: 2659633 - RNA, 18 nt, Human
cacugcacuccagccugg

SEQ ID NO: 2659634 - RNA, 16 nt, Human
cacugcacuccagccu

SEQ ID NO: 2659635 - RNA, 15 nt, Human
cacugcacuccagcc

SEQ ID NO: 2659636 - RNA, 20 nt, Human
cacugccacacucuccauca

SEQ ID NO: 2659637 - RNA, 12 nt, Human
cacugccagcag

SEQ ID NO: 2659638 - RNA, 13 nt, Human
cacugccagcagc

SEQ ID NO: 2659639 - RNA, 21 nt, Human
cacugccagcagcagcaggug

SEQ ID NO: 2659640 - RNA, 22 nt, Human
cacugccagcagcagcagguga

SEQ ID NO: 2659641 - RNA, 14 nt, Human
cacugccagcagca

SEQ ID NO: 2659642 - RNA, 16 nt, Human
cacugccagcagcagc

SEQ ID NO: 2659643 - RNA, 19 nt, Human
cacugccagcagcagcagg

SEQ ID NO: 2659644 - RNA, 20 nt, Human
cacugccagcagcagcaggu

SEQ ID NO: 2659645 - RNA, 16 nt, Human
cacuggggccuacagc

SEQ ID NO: 2659646 - RNA, 14 nt, Human
cacuggggccuaca

SEQ ID NO: 2659647 - RNA, 22 nt, Human
cacuggcugucaguaugacauu

SEQ ID NO: 2659648 - RNA, 12 nt, Human
cacugccaggcc

SEQ ID NO: 2659649 - RNA, 17 nt, Human
cacuuguagauuugauu

SEQ ID NO: 2659650 - RNA, 16 nt, Human
cacuuguagauuugau

SEQ ID NO: 2659651 - RNA, 17 nt, Human
cacuuagcgaacccuuu

SEQ ID NO: 2659652 - RNA, 21 nt, Human
cacuuaugaaugauuugcaua

SEQ ID NO: 2659653 - RNA, 15 nt, Human
cacuuauugaauaua

SEQ ID NO: 2659654 - RNA, 16 nt, Human
cacuuauugaauauau

SEQ ID NO: 2659655 - RNA, 17 nt, Human
cacuuauugaauauaug

SEQ ID NO: 2659656 - RNA, 15 nt, Human
cacuuguagauuuga

SEQ ID NO: 2659657 - RNA, 14 nt, Human
cacuuguagauuug

SEQ ID NO: 2659658 - RNA, 12 nt, Human
cacugguucuca

SEQ ID NO: 2659659 - RNA, 16 nt, Human
caugacaauguuguag

SEQ ID NO: 2659660 - RNA, 12 nt, Human
caugauuagcaa

SEQ ID NO: 2659661 - RNA, 14 nt, Human
caugaccaguaaag

SEQ ID NO: 2659662 - RNA, 15 nt, Human
caugcugaggccugg

SEQ ID NO: 2659663 - RNA, 14 nt, Human
caugcaauaaaauu

SEQ ID NO: 2659664 - RNA, 15 nt, Human
caugcaauaaaauuu

SEQ ID NO: 2659665 - RNA, 18 nt, Human
caugcaauaaaauuuaaa

SEQ ID NO: 2659666 - RNA, 16 nt, Human
caugcugaggccuggg

SEQ ID NO: 2659667 - RNA, 17 nt, Human
caugcugaggccugggc

SEQ ID NO: 2659668 - RNA, 18 nt, Human
caugcugaggccugggcc

SEQ ID NO: 2659669 - RNA, 19 nt, Human
caugcugaggccugggccg

SEQ ID NO: 2659670 - RNA, 23 nt, Human
cauccugugccacuaaacuacau

SEQ ID NO: 2659671 - RNA, 13 nt, Human
caucccauuccag

SEQ ID NO: 2659672 - RNA, 22 nt, Human
caucccauuccaggcagccucu

SEQ ID NO: 2659673 - RNA, 18 nt, Human
caucugucuauauuuuau

SEQ ID NO: 2659674 - RNA, 22 nt, Human
caucuuagguuggcaaaaaggc

SEQ ID NO: 2659675 - RNA, 21 nt, Human
caucuuagguuggcaaaaagg

SEQ ID NO: 2659676 - RNA, 17 nt, Human
caucuuagaccuccaca

SEQ ID NO: 2659677 - RNA, 13 nt, Human
caguuuaucauuc

SEQ ID NO: 2659678 - RNA, 23 nt, Human
caguuugaggauuaguuuagaac

SEQ ID NO: 2659679 - RNA, 18 nt, Human
caguuuauacccuaguua

SEQ ID NO: 2659680 - RNA, 16 nt, Human
caguuugucuuggaua

SEQ ID NO: 2659681 - RNA, 20 nt, Human
cauaggcaccuuuuacugug

SEQ ID NO: 2659682 - RNA, 21 nt, Human
cauaggcaccuuuuacuguga

SEQ ID NO: 2659683 - RNA, 16 nt, Human
cauaggaccuuuccac

SEQ ID NO: 2659684 - RNA, 18 nt, Human
cauaggaccuuuccacca

SEQ ID NO: 2659685 - RNA, 16 nt, Human
cauagccaaaauguga

SEQ ID NO: 2659686 - RNA, 14 nt, Human
cauagccaaaaugu

SEQ ID NO: 2659687 - RNA, 15 nt, Human
cauagcccaguagac

SEQ ID NO: 2659688 - RNA, 13 nt, Human
cauagccauaaau

SEQ ID NO: 2659689 - RNA, 17 nt, Human
cauagccauaaaugaug

SEQ ID NO: 2659690 - RNA, 11 nt, Human
cauagcccagu

SEQ ID NO: 2659691 - RNA, 19 nt, Human
cauacaaguuuauaaagag

SEQ ID NO: 2659692 - RNA, 22 nt, Human
cauacaaaugcaucuuugaugu

SEQ ID NO: 2659693 - RNA, 20 nt, Human
cauacaaaugcaucuuugau

SEQ ID NO: 2659694 - RNA, 19 nt, Human
cauacaaaugcaucuuuga

SEQ ID NO: 2659695 - RNA, 11 nt, Human
ccaaaaacaaa

SEQ ID NO: 2659696 - RNA, 12 nt, Human
cauuuuuguaaa

SEQ ID NO: 2659697 - RNA, 13 nt, Human
cauuuuuguaaau

SEQ ID NO: 2659698 - RNA, 22 nt, Human
cauugcuguuguccaacuauuu

SEQ ID NO: 2659699 - RNA, 21 nt, Human
cauugcuguuguccaacuauu

SEQ ID NO: 2659700 - RNA, 19 nt, Human
cauugcuguuguccaacua

SEQ ID NO: 2659701 - RNA, 17 nt, Human
cauuuauuuauccagaa

SEQ ID NO: 2659702 - RNA, 23 nt, Human
cauuuauuuauccagaaaacugu

SEQ ID NO: 2659703 - RNA, 19 nt, Human
cauuuauuuuuuuuaaaga

SEQ ID NO: 2659704 - RNA, 20 nt, Human
cauuuauuuuuuuuaaagaa

SEQ ID NO: 2659705 - RNA, 21 nt, Human
cauuuauuuuuuuuaaagaaa

SEQ ID NO: 2659706 - RNA, 22 nt, Human
cauuuauuuuuuuuaaagaaaa

SEQ ID NO: 2659707 - RNA, 21 nt, Human
cauuucagaaguuaguuugua

SEQ ID NO: 2659708 - RNA, 13 nt, Human
cauuucagaaguu

SEQ ID NO: 2659709 - RNA, 15 nt, Human
cauugcugagccucu

SEQ ID NO: 2659710 - RNA, 14 nt, Human
cauugcugagccuc

SEQ ID NO: 2659711 - RNA, 18 nt, Human
cauugcugggcuugucug

SEQ ID NO: 2659712 - RNA, 21 nt, Human
cauugcugagccucugcuccc

SEQ ID NO: 2659713 - RNA, 18 nt, Human
cauugcugagccucugcu

SEQ ID NO: 2659714 - RNA, 17 nt, Human
cauugcugagccucugc

SEQ ID NO: 2659715 - RNA, 16 nt, Human
cauugcugagccucug

SEQ ID NO: 2659716 - RNA, 16 nt, Human
cauuaugccacuuccu

SEQ ID NO: 2659717 - RNA, 18 nt, Human
cauuaugccacuuccuuu

SEQ ID NO: 2659718 - RNA, 23 nt, Human
cauuaugccacuuccuuuuaacu

SEQ ID NO: 2659719 - RNA, 15 nt, Human
cauucucccagguac

SEQ ID NO: 2659720 - RNA, 23 nt, Human
cauucucccagguaccagcugcg

SEQ ID NO: 2659721 - RNA, 12 nt, Human
cauucucccagg

SEQ ID NO: 2659722 - RNA, 21 nt, Human
cauucucccagguaccagcug

SEQ ID NO: 2659723 - RNA, 12 nt, Human
cauggcuguguu

SEQ ID NO: 2659724 - RNA, 15 nt, Human
cauggcugcuguugc

SEQ ID NO: 2659725 - RNA, 18 nt, Human
cauggcugcuguugcuua

SEQ ID NO: 2659726 - RNA, 19 nt, Human
cauggccuuaugaggcagg

SEQ ID NO: 2659727 - RNA, 18 nt, Human
cauuagccagauuugucu

SEQ ID NO: 2659728 - RNA, 19 nt, Human
cauuagccagauuugucuu

SEQ ID NO: 2659729 - RNA, 14 nt, Human
ccaaauguuuauuu

SEQ ID NO: 2659730 - RNA, 14 nt, Human
ccaaaucuggaagc

SEQ ID NO: 2659731 - RNA, 23 nt, Human
ccaacuuguauuaaagacagagg

SEQ ID NO: 2659732 - RNA, 20 nt, Human
ccaauguucucucuucucca

SEQ ID NO: 2659733 - RNA, 12 nt, Human
ccacccugggcc

SEQ ID NO: 2659734 - RNA, 21 nt, Human
ccaccaggccaccuccccagc

SEQ ID NO: 2659735 - RNA, 14 nt, Human
ccacccugcugcug

SEQ ID NO: 2659736 - RNA, 15 nt, Human
ccacccugcugcugg

SEQ ID NO: 2659737 - RNA, 16 nt, Human
ccacccugcugcuggu

SEQ ID NO: 2659738 - RNA, 18 nt, Human
ccacccugcugcuggugc

SEQ ID NO: 2659739 - RNA, 21 nt, Human
ccacccugcugcuggugcaca

SEQ ID NO: 2659740 - RNA, 13 nt, Human
ccacccugggccc

SEQ ID NO: 2659741 - RNA, 15 nt, Human
ccaccgguccagcug

SEQ ID NO: 2659742 - RNA, 17 nt, Human
ccaccgguccagcuggc

SEQ ID NO: 2659743 - RNA, 18 nt, Human
ccaccgguccagcuggcc

SEQ ID NO: 2659744 - RNA, 14 nt, Human
ccaccuagaacacu

SEQ ID NO: 2659745 - RNA, 16 nt, Human
ccaccguggaggagga

SEQ ID NO: 2659746 - RNA, 13 nt, Human
ccaccguggagga

SEQ ID NO: 2659747 - RNA, 16 nt, Human
ccaccagcucugccgu

SEQ ID NO: 2659748 - RNA, 18 nt, Human
ccaccagcaucaccugcc

SEQ ID NO: 2659749 - RNA, 19 nt, Human
ccaccagcaucaccugccu

SEQ ID NO: 2659750 - RNA, 13 nt, Human
ccaccaggccacc

SEQ ID NO: 2659751 - RNA, 19 nt, Human
ccaccaggccaccucccca

SEQ ID NO: 2659752 - RNA, 16 nt, Human
ccacacuugaaaccuu

SEQ ID NO: 2659753 - RNA, 17 nt, Human
ccacacuugaaaccuuu

SEQ ID NO: 2659754 - RNA, 12 nt, Human
caggaggcaggc

SEQ ID NO: 2659755 - RNA, 15 nt, Human
caggaggcaggcaug

SEQ ID NO: 2659756 - RNA, 18 nt, Human
caggaggcaggcauggcc

SEQ ID NO: 2659757 - RNA, 21 nt, Human
caggaggcaggcauggcccug

SEQ ID NO: 2659758 - RNA, 23 nt, Human
caggaggcaggcauggcccuggg

SEQ ID NO: 2659759 - RNA, 19 nt, Human
caggaggcagggaggcagc

SEQ ID NO: 2659760 - RNA, 20 nt, Human
caggaggcagggaggcagcc

SEQ ID NO: 2659761 - RNA, 23 nt, Human
caggaggcagggaggcagccgcc

SEQ ID NO: 2659762 - RNA, 13 nt, Human
caggaccucaggu

SEQ ID NO: 2659763 - RNA, 15 nt, Human
caggacaugcaauaa

SEQ ID NO: 2659764 - RNA, 19 nt, Human
caggacaugcaauaaaauu

SEQ ID NO: 2659765 - RNA, 21 nt, Human
caggacaugcaauaaaauuua

SEQ ID NO: 2659766 - RNA, 16 nt, Human
caggccagccuccgag

SEQ ID NO: 2659767 - RNA, 19 nt, Human
caggccagccuccgagagg

SEQ ID NO: 2659768 - RNA, 21 nt, Human
caggccagccuccgagaggga

SEQ ID NO: 2659769 - RNA, 23 nt, Human
caggccagccuccgagagggaga

SEQ ID NO: 2659770 - RNA, 11 nt, Human
caggccagccu

SEQ ID NO: 2659771 - RNA, 12 nt, Human
caggccagccuc

SEQ ID NO: 2659772 - RNA, 13 nt, Human
caggccagccucc

SEQ ID NO: 2659773 - RNA, 15 nt, Human
caggccagccuccga

SEQ ID NO: 2659774 - RNA, 11 nt, Human
caggccaccuc

SEQ ID NO: 2659775 - RNA, 19 nt, Human
caggccaccuccccagcau

SEQ ID NO: 2659776 - RNA, 20 nt, Human
caggccaccuccccagcauu

SEQ ID NO: 2659777 - RNA, 12 nt, Human
caggccaccucc

SEQ ID NO: 2659778 - RNA, 15 nt, Human
caggccaccucccca

SEQ ID NO: 2659779 - RNA, 16 nt, Human
caggccaccuccccag

SEQ ID NO: 2659780 - RNA, 18 nt, Human
cagcuuauaaugggcucu

SEQ ID NO: 2659781 - RNA, 16 nt, Human
cagcuguucagcuggu

SEQ ID NO: 2659782 - RNA, 15 nt, Human
cagcuguucagcugg

SEQ ID NO: 2659783 - RNA, 16 nt, Human
caggaaaguggccaag

SEQ ID NO: 2659784 - RNA, 23 nt, Human
caggcugggccauguccaaagag

SEQ ID NO: 2659785 - RNA, 11 nt, Human
caggcugggcc

SEQ ID NO: 2659786 - RNA, 12 nt, Human
caggcugggcca

SEQ ID NO: 2659787 - RNA, 13 nt, Human
caggcugggccau

SEQ ID NO: 2659788 - RNA, 17 nt, Human
caggcugggccaugucc

SEQ ID NO: 2659789 - RNA, 18 nt, Human
caggcugggccaugucca

SEQ ID NO: 2659790 - RNA, 20 nt, Human
caggcugggccauguccaaa

SEQ ID NO: 2659791 - RNA, 22 nt, Human
caggcugggccauguccaaaga

SEQ ID NO: 2659792 - RNA, 12 nt, Human
cagggaggggcc

SEQ ID NO: 2659793 - RNA, 16 nt, Human
cagggaggggccggcc

SEQ ID NO: 2659794 - RNA, 19 nt, Human
cagggaggggccggcccug

SEQ ID NO: 2659795 - RNA, 21 nt, Human
cagggaggggccggcccugug

SEQ ID NO: 2659796 - RNA, 22 nt, Human
cagggaggggccggcccugugu

SEQ ID NO: 2659797 - RNA, 16 nt, Human
cagggagggcuucugc

SEQ ID NO: 2659798 - RNA, 13 nt, Human
cagggcuggcucc

SEQ ID NO: 2659799 - RNA, 18 nt, Human
cagggcuggcuccugauc

SEQ ID NO: 2659800 - RNA, 20 nt, Human
cagguucuccguuagcuccu

SEQ ID NO: 2659801 - RNA, 24 nt, Human
cagguucuccguuagcuccugugg

SEQ ID NO: 2659802 - RNA, 21 nt, Human
cagguucuccguuagcuccug

SEQ ID NO: 2659803 - RNA, 22 nt, Human
cagguucuccguuagcuccugu

SEQ ID NO: 2659804 - RNA, 23 nt, Human
cagguucuccguuagcuccugug

SEQ ID NO: 2659805 - RNA, 12 nt, Human
caguauuaugua

SEQ ID NO: 2659806 - RNA, 21 nt, Human
cagggucucuaccauccccug

SEQ ID NO: 2659807 - RNA, 15 nt, Human
cagggugcagcccaa

SEQ ID NO: 2659808 - RNA, 23 nt, Human
cagggugcagcccaaucugccag

SEQ ID NO: 2659809 - RNA, 13 nt, Human
cagagccuucuca

SEQ ID NO: 2659810 - RNA, 15 nt, Human
cagagccuucucaga

SEQ ID NO: 2659811 - RNA, 16 nt, Human
cagagccuucucagaa

SEQ ID NO: 2659812 - RNA, 18 nt, Human
cagagccuucucagaagc

SEQ ID NO: 2659813 - RNA, 19 nt, Human
cagagccuucucagaagca

SEQ ID NO: 2659814 - RNA, 20 nt, Human
cagagccuucucagaagcac

SEQ ID NO: 2659815 - RNA, 21 nt, Human
cagagccuucucagaagcaca

SEQ ID NO: 2659816 - RNA, 19 nt, Human
cagagcgcgccccuagccg

SEQ ID NO: 2659817 - RNA, 18 nt, Human
cagagcgcgccccuagcc

SEQ ID NO: 2659818 - RNA, 17 nt, Human
cagagcgcgccccuagc

SEQ ID NO: 2659819 - RNA, 18 nt, Human
cagagaggacuguaggga

SEQ ID NO: 2659820 - RNA, 20 nt, Human
cagagaggacuguagggagg

SEQ ID NO: 2659821 - RNA, 19 nt, Human
cagagaggaaauucuccac

SEQ ID NO: 2659822 - RNA, 21 nt, Human
cagagaggaaauucuccacug

SEQ ID NO: 2659823 - RNA, 20 nt, Human
cagagagccuggugcugcug

SEQ ID NO: 2659824 - RNA, 19 nt, Human
cagagagccuggugcugcu

SEQ ID NO: 2659825 - RNA, 18 nt, Human
cagauaccuccaacccug

SEQ ID NO: 2659826 - RNA, 19 nt, Human
cagauaccuccaacccugc

SEQ ID NO: 2659827 - RNA, 20 nt, Human
cagauaccuccaacccugcc

SEQ ID NO: 2659828 - RNA, 21 nt, Human
cagauaccuccaacccugccg

SEQ ID NO: 2659829 - RNA, 18 nt, Human
cagauaccuuaucuuaca

SEQ ID NO: 2659830 - RNA, 19 nt, Human
cagauaccuuaucuuacaa

SEQ ID NO: 2659831 - RNA, 22 nt, Human
cagauaccuuaucuuacaauau

SEQ ID NO: 2659832 - RNA, 23 nt, Human
cagauaccuuaucuuacaauauu

SEQ ID NO: 2659833 - RNA, 18 nt, Human
cagagcuggcucugagcg

SEQ ID NO: 2659834 - RNA, 13 nt, Human
cagagcuggcucu

SEQ ID NO: 2659835 - RNA, 17 nt, Human
cagagcuggcucugagc

SEQ ID NO: 2659836 - RNA, 16 nt, Human
cagccucuccccaggu

SEQ ID NO: 2659837 - RNA, 19 nt, Human
cagccucuccccaggucca

SEQ ID NO: 2659838 - RNA, 20 nt, Human
cagccucuccccagguccag

SEQ ID NO: 2659839 - RNA, 23 nt, Human
cagccucuccccagguccagcuc

SEQ ID NO: 2659840 - RNA, 22 nt, Human
cagccugcacagugucccccag

SEQ ID NO: 2659841 - RNA, 14 nt, Human
cagccugcacagug

SEQ ID NO: 2659842 - RNA, 23 nt, Human
cagccgccaugcuccuggcccac

SEQ ID NO: 2659843 - RNA, 14 nt, Human
cagccucuccccag

SEQ ID NO: 2659844 - RNA, 20 nt, Human
cagccgccccaucugcccca

SEQ ID NO: 2659845 - RNA, 16 nt, Human
cagcguggcucuaaaa

SEQ ID NO: 2659846 - RNA, 14 nt, Human
cagccugccccgga

SEQ ID NO: 2659847 - RNA, 17 nt, Human
cagccugcgccugcugc

SEQ ID NO: 2659848 - RNA, 13 nt, Human
cagccugcgccug

SEQ ID NO: 2659849 - RNA, 16 nt, Human
cagccugcgccugcug

SEQ ID NO: 2659850 - RNA, 15 nt, Human
cagccugcgccugcu

SEQ ID NO: 2659851 - RNA, 21 nt, Human
cagccccgcgaccauguggcc

SEQ ID NO: 2659852 - RNA, 13 nt, Human
cagcccccugguc

SEQ ID NO: 2659853 - RNA, 16 nt, Human
cagcccccugcuucag

SEQ ID NO: 2659854 - RNA, 20 nt, Human
cagcccccugcuucaguccc

SEQ ID NO: 2659855 - RNA, 15 nt, Human
cagccccgacuccag

SEQ ID NO: 2659856 - RNA, 16 nt, Human
cagccccgacuccagc

SEQ ID NO: 2659857 - RNA, 17 nt, Human
cagccccgacuccagcc

SEQ ID NO: 2659858 - RNA, 18 nt, Human
cagccccgacuccagcca

SEQ ID NO: 2659859 - RNA, 19 nt, Human
cagccccgacuccagccag

SEQ ID NO: 2659860 - RNA, 20 nt, Human
cagccccgacuccagccagc

SEQ ID NO: 2659861 - RNA, 21 nt, Human
cagccccgacuccagccagcg

SEQ ID NO: 2659862 - RNA, 19 nt, Human
cagcccccuaaaagcacuc

SEQ ID NO: 2659863 - RNA, 22 nt, Human
cagccccucuggucgcuccugc

SEQ ID NO: 2659864 - RNA, 18 nt, Human
cagccccucuggucgcuc

SEQ ID NO: 2659865 - RNA, 21 nt, Human
cagccccucuggucgcuccug

SEQ ID NO: 2659866 - RNA, 13 nt, Human
cagccccucuggu

SEQ ID NO: 2659867 - RNA, 14 nt, Human
cagccccucugguc

SEQ ID NO: 2659868 - RNA, 16 nt, Human
cagccccucuggucgc

SEQ ID NO: 2659869 - RNA, 17 nt, Human
cagcauagaaguaacuu

SEQ ID NO: 2659870 - RNA, 22 nt, Human
cagcacagcuugaccugaggcu

SEQ ID NO: 2659871 - RNA, 13 nt, Human
cagcacagcuuga

SEQ ID NO: 2659872 - RNA, 15 nt, Human
cagcacagcuugacc

SEQ ID NO: 2659873 - RNA, 14 nt, Human
cagauuugucuuuu

SEQ ID NO: 2659874 - RNA, 16 nt, Human
cagcacagcuugaccu

SEQ ID NO: 2659875 - RNA, 17 nt, Human
cagcacagcuugaccug

SEQ ID NO: 2659876 - RNA, 20 nt, Human
cagcacagcuugaccugagg

SEQ ID NO: 2659877 - RNA, 21 nt, Human
cagcacagcuugaccugaggc

SEQ ID NO: 2659878 - RNA, 16 nt, Human
cagauugccuguuucu

SEQ ID NO: 2659879 - RNA, 19 nt, Human
cagccagaggcaucugagg

SEQ ID NO: 2659880 - RNA, 12 nt, Human
cagccagcaccu

SEQ ID NO: 2659881 - RNA, 13 nt, Human
cagccagcaccug

SEQ ID NO: 2659882 - RNA, 14 nt, Human
cagccagcaccugg

SEQ ID NO: 2659883 - RNA, 16 nt, Human
cagccagcaccuggca

SEQ ID NO: 2659884 - RNA, 19 nt, Human
cccaggaaaggcaggauug

SEQ ID NO: 2659885 - RNA, 19 nt, Human
cccaggcuggagugcagug

SEQ ID NO: 2659886 - RNA, 20 nt, Human
cccauagcagccaguucaaa

SEQ ID NO: 2659887 - RNA, 15 nt, Human
cccauagucccugcc

SEQ ID NO: 2659888 - RNA, 23 nt, Human
cccagggcccucggugggagcca

SEQ ID NO: 2659889 - RNA, 22 nt, Human
cccagcuuaaaggggcuagagu

SEQ ID NO: 2659890 - RNA, 15 nt, Human
cccacccugcugcug

SEQ ID NO: 2659891 - RNA, 17 nt, Human
cccacccugcugcuggu

SEQ ID NO: 2659892 - RNA, 17 nt, Human
cccacuaaugcaaacug

SEQ ID NO: 2659893 - RNA, 14 nt, Human
cccacugccagcag

SEQ ID NO: 2659894 - RNA, 15 nt, Human
cccacugccagcagc

SEQ ID NO: 2659895 - RNA, 16 nt, Human
cccacugccagcagca

SEQ ID NO: 2659896 - RNA, 17 nt, Human
cccacugccagcagcag

SEQ ID NO: 2659897 - RNA, 21 nt, Human
cccacugccagcagcagcagg

SEQ ID NO: 2659898 - RNA, 13 nt, Human
cccacugccagca

SEQ ID NO: 2659899 - RNA, 17 nt, Human
cccacuucccacccugc

SEQ ID NO: 2659900 - RNA, 21 nt, Human
cccacuguuucucuugagcug

SEQ ID NO: 2659901 - RNA, 22 nt, Human
cccacuguuucucuugagcugg

SEQ ID NO: 2659902 - RNA, 23 nt, Human
cccacuguuucucuugagcuggc

SEQ ID NO: 2659903 - RNA, 18 nt, Human
cccacccugaaagcccug

SEQ ID NO: 2659904 - RNA, 13 nt, Human
cccacccccagcc

SEQ ID NO: 2659905 - RNA, 16 nt, Human
cccacccccagccccg

SEQ ID NO: 2659906 - RNA, 18 nt, Human
cccacccccagccccgac

SEQ ID NO: 2659907 - RNA, 22 nt, Human
ccccagcaagugguccuagagg

SEQ ID NO: 2659908 - RNA, 18 nt, Human
ccccagcaccucagccug

SEQ ID NO: 2659909 - RNA, 19 nt, Human
ccccaucuccccucagcuc

SEQ ID NO: 2659910 - RNA, 13 nt, Human
ccccaucucccug

SEQ ID NO: 2659911 - RNA, 14 nt, Human
ccccaucucccugc

SEQ ID NO: 2659912 - RNA, 17 nt, Human
ccccaucucccugccug

SEQ ID NO: 2659913 - RNA, 18 nt, Human
ccccaucucccugccugg

SEQ ID NO: 2659914 - RNA, 19 nt, Human
ccccaucucccugccuggc

SEQ ID NO: 2659915 - RNA, 20 nt, Human
ccccauuucccaucugcacc

SEQ ID NO: 2659916 - RNA, 22 nt, Human
ccccauuucccaucugcacccc

SEQ ID NO: 2659917 - RNA, 16 nt, Human
ccccauuucccaucug

SEQ ID NO: 2659918 - RNA, 17 nt, Human
ccccauuucccaucugc

SEQ ID NO: 2659919 - RNA, 18 nt, Human
ccccauuucccaucugca

SEQ ID NO: 2659920 - RNA, 19 nt, Human
ccccauuucccaucugcac

SEQ ID NO: 2659921 - RNA, 19 nt, Human
cccccaaagauagacaggu

SEQ ID NO: 2659922 - RNA, 24 nt, Human
cccccaaagauagacagguccuga

SEQ ID NO: 2659923 - RNA, 13 nt, Human
ccccaaacaguga

SEQ ID NO: 2659924 - RNA, 14 nt, Human
ccccgcuucugccu

SEQ ID NO: 2659925 - RNA, 15 nt, Human
ccccggagggcugcg

SEQ ID NO: 2659926 - RNA, 21 nt, Human
ccccggcaugagacucagugc

SEQ ID NO: 2659927 - RNA, 23 nt, Human
ccccggcaugagacucagugcag

SEQ ID NO: 2659928 - RNA, 13 nt, Human
ccccgacuccagc

SEQ ID NO: 2659929 - RNA, 14 nt, Human
ccccgacuccagcc

SEQ ID NO: 2659930 - RNA, 15 nt, Human
ccccgacuccagcca

SEQ ID NO: 2659931 - RNA, 16 nt, Human
ccccgacuccagccag

SEQ ID NO: 2659932 - RNA, 17 nt, Human
ccccgacuccagccagc

SEQ ID NO: 2659933 - RNA, 18 nt, Human
ccccgacuccagccagcg

SEQ ID NO: 2659934 - RNA, 13 nt, Human
ccccgcugcugug

SEQ ID NO: 2659935 - RNA, 18 nt, Human
cccuauuagagaagagau

SEQ ID NO: 2659936 - RNA, 14 nt, Human
cccgggagcggagg

SEQ ID NO: 2659937 - RNA, 18 nt, Human
cccggcucuacgggggcc

SEQ ID NO: 2659938 - RNA, 20 nt, Human
cccggcucuacgggggccgc

SEQ ID NO: 2659939 - RNA, 16 nt, Human
cccggcugcagaggcc

SEQ ID NO: 2659940 - RNA, 20 nt, Human
cccggcaugagacucagugc

SEQ ID NO: 2659941 - RNA, 23 nt, Human
cccggcaugagacucagugcaga

SEQ ID NO: 2659942 - RNA, 20 nt, Human
ccccuuguuugucccuucua

SEQ ID NO: 2659943 - RNA, 12 nt, Human
ccccucuggucg

SEQ ID NO: 2659944 - RNA, 23 nt, Human
ccccucuggucgcuccugcccac

SEQ ID NO: 2659945 - RNA, 19 nt, Human
ccccucuggucgcuccugc

SEQ ID NO: 2659946 - RNA, 20 nt, Human
ccccucuggucgcuccugcc

SEQ ID NO: 2659947 - RNA, 20 nt, Human
ccaugacaauguuguagugu

SEQ ID NO: 2659948 - RNA, 16 nt, Human
ccauggugauggugua

SEQ ID NO: 2659949 - RNA, 20 nt, Human
ccauggugaugguguagccc

SEQ ID NO: 2659950 - RNA, 13 nt, Human
ccauguccaaaga

SEQ ID NO: 2659951 - RNA, 14 nt, Human
ccauguccaaagag

SEQ ID NO: 2659952 - RNA, 17 nt, Human
ccauguccaaagaggcu

SEQ ID NO: 2659953 - RNA, 15 nt, Human
ccauguaagcacucu

SEQ ID NO: 2659954 - RNA, 20 nt, Human
ccauguccaaagaggcugcc

SEQ ID NO: 2659955 - RNA, 18 nt, Human
ccauguccaaagaggcug

SEQ ID NO: 2659956 - RNA, 19 nt, Human
ccauguccaaagaggcugc

SEQ ID NO: 2659957 - RNA, 12 nt, Human
ccaguucaaaaa

SEQ ID NO: 2659958 - RNA, 18 nt, Human
ccagggucccucugugua

SEQ ID NO: 2659959 - RNA, 16 nt, Human
ccagggucccucugug

SEQ ID NO: 2659960 - RNA, 17 nt, Human
ccagggucccucugugu

SEQ ID NO: 2659961 - RNA, 16 nt, Human
ccaggcaccucuuccu

SEQ ID NO: 2659962 - RNA, 19 nt, Human
ccaggggaaaaucagccug

SEQ ID NO: 2659963 - RNA, 20 nt, Human
ccaggggaaaaucagccugc

SEQ ID NO: 2659964 - RNA, 13 nt, Human
ccagggguuucuc

SEQ ID NO: 2659965 - RNA, 18 nt, Human
ccaggcucguggacugag

SEQ ID NO: 2659966 - RNA, 20 nt, Human
ccaggcucguggacugagug

SEQ ID NO: 2659967 - RNA, 21 nt, Human
ccaggcucguggacugagugg

SEQ ID NO: 2659968 - RNA, 23 nt, Human
ccaggcucguggacugaguggga

SEQ ID NO: 2659969 - RNA, 18 nt, Human
ccagagugcugaaggaau

SEQ ID NO: 2659970 - RNA, 16 nt, Human
ccaccuagaacacuaa

SEQ ID NO: 2659971 - RNA, 18 nt, Human
ccaccuagaacacuaacu

SEQ ID NO: 2659972 - RNA, 19 nt, Human
ccaccuagaacacuaacuc

SEQ ID NO: 2659973 - RNA, 14 nt, Human
ccagccccucuggu

SEQ ID NO: 2659974 - RNA, 15 nt, Human
ccagccccucugguc

SEQ ID NO: 2659975 - RNA, 17 nt, Human
ccagccccucuggucgc

SEQ ID NO: 2659976 - RNA, 22 nt, Human
ccagccccucuggucgcuccug

SEQ ID NO: 2659977 - RNA, 23 nt, Human
ccagccccucuggucgcuccugc

SEQ ID NO: 2659978 - RNA, 15 nt, Human
ccagccccucuuccc

SEQ ID NO: 2659979 - RNA, 17 nt, Human
ccagccccucuucccca

SEQ ID NO: 2659980 - RNA, 16 nt, Human
ccagcuguucagcugg

SEQ ID NO: 2659981 - RNA, 17 nt, Human
ccagcuguucagcuggu

SEQ ID NO: 2659982 - RNA, 19 nt, Human
ccagcuuaaaggggcuaga

SEQ ID NO: 2659983 - RNA, 23 nt, Human
ccaggaaacuccacaucugccuu

SEQ ID NO: 2659984 - RNA, 19 nt, Human
ccaggaacagcaaaugcaa

SEQ ID NO: 2659985 - RNA, 18 nt, Human
ccaggaacagcaaaugca

SEQ ID NO: 2659986 - RNA, 18 nt, Human
ccagcagcagcaggugau

SEQ ID NO: 2659987 - RNA, 14 nt, Human
ccagcagcagcagg

SEQ ID NO: 2659988 - RNA, 15 nt, Human
ccagcagcagcaggu

SEQ ID NO: 2659989 - RNA, 13 nt, Human
ccugcuggggauc

SEQ ID NO: 2659990 - RNA, 21 nt, Human
ccugcuggggauccccgccug

SEQ ID NO: 2659991 - RNA, 23 nt, Human
ccugcuggggauccccgccuggc

SEQ ID NO: 2659992 - RNA, 22 nt, Human
ccuggaucuaccagcauaaaua

SEQ ID NO: 2659993 - RNA, 16 nt, Human
ccuggaucuaccagca

SEQ ID NO: 2659994 - RNA, 16 nt, Human
ccuggauagacgaguu

SEQ ID NO: 2659995 - RNA, 22 nt, Human
ccuggaguguaugacugcacau

SEQ ID NO: 2659996 - RNA, 12 nt, Human
ccucucucucug

SEQ ID NO: 2659997 - RNA, 13 nt, Human
ccucugcucccca

SEQ ID NO: 2659998 - RNA, 14 nt, Human
ccucugcuccccag

SEQ ID NO: 2659999 - RNA, 21 nt, Human
ccucugccugccccgccccca

SEQ ID NO: 2660000 - RNA, 12 nt, Human
ccucugccugcc

SEQ ID NO: 2660001 - RNA, 13 nt, Human
ccucugccugccc

SEQ ID NO: 2660002 - RNA, 16 nt, Human
ccucugccugccccgc

SEQ ID NO: 2660003 - RNA, 11 nt, Human
ccucugccugc

SEQ ID NO: 2660004 - RNA, 12 nt, Human
ccugacuggugc

SEQ ID NO: 2660005 - RNA, 13 nt, Human
ccugacuggugcu

SEQ ID NO: 2660006 - RNA, 16 nt, Human
ccucuuguaaagacug

SEQ ID NO: 2660007 - RNA, 17 nt, Human
ccucuuguaaagacugg

SEQ ID NO: 2660008 - RNA, 20 nt, Human
ccucuugaccaggcugccuc

SEQ ID NO: 2660009 - RNA, 15 nt, Human
ccucuugaccaggcu

SEQ ID NO: 2660010 - RNA, 17 nt, Human
ccugagaggcaggcaua

SEQ ID NO: 2660011 - RNA, 18 nt, Human
ccugagaggcaggcauag

SEQ ID NO: 2660012 - RNA, 12 nt, Human
ccugagaggcag

SEQ ID NO: 2660013 - RNA, 13 nt, Human
ccugagaggcagg

SEQ ID NO: 2660014 - RNA, 14 nt, Human
ccugagaggcaggc

SEQ ID NO: 2660015 - RNA, 15 nt, Human
ccugagaggcaggca

SEQ ID NO: 2660016 - RNA, 14 nt, Human
ccucuugucugauu

SEQ ID NO: 2660017 - RNA, 13 nt, Human
ccucauguggcug

SEQ ID NO: 2660018 - RNA, 15 nt, Human
ccucauguggcugga

SEQ ID NO: 2660019 - RNA, 16 nt, Human
ccucauguggcuggaa

SEQ ID NO: 2660020 - RNA, 17 nt, Human
ccucauguggcuggaag

SEQ ID NO: 2660021 - RNA, 11 nt, Human
ccuccaagccu

SEQ ID NO: 2660022 - RNA, 18 nt, Human
ccucauuagcauuuugcu

SEQ ID NO: 2660023 - RNA, 18 nt, Human
ccucauguggcuggaaga

SEQ ID NO: 2660024 - RNA, 23 nt, Human
ccucauguggcuggaagauccug

SEQ ID NO: 2660025 - RNA, 18 nt, Human
ccucccacacccaaagcu

SEQ ID NO: 2660026 - RNA, 19 nt, Human
ccucccacacccaaagcug

SEQ ID NO: 2660027 - RNA, 22 nt, Human
ccucccacacccaaagcugagc

SEQ ID NO: 2660028 - RNA, 16 nt, Human
ccucccaggaagccca

SEQ ID NO: 2660029 - RNA, 17 nt, Human
ccucccaggaagcccag

SEQ ID NO: 2660030 - RNA, 18 nt, Human
ccucccaggaagcccagg

SEQ ID NO: 2660031 - RNA, 20 nt, Human
ccucccaggaagcccaggag

SEQ ID NO: 2660032 - RNA, 21 nt, Human
ccucccaggaagcccaggagc

SEQ ID NO: 2660033 - RNA, 15 nt, Human
ccuauuucaucacaa

SEQ ID NO: 2660034 - RNA, 16 nt, Human
ccuauuuccagaaaua

SEQ ID NO: 2660035 - RNA, 20 nt, Human
ccucaaccucuucuggcuca

SEQ ID NO: 2660036 - RNA, 17 nt, Human
ccucaaccucuucuggc

SEQ ID NO: 2660037 - RNA, 12 nt, Human
ccucaaccucuu

SEQ ID NO: 2660038 - RNA, 20 nt, Human
ccguaucuccggcucccagc

SEQ ID NO: 2660039 - RNA, 22 nt, Human
ccguaucuccggcucccagccu

SEQ ID NO: 2660040 - RNA, 13 nt, Human
ccgucaccaccac

SEQ ID NO: 2660041 - RNA, 15 nt, Human
ccgucaccaccaccc

SEQ ID NO: 2660042 - RNA, 16 nt, Human
ccgucaccaccacccc

SEQ ID NO: 2660043 - RNA, 17 nt, Human
ccgucaccaccaccccu

SEQ ID NO: 2660044 - RNA, 20 nt, Human
ccgucaccaccaccccuacc

SEQ ID NO: 2660045 - RNA, 22 nt, Human
ccgucaccaccaccccuaccac

SEQ ID NO: 2660046 - RNA, 20 nt, Human
ccgucuccaggggcugcuuc

SEQ ID NO: 2660047 - RNA, 21 nt, Human
ccgucuccaggggcugcuucc

SEQ ID NO: 2660048 - RNA, 21 nt, Human
ccuaagaucucgguuugccaa

SEQ ID NO: 2660049 - RNA, 21 nt, Human
ccuaaggcaucuaucugugcu

SEQ ID NO: 2660050 - RNA, 23 nt, Human
ccuaaggcaucuaucugugcuag

SEQ ID NO: 2660051 - RNA, 13 nt, Human
ccuagcacagcag

SEQ ID NO: 2660052 - RNA, 15 nt, Human
ccuagcacagcagcu

SEQ ID NO: 2660053 - RNA, 16 nt, Human
ccuagcacagcagcuu

SEQ ID NO: 2660054 - RNA, 15 nt, Human
cccuucucuuaguua

SEQ ID NO: 2660055 - RNA, 17 nt, Human
ccgaccagaggagccuu

SEQ ID NO: 2660056 - RNA, 18 nt, Human
ccgaccagaggagccuuu

SEQ ID NO: 2660057 - RNA, 19 nt, Human
ccgccaccgcggguguggg

SEQ ID NO: 2660058 - RNA, 18 nt, Human
ccgccagccuccucugga

SEQ ID NO: 2660059 - RNA, 23 nt, Human
ccgccagccuccucuggacggca

SEQ ID NO: 2660060 - RNA, 11 nt, Human
ccgccagccuc

SEQ ID NO: 2660061 - RNA, 12 nt, Human
ccgccagccucc

SEQ ID NO: 2660062 - RNA, 13 nt, Human
ccgccagccuccu

SEQ ID NO: 2660063 - RNA, 14 nt, Human
ccgccagccuccuc

SEQ ID NO: 2660064 - RNA, 15 nt, Human
ccgccagccuccucu

SEQ ID NO: 2660065 - RNA, 17 nt, Human
ccgccaaggcuggggga

SEQ ID NO: 2660066 - RNA, 21 nt, Human
ccgacccaggguucccgcggg

SEQ ID NO: 2660067 - RNA, 14 nt, Human
ccgcccccuccuga

SEQ ID NO: 2660068 - RNA, 19 nt, Human
ccgcccccaguccccaccc

SEQ ID NO: 2660069 - RNA, 19 nt, Human
ccgcccaugcacuggggac

SEQ ID NO: 2660070 - RNA, 13 nt, Human
ccgcccccagucc

SEQ ID NO: 2660071 - RNA, 13 nt, Human
ccgcccaugcacu

SEQ ID NO: 2660072 - RNA, 14 nt, Human
ccgcccaugcacug

SEQ ID NO: 2660073 - RNA, 16 nt, Human
ccgccaugcuccuggc

SEQ ID NO: 2660074 - RNA, 21 nt, Human
cccuggccucugugccuucuu

SEQ ID NO: 2660075 - RNA, 22 nt, Human
cccuggcugcugcccccacccc

SEQ ID NO: 2660076 - RNA, 22 nt, Human
cccuggcuguucugugguuccu

SEQ ID NO: 2660077 - RNA, 15 nt, Human
cccuggcugcugccc

SEQ ID NO: 2660078 - RNA, 18 nt, Human
cccuggcugcugccccca

SEQ ID NO: 2660079 - RNA, 14 nt, Human
cccuggcugccggc

SEQ ID NO: 2660080 - RNA, 13 nt, Human
cccuggcugcugc

SEQ ID NO: 2660081 - RNA, 14 nt, Human
cccuggcugcugcc

SEQ ID NO: 2660082 - RNA, 18 nt, Human
cccucacccccucccacc

SEQ ID NO: 2660083 - RNA, 14 nt, Human
cgcccuuuuccccu

SEQ ID NO: 2660084 - RNA, 20 nt, Human
cgccgauagagggacggcca

SEQ ID NO: 2660085 - RNA, 16 nt, Human
cgccaaggcuggggga

SEQ ID NO: 2660086 - RNA, 13 nt, Human
cgccaaggcuggg

SEQ ID NO: 2660087 - RNA, 12 nt, Human
cgccaaggcugg

SEQ ID NO: 2660088 - RNA, 12 nt, Human
cgccgccucuuu

SEQ ID NO: 2660089 - RNA, 15 nt, Human
cgccggaucugaggg

SEQ ID NO: 2660090 - RNA, 14 nt, Human
cgccgugggcugcg

SEQ ID NO: 2660091 - RNA, 15 nt, Human
cgccgucuccagggg

SEQ ID NO: 2660092 - RNA, 16 nt, Human
cgaccagaggagccuu

SEQ ID NO: 2660093 - RNA, 21 nt, Human
cgaccaccgccccuggccgcg

SEQ ID NO: 2660094 - RNA, 17 nt, Human
cgaccagaggagccuuu

SEQ ID NO: 2660095 - RNA, 14 nt, Human
cgaccauguggcca

SEQ ID NO: 2660096 - RNA, 16 nt, Human
cgaccauguggccaca

SEQ ID NO: 2660097 - RNA, 17 nt, Human
ccuuuuuaaaacacaug

SEQ ID NO: 2660098 - RNA, 13 nt, Human
cgaccuggccgcg

SEQ ID NO: 2660099 - RNA, 19 nt, Human
cgaccuggccgcggagccu

SEQ ID NO: 2660100 - RNA, 16 nt, Human
cggagguguggagccg

SEQ ID NO: 2660101 - RNA, 13 nt, Human
cgccgccaccgcg

SEQ ID NO: 2660102 - RNA, 13 nt, Human
cgccucccuccac

SEQ ID NO: 2660103 - RNA, 15 nt, Human
cgccucccuccaccc

SEQ ID NO: 2660104 - RNA, 18 nt, Human
cgccucccuccaccccag

SEQ ID NO: 2660105 - RNA, 20 nt, Human
cgccucccuccaccccagga

SEQ ID NO: 2660106 - RNA, 17 nt, Human
cgccuccccaccuccag

SEQ ID NO: 2660107 - RNA, 18 nt, Human
cgccuccccaccuccagg

SEQ ID NO: 2660108 - RNA, 19 nt, Human
cgccuccccaccuccaggc

SEQ ID NO: 2660109 - RNA, 16 nt, Human
cgccuccccugcccca

SEQ ID NO: 2660110 - RNA, 15 nt, Human
cgccucuccucgguu

SEQ ID NO: 2660111 - RNA, 23 nt, Human
cgacauggcuccggccucugccu

SEQ ID NO: 2660112 - RNA, 13 nt, Human
ccuuuuguuuucu

SEQ ID NO: 2660113 - RNA, 15 nt, Human
ccuuuuuaaaacaca

SEQ ID NO: 2660114 - RNA, 19 nt, Human
ccuuuucgccuuuccucuc

SEQ ID NO: 2660115 - RNA, 15 nt, Human
ccuuuucuggcaccg

SEQ ID NO: 2660116 - RNA, 22 nt, Human
ccuuuucuggggaaagacacug

SEQ ID NO: 2660117 - RNA, 17 nt, Human
ccuuuucgccuuuccuc

SEQ ID NO: 2660118 - RNA, 18 nt, Human
ccuuucccccuucucuua

SEQ ID NO: 2660119 - RNA, 20 nt, Human
ccuuuccccgacgcccaccc

SEQ ID NO: 2660120 - RNA, 19 nt, Human
ccuuuccaccacagccagc

SEQ ID NO: 2660121 - RNA, 23 nt, Human
ccuuuccaccacagccagcaccu

SEQ ID NO: 2660122 - RNA, 16 nt, Human
ccuuggacauccuccu

SEQ ID NO: 2660123 - RNA, 17 nt, Human
ccuuggacauccuccuc

SEQ ID NO: 2660124 - RNA, 23 nt, Human
ccuugccuccccauuucccaucu

SEQ ID NO: 2660125 - RNA, 12 nt, Human
ccuugccucccc

SEQ ID NO: 2660126 - RNA, 14 nt, Human
ccuugccuccccau

SEQ ID NO: 2660127 - RNA, 17 nt, Human
ccuugccuccccauuuc

SEQ ID NO: 2660128 - RNA, 22 nt, Human
ccuugccuccccauuucccauc

SEQ ID NO: 2660129 - RNA, 14 nt, Human
ccuggccucugugc

SEQ ID NO: 2660130 - RNA, 15 nt, Human
cuaauugguacuuuu

SEQ ID NO: 2660131 - RNA, 19 nt, Human
cuaauugguacuuuuaaaa

SEQ ID NO: 2660132 - RNA, 21 nt, Human
cuaauugguacuuuuaaaaac

SEQ ID NO: 2660133 - RNA, 13 nt, Human
cuaauuuuuuugu

SEQ ID NO: 2660134 - RNA, 18 nt, Human
cuaauuuuuguauuauuu

SEQ ID NO: 2660135 - RNA, 19 nt, Human
cuaauuuuuguauuauuuu

SEQ ID NO: 2660136 - RNA, 21 nt, Human
cuacaugaggaacuguagaug

SEQ ID NO: 2660137 - RNA, 13 nt, Human
cuacaguugaaaa

SEQ ID NO: 2660138 - RNA, 21 nt, Human
cgugugagaagugaaugcugg

SEQ ID NO: 2660139 - RNA, 23 nt, Human
cgugugagaagugaaugcuggga

SEQ ID NO: 2660140 - RNA, 22 nt, Human
cgugugagaagugaaugcuggg

SEQ ID NO: 2660141 - RNA, 15 nt, Human
cuaaagagcccuugc

SEQ ID NO: 2660142 - RNA, 16 nt, Human
cuaaagagcccuugcc

SEQ ID NO: 2660143 - RNA, 17 nt, Human
cuaaagagcccuugccu

SEQ ID NO: 2660144 - RNA, 18 nt, Human
cuaaagagcccuugccuc

SEQ ID NO: 2660145 - RNA, 15 nt, Human
cgugugccugugugc

SEQ ID NO: 2660146 - RNA, 19 nt, Human
cguggguccugaggccugc

SEQ ID NO: 2660147 - RNA, 15 nt, Human
cguggggcagggagc

SEQ ID NO: 2660148 - RNA, 16 nt, Human
cguggggcagggagcu

SEQ ID NO: 2660149 - RNA, 22 nt, Human
cguggggcagggagcugggccc

SEQ ID NO: 2660150 - RNA, 23 nt, Human
cguggggcagggagcugggcccg

SEQ ID NO: 2660151 - RNA, 16 nt, Human
cgugggggggcgugga

SEQ ID NO: 2660152 - RNA, 15 nt, Human
cguggggugugcugg

SEQ ID NO: 2660153 - RNA, 17 nt, Human
cguggggugugcuggga

SEQ ID NO: 2660154 - RNA, 18 nt, Human
cguggggugugcugggag

SEQ ID NO: 2660155 - RNA, 22 nt, Human
cggagguugcagugagcugaga

SEQ ID NO: 2660156 - RNA, 13 nt, Human
cggcucugcaguc

SEQ ID NO: 2660157 - RNA, 11 nt, Human
cggcugaccau

SEQ ID NO: 2660158 - RNA, 14 nt, Human
cggcugaccaugcu

SEQ ID NO: 2660159 - RNA, 15 nt, Human
cggcugaccaugcuc

SEQ ID NO: 2660160 - RNA, 16 nt, Human
cggcugaccaugcuca

SEQ ID NO: 2660161 - RNA, 22 nt, Human
cggcugaccaugcucaucugcu

SEQ ID NO: 2660162 - RNA, 23 nt, Human
cggcugaccaugcucaucugcug

SEQ ID NO: 2660163 - RNA, 15 nt, Human
cgugacccgaccugg

SEQ ID NO: 2660164 - RNA, 18 nt, Human
cgugacccgaccuggccg

SEQ ID NO: 2660165 - RNA, 20 nt, Human
cgugaccggacuuuucugca

SEQ ID NO: 2660166 - RNA, 23 nt, Human
cuaaagagcccuugccuccccau

SEQ ID NO: 2660167 - RNA, 19 nt, Human
cuaaagagcccuugccucc

SEQ ID NO: 2660168 - RNA, 20 nt, Human
cuaaagagcccuugccuccc

SEQ ID NO: 2660169 - RNA, 21 nt, Human
cuaaagagcccuugccucccc

SEQ ID NO: 2660170 - RNA, 22 nt, Human
cuaaagagcccuugccucccca

SEQ ID NO: 2660171 - RNA, 13 nt, Human
cuaacuguaaauc

SEQ ID NO: 2660172 - RNA, 14 nt, Human
cuaacuguaaauca

SEQ ID NO: 2660173 - RNA, 15 nt, Human
cuaacuguaaaucau

SEQ ID NO: 2660174 - RNA, 17 nt, Human
cuaacuguaaaucaugu

SEQ ID NO: 2660175 - RNA, 18 nt, Human
cuaacuguaaaucauguu

SEQ ID NO: 2660176 - RNA, 20 nt, Human
cuaacgaaauaucaaaguca

SEQ ID NO: 2660177 - RNA, 17 nt, Human
cuaagaaaagccuaauc

SEQ ID NO: 2660178 - RNA, 22 nt, Human
cuaagaaaagccuaaucacagu

SEQ ID NO: 2660179 - RNA, 23 nt, Human
cuagcagcagggagggcuucugc

SEQ ID NO: 2660180 - RNA, 19 nt, Human
cuagcagcccacccugcug

SEQ ID NO: 2660181 - RNA, 20 nt, Human
cuagcagcccacccugcugc

SEQ ID NO: 2660182 - RNA, 23 nt, Human
cuagcagcccacccugcugcugg

SEQ ID NO: 2660183 - RNA, 16 nt, Human
cuagaacacuaacuca

SEQ ID NO: 2660184 - RNA, 22 nt, Human
cuagcagcagggagggcuucug

SEQ ID NO: 2660185 - RNA, 12 nt, Human
cuagcagcaggg

SEQ ID NO: 2660186 - RNA, 20 nt, Human
cuagaaauugacacaagugg

SEQ ID NO: 2660187 - RNA, 16 nt, Human
cuagaaauugacacaa

SEQ ID NO: 2660188 - RNA, 12 nt, Human
cuagaaauuuuc

SEQ ID NO: 2660189 - RNA, 13 nt, Human
cuagaaauuuuca

SEQ ID NO: 2660190 - RNA, 19 nt, Human
cuagaaauuccccacccug

SEQ ID NO: 2660191 - RNA, 22 nt, Human
cuaguucuuuguucauagccca

SEQ ID NO: 2660192 - RNA, 12 nt, Human
cuaguugaauac

SEQ ID NO: 2660193 - RNA, 18 nt, Human
cuaguugaauacuugaac

SEQ ID NO: 2660194 - RNA, 17 nt, Human
cuaguugaauacuugaa

SEQ ID NO: 2660195 - RNA, 15 nt, Human
cuaguugaauacuug

SEQ ID NO: 2660196 - RNA, 13 nt, Human
cuaguugaauacu

SEQ ID NO: 2660197 - RNA, 23 nt, Human
cuaguugaauacuugaaccauaa

SEQ ID NO: 2660198 - RNA, 21 nt, Human
cuaguugaauacuugaaccau

SEQ ID NO: 2660199 - RNA, 20 nt, Human
cuaguugaauacuugaacca

SEQ ID NO: 2660200 - RNA, 20 nt, Human
cuagccugaugagauuuuua

SEQ ID NO: 2660201 - RNA, 16 nt, Human
cuagccgguuccuguc

SEQ ID NO: 2660202 - RNA, 15 nt, Human
cuagccgguuccugu

SEQ ID NO: 2660203 - RNA, 19 nt, Human
cuagccgguuccugucccu

SEQ ID NO: 2660204 - RNA, 19 nt, Human
cuagggaaaaaccagcgug

SEQ ID NO: 2660205 - RNA, 21 nt, Human
cuagggaaaaaccagcgugug

SEQ ID NO: 2660206 - RNA, 16 nt, Human
cuagggccuuggaaau

SEQ ID NO: 2660207 - RNA, 17 nt, Human
cucccacccggcugcag

SEQ ID NO: 2660208 - RNA, 19 nt, Human
cucccacccggcugcagag

SEQ ID NO: 2660209 - RNA, 14 nt, Human
cuccccgcuucugc

SEQ ID NO: 2660210 - RNA, 15 nt, Human
cucccugcagaugcc

SEQ ID NO: 2660211 - RNA, 16 nt, Human
cucccugcagaugcca

SEQ ID NO: 2660212 - RNA, 23 nt, Human
cucccugcagaugccacccuagc

SEQ ID NO: 2660213 - RNA, 14 nt, Human
cucccuccuccagg

SEQ ID NO: 2660214 - RNA, 15 nt, Human
cucccuccuccaggc

SEQ ID NO: 2660215 - RNA, 16 nt, Human
cucccuccuccaggcc

SEQ ID NO: 2660216 - RNA, 21 nt, Human
cuccgcugccgugccgccugc

SEQ ID NO: 2660217 - RNA, 22 nt, Human
cuccaggggcugcuuccuccug

SEQ ID NO: 2660218 - RNA, 23 nt, Human
cuccaggggcugcuuccuccugg

SEQ ID NO: 2660219 - RNA, 17 nt, Human
cuauccccaucucccug

SEQ ID NO: 2660220 - RNA, 18 nt, Human
cuauccccaucucccugc

SEQ ID NO: 2660221 - RNA, 19 nt, Human
cuauccccaucucccugcc

SEQ ID NO: 2660222 - RNA, 20 nt, Human
cuauccccaucucccugccu

SEQ ID NO: 2660223 - RNA, 21 nt, Human
cuauccccaucucccugccug

SEQ ID NO: 2660224 - RNA, 22 nt, Human
cuauccccaucucccugccugg

SEQ ID NO: 2660225 - RNA, 23 nt, Human
cuauccccaucucccugccuggc

SEQ ID NO: 2660226 - RNA, 18 nt, Human
cucagccucccaaguaac

SEQ ID NO: 2660227 - RNA, 19 nt, Human
cucagccuucagacagaga

SEQ ID NO: 2660228 - RNA, 16 nt, Human
cucagccuucagacag

SEQ ID NO: 2660229 - RNA, 17 nt, Human
cucagccuucagacaga

SEQ ID NO: 2660230 - RNA, 15 nt, Human
cucagccuucagaca

SEQ ID NO: 2660231 - RNA, 16 nt, Human
cucagcgcggcccucc

SEQ ID NO: 2660232 - RNA, 14 nt, Human
cucagcgcggcccu

SEQ ID NO: 2660233 - RNA, 20 nt, Human
cuccaaauggagaagcugca

SEQ ID NO: 2660234 - RNA, 21 nt, Human
cuccaaauggagaagcugcag

SEQ ID NO: 2660235 - RNA, 22 nt, Human
cuccaaauggagaagcugcagg

SEQ ID NO: 2660236 - RNA, 12 nt, Human
cuccaacccugc

SEQ ID NO: 2660237 - RNA, 13 nt, Human
cuccaacccugcc

SEQ ID NO: 2660238 - RNA, 14 nt, Human
cuccaacccugccg

SEQ ID NO: 2660239 - RNA, 15 nt, Human
cuccaacccugccgu

SEQ ID NO: 2660240 - RNA, 22 nt, Human
cuccaacccugccgucaccacc

SEQ ID NO: 2660241 - RNA, 23 nt, Human
cuccaacccugccgucaccacca

SEQ ID NO: 2660242 - RNA, 22 nt, Human
cucaguggguuaacaucaguuu

SEQ ID NO: 2660243 - RNA, 15 nt, Human
cucagugcccuccag

SEQ ID NO: 2660244 - RNA, 16 nt, Human
cucagugcccuccagc

SEQ ID NO: 2660245 - RNA, 22 nt, Human
cucagugcauuugugcuagaaa

SEQ ID NO: 2660246 - RNA, 22 nt, Human
cucuccuaacugccagcccccu

SEQ ID NO: 2660247 - RNA, 17 nt, Human
cucuccuacucggcucu

SEQ ID NO: 2660248 - RNA, 18 nt, Human
cucuccuacucggcucug

SEQ ID NO: 2660249 - RNA, 19 nt, Human
cucuccuacucggcucugc

SEQ ID NO: 2660250 - RNA, 16 nt, Human
cucuccggggccauuu

SEQ ID NO: 2660251 - RNA, 21 nt, Human
cucuccggggccauuugcaau

SEQ ID NO: 2660252 - RNA, 23 nt, Human
cucuccccagguccagcucugga

SEQ ID NO: 2660253 - RNA, 18 nt, Human
cucuccccagguccagcu

SEQ ID NO: 2660254 - RNA, 20 nt, Human
cucuccccagguccagcucu

SEQ ID NO: 2660255 - RNA, 15 nt, Human
cucuccccaggucca

SEQ ID NO: 2660256 - RNA, 16 nt, Human
cucuccccagguccag

SEQ ID NO: 2660257 - RNA, 14 nt, Human
cucuauuaaaaugc

SEQ ID NO: 2660258 - RNA, 17 nt, Human
cucuauuuauguuugca

SEQ ID NO: 2660259 - RNA, 16 nt, Human
cucuauuuauguuugc

SEQ ID NO: 2660260 - RNA, 14 nt, Human
cucuauuugagaau

SEQ ID NO: 2660261 - RNA, 14 nt, Human
cucucaaguaauau

SEQ ID NO: 2660262 - RNA, 15 nt, Human
cuccguuagcuccug

SEQ ID NO: 2660263 - RNA, 16 nt, Human
cuccguuagcuccugu

SEQ ID NO: 2660264 - RNA, 16 nt, Human
cucugucacccuuguc

SEQ ID NO: 2660265 - RNA, 19 nt, Human
cucugucacccuuguccuu

SEQ ID NO: 2660266 - RNA, 11 nt, Human
cucuguacuuu

SEQ ID NO: 2660267 - RNA, 12 nt, Human
cucuguacuuuu

SEQ ID NO: 2660268 - RNA, 20 nt, Human
cucuguacuuuucauucucu

SEQ ID NO: 2660269 - RNA, 22 nt, Human
cucuguacuuuucauucucuuu

SEQ ID NO: 2660270 - RNA, 14 nt, Human
cucugcacccagaa

SEQ ID NO: 2660271 - RNA, 15 nt, Human
cucugcacccagaac

SEQ ID NO: 2660272 - RNA, 16 nt, Human
cucugcacccagaaca

SEQ ID NO: 2660273 - RNA, 17 nt, Human
cucugcacccagaacag

SEQ ID NO: 2660274 - RNA, 23 nt, Human
cucugcuauauauaaaacggugc

SEQ ID NO: 2660275 - RNA, 15 nt, Human
cucugcgucuauccu

SEQ ID NO: 2660276 - RNA, 21 nt, Human
cucugcgucuauccuguguag

SEQ ID NO: 2660277 - RNA, 21 nt, Human
cucugcucaccgcccaucagg

SEQ ID NO: 2660278 - RNA, 22 nt, Human
cucugcucaccgcccaucaggg

SEQ ID NO: 2660279 - RNA, 14 nt, Human
cugaaggaaaaaca

SEQ ID NO: 2660280 - RNA, 16 nt, Human
cugaaggaaaaacaca

SEQ ID NO: 2660281 - RNA, 17 nt, Human
cugaaggaaaaacacaa

SEQ ID NO: 2660282 - RNA, 11 nt, Human
cugaaggaaaa

SEQ ID NO: 2660283 - RNA, 18 nt, Human
cugaaggaaaaacacaag

SEQ ID NO: 2660284 - RNA, 21 nt, Human
cugaaggaaaaacacaagcaa

SEQ ID NO: 2660285 - RNA, 22 nt, Human
cugaaggaaaaacacaagcaaa

SEQ ID NO: 2660286 - RNA, 22 nt, Human
cugaaaacaauggaguauucuc

SEQ ID NO: 2660287 - RNA, 16 nt, Human
cugacagaaggugcca

SEQ ID NO: 2660288 - RNA, 21 nt, Human
cugacagaaggugccacuuua

SEQ ID NO: 2660289 - RNA, 15 nt, Human
gcugcagaggccaga

SEQ ID NO: 2660290 - RNA, 18 nt, Human
gcugcagaggccagaggc

SEQ ID NO: 2660291 - RNA, 22 nt, Human
gcugcagaggccagaggccccc

SEQ ID NO: 2660292 - RNA, 17 nt, Human
gcugcaggacuugagaa

SEQ ID NO: 2660293 - RNA, 20 nt, Human
gcugcaggcuuugccauugu

SEQ ID NO: 2660294 - RNA, 15 nt, Human
gcugcacccucaggc

SEQ ID NO: 2660295 - RNA, 13 nt, Human
gcugcacccucag

SEQ ID NO: 2660296 - RNA, 18 nt, Human
gcugcagagauuucucau

SEQ ID NO: 2660297 - RNA, 13 nt, Human
gcugcagagcagu

SEQ ID NO: 2660298 - RNA, 16 nt, Human
gcugcacccucaggca

SEQ ID NO: 2660299 - RNA, 13 nt, Human
gcugagguuccuc

SEQ ID NO: 2660300 - RNA, 16 nt, Human
gcugagguuccucugc

SEQ ID NO: 2660301 - RNA, 17 nt, Human
gcugagguuccucugcc

SEQ ID NO: 2660302 - RNA, 18 nt, Human
gcugagguuccucugccu

SEQ ID NO: 2660303 - RNA, 19 nt, Human
gcugagguuccucugccug

SEQ ID NO: 2660304 - RNA, 20 nt, Human
gcugagguuccucugccugc

SEQ ID NO: 2660305 - RNA, 21 nt, Human
gcugagguuccucugccugcc

SEQ ID NO: 2660306 - RNA, 22 nt, Human
gcugagguuccucugccugccc

SEQ ID NO: 2660307 - RNA, 23 nt, Human
gcugagguuccucugccugcccc

SEQ ID NO: 2660308 - RNA, 15 nt, Human
gcugaggugggagga

SEQ ID NO: 2660309 - RNA, 17 nt, Human
gcugaggccugggccgc

SEQ ID NO: 2660310 - RNA, 20 nt, Human
gcugaggccugggccgcugc

SEQ ID NO: 2660311 - RNA, 23 nt, Human
gcugaggccugggccgcugccac

SEQ ID NO: 2660312 - RNA, 22 nt, Human
gcugcugugcaacggucuccug

SEQ ID NO: 2660313 - RNA, 12 nt, Human
gcugcugugaag

SEQ ID NO: 2660314 - RNA, 20 nt, Human
gcugcuccgaggacccagga

SEQ ID NO: 2660315 - RNA, 13 nt, Human
gcugcucccuggc

SEQ ID NO: 2660316 - RNA, 21 nt, Human
gcugcugggggcaacuggcca

SEQ ID NO: 2660317 - RNA, 22 nt, Human
gcugcugggggcaacuggccau

SEQ ID NO: 2660318 - RNA, 15 nt, Human
gcugcuggugcacag

SEQ ID NO: 2660319 - RNA, 17 nt, Human
gcugcuggugcacagcc

SEQ ID NO: 2660320 - RNA, 21 nt, Human
gcuggagcacugggcucccgg

SEQ ID NO: 2660321 - RNA, 18 nt, Human
gcuggagcacugggcucc

SEQ ID NO: 2660322 - RNA, 16 nt, Human
gcuggagcacugggcu

SEQ ID NO: 2660323 - RNA, 15 nt, Human
gcuggagcacugggc

SEQ ID NO: 2660324 - RNA, 14 nt, Human
gcuggagcacuggg

SEQ ID NO: 2660325 - RNA, 19 nt, Human
gcuccagcaacacagccug

SEQ ID NO: 2660326 - RNA, 22 nt, Human
gcuccagcaacacagccugggc

SEQ ID NO: 2660327 - RNA, 16 nt, Human
gcucccaggggucucc

SEQ ID NO: 2660328 - RNA, 18 nt, Human
gcucccaggggucucccu

SEQ ID NO: 2660329 - RNA, 19 nt, Human
gcucccaggggucucccug

SEQ ID NO: 2660330 - RNA, 20 nt, Human
gcucccaggggucucccugg

SEQ ID NO: 2660331 - RNA, 21 nt, Human
gcucccaggggucucccuggc

SEQ ID NO: 2660332 - RNA, 22 nt, Human
gcucccaggggucucccuggcu

SEQ ID NO: 2660333 - RNA, 23 nt, Human
gcuccagcaacacagccugggcc

SEQ ID NO: 2660334 - RNA, 21 nt, Human
gcuccagcgaucucuccacug

SEQ ID NO: 2660335 - RNA, 19 nt, Human
gcucuaucgcccaggcugg

SEQ ID NO: 2660336 - RNA, 17 nt, Human
gcucuaugcuuuccaaa

SEQ ID NO: 2660337 - RNA, 18 nt, Human
gcucucaaguuaucaggg

SEQ ID NO: 2660338 - RNA, 13 nt, Human
gcucuacgggggc

SEQ ID NO: 2660339 - RNA, 14 nt, Human
gcucucuuugcaac

SEQ ID NO: 2660340 - RNA, 12 nt, Human
gcugaaaacaau

SEQ ID NO: 2660341 - RNA, 14 nt, Human
gcucugugcaguca

SEQ ID NO: 2660342 - RNA, 19 nt, Human
gcucugugcagucacugga

SEQ ID NO: 2660343 - RNA, 21 nt, Human
gcucugugcagucacuggagg

SEQ ID NO: 2660344 - RNA, 24 nt, Human
gcucuguggaugccagggccgacc

SEQ ID NO: 2660345 - RNA, 17 nt, Human
gcugaauacagaggcaa

SEQ ID NO: 2660346 - RNA, 16 nt, Human
gcugaagaauugaaaa

SEQ ID NO: 2660347 - RNA, 19 nt, Human
gcugaaguugcagauguua

SEQ ID NO: 2660348 - RNA, 20 nt, Human
gcugagccucugcuccccag

SEQ ID NO: 2660349 - RNA, 12 nt, Human
gcugagccugca

SEQ ID NO: 2660350 - RNA, 15 nt, Human
gcugagccugcaggg

SEQ ID NO: 2660351 - RNA, 16 nt, Human
gcugagccugcaggga

SEQ ID NO: 2660352 - RNA, 19 nt, Human
gcugagccugcagggaagc

SEQ ID NO: 2660353 - RNA, 20 nt, Human
gcugagccugcagggaagcc

SEQ ID NO: 2660354 - RNA, 19 nt, Human
gcugagccucugcucccca

SEQ ID NO: 2660355 - RNA, 13 nt, Human
gcugagccucugc

SEQ ID NO: 2660356 - RNA, 13 nt, Human
gcugaggccuggg

SEQ ID NO: 2660357 - RNA, 14 nt, Human
gcugaggccugggc

SEQ ID NO: 2660358 - RNA, 15 nt, Human
gcugaggccugggcc

SEQ ID NO: 2660359 - RNA, 16 nt, Human
gcugaggccugggccg

SEQ ID NO: 2660360 - RNA, 18 nt, Human
gcuguacgacacgggugg

SEQ ID NO: 2660361 - RNA, 16 nt, Human
gcuuaaugcuacaugu

SEQ ID NO: 2660362 - RNA, 18 nt, Human
gcuuaaugcuacauguga

SEQ ID NO: 2660363 - RNA, 18 nt, Human
gcuuaauggaguucuugu

SEQ ID NO: 2660364 - RNA, 13 nt, Human
gcuguuuuuuugu

SEQ ID NO: 2660365 - RNA, 19 nt, Human
gcuguugcuuaaaccacuu

SEQ ID NO: 2660366 - RNA, 17 nt, Human
gcuguuuguccugagau

SEQ ID NO: 2660367 - RNA, 20 nt, Human
gcuuccugcguccuccucac

SEQ ID NO: 2660368 - RNA, 11 nt, Human
gcuugaagcca

SEQ ID NO: 2660369 - RNA, 12 nt, Human
gcuugaagccaa

SEQ ID NO: 2660370 - RNA, 14 nt, Human
gcuugaagccaaag

SEQ ID NO: 2660371 - RNA, 15 nt, Human
gcuugaagccaaaga

SEQ ID NO: 2660372 - RNA, 16 nt, Human
gcuugaagccaaagaa

SEQ ID NO: 2660373 - RNA, 11 nt, Human
gcuugaagcug

SEQ ID NO: 2660374 - RNA, 18 nt, Human
gcuugaagccaaagaaaa

SEQ ID NO: 2660375 - RNA, 20 nt, Human
gcuugaagccaaagaaaaau

SEQ ID NO: 2660376 - RNA, 20 nt, Human
gcuugaccaggcuuggccuu

SEQ ID NO: 2660377 - RNA, 15 nt, Human
gcuuucugccaucua

SEQ ID NO: 2660378 - RNA, 14 nt, Human
gcuuucuggggccu

SEQ ID NO: 2660379 - RNA, 17 nt, Human
gcuuucuggggccuagc

SEQ ID NO: 2660380 - RNA, 23 nt, Human
gcuuucuggggccuagcgaucuc

SEQ ID NO: 2660381 - RNA, 19 nt, Human
gcuuucuccuuuaauugua

SEQ ID NO: 2660382 - RNA, 14 nt, Human
gcuugaccugaggc

SEQ ID NO: 2660383 - RNA, 15 nt, Human
gcuugguucugugaa

SEQ ID NO: 2660384 - RNA, 21 nt, Human
gcuuucccacuucccacccug

SEQ ID NO: 2660385 - RNA, 22 nt, Human
gcuuucccacuucccacccugc

SEQ ID NO: 2660386 - RNA, 14 nt, Human
gcuuuucugcccug

SEQ ID NO: 2660387 - RNA, 15 nt, Human
gcuuuucugcccugg

SEQ ID NO: 2660388 - RNA, 11 nt, Human
gcuuuuggcaa

SEQ ID NO: 2660389 - RNA, 17 nt, Human
gcuuuuuuguuuuggcu

SEQ ID NO: 2660390 - RNA, 16 nt, Human
gcuuuuuguguuuuuu

SEQ ID NO: 2660391 - RNA, 21 nt, Human
gcuuuuccuuggcauuccgca

SEQ ID NO: 2660392 - RNA, 18 nt, Human
gcuuuuggggagccagaa

SEQ ID NO: 2660393 - RNA, 15 nt, Human
gcuuugaucccugac

SEQ ID NO: 2660394 - RNA, 14 nt, Human
gcuuugaucccuga

SEQ ID NO: 2660395 - RNA, 13 nt, Human
ggaagaagggaga

SEQ ID NO: 2660396 - RNA, 14 nt, Human
ggaagaagggagaa

SEQ ID NO: 2660397 - RNA, 15 nt, Human
ggaagaagggagaag

SEQ ID NO: 2660398 - RNA, 16 nt, Human
ggaagaagggagaaga

SEQ ID NO: 2660399 - RNA, 16 nt, Human
ggaagacaaugugaaa

SEQ ID NO: 2660400 - RNA, 14 nt, Human
ggaagacaauguga

SEQ ID NO: 2660401 - RNA, 15 nt, Human
ggaagaacaggccuc

SEQ ID NO: 2660402 - RNA, 23 nt, Human
ggaacaaguugagcuaugacuua

SEQ ID NO: 2660403 - RNA, 13 nt, Human
ggaacaaguugag

SEQ ID NO: 2660404 - RNA, 15 nt, Human
ggaacaaauuauuuu

SEQ ID NO: 2660405 - RNA, 18 nt, Human
ggaaauguuuuguaaaca

SEQ ID NO: 2660406 - RNA, 16 nt, Human
ggaaauuccuguacug

SEQ ID NO: 2660407 - RNA, 23 nt, Human
ggaaauuuuacaagggcauaaag

SEQ ID NO: 2660408 - RNA, 22 nt, Human
ggaaaccgaguagaaaauguga

SEQ ID NO: 2660409 - RNA, 15 nt, Human
ggaagaaacugcuga

SEQ ID NO: 2660410 - RNA, 18 nt, Human
ggaagaagggagaagaaa

SEQ ID NO: 2660411 - RNA, 11 nt, Human
ggaagaaugaa

SEQ ID NO: 2660412 - RNA, 13 nt, Human
ggaagaaugaaag

SEQ ID NO: 2660413 - RNA, 16 nt, Human
ggaagaaugaaagcug

SEQ ID NO: 2660414 - RNA, 22 nt, Human
gccauagaguacacugccugcc

SEQ ID NO: 2660415 - RNA, 17 nt, Human
gccauagaguacacugc

SEQ ID NO: 2660416 - RNA, 19 nt, Human
gccauagaguacacugccu

SEQ ID NO: 2660417 - RNA, 18 nt, Human
gccauagaguacacugcc

SEQ ID NO: 2660418 - RNA, 14 nt, Human
gccaggccagccuc

SEQ ID NO: 2660419 - RNA, 15 nt, Human
gccaggccagccucc

SEQ ID NO: 2660420 - RNA, 12 nt, Human
gccaggccagcc

SEQ ID NO: 2660421 - RNA, 13 nt, Human
gccaggccagccu

SEQ ID NO: 2660422 - RNA, 14 nt, Human
gccaggcaggggug

SEQ ID NO: 2660423 - RNA, 15 nt, Human
gccaggcaggggugg

SEQ ID NO: 2660424 - RNA, 16 nt, Human
gccaggcagggguggg

SEQ ID NO: 2660425 - RNA, 17 nt, Human
gccaggcaggggugggg

SEQ ID NO: 2660426 - RNA, 19 nt, Human
gccaggccagccuccgaga

SEQ ID NO: 2660427 - RNA, 14 nt, Human
gcccaggagccuca

SEQ ID NO: 2660428 - RNA, 15 nt, Human
gcccaggagccucac

SEQ ID NO: 2660429 - RNA, 18 nt, Human
gcccaggagccucacugg

SEQ ID NO: 2660430 - RNA, 16 nt, Human
gccaugugcuucugcc

SEQ ID NO: 2660431 - RNA, 19 nt, Human
gccauacauaaaagaaaua

SEQ ID NO: 2660432 - RNA, 23 nt, Human
gccauguggaaggcaagccaggc

SEQ ID NO: 2660433 - RNA, 19 nt, Human
gccccaaucccuuuauuac

SEQ ID NO: 2660434 - RNA, 18 nt, Human
gccccaaucccuuuauua

SEQ ID NO: 2660435 - RNA, 12 nt, Human
gccccacccugg

SEQ ID NO: 2660436 - RNA, 13 nt, Human
gccugcuccagcu

SEQ ID NO: 2660437 - RNA, 14 nt, Human
gccuccacagcgag

SEQ ID NO: 2660438 - RNA, 23 nt, Human
gccugcuagcuagcucaacuagu

SEQ ID NO: 2660439 - RNA, 22 nt, Human
gccugcuagcuagcucaacuag

SEQ ID NO: 2660440 - RNA, 20 nt, Human
gccugcuagcuagcucaacu

SEQ ID NO: 2660441 - RNA, 16 nt, Human
gccugcuagcuagcuc

SEQ ID NO: 2660442 - RNA, 13 nt, Human
gccugcgccugcu

SEQ ID NO: 2660443 - RNA, 16 nt, Human
gccugcgccugcugca

SEQ ID NO: 2660444 - RNA, 14 nt, Human
gccugcgccugcug

SEQ ID NO: 2660445 - RNA, 22 nt, Human
gccugcgccugcugcaugcccu

SEQ ID NO: 2660446 - RNA, 18 nt, Human
gccucauguggcuggaag

SEQ ID NO: 2660447 - RNA, 19 nt, Human
gccucauguggcuggaaga

SEQ ID NO: 2660448 - RNA, 17 nt, Human
gccuccagaacucacug

SEQ ID NO: 2660449 - RNA, 19 nt, Human
gccuccagaacucacuggg

SEQ ID NO: 2660450 - RNA, 12 nt, Human
gccuccacagcg

SEQ ID NO: 2660451 - RNA, 18 nt, Human
gcgagacuccgucucaaa

SEQ ID NO: 2660452 - RNA, 17 nt, Human
gcgacuuucugccugga

SEQ ID NO: 2660453 - RNA, 14 nt, Human
gcgacuuucugccu

SEQ ID NO: 2660454 - RNA, 16 nt, Human
gcgacuuucugccugg

SEQ ID NO: 2660455 - RNA, 17 nt, Human
gcgagggcagcugcuau

SEQ ID NO: 2660456 - RNA, 15 nt, Human
gcgagggcagcugcu

SEQ ID NO: 2660457 - RNA, 16 nt, Human
gcgagggcagcugcua

SEQ ID NO: 2660458 - RNA, 12 nt, Human
gcgagggcagcu

SEQ ID NO: 2660459 - RNA, 13 nt, Human
gcgagggcagcug

SEQ ID NO: 2660460 - RNA, 14 nt, Human
gcgagggcagcugc

SEQ ID NO: 2660461 - RNA, 18 nt, Human
gcgagcaugucguggaca

SEQ ID NO: 2660462 - RNA, 13 nt, Human
gcuacaauuuuaa

SEQ ID NO: 2660463 - RNA, 18 nt, Human
gcuacuguuguaagaauu

SEQ ID NO: 2660464 - RNA, 19 nt, Human
gcuacuguuguaagaauuc

SEQ ID NO: 2660465 - RNA, 16 nt, Human
gcuacuugggaggcug

SEQ ID NO: 2660466 - RNA, 15 nt, Human
gcgugggagccagcc

SEQ ID NO: 2660467 - RNA, 16 nt, Human
gcgugggagccagccu

SEQ ID NO: 2660468 - RNA, 14 nt, Human
gcguggcccaaggc

SEQ ID NO: 2660469 - RNA, 15 nt, Human
gcguggcccaaggcu

SEQ ID NO: 2660470 - RNA, 20 nt, Human
gcguggcccaaggcuggcag

SEQ ID NO: 2660471 - RNA, 23 nt, Human
gcguggcucuaaaagguaaugug

SEQ ID NO: 2660472 - RNA, 13 nt, Human
gcguggugccauc

SEQ ID NO: 2660473 - RNA, 14 nt, Human
gcguggugccaucc

SEQ ID NO: 2660474 - RNA, 19 nt, Human
gcggagguugcagugagcu

SEQ ID NO: 2660475 - RNA, 16 nt, Human
gcggagcuugcaguga

SEQ ID NO: 2660476 - RNA, 21 nt, Human
gcggagguguggagccgaggc

SEQ ID NO: 2660477 - RNA, 16 nt, Human
aaaacauagcaucuca

SEQ ID NO: 2660478 - RNA, 15 nt, Human
aaaacauaacauaaa

SEQ ID NO: 2660479 - RNA, 17 nt, Human
aaaacauaacauaaauu

SEQ ID NO: 2660480 - RNA, 14 nt, Human
aaaacaucauuccu

SEQ ID NO: 2660481 - RNA, 23 nt, Human
aaaacauagaaauggaaauuuug

SEQ ID NO: 2660482 - RNA, 17 nt, Human
aaaacaguguguaaaca

SEQ ID NO: 2660483 - RNA, 20 nt, Human
aaaacaguguguaaacaaaa

SEQ ID NO: 2660484 - RNA, 21 nt, Human
aaaacaucauuccuuuuuauu

SEQ ID NO: 2660485 - RNA, 19 nt, Human
aaaacaucauuccuuuuua

SEQ ID NO: 2660486 - RNA, 21 nt, Human
aaaaccaauguucucucuucu

SEQ ID NO: 2660487 - RNA, 18 nt, Human
aaaaauauauaucuaucu

SEQ ID NO: 2660488 - RNA, 12 nt, Human
aaaacucuacuu

SEQ ID NO: 2660489 - RNA, 15 nt, Human
aaaacucuacuuaau

SEQ ID NO: 2660490 - RNA, 22 nt, Human
aaaacugcugacuguuuucucu

SEQ ID NO: 2660491 - RNA, 18 nt, Human
aaaacucuacuuaaucca

SEQ ID NO: 2660492 - RNA, 19 nt, Human
aaaacucuacuuaauccaa

SEQ ID NO: 2660493 - RNA, 20 nt, Human
aaaacugcugacuguuuucu

SEQ ID NO: 2660494 - RNA, 13 nt, Human
aaaagaugcuucu

SEQ ID NO: 2660495 - RNA, 23 nt, Human
aaaacugcugacuguuuucucuu

SEQ ID NO: 2660496 - RNA, 16 nt, Human
aaaacuggaccuguau

SEQ ID NO: 2660497 - RNA, 19 nt, Human
aaaacuggaccuguauauu

SEQ ID NO: 2660498 - RNA, 18 nt, Human
aaaacucaggcaaagaaa

SEQ ID NO: 2660499 - RNA, 23 nt, Human
aaaacucaggcaaagaaaaugaa

SEQ ID NO: 2660500 - RNA, 14 nt, Human
aaaacucacuguga

SEQ ID NO: 2660501 - RNA, 15 nt, Human
aaaacucacugugau

SEQ ID NO: 2660502 - RNA, 14 nt, Human
aaaaccgaauaaau

SEQ ID NO: 2660503 - RNA, 15 nt, Human
aaaaccgaauaaaug

SEQ ID NO: 2660504 - RNA, 18 nt, Human
gggaagcccauccugacc

SEQ ID NO: 2660505 - RNA, 16 nt, Human
gggaagagauccaaag

SEQ ID NO: 2660506 - RNA, 17 nt, Human
gggaagagauccaaaga

SEQ ID NO: 2660507 - RNA, 19 nt, Human
gggaagagauccaaagacu

SEQ ID NO: 2660508 - RNA, 19 nt, Human
gggaagcccauccugacca

SEQ ID NO: 2660509 - RNA, 22 nt, Human
aaaaauauaaaauuaugagauu

SEQ ID NO: 2660510 - RNA, 17 nt, Human
aaaaauagugucuuugu

SEQ ID NO: 2660511 - RNA, 22 nt, Human
gggacagaguagccagguucug

SEQ ID NO: 2660512 - RNA, 13 nt, Human
aaaaauauuuucu

SEQ ID NO: 2660513 - RNA, 22 nt, Human
aaaaauauuuucucuguacuuu

SEQ ID NO: 2660514 - RNA, 11 nt, Human
aaaaauauugu

SEQ ID NO: 2660515 - RNA, 12 nt, Human
aaaaauauuguu

SEQ ID NO: 2660516 - RNA, 23 nt, Human
aaaaauauuguuucugcauucau

SEQ ID NO: 2660517 - RNA, 11 nt, Human
aaaaauauauu

SEQ ID NO: 2660518 - RNA, 16 nt, Human
aaaaauaucaaauuaa

SEQ ID NO: 2660519 - RNA, 15 nt, Human
aaaaauaucaaauua

SEQ ID NO: 2660520 - RNA, 14 nt, Human
aaaaauaucaaauu

SEQ ID NO: 2660521 - RNA, 15 nt, Human
gggcagccucccccg

SEQ ID NO: 2660522 - RNA, 18 nt, Human
gggcagccucccccggcu

SEQ ID NO: 2660523 - RNA, 15 nt, Human
gggcagggagcuggg

SEQ ID NO: 2660524 - RNA, 18 nt, Human
gggcagggagcugggccc

SEQ ID NO: 2660525 - RNA, 19 nt, Human
gggcagggagcugggcccg

SEQ ID NO: 2660526 - RNA, 20 nt, Human
gggcagggagcugggcccga

SEQ ID NO: 2660527 - RNA, 11 nt, Human
gggcagggagc

SEQ ID NO: 2660528 - RNA, 16 nt, Human
gggcaggcugggccau

SEQ ID NO: 2660529 - RNA, 14 nt, Human
gggcaggcugggcc

SEQ ID NO: 2660530 - RNA, 15 nt, Human
gggcaggcugggcca

SEQ ID NO: 2660531 - RNA, 12 nt, Human
gggcaggcuggg

SEQ ID NO: 2660532 - RNA, 13 nt, Human
gggcaggcugggc

SEQ ID NO: 2660533 - RNA, 19 nt, Human
gggaggccaaggugggagg

SEQ ID NO: 2660534 - RNA, 20 nt, Human
gggaggcggagcuugcagug

SEQ ID NO: 2660535 - RNA, 14 nt, Human
gggaggccccaggg

SEQ ID NO: 2660536 - RNA, 15 nt, Human
gggaggccgaggcgg

SEQ ID NO: 2660537 - RNA, 12 nt, Human
gggagacagcau

SEQ ID NO: 2660538 - RNA, 13 nt, Human
aaaagcagacauu

SEQ ID NO: 2660539 - RNA, 15 nt, Human
aaaagcaaugguuga

SEQ ID NO: 2660540 - RNA, 20 nt, Human
aaaagcaaguacucuggagc

SEQ ID NO: 2660541 - RNA, 16 nt, Human
aaaagaugguaucaua

SEQ ID NO: 2660542 - RNA, 15 nt, Human
aaaagcacuccugcu

SEQ ID NO: 2660543 - RNA, 14 nt, Human
aaaagcagacauuu

SEQ ID NO: 2660544 - RNA, 22 nt, Human
gggagaagaaaggugaguuuga

SEQ ID NO: 2660545 - RNA, 15 nt, Human
gggaggucgaggcag

SEQ ID NO: 2660546 - RNA, 19 nt, Human
gggaggucgaggcaggagg

SEQ ID NO: 2660547 - RNA, 18 nt, Human
gggaggucgaggcaggag

SEQ ID NO: 2660548 - RNA, 17 nt, Human
gggaggucgaggcagga

SEQ ID NO: 2660549 - RNA, 22 nt, Human
aaaaugaauaucuauuaauaua

SEQ ID NO: 2660550 - RNA, 18 nt, Human
aaaaugaauaucuauuaa

SEQ ID NO: 2660551 - RNA, 16 nt, Human
aaaaugaagaauuuaa

SEQ ID NO: 2660552 - RNA, 15 nt, Human
aaaaugaagaauuua

SEQ ID NO: 2660553 - RNA, 14 nt, Human
aaaaugaauaucua

SEQ ID NO: 2660554 - RNA, 14 nt, Human
aaaaugaaaugcau

SEQ ID NO: 2660555 - RNA, 16 nt, Human
aaaaugaaaugcauau

SEQ ID NO: 2660556 - RNA, 18 nt, Human
aaaaugaaaugcauauuu

SEQ ID NO: 2660557 - RNA, 14 nt, Human
aaaaugaagaauuu

SEQ ID NO: 2660558 - RNA, 11 nt, Human
aaaaugaagaa

SEQ ID NO: 2660559 - RNA, 12 nt, Human
aaaaugaaaaau

SEQ ID NO: 2660560 - RNA, 15 nt, Human
aaaaugaaaauugua

SEQ ID NO: 2660561 - RNA, 16 nt, Human
aaaaugaaaauuguau

SEQ ID NO: 2660562 - RNA, 16 nt, Human
aaaaucuuuugaagca

SEQ ID NO: 2660563 - RNA, 23 nt, Human
aaaaugagcucgcauuugucaau

SEQ ID NO: 2660564 - RNA, 21 nt, Human
aaaaugagccuggcaagaaug

SEQ ID NO: 2660565 - RNA, 14 nt, Human
aaaaugagccuggc

SEQ ID NO: 2660566 - RNA, 18 nt, Human
aaaaguagaacuuuguau

SEQ ID NO: 2660567 - RNA, 17 nt, Human
aaaaguagaacuuugua

SEQ ID NO: 2660568 - RNA, 16 nt, Human
aaaaguauaaaauagu

SEQ ID NO: 2660569 - RNA, 20 nt, Human
aaaaguagaacuuuguauag

SEQ ID NO: 2660570 - RNA, 20 nt, Human
aaaaucuguugauaaaucca

SEQ ID NO: 2660571 - RNA, 21 nt, Human
aaaaucuguugauaaauccau

SEQ ID NO: 2660572 - RNA, 18 nt, Human
aaaaugcuccccacagcg

SEQ ID NO: 2660573 - RNA, 22 nt, Human
gggccagucuguggaucagaga

SEQ ID NO: 2660574 - RNA, 17 nt, Human
gggcggcaggggccugg

SEQ ID NO: 2660575 - RNA, 21 nt, Human
gggcggcaggggccuggagau

SEQ ID NO: 2660576 - RNA, 14 nt, Human
gggccuccagaacu

SEQ ID NO: 2660577 - RNA, 16 nt, Human
gggccguaucuccggc

SEQ ID NO: 2660578 - RNA, 24 nt, Human
gggccguaucuccggcucccagcc

SEQ ID NO: 2660579 - RNA, 23 nt, Human
gggccguaucuccggcucccagc

SEQ ID NO: 2660580 - RNA, 20 nt, Human
gggccguaucuccggcuccc

SEQ ID NO: 2660581 - RNA, 19 nt, Human
gggccguaucuccggcucc

SEQ ID NO: 2660582 - RNA, 20 nt, Human
gggccuagcgaucucuccug

SEQ ID NO: 2660583 - RNA, 21 nt, Human
gggccuagcgaucucuccugg

SEQ ID NO: 2660584 - RNA, 23 nt, Human
gggccuagcgaucucuccuggcc

SEQ ID NO: 2660585 - RNA, 17 nt, Human
gggccaugcugaggccu

SEQ ID NO: 2660586 - RNA, 15 nt, Human
gggcccugggcugga

SEQ ID NO: 2660587 - RNA, 14 nt, Human
gggccgacuaagag

SEQ ID NO: 2660588 - RNA, 13 nt, Human
gggccgaccagag

SEQ ID NO: 2660589 - RNA, 20 nt, Human
gggccgaccagaggagccuu

SEQ ID NO: 2660590 - RNA, 14 nt, Human
gggccaugcugagg

SEQ ID NO: 2660591 - RNA, 15 nt, Human
gggccaugcugaggc

SEQ ID NO: 2660592 - RNA, 15 nt, Human
aaacaguguguaaac

SEQ ID NO: 2660593 - RNA, 17 nt, Human
aaacaguguguaaacaa

SEQ ID NO: 2660594 - RNA, 13 nt, Human
aaacagugacugu

SEQ ID NO: 2660595 - RNA, 19 nt, Human
aaacaccaacauguuggga

SEQ ID NO: 2660596 - RNA, 20 nt, Human
aaacacccgacgucauguau

SEQ ID NO: 2660597 - RNA, 19 nt, Human
aaacaagcaaguucugaga

SEQ ID NO: 2660598 - RNA, 19 nt, Human
ggggccuggagauccuccu

SEQ ID NO: 2660599 - RNA, 19 nt, Human
ggggccaccaaagcugccc

SEQ ID NO: 2660600 - RNA, 18 nt, Human
ggggccaccaaagcugcc

SEQ ID NO: 2660601 - RNA, 14 nt, Human
ggggccaccaaagc

SEQ ID NO: 2660602 - RNA, 19 nt, Human
ggggcauugaguauuguuu

SEQ ID NO: 2660603 - RNA, 17 nt, Human
ggggcaugaccagaugc

SEQ ID NO: 2660604 - RNA, 15 nt, Human
ggggcaugaccagau

SEQ ID NO: 2660605 - RNA, 15 nt, Human
aaacaugagaugugu

SEQ ID NO: 2660606 - RNA, 16 nt, Human
aaacaucauuccuuuu

SEQ ID NO: 2660607 - RNA, 18 nt, Human
aaacaucauuccuuuuua

SEQ ID NO: 2660608 - RNA, 20 nt, Human
aaacaucauuccuuuuuauu

SEQ ID NO: 2660609 - RNA, 19 nt, Human
aaacaucauuccuuuuuau

SEQ ID NO: 2660610 - RNA, 22 nt, Human
aaacaucauuccuuuuuauuua

SEQ ID NO: 2660611 - RNA, 21 nt, Human
aaacaucauuccuuuuuauuu

SEQ ID NO: 2660612 - RNA, 13 nt, Human
aaaauuuguugca

SEQ ID NO: 2660613 - RNA, 14 nt, Human
aaaauuuguugcau

SEQ ID NO: 2660614 - RNA, 12 nt, Human
aaaauuugaagu

SEQ ID NO: 2660615 - RNA, 19 nt, Human
aaaauuugacuaauuuuac

SEQ ID NO: 2660616 - RNA, 11 nt, Human
aaaauguguuc

SEQ ID NO: 2660617 - RNA, 13 nt, Human
aaaaugugacccu

SEQ ID NO: 2660618 - RNA, 15 nt, Human
aaaaugugacccucc

SEQ ID NO: 2660619 - RNA, 18 nt, Human
aaaaugugagugguugaa

SEQ ID NO: 2660620 - RNA, 20 nt, Human
aaaaugugagugguugaaua

SEQ ID NO: 2660621 - RNA, 14 nt, Human
gggcuggcuccuga

SEQ ID NO: 2660622 - RNA, 18 nt, Human
gggcucagcaaaagaugc

SEQ ID NO: 2660623 - RNA, 10 nt, Human
gggcucagca

SEQ ID NO: 2660624 - RNA, 14 nt, Human
gggcucacacaccu

SEQ ID NO: 2660625 - RNA, 17 nt, Human
aaauaaguauuuauaau

SEQ ID NO: 2660626 - RNA, 15 nt, Human
aaauaaguauuuaua

SEQ ID NO: 2660627 - RNA, 22 nt, Human
aaauaaguauuuauaauagcaa

SEQ ID NO: 2660628 - RNA, 14 nt, Human
aaauaaguauuuau

SEQ ID NO: 2660629 - RNA, 12 nt, Human
aaauaaguauuu

SEQ ID NO: 2660630 - RNA, 22 nt, Human
aaauaaggauuuuucucuuauu

SEQ ID NO: 2660631 - RNA, 21 nt, Human
aaauaaaaaagcucuuuuaau

SEQ ID NO: 2660632 - RNA, 20 nt, Human
aaauaagcccccucaacuac

SEQ ID NO: 2660633 - RNA, 17 nt, Human
aaaguuuuauaugcuuu

SEQ ID NO: 2660634 - RNA, 13 nt, Human
aaaguuuuguaaa

SEQ ID NO: 2660635 - RNA, 16 nt, Human
aaaguuuuguaaaaga

SEQ ID NO: 2660636 - RNA, 18 nt, Human
aaaguuuuguaaaagaaa

SEQ ID NO: 2660637 - RNA, 12 nt, Human
aaaguuuuguug

SEQ ID NO: 2660638 - RNA, 14 nt, Human
aaaguuuuguugua

SEQ ID NO: 2660639 - RNA, 23 nt, Human
aaaguuuuguuguacuuaaaugg

SEQ ID NO: 2660640 - RNA, 14 nt, Human
aaaguuuuuguuug

SEQ ID NO: 2660641 - RNA, 19 nt, Human
aaauaaugaauacauuucc

SEQ ID NO: 2660642 - RNA, 13 nt, Human
aaauaaugcuaca

SEQ ID NO: 2660643 - RNA, 19 nt, Human
aaauaaugcuacaauuuua

SEQ ID NO: 2660644 - RNA, 20 nt, Human
aaauaaugcuacaauuuuaa

SEQ ID NO: 2660645 - RNA, 15 nt, Human
guaaagacuggcuuu

SEQ ID NO: 2660646 - RNA, 19 nt, Human
guaaagacuggcuuuuauu

SEQ ID NO: 2660647 - RNA, 14 nt, Human
guaaagacugguuu

SEQ ID NO: 2660648 - RNA, 18 nt, Human
guaaagacugguuuucug

SEQ ID NO: 2660649 - RNA, 19 nt, Human
guaaagacugguuuucugc

SEQ ID NO: 2660650 - RNA, 14 nt, Human
guaaagacuggcuu

SEQ ID NO: 2660651 - RNA, 12 nt, Human
guaaauucugau

SEQ ID NO: 2660652 - RNA, 14 nt, Human
guaaauucugauuu

SEQ ID NO: 2660653 - RNA, 13 nt, Human
guaaauucugauu

SEQ ID NO: 2660654 - RNA, 18 nt, Human
guaaauucugauuucuuu

SEQ ID NO: 2660655 - RNA, 15 nt, Human
guaaauucugauuuc

SEQ ID NO: 2660656 - RNA, 15 nt, Human
guaaaauauuuugaa

SEQ ID NO: 2660657 - RNA, 21 nt, Human
guaaaauauuuugaaucaaua

SEQ ID NO: 2660658 - RNA, 18 nt, Human
guaaaauauuuugaauca

SEQ ID NO: 2660659 - RNA, 19 nt, Human
guaaaauauuuugaaucaa

SEQ ID NO: 2660660 - RNA, 16 nt, Human
guaaaaugaagaauuu

SEQ ID NO: 2660661 - RNA, 14 nt, Human
guaaaaugaagaau

SEQ ID NO: 2660662 - RNA, 17 nt, Human
guaaaaugaagaauuua

SEQ ID NO: 2660663 - RNA, 18 nt, Human
aaagugugagcaaacuaa

SEQ ID NO: 2660664 - RNA, 16 nt, Human
aaaguguguauauauu

SEQ ID NO: 2660665 - RNA, 18 nt, Human
aaaguguguauauauuuu

SEQ ID NO: 2660666 - RNA, 19 nt, Human
aaaguguguauauauuuug

SEQ ID NO: 2660667 - RNA, 20 nt, Human
aaaguguguauauauuuugu

SEQ ID NO: 2660668 - RNA, 21 nt, Human
aaaguguguauauauuuugug

SEQ ID NO: 2660669 - RNA, 23 nt, Human
aaaguguguauauauuuugugug

SEQ ID NO: 2660670 - RNA, 21 nt, Human
gguuugccaaaauucauuucu

SEQ ID NO: 2660671 - RNA, 12 nt, Human
gguuugagaaau

SEQ ID NO: 2660672 - RNA, 15 nt, Human
aaaguuugcuuagaa

SEQ ID NO: 2660673 - RNA, 16 nt, Human
aaaguuugcuuagaaa

SEQ ID NO: 2660674 - RNA, 10 nt, Human
aaaguuuccg

SEQ ID NO: 2660675 - RNA, 13 nt, Human
gguucuggcuguu

SEQ ID NO: 2660676 - RNA, 16 nt, Human
gguuccuccucuccua

SEQ ID NO: 2660677 - RNA, 19 nt, Human
gguuccucaaauuuuuuga

SEQ ID NO: 2660678 - RNA, 12 nt, Human
gguuccucugcc

SEQ ID NO: 2660679 - RNA, 14 nt, Human
gguuccucugccug

SEQ ID NO: 2660680 - RNA, 15 nt, Human
gguuccucugccugc

SEQ ID NO: 2660681 - RNA, 17 nt, Human
gguuccucugccugccc

SEQ ID NO: 2660682 - RNA, 18 nt, Human
gguuccucugccugcccc

SEQ ID NO: 2660683 - RNA, 19 nt, Human
gguucuccguuagcuccug

SEQ ID NO: 2660684 - RNA, 20 nt, Human
gguucuccguuagcuccugu

SEQ ID NO: 2660685 - RNA, 21 nt, Human
gguucuccguuagcuccugug

SEQ ID NO: 2660686 - RNA, 21 nt, Human
gguuucucgcauaggaccuuu

SEQ ID NO: 2660687 - RNA, 20 nt, Human
gguuucucuauuaaaaugca

SEQ ID NO: 2660688 - RNA, 15 nt, Human
gguuucucuguggcu

SEQ ID NO: 2660689 - RNA, 22 nt, Human
gguuucucuguggcuccaggcc

SEQ ID NO: 2660690 - RNA, 21 nt, Human
ggugugcggccuuuggcuuca

SEQ ID NO: 2660691 - RNA, 12 nt, Human
ggugugcuggga

SEQ ID NO: 2660692 - RNA, 19 nt, Human
ggugugcugggagcuccac

SEQ ID NO: 2660693 - RNA, 22 nt, Human
ggugugcugggagcuccacucu

SEQ ID NO: 2660694 - RNA, 21 nt, Human
gguucccuugagggcugcagu

SEQ ID NO: 2660695 - RNA, 20 nt, Human
ggugucuugggcagagcugg

SEQ ID NO: 2660696 - RNA, 15 nt, Human
ggugucuccuuaagc

SEQ ID NO: 2660697 - RNA, 15 nt, Human
ggugugaacccggga

SEQ ID NO: 2660698 - RNA, 16 nt, Human
ggugugaacccgggag

SEQ ID NO: 2660699 - RNA, 17 nt, Human
ggugugaacccgggagc

SEQ ID NO: 2660700 - RNA, 16 nt, Human
gguggggguggaggcu

SEQ ID NO: 2660701 - RNA, 22 nt, Human
ggugggcccggcccgcgccaca

SEQ ID NO: 2660702 - RNA, 20 nt, Human
ggugggaggauugcuugagc

SEQ ID NO: 2660703 - RNA, 10 nt, Human
aaagccuucc

SEQ ID NO: 2660704 - RNA, 22 nt, Human
ggucugugugugugugugugcg

SEQ ID NO: 2660705 - RNA, 14 nt, Human
ggucuuaagaaaug

SEQ ID NO: 2660706 - RNA, 23 nt, Human
ggucuuaagaaauguauaaacuu

SEQ ID NO: 2660707 - RNA, 19 nt, Human
ggucuguuggcaggcuggc

SEQ ID NO: 2660708 - RNA, 20 nt, Human
ggucuguuggcaggcuggcc

SEQ ID NO: 2660709 - RNA, 14 nt, Human
ggugcugugaggga

SEQ ID NO: 2660710 - RNA, 17 nt, Human
ggugcugugagggaggg

SEQ ID NO: 2660711 - RNA, 21 nt, Human
ggucuugaacuccuggacuca

SEQ ID NO: 2660712 - RNA, 19 nt, Human
ggugccacuuuacccaccu

SEQ ID NO: 2660713 - RNA, 16 nt, Human
ggugccacuuuaccca

SEQ ID NO: 2660714 - RNA, 21 nt, Human
aaagcauauggguuagauguu

SEQ ID NO: 2660715 - RNA, 16 nt, Human
aaagcaugaaauguga

SEQ ID NO: 2660716 - RNA, 17 nt, Human
aaagcaugaaaugugaa

SEQ ID NO: 2660717 - RNA, 18 nt, Human
aaagcaugaaaugugaau

SEQ ID NO: 2660718 - RNA, 22 nt, Human
gguggauggccccagcacagcu

SEQ ID NO: 2660719 - RNA, 14 nt, Human
gguggauggcccca

SEQ ID NO: 2660720 - RNA, 15 nt, Human
aaagcaacaaagaaa

SEQ ID NO: 2660721 - RNA, 22 nt, Human
gguccuagaggcccuuugcugu

SEQ ID NO: 2660722 - RNA, 13 nt, Human
gguccucuggagc

SEQ ID NO: 2660723 - RNA, 15 nt, Human
gguccucuggagccc

SEQ ID NO: 2660724 - RNA, 15 nt, Human
ggucggaacccaagc

SEQ ID NO: 2660725 - RNA, 20 nt, Human
ggucgguagguucagccaag

SEQ ID NO: 2660726 - RNA, 15 nt, Human
gguccuaguaagaag

SEQ ID NO: 2660727 - RNA, 12 nt, Human
ggucgcuccugc

SEQ ID NO: 2660728 - RNA, 13 nt, Human
ggucgcuccugcc

SEQ ID NO: 2660729 - RNA, 14 nt, Human
ggucgcuccugccc

SEQ ID NO: 2660730 - RNA, 13 nt, Human
aaagaaugacuau

SEQ ID NO: 2660731 - RNA, 15 nt, Human
aaagaauaugacuuu

SEQ ID NO: 2660732 - RNA, 20 nt, Human
aaagaauaugacuuuuuaua

SEQ ID NO: 2660733 - RNA, 16 nt, Human
aaagaaguauuuuuag

SEQ ID NO: 2660734 - RNA, 18 nt, Human
aaagaauacuauuuccaa

SEQ ID NO: 2660735 - RNA, 13 nt, Human
ggguggggaaagg

SEQ ID NO: 2660736 - RNA, 22 nt, Human
ggguggucucuucuuggggccc

SEQ ID NO: 2660737 - RNA, 15 nt, Human
gggugucuugggcag

SEQ ID NO: 2660738 - RNA, 21 nt, Human
gggugucuugggcagagcugg

SEQ ID NO: 2660739 - RNA, 23 nt, Human
gggugucuugggcagagcuggcu

SEQ ID NO: 2660740 - RNA, 13 nt, Human
gggugugcuggga

SEQ ID NO: 2660741 - RNA, 12 nt, Human
ggguguggcagu

SEQ ID NO: 2660742 - RNA, 11 nt, Human
gggugggccuc

SEQ ID NO: 2660743 - RNA, 13 nt, Human
gggugggccucgg

SEQ ID NO: 2660744 - RNA, 15 nt, Human
ggguggcaccagcag

SEQ ID NO: 2660745 - RNA, 14 nt, Human
gguacaacggaggc

SEQ ID NO: 2660746 - RNA, 16 nt, Human
gguacaacggaggccu

SEQ ID NO: 2660747 - RNA, 20 nt, Human
gguaauacuuccagaagugc

SEQ ID NO: 2660748 - RNA, 14 nt, Human
gggugugggaaagc

SEQ ID NO: 2660749 - RNA, 16 nt, Human
ggguuucucuguggcu

SEQ ID NO: 2660750 - RNA, 18 nt, Human
gguaacuagggaagauaa

SEQ ID NO: 2660751 - RNA, 16 nt, Human
ggauguauggggaauc

SEQ ID NO: 2660752 - RNA, 12 nt, Human
ggcacaggaggc

SEQ ID NO: 2660753 - RNA, 16 nt, Human
ggcacaggaggcaggc

SEQ ID NO: 2660754 - RNA, 20 nt, Human
ggcacaggaggcaggcaugg

SEQ ID NO: 2660755 - RNA, 23 nt, Human
ggcacaggaggcaggcauggccc

SEQ ID NO: 2660756 - RNA, 18 nt, Human
ggauggauuuccagccaa

SEQ ID NO: 2660757 - RNA, 18 nt, Human
ggauggaggaagaacuga

SEQ ID NO: 2660758 - RNA, 13 nt, Human
ggauggccccagc

SEQ ID NO: 2660759 - RNA, 14 nt, Human
ggauggccccagca

SEQ ID NO: 2660760 - RNA, 14 nt, Human
ggauggcuugucua

SEQ ID NO: 2660761 - RNA, 16 nt, Human
ggauggccccagcaca

SEQ ID NO: 2660762 - RNA, 20 nt, Human
ggauaacuuuacagaaaugg

SEQ ID NO: 2660763 - RNA, 22 nt, Human
ggauaaagaauacuauuuccaa

SEQ ID NO: 2660764 - RNA, 18 nt, Human
ggaguuuuuaugagaaac

SEQ ID NO: 2660765 - RNA, 22 nt, Human
ggaguucuaacaaaacaaguug

SEQ ID NO: 2660766 - RNA, 14 nt, Human
ggaggaaggcaaga

SEQ ID NO: 2660767 - RNA, 20 nt, Human
ggaggccaaggugggaggau

SEQ ID NO: 2660768 - RNA, 14 nt, Human
ggaggccccagggg

SEQ ID NO: 2660769 - RNA, 15 nt, Human
ggaggccccaggggg

SEQ ID NO: 2660770 - RNA, 13 nt, Human
ggaggaaggcaag

SEQ ID NO: 2660771 - RNA, 12 nt, Human
ggagcugggccc

SEQ ID NO: 2660772 - RNA, 21 nt, Human
ggagccagcucccucuauuua

SEQ ID NO: 2660773 - RNA, 15 nt, Human
ggagccagccucccu

SEQ ID NO: 2660774 - RNA, 19 nt, Human
ggagcccagcccuccccau

SEQ ID NO: 2660775 - RNA, 16 nt, Human
ggagcccagcccuccc

SEQ ID NO: 2660776 - RNA, 13 nt, Human
ggaggcgcccuug

SEQ ID NO: 2660777 - RNA, 23 nt, Human
ggaggcgcccuuggcuucuguga

SEQ ID NO: 2660778 - RNA, 13 nt, Human
ggaggccgaggcc

SEQ ID NO: 2660779 - RNA, 18 nt, Human
ggaggccgaggccaugug

SEQ ID NO: 2660780 - RNA, 19 nt, Human
ggaggccugcgacccuggg

SEQ ID NO: 2660781 - RNA, 20 nt, Human
ggaggccugcgacccugggg

SEQ ID NO: 2660782 - RNA, 21 nt, Human
ggaggccugcgacccuggggg

SEQ ID NO: 2660783 - RNA, 17 nt, Human
ggaggcccgcagagcgc

SEQ ID NO: 2660784 - RNA, 17 nt, Human
ggagggguguggcagug

SEQ ID NO: 2660785 - RNA, 13 nt, Human
ggaggguaaauaa

SEQ ID NO: 2660786 - RNA, 20 nt, Human
ggaggguaaauaaaccacug

SEQ ID NO: 2660787 - RNA, 13 nt, Human
ggaggucacugga

SEQ ID NO: 2660788 - RNA, 21 nt, Human
ggaggucacuggaaaggggag

SEQ ID NO: 2660789 - RNA, 20 nt, Human
ggaggucaaggcugcaguga

SEQ ID NO: 2660790 - RNA, 17 nt, Human
ggaggucacuggaaagg

SEQ ID NO: 2660791 - RNA, 18 nt, Human
ggaggucgguagguucag

SEQ ID NO: 2660792 - RNA, 20 nt, Human
ggagguggaggcugcaguga

SEQ ID NO: 2660793 - RNA, 17 nt, Human
ggagguggaagaaggga

SEQ ID NO: 2660794 - RNA, 20 nt, Human
ggagguggaagaagggagaa

SEQ ID NO: 2660795 - RNA, 17 nt, Human
ggaggugauuccaguga

SEQ ID NO: 2660796 - RNA, 17 nt, Human
ggcacuggaccccagca

SEQ ID NO: 2660797 - RNA, 16 nt, Human
ggcacuggcgaggaga

SEQ ID NO: 2660798 - RNA, 16 nt, Human
ggcaccagcagccugg

SEQ ID NO: 2660799 - RNA, 15 nt, Human
ggcaccagcagccug

SEQ ID NO: 2660800 - RNA, 22 nt, Human
ggcaucccuuuuucauaaauua

SEQ ID NO: 2660801 - RNA, 21 nt, Human
ggcauagcuccccgcuucugc

SEQ ID NO: 2660802 - RNA, 23 nt, Human
ggccagagagccuggugcugcug

SEQ ID NO: 2660803 - RNA, 22 nt, Human
ggccagagagccuggugcugcu

SEQ ID NO: 2660804 - RNA, 16 nt, Human
ggccagaggcccccag

SEQ ID NO: 2660805 - RNA, 18 nt, Human
ggccagaggcccccagcc

SEQ ID NO: 2660806 - RNA, 15 nt, Human
ggccaugaguaaaau

SEQ ID NO: 2660807 - RNA, 13 nt, Human
ggccccuggcacu

SEQ ID NO: 2660808 - RNA, 15 nt, Human
ggccccacccugggc

SEQ ID NO: 2660809 - RNA, 17 nt, Human
ggccccacccugggccc

SEQ ID NO: 2660810 - RNA, 21 nt, Human
ggccccacccugggcccuggg

SEQ ID NO: 2660811 - RNA, 23 nt, Human
ggccccacccugggcccugggcu

SEQ ID NO: 2660812 - RNA, 23 nt, Human
ggccccacucccuugcuggcccc

SEQ ID NO: 2660813 - RNA, 13 nt, Human
ggccccacccugg

SEQ ID NO: 2660814 - RNA, 18 nt, Human
ggcccauagcagccaguu

SEQ ID NO: 2660815 - RNA, 15 nt, Human
ggcccagugcauggu

SEQ ID NO: 2660816 - RNA, 18 nt, Human
ggcccagugcaugguggc

SEQ ID NO: 2660817 - RNA, 21 nt, Human
ggcccagugcaugguggccag

SEQ ID NO: 2660818 - RNA, 22 nt, Human
ggcccagugcaugguggccaga

SEQ ID NO: 2660819 - RNA, 20 nt, Human
ggccccugggcuuggccugc

SEQ ID NO: 2660820 - RNA, 21 nt, Human
ggccccugggcuuggccugcu

SEQ ID NO: 2660821 - RNA, 22 nt, Human
ggccccugggcuuggccugcug

SEQ ID NO: 2660822 - RNA, 23 nt, Human
ggccccugggcuuggccugcugu

SEQ ID NO: 2660823 - RNA, 12 nt, Human
ggccgaggcggg

SEQ ID NO: 2660824 - RNA, 14 nt, Human
ggccgaggcgggug

SEQ ID NO: 2660825 - RNA, 14 nt, Human
ggcccugugugcag

SEQ ID NO: 2660826 - RNA, 15 nt, Human
ggcccugugugcagg

SEQ ID NO: 2660827 - RNA, 12 nt, Human
ggccgcugccac

SEQ ID NO: 2660828 - RNA, 17 nt, Human
ggccgcugaguggcagg

SEQ ID NO: 2660829 - RNA, 16 nt, Human
ggccgcuccaccagca

SEQ ID NO: 2660830 - RNA, 19 nt, Human
ggccgcuccaccagcauca

SEQ ID NO: 2660831 - RNA, 16 nt, Human
ggcguggcccaaggcu

SEQ ID NO: 2660832 - RNA, 18 nt, Human
ggcgugggagccagccuc

SEQ ID NO: 2660833 - RNA, 14 nt, Human
ggcgucugugugcg

SEQ ID NO: 2660834 - RNA, 17 nt, Human
ggcguccaggccgcgcc

SEQ ID NO: 2660835 - RNA, 15 nt, Human
ggcguggagggaggc

SEQ ID NO: 2660836 - RNA, 17 nt, Human
ggcguggagggaggccc

SEQ ID NO: 2660837 - RNA, 18 nt, Human
ggcguggagggaggcccc

SEQ ID NO: 2660838 - RNA, 19 nt, Human
ggcucagcaaaagaugcuu

SEQ ID NO: 2660839 - RNA, 13 nt, Human
ggcucacugccag

SEQ ID NO: 2660840 - RNA, 14 nt, Human
ggcucacugccagg

SEQ ID NO: 2660841 - RNA, 23 nt, Human
ggcucagcaaaagaugcuucuca

SEQ ID NO: 2660842 - RNA, 20 nt, Human
ggcucagcucggggagccuu

SEQ ID NO: 2660843 - RNA, 15 nt, Human
ggccuguggcugucg

SEQ ID NO: 2660844 - RNA, 10 nt, Human
ggccugcugu

SEQ ID NO: 2660845 - RNA, 19 nt, Human
ggccugcugugauuccacu

SEQ ID NO: 2660846 - RNA, 18 nt, Human
ggccuggagauccuccug

SEQ ID NO: 2660847 - RNA, 11 nt, Human
ggccuggagau

SEQ ID NO: 2660848 - RNA, 14 nt, Human
ggccuggagauccu

SEQ ID NO: 2660849 - RNA, 15 nt, Human
ggccuggagauccuc

SEQ ID NO: 2660850 - RNA, 17 nt, Human
ggccuggagauccuccu

SEQ ID NO: 2660851 - RNA, 14 nt, Human
ggcguacaggcugg

SEQ ID NO: 2660852 - RNA, 16 nt, Human
ggccuuuucuggcacc

SEQ ID NO: 2660853 - RNA, 17 nt, Human
ggccuuuucuggcaccg

SEQ ID NO: 2660854 - RNA, 17 nt, Human
ggccuuuguucuggggg

SEQ ID NO: 2660855 - RNA, 14 nt, Human
ggccuuuggcuuca

SEQ ID NO: 2660856 - RNA, 17 nt, Human
ggcgaccaccgccccug

SEQ ID NO: 2660857 - RNA, 21 nt, Human
ggcgaccaccgccccuggccg

SEQ ID NO: 2660858 - RNA, 20 nt, Human
ggcgacagagcgagacuccg

SEQ ID NO: 2660859 - RNA, 19 nt, Human
ggccuuguccucagccagu

SEQ ID NO: 2660860 - RNA, 13 nt, Human
ggccuuuggcuuc

SEQ ID NO: 2660861 - RNA, 12 nt, Human
ggccuuggaaau

SEQ ID NO: 2660862 - RNA, 20 nt, Human
ggccuccagaacucacuggg

SEQ ID NO: 2660863 - RNA, 15 nt, Human
ggccuccagaacuca

SEQ ID NO: 2660864 - RNA, 19 nt, Human
ggccucauguggcuggaag

SEQ ID NO: 2660865 - RNA, 20 nt, Human
ggccucauguggcuggaaga

SEQ ID NO: 2660866 - RNA, 15 nt, Human
ggccucauguggcug

SEQ ID NO: 2660867 - RNA, 12 nt, Human
ggccggcccugu

SEQ ID NO: 2660868 - RNA, 14 nt, Human
ggccucauguggcu

SEQ ID NO: 2660869 - RNA, 16 nt, Human
ggccucauguggcugg

SEQ ID NO: 2660870 - RNA, 17 nt, Human
ggccucauguggcugga

SEQ ID NO: 2660871 - RNA, 21 nt, Human
ggccggcagccccagccugcu

SEQ ID NO: 2660872 - RNA, 18 nt, Human
ggccggcagccccagccu

SEQ ID NO: 2660873 - RNA, 20 nt, Human
ggccggcagccccagccugc

SEQ ID NO: 2660874 - RNA, 22 nt, Human
gaagugauacuauccaguuacu

SEQ ID NO: 2660875 - RNA, 13 nt, Human
gaagugcuuggaa

SEQ ID NO: 2660876 - RNA, 19 nt, Human
gaagugcuuggaacauacu

SEQ ID NO: 2660877 - RNA, 16 nt, Human
gaagugcccuuccugc

SEQ ID NO: 2660878 - RNA, 22 nt, Human
gaagugcgggguaggggaagaa

SEQ ID NO: 2660879 - RNA, 20 nt, Human
gaagugcuggcaaccacuaa

SEQ ID NO: 2660880 - RNA, 15 nt, Human
gaagugaaugcuggg

SEQ ID NO: 2660881 - RNA, 16 nt, Human
gaagugaaugcuggga

SEQ ID NO: 2660882 - RNA, 17 nt, Human
gaagugaaugcugggac

SEQ ID NO: 2660883 - RNA, 13 nt, Human
gaagggcaaguuu

SEQ ID NO: 2660884 - RNA, 14 nt, Human
gaagggaaaguuuu

SEQ ID NO: 2660885 - RNA, 16 nt, Human
gaagggagaagaaagg

SEQ ID NO: 2660886 - RNA, 21 nt, Human
gaagcugccaggugagaaacu

SEQ ID NO: 2660887 - RNA, 22 nt, Human
gaagcugccaggugagaaacug

SEQ ID NO: 2660888 - RNA, 18 nt, Human
gaagcugcauccagaggc

SEQ ID NO: 2660889 - RNA, 17 nt, Human
gaaaucauguccauaca

SEQ ID NO: 2660890 - RNA, 14 nt, Human
gaaguguauaauau

SEQ ID NO: 2660891 - RNA, 17 nt, Human
gaaguguauaauauaaa

SEQ ID NO: 2660892 - RNA, 21 nt, Human
gaaguguauaauauaaaaaau

SEQ ID NO: 2660893 - RNA, 15 nt, Human
gaaguguauuuauuu

SEQ ID NO: 2660894 - RNA, 19 nt, Human
gacacugaaaguuuuguaa

SEQ ID NO: 2660895 - RNA, 20 nt, Human
gacacugaaaguuuuguaaa

SEQ ID NO: 2660896 - RNA, 14 nt, Human
gacacugccugggc

SEQ ID NO: 2660897 - RNA, 12 nt, Human
gacacugccugg

SEQ ID NO: 2660898 - RNA, 13 nt, Human
gacacugccuggg

SEQ ID NO: 2660899 - RNA, 14 nt, Human
gacagaaggugcca

SEQ ID NO: 2660900 - RNA, 23 nt, Human
gacagaaggugccacuuuaccca

SEQ ID NO: 2660901 - RNA, 17 nt, Human
gacacuguugauaaaaa

SEQ ID NO: 2660902 - RNA, 18 nt, Human
gacacuguugauaaaaac

SEQ ID NO: 2660903 - RNA, 19 nt, Human
gacauuaacaaauaaaaaa

SEQ ID NO: 2660904 - RNA, 18 nt, Human
gacagcuacacagagcuu

SEQ ID NO: 2660905 - RNA, 14 nt, Human
gaaugaggugggag

SEQ ID NO: 2660906 - RNA, 14 nt, Human
gaaugaggaaaauu

SEQ ID NO: 2660907 - RNA, 16 nt, Human
gaaugaggaaaauucu

SEQ ID NO: 2660908 - RNA, 23 nt, Human
gaaugaggaaaauucuuaaaagg

SEQ ID NO: 2660909 - RNA, 23 nt, Human
gaauuuuaaaaucugagggaaau

SEQ ID NO: 2660910 - RNA, 16 nt, Human
gacaaaauauuuccca

SEQ ID NO: 2660911 - RNA, 14 nt, Human
gacaaaagucuguc

SEQ ID NO: 2660912 - RNA, 17 nt, Human
gacaaaagucugucuuu

SEQ ID NO: 2660913 - RNA, 13 nt, Human
gaauuuuuauugu

SEQ ID NO: 2660914 - RNA, 15 nt, Human
gaauuuuuauuguug

SEQ ID NO: 2660915 - RNA, 12 nt, Human
gaauuuuuaagc

SEQ ID NO: 2660916 - RNA, 21 nt, Human
gaauuuugcaaagauuuaauc

SEQ ID NO: 2660917 - RNA, 22 nt, Human
gaauuuugcaaagauuuaaucu

SEQ ID NO: 2660918 - RNA, 18 nt, Human
gagauuucuuguugcuca

SEQ ID NO: 2660919 - RNA, 19 nt, Human
gagauuuuuaaaaaauauu

SEQ ID NO: 2660920 - RNA, 21 nt, Human
gagaugggaaugaggugggag

SEQ ID NO: 2660921 - RNA, 20 nt, Human
gagaugggaaugagguggga

SEQ ID NO: 2660922 - RNA, 18 nt, Human
gagauugcaccacugcac

SEQ ID NO: 2660923 - RNA, 21 nt, Human
gagauugcaccacugcacucc

SEQ ID NO: 2660924 - RNA, 20 nt, Human
gagauguauguuuggcucug

SEQ ID NO: 2660925 - RNA, 12 nt, Human
gagaggcaggca

SEQ ID NO: 2660926 - RNA, 11 nt, Human
gagaggcaggc

SEQ ID NO: 2660927 - RNA, 18 nt, Human
gagaugcaccaccaagcc

SEQ ID NO: 2660928 - RNA, 21 nt, Human
gagaugcaccaccaagccaag

SEQ ID NO: 2660929 - RNA, 15 nt, Human
gagaggcaggcauag

SEQ ID NO: 2660930 - RNA, 21 nt, Human
gagaggcaggcauagaggcuu

SEQ ID NO: 2660931 - RNA, 22 nt, Human
gagcaugguacuuggccuuugg

SEQ ID NO: 2660932 - RNA, 12 nt, Human
gagcauaauuua

SEQ ID NO: 2660933 - RNA, 17 nt, Human
gagcauaauuuaaaaau

SEQ ID NO: 2660934 - RNA, 20 nt, Human
gagcauaauuuaaaaauaua

SEQ ID NO: 2660935 - RNA, 22 nt, Human
gagcauaguccaaaaagcuccu

SEQ ID NO: 2660936 - RNA, 16 nt, Human
gagcauaguccaaaaa

SEQ ID NO: 2660937 - RNA, 22 nt, Human
gagcuggcucugagcgccucca

SEQ ID NO: 2660938 - RNA, 13 nt, Human
gagcugggcccga

SEQ ID NO: 2660939 - RNA, 16 nt, Human
gagcugggcccgacau

SEQ ID NO: 2660940 - RNA, 19 nt, Human
gagcugggcccgacauggc

SEQ ID NO: 2660941 - RNA, 20 nt, Human
gagcugggcccgacauggcu

SEQ ID NO: 2660942 - RNA, 23 nt, Human
gagcugggcccgacauggcuccg

SEQ ID NO: 2660943 - RNA, 18 nt, Human
gagccuuugguucuggcc

SEQ ID NO: 2660944 - RNA, 20 nt, Human
gagccuuuuuaaaacacaug

SEQ ID NO: 2660945 - RNA, 23 nt, Human
gagccuuugguucuggccagaau

SEQ ID NO: 2660946 - RNA, 11 nt, Human
gagcugccuuc

SEQ ID NO: 2660947 - RNA, 13 nt, Human
gagcugccuuccc

SEQ ID NO: 2660948 - RNA, 23 nt, Human
gagcugccuucccuagcuuuaga

SEQ ID NO: 2660949 - RNA, 14 nt, Human
gagcugccuucccu

SEQ ID NO: 2660950 - RNA, 19 nt, Human
gagcugccuucccuagcuu

SEQ ID NO: 2660951 - RNA, 13 nt, Human
gagcuggcucuga

SEQ ID NO: 2660952 - RNA, 17 nt, Human
gagcuggcucugagcgc

SEQ ID NO: 2660953 - RNA, 13 nt, Human
gagcggagguugc

SEQ ID NO: 2660954 - RNA, 13 nt, Human
gacucuggguccu

SEQ ID NO: 2660955 - RNA, 20 nt, Human
gacucuggguccuuccugaa

SEQ ID NO: 2660956 - RNA, 19 nt, Human
gacucuggguccuuccuga

SEQ ID NO: 2660957 - RNA, 18 nt, Human
gacucuggguccuuccug

SEQ ID NO: 2660958 - RNA, 14 nt, Human
gacucuggguccuu

SEQ ID NO: 2660959 - RNA, 17 nt, Human
gacuagcaaucucuuca

SEQ ID NO: 2660960 - RNA, 18 nt, Human
gacuaucugucugguggc

SEQ ID NO: 2660961 - RNA, 13 nt, Human
gacuuuuuauaaa

SEQ ID NO: 2660962 - RNA, 15 nt, Human
gacuuucugccugga

SEQ ID NO: 2660963 - RNA, 21 nt, Human
gacuggguaggaaagaggaag

SEQ ID NO: 2660964 - RNA, 17 nt, Human
gacuggguaggaaagag

SEQ ID NO: 2660965 - RNA, 15 nt, Human
gacugaaaauauugu

SEQ ID NO: 2660966 - RNA, 16 nt, Human
gacugguaaguaacug

SEQ ID NO: 2660967 - RNA, 12 nt, Human
gacuuucugccu

SEQ ID NO: 2660968 - RNA, 14 nt, Human
gacuuucugccugg

SEQ ID NO: 2660969 - RNA, 12 nt, Human
gagaaggaagcc

SEQ ID NO: 2660970 - RNA, 15 nt, Human
gagaagcggcuggca

SEQ ID NO: 2660971 - RNA, 13 nt, Human
gagaagcggcugg

SEQ ID NO: 2660972 - RNA, 16 nt, Human
gagaagcggcuggcag

SEQ ID NO: 2660973 - RNA, 18 nt, Human
gagaagccuucagcucca

SEQ ID NO: 2660974 - RNA, 14 nt, Human
gagaagccuucagc

SEQ ID NO: 2660975 - RNA, 13 nt, Human
gagaagccuucag

SEQ ID NO: 2660976 - RNA, 17 nt, Human
gagaagugaaugcuggg

SEQ ID NO: 2660977 - RNA, 19 nt, Human
gagaagugaaugcugggac

SEQ ID NO: 2660978 - RNA, 20 nt, Human
gagaagugaaugcugggacu

SEQ ID NO: 2660979 - RNA, 17 nt, Human
gcacuugugauuauuua

SEQ ID NO: 2660980 - RNA, 23 nt, Human
gcacuugugauuauuuauuauuu

SEQ ID NO: 2660981 - RNA, 21 nt, Human
gcacuugugauuauuuauuau

SEQ ID NO: 2660982 - RNA, 20 nt, Human
gcacuugugauuauuuauua

SEQ ID NO: 2660983 - RNA, 16 nt, Human
gcacugacugggcaua

SEQ ID NO: 2660984 - RNA, 16 nt, Human
gcagagauuucucauu

SEQ ID NO: 2660985 - RNA, 23 nt, Human
gcagagauuucucauugacuuuu

SEQ ID NO: 2660986 - RNA, 12 nt, Human
gcaauaaaugaa

SEQ ID NO: 2660987 - RNA, 14 nt, Human
gcaauaaauuuuga

SEQ ID NO: 2660988 - RNA, 13 nt, Human
gcaauaaauuuug

SEQ ID NO: 2660989 - RNA, 18 nt, Human
gcaauaaauuuugaaaag

SEQ ID NO: 2660990 - RNA, 16 nt, Human
gcaauaacagcugcaa

SEQ ID NO: 2660991 - RNA, 16 nt, Human
gcaauaaauuuugaaa

SEQ ID NO: 2660992 - RNA, 15 nt, Human
gcaauaaauuuugaa

SEQ ID NO: 2660993 - RNA, 14 nt, Human
gcacaagcugcacc

SEQ ID NO: 2660994 - RNA, 12 nt, Human
gcacaauuugca

SEQ ID NO: 2660995 - RNA, 14 nt, Human
gcacaauuugcacu

SEQ ID NO: 2660996 - RNA, 19 nt, Human
gcacaauuugcacuaaauc

SEQ ID NO: 2660997 - RNA, 13 nt, Human
gcacaugacucgg

SEQ ID NO: 2660998 - RNA, 14 nt, Human
gcagagccuucuca

SEQ ID NO: 2660999 - RNA, 16 nt, Human
gcagagccuucucaga

SEQ ID NO: 2661000 - RNA, 19 nt, Human
gcagagccuucucagaagc

SEQ ID NO: 2661001 - RNA, 23 nt, Human
gcagagccuucucagaagcacag

SEQ ID NO: 2661002 - RNA, 19 nt, Human
gcagagcgcgccccuagcc

SEQ ID NO: 2661003 - RNA, 18 nt, Human
gcagagcgcgccccuagc

SEQ ID NO: 2661004 - RNA, 13 nt, Human
gcagccccagccu

SEQ ID NO: 2661005 - RNA, 17 nt, Human
gcagccccagccugcua

SEQ ID NO: 2661006 - RNA, 16 nt, Human
gcagccccagccugcu

SEQ ID NO: 2661007 - RNA, 15 nt, Human
gcagccccagccugc

SEQ ID NO: 2661008 - RNA, 14 nt, Human
gcagccccagccug

SEQ ID NO: 2661009 - RNA, 13 nt, Human
gcagcccacccug

SEQ ID NO: 2661010 - RNA, 17 nt, Human
gcagcccacccugcugc

SEQ ID NO: 2661011 - RNA, 20 nt, Human
gcagcccacccugcugcugg

SEQ ID NO: 2661012 - RNA, 13 nt, Human
gcagcccagagac

SEQ ID NO: 2661013 - RNA, 22 nt, Human
gcagcccagagacuuuguagau

SEQ ID NO: 2661014 - RNA, 14 nt, Human
gcagcccagagacu

SEQ ID NO: 2661015 - RNA, 18 nt, Human
gcagcccagagacuuugu

SEQ ID NO: 2661016 - RNA, 23 nt, Human
gcaggcugggccauguccaaaga

SEQ ID NO: 2661017 - RNA, 14 nt, Human
gcaggcugggccau

SEQ ID NO: 2661018 - RNA, 15 nt, Human
gcaggcugggccaug

SEQ ID NO: 2661019 - RNA, 10 nt, Human
gcaggcuggg

SEQ ID NO: 2661020 - RNA, 11 nt, Human
gcaggcugggc

SEQ ID NO: 2661021 - RNA, 12 nt, Human
gcaggcugggcc

SEQ ID NO: 2661022 - RNA, 13 nt, Human
gcaggcugggcca

SEQ ID NO: 2661023 - RNA, 23 nt, Human
gcaggcuuugccauugugaacca

SEQ ID NO: 2661024 - RNA, 13 nt, Human
gcagggaggcagc

SEQ ID NO: 2661025 - RNA, 14 nt, Human
gcagggaggcagcc

SEQ ID NO: 2661026 - RNA, 16 nt, Human
gcagggagcugggccc

SEQ ID NO: 2661027 - RNA, 22 nt, Human
gcagggagcugggcccgacaug

SEQ ID NO: 2661028 - RNA, 17 nt, Human
gcaguagaacuccaggc

SEQ ID NO: 2661029 - RNA, 14 nt, Human
gcagucacuggagg

SEQ ID NO: 2661030 - RNA, 23 nt, Human
gcagucacuggagguugaagcca

SEQ ID NO: 2661031 - RNA, 15 nt, Human
gcaguaagucuuuuu

SEQ ID NO: 2661032 - RNA, 18 nt, Human
gcaguaagucuuuuuuga

SEQ ID NO: 2661033 - RNA, 17 nt, Human
gcaguuucuucaucuca

SEQ ID NO: 2661034 - RNA, 21 nt, Human
gcaguuuuguuuuaaaacugg

SEQ ID NO: 2661035 - RNA, 19 nt, Human
gcaguuugaggauuaguuu

SEQ ID NO: 2661036 - RNA, 16 nt, Human
gcaguuuaucauucaa

SEQ ID NO: 2661037 - RNA, 20 nt, Human
gcaguuuaucauucaagugu

SEQ ID NO: 2661038 - RNA, 13 nt, Human
gcagucgugccug

SEQ ID NO: 2661039 - RNA, 15 nt, Human
gcagucgugccugug

SEQ ID NO: 2661040 - RNA, 15 nt, Human
gcaguuuaucauuca

SEQ ID NO: 2661041 - RNA, 19 nt, Human
gaugcugggaguucuaaca

SEQ ID NO: 2661042 - RNA, 18 nt, Human
gaugugaauuauugacac

SEQ ID NO: 2661043 - RNA, 20 nt, Human
gaugugaauuauugacacug

SEQ ID NO: 2661044 - RNA, 22 nt, Human
gaugugaauuauugacacugaa

SEQ ID NO: 2661045 - RNA, 16 nt, Human
gaugucuuuuuauuaa

SEQ ID NO: 2661046 - RNA, 19 nt, Human
gaugucuuuuuauuaaaau

SEQ ID NO: 2661047 - RNA, 23 nt, Human
gaugucuuuuuauuaaaauauuu

SEQ ID NO: 2661048 - RNA, 19 nt, Human
gauuagcaaguuacaguga

SEQ ID NO: 2661049 - RNA, 17 nt, Human
gauuaugguuuugugau

SEQ ID NO: 2661050 - RNA, 16 nt, Human
gauuaugguuuuguga

SEQ ID NO: 2661051 - RNA, 15 nt, Human
gauuaugguuuugug

SEQ ID NO: 2661052 - RNA, 20 nt, Human
gauuauuagccagguaaugu

SEQ ID NO: 2661053 - RNA, 13 nt, Human
gauuaguuuagaa

SEQ ID NO: 2661054 - RNA, 16 nt, Human
gaugagauuuuuaaaa

SEQ ID NO: 2661055 - RNA, 15 nt, Human
gauuaguuuagaaca

SEQ ID NO: 2661056 - RNA, 14 nt, Human
gauuaguuuagaac

SEQ ID NO: 2661057 - RNA, 17 nt, Human
gauuauuuaagacuaaa

SEQ ID NO: 2661058 - RNA, 11 nt, Human
gauuauuugca

SEQ ID NO: 2661059 - RNA, 12 nt, Human
gauuauuugcau

SEQ ID NO: 2661060 - RNA, 13 nt, Human
gauuauuugcaug

SEQ ID NO: 2661061 - RNA, 14 nt, Human
gauuauuugcaugu

SEQ ID NO: 2661062 - RNA, 17 nt, Human
gauuauuugcauguuau

SEQ ID NO: 2661063 - RNA, 18 nt, Human
gauuauuugcauguuaug

SEQ ID NO: 2661064 - RNA, 19 nt, Human
gauuauuugcauguuaugu

SEQ ID NO: 2661065 - RNA, 17 nt, Human
gauccauuuccauugcu

SEQ ID NO: 2661066 - RNA, 23 nt, Human
gauccauuuccauugcuuauuau

SEQ ID NO: 2661067 - RNA, 11 nt, Human
gaucuccagcg

SEQ ID NO: 2661068 - RNA, 17 nt, Human
gauauuuuucauaaaca

SEQ ID NO: 2661069 - RNA, 18 nt, Human
gauauuuuucauaaacaa

SEQ ID NO: 2661070 - RNA, 22 nt, Human
gauauuuuucauaaacaaguuc

SEQ ID NO: 2661071 - RNA, 16 nt, Human
gaucucuugagccugg

SEQ ID NO: 2661072 - RNA, 12 nt, Human
gaucucuugagc

SEQ ID NO: 2661073 - RNA, 17 nt, Human
gaucucuugagccuggg

SEQ ID NO: 2661074 - RNA, 14 nt, Human
gaucucgguuugcc

SEQ ID NO: 2661075 - RNA, 20 nt, Human
gaucucgguuugccaaaauu

SEQ ID NO: 2661076 - RNA, 17 nt, Human
gaguuugucgcucaugu

SEQ ID NO: 2661077 - RNA, 18 nt, Human
gaguuugucgcucaugug

SEQ ID NO: 2661078 - RNA, 22 nt, Human
gaguuugucgcucaugugugca

SEQ ID NO: 2661079 - RNA, 19 nt, Human
gagugcugaaggaauggaa

SEQ ID NO: 2661080 - RNA, 17 nt, Human
gaguuugagcugccuuc

SEQ ID NO: 2661081 - RNA, 18 nt, Human
gaggugggagguggaaga

SEQ ID NO: 2661082 - RNA, 21 nt, Human
gagucaaggccugcucccugu

SEQ ID NO: 2661083 - RNA, 15 nt, Human
gaggugggaggugga

SEQ ID NO: 2661084 - RNA, 11 nt, Human
gaggugggagg

SEQ ID NO: 2661085 - RNA, 13 nt, Human
gaguccacuuugu

SEQ ID NO: 2661086 - RNA, 22 nt, Human
gaguccacuuuguuucgugggg

SEQ ID NO: 2661087 - RNA, 17 nt, Human
gauaccuccaacccugc

SEQ ID NO: 2661088 - RNA, 18 nt, Human
gauaccuccaacccugcc

SEQ ID NO: 2661089 - RNA, 20 nt, Human
gauaccuccaacccugccgu

SEQ ID NO: 2661090 - RNA, 20 nt, Human
gauauguauucuuuucucag

SEQ ID NO: 2661091 - RNA, 14 nt, Human
gauauucagaugua

SEQ ID NO: 2661092 - RNA, 15 nt, Human
gauauucagauguau

SEQ ID NO: 2661093 - RNA, 17 nt, Human
gauauucagauguaugu

SEQ ID NO: 2661094 - RNA, 20 nt, Human
gauauuccccccacuuaaga

SEQ ID NO: 2661095 - RNA, 13 nt, Human
gauauugaauguu

SEQ ID NO: 2661096 - RNA, 16 nt, Human
gauauugaauguuaaa

SEQ ID NO: 2661097 - RNA, 18 nt, Human
gauauugaggccaagaau

SEQ ID NO: 2661098 - RNA, 20 nt, Human
gauauugaggccaagaauau

SEQ ID NO: 2661099 - RNA, 23 nt, Human
gauauugaggccaagaauauugc

SEQ ID NO: 2661100 - RNA, 19 nt, Human
gauacuucccacaccacaa

SEQ ID NO: 2661101 - RNA, 17 nt, Human
cugcauuuccucgcagc

SEQ ID NO: 2661102 - RNA, 19 nt, Human
cugcauuuccucgcagccu

SEQ ID NO: 2661103 - RNA, 23 nt, Human
cugcauuuagggaguauucuaau

SEQ ID NO: 2661104 - RNA, 22 nt, Human
cugcauuuagggaguauucuaa

SEQ ID NO: 2661105 - RNA, 13 nt, Human
cugcauuuaggga

SEQ ID NO: 2661106 - RNA, 15 nt, Human
cugcauucauuuuua

SEQ ID NO: 2661107 - RNA, 16 nt, Human
cugcauucauuuuuau

SEQ ID NO: 2661108 - RNA, 23 nt, Human
cugcauucauuuuuauagcaaca

SEQ ID NO: 2661109 - RNA, 18 nt, Human
cugcauuuuuagaccauu

SEQ ID NO: 2661110 - RNA, 15 nt, Human
cugccccucagagac

SEQ ID NO: 2661111 - RNA, 16 nt, Human
cugccccucccccagc

SEQ ID NO: 2661112 - RNA, 13 nt, Human
cugccccaucucc

SEQ ID NO: 2661113 - RNA, 17 nt, Human
cugccccaucuccccuc

SEQ ID NO: 2661114 - RNA, 16 nt, Human
cugccccaucuccccu

SEQ ID NO: 2661115 - RNA, 20 nt, Human
cugccccaucuccccucagc

SEQ ID NO: 2661116 - RNA, 19 nt, Human
cugccccaucuccccucag

SEQ ID NO: 2661117 - RNA, 19 nt, Human
cugaccuuguaaaagacag

SEQ ID NO: 2661118 - RNA, 16 nt, Human
cuggaacaaauuauuu

SEQ ID NO: 2661119 - RNA, 17 nt, Human
cuggaacaaauuauuuu

SEQ ID NO: 2661120 - RNA, 19 nt, Human
cuggaacaaauuauuuuug

SEQ ID NO: 2661121 - RNA, 13 nt, Human
cuggaacaauauu

SEQ ID NO: 2661122 - RNA, 17 nt, Human
cuggaaccacauugaag

SEQ ID NO: 2661123 - RNA, 20 nt, Human
cuggaaccacauugaagaau

SEQ ID NO: 2661124 - RNA, 20 nt, Human
cuggaacccuuuuaaaguug

SEQ ID NO: 2661125 - RNA, 12 nt, Human
cugccugggcug

SEQ ID NO: 2661126 - RNA, 11 nt, Human
cugccugggcu

SEQ ID NO: 2661127 - RNA, 23 nt, Human
cugccugggcugaccccgguggc

SEQ ID NO: 2661128 - RNA, 12 nt, Human
cugccuguggcg

SEQ ID NO: 2661129 - RNA, 22 nt, Human
cugccuguggcgccgucuccag

SEQ ID NO: 2661130 - RNA, 23 nt, Human
cugccuguggcgccgucuccagg

SEQ ID NO: 2661131 - RNA, 22 nt, Human
cugccuguuaggagaagcugca

SEQ ID NO: 2661132 - RNA, 15 nt, Human
cugcuacaauguccu

SEQ ID NO: 2661133 - RNA, 19 nt, Human
cuggugcacagccacuccc

SEQ ID NO: 2661134 - RNA, 22 nt, Human
cuggguggcaccagcagccugg

SEQ ID NO: 2661135 - RNA, 17 nt, Human
cuggggccuccagaacu

SEQ ID NO: 2661136 - RNA, 15 nt, Human
cuggggccuccagaa

SEQ ID NO: 2661137 - RNA, 12 nt, Human
cuggggccucca

SEQ ID NO: 2661138 - RNA, 11 nt, Human
cuggggccucc

SEQ ID NO: 2661139 - RNA, 23 nt, Human
cuggguggcaccagcagccugga

SEQ ID NO: 2661140 - RNA, 20 nt, Human
cuggggaaagacacugccug

SEQ ID NO: 2661141 - RNA, 23 nt, Human
cuggggaaagacacugccugggc

SEQ ID NO: 2661142 - RNA, 21 nt, Human
cuggggaaagacacugccugg

SEQ ID NO: 2661143 - RNA, 22 nt, Human
cuggggaaagacacugccuggg

SEQ ID NO: 2661144 - RNA, 13 nt, Human
cuggggaaggaag

SEQ ID NO: 2661145 - RNA, 22 nt, Human
cuggggccuagcgaucucuccu

SEQ ID NO: 2661146 - RNA, 23 nt, Human
cuggggccuagcgaucucuccug

SEQ ID NO: 2661147 - RNA, 24 nt, Human
cuggggccuagcgaucucuccugg

SEQ ID NO: 2661148 - RNA, 17 nt, Human
cugggaccugccaggca

SEQ ID NO: 2661149 - RNA, 18 nt, Human
cugggaccugccaggcag

SEQ ID NO: 2661150 - RNA, 19 nt, Human
cugggaccugccaggcagg

SEQ ID NO: 2661151 - RNA, 20 nt, Human
cugggaccugccaggcaggg

SEQ ID NO: 2661152 - RNA, 19 nt, Human
cuggagaccagggagccuu

SEQ ID NO: 2661153 - RNA, 18 nt, Human
cuggagaccagggagccu

SEQ ID NO: 2661154 - RNA, 17 nt, Human
cuggagaccagggagcc

SEQ ID NO: 2661155 - RNA, 18 nt, Human
cuggcaggucaaccucgc

SEQ ID NO: 2661156 - RNA, 15 nt, Human
cuggcagggggcaug

SEQ ID NO: 2661157 - RNA, 15 nt, Human
cugugaagagaacca

SEQ ID NO: 2661158 - RNA, 17 nt, Human
cuguacuuucuauuuua

SEQ ID NO: 2661159 - RNA, 21 nt, Human
cuguagggagggcggcagggg

SEQ ID NO: 2661160 - RNA, 21 nt, Human
cugucacucauugcugagccu

SEQ ID NO: 2661161 - RNA, 14 nt, Human
cugucacucauugc

SEQ ID NO: 2661162 - RNA, 20 nt, Human
cuguagggagggcggcaggg

SEQ ID NO: 2661163 - RNA, 18 nt, Human
cuguacuuuucauucucu

SEQ ID NO: 2661164 - RNA, 22 nt, Human
cuguccugcucauuaugccacu

SEQ ID NO: 2661165 - RNA, 23 nt, Human
cugucacucauugcugagccucu

SEQ ID NO: 2661166 - RNA, 22 nt, Human
cugucacucauugcugagccuc

SEQ ID NO: 2661167 - RNA, 11 nt, Human
cuuugauguca

SEQ ID NO: 2661168 - RNA, 12 nt, Human
cuuuguaaauuc

SEQ ID NO: 2661169 - RNA, 20 nt, Human
cuuugauguguuguucuugg

SEQ ID NO: 2661170 - RNA, 23 nt, Human
cuuugguuuuuuucuucuguauu

SEQ ID NO: 2661171 - RNA, 13 nt, Human
cuuuguaaaaauc

SEQ ID NO: 2661172 - RNA, 16 nt, Human
cuuuguaaaaaucuuu

SEQ ID NO: 2661173 - RNA, 12 nt, Human
cuuuguaaauag

SEQ ID NO: 2661174 - RNA, 17 nt, Human
cuuuguaaauucugauu

SEQ ID NO: 2661175 - RNA, 16 nt, Human
cuuuguaaauucugau

SEQ ID NO: 2661176 - RNA, 15 nt, Human
cuuuguaaauucuga

SEQ ID NO: 2661177 - RNA, 12 nt, Human
cuuugauguguu

SEQ ID NO: 2661178 - RNA, 22 nt, Human
cuuugaugucagcaguugcugg

SEQ ID NO: 2661179 - RNA, 18 nt, Human
cuuugauguguuguucuu

SEQ ID NO: 2661180 - RNA, 16 nt, Human
cuuugauguguuguuc

SEQ ID NO: 2661181 - RNA, 15 nt, Human
cuuugauguguuguu

SEQ ID NO: 2661182 - RNA, 13 nt, Human
cuuugauguguug

SEQ ID NO: 2661183 - RNA, 13 nt, Human
cuuuguagauccu

SEQ ID NO: 2661184 - RNA, 21 nt, Human
cuuuguagauccuuagagguc

SEQ ID NO: 2661185 - RNA, 13 nt, Human
cuuuguauauuac

SEQ ID NO: 2661186 - RNA, 21 nt, Human
cuuuguauaguuauguaaaua

SEQ ID NO: 2661187 - RNA, 19 nt, Human
cuuuguauaguuauguaaa

SEQ ID NO: 2661188 - RNA, 18 nt, Human
cuuuguauaguuauguaa

SEQ ID NO: 2661189 - RNA, 15 nt, Human
cuuuguauaguuaug

SEQ ID NO: 2661190 - RNA, 12 nt, Human
cuuuguauaguu

SEQ ID NO: 2661191 - RNA, 14 nt, Human
cuuuguauauuaca

SEQ ID NO: 2661192 - RNA, 24 nt, Human
cuuuuaucuauucugagaaaacaa

SEQ ID NO: 2661193 - RNA, 23 nt, Human
cuuuuaucuauucugagaaaaca

SEQ ID NO: 2661194 - RNA, 18 nt, Human
cuuuuaugcaaaagguuu

SEQ ID NO: 2661195 - RNA, 19 nt, Human
cuuucaauugucacuuuuu

SEQ ID NO: 2661196 - RNA, 20 nt, Human
cuuucaauugucacuuuuua

SEQ ID NO: 2661197 - RNA, 17 nt, Human
gaaacuuugggaaaaca

SEQ ID NO: 2661198 - RNA, 21 nt, Human
gaaacuuugggaaaacauguu

SEQ ID NO: 2661199 - RNA, 12 nt, Human
gaaacuuuuauc

SEQ ID NO: 2661200 - RNA, 14 nt, Human
gaaacuuuucuaga

SEQ ID NO: 2661201 - RNA, 15 nt, Human
gaaacuuuucuagaa

SEQ ID NO: 2661202 - RNA, 22 nt, Human
gaaaggugaguuugagcugccu

SEQ ID NO: 2661203 - RNA, 23 nt, Human
gaaaggugaguuugagcugccuu

SEQ ID NO: 2661204 - RNA, 15 nt, Human
gaaaggggugcuuuu

SEQ ID NO: 2661205 - RNA, 17 nt, Human
gaaaggggucggcugac

SEQ ID NO: 2661206 - RNA, 14 nt, Human
gaaaggggugcuuu

SEQ ID NO: 2661207 - RNA, 14 nt, Human
gaaaucagccaagu

SEQ ID NO: 2661208 - RNA, 15 nt, Human
gaaaucagccaaguu

SEQ ID NO: 2661209 - RNA, 20 nt, Human
gaaaucagccaaguuuuaua

SEQ ID NO: 2661210 - RNA, 12 nt, Human
gaaaauuguauu

SEQ ID NO: 2661211 - RNA, 14 nt, Human
gaaaauuguuuagu

SEQ ID NO: 2661212 - RNA, 21 nt, Human
gaaaauuguuuagugauauua

SEQ ID NO: 2661213 - RNA, 22 nt, Human
gaaaauggucgagaaagaggca

SEQ ID NO: 2661214 - RNA, 21 nt, Human
gaaaauucauaguaagauuga

SEQ ID NO: 2661215 - RNA, 16 nt, Human
gaaaauucuuaaaagg

SEQ ID NO: 2661216 - RNA, 19 nt, Human
gaaaauugaaauaaagcua

SEQ ID NO: 2661217 - RNA, 12 nt, Human
gaaaauugaguu

SEQ ID NO: 2661218 - RNA, 18 nt, Human
gaaaagaaaaaugagccu

SEQ ID NO: 2661219 - RNA, 13 nt, Human
gaaaaaaaauuau

SEQ ID NO: 2661220 - RNA, 14 nt, Human
gaaaaacacaagca

SEQ ID NO: 2661221 - RNA, 15 nt, Human
gaaaaacacaagcaa

SEQ ID NO: 2661222 - RNA, 17 nt, Human
gaaaaacacaagcaaaa

SEQ ID NO: 2661223 - RNA, 14 nt, Human
gaaaaaaauacuau

SEQ ID NO: 2661224 - RNA, 15 nt, Human
gaaaaaaauacuauu

SEQ ID NO: 2661225 - RNA, 20 nt, Human
gaaaaaaauacuauuuaaga

SEQ ID NO: 2661226 - RNA, 13 nt, Human
cuuuuuuguuuug

SEQ ID NO: 2661227 - RNA, 16 nt, Human
cuuuuuuuccuuuuua

SEQ ID NO: 2661228 - RNA, 22 nt, Human
cuuuuuuucucugcauuuaaaa

SEQ ID NO: 2661229 - RNA, 16 nt, Human
cuuuuuuuuuucuugg

SEQ ID NO: 2661230 - RNA, 12 nt, Human
cuuuuguacuga

SEQ ID NO: 2661231 - RNA, 17 nt, Human
cuuuuguacugaauuuu

SEQ ID NO: 2661232 - RNA, 23 nt, Human
cuuuuguacugaauuuuuuugua

SEQ ID NO: 2661233 - RNA, 23 nt, Human
cuuuuggcaaugacucaaagucu

SEQ ID NO: 2661234 - RNA, 19 nt, Human
cuucacggaagagccuugc

SEQ ID NO: 2661235 - RNA, 15 nt, Human
cuucacggaagagcc

SEQ ID NO: 2661236 - RNA, 13 nt, Human
cuuauugaauaua

SEQ ID NO: 2661237 - RNA, 22 nt, Human
cuuauugacaaccgagaagguu

SEQ ID NO: 2661238 - RNA, 14 nt, Human
cuuauugaccauuu

SEQ ID NO: 2661239 - RNA, 16 nt, Human
cuuauugaccauuuuu

SEQ ID NO: 2661240 - RNA, 20 nt, Human
cuuauuauguagguaagacu

SEQ ID NO: 2661241 - RNA, 13 nt, Human
cuucaugcacuua

SEQ ID NO: 2661242 - RNA, 18 nt, Human
cuucaugcacuuaaagaa

SEQ ID NO: 2661243 - RNA, 15 nt, Human
cuucauauauuucuc

SEQ ID NO: 2661244 - RNA, 20 nt, Human
cuucacuccagccuggguga

SEQ ID NO: 2661245 - RNA, 14 nt, Human
cuucaguugcuugu

SEQ ID NO: 2661246 - RNA, 15 nt, Human
cuucaguugcuuguc

SEQ ID NO: 2661247 - RNA, 23 nt, Human
cuucaguugcuugucuucuggua

SEQ ID NO: 2661248 - RNA, 13 nt, Human
cuucccacccugc

SEQ ID NO: 2661249 - RNA, 19 nt, Human
cuucccacccugccccuca

SEQ ID NO: 2661250 - RNA, 18 nt, Human
cuucugcaacaagcaugc

SEQ ID NO: 2661251 - RNA, 12 nt, Human
cuuccuccugga

SEQ ID NO: 2661252 - RNA, 13 nt, Human
cuuccuccuggaa

SEQ ID NO: 2661253 - RNA, 14 nt, Human
cuuccuccuggaaa

SEQ ID NO: 2661254 - RNA, 13 nt, Human
cuucuagaguuuu

SEQ ID NO: 2661255 - RNA, 15 nt, Human
cuucuagaguuuuau

SEQ ID NO: 2661256 - RNA, 22 nt, Human
cuucuaggauagcuaacuguaa

SEQ ID NO: 2661257 - RNA, 12 nt, Human
cuugaagccaaa

SEQ ID NO: 2661258 - RNA, 13 nt, Human
cuugaagccaaag

SEQ ID NO: 2661259 - RNA, 14 nt, Human
cuugaagccaaaga

SEQ ID NO: 2661260 - RNA, 15 nt, Human
cuugaagccaaagaa

SEQ ID NO: 2661261 - RNA, 16 nt, Human
cuugaagccaaagaaa

SEQ ID NO: 2661262 - RNA, 19 nt, Human
cuugaagccaaagaaaaau

SEQ ID NO: 2661263 - RNA, 16 nt, Human
cuugaguuugucgcuc

SEQ ID NO: 2661264 - RNA, 21 nt, Human
cuugaguuugucgcucaugug

SEQ ID NO: 2661265 - RNA, 15 nt, Human
cuugauacauucaaa

SEQ ID NO: 2661266 - RNA, 18 nt, Human
cuugauacauucaaauuu

SEQ ID NO: 2661267 - RNA, 20 nt, Human
cuugauacauucaaauuugu

SEQ ID NO: 2661268 - RNA, 22 nt, Human
cuugauacauucaaauuugucu

SEQ ID NO: 2661269 - RNA, 11 nt, Human
cuugaagcugu

SEQ ID NO: 2661270 - RNA, 13 nt, Human
cuugccugcaggg

SEQ ID NO: 2661271 - RNA, 14 nt, Human
cuugccugcagggc

SEQ ID NO: 2661272 - RNA, 16 nt, Human
cuugccugcagggcca

SEQ ID NO: 2661273 - RNA, 17 nt, Human
cuugccugcagggccau

SEQ ID NO: 2661274 - RNA, 20 nt, Human
cuugccugcagggccauggc

SEQ ID NO: 2661275 - RNA, 23 nt, Human
cuugccuuaaacacucaccuucu

SEQ ID NO: 2661276 - RNA, 10 nt, Human
cuugccuggg

SEQ ID NO: 2661277 - RNA, 16 nt, Human
cuugccugggucacac

SEQ ID NO: 2661278 - RNA, 18 nt, Human
cuuggcacuuauugaaua

SEQ ID NO: 2661279 - RNA, 20 nt, Human
cuuggcacuuauugaauaua

SEQ ID NO: 2661280 - RNA, 23 nt, Human
cuuggcaauaaauuuugaaaagu

SEQ ID NO: 2661281 - RNA, 22 nt, Human
cuuggcaauaaauuuugaaaag

SEQ ID NO: 2661282 - RNA, 18 nt, Human
auacaaugaacacuuaua

SEQ ID NO: 2661283 - RNA, 17 nt, Human
auacaaugaacacuuau

SEQ ID NO: 2661284 - RNA, 22 nt, Human
auaauguuuaauauugagaaag

SEQ ID NO: 2661285 - RNA, 19 nt, Human
auaauguuuaauauugaga

SEQ ID NO: 2661286 - RNA, 15 nt, Human
auacacuuuguugca

SEQ ID NO: 2661287 - RNA, 17 nt, Human
auacacuuuguugcaag

SEQ ID NO: 2661288 - RNA, 21 nt, Human
auacacuuuguugcaagaugu

SEQ ID NO: 2661289 - RNA, 23 nt, Human
auacacuuuguugcaagauguga

SEQ ID NO: 2661290 - RNA, 15 nt, Human
aguuuggcauuugca

SEQ ID NO: 2661291 - RNA, 14 nt, Human
aguuugcuuagaaa

SEQ ID NO: 2661292 - RNA, 13 nt, Human
aguuugcuuagaa

SEQ ID NO: 2661293 - RNA, 11 nt, Human
aguuugcuuag

SEQ ID NO: 2661294 - RNA, 14 nt, Human
aguuugagcugccu

SEQ ID NO: 2661295 - RNA, 14 nt, Human
auaaaacuaggaau

SEQ ID NO: 2661296 - RNA, 11 nt, Human
auaaaacucug

SEQ ID NO: 2661297 - RNA, 16 nt, Human
aguuucuuuauuuugu

SEQ ID NO: 2661298 - RNA, 20 nt, Human
aguuucuuuauuuuguguaa

SEQ ID NO: 2661299 - RNA, 22 nt, Human
aguuucuuuauuuuguguaaaa

SEQ ID NO: 2661300 - RNA, 15 nt, Human
aguuugaagaccgcc

SEQ ID NO: 2661301 - RNA, 19 nt, Human
aguuugagaucagccuggg

SEQ ID NO: 2661302 - RNA, 18 nt, Human
aguuugagaucagccugg

SEQ ID NO: 2661303 - RNA, 20 nt, Human
aguuugagaucagccugggc

SEQ ID NO: 2661304 - RNA, 21 nt, Human
auaaauuuugaaaaguaauau

SEQ ID NO: 2661305 - RNA, 16 nt, Human
auaaauuuugaaaagu

SEQ ID NO: 2661306 - RNA, 15 nt, Human
auaaauuuugaaaag

SEQ ID NO: 2661307 - RNA, 14 nt, Human
auaaauuuugaaaa

SEQ ID NO: 2661308 - RNA, 13 nt, Human
auaaauuuugaaa

SEQ ID NO: 2661309 - RNA, 12 nt, Human
auauggauguua

SEQ ID NO: 2661310 - RNA, 14 nt, Human
auauggauguuacu

SEQ ID NO: 2661311 - RNA, 22 nt, Human
auauggauguuacucucuugca

SEQ ID NO: 2661312 - RNA, 23 nt, Human
auauggauguuacucucuugcac

SEQ ID NO: 2661313 - RNA, 23 nt, Human
auaucaguaacccccuuaaauuu

SEQ ID NO: 2661314 - RNA, 16 nt, Human
auaucagugacaguug

SEQ ID NO: 2661315 - RNA, 21 nt, Human
auauuucccauuugugccaga

SEQ ID NO: 2661316 - RNA, 19 nt, Human
auauucaggguaaauagga

SEQ ID NO: 2661317 - RNA, 20 nt, Human
auauucaggguaaauaggaa

SEQ ID NO: 2661318 - RNA, 13 nt, Human
auagcauguaaug

SEQ ID NO: 2661319 - RNA, 17 nt, Human
auagcagccaguucaaa

SEQ ID NO: 2661320 - RNA, 19 nt, Human
auagcagccaguucaaaaa

SEQ ID NO: 2661321 - RNA, 12 nt, Human
auagaaagcuau

SEQ ID NO: 2661322 - RNA, 18 nt, Human
auacuuuguauuguccua

SEQ ID NO: 2661323 - RNA, 13 nt, Human
auacuuuguauuu

SEQ ID NO: 2661324 - RNA, 17 nt, Human
auacuuuguauuuugau

SEQ ID NO: 2661325 - RNA, 14 nt, Human
auacuuuguauugu

SEQ ID NO: 2661326 - RNA, 13 nt, Human
auacuuuguauug

SEQ ID NO: 2661327 - RNA, 10 nt, Human
auacuuugua

SEQ ID NO: 2661328 - RNA, 14 nt, Human
auacuuuguaaaua

SEQ ID NO: 2661329 - RNA, 22 nt, Human
auaguagauguggccuuugaau

SEQ ID NO: 2661330 - RNA, 19 nt, Human
auauaaugaauaaaucauu

SEQ ID NO: 2661331 - RNA, 15 nt, Human
auauacaaaaagaaa

SEQ ID NO: 2661332 - RNA, 18 nt, Human
auaguacucuuuguagca

SEQ ID NO: 2661333 - RNA, 13 nt, Human
auaguaagauuga

SEQ ID NO: 2661334 - RNA, 13 nt, Human
auaguaagcauag

SEQ ID NO: 2661335 - RNA, 19 nt, Human
auagccuauggcagaaaaa

SEQ ID NO: 2661336 - RNA, 13 nt, Human
auauacacgaaua

SEQ ID NO: 2661337 - RNA, 17 nt, Human
auauacacgaauagaca

SEQ ID NO: 2661338 - RNA, 20 nt, Human
auauacacgaauagacauca

SEQ ID NO: 2661339 - RNA, 21 nt, Human
auauacacgaauagacaucaa

SEQ ID NO: 2661340 - RNA, 22 nt, Human
auauacacgaauagacaucaaa

SEQ ID NO: 2661341 - RNA, 17 nt, Human
auauacaguauagauuu

SEQ ID NO: 2661342 - RNA, 21 nt, Human
aguccaaaaagcuccuggggc

SEQ ID NO: 2661343 - RNA, 11 nt, Human
agucauguaug

SEQ ID NO: 2661344 - RNA, 12 nt, Human
agucauguaugu

SEQ ID NO: 2661345 - RNA, 13 nt, Human
agucauguauguu

SEQ ID NO: 2661346 - RNA, 15 nt, Human
agucauguauguuuc

SEQ ID NO: 2661347 - RNA, 17 nt, Human
agucauguauguuucuc

SEQ ID NO: 2661348 - RNA, 22 nt, Human
agucauguauguuucucuuuga

SEQ ID NO: 2661349 - RNA, 13 nt, Human
aguccaaaauacu

SEQ ID NO: 2661350 - RNA, 23 nt, Human
aguccuugauuucaaaguuuugu

SEQ ID NO: 2661351 - RNA, 14 nt, Human
agucuguggaucag

SEQ ID NO: 2661352 - RNA, 17 nt, Human
agucuguggaucagaga

SEQ ID NO: 2661353 - RNA, 16 nt, Human
agucugaguaaaaucu

SEQ ID NO: 2661354 - RNA, 21 nt, Human
agucugagggcuuguaguucu

SEQ ID NO: 2661355 - RNA, 18 nt, Human
agucugagggcuuguagu

SEQ ID NO: 2661356 - RNA, 17 nt, Human
agucugagggcuuguag

SEQ ID NO: 2661357 - RNA, 18 nt, Human
agucugaggccguugcug

SEQ ID NO: 2661358 - RNA, 16 nt, Human
agugaauuugcacugu

SEQ ID NO: 2661359 - RNA, 16 nt, Human
agucuguucugguaau

SEQ ID NO: 2661360 - RNA, 15 nt, Human
agugaaugcugggac

SEQ ID NO: 2661361 - RNA, 13 nt, Human
agucuguugugug

SEQ ID NO: 2661362 - RNA, 16 nt, Human
agucuguuguguguca

SEQ ID NO: 2661363 - RNA, 19 nt, Human
agugaaugcugggacucag

SEQ ID NO: 2661364 - RNA, 13 nt, Human
agugaccucucuc

SEQ ID NO: 2661365 - RNA, 21 nt, Human
aguaagaaagugaagcaaauc

SEQ ID NO: 2661366 - RNA, 20 nt, Human
aguaagaaagugaagcaaau

SEQ ID NO: 2661367 - RNA, 18 nt, Human
aguaacauucauguucua

SEQ ID NO: 2661368 - RNA, 21 nt, Human
aguaagaauaccacaucaaau

SEQ ID NO: 2661369 - RNA, 23 nt, Human
aguaagaauaccacaucaaauaa

SEQ ID NO: 2661370 - RNA, 14 nt, Human
aguaagaucacugu

SEQ ID NO: 2661371 - RNA, 14 nt, Human
aguaagauaucuca

SEQ ID NO: 2661372 - RNA, 21 nt, Human
aguaagaucacuguuuagauu

SEQ ID NO: 2661373 - RNA, 20 nt, Human
aguaagaucacuguuuagau

SEQ ID NO: 2661374 - RNA, 15 nt, Human
aguaagaucacuguu

SEQ ID NO: 2661375 - RNA, 12 nt, Human
aguaagauugau

SEQ ID NO: 2661376 - RNA, 22 nt, Human
aguaagauugauaucuauaaaa

SEQ ID NO: 2661377 - RNA, 14 nt, Human
agucaauggcuugu

SEQ ID NO: 2661378 - RNA, 19 nt, Human
aguauuuuuauacaaaccu

SEQ ID NO: 2661379 - RNA, 14 nt, Human
aguauuuuuucaag

SEQ ID NO: 2661380 - RNA, 19 nt, Human
aguauuuuuucaaguugua

SEQ ID NO: 2661381 - RNA, 12 nt, Human
aguaucccacau

SEQ ID NO: 2661382 - RNA, 18 nt, Human
aguaucccacauccaacu

SEQ ID NO: 2661383 - RNA, 21 nt, Human
agugggaagcccauccugacc

SEQ ID NO: 2661384 - RNA, 22 nt, Human
agugggaagcccauccugacca

SEQ ID NO: 2661385 - RNA, 12 nt, Human
agugggaagccc

SEQ ID NO: 2661386 - RNA, 17 nt, Human
agugggaagcccauccu

SEQ ID NO: 2661387 - RNA, 23 nt, Human
agugucagaaggagcuacaaaac

SEQ ID NO: 2661388 - RNA, 17 nt, Human
agugucuauaaaagaaa

SEQ ID NO: 2661389 - RNA, 19 nt, Human
agugucuauaaaagaaaca

SEQ ID NO: 2661390 - RNA, 20 nt, Human
agugucuauaaaagaaacac

SEQ ID NO: 2661391 - RNA, 17 nt, Human
aguguccuucuugcucc

SEQ ID NO: 2661392 - RNA, 16 nt, Human
agugucuggaauugug

SEQ ID NO: 2661393 - RNA, 17 nt, Human
agugucuggaauugugg

SEQ ID NO: 2661394 - RNA, 21 nt, Human
agugucuggaauuguggcuau

SEQ ID NO: 2661395 - RNA, 21 nt, Human
agugaugcugugcuaugaauu

SEQ ID NO: 2661396 - RNA, 22 nt, Human
agugaucuacaugaggaacugu

SEQ ID NO: 2661397 - RNA, 17 nt, Human
aguucaucgauuuucua

SEQ ID NO: 2661398 - RNA, 18 nt, Human
aguucaucgauuuucuau

SEQ ID NO: 2661399 - RNA, 13 nt, Human
aguugucuaaaca

SEQ ID NO: 2661400 - RNA, 13 nt, Human
aguugucagguua

SEQ ID NO: 2661401 - RNA, 13 nt, Human
aguugagcuauga

SEQ ID NO: 2661402 - RNA, 17 nt, Human
aguugagcuaugacuua

SEQ ID NO: 2661403 - RNA, 15 nt, Human
aguugagcuaugacu

SEQ ID NO: 2661404 - RNA, 18 nt, Human
aguugagcuaugacuuaa

SEQ ID NO: 2661405 - RNA, 19 nt, Human
aucuauuuauuaauauuua

SEQ ID NO: 2661406 - RNA, 15 nt, Human
aucuauuuauuaaua

SEQ ID NO: 2661407 - RNA, 12 nt, Human
aucuauuugagg

SEQ ID NO: 2661408 - RNA, 13 nt, Human
aucuauuuauuaa

SEQ ID NO: 2661409 - RNA, 17 nt, Human
aucuauagaaagcuaua

SEQ ID NO: 2661410 - RNA, 14 nt, Human
aucuauauauauaa

SEQ ID NO: 2661411 - RNA, 15 nt, Human
aucuccugacagaag

SEQ ID NO: 2661412 - RNA, 21 nt, Human
aucuccggcucccagccucag

SEQ ID NO: 2661413 - RNA, 19 nt, Human
aucuccggcucccagccuc

SEQ ID NO: 2661414 - RNA, 18 nt, Human
aucuccugacagaaggug

SEQ ID NO: 2661415 - RNA, 22 nt, Human
aucuccggcucccagccucagc

SEQ ID NO: 2661416 - RNA, 17 nt, Human
aucuccugacagaaggu

SEQ ID NO: 2661417 - RNA, 14 nt, Human
aucuccggcuccca

SEQ ID NO: 2661418 - RNA, 18 nt, Human
aucuccggcucccagccu

SEQ ID NO: 2661419 - RNA, 16 nt, Human
aucuccggcucccagc

SEQ ID NO: 2661420 - RNA, 11 nt, Human
aucuauaaaau

SEQ ID NO: 2661421 - RNA, 12 nt, Human
aucuauaaaaua

SEQ ID NO: 2661422 - RNA, 14 nt, Human
aucuauaaaauaga

SEQ ID NO: 2661423 - RNA, 20 nt, Human
aucuauaaaauagauauaaa

SEQ ID NO: 2661424 - RNA, 16 nt, Human
aucuauagaaagcuau

SEQ ID NO: 2661425 - RNA, 20 nt, Human
aucuaggggagccuugauuc

SEQ ID NO: 2661426 - RNA, 19 nt, Human
aucuaggggagccuugauu

SEQ ID NO: 2661427 - RNA, 17 nt, Human
aucuaggggagccuuga

SEQ ID NO: 2661428 - RNA, 15 nt, Human
aucuucaaagccuuc

SEQ ID NO: 2661429 - RNA, 18 nt, Human
aucuucaaagccuucucc

SEQ ID NO: 2661430 - RNA, 12 nt, Human
aucucuccuggc

SEQ ID NO: 2661431 - RNA, 13 nt, Human
aucucuccuggcc

SEQ ID NO: 2661432 - RNA, 14 nt, Human
aucucuccuggccu

SEQ ID NO: 2661433 - RNA, 22 nt, Human
aucucuccuggccuauccgcug

SEQ ID NO: 2661434 - RNA, 14 nt, Human
aucucuccacugug

SEQ ID NO: 2661435 - RNA, 16 nt, Human
aucucugaaugcccca

SEQ ID NO: 2661436 - RNA, 18 nt, Human
aucuggaguucucaaaga

SEQ ID NO: 2661437 - RNA, 22 nt, Human
aucuggagaccagggagccuuu

SEQ ID NO: 2661438 - RNA, 21 nt, Human
aucuggagaccagggagccuu

SEQ ID NO: 2661439 - RNA, 20 nt, Human
aucuggagaccagggagccu

SEQ ID NO: 2661440 - RNA, 14 nt, Human
aucuucccaugcau

SEQ ID NO: 2661441 - RNA, 23 nt, Human
augaagucuuaaggacaaagugc

SEQ ID NO: 2661442 - RNA, 12 nt, Human
augaaaauggaa

SEQ ID NO: 2661443 - RNA, 17 nt, Human
augaaaacauggaacag

SEQ ID NO: 2661444 - RNA, 20 nt, Human
augaaaacauggaacagugu

SEQ ID NO: 2661445 - RNA, 14 nt, Human
augaaguugaaaau

SEQ ID NO: 2661446 - RNA, 16 nt, Human
augaaguugaaaauca

SEQ ID NO: 2661447 - RNA, 18 nt, Human
augaccagaugcguccca

SEQ ID NO: 2661448 - RNA, 21 nt, Human
augaccagaugcgucccaaga

SEQ ID NO: 2661449 - RNA, 13 nt, Human
augaccaguaaag

SEQ ID NO: 2661450 - RNA, 24 nt, Human
augacguacaaguaguucuguauu

SEQ ID NO: 2661451 - RNA, 19 nt, Human
augacguacaaguaguucu

SEQ ID NO: 2661452 - RNA, 23 nt, Human
augacguacaaguaguucuguau

SEQ ID NO: 2661453 - RNA, 20 nt, Human
augacguacaaguaguucug

SEQ ID NO: 2661454 - RNA, 14 nt, Human
augacuguguugua

SEQ ID NO: 2661455 - RNA, 13 nt, Human
augacugcacaug

SEQ ID NO: 2661456 - RNA, 17 nt, Human
augaaaacaguguguaa

SEQ ID NO: 2661457 - RNA, 18 nt, Human
augaaaacaguguguaaa

SEQ ID NO: 2661458 - RNA, 20 nt, Human
augaaaacaguguguaaaca

SEQ ID NO: 2661459 - RNA, 20 nt, Human
aucccguuuuccccaugaca

SEQ ID NO: 2661460 - RNA, 18 nt, Human
aucccguuuuccccauga

SEQ ID NO: 2661461 - RNA, 16 nt, Human
aucccguuuuccccau

SEQ ID NO: 2661462 - RNA, 15 nt, Human
aucccguuuucccca

SEQ ID NO: 2661463 - RNA, 22 nt, Human
auccccagggggcaugaccaga

SEQ ID NO: 2661464 - RNA, 19 nt, Human
aucccuaccgacccagggu

SEQ ID NO: 2661465 - RNA, 17 nt, Human
aucccuaccgacccagg

SEQ ID NO: 2661466 - RNA, 12 nt, Human
aucccauuccag

SEQ ID NO: 2661467 - RNA, 14 nt, Human
aucccauuccaggc

SEQ ID NO: 2661468 - RNA, 15 nt, Human
aucccauuccaggca

SEQ ID NO: 2661469 - RNA, 16 nt, Human
auccagacucagagcu

SEQ ID NO: 2661470 - RNA, 23 nt, Human
auccagacucagagcucucucua

SEQ ID NO: 2661471 - RNA, 22 nt, Human
auccagaggcaaacggaggcaa

SEQ ID NO: 2661472 - RNA, 22 nt, Human
auccuugaugcaagugcaaccu

SEQ ID NO: 2661473 - RNA, 14 nt, Human
aucgccacaaacuc

SEQ ID NO: 2661474 - RNA, 16 nt, Human
aucgccacaaacucua

SEQ ID NO: 2661475 - RNA, 17 nt, Human
auccuuuaaaauuuaaa

SEQ ID NO: 2661476 - RNA, 14 nt, Human
auccuuccauucca

SEQ ID NO: 2661477 - RNA, 15 nt, Human
auccuuccauuccac

SEQ ID NO: 2661478 - RNA, 16 nt, Human
auccuuccauuccaca

SEQ ID NO: 2661479 - RNA, 20 nt, Human
auccuuccauuccacacaga

SEQ ID NO: 2661480 - RNA, 13 nt, Human
auccuuagagguc

SEQ ID NO: 2661481 - RNA, 18 nt, Human
auccuuagagguccucug

SEQ ID NO: 2661482 - RNA, 19 nt, Human
auccuuagagguccucugg

SEQ ID NO: 2661483 - RNA, 20 nt, Human
auccuuagagguccucugga

SEQ ID NO: 2661484 - RNA, 21 nt, Human
auccuuagagguccucuggag

SEQ ID NO: 2661485 - RNA, 21 nt, Human
aucaaauagaaccacuaugaa

SEQ ID NO: 2661486 - RNA, 20 nt, Human
aucaaauagaaccacuauga

SEQ ID NO: 2661487 - RNA, 23 nt, Human
aucaaagagguuuuaaaaaaauc

SEQ ID NO: 2661488 - RNA, 20 nt, Human
aucaaagagguuuuaaaaaa

SEQ ID NO: 2661489 - RNA, 14 nt, Human
aucaaaauagucua

SEQ ID NO: 2661490 - RNA, 13 nt, Human
aucaaaagugccu

SEQ ID NO: 2661491 - RNA, 12 nt, Human
auauuuccuuua

SEQ ID NO: 2661492 - RNA, 14 nt, Human
auauuuccuuuaug

SEQ ID NO: 2661493 - RNA, 15 nt, Human
auauuuccuuuaugu

SEQ ID NO: 2661494 - RNA, 17 nt, Human
auauuuccuuuauguga

SEQ ID NO: 2661495 - RNA, 18 nt, Human
auauuuccuuuaugugaa

SEQ ID NO: 2661496 - RNA, 19 nt, Human
auauuuccuuuaugugaau

SEQ ID NO: 2661497 - RNA, 20 nt, Human
auauuuccuuuaugugaauu

SEQ ID NO: 2661498 - RNA, 21 nt, Human
auauuuccuuuaugugaauuu

SEQ ID NO: 2661499 - RNA, 20 nt, Human
auauuucagguucuucagaa

SEQ ID NO: 2661500 - RNA, 17 nt, Human
aucacagggugggccuc

SEQ ID NO: 2661501 - RNA, 21 nt, Human
aucacagggugggccucggcc

SEQ ID NO: 2661502 - RNA, 13 nt, Human
aucacagccucug

SEQ ID NO: 2661503 - RNA, 17 nt, Human
aucacaguuuuuccugg

SEQ ID NO: 2661504 - RNA, 18 nt, Human
aucacaguuuuuccugga

SEQ ID NO: 2661505 - RNA, 13 nt, Human
aucaccagacagg

SEQ ID NO: 2661506 - RNA, 16 nt, Human
aucaccgacugaaaau

SEQ ID NO: 2661507 - RNA, 17 nt, Human
aucauguacuuuuuagu

SEQ ID NO: 2661508 - RNA, 18 nt, Human
aucauguacuuuuuagua

SEQ ID NO: 2661509 - RNA, 16 nt, Human
aucauguccauacacu

SEQ ID NO: 2661510 - RNA, 22 nt, Human
aucaugaaacuuguuucacuga

SEQ ID NO: 2661511 - RNA, 23 nt, Human
aucaugaaacuuguuucacugaa

SEQ ID NO: 2661512 - RNA, 15 nt, Human
aucaccauguaagca

SEQ ID NO: 2661513 - RNA, 19 nt, Human
aucaugaaucuuuguuuca

SEQ ID NO: 2661514 - RNA, 20 nt, Human
auguuuccucuaguucuuug

SEQ ID NO: 2661515 - RNA, 23 nt, Human
auguuucucuuugauuauuugca

SEQ ID NO: 2661516 - RNA, 24 nt, Human
auguuucucuuugauuauuugcau

SEQ ID NO: 2661517 - RNA, 14 nt, Human
auguuuccucuagu

SEQ ID NO: 2661518 - RNA, 16 nt, Human
auguucucucuucucc

SEQ ID NO: 2661519 - RNA, 17 nt, Human
auguucucucuucucca

SEQ ID NO: 2661520 - RNA, 16 nt, Human
auguuccucaaagcuu

SEQ ID NO: 2661521 - RNA, 17 nt, Human
auguuccucaaagcuug

SEQ ID NO: 2661522 - RNA, 21 nt, Human
auguuccucaaagcuuggauu

SEQ ID NO: 2661523 - RNA, 19 nt, Human
auguguaugcacaguaaaa

SEQ ID NO: 2661524 - RNA, 15 nt, Human
auguguaugcacagu

SEQ ID NO: 2661525 - RNA, 15 nt, Human
augucuuuuuauuaa

SEQ ID NO: 2661526 - RNA, 22 nt, Human
augucuuuuuauuaaaauauuu

SEQ ID NO: 2661527 - RNA, 19 nt, Human
augucaauuucuguguugc

SEQ ID NO: 2661528 - RNA, 16 nt, Human
augucaauuucugugu

SEQ ID NO: 2661529 - RNA, 12 nt, Human
auguaauuuaaa

SEQ ID NO: 2661530 - RNA, 13 nt, Human
auguaauuuaaau

SEQ ID NO: 2661531 - RNA, 15 nt, Human
auguaauuuaaauga

SEQ ID NO: 2661532 - RNA, 16 nt, Human
auguaauuuaaaugaa

SEQ ID NO: 2661533 - RNA, 17 nt, Human
auguaauuuaaaugaaa

SEQ ID NO: 2661534 - RNA, 20 nt, Human
auguaauuuaaaugaaagaa

SEQ ID NO: 2661535 - RNA, 20 nt, Human
auguaaauuuuguaugaaaa

SEQ ID NO: 2661536 - RNA, 20 nt, Human
augguaaucuuuaccuguau

SEQ ID NO: 2661537 - RNA, 23 nt, Human
augguaaucuuuaccuguauaca

SEQ ID NO: 2661538 - RNA, 13 nt, Human
augguaauaagca

SEQ ID NO: 2661539 - RNA, 20 nt, Human
augguaauaagcacuguaaa

SEQ ID NO: 2661540 - RNA, 22 nt, Human
auggguuuuucccuguacagua

SEQ ID NO: 2661541 - RNA, 20 nt, Human
augguaccaaucaugaaucu

SEQ ID NO: 2661542 - RNA, 17 nt, Human
augguaccaaucaugaa

SEQ ID NO: 2661543 - RNA, 19 nt, Human
augguagccagaugauaaa

SEQ ID NO: 2661544 - RNA, 12 nt, Human
augguaguuucu

SEQ ID NO: 2661545 - RNA, 19 nt, Human
augguaguuucugugguug

SEQ ID NO: 2661546 - RNA, 18 nt, Human
augguaguuucugugguu

SEQ ID NO: 2661547 - RNA, 15 nt, Human
augguaguuucugug

SEQ ID NO: 2661548 - RNA, 13 nt, Human
augguaguuucug

SEQ ID NO: 2661549 - RNA, 23 nt, Human
augguaguuucugugguuggcug

SEQ ID NO: 2661550 - RNA, 22 nt, Human
augguaguuucugugguuggcu

SEQ ID NO: 2661551 - RNA, 20 nt, Human
augaugauguggaagaacuu

SEQ ID NO: 2661552 - RNA, 15 nt, Human
augaugauccuaggc

SEQ ID NO: 2661553 - RNA, 14 nt, Human
augaugguucacgu

SEQ ID NO: 2661554 - RNA, 17 nt, Human
augaugacaaaaaaugu

SEQ ID NO: 2661555 - RNA, 17 nt, Human
augaugguuuuaaacuu

SEQ ID NO: 2661556 - RNA, 14 nt, Human
augauguacagauu

SEQ ID NO: 2661557 - RNA, 18 nt, Human
augauguacagauucuuu

SEQ ID NO: 2661558 - RNA, 21 nt, Human
augauguacagauucuuucag

SEQ ID NO: 2661559 - RNA, 23 nt, Human
augccugcuuugaauaaaugugu

SEQ ID NO: 2661560 - RNA, 15 nt, Human
augcaugucuuuuaa

SEQ ID NO: 2661561 - RNA, 18 nt, Human
augcaugucuuuuaaaau

SEQ ID NO: 2661562 - RNA, 19 nt, Human
augcuugugaaaauguguu

SEQ ID NO: 2661563 - RNA, 12 nt, Human
auggaguauucu

SEQ ID NO: 2661564 - RNA, 14 nt, Human
augcugaggccugg

SEQ ID NO: 2661565 - RNA, 15 nt, Human
augcugaggccuggg

SEQ ID NO: 2661566 - RNA, 17 nt, Human
augcugaggccugggcc

SEQ ID NO: 2661567 - RNA, 18 nt, Human
augcugaggccugggccg

SEQ ID NO: 2661568 - RNA, 22 nt, Human
augcugaggccugggccgcugc

SEQ ID NO: 2661569 - RNA, 12 nt, Human
agcuaauuauuu

SEQ ID NO: 2661570 - RNA, 21 nt, Human
agcuaauucuacucacagugc

SEQ ID NO: 2661571 - RNA, 23 nt, Human
agcucaacuagugggguuuccug

SEQ ID NO: 2661572 - RNA, 13 nt, Human
agcucaaugcagu

SEQ ID NO: 2661573 - RNA, 15 nt, Human
agcucagaaccacag

SEQ ID NO: 2661574 - RNA, 16 nt, Human
agcgacuccguuggcc

SEQ ID NO: 2661575 - RNA, 17 nt, Human
agcgacuccguuggcca

SEQ ID NO: 2661576 - RNA, 18 nt, Human
agccuuugguucuggcca

SEQ ID NO: 2661577 - RNA, 19 nt, Human
agccuuugguucuggccag

SEQ ID NO: 2661578 - RNA, 21 nt, Human
agcgacuccguuggccacucc

SEQ ID NO: 2661579 - RNA, 19 nt, Human
agcgacuccguuggccacu

SEQ ID NO: 2661580 - RNA, 20 nt, Human
agcgacuccguuggccacuc

SEQ ID NO: 2661581 - RNA, 23 nt, Human
agcgaggcacccuuacuggcuua

SEQ ID NO: 2661582 - RNA, 12 nt, Human
agcgacuaaacu

SEQ ID NO: 2661583 - RNA, 16 nt, Human
agcgaucucuccacug

SEQ ID NO: 2661584 - RNA, 19 nt, Human
agcgaucucuccacugugc

SEQ ID NO: 2661585 - RNA, 13 nt, Human
agcgaucucuccu

SEQ ID NO: 2661586 - RNA, 17 nt, Human
agcgaucucuccuggcc

SEQ ID NO: 2661587 - RNA, 18 nt, Human
agcgaucucuccuggccu

SEQ ID NO: 2661588 - RNA, 19 nt, Human
agcgaucucuccuggccua

SEQ ID NO: 2661589 - RNA, 17 nt, Human
agcgagggcagcugcua

SEQ ID NO: 2661590 - RNA, 14 nt, Human
agcgagggcagcug

SEQ ID NO: 2661591 - RNA, 15 nt, Human
agcgagggcagcugc

SEQ ID NO: 2661592 - RNA, 16 nt, Human
agcgagggcagcugcu

SEQ ID NO: 2661593 - RNA, 16 nt, Human
agccugggccccagcu

SEQ ID NO: 2661594 - RNA, 12 nt, Human
agccugggcccc

SEQ ID NO: 2661595 - RNA, 11 nt, Human
agccugggccc

SEQ ID NO: 2661596 - RNA, 17 nt, Human
agccuggggcugaggcu

SEQ ID NO: 2661597 - RNA, 15 nt, Human
agccugggaaauaag

SEQ ID NO: 2661598 - RNA, 21 nt, Human
agccugggaaauaagcccccu

SEQ ID NO: 2661599 - RNA, 12 nt, Human
agccugggaggu

SEQ ID NO: 2661600 - RNA, 16 nt, Human
agccccaucuagggga

SEQ ID NO: 2661601 - RNA, 23 nt, Human
agcugaacaauaggcuguuccca

SEQ ID NO: 2661602 - RNA, 12 nt, Human
agcuccuguggc

SEQ ID NO: 2661603 - RNA, 13 nt, Human
agcuccuguggcc

SEQ ID NO: 2661604 - RNA, 15 nt, Human
agcuccuguggcccc

SEQ ID NO: 2661605 - RNA, 16 nt, Human
agcuccuguggcccca

SEQ ID NO: 2661606 - RNA, 19 nt, Human
agcuccuguggccccaccc

SEQ ID NO: 2661607 - RNA, 22 nt, Human
agcuccuguggccccacccugg

SEQ ID NO: 2661608 - RNA, 14 nt, Human
agcugagccugcag

SEQ ID NO: 2661609 - RNA, 16 nt, Human
agcugagccugcaggg

SEQ ID NO: 2661610 - RNA, 17 nt, Human
agcugagccugcaggga

SEQ ID NO: 2661611 - RNA, 21 nt, Human
agcugagccugcagggaagcc

SEQ ID NO: 2661612 - RNA, 23 nt, Human
agcugagccugcagggaagcccc

SEQ ID NO: 2661613 - RNA, 15 nt, Human
agcugaaccugggua

SEQ ID NO: 2661614 - RNA, 18 nt, Human
agcugaagaauugaaaag

SEQ ID NO: 2661615 - RNA, 16 nt, Human
agcugguugagguuuc

SEQ ID NO: 2661616 - RNA, 21 nt, Human
agcuccccgcuucugccugca

SEQ ID NO: 2661617 - RNA, 20 nt, Human
agcuucaugcacuuaaagaa

SEQ ID NO: 2661618 - RNA, 18 nt, Human
agcuucugaggcgcugcu

SEQ ID NO: 2661619 - RNA, 19 nt, Human
agcuucugcuuuucugccc

SEQ ID NO: 2661620 - RNA, 23 nt, Human
agcuuuguuuguugucagcugaa

SEQ ID NO: 2661621 - RNA, 12 nt, Human
agcuucugcuuu

SEQ ID NO: 2661622 - RNA, 17 nt, Human
agcuucugcuuuucugc

SEQ ID NO: 2661623 - RNA, 16 nt, Human
aggaaauucuccacug

SEQ ID NO: 2661624 - RNA, 19 nt, Human
aggaacauaugaaaauaca

SEQ ID NO: 2661625 - RNA, 16 nt, Human
aggaacauugugucua

SEQ ID NO: 2661626 - RNA, 21 nt, Human
aggaauaaauaaaaauggaua

SEQ ID NO: 2661627 - RNA, 19 nt, Human
aggaauaaauaaaaaugga

SEQ ID NO: 2661628 - RNA, 13 nt, Human
aggaauaaauaaa

SEQ ID NO: 2661629 - RNA, 14 nt, Human
aggaaguguuuaug

SEQ ID NO: 2661630 - RNA, 18 nt, Human
aggaacuguagaugaugu

SEQ ID NO: 2661631 - RNA, 15 nt, Human
aggagaggagagggg

SEQ ID NO: 2661632 - RNA, 13 nt, Human
aggaccagggccu

SEQ ID NO: 2661633 - RNA, 15 nt, Human
aggaccagggccuuu

SEQ ID NO: 2661634 - RNA, 20 nt, Human
aggaccagggccuuuucugg

SEQ ID NO: 2661635 - RNA, 20 nt, Human
aggaauauuuuccaaagagu

SEQ ID NO: 2661636 - RNA, 15 nt, Human
aggaauauuuuccaa

SEQ ID NO: 2661637 - RNA, 16 nt, Human
aggaauauuuuccaaa

SEQ ID NO: 2661638 - RNA, 13 nt, Human
agguccuaaggca

SEQ ID NO: 2661639 - RNA, 21 nt, Human
aggucuccaguuggcuuuacu

SEQ ID NO: 2661640 - RNA, 15 nt, Human
agguccucuggagcc

SEQ ID NO: 2661641 - RNA, 16 nt, Human
agguccucagaaagug

SEQ ID NO: 2661642 - RNA, 20 nt, Human
agguccucuggagcccuaac

SEQ ID NO: 2661643 - RNA, 22 nt, Human
aggucgguagguucagccaagg

SEQ ID NO: 2661644 - RNA, 20 nt, Human
aggucuauuuaaaaaaaaag

SEQ ID NO: 2661645 - RNA, 21 nt, Human
aggucuauuuaaaaaaaaagu

SEQ ID NO: 2661646 - RNA, 21 nt, Human
agggcaagcuccgcaggacuu

SEQ ID NO: 2661647 - RNA, 20 nt, Human
agggcaagcuccgcaggacu

SEQ ID NO: 2661648 - RNA, 19 nt, Human
agggcaagcuccgcaggac

SEQ ID NO: 2661649 - RNA, 17 nt, Human
agggcaagcuccgcagg

SEQ ID NO: 2661650 - RNA, 21 nt, Human
aggguauggacuaucugucug

SEQ ID NO: 2661651 - RNA, 22 nt, Human
aggggccuggagauccuccugc

SEQ ID NO: 2661652 - RNA, 13 nt, Human
aggguauuccaga

SEQ ID NO: 2661653 - RNA, 18 nt, Human
aggggccuggagauccuc

SEQ ID NO: 2661654 - RNA, 21 nt, Human
aggggccuggagauccuccug

SEQ ID NO: 2661655 - RNA, 22 nt, Human
agggucggaacccaagcuuaga

SEQ ID NO: 2661656 - RNA, 17 nt, Human
agggucggaacccaagc

SEQ ID NO: 2661657 - RNA, 21 nt, Human
agggccuuggaaauuccugua

SEQ ID NO: 2661658 - RNA, 15 nt, Human
agggccuuuucuggc

SEQ ID NO: 2661659 - RNA, 19 nt, Human
agggccuuuucuggcaccg

SEQ ID NO: 2661660 - RNA, 20 nt, Human
agggccuuuucuggcaccgc

SEQ ID NO: 2661661 - RNA, 13 nt, Human
aggggccuggaga

SEQ ID NO: 2661662 - RNA, 14 nt, Human
aggggccuggagau

SEQ ID NO: 2661663 - RNA, 15 nt, Human
agggacccuuugggg

SEQ ID NO: 2661664 - RNA, 16 nt, Human
agggacccuuuggggg

SEQ ID NO: 2661665 - RNA, 17 nt, Human
agggacccuuugggggu

SEQ ID NO: 2661666 - RNA, 19 nt, Human
aggcugguacaacggaggc

SEQ ID NO: 2661667 - RNA, 21 nt, Human
aggcugguacaacggaggccu

SEQ ID NO: 2661668 - RNA, 20 nt, Human
aggcugguggagaacucugg

SEQ ID NO: 2661669 - RNA, 19 nt, Human
aggcugaggcaggagaaug

SEQ ID NO: 2661670 - RNA, 19 nt, Human
aggcgucaacgugcauuuu

SEQ ID NO: 2661671 - RNA, 19 nt, Human
aggcuaaggcaggaaaauu

SEQ ID NO: 2661672 - RNA, 17 nt, Human
aggcgggggcugcccuu

SEQ ID NO: 2661673 - RNA, 16 nt, Human
aggcauggcccugggc

SEQ ID NO: 2661674 - RNA, 22 nt, Human
aggccauggcaucccuuuuuca

SEQ ID NO: 2661675 - RNA, 15 nt, Human
aggcccugagacagg

SEQ ID NO: 2661676 - RNA, 14 nt, Human
aggcccuggccucc

SEQ ID NO: 2661677 - RNA, 15 nt, Human
aggcccuggccuccc

SEQ ID NO: 2661678 - RNA, 13 nt, Human
aggccggcagccc

SEQ ID NO: 2661679 - RNA, 16 nt, Human
aggccggcagccccag

SEQ ID NO: 2661680 - RNA, 15 nt, Human
aggccggcagcccca

SEQ ID NO: 2661681 - RNA, 23 nt, Human
aggccggcagccccagccugcua

SEQ ID NO: 2661682 - RNA, 22 nt, Human
aggccggcagccccagccugcu

SEQ ID NO: 2661683 - RNA, 21 nt, Human
aggccggcagccccagccugc

SEQ ID NO: 2661684 - RNA, 20 nt, Human
aggccggcagccccagccug

SEQ ID NO: 2661685 - RNA, 19 nt, Human
aggccggcagccccagccu

SEQ ID NO: 2661686 - RNA, 18 nt, Human
aggccgcgcguccagcug

SEQ ID NO: 2661687 - RNA, 19 nt, Human
aggccgcgcguccagcugc

SEQ ID NO: 2661688 - RNA, 20 nt, Human
aggccgcgcguccagcugcc

SEQ ID NO: 2661689 - RNA, 16 nt, Human
aggccgcgcccuuucc

SEQ ID NO: 2661690 - RNA, 21 nt, Human
aggcccuggccuccccugcca

SEQ ID NO: 2661691 - RNA, 22 nt, Human
aggcccuggccuccccugccac

SEQ ID NO: 2661692 - RNA, 23 nt, Human
aggcccuggccuccccugccacc

SEQ ID NO: 2661693 - RNA, 16 nt, Human
aggcaccuuuuacugu

SEQ ID NO: 2661694 - RNA, 17 nt, Human
aggcaccuuuuacugug

SEQ ID NO: 2661695 - RNA, 13 nt, Human
aggcaccucuucc

SEQ ID NO: 2661696 - RNA, 14 nt, Human
aggcaccucuuccu

SEQ ID NO: 2661697 - RNA, 20 nt, Human
aggagagggcgcuccucucu

SEQ ID NO: 2661698 - RNA, 16 nt, Human
aggcacgggugguccc

SEQ ID NO: 2661699 - RNA, 17 nt, Human
aggcacggguggucccc

SEQ ID NO: 2661700 - RNA, 15 nt, Human
aggcaugguggccca

SEQ ID NO: 2661701 - RNA, 14 nt, Human
aggcauggcccugg

SEQ ID NO: 2661702 - RNA, 15 nt, Human
aggcauggcccuggg

SEQ ID NO: 2661703 - RNA, 12 nt, Human
aggcauggcccu

SEQ ID NO: 2661704 - RNA, 13 nt, Human
aggcauggcccug

SEQ ID NO: 2661705 - RNA, 16 nt, Human
aggcagauuugagguu

SEQ ID NO: 2661706 - RNA, 20 nt, Human
aggcagauuuuacagagcgc

SEQ ID NO: 2661707 - RNA, 22 nt, Human
aggcagauuuuacagagcgcac

SEQ ID NO: 2661708 - RNA, 15 nt, Human
agaggaauccuggca

SEQ ID NO: 2661709 - RNA, 17 nt, Human
agaggaauccuggcagc

SEQ ID NO: 2661710 - RNA, 21 nt, Human
agaggaauccuggcagcccag

SEQ ID NO: 2661711 - RNA, 18 nt, Human
agaggaauuacgugcucu

SEQ ID NO: 2661712 - RNA, 13 nt, Human
agaggaaugaaaa

SEQ ID NO: 2661713 - RNA, 15 nt, Human
agaggaaugaaaaaa

SEQ ID NO: 2661714 - RNA, 17 nt, Human
agaggaaugaaaaaagc

SEQ ID NO: 2661715 - RNA, 18 nt, Human
agaggaaugaaaaaagcu

SEQ ID NO: 2661716 - RNA, 22 nt, Human
agaggagccuuuuuaaaacaca

SEQ ID NO: 2661717 - RNA, 23 nt, Human
agaggagccuuuuuaaaacacau

SEQ ID NO: 2661718 - RNA, 15 nt, Human
agagagagaggacag

SEQ ID NO: 2661719 - RNA, 15 nt, Human
agagagagagagaga

SEQ ID NO: 2661720 - RNA, 15 nt, Human
agagagagagagagg

SEQ ID NO: 2661721 - RNA, 13 nt, Human
agagagagagagg

SEQ ID NO: 2661722 - RNA, 14 nt, Human
agagagagaggaca

SEQ ID NO: 2661723 - RNA, 13 nt, Human
agagccauacaua

SEQ ID NO: 2661724 - RNA, 15 nt, Human
agagccauacauaaa

SEQ ID NO: 2661725 - RNA, 16 nt, Human
agagccauacauaaaa

SEQ ID NO: 2661726 - RNA, 18 nt, Human
agagccauacauaaaaga

SEQ ID NO: 2661727 - RNA, 19 nt, Human
agagccauacauaaaagaa

SEQ ID NO: 2661728 - RNA, 20 nt, Human
agagccauacauaaaagaaa

SEQ ID NO: 2661729 - RNA, 21 nt, Human
agagccauacauaaaagaaau

SEQ ID NO: 2661730 - RNA, 14 nt, Human
agagcccuugccuc

SEQ ID NO: 2661731 - RNA, 22 nt, Human
agagccgggcacauugagcugu

SEQ ID NO: 2661732 - RNA, 19 nt, Human
agagcccuugccuccccau

SEQ ID NO: 2661733 - RNA, 19 nt, Human
agagccggcccgccucucc

SEQ ID NO: 2661734 - RNA, 21 nt, Human
agagccggcccgccucuccuc

SEQ ID NO: 2661735 - RNA, 15 nt, Human
agaccagauuaaacu

SEQ ID NO: 2661736 - RNA, 18 nt, Human
agaccagauuaaacuuca

SEQ ID NO: 2661737 - RNA, 19 nt, Human
agacagccaaaggcuggcg

SEQ ID NO: 2661738 - RNA, 18 nt, Human
agacagccaaaggcuggc

SEQ ID NO: 2661739 - RNA, 12 nt, Human
agacaaauauuc

SEQ ID NO: 2661740 - RNA, 22 nt, Human
agacaaauauuccuuugcauau

SEQ ID NO: 2661741 - RNA, 21 nt, Human
acuuuccgaaaaauaaagaca

SEQ ID NO: 2661742 - RNA, 16 nt, Human
agaagugaaugcuggg

SEQ ID NO: 2661743 - RNA, 17 nt, Human
agaagugaaugcuggga

SEQ ID NO: 2661744 - RNA, 19 nt, Human
agaagugaaugcugggacu

SEQ ID NO: 2661745 - RNA, 21 nt, Human
agaagugaaugcugggacuca

SEQ ID NO: 2661746 - RNA, 22 nt, Human
agaaugcugcaggacuugagaa

SEQ ID NO: 2661747 - RNA, 21 nt, Human
agaaugacuauauaauuuauu

SEQ ID NO: 2661748 - RNA, 15 nt, Human
agaaugcaaccaagu

SEQ ID NO: 2661749 - RNA, 20 nt, Human
agaaugcaaccaagucacac

SEQ ID NO: 2661750 - RNA, 21 nt, Human
agaauggcgccaccagcucug

SEQ ID NO: 2661751 - RNA, 15 nt, Human
agaaggugccacuuu

SEQ ID NO: 2661752 - RNA, 14 nt, Human
agaagguuuauugu

SEQ ID NO: 2661753 - RNA, 16 nt, Human
agaagguuuauuguua

SEQ ID NO: 2661754 - RNA, 17 nt, Human
agaagguuuauuguuaa

SEQ ID NO: 2661755 - RNA, 18 nt, Human
agaagguuuauuguuaau

SEQ ID NO: 2661756 - RNA, 14 nt, Human
agaaguaacuuacu

SEQ ID NO: 2661757 - RNA, 21 nt, Human
agaaguacugcccuuuugugu

SEQ ID NO: 2661758 - RNA, 20 nt, Human
agaaguaagaggcuaccucu

SEQ ID NO: 2661759 - RNA, 21 nt, Human
agaaguaagaggcuaccucuu

SEQ ID NO: 2661760 - RNA, 14 nt, Human
agaaguauuuuuag

SEQ ID NO: 2661761 - RNA, 15 nt, Human
agaaguauuuuuaga

SEQ ID NO: 2661762 - RNA, 19 nt, Human
agaaguauuuuuagaauaa

SEQ ID NO: 2661763 - RNA, 21 nt, Human
agaaguauuuuuagaauaaga

SEQ ID NO: 2661764 - RNA, 21 nt, Human
agaagagauugugguuucauu

SEQ ID NO: 2661765 - RNA, 15 nt, Human
agauggucauccaga

SEQ ID NO: 2661766 - RNA, 18 nt, Human
agaugguuugagccugag

SEQ ID NO: 2661767 - RNA, 13 nt, Human
agauguaaaaaga

SEQ ID NO: 2661768 - RNA, 13 nt, Human
agauucucaaagg

SEQ ID NO: 2661769 - RNA, 19 nt, Human
agaugguauauuugguacu

SEQ ID NO: 2661770 - RNA, 22 nt, Human
agagugauagucuuuugcuuuu

SEQ ID NO: 2661771 - RNA, 20 nt, Human
agagugauagucuuuugcuu

SEQ ID NO: 2661772 - RNA, 12 nt, Human
agagggggugga

SEQ ID NO: 2661773 - RNA, 19 nt, Human
agaggggguggaggggugu

SEQ ID NO: 2661774 - RNA, 13 nt, Human
agauucuuaauuc

SEQ ID NO: 2661775 - RNA, 15 nt, Human
agcaaaauaaaacau

SEQ ID NO: 2661776 - RNA, 18 nt, Human
agcaaaagaugcuucuca

SEQ ID NO: 2661777 - RNA, 19 nt, Human
agcaaacuaacuugacuuu

SEQ ID NO: 2661778 - RNA, 16 nt, Human
agauucuucuguguuu

SEQ ID NO: 2661779 - RNA, 13 nt, Human
agauucuucugug

SEQ ID NO: 2661780 - RNA, 20 nt, Human
agauucuuucaguucuuugg

SEQ ID NO: 2661781 - RNA, 13 nt, Human
agcaaaugcaaaa

SEQ ID NO: 2661782 - RNA, 14 nt, Human
agcaaaugcaaaaa

SEQ ID NO: 2661783 - RNA, 22 nt, Human
agcaaaugcaaaaacucuuuga

SEQ ID NO: 2661784 - RNA, 19 nt, Human
agcacaauuugcacuaaau

SEQ ID NO: 2661785 - RNA, 15 nt, Human
agcaaucucuucauu

SEQ ID NO: 2661786 - RNA, 18 nt, Human
agcaaucucuucauuauu

SEQ ID NO: 2661787 - RNA, 23 nt, Human
agcaaucucuucauuauucucug

SEQ ID NO: 2661788 - RNA, 15 nt, Human
agcagccucucccca

SEQ ID NO: 2661789 - RNA, 21 nt, Human
agcagccucuccccaggucca

SEQ ID NO: 2661790 - RNA, 18 nt, Human
agcagccucuccccaggu

SEQ ID NO: 2661791 - RNA, 20 nt, Human
agcagccucuccccaggucc

SEQ ID NO: 2661792 - RNA, 21 nt, Human
agcccuccccauggagccagc

SEQ ID NO: 2661793 - RNA, 20 nt, Human
agcccuccccauggagccag

SEQ ID NO: 2661794 - RNA, 19 nt, Human
agcccuccccauggagcca

SEQ ID NO: 2661795 - RNA, 12 nt, Human
agcccuccccau

SEQ ID NO: 2661796 - RNA, 17 nt, Human
agccccacauguccagc

SEQ ID NO: 2661797 - RNA, 12 nt, Human
agcccucccacu

SEQ ID NO: 2661798 - RNA, 13 nt, Human
agcccucccacuu

SEQ ID NO: 2661799 - RNA, 22 nt, Human
agcccucccacuuugcuguucc

SEQ ID NO: 2661800 - RNA, 15 nt, Human
agcccaccccucaac

SEQ ID NO: 2661801 - RNA, 20 nt, Human
agccaagauuuuccucuugu

SEQ ID NO: 2661802 - RNA, 22 nt, Human
agccaagauuuuccucuuguga

SEQ ID NO: 2661803 - RNA, 12 nt, Human
agccaaagaaaa

SEQ ID NO: 2661804 - RNA, 13 nt, Human
agccaaagaaaaa

SEQ ID NO: 2661805 - RNA, 23 nt, Human
aagggaugcaggcuccccugagg

SEQ ID NO: 2661806 - RNA, 16 nt, Human
aagggaugcaggcucc

SEQ ID NO: 2661807 - RNA, 12 nt, Human
aagggauauuuu

SEQ ID NO: 2661808 - RNA, 12 nt, Human
aagggagaagaa

SEQ ID NO: 2661809 - RNA, 13 nt, Human
aagggauaaagaa

SEQ ID NO: 2661810 - RNA, 13 nt, Human
aagguguuugaaa

SEQ ID NO: 2661811 - RNA, 12 nt, Human
aagguguuugaa

SEQ ID NO: 2661812 - RNA, 15 nt, Human
aagguuauaauuuuu

SEQ ID NO: 2661813 - RNA, 14 nt, Human
aagggcauaaagua

SEQ ID NO: 2661814 - RNA, 15 nt, Human
aagggcauaaaguaa

SEQ ID NO: 2661815 - RNA, 21 nt, Human
aagggcauaaaguaaauacau

SEQ ID NO: 2661816 - RNA, 18 nt, Human
aaggucuuuaaaauauug

SEQ ID NO: 2661817 - RNA, 12 nt, Human
aaggucuuucag

SEQ ID NO: 2661818 - RNA, 18 nt, Human
aaggucuuucaguacuuu

SEQ ID NO: 2661819 - RNA, 19 nt, Human
aaggucuuucaguacuuuu

SEQ ID NO: 2661820 - RNA, 20 nt, Human
aaggcagauuuuacagagcg

SEQ ID NO: 2661821 - RNA, 18 nt, Human
aaggcacuucauguaaag

SEQ ID NO: 2661822 - RNA, 12 nt, Human
aaggaccuuaag

SEQ ID NO: 2661823 - RNA, 18 nt, Human
aaggaccuuaagacagag

SEQ ID NO: 2661824 - RNA, 19 nt, Human
aaggaccuuaagacagagu

SEQ ID NO: 2661825 - RNA, 14 nt, Human
aaggacaaagugcc

SEQ ID NO: 2661826 - RNA, 16 nt, Human
aaggacaaagugccaa

SEQ ID NO: 2661827 - RNA, 19 nt, Human
aaggacaaagugccaaaga

SEQ ID NO: 2661828 - RNA, 20 nt, Human
aaggacaaagugccaaagaa

SEQ ID NO: 2661829 - RNA, 18 nt, Human
aagcugcccacuguuucu

SEQ ID NO: 2661830 - RNA, 20 nt, Human
aagcugcccacuguuucucu

SEQ ID NO: 2661831 - RNA, 21 nt, Human
aaggaauuaccaagaauaucc

SEQ ID NO: 2661832 - RNA, 18 nt, Human
aacuguuguagaagacaa

SEQ ID NO: 2661833 - RNA, 19 nt, Human
aacuguuguagaagacaaa

SEQ ID NO: 2661834 - RNA, 18 nt, Human
aagacaguguauguagaa

SEQ ID NO: 2661835 - RNA, 14 nt, Human
aagacaggagacaa

SEQ ID NO: 2661836 - RNA, 18 nt, Human
aagacaggagacaaaaga

SEQ ID NO: 2661837 - RNA, 14 nt, Human
aagagaaguuauuu

SEQ ID NO: 2661838 - RNA, 21 nt, Human
aagagaaguuauuuucuacag

SEQ ID NO: 2661839 - RNA, 21 nt, Human
aagagaaguuguaaaguaugu

SEQ ID NO: 2661840 - RNA, 11 nt, Human
aagagaaugag

SEQ ID NO: 2661841 - RNA, 16 nt, Human
aagagaaugaguccuu

SEQ ID NO: 2661842 - RNA, 11 nt, Human
aagagaacucg

SEQ ID NO: 2661843 - RNA, 20 nt, Human
aagagaacucgcgcucagua

SEQ ID NO: 2661844 - RNA, 17 nt, Human
aagagagaacaggacua

SEQ ID NO: 2661845 - RNA, 13 nt, Human
aagagacacucca

SEQ ID NO: 2661846 - RNA, 14 nt, Human
aagagacaggcagg

SEQ ID NO: 2661847 - RNA, 13 nt, Human
aagcagaggacca

SEQ ID NO: 2661848 - RNA, 15 nt, Human
aagcagaggaccagg

SEQ ID NO: 2661849 - RNA, 18 nt, Human
aagcagaggaccagggcc

SEQ ID NO: 2661850 - RNA, 19 nt, Human
aagcagaggaccagggccu

SEQ ID NO: 2661851 - RNA, 21 nt, Human
aagcagaggaaggagaggaga

SEQ ID NO: 2661852 - RNA, 14 nt, Human
aagcagaguuuuca

SEQ ID NO: 2661853 - RNA, 15 nt, Human
aagcagaguuuucau

SEQ ID NO: 2661854 - RNA, 18 nt, Human
aagauugccccaucuaga

SEQ ID NO: 2661855 - RNA, 16 nt, Human
aagauuuuccucuugu

SEQ ID NO: 2661856 - RNA, 19 nt, Human
aagauuuuccucuugugau

SEQ ID NO: 2661857 - RNA, 20 nt, Human
aagauuuuccucuugugauu

SEQ ID NO: 2661858 - RNA, 12 nt, Human
aagauagacagg

SEQ ID NO: 2661859 - RNA, 13 nt, Human
aagauagacaggu

SEQ ID NO: 2661860 - RNA, 16 nt, Human
aagauagacagguccu

SEQ ID NO: 2661861 - RNA, 17 nt, Human
aagauagacagguccug

SEQ ID NO: 2661862 - RNA, 19 nt, Human
aagauagacagguccugau

SEQ ID NO: 2661863 - RNA, 16 nt, Human
aagauacuuuguauug

SEQ ID NO: 2661864 - RNA, 14 nt, Human
aagauacuuuguau

SEQ ID NO: 2661865 - RNA, 13 nt, Human
aagauacuuugua

SEQ ID NO: 2661866 - RNA, 12 nt, Human
aagauacuuugu

SEQ ID NO: 2661867 - RNA, 14 nt, Human
aagauugauaucua

SEQ ID NO: 2661868 - RNA, 16 nt, Human
aagauugauaucuaua

SEQ ID NO: 2661869 - RNA, 20 nt, Human
aagauugauaucuauaaaau

SEQ ID NO: 2661870 - RNA, 21 nt, Human
aagauugauaucuauaaaaua

SEQ ID NO: 2661871 - RNA, 20 nt, Human
aagauucuucuguguuuaua

SEQ ID NO: 2661872 - RNA, 22 nt, Human
aauaguuuauuuuaaaacaaua

SEQ ID NO: 2661873 - RNA, 20 nt, Human
aauaguuuauuuuaaaacaa

SEQ ID NO: 2661874 - RNA, 15 nt, Human
aauagaaauuuugua

SEQ ID NO: 2661875 - RNA, 16 nt, Human
aauagaaauuuuguaa

SEQ ID NO: 2661876 - RNA, 17 nt, Human
aauagaaauuuuguaag

SEQ ID NO: 2661877 - RNA, 18 nt, Human
aauagaaauuuuguaaga

SEQ ID NO: 2661878 - RNA, 19 nt, Human
aauagaaauuuuguaagaa

SEQ ID NO: 2661879 - RNA, 12 nt, Human
aauagaaacaag

SEQ ID NO: 2661880 - RNA, 16 nt, Human
aauacuguucuuucca

SEQ ID NO: 2661881 - RNA, 11 nt, Human
aauauaaaaaa

SEQ ID NO: 2661882 - RNA, 12 nt, Human
aauauaaaauua

SEQ ID NO: 2661883 - RNA, 15 nt, Human
aauauaaaauuauga

SEQ ID NO: 2661884 - RNA, 14 nt, Human
aauauaaacaaaga

SEQ ID NO: 2661885 - RNA, 21 nt, Human
aauauaaacaaagauucauga

SEQ ID NO: 2661886 - RNA, 22 nt, Human
aauauaaacaaagauucaugau

SEQ ID NO: 2661887 - RNA, 23 nt, Human
aauauaaacaaagauucaugauu

SEQ ID NO: 2661888 - RNA, 12 nt, Human
aauacuuccaga

SEQ ID NO: 2661889 - RNA, 14 nt, Human
aauacuuccagaag

SEQ ID NO: 2661890 - RNA, 15 nt, Human
aauacuuccagaagu

SEQ ID NO: 2661891 - RNA, 22 nt, Human
aauacuugaaccauaaaauguc

SEQ ID NO: 2661892 - RNA, 19 nt, Human
aauacuugaaccauaaaau

SEQ ID NO: 2661893 - RNA, 17 nt, Human
aauacuugaaccauaaa

SEQ ID NO: 2661894 - RNA, 14 nt, Human
aauacuugaaccau

SEQ ID NO: 2661895 - RNA, 15 nt, Human
aauauagcugagacu

SEQ ID NO: 2661896 - RNA, 14 nt, Human
aauauaacacauuu

SEQ ID NO: 2661897 - RNA, 15 nt, Human
aauauaacacauuuu

SEQ ID NO: 2661898 - RNA, 18 nt, Human
aaguggggugcugggagg

SEQ ID NO: 2661899 - RNA, 11 nt, Human
aagugggccca

SEQ ID NO: 2661900 - RNA, 13 nt, Human
aagugggcccacc

SEQ ID NO: 2661901 - RNA, 15 nt, Human
aagugggcccacccg

SEQ ID NO: 2661902 - RNA, 19 nt, Human
aagugggcccacccggugg

SEQ ID NO: 2661903 - RNA, 11 nt, Human
aaguucuuaug

SEQ ID NO: 2661904 - RNA, 19 nt, Human
aaguucuuaugaggagggg

SEQ ID NO: 2661905 - RNA, 20 nt, Human
aaguucuuaugaggagggga

SEQ ID NO: 2661906 - RNA, 22 nt, Human
aaguucuuaugaggaggggagg

SEQ ID NO: 2661907 - RNA, 20 nt, Human
aaguauaaaauaguaugaaa

SEQ ID NO: 2661908 - RNA, 22 nt, Human
aaguauaaaauaguaugaaaau

SEQ ID NO: 2661909 - RNA, 14 nt, Human
aaguaguucuguau

SEQ ID NO: 2661910 - RNA, 23 nt, Human
aaguaguucuguauuugaaagug

SEQ ID NO: 2661911 - RNA, 22 nt, Human
aaguaguucuguauuugaaagu

SEQ ID NO: 2661912 - RNA, 21 nt, Human
aaguaguucuguauuugaaag

SEQ ID NO: 2661913 - RNA, 20 nt, Human
aaguaguucuguauuugaaa

SEQ ID NO: 2661914 - RNA, 19 nt, Human
aaguaguucuguauuugaa

SEQ ID NO: 2661915 - RNA, 16 nt, Human
aaguaguucuguauuu

SEQ ID NO: 2661916 - RNA, 18 nt, Human
aagugcuauuacgaaguu

SEQ ID NO: 2661917 - RNA, 13 nt, Human
aagugcuauuacg

SEQ ID NO: 2661918 - RNA, 15 nt, Human
aauaaacccucagag

SEQ ID NO: 2661919 - RNA, 16 nt, Human
aauaaaauuuguugca

SEQ ID NO: 2661920 - RNA, 17 nt, Human
aauaaaauuuguugcau

SEQ ID NO: 2661921 - RNA, 12 nt, Human
aauaaaauuuaa

SEQ ID NO: 2661922 - RNA, 13 nt, Human
aauaaaauuuaaa

SEQ ID NO: 2661923 - RNA, 11 nt, Human
aauaaaauuug

SEQ ID NO: 2661924 - RNA, 12 nt, Human
aauaaaauuugu

SEQ ID NO: 2661925 - RNA, 13 nt, Human
aauaaaauuuguu

SEQ ID NO: 2661926 - RNA, 14 nt, Human
aauaaaauuuguug

SEQ ID NO: 2661927 - RNA, 15 nt, Human
aaguugaaaaucaua

SEQ ID NO: 2661928 - RNA, 9 nt, Human
aaguucuua

SEQ ID NO: 2661929 - RNA, 22 nt, Human
aaguugcagauguuagauauuu

SEQ ID NO: 2661930 - RNA, 15 nt, Human
aauaauauauuuucu

SEQ ID NO: 2661931 - RNA, 17 nt, Human
aauaauauauuuucugu

SEQ ID NO: 2661932 - RNA, 19 nt, Human
aauaauauauuuucuguuu

SEQ ID NO: 2661933 - RNA, 16 nt, Human
aauaauaaaugcccuc

SEQ ID NO: 2661934 - RNA, 13 nt, Human
aauaauagacugu

SEQ ID NO: 2661935 - RNA, 14 nt, Human
aauaauagacugua

SEQ ID NO: 2661936 - RNA, 12 nt, Human
aauaaagcuugu

SEQ ID NO: 2661937 - RNA, 13 nt, Human
aaucauuuucauu

SEQ ID NO: 2661938 - RNA, 17 nt, Human
aaucauuuucauuccua

SEQ ID NO: 2661939 - RNA, 18 nt, Human
aaucauuuucauuccuaa

SEQ ID NO: 2661940 - RNA, 14 nt, Human
aaucauuuguuuac

SEQ ID NO: 2661941 - RNA, 16 nt, Human
aaucauuuguuuacau

SEQ ID NO: 2661942 - RNA, 22 nt, Human
aaucauuuguuuacauuugaug

SEQ ID NO: 2661943 - RNA, 16 nt, Human
aaugauacugauggug

SEQ ID NO: 2661944 - RNA, 15 nt, Human
aaugaugugcaaaac

SEQ ID NO: 2661945 - RNA, 17 nt, Human
aaugaugugcaaaaccu

SEQ ID NO: 2661946 - RNA, 14 nt, Human
aaucuggagaccag

SEQ ID NO: 2661947 - RNA, 16 nt, Human
aaugcuccccacagcg

SEQ ID NO: 2661948 - RNA, 20 nt, Human
aaugcuccccacagcguccc

SEQ ID NO: 2661949 - RNA, 14 nt, Human
aaugcucaaagaaa

SEQ ID NO: 2661950 - RNA, 14 nt, Human
aaugggaccugugg

SEQ ID NO: 2661951 - RNA, 23 nt, Human
aauggucacguuuggugcuucuc

SEQ ID NO: 2661952 - RNA, 22 nt, Human
aauggucacguuuggugcuucu

SEQ ID NO: 2661953 - RNA, 15 nt, Human
aauggguuacuugau

SEQ ID NO: 2661954 - RNA, 16 nt, Human
aaugcuacaauuuuaa

SEQ ID NO: 2661955 - RNA, 20 nt, Human
aaugcuacaauuuuaagagg

SEQ ID NO: 2661956 - RNA, 15 nt, Human
aaugcuacaugugag

SEQ ID NO: 2661957 - RNA, 11 nt, Human
aaugcccucuu

SEQ ID NO: 2661958 - RNA, 16 nt, Human
aacgaaauaucaaagu

SEQ ID NO: 2661959 - RNA, 16 nt, Human
aacgaagaguucccuu

SEQ ID NO: 2661960 - RNA, 23 nt, Human
aacgaagaguucccuugaaacuu

SEQ ID NO: 2661961 - RNA, 18 nt, Human
aacgaaccuuggccuggg

SEQ ID NO: 2661962 - RNA, 15 nt, Human
aacgaaccuuggccu

SEQ ID NO: 2661963 - RNA, 21 nt, Human
aacgaaccuuggccugggccg

SEQ ID NO: 2661964 - RNA, 17 nt, Human
aacgaucacaaaugacu

SEQ ID NO: 2661965 - RNA, 22 nt, Human
aacgaucacaaaugacuuuauu

SEQ ID NO: 2661966 - RNA, 18 nt, Human
aacgccuccccugcccca

SEQ ID NO: 2661967 - RNA, 20 nt, Human
aacugaagcagccucucccc

SEQ ID NO: 2661968 - RNA, 21 nt, Human
aacugaagcagccucucccca

SEQ ID NO: 2661969 - RNA, 20 nt, Human
aacggugcugugagggaggg

SEQ ID NO: 2661970 - RNA, 17 nt, Human
aacgcuaaagagcccuu

SEQ ID NO: 2661971 - RNA, 21 nt, Human
aacgcuaaagagcccuugccu

SEQ ID NO: 2661972 - RNA, 22 nt, Human
aacgcuaaagagcccuugccuc

SEQ ID NO: 2661973 - RNA, 19 nt, Human
aacguccucuuuaguuuuu

SEQ ID NO: 2661974 - RNA, 13 nt, Human
aacucaaauacac

SEQ ID NO: 2661975 - RNA, 17 nt, Human
aacucaaacucuuaaaa

SEQ ID NO: 2661976 - RNA, 16 nt, Human
aaccaggcaccucuuc

SEQ ID NO: 2661977 - RNA, 18 nt, Human
aaccaggcaccucuuccu

SEQ ID NO: 2661978 - RNA, 18 nt, Human
aacaugcuggugaauauu

SEQ ID NO: 2661979 - RNA, 22 nt, Human
aacaugcuggugaauauuuuca

SEQ ID NO: 2661980 - RNA, 23 nt, Human
aacaucucaauaaagugcuuuaa

SEQ ID NO: 2661981 - RNA, 14 nt, Human
aaccauaaauucaa

SEQ ID NO: 2661982 - RNA, 18 nt, Human
aaccauaaaauguccagu

SEQ ID NO: 2661983 - RNA, 17 nt, Human
aaccgaguagaaaaugu

SEQ ID NO: 2661984 - RNA, 19 nt, Human
aaccgaguagaaaauguga

SEQ ID NO: 2661985 - RNA, 23 nt, Human
aaccgaguagaaaaugugacccu

SEQ ID NO: 2661986 - RNA, 12 nt, Human
aaccgcacagcu

SEQ ID NO: 2661987 - RNA, 13 nt, Human
aaccgcacagcuc

SEQ ID NO: 2661988 - RNA, 14 nt, Human
aaccgcacagcuca

SEQ ID NO: 2661989 - RNA, 15 nt, Human
aaccgcacagcucag

SEQ ID NO: 2661990 - RNA, 23 nt, Human
aacacuagggccuuggaaauucc

SEQ ID NO: 2661991 - RNA, 20 nt, Human
aacagcaaaugcaaaaacuc

SEQ ID NO: 2661992 - RNA, 20 nt, Human
aaaucugagggaaauguuuu

SEQ ID NO: 2661993 - RNA, 21 nt, Human
aaaucugagggaaauguuuug

SEQ ID NO: 2661994 - RNA, 22 nt, Human
aaaucugagggaaauguuuugu

SEQ ID NO: 2661995 - RNA, 18 nt, Human
aaaugcucaaagaaaucu

SEQ ID NO: 2661996 - RNA, 13 nt, Human
aaaugcuccccac

SEQ ID NO: 2661997 - RNA, 11 nt, Human
aacaaaauuug

SEQ ID NO: 2661998 - RNA, 20 nt, Human
aacaaaauuugacuaauuuu

SEQ ID NO: 2661999 - RNA, 24 nt, Human
aacaaaauuugacuaauuuuacau

SEQ ID NO: 2662000 - RNA, 19 nt, Human
aaauugaguugcacuuauu

SEQ ID NO: 2662001 - RNA, 19 nt, Human
aacaccucugcacaagcug

SEQ ID NO: 2662002 - RNA, 17 nt, Human
aacacuaacucaccagc

SEQ ID NO: 2662003 - RNA, 18 nt, Human
aacacuaacucaccagcc

SEQ ID NO: 2662004 - RNA, 19 nt, Human
aacacuaacucaccagccc

SEQ ID NO: 2662005 - RNA, 19 nt, Human
aacaaauaaaaaagcucuu

SEQ ID NO: 2662006 - RNA, 19 nt, Human
aaaauugaacaaagacuac

SEQ ID NO: 2662007 - RNA, 21 nt, Human
aaacaggcaguuggccagaga

SEQ ID NO: 2662008 - RNA, 11 nt, Human
aaacaggcagu

SEQ ID NO: 2662009 - RNA, 17 nt, Human
aaaaucccccagcacuu

SEQ ID NO: 2662010 - RNA, 20 nt, Human
aaaauuaagcaaauguuaaa

SEQ ID NO: 2662011 - RNA, 18 nt, Human
aaaauuaagguguuugaa

SEQ ID NO: 2662012 - RNA, 17 nt, Human
aaaauuaagguguuuga

SEQ ID NO: 2662013 - RNA, 15 nt, Human
aaaauuagccaagug

SEQ ID NO: 2662014 - RNA, 20 nt, Human
aaaauuaagguguuugaaaa

SEQ ID NO: 2662015 - RNA, 18 nt, Human
aaaauuagccgggcgugg

SEQ ID NO: 2662016 - RNA, 14 nt, Human
aaaauccaaaaaga

SEQ ID NO: 2662017 - RNA, 15 nt, Human
aaaauccaaaaagaa

SEQ ID NO: 2662018 - RNA, 16 nt, Human
aaaaguuuuuguuugg

SEQ ID NO: 2662019 - RNA, 13 nt, Human
aaagaaaaugaaa

SEQ ID NO: 2662020 - RNA, 18 nt, Human
aaacugaagcagccucuc

SEQ ID NO: 2662021 - RNA, 21 nt, Human
aaacugaagcagccucucccc

SEQ ID NO: 2662022 - RNA, 12 nt, Human
aaagaaaauuga

SEQ ID NO: 2662023 - RNA, 13 nt, Human
aaagaaaauugag

SEQ ID NO: 2662024 - RNA, 14 nt, Human
aaagaggcugcccc

SEQ ID NO: 2662025 - RNA, 18 nt, Human
aaagaggcugccccucuc

SEQ ID NO: 2662026 - RNA, 20 nt, Human
aaagaggcugccccucucac

SEQ ID NO: 2662027 - RNA, 11 nt, Human
aaaccuagguc

SEQ ID NO: 2662028 - RNA, 18 nt, Human
aaaccuacccucagugag

SEQ ID NO: 2662029 - RNA, 17 nt, Human
aaaccccaaacagugac

SEQ ID NO: 2662030 - RNA, 17 nt, Human
aaaccccaucucuacaa

SEQ ID NO: 2662031 - RNA, 15 nt, Human
aaagagggcuuccuc

SEQ ID NO: 2662032 - RNA, 19 nt, Human
aaagagggcuuccucuaga

SEQ ID NO: 2662033 - RNA, 22 nt, Human
aaagaggcugccccucucacca

SEQ ID NO: 2662034 - RNA, 23 nt, Human
aaagaggcugccccucucaccaa

SEQ ID NO: 2662035 - RNA, 11 nt, Human
aaagcauuuuu

SEQ ID NO: 2662036 - RNA, 13 nt, Human
aaagcauuuuuca

SEQ ID NO: 2662037 - RNA, 16 nt, Human
aaagcauuuuucaaua

SEQ ID NO: 2662038 - RNA, 21 nt, Human
aaaggcaggccuauuucauca

SEQ ID NO: 2662039 - RNA, 14 nt, Human
aaagugcauuuuug

SEQ ID NO: 2662040 - RNA, 13 nt, Human
aaagugccaaaga

SEQ ID NO: 2662041 - RNA, 14 nt, Human
aaagugccaaagaa

SEQ ID NO: 2662042 - RNA, 15 nt, Human
aaagugccaaagaaa

SEQ ID NO: 2662043 - RNA, 21 nt, Human
aaagugccaaagaaagugguc

SEQ ID NO: 2662044 - RNA, 17 nt, Human
aaagugccucaagagga

SEQ ID NO: 2662045 - RNA, 22 nt, Human
aaagugccucaagaggaaugaa

SEQ ID NO: 2662046 - RNA, 12 nt, Human
aaaguauuuucu

SEQ ID NO: 2662047 - RNA, 18 nt, Human
aaaggcugugcugcccug

SEQ ID NO: 2662048 - RNA, 23 nt, Human
aaaggcugugcugcccugaagaa

SEQ ID NO: 2662049 - RNA, 15 nt, Human
aaaggcugugcugcc

SEQ ID NO: 2662050 - RNA, 13 nt, Human
aaagucagagaca

SEQ ID NO: 2662051 - RNA, 15 nt, Human
aaagucagagacaga

SEQ ID NO: 2662052 - RNA, 18 nt, Human
aaagucagagacagauac

SEQ ID NO: 2662053 - RNA, 16 nt, Human
aaauaaaacauagcaa

SEQ ID NO: 2662054 - RNA, 15 nt, Human
aaauaaaaauggaua

SEQ ID NO: 2662055 - RNA, 14 nt, Human
aaagugccuuugca

SEQ ID NO: 2662056 - RNA, 12 nt, Human
aaagugccuuug

SEQ ID NO: 2662057 - RNA, 18 nt, Human
aaauaaaauuuguugcau

SEQ ID NO: 2662058 - RNA, 19 nt, Human
aaauaaaauuuguugcaua

SEQ ID NO: 2662059 - RNA, 22 nt, Human
aaauaaaccaaaggaaaauguc

SEQ ID NO: 2662060 - RNA, 13 nt, Human
aaauaaaccacug

SEQ ID NO: 2662061 - RNA, 14 nt, Human
aaauaaaccacugu

SEQ ID NO: 2662062 - RNA, 19 nt, Human
acagaacuugaauguguca

SEQ ID NO: 2662063 - RNA, 20 nt, Human
acagaacuugaaugugucag

SEQ ID NO: 2662064 - RNA, 17 nt, Human
acagaacuugaaugugu

SEQ ID NO: 2662065 - RNA, 19 nt, Human
aauuuucauuuugcacuga

SEQ ID NO: 2662066 - RNA, 13 nt, Human
acaaaaugaagcu

SEQ ID NO: 2662067 - RNA, 21 nt, Human
acaaagaaauccggagaagcu

SEQ ID NO: 2662068 - RNA, 22 nt, Human
acaaagaaauccggagaagcug

SEQ ID NO: 2662069 - RNA, 15 nt, Human
aauuuucaaguaauu

SEQ ID NO: 2662070 - RNA, 19 nt, Human
aauuuucaaguaauuguga

SEQ ID NO: 2662071 - RNA, 18 nt, Human
aauuuucacuuuuggcaa

SEQ ID NO: 2662072 - RNA, 21 nt, Human
aauuuucacuuuuggcaauga

SEQ ID NO: 2662073 - RNA, 22 nt, Human
aauuuucaacugucuuccucaa

SEQ ID NO: 2662074 - RNA, 12 nt, Human
aauuuucagcau

SEQ ID NO: 2662075 - RNA, 19 nt, Human
aauugguacuuuuaaaaac

SEQ ID NO: 2662076 - RNA, 23 nt, Human
aauugguacuuuuaaaaacauaa

SEQ ID NO: 2662077 - RNA, 13 nt, Human
aauuggggcacuu

SEQ ID NO: 2662078 - RNA, 20 nt, Human
aauugguaaaacucacugug

SEQ ID NO: 2662079 - RNA, 21 nt, Human
aauugguaaaacucacuguga

SEQ ID NO: 2662080 - RNA, 19 nt, Human
aauuguauuuuuguuguug

SEQ ID NO: 2662081 - RNA, 14 nt, Human
aauuguauuuuugu

SEQ ID NO: 2662082 - RNA, 12 nt, Human
aauuguauuuuu

SEQ ID NO: 2662083 - RNA, 11 nt, Human
aauuguauuuu

SEQ ID NO: 2662084 - RNA, 14 nt, Human
aauuguauauugua

SEQ ID NO: 2662085 - RNA, 21 nt, Human
aauuguaaaguaaaagcuaua

SEQ ID NO: 2662086 - RNA, 11 nt, Human
aauuguggcua

SEQ ID NO: 2662087 - RNA, 18 nt, Human
aauuguggcuauccugau

SEQ ID NO: 2662088 - RNA, 19 nt, Human
aauuguggcuauccugauu

SEQ ID NO: 2662089 - RNA, 12 nt, Human
aauugugaaaaa

SEQ ID NO: 2662090 - RNA, 19 nt, Human
aauugucuuuggugcuuuu

SEQ ID NO: 2662091 - RNA, 19 nt, Human
aauugucacuuuuuaugcu

SEQ ID NO: 2662092 - RNA, 14 nt, Human
aauuuauuuccacu

SEQ ID NO: 2662093 - RNA, 20 nt, Human
aauuuauuuccacuaaaaau

SEQ ID NO: 2662094 - RNA, 21 nt, Human
aauuuauuuccacuaaaaaua

SEQ ID NO: 2662095 - RNA, 22 nt, Human
aauuucacuacuagauugacua

SEQ ID NO: 2662096 - RNA, 14 nt, Human
aauuuccuuuuuga

SEQ ID NO: 2662097 - RNA, 15 nt, Human
aauuuccuuuuugac

SEQ ID NO: 2662098 - RNA, 17 nt, Human
aauuuccuuuuugacac

SEQ ID NO: 2662099 - RNA, 18 nt, Human
aauuuccuuuuugacacu

SEQ ID NO: 2662100 - RNA, 19 nt, Human
aauuuccuuuuugacacug

SEQ ID NO: 2662101 - RNA, 20 nt, Human
aauuuccuuuuugacacuga

SEQ ID NO: 2662102 - RNA, 21 nt, Human
aauuuccuuuuugacacugaa

SEQ ID NO: 2662103 - RNA, 22 nt, Human
aauuuccuuuuugacacugaaa

SEQ ID NO: 2662104 - RNA, 12 nt, Human
aauuucagggug

SEQ ID NO: 2662105 - RNA, 16 nt, Human
aauuucagggugcagc

SEQ ID NO: 2662106 - RNA, 18 nt, Human
acagcugcaauucccugg

SEQ ID NO: 2662107 - RNA, 19 nt, Human
acagcugcaauucccugga

SEQ ID NO: 2662108 - RNA, 19 nt, Human
acagugcagagccuucuca

SEQ ID NO: 2662109 - RNA, 20 nt, Human
acagugcagagccuucucag

SEQ ID NO: 2662110 - RNA, 21 nt, Human
acagugcagagccuucucaga

SEQ ID NO: 2662111 - RNA, 22 nt, Human
acagugcagagccuucucagaa

SEQ ID NO: 2662112 - RNA, 18 nt, Human
acagugguuuuauacuga

SEQ ID NO: 2662113 - RNA, 17 nt, Human
acagugguggcaacauu

SEQ ID NO: 2662114 - RNA, 21 nt, Human
acagugguggcaacauucauu

SEQ ID NO: 2662115 - RNA, 23 nt, Human
acagugguggcaacauucauugc

SEQ ID NO: 2662116 - RNA, 12 nt, Human
acaguguaugua

SEQ ID NO: 2662117 - RNA, 13 nt, Human
acaguguauguag

SEQ ID NO: 2662118 - RNA, 19 nt, Human
acaguguauguagaagcau

SEQ ID NO: 2662119 - RNA, 15 nt, Human
acagugucccccagg

SEQ ID NO: 2662120 - RNA, 16 nt, Human
acagugucccccaggu

SEQ ID NO: 2662121 - RNA, 24 nt, Human
acagugucccccagguuccgaaga

SEQ ID NO: 2662122 - RNA, 22 nt, Human
acagugguuuuauacugaagga

SEQ ID NO: 2662123 - RNA, 20 nt, Human
acagugguuuuauacugaag

SEQ ID NO: 2662124 - RNA, 16 nt, Human
acauccgcgugugccu

SEQ ID NO: 2662125 - RNA, 17 nt, Human
acauccgcgugugccug

SEQ ID NO: 2662126 - RNA, 21 nt, Human
acauccgcgugugccugugug

SEQ ID NO: 2662127 - RNA, 22 nt, Human
acauccgcgugugccugugugc

SEQ ID NO: 2662128 - RNA, 23 nt, Human
acauccgcgugugccugugugcg

SEQ ID NO: 2662129 - RNA, 13 nt, Human
acauccuccuccc

SEQ ID NO: 2662130 - RNA, 15 nt, Human
acauccuccucccac

SEQ ID NO: 2662131 - RNA, 19 nt, Human
acaugccacaucaaaccuu

SEQ ID NO: 2662132 - RNA, 22 nt, Human
acaugccacaucaaaccuuuga

SEQ ID NO: 2662133 - RNA, 12 nt, Human
acaugcccccug

SEQ ID NO: 2662134 - RNA, 21 nt, Human
acauacaaaugcaucuuugau

SEQ ID NO: 2662135 - RNA, 11 nt, Human
acauacaaaug

SEQ ID NO: 2662136 - RNA, 15 nt, Human
acauaagcuuccauu

SEQ ID NO: 2662137 - RNA, 17 nt, Human
acauaagcuuccauuuu

SEQ ID NO: 2662138 - RNA, 18 nt, Human
acauaagcuuccauuuua

SEQ ID NO: 2662139 - RNA, 18 nt, Human
accaccccggcccccugc

SEQ ID NO: 2662140 - RNA, 20 nt, Human
accaccccggcccccugccc

SEQ ID NO: 2662141 - RNA, 13 nt, Human
accaccccuacca

SEQ ID NO: 2662142 - RNA, 14 nt, Human
accaccccuaccac

SEQ ID NO: 2662143 - RNA, 12 nt, Human
accacccugagc

SEQ ID NO: 2662144 - RNA, 13 nt, Human
accacccugagcc

SEQ ID NO: 2662145 - RNA, 14 nt, Human
accacccugagccg

SEQ ID NO: 2662146 - RNA, 15 nt, Human
accaagaaagcucac

SEQ ID NO: 2662147 - RNA, 12 nt, Human
acauuucucuga

SEQ ID NO: 2662148 - RNA, 18 nt, Human
acauuuccuuacagaacu

SEQ ID NO: 2662149 - RNA, 12 nt, Human
acauuucuauaa

SEQ ID NO: 2662150 - RNA, 15 nt, Human
acauuucuauaaaua

SEQ ID NO: 2662151 - RNA, 16 nt, Human
accagccccacugcca

SEQ ID NO: 2662152 - RNA, 17 nt, Human
accagccccacugccag

SEQ ID NO: 2662153 - RNA, 23 nt, Human
accagccccacugccagcagcag

SEQ ID NO: 2662154 - RNA, 18 nt, Human
accagccccacugccagc

SEQ ID NO: 2662155 - RNA, 20 nt, Human
accagccccacugccagcag

SEQ ID NO: 2662156 - RNA, 21 nt, Human
accagccccacugccagcagc

SEQ ID NO: 2662157 - RNA, 22 nt, Human
accagccccacugccagcagca

SEQ ID NO: 2662158 - RNA, 20 nt, Human
acauuuagcugugcucagaa

SEQ ID NO: 2662159 - RNA, 18 nt, Human
acccaugcaagcagagga

SEQ ID NO: 2662160 - RNA, 22 nt, Human
acccaugcaagcagaggaccag

SEQ ID NO: 2662161 - RNA, 13 nt, Human
accaucaauccug

SEQ ID NO: 2662162 - RNA, 16 nt, Human
accaucaauccugauu

SEQ ID NO: 2662163 - RNA, 19 nt, Human
acuaauauuuuaugugaga

SEQ ID NO: 2662164 - RNA, 15 nt, Human
acuaacucaaauaca

SEQ ID NO: 2662165 - RNA, 18 nt, Human
acuaacucaaauacacau

SEQ ID NO: 2662166 - RNA, 22 nt, Human
acuaacucaaauacacauuugc

SEQ ID NO: 2662167 - RNA, 22 nt, Human
acuaacucaccagccccacugc

SEQ ID NO: 2662168 - RNA, 20 nt, Human
acguggccauguaugaagcc

SEQ ID NO: 2662169 - RNA, 22 nt, Human
acuaacgaaauaucaaagucau

SEQ ID NO: 2662170 - RNA, 19 nt, Human
acggacacucaaaagcugg

SEQ ID NO: 2662171 - RNA, 16 nt, Human
acggaagagccuugcg

SEQ ID NO: 2662172 - RNA, 15 nt, Human
acggaagagccuugc

SEQ ID NO: 2662173 - RNA, 23 nt, Human
acuauugugcucagagacacugu

SEQ ID NO: 2662174 - RNA, 23 nt, Human
acuaggcccccacuugccucuuc

SEQ ID NO: 2662175 - RNA, 22 nt, Human
acuaggcccccacuugccucuu

SEQ ID NO: 2662176 - RNA, 17 nt, Human
acuagggaagauaauau

SEQ ID NO: 2662177 - RNA, 15 nt, Human
acuaaugcaaacugg

SEQ ID NO: 2662178 - RNA, 15 nt, Human
accugccaggcaggg

SEQ ID NO: 2662179 - RNA, 18 nt, Human
accugccaggcaggggug

SEQ ID NO: 2662180 - RNA, 20 nt, Human
accugccaggcagggguggg

SEQ ID NO: 2662181 - RNA, 14 nt, Human
accugcccucaagg

SEQ ID NO: 2662182 - RNA, 15 nt, Human
accugcccucaaggg

SEQ ID NO: 2662183 - RNA, 17 nt, Human
accugcccucaagggug

SEQ ID NO: 2662184 - RNA, 12 nt, Human
accucagggcuc

SEQ ID NO: 2662185 - RNA, 13 nt, Human
accucagggcucc

SEQ ID NO: 2662186 - RNA, 15 nt, Human
accucagggcuccca

SEQ ID NO: 2662187 - RNA, 16 nt, Human
accucagggcucccag

SEQ ID NO: 2662188 - RNA, 17 nt, Human
accucagggcucccagg

SEQ ID NO: 2662189 - RNA, 20 nt, Human
accucagggcucccaggggu

SEQ ID NO: 2662190 - RNA, 21 nt, Human
accgugaagauacuuuguauu

SEQ ID NO: 2662191 - RNA, 20 nt, Human
accgugaagauacuuuguau

SEQ ID NO: 2662192 - RNA, 19 nt, Human
accgugaagauacuuugua

SEQ ID NO: 2662193 - RNA, 18 nt, Human
accgugaagauacuuugu

SEQ ID NO: 2662194 - RNA, 18 nt, Human
accucaguuauuacaugu

SEQ ID NO: 2662195 - RNA, 22 nt, Human
accucaguuauuacauguaauu

SEQ ID NO: 2662196 - RNA, 18 nt, Human
accucaguucauuguggu

SEQ ID NO: 2662197 - RNA, 18 nt, Human
accucaggugagaagcag

SEQ ID NO: 2662198 - RNA, 18 nt, Human
accccaagccagcccggc

SEQ ID NO: 2662199 - RNA, 13 nt, Human
accccaagagaac

SEQ ID NO: 2662200 - RNA, 16 nt, Human
accccaagagaacucg

SEQ ID NO: 2662201 - RNA, 18 nt, Human
accccaagagaacucgcg

SEQ ID NO: 2662202 - RNA, 21 nt, Human
accccaagccagcccggccgc

SEQ ID NO: 2662203 - RNA, 24 nt, Human
accggagugucuggaauuguggcu

SEQ ID NO: 2662204 - RNA, 14 nt, Human
acccuuauaaaauc

SEQ ID NO: 2662205 - RNA, 15 nt, Human
acccuuauaaaaucc

SEQ ID NO: 2662206 - RNA, 22 nt, Human
acccuuacuggcuuaccuccuc

SEQ ID NO: 2662207 - RNA, 12 nt, Human
accggcaggugc

SEQ ID NO: 2662208 - RNA, 23 nt, Human
accggcggaccccagccauccag

SEQ ID NO: 2662209 - RNA, 18 nt, Human
accgguccagcuggccug

SEQ ID NO: 2662210 - RNA, 23 nt, Human
accgguccagcuggccuggacag

SEQ ID NO: 2662211 - RNA, 14 nt, Human
accgugaagauacu

SEQ ID NO: 2662212 - RNA, 14 nt, Human
accgguccagcugg

SEQ ID NO: 2662213 - RNA, 21 nt, Human
accgggucuugauucagucac

SEQ ID NO: 2662214 - RNA, 23 nt, Human
accgggucuugauucagucacau

SEQ ID NO: 2662215 - RNA, 15 nt, Human
accgguccagcuggc

SEQ ID NO: 2662216 - RNA, 16 nt, Human
accgguccagcuggcc

SEQ ID NO: 2662217 - RNA, 17 nt, Human
accgguccagcuggccu

SEQ ID NO: 2662218 - RNA, 13 nt, Human
acugacauuucuu

SEQ ID NO: 2662219 - RNA, 15 nt, Human
acugacauuucuucu

SEQ ID NO: 2662220 - RNA, 20 nt, Human
acugaucuuuguauauuaca

SEQ ID NO: 2662221 - RNA, 23 nt, Human
acugauggaauuuuuuuguacga

SEQ ID NO: 2662222 - RNA, 22 nt, Human
acugauggaauuuuuuuguacg

SEQ ID NO: 2662223 - RNA, 21 nt, Human
acugauggaauuuuuuuguac

SEQ ID NO: 2662224 - RNA, 12 nt, Human
acugauggaauu

SEQ ID NO: 2662225 - RNA, 21 nt, Human
acucuacuuaauccaaugggu

SEQ ID NO: 2662226 - RNA, 19 nt, Human
acucuacuuaauccaaugg

SEQ ID NO: 2662227 - RNA, 18 nt, Human
acucuaagucauguaugu

SEQ ID NO: 2662228 - RNA, 19 nt, Human
acucuaagucauguauguu

SEQ ID NO: 2662229 - RNA, 20 nt, Human
acucuaagucauguauguuu

SEQ ID NO: 2662230 - RNA, 22 nt, Human
acucuaagucauguauguuucu

SEQ ID NO: 2662231 - RNA, 23 nt, Human
acucuaagucauguauguuucuc

SEQ ID NO: 2662232 - RNA, 15 nt, Human
acugcccggcagggu

SEQ ID NO: 2662233 - RNA, 18 nt, Human
acugccaggccagccucc

SEQ ID NO: 2662234 - RNA, 19 nt, Human
acugccaggccagccuccg

SEQ ID NO: 2662235 - RNA, 23 nt, Human
acugccaggccagccuccgagag

SEQ ID NO: 2662236 - RNA, 22 nt, Human
acugcccggcaggguccuagaa

SEQ ID NO: 2662237 - RNA, 15 nt, Human
acuuaaagaaguauu

SEQ ID NO: 2662238 - RNA, 22 nt, Human
acuuaaagaaguauuuuuagaa

SEQ ID NO: 2662239 - RNA, 12 nt, Human
acuucugccugg

SEQ ID NO: 2662240 - RNA, 13 nt, Human
acuucugccugga

SEQ ID NO: 2662241 - RNA, 16 nt, Human
acuucugccuggagac

SEQ ID NO: 2662242 - RNA, 22 nt, Human
acuuggcucgaaucucugugcc

SEQ ID NO: 2662243 - RNA, 23 nt, Human
acuuggcucgaaucucugugccu

SEQ ID NO: 2662244 - RNA, 13 nt, Human
acuggaccccagc

SEQ ID NO: 2662245 - RNA, 20 nt, Human
acuuucaauugucacuuuuu

SEQ ID NO: 2662246 - RNA, 16 nt, Human
acuugggaggcugagg

SEQ ID NO: 2662247 - RNA, 17 nt, Human
acuucuuacgcaaugcu

SEQ ID NO: 2662248 - RNA, 16 nt, Human
cagugcuuuaauggca

SEQ ID NO: 2662249 - RNA, 20 nt, Human
cagugcuuuuaagugaaaau

SEQ ID NO: 2662250 - RNA, 23 nt, Human
caguggaauauaaggaaagcaau

SEQ ID NO: 2662251 - RNA, 21 nt, Human
caguggaccgcccuuuucccc

SEQ ID NO: 2662252 - RNA, 22 nt, Human
caguggaccgcccuuuuccccu

SEQ ID NO: 2662253 - RNA, 20 nt, Human
caguggcgcauucuaggcuc

SEQ ID NO: 2662254 - RNA, 11 nt, Human
caguggccuua

SEQ ID NO: 2662255 - RNA, 15 nt, Human
cagugguuuuauacu

SEQ ID NO: 2662256 - RNA, 21 nt, Human
cagugguuuuauacugaagga

SEQ ID NO: 2662257 - RNA, 12 nt, Human
caguguguaaac

SEQ ID NO: 2662258 - RNA, 13 nt, Human
caguguguaaaca

SEQ ID NO: 2662259 - RNA, 14 nt, Human
caguguguaaacaa

SEQ ID NO: 2662260 - RNA, 16 nt, Human
caguguguaaacaaaa

SEQ ID NO: 2662261 - RNA, 17 nt, Human
cagugugggcuugacca

SEQ ID NO: 2662262 - RNA, 19 nt, Human
caguguggccucuucugag

SEQ ID NO: 2662263 - RNA, 15 nt, Human
caguguggccaggcu

SEQ ID NO: 2662264 - RNA, 16 nt, Human
caguguggccaggcug

SEQ ID NO: 2662265 - RNA, 14 nt, Human
caguguauguagaa

SEQ ID NO: 2662266 - RNA, 18 nt, Human
caguguauguagaagcau

SEQ ID NO: 2662267 - RNA, 19 nt, Human
cagugucuauaaaagaaac

SEQ ID NO: 2662268 - RNA, 20 nt, Human
cagugguuuuauacugaagg

SEQ ID NO: 2662269 - RNA, 18 nt, Human
caguguuuugcaagugcu

SEQ ID NO: 2662270 - RNA, 21 nt, Human
caguguuuugcaagugcugga

SEQ ID NO: 2662271 - RNA, 16 nt, Human
caguguugguauauuu

SEQ ID NO: 2662272 - RNA, 16 nt, Human
caguuccucccaggaa

SEQ ID NO: 2662273 - RNA, 22 nt, Human
caguuccucccaggaagcccag

SEQ ID NO: 2662274 - RNA, 17 nt, Human
caguucuacucaggcug

SEQ ID NO: 2662275 - RNA, 19 nt, Human
caguugaaaaacagcugag

SEQ ID NO: 2662276 - RNA, 18 nt, Human
caguugaaaaacagcuga

SEQ ID NO: 2662277 - RNA, 12 nt, Human
caguugaaaaac

SEQ ID NO: 2662278 - RNA, 18 nt, Human
cauaauacugaaccacuu

SEQ ID NO: 2662279 - RNA, 17 nt, Human
cauaauacugaaccacu

SEQ ID NO: 2662280 - RNA, 16 nt, Human
cauaauacugaaccac

SEQ ID NO: 2662281 - RNA, 15 nt, Human
cauaauacugaacca

SEQ ID NO: 2662282 - RNA, 13 nt, Human
cauaagcuuccau

SEQ ID NO: 2662283 - RNA, 17 nt, Human
cauaagcuuccauuuua

SEQ ID NO: 2662284 - RNA, 19 nt, Human
cauaagcuuccauuuuaau

SEQ ID NO: 2662285 - RNA, 14 nt, Human
cauaacauccagag

SEQ ID NO: 2662286 - RNA, 15 nt, Human
cauaacauccagagc

SEQ ID NO: 2662287 - RNA, 12 nt, Human
cauaaauuuuuu

SEQ ID NO: 2662288 - RNA, 22 nt, Human
cauaaauuuuuugaagucuuua

SEQ ID NO: 2662289 - RNA, 14 nt, Human
cauaaaguaaauac

SEQ ID NO: 2662290 - RNA, 15 nt, Human
cauaaaguaaauaca

SEQ ID NO: 2662291 - RNA, 22 nt, Human
cauaaaguaaauacaugcauau

SEQ ID NO: 2662292 - RNA, 12 nt, Human
cauaaauuauuu

SEQ ID NO: 2662293 - RNA, 17 nt, Human
cauaaauuauuugauua

SEQ ID NO: 2662294 - RNA, 22 nt, Human
cauaaauuauuugauuauuuaa

SEQ ID NO: 2662295 - RNA, 16 nt, Human
cauaaauucaacuuug

SEQ ID NO: 2662296 - RNA, 18 nt, Human
cauaaauucaacuuugua

SEQ ID NO: 2662297 - RNA, 19 nt, Human
cauaaauucaacuuuguaa

SEQ ID NO: 2662298 - RNA, 20 nt, Human
cauaaauucaacuuuguaaa

SEQ ID NO: 2662299 - RNA, 21 nt, Human
cauaaaaauuagccaagugug

SEQ ID NO: 2662300 - RNA, 16 nt, Human
cauaaaagaaauaaac

SEQ ID NO: 2662301 - RNA, 22 nt, Human
cauaaaauguccaguaagauca

SEQ ID NO: 2662302 - RNA, 20 nt, Human
caguugcagcccuugugaug

SEQ ID NO: 2662303 - RNA, 20 nt, Human
caguuuugaccuaacauacc

SEQ ID NO: 2662304 - RNA, 14 nt, Human
caguuguauuuaac

SEQ ID NO: 2662305 - RNA, 18 nt, Human
caguuguauuuaacagaa

SEQ ID NO: 2662306 - RNA, 21 nt, Human
caguuguauuuaacagaaauu

SEQ ID NO: 2662307 - RNA, 16 nt, Human
caguugcucuaugcuu

SEQ ID NO: 2662308 - RNA, 20 nt, Human
caguugcugguaaaaugaag

SEQ ID NO: 2662309 - RNA, 19 nt, Human
caguugcugguaaaaugaa

SEQ ID NO: 2662310 - RNA, 18 nt, Human
caguugcugguaaaauga

SEQ ID NO: 2662311 - RNA, 17 nt, Human
caguugcugguaaaaug

SEQ ID NO: 2662312 - RNA, 13 nt, Human
caguugcugguaa

SEQ ID NO: 2662313 - RNA, 14 nt, Human
caguugcugguaaa

SEQ ID NO: 2662314 - RNA, 17 nt, Human
caguuggccagagagcc

SEQ ID NO: 2662315 - RNA, 16 nt, Human
caguuggccagagagc

SEQ ID NO: 2662316 - RNA, 13 nt, Human
caguugcuugucu

SEQ ID NO: 2662317 - RNA, 14 nt, Human
caguugcuugucuu

SEQ ID NO: 2662318 - RNA, 23 nt, Human
caguugcugguaaaaugaagaau

SEQ ID NO: 2662319 - RNA, 22 nt, Human
caguugcugguaaaaugaagaa

SEQ ID NO: 2662320 - RNA, 21 nt, Human
caguugcugguaaaaugaaga

SEQ ID NO: 2662321 - RNA, 18 nt, Human
caucucaggagauuucau

SEQ ID NO: 2662322 - RNA, 13 nt, Human
caucucacagcua

SEQ ID NO: 2662323 - RNA, 18 nt, Human
caucucauuuaagggaaa

SEQ ID NO: 2662324 - RNA, 19 nt, Human
caucucauuuaagggaaaa

SEQ ID NO: 2662325 - RNA, 20 nt, Human
caucucauuuaagggaaaaa

SEQ ID NO: 2662326 - RNA, 21 nt, Human
caucucauuuaagggaaaaau

SEQ ID NO: 2662327 - RNA, 22 nt, Human
caucucauuuaagggaaaaaua

SEQ ID NO: 2662328 - RNA, 23 nt, Human
caucucauuuaagggaaaaauau

SEQ ID NO: 2662329 - RNA, 20 nt, Human
caucuaggggagccuugauu

SEQ ID NO: 2662330 - RNA, 19 nt, Human
caucuaggggagccuugau

SEQ ID NO: 2662331 - RNA, 16 nt, Human
caucuaucucaauccu

SEQ ID NO: 2662332 - RNA, 13 nt, Human
caucuaucugugc

SEQ ID NO: 2662333 - RNA, 14 nt, Human
caucuaucugugcu

SEQ ID NO: 2662334 - RNA, 15 nt, Human
caucuaucucaaucc

SEQ ID NO: 2662335 - RNA, 20 nt, Human
caucuaucucaucuaucuca

SEQ ID NO: 2662336 - RNA, 17 nt, Human
caucuauagaaagcuau

SEQ ID NO: 2662337 - RNA, 13 nt, Human
caucuaucuaguu

SEQ ID NO: 2662338 - RNA, 17 nt, Human
caucuaucuaguucuaa

SEQ ID NO: 2662339 - RNA, 18 nt, Human
caucuaggggagccuuga

SEQ ID NO: 2662340 - RNA, 12 nt, Human
caucuagccagc

SEQ ID NO: 2662341 - RNA, 13 nt, Human
caucuagccagcc

SEQ ID NO: 2662342 - RNA, 17 nt, Human
caucuagccagccccuc

SEQ ID NO: 2662343 - RNA, 21 nt, Human
caucuagccagccccucuucc

SEQ ID NO: 2662344 - RNA, 22 nt, Human
caucuagccagccccucuuccc

SEQ ID NO: 2662345 - RNA, 13 nt, Human
cauccuccuccca

SEQ ID NO: 2662346 - RNA, 16 nt, Human
cauccuccucccaccc

SEQ ID NO: 2662347 - RNA, 20 nt, Human
cauccuccucccacccggcu

SEQ ID NO: 2662348 - RNA, 21 nt, Human
caucuaauucucuguggaaug

SEQ ID NO: 2662349 - RNA, 13 nt, Human
caucuaauucuga

SEQ ID NO: 2662350 - RNA, 14 nt, Human
caucuaauucugau

SEQ ID NO: 2662351 - RNA, 15 nt, Human
caucuaauucugauu

SEQ ID NO: 2662352 - RNA, 16 nt, Human
caucuaauucugauuc

SEQ ID NO: 2662353 - RNA, 18 nt, Human
cauccacaauaaccaaga

SEQ ID NO: 2662354 - RNA, 21 nt, Human
cauccuacaacucacauuaga

SEQ ID NO: 2662355 - RNA, 14 nt, Human
cauccuacccuuuu

SEQ ID NO: 2662356 - RNA, 22 nt, Human
caucugcaccccuucucuccuc

SEQ ID NO: 2662357 - RNA, 23 nt, Human
caucugcaccccuucucuccucc

SEQ ID NO: 2662358 - RNA, 12 nt, Human
caucugcaaaag

SEQ ID NO: 2662359 - RNA, 20 nt, Human
caucugcaaaaggccucuug

SEQ ID NO: 2662360 - RNA, 22 nt, Human
caucugcaaaaggccucuugua

SEQ ID NO: 2662361 - RNA, 23 nt, Human
caucugcaaaaggccucuuguaa

SEQ ID NO: 2662362 - RNA, 16 nt, Human
caucugcaccccuucu

SEQ ID NO: 2662363 - RNA, 17 nt, Human
caucugcaccccuucuc

SEQ ID NO: 2662364 - RNA, 19 nt, Human
caucugcaccccuucucuc

SEQ ID NO: 2662365 - RNA, 21 nt, Human
caucugcaccccuucucuccu

SEQ ID NO: 2662366 - RNA, 15 nt, Human
caucugagguuuuau

SEQ ID NO: 2662367 - RNA, 21 nt, Human
caucugagguuuuauuucauu

SEQ ID NO: 2662368 - RNA, 14 nt, Human
caucuccccucagc

SEQ ID NO: 2662369 - RNA, 13 nt, Human
caucuccccucag

SEQ ID NO: 2662370 - RNA, 15 nt, Human
caucuugccuccagg

SEQ ID NO: 2662371 - RNA, 16 nt, Human
caucuugccuccaggu

SEQ ID NO: 2662372 - RNA, 18 nt, Human
caucuugccuccaggugc

SEQ ID NO: 2662373 - RNA, 19 nt, Human
caucuugccuccaggugca

SEQ ID NO: 2662374 - RNA, 21 nt, Human
caucuugccuccaggugcaga

SEQ ID NO: 2662375 - RNA, 22 nt, Human
caucuugccuccaggugcagag

SEQ ID NO: 2662376 - RNA, 23 nt, Human
caucuugccuccaggugcagagg

SEQ ID NO: 2662377 - RNA, 13 nt, Human
caucuugcuuccc

SEQ ID NO: 2662378 - RNA, 14 nt, Human
caucuugcuucccu

SEQ ID NO: 2662379 - RNA, 15 nt, Human
caucuugcuucccua

SEQ ID NO: 2662380 - RNA, 11 nt, Human
caucuuggggg

SEQ ID NO: 2662381 - RNA, 19 nt, Human
caucccuaccgacccaggg

SEQ ID NO: 2662382 - RNA, 13 nt, Human
cauccagggggca

SEQ ID NO: 2662383 - RNA, 13 nt, Human
cauccagaugugg

SEQ ID NO: 2662384 - RNA, 14 nt, Human
cauccagauguggc

SEQ ID NO: 2662385 - RNA, 15 nt, Human
cauccagauguggcu

SEQ ID NO: 2662386 - RNA, 16 nt, Human
cauccagauguggcua

SEQ ID NO: 2662387 - RNA, 14 nt, Human
cauccaaccuuccc

SEQ ID NO: 2662388 - RNA, 21 nt, Human
cauccaaggccagguucuccg

SEQ ID NO: 2662389 - RNA, 16 nt, Human
cauccaaccuucccaa

SEQ ID NO: 2662390 - RNA, 14 nt, Human
cauccaacuccagc

SEQ ID NO: 2662391 - RNA, 15 nt, Human
cauccaacuccagca

SEQ ID NO: 2662392 - RNA, 16 nt, Human
cauccaacuccagcaa

SEQ ID NO: 2662393 - RNA, 17 nt, Human
cauccaacuccagcaac

SEQ ID NO: 2662394 - RNA, 18 nt, Human
cauccaacuccagcaacu

SEQ ID NO: 2662395 - RNA, 14 nt, Human
caucauuucaggag

SEQ ID NO: 2662396 - RNA, 23 nt, Human
caucccuaccgacccaggguucc

SEQ ID NO: 2662397 - RNA, 19 nt, Human
caucaaucaaauaaguauu

SEQ ID NO: 2662398 - RNA, 14 nt, Human
caucaauccugauu

SEQ ID NO: 2662399 - RNA, 16 nt, Human
caucaauccugauucc

SEQ ID NO: 2662400 - RNA, 21 nt, Human
caucaauccugauuccucucu

SEQ ID NO: 2662401 - RNA, 14 nt, Human
caucacaagaacac

SEQ ID NO: 2662402 - RNA, 17 nt, Human
caucacaagaacacaca

SEQ ID NO: 2662403 - RNA, 13 nt, Human
caucacagggugg

SEQ ID NO: 2662404 - RNA, 14 nt, Human
caucacaggguggg

SEQ ID NO: 2662405 - RNA, 18 nt, Human
caucacagggugggccuc

SEQ ID NO: 2662406 - RNA, 19 nt, Human
caucacagggugggccucg

SEQ ID NO: 2662407 - RNA, 21 nt, Human
caucacagggugggccucggc

SEQ ID NO: 2662408 - RNA, 22 nt, Human
caucacagggugggccucggcc

SEQ ID NO: 2662409 - RNA, 17 nt, Human
caucaaaccuuugagua

SEQ ID NO: 2662410 - RNA, 18 nt, Human
caucaaaccuuugaguag

SEQ ID NO: 2662411 - RNA, 19 nt, Human
caucaaaauauuucaguga

SEQ ID NO: 2662412 - RNA, 21 nt, Human
caucaaaauauuucagugaau

SEQ ID NO: 2662413 - RNA, 13 nt, Human
caucaaauaagaa

SEQ ID NO: 2662414 - RNA, 17 nt, Human
cauauuuuauuacuguu

SEQ ID NO: 2662415 - RNA, 18 nt, Human
cauauuuuauuacuguuu

SEQ ID NO: 2662416 - RNA, 23 nt, Human
cauauuuuauuacuguuuauuac

SEQ ID NO: 2662417 - RNA, 16 nt, Human
cauauuugaagggucu

SEQ ID NO: 2662418 - RNA, 18 nt, Human
cauaguuuggcauuugca

SEQ ID NO: 2662419 - RNA, 15 nt, Human
cauaguuuggcauuu

SEQ ID NO: 2662420 - RNA, 14 nt, Human
cauaguuuggcauu

SEQ ID NO: 2662421 - RNA, 16 nt, Human
cauaguuuggcauuug

SEQ ID NO: 2662422 - RNA, 16 nt, Human
cauaguuuuauuuaua

SEQ ID NO: 2662423 - RNA, 15 nt, Human
cauaguuuuauuuau

SEQ ID NO: 2662424 - RNA, 19 nt, Human
cauaguuuuauuuauauuu

SEQ ID NO: 2662425 - RNA, 14 nt, Human
cauauaaugaauaa

SEQ ID NO: 2662426 - RNA, 16 nt, Human
cauauaaugaauaaau

SEQ ID NO: 2662427 - RNA, 13 nt, Human
cauaguuuggcau

SEQ ID NO: 2662428 - RNA, 21 nt, Human
cauaguucugagcugccagug

SEQ ID NO: 2662429 - RNA, 12 nt, Human
cauaguuucuuu

SEQ ID NO: 2662430 - RNA, 15 nt, Human
cauaguuucuuuauu

SEQ ID NO: 2662431 - RNA, 16 nt, Human
cauaguuucuuuauuu

SEQ ID NO: 2662432 - RNA, 17 nt, Human
cauaguuucuuuauuuu

SEQ ID NO: 2662433 - RNA, 22 nt, Human
cauaguuucuuuauuuugugua

SEQ ID NO: 2662434 - RNA, 23 nt, Human
cauaguuucuuuauuuuguguaa

SEQ ID NO: 2662435 - RNA, 20 nt, Human
cauaguucugagcugccagu

SEQ ID NO: 2662436 - RNA, 13 nt, Human
cauaguuacugug

SEQ ID NO: 2662437 - RNA, 14 nt, Human
cauaguuacugugu

SEQ ID NO: 2662438 - RNA, 16 nt, Human
cauaguuacuguguaa

SEQ ID NO: 2662439 - RNA, 18 nt, Human
cauaguuacuguguaaac

SEQ ID NO: 2662440 - RNA, 19 nt, Human
cauaguuacuguguaaacu

SEQ ID NO: 2662441 - RNA, 18 nt, Human
cauagaaaccacuagaaa

SEQ ID NO: 2662442 - RNA, 23 nt, Human
cauagaggcuucuccgccagccu

SEQ ID NO: 2662443 - RNA, 14 nt, Human
cauagaguacacug

SEQ ID NO: 2662444 - RNA, 19 nt, Human
cauagaggcuucuccgcca

SEQ ID NO: 2662445 - RNA, 20 nt, Human
cauagaggcuucuccgccag

SEQ ID NO: 2662446 - RNA, 21 nt, Human
cauagaggcuucuccgccagc

SEQ ID NO: 2662447 - RNA, 22 nt, Human
cauagaggcuucuccgccagcc

SEQ ID NO: 2662448 - RNA, 12 nt, Human
cauagaggcuuc

SEQ ID NO: 2662449 - RNA, 15 nt, Human
cauagaggcuucucc

SEQ ID NO: 2662450 - RNA, 19 nt, Human
cauagaguacacugccugc

SEQ ID NO: 2662451 - RNA, 18 nt, Human
cauagaguacacugccug

SEQ ID NO: 2662452 - RNA, 17 nt, Human
cauagaguacacugccu

SEQ ID NO: 2662453 - RNA, 15 nt, Human
cauagaguacacugc

SEQ ID NO: 2662454 - RNA, 16 nt, Human
cauagauaauauuguu

SEQ ID NO: 2662455 - RNA, 17 nt, Human
cauagauaauauuguuu

SEQ ID NO: 2662456 - RNA, 19 nt, Human
cauagauaauauuguuugg

SEQ ID NO: 2662457 - RNA, 22 nt, Human
cauagauaauauuguuugguaa

SEQ ID NO: 2662458 - RNA, 23 nt, Human
cauagauaauauuguuugguaaa

SEQ ID NO: 2662459 - RNA, 24 nt, Human
cauagauaauauuguuugguaaau

SEQ ID NO: 2662460 - RNA, 23 nt, Human
cauauacacgaauagacaucaaa

SEQ ID NO: 2662461 - RNA, 11 nt, Human
cauauauauau

SEQ ID NO: 2662462 - RNA, 16 nt, Human
cauauauauauauaac

SEQ ID NO: 2662463 - RNA, 13 nt, Human
cauaucaguugag

SEQ ID NO: 2662464 - RNA, 20 nt, Human
cauaucaacuuagucaauaa

SEQ ID NO: 2662465 - RNA, 13 nt, Human
cauaucccuucca

SEQ ID NO: 2662466 - RNA, 14 nt, Human
cauaucccuuccag

SEQ ID NO: 2662467 - RNA, 15 nt, Human
cauaucccuuccaga

SEQ ID NO: 2662468 - RNA, 17 nt, Human
cauaucccuuccagaug

SEQ ID NO: 2662469 - RNA, 14 nt, Human
cauacuuaccuagu

SEQ ID NO: 2662470 - RNA, 18 nt, Human
cauacuuaccuagugaaa

SEQ ID NO: 2662471 - RNA, 22 nt, Human
cauacuuaccuagugaaacuuu

SEQ ID NO: 2662472 - RNA, 14 nt, Human
cauacgauuuaagg

SEQ ID NO: 2662473 - RNA, 20 nt, Human
cauacuccuuccaucaaaua

SEQ ID NO: 2662474 - RNA, 15 nt, Human
cauacucgagucuga

SEQ ID NO: 2662475 - RNA, 19 nt, Human
cauacucgagucugaggcc

SEQ ID NO: 2662476 - RNA, 18 nt, Human
cauacucgagucugaggc

SEQ ID NO: 2662477 - RNA, 17 nt, Human
cauacucgagucugagg

SEQ ID NO: 2662478 - RNA, 16 nt, Human
cauacucgagucugag

SEQ ID NO: 2662479 - RNA, 20 nt, Human
cauagaaauggaaauuuugc

SEQ ID NO: 2662480 - RNA, 23 nt, Human
cauagaaauggaaauuuugcuau

SEQ ID NO: 2662481 - RNA, 22 nt, Human
cauagaaauguagguccucaga

SEQ ID NO: 2662482 - RNA, 23 nt, Human
cauagaaauguagguccucagaa

SEQ ID NO: 2662483 - RNA, 13 nt, Human
cauagacaugaaa

SEQ ID NO: 2662484 - RNA, 14 nt, Human
cauagacaugaaag

SEQ ID NO: 2662485 - RNA, 16 nt, Human
cauagacaugaaaggu

SEQ ID NO: 2662486 - RNA, 17 nt, Human
cauacuggcuucaccau

SEQ ID NO: 2662487 - RNA, 14 nt, Human
cauacuuuguaaau

SEQ ID NO: 2662488 - RNA, 15 nt, Human
cauacuuuguaaaua

SEQ ID NO: 2662489 - RNA, 22 nt, Human
cauacuuuguaaauaggauuuu

SEQ ID NO: 2662490 - RNA, 16 nt, Human
cauacuuuguauuuug

SEQ ID NO: 2662491 - RNA, 17 nt, Human
cauacuuuguauuuuga

SEQ ID NO: 2662492 - RNA, 18 nt, Human
cauacuuuguauuuugau

SEQ ID NO: 2662493 - RNA, 10 nt, Human
cauuaaacug

SEQ ID NO: 2662494 - RNA, 11 nt, Human
cauuaaacuuu

SEQ ID NO: 2662495 - RNA, 13 nt, Human
cauuaaacuuuuu

SEQ ID NO: 2662496 - RNA, 14 nt, Human
cauuaaacuuuuuu

SEQ ID NO: 2662497 - RNA, 19 nt, Human
cauuaaacuuuuuuaacca

SEQ ID NO: 2662498 - RNA, 15 nt, Human
cauguuuuguuuacg

SEQ ID NO: 2662499 - RNA, 20 nt, Human
cauuaaaggcauaaaugacu

SEQ ID NO: 2662500 - RNA, 15 nt, Human
cauuaauacucuuua

SEQ ID NO: 2662501 - RNA, 13 nt, Human
cauuaacaaauaa

SEQ ID NO: 2662502 - RNA, 15 nt, Human
cauuaacaaauaaaa

SEQ ID NO: 2662503 - RNA, 16 nt, Human
cauuaacaaauaaaaa

SEQ ID NO: 2662504 - RNA, 23 nt, Human
cauuauuuauauggggaauauau

SEQ ID NO: 2662505 - RNA, 19 nt, Human
cauuagagaacauccuggc

SEQ ID NO: 2662506 - RNA, 12 nt, Human
cauguggcugga

SEQ ID NO: 2662507 - RNA, 20 nt, Human
cauguggaaggcaagccagg

SEQ ID NO: 2662508 - RNA, 22 nt, Human
cauguggaaggcaagccaggcu

SEQ ID NO: 2662509 - RNA, 23 nt, Human
cauguggaaggcaagccaggcuc

SEQ ID NO: 2662510 - RNA, 13 nt, Human
cauguggcuggaa

SEQ ID NO: 2662511 - RNA, 15 nt, Human
cauguggcuggaaga

SEQ ID NO: 2662512 - RNA, 14 nt, Human
caugugguuugaaa

SEQ ID NO: 2662513 - RNA, 18 nt, Human
caugugugcaacagggua

SEQ ID NO: 2662514 - RNA, 15 nt, Human
caugugcauaguuuc

SEQ ID NO: 2662515 - RNA, 16 nt, Human
caugugcauaguuucu

SEQ ID NO: 2662516 - RNA, 17 nt, Human
caugugcauaguuucuu

SEQ ID NO: 2662517 - RNA, 18 nt, Human
caugugcauaguuucuuu

SEQ ID NO: 2662518 - RNA, 15 nt, Human
caugugcuucugcca

SEQ ID NO: 2662519 - RNA, 12 nt, Human
cauguuuuguau

SEQ ID NO: 2662520 - RNA, 14 nt, Human
cauguuuuccguga

SEQ ID NO: 2662521 - RNA, 12 nt, Human
cauguuuauaaa

SEQ ID NO: 2662522 - RNA, 13 nt, Human
cauguuuauaaau

SEQ ID NO: 2662523 - RNA, 23 nt, Human
cauguuuauaaaucuuaugcucu

SEQ ID NO: 2662524 - RNA, 15 nt, Human
caugucuuuuaaaau

SEQ ID NO: 2662525 - RNA, 18 nt, Human
cauguaaauguaaacuca

SEQ ID NO: 2662526 - RNA, 14 nt, Human
cauggugccugaga

SEQ ID NO: 2662527 - RNA, 13 nt, Human
cauggugccugag

SEQ ID NO: 2662528 - RNA, 19 nt, Human
cauggugaaaccccgucuc

SEQ ID NO: 2662529 - RNA, 14 nt, Human
cauggugaagugcu

SEQ ID NO: 2662530 - RNA, 23 nt, Human
cauggugaagugcuuggaacaua

SEQ ID NO: 2662531 - RNA, 15 nt, Human
cauggugccugagag

SEQ ID NO: 2662532 - RNA, 16 nt, Human
cauggugccugagagg

SEQ ID NO: 2662533 - RNA, 21 nt, Human
cauguaaugguaucuuaaagu

SEQ ID NO: 2662534 - RNA, 16 nt, Human
cauguaaauuuuguau

SEQ ID NO: 2662535 - RNA, 17 nt, Human
caugcuaacaaagacaa

SEQ ID NO: 2662536 - RNA, 18 nt, Human
caugccucacuaauuuuu

SEQ ID NO: 2662537 - RNA, 23 nt, Human
caugcggugccaugaagggaccc

SEQ ID NO: 2662538 - RNA, 13 nt, Human
caugcggucgggc

SEQ ID NO: 2662539 - RNA, 15 nt, Human
caugcgcucagggcc

SEQ ID NO: 2662540 - RNA, 21 nt, Human
caugcgcccccuccgcccugc

SEQ ID NO: 2662541 - RNA, 23 nt, Human
caugcgcccccuccgcccugcca

SEQ ID NO: 2662542 - RNA, 14 nt, Human
caugcgcucagggc

SEQ ID NO: 2662543 - RNA, 11 nt, Human
cauggggaggg

SEQ ID NO: 2662544 - RNA, 20 nt, Human
cauggggagggauucugguu

SEQ ID NO: 2662545 - RNA, 23 nt, Human
cauggggagggauucugguucca

SEQ ID NO: 2662546 - RNA, 10 nt, Human
cauggagcca

SEQ ID NO: 2662547 - RNA, 16 nt, Human
caugccgucugccgga

SEQ ID NO: 2662548 - RNA, 21 nt, Human
caugcccucucaggccggcag

SEQ ID NO: 2662549 - RNA, 16 nt, Human
caugcccucucaggcc

SEQ ID NO: 2662550 - RNA, 13 nt, Human
caugcccucucag

SEQ ID NO: 2662551 - RNA, 15 nt, Human
caugcccucucaggc

SEQ ID NO: 2662552 - RNA, 14 nt, Human
caugcccucucagg

SEQ ID NO: 2662553 - RNA, 12 nt, Human
caugcauauaau

SEQ ID NO: 2662554 - RNA, 14 nt, Human
caugcauauaauga

SEQ ID NO: 2662555 - RNA, 18 nt, Human
caugcauauaaugaauaa

SEQ ID NO: 2662556 - RNA, 20 nt, Human
caugcauauaaugaauaaau

SEQ ID NO: 2662557 - RNA, 21 nt, Human
caugcauauaaugaauaaauc

SEQ ID NO: 2662558 - RNA, 22 nt, Human
caugcauauaaugaauaaauca

SEQ ID NO: 2662559 - RNA, 23 nt, Human
caugcccacccccugcccugcac

SEQ ID NO: 2662560 - RNA, 11 nt, Human
caugcccccug

SEQ ID NO: 2662561 - RNA, 14 nt, Human
caugcccccugcag

SEQ ID NO: 2662562 - RNA, 16 nt, Human
caugcccccugcagac

SEQ ID NO: 2662563 - RNA, 15 nt, Human
caugcccacccccug

SEQ ID NO: 2662564 - RNA, 16 nt, Human
caugcccacccccugc

SEQ ID NO: 2662565 - RNA, 17 nt, Human
caugcccacccccugcc

SEQ ID NO: 2662566 - RNA, 18 nt, Human
caugcccacccccugccc

SEQ ID NO: 2662567 - RNA, 19 nt, Human
caugcccacccccugcccu

SEQ ID NO: 2662568 - RNA, 20 nt, Human
caugcccacccccugcccug

SEQ ID NO: 2662569 - RNA, 21 nt, Human
caugcccacccccugcccugc

SEQ ID NO: 2662570 - RNA, 22 nt, Human
caugcccacccccugcccugca

SEQ ID NO: 2662571 - RNA, 13 nt, Human
caugcccaccccc

SEQ ID NO: 2662572 - RNA, 14 nt, Human
caugcaugcaaaug

SEQ ID NO: 2662573 - RNA, 19 nt, Human
caugcaugcaaaugagcuc

SEQ ID NO: 2662574 - RNA, 13 nt, Human
caugccagcuggc

SEQ ID NO: 2662575 - RNA, 14 nt, Human
caugccagcuggcc

SEQ ID NO: 2662576 - RNA, 16 nt, Human
caugccagcuggccuu

SEQ ID NO: 2662577 - RNA, 22 nt, Human
caugccagcuggccuuuguaag

SEQ ID NO: 2662578 - RNA, 20 nt, Human
caugccagcuuaucucaggg

SEQ ID NO: 2662579 - RNA, 19 nt, Human
caugccagcuuaucucagg

SEQ ID NO: 2662580 - RNA, 12 nt, Human
ccaacccugccg

SEQ ID NO: 2662581 - RNA, 13 nt, Human
ccaacccugccgu

SEQ ID NO: 2662582 - RNA, 21 nt, Human
ccaacccugccgucaccacca

SEQ ID NO: 2662583 - RNA, 22 nt, Human
ccaacccugccgucaccaccac

SEQ ID NO: 2662584 - RNA, 16 nt, Human
ccaaccgugucugucu

SEQ ID NO: 2662585 - RNA, 14 nt, Human
ccaaccucagggcu

SEQ ID NO: 2662586 - RNA, 18 nt, Human
ccaaccucagggcuccca

SEQ ID NO: 2662587 - RNA, 20 nt, Human
ccaaccucagggcucccagg

SEQ ID NO: 2662588 - RNA, 22 nt, Human
ccaaccucagggcucccagggg

SEQ ID NO: 2662589 - RNA, 16 nt, Human
ccaacaucucccuccc

SEQ ID NO: 2662590 - RNA, 15 nt, Human
ccaaccuuucccuca

SEQ ID NO: 2662591 - RNA, 16 nt, Human
ccaaccuuucccucac

SEQ ID NO: 2662592 - RNA, 12 nt, Human
ccaaccuuccca

SEQ ID NO: 2662593 - RNA, 19 nt, Human
ccaaagauagacagguccu

SEQ ID NO: 2662594 - RNA, 17 nt, Human
ccaaagagggcuuccuc

SEQ ID NO: 2662595 - RNA, 19 nt, Human
ccaaagagggcuuccucua

SEQ ID NO: 2662596 - RNA, 16 nt, Human
ccaaagagggcuuccu

SEQ ID NO: 2662597 - RNA, 23 nt, Human
ccaaagaggcugccccucucacc

SEQ ID NO: 2662598 - RNA, 17 nt, Human
ccaaagaggcugccccu

SEQ ID NO: 2662599 - RNA, 20 nt, Human
ccaaagaggcugccccucuc

SEQ ID NO: 2662600 - RNA, 21 nt, Human
ccaaagaggcugccccucuca

SEQ ID NO: 2662601 - RNA, 22 nt, Human
ccaaagaggcugccccucucac

SEQ ID NO: 2662602 - RNA, 18 nt, Human
ccacaaaggagagcuagc

SEQ ID NO: 2662603 - RNA, 13 nt, Human
ccacaaccucuuc

SEQ ID NO: 2662604 - RNA, 15 nt, Human
ccacaaccucuuccc

SEQ ID NO: 2662605 - RNA, 15 nt, Human
ccaaguggggugcug

SEQ ID NO: 2662606 - RNA, 16 nt, Human
ccaaguggggugcugg

SEQ ID NO: 2662607 - RNA, 22 nt, Human
ccaaguggggugcugggaggag

SEQ ID NO: 2662608 - RNA, 14 nt, Human
ccaaggcuggggga

SEQ ID NO: 2662609 - RNA, 14 nt, Human
ccaaggcuggcagg

SEQ ID NO: 2662610 - RNA, 13 nt, Human
ccaaggccagguu

SEQ ID NO: 2662611 - RNA, 13 nt, Human
ccaagcuccaagc

SEQ ID NO: 2662612 - RNA, 15 nt, Human
ccaagcuccaagccc

SEQ ID NO: 2662613 - RNA, 17 nt, Human
ccaagcuccaagcccca

SEQ ID NO: 2662614 - RNA, 22 nt, Human
ccacaauaaccaagauauuuuu

SEQ ID NO: 2662615 - RNA, 14 nt, Human
cauuucccaucugc

SEQ ID NO: 2662616 - RNA, 14 nt, Human
cauuuccauugcuu

SEQ ID NO: 2662617 - RNA, 15 nt, Human
cauuuccauugcuua

SEQ ID NO: 2662618 - RNA, 16 nt, Human
cauuuccauugcuuau

SEQ ID NO: 2662619 - RNA, 15 nt, Human
cauuucccaucugca

SEQ ID NO: 2662620 - RNA, 17 nt, Human
cauuucccaucugcacc

SEQ ID NO: 2662621 - RNA, 19 nt, Human
cauugcacauaagcuucca

SEQ ID NO: 2662622 - RNA, 21 nt, Human
cauugcacauaagcuuccauu

SEQ ID NO: 2662623 - RNA, 16 nt, Human
cauugacuuuuauaaa

SEQ ID NO: 2662624 - RNA, 18 nt, Human
cauugacuuuuauaaagc

SEQ ID NO: 2662625 - RNA, 18 nt, Human
cauugagaccgugaagau

SEQ ID NO: 2662626 - RNA, 23 nt, Human
cauuuccccucugcacccagaac

SEQ ID NO: 2662627 - RNA, 20 nt, Human
cauuucccaucugcaccccu

SEQ ID NO: 2662628 - RNA, 21 nt, Human
cauugaccuauuuccagaaau

SEQ ID NO: 2662629 - RNA, 15 nt, Human
cauugaccuauuucc

SEQ ID NO: 2662630 - RNA, 13 nt, Human
ccaaacgccuccc

SEQ ID NO: 2662631 - RNA, 12 nt, Human
ccaaagaggcug

SEQ ID NO: 2662632 - RNA, 13 nt, Human
ccaaagaggcugc

SEQ ID NO: 2662633 - RNA, 14 nt, Human
ccaaagaggcugcc

SEQ ID NO: 2662634 - RNA, 16 nt, Human
ccaaagaggcugcccc

SEQ ID NO: 2662635 - RNA, 12 nt, Human
cauuuuuauagc

SEQ ID NO: 2662636 - RNA, 13 nt, Human
ccaaaccggcagg

SEQ ID NO: 2662637 - RNA, 16 nt, Human
ccaaaccggcaggugc

SEQ ID NO: 2662638 - RNA, 18 nt, Human
ccaaaccggcaggugcga

SEQ ID NO: 2662639 - RNA, 15 nt, Human
ccaaagagugauagu

SEQ ID NO: 2662640 - RNA, 22 nt, Human
cauuuuaaggaaaacuaccugu

SEQ ID NO: 2662641 - RNA, 18 nt, Human
cauuuuaacccuauuuua

SEQ ID NO: 2662642 - RNA, 14 nt, Human
cauuuuaauuuuaa

SEQ ID NO: 2662643 - RNA, 15 nt, Human
cauuuuaauuuuaaa

SEQ ID NO: 2662644 - RNA, 18 nt, Human
cauuuuaauuuuaaagug

SEQ ID NO: 2662645 - RNA, 14 nt, Human
cauuuugaccuacu

SEQ ID NO: 2662646 - RNA, 17 nt, Human
cauuuucuuuuuuaacc

SEQ ID NO: 2662647 - RNA, 20 nt, Human
cauuuugaaauuguuccuug

SEQ ID NO: 2662648 - RNA, 24 nt, Human
cauuuugcuaaaugugaaugauga

SEQ ID NO: 2662649 - RNA, 21 nt, Human
cauuuugcuaaaugugaauga

SEQ ID NO: 2662650 - RNA, 18 nt, Human
cauuuugcuaaaugugaa

SEQ ID NO: 2662651 - RNA, 23 nt, Human
cccauggguuguguguuuauuuc

SEQ ID NO: 2662652 - RNA, 22 nt, Human
cccauggguuguguguuuauuu

SEQ ID NO: 2662653 - RNA, 19 nt, Human
cccauggggagggauucug

SEQ ID NO: 2662654 - RNA, 18 nt, Human
cccaucgugaagaagccu

SEQ ID NO: 2662655 - RNA, 12 nt, Human
cccaucuugcuu

SEQ ID NO: 2662656 - RNA, 23 nt, Human
cccauguagcccccuggccucug

SEQ ID NO: 2662657 - RNA, 22 nt, Human
cccauguagcccccuggccucu

SEQ ID NO: 2662658 - RNA, 21 nt, Human
cccauguagcccccuggccuc

SEQ ID NO: 2662659 - RNA, 15 nt, Human
cccauguagcccccu

SEQ ID NO: 2662660 - RNA, 14 nt, Human
cccauguagccccc

SEQ ID NO: 2662661 - RNA, 21 nt, Human
ccccaaagauagacagguccu

SEQ ID NO: 2662662 - RNA, 22 nt, Human
ccccaaagauagacagguccug

SEQ ID NO: 2662663 - RNA, 21 nt, Human
cccauuaaggggaagaaugaa

SEQ ID NO: 2662664 - RNA, 13 nt, Human
ccccaaccucagg

SEQ ID NO: 2662665 - RNA, 14 nt, Human
ccccaaccucaggg

SEQ ID NO: 2662666 - RNA, 20 nt, Human
ccccaaccucagggcuccca

SEQ ID NO: 2662667 - RNA, 21 nt, Human
ccccaaccucagggcucccag

SEQ ID NO: 2662668 - RNA, 22 nt, Human
ccccaaccucagggcucccagg

SEQ ID NO: 2662669 - RNA, 15 nt, Human
ccccaaccuuucccu

SEQ ID NO: 2662670 - RNA, 19 nt, Human
ccccaaccuuucccucacc

SEQ ID NO: 2662671 - RNA, 21 nt, Human
ccccaaccuuucccucacccc

SEQ ID NO: 2662672 - RNA, 15 nt, Human
ccccaaaucaauaca

SEQ ID NO: 2662673 - RNA, 14 nt, Human
cccaguuagcucuc

SEQ ID NO: 2662674 - RNA, 15 nt, Human
cccagugccgagaag

SEQ ID NO: 2662675 - RNA, 21 nt, Human
cccaguccccaccccugcccc

SEQ ID NO: 2662676 - RNA, 23 nt, Human
cccaguccccaccccugccccca

SEQ ID NO: 2662677 - RNA, 17 nt, Human
cccagguaccagcugcg

SEQ ID NO: 2662678 - RNA, 19 nt, Human
cccagguaccagcugcgcu

SEQ ID NO: 2662679 - RNA, 14 nt, Human
cccaggguucccgc

SEQ ID NO: 2662680 - RNA, 14 nt, Human
cccagguaccagcu

SEQ ID NO: 2662681 - RNA, 15 nt, Human
cccagguaccagcug

SEQ ID NO: 2662682 - RNA, 16 nt, Human
cccagguaccagcugc

SEQ ID NO: 2662683 - RNA, 22 nt, Human
cccagccucagcgcggcccucc

SEQ ID NO: 2662684 - RNA, 20 nt, Human
cccagccucagcgcggcccu

SEQ ID NO: 2662685 - RNA, 15 nt, Human
cccagccucagcgcg

SEQ ID NO: 2662686 - RNA, 14 nt, Human
cccagccucagcgc

SEQ ID NO: 2662687 - RNA, 13 nt, Human
cccagccucagcg

SEQ ID NO: 2662688 - RNA, 12 nt, Human
cccagcccugcu

SEQ ID NO: 2662689 - RNA, 14 nt, Human
cccagcccugcugg

SEQ ID NO: 2662690 - RNA, 15 nt, Human
cccagcccugcuggg

SEQ ID NO: 2662691 - RNA, 17 nt, Human
cccagcccugcugggga

SEQ ID NO: 2662692 - RNA, 16 nt, Human
cccagccccgacucca

SEQ ID NO: 2662693 - RNA, 17 nt, Human
cccagccccgacuccag

SEQ ID NO: 2662694 - RNA, 18 nt, Human
cccagccccgacuccagc

SEQ ID NO: 2662695 - RNA, 19 nt, Human
cccagccccgacuccagcc

SEQ ID NO: 2662696 - RNA, 20 nt, Human
cccagccccgacuccagcca

SEQ ID NO: 2662697 - RNA, 21 nt, Human
cccagccccgacuccagccag

SEQ ID NO: 2662698 - RNA, 15 nt, Human
cccagcuacuuggga

SEQ ID NO: 2662699 - RNA, 17 nt, Human
cccagcuacuugggagg

SEQ ID NO: 2662700 - RNA, 18 nt, Human
cccagcuacuugggaggc

SEQ ID NO: 2662701 - RNA, 23 nt, Human
cccagcuacuugggaggcugagg

SEQ ID NO: 2662702 - RNA, 18 nt, Human
ccauuccacacagaaugc

SEQ ID NO: 2662703 - RNA, 13 nt, Human
cccaggacgccac

SEQ ID NO: 2662704 - RNA, 19 nt, Human
cccaggacgccacucauuu

SEQ ID NO: 2662705 - RNA, 22 nt, Human
cccaggacgccacucauuucau

SEQ ID NO: 2662706 - RNA, 23 nt, Human
cccaggacgccacucauuucauc

SEQ ID NO: 2662707 - RNA, 20 nt, Human
ccaugugauggacacuccag

SEQ ID NO: 2662708 - RNA, 21 nt, Human
ccaugugauggacacuccagg

SEQ ID NO: 2662709 - RNA, 22 nt, Human
ccaugugauggacacuccaggg

SEQ ID NO: 2662710 - RNA, 19 nt, Human
ccaugugcauaguuucuuu

SEQ ID NO: 2662711 - RNA, 21 nt, Human
ccaugugcauaguuucuuuau

SEQ ID NO: 2662712 - RNA, 20 nt, Human
ccauguggaaggcaagccag

SEQ ID NO: 2662713 - RNA, 21 nt, Human
ccauguggaaggcaagccagg

SEQ ID NO: 2662714 - RNA, 24 nt, Human
ccauguggaaggcaagccaggcuc

SEQ ID NO: 2662715 - RNA, 21 nt, Human
ccauguggauaacuuuacaga

SEQ ID NO: 2662716 - RNA, 12 nt, Human
ccauguggccac

SEQ ID NO: 2662717 - RNA, 14 nt, Human
ccauguggccacaa

SEQ ID NO: 2662718 - RNA, 22 nt, Human
ccauggagccagcucccucuau

SEQ ID NO: 2662719 - RNA, 18 nt, Human
ccauggagccagcucccu

SEQ ID NO: 2662720 - RNA, 17 nt, Human
ccauggagccagcuccc

SEQ ID NO: 2662721 - RNA, 14 nt, Human
ccauggagccagcu

SEQ ID NO: 2662722 - RNA, 14 nt, Human
ccaugcgcccccuc

SEQ ID NO: 2662723 - RNA, 20 nt, Human
ccaugcgcccccuccgcccu

SEQ ID NO: 2662724 - RNA, 13 nt, Human
ccaugcuccuggc

SEQ ID NO: 2662725 - RNA, 18 nt, Human
ccaugcuccuggcccacu

SEQ ID NO: 2662726 - RNA, 15 nt, Human
ccaugcuccuggccc

SEQ ID NO: 2662727 - RNA, 15 nt, Human
ccaugcugaggccug

SEQ ID NO: 2662728 - RNA, 16 nt, Human
ccaugcugaggccugg

SEQ ID NO: 2662729 - RNA, 17 nt, Human
ccaugcugaggccuggg

SEQ ID NO: 2662730 - RNA, 20 nt, Human
ccauuccaggcagccucugu

SEQ ID NO: 2662731 - RNA, 21 nt, Human
ccauuccaggcagccucuguc

SEQ ID NO: 2662732 - RNA, 19 nt, Human
ccauguuggccaggcuggu

SEQ ID NO: 2662733 - RNA, 13 nt, Human
ccaggccugccuc

SEQ ID NO: 2662734 - RNA, 16 nt, Human
ccaggccugccuccca

SEQ ID NO: 2662735 - RNA, 14 nt, Human
ccagggaccggcgg

SEQ ID NO: 2662736 - RNA, 15 nt, Human
ccagggaauccaagc

SEQ ID NO: 2662737 - RNA, 17 nt, Human
ccagggaauccaagccu

SEQ ID NO: 2662738 - RNA, 18 nt, Human
ccagggaauccaagccuc

SEQ ID NO: 2662739 - RNA, 21 nt, Human
ccagggaauccaagccuccac

SEQ ID NO: 2662740 - RNA, 16 nt, Human
ccagggacacacagcc

SEQ ID NO: 2662741 - RNA, 19 nt, Human
ccagggacacacagccuag

SEQ ID NO: 2662742 - RNA, 21 nt, Human
ccagggacacacagccuagca

SEQ ID NO: 2662743 - RNA, 12 nt, Human
ccauccugacca

SEQ ID NO: 2662744 - RNA, 12 nt, Human
ccauccugacug

SEQ ID NO: 2662745 - RNA, 13 nt, Human
ccauccugacuga

SEQ ID NO: 2662746 - RNA, 12 nt, Human
ccauccuggcua

SEQ ID NO: 2662747 - RNA, 19 nt, Human
ccauccugggacggcggca

SEQ ID NO: 2662748 - RNA, 17 nt, Human
ccauccuguauucuuca

SEQ ID NO: 2662749 - RNA, 16 nt, Human
ccauagacaugaaagg

SEQ ID NO: 2662750 - RNA, 20 nt, Human
ccauauuuuauuacuguuua

SEQ ID NO: 2662751 - RNA, 13 nt, Human
ccaucacccucuu

SEQ ID NO: 2662752 - RNA, 16 nt, Human
ccaucacccucuuccu

SEQ ID NO: 2662753 - RNA, 18 nt, Human
ccaucacccucuuccugu

SEQ ID NO: 2662754 - RNA, 20 nt, Human
ccaucacccucuuccuguga

SEQ ID NO: 2662755 - RNA, 16 nt, Human
ccauagaguacacugc

SEQ ID NO: 2662756 - RNA, 22 nt, Human
ccauagaguacacugccugccu

SEQ ID NO: 2662757 - RNA, 20 nt, Human
ccauagaguacacugccugc

SEQ ID NO: 2662758 - RNA, 19 nt, Human
ccauagaguacacugccug

SEQ ID NO: 2662759 - RNA, 17 nt, Human
ccagcugacaucuugaa

SEQ ID NO: 2662760 - RNA, 21 nt, Human
ccagcugacaucuugaauccu

SEQ ID NO: 2662761 - RNA, 20 nt, Human
ccagcucugccgucucugga

SEQ ID NO: 2662762 - RNA, 21 nt, Human
ccagcucugccgucucuggag

SEQ ID NO: 2662763 - RNA, 22 nt, Human
ccagcucugccgucucuggagc

SEQ ID NO: 2662764 - RNA, 19 nt, Human
ccagcugggccgggaccca

SEQ ID NO: 2662765 - RNA, 17 nt, Human
ccagcuggccuggacag

SEQ ID NO: 2662766 - RNA, 12 nt, Human
ccagcuggccuu

SEQ ID NO: 2662767 - RNA, 13 nt, Human
ccagcuggccuuu

SEQ ID NO: 2662768 - RNA, 14 nt, Human
ccagcuggccuuug

SEQ ID NO: 2662769 - RNA, 16 nt, Human
ccagcuggccuuugua

SEQ ID NO: 2662770 - RNA, 12 nt, Human
ccagcuggccug

SEQ ID NO: 2662771 - RNA, 13 nt, Human
ccagcuggccugg

SEQ ID NO: 2662772 - RNA, 15 nt, Human
ccagcuggccuggac

SEQ ID NO: 2662773 - RNA, 16 nt, Human
ccagcuggccuggaca

SEQ ID NO: 2662774 - RNA, 16 nt, Human
ccagccuccucuggac

SEQ ID NO: 2662775 - RNA, 23 nt, Human
ccagccuccucuggacggcaggc

SEQ ID NO: 2662776 - RNA, 14 nt, Human
ccaggacgccacuc

SEQ ID NO: 2662777 - RNA, 15 nt, Human
ccaggacgccacuca

SEQ ID NO: 2662778 - RNA, 16 nt, Human
ccaggacgccacucau

SEQ ID NO: 2662779 - RNA, 20 nt, Human
ccaggacgccacucauuuca

SEQ ID NO: 2662780 - RNA, 21 nt, Human
ccaggacgccacucauuucau

SEQ ID NO: 2662781 - RNA, 22 nt, Human
ccaggacgccacucauuucauc

SEQ ID NO: 2662782 - RNA, 23 nt, Human
ccaggacgccacucauuucaucu

SEQ ID NO: 2662783 - RNA, 11 nt, Human
ccaggccagcc

SEQ ID NO: 2662784 - RNA, 12 nt, Human
ccaggccagccu

SEQ ID NO: 2662785 - RNA, 13 nt, Human
ccaggccagccuc

SEQ ID NO: 2662786 - RNA, 14 nt, Human
ccaggccagccucc

SEQ ID NO: 2662787 - RNA, 15 nt, Human
ccaggccagccuccg

SEQ ID NO: 2662788 - RNA, 16 nt, Human
ccaggccagccuccga

SEQ ID NO: 2662789 - RNA, 19 nt, Human
ccaggccagccuccgagag

SEQ ID NO: 2662790 - RNA, 20 nt, Human
ccaggccagccuccgagagg

SEQ ID NO: 2662791 - RNA, 22 nt, Human
ccgggaaccuccccagccugcg

SEQ ID NO: 2662792 - RNA, 21 nt, Human
ccggggaagagauccaaagac

SEQ ID NO: 2662793 - RNA, 15 nt, Human
ccggggacccuguga

SEQ ID NO: 2662794 - RNA, 15 nt, Human
ccgguccagcuggcc

SEQ ID NO: 2662795 - RNA, 21 nt, Human
ccgguccagcuggccuggaca

SEQ ID NO: 2662796 - RNA, 16 nt, Human
ccguggaggaggaagg

SEQ ID NO: 2662797 - RNA, 20 nt, Human
ccguggaggaggaaggcaag

SEQ ID NO: 2662798 - RNA, 22 nt, Human
ccguggaggaggaaggcaagag

SEQ ID NO: 2662799 - RNA, 23 nt, Human
ccguggaggaggaaggcaagagg

SEQ ID NO: 2662800 - RNA, 18 nt, Human
ccgguggcggccccagca

SEQ ID NO: 2662801 - RNA, 22 nt, Human
ccggugggacccccguggggca

SEQ ID NO: 2662802 - RNA, 20 nt, Human
ccgguggcggccccagcacc

SEQ ID NO: 2662803 - RNA, 21 nt, Human
ccggacccucuaaccucgccc

SEQ ID NO: 2662804 - RNA, 15 nt, Human
ccggacuuuucugca

SEQ ID NO: 2662805 - RNA, 16 nt, Human
ccggacuuuucugcaa

SEQ ID NO: 2662806 - RNA, 23 nt, Human
cccuuuccccgacgcccacccaa

SEQ ID NO: 2662807 - RNA, 16 nt, Human
ccggaucugagggaga

SEQ ID NO: 2662808 - RNA, 22 nt, Human
ccggagugucuggaauuguggc

SEQ ID NO: 2662809 - RNA, 17 nt, Human
ccgggaaccuccccagc

SEQ ID NO: 2662810 - RNA, 21 nt, Human
ccgggaaccuccccagccugc

SEQ ID NO: 2662811 - RNA, 20 nt, Human
ccgggaaccuccccagccug

SEQ ID NO: 2662812 - RNA, 19 nt, Human
ccgggaaccuccccagccu

SEQ ID NO: 2662813 - RNA, 18 nt, Human
ccgggaaccuccccagcc

SEQ ID NO: 2662814 - RNA, 19 nt, Human
cccuuguuugucccuucua

SEQ ID NO: 2662815 - RNA, 23 nt, Human
cccuuccgcaguguggccaggcu

SEQ ID NO: 2662816 - RNA, 18 nt, Human
cccuugaaacuuugggaa

SEQ ID NO: 2662817 - RNA, 22 nt, Human
cccugguuauugauguggcccu

SEQ ID NO: 2662818 - RNA, 16 nt, Human
cccuguguuaauuuaa

SEQ ID NO: 2662819 - RNA, 13 nt, Human
cccuucccccacc

SEQ ID NO: 2662820 - RNA, 18 nt, Human
cccuuccccaugcuuccu

SEQ ID NO: 2662821 - RNA, 23 nt, Human
cccuuccccaugcuuccuugccu

SEQ ID NO: 2662822 - RNA, 17 nt, Human
ccuacauaucccuucca

SEQ ID NO: 2662823 - RNA, 23 nt, Human
ccuagacucggggugcuuccuug

SEQ ID NO: 2662824 - RNA, 21 nt, Human
ccuagacucggggugcuuccu

SEQ ID NO: 2662825 - RNA, 21 nt, Human
ccuagaacacuaacucaccag

SEQ ID NO: 2662826 - RNA, 21 nt, Human
ccuagaaauuccccacccuga

SEQ ID NO: 2662827 - RNA, 14 nt, Human
ccuaaauggccuca

SEQ ID NO: 2662828 - RNA, 18 nt, Human
ccuaaauggccucaugug

SEQ ID NO: 2662829 - RNA, 21 nt, Human
ccuaacaucugaccuggcauc

SEQ ID NO: 2662830 - RNA, 22 nt, Human
ccuacaguugaaaaacagcuga

SEQ ID NO: 2662831 - RNA, 21 nt, Human
ccuacagcuuugaucccugac

SEQ ID NO: 2662832 - RNA, 20 nt, Human
ccuacagcuuugaucccuga

SEQ ID NO: 2662833 - RNA, 17 nt, Human
ccuacagcuuugauccc

SEQ ID NO: 2662834 - RNA, 18 nt, Human
ccguuagcuccuguggcc

SEQ ID NO: 2662835 - RNA, 13 nt, Human
ccguuagcuccug

SEQ ID NO: 2662836 - RNA, 14 nt, Human
ccguuagcuccugu

SEQ ID NO: 2662837 - RNA, 15 nt, Human
ccguuagcuccugug

SEQ ID NO: 2662838 - RNA, 17 nt, Human
ccguuagcuccuguggc

SEQ ID NO: 2662839 - RNA, 23 nt, Human
ccucaccucaugcccacccccug

SEQ ID NO: 2662840 - RNA, 12 nt, Human
ccucaccucaug

SEQ ID NO: 2662841 - RNA, 22 nt, Human
ccucaccuaauaggcugggaga

SEQ ID NO: 2662842 - RNA, 14 nt, Human
ccucaccucaugcc

SEQ ID NO: 2662843 - RNA, 15 nt, Human
ccucaccucaugccc

SEQ ID NO: 2662844 - RNA, 16 nt, Human
ccucaccucaugccca

SEQ ID NO: 2662845 - RNA, 17 nt, Human
ccucaccucaugcccac

SEQ ID NO: 2662846 - RNA, 19 nt, Human
ccucaccucaugcccaccc

SEQ ID NO: 2662847 - RNA, 22 nt, Human
ccucaccucaugcccacccccu

SEQ ID NO: 2662848 - RNA, 22 nt, Human
ccucacucggguuucucugugg

SEQ ID NO: 2662849 - RNA, 23 nt, Human
ccucacucggguuucucuguggc

SEQ ID NO: 2662850 - RNA, 18 nt, Human
ccuauugauuuaagcuuu

SEQ ID NO: 2662851 - RNA, 16 nt, Human
ccuauucuauaaaacu

SEQ ID NO: 2662852 - RNA, 15 nt, Human
ccuauuaguguuaua

SEQ ID NO: 2662853 - RNA, 11 nt, Human
ccuauuagugu

SEQ ID NO: 2662854 - RNA, 19 nt, Human
ccuauuaguguuauaugaa

SEQ ID NO: 2662855 - RNA, 16 nt, Human
ccuauuaguguuauau

SEQ ID NO: 2662856 - RNA, 17 nt, Human
ccuauuagagaagagau

SEQ ID NO: 2662857 - RNA, 16 nt, Human
ccuauuagagaagaga

SEQ ID NO: 2662858 - RNA, 16 nt, Human
ccuaucuccugacaga

SEQ ID NO: 2662859 - RNA, 14 nt, Human
ccuaucuccugaca

SEQ ID NO: 2662860 - RNA, 15 nt, Human
ccuaucuccugacag

SEQ ID NO: 2662861 - RNA, 14 nt, Human
ccuaucccucuccu

SEQ ID NO: 2662862 - RNA, 15 nt, Human
ccuaucccucuccua

SEQ ID NO: 2662863 - RNA, 15 nt, Human
ccuauccgcugccag

SEQ ID NO: 2662864 - RNA, 17 nt, Human
ccuauccgcugccagcc

SEQ ID NO: 2662865 - RNA, 18 nt, Human
ccuauccgcugccagccu

SEQ ID NO: 2662866 - RNA, 13 nt, Human
ccuaucuccugac

SEQ ID NO: 2662867 - RNA, 19 nt, Human
ccuagaccuaaacggcuca

SEQ ID NO: 2662868 - RNA, 14 nt, Human
ccuaggucuccagu

SEQ ID NO: 2662869 - RNA, 14 nt, Human
ccuagugaaacuuu

SEQ ID NO: 2662870 - RNA, 19 nt, Human
ccuagugaaacuuuucuag

SEQ ID NO: 2662871 - RNA, 13 nt, Human
ccucuccauuugc

SEQ ID NO: 2662872 - RNA, 20 nt, Human
ccucuccauuugcucuucag

SEQ ID NO: 2662873 - RNA, 13 nt, Human
ccucuccagccuc

SEQ ID NO: 2662874 - RNA, 14 nt, Human
ccucuccagccuca

SEQ ID NO: 2662875 - RNA, 16 nt, Human
ccucuccagccucagc

SEQ ID NO: 2662876 - RNA, 17 nt, Human
ccucuccagccucagcc

SEQ ID NO: 2662877 - RNA, 18 nt, Human
ccucuccagccucagccc

SEQ ID NO: 2662878 - RNA, 20 nt, Human
ccucuccagccucagccccc

SEQ ID NO: 2662879 - RNA, 22 nt, Human
ccucuccagccucagcccccug

SEQ ID NO: 2662880 - RNA, 21 nt, Human
ccuccuccagccgccaugcuc

SEQ ID NO: 2662881 - RNA, 16 nt, Human
ccuccucccacccggc

SEQ ID NO: 2662882 - RNA, 15 nt, Human
ccuccuccaggccug

SEQ ID NO: 2662883 - RNA, 19 nt, Human
ccuccucccacccggcugc

SEQ ID NO: 2662884 - RNA, 19 nt, Human
ccuccucucccauccuuga

SEQ ID NO: 2662885 - RNA, 15 nt, Human
ccucuaaugagacug

SEQ ID NO: 2662886 - RNA, 14 nt, Human
ccucuaaugagacu

SEQ ID NO: 2662887 - RNA, 20 nt, Human
ccucuaaccucgcccucucc

SEQ ID NO: 2662888 - RNA, 18 nt, Human
ccucgugaaagugcauuu

SEQ ID NO: 2662889 - RNA, 15 nt, Human
ccucugaacuugccu

SEQ ID NO: 2662890 - RNA, 20 nt, Human
ccucuccuacucggcucugc

SEQ ID NO: 2662891 - RNA, 18 nt, Human
ccucuccucgguucaagg

SEQ ID NO: 2662892 - RNA, 22 nt, Human
ccucugaauuuacuuccuugca

SEQ ID NO: 2662893 - RNA, 19 nt, Human
ccucugacguccaccuccu

SEQ ID NO: 2662894 - RNA, 12 nt, Human
ccuccuccagcc

SEQ ID NO: 2662895 - RNA, 22 nt, Human
ccuccucaccucaugcccaccc

SEQ ID NO: 2662896 - RNA, 17 nt, Human
ccuccucaccucaugcc

SEQ ID NO: 2662897 - RNA, 19 nt, Human
ccuccucaccucaugccca

SEQ ID NO: 2662898 - RNA, 16 nt, Human
ccuccucaccucaugc

SEQ ID NO: 2662899 - RNA, 17 nt, Human
ccuccccugccaccagg

SEQ ID NO: 2662900 - RNA, 12 nt, Human
ccuccccugcca

SEQ ID NO: 2662901 - RNA, 13 nt, Human
ccuccccugccac

SEQ ID NO: 2662902 - RNA, 14 nt, Human
ccuccccugccacc

SEQ ID NO: 2662903 - RNA, 16 nt, Human
ccuccagugugggcuu

SEQ ID NO: 2662904 - RNA, 20 nt, Human
ccucaggugagaagcagagg

SEQ ID NO: 2662905 - RNA, 18 nt, Human
ccucaggugagaagcaga

SEQ ID NO: 2662906 - RNA, 17 nt, Human
ccucaggugagaagcag

SEQ ID NO: 2662907 - RNA, 22 nt, Human
ccuccagaacucacuggggccu

SEQ ID NO: 2662908 - RNA, 21 nt, Human
ccuccagaacucacuggggcc

SEQ ID NO: 2662909 - RNA, 16 nt, Human
cccguuuuccccauga

SEQ ID NO: 2662910 - RNA, 12 nt, Human
cccguuuucccc

SEQ ID NO: 2662911 - RNA, 14 nt, Human
cccguuucuggugg

SEQ ID NO: 2662912 - RNA, 18 nt, Human
cccguuuuccccaugaca

SEQ ID NO: 2662913 - RNA, 20 nt, Human
cccuaaaagcacuccugcuu

SEQ ID NO: 2662914 - RNA, 21 nt, Human
cccuaaccccuuccagaucac

SEQ ID NO: 2662915 - RNA, 17 nt, Human
cccuaaccccuuccaga

SEQ ID NO: 2662916 - RNA, 16 nt, Human
cccggcaggguccuag

SEQ ID NO: 2662917 - RNA, 21 nt, Human
cccggaggccgaggccaugug

SEQ ID NO: 2662918 - RNA, 14 nt, Human
cccggagcuggagg

SEQ ID NO: 2662919 - RNA, 13 nt, Human
cccuaagguccua

SEQ ID NO: 2662920 - RNA, 19 nt, Human
cccuagcagcccacccugc

SEQ ID NO: 2662921 - RNA, 20 nt, Human
cccuagcagcccacccugcu

SEQ ID NO: 2662922 - RNA, 23 nt, Human
cccuagcagcccacccugcugcu

SEQ ID NO: 2662923 - RNA, 20 nt, Human
cccuagccaaugucuccucc

SEQ ID NO: 2662924 - RNA, 20 nt, Human
cccuccaaauggagaagcug

SEQ ID NO: 2662925 - RNA, 23 nt, Human
cccuccaaauggagaagcugcag

SEQ ID NO: 2662926 - RNA, 22 nt, Human
ccccaggugguuauggagaggg

SEQ ID NO: 2662927 - RNA, 17 nt, Human
ccccagguccagcucug

SEQ ID NO: 2662928 - RNA, 21 nt, Human
ccccagguccagcucuggagg

SEQ ID NO: 2662929 - RNA, 22 nt, Human
ccccagguccagcucuggaggg

SEQ ID NO: 2662930 - RNA, 22 nt, Human
ccccagggggucucacccaugc

SEQ ID NO: 2662931 - RNA, 12 nt, Human
ccccaggacgcc

SEQ ID NO: 2662932 - RNA, 23 nt, Human
ccccaggacgccacucauuucau

SEQ ID NO: 2662933 - RNA, 17 nt, Human
ccccacagcgucccugg

SEQ ID NO: 2662934 - RNA, 18 nt, Human
ccccacagcgucccuggc

SEQ ID NO: 2662935 - RNA, 22 nt, Human
ccccacagucuccggccucucc

SEQ ID NO: 2662936 - RNA, 13 nt, Human
ccccacaguugcu

SEQ ID NO: 2662937 - RNA, 17 nt, Human
ccccagccccgacucca

SEQ ID NO: 2662938 - RNA, 18 nt, Human
ccccagccccgacuccag

SEQ ID NO: 2662939 - RNA, 19 nt, Human
ccccagccccgacuccagc

SEQ ID NO: 2662940 - RNA, 23 nt, Human
ccccagccccgacuccagccagc

SEQ ID NO: 2662941 - RNA, 13 nt, Human
ccccagccccggg

SEQ ID NO: 2662942 - RNA, 12 nt, Human
ccccagccugcg

SEQ ID NO: 2662943 - RNA, 11 nt, Human
ccccagccugc

SEQ ID NO: 2662944 - RNA, 10 nt, Human
ccccagccug

SEQ ID NO: 2662945 - RNA, 20 nt, Human
ccccagcccuaaucucaccc

SEQ ID NO: 2662946 - RNA, 13 nt, Human
ccccagccugcua

SEQ ID NO: 2662947 - RNA, 20 nt, Human
ccccagccugcuagcuagcu

SEQ ID NO: 2662948 - RNA, 12 nt, Human
ccccagccugcu

SEQ ID NO: 2662949 - RNA, 19 nt, Human
ccccagccugcgccugcug

SEQ ID NO: 2662950 - RNA, 18 nt, Human
ccccagccugcgccugcu

SEQ ID NO: 2662951 - RNA, 22 nt, Human
cccgcggggcugucggcgcugc

SEQ ID NO: 2662952 - RNA, 12 nt, Human
cccgccuggcca

SEQ ID NO: 2662953 - RNA, 14 nt, Human
cccgccuggccagg

SEQ ID NO: 2662954 - RNA, 15 nt, Human
cccgccuggccagga

SEQ ID NO: 2662955 - RNA, 16 nt, Human
cccgccuggccaggag

SEQ ID NO: 2662956 - RNA, 17 nt, Human
cccgccuggccaggagc

SEQ ID NO: 2662957 - RNA, 21 nt, Human
cccgccuggccaggagcaggc

SEQ ID NO: 2662958 - RNA, 17 nt, Human
cccgcgccacaggaccc

SEQ ID NO: 2662959 - RNA, 19 nt, Human
ccccuuccucuugucugau

SEQ ID NO: 2662960 - RNA, 16 nt, Human
ccccugggcuuggccu

SEQ ID NO: 2662961 - RNA, 18 nt, Human
ccccugggcuuggccugc

SEQ ID NO: 2662962 - RNA, 19 nt, Human
ccccugggcuuggccugcu

SEQ ID NO: 2662963 - RNA, 23 nt, Human
ccccugggcuuggccugcuguga

SEQ ID NO: 2662964 - RNA, 20 nt, Human
ccccugggcuuggccugcug

SEQ ID NO: 2662965 - RNA, 21 nt, Human
ccccugggcuuggccugcugu

SEQ ID NO: 2662966 - RNA, 22 nt, Human
ccccugggcuuggccugcugug

SEQ ID NO: 2662967 - RNA, 16 nt, Human
ccccuggccgcgcucc

SEQ ID NO: 2662968 - RNA, 23 nt, Human
ccccuggccgcgcuccgggcuuu

SEQ ID NO: 2662969 - RNA, 12 nt, Human
cccuggagccca

SEQ ID NO: 2662970 - RNA, 21 nt, Human
cccugggggcacaggaggcag

SEQ ID NO: 2662971 - RNA, 17 nt, Human
cccugggugggcucugu

SEQ ID NO: 2662972 - RNA, 18 nt, Human
cccugggugggcucugug

SEQ ID NO: 2662973 - RNA, 20 nt, Human
cccugggugggcucugugca

SEQ ID NO: 2662974 - RNA, 20 nt, Human
cccuggguguccccgcugcu

SEQ ID NO: 2662975 - RNA, 22 nt, Human
cccuggguguccccgcugcugu

SEQ ID NO: 2662976 - RNA, 23 nt, Human
cccuggguguccccgcugcugug

SEQ ID NO: 2662977 - RNA, 15 nt, Human
cccugccugccgucu

SEQ ID NO: 2662978 - RNA, 13 nt, Human
cccugccuggccc

SEQ ID NO: 2662979 - RNA, 17 nt, Human
cccugccuggcccccaa

SEQ ID NO: 2662980 - RNA, 21 nt, Human
cccugccuggcccccaaccuc

SEQ ID NO: 2662981 - RNA, 10 nt, Human
cccugcuuuu

SEQ ID NO: 2662982 - RNA, 16 nt, Human
cccugaucccauuuuc

SEQ ID NO: 2662983 - RNA, 18 nt, Human
cccugaucccauuuuccu

SEQ ID NO: 2662984 - RNA, 22 nt, Human
cccugaucccauuuuccucuga

SEQ ID NO: 2662985 - RNA, 13 nt, Human
cccucucaccaaa

SEQ ID NO: 2662986 - RNA, 15 nt, Human
cccugccaccaggcc

SEQ ID NO: 2662987 - RNA, 14 nt, Human
cccugccaccaggc

SEQ ID NO: 2662988 - RNA, 22 nt, Human
cuagugcuccauaguuuggcau

SEQ ID NO: 2662989 - RNA, 20 nt, Human
cuagucaacaguacccuggu

SEQ ID NO: 2662990 - RNA, 15 nt, Human
cuagugggguuuccu

SEQ ID NO: 2662991 - RNA, 19 nt, Human
cuagugggguuuccuggca

SEQ ID NO: 2662992 - RNA, 18 nt, Human
cuagugggguuuccuggc

SEQ ID NO: 2662993 - RNA, 17 nt, Human
cuagugggguuuccugg

SEQ ID NO: 2662994 - RNA, 13 nt, Human
cuaggcccccacu

SEQ ID NO: 2662995 - RNA, 15 nt, Human
cuaggcccccacuug

SEQ ID NO: 2662996 - RNA, 16 nt, Human
cuaggcccccacuugc

SEQ ID NO: 2662997 - RNA, 12 nt, Human
cuagauugacua

SEQ ID NO: 2662998 - RNA, 21 nt, Human
cuaggcauuugcugaauacag

SEQ ID NO: 2662999 - RNA, 22 nt, Human
cuaggauagcuaacuguaaauc

SEQ ID NO: 2663000 - RNA, 18 nt, Human
cuaggagaaccaaaucug

SEQ ID NO: 2663001 - RNA, 21 nt, Human
cuaggagaaccaaaucuggaa

SEQ ID NO: 2663002 - RNA, 23 nt, Human
cuaggagaaccaaaucuggaagc

SEQ ID NO: 2663003 - RNA, 16 nt, Human
cuaggaagagucuacc

SEQ ID NO: 2663004 - RNA, 17 nt, Human
cuauauccugugacugu

SEQ ID NO: 2663005 - RNA, 15 nt, Human
cuauauccugugacu

SEQ ID NO: 2663006 - RNA, 23 nt, Human
cuaguuaccacauuacucugccu

SEQ ID NO: 2663007 - RNA, 12 nt, Human
cuauauauuucu

SEQ ID NO: 2663008 - RNA, 13 nt, Human
cuauauauuucua

SEQ ID NO: 2663009 - RNA, 14 nt, Human
cuauauauuucuau

SEQ ID NO: 2663010 - RNA, 16 nt, Human
cuauauauuucuauua

SEQ ID NO: 2663011 - RNA, 15 nt, Human
cuauauauaaaacgg

SEQ ID NO: 2663012 - RNA, 19 nt, Human
cuauauauaaaacggugcu

SEQ ID NO: 2663013 - RNA, 22 nt, Human
cuauauauaaaacggugcugug

SEQ ID NO: 2663014 - RNA, 14 nt, Human
cuauauauauaaau

SEQ ID NO: 2663015 - RNA, 16 nt, Human
cuauauauauaaaugu

SEQ ID NO: 2663016 - RNA, 17 nt, Human
cuauauauauaaaugua

SEQ ID NO: 2663017 - RNA, 18 nt, Human
cuauauauauaaauguau

SEQ ID NO: 2663018 - RNA, 13 nt, Human
cuauauauauaau

SEQ ID NO: 2663019 - RNA, 21 nt, Human
cuauauuuugucauaucaaau

SEQ ID NO: 2663020 - RNA, 16 nt, Human
cuauauuuugucauau

SEQ ID NO: 2663021 - RNA, 15 nt, Human
cuauauuuugucaua

SEQ ID NO: 2663022 - RNA, 14 nt, Human
cuauauuuugucau

SEQ ID NO: 2663023 - RNA, 15 nt, Human
cuaucaacaauaaaa

SEQ ID NO: 2663024 - RNA, 19 nt, Human
cuaucaacaauaaaauuuu

SEQ ID NO: 2663025 - RNA, 15 nt, Human
cucacagugcuuuua

SEQ ID NO: 2663026 - RNA, 23 nt, Human
cucacuaggcccccacuugccuc

SEQ ID NO: 2663027 - RNA, 21 nt, Human
cucacccaugcaagcagagga

SEQ ID NO: 2663028 - RNA, 22 nt, Human
cucacccaugcaagcagaggac

SEQ ID NO: 2663029 - RNA, 14 nt, Human
cucacccccuccca

SEQ ID NO: 2663030 - RNA, 15 nt, Human
cucacccccucccac

SEQ ID NO: 2663031 - RNA, 18 nt, Human
cucacccccucccacccc

SEQ ID NO: 2663032 - RNA, 21 nt, Human
cucacccccucccacccccag

SEQ ID NO: 2663033 - RNA, 22 nt, Human
cucacccccucccacccccagc

SEQ ID NO: 2663034 - RNA, 23 nt, Human
cucacccccucccacccccagcc

SEQ ID NO: 2663035 - RNA, 17 nt, Human
cucaacuggguccagaa

SEQ ID NO: 2663036 - RNA, 16 nt, Human
cucaagaggaaugaaa

SEQ ID NO: 2663037 - RNA, 18 nt, Human
cucaagaggaaugaaaaa

SEQ ID NO: 2663038 - RNA, 18 nt, Human
cucaagcggguggcucug

SEQ ID NO: 2663039 - RNA, 20 nt, Human
cucaagcggguggcucuggg

SEQ ID NO: 2663040 - RNA, 21 nt, Human
cucaaccucuucuggcucaaa

SEQ ID NO: 2663041 - RNA, 12 nt, Human
cucaaccucuuc

SEQ ID NO: 2663042 - RNA, 20 nt, Human
cucaaccucuucuggcucaa

SEQ ID NO: 2663043 - RNA, 18 nt, Human
cucaaccucuucuggcuc

SEQ ID NO: 2663044 - RNA, 14 nt, Human
cucaaccucuucug

SEQ ID NO: 2663045 - RNA, 13 nt, Human
cucaaccucuucu

SEQ ID NO: 2663046 - RNA, 15 nt, Human
cuauuuucuaaagac

SEQ ID NO: 2663047 - RNA, 14 nt, Human
cuauuuuaaucuug

SEQ ID NO: 2663048 - RNA, 11 nt, Human
cuauuuuaaga

SEQ ID NO: 2663049 - RNA, 23 nt, Human
cuauuuuaagacugauuuuaaua

SEQ ID NO: 2663050 - RNA, 16 nt, Human
cuaugacuuaacauag

SEQ ID NO: 2663051 - RNA, 13 nt, Human
cuagauuuucacu

SEQ ID NO: 2663052 - RNA, 19 nt, Human
cuagauuuucacuuaugaa

SEQ ID NO: 2663053 - RNA, 17 nt, Human
cuagcacuuugggaggc

SEQ ID NO: 2663054 - RNA, 19 nt, Human
cuagcaaucucuucauuau

SEQ ID NO: 2663055 - RNA, 17 nt, Human
cuagcacaauuugcacu

SEQ ID NO: 2663056 - RNA, 15 nt, Human
cuagcacagcagcuu

SEQ ID NO: 2663057 - RNA, 15 nt, Human
cuagcaaaauaaaac

SEQ ID NO: 2663058 - RNA, 17 nt, Human
cuagcaaaauaaaacau

SEQ ID NO: 2663059 - RNA, 19 nt, Human
cuagcaaaauaaaacauag

SEQ ID NO: 2663060 - RNA, 19 nt, Human
cuagacuagcaaucucuuc

SEQ ID NO: 2663061 - RNA, 20 nt, Human
cuacuugggaggcugaggca

SEQ ID NO: 2663062 - RNA, 21 nt, Human
cuagagugaacuugggccacu

SEQ ID NO: 2663063 - RNA, 17 nt, Human
cuagagugaacuugggc

SEQ ID NO: 2663064 - RNA, 23 nt, Human
cuacuucuuuuuucaaaagaaag

SEQ ID NO: 2663065 - RNA, 13 nt, Human
cuacuugggaggc

SEQ ID NO: 2663066 - RNA, 16 nt, Human
cuacuugggaggcuga

SEQ ID NO: 2663067 - RNA, 19 nt, Human
cuacugacauaucuacacu

SEQ ID NO: 2663068 - RNA, 20 nt, Human
cuacccgacauaagucgagg

SEQ ID NO: 2663069 - RNA, 22 nt, Human
cuaacauggugaaaccccgucu

SEQ ID NO: 2663070 - RNA, 17 nt, Human
cuaagcagcuuauuguu

SEQ ID NO: 2663071 - RNA, 20 nt, Human
cuaaggcaucuaucugugcu

SEQ ID NO: 2663072 - RNA, 22 nt, Human
cuaaggcaucuaucugugcuag

SEQ ID NO: 2663073 - RNA, 23 nt, Human
cuacacuucgcaccggagugucu

SEQ ID NO: 2663074 - RNA, 22 nt, Human
cuacagaaaugaggaggaugcu

SEQ ID NO: 2663075 - RNA, 22 nt, Human
cuacagagaggaaauucuccac

SEQ ID NO: 2663076 - RNA, 15 nt, Human
cuaccccgcagacac

SEQ ID NO: 2663077 - RNA, 20 nt, Human
cuaccccgcagacaccuugg

SEQ ID NO: 2663078 - RNA, 18 nt, Human
cuacccagcguggccucc

SEQ ID NO: 2663079 - RNA, 23 nt, Human
cuaauguggaccuuagaauacag

SEQ ID NO: 2663080 - RNA, 17 nt, Human
cuaauuaaccuuacuaa

SEQ ID NO: 2663081 - RNA, 18 nt, Human
cuaauuaaccuuacuaau

SEQ ID NO: 2663082 - RNA, 17 nt, Human
cuaauuaacugaaacau

SEQ ID NO: 2663083 - RNA, 16 nt, Human
cuaauuaaucuggaau

SEQ ID NO: 2663084 - RNA, 13 nt, Human
cuacaaucucuuu

SEQ ID NO: 2663085 - RNA, 21 nt, Human
cuacaaucucuuuuuguuugc

SEQ ID NO: 2663086 - RNA, 13 nt, Human
cuaaugagacuga

SEQ ID NO: 2663087 - RNA, 21 nt, Human
cuaaucacaguuuuuccugga

SEQ ID NO: 2663088 - RNA, 22 nt, Human
cuaaucacaguuuuuccuggaa

SEQ ID NO: 2663089 - RNA, 15 nt, Human
cuaaucaccauguaa

SEQ ID NO: 2663090 - RNA, 18 nt, Human
cuaaucaccauguaagca

SEQ ID NO: 2663091 - RNA, 19 nt, Human
cuaaucaccauguaagcac

SEQ ID NO: 2663092 - RNA, 19 nt, Human
cuaaucuagauaucgacuu

SEQ ID NO: 2663093 - RNA, 18 nt, Human
cuaaucuauggucgggag

SEQ ID NO: 2663094 - RNA, 20 nt, Human
cuaaucuauggucgggagac

SEQ ID NO: 2663095 - RNA, 14 nt, Human
cuaauauuuuaugu

SEQ ID NO: 2663096 - RNA, 12 nt, Human
cuaagguccuaa

SEQ ID NO: 2663097 - RNA, 13 nt, Human
cuaagguccuaag

SEQ ID NO: 2663098 - RNA, 14 nt, Human
cuaaaucuauuuau

SEQ ID NO: 2663099 - RNA, 19 nt, Human
cuaaaucagagacaaaaua

SEQ ID NO: 2663100 - RNA, 12 nt, Human
cuaaaucuauuu

SEQ ID NO: 2663101 - RNA, 19 nt, Human
cuaaaucuauuuauuaaua

SEQ ID NO: 2663102 - RNA, 16 nt, Human
cuaaaucuauuuauua

SEQ ID NO: 2663103 - RNA, 21 nt, Human
cuaaaucuauuuauuaauauu

SEQ ID NO: 2663104 - RNA, 12 nt, Human
cuaaauggccuc

SEQ ID NO: 2663105 - RNA, 13 nt, Human
cuaaauggccuca

SEQ ID NO: 2663106 - RNA, 16 nt, Human
cuaaauggccucaugu

SEQ ID NO: 2663107 - RNA, 15 nt, Human
cuaaaucagagacaa

SEQ ID NO: 2663108 - RNA, 14 nt, Human
cuaaaucagagaca

SEQ ID NO: 2663109 - RNA, 17 nt, Human
cuaaauggccucaugug

SEQ ID NO: 2663110 - RNA, 19 nt, Human
cuaaauggccucauguggc

SEQ ID NO: 2663111 - RNA, 22 nt, Human
cuaaauuauaguguagaaaaga

SEQ ID NO: 2663112 - RNA, 13 nt, Human
cuaaaauuugaag

SEQ ID NO: 2663113 - RNA, 21 nt, Human
cuaaauguuuggcauguaaau

SEQ ID NO: 2663114 - RNA, 13 nt, Human
cuaaauuucacua

SEQ ID NO: 2663115 - RNA, 14 nt, Human
cuaaaaauauuguu

SEQ ID NO: 2663116 - RNA, 18 nt, Human
cguuguguuuuuuaagau

SEQ ID NO: 2663117 - RNA, 16 nt, Human
cguuggagaagcccgu

SEQ ID NO: 2663118 - RNA, 12 nt, Human
cuaaaccucagu

SEQ ID NO: 2663119 - RNA, 13 nt, Human
cuaaaccucaguu

SEQ ID NO: 2663120 - RNA, 17 nt, Human
cuaaaccucaguuauua

SEQ ID NO: 2663121 - RNA, 19 nt, Human
cuaaacaaugcugauuugg

SEQ ID NO: 2663122 - RNA, 15 nt, Human
cgugaaaacggagcu

SEQ ID NO: 2663123 - RNA, 17 nt, Human
cgugaaaacggagcuga

SEQ ID NO: 2663124 - RNA, 16 nt, Human
cgugaaaacggagcug

SEQ ID NO: 2663125 - RNA, 14 nt, Human
cgucuauccugugu

SEQ ID NO: 2663126 - RNA, 16 nt, Human
cgucuugguguaauuu

SEQ ID NO: 2663127 - RNA, 22 nt, Human
cgucuugguguaauuugaagau

SEQ ID NO: 2663128 - RNA, 18 nt, Human
cgugaaaacggagcugaa

SEQ ID NO: 2663129 - RNA, 23 nt, Human
cggugcccaagccagaggcuggg

SEQ ID NO: 2663130 - RNA, 17 nt, Human
cgucucaaccccucaca

SEQ ID NO: 2663131 - RNA, 14 nt, Human
cgucuccaggggcu

SEQ ID NO: 2663132 - RNA, 19 nt, Human
cgucuccaggggcugcuuc

SEQ ID NO: 2663133 - RNA, 20 nt, Human
cgucuccaggggcugcuucc

SEQ ID NO: 2663134 - RNA, 21 nt, Human
cgucuccaggggcugcuuccu

SEQ ID NO: 2663135 - RNA, 13 nt, Human
cguccugccugug

SEQ ID NO: 2663136 - RNA, 16 nt, Human
cguccugccuguggcg

SEQ ID NO: 2663137 - RNA, 14 nt, Human
cguccugccugugg

SEQ ID NO: 2663138 - RNA, 15 nt, Human
cguccugccuguggc

SEQ ID NO: 2663139 - RNA, 11 nt, Human
cguggggaggu

SEQ ID NO: 2663140 - RNA, 20 nt, Human
cgugggcucccguguuuugu

SEQ ID NO: 2663141 - RNA, 18 nt, Human
cguugcugacuuagaauc

SEQ ID NO: 2663142 - RNA, 12 nt, Human
cgugggcucccg

SEQ ID NO: 2663143 - RNA, 14 nt, Human
cgugggagccagcc

SEQ ID NO: 2663144 - RNA, 19 nt, Human
cgugggacggugcccaagc

SEQ ID NO: 2663145 - RNA, 20 nt, Human
cgugggacggugcccaagcc

SEQ ID NO: 2663146 - RNA, 13 nt, Human
cguggcccaaggc

SEQ ID NO: 2663147 - RNA, 14 nt, Human
cguggcccaaggcu

SEQ ID NO: 2663148 - RNA, 19 nt, Human
cguggcccaaggcuggcag

SEQ ID NO: 2663149 - RNA, 17 nt, Human
cgugcaucccugagaca

SEQ ID NO: 2663150 - RNA, 18 nt, Human
cguggcacucgcuguaug

SEQ ID NO: 2663151 - RNA, 13 nt, Human
cguggagggaggc

SEQ ID NO: 2663152 - RNA, 15 nt, Human
cguggagggaggccc

SEQ ID NO: 2663153 - RNA, 16 nt, Human
cguggagggaggcccc

SEQ ID NO: 2663154 - RNA, 19 nt, Human
cguggagggaggccccagg

SEQ ID NO: 2663155 - RNA, 20 nt, Human
cguggagggaggccccaggg

SEQ ID NO: 2663156 - RNA, 17 nt, Human
cguggaggaggaaggca

SEQ ID NO: 2663157 - RNA, 15 nt, Human
cguggacugaguggg

SEQ ID NO: 2663158 - RNA, 19 nt, Human
cguggacugagugggaagc

SEQ ID NO: 2663159 - RNA, 21 nt, Human
cguggacugagugggaagccc

SEQ ID NO: 2663160 - RNA, 15 nt, Human
cgugcugggcggcug

SEQ ID NO: 2663161 - RNA, 19 nt, Human
cgugcugggcggcugugcu

SEQ ID NO: 2663162 - RNA, 15 nt, Human
cgugcuacugcacuc

SEQ ID NO: 2663163 - RNA, 17 nt, Human
cgugcuacugcacucca

SEQ ID NO: 2663164 - RNA, 20 nt, Human
cgcccaggcuggagugcagu

SEQ ID NO: 2663165 - RNA, 21 nt, Human
cgccccuagccgguuccuguc

SEQ ID NO: 2663166 - RNA, 14 nt, Human
cgcccugccacuca

SEQ ID NO: 2663167 - RNA, 21 nt, Human
cgcgccacaggacccucgccg

SEQ ID NO: 2663168 - RNA, 17 nt, Human
cgcgccacaggacccuc

SEQ ID NO: 2663169 - RNA, 16 nt, Human
cgcgccacaggacccu

SEQ ID NO: 2663170 - RNA, 14 nt, Human
cgcgccacaggacc

SEQ ID NO: 2663171 - RNA, 11 nt, Human
cgcccuuggcu

SEQ ID NO: 2663172 - RNA, 17 nt, Human
cgcccuuggcuucugug

SEQ ID NO: 2663173 - RNA, 20 nt, Human
cgcccuuggcuucugugaug

SEQ ID NO: 2663174 - RNA, 23 nt, Human
cgccaggggaaaaucagccugcu

SEQ ID NO: 2663175 - RNA, 23 nt, Human
cgccagccuccucuggacggcag

SEQ ID NO: 2663176 - RNA, 13 nt, Human
cgccagccuccuc

SEQ ID NO: 2663177 - RNA, 14 nt, Human
cgccagccuccucu

SEQ ID NO: 2663178 - RNA, 15 nt, Human
cgccagccuccucug

SEQ ID NO: 2663179 - RNA, 16 nt, Human
cgccagccuccucugg

SEQ ID NO: 2663180 - RNA, 17 nt, Human
cgccagccuccucugga

SEQ ID NO: 2663181 - RNA, 18 nt, Human
cgccagccuccucuggac

SEQ ID NO: 2663182 - RNA, 21 nt, Human
cgccagccuccucuggacggc

SEQ ID NO: 2663183 - RNA, 18 nt, Human
ccucugccccucccccag

SEQ ID NO: 2663184 - RNA, 22 nt, Human
cgcuguaugaaaggagagagca

SEQ ID NO: 2663185 - RNA, 17 nt, Human
cgcuuuuccuuggcauu

SEQ ID NO: 2663186 - RNA, 16 nt, Human
cgcuuuuccuuggcau

SEQ ID NO: 2663187 - RNA, 14 nt, Human
cgcuuuuccuuggc

SEQ ID NO: 2663188 - RNA, 11 nt, Human
cgcuuuuccuu

SEQ ID NO: 2663189 - RNA, 22 nt, Human
cgcuucuugccucugugcugug

SEQ ID NO: 2663190 - RNA, 18 nt, Human
cgcuucuugccucugugc

SEQ ID NO: 2663191 - RNA, 19 nt, Human
cgcuucuugccucugugcu

SEQ ID NO: 2663192 - RNA, 18 nt, Human
cgcuugcuuuucuguauu

SEQ ID NO: 2663193 - RNA, 23 nt, Human
cgcuccaccagcaucaccugccu

SEQ ID NO: 2663194 - RNA, 19 nt, Human
cgcucagggccaugcugag

SEQ ID NO: 2663195 - RNA, 20 nt, Human
cgcucagggccaugcugagg

SEQ ID NO: 2663196 - RNA, 21 nt, Human
cgcucagggccaugcugaggc

SEQ ID NO: 2663197 - RNA, 22 nt, Human
cgcucagggccaugcugaggcc

SEQ ID NO: 2663198 - RNA, 15 nt, Human
cgcucaguaaacggg

SEQ ID NO: 2663199 - RNA, 14 nt, Human
cgcgcuugcuggcc

SEQ ID NO: 2663200 - RNA, 16 nt, Human
cgcgcuugcuggccag

SEQ ID NO: 2663201 - RNA, 16 nt, Human
cgcggagccugcauuu

SEQ ID NO: 2663202 - RNA, 13 nt, Human
cgcgccccuagcc

SEQ ID NO: 2663203 - RNA, 20 nt, Human
cggccuagggcccccacagu

SEQ ID NO: 2663204 - RNA, 17 nt, Human
cggcccgcgccacagga

SEQ ID NO: 2663205 - RNA, 16 nt, Human
cggcccgcgccacagg

SEQ ID NO: 2663206 - RNA, 14 nt, Human
cggcccgccucucc

SEQ ID NO: 2663207 - RNA, 17 nt, Human
cggcccgccucuccucg

SEQ ID NO: 2663208 - RNA, 12 nt, Human
cggcugcagagg

SEQ ID NO: 2663209 - RNA, 15 nt, Human
cggcugcagaggcca

SEQ ID NO: 2663210 - RNA, 20 nt, Human
cggcugcagaggccagaggc

SEQ ID NO: 2663211 - RNA, 18 nt, Human
cggcugcauugaagaucc

SEQ ID NO: 2663212 - RNA, 15 nt, Human
cggcagccccagccu

SEQ ID NO: 2663213 - RNA, 22 nt, Human
cgcuuuuccuuggcauuccgca

SEQ ID NO: 2663214 - RNA, 13 nt, Human
cggaagagccuug

SEQ ID NO: 2663215 - RNA, 17 nt, Human
cggaagggguuccucaa

SEQ ID NO: 2663216 - RNA, 18 nt, Human
cggcaugagacucagugc

SEQ ID NO: 2663217 - RNA, 20 nt, Human
cggcaugagacucagugcag

SEQ ID NO: 2663218 - RNA, 21 nt, Human
cggcaugagacucagugcaga

SEQ ID NO: 2663219 - RNA, 23 nt, Human
cggcaugagacucagugcagaug

SEQ ID NO: 2663220 - RNA, 22 nt, Human
cggcagccccagccugcuagcu

SEQ ID NO: 2663221 - RNA, 18 nt, Human
cggcagccccagccugcu

SEQ ID NO: 2663222 - RNA, 17 nt, Human
cggcagccccagccugc

SEQ ID NO: 2663223 - RNA, 16 nt, Human
cggcagccccagccug

SEQ ID NO: 2663224 - RNA, 12 nt, Human
cggccaagaaug

SEQ ID NO: 2663225 - RNA, 13 nt, Human
cggccaagaaugu

SEQ ID NO: 2663226 - RNA, 14 nt, Human
cggccaagaaugua

SEQ ID NO: 2663227 - RNA, 13 nt, Human
cgguaacuguccu

SEQ ID NO: 2663228 - RNA, 14 nt, Human
cgguaacuguccug

SEQ ID NO: 2663229 - RNA, 15 nt, Human
cgguaacuguccugu

SEQ ID NO: 2663230 - RNA, 17 nt, Human
cgguaacuguccugucc

SEQ ID NO: 2663231 - RNA, 18 nt, Human
cgguaacuguccuguccu

SEQ ID NO: 2663232 - RNA, 18 nt, Human
cgguaggcgaccaccgcc

SEQ ID NO: 2663233 - RNA, 18 nt, Human
cgguagguucagccaagg

SEQ ID NO: 2663234 - RNA, 18 nt, Human
cgguauccccccaucuug

SEQ ID NO: 2663235 - RNA, 22 nt, Human
cgguauccccccaucuugcuuc

SEQ ID NO: 2663236 - RNA, 12 nt, Human
cgguacucccau

SEQ ID NO: 2663237 - RNA, 18 nt, Human
cggguggcucugggaucc

SEQ ID NO: 2663238 - RNA, 14 nt, Human
cggguggggaaagg

SEQ ID NO: 2663239 - RNA, 21 nt, Human
cggguggggaaaggagguggg

SEQ ID NO: 2663240 - RNA, 15 nt, Human
cgggugugggaaagc

SEQ ID NO: 2663241 - RNA, 17 nt, Human
cggguuagacagccaaa

SEQ ID NO: 2663242 - RNA, 16 nt, Human
cggguggggcuugggg

SEQ ID NO: 2663243 - RNA, 20 nt, Human
cggguggggcuuggggcuca

SEQ ID NO: 2663244 - RNA, 12 nt, Human
cggguggucccc

SEQ ID NO: 2663245 - RNA, 14 nt, Human
cgggugguccccgu

SEQ ID NO: 2663246 - RNA, 18 nt, Human
cgggucgggggcaggugc

SEQ ID NO: 2663247 - RNA, 21 nt, Human
cgguccagcuggccuggacag

SEQ ID NO: 2663248 - RNA, 12 nt, Human
cggucacugaug

SEQ ID NO: 2663249 - RNA, 11 nt, Human
cgguccagcug

SEQ ID NO: 2663250 - RNA, 13 nt, Human
cgguccagcuggc

SEQ ID NO: 2663251 - RNA, 14 nt, Human
cgguccagcuggcc

SEQ ID NO: 2663252 - RNA, 15 nt, Human
cgguccagcuggccu

SEQ ID NO: 2663253 - RNA, 16 nt, Human
cgguccagcuggccug

SEQ ID NO: 2663254 - RNA, 15 nt, Human
cggucuccugacugg

SEQ ID NO: 2663255 - RNA, 16 nt, Human
cggucuccugacuggu

SEQ ID NO: 2663256 - RNA, 23 nt, Human
cggucucggaucaggcucccagg

SEQ ID NO: 2663257 - RNA, 22 nt, Human
cggucucggaucaggcucccag

SEQ ID NO: 2663258 - RNA, 17 nt, Human
cggugccaugaagggac

SEQ ID NO: 2663259 - RNA, 14 nt, Human
cggugcccaagcca

SEQ ID NO: 2663260 - RNA, 15 nt, Human
cggugcccaagccag

SEQ ID NO: 2663261 - RNA, 18 nt, Human
cggugcccaagccagagg

SEQ ID NO: 2663262 - RNA, 20 nt, Human
cggugcccaagccagaggcu

SEQ ID NO: 2663263 - RNA, 15 nt, Human
cggguuucucugugg

SEQ ID NO: 2663264 - RNA, 22 nt, Human
cgggagccaugcgcccccuccg

SEQ ID NO: 2663265 - RNA, 12 nt, Human
cgggagacagca

SEQ ID NO: 2663266 - RNA, 20 nt, Human
cgggaggucgaggcaggagg

SEQ ID NO: 2663267 - RNA, 18 nt, Human
cgggaggucgaggcagga

SEQ ID NO: 2663268 - RNA, 16 nt, Human
cgggaugguucuggcu

SEQ ID NO: 2663269 - RNA, 15 nt, Human
cggggugcuuccuug

SEQ ID NO: 2663270 - RNA, 14 nt, Human
cgggguggccacag

SEQ ID NO: 2663271 - RNA, 16 nt, Human
cgggguggccacagcg

SEQ ID NO: 2663272 - RNA, 22 nt, Human
cggggugaguccauucucccag

SEQ ID NO: 2663273 - RNA, 23 nt, Human
cggggugaguccauucucccagg

SEQ ID NO: 2663274 - RNA, 21 nt, Human
cgggguauccugggggaccca

SEQ ID NO: 2663275 - RNA, 15 nt, Human
cgggguauccugggg

SEQ ID NO: 2663276 - RNA, 20 nt, Human
cgggggcugcccuugggcca

SEQ ID NO: 2663277 - RNA, 16 nt, Human
cgggggcaggugcugg

SEQ ID NO: 2663278 - RNA, 14 nt, Human
cggggcugucggcg

SEQ ID NO: 2663279 - RNA, 21 nt, Human
cggggcugucggcgcugcccc

SEQ ID NO: 2663280 - RNA, 19 nt, Human
cggggcugucggcgcugcc

SEQ ID NO: 2663281 - RNA, 12 nt, Human
cggggacccugu

SEQ ID NO: 2663282 - RNA, 14 nt, Human
cggggacccuguga

SEQ ID NO: 2663283 - RNA, 14 nt, Human
cucuccuugagugu

SEQ ID NO: 2663284 - RNA, 12 nt, Human
cucuccuggccu

SEQ ID NO: 2663285 - RNA, 13 nt, Human
cucuccuggccua

SEQ ID NO: 2663286 - RNA, 20 nt, Human
cucuccuggccuauccgcug

SEQ ID NO: 2663287 - RNA, 21 nt, Human
cucuccuggccuauccgcugc

SEQ ID NO: 2663288 - RNA, 22 nt, Human
cucuccuggccuauccgcugcc

SEQ ID NO: 2663289 - RNA, 23 nt, Human
cucuccuggccuauccgcugcca

SEQ ID NO: 2663290 - RNA, 13 nt, Human
cucucuagcacaa

SEQ ID NO: 2663291 - RNA, 22 nt, Human
cucucuagcacaauuugcacua

SEQ ID NO: 2663292 - RNA, 17 nt, Human
cucucuccagauguuuc

SEQ ID NO: 2663293 - RNA, 14 nt, Human
cucucuccagaugu

SEQ ID NO: 2663294 - RNA, 12 nt, Human
cucucuccagau

SEQ ID NO: 2663295 - RNA, 13 nt, Human
cucuccagccuca

SEQ ID NO: 2663296 - RNA, 16 nt, Human
cucuccagccucagcc

SEQ ID NO: 2663297 - RNA, 23 nt, Human
cucuccagccucagcccccugcu

SEQ ID NO: 2663298 - RNA, 18 nt, Human
cucuaguucuuuguucau

SEQ ID NO: 2663299 - RNA, 13 nt, Human
cucuaguucuuug

SEQ ID NO: 2663300 - RNA, 15 nt, Human
cucuaguucuuuguu

SEQ ID NO: 2663301 - RNA, 17 nt, Human
cucuagcagcaccuccu

SEQ ID NO: 2663302 - RNA, 19 nt, Human
cucuagcagcaccuccugu

SEQ ID NO: 2663303 - RNA, 15 nt, Human
cucuagaagccaagg

SEQ ID NO: 2663304 - RNA, 22 nt, Human
cucuagaagccaagggaaaggg

SEQ ID NO: 2663305 - RNA, 18 nt, Human
cucuagaagccaagggaa

SEQ ID NO: 2663306 - RNA, 19 nt, Human
cucuagaagccaagggaaa

SEQ ID NO: 2663307 - RNA, 23 nt, Human
cucuagggaaaaaccagcgugug

SEQ ID NO: 2663308 - RNA, 17 nt, Human
cucuacuuaauccaaug

SEQ ID NO: 2663309 - RNA, 18 nt, Human
cucuacuuaauccaaugg

SEQ ID NO: 2663310 - RNA, 20 nt, Human
cucuaccauccccuguagag

SEQ ID NO: 2663311 - RNA, 13 nt, Human
cucuacaaaaagc

SEQ ID NO: 2663312 - RNA, 13 nt, Human
cucggcucugcag

SEQ ID NO: 2663313 - RNA, 13 nt, Human
cucuaacauuucc

SEQ ID NO: 2663314 - RNA, 20 nt, Human
cucuaaccucgcccucuccu

SEQ ID NO: 2663315 - RNA, 19 nt, Human
cucuaaccucgcccucucc

SEQ ID NO: 2663316 - RNA, 17 nt, Human
cucuaaccucgcccucu

SEQ ID NO: 2663317 - RNA, 14 nt, Human
cucuaaccucgccc

SEQ ID NO: 2663318 - RNA, 21 nt, Human
cucggaguguguaugccaaga

SEQ ID NO: 2663319 - RNA, 18 nt, Human
cucggauaguugcuauuu

SEQ ID NO: 2663320 - RNA, 22 nt, Human
cucggauaguugcuauuuuugu

SEQ ID NO: 2663321 - RNA, 13 nt, Human
cucggcucagcuc

SEQ ID NO: 2663322 - RNA, 12 nt, Human
cucccuccaccc

SEQ ID NO: 2663323 - RNA, 13 nt, Human
cucccuccacccc

SEQ ID NO: 2663324 - RNA, 14 nt, Human
cucccuccacccca

SEQ ID NO: 2663325 - RNA, 15 nt, Human
cucccuccaccccag

SEQ ID NO: 2663326 - RNA, 16 nt, Human
cucccuccaccccagg

SEQ ID NO: 2663327 - RNA, 17 nt, Human
cucccuccaccccagga

SEQ ID NO: 2663328 - RNA, 18 nt, Human
cucccuccaccccaggac

SEQ ID NO: 2663329 - RNA, 19 nt, Human
cucccuccaccccaggacg

SEQ ID NO: 2663330 - RNA, 17 nt, Human
cucccuuucuucccuac

SEQ ID NO: 2663331 - RNA, 20 nt, Human
cuccucaccucaugcccacc

SEQ ID NO: 2663332 - RNA, 12 nt, Human
cuccucaccuca

SEQ ID NO: 2663333 - RNA, 14 nt, Human
cuccucaccucaug

SEQ ID NO: 2663334 - RNA, 15 nt, Human
cuccucaccucaugc

SEQ ID NO: 2663335 - RNA, 16 nt, Human
cuccucaccucaugcc

SEQ ID NO: 2663336 - RNA, 17 nt, Human
cuccucaccucaugccc

SEQ ID NO: 2663337 - RNA, 19 nt, Human
cuccucaccucaugcccac

SEQ ID NO: 2663338 - RNA, 15 nt, Human
cuccgccagccuccu

SEQ ID NO: 2663339 - RNA, 14 nt, Human
cucccuagcuccuc

SEQ ID NO: 2663340 - RNA, 14 nt, Human
cuccgccagccucc

SEQ ID NO: 2663341 - RNA, 18 nt, Human
cuccgccagccuccucug

SEQ ID NO: 2663342 - RNA, 20 nt, Human
cuccgccagccuccucugga

SEQ ID NO: 2663343 - RNA, 21 nt, Human
cuccgccagccuccucuggac

SEQ ID NO: 2663344 - RNA, 13 nt, Human
cuccgcccugcca

SEQ ID NO: 2663345 - RNA, 14 nt, Human
cuccgcccugccac

SEQ ID NO: 2663346 - RNA, 17 nt, Human
cuccgcccugccacuca

SEQ ID NO: 2663347 - RNA, 15 nt, Human
cuccgcccugccacu

SEQ ID NO: 2663348 - RNA, 16 nt, Human
cuccgcccugccacuc

SEQ ID NO: 2663349 - RNA, 17 nt, Human
cuccuccagugugggcu

SEQ ID NO: 2663350 - RNA, 23 nt, Human
cuccuccagugugggcuugacca

SEQ ID NO: 2663351 - RNA, 13 nt, Human
cuccuccaggccu

SEQ ID NO: 2663352 - RNA, 14 nt, Human
cuccuccaggccug

SEQ ID NO: 2663353 - RNA, 15 nt, Human
cuccuccaggccugc

SEQ ID NO: 2663354 - RNA, 17 nt, Human
cuccuccaggccugccu

SEQ ID NO: 2663355 - RNA, 18 nt, Human
cuccuccaggccugccuc

SEQ ID NO: 2663356 - RNA, 19 nt, Human
cuccuccaggccugccucc

SEQ ID NO: 2663357 - RNA, 21 nt, Human
cuccuccaggccugccuccca

SEQ ID NO: 2663358 - RNA, 23 nt, Human
cuccuccaggccugccucccacu

SEQ ID NO: 2663359 - RNA, 20 nt, Human
cuccucauggcagccuacuc

SEQ ID NO: 2663360 - RNA, 22 nt, Human
cuccuccagccgccaugcuccu

SEQ ID NO: 2663361 - RNA, 15 nt, Human
cuccuccccuuccuc

SEQ ID NO: 2663362 - RNA, 17 nt, Human
cuccuccccuuccucuu

SEQ ID NO: 2663363 - RNA, 14 nt, Human
cuccuccccaaauc

SEQ ID NO: 2663364 - RNA, 17 nt, Human
cuccuccccaaaucaau

SEQ ID NO: 2663365 - RNA, 21 nt, Human
cuccuguggccccacccuggg

SEQ ID NO: 2663366 - RNA, 22 nt, Human
cuccuguggccccacccugggc

SEQ ID NO: 2663367 - RNA, 13 nt, Human
cuccuguggcccc

SEQ ID NO: 2663368 - RNA, 19 nt, Human
cuccuguggccccacccug

SEQ ID NO: 2663369 - RNA, 20 nt, Human
cuccuguggccccacccugg

SEQ ID NO: 2663370 - RNA, 15 nt, Human
cuccugcacuuacuu

SEQ ID NO: 2663371 - RNA, 17 nt, Human
cuccugcacuuacuugc

SEQ ID NO: 2663372 - RNA, 18 nt, Human
cuccugcacuuacuugcu

SEQ ID NO: 2663373 - RNA, 19 nt, Human
cuccugcacuuacuugcuu

SEQ ID NO: 2663374 - RNA, 20 nt, Human
cuccugcacuuacuugcuua

SEQ ID NO: 2663375 - RNA, 22 nt, Human
cuccugcacuuacuugcuuauu

SEQ ID NO: 2663376 - RNA, 14 nt, Human
cuccugcagaccac

SEQ ID NO: 2663377 - RNA, 17 nt, Human
cucacuauccuacccca

SEQ ID NO: 2663378 - RNA, 21 nt, Human
cucccagguaccagcugcgcu

SEQ ID NO: 2663379 - RNA, 22 nt, Human
cucccagguaccagcugcgcuu

SEQ ID NO: 2663380 - RNA, 17 nt, Human
cucccagguaccagcug

SEQ ID NO: 2663381 - RNA, 18 nt, Human
cucccagguaccagcugc

SEQ ID NO: 2663382 - RNA, 19 nt, Human
cucccagguaccagcugcg

SEQ ID NO: 2663383 - RNA, 16 nt, Human
cucccagguaccagcu

SEQ ID NO: 2663384 - RNA, 24 nt, Human
cucccagguaccagcugcgcuugc

SEQ ID NO: 2663385 - RNA, 13 nt, Human
cucccaggggucu

SEQ ID NO: 2663386 - RNA, 16 nt, Human
cucccaggggucuccc

SEQ ID NO: 2663387 - RNA, 18 nt, Human
cucccaggggucucccug

SEQ ID NO: 2663388 - RNA, 19 nt, Human
cucccaggggucucccugg

SEQ ID NO: 2663389 - RNA, 20 nt, Human
cucccaggggucucccuggc

SEQ ID NO: 2663390 - RNA, 21 nt, Human
cucccaggggucucccuggcu

SEQ ID NO: 2663391 - RNA, 22 nt, Human
cucccaggggucucccuggcuc

SEQ ID NO: 2663392 - RNA, 23 nt, Human
cucccaggggucucccuggcucc

SEQ ID NO: 2663393 - RNA, 21 nt, Human
cuccccagccugcgccugcug

SEQ ID NO: 2663394 - RNA, 16 nt, Human
cuccccagccugcgcc

SEQ ID NO: 2663395 - RNA, 14 nt, Human
cuccccagccugcg

SEQ ID NO: 2663396 - RNA, 13 nt, Human
cuccccagccugc

SEQ ID NO: 2663397 - RNA, 12 nt, Human
cuccccagccug

SEQ ID NO: 2663398 - RNA, 11 nt, Human
cuccccacagc

SEQ ID NO: 2663399 - RNA, 15 nt, Human
cuccccacagcgucc

SEQ ID NO: 2663400 - RNA, 18 nt, Human
cuccccacagcgucccug

SEQ ID NO: 2663401 - RNA, 19 nt, Human
cuccccacagcgucccugg

SEQ ID NO: 2663402 - RNA, 20 nt, Human
cuccccacagcgucccuggc

SEQ ID NO: 2663403 - RNA, 21 nt, Human
cuccccaaaucaauacacuag

SEQ ID NO: 2663404 - RNA, 18 nt, Human
cucccgggccccacagac

SEQ ID NO: 2663405 - RNA, 22 nt, Human
cugagccagugcuuuaauggca

SEQ ID NO: 2663406 - RNA, 18 nt, Human
cugagcccuacucccugc

SEQ ID NO: 2663407 - RNA, 20 nt, Human
cugagcccuacucccugcag

SEQ ID NO: 2663408 - RNA, 21 nt, Human
cugagcccuacucccugcaga

SEQ ID NO: 2663409 - RNA, 22 nt, Human
cugagcccuacucccugcagau

SEQ ID NO: 2663410 - RNA, 23 nt, Human
cugagcccuacucccugcagaug

SEQ ID NO: 2663411 - RNA, 18 nt, Human
cugagccggccccaggcu

SEQ ID NO: 2663412 - RNA, 19 nt, Human
cugagccggccccaggcuc

SEQ ID NO: 2663413 - RNA, 23 nt, Human
cugagccggccccaggcucgugg

SEQ ID NO: 2663414 - RNA, 16 nt, Human
cugagccggccccagg

SEQ ID NO: 2663415 - RNA, 12 nt, Human
cugagccucugc

SEQ ID NO: 2663416 - RNA, 18 nt, Human
cugagccucugcucccca

SEQ ID NO: 2663417 - RNA, 16 nt, Human
cugagccucugcuccc

SEQ ID NO: 2663418 - RNA, 15 nt, Human
cugagccucugcucc

SEQ ID NO: 2663419 - RNA, 14 nt, Human
cugagccucugcuc

SEQ ID NO: 2663420 - RNA, 14 nt, Human
cugagccugcaggg

SEQ ID NO: 2663421 - RNA, 15 nt, Human
cugagccugcaggga

SEQ ID NO: 2663422 - RNA, 18 nt, Human
cugagccugcagggaagc

SEQ ID NO: 2663423 - RNA, 19 nt, Human
cugagccugcagggaagcc

SEQ ID NO: 2663424 - RNA, 22 nt, Human
cugagcgccuccauccaaggcc

SEQ ID NO: 2663425 - RNA, 13 nt, Human
cugagcgccucca

SEQ ID NO: 2663426 - RNA, 15 nt, Human
cugagcgccuccauc

SEQ ID NO: 2663427 - RNA, 16 nt, Human
cugaggaugaccagaa

SEQ ID NO: 2663428 - RNA, 22 nt, Human
cugaggauauucagauguaugu

SEQ ID NO: 2663429 - RNA, 13 nt, Human
cugaggcaggaga

SEQ ID NO: 2663430 - RNA, 17 nt, Human
cugaggcaguuugagga

SEQ ID NO: 2663431 - RNA, 18 nt, Human
cugacuguuuucucuuga

SEQ ID NO: 2663432 - RNA, 22 nt, Human
cugacuuagaaucccuguguua

SEQ ID NO: 2663433 - RNA, 12 nt, Human
cugacuuagaau

SEQ ID NO: 2663434 - RNA, 11 nt, Human
cugacuucugc

SEQ ID NO: 2663435 - RNA, 12 nt, Human
cugacuucugcc

SEQ ID NO: 2663436 - RNA, 13 nt, Human
cugacuucugccu

SEQ ID NO: 2663437 - RNA, 14 nt, Human
cugacuucugccug

SEQ ID NO: 2663438 - RNA, 15 nt, Human
cugacuucugccugg

SEQ ID NO: 2663439 - RNA, 16 nt, Human
cugacuucugccugga

SEQ ID NO: 2663440 - RNA, 18 nt, Human
cugacuucugccuggaga

SEQ ID NO: 2663441 - RNA, 19 nt, Human
cugacuucugccuggagac

SEQ ID NO: 2663442 - RNA, 16 nt, Human
cugacuguuuucucuu

SEQ ID NO: 2663443 - RNA, 16 nt, Human
cugacauaucuacacu

SEQ ID NO: 2663444 - RNA, 13 nt, Human
cugacaucuugaa

SEQ ID NO: 2663445 - RNA, 15 nt, Human
cugacaucuugaauc

SEQ ID NO: 2663446 - RNA, 21 nt, Human
cugacaucuugaauccuucca

SEQ ID NO: 2663447 - RNA, 22 nt, Human
cugacaucuugaauccuuccau

SEQ ID NO: 2663448 - RNA, 16 nt, Human
cugacaucuggaaucu

SEQ ID NO: 2663449 - RNA, 15 nt, Human
cugaagaugggagcc

SEQ ID NO: 2663450 - RNA, 17 nt, Human
cugaagaugggagccuu

SEQ ID NO: 2663451 - RNA, 14 nt, Human
cugacauuucuucu

SEQ ID NO: 2663452 - RNA, 18 nt, Human
cugacauuucuucuagug

SEQ ID NO: 2663453 - RNA, 13 nt, Human
cucuggagcccua

SEQ ID NO: 2663454 - RNA, 14 nt, Human
cucuggaggggagg

SEQ ID NO: 2663455 - RNA, 15 nt, Human
cucuggaggggaggg

SEQ ID NO: 2663456 - RNA, 21 nt, Human
cucuggaugauggauuccaca

SEQ ID NO: 2663457 - RNA, 16 nt, Human
cucuggaggggagggg

SEQ ID NO: 2663458 - RNA, 12 nt, Human
cucugccugccc

SEQ ID NO: 2663459 - RNA, 13 nt, Human
cucugccugcccc

SEQ ID NO: 2663460 - RNA, 21 nt, Human
cucugcuucucugacuucugc

SEQ ID NO: 2663461 - RNA, 16 nt, Human
cucugcuucucugacu

SEQ ID NO: 2663462 - RNA, 17 nt, Human
cucugcuucucugacuu

SEQ ID NO: 2663463 - RNA, 12 nt, Human
cucugcuucucu

SEQ ID NO: 2663464 - RNA, 13 nt, Human
cucugcuucucug

SEQ ID NO: 2663465 - RNA, 14 nt, Human
cucugcuucucuga

SEQ ID NO: 2663466 - RNA, 15 nt, Human
cucugcuucucugac

SEQ ID NO: 2663467 - RNA, 11 nt, Human
cucugccugcc

SEQ ID NO: 2663468 - RNA, 13 nt, Human
cucucuccucccu

SEQ ID NO: 2663469 - RNA, 18 nt, Human
cucuguguauuugcuuuu

SEQ ID NO: 2663470 - RNA, 19 nt, Human
cucuguguauuugcuuuuu

SEQ ID NO: 2663471 - RNA, 20 nt, Human
cucuguggcuccaggccaaa

SEQ ID NO: 2663472 - RNA, 11 nt, Human
cucuguggaug

SEQ ID NO: 2663473 - RNA, 15 nt, Human
cucuuagaaaaacca

SEQ ID NO: 2663474 - RNA, 13 nt, Human
cucuuagaaaaac

SEQ ID NO: 2663475 - RNA, 18 nt, Human
cucuucauuauucucugc

SEQ ID NO: 2663476 - RNA, 17 nt, Human
cucuucaucccauucca

SEQ ID NO: 2663477 - RNA, 19 nt, Human
cucuucaucccauuccagg

SEQ ID NO: 2663478 - RNA, 20 nt, Human
cucugugcagucacuggagg

SEQ ID NO: 2663479 - RNA, 11 nt, Human
cucugugagaa

SEQ ID NO: 2663480 - RNA, 19 nt, Human
cucugugagaagguuuauu

SEQ ID NO: 2663481 - RNA, 21 nt, Human
cucugugagaagguuuauugu

SEQ ID NO: 2663482 - RNA, 22 nt, Human
cucugugagaagguuuauuguu

SEQ ID NO: 2663483 - RNA, 23 nt, Human
cucugugagaagguuuauuguua

SEQ ID NO: 2663484 - RNA, 13 nt, Human
cucugugccuucg

SEQ ID NO: 2663485 - RNA, 15 nt, Human
cucugugccucccuc

SEQ ID NO: 2663486 - RNA, 22 nt, Human
cucugugccucccuccccagug

SEQ ID NO: 2663487 - RNA, 16 nt, Human
cucugugccuucuuuu

SEQ ID NO: 2663488 - RNA, 15 nt, Human
cucugugccuucuuu

SEQ ID NO: 2663489 - RNA, 13 nt, Human
cucugugcugugu

SEQ ID NO: 2663490 - RNA, 10 nt, Human
cucuggcuuu

SEQ ID NO: 2663491 - RNA, 15 nt, Human
cucuggcuuuuggaa

SEQ ID NO: 2663492 - RNA, 16 nt, Human
cucuggcuuuuggaag

SEQ ID NO: 2663493 - RNA, 16 nt, Human
cucuucuuggggccca

SEQ ID NO: 2663494 - RNA, 20 nt, Human
cucuucuuggggcccagugc

SEQ ID NO: 2663495 - RNA, 21 nt, Human
cucuucuuggggcccagugca

SEQ ID NO: 2663496 - RNA, 22 nt, Human
cucuucuuggggcccagugcau

SEQ ID NO: 2663497 - RNA, 20 nt, Human
cucuuccuaucccucuccua

SEQ ID NO: 2663498 - RNA, 23 nt, Human
cucuuuaaaaggaaagaaaacau

SEQ ID NO: 2663499 - RNA, 20 nt, Human
cucuuuaaaaggaaagaaaa

SEQ ID NO: 2663500 - RNA, 19 nt, Human
cucuuuaaaaggaaagaaa

SEQ ID NO: 2663501 - RNA, 13 nt, Human
cugaagaauugaa

SEQ ID NO: 2663502 - RNA, 18 nt, Human
cugaagaauugaaaaguu

SEQ ID NO: 2663503 - RNA, 19 nt, Human
cugaacacuuuuguuguaa

SEQ ID NO: 2663504 - RNA, 20 nt, Human
cugaacacuuuuguuguaaa

SEQ ID NO: 2663505 - RNA, 21 nt, Human
cugaaaucuucccaugcauuc

SEQ ID NO: 2663506 - RNA, 23 nt, Human
cugaaaucuucccaugcauucug

SEQ ID NO: 2663507 - RNA, 19 nt, Human
cugaaauucuccuggaggu

SEQ ID NO: 2663508 - RNA, 20 nt, Human
cugaaauucuccuggagguc

SEQ ID NO: 2663509 - RNA, 15 nt, Human
cugaaagcccugagc

SEQ ID NO: 2663510 - RNA, 11 nt, Human
cucuuugauua

SEQ ID NO: 2663511 - RNA, 13 nt, Human
cucuuugauuauu

SEQ ID NO: 2663512 - RNA, 14 nt, Human
cucuuugauuauuu

SEQ ID NO: 2663513 - RNA, 16 nt, Human
cucuuugauuauuugc

SEQ ID NO: 2663514 - RNA, 17 nt, Human
cucuuugauuauuugca

SEQ ID NO: 2663515 - RNA, 18 nt, Human
cucuuugauuauuugcau

SEQ ID NO: 2663516 - RNA, 19 nt, Human
cucuuugauuauuugcaug

SEQ ID NO: 2663517 - RNA, 20 nt, Human
cucuuugauuauuugcaugu

SEQ ID NO: 2663518 - RNA, 21 nt, Human
cucuuugauuauuugcauguu

SEQ ID NO: 2663519 - RNA, 16 nt, Human
cugaaauaggaaacaa

SEQ ID NO: 2663520 - RNA, 18 nt, Human
cugaaauaggaaacaagu

SEQ ID NO: 2663521 - RNA, 23 nt, Human
cugaaagcccugagcuuucugcu

SEQ ID NO: 2663522 - RNA, 19 nt, Human
cugaaagcccugagcuuuc

SEQ ID NO: 2663523 - RNA, 18 nt, Human
cugaaagcccugagcuuu

SEQ ID NO: 2663524 - RNA, 17 nt, Human
cugaaagcccugagcuu

SEQ ID NO: 2663525 - RNA, 16 nt, Human
cugaaagcccugagcu

SEQ ID NO: 2663526 - RNA, 16 nt, Human
cugcuccccaggggag

SEQ ID NO: 2663527 - RNA, 12 nt, Human
cugcugccucuu

SEQ ID NO: 2663528 - RNA, 13 nt, Human
cugcugccucuuu

SEQ ID NO: 2663529 - RNA, 17 nt, Human
cugcugccucuuucccu

SEQ ID NO: 2663530 - RNA, 20 nt, Human
cugcugccucuuucccuagg

SEQ ID NO: 2663531 - RNA, 21 nt, Human
cugcugccucuuucccuagga

SEQ ID NO: 2663532 - RNA, 22 nt, Human
cugcugccucuuucccuaggaa

SEQ ID NO: 2663533 - RNA, 15 nt, Human
cugcucuucauccca

SEQ ID NO: 2663534 - RNA, 21 nt, Human
cugcucuucaucccauuccag

SEQ ID NO: 2663535 - RNA, 17 nt, Human
cugcucucauauaagac

SEQ ID NO: 2663536 - RNA, 22 nt, Human
cugcccucucccaaaaaacuac

SEQ ID NO: 2663537 - RNA, 22 nt, Human
cugccugccuuaagugaggaaa

SEQ ID NO: 2663538 - RNA, 20 nt, Human
cugccugccuuaagugagga

SEQ ID NO: 2663539 - RNA, 18 nt, Human
cugccugccuuaagugag

SEQ ID NO: 2663540 - RNA, 17 nt, Human
cugccugccuuaaguga

SEQ ID NO: 2663541 - RNA, 15 nt, Human
cugccugcaccccug

SEQ ID NO: 2663542 - RNA, 13 nt, Human
cugccuucgcuuc

SEQ ID NO: 2663543 - RNA, 14 nt, Human
cugccuucgcuucu

SEQ ID NO: 2663544 - RNA, 15 nt, Human
cugccuucgcuucuu

SEQ ID NO: 2663545 - RNA, 17 nt, Human
cugccuucgcuucuugc

SEQ ID NO: 2663546 - RNA, 11 nt, Human
cugccuucccu

SEQ ID NO: 2663547 - RNA, 12 nt, Human
cugccuucccua

SEQ ID NO: 2663548 - RNA, 15 nt, Human
cugccuucccuagcu

SEQ ID NO: 2663549 - RNA, 16 nt, Human
cugccuucccuagcuu

SEQ ID NO: 2663550 - RNA, 17 nt, Human
cugccuucccuagcuuu

SEQ ID NO: 2663551 - RNA, 22 nt, Human
cugcgcccuuaacugcauccag

SEQ ID NO: 2663552 - RNA, 12 nt, Human
cugcgccugcug

SEQ ID NO: 2663553 - RNA, 13 nt, Human
cugcgccuuuccu

SEQ ID NO: 2663554 - RNA, 23 nt, Human
cugcgccugcugcaugcccucuc

SEQ ID NO: 2663555 - RNA, 20 nt, Human
cugcgccugcugcaugcccu

SEQ ID NO: 2663556 - RNA, 13 nt, Human
cugcgccugcugc

SEQ ID NO: 2663557 - RNA, 21 nt, Human
cugcgccuuuccuuuucgccu

SEQ ID NO: 2663558 - RNA, 17 nt, Human
cugcgcucucuuugcaa

SEQ ID NO: 2663559 - RNA, 18 nt, Human
cugcgcucucuuugcaac

SEQ ID NO: 2663560 - RNA, 22 nt, Human
cugcuugaggcaacucaucuua

SEQ ID NO: 2663561 - RNA, 22 nt, Human
cuggaagccaaaauguaggcuu

SEQ ID NO: 2663562 - RNA, 24 nt, Human
cugcuuuucugcccuggcugcugc

SEQ ID NO: 2663563 - RNA, 19 nt, Human
cugcuuuucugcccuggcu

SEQ ID NO: 2663564 - RNA, 20 nt, Human
cugcuuuucugcccuggcug

SEQ ID NO: 2663565 - RNA, 21 nt, Human
cugcuuuucugcccuggcugc

SEQ ID NO: 2663566 - RNA, 22 nt, Human
cugcuuuucugcccuggcugcu

SEQ ID NO: 2663567 - RNA, 13 nt, Human
cugcuuugaauaa

SEQ ID NO: 2663568 - RNA, 19 nt, Human
cugcuuugaauaaaugugu

SEQ ID NO: 2663569 - RNA, 16 nt, Human
cugcuuuagacuugaa

SEQ ID NO: 2663570 - RNA, 14 nt, Human
cugcuuuagacuug

SEQ ID NO: 2663571 - RNA, 20 nt, Human
cugcuuuagacuugaaaaga

SEQ ID NO: 2663572 - RNA, 19 nt, Human
cugcuuuagacuugaaaag

SEQ ID NO: 2663573 - RNA, 17 nt, Human
cugcuuuagacuugaaa

SEQ ID NO: 2663574 - RNA, 15 nt, Human
cugcuggugcacagc

SEQ ID NO: 2663575 - RNA, 15 nt, Human
cugcugucauaacau

SEQ ID NO: 2663576 - RNA, 18 nt, Human
cugcuuccuccuggaaau

SEQ ID NO: 2663577 - RNA, 22 nt, Human
cugcuugaauaaacaccacugg

SEQ ID NO: 2663578 - RNA, 23 nt, Human
cugcuucucugacuucugccugg

SEQ ID NO: 2663579 - RNA, 21 nt, Human
cugcuucucugacuucugccu

SEQ ID NO: 2663580 - RNA, 22 nt, Human
cugcuucucugacuucugccug

SEQ ID NO: 2663581 - RNA, 13 nt, Human
cugcuucucugac

SEQ ID NO: 2663582 - RNA, 14 nt, Human
cugcuucucugacu

SEQ ID NO: 2663583 - RNA, 15 nt, Human
cugcuucucugacuu

SEQ ID NO: 2663584 - RNA, 16 nt, Human
cugcuucucugacuuc

SEQ ID NO: 2663585 - RNA, 17 nt, Human
cugcuucucugacuucu

SEQ ID NO: 2663586 - RNA, 19 nt, Human
cugcuucucugacuucugc

SEQ ID NO: 2663587 - RNA, 20 nt, Human
cugcuucucugacuucugcc

SEQ ID NO: 2663588 - RNA, 21 nt, Human
cugcuugaggcaacucaucuu

SEQ ID NO: 2663589 - RNA, 20 nt, Human
cugcuugaggcaacucaucu

SEQ ID NO: 2663590 - RNA, 13 nt, Human
cugcuugaggcaa

SEQ ID NO: 2663591 - RNA, 16 nt, Human
cugcugguccguggga

SEQ ID NO: 2663592 - RNA, 17 nt, Human
cugcugguccgugggac

SEQ ID NO: 2663593 - RNA, 17 nt, Human
cugcuggggauccccgc

SEQ ID NO: 2663594 - RNA, 21 nt, Human
cugcuggggauccccgccugg

SEQ ID NO: 2663595 - RNA, 22 nt, Human
cugcuggggauccccgccuggc

SEQ ID NO: 2663596 - RNA, 20 nt, Human
cugcugggggcaacuggcca

SEQ ID NO: 2663597 - RNA, 18 nt, Human
cugcugggggcaacuggc

SEQ ID NO: 2663598 - RNA, 14 nt, Human
cugcugcugcugug

SEQ ID NO: 2663599 - RNA, 16 nt, Human
cugcagcaccgagggg

SEQ ID NO: 2663600 - RNA, 18 nt, Human
cugcagcaccgaggggcc

SEQ ID NO: 2663601 - RNA, 19 nt, Human
cugcagcaccgaggggccu

SEQ ID NO: 2663602 - RNA, 22 nt, Human
cugcagcaccgaggggccuuug

SEQ ID NO: 2663603 - RNA, 18 nt, Human
cugcaguccuacucaagc

SEQ ID NO: 2663604 - RNA, 22 nt, Human
cugcaguccuacucaagcgggu

SEQ ID NO: 2663605 - RNA, 23 nt, Human
cugcaguccuacucaagcgggug

SEQ ID NO: 2663606 - RNA, 21 nt, Human
cugcaguuugagacaggagac

SEQ ID NO: 2663607 - RNA, 18 nt, Human
cugcaguucuacucaggc

SEQ ID NO: 2663608 - RNA, 20 nt, Human
cugcaguucuacucaggcug

SEQ ID NO: 2663609 - RNA, 23 nt, Human
cugcaguucuacucaggcuggug

SEQ ID NO: 2663610 - RNA, 19 nt, Human
cugcaguuugagacaggag

SEQ ID NO: 2663611 - RNA, 22 nt, Human
cugcaggucaaguugucagguu

SEQ ID NO: 2663612 - RNA, 14 nt, Human
cugcacuccucagg

SEQ ID NO: 2663613 - RNA, 15 nt, Human
cugcagaccacgccc

SEQ ID NO: 2663614 - RNA, 11 nt, Human
cugcagaggcc

SEQ ID NO: 2663615 - RNA, 13 nt, Human
cugcagaggccag

SEQ ID NO: 2663616 - RNA, 21 nt, Human
cugcagaggccagaggccccc

SEQ ID NO: 2663617 - RNA, 17 nt, Human
cugcagaggccagaggc

SEQ ID NO: 2663618 - RNA, 20 nt, Human
cugcagaggccagaggcccc

SEQ ID NO: 2663619 - RNA, 20 nt, Human
cugcacuccagccuggguga

SEQ ID NO: 2663620 - RNA, 22 nt, Human
cugcauaaaaaggucuuuaaaa

SEQ ID NO: 2663621 - RNA, 15 nt, Human
cugccagacuuaaaa

SEQ ID NO: 2663622 - RNA, 23 nt, Human
cugccauggcuagguagaaguga

SEQ ID NO: 2663623 - RNA, 14 nt, Human
cugccaucuagcca

SEQ ID NO: 2663624 - RNA, 17 nt, Human
cugccaucuagccagcc

SEQ ID NO: 2663625 - RNA, 20 nt, Human
cugccaucuagccagccccu

SEQ ID NO: 2663626 - RNA, 20 nt, Human
cugcccggcaggguccuaga

SEQ ID NO: 2663627 - RNA, 13 nt, Human
cugcccggcaggg

SEQ ID NO: 2663628 - RNA, 15 nt, Human
cugccauuucugaga

SEQ ID NO: 2663629 - RNA, 22 nt, Human
cugccauuacagagguauuaaa

SEQ ID NO: 2663630 - RNA, 23 nt, Human
cugccauuacagagguauuaaaa

SEQ ID NO: 2663631 - RNA, 15 nt, Human
cugcccaccugccgg

SEQ ID NO: 2663632 - RNA, 12 nt, Human
cugcccaccugc

SEQ ID NO: 2663633 - RNA, 16 nt, Human
cuggcuuuaagccuuc

SEQ ID NO: 2663634 - RNA, 17 nt, Human
cuggcuuuaagccuuca

SEQ ID NO: 2663635 - RNA, 15 nt, Human
cuggcuuuugagcac

SEQ ID NO: 2663636 - RNA, 14 nt, Human
cuggcuuuuggaag

SEQ ID NO: 2663637 - RNA, 14 nt, Human
cuggcuuuuauuaa

SEQ ID NO: 2663638 - RNA, 22 nt, Human
cuggcuuuuauuaaugcacuuu

SEQ ID NO: 2663639 - RNA, 23 nt, Human
cuggcuuuuauuaaugcacuuuc

SEQ ID NO: 2663640 - RNA, 15 nt, Human
cuggcugcugccccc

SEQ ID NO: 2663641 - RNA, 16 nt, Human
cuggcugcugccccca

SEQ ID NO: 2663642 - RNA, 17 nt, Human
cuggcugcugcccccac

SEQ ID NO: 2663643 - RNA, 19 nt, Human
cuggcugcugcccccaccc

SEQ ID NO: 2663644 - RNA, 13 nt, Human
cuggcgcaggugg

SEQ ID NO: 2663645 - RNA, 14 nt, Human
cuggcgcagguggg

SEQ ID NO: 2663646 - RNA, 16 nt, Human
cuggcgcaggugggcu

SEQ ID NO: 2663647 - RNA, 14 nt, Human
cuggccuuuguaag

SEQ ID NO: 2663648 - RNA, 19 nt, Human
cuggccuuuguaagugcag

SEQ ID NO: 2663649 - RNA, 23 nt, Human
cuggcgagagucuggcccuagac

SEQ ID NO: 2663650 - RNA, 24 nt, Human
cuggcgcagaacgaaccuuggccu

SEQ ID NO: 2663651 - RNA, 23 nt, Human
cuggcgcagaacgaaccuuggcc

SEQ ID NO: 2663652 - RNA, 19 nt, Human
cuggcgagagucuggcccu

SEQ ID NO: 2663653 - RNA, 23 nt, Human
cuggcuguucugugguuccucug

SEQ ID NO: 2663654 - RNA, 19 nt, Human
cuggcugucaguaugacau

SEQ ID NO: 2663655 - RNA, 21 nt, Human
cugggaugaaacuaaagcaau

SEQ ID NO: 2663656 - RNA, 11 nt, Human
cugggcccugg

SEQ ID NO: 2663657 - RNA, 13 nt, Human
cugggccccagcu

SEQ ID NO: 2663658 - RNA, 15 nt, Human
cugggccgcugccac

SEQ ID NO: 2663659 - RNA, 16 nt, Human
cugggccgcugccacg

SEQ ID NO: 2663660 - RNA, 21 nt, Human
cugggccguaucuccggcucc

SEQ ID NO: 2663661 - RNA, 18 nt, Human
cugggccguaucuccggc

SEQ ID NO: 2663662 - RNA, 24 nt, Human
cugggccguaucuccggcucccag

SEQ ID NO: 2663663 - RNA, 13 nt, Human
cugggcccugggc

SEQ ID NO: 2663664 - RNA, 14 nt, Human
cugggcccugggcu

SEQ ID NO: 2663665 - RNA, 15 nt, Human
cugggcccugggcug

SEQ ID NO: 2663666 - RNA, 16 nt, Human
cugggcccugggcugg

SEQ ID NO: 2663667 - RNA, 18 nt, Human
cugggcccugggcuggaa

SEQ ID NO: 2663668 - RNA, 21 nt, Human
cugggaggucaaggcugcagu

SEQ ID NO: 2663669 - RNA, 19 nt, Human
cugggaggucaaggcugca

SEQ ID NO: 2663670 - RNA, 21 nt, Human
cugggagcuccacucugcuuc

SEQ ID NO: 2663671 - RNA, 16 nt, Human
cugggagcuccacucu

SEQ ID NO: 2663672 - RNA, 17 nt, Human
cugggagcuccacucug

SEQ ID NO: 2663673 - RNA, 20 nt, Human
cugggagcuccacucugcuu

SEQ ID NO: 2663674 - RNA, 14 nt, Human
cugggaggagggag

SEQ ID NO: 2663675 - RNA, 15 nt, Human
cugggaggagggaga

SEQ ID NO: 2663676 - RNA, 16 nt, Human
cugggaggagggagag

SEQ ID NO: 2663677 - RNA, 17 nt, Human
cugggaggagggagagg

SEQ ID NO: 2663678 - RNA, 19 nt, Human
cugggaggagggagaggga

SEQ ID NO: 2663679 - RNA, 20 nt, Human
cugggaggagggagagggag

SEQ ID NO: 2663680 - RNA, 23 nt, Human
cugggaggagggagagggagguc

SEQ ID NO: 2663681 - RNA, 23 nt, Human
cuggccuggacaguaucccacau

SEQ ID NO: 2663682 - RNA, 14 nt, Human
cuggccucucuagc

SEQ ID NO: 2663683 - RNA, 16 nt, Human
cuggccucucuagcac

SEQ ID NO: 2663684 - RNA, 17 nt, Human
cuggccucucuagcaca

SEQ ID NO: 2663685 - RNA, 18 nt, Human
cuggccucucuagcacaa

SEQ ID NO: 2663686 - RNA, 20 nt, Human
cuggccccagguagaaacuu

SEQ ID NO: 2663687 - RNA, 17 nt, Human
cuggcccccaaccucag

SEQ ID NO: 2663688 - RNA, 18 nt, Human
cuggcccccaaccucagg

SEQ ID NO: 2663689 - RNA, 22 nt, Human
cuggcccccaaccucagggcuc

SEQ ID NO: 2663690 - RNA, 23 nt, Human
cuggcccccaaccucagggcucc

SEQ ID NO: 2663691 - RNA, 13 nt, Human
cuggccaggagca

SEQ ID NO: 2663692 - RNA, 14 nt, Human
cuggccaggagcag

SEQ ID NO: 2663693 - RNA, 15 nt, Human
cuggccaggagcagg

SEQ ID NO: 2663694 - RNA, 23 nt, Human
cuggccaggagcaggcacgggug

SEQ ID NO: 2663695 - RNA, 12 nt, Human
cuggccaggagc

SEQ ID NO: 2663696 - RNA, 17 nt, Human
cuggccaguccaggcug

SEQ ID NO: 2663697 - RNA, 15 nt, Human
cuggccaguccaggc

SEQ ID NO: 2663698 - RNA, 16 nt, Human
cuggccaguccaggcu

SEQ ID NO: 2663699 - RNA, 18 nt, Human
cuggccaguccacccugc

SEQ ID NO: 2663700 - RNA, 20 nt, Human
cuggccaguccacccugccu

SEQ ID NO: 2663701 - RNA, 22 nt, Human
cuggccaguccacccugccugc

SEQ ID NO: 2663702 - RNA, 23 nt, Human
cuggcaucgcaccauucugacuc

SEQ ID NO: 2663703 - RNA, 21 nt, Human
cuggcaucuaauucugauucu

SEQ ID NO: 2663704 - RNA, 18 nt, Human
cuggcaucuuagaccucc

SEQ ID NO: 2663705 - RNA, 14 nt, Human
cuggcaagaaugug

SEQ ID NO: 2663706 - RNA, 24 nt, Human
cuggaaucuggagaccagggagcc

SEQ ID NO: 2663707 - RNA, 23 nt, Human
cuggaaucaggaauauuuuccaa

SEQ ID NO: 2663708 - RNA, 17 nt, Human
cuggaaucuggagacca

SEQ ID NO: 2663709 - RNA, 19 nt, Human
cuggaaucuggagaccagg

SEQ ID NO: 2663710 - RNA, 18 nt, Human
cuggaaucuggagaccag

SEQ ID NO: 2663711 - RNA, 19 nt, Human
cuggcacccaccguggagg

SEQ ID NO: 2663712 - RNA, 19 nt, Human
cuggcaaggacuuuguaca

SEQ ID NO: 2663713 - RNA, 20 nt, Human
cuggcaaggacuuuguacau

SEQ ID NO: 2663714 - RNA, 18 nt, Human
cugguaggaccaagcauc

SEQ ID NO: 2663715 - RNA, 15 nt, Human
cugguaggaccaagc

SEQ ID NO: 2663716 - RNA, 17 nt, Human
cugguaggaccaagcau

SEQ ID NO: 2663717 - RNA, 13 nt, Human
cuggguugggggc

SEQ ID NO: 2663718 - RNA, 23 nt, Human
cuggguugggggcuagggagacg

SEQ ID NO: 2663719 - RNA, 20 nt, Human
cugggccgggacccagggcc

SEQ ID NO: 2663720 - RNA, 20 nt, Human
cugguuauugauguggcccu

SEQ ID NO: 2663721 - RNA, 20 nt, Human
cugguucauucuucagauau

SEQ ID NO: 2663722 - RNA, 23 nt, Human
cugguuccagggucccucugugu

SEQ ID NO: 2663723 - RNA, 13 nt, Human
cugguuccagggu

SEQ ID NO: 2663724 - RNA, 14 nt, Human
cugguuccaggguc

SEQ ID NO: 2663725 - RNA, 15 nt, Human
cugguuccagggucc

SEQ ID NO: 2663726 - RNA, 16 nt, Human
cugguuccaggguccc

SEQ ID NO: 2663727 - RNA, 18 nt, Human
cugguuccagggucccuc

SEQ ID NO: 2663728 - RNA, 22 nt, Human
cugguuccagggucccucugug

SEQ ID NO: 2663729 - RNA, 14 nt, Human
cugguguuucuuga

SEQ ID NO: 2663730 - RNA, 13 nt, Human
cugguguuucuug

SEQ ID NO: 2663731 - RNA, 20 nt, Human
cugguggagaacucuggcuu

SEQ ID NO: 2663732 - RNA, 21 nt, Human
cugguggagaacucuggcuuu

SEQ ID NO: 2663733 - RNA, 17 nt, Human
cugucccuugcuugccu

SEQ ID NO: 2663734 - RNA, 18 nt, Human
cugucccuugcuugccug

SEQ ID NO: 2663735 - RNA, 23 nt, Human
cugucccuugcuugccugcaggg

SEQ ID NO: 2663736 - RNA, 22 nt, Human
cugucucaaaaaaagaaaaaga

SEQ ID NO: 2663737 - RNA, 22 nt, Human
cugucccagugccgagaaggaa

SEQ ID NO: 2663738 - RNA, 19 nt, Human
cugucccauagucccugcc

SEQ ID NO: 2663739 - RNA, 18 nt, Human
cugucccauagucccugc

SEQ ID NO: 2663740 - RNA, 14 nt, Human
cuguccacgcgugc

SEQ ID NO: 2663741 - RNA, 19 nt, Human
cuguccacgcgugccgugg

SEQ ID NO: 2663742 - RNA, 13 nt, Human
cuguauuugaaag

SEQ ID NO: 2663743 - RNA, 16 nt, Human
cuguauuugaaagugc

SEQ ID NO: 2663744 - RNA, 14 nt, Human
cuguauuugaaagu

SEQ ID NO: 2663745 - RNA, 21 nt, Human
cuguauuugaaagugccuuug

SEQ ID NO: 2663746 - RNA, 20 nt, Human
cuguauuugaaagugccuuu

SEQ ID NO: 2663747 - RNA, 19 nt, Human
cuguauuugaaagugccuu

SEQ ID NO: 2663748 - RNA, 17 nt, Human
cuguauuugaaagugcc

SEQ ID NO: 2663749 - RNA, 18 nt, Human
cuguauuugaaauaagaa

SEQ ID NO: 2663750 - RNA, 22 nt, Human
cuguauuugaaauaagaauuca

SEQ ID NO: 2663751 - RNA, 15 nt, Human
cuguauauaaaggug

SEQ ID NO: 2663752 - RNA, 14 nt, Human
gaacuugaaugugu

SEQ ID NO: 2663753 - RNA, 17 nt, Human
gaacuugggccacugug

SEQ ID NO: 2663754 - RNA, 14 nt, Human
gaagaagcucucuc

SEQ ID NO: 2663755 - RNA, 13 nt, Human
gaagaacaggccu

SEQ ID NO: 2663756 - RNA, 19 nt, Human
gaagaacaggccucuccau

SEQ ID NO: 2663757 - RNA, 21 nt, Human
gaagagcgcaguguuuugcaa

SEQ ID NO: 2663758 - RNA, 17 nt, Human
gaagagcuauuauauaa

SEQ ID NO: 2663759 - RNA, 17 nt, Human
gaagaggaaaaggcugg

SEQ ID NO: 2663760 - RNA, 12 nt, Human
gaagagccuugc

SEQ ID NO: 2663761 - RNA, 18 nt, Human
gaagaagggagaagaaag

SEQ ID NO: 2663762 - RNA, 19 nt, Human
gaagaagggagaagaaagg

SEQ ID NO: 2663763 - RNA, 14 nt, Human
gaagaagggagaag

SEQ ID NO: 2663764 - RNA, 15 nt, Human
gaagaagggagaaga

SEQ ID NO: 2663765 - RNA, 16 nt, Human
gaagaagggagaagaa

SEQ ID NO: 2663766 - RNA, 17 nt, Human
gaagaagggagaagaaa

SEQ ID NO: 2663767 - RNA, 22 nt, Human
gaagaugcuccagcaacacagc

SEQ ID NO: 2663768 - RNA, 14 nt, Human
gaagauccugcggg

SEQ ID NO: 2663769 - RNA, 22 nt, Human
gaagauccugcggguggggcuu

SEQ ID NO: 2663770 - RNA, 19 nt, Human
gaagaucauuuugaaauug

SEQ ID NO: 2663771 - RNA, 21 nt, Human
gaagauccagcugccuauuga

SEQ ID NO: 2663772 - RNA, 20 nt, Human
gaagaguucccuugaaacuu

SEQ ID NO: 2663773 - RNA, 21 nt, Human
gaagaguucccuugaaacuuu

SEQ ID NO: 2663774 - RNA, 10 nt, Human
gaagccaaag

SEQ ID NO: 2663775 - RNA, 12 nt, Human
gaagccaaagaa

SEQ ID NO: 2663776 - RNA, 13 nt, Human
gaagccaaagaaa

SEQ ID NO: 2663777 - RNA, 14 nt, Human
gaagccaaagaaaa

SEQ ID NO: 2663778 - RNA, 16 nt, Human
gaagccaaagaaaaau

SEQ ID NO: 2663779 - RNA, 16 nt, Human
gaagccuucagcucca

SEQ ID NO: 2663780 - RNA, 17 nt, Human
gaagccuucagcuccag

SEQ ID NO: 2663781 - RNA, 15 nt, Human
gaagccuucagcucc

SEQ ID NO: 2663782 - RNA, 22 nt, Human
gaagccuguaacacuccucugc

SEQ ID NO: 2663783 - RNA, 16 nt, Human
gaagcuucaugcacuu

SEQ ID NO: 2663784 - RNA, 20 nt, Human
gaaggaagccggggaagaga

SEQ ID NO: 2663785 - RNA, 15 nt, Human
gaaguauuuuuagaa

SEQ ID NO: 2663786 - RNA, 17 nt, Human
gaaguauuuuuagaaua

SEQ ID NO: 2663787 - RNA, 19 nt, Human
gaaguauuuuuagaauaag

SEQ ID NO: 2663788 - RNA, 16 nt, Human
gaagucaauaugugga

SEQ ID NO: 2663789 - RNA, 21 nt, Human
gaaggaugaugucuuuuuauu

SEQ ID NO: 2663790 - RNA, 22 nt, Human
gaaauguaggcaucaugcaugu

SEQ ID NO: 2663791 - RNA, 18 nt, Human
gaaauguagguccucaga

SEQ ID NO: 2663792 - RNA, 19 nt, Human
gaaaugugaauuuuuauug

SEQ ID NO: 2663793 - RNA, 20 nt, Human
gaaaugugaauuuuuauugu

SEQ ID NO: 2663794 - RNA, 21 nt, Human
gaaaugugaauuuuuauuguu

SEQ ID NO: 2663795 - RNA, 15 nt, Human
gaaaugaggaggaug

SEQ ID NO: 2663796 - RNA, 11 nt, Human
gaaaugauguu

SEQ ID NO: 2663797 - RNA, 19 nt, Human
gaaauauauacaaaaagaa

SEQ ID NO: 2663798 - RNA, 16 nt, Human
gaaauaucaaagucau

SEQ ID NO: 2663799 - RNA, 23 nt, Human
gaaauaucaaagucauuaaagac

SEQ ID NO: 2663800 - RNA, 16 nt, Human
gaaauaaaauauaucu

SEQ ID NO: 2663801 - RNA, 19 nt, Human
gaaauaaaccaaaggaaaa

SEQ ID NO: 2663802 - RNA, 11 nt, Human
gaacaggacua

SEQ ID NO: 2663803 - RNA, 21 nt, Human
gaacagguuuuuuuguuuguu

SEQ ID NO: 2663804 - RNA, 20 nt, Human
gaacagagagacccuugugg

SEQ ID NO: 2663805 - RNA, 21 nt, Human
gaacagagagacccuuguggg

SEQ ID NO: 2663806 - RNA, 19 nt, Human
gaacaucuaacccacuaga

SEQ ID NO: 2663807 - RNA, 16 nt, Human
gaaccaaaucuggaag

SEQ ID NO: 2663808 - RNA, 17 nt, Human
gaaccaaaucuggaagc

SEQ ID NO: 2663809 - RNA, 18 nt, Human
gaacaugguuugacucau

SEQ ID NO: 2663810 - RNA, 14 nt, Human
gaacaugaaucaaa

SEQ ID NO: 2663811 - RNA, 15 nt, Human
gaacaugaaucaaaa

SEQ ID NO: 2663812 - RNA, 13 nt, Human
gaacaugcccccu

SEQ ID NO: 2663813 - RNA, 14 nt, Human
gaacaugcccccug

SEQ ID NO: 2663814 - RNA, 14 nt, Human
gaaagcaauaaaug

SEQ ID NO: 2663815 - RNA, 17 nt, Human
gaaagcaacaaagaaau

SEQ ID NO: 2663816 - RNA, 17 nt, Human
gaaacuccacaucugcc

SEQ ID NO: 2663817 - RNA, 16 nt, Human
gaaacuccacaucugc

SEQ ID NO: 2663818 - RNA, 15 nt, Human
gaaacuaguguacau

SEQ ID NO: 2663819 - RNA, 21 nt, Human
gaaacucacacuccccuaggg

SEQ ID NO: 2663820 - RNA, 19 nt, Human
gaaacuauauuuugucaua

SEQ ID NO: 2663821 - RNA, 14 nt, Human
gaaaaagauguaca

SEQ ID NO: 2663822 - RNA, 20 nt, Human
gaaaaagacuuuaaaaguga

SEQ ID NO: 2663823 - RNA, 16 nt, Human
gaaaaaugagccuggc

SEQ ID NO: 2663824 - RNA, 16 nt, Human
gaaaaaugcuccccac

SEQ ID NO: 2663825 - RNA, 17 nt, Human
gaaaaaugcuccccaca

SEQ ID NO: 2663826 - RNA, 22 nt, Human
gaaagcuuuauuuugagaugua

SEQ ID NO: 2663827 - RNA, 23 nt, Human
gaaagcuuugaauacuaaauuau

SEQ ID NO: 2663828 - RNA, 20 nt, Human
gaaagucagccauaucucca

SEQ ID NO: 2663829 - RNA, 15 nt, Human
gaaaggagguggggg

SEQ ID NO: 2663830 - RNA, 20 nt, Human
gaaaggcaggccuauuucau

SEQ ID NO: 2663831 - RNA, 21 nt, Human
gaaaguagggggcuuucuggg

SEQ ID NO: 2663832 - RNA, 19 nt, Human
gaaagugaagcaaaucaga

SEQ ID NO: 2663833 - RNA, 13 nt, Human
gaaagugcauuuu

SEQ ID NO: 2663834 - RNA, 14 nt, Human
gaaagugcauuuuu

SEQ ID NO: 2663835 - RNA, 20 nt, Human
gaaagugcauuuuuguaaau

SEQ ID NO: 2663836 - RNA, 20 nt, Human
gaaagugccuuugcagcuca

SEQ ID NO: 2663837 - RNA, 18 nt, Human
gaaagugccuuugcagcu

SEQ ID NO: 2663838 - RNA, 15 nt, Human
gaaagugccuuugca

SEQ ID NO: 2663839 - RNA, 22 nt, Human
gaaagugggcuuaauggaguuc

SEQ ID NO: 2663840 - RNA, 23 nt, Human
gaaagugccuuugcagcucagaa

SEQ ID NO: 2663841 - RNA, 19 nt, Human
gaaaguggucuuaagaaau

SEQ ID NO: 2663842 - RNA, 19 nt, Human
gaaaguguauaauaagaaa

SEQ ID NO: 2663843 - RNA, 23 nt, Human
gaaaguguguguaguuuuacuuu

SEQ ID NO: 2663844 - RNA, 20 nt, Human
gaaaguuucguuauauuaaa

SEQ ID NO: 2663845 - RNA, 13 nt, Human
gaaaguuuuguaa

SEQ ID NO: 2663846 - RNA, 15 nt, Human
gaaaguuuuguaaaa

SEQ ID NO: 2663847 - RNA, 17 nt, Human
gaaaguuuuguaaaaga

SEQ ID NO: 2663848 - RNA, 18 nt, Human
gaaaguuuuguaaaagaa

SEQ ID NO: 2663849 - RNA, 20 nt, Human
gaaaguuuuguaaaagaaau

SEQ ID NO: 2663850 - RNA, 21 nt, Human
gaaaguuuuguaaaagaaauc

SEQ ID NO: 2663851 - RNA, 11 nt, Human
gaaaguuuuuu

SEQ ID NO: 2663852 - RNA, 18 nt, Human
gaaaguuuuuuuuuauua

SEQ ID NO: 2663853 - RNA, 19 nt, Human
gaaaguuuuuuuuuauuau

SEQ ID NO: 2663854 - RNA, 15 nt, Human
cuuuuuuauuaauca

SEQ ID NO: 2663855 - RNA, 14 nt, Human
cuuuuuuauuaauc

SEQ ID NO: 2663856 - RNA, 13 nt, Human
cuuuuuuauuaau

SEQ ID NO: 2663857 - RNA, 16 nt, Human
gaaaaagaaaaaauau

SEQ ID NO: 2663858 - RNA, 11 nt, Human
gaaaaagaaaa

SEQ ID NO: 2663859 - RNA, 14 nt, Human
cuuuuuucaaaauc

SEQ ID NO: 2663860 - RNA, 22 nt, Human
cuuuuuucaaaauccaaaaaga

SEQ ID NO: 2663861 - RNA, 21 nt, Human
cuuuuuuauuaaucacugugu

SEQ ID NO: 2663862 - RNA, 20 nt, Human
cuuuuuuauuaaucacugug

SEQ ID NO: 2663863 - RNA, 19 nt, Human
cuuuuuuauuaaucacugu

SEQ ID NO: 2663864 - RNA, 17 nt, Human
cuuuuuuauuaaucacu

SEQ ID NO: 2663865 - RNA, 16 nt, Human
cuuuuuucaaaagaaa

SEQ ID NO: 2663866 - RNA, 13 nt, Human
cuuuuuucaaaau

SEQ ID NO: 2663867 - RNA, 17 nt, Human
cuuuuuccccuuucugu

SEQ ID NO: 2663868 - RNA, 14 nt, Human
cuuuucgccuuucc

SEQ ID NO: 2663869 - RNA, 15 nt, Human
cuuuucgccuuuccu

SEQ ID NO: 2663870 - RNA, 15 nt, Human
cuuuugcaaccagga

SEQ ID NO: 2663871 - RNA, 16 nt, Human
cuuuugcaaccaggaa

SEQ ID NO: 2663872 - RNA, 17 nt, Human
cuuuugcaaccaggaac

SEQ ID NO: 2663873 - RNA, 24 nt, Human
cuuuugcaaccaggaacagcaaau

SEQ ID NO: 2663874 - RNA, 16 nt, Human
cuuuuuaguaauuucu

SEQ ID NO: 2663875 - RNA, 20 nt, Human
cuuuuuaaggucuuucagua

SEQ ID NO: 2663876 - RNA, 20 nt, Human
cuuuuaacuuuauaaaucca

SEQ ID NO: 2663877 - RNA, 16 nt, Human
cuuuuaaaguugauau

SEQ ID NO: 2663878 - RNA, 22 nt, Human
cuuuuaacuguuguagaagaca

SEQ ID NO: 2663879 - RNA, 12 nt, Human
cuuuuaaagacc

SEQ ID NO: 2663880 - RNA, 18 nt, Human
cuuuuaaagacccuccua

SEQ ID NO: 2663881 - RNA, 22 nt, Human
cuuuuaaaugauugaauuauau

SEQ ID NO: 2663882 - RNA, 13 nt, Human
cuuuuaaaaugca

SEQ ID NO: 2663883 - RNA, 19 nt, Human
cuuuuaaaaugcaauguaa

SEQ ID NO: 2663884 - RNA, 21 nt, Human
cuuuggaccuaaauggccuca

SEQ ID NO: 2663885 - RNA, 18 nt, Human
cuuuuaaaaacauaacau

SEQ ID NO: 2663886 - RNA, 14 nt, Human
cuuuggaggugcug

SEQ ID NO: 2663887 - RNA, 15 nt, Human
cuuuuccuuggcauu

SEQ ID NO: 2663888 - RNA, 13 nt, Human
cuuuuccuuggca

SEQ ID NO: 2663889 - RNA, 19 nt, Human
cuuuuccacuccauugucg

SEQ ID NO: 2663890 - RNA, 15 nt, Human
cuuuucaccauucgu

SEQ ID NO: 2663891 - RNA, 22 nt, Human
cuuucauggcugcuguugcuua

SEQ ID NO: 2663892 - RNA, 23 nt, Human
cuuucaagcagucgugccugugu

SEQ ID NO: 2663893 - RNA, 12 nt, Human
cuuucaaagcuu

SEQ ID NO: 2663894 - RNA, 15 nt, Human
cuuucaaaggaacau

SEQ ID NO: 2663895 - RNA, 20 nt, Human
cuuuauuuuuuugaacucuu

SEQ ID NO: 2663896 - RNA, 17 nt, Human
cuuuauuuuuuugaacu

SEQ ID NO: 2663897 - RNA, 19 nt, Human
cuuucaagcagucgugccu

SEQ ID NO: 2663898 - RNA, 20 nt, Human
cuuucaagcagucgugccug

SEQ ID NO: 2663899 - RNA, 22 nt, Human
cuuucaagcagucgugccugug

SEQ ID NO: 2663900 - RNA, 17 nt, Human
cuuuauuuugagaugua

SEQ ID NO: 2663901 - RNA, 19 nt, Human
cuuuauuuugagauguaaa

SEQ ID NO: 2663902 - RNA, 22 nt, Human
cuuuauuuugagauguaaaaag

SEQ ID NO: 2663903 - RNA, 13 nt, Human
cuuuauuuugugu

SEQ ID NO: 2663904 - RNA, 14 nt, Human
cuuuauuuugugua

SEQ ID NO: 2663905 - RNA, 16 nt, Human
cuuuauuuuguguaaa

SEQ ID NO: 2663906 - RNA, 17 nt, Human
cuuuauuuuguguaaaa

SEQ ID NO: 2663907 - RNA, 18 nt, Human
cuuuauuuuguguaaaaa

SEQ ID NO: 2663908 - RNA, 22 nt, Human
cuugugucuuuggaggugcugc

SEQ ID NO: 2663909 - RNA, 23 nt, Human
cuugugucuuuggaggugcugcu

SEQ ID NO: 2663910 - RNA, 17 nt, Human
cuuucccccuucucuua

SEQ ID NO: 2663911 - RNA, 17 nt, Human
cuuucccauggggaggg

SEQ ID NO: 2663912 - RNA, 16 nt, Human
cuuuccaaaugcccag

SEQ ID NO: 2663913 - RNA, 13 nt, Human
cuuucuguugcca

SEQ ID NO: 2663914 - RNA, 15 nt, Human
cuuugccaugugcuu

SEQ ID NO: 2663915 - RNA, 19 nt, Human
cuuugccagucauucagca

SEQ ID NO: 2663916 - RNA, 16 nt, Human
cuuugaauaaaugugu

SEQ ID NO: 2663917 - RNA, 23 nt, Human
cuuugaauauguaguaucuauau

SEQ ID NO: 2663918 - RNA, 17 nt, Human
cuugcuuuaccuuuuca

SEQ ID NO: 2663919 - RNA, 19 nt, Human
cuugcuuuaccuuuucagg

SEQ ID NO: 2663920 - RNA, 20 nt, Human
cuugcuuuaccuuuucaggg

SEQ ID NO: 2663921 - RNA, 15 nt, Human
cuuggacauccuccu

SEQ ID NO: 2663922 - RNA, 16 nt, Human
cuuggacauccuccuc

SEQ ID NO: 2663923 - RNA, 22 nt, Human
cuuggacauccuccucccaccc

SEQ ID NO: 2663924 - RNA, 17 nt, Human
cuuggacauccuccucc

SEQ ID NO: 2663925 - RNA, 19 nt, Human
cuuggacauccuccuccca

SEQ ID NO: 2663926 - RNA, 20 nt, Human
cuuggacauccuccucccac

SEQ ID NO: 2663927 - RNA, 21 nt, Human
cuuggacauccuccucccacc

SEQ ID NO: 2663928 - RNA, 12 nt, Human
cuugcauguggu

SEQ ID NO: 2663929 - RNA, 12 nt, Human
cuugcuggcccc

SEQ ID NO: 2663930 - RNA, 13 nt, Human
cuugcuggcccca

SEQ ID NO: 2663931 - RNA, 14 nt, Human
cuugcuggccccag

SEQ ID NO: 2663932 - RNA, 15 nt, Human
cuugcuggccccagc

SEQ ID NO: 2663933 - RNA, 16 nt, Human
cuugcuggccccagcc

SEQ ID NO: 2663934 - RNA, 18 nt, Human
cuugcuggccccagcccu

SEQ ID NO: 2663935 - RNA, 20 nt, Human
cuugcuggccccagcccugc

SEQ ID NO: 2663936 - RNA, 21 nt, Human
cuugcuggccccagcccugcu

SEQ ID NO: 2663937 - RNA, 22 nt, Human
cuugcuggccccagcccugcug

SEQ ID NO: 2663938 - RNA, 12 nt, Human
cuuggcucagac

SEQ ID NO: 2663939 - RNA, 16 nt, Human
cuuggcucagacaugu

SEQ ID NO: 2663940 - RNA, 14 nt, Human
cuuggcucagacau

SEQ ID NO: 2663941 - RNA, 18 nt, Human
cuuggcucgaaucucugu

SEQ ID NO: 2663942 - RNA, 19 nt, Human
cuuggcucgaaucucugug

SEQ ID NO: 2663943 - RNA, 20 nt, Human
cuuggcucgaaucucugugc

SEQ ID NO: 2663944 - RNA, 21 nt, Human
cuuggcucgaaucucugugcc

SEQ ID NO: 2663945 - RNA, 22 nt, Human
cuuggcucgaaucucugugccu

SEQ ID NO: 2663946 - RNA, 14 nt, Human
cuugcagaacugua

SEQ ID NO: 2663947 - RNA, 22 nt, Human
cuuggauauauaggcuauuuuc

SEQ ID NO: 2663948 - RNA, 13 nt, Human
cuuggauuaaaua

SEQ ID NO: 2663949 - RNA, 15 nt, Human
cuuggauuaaauaca

SEQ ID NO: 2663950 - RNA, 12 nt, Human
cuuguaaagacu

SEQ ID NO: 2663951 - RNA, 13 nt, Human
cuuguaaagacug

SEQ ID NO: 2663952 - RNA, 14 nt, Human
cuuguaaagacugg

SEQ ID NO: 2663953 - RNA, 15 nt, Human
cuuguaaagacuggu

SEQ ID NO: 2663954 - RNA, 23 nt, Human
cuuguaaagacugguuuucugcc

SEQ ID NO: 2663955 - RNA, 14 nt, Human
cuugguuuuauggu

SEQ ID NO: 2663956 - RNA, 23 nt, Human
cuuggggccaccaaagcugccca

SEQ ID NO: 2663957 - RNA, 12 nt, Human
cuuggggcccag

SEQ ID NO: 2663958 - RNA, 15 nt, Human
cuuggggcccagugc

SEQ ID NO: 2663959 - RNA, 16 nt, Human
cuuggggcccagugca

SEQ ID NO: 2663960 - RNA, 17 nt, Human
cuuggggcccagugcau

SEQ ID NO: 2663961 - RNA, 19 nt, Human
cuuggggcccagugcaugg

SEQ ID NO: 2663962 - RNA, 21 nt, Human
cuuggggccaccaaagcugcc

SEQ ID NO: 2663963 - RNA, 22 nt, Human
cuuggggccaccaaagcugccc

SEQ ID NO: 2663964 - RNA, 19 nt, Human
cuuggggccaccaaagcug

SEQ ID NO: 2663965 - RNA, 13 nt, Human
cuuggcuucugug

SEQ ID NO: 2663966 - RNA, 17 nt, Human
cuuggcuucugugauga

SEQ ID NO: 2663967 - RNA, 14 nt, Human
cuuggcuuaaucau

SEQ ID NO: 2663968 - RNA, 19 nt, Human
cuuggcuuaaucauuuuca

SEQ ID NO: 2663969 - RNA, 21 nt, Human
cuuggcuucugugaugagcug

SEQ ID NO: 2663970 - RNA, 17 nt, Human
cuuguauuaaagacaga

SEQ ID NO: 2663971 - RNA, 18 nt, Human
cuuguaaaagacagugua

SEQ ID NO: 2663972 - RNA, 17 nt, Human
cuugcaagcaugcuugu

SEQ ID NO: 2663973 - RNA, 16 nt, Human
cuugcaagcaugcuug

SEQ ID NO: 2663974 - RNA, 18 nt, Human
cuugcaagcaugcuugug

SEQ ID NO: 2663975 - RNA, 12 nt, Human
cuugagggcugc

SEQ ID NO: 2663976 - RNA, 15 nt, Human
cuugaggccugaucu

SEQ ID NO: 2663977 - RNA, 17 nt, Human
cuugaggccugaucugc

SEQ ID NO: 2663978 - RNA, 21 nt, Human
cuugaggccugaucugcccau

SEQ ID NO: 2663979 - RNA, 13 nt, Human
cuugagcucagga

SEQ ID NO: 2663980 - RNA, 14 nt, Human
cuugagagggugga

SEQ ID NO: 2663981 - RNA, 20 nt, Human
cuugagaguagaugguuuga

SEQ ID NO: 2663982 - RNA, 21 nt, Human
cuugaccaggcugccucccuu

SEQ ID NO: 2663983 - RNA, 17 nt, Human
cuugaccaggcuuggcc

SEQ ID NO: 2663984 - RNA, 13 nt, Human
cuugaccaggcug

SEQ ID NO: 2663985 - RNA, 18 nt, Human
cuugaacuccuggacuca

SEQ ID NO: 2663986 - RNA, 21 nt, Human
cugucucucuucucagagugg

SEQ ID NO: 2663987 - RNA, 14 nt, Human
cuucuuuugauuau

SEQ ID NO: 2663988 - RNA, 13 nt, Human
cuucuuuugauua

SEQ ID NO: 2663989 - RNA, 16 nt, Human
cuucuuuugauuaugu

SEQ ID NO: 2663990 - RNA, 20 nt, Human
cuucuuuuuucaaaagaaag

SEQ ID NO: 2663991 - RNA, 19 nt, Human
cuucuuuuuucaaaagaaa

SEQ ID NO: 2663992 - RNA, 22 nt, Human
gacucaucaaucaaauaaguau

SEQ ID NO: 2663993 - RNA, 14 nt, Human
gacucagugcagau

SEQ ID NO: 2663994 - RNA, 20 nt, Human
gacucagugcagauggagag

SEQ ID NO: 2663995 - RNA, 16 nt, Human
gacucaggugggcccu

SEQ ID NO: 2663996 - RNA, 20 nt, Human
gacucaggugggcccucuga

SEQ ID NO: 2663997 - RNA, 9 nt, Human
gacuccagc

SEQ ID NO: 2663998 - RNA, 10 nt, Human
gacuccagcc

SEQ ID NO: 2663999 - RNA, 12 nt, Human
gacuccagccag

SEQ ID NO: 2664000 - RNA, 13 nt, Human
gacuccagccagc

SEQ ID NO: 2664001 - RNA, 14 nt, Human
gacuccagccagcg

SEQ ID NO: 2664002 - RNA, 15 nt, Human
gacuccagccagcgc

SEQ ID NO: 2664003 - RNA, 16 nt, Human
gacuccagccagcgcc

SEQ ID NO: 2664004 - RNA, 19 nt, Human
gacuccagccagcgccucc

SEQ ID NO: 2664005 - RNA, 20 nt, Human
gacuccagccagcgccuccc

SEQ ID NO: 2664006 - RNA, 21 nt, Human
gacuccagccagcgccucccu

SEQ ID NO: 2664007 - RNA, 22 nt, Human
gacuccagccagcgccucccuc

SEQ ID NO: 2664008 - RNA, 23 nt, Human
gacuccagccagcgccucccucc

SEQ ID NO: 2664009 - RNA, 16 nt, Human
gacucaucuuauaugg

SEQ ID NO: 2664010 - RNA, 15 nt, Human
gacuaauuuuacaug

SEQ ID NO: 2664011 - RNA, 18 nt, Human
gacuaauuuuacauguuu

SEQ ID NO: 2664012 - RNA, 23 nt, Human
gacuaauuuuacauguuuauaaa

SEQ ID NO: 2664013 - RNA, 17 nt, Human
gacuacucccccaggug

SEQ ID NO: 2664014 - RNA, 23 nt, Human
gacgguguuuugccauguuggcc

SEQ ID NO: 2664015 - RNA, 14 nt, Human
gaccuggaagaaca

SEQ ID NO: 2664016 - RNA, 20 nt, Human
gaccuggaagaacaggccuc

SEQ ID NO: 2664017 - RNA, 16 nt, Human
gaccuuguaaaagaca

SEQ ID NO: 2664018 - RNA, 18 nt, Human
gaccuuguaaaagacagu

SEQ ID NO: 2664019 - RNA, 16 nt, Human
gaccuuguuacuucug

SEQ ID NO: 2664020 - RNA, 17 nt, Human
gaccuuguuacuucuga

SEQ ID NO: 2664021 - RNA, 21 nt, Human
gacgaacauccaaccuuccca

SEQ ID NO: 2664022 - RNA, 21 nt, Human
gaccuuuccaccacagccagc

SEQ ID NO: 2664023 - RNA, 23 nt, Human
gaccuuuccaccacagccagcac

SEQ ID NO: 2664024 - RNA, 13 nt, Human
gaccuuuccacca

SEQ ID NO: 2664025 - RNA, 17 nt, Human
gaccuuuccaccacagc

SEQ ID NO: 2664026 - RNA, 18 nt, Human
gaccuuuccaccacagcc

SEQ ID NO: 2664027 - RNA, 18 nt, Human
gacgaggggugucuuggg

SEQ ID NO: 2664028 - RNA, 15 nt, Human
gacgaguugauuucc

SEQ ID NO: 2664029 - RNA, 17 nt, Human
gacgaguugauuuccuc

SEQ ID NO: 2664030 - RNA, 21 nt, Human
gacgucagauguuuaaaacac

SEQ ID NO: 2664031 - RNA, 18 nt, Human
gacggugcccaagccaga

SEQ ID NO: 2664032 - RNA, 23 nt, Human
gacggugcccaagccagaggcug

SEQ ID NO: 2664033 - RNA, 16 nt, Human
gacggugcccaagcca

SEQ ID NO: 2664034 - RNA, 22 nt, Human
gacguacaaguaguucuguauu

SEQ ID NO: 2664035 - RNA, 19 nt, Human
gacguacaaguaguucugu

SEQ ID NO: 2664036 - RNA, 18 nt, Human
gacguacaaguaguucug

SEQ ID NO: 2664037 - RNA, 16 nt, Human
gacguacaaguaguuc

SEQ ID NO: 2664038 - RNA, 15 nt, Human
gacgguuuccaggga

SEQ ID NO: 2664039 - RNA, 18 nt, Human
gacgguuuccagggaggg

SEQ ID NO: 2664040 - RNA, 22 nt, Human
gacgguuuccagggaggggccg

SEQ ID NO: 2664041 - RNA, 21 nt, Human
gaccugccaggcagggguggg

SEQ ID NO: 2664042 - RNA, 19 nt, Human
gaccugccaggcaggggug

SEQ ID NO: 2664043 - RNA, 20 nt, Human
gaccugccaggcaggggugg

SEQ ID NO: 2664044 - RNA, 16 nt, Human
gaccugccaggcaggg

SEQ ID NO: 2664045 - RNA, 17 nt, Human
gaccugccaggcagggg

SEQ ID NO: 2664046 - RNA, 18 nt, Human
gaccugccaggcaggggu

SEQ ID NO: 2664047 - RNA, 15 nt, Human
gaccugccaggcagg

SEQ ID NO: 2664048 - RNA, 13 nt, Human
gaccugaggcugu

SEQ ID NO: 2664049 - RNA, 14 nt, Human
gaccugaggcugug

SEQ ID NO: 2664050 - RNA, 15 nt, Human
gaccugaggcugugg

SEQ ID NO: 2664051 - RNA, 17 nt, Human
gaccugaggcugugguc

SEQ ID NO: 2664052 - RNA, 21 nt, Human
gacccugugacauggugccug

SEQ ID NO: 2664053 - RNA, 22 nt, Human
gacccugugacauggugccuga

SEQ ID NO: 2664054 - RNA, 20 nt, Human
gacccugugacauggugccu

SEQ ID NO: 2664055 - RNA, 17 nt, Human
gaccggacuuuucugca

SEQ ID NO: 2664056 - RNA, 15 nt, Human
gacccuuauaaaauc

SEQ ID NO: 2664057 - RNA, 17 nt, Human
gacccuuauaaaauccu

SEQ ID NO: 2664058 - RNA, 16 nt, Human
gaccgggcccuggguu

SEQ ID NO: 2664059 - RNA, 19 nt, Human
gaccgugaagauacuuugu

SEQ ID NO: 2664060 - RNA, 20 nt, Human
gaccggcggaccccagccau

SEQ ID NO: 2664061 - RNA, 19 nt, Human
gaccggcggaccccagcca

SEQ ID NO: 2664062 - RNA, 20 nt, Human
gaccuaaauggccucaugug

SEQ ID NO: 2664063 - RNA, 16 nt, Human
gaccuaaauggccuca

SEQ ID NO: 2664064 - RNA, 14 nt, Human
gaccaacugucacu

SEQ ID NO: 2664065 - RNA, 16 nt, Human
gacccaggguucccgc

SEQ ID NO: 2664066 - RNA, 15 nt, Human
gacccaggaaaggca

SEQ ID NO: 2664067 - RNA, 21 nt, Human
gacccaggaaaggcaggauug

SEQ ID NO: 2664068 - RNA, 23 nt, Human
gacccugucucaaaaaaagaaaa

SEQ ID NO: 2664069 - RNA, 19 nt, Human
gaccccggcuuccuuuccc

SEQ ID NO: 2664070 - RNA, 22 nt, Human
gaccccgguggcggccccagca

SEQ ID NO: 2664071 - RNA, 19 nt, Human
gacauggcuccggccucug

SEQ ID NO: 2664072 - RNA, 20 nt, Human
gacauggcuccggccucugc

SEQ ID NO: 2664073 - RNA, 14 nt, Human
gacauggugccuga

SEQ ID NO: 2664074 - RNA, 16 nt, Human
gacauggugccugaga

SEQ ID NO: 2664075 - RNA, 17 nt, Human
gacauggugccugagag

SEQ ID NO: 2664076 - RNA, 18 nt, Human
gacauggugccugagagg

SEQ ID NO: 2664077 - RNA, 19 nt, Human
gacauggugccugagaggc

SEQ ID NO: 2664078 - RNA, 20 nt, Human
gacauggugccugagaggca

SEQ ID NO: 2664079 - RNA, 21 nt, Human
gacauggugccugagaggcag

SEQ ID NO: 2664080 - RNA, 22 nt, Human
gacauggugccugagaggcagg

SEQ ID NO: 2664081 - RNA, 23 nt, Human
gacauggugccugagaggcaggc

SEQ ID NO: 2664082 - RNA, 19 nt, Human
gacaucuggaaucuggaga

SEQ ID NO: 2664083 - RNA, 18 nt, Human
gacaucuggaaucuggag

SEQ ID NO: 2664084 - RNA, 14 nt, Human
gacaucuggaaucu

SEQ ID NO: 2664085 - RNA, 15 nt, Human
gacaucuugaauccu

SEQ ID NO: 2664086 - RNA, 22 nt, Human
gacaucuggaaucuggagacca

SEQ ID NO: 2664087 - RNA, 20 nt, Human
gacaucuggaaucuggagac

SEQ ID NO: 2664088 - RNA, 15 nt, Human
gacauaucaucugug

SEQ ID NO: 2664089 - RNA, 14 nt, Human
gacauaucuacacu

SEQ ID NO: 2664090 - RNA, 19 nt, Human
gacaucaaacucaaugcuu

SEQ ID NO: 2664091 - RNA, 18 nt, Human
gacacggguggggaaagg

SEQ ID NO: 2664092 - RNA, 15 nt, Human
gacagcuugagccgg

SEQ ID NO: 2664093 - RNA, 21 nt, Human
gacaggagaccuggcacugga

SEQ ID NO: 2664094 - RNA, 18 nt, Human
gacaggagaccuggcacu

SEQ ID NO: 2664095 - RNA, 18 nt, Human
gacagccaaaggcuggcg

SEQ ID NO: 2664096 - RNA, 17 nt, Human
gacagccaaaggcuggc

SEQ ID NO: 2664097 - RNA, 16 nt, Human
gacagccaaaggcugg

SEQ ID NO: 2664098 - RNA, 20 nt, Human
gacaagauuuuuuaauuguu

SEQ ID NO: 2664099 - RNA, 18 nt, Human
gacaagagaugggaauga

SEQ ID NO: 2664100 - RNA, 14 nt, Human
gacaagagauggga

SEQ ID NO: 2664101 - RNA, 20 nt, Human
gacaagagaugggaaugagg

SEQ ID NO: 2664102 - RNA, 16 nt, Human
gacaauaaacccucag

SEQ ID NO: 2664103 - RNA, 22 nt, Human
gacaauaaacccucagagccuc

SEQ ID NO: 2664104 - RNA, 13 nt, Human
gacaauaaagcuu

SEQ ID NO: 2664105 - RNA, 14 nt, Human
gacaauaaagcuug

SEQ ID NO: 2664106 - RNA, 19 nt, Human
gacaauaaagcuuguugac

SEQ ID NO: 2664107 - RNA, 15 nt, Human
gacaauacugggguu

SEQ ID NO: 2664108 - RNA, 15 nt, Human
gacaauugucuuuuu

SEQ ID NO: 2664109 - RNA, 22 nt, Human
gacacaaguggaccuuaggccu

SEQ ID NO: 2664110 - RNA, 14 nt, Human
gacacacagccuag

SEQ ID NO: 2664111 - RNA, 17 nt, Human
gacacacacagacuauu

SEQ ID NO: 2664112 - RNA, 13 nt, Human
gacacccucaacc

SEQ ID NO: 2664113 - RNA, 14 nt, Human
gacaccuuggacau

SEQ ID NO: 2664114 - RNA, 16 nt, Human
gagccucugcucccca

SEQ ID NO: 2664115 - RNA, 14 nt, Human
gagccucacugggg

SEQ ID NO: 2664116 - RNA, 23 nt, Human
gagccucacuggggcagacaaua

SEQ ID NO: 2664117 - RNA, 17 nt, Human
gagccucugcuccccag

SEQ ID NO: 2664118 - RNA, 15 nt, Human
gagcccuugccuccc

SEQ ID NO: 2664119 - RNA, 16 nt, Human
gagcccuugccucccc

SEQ ID NO: 2664120 - RNA, 17 nt, Human
gagcccuugccucccca

SEQ ID NO: 2664121 - RNA, 22 nt, Human
gagcccuugccuccccauuucc

SEQ ID NO: 2664122 - RNA, 20 nt, Human
gagccgagaucgcgccacug

SEQ ID NO: 2664123 - RNA, 17 nt, Human
gagccgguaacuguccu

SEQ ID NO: 2664124 - RNA, 18 nt, Human
gagccgguaacuguccug

SEQ ID NO: 2664125 - RNA, 19 nt, Human
gagccgguaacuguccugu

SEQ ID NO: 2664126 - RNA, 21 nt, Human
gagccgguaacuguccugucc

SEQ ID NO: 2664127 - RNA, 22 nt, Human
gagccgguaacuguccuguccu

SEQ ID NO: 2664128 - RNA, 16 nt, Human
gagccggccccaggcu

SEQ ID NO: 2664129 - RNA, 23 nt, Human
gagccggccccaggcucguggac

SEQ ID NO: 2664130 - RNA, 16 nt, Human
gagccgggccccuggg

SEQ ID NO: 2664131 - RNA, 15 nt, Human
gagccgggccccugg

SEQ ID NO: 2664132 - RNA, 21 nt, Human
gagccgggcacauugagcugu

SEQ ID NO: 2664133 - RNA, 18 nt, Human
gagauaauuacugccuug

SEQ ID NO: 2664134 - RNA, 19 nt, Human
gagauaauuacugccuuga

SEQ ID NO: 2664135 - RNA, 18 nt, Human
gagccagcucccucuauu

SEQ ID NO: 2664136 - RNA, 13 nt, Human
gagccagcucccu

SEQ ID NO: 2664137 - RNA, 20 nt, Human
gagccagcuuggggccacca

SEQ ID NO: 2664138 - RNA, 22 nt, Human
gagcuuucugcuaucaaagagg

SEQ ID NO: 2664139 - RNA, 20 nt, Human
gagcuuugaaaauucagugg

SEQ ID NO: 2664140 - RNA, 12 nt, Human
gaggaaaauucu

SEQ ID NO: 2664141 - RNA, 13 nt, Human
gaggaaaauucuu

SEQ ID NO: 2664142 - RNA, 17 nt, Human
gaggaagagaaaaaaua

SEQ ID NO: 2664143 - RNA, 17 nt, Human
gaggaaauucuccacug

SEQ ID NO: 2664144 - RNA, 19 nt, Human
gaggaacaaucggcugcau

SEQ ID NO: 2664145 - RNA, 20 nt, Human
gaggaaaucaaagugcuauu

SEQ ID NO: 2664146 - RNA, 12 nt, Human
gaggaaaucaaa

SEQ ID NO: 2664147 - RNA, 12 nt, Human
gagcucuuccua

SEQ ID NO: 2664148 - RNA, 21 nt, Human
gagcucuuccuaucccucucc

SEQ ID NO: 2664149 - RNA, 19 nt, Human
gagcucccacuucugccag

SEQ ID NO: 2664150 - RNA, 20 nt, Human
gagcucccacuucugccaga

SEQ ID NO: 2664151 - RNA, 15 nt, Human
gagcugaguggggga

SEQ ID NO: 2664152 - RNA, 21 nt, Human
gagcugagaucgugcuacugc

SEQ ID NO: 2664153 - RNA, 17 nt, Human
gagcuaggaagagucua

SEQ ID NO: 2664154 - RNA, 17 nt, Human
gagcuagcagcagggag

SEQ ID NO: 2664155 - RNA, 15 nt, Human
gagcuagcagcaggg

SEQ ID NO: 2664156 - RNA, 23 nt, Human
gagccugcauuuccucgcagccu

SEQ ID NO: 2664157 - RNA, 13 nt, Human
gagccugcccagc

SEQ ID NO: 2664158 - RNA, 22 nt, Human
gagcuccacucugcuucucuga

SEQ ID NO: 2664159 - RNA, 13 nt, Human
gagcuaugacuua

SEQ ID NO: 2664160 - RNA, 19 nt, Human
gagagagguugaaaaacaa

SEQ ID NO: 2664161 - RNA, 18 nt, Human
gagagcaucggccuaggg

SEQ ID NO: 2664162 - RNA, 15 nt, Human
gagagcaucggccua

SEQ ID NO: 2664163 - RNA, 12 nt, Human
gagagcauaauu

SEQ ID NO: 2664164 - RNA, 16 nt, Human
gagagcauaauuuaaa

SEQ ID NO: 2664165 - RNA, 17 nt, Human
gagagagguugaaaaac

SEQ ID NO: 2664166 - RNA, 16 nt, Human
gagagccauacauaaa

SEQ ID NO: 2664167 - RNA, 12 nt, Human
gagagccugcug

SEQ ID NO: 2664168 - RNA, 13 nt, Human
gagagccugcugg

SEQ ID NO: 2664169 - RNA, 14 nt, Human
gagagccugcuggc

SEQ ID NO: 2664170 - RNA, 15 nt, Human
gagagccugcuggca

SEQ ID NO: 2664171 - RNA, 13 nt, Human
gagagaggacagc

SEQ ID NO: 2664172 - RNA, 19 nt, Human
gagacuuugaugucagcag

SEQ ID NO: 2664173 - RNA, 13 nt, Human
gagacuuuguaga

SEQ ID NO: 2664174 - RNA, 15 nt, Human
gagacuuugauguca

SEQ ID NO: 2664175 - RNA, 14 nt, Human
gagacuuugauguc

SEQ ID NO: 2664176 - RNA, 13 nt, Human
gagacuuugaugu

SEQ ID NO: 2664177 - RNA, 11 nt, Human
gagacuuugau

SEQ ID NO: 2664178 - RNA, 10 nt, Human
gagacuuuga

SEQ ID NO: 2664179 - RNA, 18 nt, Human
gagagucuggcccuagac

SEQ ID NO: 2664180 - RNA, 14 nt, Human
gagaggugggccag

SEQ ID NO: 2664181 - RNA, 22 nt, Human
gagaggugggccagucugugga

SEQ ID NO: 2664182 - RNA, 23 nt, Human
gagaggugggccagucuguggau

SEQ ID NO: 2664183 - RNA, 23 nt, Human
gagagggaggucacuggaaaggg

SEQ ID NO: 2664184 - RNA, 19 nt, Human
gagagccuggugcugcugc

SEQ ID NO: 2664185 - RNA, 17 nt, Human
gagagccuggugcugcu

SEQ ID NO: 2664186 - RNA, 13 nt, Human
gagagccuggugc

SEQ ID NO: 2664187 - RNA, 16 nt, Human
gagaccagggagccuu

SEQ ID NO: 2664188 - RNA, 16 nt, Human
gagacucgacucugug

SEQ ID NO: 2664189 - RNA, 17 nt, Human
gagacucgacucugugc

SEQ ID NO: 2664190 - RNA, 18 nt, Human
gagacucgacucugugcc

SEQ ID NO: 2664191 - RNA, 12 nt, Human
gagacugugcug

SEQ ID NO: 2664192 - RNA, 13 nt, Human
gagacugugcugu

SEQ ID NO: 2664193 - RNA, 18 nt, Human
gagacuuagggcaccagg

SEQ ID NO: 2664194 - RNA, 21 nt, Human
gagacuuagggcaccaggggu

SEQ ID NO: 2664195 - RNA, 13 nt, Human
gagacuugccaga

SEQ ID NO: 2664196 - RNA, 18 nt, Human
gagacaaaauauuuccca

SEQ ID NO: 2664197 - RNA, 14 nt, Human
gagaauugggggcu

SEQ ID NO: 2664198 - RNA, 16 nt, Human
gagacacuguugauaa

SEQ ID NO: 2664199 - RNA, 20 nt, Human
gagacacuguugauaaaaac

SEQ ID NO: 2664200 - RNA, 16 nt, Human
gagacacggagcccag

SEQ ID NO: 2664201 - RNA, 15 nt, Human
gagacagauaccucc

SEQ ID NO: 2664202 - RNA, 16 nt, Human
gagacagauaccucca

SEQ ID NO: 2664203 - RNA, 20 nt, Human
gagacagauaccuccaaccc

SEQ ID NO: 2664204 - RNA, 22 nt, Human
gagacagauaccuccaacccug

SEQ ID NO: 2664205 - RNA, 23 nt, Human
gagacagauaccuccaacccugc

SEQ ID NO: 2664206 - RNA, 16 nt, Human
gagaacccaguuuccc

SEQ ID NO: 2664207 - RNA, 23 nt, Human
gagaaugaguccuugauuucaaa

SEQ ID NO: 2664208 - RNA, 14 nt, Human
gagaagcccgugug

SEQ ID NO: 2664209 - RNA, 15 nt, Human
gagaagcccguguga

SEQ ID NO: 2664210 - RNA, 16 nt, Human
gagaagcccgugugag

SEQ ID NO: 2664211 - RNA, 24 nt, Human
gagaaacuuaaauguuauuaucug

SEQ ID NO: 2664212 - RNA, 18 nt, Human
gagaaccaaaucuggaag

SEQ ID NO: 2664213 - RNA, 13 nt, Human
gagaaccaaaucu

SEQ ID NO: 2664214 - RNA, 17 nt, Human
gagaaccaaaucuggaa

SEQ ID NO: 2664215 - RNA, 12 nt, Human
gagaacaggacu

SEQ ID NO: 2664216 - RNA, 19 nt, Human
gagaacaugaaucaaaagu

SEQ ID NO: 2664217 - RNA, 13 nt, Human
gagaacaggacua

SEQ ID NO: 2664218 - RNA, 11 nt, Human
gagaaaugaaa

SEQ ID NO: 2664219 - RNA, 18 nt, Human
gagaaagugugagcaaac

SEQ ID NO: 2664220 - RNA, 23 nt, Human
gagaaauaaaguuugcuuagaaa

SEQ ID NO: 2664221 - RNA, 15 nt, Human
gagaaagaauuuagu

SEQ ID NO: 2664222 - RNA, 16 nt, Human
gacucgggggugggga

SEQ ID NO: 2664223 - RNA, 19 nt, Human
gacucggggugcuuccuug

SEQ ID NO: 2664224 - RNA, 18 nt, Human
gacucggggugcuuccuu

SEQ ID NO: 2664225 - RNA, 14 nt, Human
gacucggggguggg

SEQ ID NO: 2664226 - RNA, 15 nt, Human
gacuuguuuuugcac

SEQ ID NO: 2664227 - RNA, 13 nt, Human
gagaaaauugaaa

SEQ ID NO: 2664228 - RNA, 13 nt, Human
gacucgguuucuc

SEQ ID NO: 2664229 - RNA, 16 nt, Human
gaucccguuuucccca

SEQ ID NO: 2664230 - RNA, 17 nt, Human
gaucccguuuuccccau

SEQ ID NO: 2664231 - RNA, 17 nt, Human
gauccugcggguggggc

SEQ ID NO: 2664232 - RNA, 18 nt, Human
gauccugcggguggggcu

SEQ ID NO: 2664233 - RNA, 22 nt, Human
gaucgugcuacugcacuccagc

SEQ ID NO: 2664234 - RNA, 22 nt, Human
gaucggccaucaagggaagaac

SEQ ID NO: 2664235 - RNA, 16 nt, Human
gaucucagcuuugaga

SEQ ID NO: 2664236 - RNA, 21 nt, Human
gaucucagcuuugagaagccu

SEQ ID NO: 2664237 - RNA, 14 nt, Human
gaucucagcuuuga

SEQ ID NO: 2664238 - RNA, 16 nt, Human
gaugaaacuaaagcaa

SEQ ID NO: 2664239 - RNA, 17 nt, Human
gaugaaacuaaagcaau

SEQ ID NO: 2664240 - RNA, 19 nt, Human
gaugaaacuaaagcaauag

SEQ ID NO: 2664241 - RNA, 22 nt, Human
gaugaaacuaaagcaauagaaa

SEQ ID NO: 2664242 - RNA, 22 nt, Human
gaucucagcuuugagaagccuu

SEQ ID NO: 2664243 - RNA, 13 nt, Human
gauggcuugucua

SEQ ID NO: 2664244 - RNA, 15 nt, Human
gauggcuugucuaua

SEQ ID NO: 2664245 - RNA, 14 nt, Human
gauggccuuaauuu

SEQ ID NO: 2664246 - RNA, 17 nt, Human
gauggccuuaauuuccu

SEQ ID NO: 2664247 - RNA, 18 nt, Human
gauggccuuaauuuccuu

SEQ ID NO: 2664248 - RNA, 22 nt, Human
gauggauuuccagccaaagccu

SEQ ID NO: 2664249 - RNA, 23 nt, Human
gaugccacuucuaagaaaagccu

SEQ ID NO: 2664250 - RNA, 15 nt, Human
gaugacaauaaagcu

SEQ ID NO: 2664251 - RNA, 16 nt, Human
gaugacaauaaagcuu

SEQ ID NO: 2664252 - RNA, 16 nt, Human
gaugcaccaccaagcc

SEQ ID NO: 2664253 - RNA, 12 nt, Human
gaugccacccua

SEQ ID NO: 2664254 - RNA, 16 nt, Human
gaugccacccuagcca

SEQ ID NO: 2664255 - RNA, 15 nt, Human
gauaaggccuguggg

SEQ ID NO: 2664256 - RNA, 13 nt, Human
gauaguaagcaua

SEQ ID NO: 2664257 - RNA, 14 nt, Human
gauaguaagcauag

SEQ ID NO: 2664258 - RNA, 23 nt, Human
gauagucuuuugcuuuuggcaaa

SEQ ID NO: 2664259 - RNA, 17 nt, Human
gauagugggauuuccag

SEQ ID NO: 2664260 - RNA, 19 nt, Human
gauagugggauuuccagaa

SEQ ID NO: 2664261 - RNA, 19 nt, Human
gaucaauauuuuuauauca

SEQ ID NO: 2664262 - RNA, 15 nt, Human
gaucagccugggcaa

SEQ ID NO: 2664263 - RNA, 12 nt, Human
gaucagccuggg

SEQ ID NO: 2664264 - RNA, 13 nt, Human
gaucauguacuuu

SEQ ID NO: 2664265 - RNA, 15 nt, Human
gaucauguacuuuuu

SEQ ID NO: 2664266 - RNA, 19 nt, Human
gaucauguacuuuuuagua

SEQ ID NO: 2664267 - RNA, 20 nt, Human
gaucauguacuuuuuaguaa

SEQ ID NO: 2664268 - RNA, 13 nt, Human
gauccccgccugg

SEQ ID NO: 2664269 - RNA, 14 nt, Human
gauccccgccuggc

SEQ ID NO: 2664270 - RNA, 15 nt, Human
gauccccgccuggcc

SEQ ID NO: 2664271 - RNA, 16 nt, Human
gauccccgccuggcca

SEQ ID NO: 2664272 - RNA, 17 nt, Human
gauccccgccuggccag

SEQ ID NO: 2664273 - RNA, 18 nt, Human
gauccccgccuggccagg

SEQ ID NO: 2664274 - RNA, 19 nt, Human
gauccccgccuggccagga

SEQ ID NO: 2664275 - RNA, 20 nt, Human
gauccccgccuggccaggag

SEQ ID NO: 2664276 - RNA, 21 nt, Human
gauccccgccuggccaggagc

SEQ ID NO: 2664277 - RNA, 22 nt, Human
gauccccgccuggccaggagca

SEQ ID NO: 2664278 - RNA, 14 nt, Human
gcaauauuugaauu

SEQ ID NO: 2664279 - RNA, 18 nt, Human
gcaauauuugaauuuuaa

SEQ ID NO: 2664280 - RNA, 19 nt, Human
gcaaucaagguuauaauuu

SEQ ID NO: 2664281 - RNA, 15 nt, Human
gcaaggcuaugugau

SEQ ID NO: 2664282 - RNA, 22 nt, Human
gcaagggguucccuugagggcu

SEQ ID NO: 2664283 - RNA, 20 nt, Human
gcaaggccugguguuucuug

SEQ ID NO: 2664284 - RNA, 22 nt, Human
gcaagaggggguggaggggugu

SEQ ID NO: 2664285 - RNA, 23 nt, Human
gcaagaggggguggaggggugug

SEQ ID NO: 2664286 - RNA, 13 nt, Human
gcaagccaggcuc

SEQ ID NO: 2664287 - RNA, 20 nt, Human
gcaagccaggcucacucaca

SEQ ID NO: 2664288 - RNA, 21 nt, Human
gcaagccaggcucacucacag

SEQ ID NO: 2664289 - RNA, 18 nt, Human
gcaagcuccgcaggacuu

SEQ ID NO: 2664290 - RNA, 15 nt, Human
gcaagcuccgcagga

SEQ ID NO: 2664291 - RNA, 14 nt, Human
gcaaggacuuugua

SEQ ID NO: 2664292 - RNA, 16 nt, Human
gcaaggacuuuguaca

SEQ ID NO: 2664293 - RNA, 19 nt, Human
gcaaggacuuuguacauuu

SEQ ID NO: 2664294 - RNA, 20 nt, Human
gauuuuugcaauaccaagua

SEQ ID NO: 2664295 - RNA, 22 nt, Human
gcaaaucagaaacuugugaagu

SEQ ID NO: 2664296 - RNA, 20 nt, Human
gcaaaucagaaacuugugaa

SEQ ID NO: 2664297 - RNA, 15 nt, Human
gcaaaucagaaacuu

SEQ ID NO: 2664298 - RNA, 13 nt, Human
gcaaaucagaaac

SEQ ID NO: 2664299 - RNA, 23 nt, Human
gcaacacagccugggccccagcu

SEQ ID NO: 2664300 - RNA, 18 nt, Human
gcaacacagccugggccc

SEQ ID NO: 2664301 - RNA, 16 nt, Human
gcaacacagccugggc

SEQ ID NO: 2664302 - RNA, 17 nt, Human
gcaagaauugaagcagg

SEQ ID NO: 2664303 - RNA, 20 nt, Human
gcaagaggggguggaggggu

SEQ ID NO: 2664304 - RNA, 18 nt, Human
gauuuuuacuguguuuua

SEQ ID NO: 2664305 - RNA, 15 nt, Human
gauuuuuagaauuaa

SEQ ID NO: 2664306 - RNA, 16 nt, Human
gauuuuuacuguguuu

SEQ ID NO: 2664307 - RNA, 23 nt, Human
gauuuucuauuauggaaaacugu

SEQ ID NO: 2664308 - RNA, 19 nt, Human
gauuuucacauucuuggcu

SEQ ID NO: 2664309 - RNA, 13 nt, Human
gauuuuccaaaug

SEQ ID NO: 2664310 - RNA, 15 nt, Human
gauuugcugcucuuc

SEQ ID NO: 2664311 - RNA, 15 nt, Human
gauuucucauugacu

SEQ ID NO: 2664312 - RNA, 16 nt, Human
gauuucucauugacuu

SEQ ID NO: 2664313 - RNA, 22 nt, Human
gauuucucauugacuuuuauaa

SEQ ID NO: 2664314 - RNA, 14 nt, Human
gauuucugaggaaa

SEQ ID NO: 2664315 - RNA, 13 nt, Human
gauuugccauaga

SEQ ID NO: 2664316 - RNA, 17 nt, Human
gauuugccauagaguac

SEQ ID NO: 2664317 - RNA, 19 nt, Human
gauuuggcacuagccaaag

SEQ ID NO: 2664318 - RNA, 21 nt, Human
gauuccacuacaccuggcuga

SEQ ID NO: 2664319 - RNA, 15 nt, Human
gauucagcucugcaa

SEQ ID NO: 2664320 - RNA, 13 nt, Human
gauucagcucugc

SEQ ID NO: 2664321 - RNA, 18 nt, Human
gauggggguuucaccaua

SEQ ID NO: 2664322 - RNA, 16 nt, Human
gauuccuuuuuucaaa

SEQ ID NO: 2664323 - RNA, 16 nt, Human
gauucgguaucccccc

SEQ ID NO: 2664324 - RNA, 17 nt, Human
gauucgguaucccccca

SEQ ID NO: 2664325 - RNA, 23 nt, Human
gauugcaccacugcacuccagcc

SEQ ID NO: 2664326 - RNA, 16 nt, Human
gauugcaccacugcac

SEQ ID NO: 2664327 - RNA, 24 nt, Human
gcagugguuuuggcaaacgcuaaa

SEQ ID NO: 2664328 - RNA, 19 nt, Human
gcaguggcgcauucuaggc

SEQ ID NO: 2664329 - RNA, 16 nt, Human
gcauagaggcuucucc

SEQ ID NO: 2664330 - RNA, 22 nt, Human
gcauagaggcuucuccgccagc

SEQ ID NO: 2664331 - RNA, 14 nt, Human
gcauacuuuguaaa

SEQ ID NO: 2664332 - RNA, 15 nt, Human
gcauacuuuguaaau

SEQ ID NO: 2664333 - RNA, 16 nt, Human
gcauacuuuguaaaua

SEQ ID NO: 2664334 - RNA, 14 nt, Human
gcauacuuuguauu

SEQ ID NO: 2664335 - RNA, 18 nt, Human
gcauacuuuguauuuuga

SEQ ID NO: 2664336 - RNA, 19 nt, Human
gcauagauaauauuguuug

SEQ ID NO: 2664337 - RNA, 23 nt, Human
gcauagauaauauuguuugguaa

SEQ ID NO: 2664338 - RNA, 12 nt, Human
gcauaguuucuu

SEQ ID NO: 2664339 - RNA, 13 nt, Human
gcauaguuucuuu

SEQ ID NO: 2664340 - RNA, 15 nt, Human
gcauaguuucuuuau

SEQ ID NO: 2664341 - RNA, 17 nt, Human
gcauaguuucuuuauuu

SEQ ID NO: 2664342 - RNA, 17 nt, Human
gcauauggguuagaugu

SEQ ID NO: 2664343 - RNA, 19 nt, Human
gcauauuugcaaaguguau

SEQ ID NO: 2664344 - RNA, 20 nt, Human
gcauaugaaaggagagcauc

SEQ ID NO: 2664345 - RNA, 16 nt, Human
gcauaugaaaggagag

SEQ ID NO: 2664346 - RNA, 12 nt, Human
gcaguggccuua

SEQ ID NO: 2664347 - RNA, 23 nt, Human
gcaggugaucugcugcagagcag

SEQ ID NO: 2664348 - RNA, 18 nt, Human
gcaggugauuggaccagg

SEQ ID NO: 2664349 - RNA, 13 nt, Human
gcagggccauggc

SEQ ID NO: 2664350 - RNA, 16 nt, Human
gcagggccauggcuca

SEQ ID NO: 2664351 - RNA, 18 nt, Human
gcagggccauggcucagg

SEQ ID NO: 2664352 - RNA, 22 nt, Human
gcagggccauggcucagggugg

SEQ ID NO: 2664353 - RNA, 13 nt, Human
gcaggggccugga

SEQ ID NO: 2664354 - RNA, 14 nt, Human
gcaggggccuggag

SEQ ID NO: 2664355 - RNA, 16 nt, Human
gcaggggccuggagau

SEQ ID NO: 2664356 - RNA, 20 nt, Human
gcaggggccuggagauccuc

SEQ ID NO: 2664357 - RNA, 18 nt, Human
gcaugagacucagugcag

SEQ ID NO: 2664358 - RNA, 21 nt, Human
gcaugagacucagugcagaug

SEQ ID NO: 2664359 - RNA, 16 nt, Human
gcaucaccugccuguu

SEQ ID NO: 2664360 - RNA, 14 nt, Human
gcaucaccugccug

SEQ ID NO: 2664361 - RNA, 15 nt, Human
gcaucaccugccugu

SEQ ID NO: 2664362 - RNA, 16 nt, Human
gcaucacuuaaaacac

SEQ ID NO: 2664363 - RNA, 20 nt, Human
gcaucacuuaaaacacguuu

SEQ ID NO: 2664364 - RNA, 20 nt, Human
gcaucugaaauaggaaacaa

SEQ ID NO: 2664365 - RNA, 15 nt, Human
gcaucugagggggag

SEQ ID NO: 2664366 - RNA, 22 nt, Human
gcaucuuggggggguggccgcu

SEQ ID NO: 2664367 - RNA, 13 nt, Human
gcaucuuugaugu

SEQ ID NO: 2664368 - RNA, 11 nt, Human
gcaucuuugau

SEQ ID NO: 2664369 - RNA, 17 nt, Human
gcaucuuugauguguug

SEQ ID NO: 2664370 - RNA, 15 nt, Human
gcaucuuugaugugu

SEQ ID NO: 2664371 - RNA, 15 nt, Human
gcaucuugccuccag

SEQ ID NO: 2664372 - RNA, 16 nt, Human
gcaucuugccuccagg

SEQ ID NO: 2664373 - RNA, 17 nt, Human
gcaucuugccuccaggu

SEQ ID NO: 2664374 - RNA, 19 nt, Human
gcaucuugccuccaggugc

SEQ ID NO: 2664375 - RNA, 23 nt, Human
gcaucuugccuccaggugcagag

SEQ ID NO: 2664376 - RNA, 14 nt, Human
gcaugaaaugugaa

SEQ ID NO: 2664377 - RNA, 15 nt, Human
gcaugaaaugugaau

SEQ ID NO: 2664378 - RNA, 20 nt, Human
gcaugaaaugugaauuuuua

SEQ ID NO: 2664379 - RNA, 22 nt, Human
gcaugaaaugugaauuuuuauu

SEQ ID NO: 2664380 - RNA, 14 nt, Human
gcaugaaauaaaau

SEQ ID NO: 2664381 - RNA, 15 nt, Human
gcaugaaauaaaaua

SEQ ID NO: 2664382 - RNA, 18 nt, Human
gcaugaaauaaaauauau

SEQ ID NO: 2664383 - RNA, 14 nt, Human
gcauuuuuguaaau

SEQ ID NO: 2664384 - RNA, 20 nt, Human
gcauuuuucaauauauugaa

SEQ ID NO: 2664385 - RNA, 21 nt, Human
gcauuuuucaauauauugaac

SEQ ID NO: 2664386 - RNA, 19 nt, Human
gccaaagccuccuccagcc

SEQ ID NO: 2664387 - RNA, 16 nt, Human
gccaaagccuccucca

SEQ ID NO: 2664388 - RNA, 17 nt, Human
gcauuugugcuagaaau

SEQ ID NO: 2664389 - RNA, 21 nt, Human
gcauuugugcuagaaauuuuc

SEQ ID NO: 2664390 - RNA, 14 nt, Human
gcauuugcugaaua

SEQ ID NO: 2664391 - RNA, 13 nt, Human
gcauuugcugaau

SEQ ID NO: 2664392 - RNA, 17 nt, Human
gcagacauuuuaaaaaa

SEQ ID NO: 2664393 - RNA, 20 nt, Human
gcagaccacgcccguccugc

SEQ ID NO: 2664394 - RNA, 23 nt, Human
gcagaccacgcccguccugccug

SEQ ID NO: 2664395 - RNA, 12 nt, Human
gcagaguuuuca

SEQ ID NO: 2664396 - RNA, 14 nt, Human
gcagaguuuucauu

SEQ ID NO: 2664397 - RNA, 19 nt, Human
gcagaguuuucauuaaauc

SEQ ID NO: 2664398 - RNA, 16 nt, Human
gcagauuuuacagagc

SEQ ID NO: 2664399 - RNA, 23 nt, Human
gcaggaggaucacuugaguccag

SEQ ID NO: 2664400 - RNA, 20 nt, Human
gcaggaggaucacuugaguc

SEQ ID NO: 2664401 - RNA, 18 nt, Human
gcaggcacgggugguccc

SEQ ID NO: 2664402 - RNA, 19 nt, Human
gcaggcacggguggucccc

SEQ ID NO: 2664403 - RNA, 20 nt, Human
gcaggcacgggugguccccg

SEQ ID NO: 2664404 - RNA, 23 nt, Human
gcaccauucugacucgguuucuc

SEQ ID NO: 2664405 - RNA, 15 nt, Human
gcaccauucugacuc

SEQ ID NO: 2664406 - RNA, 17 nt, Human
gcaccauucugacucgg

SEQ ID NO: 2664407 - RNA, 13 nt, Human
gcaccaggaagcc

SEQ ID NO: 2664408 - RNA, 16 nt, Human
gcaccagcagccugga

SEQ ID NO: 2664409 - RNA, 22 nt, Human
gcaccacugcacuccagccugg

SEQ ID NO: 2664410 - RNA, 21 nt, Human
gcaccacugcacuccagccug

SEQ ID NO: 2664411 - RNA, 15 nt, Human
gcaccagcagccugg

SEQ ID NO: 2664412 - RNA, 20 nt, Human
gcaccacugcacuccagccu

SEQ ID NO: 2664413 - RNA, 13 nt, Human
gcacggguggucc

SEQ ID NO: 2664414 - RNA, 14 nt, Human
gcacgggugguccc

SEQ ID NO: 2664415 - RNA, 15 nt, Human
gcacggguggucccc

SEQ ID NO: 2664416 - RNA, 16 nt, Human
gcacgggugguccccg

SEQ ID NO: 2664417 - RNA, 14 nt, Human
gcaccuuuuacugu

SEQ ID NO: 2664418 - RNA, 15 nt, Human
gcaccuuuuacugug

SEQ ID NO: 2664419 - RNA, 23 nt, Human
gcaccuuuuacugugauguuugu

SEQ ID NO: 2664420 - RNA, 15 nt, Human
gcacccucaggcagg

SEQ ID NO: 2664421 - RNA, 18 nt, Human
gcaccuggcaucgcacca

SEQ ID NO: 2664422 - RNA, 13 nt, Human
gcacgucauggga

SEQ ID NO: 2664423 - RNA, 14 nt, Human
gcacuuaaagaagu

SEQ ID NO: 2664424 - RNA, 17 nt, Human
gcacuuauugaauauau

SEQ ID NO: 2664425 - RNA, 18 nt, Human
gcacuuauugaauauaug

SEQ ID NO: 2664426 - RNA, 20 nt, Human
gcacuuauugaauauaugau

SEQ ID NO: 2664427 - RNA, 18 nt, Human
gcacuuauugaccauuuu

SEQ ID NO: 2664428 - RNA, 19 nt, Human
gcacuuauugaccauuuuu

SEQ ID NO: 2664429 - RNA, 23 nt, Human
gcacuuauugaccauuuuuuaau

SEQ ID NO: 2664430 - RNA, 22 nt, Human
gcacuuacugguaggaccaagc

SEQ ID NO: 2664431 - RNA, 18 nt, Human
gcagaauguaagugggcc

SEQ ID NO: 2664432 - RNA, 19 nt, Human
gcagaauguaagugggccc

SEQ ID NO: 2664433 - RNA, 22 nt, Human
gcagaauguaagugggcccacc

SEQ ID NO: 2664434 - RNA, 15 nt, Human
gcacuucauguaaag

SEQ ID NO: 2664435 - RNA, 18 nt, Human
gcacuucauguaaagugu

SEQ ID NO: 2664436 - RNA, 14 nt, Human
gcagacaauaaacc

SEQ ID NO: 2664437 - RNA, 17 nt, Human
gcagacaauaaacccuc

SEQ ID NO: 2664438 - RNA, 19 nt, Human
gcagacaauaaacccucag

SEQ ID NO: 2664439 - RNA, 20 nt, Human
gcagacaauaaacccucaga

SEQ ID NO: 2664440 - RNA, 21 nt, Human
gcagacaauaaacccucagag

SEQ ID NO: 2664441 - RNA, 20 nt, Human
gccuggugcuuccaaauauu

SEQ ID NO: 2664442 - RNA, 16 nt, Human
gccuuaaaacaucauu

SEQ ID NO: 2664443 - RNA, 19 nt, Human
gccuguuucugauuugcug

SEQ ID NO: 2664444 - RNA, 14 nt, Human
gccuuaaaaccaaa

SEQ ID NO: 2664445 - RNA, 19 nt, Human
gccuuaaaacaucauuccu

SEQ ID NO: 2664446 - RNA, 17 nt, Human
gccuuaaaaccaaagag

SEQ ID NO: 2664447 - RNA, 18 nt, Human
gccugcaaucugagccag

SEQ ID NO: 2664448 - RNA, 21 nt, Human
gccugggguguuaguggcacc

SEQ ID NO: 2664449 - RNA, 22 nt, Human
gccugggguguuaguggcaccg

SEQ ID NO: 2664450 - RNA, 21 nt, Human
gccugggucacacacggaggc

SEQ ID NO: 2664451 - RNA, 13 nt, Human
gccuggugcugcu

SEQ ID NO: 2664452 - RNA, 13 nt, Human
gccuuuggcuuca

SEQ ID NO: 2664453 - RNA, 12 nt, Human
gccuuggcucag

SEQ ID NO: 2664454 - RNA, 16 nt, Human
gccuuggcucagacau

SEQ ID NO: 2664455 - RNA, 15 nt, Human
gccuuggcucagaca

SEQ ID NO: 2664456 - RNA, 14 nt, Human
gccuuggcucagac

SEQ ID NO: 2664457 - RNA, 23 nt, Human
gccuucaggguucagcaguacag

SEQ ID NO: 2664458 - RNA, 21 nt, Human
gccuuugcagcucagaaccac

SEQ ID NO: 2664459 - RNA, 16 nt, Human
gccuuugcagcucaga

SEQ ID NO: 2664460 - RNA, 17 nt, Human
gccuugcuguuuguccu

SEQ ID NO: 2664461 - RNA, 19 nt, Human
gccuugcuguuuguccuga

SEQ ID NO: 2664462 - RNA, 22 nt, Human
gccuugcuguuuguccugagau

SEQ ID NO: 2664463 - RNA, 13 nt, Human
gccuuggaaauuc

SEQ ID NO: 2664464 - RNA, 14 nt, Human
gccuuggaaauucc

SEQ ID NO: 2664465 - RNA, 14 nt, Human
gcguacaggcuggc

SEQ ID NO: 2664466 - RNA, 15 nt, Human
gcgguggcucacgcc

SEQ ID NO: 2664467 - RNA, 18 nt, Human
gcgguggcucacgccugu

SEQ ID NO: 2664468 - RNA, 22 nt, Human
gcggggcugucggcgcugcccc

SEQ ID NO: 2664469 - RNA, 18 nt, Human
gcggggcugucggcgcug

SEQ ID NO: 2664470 - RNA, 16 nt, Human
gcgcucagggccaugc

SEQ ID NO: 2664471 - RNA, 17 nt, Human
gcgaacccuuuauuuga

SEQ ID NO: 2664472 - RNA, 13 nt, Human
gcgccgucuccag

SEQ ID NO: 2664473 - RNA, 15 nt, Human
gcgccgucuccaggg

SEQ ID NO: 2664474 - RNA, 22 nt, Human
gcgccgucuccaggggcugcuu

SEQ ID NO: 2664475 - RNA, 13 nt, Human
gcgcucagggcca

SEQ ID NO: 2664476 - RNA, 22 nt, Human
gcgcucagggccaugcugaggc

SEQ ID NO: 2664477 - RNA, 12 nt, Human
gcgcucaguaaa

SEQ ID NO: 2664478 - RNA, 14 nt, Human
gcgcucaguaaacg

SEQ ID NO: 2664479 - RNA, 15 nt, Human
gcgcucaguaaacgg

SEQ ID NO: 2664480 - RNA, 17 nt, Human
gcgcucaguaaacggga

SEQ ID NO: 2664481 - RNA, 14 nt, Human
gcgcgccccuagcc

SEQ ID NO: 2664482 - RNA, 15 nt, Human
gcgcgccccuagccg

SEQ ID NO: 2664483 - RNA, 17 nt, Human
gcgcggacgugcugggc

SEQ ID NO: 2664484 - RNA, 20 nt, Human
gcgcgguggcgggcaccugu

SEQ ID NO: 2664485 - RNA, 13 nt, Human
gcgcgguggcuca

SEQ ID NO: 2664486 - RNA, 15 nt, Human
gcgcgguggcucacg

SEQ ID NO: 2664487 - RNA, 20 nt, Human
gcgcgguggcucacgccugu

SEQ ID NO: 2664488 - RNA, 22 nt, Human
gcuagcuucugcuuuucugccc

SEQ ID NO: 2664489 - RNA, 16 nt, Human
gcuaccuuucaaagcu

SEQ ID NO: 2664490 - RNA, 17 nt, Human
gcuaccuuucaaagcuu

SEQ ID NO: 2664491 - RNA, 15 nt, Human
gcuagcuucugcuuu

SEQ ID NO: 2664492 - RNA, 12 nt, Human
gcuagcuucugc

SEQ ID NO: 2664493 - RNA, 17 nt, Human
gcuagcuucugcuuuuc

SEQ ID NO: 2664494 - RNA, 18 nt, Human
gcuagcuucugcuuuucu

SEQ ID NO: 2664495 - RNA, 23 nt, Human
gcuagcuucugcuuuucugcccu

SEQ ID NO: 2664496 - RNA, 14 nt, Human
gcuaaagagcccuu

SEQ ID NO: 2664497 - RNA, 18 nt, Human
gcuaaagagcccuugccu

SEQ ID NO: 2664498 - RNA, 22 nt, Human
gcuaaagagcccuugccucccc

SEQ ID NO: 2664499 - RNA, 23 nt, Human
gcuaaagagcccuugccucccca

SEQ ID NO: 2664500 - RNA, 15 nt, Human
gcgucuauccugugu

SEQ ID NO: 2664501 - RNA, 13 nt, Human
gcgucugugugcg

SEQ ID NO: 2664502 - RNA, 22 nt, Human
gccgguuccugucccugcgccu

SEQ ID NO: 2664503 - RNA, 17 nt, Human
gccgguuccugucccug

SEQ ID NO: 2664504 - RNA, 12 nt, Human
gccgguuccugu

SEQ ID NO: 2664505 - RNA, 20 nt, Human
gccguaucuccggcucccag

SEQ ID NO: 2664506 - RNA, 21 nt, Human
gccguaucuccggcucccagc

SEQ ID NO: 2664507 - RNA, 23 nt, Human
gccguaucuccggcucccagccu

SEQ ID NO: 2664508 - RNA, 13 nt, Human
gccgucaccacca

SEQ ID NO: 2664509 - RNA, 15 nt, Human
gccgucaccaccacc

SEQ ID NO: 2664510 - RNA, 16 nt, Human
gccgucaccaccaccc

SEQ ID NO: 2664511 - RNA, 17 nt, Human
gccgucaccaccacccc

SEQ ID NO: 2664512 - RNA, 18 nt, Human
gccgucaccaccaccccu

SEQ ID NO: 2664513 - RNA, 23 nt, Human
gccgucaccaccaccccuaccac

SEQ ID NO: 2664514 - RNA, 20 nt, Human
gccguggggccgccgccucu

SEQ ID NO: 2664515 - RNA, 23 nt, Human
gccguggggccgccgccucuuuc

SEQ ID NO: 2664516 - RNA, 20 nt, Human
gccguguaaccauggaccca

SEQ ID NO: 2664517 - RNA, 16 nt, Human
gccuauggcagaaaaa

SEQ ID NO: 2664518 - RNA, 18 nt, Human
gccucaagaggaaugaaa

SEQ ID NO: 2664519 - RNA, 22 nt, Human
gccgguaacuguccuguccugc

SEQ ID NO: 2664520 - RNA, 14 nt, Human
gccgggcgcggugg

SEQ ID NO: 2664521 - RNA, 16 nt, Human
gccgggcgcgguggcu

SEQ ID NO: 2664522 - RNA, 18 nt, Human
gccgggcgcgguggcuca

SEQ ID NO: 2664523 - RNA, 22 nt, Human
gccgggcgcgguggcucacgcc

SEQ ID NO: 2664524 - RNA, 22 nt, Human
gccgggaccacccugagccggc

SEQ ID NO: 2664525 - RNA, 16 nt, Human
gccgggacccagggcc

SEQ ID NO: 2664526 - RNA, 21 nt, Human
gccgggcgcgguggcucacgc

SEQ ID NO: 2664527 - RNA, 18 nt, Human
gccgggaccacccugagc

SEQ ID NO: 2664528 - RNA, 20 nt, Human
gccgggaccacccugagccg

SEQ ID NO: 2664529 - RNA, 13 nt, Human
gcccugcugggga

SEQ ID NO: 2664530 - RNA, 21 nt, Human
gcccugcuggggauccccgcc

SEQ ID NO: 2664531 - RNA, 16 nt, Human
gcccuugccuccccau

SEQ ID NO: 2664532 - RNA, 15 nt, Human
gcccuuggcuucugu

SEQ ID NO: 2664533 - RNA, 12 nt, Human
gcccuugggcca

SEQ ID NO: 2664534 - RNA, 14 nt, Human
gcccuugggccacc

SEQ ID NO: 2664535 - RNA, 13 nt, Human
gcccuugccuccc

SEQ ID NO: 2664536 - RNA, 14 nt, Human
gcccuugccucccc

SEQ ID NO: 2664537 - RNA, 12 nt, Human
gccgaccagagg

SEQ ID NO: 2664538 - RNA, 19 nt, Human
gccgaccagaggagccuuu

SEQ ID NO: 2664539 - RNA, 16 nt, Human
gccuccgagagggaga

SEQ ID NO: 2664540 - RNA, 18 nt, Human
gccuccgagagggagaga

SEQ ID NO: 2664541 - RNA, 15 nt, Human
gccuccgagagggag

SEQ ID NO: 2664542 - RNA, 14 nt, Human
gccucccuuguggc

SEQ ID NO: 2664543 - RNA, 15 nt, Human
gccucucagugcccu

SEQ ID NO: 2664544 - RNA, 19 nt, Human
gccucucagugcccuccag

SEQ ID NO: 2664545 - RNA, 22 nt, Human
gccucucagugcccuccagccc

SEQ ID NO: 2664546 - RNA, 12 nt, Human
gccucagacugg

SEQ ID NO: 2664547 - RNA, 21 nt, Human
gccucagacuggagggcaagg

SEQ ID NO: 2664548 - RNA, 13 nt, Human
gccucucuagcac

SEQ ID NO: 2664549 - RNA, 16 nt, Human
gccugagaggcaggca

SEQ ID NO: 2664550 - RNA, 18 nt, Human
gccugagaggcaggcaua

SEQ ID NO: 2664551 - RNA, 19 nt, Human
gccugagaggcaggcauag

SEQ ID NO: 2664552 - RNA, 20 nt, Human
gccugagaggcaggcauaga

SEQ ID NO: 2664553 - RNA, 19 nt, Human
gccugaggucaucggcgug

SEQ ID NO: 2664554 - RNA, 13 nt, Human
gccugagaggcag

SEQ ID NO: 2664555 - RNA, 14 nt, Human
gccugagaggcagg

SEQ ID NO: 2664556 - RNA, 15 nt, Human
gccugagaggcaggc

SEQ ID NO: 2664557 - RNA, 14 nt, Human
gccccacccugggc

SEQ ID NO: 2664558 - RNA, 15 nt, Human
gccccacccugggcc

SEQ ID NO: 2664559 - RNA, 16 nt, Human
gccccacccugggccc

SEQ ID NO: 2664560 - RNA, 19 nt, Human
gccccacccugggcccugg

SEQ ID NO: 2664561 - RNA, 20 nt, Human
gccccacccugggcccuggg

SEQ ID NO: 2664562 - RNA, 12 nt, Human
gccccacugcca

SEQ ID NO: 2664563 - RNA, 14 nt, Human
gccccacugccagc

SEQ ID NO: 2664564 - RNA, 15 nt, Human
gccccacugccagca

SEQ ID NO: 2664565 - RNA, 16 nt, Human
gccccacugccagcag

SEQ ID NO: 2664566 - RNA, 17 nt, Human
gccccacugccagcagc

SEQ ID NO: 2664567 - RNA, 20 nt, Human
gccccacugccagcagcagc

SEQ ID NO: 2664568 - RNA, 23 nt, Human
gccccacugccagcagcagcagg

SEQ ID NO: 2664569 - RNA, 24 nt, Human
gccccacccugggcccugggcugg

SEQ ID NO: 2664570 - RNA, 22 nt, Human
gccccacccugggcccugggcu

SEQ ID NO: 2664571 - RNA, 23 nt, Human
gccccacccugggcccugggcug

SEQ ID NO: 2664572 - RNA, 20 nt, Human
gccccacucccuugcuggcc

SEQ ID NO: 2664573 - RNA, 22 nt, Human
gccccacucccuugcuggcccc

SEQ ID NO: 2664574 - RNA, 23 nt, Human
gccccacucccuugcuggcccca

SEQ ID NO: 2664575 - RNA, 17 nt, Human
gcccagaauacugaugg

SEQ ID NO: 2664576 - RNA, 18 nt, Human
gcccagggcuccugcacu

SEQ ID NO: 2664577 - RNA, 15 nt, Human
gcccagggcuccugc

SEQ ID NO: 2664578 - RNA, 16 nt, Human
gcccagggcuccugca

SEQ ID NO: 2664579 - RNA, 12 nt, Human
gcccagggcucc

SEQ ID NO: 2664580 - RNA, 14 nt, Human
gcccagggcuccug

SEQ ID NO: 2664581 - RNA, 16 nt, Human
gcccagggcaagcucc

SEQ ID NO: 2664582 - RNA, 19 nt, Human
gcccagggcaagcuccgca

SEQ ID NO: 2664583 - RNA, 18 nt, Human
gcccagggcaagcuccgc

SEQ ID NO: 2664584 - RNA, 23 nt, Human
gcccagggcaagcuccgcaggac

SEQ ID NO: 2664585 - RNA, 19 nt, Human
gcccaggcuggagugcagu

SEQ ID NO: 2664586 - RNA, 20 nt, Human
gcccaggcuggagugcagug

SEQ ID NO: 2664587 - RNA, 17 nt, Human
gcccccaccccggggac

SEQ ID NO: 2664588 - RNA, 21 nt, Human
gcccccaccccggggacccug

SEQ ID NO: 2664589 - RNA, 22 nt, Human
gcccccaccccggggacccugu

SEQ ID NO: 2664590 - RNA, 18 nt, Human
gcccccacaguugcucua

SEQ ID NO: 2664591 - RNA, 16 nt, Human
gcccccaaccucaggg

SEQ ID NO: 2664592 - RNA, 17 nt, Human
gcccccaaccucagggc

SEQ ID NO: 2664593 - RNA, 19 nt, Human
gcccccaaccucagggcuc

SEQ ID NO: 2664594 - RNA, 23 nt, Human
gcccccaaccucagggcucccag

SEQ ID NO: 2664595 - RNA, 19 nt, Human
gcccccuggccucugugcc

SEQ ID NO: 2664596 - RNA, 17 nt, Human
gcccccuggccucugug

SEQ ID NO: 2664597 - RNA, 18 nt, Human
gcccccugcuucaguccc

SEQ ID NO: 2664598 - RNA, 16 nt, Human
gcccccuggccucugu

SEQ ID NO: 2664599 - RNA, 15 nt, Human
gcccccuggccucug

SEQ ID NO: 2664600 - RNA, 14 nt, Human
gcccccuggccucu

SEQ ID NO: 2664601 - RNA, 13 nt, Human
gcccccuggccuc

SEQ ID NO: 2664602 - RNA, 20 nt, Human
gcccccaaagauagacaggu

SEQ ID NO: 2664603 - RNA, 24 nt, Human
gcccccaaagauagacagguccug

SEQ ID NO: 2664604 - RNA, 21 nt, Human
gccccagcaccucagccugca

SEQ ID NO: 2664605 - RNA, 19 nt, Human
gccccagcaccucagccug

SEQ ID NO: 2664606 - RNA, 13 nt, Human
gccccagcacagc

SEQ ID NO: 2664607 - RNA, 20 nt, Human
gccccagcacagcuugaccu

SEQ ID NO: 2664608 - RNA, 19 nt, Human
gccccaggcucguggacug

SEQ ID NO: 2664609 - RNA, 16 nt, Human
gccccagguagaaacu

SEQ ID NO: 2664610 - RNA, 20 nt, Human
gccccucuggucgcuccugc

SEQ ID NO: 2664611 - RNA, 22 nt, Human
gccccucuggucgcuccugccc

SEQ ID NO: 2664612 - RNA, 14 nt, Human
gccccucuucccca

SEQ ID NO: 2664613 - RNA, 12 nt, Human
gccccugggcuu

SEQ ID NO: 2664614 - RNA, 22 nt, Human
gccccugggcuuggccugcugu

SEQ ID NO: 2664615 - RNA, 23 nt, Human
gccccugggcuuggccugcugug

SEQ ID NO: 2664616 - RNA, 18 nt, Human
gccccugggcuuggccug

SEQ ID NO: 2664617 - RNA, 19 nt, Human
gccccugggcuuggccugc

SEQ ID NO: 2664618 - RNA, 20 nt, Human
gccccugggcuuggccugcu

SEQ ID NO: 2664619 - RNA, 21 nt, Human
gccccugggcuuggccugcug

SEQ ID NO: 2664620 - RNA, 15 nt, Human
gccccucagagacug

SEQ ID NO: 2664621 - RNA, 13 nt, Human
gccccucccccag

SEQ ID NO: 2664622 - RNA, 14 nt, Human
gccccucuggucgc

SEQ ID NO: 2664623 - RNA, 18 nt, Human
gccccucuggucgcuccu

SEQ ID NO: 2664624 - RNA, 19 nt, Human
gccccucuggucgcuccug

SEQ ID NO: 2664625 - RNA, 12 nt, Human
gccccgacucca

SEQ ID NO: 2664626 - RNA, 13 nt, Human
gccccgacuccag

SEQ ID NO: 2664627 - RNA, 14 nt, Human
gccccgacuccagc

SEQ ID NO: 2664628 - RNA, 15 nt, Human
gccccgacuccagcc

SEQ ID NO: 2664629 - RNA, 16 nt, Human
gccccgacuccagcca

SEQ ID NO: 2664630 - RNA, 17 nt, Human
gccccgacuccagccag

SEQ ID NO: 2664631 - RNA, 18 nt, Human
gccccgacuccagccagc

SEQ ID NO: 2664632 - RNA, 19 nt, Human
gccccgacuccagccagcg

SEQ ID NO: 2664633 - RNA, 20 nt, Human
gccccgacuccagccagcgc

SEQ ID NO: 2664634 - RNA, 21 nt, Human
gccccgacuccagccagcgcc

SEQ ID NO: 2664635 - RNA, 14 nt, Human
gcccucccacuuug

SEQ ID NO: 2664636 - RNA, 23 nt, Human
gcccucccacuuugcuguuccuu

SEQ ID NO: 2664637 - RNA, 22 nt, Human
gcccgcagagcgcgccccuagc

SEQ ID NO: 2664638 - RNA, 23 nt, Human
gcccgcagagcgcgccccuagcc

SEQ ID NO: 2664639 - RNA, 18 nt, Human
gcccugaagaauggcgcc

SEQ ID NO: 2664640 - RNA, 14 nt, Human
gcccugagcuuucu

SEQ ID NO: 2664641 - RNA, 12 nt, Human
gcccucuucucg

SEQ ID NO: 2664642 - RNA, 21 nt, Human
gccacuccgagaggugggcca

SEQ ID NO: 2664643 - RNA, 14 nt, Human
gccagaggccccca

SEQ ID NO: 2664644 - RNA, 21 nt, Human
gccagagagccuggugcugcu

SEQ ID NO: 2664645 - RNA, 24 nt, Human
gccagaggcccccagcccagggcu

SEQ ID NO: 2664646 - RNA, 20 nt, Human
gccagaggcccccagcccag

SEQ ID NO: 2664647 - RNA, 23 nt, Human
gccagaggcccccagcccagggc

SEQ ID NO: 2664648 - RNA, 15 nt, Human
gccagaggcccccag

SEQ ID NO: 2664649 - RNA, 16 nt, Human
gccagaggcccccagc

SEQ ID NO: 2664650 - RNA, 18 nt, Human
gccagaggcccccagccc

SEQ ID NO: 2664651 - RNA, 19 nt, Human
gccagaggcccccagccca

SEQ ID NO: 2664652 - RNA, 12 nt, Human
gccagaggcugg

SEQ ID NO: 2664653 - RNA, 13 nt, Human
gccagaggcuggg

SEQ ID NO: 2664654 - RNA, 22 nt, Human
gccacuccccggcaugagacuc

SEQ ID NO: 2664655 - RNA, 15 nt, Human
gccagccucagacug

SEQ ID NO: 2664656 - RNA, 18 nt, Human
gccagccuccgagaggga

SEQ ID NO: 2664657 - RNA, 20 nt, Human
gccagccuccgagagggaga

SEQ ID NO: 2664658 - RNA, 21 nt, Human
gccagccuccgagagggagag

SEQ ID NO: 2664659 - RNA, 12 nt, Human
gccagccuccuc

SEQ ID NO: 2664660 - RNA, 13 nt, Human
gccagccuccucu

SEQ ID NO: 2664661 - RNA, 14 nt, Human
gccagccuccucug

SEQ ID NO: 2664662 - RNA, 17 nt, Human
gccagccuccucuggac

SEQ ID NO: 2664663 - RNA, 15 nt, Human
gccagccuccucugg

SEQ ID NO: 2664664 - RNA, 16 nt, Human
gccagccuccucugga

SEQ ID NO: 2664665 - RNA, 22 nt, Human
gccaggacaugcaauaaaauuu

SEQ ID NO: 2664666 - RNA, 17 nt, Human
gccaggcucacucacag

SEQ ID NO: 2664667 - RNA, 22 nt, Human
gccaggcucacucacagaguca

SEQ ID NO: 2664668 - RNA, 21 nt, Human
gccaggagcaggcacgggugg

SEQ ID NO: 2664669 - RNA, 18 nt, Human
gccagcugacaucuugaa

SEQ ID NO: 2664670 - RNA, 24 nt, Human
gccaugcuccuggcccacugcauc

SEQ ID NO: 2664671 - RNA, 15 nt, Human
gcccaagccagaggc

SEQ ID NO: 2664672 - RNA, 16 nt, Human
gcccaagccagaggcu

SEQ ID NO: 2664673 - RNA, 17 nt, Human
gcccaagccagaggcug

SEQ ID NO: 2664674 - RNA, 18 nt, Human
gcccaagccagaggcugg

SEQ ID NO: 2664675 - RNA, 21 nt, Human
gcccaagccagaggcuggguu

SEQ ID NO: 2664676 - RNA, 23 nt, Human
gcccaagccagaggcuggguuca

SEQ ID NO: 2664677 - RNA, 13 nt, Human
gcccagaauacug

SEQ ID NO: 2664678 - RNA, 20 nt, Human
gcccagaauaaguuauugca

SEQ ID NO: 2664679 - RNA, 23 nt, Human
gcccagaauaaguuauugcaguu

SEQ ID NO: 2664680 - RNA, 16 nt, Human
gcccagaauaaguuau

SEQ ID NO: 2664681 - RNA, 13 nt, Human
gccaucuguagcu

SEQ ID NO: 2664682 - RNA, 20 nt, Human
gccaugcgcccccuccgccc

SEQ ID NO: 2664683 - RNA, 14 nt, Human
gccaugcuccuggc

SEQ ID NO: 2664684 - RNA, 18 nt, Human
gccaugccgucugccgga

SEQ ID NO: 2664685 - RNA, 15 nt, Human
gccaugaagggaccc

SEQ ID NO: 2664686 - RNA, 16 nt, Human
gccaugaagggacccu

SEQ ID NO: 2664687 - RNA, 19 nt, Human
gccaguccacccugccugc

SEQ ID NO: 2664688 - RNA, 13 nt, Human
gccaguccaggcu

SEQ ID NO: 2664689 - RNA, 14 nt, Human
gccaguccaggcug

SEQ ID NO: 2664690 - RNA, 20 nt, Human
gccaguccaggcugccgugg

SEQ ID NO: 2664691 - RNA, 21 nt, Human
gccaguccaggcugccguggg

SEQ ID NO: 2664692 - RNA, 21 nt, Human
uuuuaaaucuaaaucuauuua

SEQ ID NO: 2664693 - RNA, 14 nt, Human
uuuuaaaucuaaau

SEQ ID NO: 2664694 - RNA, 18 nt, Human
uuuuaaaucuaaaucuau

SEQ ID NO: 2664695 - RNA, 15 nt, Human
uuuuaaauauuuucu

SEQ ID NO: 2664696 - RNA, 17 nt, Human
uuuuaaauauuuucuau

SEQ ID NO: 2664697 - RNA, 23 nt, Human
uuuuaaagacccuccuauucuau

SEQ ID NO: 2664698 - RNA, 15 nt, Human
uuuuaaugaugacaa

SEQ ID NO: 2664699 - RNA, 17 nt, Human
uuuuaaugaugacaaaa

SEQ ID NO: 2664700 - RNA, 18 nt, Human
uuuuaaucuacugcauuu

SEQ ID NO: 2664701 - RNA, 14 nt, Human
uuuguaaaaaucuu

SEQ ID NO: 2664702 - RNA, 22 nt, Human
uuuguaaaaaucuuuugaagca

SEQ ID NO: 2664703 - RNA, 23 nt, Human
uuuguaaaaaucuuuugaagcau

SEQ ID NO: 2664704 - RNA, 16 nt, Human
uuuguauaguuaugua

SEQ ID NO: 2664705 - RNA, 14 nt, Human
uuuguauaguuaug

SEQ ID NO: 2664706 - RNA, 22 nt, Human
uuuguauaguuauguaaauaau

SEQ ID NO: 2664707 - RNA, 21 nt, Human
uuuguauaguuauguaaauaa

SEQ ID NO: 2664708 - RNA, 19 nt, Human
uuuguauaguuauguaaau

SEQ ID NO: 2664709 - RNA, 17 nt, Human
uuuguauaguuauguaa

SEQ ID NO: 2664710 - RNA, 13 nt, Human
uuuguaugaaaac

SEQ ID NO: 2664711 - RNA, 20 nt, Human
uuuguauauugguuuuauga

SEQ ID NO: 2664712 - RNA, 18 nt, Human
uuuguauauugguuuuau

SEQ ID NO: 2664713 - RNA, 15 nt, Human
uuuguaugaaaacau

SEQ ID NO: 2664714 - RNA, 23 nt, Human
uuuguaugaaaacauggaacagu

SEQ ID NO: 2664715 - RNA, 13 nt, Human
uuuguucccggcu

SEQ ID NO: 2664716 - RNA, 19 nt, Human
uuuuaaagaaaagaugaaa

SEQ ID NO: 2664717 - RNA, 11 nt, Human
uuuuaaagaau

SEQ ID NO: 2664718 - RNA, 23 nt, Human
uuuuaaagaauaugacuuuuuau

SEQ ID NO: 2664719 - RNA, 21 nt, Human
uuuggugcuucucagauuucu

SEQ ID NO: 2664720 - RNA, 20 nt, Human
uuuggaaaaguggcguggga

SEQ ID NO: 2664721 - RNA, 14 nt, Human
uuugcaucugaaau

SEQ ID NO: 2664722 - RNA, 22 nt, Human
uuugcaucugaaauaggaaaca

SEQ ID NO: 2664723 - RNA, 13 nt, Human
uuugcaugcaugc

SEQ ID NO: 2664724 - RNA, 20 nt, Human
uuugcaugcaugcaaaugag

SEQ ID NO: 2664725 - RNA, 14 nt, Human
uuugcauguuaugu

SEQ ID NO: 2664726 - RNA, 15 nt, Human
uuugcauguuauguu

SEQ ID NO: 2664727 - RNA, 17 nt, Human
uuugcauguuauguuua

SEQ ID NO: 2664728 - RNA, 18 nt, Human
uuugcauguuauguuuaa

SEQ ID NO: 2664729 - RNA, 15 nt, Human
uuucucuguacuuuu

SEQ ID NO: 2664730 - RNA, 16 nt, Human
uuucucuguacuuuuc

SEQ ID NO: 2664731 - RNA, 18 nt, Human
uuucucuguacuuuucau

SEQ ID NO: 2664732 - RNA, 22 nt, Human
uuucucugcauuuaaaaaaauc

SEQ ID NO: 2664733 - RNA, 20 nt, Human
uuucuacugucaaaugaugu

SEQ ID NO: 2664734 - RNA, 19 nt, Human
uuucuagaauuauuuuuca

SEQ ID NO: 2664735 - RNA, 21 nt, Human
uuucuagaauuauuuuucacu

SEQ ID NO: 2664736 - RNA, 11 nt, Human
uuuccucagug

SEQ ID NO: 2664737 - RNA, 20 nt, Human
uuacagaaucuuccuuuuau

SEQ ID NO: 2664738 - RNA, 20 nt, Human
uuuccucccucugccccucc

SEQ ID NO: 2664739 - RNA, 19 nt, Human
uuuccuggaauugccagcu

SEQ ID NO: 2664740 - RNA, 20 nt, Human
uuuccuggaauugccagcug

SEQ ID NO: 2664741 - RNA, 14 nt, Human
uuugaauauguagu

SEQ ID NO: 2664742 - RNA, 19 nt, Human
uuugaauauguaguaucua

SEQ ID NO: 2664743 - RNA, 19 nt, Human
uuugaaucaauaauauauu

SEQ ID NO: 2664744 - RNA, 17 nt, Human
uuugaacucuucucauu

SEQ ID NO: 2664745 - RNA, 22 nt, Human
uuugaacucuucucauuacuug

SEQ ID NO: 2664746 - RNA, 13 nt, Human
uuucuuaugugac

SEQ ID NO: 2664747 - RNA, 14 nt, Human
uuucuuaugugaca

SEQ ID NO: 2664748 - RNA, 15 nt, Human
uuucuuaugugacau

SEQ ID NO: 2664749 - RNA, 16 nt, Human
uuucuuaugugacauu

SEQ ID NO: 2664750 - RNA, 17 nt, Human
uuucuuaugugacauua

SEQ ID NO: 2664751 - RNA, 12 nt, Human
uuucuguuuucu

SEQ ID NO: 2664752 - RNA, 15 nt, Human
uuucuguugaaguuu

SEQ ID NO: 2664753 - RNA, 15 nt, Human
uuucuucagggcugc

SEQ ID NO: 2664754 - RNA, 16 nt, Human
uuucuucagggcugcu

SEQ ID NO: 2664755 - RNA, 23 nt, Human
uuucuucuguauuuuuuuuucua

SEQ ID NO: 2664756 - RNA, 15 nt, Human
uuucuucucugugag

SEQ ID NO: 2664757 - RNA, 20 nt, Human
uuucuucucugugagaaggu

SEQ ID NO: 2664758 - RNA, 20 nt, Human
uuuuugaaaagcagacauuu

SEQ ID NO: 2664759 - RNA, 13 nt, Human
uuuuuuguaauaa

SEQ ID NO: 2664760 - RNA, 13 nt, Human
uuuuuuguaugug

SEQ ID NO: 2664761 - RNA, 14 nt, Human
uuuuuuguaugaaa

SEQ ID NO: 2664762 - RNA, 13 nt, Human
uuuuuuguaugaa

SEQ ID NO: 2664763 - RNA, 20 nt, Human
uuuuugaacucuucucauua

SEQ ID NO: 2664764 - RNA, 19 nt, Human
uuuuugaacucuucucauu

SEQ ID NO: 2664765 - RNA, 15 nt, Human
uuuuucuaagagaag

SEQ ID NO: 2664766 - RNA, 16 nt, Human
uuuuucuaagagaagu

SEQ ID NO: 2664767 - RNA, 16 nt, Human
uuuuuaagcuucaguu

SEQ ID NO: 2664768 - RNA, 11 nt, Human
uuuuuaagaua

SEQ ID NO: 2664769 - RNA, 20 nt, Human
uuuuuaagcugcaaaucuga

SEQ ID NO: 2664770 - RNA, 16 nt, Human
uuuuuaaauauuuucu

SEQ ID NO: 2664771 - RNA, 15 nt, Human
uuuuuaagauagugu

SEQ ID NO: 2664772 - RNA, 16 nt, Human
uuuuuaagauagugua

SEQ ID NO: 2664773 - RNA, 20 nt, Human
uuuuuaagauaguguaacuu

SEQ ID NO: 2664774 - RNA, 22 nt, Human
uuuuaauuguauuuuuguuguu

SEQ ID NO: 2664775 - RNA, 20 nt, Human
uuuuccuggaauugccagcu

SEQ ID NO: 2664776 - RNA, 14 nt, Human
uuuuaauuguuuaa

SEQ ID NO: 2664777 - RNA, 20 nt, Human
uuuuaaugcuauuugaacaa

SEQ ID NO: 2664778 - RNA, 12 nt, Human
uuuuaauuguau

SEQ ID NO: 2664779 - RNA, 14 nt, Human
uuuuaauuguauuu

SEQ ID NO: 2664780 - RNA, 13 nt, Human
uuuuaauuguauu

SEQ ID NO: 2664781 - RNA, 13 nt, Human
uuuucuacagugg

SEQ ID NO: 2664782 - RNA, 15 nt, Human
uuuucuaagagaagu

SEQ ID NO: 2664783 - RNA, 13 nt, Human
uuuucuaagagaa

SEQ ID NO: 2664784 - RNA, 14 nt, Human
uuuucuacaguggu

SEQ ID NO: 2664785 - RNA, 18 nt, Human
uuuucuacagugguuuua

SEQ ID NO: 2664786 - RNA, 15 nt, Human
uuuuggggagccaga

SEQ ID NO: 2664787 - RNA, 16 nt, Human
uuuuggggagccagaa

SEQ ID NO: 2664788 - RNA, 19 nt, Human
uuuugguaaagacuggcuu

SEQ ID NO: 2664789 - RNA, 22 nt, Human
uuuuggcugaaauucuccugga

SEQ ID NO: 2664790 - RNA, 14 nt, Human
uuuucuaaagacuu

SEQ ID NO: 2664791 - RNA, 12 nt, Human
uuuugacacuga

SEQ ID NO: 2664792 - RNA, 13 nt, Human
uuuugacacugaa

SEQ ID NO: 2664793 - RNA, 14 nt, Human
uuuugacacugaaa

SEQ ID NO: 2664794 - RNA, 18 nt, Human
uuuugacacugaaaguuu

SEQ ID NO: 2664795 - RNA, 19 nt, Human
uuuuggcaaacgcuaaaga

SEQ ID NO: 2664796 - RNA, 22 nt, Human
uuuuggcaaugacucaaagucu

SEQ ID NO: 2664797 - RNA, 23 nt, Human
uuuuggcaaugacucaaagucug

SEQ ID NO: 2664798 - RNA, 19 nt, Human
uuuuggcaaaacucuacuu

SEQ ID NO: 2664799 - RNA, 22 nt, Human
uuuucuuuuuuuuuaaguucuu

SEQ ID NO: 2664800 - RNA, 13 nt, Human
uuuugaaucaaua

SEQ ID NO: 2664801 - RNA, 18 nt, Human
uuuuuaaaacacauguuu

SEQ ID NO: 2664802 - RNA, 14 nt, Human
uuuuuaaaacacau

SEQ ID NO: 2664803 - RNA, 23 nt, Human
uuuuuaaaacacauguuuuuaua

SEQ ID NO: 2664804 - RNA, 18 nt, Human
uuuuuaaaaaauauuuuc

SEQ ID NO: 2664805 - RNA, 19 nt, Human
uuuuuaaaaaauauuuucu

SEQ ID NO: 2664806 - RNA, 18 nt, Human
uuuuguauuuucaugaaa

SEQ ID NO: 2664807 - RNA, 14 nt, Human
uuuuguaugugugu

SEQ ID NO: 2664808 - RNA, 14 nt, Human
uuuuguauguuaaa

SEQ ID NO: 2664809 - RNA, 17 nt, Human
uuuuguauguuaaagag

SEQ ID NO: 2664810 - RNA, 12 nt, Human
uuuuuaaaauuu

SEQ ID NO: 2664811 - RNA, 16 nt, Human
uuuuuaaaauauuuau

SEQ ID NO: 2664812 - RNA, 14 nt, Human
uuuuuaaaauagaa

SEQ ID NO: 2664813 - RNA, 23 nt, Human
uuuuuaaaauagaaauuuuguaa

SEQ ID NO: 2664814 - RNA, 15 nt, Human
uuuuguacugaauuu

SEQ ID NO: 2664815 - RNA, 14 nt, Human
uuuuguauauuggu

SEQ ID NO: 2664816 - RNA, 11 nt, Human
uuuuguaagaa

SEQ ID NO: 2664817 - RNA, 14 nt, Human
uuuuguaaaguuuc

SEQ ID NO: 2664818 - RNA, 16 nt, Human
uuuuguaauaagcaau

SEQ ID NO: 2664819 - RNA, 22 nt, Human
uuuuguaauaagcaaucaaggu

SEQ ID NO: 2664820 - RNA, 12 nt, Human
uuuuguaaaaga

SEQ ID NO: 2664821 - RNA, 15 nt, Human
uuuuguaaaagaaau

SEQ ID NO: 2664822 - RNA, 13 nt, Human
uuuuguaaacauu

SEQ ID NO: 2664823 - RNA, 14 nt, Human
uuuuguaaacauuu

SEQ ID NO: 2664824 - RNA, 15 nt, Human
uuuuguaaacauuua

SEQ ID NO: 2664825 - RNA, 16 nt, Human
uuuuguaaacauuuau

SEQ ID NO: 2664826 - RNA, 17 nt, Human
uuuuguaaacauuuauu

SEQ ID NO: 2664827 - RNA, 15 nt, Human
gucauuaaacugguu

SEQ ID NO: 2664828 - RNA, 13 nt, Human
gucauuaaacugg

SEQ ID NO: 2664829 - RNA, 12 nt, Human
gucauuaaacug

SEQ ID NO: 2664830 - RNA, 12 nt, Human
gucagcuccagc

SEQ ID NO: 2664831 - RNA, 13 nt, Human
gucagcuccagcu

SEQ ID NO: 2664832 - RNA, 17 nt, Human
gucagcugcucccuggc

SEQ ID NO: 2664833 - RNA, 20 nt, Human
gucagcugcucccuggcauu

SEQ ID NO: 2664834 - RNA, 21 nt, Human
gucauuaugagaggcaaugau

SEQ ID NO: 2664835 - RNA, 14 nt, Human
gucauucagaguca

SEQ ID NO: 2664836 - RNA, 20 nt, Human
gucauucagagucagccagg

SEQ ID NO: 2664837 - RNA, 19 nt, Human
gucauugcacauaagcuuc

SEQ ID NO: 2664838 - RNA, 15 nt, Human
guccacccugccugc

SEQ ID NO: 2664839 - RNA, 16 nt, Human
guccacccugccugcc

SEQ ID NO: 2664840 - RNA, 16 nt, Human
guccacgcgugccgug

SEQ ID NO: 2664841 - RNA, 19 nt, Human
guccacgcgugccguggca

SEQ ID NO: 2664842 - RNA, 22 nt, Human
guccacgcgugccguggcacca

SEQ ID NO: 2664843 - RNA, 14 nt, Human
guccagccugcccc

SEQ ID NO: 2664844 - RNA, 22 nt, Human
guccagccugccccggagcugg

SEQ ID NO: 2664845 - RNA, 23 nt, Human
guccagccugccccggagcugga

SEQ ID NO: 2664846 - RNA, 19 nt, Human
guccagcaccuugugccug

SEQ ID NO: 2664847 - RNA, 23 nt, Human
guccagcaccuugugccuggggu

SEQ ID NO: 2664848 - RNA, 23 nt, Human
guccaguaagaucacuguuuaga

SEQ ID NO: 2664849 - RNA, 14 nt, Human
guccaguaagauca

SEQ ID NO: 2664850 - RNA, 21 nt, Human
guccaguaagaucacuguuua

SEQ ID NO: 2664851 - RNA, 20 nt, Human
guccaguaagaucacuguuu

SEQ ID NO: 2664852 - RNA, 19 nt, Human
guccaguaagaucacuguu

SEQ ID NO: 2664853 - RNA, 18 nt, Human
guccaguaagaucacugu

SEQ ID NO: 2664854 - RNA, 15 nt, Human
gucccuagcagccca

SEQ ID NO: 2664855 - RNA, 18 nt, Human
gucccuagcagcccaccc

SEQ ID NO: 2664856 - RNA, 20 nt, Human
gucccuagcagcccacccug

SEQ ID NO: 2664857 - RNA, 21 nt, Human
gucccuagcagcccacccugc

SEQ ID NO: 2664858 - RNA, 15 nt, Human
gucccuaugcauauc

SEQ ID NO: 2664859 - RNA, 11 nt, Human
gucccucugug

SEQ ID NO: 2664860 - RNA, 12 nt, Human
gucccucugugu

SEQ ID NO: 2664861 - RNA, 13 nt, Human
gucccucugugua

SEQ ID NO: 2664862 - RNA, 14 nt, Human
gucccucuguguau

SEQ ID NO: 2664863 - RNA, 22 nt, Human
gucccucuguguauuugcuuuu

SEQ ID NO: 2664864 - RNA, 18 nt, Human
gucccauagucccugcca

SEQ ID NO: 2664865 - RNA, 17 nt, Human
gucccauagucccugcc

SEQ ID NO: 2664866 - RNA, 16 nt, Human
gucccaggcagggaga

SEQ ID NO: 2664867 - RNA, 22 nt, Human
guccccaaccgugucugucugg

SEQ ID NO: 2664868 - RNA, 12 nt, Human
guccccaccccu

SEQ ID NO: 2664869 - RNA, 14 nt, Human
guccccaccccugc

SEQ ID NO: 2664870 - RNA, 15 nt, Human
guccccaccccugcc

SEQ ID NO: 2664871 - RNA, 16 nt, Human
guccccaccccugccc

SEQ ID NO: 2664872 - RNA, 17 nt, Human
guccccaccccugcccc

SEQ ID NO: 2664873 - RNA, 15 nt, Human
gucaagugaaaaagg

SEQ ID NO: 2664874 - RNA, 22 nt, Human
gucaagggcugucauugcacau

SEQ ID NO: 2664875 - RNA, 19 nt, Human
guauuuuguuuuugucuua

SEQ ID NO: 2664876 - RNA, 15 nt, Human
gucaccaccaccccu

SEQ ID NO: 2664877 - RNA, 19 nt, Human
gucaccaccaccccuacca

SEQ ID NO: 2664878 - RNA, 20 nt, Human
gucaccaccaccccuaccac

SEQ ID NO: 2664879 - RNA, 16 nt, Human
gucaccagagacuuua

SEQ ID NO: 2664880 - RNA, 13 nt, Human
gucaccagagacu

SEQ ID NO: 2664881 - RNA, 15 nt, Human
guauuuucuucucug

SEQ ID NO: 2664882 - RNA, 16 nt, Human
guauuuucuucucugu

SEQ ID NO: 2664883 - RNA, 19 nt, Human
guauuuucuucucugugag

SEQ ID NO: 2664884 - RNA, 14 nt, Human
guauuuucauacaa

SEQ ID NO: 2664885 - RNA, 15 nt, Human
guauuuucaugaaaa

SEQ ID NO: 2664886 - RNA, 16 nt, Human
guauuuucaugaaaau

SEQ ID NO: 2664887 - RNA, 19 nt, Human
guauuuucaugaaaauacc

SEQ ID NO: 2664888 - RNA, 18 nt, Human
gucagauguuuaaaacac

SEQ ID NO: 2664889 - RNA, 19 nt, Human
gucagauguuuaaaacacc

SEQ ID NO: 2664890 - RNA, 13 nt, Human
gucagauguuuaa

SEQ ID NO: 2664891 - RNA, 17 nt, Human
gucagauguuuaaaaca

SEQ ID NO: 2664892 - RNA, 15 nt, Human
gucagauguuuaaaa

SEQ ID NO: 2664893 - RNA, 10 nt, Human
gucagagaca

SEQ ID NO: 2664894 - RNA, 14 nt, Human
gucacucauugcug

SEQ ID NO: 2664895 - RNA, 19 nt, Human
gucacuaugggaugagaaa

SEQ ID NO: 2664896 - RNA, 20 nt, Human
gucacuaugggaugagaaaa

SEQ ID NO: 2664897 - RNA, 24 nt, Human
gucacucauugcugagccucugcu

SEQ ID NO: 2664898 - RNA, 23 nt, Human
gucacucauugcugagccucugc

SEQ ID NO: 2664899 - RNA, 22 nt, Human
gucacucauugcugagccucug

SEQ ID NO: 2664900 - RNA, 21 nt, Human
gucacucauugcugagccucu

SEQ ID NO: 2664901 - RNA, 20 nt, Human
gucacucauugcugagccuc

SEQ ID NO: 2664902 - RNA, 19 nt, Human
gucacucauugcugagccu

SEQ ID NO: 2664903 - RNA, 18 nt, Human
gucacucauugcugagcc

SEQ ID NO: 2664904 - RNA, 14 nt, Human
gucacuaauacaca

SEQ ID NO: 2664905 - RNA, 19 nt, Human
gucacguuuggugcuucuc

SEQ ID NO: 2664906 - RNA, 17 nt, Human
guagguucagccaaggu

SEQ ID NO: 2664907 - RNA, 15 nt, Human
guagguucagccaag

SEQ ID NO: 2664908 - RNA, 16 nt, Human
guagguucagccaagg

SEQ ID NO: 2664909 - RNA, 13 nt, Human
guagguaagacug

SEQ ID NO: 2664910 - RNA, 23 nt, Human
guagucccagcuacuugggaggc

SEQ ID NO: 2664911 - RNA, 12 nt, Human
guaguccccaac

SEQ ID NO: 2664912 - RNA, 12 nt, Human
guagucccagcu

SEQ ID NO: 2664913 - RNA, 12 nt, Human
guaguccuguga

SEQ ID NO: 2664914 - RNA, 15 nt, Human
guagagugugccuga

SEQ ID NO: 2664915 - RNA, 19 nt, Human
guagaguugaucaaaauca

SEQ ID NO: 2664916 - RNA, 16 nt, Human
guagauaauuucaggg

SEQ ID NO: 2664917 - RNA, 17 nt, Human
guagauaauuucagggu

SEQ ID NO: 2664918 - RNA, 18 nt, Human
guagauaauuucagggug

SEQ ID NO: 2664919 - RNA, 15 nt, Human
guagauccauuucca

SEQ ID NO: 2664920 - RNA, 22 nt, Human
guagauccauuuccauugcuua

SEQ ID NO: 2664921 - RNA, 17 nt, Human
guagauauguauucuuu

SEQ ID NO: 2664922 - RNA, 18 nt, Human
guagauauguauucuuuu

SEQ ID NO: 2664923 - RNA, 13 nt, Human
guagcacuuacug

SEQ ID NO: 2664924 - RNA, 22 nt, Human
guagcagugagucauaucuuaa

SEQ ID NO: 2664925 - RNA, 16 nt, Human
guagauuugauuuuuu

SEQ ID NO: 2664926 - RNA, 12 nt, Human
guagauuugauu

SEQ ID NO: 2664927 - RNA, 14 nt, Human
guagauuuuccaaa

SEQ ID NO: 2664928 - RNA, 17 nt, Human
guagcccccuggccucu

SEQ ID NO: 2664929 - RNA, 16 nt, Human
guagcccccuggccuc

SEQ ID NO: 2664930 - RNA, 13 nt, Human
guagggagggcgg

SEQ ID NO: 2664931 - RNA, 23 nt, Human
guagcccccuggccucugugccu

SEQ ID NO: 2664932 - RNA, 19 nt, Human
guagcccccuggccucugu

SEQ ID NO: 2664933 - RNA, 18 nt, Human
guagcccccuggccucug

SEQ ID NO: 2664934 - RNA, 18 nt, Human
guauauauacauauauau

SEQ ID NO: 2664935 - RNA, 19 nt, Human
guauaugguauauauacau

SEQ ID NO: 2664936 - RNA, 13 nt, Human
guauauauuuugu

SEQ ID NO: 2664937 - RNA, 22 nt, Human
guauauauuuugugugaaauug

SEQ ID NO: 2664938 - RNA, 13 nt, Human
guauauuaaaaaa

SEQ ID NO: 2664939 - RNA, 19 nt, Human
guauauuaaaaaagagaca

SEQ ID NO: 2664940 - RNA, 13 nt, Human
guauauuacaaug

SEQ ID NO: 2664941 - RNA, 17 nt, Human
guauccuggaacaauau

SEQ ID NO: 2664942 - RNA, 21 nt, Human
guauccuggaacaauauuuua

SEQ ID NO: 2664943 - RNA, 22 nt, Human
guauccuggaacaauauuuuau

SEQ ID NO: 2664944 - RNA, 23 nt, Human
guauccuggaacaauauuuuaug

SEQ ID NO: 2664945 - RNA, 14 nt, Human
guauauuacaauga

SEQ ID NO: 2664946 - RNA, 22 nt, Human
guaucuagagcuuaaugcuaca

SEQ ID NO: 2664947 - RNA, 18 nt, Human
guauccugggggacccaa

SEQ ID NO: 2664948 - RNA, 22 nt, Human
guaucuccggcucccagccuca

SEQ ID NO: 2664949 - RNA, 21 nt, Human
guaucuccggcucccagccuc

SEQ ID NO: 2664950 - RNA, 20 nt, Human
guaucuccggcucccagccu

SEQ ID NO: 2664951 - RNA, 18 nt, Human
guaucuccggcucccagc

SEQ ID NO: 2664952 - RNA, 16 nt, Human
guaucuccggcuccca

SEQ ID NO: 2664953 - RNA, 18 nt, Human
guauaguuauguaaauaa

SEQ ID NO: 2664954 - RNA, 20 nt, Human
guauagcaugaaauaaaaua

SEQ ID NO: 2664955 - RNA, 15 nt, Human
guauaguuauguaaa

SEQ ID NO: 2664956 - RNA, 14 nt, Human
guauaguuauguaa

SEQ ID NO: 2664957 - RNA, 23 nt, Human
guauagccuauggcagaaaaaau

SEQ ID NO: 2664958 - RNA, 21 nt, Human
guauagccuauggcagaaaaa

SEQ ID NO: 2664959 - RNA, 13 nt, Human
guauguguuuaga

SEQ ID NO: 2664960 - RNA, 13 nt, Human
guauuaaagacag

SEQ ID NO: 2664961 - RNA, 18 nt, Human
guauuaaaacuaaauuuc

SEQ ID NO: 2664962 - RNA, 20 nt, Human
guauuaaaacuaaauuucac

SEQ ID NO: 2664963 - RNA, 17 nt, Human
guauguuucucuuugau

SEQ ID NO: 2664964 - RNA, 20 nt, Human
guauguuucucuuugauuau

SEQ ID NO: 2664965 - RNA, 18 nt, Human
guauguuaaagagaauga

SEQ ID NO: 2664966 - RNA, 22 nt, Human
guauguguuuagaauugaaggu

SEQ ID NO: 2664967 - RNA, 18 nt, Human
guauguguuuagaauuga

SEQ ID NO: 2664968 - RNA, 13 nt, Human
guaugaaaacaug

SEQ ID NO: 2664969 - RNA, 20 nt, Human
guaugaaaacauggaacagu

SEQ ID NO: 2664970 - RNA, 17 nt, Human
guaugaaaacauggaac

SEQ ID NO: 2664971 - RNA, 20 nt, Human
gucugugugcgcucugugga

SEQ ID NO: 2664972 - RNA, 13 nt, Human
gucuguggaucag

SEQ ID NO: 2664973 - RNA, 22 nt, Human
gucuguuggcaggcuggccagu

SEQ ID NO: 2664974 - RNA, 18 nt, Human
gucuguugugugucaugc

SEQ ID NO: 2664975 - RNA, 21 nt, Human
gucugugugugugugugugcg

SEQ ID NO: 2664976 - RNA, 20 nt, Human
gucuguugugugucaugcca

SEQ ID NO: 2664977 - RNA, 20 nt, Human
gucuguuggcaggcuggcca

SEQ ID NO: 2664978 - RNA, 21 nt, Human
gucuguuggcaggcuggccag

SEQ ID NO: 2664979 - RNA, 22 nt, Human
gucuguugugugucaugccagu

SEQ ID NO: 2664980 - RNA, 14 nt, Human
gucuguuggcaggc

SEQ ID NO: 2664981 - RNA, 16 nt, Human
gucuguuggcaggcug

SEQ ID NO: 2664982 - RNA, 18 nt, Human
gucuguuggcaggcuggc

SEQ ID NO: 2664983 - RNA, 19 nt, Human
gucuguuggcaggcuggcc

SEQ ID NO: 2664984 - RNA, 18 nt, Human
gucugugaacagagagac

SEQ ID NO: 2664985 - RNA, 21 nt, Human
gucugugaacagagagacccu

SEQ ID NO: 2664986 - RNA, 16 nt, Human
gucugucuuuccugaa

SEQ ID NO: 2664987 - RNA, 20 nt, Human
gucugucuuuccugaaccau

SEQ ID NO: 2664988 - RNA, 23 nt, Human
gucuaagacuauauauauaaaug

SEQ ID NO: 2664989 - RNA, 23 nt, Human
gucugccggacccggaggccgag

SEQ ID NO: 2664990 - RNA, 21 nt, Human
gucuuaaaaaguggaaaaaua

SEQ ID NO: 2664991 - RNA, 21 nt, Human
gucuugggcagagcuggcucu

SEQ ID NO: 2664992 - RNA, 22 nt, Human
gucuugggcagagcuggcucug

SEQ ID NO: 2664993 - RNA, 16 nt, Human
gucuugggcagagcug

SEQ ID NO: 2664994 - RNA, 19 nt, Human
gucuugggcagagcuggcu

SEQ ID NO: 2664995 - RNA, 20 nt, Human
gucuugggcagagcuggcuc

SEQ ID NO: 2664996 - RNA, 18 nt, Human
gucuugauucagucacau

SEQ ID NO: 2664997 - RNA, 15 nt, Human
gucuuggauauauag

SEQ ID NO: 2664998 - RNA, 18 nt, Human
gucgugccuguguccaug

SEQ ID NO: 2664999 - RNA, 23 nt, Human
gucguggacacacacagacuauu

SEQ ID NO: 2665000 - RNA, 19 nt, Human
gucgucacuaauacacagu

SEQ ID NO: 2665001 - RNA, 12 nt, Human
gucgugccugug

SEQ ID NO: 2665002 - RNA, 13 nt, Human
gucgugccugugu

SEQ ID NO: 2665003 - RNA, 14 nt, Human
gucgugccuguguc

SEQ ID NO: 2665004 - RNA, 15 nt, Human
gucgugccugugucc

SEQ ID NO: 2665005 - RNA, 17 nt, Human
gucgugccuguguccau

SEQ ID NO: 2665006 - RNA, 13 nt, Human
gucucacccaugc

SEQ ID NO: 2665007 - RNA, 23 nt, Human
gucucacccaugcaagcagagga

SEQ ID NO: 2665008 - RNA, 14 nt, Human
gucggcugaccaug

SEQ ID NO: 2665009 - RNA, 17 nt, Human
gucggcugaccaugcuc

SEQ ID NO: 2665010 - RNA, 18 nt, Human
gucggcugaccaugcuca

SEQ ID NO: 2665011 - RNA, 22 nt, Human
gucccugccacgaauuucugug

SEQ ID NO: 2665012 - RNA, 20 nt, Human
gucucuucuuggggcccagu

SEQ ID NO: 2665013 - RNA, 21 nt, Human
gucucuucuuggggcccagug

SEQ ID NO: 2665014 - RNA, 22 nt, Human
gucucuucuuggggcccagugc

SEQ ID NO: 2665015 - RNA, 23 nt, Human
gucucuucuuggggcccagugca

SEQ ID NO: 2665016 - RNA, 18 nt, Human
gucucucuucucagagug

SEQ ID NO: 2665017 - RNA, 19 nt, Human
gucucucuucucagagugg

SEQ ID NO: 2665018 - RNA, 14 nt, Human
gugcggccuuuggc

SEQ ID NO: 2665019 - RNA, 15 nt, Human
gugcgcucuguggau

SEQ ID NO: 2665020 - RNA, 22 nt, Human
gugcgcucuguggaugccaggg

SEQ ID NO: 2665021 - RNA, 18 nt, Human
gugcgcaucuugccucca

SEQ ID NO: 2665022 - RNA, 20 nt, Human
gugcgcaucuugccuccagg

SEQ ID NO: 2665023 - RNA, 24 nt, Human
gugcgcaucuugccuccaggugca

SEQ ID NO: 2665024 - RNA, 15 nt, Human
gugcagauggagaga

SEQ ID NO: 2665025 - RNA, 14 nt, Human
gugcauaguuucuu

SEQ ID NO: 2665026 - RNA, 15 nt, Human
gugcauaguuucuuu

SEQ ID NO: 2665027 - RNA, 16 nt, Human
gugauuuaauccaguu

SEQ ID NO: 2665028 - RNA, 21 nt, Human
gugauuucuuuaaaagaauga

SEQ ID NO: 2665029 - RNA, 14 nt, Human
gugauuugaaaaau

SEQ ID NO: 2665030 - RNA, 17 nt, Human
gugauuugaaaaauaua

SEQ ID NO: 2665031 - RNA, 22 nt, Human
gugauuugaaaaauauaaaauu

SEQ ID NO: 2665032 - RNA, 23 nt, Human
gugauuugaaaaauauaaaauua

SEQ ID NO: 2665033 - RNA, 17 nt, Human
gugcaaaaccuuuuacu

SEQ ID NO: 2665034 - RNA, 14 nt, Human
gugauuuuuuuguc

SEQ ID NO: 2665035 - RNA, 15 nt, Human
gugcagagguacccu

SEQ ID NO: 2665036 - RNA, 19 nt, Human
gugcagagguacccugggu

SEQ ID NO: 2665037 - RNA, 16 nt, Human
gugcagagccuucuca

SEQ ID NO: 2665038 - RNA, 23 nt, Human
gugcagagccuucucagaagcac

SEQ ID NO: 2665039 - RNA, 12 nt, Human
gugcagaaugua

SEQ ID NO: 2665040 - RNA, 13 nt, Human
gugcagaauguaa

SEQ ID NO: 2665041 - RNA, 22 nt, Human
gugcagaauguaagugggccca

SEQ ID NO: 2665042 - RNA, 14 nt, Human
gucuuggccagcca

SEQ ID NO: 2665043 - RNA, 15 nt, Human
gucuugguguaauuu

SEQ ID NO: 2665044 - RNA, 14 nt, Human
gucuuuuuuuuccu

SEQ ID NO: 2665045 - RNA, 15 nt, Human
gucuuuuuuuuccug

SEQ ID NO: 2665046 - RNA, 11 nt, Human
gugaauuuuua

SEQ ID NO: 2665047 - RNA, 13 nt, Human
gugaauuuuuaag

SEQ ID NO: 2665048 - RNA, 14 nt, Human
gugaauuauugaca

SEQ ID NO: 2665049 - RNA, 16 nt, Human
gugaauuauugacacu

SEQ ID NO: 2665050 - RNA, 17 nt, Human
gugaauuauugacacug

SEQ ID NO: 2665051 - RNA, 18 nt, Human
gugaauuauugacacuga

SEQ ID NO: 2665052 - RNA, 19 nt, Human
gugaauuauugacacugaa

SEQ ID NO: 2665053 - RNA, 21 nt, Human
gugaaugcugggacucagccu

SEQ ID NO: 2665054 - RNA, 21 nt, Human
gugaaugaugauccuaggcau

SEQ ID NO: 2665055 - RNA, 13 nt, Human
gugaaugcuggga

SEQ ID NO: 2665056 - RNA, 15 nt, Human
gugaaugcugggacu

SEQ ID NO: 2665057 - RNA, 20 nt, Human
gugaaugcugggacucagcc

SEQ ID NO: 2665058 - RNA, 16 nt, Human
gugacaauuuuguaca

SEQ ID NO: 2665059 - RNA, 16 nt, Human
gugacaauucuguuuu

SEQ ID NO: 2665060 - RNA, 19 nt, Human
gugacaauucuguuuuuaa

SEQ ID NO: 2665061 - RNA, 17 nt, Human
gugaucaauauuuuuau

SEQ ID NO: 2665062 - RNA, 20 nt, Human
gugaucaauauuuuuauauc

SEQ ID NO: 2665063 - RNA, 23 nt, Human
gugauccacccaacccuaucucc

SEQ ID NO: 2665064 - RNA, 22 nt, Human
gugauagucuuuugcuuuuggc

SEQ ID NO: 2665065 - RNA, 15 nt, Human
gugaguuugagcugc

SEQ ID NO: 2665066 - RNA, 17 nt, Human
gugaguuugagcugccu

SEQ ID NO: 2665067 - RNA, 21 nt, Human
gugaguuugagcugccuuccc

SEQ ID NO: 2665068 - RNA, 15 nt, Human
gugauacauuuuuua

SEQ ID NO: 2665069 - RNA, 18 nt, Human
gugaguuugagcugccuu

SEQ ID NO: 2665070 - RNA, 16 nt, Human
gugagugguugaauau

SEQ ID NO: 2665071 - RNA, 18 nt, Human
guucugagcugccagugg

SEQ ID NO: 2665072 - RNA, 16 nt, Human
guucugagcugccagu

SEQ ID NO: 2665073 - RNA, 22 nt, Human
guucuaacagugaaguuuuacu

SEQ ID NO: 2665074 - RNA, 21 nt, Human
guuccuugguccuaguaagaa

SEQ ID NO: 2665075 - RNA, 14 nt, Human
guucguugguuaua

SEQ ID NO: 2665076 - RNA, 17 nt, Human
guugaaaaacagcugag

SEQ ID NO: 2665077 - RNA, 15 nt, Human
guucuuuuaagccca

SEQ ID NO: 2665078 - RNA, 21 nt, Human
guucuuuguucauagcccagu

SEQ ID NO: 2665079 - RNA, 13 nt, Human
guucuuuguucau

SEQ ID NO: 2665080 - RNA, 20 nt, Human
guucuuuguucauagcccag

SEQ ID NO: 2665081 - RNA, 14 nt, Human
guucuuuggauucu

SEQ ID NO: 2665082 - RNA, 16 nt, Human
guucuggcuguuugag

SEQ ID NO: 2665083 - RNA, 12 nt, Human
guucuuucagaa

SEQ ID NO: 2665084 - RNA, 16 nt, Human
guucuggccagaaugc

SEQ ID NO: 2665085 - RNA, 13 nt, Human
guucuggccagaa

SEQ ID NO: 2665086 - RNA, 12 nt, Human
guucuggccaga

SEQ ID NO: 2665087 - RNA, 22 nt, Human
guuggaggugauuccagugaag

SEQ ID NO: 2665088 - RNA, 19 nt, Human
guugccacaguagaacugu

SEQ ID NO: 2665089 - RNA, 15 nt, Human
guugccaagcuccaa

SEQ ID NO: 2665090 - RNA, 18 nt, Human
guugccaagcuccaagcc

SEQ ID NO: 2665091 - RNA, 19 nt, Human
guugccaagcuccaagccc

SEQ ID NO: 2665092 - RNA, 14 nt, Human
guuggcaaaaaggc

SEQ ID NO: 2665093 - RNA, 18 nt, Human
guuggcaaaaaggcagga

SEQ ID NO: 2665094 - RNA, 13 nt, Human
guuggcaggcugg

SEQ ID NO: 2665095 - RNA, 14 nt, Human
guuggcaggcuggc

SEQ ID NO: 2665096 - RNA, 15 nt, Human
guuggcaggcuggcc

SEQ ID NO: 2665097 - RNA, 16 nt, Human
guuggcaggcuggcca

SEQ ID NO: 2665098 - RNA, 17 nt, Human
guuggcaggcuggccag

SEQ ID NO: 2665099 - RNA, 20 nt, Human
guuggcaggcuggccagucc

SEQ ID NO: 2665100 - RNA, 13 nt, Human
guugaauaugauu

SEQ ID NO: 2665101 - RNA, 23 nt, Human
guugauucgguauccccccaucu

SEQ ID NO: 2665102 - RNA, 17 nt, Human
guugauuuuuacugugu

SEQ ID NO: 2665103 - RNA, 14 nt, Human
guugcaagauguga

SEQ ID NO: 2665104 - RNA, 15 nt, Human
guugcaagaugugaa

SEQ ID NO: 2665105 - RNA, 16 nt, Human
guugcaagaugugaau

SEQ ID NO: 2665106 - RNA, 17 nt, Human
guugcaagaugugaauu

SEQ ID NO: 2665107 - RNA, 18 nt, Human
guugcaagaugugaauua

SEQ ID NO: 2665108 - RNA, 23 nt, Human
guugcauuuuaacccuauuuuac

SEQ ID NO: 2665109 - RNA, 13 nt, Human
guugcauggaaau

SEQ ID NO: 2665110 - RNA, 14 nt, Human
guugcauggaaauc

SEQ ID NO: 2665111 - RNA, 15 nt, Human
guugcaggaccucag

SEQ ID NO: 2665112 - RNA, 15 nt, Human
guuacucucuugcac

SEQ ID NO: 2665113 - RNA, 21 nt, Human
guuacucucuugcaccaaauu

SEQ ID NO: 2665114 - RNA, 16 nt, Human
guuaguuuguauauau

SEQ ID NO: 2665115 - RNA, 17 nt, Human
guuaguuuguauauauu

SEQ ID NO: 2665116 - RNA, 21 nt, Human
guuaguuuguauauauuauua

SEQ ID NO: 2665117 - RNA, 12 nt, Human
guuauaauuuuu

SEQ ID NO: 2665118 - RNA, 23 nt, Human
guuauaauuuuuuuuaaaauaga

SEQ ID NO: 2665119 - RNA, 18 nt, Human
guucaaggucacuguuuc

SEQ ID NO: 2665120 - RNA, 21 nt, Human
guucaaggucacuguuuccug

SEQ ID NO: 2665121 - RNA, 22 nt, Human
guucaaggucacuguuuccugg

SEQ ID NO: 2665122 - RNA, 13 nt, Human
guuaugcaucauu

SEQ ID NO: 2665123 - RNA, 15 nt, Human
guuauguaaauaauu

SEQ ID NO: 2665124 - RNA, 21 nt, Human
guuauguaaauaauucuuuuu

SEQ ID NO: 2665125 - RNA, 13 nt, Human
guuauuagauguu

SEQ ID NO: 2665126 - RNA, 17 nt, Human
guuauguuuaauaagcu

SEQ ID NO: 2665127 - RNA, 17 nt, Human
guuauguuuuucugugu

SEQ ID NO: 2665128 - RNA, 17 nt, Human
guuaucaaaauagucua

SEQ ID NO: 2665129 - RNA, 13 nt, Human
guuauaagaagaa

SEQ ID NO: 2665130 - RNA, 22 nt, Human
guucaccuugaagaaccucuca

SEQ ID NO: 2665131 - RNA, 14 nt, Human
guucaucauccaga

SEQ ID NO: 2665132 - RNA, 21 nt, Human
guucaucauccagauguggcu

SEQ ID NO: 2665133 - RNA, 22 nt, Human
guucaucauccagauguggcua

SEQ ID NO: 2665134 - RNA, 15 nt, Human
guucagccaagguuu

SEQ ID NO: 2665135 - RNA, 12 nt, Human
guucagccaagg

SEQ ID NO: 2665136 - RNA, 14 nt, Human
guucagcaguacag

SEQ ID NO: 2665137 - RNA, 18 nt, Human
guucagcaguacagccga

SEQ ID NO: 2665138 - RNA, 16 nt, Human
guucaucgauuuucua

SEQ ID NO: 2665139 - RNA, 20 nt, Human
guuccucaaagcuuggauua

SEQ ID NO: 2665140 - RNA, 15 nt, Human
guuccucaaauuuuu

SEQ ID NO: 2665141 - RNA, 20 nt, Human
guuccucaaauuuuuugacu

SEQ ID NO: 2665142 - RNA, 22 nt, Human
guuccucccccaguuccuccca

SEQ ID NO: 2665143 - RNA, 12 nt, Human
guuccucugccu

SEQ ID NO: 2665144 - RNA, 13 nt, Human
guuccucugccug

SEQ ID NO: 2665145 - RNA, 14 nt, Human
guuccucugccugc

SEQ ID NO: 2665146 - RNA, 16 nt, Human
guuccucugccugccc

SEQ ID NO: 2665147 - RNA, 13 nt, Human
guuccucugcuca

SEQ ID NO: 2665148 - RNA, 23 nt, Human
guuccucugcucaccgcccauca

SEQ ID NO: 2665149 - RNA, 15 nt, Human
guuccucugccugcc

SEQ ID NO: 2665150 - RNA, 22 nt, Human
guuccucuuugguguacagacu

SEQ ID NO: 2665151 - RNA, 20 nt, Human
guuccuguucaguaauaaaa

SEQ ID NO: 2665152 - RNA, 13 nt, Human
guuccugucccug

SEQ ID NO: 2665153 - RNA, 17 nt, Human
guuccugucccugcgcc

SEQ ID NO: 2665154 - RNA, 16 nt, Human
guuccugucccugcgc

SEQ ID NO: 2665155 - RNA, 15 nt, Human
guuccugucccugcg

SEQ ID NO: 2665156 - RNA, 14 nt, Human
guuccugucccugc

SEQ ID NO: 2665157 - RNA, 22 nt, Human
guuccucauuagcauuuugcua

SEQ ID NO: 2665158 - RNA, 17 nt, Human
guuccagggucccucug

SEQ ID NO: 2665159 - RNA, 19 nt, Human
guuccagggucccucugug

SEQ ID NO: 2665160 - RNA, 20 nt, Human
guuccagggucccucugugu

SEQ ID NO: 2665161 - RNA, 21 nt, Human
guuccagggucccucugugua

SEQ ID NO: 2665162 - RNA, 15 nt, Human
guuccaccccaagag

SEQ ID NO: 2665163 - RNA, 21 nt, Human
guuccaccccaagagaacucg

SEQ ID NO: 2665164 - RNA, 13 nt, Human
guucauuugugua

SEQ ID NO: 2665165 - RNA, 15 nt, Human
guucauucuucagau

SEQ ID NO: 2665166 - RNA, 14 nt, Human
guguuauaugaaca

SEQ ID NO: 2665167 - RNA, 14 nt, Human
guguuaguggcacc

SEQ ID NO: 2665168 - RNA, 15 nt, Human
guguuaguggcaccg

SEQ ID NO: 2665169 - RNA, 21 nt, Human
guguuaguggcaccgccuccc

SEQ ID NO: 2665170 - RNA, 13 nt, Human
guguuaauuuaag

SEQ ID NO: 2665171 - RNA, 18 nt, Human
guguuaauuuaaguuuug

SEQ ID NO: 2665172 - RNA, 16 nt, Human
guguuaauuuaaguuu

SEQ ID NO: 2665173 - RNA, 23 nt, Human
guguuauaugaacauacaaaugc

SEQ ID NO: 2665174 - RNA, 17 nt, Human
guguuauaugaacauac

SEQ ID NO: 2665175 - RNA, 16 nt, Human
guguuuugcaagugcu

SEQ ID NO: 2665176 - RNA, 15 nt, Human
guguuuuauaaaaua

SEQ ID NO: 2665177 - RNA, 16 nt, Human
guguuuuagaugguuu

SEQ ID NO: 2665178 - RNA, 13 nt, Human
guguuuuuuaaga

SEQ ID NO: 2665179 - RNA, 14 nt, Human
guguuuuuuaagau

SEQ ID NO: 2665180 - RNA, 15 nt, Human
guguuuuuuaagaua

SEQ ID NO: 2665181 - RNA, 21 nt, Human
guguuuuuuaagauaguguaa

SEQ ID NO: 2665182 - RNA, 17 nt, Human
guguuuuuuuauuucua

SEQ ID NO: 2665183 - RNA, 19 nt, Human
guguuuuuuuauuucuacu

SEQ ID NO: 2665184 - RNA, 23 nt, Human
guguuuuuucuuuuuuuuuaagu

SEQ ID NO: 2665185 - RNA, 14 nt, Human
guuaaacauugaag

SEQ ID NO: 2665186 - RNA, 15 nt, Human
guuaaagagaaugag

SEQ ID NO: 2665187 - RNA, 21 nt, Human
guuaaagggauauuuuuuucu

SEQ ID NO: 2665188 - RNA, 15 nt, Human
guuaacaucaguuuu

SEQ ID NO: 2665189 - RNA, 17 nt, Human
guuaacugauuugcaau

SEQ ID NO: 2665190 - RNA, 14 nt, Human
guguccggucccug

SEQ ID NO: 2665191 - RNA, 18 nt, Human
gugucucacuaaagcaug

SEQ ID NO: 2665192 - RNA, 22 nt, Human
gugucuccuuaagcugcagaga

SEQ ID NO: 2665193 - RNA, 18 nt, Human
gugucuggaauuguggcu

SEQ ID NO: 2665194 - RNA, 19 nt, Human
gugucuggaauuguggcua

SEQ ID NO: 2665195 - RNA, 23 nt, Human
gugucuggaauuguggcuauccu

SEQ ID NO: 2665196 - RNA, 23 nt, Human
gugugcacauccgcgugugccug

SEQ ID NO: 2665197 - RNA, 11 nt, Human
gugugcuggga

SEQ ID NO: 2665198 - RNA, 12 nt, Human
gugugcugggag

SEQ ID NO: 2665199 - RNA, 19 nt, Human
gugugcugggagcuccacu

SEQ ID NO: 2665200 - RNA, 16 nt, Human
gugugcgcucugugga

SEQ ID NO: 2665201 - RNA, 12 nt, Human
gugugggaaagc

SEQ ID NO: 2665202 - RNA, 13 nt, Human
guguggccaggcu

SEQ ID NO: 2665203 - RNA, 15 nt, Human
guguggccuguggcu

SEQ ID NO: 2665204 - RNA, 12 nt, Human
guguggcagugg

SEQ ID NO: 2665205 - RNA, 14 nt, Human
guguggcagugguu

SEQ ID NO: 2665206 - RNA, 19 nt, Human
guguggauugccucugaaa

SEQ ID NO: 2665207 - RNA, 23 nt, Human
guguggauugccucugaaaagug

SEQ ID NO: 2665208 - RNA, 13 nt, Human
guguggagaagcg

SEQ ID NO: 2665209 - RNA, 21 nt, Human
guguggacuguggcacuugcc

SEQ ID NO: 2665210 - RNA, 21 nt, Human
guguggagaagcggcuggcag

SEQ ID NO: 2665211 - RNA, 14 nt, Human
guguguugucucuu

SEQ ID NO: 2665212 - RNA, 16 nt, Human
guguguugucucuuga

SEQ ID NO: 2665213 - RNA, 22 nt, Human
guggugccauccccagggggca

SEQ ID NO: 2665214 - RNA, 18 nt, Human
guggugauuugaaaaaua

SEQ ID NO: 2665215 - RNA, 21 nt, Human
guggugauuugaaaaauauaa

SEQ ID NO: 2665216 - RNA, 16 nt, Human
guggugccauccccag

SEQ ID NO: 2665217 - RNA, 17 nt, Human
guggugccauccccagg

SEQ ID NO: 2665218 - RNA, 13 nt, Human
guggucuguuggc

SEQ ID NO: 2665219 - RNA, 17 nt, Human
guggucuguuggcaggc

SEQ ID NO: 2665220 - RNA, 19 nt, Human
guggucuguuggcaggcug

SEQ ID NO: 2665221 - RNA, 20 nt, Human
guggucuguuggcaggcugg

SEQ ID NO: 2665222 - RNA, 21 nt, Human
guggucuguuggcaggcuggc

SEQ ID NO: 2665223 - RNA, 22 nt, Human
guggucuguuggcaggcuggcc

SEQ ID NO: 2665224 - RNA, 23 nt, Human
guggucuguuggcaggcuggcca

SEQ ID NO: 2665225 - RNA, 22 nt, Human
guggucacaacuugauggcugc

SEQ ID NO: 2665226 - RNA, 15 nt, Human
guggucacagcggag

SEQ ID NO: 2665227 - RNA, 16 nt, Human
guggucacagcggagg

SEQ ID NO: 2665228 - RNA, 18 nt, Human
guggucacagcggaggug

SEQ ID NO: 2665229 - RNA, 22 nt, Human
guggucacagcggaggugugga

SEQ ID NO: 2665230 - RNA, 12 nt, Human
gugguagaaaca

SEQ ID NO: 2665231 - RNA, 13 nt, Human
gugguagaaacaa

SEQ ID NO: 2665232 - RNA, 17 nt, Human
gugguagagugugccug

SEQ ID NO: 2665233 - RNA, 13 nt, Human
gugguagagaagc

SEQ ID NO: 2665234 - RNA, 15 nt, Human
guggucggugggacc

SEQ ID NO: 2665235 - RNA, 16 nt, Human
guggucggugggaccc

SEQ ID NO: 2665236 - RNA, 20 nt, Human
guggucucuucuuggggccc

SEQ ID NO: 2665237 - RNA, 21 nt, Human
guggucucuucuuggggccca

SEQ ID NO: 2665238 - RNA, 23 nt, Human
guggucucuucuuggggcccagu

SEQ ID NO: 2665239 - RNA, 16 nt, Human
guguacagccagacca

SEQ ID NO: 2665240 - RNA, 14 nt, Human
guguaauuugaaga

SEQ ID NO: 2665241 - RNA, 15 nt, Human
guguaauuugaagau

SEQ ID NO: 2665242 - RNA, 14 nt, Human
guguaugcacagua

SEQ ID NO: 2665243 - RNA, 14 nt, Human
guguauaauauaaa

SEQ ID NO: 2665244 - RNA, 13 nt, Human
gugucccaggcag

SEQ ID NO: 2665245 - RNA, 14 nt, Human
gugucccaggcagg

SEQ ID NO: 2665246 - RNA, 19 nt, Human
gugucccaggcagggagac

SEQ ID NO: 2665247 - RNA, 16 nt, Human
guguauguagaagcau

SEQ ID NO: 2665248 - RNA, 19 nt, Human
guguccccgcugcugugca

SEQ ID NO: 2665249 - RNA, 21 nt, Human
guguccccgcugcugugcaac

SEQ ID NO: 2665250 - RNA, 17 nt, Human
guguauauuugauuuau

SEQ ID NO: 2665251 - RNA, 14 nt, Human
guguauauuugauu

SEQ ID NO: 2665252 - RNA, 13 nt, Human
guguauauuugau

SEQ ID NO: 2665253 - RNA, 12 nt, Human
guguauauuuga

SEQ ID NO: 2665254 - RNA, 14 nt, Human
guggcuacugacau

SEQ ID NO: 2665255 - RNA, 15 nt, Human
guggcuauccugauu

SEQ ID NO: 2665256 - RNA, 14 nt, Human
guggcucacgccug

SEQ ID NO: 2665257 - RNA, 17 nt, Human
gugggcaaacaggcagu

SEQ ID NO: 2665258 - RNA, 22 nt, Human
guggcugucaaugggaccugug

SEQ ID NO: 2665259 - RNA, 20 nt, Human
guggcuggaagauccugcgg

SEQ ID NO: 2665260 - RNA, 22 nt, Human
guggcuggaaccacauugaaga

SEQ ID NO: 2665261 - RNA, 24 nt, Human
guggcuggaaccacauugaagaau

SEQ ID NO: 2665262 - RNA, 12 nt, Human
guggcuggaaga

SEQ ID NO: 2665263 - RNA, 17 nt, Human
guggcuggaagauccug

SEQ ID NO: 2665264 - RNA, 14 nt, Human
gugggccucggccc

SEQ ID NO: 2665265 - RNA, 18 nt, Human
gugggcucugugcaguca

SEQ ID NO: 2665266 - RNA, 17 nt, Human
gugggcuggacuucuac

SEQ ID NO: 2665267 - RNA, 19 nt, Human
gugggcuggacuucuaccu

SEQ ID NO: 2665268 - RNA, 13 nt, Human
guggggcagggag

SEQ ID NO: 2665269 - RNA, 14 nt, Human
guggggcagggagc

SEQ ID NO: 2665270 - RNA, 15 nt, Human
guggggcagggagcu

SEQ ID NO: 2665271 - RNA, 16 nt, Human
gugggcuacaugcugg

SEQ ID NO: 2665272 - RNA, 19 nt, Human
gugggcuacaugcuggggu

SEQ ID NO: 2665273 - RNA, 21 nt, Human
guggcuguugacgcaccugug

SEQ ID NO: 2665274 - RNA, 12 nt, Human
gugggcccaccc

SEQ ID NO: 2665275 - RNA, 22 nt, Human
gugggcccacccggugggaccc

SEQ ID NO: 2665276 - RNA, 17 nt, Human
gugggccagucugugga

SEQ ID NO: 2665277 - RNA, 18 nt, Human
gugggccagucuguggau

SEQ ID NO: 2665278 - RNA, 15 nt, Human
gugggccagucugug

SEQ ID NO: 2665279 - RNA, 16 nt, Human
gugggccagucugugg

SEQ ID NO: 2665280 - RNA, 15 nt, Human
guuuuccccaugaca

SEQ ID NO: 2665281 - RNA, 20 nt, Human
guuuuccagguuuaagcugu

SEQ ID NO: 2665282 - RNA, 13 nt, Human
guuuuguaaaaga

SEQ ID NO: 2665283 - RNA, 14 nt, Human
guuuuguaaaagaa

SEQ ID NO: 2665284 - RNA, 15 nt, Human
guuuuguaaaagaaa

SEQ ID NO: 2665285 - RNA, 13 nt, Human
guuuuguaaacau

SEQ ID NO: 2665286 - RNA, 16 nt, Human
guuuuguaaacauuua

SEQ ID NO: 2665287 - RNA, 17 nt, Human
guuuuguaaacauuuau

SEQ ID NO: 2665288 - RNA, 19 nt, Human
guuuuguacauguaacauu

SEQ ID NO: 2665289 - RNA, 17 nt, Human
guuuuguaggagacuug

SEQ ID NO: 2665290 - RNA, 23 nt, Human
guuuguuuuuuguuuuucugcuu

SEQ ID NO: 2665291 - RNA, 12 nt, Human
guuuguuuuugg

SEQ ID NO: 2665292 - RNA, 18 nt, Human
guuuuaaaacuggaccug

SEQ ID NO: 2665293 - RNA, 21 nt, Human
guuuuaaaacuggaccuguau

SEQ ID NO: 2665294 - RNA, 12 nt, Human
guuuucagaaaa

SEQ ID NO: 2665295 - RNA, 19 nt, Human
guuuucagaaaaagaaaug

SEQ ID NO: 2665296 - RNA, 18 nt, Human
guuugucgcucaugugug

SEQ ID NO: 2665297 - RNA, 20 nt, Human
guuuguguguugucucuuga

SEQ ID NO: 2665298 - RNA, 13 nt, Human
guuuggugcuucu

SEQ ID NO: 2665299 - RNA, 16 nt, Human
guuugguaaauguuuc

SEQ ID NO: 2665300 - RNA, 19 nt, Human
guuugguaaauguuucuuu

SEQ ID NO: 2665301 - RNA, 22 nt, Human
guuuccucuaguucuuuguuca

SEQ ID NO: 2665302 - RNA, 18 nt, Human
guuuccucuaguucuuug

SEQ ID NO: 2665303 - RNA, 17 nt, Human
guuuccuccaagcuauu

SEQ ID NO: 2665304 - RNA, 20 nt, Human
guuuccuccauuugagaaaa

SEQ ID NO: 2665305 - RNA, 13 nt, Human
guuuccgugcgug

SEQ ID NO: 2665306 - RNA, 17 nt, Human
guuuccgugcguggcac

SEQ ID NO: 2665307 - RNA, 19 nt, Human
guuucuuuauuuuguguaa

SEQ ID NO: 2665308 - RNA, 19 nt, Human
guuucuuuaaccuuguaua

SEQ ID NO: 2665309 - RNA, 21 nt, Human
guuucuuuaaccuuguauaaa

SEQ ID NO: 2665310 - RNA, 17 nt, Human
guuucuugcaagcaugc

SEQ ID NO: 2665311 - RNA, 22 nt, Human
guuucuuaacccuuuccagagu

SEQ ID NO: 2665312 - RNA, 18 nt, Human
guuugagaucagccuggg

SEQ ID NO: 2665313 - RNA, 14 nt, Human
guuucuuuuaaaga

SEQ ID NO: 2665314 - RNA, 11 nt, Human
guuugagaaau

SEQ ID NO: 2665315 - RNA, 17 nt, Human
guuugagaucagccugg

SEQ ID NO: 2665316 - RNA, 14 nt, Human
guuucuuuuguuug

SEQ ID NO: 2665317 - RNA, 18 nt, Human
guuucuuuuguuugguaa

SEQ ID NO: 2665318 - RNA, 16 nt, Human
guuugaaaauaguuua

SEQ ID NO: 2665319 - RNA, 13 nt, Human
guuugaaaauagu

SEQ ID NO: 2665320 - RNA, 14 nt, Human
guuugaaaacuuca

SEQ ID NO: 2665321 - RNA, 18 nt, Human
guuugaaaacuucagaag

SEQ ID NO: 2665322 - RNA, 20 nt, Human
guuugaaaacuucagaagca

SEQ ID NO: 2665323 - RNA, 21 nt, Human
guuugaaaacuucagaagcaa

SEQ ID NO: 2665324 - RNA, 16 nt, Human
guuuagaauugaaggu

SEQ ID NO: 2665325 - RNA, 19 nt, Human
guuuauaaaauauaaacaa

SEQ ID NO: 2665326 - RNA, 14 nt, Human
guuuauaaacagaa

SEQ ID NO: 2665327 - RNA, 13 nt, Human
guuuauaaaucuu

SEQ ID NO: 2665328 - RNA, 13 nt, Human
guuuauaauaaaa

SEQ ID NO: 2665329 - RNA, 14 nt, Human
guuuauaauaaaaa

SEQ ID NO: 2665330 - RNA, 15 nt, Human
guuuauaauaaaaau

SEQ ID NO: 2665331 - RNA, 13 nt, Human
guuuauaaaauau

SEQ ID NO: 2665332 - RNA, 18 nt, Human
guuuauaaaauauaaaca

SEQ ID NO: 2665333 - RNA, 15 nt, Human
guuucaguuuguugg

SEQ ID NO: 2665334 - RNA, 18 nt, Human
guuucaguuuguuggaaa

SEQ ID NO: 2665335 - RNA, 21 nt, Human
guuucaguuuguuggaaagua

SEQ ID NO: 2665336 - RNA, 14 nt, Human
guuuaucauucaag

SEQ ID NO: 2665337 - RNA, 15 nt, Human
guuuaucauucaagu

SEQ ID NO: 2665338 - RNA, 16 nt, Human
guuuaucauucaagug

SEQ ID NO: 2665339 - RNA, 17 nt, Human
guuuaucauucaagugu

SEQ ID NO: 2665340 - RNA, 20 nt, Human
guuuaucauucaaguguaaa

SEQ ID NO: 2665341 - RNA, 15 nt, Human
guuguuuauaauaaa

SEQ ID NO: 2665342 - RNA, 16 nt, Human
guuguuuauaauaaaa

SEQ ID NO: 2665343 - RNA, 18 nt, Human
guuguuuauaauaaaaau

SEQ ID NO: 2665344 - RNA, 21 nt, Human
guuguucuuggcaauaaauuu

SEQ ID NO: 2665345 - RNA, 15 nt, Human
guuguucuuucagaa

SEQ ID NO: 2665346 - RNA, 19 nt, Human
guuguucuuggcaauaaau

SEQ ID NO: 2665347 - RNA, 12 nt, Human
guuuagaacagg

SEQ ID NO: 2665348 - RNA, 14 nt, Human
guuuagaauugaag

SEQ ID NO: 2665349 - RNA, 15 nt, Human
guuuagaacagguuu

SEQ ID NO: 2665350 - RNA, 13 nt, Human
guuuaccuuucuc

SEQ ID NO: 2665351 - RNA, 21 nt, Human
guuuacauuugaugcaugucu

SEQ ID NO: 2665352 - RNA, 18 nt, Human
guugucagguuauuuauu

SEQ ID NO: 2665353 - RNA, 14 nt, Human
guuguccaacuauu

SEQ ID NO: 2665354 - RNA, 12 nt, Human
guugucagcuga

SEQ ID NO: 2665355 - RNA, 16 nt, Human
guugucuggcaaggac

SEQ ID NO: 2665356 - RNA, 14 nt, Human
guugucuggcaagg

SEQ ID NO: 2665357 - RNA, 16 nt, Human
guuguguuuuuuaaga

SEQ ID NO: 2665358 - RNA, 15 nt, Human
uaaaacaucauuccu

SEQ ID NO: 2665359 - RNA, 20 nt, Human
uaaaacaucauuccuuuuua

SEQ ID NO: 2665360 - RNA, 17 nt, Human
uaaaacaucauuccuuu

SEQ ID NO: 2665361 - RNA, 16 nt, Human
uaaaacaucauuccuu

SEQ ID NO: 2665362 - RNA, 13 nt, Human
uaaaacauagcaa

SEQ ID NO: 2665363 - RNA, 14 nt, Human
uaaaacauagcaaa

SEQ ID NO: 2665364 - RNA, 15 nt, Human
uaaaacauagcaaau

SEQ ID NO: 2665365 - RNA, 11 nt, Human
uaaaaccaaag

SEQ ID NO: 2665366 - RNA, 13 nt, Human
uaaaaccaaagag

SEQ ID NO: 2665367 - RNA, 21 nt, Human
uaaaaggaaagaaaacaucuu

SEQ ID NO: 2665368 - RNA, 15 nt, Human
uaaaaggaaagaaaa

SEQ ID NO: 2665369 - RNA, 14 nt, Human
uaaaaggauggcaa

SEQ ID NO: 2665370 - RNA, 21 nt, Human
uaaaacacaccuaagagaaaa

SEQ ID NO: 2665371 - RNA, 13 nt, Human
uaaaacagaaaaa

SEQ ID NO: 2665372 - RNA, 17 nt, Human
uaaaacagaguaaucuu

SEQ ID NO: 2665373 - RNA, 19 nt, Human
uaaaacagaguaaucuugu

SEQ ID NO: 2665374 - RNA, 14 nt, Human
uaaaacaaaauuug

SEQ ID NO: 2665375 - RNA, 15 nt, Human
uaaaacaaaauuuga

SEQ ID NO: 2665376 - RNA, 17 nt, Human
uaaaacaaaauuugacu

SEQ ID NO: 2665377 - RNA, 21 nt, Human
uaaaacaaaauuugacuaauu

SEQ ID NO: 2665378 - RNA, 12 nt, Human
uaaaaauuguua

SEQ ID NO: 2665379 - RNA, 14 nt, Human
uaaaaagcaaaaau

SEQ ID NO: 2665380 - RNA, 17 nt, Human
guuuuuacaagauguau

SEQ ID NO: 2665381 - RNA, 17 nt, Human
uaaaguguguuucuaug

SEQ ID NO: 2665382 - RNA, 20 nt, Human
uaaagcuuguugacucagcu

SEQ ID NO: 2665383 - RNA, 20 nt, Human
uaaaggaagcacucuguaua

SEQ ID NO: 2665384 - RNA, 10 nt, Human
uaaagaaaag

SEQ ID NO: 2665385 - RNA, 13 nt, Human
uaaagaaaagaug

SEQ ID NO: 2665386 - RNA, 15 nt, Human
uaaagaaaagaugaa

SEQ ID NO: 2665387 - RNA, 16 nt, Human
uaaagaaaagaugaaa

SEQ ID NO: 2665388 - RNA, 13 nt, Human
uaaagcaauagaa

SEQ ID NO: 2665389 - RNA, 14 nt, Human
uaaagcaauagaaa

SEQ ID NO: 2665390 - RNA, 15 nt, Human
uaaagcaauagaaac

SEQ ID NO: 2665391 - RNA, 22 nt, Human
uaaagcacagucugaugacaca

SEQ ID NO: 2665392 - RNA, 23 nt, Human
uaaacauuuauuuuuuuuaaaga

SEQ ID NO: 2665393 - RNA, 18 nt, Human
uaaacauugaaguaauga

SEQ ID NO: 2665394 - RNA, 17 nt, Human
uaaacugucgugucaua

SEQ ID NO: 2665395 - RNA, 22 nt, Human
uaaacuugguuuuuaaaaaacu

SEQ ID NO: 2665396 - RNA, 18 nt, Human
uaaacuucauauguaauc

SEQ ID NO: 2665397 - RNA, 22 nt, Human
uaaacuucugcaacaagcaugc

SEQ ID NO: 2665398 - RNA, 23 nt, Human
uaaacuucugcaacaagcaugca

SEQ ID NO: 2665399 - RNA, 14 nt, Human
uaaagaaaaaaaua

SEQ ID NO: 2665400 - RNA, 15 nt, Human
uaaagaaaaaaauac

SEQ ID NO: 2665401 - RNA, 20 nt, Human
uaaagaaaaaaaugucaaaa

SEQ ID NO: 2665402 - RNA, 17 nt, Human
uaaagaaaaaaauguca

SEQ ID NO: 2665403 - RNA, 16 nt, Human
uaaagaaaaaaauguc

SEQ ID NO: 2665404 - RNA, 14 nt, Human
uaaagaaaaaaaug

SEQ ID NO: 2665405 - RNA, 20 nt, Human
uaaagaaaaauaucuuggcc

SEQ ID NO: 2665406 - RNA, 22 nt, Human
uaaagaaaaaaaugucaaaagu

SEQ ID NO: 2665407 - RNA, 12 nt, Human
uaaaaucaugaa

SEQ ID NO: 2665408 - RNA, 18 nt, Human
uaaaaucaugaaacuugu

SEQ ID NO: 2665409 - RNA, 22 nt, Human
uaaacaugaaaacacuugaaau

SEQ ID NO: 2665410 - RNA, 14 nt, Human
uaaacacucaccuu

SEQ ID NO: 2665411 - RNA, 16 nt, Human
uaaacacucaccuucu

SEQ ID NO: 2665412 - RNA, 17 nt, Human
uaaacacucaccuucua

SEQ ID NO: 2665413 - RNA, 15 nt, Human
uaaaagguaaugugu

SEQ ID NO: 2665414 - RNA, 16 nt, Human
uaauggcaugucagac

SEQ ID NO: 2665415 - RNA, 19 nt, Human
uaauggaaguguauuuauu

SEQ ID NO: 2665416 - RNA, 20 nt, Human
uaauggaaguguauuuauuu

SEQ ID NO: 2665417 - RNA, 23 nt, Human
uaauggaaguguauuuauuuuac

SEQ ID NO: 2665418 - RNA, 15 nt, Human
uaauggauuucagaa

SEQ ID NO: 2665419 - RNA, 16 nt, Human
uaaugcuauuugaaca

SEQ ID NO: 2665420 - RNA, 17 nt, Human
uaaugcuauuugaacaa

SEQ ID NO: 2665421 - RNA, 19 nt, Human
uaauccccuaaaauaacag

SEQ ID NO: 2665422 - RNA, 14 nt, Human
uaaugcuacaauuu

SEQ ID NO: 2665423 - RNA, 15 nt, Human
uaaugcuacaauuuu

SEQ ID NO: 2665424 - RNA, 17 nt, Human
uaauuaggcaaggcuau

SEQ ID NO: 2665425 - RNA, 13 nt, Human
uaauguuuucaaa

SEQ ID NO: 2665426 - RNA, 14 nt, Human
uaauguuuucaaaa

SEQ ID NO: 2665427 - RNA, 18 nt, Human
uaauuaaccuuacuaauu

SEQ ID NO: 2665428 - RNA, 19 nt, Human
uaauuaaccuuacuaauua

SEQ ID NO: 2665429 - RNA, 16 nt, Human
uaauuaacugaaacau

SEQ ID NO: 2665430 - RNA, 14 nt, Human
uaauaaucaagagc

SEQ ID NO: 2665431 - RNA, 12 nt, Human
uaauaaucaaga

SEQ ID NO: 2665432 - RNA, 12 nt, Human
uaauaaucuugu

SEQ ID NO: 2665433 - RNA, 15 nt, Human
uaauaaucuuguuuc

SEQ ID NO: 2665434 - RNA, 18 nt, Human
uaauaaucuuguuucuga

SEQ ID NO: 2665435 - RNA, 20 nt, Human
uaauaaucuuguuucugaaa

SEQ ID NO: 2665436 - RNA, 22 nt, Human
uaauaaucaagagccuuaaaac

SEQ ID NO: 2665437 - RNA, 20 nt, Human
uaauaaucaagagccuuaaa

SEQ ID NO: 2665438 - RNA, 19 nt, Human
uaauaaucaagagccuuaa

SEQ ID NO: 2665439 - RNA, 15 nt, Human
uaauaauguuuaaua

SEQ ID NO: 2665440 - RNA, 16 nt, Human
uaauaauggcaucaau

SEQ ID NO: 2665441 - RNA, 14 nt, Human
uaagucuuucaugg

SEQ ID NO: 2665442 - RNA, 21 nt, Human
uaaucccugcuuuuuguguuu

SEQ ID NO: 2665443 - RNA, 14 nt, Human
uaaucccugcuuuu

SEQ ID NO: 2665444 - RNA, 17 nt, Human
uaaucccugcuuuuugu

SEQ ID NO: 2665445 - RNA, 13 nt, Human
uaaucccugcuuu

SEQ ID NO: 2665446 - RNA, 20 nt, Human
uaauauuaaggaagacaaug

SEQ ID NO: 2665447 - RNA, 16 nt, Human
uaaucuacugcauuua

SEQ ID NO: 2665448 - RNA, 14 nt, Human
uaaucuacugcauu

SEQ ID NO: 2665449 - RNA, 17 nt, Human
uaaucuagauaucgacu

SEQ ID NO: 2665450 - RNA, 22 nt, Human
uaaucuagauaucgacuuguuu

SEQ ID NO: 2665451 - RNA, 12 nt, Human
uaaguccagugu

SEQ ID NO: 2665452 - RNA, 14 nt, Human
uaagucauguaugu

SEQ ID NO: 2665453 - RNA, 17 nt, Human
uaagucauguauguuuc

SEQ ID NO: 2665454 - RNA, 18 nt, Human
uaagucauguauguuucu

SEQ ID NO: 2665455 - RNA, 18 nt, Human
uaagugauuuuuuugucc

SEQ ID NO: 2665456 - RNA, 19 nt, Human
uaagugaggaaaucaaagu

SEQ ID NO: 2665457 - RNA, 21 nt, Human
uaagugaggaaaucaaagugc

SEQ ID NO: 2665458 - RNA, 14 nt, Human
uaauaaauauauac

SEQ ID NO: 2665459 - RNA, 19 nt, Human
uaauaagcuacuagcaaaa

SEQ ID NO: 2665460 - RNA, 12 nt, Human
uaauaagcuagu

SEQ ID NO: 2665461 - RNA, 15 nt, Human
uaauaagcacuguaa

SEQ ID NO: 2665462 - RNA, 16 nt, Human
uaauaagcacuguaaa

SEQ ID NO: 2665463 - RNA, 21 nt, Human
uaauaagcuaguugaauacuu

SEQ ID NO: 2665464 - RNA, 20 nt, Human
uaauaagcuaguugaauacu

SEQ ID NO: 2665465 - RNA, 17 nt, Human
uaauaagcuaguugaau

SEQ ID NO: 2665466 - RNA, 16 nt, Human
uaauaagcuaguugaa

SEQ ID NO: 2665467 - RNA, 23 nt, Human
uaauaagcuaguugaauacuuga

SEQ ID NO: 2665468 - RNA, 13 nt, Human
uaauaacugugua

SEQ ID NO: 2665469 - RNA, 17 nt, Human
uaauaacuguguacugu

SEQ ID NO: 2665470 - RNA, 13 nt, Human
uaagguccuaagg

SEQ ID NO: 2665471 - RNA, 15 nt, Human
uaaggggaagaauga

SEQ ID NO: 2665472 - RNA, 16 nt, Human
uaaggggaagaaugaa

SEQ ID NO: 2665473 - RNA, 20 nt, Human
uaaggggaagaaugaaagcu

SEQ ID NO: 2665474 - RNA, 19 nt, Human
uaaggggaggaaccagagu

SEQ ID NO: 2665475 - RNA, 12 nt, Human
uaagguguuuga

SEQ ID NO: 2665476 - RNA, 18 nt, Human
uaaggucuuucaguacuu

SEQ ID NO: 2665477 - RNA, 21 nt, Human
uaaggucuuucaguacuuuuu

SEQ ID NO: 2665478 - RNA, 21 nt, Human
uaagguguuugaaaauaguuu

SEQ ID NO: 2665479 - RNA, 20 nt, Human
uaagguguuugaaaauaguu

SEQ ID NO: 2665480 - RNA, 18 nt, Human
uaagguguuugaaaauag

SEQ ID NO: 2665481 - RNA, 17 nt, Human
uaagguguuugaaaaua

SEQ ID NO: 2665482 - RNA, 16 nt, Human
uaagguguuugaaaau

SEQ ID NO: 2665483 - RNA, 15 nt, Human
uaagguguuugaaaa

SEQ ID NO: 2665484 - RNA, 16 nt, Human
uaagcccuaagguccu

SEQ ID NO: 2665485 - RNA, 15 nt, Human
uaagcuacuagcaaa

SEQ ID NO: 2665486 - RNA, 18 nt, Human
uaagcuacuagcaaaaua

SEQ ID NO: 2665487 - RNA, 22 nt, Human
uaagcguauggcuuuauuuuuu

SEQ ID NO: 2665488 - RNA, 16 nt, Human
uaagcguauggcuuua

SEQ ID NO: 2665489 - RNA, 15 nt, Human
uaagcguauggcuuu

SEQ ID NO: 2665490 - RNA, 23 nt, Human
uaagggaacaaguugagcuauga

SEQ ID NO: 2665491 - RNA, 17 nt, Human
uaagggaacaaguugag

SEQ ID NO: 2665492 - RNA, 11 nt, Human
uaagggaaaaa

SEQ ID NO: 2665493 - RNA, 12 nt, Human
uaagggaaaaau

SEQ ID NO: 2665494 - RNA, 17 nt, Human
uaagggaaaaauauaua

SEQ ID NO: 2665495 - RNA, 17 nt, Human
uaaggauuuuucucuua

SEQ ID NO: 2665496 - RNA, 22 nt, Human
uaagcuaguugaauacuugaac

SEQ ID NO: 2665497 - RNA, 21 nt, Human
uaagcuaguugaauacuugaa

SEQ ID NO: 2665498 - RNA, 20 nt, Human
uaagcuaguugaauacuuga

SEQ ID NO: 2665499 - RNA, 19 nt, Human
uaagcuaguugaauacuug

SEQ ID NO: 2665500 - RNA, 18 nt, Human
uaagcuaguugaauacuu

SEQ ID NO: 2665501 - RNA, 16 nt, Human
uaagcuaguugaauac

SEQ ID NO: 2665502 - RNA, 15 nt, Human
uaaauucaacuuugu

SEQ ID NO: 2665503 - RNA, 16 nt, Human
uaaauucaacuuugua

SEQ ID NO: 2665504 - RNA, 18 nt, Human
uaaauucaacuuuguaaa

SEQ ID NO: 2665505 - RNA, 19 nt, Human
uaaauucaacuuuguaaaa

SEQ ID NO: 2665506 - RNA, 20 nt, Human
uaaauucugauuucuuuuca

SEQ ID NO: 2665507 - RNA, 16 nt, Human
uaaauucugauuucuu

SEQ ID NO: 2665508 - RNA, 15 nt, Human
uaaauucugauuucu

SEQ ID NO: 2665509 - RNA, 14 nt, Human
uaaauucugauuuc

SEQ ID NO: 2665510 - RNA, 13 nt, Human
uaaauucugauuu

SEQ ID NO: 2665511 - RNA, 12 nt, Human
uaaauucugauu

SEQ ID NO: 2665512 - RNA, 11 nt, Human
uaaauucugau

SEQ ID NO: 2665513 - RNA, 13 nt, Human
uaaauuuaguguu

SEQ ID NO: 2665514 - RNA, 14 nt, Human
uaaauuuaguguuu

SEQ ID NO: 2665515 - RNA, 21 nt, Human
uaaauuucacuacuagauuga

SEQ ID NO: 2665516 - RNA, 15 nt, Human
uaaauuucuuaugug

SEQ ID NO: 2665517 - RNA, 16 nt, Human
uaaauuucuuauguga

SEQ ID NO: 2665518 - RNA, 18 nt, Human
uaaauuucuuaugugaca

SEQ ID NO: 2665519 - RNA, 22 nt, Human
uaaauuucuuaugugacauuaa

SEQ ID NO: 2665520 - RNA, 14 nt, Human
uaacacuccucugc

SEQ ID NO: 2665521 - RNA, 12 nt, Human
uaacacauuuuu

SEQ ID NO: 2665522 - RNA, 19 nt, Human
uaacacauuuuuuugcaug

SEQ ID NO: 2665523 - RNA, 20 nt, Human
uaacacauuuuuuugcaugc

SEQ ID NO: 2665524 - RNA, 21 nt, Human
uaacacauuuuuuugcaugca

SEQ ID NO: 2665525 - RNA, 18 nt, Human
uaacaccaugauuaacca

SEQ ID NO: 2665526 - RNA, 23 nt, Human
uaaauggccucauguggcuggaa

SEQ ID NO: 2665527 - RNA, 18 nt, Human
uaaaugguaauaagcacu

SEQ ID NO: 2665528 - RNA, 19 nt, Human
uaaaugguaauaagcacug

SEQ ID NO: 2665529 - RNA, 15 nt, Human
uaaauguauaaauau

SEQ ID NO: 2665530 - RNA, 19 nt, Human
uaaauguauaaauauacag

SEQ ID NO: 2665531 - RNA, 22 nt, Human
uaaauguauaaauauacaguau

SEQ ID NO: 2665532 - RNA, 12 nt, Human
uaaauguaaacu

SEQ ID NO: 2665533 - RNA, 14 nt, Human
uaaauguaaacuca

SEQ ID NO: 2665534 - RNA, 15 nt, Human
uaaauguaaacucag

SEQ ID NO: 2665535 - RNA, 16 nt, Human
uaaauguaaacucagc

SEQ ID NO: 2665536 - RNA, 20 nt, Human
uaaaugucuaguuguaacac

SEQ ID NO: 2665537 - RNA, 12 nt, Human
uaaauggccuca

SEQ ID NO: 2665538 - RNA, 16 nt, Human
uaaauggccucaugug

SEQ ID NO: 2665539 - RNA, 22 nt, Human
uaaauggccucauguggcugga

SEQ ID NO: 2665540 - RNA, 15 nt, Human
uaaaugcccucuucu

SEQ ID NO: 2665541 - RNA, 22 nt, Human
uaaaugcccucuucucgugccu

SEQ ID NO: 2665542 - RNA, 19 nt, Human
uaacuggaacaaauuauuu

SEQ ID NO: 2665543 - RNA, 15 nt, Human
uaacuguguacuguu

SEQ ID NO: 2665544 - RNA, 20 nt, Human
uaacuuuuguaaauacacau

SEQ ID NO: 2665545 - RNA, 15 nt, Human
uaagaggcagcguga

SEQ ID NO: 2665546 - RNA, 21 nt, Human
uaagaaaauauauucuuucaa

SEQ ID NO: 2665547 - RNA, 23 nt, Human
uaagaaaauauauucuuucaaag

SEQ ID NO: 2665548 - RNA, 24 nt, Human
uaagaaacuuauuucucauaucaa

SEQ ID NO: 2665549 - RNA, 16 nt, Human
uaagaaauguauaaac

SEQ ID NO: 2665550 - RNA, 18 nt, Human
uaagaaauguauaaacuu

SEQ ID NO: 2665551 - RNA, 16 nt, Human
uaaccacuucagcuga

SEQ ID NO: 2665552 - RNA, 17 nt, Human
uaaauucugagccugau

SEQ ID NO: 2665553 - RNA, 22 nt, Human
uaacacuucuuacgcaaugcuu

SEQ ID NO: 2665554 - RNA, 19 nt, Human
uaacccccuuaaauuuaau

SEQ ID NO: 2665555 - RNA, 19 nt, Human
uaacucccagugaugcugu

SEQ ID NO: 2665556 - RNA, 15 nt, Human
uaacuccccacccca

SEQ ID NO: 2665557 - RNA, 16 nt, Human
uaacucaccagcccca

SEQ ID NO: 2665558 - RNA, 21 nt, Human
uaacucaccagccccacugcc

SEQ ID NO: 2665559 - RNA, 16 nt, Human
uaacccauaauugaag

SEQ ID NO: 2665560 - RNA, 15 nt, Human
uaacucaaauacaca

SEQ ID NO: 2665561 - RNA, 18 nt, Human
uaacucaaauacacauuu

SEQ ID NO: 2665562 - RNA, 20 nt, Human
uaacucaaauacacauuugc

SEQ ID NO: 2665563 - RNA, 21 nt, Human
uaacucaaauacacauuugcu

SEQ ID NO: 2665564 - RNA, 15 nt, Human
uaacucaccagcccc

SEQ ID NO: 2665565 - RNA, 19 nt, Human
uauaugaacauacaaaugc

SEQ ID NO: 2665566 - RNA, 13 nt, Human
uauauuugauuua

SEQ ID NO: 2665567 - RNA, 18 nt, Human
uauaugcuuuauuaaugu

SEQ ID NO: 2665568 - RNA, 17 nt, Human
uauauggaagaggaaaa

SEQ ID NO: 2665569 - RNA, 15 nt, Human
uauauuuguaaagcu

SEQ ID NO: 2665570 - RNA, 17 nt, Human
uauauuuguaaagcuau

SEQ ID NO: 2665571 - RNA, 22 nt, Human
uauauuugauuuauuaacuuaa

SEQ ID NO: 2665572 - RNA, 20 nt, Human
uauauuugauuuauuaacuu

SEQ ID NO: 2665573 - RNA, 17 nt, Human
uauauuugauuuauuaa

SEQ ID NO: 2665574 - RNA, 16 nt, Human
uauauuugauuuauua

SEQ ID NO: 2665575 - RNA, 13 nt, Human
uauauuuugucau

SEQ ID NO: 2665576 - RNA, 14 nt, Human
uauauuuugucaua

SEQ ID NO: 2665577 - RNA, 16 nt, Human
uauauuuugugugaaa

SEQ ID NO: 2665578 - RNA, 18 nt, Human
uauauuuugugugaaauu

SEQ ID NO: 2665579 - RNA, 19 nt, Human
uauauuuugugugaaauug

SEQ ID NO: 2665580 - RNA, 22 nt, Human
uauauuuugugugaaauugcau

SEQ ID NO: 2665581 - RNA, 14 nt, Human
uauauuuucuguuu

SEQ ID NO: 2665582 - RNA, 15 nt, Human
uauauuuuauauuac

SEQ ID NO: 2665583 - RNA, 14 nt, Human
uaucaaaauagucu

SEQ ID NO: 2665584 - RNA, 9 nt, Human
uaucaguag

SEQ ID NO: 2665585 - RNA, 21 nt, Human
uaucaguaacccccuuaaauu

SEQ ID NO: 2665586 - RNA, 13 nt, Human
uaucauucaagug

SEQ ID NO: 2665587 - RNA, 14 nt, Human
uaucauucaagugu

SEQ ID NO: 2665588 - RNA, 15 nt, Human
uaucauauauuuaau

SEQ ID NO: 2665589 - RNA, 19 nt, Human
uaucauauauuuaaucuua

SEQ ID NO: 2665590 - RNA, 13 nt, Human
uaucaugcaaaau

SEQ ID NO: 2665591 - RNA, 14 nt, Human
uaucaugcaaaaua

SEQ ID NO: 2665592 - RNA, 15 nt, Human
uaucaugcaaaauau

SEQ ID NO: 2665593 - RNA, 13 nt, Human
uauaucuggccuc

SEQ ID NO: 2665594 - RNA, 19 nt, Human
uauauaaaacggugcugug

SEQ ID NO: 2665595 - RNA, 13 nt, Human
uauaucugcaaaa

SEQ ID NO: 2665596 - RNA, 14 nt, Human
uauauaacauauau

SEQ ID NO: 2665597 - RNA, 17 nt, Human
uauauaacauauaugga

SEQ ID NO: 2665598 - RNA, 18 nt, Human
uauauaacauauauggaa

SEQ ID NO: 2665599 - RNA, 15 nt, Human
uauagucaauggcuu

SEQ ID NO: 2665600 - RNA, 22 nt, Human
uauagucaauggcuuguucauc

SEQ ID NO: 2665601 - RNA, 16 nt, Human
uauagucuaagacuau

SEQ ID NO: 2665602 - RNA, 18 nt, Human
uauagucuaagacuauau

SEQ ID NO: 2665603 - RNA, 19 nt, Human
uauagucuaagacuauaua

SEQ ID NO: 2665604 - RNA, 20 nt, Human
uauagucuaagacuauauau

SEQ ID NO: 2665605 - RNA, 21 nt, Human
uauagaggcuagcuucugcuu

SEQ ID NO: 2665606 - RNA, 18 nt, Human
uauaaaguaguccuguga

SEQ ID NO: 2665607 - RNA, 16 nt, Human
uauaaaguaguccugu

SEQ ID NO: 2665608 - RNA, 22 nt, Human
uauagaaaaauaaaaaucucuu

SEQ ID NO: 2665609 - RNA, 23 nt, Human
uauagaaaaauaaaaaucucuuu

SEQ ID NO: 2665610 - RNA, 13 nt, Human
uauagaaagcuau

SEQ ID NO: 2665611 - RNA, 24 nt, Human
uauagaaagcuauauaagacaaga

SEQ ID NO: 2665612 - RNA, 19 nt, Human
uauaaaguggaaguaugua

SEQ ID NO: 2665613 - RNA, 23 nt, Human
uaguauuaucaaagggauaaaga

SEQ ID NO: 2665614 - RNA, 16 nt, Human
uaguauuuauuuaugu

SEQ ID NO: 2665615 - RNA, 18 nt, Human
uaguauuuauuuauguac

SEQ ID NO: 2665616 - RNA, 20 nt, Human
uaguucuuuaaacugucgug

SEQ ID NO: 2665617 - RNA, 15 nt, Human
uaguucuuuaaacug

SEQ ID NO: 2665618 - RNA, 12 nt, Human
uaguucuuuaaa

SEQ ID NO: 2665619 - RNA, 17 nt, Human
uaguugaauacuugaac

SEQ ID NO: 2665620 - RNA, 16 nt, Human
uaguugaauacuugaa

SEQ ID NO: 2665621 - RNA, 15 nt, Human
uaguugaauacuuga

SEQ ID NO: 2665622 - RNA, 13 nt, Human
uaguugaauacuu

SEQ ID NO: 2665623 - RNA, 16 nt, Human
uaguucuguauuugaa

SEQ ID NO: 2665624 - RNA, 19 nt, Human
uaguucuguauuugaaagu

SEQ ID NO: 2665625 - RNA, 17 nt, Human
uaguucuguauuugaaa

SEQ ID NO: 2665626 - RNA, 21 nt, Human
uaguucuguauuugaaagugc

SEQ ID NO: 2665627 - RNA, 20 nt, Human
uaguugaauacuugaaccau

SEQ ID NO: 2665628 - RNA, 19 nt, Human
uaguugaauacuugaacca

SEQ ID NO: 2665629 - RNA, 21 nt, Human
uaguugaauacuugaaccaua

SEQ ID NO: 2665630 - RNA, 18 nt, Human
uauaaacaaagauucaug

SEQ ID NO: 2665631 - RNA, 12 nt, Human
uauaaaauuaug

SEQ ID NO: 2665632 - RNA, 20 nt, Human
uauaaaauuaugagauuggu

SEQ ID NO: 2665633 - RNA, 16 nt, Human
uauaaacagaaaugga

SEQ ID NO: 2665634 - RNA, 17 nt, Human
uauaaacagaaauggaa

SEQ ID NO: 2665635 - RNA, 18 nt, Human
uauaaacagaaauggaaa

SEQ ID NO: 2665636 - RNA, 21 nt, Human
uauaaacagaaauggaaagca

SEQ ID NO: 2665637 - RNA, 12 nt, Human
uaguuucuuuau

SEQ ID NO: 2665638 - RNA, 17 nt, Human
uaguuucuuuauuuugu

SEQ ID NO: 2665639 - RNA, 22 nt, Human
uaguuucuuuauuuuguguaaa

SEQ ID NO: 2665640 - RNA, 13 nt, Human
uaguuuacagaaa

SEQ ID NO: 2665641 - RNA, 16 nt, Human
uauaaaggauaaagaa

SEQ ID NO: 2665642 - RNA, 12 nt, Human
uaggucuccagu

SEQ ID NO: 2665643 - RNA, 18 nt, Human
uaggcuuaguuugugugu

SEQ ID NO: 2665644 - RNA, 15 nt, Human
uagguucagccaagg

SEQ ID NO: 2665645 - RNA, 17 nt, Human
uaggugugggggaagca

SEQ ID NO: 2665646 - RNA, 13 nt, Human
uagguguggggga

SEQ ID NO: 2665647 - RNA, 14 nt, Human
uagguucagccaag

SEQ ID NO: 2665648 - RNA, 22 nt, Human
uagcaucucaggagauuucaug

SEQ ID NO: 2665649 - RNA, 18 nt, Human
uagcaucacuuaaaacac

SEQ ID NO: 2665650 - RNA, 17 nt, Human
uagcaucacuuaaaaca

SEQ ID NO: 2665651 - RNA, 23 nt, Human
uagcaucacuuaaaacacguuuu

SEQ ID NO: 2665652 - RNA, 18 nt, Human
uagcaucuggaagaucau

SEQ ID NO: 2665653 - RNA, 15 nt, Human
uagcaugaaauaaaa

SEQ ID NO: 2665654 - RNA, 16 nt, Human
uagcaugaaauaaaau

SEQ ID NO: 2665655 - RNA, 14 nt, Human
uagcauacuggcuu

SEQ ID NO: 2665656 - RNA, 15 nt, Human
uagcaucacuuaaaa

SEQ ID NO: 2665657 - RNA, 21 nt, Human
uagauuugccauagaguacac

SEQ ID NO: 2665658 - RNA, 14 nt, Human
uagccuggacugcu

SEQ ID NO: 2665659 - RNA, 15 nt, Human
uagcugaagaauuga

SEQ ID NO: 2665660 - RNA, 17 nt, Human
uagcugaagaauugaaa

SEQ ID NO: 2665661 - RNA, 21 nt, Human
uagcugaagaauugaaaaguu

SEQ ID NO: 2665662 - RNA, 22 nt, Human
uagcugaagaauugaaaaguuu

SEQ ID NO: 2665663 - RNA, 18 nt, Human
uagccagccccucuuccc

SEQ ID NO: 2665664 - RNA, 19 nt, Human
uagccgcccaugcacuggg

SEQ ID NO: 2665665 - RNA, 21 nt, Human
uagccgguuccugucccugcg

SEQ ID NO: 2665666 - RNA, 16 nt, Human
uagccgguuccugucc

SEQ ID NO: 2665667 - RNA, 15 nt, Human
uagcccccuggccuc

SEQ ID NO: 2665668 - RNA, 18 nt, Human
uagcccccuggccucugu

SEQ ID NO: 2665669 - RNA, 17 nt, Human
uagcccccuggccucug

SEQ ID NO: 2665670 - RNA, 16 nt, Human
uagcccccuggccucu

SEQ ID NO: 2665671 - RNA, 14 nt, Human
uagaauuaaaaaag

SEQ ID NO: 2665672 - RNA, 21 nt, Human
uagaauuaaaaaagcauacuu

SEQ ID NO: 2665673 - RNA, 15 nt, Human
uagaauuauuuuuca

SEQ ID NO: 2665674 - RNA, 18 nt, Human
uagaauuauuuuucacuc

SEQ ID NO: 2665675 - RNA, 19 nt, Human
uagaauuauuuuucacucu

SEQ ID NO: 2665676 - RNA, 22 nt, Human
uagaauuauuuuucacucuaag

SEQ ID NO: 2665677 - RNA, 15 nt, Human
uagaaucccuguguu

SEQ ID NO: 2665678 - RNA, 13 nt, Human
uagaaucccugug

SEQ ID NO: 2665679 - RNA, 20 nt, Human
uagaaucccuguguuaauuu

SEQ ID NO: 2665680 - RNA, 16 nt, Human
uagaaucccuguguua

SEQ ID NO: 2665681 - RNA, 16 nt, Human
uagaaguuuggcugcu

SEQ ID NO: 2665682 - RNA, 21 nt, Human
uagaaguuuggcugcugucau

SEQ ID NO: 2665683 - RNA, 17 nt, Human
uagaauaagaauuugca

SEQ ID NO: 2665684 - RNA, 18 nt, Human
uagaauaagaauuugcau

SEQ ID NO: 2665685 - RNA, 19 nt, Human
uagaauaagaauuugcaua

SEQ ID NO: 2665686 - RNA, 23 nt, Human
uagaauacaguuuugaguagagu

SEQ ID NO: 2665687 - RNA, 14 nt, Human
uacuuguugccuau

SEQ ID NO: 2665688 - RNA, 17 nt, Human
uacuuguugccuauaag

SEQ ID NO: 2665689 - RNA, 20 nt, Human
uagaagugagcaaaaaagag

SEQ ID NO: 2665690 - RNA, 13 nt, Human
uacuuguuuugga

SEQ ID NO: 2665691 - RNA, 17 nt, Human
uagaccuuguuacuucu

SEQ ID NO: 2665692 - RNA, 19 nt, Human
uagaccuuguuacuucuga

SEQ ID NO: 2665693 - RNA, 21 nt, Human
uagacuagcaaucucuucauu

SEQ ID NO: 2665694 - RNA, 20 nt, Human
uagacucggggugcuuccuu

SEQ ID NO: 2665695 - RNA, 21 nt, Human
uagacucggggugcuuccuug

SEQ ID NO: 2665696 - RNA, 23 nt, Human
uagaccauuuaucugggauuaug

SEQ ID NO: 2665697 - RNA, 18 nt, Human
uagaccccauacaaguuu

SEQ ID NO: 2665698 - RNA, 18 nt, Human
uagaauugaagguuuuug

SEQ ID NO: 2665699 - RNA, 17 nt, Human
uagaauugaagguuuuu

SEQ ID NO: 2665700 - RNA, 16 nt, Human
uagaauugaagguuuu

SEQ ID NO: 2665701 - RNA, 16 nt, Human
uagagaagcaaguaaa

SEQ ID NO: 2665702 - RNA, 13 nt, Human
uagagaagcaagu

SEQ ID NO: 2665703 - RNA, 12 nt, Human
uagacuugaaaa

SEQ ID NO: 2665704 - RNA, 10 nt, Human
uagacuugaa

SEQ ID NO: 2665705 - RNA, 17 nt, Human
uagagguccucuggagc

SEQ ID NO: 2665706 - RNA, 18 nt, Human
uagagguccucuggagcc

SEQ ID NO: 2665707 - RNA, 19 nt, Human
uagagguccucuggagccc

SEQ ID NO: 2665708 - RNA, 12 nt, Human
uagagugggagc

SEQ ID NO: 2665709 - RNA, 21 nt, Human
uagagucugagggcuuguagu

SEQ ID NO: 2665710 - RNA, 15 nt, Human
uagagucugagggcu

SEQ ID NO: 2665711 - RNA, 17 nt, Human
uagaguguagacugugg

SEQ ID NO: 2665712 - RNA, 20 nt, Human
uagaguguaguuuacagaaa

SEQ ID NO: 2665713 - RNA, 20 nt, Human
uagagguccucuggagcccu

SEQ ID NO: 2665714 - RNA, 22 nt, Human
uaauuaggcaaggcuaugugau

SEQ ID NO: 2665715 - RNA, 21 nt, Human
uaauuaggcaaggcuauguga

SEQ ID NO: 2665716 - RNA, 19 nt, Human
uaauuuuuaaugaugacaa

SEQ ID NO: 2665717 - RNA, 16 nt, Human
uacaaacauuuaagcu

SEQ ID NO: 2665718 - RNA, 13 nt, Human
uacaaaccuacca

SEQ ID NO: 2665719 - RNA, 17 nt, Human
uacaaaguuaaaauugu

SEQ ID NO: 2665720 - RNA, 18 nt, Human
uacaaaguuaaaauuguu

SEQ ID NO: 2665721 - RNA, 18 nt, Human
uacaaaugcaucuuugau

SEQ ID NO: 2665722 - RNA, 17 nt, Human
uacaaaugcaucuuuga

SEQ ID NO: 2665723 - RNA, 16 nt, Human
uacaaaugcaucuuug

SEQ ID NO: 2665724 - RNA, 13 nt, Human
uacacauuugcua

SEQ ID NO: 2665725 - RNA, 17 nt, Human
uacacauuugcuacugu

SEQ ID NO: 2665726 - RNA, 21 nt, Human
uacacauuugcuacuguugua

SEQ ID NO: 2665727 - RNA, 23 nt, Human
uacacauagcauguaaugguauc

SEQ ID NO: 2665728 - RNA, 18 nt, Human
uacacauauuugaagggu

SEQ ID NO: 2665729 - RNA, 20 nt, Human
uacacauauuugaagggucu

SEQ ID NO: 2665730 - RNA, 16 nt, Human
uacaaauuuguuauuu

SEQ ID NO: 2665731 - RNA, 21 nt, Human
uacaaaugcaucuuugaugug

SEQ ID NO: 2665732 - RNA, 19 nt, Human
uacaaaugcaucuuugaug

SEQ ID NO: 2665733 - RNA, 18 nt, Human
uacaacuuaaauaauaaa

SEQ ID NO: 2665734 - RNA, 15 nt, Human
uacaacggaggccug

SEQ ID NO: 2665735 - RNA, 13 nt, Human
uacaauuuuaaga

SEQ ID NO: 2665736 - RNA, 12 nt, Human
uacaauuuuauc

SEQ ID NO: 2665737 - RNA, 18 nt, Human
uacaauuuuaucuguuuc

SEQ ID NO: 2665738 - RNA, 15 nt, Human
uacaguuuucagaaa

SEQ ID NO: 2665739 - RNA, 18 nt, Human
uacaguuuugaguagagu

SEQ ID NO: 2665740 - RNA, 13 nt, Human
uacauaaaagaaa

SEQ ID NO: 2665741 - RNA, 17 nt, Human
uacauaaaagaaauaaa

SEQ ID NO: 2665742 - RNA, 20 nt, Human
uacaucuuuucaacaaguaa

SEQ ID NO: 2665743 - RNA, 17 nt, Human
uacaugccacaucaaac

SEQ ID NO: 2665744 - RNA, 14 nt, Human
uacaugcauauaau

SEQ ID NO: 2665745 - RNA, 20 nt, Human
uacaugcauauaaugaauaa

SEQ ID NO: 2665746 - RNA, 14 nt, Human
uacaugcugggguc

SEQ ID NO: 2665747 - RNA, 19 nt, Human
uacaguugaaaaacagcug

SEQ ID NO: 2665748 - RNA, 17 nt, Human
uacaguugaaaaacagc

SEQ ID NO: 2665749 - RNA, 17 nt, Human
uacaguugaaauaacug

SEQ ID NO: 2665750 - RNA, 19 nt, Human
uacaguugaaauaacugga

SEQ ID NO: 2665751 - RNA, 20 nt, Human
uacaguugaaaaacagcuga

SEQ ID NO: 2665752 - RNA, 16 nt, Human
uacagcucauuaaacu

SEQ ID NO: 2665753 - RNA, 18 nt, Human
uacagcucauuaaacuuu

SEQ ID NO: 2665754 - RNA, 21 nt, Human
uacagcucauuaaacuuuuuu

SEQ ID NO: 2665755 - RNA, 16 nt, Human
uacacugccugccuua

SEQ ID NO: 2665756 - RNA, 16 nt, Human
uacugcacuccagccu

SEQ ID NO: 2665757 - RNA, 17 nt, Human
uacugcacuccagccug

SEQ ID NO: 2665758 - RNA, 18 nt, Human
uacugcacuccagccugg

SEQ ID NO: 2665759 - RNA, 19 nt, Human
uacugcacuccagccuggg

SEQ ID NO: 2665760 - RNA, 20 nt, Human
uacugcacuccagccugggg

SEQ ID NO: 2665761 - RNA, 18 nt, Human
uacugcauuuagggagua

SEQ ID NO: 2665762 - RNA, 15 nt, Human
uacugcauuuaggga

SEQ ID NO: 2665763 - RNA, 15 nt, Human
uacugccugaauaaa

SEQ ID NO: 2665764 - RNA, 20 nt, Human
uacugccugaauaaagagcc

SEQ ID NO: 2665765 - RNA, 12 nt, Human
uacugccuugaa

SEQ ID NO: 2665766 - RNA, 13 nt, Human
uacugccuugaaa

SEQ ID NO: 2665767 - RNA, 13 nt, Human
uacucccugcaga

SEQ ID NO: 2665768 - RNA, 16 nt, Human
uacucccugcagaugc

SEQ ID NO: 2665769 - RNA, 18 nt, Human
uacucccugcagaugcca

SEQ ID NO: 2665770 - RNA, 19 nt, Human
uacucccugcagaugccac

SEQ ID NO: 2665771 - RNA, 18 nt, Human
uacugcuugaauaaacac

SEQ ID NO: 2665772 - RNA, 21 nt, Human
uacuggaacccuuuuaaaguu

SEQ ID NO: 2665773 - RNA, 21 nt, Human
uacugucaaaugaugugcaaa

SEQ ID NO: 2665774 - RNA, 12 nt, Human
uacugcgacuuu

SEQ ID NO: 2665775 - RNA, 16 nt, Human
uacugcgacuuucugc

SEQ ID NO: 2665776 - RNA, 17 nt, Human
uacugcgacuuucugcc

SEQ ID NO: 2665777 - RNA, 18 nt, Human
uacugcgacuuucugccu

SEQ ID NO: 2665778 - RNA, 19 nt, Human
uacugcgacuuucugccug

SEQ ID NO: 2665779 - RNA, 20 nt, Human
uacugcgacuuucugccugg

SEQ ID NO: 2665780 - RNA, 21 nt, Human
uacugcgacuuucugccugga

SEQ ID NO: 2665781 - RNA, 22 nt, Human
uacugcgacuuucugccuggag

SEQ ID NO: 2665782 - RNA, 18 nt, Human
uacuguguuuuauaaaau

SEQ ID NO: 2665783 - RNA, 13 nt, Human
uacuguuacuggg

SEQ ID NO: 2665784 - RNA, 17 nt, Human
uacuguuacugggcccu

SEQ ID NO: 2665785 - RNA, 18 nt, Human
uacuguuacugggcccug

SEQ ID NO: 2665786 - RNA, 17 nt, Human
uacugucuauuaauauu

SEQ ID NO: 2665787 - RNA, 18 nt, Human
uacugucuauuaauauuc

SEQ ID NO: 2665788 - RNA, 19 nt, Human
uacugucuauuaauauuca

SEQ ID NO: 2665789 - RNA, 21 nt, Human
uacugucuucaguaagccgug

SEQ ID NO: 2665790 - RNA, 16 nt, Human
uacuugaaccauaaaa

SEQ ID NO: 2665791 - RNA, 12 nt, Human
uacuugaaccau

SEQ ID NO: 2665792 - RNA, 21 nt, Human
uacuugaaccauaaaaugucc

SEQ ID NO: 2665793 - RNA, 20 nt, Human
uacuugaaccauaaaauguc

SEQ ID NO: 2665794 - RNA, 19 nt, Human
uacuugaaccauaaaaugu

SEQ ID NO: 2665795 - RNA, 17 nt, Human
uacuugaaccauaaaau

SEQ ID NO: 2665796 - RNA, 14 nt, Human
uacuuaaaugguaa

SEQ ID NO: 2665797 - RNA, 21 nt, Human
uacuuaaaugguaauaagcac

SEQ ID NO: 2665798 - RNA, 23 nt, Human
uacuuaaaugguaauaagcacug

SEQ ID NO: 2665799 - RNA, 24 nt, Human
uacuuaaaugguaauaagcacugu

SEQ ID NO: 2665800 - RNA, 19 nt, Human
uacuguuuuaucuggcccc

SEQ ID NO: 2665801 - RNA, 23 nt, Human
uacuguucggaagggguuccuca

SEQ ID NO: 2665802 - RNA, 15 nt, Human
uacuguuuauuacuu

SEQ ID NO: 2665803 - RNA, 22 nt, Human
uacuguuuauuacuuccaugaa

SEQ ID NO: 2665804 - RNA, 16 nt, Human
uacuguuaucuaucug

SEQ ID NO: 2665805 - RNA, 19 nt, Human
uacuaaacaguaagauauc

SEQ ID NO: 2665806 - RNA, 16 nt, Human
uaccuuuuuuuuuucu

SEQ ID NO: 2665807 - RNA, 18 nt, Human
uaccuuuuuuuuuucuug

SEQ ID NO: 2665808 - RNA, 20 nt, Human
uaccuuuuuuuuuucuuggu

SEQ ID NO: 2665809 - RNA, 14 nt, Human
uaccuuaucuuaca

SEQ ID NO: 2665810 - RNA, 23 nt, Human
uaccuuaucuuacaauauugauu

SEQ ID NO: 2665811 - RNA, 14 nt, Human
uaccuuuucagggc

SEQ ID NO: 2665812 - RNA, 17 nt, Human
uaccuuuucagggcugg

SEQ ID NO: 2665813 - RNA, 18 nt, Human
uaccuuuucagggcuggc

SEQ ID NO: 2665814 - RNA, 18 nt, Human
uaccucggugccuuccuc

SEQ ID NO: 2665815 - RNA, 14 nt, Human
uaccgacccagggu

SEQ ID NO: 2665816 - RNA, 15 nt, Human
uacauuuuuuaagcu

SEQ ID NO: 2665817 - RNA, 14 nt, Human
uaccuagugaaacu

SEQ ID NO: 2665818 - RNA, 15 nt, Human
uaccuagugaaacuu

SEQ ID NO: 2665819 - RNA, 16 nt, Human
uaccuagugaaacuuu

SEQ ID NO: 2665820 - RNA, 18 nt, Human
uaccuagugaaacuuuuc

SEQ ID NO: 2665821 - RNA, 19 nt, Human
uaccuagugaaacuuuucu

SEQ ID NO: 2665822 - RNA, 22 nt, Human
uaccuagugaaacuuuucuaga

SEQ ID NO: 2665823 - RNA, 17 nt, Human
uaccuagcuaauuauuu

SEQ ID NO: 2665824 - RNA, 18 nt, Human
uaccuagcuaauuauuua

SEQ ID NO: 2665825 - RNA, 15 nt, Human
uaccuccaacccugc

SEQ ID NO: 2665826 - RNA, 16 nt, Human
uaccuccaacccugcc

SEQ ID NO: 2665827 - RNA, 17 nt, Human
uaccuccaacccugccg

SEQ ID NO: 2665828 - RNA, 13 nt, Human
uaccuaacaucug

SEQ ID NO: 2665829 - RNA, 16 nt, Human
ugacaacugugacugu

SEQ ID NO: 2665830 - RNA, 15 nt, Human
ugacaacugugacug

SEQ ID NO: 2665831 - RNA, 17 nt, Human
ugacaaggcacuucaug

SEQ ID NO: 2665832 - RNA, 21 nt, Human
ugacaaggcacuucauguaaa

SEQ ID NO: 2665833 - RNA, 14 nt, Human
ugacaacugugacu

SEQ ID NO: 2665834 - RNA, 13 nt, Human
ugacaacugugac

SEQ ID NO: 2665835 - RNA, 12 nt, Human
ugacaacuguga

SEQ ID NO: 2665836 - RNA, 21 nt, Human
ugacaacguuucagcgacucc

SEQ ID NO: 2665837 - RNA, 17 nt, Human
ugacaaccgagaagguu

SEQ ID NO: 2665838 - RNA, 19 nt, Human
ugacaaccgagaagguuua

SEQ ID NO: 2665839 - RNA, 16 nt, Human
ugacacaaguggaccu

SEQ ID NO: 2665840 - RNA, 19 nt, Human
ugacacaaguggaccuuag

SEQ ID NO: 2665841 - RNA, 17 nt, Human
ugacacaaguggaccuu

SEQ ID NO: 2665842 - RNA, 16 nt, Human
ugaauuaaauuaggaa

SEQ ID NO: 2665843 - RNA, 20 nt, Human
ugacaaauaaauuaggacca

SEQ ID NO: 2665844 - RNA, 17 nt, Human
ugacaucuugaauccuu

SEQ ID NO: 2665845 - RNA, 20 nt, Human
ugacaucuugaauccuucca

SEQ ID NO: 2665846 - RNA, 14 nt, Human
ugacaucuggaauc

SEQ ID NO: 2665847 - RNA, 22 nt, Human
ugacagagcaagugagacccug

SEQ ID NO: 2665848 - RNA, 14 nt, Human
ugaaugauuugcau

SEQ ID NO: 2665849 - RNA, 23 nt, Human
ugaaugaugauccuaggcauuug

SEQ ID NO: 2665850 - RNA, 18 nt, Human
ugaauccuuccauuccac

SEQ ID NO: 2665851 - RNA, 22 nt, Human
ugaaucaauaauauauuuucug

SEQ ID NO: 2665852 - RNA, 16 nt, Human
ugaaguuuuacugucu

SEQ ID NO: 2665853 - RNA, 17 nt, Human
ugaaguuuuacugucua

SEQ ID NO: 2665854 - RNA, 22 nt, Human
ugaaguuuuuuugcugcugccu

SEQ ID NO: 2665855 - RNA, 17 nt, Human
ugaaguuuacaaucaaa

SEQ ID NO: 2665856 - RNA, 23 nt, Human
ugaaggaaaaacacaagcaaaaa

SEQ ID NO: 2665857 - RNA, 21 nt, Human
ugaaggaaaaacacaagcaaa

SEQ ID NO: 2665858 - RNA, 18 nt, Human
ugaacuuaauaacugugu

SEQ ID NO: 2665859 - RNA, 22 nt, Human
ugaacuuaauaacuguguacug

SEQ ID NO: 2665860 - RNA, 23 nt, Human
ugaacuuaauaacuguguacugu

SEQ ID NO: 2665861 - RNA, 21 nt, Human
ugaacuuauuuacacauaguu

SEQ ID NO: 2665862 - RNA, 14 nt, Human
ugagcugccagugg

SEQ ID NO: 2665863 - RNA, 20 nt, Human
ugagcugccuguaacuugag

SEQ ID NO: 2665864 - RNA, 11 nt, Human
ugagcugccuu

SEQ ID NO: 2665865 - RNA, 12 nt, Human
ugagcugccagu

SEQ ID NO: 2665866 - RNA, 16 nt, Human
ugagcugaucugcgga

SEQ ID NO: 2665867 - RNA, 18 nt, Human
ugagcuuacguaguucua

SEQ ID NO: 2665868 - RNA, 17 nt, Human
ugagcuuacguaguucu

SEQ ID NO: 2665869 - RNA, 12 nt, Human
ugaggaggggag

SEQ ID NO: 2665870 - RNA, 13 nt, Human
ugaggaggggagg

SEQ ID NO: 2665871 - RNA, 16 nt, Human
ugaggaggggagggua

SEQ ID NO: 2665872 - RNA, 22 nt, Human
ugaggaggggaggguaaauaaa

SEQ ID NO: 2665873 - RNA, 13 nt, Human
ugaggaggguggg

SEQ ID NO: 2665874 - RNA, 17 nt, Human
ugaggagggugggggag

SEQ ID NO: 2665875 - RNA, 20 nt, Human
ugaggagggugggggaggga

SEQ ID NO: 2665876 - RNA, 18 nt, Human
ugaggauauucagaugua

SEQ ID NO: 2665877 - RNA, 20 nt, Human
ugaggcaauaaaaaucauag

SEQ ID NO: 2665878 - RNA, 21 nt, Human
ugaggauuaguuuagaacagg

SEQ ID NO: 2665879 - RNA, 17 nt, Human
ugaggauuaguuuagaa

SEQ ID NO: 2665880 - RNA, 20 nt, Human
ugaggauuaguuuagaacag

SEQ ID NO: 2665881 - RNA, 19 nt, Human
ugaggauuaguuuagaaca

SEQ ID NO: 2665882 - RNA, 19 nt, Human
ugagcucaggaguuugaga

SEQ ID NO: 2665883 - RNA, 11 nt, Human
ugagcucagga

SEQ ID NO: 2665884 - RNA, 21 nt, Human
ugaggugggagguggaagaag

SEQ ID NO: 2665885 - RNA, 22 nt, Human
ugaggugggagguggaagaagg

SEQ ID NO: 2665886 - RNA, 13 nt, Human
ugaggugggaggu

SEQ ID NO: 2665887 - RNA, 18 nt, Human
ugaggugggagguggaag

SEQ ID NO: 2665888 - RNA, 15 nt, Human
ugaggcacuggcgag

SEQ ID NO: 2665889 - RNA, 14 nt, Human
ugaggcaggagaau

SEQ ID NO: 2665890 - RNA, 12 nt, Human
ugaggccugggc

SEQ ID NO: 2665891 - RNA, 13 nt, Human
ugaggccugggcc

SEQ ID NO: 2665892 - RNA, 22 nt, Human
ugaggccugggccgcugccacg

SEQ ID NO: 2665893 - RNA, 11 nt, Human
ugacuaauuag

SEQ ID NO: 2665894 - RNA, 15 nt, Human
ugacuaacucaaaua

SEQ ID NO: 2665895 - RNA, 20 nt, Human
ugacuaacucaaauacacau

SEQ ID NO: 2665896 - RNA, 21 nt, Human
ugacuaacucaaauacacauu

SEQ ID NO: 2665897 - RNA, 22 nt, Human
ugacuaacucaaauacacauuu

SEQ ID NO: 2665898 - RNA, 23 nt, Human
ugacuaacucaaauacacauuug

SEQ ID NO: 2665899 - RNA, 15 nt, Human
ugacuaagaaauucu

SEQ ID NO: 2665900 - RNA, 19 nt, Human
ugaccaugcucaucugcug

SEQ ID NO: 2665901 - RNA, 12 nt, Human
ugaccaugcuca

SEQ ID NO: 2665902 - RNA, 16 nt, Human
ugaccaugcucaucug

SEQ ID NO: 2665903 - RNA, 18 nt, Human
ugaccaugcucaucugcu

SEQ ID NO: 2665904 - RNA, 21 nt, Human
ugacucuugaguuguuuuugu

SEQ ID NO: 2665905 - RNA, 19 nt, Human
ugacucuugaguuguuuuu

SEQ ID NO: 2665906 - RNA, 14 nt, Human
ugacucuugaguug

SEQ ID NO: 2665907 - RNA, 12 nt, Human
ugacguuuacau

SEQ ID NO: 2665908 - RNA, 15 nt, Human
ugacuaauuuuacau

SEQ ID NO: 2665909 - RNA, 18 nt, Human
ugacuaauuuuacauguu

SEQ ID NO: 2665910 - RNA, 21 nt, Human
ugacuaauuuuacauguuuau

SEQ ID NO: 2665911 - RNA, 22 nt, Human
ugacuaauuuuacauguuuaua

SEQ ID NO: 2665912 - RNA, 23 nt, Human
ugacucuugaguuguuuuuguau

SEQ ID NO: 2665913 - RNA, 22 nt, Human
ugacucuugaguuguuuuugua

SEQ ID NO: 2665914 - RNA, 18 nt, Human
ugagaaacuuaaauguua

SEQ ID NO: 2665915 - RNA, 19 nt, Human
ugagaaacuuaaauguuau

SEQ ID NO: 2665916 - RNA, 23 nt, Human
ugagaaacuguuugaaaacuuca

SEQ ID NO: 2665917 - RNA, 14 nt, Human
ugagaaauccugga

SEQ ID NO: 2665918 - RNA, 20 nt, Human
ugacuuuuaaggcuaaaacu

SEQ ID NO: 2665919 - RNA, 16 nt, Human
ugacuuuuauaaagca

SEQ ID NO: 2665920 - RNA, 17 nt, Human
ugacuuuuauaaagcau

SEQ ID NO: 2665921 - RNA, 18 nt, Human
ugacuuuuauaaagcaug

SEQ ID NO: 2665922 - RNA, 22 nt, Human
ugacuuuucuguccgagcuuug

SEQ ID NO: 2665923 - RNA, 13 nt, Human
ugacuuuuuauaa

SEQ ID NO: 2665924 - RNA, 14 nt, Human
ugacuuuuuauaaa

SEQ ID NO: 2665925 - RNA, 19 nt, Human
ugacuuuuuauaaaauggc

SEQ ID NO: 2665926 - RNA, 13 nt, Human
ugagaaaacaagc

SEQ ID NO: 2665927 - RNA, 14 nt, Human
ugacuuuuuuugua

SEQ ID NO: 2665928 - RNA, 15 nt, Human
ugacuuuuuuuguau

SEQ ID NO: 2665929 - RNA, 17 nt, Human
ugacuuuuuuuguaugu

SEQ ID NO: 2665930 - RNA, 18 nt, Human
ugacuuuuuuuguaugug

SEQ ID NO: 2665931 - RNA, 19 nt, Human
ugacuuuuuuuguaugugu

SEQ ID NO: 2665932 - RNA, 14 nt, Human
ugagaaaacaagca

SEQ ID NO: 2665933 - RNA, 23 nt, Human
ugagaaaacaagcaaguucugag

SEQ ID NO: 2665934 - RNA, 20 nt, Human
ugagaaacaucucaauaaag

SEQ ID NO: 2665935 - RNA, 15 nt, Human
ugagaaaauaaagcu

SEQ ID NO: 2665936 - RNA, 16 nt, Human
ugagaaaauugaaaua

SEQ ID NO: 2665937 - RNA, 21 nt, Human
ugagaaaauugaaauaaagcu

SEQ ID NO: 2665938 - RNA, 14 nt, Human
ugagaccaaccugg

SEQ ID NO: 2665939 - RNA, 20 nt, Human
ucugagccagugcuuuaaug

SEQ ID NO: 2665940 - RNA, 14 nt, Human
ucugagcgccucca

SEQ ID NO: 2665941 - RNA, 21 nt, Human
ucugagcgccuccauccaagg

SEQ ID NO: 2665942 - RNA, 24 nt, Human
ucugagaucaaaacgguuuuacug

SEQ ID NO: 2665943 - RNA, 20 nt, Human
ucugauuugucccuaugcau

SEQ ID NO: 2665944 - RNA, 17 nt, Human
ucugauuugcugcucuu

SEQ ID NO: 2665945 - RNA, 19 nt, Human
ucugauuugcugcucuuca

SEQ ID NO: 2665946 - RNA, 20 nt, Human
ucugauuucuuuucaccauu

SEQ ID NO: 2665947 - RNA, 24 nt, Human
ucugcaaacaccaacauguuggga

SEQ ID NO: 2665948 - RNA, 15 nt, Human
ucugagccugauauu

SEQ ID NO: 2665949 - RNA, 18 nt, Human
ucugccaucuagccagcc

SEQ ID NO: 2665950 - RNA, 19 nt, Human
ucugcaguccuacucaagc

SEQ ID NO: 2665951 - RNA, 18 nt, Human
ucuggacccuuauaaaau

SEQ ID NO: 2665952 - RNA, 16 nt, Human
ucuguaaauauguuuu

SEQ ID NO: 2665953 - RNA, 12 nt, Human
ucuguaaauaug

SEQ ID NO: 2665954 - RNA, 14 nt, Human
ucuggacggcaggc

SEQ ID NO: 2665955 - RNA, 15 nt, Human
ucuggacggcaggcu

SEQ ID NO: 2665956 - RNA, 17 nt, Human
ucuggacggcaggcuca

SEQ ID NO: 2665957 - RNA, 19 nt, Human
ucuggacggcaggcucacu

SEQ ID NO: 2665958 - RNA, 23 nt, Human
ucuggacggcaggcucacugcca

SEQ ID NO: 2665959 - RNA, 21 nt, Human
ucuggacggcaggcucacugc

SEQ ID NO: 2665960 - RNA, 22 nt, Human
ucuggacggcaggcucacugcc

SEQ ID NO: 2665961 - RNA, 15 nt, Human
ucuggaauuguggcu

SEQ ID NO: 2665962 - RNA, 22 nt, Human
ucugcugcagagcaguaaggga

SEQ ID NO: 2665963 - RNA, 16 nt, Human
ucugcugcagagcagu

SEQ ID NO: 2665964 - RNA, 15 nt, Human
ucugcugcagagcag

SEQ ID NO: 2665965 - RNA, 16 nt, Human
ucuuugaauauguagu

SEQ ID NO: 2665966 - RNA, 18 nt, Human
ucuuucccauggggaggg

SEQ ID NO: 2665967 - RNA, 15 nt, Human
ucuugugucuuugga

SEQ ID NO: 2665968 - RNA, 20 nt, Human
ucuugugucuuuggaggugc

SEQ ID NO: 2665969 - RNA, 19 nt, Human
ucuugaagcccccagcccu

SEQ ID NO: 2665970 - RNA, 13 nt, Human
ucuuugcaacugu

SEQ ID NO: 2665971 - RNA, 21 nt, Human
ucuuugccagucauucagcag

SEQ ID NO: 2665972 - RNA, 12 nt, Human
ucuuugagaggg

SEQ ID NO: 2665973 - RNA, 20 nt, Human
ucuuuuuaaaaauuguuauu

SEQ ID NO: 2665974 - RNA, 12 nt, Human
ucuuuuguuugg

SEQ ID NO: 2665975 - RNA, 16 nt, Human
ucuuuuguuugguaaa

SEQ ID NO: 2665976 - RNA, 19 nt, Human
ugaaaacaguguguaaaca

SEQ ID NO: 2665977 - RNA, 20 nt, Human
ugaaaacaguguguaaacaa

SEQ ID NO: 2665978 - RNA, 14 nt, Human
ugaaaauucagugg

SEQ ID NO: 2665979 - RNA, 17 nt, Human
ugaaaauuggacagauu

SEQ ID NO: 2665980 - RNA, 23 nt, Human
ugaaaauuggacagauugccugu

SEQ ID NO: 2665981 - RNA, 13 nt, Human
ugaaaauuguauu

SEQ ID NO: 2665982 - RNA, 22 nt, Human
ugaaaauuguuuagugauauua

SEQ ID NO: 2665983 - RNA, 22 nt, Human
ugaaaauucauaguaagauuga

SEQ ID NO: 2665984 - RNA, 22 nt, Human
ugaaaagaaaaaugagccuggc

SEQ ID NO: 2665985 - RNA, 20 nt, Human
ugaaaagaaaaaugagccug

SEQ ID NO: 2665986 - RNA, 21 nt, Human
ugaaaauuacaguccaaaaua

SEQ ID NO: 2665987 - RNA, 15 nt, Human
ugaaaagaaaaauga

SEQ ID NO: 2665988 - RNA, 19 nt, Human
ugaaaagaaaaaugagccu

SEQ ID NO: 2665989 - RNA, 20 nt, Human
ugaaaacggagcugaacaau

SEQ ID NO: 2665990 - RNA, 23 nt, Human
ucuuagguuggcaaaaaggcagg

SEQ ID NO: 2665991 - RNA, 20 nt, Human
ucuuagguuggcaaaaaggc

SEQ ID NO: 2665992 - RNA, 13 nt, Human
ucugugugucagu

SEQ ID NO: 2665993 - RNA, 15 nt, Human
ucugugugucaguuu

SEQ ID NO: 2665994 - RNA, 18 nt, Human
ucugugugucaguuuuca

SEQ ID NO: 2665995 - RNA, 19 nt, Human
ucugugugucaguuuucau

SEQ ID NO: 2665996 - RNA, 13 nt, Human
ucuuagauucuua

SEQ ID NO: 2665997 - RNA, 14 nt, Human
ucuuagauucuuaa

SEQ ID NO: 2665998 - RNA, 17 nt, Human
ucuucauuauucucugc

SEQ ID NO: 2665999 - RNA, 16 nt, Human
ucuuaugaggagggga

SEQ ID NO: 2666000 - RNA, 13 nt, Human
ucuugcccauccu

SEQ ID NO: 2666001 - RNA, 14 nt, Human
ucuugcccauccug

SEQ ID NO: 2666002 - RNA, 15 nt, Human
ucuugcccauccuga

SEQ ID NO: 2666003 - RNA, 18 nt, Human
ucuugcccauccugacug

SEQ ID NO: 2666004 - RNA, 13 nt, Human
ucuuguccuagcu

SEQ ID NO: 2666005 - RNA, 20 nt, Human
ucuuguccucauucuugccu

SEQ ID NO: 2666006 - RNA, 19 nt, Human
ucuucuuggggcccagugc

SEQ ID NO: 2666007 - RNA, 20 nt, Human
ucuucuuggggcccagugca

SEQ ID NO: 2666008 - RNA, 21 nt, Human
ucuucuuggggcccagugcau

SEQ ID NO: 2666009 - RNA, 22 nt, Human
ucuuccuugaagaacugcaggc

SEQ ID NO: 2666010 - RNA, 14 nt, Human
ucuuccuuuuauca

SEQ ID NO: 2666011 - RNA, 23 nt, Human
ucuuccuugaagaacugcaggcc

SEQ ID NO: 2666012 - RNA, 15 nt, Human
ucuuccuugauguuu

SEQ ID NO: 2666013 - RNA, 18 nt, Human
ucuuccuugauguuuggg

SEQ ID NO: 2666014 - RNA, 12 nt, Human
ucaggaggcgcc

SEQ ID NO: 2666015 - RNA, 14 nt, Human
ucaggaggcgcccu

SEQ ID NO: 2666016 - RNA, 18 nt, Human
ucaggagaauuagauuuc

SEQ ID NO: 2666017 - RNA, 22 nt, Human
ucaggagaucgagaccauccug

SEQ ID NO: 2666018 - RNA, 15 nt, Human
ucagcugcucccugg

SEQ ID NO: 2666019 - RNA, 19 nt, Human
ucagcugcucccuggcauu

SEQ ID NO: 2666020 - RNA, 13 nt, Human
ucagcucggcuca

SEQ ID NO: 2666021 - RNA, 18 nt, Human
ucagcucggggagccuua

SEQ ID NO: 2666022 - RNA, 18 nt, Human
ucagcucggcucagcucg

SEQ ID NO: 2666023 - RNA, 17 nt, Human
ucagcucggggagccuu

SEQ ID NO: 2666024 - RNA, 12 nt, Human
ucagccugcaca

SEQ ID NO: 2666025 - RNA, 16 nt, Human
ucagccugcuccagcu

SEQ ID NO: 2666026 - RNA, 13 nt, Human
ucagcaguugcug

SEQ ID NO: 2666027 - RNA, 23 nt, Human
ucagcaguugcugguaaaaugaa

SEQ ID NO: 2666028 - RNA, 22 nt, Human
ucagcaguugcugguaaaauga

SEQ ID NO: 2666029 - RNA, 20 nt, Human
ucagcaguugcugguaaaau

SEQ ID NO: 2666030 - RNA, 19 nt, Human
ucagcaguugcugguaaaa

SEQ ID NO: 2666031 - RNA, 18 nt, Human
ucagcaguugcugguaaa

SEQ ID NO: 2666032 - RNA, 17 nt, Human
ucagcaguugcugguaa

SEQ ID NO: 2666033 - RNA, 16 nt, Human
ucagcaguugcuggua

SEQ ID NO: 2666034 - RNA, 14 nt, Human
ucagcaguugcugg

SEQ ID NO: 2666035 - RNA, 13 nt, Human
ucagcaugaaaau

SEQ ID NO: 2666036 - RNA, 22 nt, Human
uaucauucaaguguaaaauauu

SEQ ID NO: 2666037 - RNA, 14 nt, Human
ucagucauguguaa

SEQ ID NO: 2666038 - RNA, 15 nt, Human
ucaguguugguauau

SEQ ID NO: 2666039 - RNA, 18 nt, Human
ucagucccuuccccaugc

SEQ ID NO: 2666040 - RNA, 17 nt, Human
ucaugaaacuuguuuca

SEQ ID NO: 2666041 - RNA, 20 nt, Human
ucaugaaacuuguuucacug

SEQ ID NO: 2666042 - RNA, 12 nt, Human
ucaugaaaauac

SEQ ID NO: 2666043 - RNA, 14 nt, Human
ucaugaaaauacca

SEQ ID NO: 2666044 - RNA, 16 nt, Human
ucaugaaaauaccauu

SEQ ID NO: 2666045 - RNA, 20 nt, Human
ucaucuggaguucucaaaga

SEQ ID NO: 2666046 - RNA, 14 nt, Human
ucaucuggaguucu

SEQ ID NO: 2666047 - RNA, 19 nt, Human
ucaucugcugguccguggg

SEQ ID NO: 2666048 - RNA, 13 nt, Human
ucaucugcugguc

SEQ ID NO: 2666049 - RNA, 14 nt, Human
ucaucugcuggucc

SEQ ID NO: 2666050 - RNA, 16 nt, Human
ucaucauccagaugug

SEQ ID NO: 2666051 - RNA, 17 nt, Human
ucaucauccagaugugg

SEQ ID NO: 2666052 - RNA, 17 nt, Human
ucaguguuuuugugaau

SEQ ID NO: 2666053 - RNA, 17 nt, Human
ucaucaaagaacaaaca

SEQ ID NO: 2666054 - RNA, 17 nt, Human
ucauacucgagucugag

SEQ ID NO: 2666055 - RNA, 16 nt, Human
ucauacucgagucuga

SEQ ID NO: 2666056 - RNA, 19 nt, Human
uccauaguuuggcauuugc

SEQ ID NO: 2666057 - RNA, 20 nt, Human
uccauaguuuggcauuugca

SEQ ID NO: 2666058 - RNA, 16 nt, Human
uccauaguuuggcauu

SEQ ID NO: 2666059 - RNA, 22 nt, Human
uccauacacuuuguugcaagau

SEQ ID NO: 2666060 - RNA, 13 nt, Human
ucccaagaaugca

SEQ ID NO: 2666061 - RNA, 16 nt, Human
ucccaagaaugcaaga

SEQ ID NO: 2666062 - RNA, 20 nt, Human
ucccaagaaugcaagauuuc

SEQ ID NO: 2666063 - RNA, 15 nt, Human
ucccaaccaggcacc

SEQ ID NO: 2666064 - RNA, 15 nt, Human
uccaugcgcucaggg

SEQ ID NO: 2666065 - RNA, 16 nt, Human
uccaugcgcucagggc

SEQ ID NO: 2666066 - RNA, 15 nt, Human
ucccaggcagggaga

SEQ ID NO: 2666067 - RNA, 16 nt, Human
ucccacuucugccaga

SEQ ID NO: 2666068 - RNA, 15 nt, Human
ucccacuucugccag

SEQ ID NO: 2666069 - RNA, 16 nt, Human
ucccacuucccacccu

SEQ ID NO: 2666070 - RNA, 14 nt, Human
ucccaagauguuga

SEQ ID NO: 2666071 - RNA, 23 nt, Human
ucccaagauguugauuuuuacug

SEQ ID NO: 2666072 - RNA, 13 nt, Human
ucccaagccuccu

SEQ ID NO: 2666073 - RNA, 14 nt, Human
ucccaagccuucgg

SEQ ID NO: 2666074 - RNA, 16 nt, Human
uccacugugcuuucag

SEQ ID NO: 2666075 - RNA, 16 nt, Human
uccacacccgugagaa

SEQ ID NO: 2666076 - RNA, 22 nt, Human
uccacagcgagggcagcugcua

SEQ ID NO: 2666077 - RNA, 17 nt, Human
uccagauggucauccag

SEQ ID NO: 2666078 - RNA, 18 nt, Human
uccagauggucauccaga

SEQ ID NO: 2666079 - RNA, 21 nt, Human
uccagauggucauccagacuc

SEQ ID NO: 2666080 - RNA, 13 nt, Human
uccagauguggcu

SEQ ID NO: 2666081 - RNA, 14 nt, Human
uccagauguggcua

SEQ ID NO: 2666082 - RNA, 21 nt, Human
uccagauguggcuacugacau

SEQ ID NO: 2666083 - RNA, 19 nt, Human
uccagauguuuccagacuu

SEQ ID NO: 2666084 - RNA, 18 nt, Human
uccagauguuuccagacu

SEQ ID NO: 2666085 - RNA, 22 nt, Human
uccagcaacacagccugggccc

SEQ ID NO: 2666086 - RNA, 18 nt, Human
uccagcaacuucuucucc

SEQ ID NO: 2666087 - RNA, 19 nt, Human
uccagcaacuucuucucca

SEQ ID NO: 2666088 - RNA, 20 nt, Human
uccagcaacuucuucuccau

SEQ ID NO: 2666089 - RNA, 17 nt, Human
uccagcaacacagccug

SEQ ID NO: 2666090 - RNA, 20 nt, Human
uccagcaacacagccugggc

SEQ ID NO: 2666091 - RNA, 21 nt, Human
uccagcaacacagccugggcc

SEQ ID NO: 2666092 - RNA, 16 nt, Human
uccagcaacacagccu

SEQ ID NO: 2666093 - RNA, 21 nt, Human
uccaggaaacuccacaucugc

SEQ ID NO: 2666094 - RNA, 17 nt, Human
uccagaucuuucagaaa

SEQ ID NO: 2666095 - RNA, 23 nt, Human
uccaggaaacuccacaucugccu

SEQ ID NO: 2666096 - RNA, 22 nt, Human
uccaggaaaguggccaagaagc

SEQ ID NO: 2666097 - RNA, 17 nt, Human
uccagcuggccuggaca

SEQ ID NO: 2666098 - RNA, 18 nt, Human
uccagcuggccuggacag

SEQ ID NO: 2666099 - RNA, 11 nt, Human
uccagcuggcc

SEQ ID NO: 2666100 - RNA, 12 nt, Human
uccagcuggccu

SEQ ID NO: 2666101 - RNA, 13 nt, Human
uccagcuggccug

SEQ ID NO: 2666102 - RNA, 15 nt, Human
uccaagccccaucuu

SEQ ID NO: 2666103 - RNA, 19 nt, Human
uccaagccccaucuucuaa

SEQ ID NO: 2666104 - RNA, 23 nt, Human
uccaagccccaucuucuaaaugg

SEQ ID NO: 2666105 - RNA, 14 nt, Human
uccaagccuccaca

SEQ ID NO: 2666106 - RNA, 15 nt, Human
uccaagccuccacag

SEQ ID NO: 2666107 - RNA, 16 nt, Human
uccaagccuccacagc

SEQ ID NO: 2666108 - RNA, 21 nt, Human
uccaagccuccacagcgaggg

SEQ ID NO: 2666109 - RNA, 17 nt, Human
uccaagccuccacagcg

SEQ ID NO: 2666110 - RNA, 20 nt, Human
uccaagccuccacagcgagg

SEQ ID NO: 2666111 - RNA, 17 nt, Human
uccacagcgagggcagc

SEQ ID NO: 2666112 - RNA, 18 nt, Human
uccacagcgagggcagcu

SEQ ID NO: 2666113 - RNA, 19 nt, Human
uccacagcgagggcagcug

SEQ ID NO: 2666114 - RNA, 20 nt, Human
uccacagcgagggcagcugc

SEQ ID NO: 2666115 - RNA, 21 nt, Human
uccacagcgagggcagcugcu

SEQ ID NO: 2666116 - RNA, 16 nt, Human
uccacacagaaugcaa

SEQ ID NO: 2666117 - RNA, 12 nt, Human
ucauguauguuu

SEQ ID NO: 2666118 - RNA, 13 nt, Human
ucauguauguuuc

SEQ ID NO: 2666119 - RNA, 14 nt, Human
ucauguauguuucu

SEQ ID NO: 2666120 - RNA, 16 nt, Human
ucauguauguuucucu

SEQ ID NO: 2666121 - RNA, 15 nt, Human
ucauguauuugagca

SEQ ID NO: 2666122 - RNA, 18 nt, Human
ucauguauuugagcauau

SEQ ID NO: 2666123 - RNA, 13 nt, Human
ucauguacuuuuu

SEQ ID NO: 2666124 - RNA, 15 nt, Human
ucauguacuuuuuag

SEQ ID NO: 2666125 - RNA, 22 nt, Human
ucauguacuuuuuaguaauuuc

SEQ ID NO: 2666126 - RNA, 16 nt, Human
ucauggcugcuguugc

SEQ ID NO: 2666127 - RNA, 23 nt, Human
ucaugggagggggcuugaagcca

SEQ ID NO: 2666128 - RNA, 12 nt, Human
ucuagggaaaaa

SEQ ID NO: 2666129 - RNA, 17 nt, Human
ucuacuagauugugauc

SEQ ID NO: 2666130 - RNA, 18 nt, Human
ucuacucuagggaaaaac

SEQ ID NO: 2666131 - RNA, 14 nt, Human
ucuaggauagcuaa

SEQ ID NO: 2666132 - RNA, 23 nt, Human
ucuaggauagcuaacuguaaauc

SEQ ID NO: 2666133 - RNA, 16 nt, Human
ucuaauugcugugugu

SEQ ID NO: 2666134 - RNA, 12 nt, Human
ucuaauucugau

SEQ ID NO: 2666135 - RNA, 14 nt, Human
ucuaauucugauuc

SEQ ID NO: 2666136 - RNA, 13 nt, Human
ucgccacaaacuc

SEQ ID NO: 2666137 - RNA, 19 nt, Human
ucuaaucuagauaucgacu

SEQ ID NO: 2666138 - RNA, 20 nt, Human
ucuaaucuagauaucgacuu

SEQ ID NO: 2666139 - RNA, 15 nt, Human
ucuaauucucugugg

SEQ ID NO: 2666140 - RNA, 20 nt, Human
ucucacugccaugccagcuu

SEQ ID NO: 2666141 - RNA, 14 nt, Human
ucuaucuauuugag

SEQ ID NO: 2666142 - RNA, 15 nt, Human
ucuaucuauuugagg

SEQ ID NO: 2666143 - RNA, 12 nt, Human
ucuaucucaucu

SEQ ID NO: 2666144 - RNA, 14 nt, Human
ucuauccucuguaa

SEQ ID NO: 2666145 - RNA, 14 nt, Human
ucucagauuucuga

SEQ ID NO: 2666146 - RNA, 18 nt, Human
ucucagauuucugaggaa

SEQ ID NO: 2666147 - RNA, 17 nt, Human
ucucagauuucugagga

SEQ ID NO: 2666148 - RNA, 22 nt, Human
ucggccuagggcccccacaguu

SEQ ID NO: 2666149 - RNA, 15 nt, Human
ucggccuagggcccc

SEQ ID NO: 2666150 - RNA, 19 nt, Human
ucgcuucuugccucugugc

SEQ ID NO: 2666151 - RNA, 21 nt, Human
ucgcuucuugccucugugcug

SEQ ID NO: 2666152 - RNA, 15 nt, Human
ucgcauuugucaaug

SEQ ID NO: 2666153 - RNA, 13 nt, Human
ucgcauuugucaa

SEQ ID NO: 2666154 - RNA, 22 nt, Human
ucgauacugcgacuuucugccu

SEQ ID NO: 2666155 - RNA, 23 nt, Human
ucgauacugcgacuuucugccug

SEQ ID NO: 2666156 - RNA, 19 nt, Human
ucgauacugcgacuuucug

SEQ ID NO: 2666157 - RNA, 20 nt, Human
ucgauacugcgacuuucugc

SEQ ID NO: 2666158 - RNA, 18 nt, Human
uccuugaagaacugcagg

SEQ ID NO: 2666159 - RNA, 19 nt, Human
uccuugaagaacugcaggc

SEQ ID NO: 2666160 - RNA, 19 nt, Human
uccuugguccuaguaagaa

SEQ ID NO: 2666161 - RNA, 18 nt, Human
uccuuugguccugucccc

SEQ ID NO: 2666162 - RNA, 14 nt, Human
uccugucccugcgc

SEQ ID NO: 2666163 - RNA, 22 nt, Human
uccugucccugcgccuuuccuu

SEQ ID NO: 2666164 - RNA, 16 nt, Human
uccgcccugccacuca

SEQ ID NO: 2666165 - RNA, 14 nt, Human
uccgcccugccacu

SEQ ID NO: 2666166 - RNA, 15 nt, Human
uccgcccugccacuc

SEQ ID NO: 2666167 - RNA, 13 nt, Human
uccgcccugccac

SEQ ID NO: 2666168 - RNA, 13 nt, Human
uccgagagggaga

SEQ ID NO: 2666169 - RNA, 14 nt, Human
uccgagagggagag

SEQ ID NO: 2666170 - RNA, 16 nt, Human
uccgagaggugggcca

SEQ ID NO: 2666171 - RNA, 15 nt, Human
uccgagagggagaga

SEQ ID NO: 2666172 - RNA, 21 nt, Human
uccgaggacccaggaaaggca

SEQ ID NO: 2666173 - RNA, 14 nt, Human
ucccuugaccuuaa

SEQ ID NO: 2666174 - RNA, 20 nt, Human
uccgccagccuccucuggac

SEQ ID NO: 2666175 - RNA, 12 nt, Human
uccgacugcuuu

SEQ ID NO: 2666176 - RNA, 15 nt, Human
uccgacugcuuugga

SEQ ID NO: 2666177 - RNA, 17 nt, Human
ucccuggcucccuccuc

SEQ ID NO: 2666178 - RNA, 20 nt, Human
ucccuugaaacuuugggaaa

SEQ ID NO: 2666179 - RNA, 11 nt, Human
ucccuggcgca

SEQ ID NO: 2666180 - RNA, 21 nt, Human
ucccuggcgcaggugggcugg

SEQ ID NO: 2666181 - RNA, 12 nt, Human
ucccuggcuccc

SEQ ID NO: 2666182 - RNA, 19 nt, Human
ucccucuauuuauguuugc

SEQ ID NO: 2666183 - RNA, 13 nt, Human
ucccucuauuuau

SEQ ID NO: 2666184 - RNA, 15 nt, Human
ucccucugccccucc

SEQ ID NO: 2666185 - RNA, 16 nt, Human
ucccugcagaugccac

SEQ ID NO: 2666186 - RNA, 22 nt, Human
ucccugcagaugccacccuagc

SEQ ID NO: 2666187 - RNA, 23 nt, Human
ucccugcagaugccacccuagcc

SEQ ID NO: 2666188 - RNA, 22 nt, Human
ucccuagcuuuagacccugggu

SEQ ID NO: 2666189 - RNA, 19 nt, Human
ucccuagcuuuagacccug

SEQ ID NO: 2666190 - RNA, 20 nt, Human
ucccuagcuuuagacccugg

SEQ ID NO: 2666191 - RNA, 15 nt, Human
ucccuagcagcccac

SEQ ID NO: 2666192 - RNA, 17 nt, Human
ucccuagcagcccaccc

SEQ ID NO: 2666193 - RNA, 18 nt, Human
ucccuaccgacccagggu

SEQ ID NO: 2666194 - RNA, 15 nt, Human
ucccuaccgacccag

SEQ ID NO: 2666195 - RNA, 17 nt, Human
uccucucaccucagccu

SEQ ID NO: 2666196 - RNA, 22 nt, Human
uccuccagugugggcuugacca

SEQ ID NO: 2666197 - RNA, 24 nt, Human
uccucuggacggcaggcucacugc

SEQ ID NO: 2666198 - RNA, 12 nt, Human
uccucuggagcc

SEQ ID NO: 2666199 - RNA, 11 nt, Human
uccuccuggaa

SEQ ID NO: 2666200 - RNA, 19 nt, Human
uccggaaacuaguguacau

SEQ ID NO: 2666201 - RNA, 12 nt, Human
uccuccugcaga

SEQ ID NO: 2666202 - RNA, 15 nt, Human
uccuccugcagacca

SEQ ID NO: 2666203 - RNA, 20 nt, Human
uccuccugcagaccacgccc

SEQ ID NO: 2666204 - RNA, 18 nt, Human
uccuccucaccucaugcc

SEQ ID NO: 2666205 - RNA, 12 nt, Human
uccuccucaccu

SEQ ID NO: 2666206 - RNA, 16 nt, Human
uccuccucaccucaug

SEQ ID NO: 2666207 - RNA, 20 nt, Human
ugccuggugcuuccaaauau

SEQ ID NO: 2666208 - RNA, 15 nt, Human
ugccuguaacuugag

SEQ ID NO: 2666209 - RNA, 19 nt, Human
ugccugagaggcaggcaua

SEQ ID NO: 2666210 - RNA, 15 nt, Human
ugccugagaggcagg

SEQ ID NO: 2666211 - RNA, 16 nt, Human
ugccugagaggcaggc

SEQ ID NO: 2666212 - RNA, 17 nt, Human
ugccugagaggcaggca

SEQ ID NO: 2666213 - RNA, 18 nt, Human
ugccugagaggcaggcau

SEQ ID NO: 2666214 - RNA, 13 nt, Human
ugccugagaggca

SEQ ID NO: 2666215 - RNA, 14 nt, Human
ugccugagaggcag

SEQ ID NO: 2666216 - RNA, 14 nt, Human
ugccccucccccag

SEQ ID NO: 2666217 - RNA, 16 nt, Human
ugccccucccccagcc

SEQ ID NO: 2666218 - RNA, 11 nt, Human
ugccucuuucc

SEQ ID NO: 2666219 - RNA, 12 nt, Human
ugccucuuuccc

SEQ ID NO: 2666220 - RNA, 17 nt, Human
ugccucuuucccuagga

SEQ ID NO: 2666221 - RNA, 19 nt, Human
ugccugacagagggaugga

SEQ ID NO: 2666222 - RNA, 16 nt, Human
ugccuucuuuugauua

SEQ ID NO: 2666223 - RNA, 20 nt, Human
ugccuucgcuucuugccucu

SEQ ID NO: 2666224 - RNA, 21 nt, Human
ugccuucgcuucuugccucug

SEQ ID NO: 2666225 - RNA, 22 nt, Human
ugccuucgcuucuugccucugu

SEQ ID NO: 2666226 - RNA, 23 nt, Human
ugccuucgcuucuugccucugug

SEQ ID NO: 2666227 - RNA, 20 nt, Human
ugccuucgucuuucccaugg

SEQ ID NO: 2666228 - RNA, 17 nt, Human
ugcuaaauaaaauuugu

SEQ ID NO: 2666229 - RNA, 21 nt, Human
ugcuaaauaaaauuuguugca

SEQ ID NO: 2666230 - RNA, 22 nt, Human
ugcuaaauaaaauuuguugcau

SEQ ID NO: 2666231 - RNA, 23 nt, Human
ugcuaaauaaaauuuguugcaua

SEQ ID NO: 2666232 - RNA, 15 nt, Human
ugcuaaaugugaaug

SEQ ID NO: 2666233 - RNA, 13 nt, Human
ugcuaacaaagac

SEQ ID NO: 2666234 - RNA, 22 nt, Human
ugcuaacaaagacaaaagucug

SEQ ID NO: 2666235 - RNA, 23 nt, Human
ugcuaacaaagacaaaagucugu

SEQ ID NO: 2666236 - RNA, 12 nt, Human
ugcgucccaaga

SEQ ID NO: 2666237 - RNA, 23 nt, Human
ugcguccccccccaaccuuuccc

SEQ ID NO: 2666238 - RNA, 15 nt, Human
ugcgucuugguguaa

SEQ ID NO: 2666239 - RNA, 16 nt, Human
ugcgucuugguguaau

SEQ ID NO: 2666240 - RNA, 22 nt, Human
ugcgucuugguguaauuugaag

SEQ ID NO: 2666241 - RNA, 23 nt, Human
ugcguccuccucaccucaugccc

SEQ ID NO: 2666242 - RNA, 16 nt, Human
ugcgucuauccugugu

SEQ ID NO: 2666243 - RNA, 14 nt, Human
ugcguccuccucac

SEQ ID NO: 2666244 - RNA, 16 nt, Human
ugcguccuccucaccu

SEQ ID NO: 2666245 - RNA, 19 nt, Human
ugcguccuccucaccucau

SEQ ID NO: 2666246 - RNA, 22 nt, Human
ugcguccuccucaccucaugcc

SEQ ID NO: 2666247 - RNA, 14 nt, Human
ugcucucacuguuu

SEQ ID NO: 2666248 - RNA, 22 nt, Human
ugcucucacuguuuguuuuuau

SEQ ID NO: 2666249 - RNA, 21 nt, Human
ugcucuaugcuuuccaaaccu

SEQ ID NO: 2666250 - RNA, 12 nt, Human
ugcucuaugcuu

SEQ ID NO: 2666251 - RNA, 18 nt, Human
ugcucuaugcuuuccaaa

SEQ ID NO: 2666252 - RNA, 16 nt, Human
ugcucuaugcuuucca

SEQ ID NO: 2666253 - RNA, 16 nt, Human
ugcugcaugcccucuc

SEQ ID NO: 2666254 - RNA, 15 nt, Human
ugcugcaugcccucu

SEQ ID NO: 2666255 - RNA, 19 nt, Human
ugcugcaugcccucucagg

SEQ ID NO: 2666256 - RNA, 18 nt, Human
ugcugcaugcccucucag

SEQ ID NO: 2666257 - RNA, 12 nt, Human
ugcugcuggugc

SEQ ID NO: 2666258 - RNA, 16 nt, Human
ugcugcuggugcacag

SEQ ID NO: 2666259 - RNA, 18 nt, Human
ugcugcuggugcacagcc

SEQ ID NO: 2666260 - RNA, 18 nt, Human
ugcugauuuggugaccaa

SEQ ID NO: 2666261 - RNA, 17 nt, Human
ugcagcaccgaggggcc

SEQ ID NO: 2666262 - RNA, 20 nt, Human
ugcagcaccgaggggccuuu

SEQ ID NO: 2666263 - RNA, 21 nt, Human
ugcagcaccgaggggccuuug

SEQ ID NO: 2666264 - RNA, 17 nt, Human
ugcagaggccagaggcc

SEQ ID NO: 2666265 - RNA, 14 nt, Human
ugcagaggccagag

SEQ ID NO: 2666266 - RNA, 15 nt, Human
ugcagaggccagagg

SEQ ID NO: 2666267 - RNA, 18 nt, Human
ugcagagcaguaagggaa

SEQ ID NO: 2666268 - RNA, 17 nt, Human
ugcagagcaguaaggga

SEQ ID NO: 2666269 - RNA, 15 nt, Human
ugcagagauuucuca

SEQ ID NO: 2666270 - RNA, 20 nt, Human
ugcagagauuucucauugac

SEQ ID NO: 2666271 - RNA, 15 nt, Human
ugcagagccuucuca

SEQ ID NO: 2666272 - RNA, 16 nt, Human
ugcagagccuucucag

SEQ ID NO: 2666273 - RNA, 17 nt, Human
ugcagagccuucucaga

SEQ ID NO: 2666274 - RNA, 19 nt, Human
ugcagagccuucucagaag

SEQ ID NO: 2666275 - RNA, 20 nt, Human
ugcagagccuucucagaagc

SEQ ID NO: 2666276 - RNA, 22 nt, Human
ugcagagccuucucagaagcac

SEQ ID NO: 2666277 - RNA, 20 nt, Human
ugcacuuucuauccucugua

SEQ ID NO: 2666278 - RNA, 21 nt, Human
ugcacuugugauuauuuauua

SEQ ID NO: 2666279 - RNA, 12 nt, Human
ugcaggcccugg

SEQ ID NO: 2666280 - RNA, 15 nt, Human
ugcaggcccuggccu

SEQ ID NO: 2666281 - RNA, 16 nt, Human
ugcaggcccuggccuc

SEQ ID NO: 2666282 - RNA, 13 nt, Human
ugcagugagcuga

SEQ ID NO: 2666283 - RNA, 17 nt, Human
ugcaggcccuggccucc

SEQ ID NO: 2666284 - RNA, 19 nt, Human
ugcaggcccuggccucccc

SEQ ID NO: 2666285 - RNA, 18 nt, Human
ugcaguggcgcauucuag

SEQ ID NO: 2666286 - RNA, 21 nt, Human
ugcaguggcgcauucuaggcu

SEQ ID NO: 2666287 - RNA, 16 nt, Human
ugcauauaaugaauaa

SEQ ID NO: 2666288 - RNA, 17 nt, Human
ugcauauaaugaauaaa

SEQ ID NO: 2666289 - RNA, 20 nt, Human
ugcauauaaugaauaaauca

SEQ ID NO: 2666290 - RNA, 15 nt, Human
ugcccauccugacug

SEQ ID NO: 2666291 - RNA, 20 nt, Human
ugcccaucgugaagaagccu

SEQ ID NO: 2666292 - RNA, 21 nt, Human
ugcccaucgugaagaagccug

SEQ ID NO: 2666293 - RNA, 22 nt, Human
ugcccaucgugaagaagccugu

SEQ ID NO: 2666294 - RNA, 23 nt, Human
ugcccaucgugaagaagccugua

SEQ ID NO: 2666295 - RNA, 14 nt, Human
ugccccucagagac

SEQ ID NO: 2666296 - RNA, 16 nt, Human
ugccccucagagacug

SEQ ID NO: 2666297 - RNA, 16 nt, Human
ugcccaccugccggcc

SEQ ID NO: 2666298 - RNA, 14 nt, Human
ugccaccaggccac

SEQ ID NO: 2666299 - RNA, 17 nt, Human
ugccaccaggccaccuc

SEQ ID NO: 2666300 - RNA, 18 nt, Human
ugccaccaggccaccucc

SEQ ID NO: 2666301 - RNA, 15 nt, Human
ugccacccugcugag

SEQ ID NO: 2666302 - RNA, 14 nt, Human
ugccacccuagcca

SEQ ID NO: 2666303 - RNA, 12 nt, Human
ugccaggcaggg

SEQ ID NO: 2666304 - RNA, 15 nt, Human
ugccaggcaggggug

SEQ ID NO: 2666305 - RNA, 16 nt, Human
ugccaggcaggggugg

SEQ ID NO: 2666306 - RNA, 17 nt, Human
ugccaggcagggguggg

SEQ ID NO: 2666307 - RNA, 18 nt, Human
ugccaggcaggggugggg

SEQ ID NO: 2666308 - RNA, 13 nt, Human
ugccaccaggcca

SEQ ID NO: 2666309 - RNA, 19 nt, Human
ugcauauuugcaaagugua

SEQ ID NO: 2666310 - RNA, 17 nt, Human
ugggaccugccaggcag

SEQ ID NO: 2666311 - RNA, 20 nt, Human
ugggaccugccaggcagggg

SEQ ID NO: 2666312 - RNA, 18 nt, Human
ugggaccugccaggcagg

SEQ ID NO: 2666313 - RNA, 19 nt, Human
ugggaccugccaggcaggg

SEQ ID NO: 2666314 - RNA, 23 nt, Human
ugggaccugccaggcaggggugg

SEQ ID NO: 2666315 - RNA, 14 nt, Human
ugggaccuguggcu

SEQ ID NO: 2666316 - RNA, 18 nt, Human
ugggaccuguggcugucg

SEQ ID NO: 2666317 - RNA, 23 nt, Human
ugggacggugcccaagccagagg

SEQ ID NO: 2666318 - RNA, 13 nt, Human
ugggacggcggca

SEQ ID NO: 2666319 - RNA, 23 nt, Human
ugggacgggaugguucuggcugu

SEQ ID NO: 2666320 - RNA, 14 nt, Human
ugggacggugccca

SEQ ID NO: 2666321 - RNA, 16 nt, Human
ugggcagagcuggcuc

SEQ ID NO: 2666322 - RNA, 18 nt, Human
ugggcagagcuggcucug

SEQ ID NO: 2666323 - RNA, 20 nt, Human
ugggcagagcuggcucugag

SEQ ID NO: 2666324 - RNA, 13 nt, Human
uggcuucugugau

SEQ ID NO: 2666325 - RNA, 14 nt, Human
uggcuucugugaug

SEQ ID NO: 2666326 - RNA, 17 nt, Human
uggcuucugugaugagc

SEQ ID NO: 2666327 - RNA, 21 nt, Human
uggcuucugugaugagcugau

SEQ ID NO: 2666328 - RNA, 22 nt, Human
uggcuucugugaugagcugauc

SEQ ID NO: 2666329 - RNA, 13 nt, Human
uggccccacccug

SEQ ID NO: 2666330 - RNA, 15 nt, Human
uggccccacccuggg

SEQ ID NO: 2666331 - RNA, 16 nt, Human
uggccccacccugggc

SEQ ID NO: 2666332 - RNA, 18 nt, Human
uggccccacccugggccc

SEQ ID NO: 2666333 - RNA, 19 nt, Human
uggcucugagcgccuccau

SEQ ID NO: 2666334 - RNA, 12 nt, Human
uggccccagcac

SEQ ID NO: 2666335 - RNA, 22 nt, Human
uggccccacccugggcccuggg

SEQ ID NO: 2666336 - RNA, 19 nt, Human
uggcuggaagauccugcgg

SEQ ID NO: 2666337 - RNA, 20 nt, Human
uggcuggaagauccugcggg

SEQ ID NO: 2666338 - RNA, 21 nt, Human
uggcuggaagauccugcgggu

SEQ ID NO: 2666339 - RNA, 21 nt, Human
ugggggaucacagccucugaa

SEQ ID NO: 2666340 - RNA, 20 nt, Human
ugggggaucacagccucuga

SEQ ID NO: 2666341 - RNA, 17 nt, Human
uggggaaaggagguggg

SEQ ID NO: 2666342 - RNA, 19 nt, Human
uggggaaaggagguggggg

SEQ ID NO: 2666343 - RNA, 23 nt, Human
uggggaaaggggucggcugacca

SEQ ID NO: 2666344 - RNA, 21 nt, Human
uggggaaaggggucggcugac

SEQ ID NO: 2666345 - RNA, 22 nt, Human
uggggaaaggggucggcugacc

SEQ ID NO: 2666346 - RNA, 14 nt, Human
ugggggcuagggag

SEQ ID NO: 2666347 - RNA, 16 nt, Human
ugggggcacaggaggc

SEQ ID NO: 2666348 - RNA, 20 nt, Human
ugggaguacucucaucacua

SEQ ID NO: 2666349 - RNA, 19 nt, Human
ugggcuacaugcugggguc

SEQ ID NO: 2666350 - RNA, 13 nt, Human
ugggcuuauaucu

SEQ ID NO: 2666351 - RNA, 20 nt, Human
ugggcuuauaucuggccucu

SEQ ID NO: 2666352 - RNA, 21 nt, Human
ugggcuuauaucuggccucug

SEQ ID NO: 2666353 - RNA, 22 nt, Human
ugggcuuauaucuggccucugc

SEQ ID NO: 2666354 - RNA, 20 nt, Human
ugggcuuuuggggagccaga

SEQ ID NO: 2666355 - RNA, 21 nt, Human
ugggcuuuuggggagccagaa

SEQ ID NO: 2666356 - RNA, 22 nt, Human
ugggcuuuuggggagccagaag

SEQ ID NO: 2666357 - RNA, 18 nt, Human
uggggaaagacacugccu

SEQ ID NO: 2666358 - RNA, 19 nt, Human
uggggaaagacacugccug

SEQ ID NO: 2666359 - RNA, 20 nt, Human
uggggaaagacacugccugg

SEQ ID NO: 2666360 - RNA, 21 nt, Human
uggggaaagacacugccuggg

SEQ ID NO: 2666361 - RNA, 22 nt, Human
uggggaaagacacugccugggc

SEQ ID NO: 2666362 - RNA, 16 nt, Human
ugguaucuuaaagugu

SEQ ID NO: 2666363 - RNA, 14 nt, Human
ugguaucauauauu

SEQ ID NO: 2666364 - RNA, 17 nt, Human
ugguaguuucugugguu

SEQ ID NO: 2666365 - RNA, 13 nt, Human
ugguauauauaca

SEQ ID NO: 2666366 - RNA, 14 nt, Human
ugguauauauacau

SEQ ID NO: 2666367 - RNA, 14 nt, Human
uggguuugagaaau

SEQ ID NO: 2666368 - RNA, 12 nt, Human
ugggguuuugua

SEQ ID NO: 2666369 - RNA, 15 nt, Human
ugggguuuccuggca

SEQ ID NO: 2666370 - RNA, 16 nt, Human
uggguaacuagggaag

SEQ ID NO: 2666371 - RNA, 17 nt, Human
ugggguuuccuggcacu

SEQ ID NO: 2666372 - RNA, 14 nt, Human
ugggguuuccuggc

SEQ ID NO: 2666373 - RNA, 13 nt, Human
ugggguuuccugg

SEQ ID NO: 2666374 - RNA, 17 nt, Human
uggcaaaggaaggugga

SEQ ID NO: 2666375 - RNA, 18 nt, Human
uggauuuggcacuagcca

SEQ ID NO: 2666376 - RNA, 21 nt, Human
uggauuuggcacuagccaaag

SEQ ID NO: 2666377 - RNA, 13 nt, Human
uggauuucagaag

SEQ ID NO: 2666378 - RNA, 19 nt, Human
uggaucauaagacaaugga

SEQ ID NO: 2666379 - RNA, 12 nt, Human
uggagggaagcc

SEQ ID NO: 2666380 - RNA, 22 nt, Human
uggaggcuuccugcguccuccu

SEQ ID NO: 2666381 - RNA, 11 nt, Human
uggagggaggc

SEQ ID NO: 2666382 - RNA, 13 nt, Human
uggagggaggccc

SEQ ID NO: 2666383 - RNA, 14 nt, Human
uggagggaggcccc

SEQ ID NO: 2666384 - RNA, 16 nt, Human
uggagggaggccccag

SEQ ID NO: 2666385 - RNA, 18 nt, Human
uggagggaggccccaggg

SEQ ID NO: 2666386 - RNA, 19 nt, Human
uggagggaggccccagggg

SEQ ID NO: 2666387 - RNA, 13 nt, Human
uggagggagggaa

SEQ ID NO: 2666388 - RNA, 17 nt, Human
uggagggagggaagggu

SEQ ID NO: 2666389 - RNA, 20 nt, Human
uggaggcuuccugcguccuc

SEQ ID NO: 2666390 - RNA, 20 nt, Human
uggaggaagaacugaaaggc

SEQ ID NO: 2666391 - RNA, 17 nt, Human
uggaggaagaacugaaa

SEQ ID NO: 2666392 - RNA, 15 nt, Human
uggaggaagaacuga

SEQ ID NO: 2666393 - RNA, 20 nt, Human
uggaggaacaaucggcugca

SEQ ID NO: 2666394 - RNA, 21 nt, Human
uggaggaacaaucggcugcau

SEQ ID NO: 2666395 - RNA, 19 nt, Human
uggaggaacacuugaugga

SEQ ID NO: 2666396 - RNA, 16 nt, Human
uggcaccgccucccca

SEQ ID NO: 2666397 - RNA, 23 nt, Human
uggcaccgccuccccaccuccag

SEQ ID NO: 2666398 - RNA, 15 nt, Human
uggcaggggacagga

SEQ ID NO: 2666399 - RNA, 18 nt, Human
uggcaggggacaggaguc

SEQ ID NO: 2666400 - RNA, 18 nt, Human
uggcaguccgugggacgg

SEQ ID NO: 2666401 - RNA, 12 nt, Human
uggccaggagca

SEQ ID NO: 2666402 - RNA, 14 nt, Human
uggccaggagcagg

SEQ ID NO: 2666403 - RNA, 22 nt, Human
uggccaggagcaggcacgggug

SEQ ID NO: 2666404 - RNA, 20 nt, Human
ugcuggagcacugggcuccc

SEQ ID NO: 2666405 - RNA, 18 nt, Human
ugcuggagcacugggcuc

SEQ ID NO: 2666406 - RNA, 16 nt, Human
ugcuggagcacugggc

SEQ ID NO: 2666407 - RNA, 18 nt, Human
ugcuuugaauaaaugugu

SEQ ID NO: 2666408 - RNA, 17 nt, Human
uggaaaaauagccugcc

SEQ ID NO: 2666409 - RNA, 20 nt, Human
uggaaaaauagccugccucu

SEQ ID NO: 2666410 - RNA, 18 nt, Human
ugcuuuaccuuuucaggg

SEQ ID NO: 2666411 - RNA, 21 nt, Human
ugcuuuaccuuuucagggcug

SEQ ID NO: 2666412 - RNA, 15 nt, Human
ugcuuuagacuugaa

SEQ ID NO: 2666413 - RNA, 14 nt, Human
ugcuuuagacuuga

SEQ ID NO: 2666414 - RNA, 18 nt, Human
ugcuuuagacuugaaaag

SEQ ID NO: 2666415 - RNA, 16 nt, Human
ugcuuuagacuugaaa

SEQ ID NO: 2666416 - RNA, 14 nt, Human
uggaacauacuguu

SEQ ID NO: 2666417 - RNA, 16 nt, Human
uggaacauacuguuca

SEQ ID NO: 2666418 - RNA, 17 nt, Human
uggaacauacuguucac

SEQ ID NO: 2666419 - RNA, 17 nt, Human
uggaaccacauugaaga

SEQ ID NO: 2666420 - RNA, 19 nt, Human
uggaaccacauugaagaau

SEQ ID NO: 2666421 - RNA, 19 nt, Human
uggaaagcagaguuuucau

SEQ ID NO: 2666422 - RNA, 15 nt, Human
uggaaaacuguguug

SEQ ID NO: 2666423 - RNA, 20 nt, Human
uggaaaacuguguugccaca

SEQ ID NO: 2666424 - RNA, 14 nt, Human
uggacuaucugucu

SEQ ID NO: 2666425 - RNA, 15 nt, Human
uggacuaucugucug

SEQ ID NO: 2666426 - RNA, 17 nt, Human
uggacuaucugucuggu

SEQ ID NO: 2666427 - RNA, 20 nt, Human
uggacuaucugucugguggc

SEQ ID NO: 2666428 - RNA, 22 nt, Human
uggacuaucugucugguggccc

SEQ ID NO: 2666429 - RNA, 23 nt, Human
uggacuaucugucugguggcccc

SEQ ID NO: 2666430 - RNA, 18 nt, Human
uggacauccuccucccac

SEQ ID NO: 2666431 - RNA, 20 nt, Human
uggacauccuccucccaccc

SEQ ID NO: 2666432 - RNA, 23 nt, Human
uggacauccuccucccacccggc

SEQ ID NO: 2666433 - RNA, 21 nt, Human
uggacagauugccuguuucug

SEQ ID NO: 2666434 - RNA, 22 nt, Human
uggacagauugccuguuucuga

SEQ ID NO: 2666435 - RNA, 18 nt, Human
uggaauauaaggaaagca

SEQ ID NO: 2666436 - RNA, 14 nt, Human
uggaauauaaggaa

SEQ ID NO: 2666437 - RNA, 21 nt, Human
uggaauauaaggaaagcaaua

SEQ ID NO: 2666438 - RNA, 19 nt, Human
uggaaguuuuccuacacuu

SEQ ID NO: 2666439 - RNA, 22 nt, Human
uggaauaaaaggcuugaagcug

SEQ ID NO: 2666440 - RNA, 15 nt, Human
uggaauaaaaggcuu

SEQ ID NO: 2666441 - RNA, 18 nt, Human
uggaauaaaaggcuugaa

SEQ ID NO: 2666442 - RNA, 13 nt, Human
uguguaaugaaaa

SEQ ID NO: 2666443 - RNA, 17 nt, Human
ugugggauauugaaugu

SEQ ID NO: 2666444 - RNA, 17 nt, Human
uguggcuacugacauau

SEQ ID NO: 2666445 - RNA, 16 nt, Human
uguggcuagugacaaa

SEQ ID NO: 2666446 - RNA, 19 nt, Human
uguggcgccgucuccaggg

SEQ ID NO: 2666447 - RNA, 23 nt, Human
uguggcgccgucuccaggggcug

SEQ ID NO: 2666448 - RNA, 14 nt, Human
uguggcuccaggcc

SEQ ID NO: 2666449 - RNA, 17 nt, Human
uguggcuccaggccaaa

SEQ ID NO: 2666450 - RNA, 22 nt, Human
uguggcuccaggccaaagugcc

SEQ ID NO: 2666451 - RNA, 16 nt, Human
uguggccucuucugag

SEQ ID NO: 2666452 - RNA, 11 nt, Human
uguggccugca

SEQ ID NO: 2666453 - RNA, 18 nt, Human
uguggccucuucugagcu

SEQ ID NO: 2666454 - RNA, 17 nt, Human
uguggccugcacaguga

SEQ ID NO: 2666455 - RNA, 18 nt, Human
uguggcgccgucuccagg

SEQ ID NO: 2666456 - RNA, 19 nt, Human
uguggaaggcaagccaggc

SEQ ID NO: 2666457 - RNA, 22 nt, Human
uguggaaggcaagccaggcuca

SEQ ID NO: 2666458 - RNA, 15 nt, Human
ugugcuaugaauuuu

SEQ ID NO: 2666459 - RNA, 14 nt, Human
ugugcuaugaauuu

SEQ ID NO: 2666460 - RNA, 15 nt, Human
ugugcucagaagggc

SEQ ID NO: 2666461 - RNA, 15 nt, Human
ugugcucagagacac

SEQ ID NO: 2666462 - RNA, 17 nt, Human
ugugcuagaaauuuuca

SEQ ID NO: 2666463 - RNA, 20 nt, Human
ugugcuagaaauuuucaaga

SEQ ID NO: 2666464 - RNA, 14 nt, Human
ugugccuucgucuu

SEQ ID NO: 2666465 - RNA, 23 nt, Human
ugugccuucgucuuucccauggg

SEQ ID NO: 2666466 - RNA, 16 nt, Human
ugugccuucuuuugau

SEQ ID NO: 2666467 - RNA, 15 nt, Human
ugugaauuauugaca

SEQ ID NO: 2666468 - RNA, 16 nt, Human
ugugaauuauugacac

SEQ ID NO: 2666469 - RNA, 17 nt, Human
ugugaauuauugacacu

SEQ ID NO: 2666470 - RNA, 19 nt, Human
ugugaauuauugacacuga

SEQ ID NO: 2666471 - RNA, 20 nt, Human
ugugaauuauugacacugaa

SEQ ID NO: 2666472 - RNA, 21 nt, Human
ugugaauuauugacacugaac

SEQ ID NO: 2666473 - RNA, 14 nt, Human
ugugagugguugaa

SEQ ID NO: 2666474 - RNA, 10 nt, Human
ugugcacauc

SEQ ID NO: 2666475 - RNA, 21 nt, Human
ugugcacauccgcgugugccu

SEQ ID NO: 2666476 - RNA, 22 nt, Human
ugugcacauccgcgugugccug

SEQ ID NO: 2666477 - RNA, 23 nt, Human
ugugcacauccgcgugugccugu

SEQ ID NO: 2666478 - RNA, 14 nt, Human
ugucuggcaaggac

SEQ ID NO: 2666479 - RNA, 15 nt, Human
ugucuggaauugugg

SEQ ID NO: 2666480 - RNA, 20 nt, Human
ugucuggcaaggacuuugua

SEQ ID NO: 2666481 - RNA, 15 nt, Human
ugucuuuuuguugua

SEQ ID NO: 2666482 - RNA, 21 nt, Human
ugucuuuuuauuaaaauauuu

SEQ ID NO: 2666483 - RNA, 23 nt, Human
ugugaaaagaaaaaugagccugg

SEQ ID NO: 2666484 - RNA, 21 nt, Human
ugugaaaagaaaaaugagccu

SEQ ID NO: 2666485 - RNA, 21 nt, Human
ugugaagcuggaacugcggga

SEQ ID NO: 2666486 - RNA, 12 nt, Human
ugugaagcugga

SEQ ID NO: 2666487 - RNA, 13 nt, Human
ugucuuuccugaa

SEQ ID NO: 2666488 - RNA, 22 nt, Human
ugucuuuccugaaccaugugga

SEQ ID NO: 2666489 - RNA, 17 nt, Human
ugucuguaaauauguuu

SEQ ID NO: 2666490 - RNA, 12 nt, Human
ugucuguaaaua

SEQ ID NO: 2666491 - RNA, 18 nt, Human
uguccaugcgcucagggc

SEQ ID NO: 2666492 - RNA, 20 nt, Human
ugucccccagguuccgaaga

SEQ ID NO: 2666493 - RNA, 14 nt, Human
ugucacgaauaugg

SEQ ID NO: 2666494 - RNA, 18 nt, Human
ugucacgaauauggacau

SEQ ID NO: 2666495 - RNA, 19 nt, Human
ugucacgaauauggacaua

SEQ ID NO: 2666496 - RNA, 16 nt, Human
ugucauuucagaaguu

SEQ ID NO: 2666497 - RNA, 15 nt, Human
ugucauuucagaagu

SEQ ID NO: 2666498 - RNA, 16 nt, Human
uguccaguaagaucac

SEQ ID NO: 2666499 - RNA, 19 nt, Human
uguccaguaagaucacugu

SEQ ID NO: 2666500 - RNA, 17 nt, Human
uguccaguaagaucacu

SEQ ID NO: 2666501 - RNA, 22 nt, Human
uguccaguaagaucacuguuua

SEQ ID NO: 2666502 - RNA, 21 nt, Human
uguccaguaagaucacuguuu

SEQ ID NO: 2666503 - RNA, 20 nt, Human
uguccaguaagaucacuguu

SEQ ID NO: 2666504 - RNA, 13 nt, Human
uguccauacacuu

SEQ ID NO: 2666505 - RNA, 20 nt, Human
uguccauacacuuuguugca

SEQ ID NO: 2666506 - RNA, 21 nt, Human
uguaguuguucguugguuaua

SEQ ID NO: 2666507 - RNA, 16 nt, Human
uguaguuuacagaaaa

SEQ ID NO: 2666508 - RNA, 17 nt, Human
uguaguucuuuaaacug

SEQ ID NO: 2666509 - RNA, 15 nt, Human
uguaguucuuuaaac

SEQ ID NO: 2666510 - RNA, 14 nt, Human
uguaguucuuuaaa

SEQ ID NO: 2666511 - RNA, 12 nt, Human
uguaguucuuua

SEQ ID NO: 2666512 - RNA, 14 nt, Human
uguauuguccuauu

SEQ ID NO: 2666513 - RNA, 19 nt, Human
uguauuguccuauuagugu

SEQ ID NO: 2666514 - RNA, 21 nt, Human
uguauuguauauuacaaugau

SEQ ID NO: 2666515 - RNA, 14 nt, Human
uguauuuugauuau

SEQ ID NO: 2666516 - RNA, 20 nt, Human
ugucacauuuagcugugcuc

SEQ ID NO: 2666517 - RNA, 23 nt, Human
ugucacccaaaccggcaggugcg

SEQ ID NO: 2666518 - RNA, 20 nt, Human
uguauuuaaaaauagaaaca

SEQ ID NO: 2666519 - RNA, 18 nt, Human
uguauuuuauuuagacaa

SEQ ID NO: 2666520 - RNA, 19 nt, Human
uguauuuuauuuagacaag

SEQ ID NO: 2666521 - RNA, 14 nt, Human
uguauuuucagagc

SEQ ID NO: 2666522 - RNA, 12 nt, Human
uguauuuucaug

SEQ ID NO: 2666523 - RNA, 16 nt, Human
uguauuuucaugaaaa

SEQ ID NO: 2666524 - RNA, 22 nt, Human
uguauuuuauuuagacaagaga

SEQ ID NO: 2666525 - RNA, 20 nt, Human
uguagcuauaaugagcaugu

SEQ ID NO: 2666526 - RNA, 18 nt, Human
uguagcccccuggccucu

SEQ ID NO: 2666527 - RNA, 17 nt, Human
uguagcccccuggccuc

SEQ ID NO: 2666528 - RNA, 16 nt, Human
uguagcccccuggccu

SEQ ID NO: 2666529 - RNA, 20 nt, Human
uguagcccccuggccucugu

SEQ ID NO: 2666530 - RNA, 19 nt, Human
uguagcccccuggccucug

SEQ ID NO: 2666531 - RNA, 15 nt, Human
uguagcccucccacu

SEQ ID NO: 2666532 - RNA, 21 nt, Human
uguagcccucccacuuugcug

SEQ ID NO: 2666533 - RNA, 15 nt, Human
uguacuguuacuggg

SEQ ID NO: 2666534 - RNA, 18 nt, Human
uguacuguuacugggccc

SEQ ID NO: 2666535 - RNA, 14 nt, Human
uguacguccagccu

SEQ ID NO: 2666536 - RNA, 17 nt, Human
uguacguccagccugcc

SEQ ID NO: 2666537 - RNA, 23 nt, Human
uguacgacacggguggggaaagg

SEQ ID NO: 2666538 - RNA, 23 nt, Human
uguacgacgucagauguuuaaaa

SEQ ID NO: 2666539 - RNA, 22 nt, Human
uguacgacgucagauguuuaaa

SEQ ID NO: 2666540 - RNA, 22 nt, Human
uguagcagugagucauaucuua

SEQ ID NO: 2666541 - RNA, 12 nt, Human
uguagcauacug

SEQ ID NO: 2666542 - RNA, 15 nt, Human
uguacuuaaauggua

SEQ ID NO: 2666543 - RNA, 22 nt, Human
uguacuuaaaugguaauaagca

SEQ ID NO: 2666544 - RNA, 12 nt, Human
uguagaugaugu

SEQ ID NO: 2666545 - RNA, 18 nt, Human
uguagauauguauucuuu

SEQ ID NO: 2666546 - RNA, 15 nt, Human
uguagaugauguauu

SEQ ID NO: 2666547 - RNA, 15 nt, Human
uguaauuaaauucug

SEQ ID NO: 2666548 - RNA, 13 nt, Human
uguaauaaacuuu

SEQ ID NO: 2666549 - RNA, 15 nt, Human
uguaauaaacuuuaa

SEQ ID NO: 2666550 - RNA, 17 nt, Human
uguaauaaacuuuaaua

SEQ ID NO: 2666551 - RNA, 22 nt, Human
uggucacaacuugauggcugcg

SEQ ID NO: 2666552 - RNA, 23 nt, Human
uggucaagggcugucauugcaca

SEQ ID NO: 2666553 - RNA, 15 nt, Human
uggucacagcggagg

SEQ ID NO: 2666554 - RNA, 21 nt, Human
uggucacagcggaggugugga

SEQ ID NO: 2666555 - RNA, 20 nt, Human
uguaaucccagcuacucggg

SEQ ID NO: 2666556 - RNA, 20 nt, Human
uuaaaucuaaaucuauuuau

SEQ ID NO: 2666557 - RNA, 13 nt, Human
uuaaauccuuuua

SEQ ID NO: 2666558 - RNA, 19 nt, Human
uuaaauccuuuuaccuuuu

SEQ ID NO: 2666559 - RNA, 14 nt, Human
uuaaaucuuaaugu

SEQ ID NO: 2666560 - RNA, 15 nt, Human
uuaaaucuuaauguu

SEQ ID NO: 2666561 - RNA, 12 nt, Human
uuaaaugaaaga

SEQ ID NO: 2666562 - RNA, 16 nt, Human
uuaaaugaaagaaaau

SEQ ID NO: 2666563 - RNA, 13 nt, Human
uuaaauauuuucu

SEQ ID NO: 2666564 - RNA, 18 nt, Human
uuaaauauuuucuauuuu

SEQ ID NO: 2666565 - RNA, 22 nt, Human
uuaaauauuuucuauuuuaaga

SEQ ID NO: 2666566 - RNA, 15 nt, Human
uuaaagaaaagauga

SEQ ID NO: 2666567 - RNA, 16 nt, Human
uuaaagaaaagaugaa

SEQ ID NO: 2666568 - RNA, 17 nt, Human
uuaaagaaaagaugaaa

SEQ ID NO: 2666569 - RNA, 23 nt, Human
uuaaagaaaaaaaugucaaaagu

SEQ ID NO: 2666570 - RNA, 15 nt, Human
uuaaaauaauuauau

SEQ ID NO: 2666571 - RNA, 15 nt, Human
uuaaacuuuuuuaac

SEQ ID NO: 2666572 - RNA, 16 nt, Human
uuaaagaaaaaaaugu

SEQ ID NO: 2666573 - RNA, 22 nt, Human
uuaaacuaggagaaccaaaucu

SEQ ID NO: 2666574 - RNA, 14 nt, Human
uuaaaacuggaccu

SEQ ID NO: 2666575 - RNA, 16 nt, Human
uuaaaacuggaccugu

SEQ ID NO: 2666576 - RNA, 14 nt, Human
uuaaaauaaauauu

SEQ ID NO: 2666577 - RNA, 15 nt, Human
uuaaaauaaggauuu

SEQ ID NO: 2666578 - RNA, 14 nt, Human
uuaaaauaaaauga

SEQ ID NO: 2666579 - RNA, 15 nt, Human
uuaaaauaaaaugaa

SEQ ID NO: 2666580 - RNA, 17 nt, Human
uuaaaauaaaaugaaaa

SEQ ID NO: 2666581 - RNA, 20 nt, Human
uuaaaauaaaaugaaaauug

SEQ ID NO: 2666582 - RNA, 21 nt, Human
uuaaaauaaaaugaaaauugu

SEQ ID NO: 2666583 - RNA, 14 nt, Human
uuaaaacccaagug

SEQ ID NO: 2666584 - RNA, 20 nt, Human
uuaaaaaaaaagucagagac

SEQ ID NO: 2666585 - RNA, 22 nt, Human
uuaaaaaaaaagucagagacag

SEQ ID NO: 2666586 - RNA, 13 nt, Human
uuaaaacuaaauu

SEQ ID NO: 2666587 - RNA, 16 nt, Human
uuaaaacuaaauuuca

SEQ ID NO: 2666588 - RNA, 14 nt, Human
uguuuccucuaguu

SEQ ID NO: 2666589 - RNA, 21 nt, Human
uguuuccugacauugucuccu

SEQ ID NO: 2666590 - RNA, 22 nt, Human
uguuucuggacccuuauaaaau

SEQ ID NO: 2666591 - RNA, 23 nt, Human
uguuucuggacccuuauaaaauc

SEQ ID NO: 2666592 - RNA, 12 nt, Human
uguuuacugaaa

SEQ ID NO: 2666593 - RNA, 17 nt, Human
uguuuacauuugaugca

SEQ ID NO: 2666594 - RNA, 22 nt, Human
uguuuacauuugaugcaugucu

SEQ ID NO: 2666595 - RNA, 15 nt, Human
uguuuaccuuucucu

SEQ ID NO: 2666596 - RNA, 16 nt, Human
uguuuaccuuucucuc

SEQ ID NO: 2666597 - RNA, 23 nt, Human
uguuuaccuuucucucucuaagg

SEQ ID NO: 2666598 - RNA, 21 nt, Human
uguuuuuguauauugguuuua

SEQ ID NO: 2666599 - RNA, 14 nt, Human
uguuuuuguauauu

SEQ ID NO: 2666600 - RNA, 10 nt, Human
uguuuuuggg

SEQ ID NO: 2666601 - RNA, 13 nt, Human
uguuuuuguauau

SEQ ID NO: 2666602 - RNA, 12 nt, Human
uguuuuuguaua

SEQ ID NO: 2666603 - RNA, 13 nt, Human
uguuuuuaaugcu

SEQ ID NO: 2666604 - RNA, 19 nt, Human
uguuuuuaaugcuauuuga

SEQ ID NO: 2666605 - RNA, 12 nt, Human
uguuuuucugcu

SEQ ID NO: 2666606 - RNA, 18 nt, Human
uguuuuugaggcuuucug

SEQ ID NO: 2666607 - RNA, 16 nt, Human
uguuuuugcacauguu

SEQ ID NO: 2666608 - RNA, 22 nt, Human
uguuuuucugugugucaguuuu

SEQ ID NO: 2666609 - RNA, 19 nt, Human
uguuuuucugcuuuagacu

SEQ ID NO: 2666610 - RNA, 18 nt, Human
uguuuuucugcuuuagac

SEQ ID NO: 2666611 - RNA, 15 nt, Human
uguuuuucugcuuua

SEQ ID NO: 2666612 - RNA, 14 nt, Human
uguuuuucugcuuu

SEQ ID NO: 2666613 - RNA, 15 nt, Human
uuacagaaauggacu

SEQ ID NO: 2666614 - RNA, 19 nt, Human
uuacagaaauggacuggag

SEQ ID NO: 2666615 - RNA, 23 nt, Human
uuacacuggcaaugguaguuucu

SEQ ID NO: 2666616 - RNA, 22 nt, Human
uuacacuggcaaugguaguuuc

SEQ ID NO: 2666617 - RNA, 21 nt, Human
uuacacuggcaaugguaguuu

SEQ ID NO: 2666618 - RNA, 20 nt, Human
uuacacuggcaaugguaguu

SEQ ID NO: 2666619 - RNA, 13 nt, Human
uuacagaaaaaga

SEQ ID NO: 2666620 - RNA, 18 nt, Human
uuacagaaaaagacuuua

SEQ ID NO: 2666621 - RNA, 14 nt, Human
uuaaugacaauauu

SEQ ID NO: 2666622 - RNA, 19 nt, Human
uuacacagaaacacugccu

SEQ ID NO: 2666623 - RNA, 20 nt, Human
uuacacagaaacacugccuu

SEQ ID NO: 2666624 - RNA, 13 nt, Human
uuacacagaaaca

SEQ ID NO: 2666625 - RNA, 14 nt, Human
uuacacagaaacac

SEQ ID NO: 2666626 - RNA, 16 nt, Human
uuacacagaaacacug

SEQ ID NO: 2666627 - RNA, 18 nt, Human
uuacacagaaacacugcc

SEQ ID NO: 2666628 - RNA, 23 nt, Human
uuaauaccagauaccuuaucuua

SEQ ID NO: 2666629 - RNA, 20 nt, Human
uuaauaaucaagagccuuaa

SEQ ID NO: 2666630 - RNA, 13 nt, Human
uuaauacaaggua

SEQ ID NO: 2666631 - RNA, 19 nt, Human
uuaauacaagguauaauaa

SEQ ID NO: 2666632 - RNA, 22 nt, Human
uuaauacaagguauaauaaaau

SEQ ID NO: 2666633 - RNA, 23 nt, Human
uuaauacaagguauaauaaaauu

SEQ ID NO: 2666634 - RNA, 19 nt, Human
uuaagcaaauguuaaaagu

SEQ ID NO: 2666635 - RNA, 17 nt, Human
uuaagauaguguaacuu

SEQ ID NO: 2666636 - RNA, 22 nt, Human
uuaauaagcuacuagcaaaaua

SEQ ID NO: 2666637 - RNA, 11 nt, Human
uuaagauguga

SEQ ID NO: 2666638 - RNA, 12 nt, Human
uuaagaugugaa

SEQ ID NO: 2666639 - RNA, 13 nt, Human
uuaagaugugaaa

SEQ ID NO: 2666640 - RNA, 14 nt, Human
uuaagaugugaaaa

SEQ ID NO: 2666641 - RNA, 15 nt, Human
uuaagaugugaaaau

SEQ ID NO: 2666642 - RNA, 17 nt, Human
uuaagaugugaaaauua

SEQ ID NO: 2666643 - RNA, 17 nt, Human
uuaaauguuaccucuga

SEQ ID NO: 2666644 - RNA, 18 nt, Human
uguugacaacugugacug

SEQ ID NO: 2666645 - RNA, 15 nt, Human
uguugacaacuguga

SEQ ID NO: 2666646 - RNA, 16 nt, Human
uguugacgcaccugug

SEQ ID NO: 2666647 - RNA, 20 nt, Human
uguucuuuuaaaugauugaa

SEQ ID NO: 2666648 - RNA, 23 nt, Human
uguucauagcccaguagaccuug

SEQ ID NO: 2666649 - RNA, 19 nt, Human
uguucauagcccaguagac

SEQ ID NO: 2666650 - RNA, 20 nt, Human
uguucauagcccaguagacc

SEQ ID NO: 2666651 - RNA, 15 nt, Human
uguucaucauccaga

SEQ ID NO: 2666652 - RNA, 16 nt, Human
uguucaucauccagau

SEQ ID NO: 2666653 - RNA, 18 nt, Human
uguucaucauccagaugu

SEQ ID NO: 2666654 - RNA, 20 nt, Human
uguucaucauccagaugugg

SEQ ID NO: 2666655 - RNA, 17 nt, Human
uguucucggagugugua

SEQ ID NO: 2666656 - RNA, 18 nt, Human
uguucucggaguguguau

SEQ ID NO: 2666657 - RNA, 16 nt, Human
uguucucucuucucca

SEQ ID NO: 2666658 - RNA, 15 nt, Human
uguucucucuucucc

SEQ ID NO: 2666659 - RNA, 13 nt, Human
uguuggaaaguaa

SEQ ID NO: 2666660 - RNA, 16 nt, Human
uguugauuauuagcca

SEQ ID NO: 2666661 - RNA, 11 nt, Human
uguugauuauu

SEQ ID NO: 2666662 - RNA, 17 nt, Human
uguugaucauguacuuu

SEQ ID NO: 2666663 - RNA, 19 nt, Human
uguugaucauguacuuuuu

SEQ ID NO: 2666664 - RNA, 20 nt, Human
uguugaucauguacuuuuua

SEQ ID NO: 2666665 - RNA, 22 nt, Human
uguugaucauguacuuuuuagu

SEQ ID NO: 2666666 - RNA, 23 nt, Human
uguugaucauguacuuuuuagua

SEQ ID NO: 2666667 - RNA, 12 nt, Human
uguuggcaggcu

SEQ ID NO: 2666668 - RNA, 19 nt, Human
uguugggaaacuuggcucg

SEQ ID NO: 2666669 - RNA, 14 nt, Human
uguugggacugcua

SEQ ID NO: 2666670 - RNA, 19 nt, Human
uguugggacugcuaaauaa

SEQ ID NO: 2666671 - RNA, 18 nt, Human
uguuggcaggcuggccag

SEQ ID NO: 2666672 - RNA, 21 nt, Human
uguuggcaggcuggccagucc

SEQ ID NO: 2666673 - RNA, 16 nt, Human
uguuuaauauugagaa

SEQ ID NO: 2666674 - RNA, 13 nt, Human
uguuuaaaaugua

SEQ ID NO: 2666675 - RNA, 14 nt, Human
uguuuaaaauguaa

SEQ ID NO: 2666676 - RNA, 20 nt, Human
uguuuaaaauguaauuuaaa

SEQ ID NO: 2666677 - RNA, 22 nt, Human
uguuuaaaauguaauuuaaaug

SEQ ID NO: 2666678 - RNA, 15 nt, Human
uguguuuauuucacu

SEQ ID NO: 2666679 - RNA, 14 nt, Human
uguguuuauuucac

SEQ ID NO: 2666680 - RNA, 13 nt, Human
ugugugugcgugu

SEQ ID NO: 2666681 - RNA, 16 nt, Human
ugugugugacaauucu

SEQ ID NO: 2666682 - RNA, 14 nt, Human
ugugugguagaaac

SEQ ID NO: 2666683 - RNA, 15 nt, Human
ugugugguagaaaca

SEQ ID NO: 2666684 - RNA, 16 nt, Human
ugugugguagaaacaa

SEQ ID NO: 2666685 - RNA, 20 nt, Human
uguguuucuaugugacaauu

SEQ ID NO: 2666686 - RNA, 21 nt, Human
uguguuucuccugagcuagga

SEQ ID NO: 2666687 - RNA, 23 nt, Human
uguguggauugccucugaaaagu

SEQ ID NO: 2666688 - RNA, 23 nt, Human
uguguggacuguggcacuugccu

SEQ ID NO: 2666689 - RNA, 16 nt, Human
uguguggacuguggca

SEQ ID NO: 2666690 - RNA, 11 nt, Human
uguguggccug

SEQ ID NO: 2666691 - RNA, 22 nt, Human
ugugugcaacaggguauggacu

SEQ ID NO: 2666692 - RNA, 14 nt, Human
uguguaugccaaga

SEQ ID NO: 2666693 - RNA, 14 nt, Human
ugugugaaauugca

SEQ ID NO: 2666694 - RNA, 23 nt, Human
uguuaaaauuaucaauaucuaau

SEQ ID NO: 2666695 - RNA, 21 nt, Human
uguuaaaauuaucaauaucua

SEQ ID NO: 2666696 - RNA, 15 nt, Human
uguuaaaaguuuuau

SEQ ID NO: 2666697 - RNA, 20 nt, Human
uguuaaaaguuuuauaugcu

SEQ ID NO: 2666698 - RNA, 14 nt, Human
uguguuuuuuaaga

SEQ ID NO: 2666699 - RNA, 16 nt, Human
uguguuuuuuaagaua

SEQ ID NO: 2666700 - RNA, 17 nt, Human
uguguuuuuuaagauag

SEQ ID NO: 2666701 - RNA, 14 nt, Human
uguuaccucugaau

SEQ ID NO: 2666702 - RNA, 22 nt, Human
uguuacucucuugcaccaaauu

SEQ ID NO: 2666703 - RNA, 15 nt, Human
uguuacugggcccug

SEQ ID NO: 2666704 - RNA, 21 nt, Human
uguuaggauuuucacauucuu

SEQ ID NO: 2666705 - RNA, 14 nt, Human
uguucauagcccag

SEQ ID NO: 2666706 - RNA, 15 nt, Human
uguucauagcccagu

SEQ ID NO: 2666707 - RNA, 12 nt, Human
uuuuuuguuauu

SEQ ID NO: 2666708 - RNA, 18 nt, Human
caaugaacacuuauaagu

SEQ ID NO: 2666709 - RNA, 15 nt, Human
caaugaaccauaaau

SEQ ID NO: 2666710 - RNA, 16 nt, Human
caaugaaccauaaauu

SEQ ID NO: 2666711 - RNA, 17 nt, Human
caaugaaccauaaauuc

SEQ ID NO: 2666712 - RNA, 19 nt, Human
caaugaaccauaaauucaa

SEQ ID NO: 2666713 - RNA, 18 nt, Human
caauccugauuccucucu

SEQ ID NO: 2666714 - RNA, 21 nt, Human
caauccugauuccucucuaag

SEQ ID NO: 2666715 - RNA, 21 nt, Human
caauccuaauuucuccucccu

SEQ ID NO: 2666716 - RNA, 20 nt, Human
caauccuaauuucuccuccc

SEQ ID NO: 2666717 - RNA, 15 nt, Human
caaguguaaaauauu

SEQ ID NO: 2666718 - RNA, 16 nt, Human
caaguguaaaauauuu

SEQ ID NO: 2666719 - RNA, 22 nt, Human
caagugugugccaccaugccuc

SEQ ID NO: 2666720 - RNA, 22 nt, Human
caauaggaguggugauuugaaa

SEQ ID NO: 2666721 - RNA, 21 nt, Human
caauaggaugggcuucugugc

SEQ ID NO: 2666722 - RNA, 15 nt, Human
caauaggcuguuccc

SEQ ID NO: 2666723 - RNA, 13 nt, Human
caaugaaguugaa

SEQ ID NO: 2666724 - RNA, 21 nt, Human
caaugaaguugaaaaucauag

SEQ ID NO: 2666725 - RNA, 20 nt, Human
caaugaucaccgacugaaaa

SEQ ID NO: 2666726 - RNA, 15 nt, Human
caauuuuaucuguuu

SEQ ID NO: 2666727 - RNA, 18 nt, Human
cacacugguucucaauga

SEQ ID NO: 2666728 - RNA, 19 nt, Human
cacacugguucucaaugaa

SEQ ID NO: 2666729 - RNA, 20 nt, Human
cacacugguucucaaugaaa

SEQ ID NO: 2666730 - RNA, 14 nt, Human
cacacugguucuca

SEQ ID NO: 2666731 - RNA, 15 nt, Human
cacacugguucucaa

SEQ ID NO: 2666732 - RNA, 16 nt, Human
cacacugguucucaau

SEQ ID NO: 2666733 - RNA, 14 nt, Human
cacagacuauuuuu

SEQ ID NO: 2666734 - RNA, 13 nt, Human
cacagacuauuuu

SEQ ID NO: 2666735 - RNA, 23 nt, Human
cacagagcaagagauaagucuuu

SEQ ID NO: 2666736 - RNA, 22 nt, Human
cacacagaccccucgcaacugu

SEQ ID NO: 2666737 - RNA, 16 nt, Human
cacacuugaaaccuuu

SEQ ID NO: 2666738 - RNA, 15 nt, Human
cacacagacuauuuu

SEQ ID NO: 2666739 - RNA, 15 nt, Human
cacacagaaugcaac

SEQ ID NO: 2666740 - RNA, 15 nt, Human
cacacagccuagcac

SEQ ID NO: 2666741 - RNA, 16 nt, Human
cacaccuguagcacuu

SEQ ID NO: 2666742 - RNA, 14 nt, Human
cacacccaaagcug

SEQ ID NO: 2666743 - RNA, 15 nt, Human
cacacccaaagcuga

SEQ ID NO: 2666744 - RNA, 19 nt, Human
cacacccaaagcugagccu

SEQ ID NO: 2666745 - RNA, 22 nt, Human
cacacccaaagcugagccugca

SEQ ID NO: 2666746 - RNA, 23 nt, Human
cacaccaaucuuacuuuguaaau

SEQ ID NO: 2666747 - RNA, 14 nt, Human
cacaucaaauaaga

SEQ ID NO: 2666748 - RNA, 18 nt, Human
cacaucaaauaagaaaua

SEQ ID NO: 2666749 - RNA, 14 nt, Human
cacaucaaaccuuu

SEQ ID NO: 2666750 - RNA, 16 nt, Human
cacauauuugaagggu

SEQ ID NO: 2666751 - RNA, 23 nt, Human
cacauauuugaagggucuuucuc

SEQ ID NO: 2666752 - RNA, 13 nt, Human
cacauguuuuuau

SEQ ID NO: 2666753 - RNA, 16 nt, Human
cacauguccagcaccu

SEQ ID NO: 2666754 - RNA, 12 nt, Human
cacauguuuccu

SEQ ID NO: 2666755 - RNA, 14 nt, Human
cacauguuuccucu

SEQ ID NO: 2666756 - RNA, 15 nt, Human
cacauguuuccucua

SEQ ID NO: 2666757 - RNA, 13 nt, Human
caccaccaagcca

SEQ ID NO: 2666758 - RNA, 14 nt, Human
caccaccaccccua

SEQ ID NO: 2666759 - RNA, 14 nt, Human
caccaccccuacca

SEQ ID NO: 2666760 - RNA, 13 nt, Human
caccacagccagc

SEQ ID NO: 2666761 - RNA, 17 nt, Human
caccacagccagcaccu

SEQ ID NO: 2666762 - RNA, 19 nt, Human
caccacagccagcaccugg

SEQ ID NO: 2666763 - RNA, 13 nt, Human
cacauucuuggcu

SEQ ID NO: 2666764 - RNA, 22 nt, Human
cacauucuuggcuuaaucauuu

SEQ ID NO: 2666765 - RNA, 13 nt, Human
cacauugaagaau

SEQ ID NO: 2666766 - RNA, 23 nt, Human
cacauugaagaauguuagaguaa

SEQ ID NO: 2666767 - RNA, 17 nt, Human
cacauugagcugugcaa

SEQ ID NO: 2666768 - RNA, 23 nt, Human
cacagcagcuuauaaugggcucu

SEQ ID NO: 2666769 - RNA, 13 nt, Human
cacagccuagcac

SEQ ID NO: 2666770 - RNA, 18 nt, Human
cacagccuagcacagcag

SEQ ID NO: 2666771 - RNA, 20 nt, Human
cacagccuagcacagcagcu

SEQ ID NO: 2666772 - RNA, 14 nt, Human
cacauauauauuac

SEQ ID NO: 2666773 - RNA, 13 nt, Human
cacauauacacga

SEQ ID NO: 2666774 - RNA, 17 nt, Human
cacaguuuuuccuggaa

SEQ ID NO: 2666775 - RNA, 18 nt, Human
cacaguugcucuaugcuu

SEQ ID NO: 2666776 - RNA, 17 nt, Human
caaauaaguauuuauaa

SEQ ID NO: 2666777 - RNA, 18 nt, Human
caaauaaguauuuauaau

SEQ ID NO: 2666778 - RNA, 16 nt, Human
caaauaaguauuuaua

SEQ ID NO: 2666779 - RNA, 22 nt, Human
caaaguuuuguuguacuuaaau

SEQ ID NO: 2666780 - RNA, 14 nt, Human
caaauaagaaauaa

SEQ ID NO: 2666781 - RNA, 16 nt, Human
caaaguuugacaggaa

SEQ ID NO: 2666782 - RNA, 17 nt, Human
caaaguuugacaggaac

SEQ ID NO: 2666783 - RNA, 19 nt, Human
caaaguuugacaggaaccu

SEQ ID NO: 2666784 - RNA, 20 nt, Human
caaaguuugacaggaaccuu

SEQ ID NO: 2666785 - RNA, 13 nt, Human
caaauacacauuu

SEQ ID NO: 2666786 - RNA, 14 nt, Human
caaauacacauuug

SEQ ID NO: 2666787 - RNA, 16 nt, Human
caaauacacauuugcu

SEQ ID NO: 2666788 - RNA, 17 nt, Human
caaauacacauuugcua

SEQ ID NO: 2666789 - RNA, 14 nt, Human
caaagaaaaugaaa

SEQ ID NO: 2666790 - RNA, 16 nt, Human
caaagaaaaugaaaug

SEQ ID NO: 2666791 - RNA, 18 nt, Human
caaagaaaaugaaaugca

SEQ ID NO: 2666792 - RNA, 21 nt, Human
caaagaaaaugaaaugcauau

SEQ ID NO: 2666793 - RNA, 14 nt, Human
caaagagggcuucc

SEQ ID NO: 2666794 - RNA, 23 nt, Human
caaagaggcugccccucucacca

SEQ ID NO: 2666795 - RNA, 21 nt, Human
caaagaggcugccccucucac

SEQ ID NO: 2666796 - RNA, 22 nt, Human
caaagaggcugccccucucacc

SEQ ID NO: 2666797 - RNA, 15 nt, Human
caaagagggcuuccu

SEQ ID NO: 2666798 - RNA, 16 nt, Human
caaagagggcuuccuc

SEQ ID NO: 2666799 - RNA, 18 nt, Human
caaagagggcuuccucua

SEQ ID NO: 2666800 - RNA, 22 nt, Human
caaagagggcuuccucuagaag

SEQ ID NO: 2666801 - RNA, 12 nt, Human
caaagaggcugc

SEQ ID NO: 2666802 - RNA, 13 nt, Human
caaagaggcugcc

SEQ ID NO: 2666803 - RNA, 15 nt, Human
caaagaggcugcccc

SEQ ID NO: 2666804 - RNA, 16 nt, Human
caaagaggcugccccu

SEQ ID NO: 2666805 - RNA, 12 nt, Human
caaaaaaugagc

SEQ ID NO: 2666806 - RNA, 15 nt, Human
caaaaaacuacuucu

SEQ ID NO: 2666807 - RNA, 11 nt, Human
caaaaaacuac

SEQ ID NO: 2666808 - RNA, 18 nt, Human
caaaggagcgagcauguc

SEQ ID NO: 2666809 - RNA, 22 nt, Human
caaaggaaaauaguaauguuuu

SEQ ID NO: 2666810 - RNA, 17 nt, Human
caaaggaaaaugucugu

SEQ ID NO: 2666811 - RNA, 18 nt, Human
caaaggaaacuuugcaga

SEQ ID NO: 2666812 - RNA, 19 nt, Human
caaaggaacauugugucua

SEQ ID NO: 2666813 - RNA, 19 nt, Human
caaagcuuggagggaagcc

SEQ ID NO: 2666814 - RNA, 20 nt, Human
caaagcuuggauuaaauaca

SEQ ID NO: 2666815 - RNA, 21 nt, Human
caaagcuuggauuaaauacau

SEQ ID NO: 2666816 - RNA, 16 nt, Human
caaagcuggcucaccu

SEQ ID NO: 2666817 - RNA, 17 nt, Human
caaagcuggcucaccuu

SEQ ID NO: 2666818 - RNA, 13 nt, Human
caaccacaaaacu

SEQ ID NO: 2666819 - RNA, 22 nt, Human
caacauucauugccaagggccc

SEQ ID NO: 2666820 - RNA, 23 nt, Human
caacauguugggaaacuuggcuc

SEQ ID NO: 2666821 - RNA, 19 nt, Human
caacauguugggaaacuug

SEQ ID NO: 2666822 - RNA, 22 nt, Human
caacauguugggaaacuuggcu

SEQ ID NO: 2666823 - RNA, 16 nt, Human
caacugcauuggcuuu

SEQ ID NO: 2666824 - RNA, 19 nt, Human
caacuuagucaauaagaaa

SEQ ID NO: 2666825 - RNA, 19 nt, Human
caacuuuguaaaaaucuuu

SEQ ID NO: 2666826 - RNA, 22 nt, Human
caacuuuguaaaaaucuuuuga

SEQ ID NO: 2666827 - RNA, 16 nt, Human
caaccucuucuggcuc

SEQ ID NO: 2666828 - RNA, 18 nt, Human
caaccucuucuggcucaa

SEQ ID NO: 2666829 - RNA, 17 nt, Human
caaccucuucuggcuca

SEQ ID NO: 2666830 - RNA, 20 nt, Human
caacgaucacaaaugacuuu

SEQ ID NO: 2666831 - RNA, 13 nt, Human
caaccaagucaca

SEQ ID NO: 2666832 - RNA, 14 nt, Human
caacgccgugggcu

SEQ ID NO: 2666833 - RNA, 16 nt, Human
caacgaucacaaauga

SEQ ID NO: 2666834 - RNA, 19 nt, Human
caacgaucacaaaugacuu

SEQ ID NO: 2666835 - RNA, 18 nt, Human
caacgaucacaaaugacu

SEQ ID NO: 2666836 - RNA, 20 nt, Human
caagaaagcucacuguagcu

SEQ ID NO: 2666837 - RNA, 18 nt, Human
caagccaagggaaccugu

SEQ ID NO: 2666838 - RNA, 21 nt, Human
caagccaagggaaccuguguc

SEQ ID NO: 2666839 - RNA, 22 nt, Human
caagccaagggaaccugugucc

SEQ ID NO: 2666840 - RNA, 23 nt, Human
caagccaagggaaccuguguccg

SEQ ID NO: 2666841 - RNA, 15 nt, Human
caagcggguggcucu

SEQ ID NO: 2666842 - RNA, 18 nt, Human
caagcggguggcucuggg

SEQ ID NO: 2666843 - RNA, 19 nt, Human
caagugaaaaaggaggaag

SEQ ID NO: 2666844 - RNA, 15 nt, Human
caaguggggugcugg

SEQ ID NO: 2666845 - RNA, 17 nt, Human
caaguggggugcuggga

SEQ ID NO: 2666846 - RNA, 21 nt, Human
caaguggggugcugggaggag

SEQ ID NO: 2666847 - RNA, 18 nt, Human
caaguggggugcugggag

SEQ ID NO: 2666848 - RNA, 19 nt, Human
caaguggggugcugggagg

SEQ ID NO: 2666849 - RNA, 22 nt, Human
caagugugguagagugugccug

SEQ ID NO: 2666850 - RNA, 23 nt, Human
caaggugggaggauugcuugagc

SEQ ID NO: 2666851 - RNA, 12 nt, Human
caaggugggagg

SEQ ID NO: 2666852 - RNA, 17 nt, Human
caagggcugucauugca

SEQ ID NO: 2666853 - RNA, 12 nt, Human
caccccccaggc

SEQ ID NO: 2666854 - RNA, 12 nt, Human
cacccccagccc

SEQ ID NO: 2666855 - RNA, 13 nt, Human
cacccccagcccc

SEQ ID NO: 2666856 - RNA, 19 nt, Human
cacccccagccccgacucc

SEQ ID NO: 2666857 - RNA, 21 nt, Human
cacccccagccccgacuccag

SEQ ID NO: 2666858 - RNA, 23 nt, Human
cacccccagccccgacuccagcc

SEQ ID NO: 2666859 - RNA, 17 nt, Human
cacccccugcccugcac

SEQ ID NO: 2666860 - RNA, 14 nt, Human
cacccccugcccug

SEQ ID NO: 2666861 - RNA, 16 nt, Human
cacccccugcccugca

SEQ ID NO: 2666862 - RNA, 13 nt, Human
cacccccugcccu

SEQ ID NO: 2666863 - RNA, 14 nt, Human
cacccccucccacc

SEQ ID NO: 2666864 - RNA, 15 nt, Human
cacccccucccaccc

SEQ ID NO: 2666865 - RNA, 16 nt, Human
cacccccucccacccc

SEQ ID NO: 2666866 - RNA, 19 nt, Human
cacccccucccacccccag

SEQ ID NO: 2666867 - RNA, 19 nt, Human
caccccggggacccuguga

SEQ ID NO: 2666868 - RNA, 20 nt, Human
caccccggggacccugugac

SEQ ID NO: 2666869 - RNA, 17 nt, Human
caccccggggacccugu

SEQ ID NO: 2666870 - RNA, 18 nt, Human
caccccggggacccugug

SEQ ID NO: 2666871 - RNA, 18 nt, Human
caccccggcccccugccc

SEQ ID NO: 2666872 - RNA, 23 nt, Human
caccccggcccccugcccguucu

SEQ ID NO: 2666873 - RNA, 22 nt, Human
caccacgggacaucacagggug

SEQ ID NO: 2666874 - RNA, 13 nt, Human
cacccaccgugga

SEQ ID NO: 2666875 - RNA, 16 nt, Human
cacccaccguggagga

SEQ ID NO: 2666876 - RNA, 11 nt, Human
caccccaggac

SEQ ID NO: 2666877 - RNA, 17 nt, Human
caccccaggacgccacu

SEQ ID NO: 2666878 - RNA, 18 nt, Human
caccccaggacgccacuc

SEQ ID NO: 2666879 - RNA, 20 nt, Human
caccccaggacgccacucau

SEQ ID NO: 2666880 - RNA, 19 nt, Human
uaaaucuaaaucuauuuau

SEQ ID NO: 2666881 - RNA, 15 nt, Human
uaaaucuaaaucuau

SEQ ID NO: 2666882 - RNA, 14 nt, Human
uaaaucuaaaucua

SEQ ID NO: 2666883 - RNA, 14 nt, Human
uaaauccugaagag

SEQ ID NO: 2666884 - RNA, 16 nt, Human
uaaauccugaagagca

SEQ ID NO: 2666885 - RNA, 18 nt, Human
uaaauccugaagagcauu

SEQ ID NO: 2666886 - RNA, 21 nt, Human
uaaauaggaaucauucagaaa

SEQ ID NO: 2666887 - RNA, 23 nt, Human
uaaauaggaaucauucagaaaug

SEQ ID NO: 2666888 - RNA, 12 nt, Human
uaaauaggauuu

SEQ ID NO: 2666889 - RNA, 14 nt, Human
aauaaggauuuuuc

SEQ ID NO: 2666890 - RNA, 19 nt, Human
uaaauacacauagcaugua

SEQ ID NO: 2666891 - RNA, 23 nt, Human
uaaauaauucuuuuuuauuaauc

SEQ ID NO: 2666892 - RNA, 17 nt, Human
uaaauaauucuuuuuua

SEQ ID NO: 2666893 - RNA, 14 nt, Human
uaaauaauuuauuu

SEQ ID NO: 2666894 - RNA, 17 nt, Human
uaaauaauuuauuuaau

SEQ ID NO: 2666895 - RNA, 23 nt, Human
aauacacauagcauguaauggua

SEQ ID NO: 2666896 - RNA, 14 nt, Human
aauacacauuugcu

SEQ ID NO: 2666897 - RNA, 15 nt, Human
aauacacauuugcua

SEQ ID NO: 2666898 - RNA, 17 nt, Human
aauacaagguauaauaa

SEQ ID NO: 2666899 - RNA, 19 nt, Human
aauacaagguauaauaaaa

SEQ ID NO: 2666900 - RNA, 20 nt, Human
aauacaagguauaauaaaau

SEQ ID NO: 2666901 - RNA, 22 nt, Human
aauacaagguauaauaaaauua

SEQ ID NO: 2666902 - RNA, 22 nt, Human
uaaauuuuuuuguaugaaaaca

SEQ ID NO: 2666903 - RNA, 21 nt, Human
uaaauuuuuuuguaugaaaac

SEQ ID NO: 2666904 - RNA, 18 nt, Human
uaaauuuuuuuguaugaa

SEQ ID NO: 2666905 - RNA, 17 nt, Human
uaaauuuuuuuguauga

SEQ ID NO: 2666906 - RNA, 16 nt, Human
uaaauuuuuuuguaug

SEQ ID NO: 2666907 - RNA, 15 nt, Human
uaaauuuuuuuguau

SEQ ID NO: 2666908 - RNA, 22 nt, Human
uaaauuuugaaaaguaauauuu

SEQ ID NO: 2666909 - RNA, 15 nt, Human
uaaauuuugaaaagu

SEQ ID NO: 2666910 - RNA, 14 nt, Human
uaaauuuugaaaag

SEQ ID NO: 2666911 - RNA, 20 nt, Human
uaaauguuuggcauguaaau

SEQ ID NO: 2666912 - RNA, 22 nt, Human
uaaauguuuggcauguaaaugu

SEQ ID NO: 2666913 - RNA, 21 nt, Human
uaaauguuucuuuuaaagacc

SEQ ID NO: 2666914 - RNA, 19 nt, Human
uaaauguuucuuuuguuug

SEQ ID NO: 2666915 - RNA, 22 nt, Human
uaaauuaggaauaaauaaaaau

SEQ ID NO: 2666916 - RNA, 21 nt, Human
uaaauuaggaauaaauaaaaa

SEQ ID NO: 2666917 - RNA, 17 nt, Human
uaaauuaggaauaaaua

SEQ ID NO: 2666918 - RNA, 14 nt, Human
uaaauuaggaauaa

SEQ ID NO: 2666919 - RNA, 13 nt, Human
uaaauuacaauuu

SEQ ID NO: 2666920 - RNA, 14 nt, Human
uaaauuacaauuuu

SEQ ID NO: 2666921 - RNA, 16 nt, Human
uaaauuacaauuuuau

SEQ ID NO: 2666922 - RNA, 17 nt, Human
uaaauuacaauuuuauc

SEQ ID NO: 2666923 - RNA, 23 nt, Human
uaaauuacaauuuuaucuguuuc

SEQ ID NO: 2666924 - RNA, 18 nt, Human
uaaaguguaaguucacaa

SEQ ID NO: 2666925 - RNA, 14 nt, Human
aauaaaaaaagaaa

SEQ ID NO: 2666926 - RNA, 22 nt, Human
uaaagggauauuuuuuucuauu

SEQ ID NO: 2666927 - RNA, 13 nt, Human
aauaaaaauggau

SEQ ID NO: 2666928 - RNA, 11 nt, Human
aauaaaaauau

SEQ ID NO: 2666929 - RNA, 14 nt, Human
aauaaaaauauauu

SEQ ID NO: 2666930 - RNA, 15 nt, Human
aauaaaaauauauuu

SEQ ID NO: 2666931 - RNA, 20 nt, Human
aauaaaaauauauuuucaac

SEQ ID NO: 2666932 - RNA, 13 nt, Human
aauaaaaaugaua

SEQ ID NO: 2666933 - RNA, 15 nt, Human
aauaaaauauaucuu

SEQ ID NO: 2666934 - RNA, 20 nt, Human
aauaaaauauaucuuauaaa

SEQ ID NO: 2666935 - RNA, 13 nt, Human
aauaaaaugaaaa

SEQ ID NO: 2666936 - RNA, 14 nt, Human
aauaaaaugaaaau

SEQ ID NO: 2666937 - RNA, 19 nt, Human
aauaaaaugaaaauuguau

SEQ ID NO: 2666938 - RNA, 16 nt, Human
aauaaguauuuauaau

SEQ ID NO: 2666939 - RNA, 12 nt, Human
aauaacagcugc

SEQ ID NO: 2666940 - RNA, 13 nt, Human
aauaacagcugca

SEQ ID NO: 2666941 - RNA, 14 nt, Human
aauaacagcugcaa

SEQ ID NO: 2666942 - RNA, 19 nt, Human
aauaagcuacuagcaaaau

SEQ ID NO: 2666943 - RNA, 20 nt, Human
aauaagcuacuagcaaaaua

SEQ ID NO: 2666944 - RNA, 16 nt, Human
aauaagcuaguugaau

SEQ ID NO: 2666945 - RNA, 18 nt, Human
aauaagcuaguugaauac

SEQ ID NO: 2666946 - RNA, 17 nt, Human
aauaagcuaguugaaua

SEQ ID NO: 2666947 - RNA, 19 nt, Human
aauaagcacuguaaacuuc

SEQ ID NO: 2666948 - RNA, 22 nt, Human
aauaagcuaguugaauacuuga

SEQ ID NO: 2666949 - RNA, 20 nt, Human
aauaagcuaguugaauacuu

SEQ ID NO: 2666950 - RNA, 23 nt, Human
aauaagcuaguugaauacuugaa

SEQ ID NO: 2666951 - RNA, 22 nt, Human
aauaaauuuugaaaaguaauau

SEQ ID NO: 2666952 - RNA, 15 nt, Human
aauaacaaagcccuu

SEQ ID NO: 2666953 - RNA, 20 nt, Human
aauaaauuuugaaaaguaau

SEQ ID NO: 2666954 - RNA, 18 nt, Human
aauaaauuuugaaaagua

SEQ ID NO: 2666955 - RNA, 16 nt, Human
aauaaauuuugaaaag

SEQ ID NO: 2666956 - RNA, 15 nt, Human
aauaaauuuugaaaa

SEQ ID NO: 2666957 - RNA, 12 nt, Human
aauaaauuuuga

SEQ ID NO: 2666958 - RNA, 14 nt, Human
aauaaauuuugaaa

SEQ ID NO: 2666959 - RNA, 13 nt, Human
aauaaauuuugaa

SEQ ID NO: 2666960 - RNA, 11 nt, Human
aauaaaugugu

SEQ ID NO: 2666961 - RNA, 12 nt, Human
aauaaauguguu

SEQ ID NO: 2666962 - RNA, 18 nt, Human
aauaaauguuuuauuucu

SEQ ID NO: 2666963 - RNA, 18 nt, Human
aauaaauaaaaacuaauu

SEQ ID NO: 2666964 - RNA, 16 nt, Human
aauaaauaauuuucau

SEQ ID NO: 2666965 - RNA, 19 nt, Human
aauaaaguuugcuuagaaa

SEQ ID NO: 2666966 - RNA, 11 nt, Human
aauaaauauau

SEQ ID NO: 2666967 - RNA, 15 nt, Human
aauaaauauauacau

SEQ ID NO: 2666968 - RNA, 22 nt, Human
uaaaauuaucaauaucuaauau

SEQ ID NO: 2666969 - RNA, 15 nt, Human
uaaaauuaugagauu

SEQ ID NO: 2666970 - RNA, 22 nt, Human
uaaaauuaugagauugguuuuc

SEQ ID NO: 2666971 - RNA, 14 nt, Human
uaaaauuuguugca

SEQ ID NO: 2666972 - RNA, 15 nt, Human
uaaaauuuguugcau

SEQ ID NO: 2666973 - RNA, 16 nt, Human
uaaaauuuuguauguu

SEQ ID NO: 2666974 - RNA, 19 nt, Human
uaaaauuuuguauguuaaa

SEQ ID NO: 2666975 - RNA, 23 nt, Human
uaaaauuuuguauguuaaagaga

SEQ ID NO: 2666976 - RNA, 20 nt, Human
aaguuuuccuacacuugaga

SEQ ID NO: 2666977 - RNA, 16 nt, Human
uaaacaaagauucaug

SEQ ID NO: 2666978 - RNA, 16 nt, Human
uaaacaaaaugaagcu

SEQ ID NO: 2666979 - RNA, 18 nt, Human
uaaacaaagauucaugau

SEQ ID NO: 2666980 - RNA, 14 nt, Human
uaaaccacugugcg

SEQ ID NO: 2666981 - RNA, 22 nt, Human
uaaaccacuuaaacgaagaguu

SEQ ID NO: 2666982 - RNA, 19 nt, Human
aaguuucaguauuagaugc

SEQ ID NO: 2666983 - RNA, 13 nt, Human
aaguuugcuuaga

SEQ ID NO: 2666984 - RNA, 15 nt, Human
aaguuugcuuagaaa

SEQ ID NO: 2666985 - RNA, 16 nt, Human
aaguuugcuuagaaaa

SEQ ID NO: 2666986 - RNA, 13 nt, Human
aaguuuauauaua

SEQ ID NO: 2666987 - RNA, 13 nt, Human
aaguuuuauaugc

SEQ ID NO: 2666988 - RNA, 13 nt, Human
aaguuuuguaaaa

SEQ ID NO: 2666989 - RNA, 16 nt, Human
aaguuuuguaaaagaa

SEQ ID NO: 2666990 - RNA, 15 nt, Human
aaguuuugacaagcu

SEQ ID NO: 2666991 - RNA, 20 nt, Human
aaguuuugacaagcuggcuu

SEQ ID NO: 2666992 - RNA, 19 nt, Human
aaguuuugacaagcuggcu

SEQ ID NO: 2666993 - RNA, 15 nt, Human
aaguguuuauguugu

SEQ ID NO: 2666994 - RNA, 19 nt, Human
aaguguuuauguuguuuau

SEQ ID NO: 2666995 - RNA, 13 nt, Human
aaguuaaaauugu

SEQ ID NO: 2666996 - RNA, 18 nt, Human
aaguuaaacauugaagua

SEQ ID NO: 2666997 - RNA, 21 nt, Human
aaguucauguccaaacguccu

SEQ ID NO: 2666998 - RNA, 14 nt, Human
aaguuauugcaguu

SEQ ID NO: 2666999 - RNA, 15 nt, Human
aaguuauugcaguuu

SEQ ID NO: 2667000 - RNA, 17 nt, Human
aaguuauugcaguuuau

SEQ ID NO: 2667001 - RNA, 19 nt, Human
aaguuuacaaucaaaggaa

SEQ ID NO: 2667002 - RNA, 18 nt, Human
aaguuuacaaucaaagga

SEQ ID NO: 2667003 - RNA, 15 nt, Human
uaaaccucaguuauu

SEQ ID NO: 2667004 - RNA, 13 nt, Human
uaaacccucagag

SEQ ID NO: 2667005 - RNA, 16 nt, Human
uaaacccucagagccu

SEQ ID NO: 2667006 - RNA, 18 nt, Human
uaaaccgccaaggcuggg

SEQ ID NO: 2667007 - RNA, 16 nt, Human
uaaaccgccaaggcug

SEQ ID NO: 2667008 - RNA, 21 nt, Human
uaaaccuaggacuuccgagcu

SEQ ID NO: 2667009 - RNA, 18 nt, Human
uaaacucaucugaaaugu

SEQ ID NO: 2667010 - RNA, 22 nt, Human
uaaacucaucugaaauguuaca

SEQ ID NO: 2667011 - RNA, 14 nt, Human
uaaacuauaaaaca

SEQ ID NO: 2667012 - RNA, 22 nt, Human
uaaacuauaaaacaaaaauuug

SEQ ID NO: 2667013 - RNA, 23 nt, Human
uaaacucagcaucaaaauauuuc

SEQ ID NO: 2667014 - RNA, 19 nt, Human
uaaagagcccuugccuccc

SEQ ID NO: 2667015 - RNA, 21 nt, Human
uaaagagcccuugccucccca

SEQ ID NO: 2667016 - RNA, 15 nt, Human
uaaagagcccuugcc

SEQ ID NO: 2667017 - RNA, 16 nt, Human
uaaagagcccuugccu

SEQ ID NO: 2667018 - RNA, 17 nt, Human
uaaagagcccuugccuc

SEQ ID NO: 2667019 - RNA, 19 nt, Human
uaaagagagaacaggacua

SEQ ID NO: 2667020 - RNA, 12 nt, Human
uaaagagaauga

SEQ ID NO: 2667021 - RNA, 13 nt, Human
uaaagagaaugag

SEQ ID NO: 2667022 - RNA, 20 nt, Human
uaaagagcaucugauucuug

SEQ ID NO: 2667023 - RNA, 15 nt, Human
uaaagacagaggcag

SEQ ID NO: 2667024 - RNA, 15 nt, Human
uaaagacaggagaca

SEQ ID NO: 2667025 - RNA, 23 nt, Human
uaaagacaggagacaaaagagca

SEQ ID NO: 2667026 - RNA, 15 nt, Human
uaaagacaccugguu

SEQ ID NO: 2667027 - RNA, 20 nt, Human
uaaagacuggcuuuuauuaa

SEQ ID NO: 2667028 - RNA, 13 nt, Human
uaaagacugguuu

SEQ ID NO: 2667029 - RNA, 19 nt, Human
uaaagacugguuuucugcc

SEQ ID NO: 2667030 - RNA, 22 nt, Human
uaaagacugguuuucugccaau

SEQ ID NO: 2667031 - RNA, 22 nt, Human
uaaagacuuguauagcaugaaa

SEQ ID NO: 2667032 - RNA, 15 nt, Human
uaaagacuggcuuuu

SEQ ID NO: 2667033 - RNA, 14 nt, Human
uaaagacuggcuuu

SEQ ID NO: 2667034 - RNA, 19 nt, Human
uaaagacccuccuauucua

SEQ ID NO: 2667035 - RNA, 23 nt, Human
uaaagacccuccuauucuauaaa

SEQ ID NO: 2667036 - RNA, 14 nt, Human
uaaagaaguauuuu

SEQ ID NO: 2667037 - RNA, 15 nt, Human
uaaagaaguauuuuu

SEQ ID NO: 2667038 - RNA, 17 nt, Human
uaaagaaguauuuuuag

SEQ ID NO: 2667039 - RNA, 19 nt, Human
uaaagaaguauuuuuagaa

SEQ ID NO: 2667040 - RNA, 22 nt, Human
uaaagaaguauuuuuagaauaa

SEQ ID NO: 2667041 - RNA, 16 nt, Human
uaaagaauaugacuuu

SEQ ID NO: 2667042 - RNA, 19 nt, Human
uaaagaauaugacuuuuua

SEQ ID NO: 2667043 - RNA, 16 nt, Human
uaaagaaggaugaugu

SEQ ID NO: 2667044 - RNA, 15 nt, Human
guugacaacugugac

SEQ ID NO: 2667045 - RNA, 14 nt, Human
guugacaacuguga

SEQ ID NO: 2667046 - RNA, 16 nt, Human
guugacaacugugacu

SEQ ID NO: 2667047 - RNA, 12 nt, Human
guugagcuauga

SEQ ID NO: 2667048 - RNA, 16 nt, Human
guugagcuaugacuua

SEQ ID NO: 2667049 - RNA, 15 nt, Human
guugagcuaugacuu

SEQ ID NO: 2667050 - RNA, 14 nt, Human
guugagcaagcagu

SEQ ID NO: 2667051 - RNA, 18 nt, Human
guucuccguuagcuccug

SEQ ID NO: 2667052 - RNA, 19 nt, Human
guucuccguuagcuccugu

SEQ ID NO: 2667053 - RNA, 14 nt, Human
guucugugguuccu

SEQ ID NO: 2667054 - RNA, 18 nt, Human
guucugugguuccucugc

SEQ ID NO: 2667055 - RNA, 20 nt, Human
guucuguauuugaaagugcc

SEQ ID NO: 2667056 - RNA, 15 nt, Human
guucuguauuugaaa

SEQ ID NO: 2667057 - RNA, 12 nt, Human
guucucaaugaa

SEQ ID NO: 2667058 - RNA, 13 nt, Human
guucucaaugaaa

SEQ ID NO: 2667059 - RNA, 14 nt, Human
guucucaaugaaaa

SEQ ID NO: 2667060 - RNA, 15 nt, Human
guucucaaugaaaaa

SEQ ID NO: 2667061 - RNA, 23 nt, Human
guucucagaaucccuuaacaguu

SEQ ID NO: 2667062 - RNA, 17 nt, Human
aagcuuuccuguugaau

SEQ ID NO: 2667063 - RNA, 19 nt, Human
aagcuuugaauacuaaauu

SEQ ID NO: 2667064 - RNA, 18 nt, Human
aagcuguuacugucuuca

SEQ ID NO: 2667065 - RNA, 16 nt, Human
aagcucugaccacuug

SEQ ID NO: 2667066 - RNA, 13 nt, Human
aagcuguuccugu

SEQ ID NO: 2667067 - RNA, 17 nt, Human
aagcuccuaucuguuuu

SEQ ID NO: 2667068 - RNA, 16 nt, Human
aagcuccgcaggacuu

SEQ ID NO: 2667069 - RNA, 15 nt, Human
aagcuccgcaggacu

SEQ ID NO: 2667070 - RNA, 14 nt, Human
gugugugugugcac

SEQ ID NO: 2667071 - RNA, 13 nt, Human
guguuuauaaaau

SEQ ID NO: 2667072 - RNA, 14 nt, Human
guguuuauaaaaua

SEQ ID NO: 2667073 - RNA, 22 nt, Human
guguuuauaaaauauaaacaaa

SEQ ID NO: 2667074 - RNA, 18 nt, Human
guguuuagaauugaaggu

SEQ ID NO: 2667075 - RNA, 15 nt, Human
guguuuagaauugaa

SEQ ID NO: 2667076 - RNA, 21 nt, Human
guugggggaggggagacuuug

SEQ ID NO: 2667077 - RNA, 23 nt, Human
guugggaaugaggaaaauucuua

SEQ ID NO: 2667078 - RNA, 16 nt, Human
aaggcuaaaacuuaac

SEQ ID NO: 2667079 - RNA, 18 nt, Human
guugcucaaaaaaugagc

SEQ ID NO: 2667080 - RNA, 17 nt, Human
guugcuauuuuuguaaa

SEQ ID NO: 2667081 - RNA, 15 nt, Human
guugcugacuuagaa

SEQ ID NO: 2667082 - RNA, 23 nt, Human
guugcucuaugcuuuccaaaccu

SEQ ID NO: 2667083 - RNA, 13 nt, Human
aaggccucuugua

SEQ ID NO: 2667084 - RNA, 20 nt, Human
aaggccucuuguaaagacug

SEQ ID NO: 2667085 - RNA, 21 nt, Human
aaggccucuuguaaagacugg

SEQ ID NO: 2667086 - RNA, 20 nt, Human
aaggccugguguuucuugau

SEQ ID NO: 2667087 - RNA, 12 nt, Human
aaggcgcugaga

SEQ ID NO: 2667088 - RNA, 17 nt, Human
aaggcgcugagacugug

SEQ ID NO: 2667089 - RNA, 22 nt, Human
aaggauauuuacuacuuuugca

SEQ ID NO: 2667090 - RNA, 14 nt, Human
aaggauaguaagca

SEQ ID NO: 2667091 - RNA, 15 nt, Human
aaggauaguaagcau

SEQ ID NO: 2667092 - RNA, 20 nt, Human
aaggauaguaagcauagaaa

SEQ ID NO: 2667093 - RNA, 20 nt, Human
aaggaggaagagaaaaaaua

SEQ ID NO: 2667094 - RNA, 18 nt, Human
aaggaagguggauggccc

SEQ ID NO: 2667095 - RNA, 19 nt, Human
aaggagagagcaaagggug

SEQ ID NO: 2667096 - RNA, 12 nt, Human
aaggaaggugga

SEQ ID NO: 2667097 - RNA, 17 nt, Human
aaggaagguggauggcc

SEQ ID NO: 2667098 - RNA, 20 nt, Human
aaggaaacaaccaugucauu

SEQ ID NO: 2667099 - RNA, 22 nt, Human
guugaucauguacuuuuuagua

SEQ ID NO: 2667100 - RNA, 14 nt, Human
aagugaagugauac

SEQ ID NO: 2667101 - RNA, 15 nt, Human
aagugaaugcuggga

SEQ ID NO: 2667102 - RNA, 18 nt, Human
guuuuucuaggccugggg

SEQ ID NO: 2667103 - RNA, 12 nt, Human
guuuuucuacua

SEQ ID NO: 2667104 - RNA, 15 nt, Human
aagugagaagauggu

SEQ ID NO: 2667105 - RNA, 19 nt, Human
guuuuuuucuucuguauuu

SEQ ID NO: 2667106 - RNA, 14 nt, Human
guuuuuuuauuucu

SEQ ID NO: 2667107 - RNA, 18 nt, Human
guuuuuuguuuuucugcu

SEQ ID NO: 2667108 - RNA, 17 nt, Human
guuuuuuuguuauuaaa

SEQ ID NO: 2667109 - RNA, 21 nt, Human
guuuuuuaaaauauuuaucug

SEQ ID NO: 2667110 - RNA, 18 nt, Human
guuuuuuaagauagugua

SEQ ID NO: 2667111 - RNA, 19 nt, Human
guuuuuuaagauaguguaa

SEQ ID NO: 2667112 - RNA, 15 nt, Human
guuuuuuccucagug

SEQ ID NO: 2667113 - RNA, 20 nt, Human
guuuuuuccucagugcauuu

SEQ ID NO: 2667114 - RNA, 9 nt, Human
guuuuuugu

SEQ ID NO: 2667115 - RNA, 16 nt, Human
guuuuugucuuaaaaa

SEQ ID NO: 2667116 - RNA, 14 nt, Human
guuuuuguauauug

SEQ ID NO: 2667117 - RNA, 15 nt, Human
guuuuuguuuggaga

SEQ ID NO: 2667118 - RNA, 15 nt, Human
guuuuugcacauguu

SEQ ID NO: 2667119 - RNA, 22 nt, Human
guuuuucugcuuuagacuugaa

SEQ ID NO: 2667120 - RNA, 19 nt, Human
guuuuucugcuuuagacuu

SEQ ID NO: 2667121 - RNA, 18 nt, Human
guuuuucugcuuuagacu

SEQ ID NO: 2667122 - RNA, 16 nt, Human
guuuuucugcuuuaga

SEQ ID NO: 2667123 - RNA, 14 nt, Human
guuuuucugcuuua

SEQ ID NO: 2667124 - RNA, 14 nt, Human
aaguacucuggagc

SEQ ID NO: 2667125 - RNA, 21 nt, Human
aagucacacauuacaaaguua

SEQ ID NO: 2667126 - RNA, 17 nt, Human
aagucauagccauaaau

SEQ ID NO: 2667127 - RNA, 21 nt, Human
aagucaagugaaaaaggagga

SEQ ID NO: 2667128 - RNA, 20 nt, Human
aagucaauauguggaagcaa

SEQ ID NO: 2667129 - RNA, 16 nt, Human
aagggcccagauucua

SEQ ID NO: 2667130 - RNA, 22 nt, Human
aaggcuggcgagagucuggccc

SEQ ID NO: 2667131 - RNA, 16 nt, Human
aaggcugaugucaauu

SEQ ID NO: 2667132 - RNA, 13 nt, Human
aaggcuggcaggu

SEQ ID NO: 2667133 - RNA, 20 nt, Human
aaggcuggcgagagucuggc

SEQ ID NO: 2667134 - RNA, 21 nt, Human
guuguaaaguauguauuauuu

SEQ ID NO: 2667135 - RNA, 18 nt, Human
guuguaaauaauuuauuu

SEQ ID NO: 2667136 - RNA, 16 nt, Human
guuguaaaccaaguga

SEQ ID NO: 2667137 - RNA, 13 nt, Human
aaggguuucucua

SEQ ID NO: 2667138 - RNA, 14 nt, Human
aaggguuucucuau

SEQ ID NO: 2667139 - RNA, 18 nt, Human
aaguaaauacaugcauau

SEQ ID NO: 2667140 - RNA, 22 nt, Human
guuucuggacccuuauaaaauc

SEQ ID NO: 2667141 - RNA, 18 nt, Human
guuucugguggucuguug

SEQ ID NO: 2667142 - RNA, 21 nt, Human
guuucugguggucuguuggca

SEQ ID NO: 2667143 - RNA, 15 nt, Human
guuucuccugagcua

SEQ ID NO: 2667144 - RNA, 18 nt, Human
guuucuccugagcuagga

SEQ ID NO: 2667145 - RNA, 18 nt, Human
guuucuccaaacugaagc

SEQ ID NO: 2667146 - RNA, 22 nt, Human
guuuggcauguaaauguaaacu

SEQ ID NO: 2667147 - RNA, 18 nt, Human
guuuuauagccuggacug

SEQ ID NO: 2667148 - RNA, 15 nt, Human
guuuuauacugaagg

SEQ ID NO: 2667149 - RNA, 21 nt, Human
guuuuauacugaaggaaaaac

SEQ ID NO: 2667150 - RNA, 18 nt, Human
guuuuacugcagcuuugu

SEQ ID NO: 2667151 - RNA, 16 nt, Human
guuuuacugcagcuuu

SEQ ID NO: 2667152 - RNA, 16 nt, Human
guuuuauaauccuuaa

SEQ ID NO: 2667153 - RNA, 15 nt, Human
guuuuacugcagcuu

SEQ ID NO: 2667154 - RNA, 13 nt, Human
guuuuacugucua

SEQ ID NO: 2667155 - RNA, 15 nt, Human
guuuuacugucuauu

SEQ ID NO: 2667156 - RNA, 19 nt, Human
guuuuaaggacugacugag

SEQ ID NO: 2667157 - RNA, 18 nt, Human
guuuuaaggacugacuga

SEQ ID NO: 2667158 - RNA, 17 nt, Human
guggcacuugccugggu

SEQ ID NO: 2667159 - RNA, 14 nt, Human
guggcaccagcagc

SEQ ID NO: 2667160 - RNA, 13 nt, Human
guggcaccagcag

SEQ ID NO: 2667161 - RNA, 19 nt, Human
guggcacuugccuggguca

SEQ ID NO: 2667162 - RNA, 16 nt, Human
guggcaaucugugggc

SEQ ID NO: 2667163 - RNA, 18 nt, Human
guggauuuuguuuaaaaa

SEQ ID NO: 2667164 - RNA, 20 nt, Human
guggacugagugggaagccc

SEQ ID NO: 2667165 - RNA, 17 nt, Human
guggacugagugggaag

SEQ ID NO: 2667166 - RNA, 18 nt, Human
guggacugagugggaagc

SEQ ID NO: 2667167 - RNA, 20 nt, Human
guggacugaccuuguaaaag

SEQ ID NO: 2667168 - RNA, 21 nt, Human
guggacugaccuuguaaaaga

SEQ ID NO: 2667169 - RNA, 15 nt, Human
aagaauguuagagua

SEQ ID NO: 2667170 - RNA, 16 nt, Human
aagaauguuagaguaa

SEQ ID NO: 2667171 - RNA, 20 nt, Human
aagaauguuagaguaaugaa

SEQ ID NO: 2667172 - RNA, 21 nt, Human
aagaauguuagaguaaugaaa

SEQ ID NO: 2667173 - RNA, 20 nt, Human
aagaauauccuuuaaaauuu

SEQ ID NO: 2667174 - RNA, 21 nt, Human
aagaauauccuuuaaaauuua

SEQ ID NO: 2667175 - RNA, 12 nt, Human
aagaauauugca

SEQ ID NO: 2667176 - RNA, 14 nt, Human
aagaauauugcaaa

SEQ ID NO: 2667177 - RNA, 17 nt, Human
aagaauauugcaaaaua

SEQ ID NO: 2667178 - RNA, 19 nt, Human
aagaauauugcaaaauaca

SEQ ID NO: 2667179 - RNA, 23 nt, Human
aagaauauugcaaaauacaugaa

SEQ ID NO: 2667180 - RNA, 19 nt, Human
guggcagcaacggcacagc

SEQ ID NO: 2667181 - RNA, 14 nt, Human
aagaauaugacuuu

SEQ ID NO: 2667182 - RNA, 12 nt, Human
aagaauuugcau

SEQ ID NO: 2667183 - RNA, 13 nt, Human
aagaauuugcaua

SEQ ID NO: 2667184 - RNA, 14 nt, Human
aagaauuugcauac

SEQ ID NO: 2667185 - RNA, 19 nt, Human
aagaauucaaacuggggcc

SEQ ID NO: 2667186 - RNA, 19 nt, Human
aagaauucugauugauuug

SEQ ID NO: 2667187 - RNA, 20 nt, Human
aagaauucugauugauuuga

SEQ ID NO: 2667188 - RNA, 15 nt, Human
aagaauugaaaaguu

SEQ ID NO: 2667189 - RNA, 18 nt, Human
aagaauugaaaaguuuuu

SEQ ID NO: 2667190 - RNA, 19 nt, Human
aagaauugaaaaguuuuug

SEQ ID NO: 2667191 - RNA, 20 nt, Human
aagaauugaaaaguuuuugu

SEQ ID NO: 2667192 - RNA, 20 nt, Human
aagaaguauuuuuagaauaa

SEQ ID NO: 2667193 - RNA, 14 nt, Human
aagaagggagaaga

SEQ ID NO: 2667194 - RNA, 15 nt, Human
aagaagggagaagaa

SEQ ID NO: 2667195 - RNA, 17 nt, Human
aagaagggagaagaaag

SEQ ID NO: 2667196 - RNA, 15 nt, Human
gugcugcugcugcug

SEQ ID NO: 2667197 - RNA, 22 nt, Human
aagaagccuguaacacuccucu

SEQ ID NO: 2667198 - RNA, 18 nt, Human
gugcugggcggcugugcu

SEQ ID NO: 2667199 - RNA, 22 nt, Human
gugcuggagcacugggcucccg

SEQ ID NO: 2667200 - RNA, 16 nt, Human
gugcuggagcacuggg

SEQ ID NO: 2667201 - RNA, 19 nt, Human
gugcuggagcacugggcuc

SEQ ID NO: 2667202 - RNA, 17 nt, Human
gugcuggagcacugggc

SEQ ID NO: 2667203 - RNA, 15 nt, Human
gugcuggcaaccacu

SEQ ID NO: 2667204 - RNA, 17 nt, Human
gugcuggagucuccuga

SEQ ID NO: 2667205 - RNA, 23 nt, Human
gugcuggagucuccugaggacac

SEQ ID NO: 2667206 - RNA, 13 nt, Human
gugcugugaggga

SEQ ID NO: 2667207 - RNA, 14 nt, Human
gugcugugagggag

SEQ ID NO: 2667208 - RNA, 15 nt, Human
gugcugugagggagg

SEQ ID NO: 2667209 - RNA, 16 nt, Human
gugcugugagggaggg

SEQ ID NO: 2667210 - RNA, 12 nt, Human
guggaagcaacc

SEQ ID NO: 2667211 - RNA, 13 nt, Human
guggaagcaacca

SEQ ID NO: 2667212 - RNA, 16 nt, Human
guggaaggcaagccag

SEQ ID NO: 2667213 - RNA, 20 nt, Human
guggaagaagggagaagaaa

SEQ ID NO: 2667214 - RNA, 15 nt, Human
guggaagaagggaga

SEQ ID NO: 2667215 - RNA, 16 nt, Human
guggaagaagggagaa

SEQ ID NO: 2667216 - RNA, 18 nt, Human
guggaagaagggagaaga

SEQ ID NO: 2667217 - RNA, 16 nt, Human
guggacacacacagac

SEQ ID NO: 2667218 - RNA, 17 nt, Human
aacuuguauuaaagaca

SEQ ID NO: 2667219 - RNA, 11 nt, Human
gugccuggggu

SEQ ID NO: 2667220 - RNA, 13 nt, Human
aagaaaagaccuu

SEQ ID NO: 2667221 - RNA, 13 nt, Human
aagaaaagaugaa

SEQ ID NO: 2667222 - RNA, 14 nt, Human
aagaaaagaugaaa

SEQ ID NO: 2667223 - RNA, 13 nt, Human
aagaaaacaucuu

SEQ ID NO: 2667224 - RNA, 17 nt, Human
aagaaaacaucuuuaag

SEQ ID NO: 2667225 - RNA, 16 nt, Human
aagaaaaugaaaugca

SEQ ID NO: 2667226 - RNA, 14 nt, Human
aagaaaauugaguu

SEQ ID NO: 2667227 - RNA, 22 nt, Human
aagaaaguggucuuaagaaaug

SEQ ID NO: 2667228 - RNA, 16 nt, Human
aagaaagucagccaua

SEQ ID NO: 2667229 - RNA, 17 nt, Human
aagaaauaaaccaaagg

SEQ ID NO: 2667230 - RNA, 22 nt, Human
aagaagcaguggccuuauugca

SEQ ID NO: 2667231 - RNA, 15 nt, Human
aagaagcucucuccu

SEQ ID NO: 2667232 - RNA, 14 nt, Human
aagaagcucucucc

SEQ ID NO: 2667233 - RNA, 14 nt, Human
aacuugcuuaaauu

SEQ ID NO: 2667234 - RNA, 15 nt, Human
aacuugcuuaaauuu

SEQ ID NO: 2667235 - RNA, 18 nt, Human
aacuugcuuaaauuucuu

SEQ ID NO: 2667236 - RNA, 19 nt, Human
aacuugcuuaaauuucuua

SEQ ID NO: 2667237 - RNA, 20 nt, Human
aacuugcuuaaauuucuuau

SEQ ID NO: 2667238 - RNA, 21 nt, Human
aacuugcuuaaauuucuuaug

SEQ ID NO: 2667239 - RNA, 18 nt, Human
gugccugagaggcaggca

SEQ ID NO: 2667240 - RNA, 14 nt, Human
gugccugagaggca

SEQ ID NO: 2667241 - RNA, 15 nt, Human
gugccugagaggcag

SEQ ID NO: 2667242 - RNA, 16 nt, Human
gugccugagaggcagg

SEQ ID NO: 2667243 - RNA, 17 nt, Human
gugccugagaggcaggc

SEQ ID NO: 2667244 - RNA, 23 nt, Human
aacugcaggcccuggccuccccu

SEQ ID NO: 2667245 - RNA, 17 nt, Human
aagcaaaucagaaacuu

SEQ ID NO: 2667246 - RNA, 13 nt, Human
aagaugaucauuu

SEQ ID NO: 2667247 - RNA, 17 nt, Human
aagaugacuguguugua

SEQ ID NO: 2667248 - RNA, 18 nt, Human
gugguuauggagagggug

SEQ ID NO: 2667249 - RNA, 20 nt, Human
gugggauuuccagaaccaca

SEQ ID NO: 2667250 - RNA, 14 nt, Human
aagauccagcugcc

SEQ ID NO: 2667251 - RNA, 12 nt, Human
aagaucacuguu

SEQ ID NO: 2667252 - RNA, 20 nt, Human
aagaucacuguuuagauuug

SEQ ID NO: 2667253 - RNA, 14 nt, Human
aagaucacuguuua

SEQ ID NO: 2667254 - RNA, 20 nt, Human
aagcaaguaaaaaggcuaaa

SEQ ID NO: 2667255 - RNA, 19 nt, Human
aagcaaguaaaaaggcuaa

SEQ ID NO: 2667256 - RNA, 18 nt, Human
guguccaugcgcucaggg

SEQ ID NO: 2667257 - RNA, 19 nt, Human
guguccaugcgcucagggc

SEQ ID NO: 2667258 - RNA, 20 nt, Human
guguccaugcgcucagggcc

SEQ ID NO: 2667259 - RNA, 21 nt, Human
guguccaugcgcucagggcca

SEQ ID NO: 2667260 - RNA, 16 nt, Human
gugucuugggcagagc

SEQ ID NO: 2667261 - RNA, 17 nt, Human
gugucuugggcagagcu

SEQ ID NO: 2667262 - RNA, 20 nt, Human
gugucuugggcagagcuggc

SEQ ID NO: 2667263 - RNA, 23 nt, Human
gugucuugggcagagcuggcucu

SEQ ID NO: 2667264 - RNA, 11 nt, Human
guguguaaaca

SEQ ID NO: 2667265 - RNA, 12 nt, Human
guguguaaacaa

SEQ ID NO: 2667266 - RNA, 17 nt, Human
gugugugguagaaacaa

SEQ ID NO: 2667267 - RNA, 15 nt, Human
gugugugugugugca

SEQ ID NO: 2667268 - RNA, 11 nt, Human
aagacuggcuu

SEQ ID NO: 2667269 - RNA, 23 nt, Human
aagacuggcuuuuauuaaugcac

SEQ ID NO: 2667270 - RNA, 15 nt, Human
aagacugguuuucug

SEQ ID NO: 2667271 - RNA, 16 nt, Human
aagacugguuuucugc

SEQ ID NO: 2667272 - RNA, 17 nt, Human
aagacugguuuucugcc

SEQ ID NO: 2667273 - RNA, 20 nt, Human
aagacugguuuucugccaau

SEQ ID NO: 2667274 - RNA, 21 nt, Human
guggccccacccugggcccug

SEQ ID NO: 2667275 - RNA, 23 nt, Human
guggccccacccugggcccuggg

SEQ ID NO: 2667276 - RNA, 16 nt, Human
guggccccguuucugg

SEQ ID NO: 2667277 - RNA, 17 nt, Human
guggccccguuucuggu

SEQ ID NO: 2667278 - RNA, 18 nt, Human
aagagcccuaaguuugua

SEQ ID NO: 2667279 - RNA, 13 nt, Human
aagagcuauugcc

SEQ ID NO: 2667280 - RNA, 20 nt, Human
aagagcuauugccaaccagu

SEQ ID NO: 2667281 - RNA, 19 nt, Human
aagagauugugguuucauu

SEQ ID NO: 2667282 - RNA, 16 nt, Human
aagagauugugguuuc

SEQ ID NO: 2667283 - RNA, 22 nt, Human
aagacuggcuuuuauuaaugca

SEQ ID NO: 2667284 - RNA, 18 nt, Human
gugguggcucacgccugu

SEQ ID NO: 2667285 - RNA, 18 nt, Human
gugguggcccacgccugu

SEQ ID NO: 2667286 - RNA, 18 nt, Human
guggguccugaggccugc

SEQ ID NO: 2667287 - RNA, 15 nt, Human
gugguggaaggguag

SEQ ID NO: 2667288 - RNA, 22 nt, Human
guggccucagcucaaugcaguu

SEQ ID NO: 2667289 - RNA, 23 nt, Human
guggccccguuucugguggucug

SEQ ID NO: 2667290 - RNA, 12 nt, Human
gugggagcugag

SEQ ID NO: 2667291 - RNA, 13 nt, Human
guccuaaugguga

SEQ ID NO: 2667292 - RNA, 14 nt, Human
guccccgcugcugu

SEQ ID NO: 2667293 - RNA, 15 nt, Human
guccccgcugcugug

SEQ ID NO: 2667294 - RNA, 16 nt, Human
guccccgcugcugugc

SEQ ID NO: 2667295 - RNA, 13 nt, Human
guccccgcagccc

SEQ ID NO: 2667296 - RNA, 18 nt, Human
guccaugcuaacaaagac

SEQ ID NO: 2667297 - RNA, 19 nt, Human
guccaugcuaacaaagaca

SEQ ID NO: 2667298 - RNA, 13 nt, Human
guccauucuccca

SEQ ID NO: 2667299 - RNA, 15 nt, Human
guccauucucccagg

SEQ ID NO: 2667300 - RNA, 21 nt, Human
guccccccccaaccuuucccu

SEQ ID NO: 2667301 - RNA, 21 nt, Human
guccuaauggugaugcagucu

SEQ ID NO: 2667302 - RNA, 16 nt, Human
aacagaguaaucuugu

SEQ ID NO: 2667303 - RNA, 12 nt, Human
aacauauaugga

SEQ ID NO: 2667304 - RNA, 17 nt, Human
aacauaugaaaauacaa

SEQ ID NO: 2667305 - RNA, 23 nt, Human
aacauagaaauggaaauuuugcu

SEQ ID NO: 2667306 - RNA, 20 nt, Human
aacauguuaaugacaauauu

SEQ ID NO: 2667307 - RNA, 22 nt, Human
aacauguuaaugacaauauucc

SEQ ID NO: 2667308 - RNA, 13 nt, Human
aacauaacauaaa

SEQ ID NO: 2667309 - RNA, 21 nt, Human
aacauaaauuuuuugaagucu

SEQ ID NO: 2667310 - RNA, 20 nt, Human
aacagugaaguuuuacuguc

SEQ ID NO: 2667311 - RNA, 21 nt, Human
aacagugaaguuuuacugucu

SEQ ID NO: 2667312 - RNA, 16 nt, Human
guccuugauuucaaag

SEQ ID NO: 2667313 - RNA, 19 nt, Human
guccuugauuucaaaguuu

SEQ ID NO: 2667314 - RNA, 21 nt, Human
guccugcucauuaugccacuu

SEQ ID NO: 2667315 - RNA, 15 nt, Human
guccugccuguggcg

SEQ ID NO: 2667316 - RNA, 22 nt, Human
guccugccuguggcgccgucuc

SEQ ID NO: 2667317 - RNA, 22 nt, Human
gucgagaaagaggcaccaggaa

SEQ ID NO: 2667318 - RNA, 19 nt, Human
gucucaaaaaaagaaaaag

SEQ ID NO: 2667319 - RNA, 15 nt, Human
gucuccaggggcugc

SEQ ID NO: 2667320 - RNA, 16 nt, Human
gucuccaggggcugcu

SEQ ID NO: 2667321 - RNA, 19 nt, Human
gucuccaggggcugcuucc

SEQ ID NO: 2667322 - RNA, 20 nt, Human
gucuccaggggcugcuuccu

SEQ ID NO: 2667323 - RNA, 21 nt, Human
gucuccaggggcugcuuccuc

SEQ ID NO: 2667324 - RNA, 22 nt, Human
gucuccaggggcugcuuccucc

SEQ ID NO: 2667325 - RNA, 23 nt, Human
gucuccaggggcugcuuccuccu

SEQ ID NO: 2667326 - RNA, 15 nt, Human
aaccaaaucuggaag

SEQ ID NO: 2667327 - RNA, 15 nt, Human
aaccaaauguuuauu

SEQ ID NO: 2667328 - RNA, 21 nt, Human
aaccaaauguuuauuuucuac

SEQ ID NO: 2667329 - RNA, 12 nt, Human
aaccuuaaguaa

SEQ ID NO: 2667330 - RNA, 13 nt, Human
gucuuuuaaaaug

SEQ ID NO: 2667331 - RNA, 16 nt, Human
gucuucaguaagccgu

SEQ ID NO: 2667332 - RNA, 21 nt, Human
aaccuuugaguagauccauuu

SEQ ID NO: 2667333 - RNA, 11 nt, Human
aaccuuucccu

SEQ ID NO: 2667334 - RNA, 13 nt, Human
aaccuuucccuca

SEQ ID NO: 2667335 - RNA, 14 nt, Human
aaccuuucccucac

SEQ ID NO: 2667336 - RNA, 15 nt, Human
aaccuuucccucacc

SEQ ID NO: 2667337 - RNA, 17 nt, Human
aaccuuucccucacccc

SEQ ID NO: 2667338 - RNA, 18 nt, Human
aaccuuucccucaccccc

SEQ ID NO: 2667339 - RNA, 19 nt, Human
aaccuuucccucacccccu

SEQ ID NO: 2667340 - RNA, 20 nt, Human
aaccuuucccucacccccuc

SEQ ID NO: 2667341 - RNA, 22 nt, Human
aaccuuucccucacccccuccc

SEQ ID NO: 2667342 - RNA, 13 nt, Human
aaccuuguauaaa

SEQ ID NO: 2667343 - RNA, 14 nt, Human
aaccuuguauaaau

SEQ ID NO: 2667344 - RNA, 16 nt, Human
aaccuuguauaaauua

SEQ ID NO: 2667345 - RNA, 19 nt, Human
aaccuuguauaaauuauuc

SEQ ID NO: 2667346 - RNA, 13 nt, Human
gucugguggcccc

SEQ ID NO: 2667347 - RNA, 20 nt, Human
gucugguggccccguuucug

SEQ ID NO: 2667348 - RNA, 19 nt, Human
aaccaucuugugucuuugg

SEQ ID NO: 2667349 - RNA, 22 nt, Human
gucucuuuaaaaggaaagaaaa

SEQ ID NO: 2667350 - RNA, 14 nt, Human
aacugcaggcccug

SEQ ID NO: 2667351 - RNA, 16 nt, Human
aacugcaggcccuggc

SEQ ID NO: 2667352 - RNA, 17 nt, Human
aacugcaggcccuggcc

SEQ ID NO: 2667353 - RNA, 18 nt, Human
aacugcaggcccuggccu

SEQ ID NO: 2667354 - RNA, 19 nt, Human
aacugcaggcccuggccuc

SEQ ID NO: 2667355 - RNA, 20 nt, Human
aacugcaggcccuggccucc

SEQ ID NO: 2667356 - RNA, 21 nt, Human
aacugcaggcccuggccuccc

SEQ ID NO: 2667357 - RNA, 13 nt, Human
aacugcaggcccu

SEQ ID NO: 2667358 - RNA, 16 nt, Human
aacugaaaugccugcu

SEQ ID NO: 2667359 - RNA, 15 nt, Human
gugaguccauucucc

SEQ ID NO: 2667360 - RNA, 15 nt, Human
aacucugcauguaga

SEQ ID NO: 2667361 - RNA, 15 nt, Human
aacucuggcuuuugg

SEQ ID NO: 2667362 - RNA, 21 nt, Human
gugagaagugaaugcugggac

SEQ ID NO: 2667363 - RNA, 22 nt, Human
gugagaagugaaugcugggacu

SEQ ID NO: 2667364 - RNA, 20 nt, Human
gugagaagugaaugcuggga

SEQ ID NO: 2667365 - RNA, 17 nt, Human
gugagaagguuuauugu

SEQ ID NO: 2667366 - RNA, 20 nt, Human
gugagaagguuuauuguuaa

SEQ ID NO: 2667367 - RNA, 13 nt, Human
gugaagugcuugg

SEQ ID NO: 2667368 - RNA, 17 nt, Human
gugagaacccaguuucc

SEQ ID NO: 2667369 - RNA, 19 nt, Human
gugagaaacaucucaauaa

SEQ ID NO: 2667370 - RNA, 13 nt, Human
gugaagaagccug

SEQ ID NO: 2667371 - RNA, 17 nt, Human
aacuauauuuugucaua

SEQ ID NO: 2667372 - RNA, 16 nt, Human
aacuauauuuugucau

SEQ ID NO: 2667373 - RNA, 20 nt, Human
gugaagauacuuuguauugu

SEQ ID NO: 2667374 - RNA, 18 nt, Human
gugaagauacuuuguauu

SEQ ID NO: 2667375 - RNA, 15 nt, Human
gugaagauacuuugu

SEQ ID NO: 2667376 - RNA, 13 nt, Human
gugaagauacuuu

SEQ ID NO: 2667377 - RNA, 15 nt, Human
gugacauggugccug

SEQ ID NO: 2667378 - RNA, 16 nt, Human
gugacauggugccuga

SEQ ID NO: 2667379 - RNA, 19 nt, Human
gugacauggugccugagag

SEQ ID NO: 2667380 - RNA, 20 nt, Human
gugacauggugccugagagg

SEQ ID NO: 2667381 - RNA, 22 nt, Human
gugacauggugccugagaggca

SEQ ID NO: 2667382 - RNA, 23 nt, Human
gugacauggugccugagaggcag

SEQ ID NO: 2667383 - RNA, 24 nt, Human
gugacauggugccugagaggcagg

SEQ ID NO: 2667384 - RNA, 18 nt, Human
gugaccauguuuuguuua

SEQ ID NO: 2667385 - RNA, 17 nt, Human
uaaucuuguuucugaaa

SEQ ID NO: 2667386 - RNA, 13 nt, Human
uaaugaaauggag

SEQ ID NO: 2667387 - RNA, 15 nt, Human
uaaugaaauggagga

SEQ ID NO: 2667388 - RNA, 19 nt, Human
aaugaauaucuauuaauau

SEQ ID NO: 2667389 - RNA, 18 nt, Human
aaugaauaucuauuaaua

SEQ ID NO: 2667390 - RNA, 15 nt, Human
aaugaauaucuauua

SEQ ID NO: 2667391 - RNA, 14 nt, Human
aaugaauaucuauu

SEQ ID NO: 2667392 - RNA, 13 nt, Human
aaucuuuugaagc

SEQ ID NO: 2667393 - RNA, 21 nt, Human
aaugaaaaauagugucuuugu

SEQ ID NO: 2667394 - RNA, 14 nt, Human
aaugaaaaaagcuu

SEQ ID NO: 2667395 - RNA, 13 nt, Human
uaaucauuuguuu

SEQ ID NO: 2667396 - RNA, 14 nt, Human
uaaucauuuguuua

SEQ ID NO: 2667397 - RNA, 19 nt, Human
uaaucauuuguuuacauuu

SEQ ID NO: 2667398 - RNA, 21 nt, Human
uaaucauuuguuuacauuuga

SEQ ID NO: 2667399 - RNA, 12 nt, Human
uaaucauuuuca

SEQ ID NO: 2667400 - RNA, 13 nt, Human
uaaucauuuucau

SEQ ID NO: 2667401 - RNA, 14 nt, Human
uaaucauuuucauu

SEQ ID NO: 2667402 - RNA, 17 nt, Human
uaaucauuuucauuccu

SEQ ID NO: 2667403 - RNA, 18 nt, Human
uaaucauuuucauuccua

SEQ ID NO: 2667404 - RNA, 19 nt, Human
uaauccaauggguuuuucc

SEQ ID NO: 2667405 - RNA, 20 nt, Human
uaauauucaggguaaauagg

SEQ ID NO: 2667406 - RNA, 21 nt, Human
uaauauucaggguaaauagga

SEQ ID NO: 2667407 - RNA, 19 nt, Human
uaauauugagaaagaaacu

SEQ ID NO: 2667408 - RNA, 14 nt, Human
uaauauugagaaag

SEQ ID NO: 2667409 - RNA, 20 nt, Human
uaauauuguuugguaaaugu

SEQ ID NO: 2667410 - RNA, 21 nt, Human
uaauauuguuugguaaauguu

SEQ ID NO: 2667411 - RNA, 20 nt, Human
aauacaguaucucagggccu

SEQ ID NO: 2667412 - RNA, 14 nt, Human
aauacauagugaaa

SEQ ID NO: 2667413 - RNA, 16 nt, Human
aauacauagugaaaau

SEQ ID NO: 2667414 - RNA, 15 nt, Human
uaauagaaaugucuc

SEQ ID NO: 2667415 - RNA, 18 nt, Human
aauacauauggauguuac

SEQ ID NO: 2667416 - RNA, 20 nt, Human
aaugaauaucuauuaauaua

SEQ ID NO: 2667417 - RNA, 19 nt, Human
uaaucuuuaccuguauaca

SEQ ID NO: 2667418 - RNA, 13 nt, Human
aaugcaaacuggg

SEQ ID NO: 2667419 - RNA, 21 nt, Human
aaugcaaacugggaugaaacu

SEQ ID NO: 2667420 - RNA, 14 nt, Human
uaauuauauaacug

SEQ ID NO: 2667421 - RNA, 16 nt, Human
uaauuauauaacugua

SEQ ID NO: 2667422 - RNA, 17 nt, Human
uaauuauauaacuguau

SEQ ID NO: 2667423 - RNA, 20 nt, Human
uaauuauauaacuguauuug

SEQ ID NO: 2667424 - RNA, 23 nt, Human
uaauuaguuccucauuagcauuu

SEQ ID NO: 2667425 - RNA, 21 nt, Human
aaugcaauguaagcauacuuu

SEQ ID NO: 2667426 - RNA, 13 nt, Human
uacaaaaagaaaa

SEQ ID NO: 2667427 - RNA, 18 nt, Human
uacaagucagcuccagcu

SEQ ID NO: 2667428 - RNA, 14 nt, Human
uacaagucaguagg

SEQ ID NO: 2667429 - RNA, 16 nt, Human
uacaaguuuauauaua

SEQ ID NO: 2667430 - RNA, 17 nt, Human
uacaaguuuauauauau

SEQ ID NO: 2667431 - RNA, 13 nt, Human
uaauuugaagauu

SEQ ID NO: 2667432 - RNA, 14 nt, Human
uaauuugaagauug

SEQ ID NO: 2667433 - RNA, 17 nt, Human
uaauuugaugagguauu

SEQ ID NO: 2667434 - RNA, 20 nt, Human
uaauuugaugagguauuuuu

SEQ ID NO: 2667435 - RNA, 19 nt, Human
uaauuucuccucccuuccu

SEQ ID NO: 2667436 - RNA, 17 nt, Human
uaauuucuuuuuuuccu

SEQ ID NO: 2667437 - RNA, 15 nt, Human
uaauuuaaguuuuga

SEQ ID NO: 2667438 - RNA, 14 nt, Human
uaauuuaaguuuug

SEQ ID NO: 2667439 - RNA, 10 nt, Human
uaauuuccuu

SEQ ID NO: 2667440 - RNA, 20 nt, Human
uaauuuaaguuuugacaagc

SEQ ID NO: 2667441 - RNA, 13 nt, Human
uaauuucuccucc

SEQ ID NO: 2667442 - RNA, 14 nt, Human
uaauuucuccuccc

SEQ ID NO: 2667443 - RNA, 20 nt, Human
uaauuucuagaaacaaacau

SEQ ID NO: 2667444 - RNA, 11 nt, Human
uaauuuccuuu

SEQ ID NO: 2667445 - RNA, 13 nt, Human
uaauuuccuuuuu

SEQ ID NO: 2667446 - RNA, 17 nt, Human
uaauuuccuuuuugaca

SEQ ID NO: 2667447 - RNA, 19 nt, Human
uaauuuccuuuuugacacu

SEQ ID NO: 2667448 - RNA, 20 nt, Human
uaauuuccuuuuugacacug

SEQ ID NO: 2667449 - RNA, 21 nt, Human
uaauuuccuuuuugacacuga

SEQ ID NO: 2667450 - RNA, 22 nt, Human
uaauuuccuuuuugacacugaa

SEQ ID NO: 2667451 - RNA, 15 nt, Human
uacaaugaacacuua

SEQ ID NO: 2667452 - RNA, 17 nt, Human
uacaaucucuuuuuguu

SEQ ID NO: 2667453 - RNA, 20 nt, Human
uacaaucaaaggaaaauagu

SEQ ID NO: 2667454 - RNA, 14 nt, Human
uacaauauugauug

SEQ ID NO: 2667455 - RNA, 15 nt, Human
uacaauauugauugg

SEQ ID NO: 2667456 - RNA, 19 nt, Human
uacaauauugauugggaaa

SEQ ID NO: 2667457 - RNA, 23 nt, Human
uacaauauugauugggaaaacau

SEQ ID NO: 2667458 - RNA, 23 nt, Human
uacaccuggcugagguuccucug

SEQ ID NO: 2667459 - RNA, 14 nt, Human
uacaccuugccuug

SEQ ID NO: 2667460 - RNA, 20 nt, Human
uacaccuugccuugcuguuu

SEQ ID NO: 2667461 - RNA, 18 nt, Human
uacacgaauagacaucaa

SEQ ID NO: 2667462 - RNA, 19 nt, Human
uacacgaauagacaucaaa

SEQ ID NO: 2667463 - RNA, 21 nt, Human
uacacgaauagacaucaaacu

SEQ ID NO: 2667464 - RNA, 21 nt, Human
uacacgaccauuugauaggga

SEQ ID NO: 2667465 - RNA, 12 nt, Human
uacaccuggcug

SEQ ID NO: 2667466 - RNA, 13 nt, Human
uacaccuggcuga

SEQ ID NO: 2667467 - RNA, 14 nt, Human
uacaccuggcugag

SEQ ID NO: 2667468 - RNA, 15 nt, Human
uacaccuggcugagg

SEQ ID NO: 2667469 - RNA, 22 nt, Human
uacaccuggcugagguuccucu

SEQ ID NO: 2667470 - RNA, 16 nt, Human
aauguaagcauacuuu

SEQ ID NO: 2667471 - RNA, 16 nt, Human
aauguacaguugaaau

SEQ ID NO: 2667472 - RNA, 17 nt, Human
aauguacaguugaaaua

SEQ ID NO: 2667473 - RNA, 16 nt, Human
aauguagguccucaga

SEQ ID NO: 2667474 - RNA, 18 nt, Human
aauguagguccucagaaa

SEQ ID NO: 2667475 - RNA, 22 nt, Human
aauguaggcuuaguuugugugu

SEQ ID NO: 2667476 - RNA, 16 nt, Human
aauguaggcuuaguuu

SEQ ID NO: 2667477 - RNA, 19 nt, Human
aauguaggcuuaguuugug

SEQ ID NO: 2667478 - RNA, 23 nt, Human
aauguagcgacugucaacagcgu

SEQ ID NO: 2667479 - RNA, 19 nt, Human
uacaguccaaaauacuguu

SEQ ID NO: 2667480 - RNA, 15 nt, Human
uacauacgauuuaag

SEQ ID NO: 2667481 - RNA, 16 nt, Human
uacauacgauuuaagg

SEQ ID NO: 2667482 - RNA, 17 nt, Human
uacauacgauuuaaggu

SEQ ID NO: 2667483 - RNA, 19 nt, Human
uacauacgauuuaagguau

SEQ ID NO: 2667484 - RNA, 14 nt, Human
aauguauuuuuccu

SEQ ID NO: 2667485 - RNA, 23 nt, Human
aaugucaaaaguagaacuuugua

SEQ ID NO: 2667486 - RNA, 19 nt, Human
aaugucaaaaguagaacuu

SEQ ID NO: 2667487 - RNA, 15 nt, Human
aaugucaaaaguaga

SEQ ID NO: 2667488 - RNA, 14 nt, Human
aaugucaaaaguag

SEQ ID NO: 2667489 - RNA, 18 nt, Human
uacaguaucucagggccu

SEQ ID NO: 2667490 - RNA, 21 nt, Human
uacagugcagagccuucucag

SEQ ID NO: 2667491 - RNA, 22 nt, Human
uacagugcagagccuucucaga

SEQ ID NO: 2667492 - RNA, 11 nt, Human
uacagugguuu

SEQ ID NO: 2667493 - RNA, 20 nt, Human
uacauaauacugaaccacuu

SEQ ID NO: 2667494 - RNA, 23 nt, Human
uacauaauacugaaccacuugua

SEQ ID NO: 2667495 - RNA, 18 nt, Human
aaugugaauuuuuauugu

SEQ ID NO: 2667496 - RNA, 20 nt, Human
aaugugaauuuuuauuguug

SEQ ID NO: 2667497 - RNA, 15 nt, Human
uacauuguauauaug

SEQ ID NO: 2667498 - RNA, 15 nt, Human
uacauguuuauaaau

SEQ ID NO: 2667499 - RNA, 17 nt, Human
uacauguuuauaaaucu

SEQ ID NO: 2667500 - RNA, 20 nt, Human
aauuaagguguuugaaaaua

SEQ ID NO: 2667501 - RNA, 13 nt, Human
uacauguaauuug

SEQ ID NO: 2667502 - RNA, 14 nt, Human
uacauguaauuuga

SEQ ID NO: 2667503 - RNA, 13 nt, Human
aauuaagcaaaug

SEQ ID NO: 2667504 - RNA, 15 nt, Human
aauuaagcaaauguu

SEQ ID NO: 2667505 - RNA, 18 nt, Human
aauuaagcaaauguuaaa

SEQ ID NO: 2667506 - RNA, 22 nt, Human
aauuaagcaaauguuaaaaguu

SEQ ID NO: 2667507 - RNA, 23 nt, Human
aauuaagcaaauguuaaaaguuu

SEQ ID NO: 2667508 - RNA, 19 nt, Human
aauuaagcccuaagguccu

SEQ ID NO: 2667509 - RNA, 22 nt, Human
aauuaagcccuaagguccuaag

SEQ ID NO: 2667510 - RNA, 13 nt, Human
aauuaagguguuu

SEQ ID NO: 2667511 - RNA, 18 nt, Human
aauuaagguguuugaaaa

SEQ ID NO: 2667512 - RNA, 17 nt, Human
aauuaagguguuugaaa

SEQ ID NO: 2667513 - RNA, 16 nt, Human
aauuaagguguuugaa

SEQ ID NO: 2667514 - RNA, 15 nt, Human
aauuaagguguuuga

SEQ ID NO: 2667515 - RNA, 17 nt, Human
uaccccgcagacaccuu

SEQ ID NO: 2667516 - RNA, 11 nt, Human
uacauuuaaua

SEQ ID NO: 2667517 - RNA, 17 nt, Human
uaccauccccuguagag

SEQ ID NO: 2667518 - RNA, 12 nt, Human
uacugaauuuuu

SEQ ID NO: 2667519 - RNA, 16 nt, Human
uacugaauuuuuuugu

SEQ ID NO: 2667520 - RNA, 18 nt, Human
uacugaauuuuuuuguaa

SEQ ID NO: 2667521 - RNA, 19 nt, Human
uacugaauuuuuuuguaau

SEQ ID NO: 2667522 - RNA, 19 nt, Human
uacuggugcagucauuaug

SEQ ID NO: 2667523 - RNA, 13 nt, Human
uacugguugcaug

SEQ ID NO: 2667524 - RNA, 14 nt, Human
uacugguugcaugg

SEQ ID NO: 2667525 - RNA, 18 nt, Human
uacugguugcauggaaau

SEQ ID NO: 2667526 - RNA, 20 nt, Human
uacugguugcauggaaauca

SEQ ID NO: 2667527 - RNA, 19 nt, Human
uacucaagcggguggcucu

SEQ ID NO: 2667528 - RNA, 12 nt, Human
uacugaaggaaa

SEQ ID NO: 2667529 - RNA, 13 nt, Human
uacugaaggaaaa

SEQ ID NO: 2667530 - RNA, 14 nt, Human
uacugaaggaaaaa

SEQ ID NO: 2667531 - RNA, 18 nt, Human
uacugaaggaaaaacaca

SEQ ID NO: 2667532 - RNA, 19 nt, Human
uacugaaggaaaaacacaa

SEQ ID NO: 2667533 - RNA, 20 nt, Human
uacugaaggaaaaacacaag

SEQ ID NO: 2667534 - RNA, 23 nt, Human
uacugaaggaaaaacacaagcaa

SEQ ID NO: 2667535 - RNA, 23 nt, Human
uacugaaccacuuguagauuuga

SEQ ID NO: 2667536 - RNA, 22 nt, Human
uacugaaccacuuguagauuug

SEQ ID NO: 2667537 - RNA, 19 nt, Human
uacugaaccacuuguagau

SEQ ID NO: 2667538 - RNA, 17 nt, Human
uacugaaccacuuguag

SEQ ID NO: 2667539 - RNA, 16 nt, Human
uacugaaccacuugua

SEQ ID NO: 2667540 - RNA, 12 nt, Human
uacguaguucua

SEQ ID NO: 2667541 - RNA, 18 nt, Human
uacgugcucugugggucu

SEQ ID NO: 2667542 - RNA, 21 nt, Human
uacuagucaccagagacuuua

SEQ ID NO: 2667543 - RNA, 20 nt, Human
uacuagucaccagagacuuu

SEQ ID NO: 2667544 - RNA, 22 nt, Human
uacuauucaguggcgagaaaua

SEQ ID NO: 2667545 - RNA, 19 nt, Human
uacuauucagguaacacua

SEQ ID NO: 2667546 - RNA, 22 nt, Human
uacuagucaccagagacuuuag

SEQ ID NO: 2667547 - RNA, 21 nt, Human
aauugaagguuuuugauagca

SEQ ID NO: 2667548 - RNA, 17 nt, Human
aauugaaguguauaaua

SEQ ID NO: 2667549 - RNA, 20 nt, Human
aauugaaguguauaauauaa

SEQ ID NO: 2667550 - RNA, 21 nt, Human
aauugaaguguauaauauaaa

SEQ ID NO: 2667551 - RNA, 19 nt, Human
aauugaagguuuuugauag

SEQ ID NO: 2667552 - RNA, 18 nt, Human
aauugaagguuuuugaua

SEQ ID NO: 2667553 - RNA, 16 nt, Human
aauugaagguuuuuga

SEQ ID NO: 2667554 - RNA, 23 nt, Human
aauucuuuuuuauuaaucacugu

SEQ ID NO: 2667555 - RNA, 22 nt, Human
aauucuuuuuuauuaaucacug

SEQ ID NO: 2667556 - RNA, 21 nt, Human
aauucuuuuuuauuaaucacu

SEQ ID NO: 2667557 - RNA, 18 nt, Human
aauucuuuuuuauuaauc

SEQ ID NO: 2667558 - RNA, 17 nt, Human
aauucuuuuuuauuaau

SEQ ID NO: 2667559 - RNA, 16 nt, Human
aauucuuuuuuauuaa

SEQ ID NO: 2667560 - RNA, 14 nt, Human
aauucuuuuuuauu

SEQ ID NO: 2667561 - RNA, 13 nt, Human
aauucuuuuuuau

SEQ ID NO: 2667562 - RNA, 16 nt, Human
aauucuuaaguauguu

SEQ ID NO: 2667563 - RNA, 11 nt, Human
uacccugggug

SEQ ID NO: 2667564 - RNA, 12 nt, Human
uacccugggugu

SEQ ID NO: 2667565 - RNA, 21 nt, Human
uacccuggguguccccgcugc

SEQ ID NO: 2667566 - RNA, 15 nt, Human
uacccuuuucugggg

SEQ ID NO: 2667567 - RNA, 14 nt, Human
aauuguuucagaau

SEQ ID NO: 2667568 - RNA, 15 nt, Human
aauugugugaacuug

SEQ ID NO: 2667569 - RNA, 18 nt, Human
aauugugugaacuuggaa

SEQ ID NO: 2667570 - RNA, 14 nt, Human
aauuuaaaaaauaa

SEQ ID NO: 2667571 - RNA, 13 nt, Human
aauuguuuaaaaa

SEQ ID NO: 2667572 - RNA, 18 nt, Human
aauuuaaaaaauaaauaa

SEQ ID NO: 2667573 - RNA, 14 nt, Human
aauuuaaaaauaua

SEQ ID NO: 2667574 - RNA, 15 nt, Human
aauuuaaaaauauau

SEQ ID NO: 2667575 - RNA, 17 nt, Human
aauuuaaaaauauauuu

SEQ ID NO: 2667576 - RNA, 20 nt, Human
aauuuaaagaaaaaaauguc

SEQ ID NO: 2667577 - RNA, 19 nt, Human
aauuuaaaauaauuauaua

SEQ ID NO: 2667578 - RNA, 12 nt, Human
aauuuaaguuuu

SEQ ID NO: 2667579 - RNA, 17 nt, Human
aauuuaaguuuugacaa

SEQ ID NO: 2667580 - RNA, 15 nt, Human
aauuuaaguuuugac

SEQ ID NO: 2667581 - RNA, 24 nt, Human
aauuuaaguuuugacaagcuggcu

SEQ ID NO: 2667582 - RNA, 20 nt, Human
aauuuaauaccagauaccuu

SEQ ID NO: 2667583 - RNA, 23 nt, Human
aauuuaaguuuugacaagcuggc

SEQ ID NO: 2667584 - RNA, 20 nt, Human
aauuuaaguuuugacaagcu

SEQ ID NO: 2667585 - RNA, 12 nt, Human
aauuucuccucc

SEQ ID NO: 2667586 - RNA, 14 nt, Human
aauuucuccucccu

SEQ ID NO: 2667587 - RNA, 20 nt, Human
aauuucuccucccuuccuuu

SEQ ID NO: 2667588 - RNA, 14 nt, Human
aauuugaaguaaug

SEQ ID NO: 2667589 - RNA, 16 nt, Human
aauuugacuaauuuua

SEQ ID NO: 2667590 - RNA, 17 nt, Human
aauuugacuaauuuuac

SEQ ID NO: 2667591 - RNA, 12 nt, Human
aauuucugugcc

SEQ ID NO: 2667592 - RNA, 20 nt, Human
aauuucugugcccuccugac

SEQ ID NO: 2667593 - RNA, 19 nt, Human
aauuucugugcccuccuga

SEQ ID NO: 2667594 - RNA, 21 nt, Human
aauuucuguguugccaagcuc

SEQ ID NO: 2667595 - RNA, 12 nt, Human
aauuuuuguauu

SEQ ID NO: 2667596 - RNA, 17 nt, Human
aauuuuuguauuauuuu

SEQ ID NO: 2667597 - RNA, 14 nt, Human
aauuuuuuuguaug

SEQ ID NO: 2667598 - RNA, 15 nt, Human
aauuuuuuuguaaua

SEQ ID NO: 2667599 - RNA, 16 nt, Human
aauuuuuuuguaauaa

SEQ ID NO: 2667600 - RNA, 16 nt, Human
uagacagguccugauu

SEQ ID NO: 2667601 - RNA, 15 nt, Human
aauuuuaaaaaucua

SEQ ID NO: 2667602 - RNA, 15 nt, Human
aauuuuaaaaucuga

SEQ ID NO: 2667603 - RNA, 22 nt, Human
aauuuuaaaaucugagggaaau

SEQ ID NO: 2667604 - RNA, 13 nt, Human
aauuuuaaagugc

SEQ ID NO: 2667605 - RNA, 16 nt, Human
aauuuuaaagugcaaa

SEQ ID NO: 2667606 - RNA, 17 nt, Human
aauuuuaaagugcaaaa

SEQ ID NO: 2667607 - RNA, 12 nt, Human
aauuuuuauugu

SEQ ID NO: 2667608 - RNA, 13 nt, Human
aauuuuuauuguu

SEQ ID NO: 2667609 - RNA, 19 nt, Human
uagaauugaagguuuuuga

SEQ ID NO: 2667610 - RNA, 23 nt, Human
uagaauugaagguuuuugauagc

SEQ ID NO: 2667611 - RNA, 21 nt, Human
uagaauugaagguuuuugaua

SEQ ID NO: 2667612 - RNA, 20 nt, Human
uagaauugaagguuuuugau

SEQ ID NO: 2667613 - RNA, 16 nt, Human
uagaagccaagggaaa

SEQ ID NO: 2667614 - RNA, 19 nt, Human
uagaagccaagggaaaggg

SEQ ID NO: 2667615 - RNA, 19 nt, Human
uagacagcuuuucucaacu

SEQ ID NO: 2667616 - RNA, 23 nt, Human
uagacagcuuuucucaacugggu

SEQ ID NO: 2667617 - RNA, 20 nt, Human
uagacagccaaaggcuggcg

SEQ ID NO: 2667618 - RNA, 18 nt, Human
uagacagccaaaggcugg

SEQ ID NO: 2667619 - RNA, 16 nt, Human
uagaacuccaggcccu

SEQ ID NO: 2667620 - RNA, 19 nt, Human
uagaacuccaggcccuccu

SEQ ID NO: 2667621 - RNA, 14 nt, Human
uagaagagagaggu

SEQ ID NO: 2667622 - RNA, 22 nt, Human
uagaagagagagguugaaaaac

SEQ ID NO: 2667623 - RNA, 21 nt, Human
uagaagcacuacaccuugccu

SEQ ID NO: 2667624 - RNA, 22 nt, Human
uagaagcacuacaccuugccuu

SEQ ID NO: 2667625 - RNA, 12 nt, Human
uagaagccaagg

SEQ ID NO: 2667626 - RNA, 15 nt, Human
uagaagccaagggaa

SEQ ID NO: 2667627 - RNA, 15 nt, Human
uagaacugucuguga

SEQ ID NO: 2667628 - RNA, 16 nt, Human
uagaacugucugugaa

SEQ ID NO: 2667629 - RNA, 22 nt, Human
uagcauuguaagcguauggcuu

SEQ ID NO: 2667630 - RNA, 14 nt, Human
acaaauuauuuuug

SEQ ID NO: 2667631 - RNA, 22 nt, Human
uagcauguuuauaucugcaaaa

SEQ ID NO: 2667632 - RNA, 19 nt, Human
acaagaacacacacauaua

SEQ ID NO: 2667633 - RNA, 18 nt, Human
acaacaauugguaaaacu

SEQ ID NO: 2667634 - RNA, 19 nt, Human
acaacaauugguaaaacuc

SEQ ID NO: 2667635 - RNA, 16 nt, Human
acaagcaaguucugag

SEQ ID NO: 2667636 - RNA, 13 nt, Human
acaagcugcaccc

SEQ ID NO: 2667637 - RNA, 12 nt, Human
uagcacagcagc

SEQ ID NO: 2667638 - RNA, 22 nt, Human
uagauuuuagacccuauugcug

SEQ ID NO: 2667639 - RNA, 19 nt, Human
uagaucauaguuuuauuua

SEQ ID NO: 2667640 - RNA, 17 nt, Human
uagaucauaguuuuauu

SEQ ID NO: 2667641 - RNA, 13 nt, Human
uagauuuuccaaa

SEQ ID NO: 2667642 - RNA, 12 nt, Human
uagauuuuccaa

SEQ ID NO: 2667643 - RNA, 13 nt, Human
uagaucauaguuu

SEQ ID NO: 2667644 - RNA, 13 nt, Human
uagauauuuuuca

SEQ ID NO: 2667645 - RNA, 15 nt, Human
uagauauuuuucaua

SEQ ID NO: 2667646 - RNA, 20 nt, Human
uagauauuuuucauaaacaa

SEQ ID NO: 2667647 - RNA, 21 nt, Human
uagauauuuuucauaaacaag

SEQ ID NO: 2667648 - RNA, 17 nt, Human
uagagcuuucaaguaca

SEQ ID NO: 2667649 - RNA, 13 nt, Human
uagagccagcuug

SEQ ID NO: 2667650 - RNA, 11 nt, Human
acaaaaaccaa

SEQ ID NO: 2667651 - RNA, 18 nt, Human
acaaaaaccaaauguuua

SEQ ID NO: 2667652 - RNA, 20 nt, Human
acaaaaaccaaauguuuauu

SEQ ID NO: 2667653 - RNA, 16 nt, Human
acaaaaagcauaaaaa

SEQ ID NO: 2667654 - RNA, 16 nt, Human
uauuucacuugaugau

SEQ ID NO: 2667655 - RNA, 21 nt, Human
uauuuauuuuccuaaagagag

SEQ ID NO: 2667656 - RNA, 20 nt, Human
uauuucaaaauauacauuca

SEQ ID NO: 2667657 - RNA, 22 nt, Human
uauuuauuuuuuuuaauuguau

SEQ ID NO: 2667658 - RNA, 20 nt, Human
uauuuauuuuuuuuaauugu

SEQ ID NO: 2667659 - RNA, 16 nt, Human
uauuuauuuuccuaaa

SEQ ID NO: 2667660 - RNA, 20 nt, Human
uauuuauuuuccuaaagaga

SEQ ID NO: 2667661 - RNA, 11 nt, Human
uauuuauuuac

SEQ ID NO: 2667662 - RNA, 13 nt, Human
uauuuauuuaugu

SEQ ID NO: 2667663 - RNA, 14 nt, Human
uauuuauuuaugua

SEQ ID NO: 2667664 - RNA, 18 nt, Human
uauuuauuuauguacuuu

SEQ ID NO: 2667665 - RNA, 11 nt, Human
uauuuauuuau

SEQ ID NO: 2667666 - RNA, 17 nt, Human
uauuuaauggaagugua

SEQ ID NO: 2667667 - RNA, 20 nt, Human
uauuuaauggaaguguauuu

SEQ ID NO: 2667668 - RNA, 14 nt, Human
uauuuacauuuaau

SEQ ID NO: 2667669 - RNA, 13 nt, Human
uauuuagacaaga

SEQ ID NO: 2667670 - RNA, 15 nt, Human
uauuuagacaagaga

SEQ ID NO: 2667671 - RNA, 19 nt, Human
uauuuagacaagagauggg

SEQ ID NO: 2667672 - RNA, 20 nt, Human
uauuuagacaagagauggga

SEQ ID NO: 2667673 - RNA, 15 nt, Human
uauuuaacauuauuu

SEQ ID NO: 2667674 - RNA, 14 nt, Human
uauuuaagacuaaa

SEQ ID NO: 2667675 - RNA, 19 nt, Human
uauuuaacagaaauuguau

SEQ ID NO: 2667676 - RNA, 16 nt, Human
uauuuaacagaaauug

SEQ ID NO: 2667677 - RNA, 22 nt, Human
uauuguccuauuaguguuauau

SEQ ID NO: 2667678 - RNA, 18 nt, Human
uauuguccuauuaguguu

SEQ ID NO: 2667679 - RNA, 17 nt, Human
uauuguccuauuagugu

SEQ ID NO: 2667680 - RNA, 13 nt, Human
uauuuaagaugug

SEQ ID NO: 2667681 - RNA, 14 nt, Human
uauuuaagauguga

SEQ ID NO: 2667682 - RNA, 16 nt, Human
uauuuaagaugugaaa

SEQ ID NO: 2667683 - RNA, 18 nt, Human
uauuuaagaugugaaaau

SEQ ID NO: 2667684 - RNA, 14 nt, Human
uauuuaauauuuaa

SEQ ID NO: 2667685 - RNA, 19 nt, Human
uauuguauauuacaaugau

SEQ ID NO: 2667686 - RNA, 17 nt, Human
uauuguauauuacaaug

SEQ ID NO: 2667687 - RNA, 16 nt, Human
uauuguauauuacaau

SEQ ID NO: 2667688 - RNA, 15 nt, Human
uauuguauuuaugug

SEQ ID NO: 2667689 - RNA, 14 nt, Human
uauugacucugggu

SEQ ID NO: 2667690 - RNA, 14 nt, Human
uauugaauguuaaa

SEQ ID NO: 2667691 - RNA, 14 nt, Human
uauugaccauuuuu

SEQ ID NO: 2667692 - RNA, 22 nt, Human
uauugacucuggguccuuccug

SEQ ID NO: 2667693 - RNA, 20 nt, Human
uauugacucuggguccuucc

SEQ ID NO: 2667694 - RNA, 15 nt, Human
uauugacucuggguc

SEQ ID NO: 2667695 - RNA, 17 nt, Human
uauugaggccaagaaua

SEQ ID NO: 2667696 - RNA, 18 nt, Human
uauugaggccaagaauau

SEQ ID NO: 2667697 - RNA, 19 nt, Human
uauugaggccaagaauauu

SEQ ID NO: 2667698 - RNA, 21 nt, Human
uauugaggccaagaauauugc

SEQ ID NO: 2667699 - RNA, 22 nt, Human
uauugaggccaagaauauugca

SEQ ID NO: 2667700 - RNA, 23 nt, Human
uauugaggccaagaauauugcaa

SEQ ID NO: 2667701 - RNA, 15 nt, Human
uauugguuuuaugau

SEQ ID NO: 2667702 - RNA, 14 nt, Human
uauugguuuuauga

SEQ ID NO: 2667703 - RNA, 13 nt, Human
uauugguuuuaug

SEQ ID NO: 2667704 - RNA, 18 nt, Human
uauuggggccaugaguaa

SEQ ID NO: 2667705 - RNA, 23 nt, Human
uauuggggccaugaguaaaauag

SEQ ID NO: 2667706 - RNA, 22 nt, Human
uauucuucucuuccuuuuauca

SEQ ID NO: 2667707 - RNA, 13 nt, Human
uauucuuuucuca

SEQ ID NO: 2667708 - RNA, 19 nt, Human
uauugaacuuuuguacuga

SEQ ID NO: 2667709 - RNA, 21 nt, Human
uauugacaaccgagaagguuu

SEQ ID NO: 2667710 - RNA, 11 nt, Human
uauugacacug

SEQ ID NO: 2667711 - RNA, 12 nt, Human
uauugacacuga

SEQ ID NO: 2667712 - RNA, 13 nt, Human
uauugacacugaa

SEQ ID NO: 2667713 - RNA, 14 nt, Human
uauugacacugaac

SEQ ID NO: 2667714 - RNA, 16 nt, Human
uauugacacugaacuu

SEQ ID NO: 2667715 - RNA, 19 nt, Human
uauugacacugaacuuaau

SEQ ID NO: 2667716 - RNA, 24 nt, Human
uauugacacugaacuuaauaacug

SEQ ID NO: 2667717 - RNA, 13 nt, Human
uauucuucucuuc

SEQ ID NO: 2667718 - RNA, 15 nt, Human
uauucugagaaaaca

SEQ ID NO: 2667719 - RNA, 21 nt, Human
uauucucuuaauuuuucuuaa

SEQ ID NO: 2667720 - RNA, 17 nt, Human
uauucugagaaaacaag

SEQ ID NO: 2667721 - RNA, 15 nt, Human
uauucagauguaugu

SEQ ID NO: 2667722 - RNA, 15 nt, Human
uauucaggguaaaua

SEQ ID NO: 2667723 - RNA, 16 nt, Human
uauucaggguaaauag

SEQ ID NO: 2667724 - RNA, 14 nt, Human
uauucacuggcccc

SEQ ID NO: 2667725 - RNA, 22 nt, Human
uauuacccccuccuucagacac

SEQ ID NO: 2667726 - RNA, 21 nt, Human
uauuacccccuccuucagaca

SEQ ID NO: 2667727 - RNA, 21 nt, Human
uauuacgaaguucaagaucaa

SEQ ID NO: 2667728 - RNA, 20 nt, Human
uauuacgaaguucaagauca

SEQ ID NO: 2667729 - RNA, 12 nt, Human
uauuagagaaga

SEQ ID NO: 2667730 - RNA, 23 nt, Human
uauuaguguuauaugaacauaca

SEQ ID NO: 2667731 - RNA, 15 nt, Human
uauuagaugcacuua

SEQ ID NO: 2667732 - RNA, 16 nt, Human
uauuauaaaggauaaa

SEQ ID NO: 2667733 - RNA, 18 nt, Human
uauuauaaaggauaaaga

SEQ ID NO: 2667734 - RNA, 20 nt, Human
uauuauaaaggauaaagaag

SEQ ID NO: 2667735 - RNA, 21 nt, Human
uauuaguguuauaugaacaua

SEQ ID NO: 2667736 - RNA, 18 nt, Human
uauuaguguuauaugaac

SEQ ID NO: 2667737 - RNA, 17 nt, Human
uauuaguguuauaugaa

SEQ ID NO: 2667738 - RNA, 16 nt, Human
uauuaguguuauauga

SEQ ID NO: 2667739 - RNA, 14 nt, Human
uauuaguguuauau

SEQ ID NO: 2667740 - RNA, 13 nt, Human
uauuaguguuaua

SEQ ID NO: 2667741 - RNA, 21 nt, Human
uauuagccagguaaugugaau

SEQ ID NO: 2667742 - RNA, 12 nt, Human
uauuaaaacuaa

SEQ ID NO: 2667743 - RNA, 14 nt, Human
uauuaaaacuaaau

SEQ ID NO: 2667744 - RNA, 17 nt, Human
uauuaaaacuaaauuuc

SEQ ID NO: 2667745 - RNA, 19 nt, Human
uauuaaaacuaaauuucac

SEQ ID NO: 2667746 - RNA, 12 nt, Human
uauuaaagacag

SEQ ID NO: 2667747 - RNA, 18 nt, Human
uauuacauguaauuugau

SEQ ID NO: 2667748 - RNA, 20 nt, Human
uauuacauguaauuugauga

SEQ ID NO: 2667749 - RNA, 23 nt, Human
uauuaaaggaagcacucuguaua

SEQ ID NO: 2667750 - RNA, 19 nt, Human
acagucuccggccucucca

SEQ ID NO: 2667751 - RNA, 16 nt, Human
acagugaaguuuuacu

SEQ ID NO: 2667752 - RNA, 23 nt, Human
acagugaaguuuuacugucuauu

SEQ ID NO: 2667753 - RNA, 13 nt, Human
acaguguguaaac

SEQ ID NO: 2667754 - RNA, 14 nt, Human
acaguguguaaaca

SEQ ID NO: 2667755 - RNA, 17 nt, Human
acaguguguaaacaaaa

SEQ ID NO: 2667756 - RNA, 18 nt, Human
acaguguguaaacaaaau

SEQ ID NO: 2667757 - RNA, 15 nt, Human
acaguaucccacauc

SEQ ID NO: 2667758 - RNA, 21 nt, Human
acaguaucccacauccaacuc

SEQ ID NO: 2667759 - RNA, 16 nt, Human
acaguauagauuuuug

SEQ ID NO: 2667760 - RNA, 23 nt, Human
acaguaugugggauauugaaugu

SEQ ID NO: 2667761 - RNA, 14 nt, Human
uaucaauaucuaau

SEQ ID NO: 2667762 - RNA, 17 nt, Human
uaucaauaucuaauaua

SEQ ID NO: 2667763 - RNA, 21 nt, Human
uaucaauaucuaauauauaug

SEQ ID NO: 2667764 - RNA, 18 nt, Human
uaucaauaucuaauauau

SEQ ID NO: 2667765 - RNA, 22 nt, Human
uaucaauaucuaauauauauga

SEQ ID NO: 2667766 - RNA, 20 nt, Human
uaucacauuggagucacugc

SEQ ID NO: 2667767 - RNA, 19 nt, Human
uauauugguuuuaugauga

SEQ ID NO: 2667768 - RNA, 17 nt, Human
uauauugguuuuaugau

SEQ ID NO: 2667769 - RNA, 16 nt, Human
uauauugguuuuauga

SEQ ID NO: 2667770 - RNA, 15 nt, Human
uauauugguuuuaug

SEQ ID NO: 2667771 - RNA, 23 nt, Human
acagacuauuuuuagauuuucuu

SEQ ID NO: 2667772 - RNA, 14 nt, Human
acagacuauuuuua

SEQ ID NO: 2667773 - RNA, 17 nt, Human
acagacuauuuuuagau

SEQ ID NO: 2667774 - RNA, 12 nt, Human
uauauucuuuca

SEQ ID NO: 2667775 - RNA, 16 nt, Human
uauauucuuucaaagg

SEQ ID NO: 2667776 - RNA, 12 nt, Human
uauauugaacuu

SEQ ID NO: 2667777 - RNA, 13 nt, Human
uauauugaacuuu

SEQ ID NO: 2667778 - RNA, 21 nt, Human
uauauugaacuuuuguacuga

SEQ ID NO: 2667779 - RNA, 22 nt, Human
uauauugaacuuuuguacugaa

SEQ ID NO: 2667780 - RNA, 12 nt, Human
acacuccucugc

SEQ ID NO: 2667781 - RNA, 14 nt, Human
acacuccucugcgu

SEQ ID NO: 2667782 - RNA, 17 nt, Human
acacuccucugcgucua

SEQ ID NO: 2667783 - RNA, 20 nt, Human
acagacacgagccaccucac

SEQ ID NO: 2667784 - RNA, 22 nt, Human
acagacacuaacgaaauaucaa

SEQ ID NO: 2667785 - RNA, 16 nt, Human
acagagaggacuguag

SEQ ID NO: 2667786 - RNA, 11 nt, Human
uaucuccugac

SEQ ID NO: 2667787 - RNA, 19 nt, Human
uaucuccggcucccagccu

SEQ ID NO: 2667788 - RNA, 18 nt, Human
uaucuccggcucccagcc

SEQ ID NO: 2667789 - RNA, 20 nt, Human
uaucuccggcucccagccuc

SEQ ID NO: 2667790 - RNA, 13 nt, Human
uaucuccugacag

SEQ ID NO: 2667791 - RNA, 14 nt, Human
uaucuccugacaga

SEQ ID NO: 2667792 - RNA, 21 nt, Human
uaucuccugacagaaggugcc

SEQ ID NO: 2667793 - RNA, 18 nt, Human
uaucuaguucuaacagug

SEQ ID NO: 2667794 - RNA, 14 nt, Human
uauccauauuuuau

SEQ ID NO: 2667795 - RNA, 22 nt, Human
uauccauauuuuauuacuguuu

SEQ ID NO: 2667796 - RNA, 14 nt, Human
uaucuccggcuccc

SEQ ID NO: 2667797 - RNA, 16 nt, Human
uaucuccggcucccag

SEQ ID NO: 2667798 - RNA, 16 nt, Human
uaucccaagaaugcaa

SEQ ID NO: 2667799 - RNA, 22 nt, Human
acagcagcuuauaaugggcucu

SEQ ID NO: 2667800 - RNA, 15 nt, Human
uaucuugauacauuc

SEQ ID NO: 2667801 - RNA, 16 nt, Human
uaucuugauacauuca

SEQ ID NO: 2667802 - RNA, 17 nt, Human
uaucuugauacauucaa

SEQ ID NO: 2667803 - RNA, 18 nt, Human
uaucuugauacauucaaa

SEQ ID NO: 2667804 - RNA, 19 nt, Human
uaucuugauacauucaaau

SEQ ID NO: 2667805 - RNA, 13 nt, Human
uaugaggagggga

SEQ ID NO: 2667806 - RNA, 14 nt, Human
uaugaggaggggag

SEQ ID NO: 2667807 - RNA, 14 nt, Human
uaugaguagccagg

SEQ ID NO: 2667808 - RNA, 21 nt, Human
uauggcuuuauuuuuuugaac

SEQ ID NO: 2667809 - RNA, 15 nt, Human
uaugggccccuggca

SEQ ID NO: 2667810 - RNA, 23 nt, Human
uaugggcuuuuggggagccagaa

SEQ ID NO: 2667811 - RNA, 12 nt, Human
acagccugggcc

SEQ ID NO: 2667812 - RNA, 15 nt, Human
acagccugggcccca

SEQ ID NO: 2667813 - RNA, 18 nt, Human
acagccugggccccagcu

SEQ ID NO: 2667814 - RNA, 14 nt, Human
acagcucauuaaac

SEQ ID NO: 2667815 - RNA, 16 nt, Human
acagcucauuaaacuu

SEQ ID NO: 2667816 - RNA, 17 nt, Human
acagcucauuaaacuuu

SEQ ID NO: 2667817 - RNA, 19 nt, Human
acagcucauuaaacuuuuu

SEQ ID NO: 2667818 - RNA, 14 nt, Human
acagcucaggaggc

SEQ ID NO: 2667819 - RNA, 19 nt, Human
acagcucaggaggcgcccu

SEQ ID NO: 2667820 - RNA, 21 nt, Human
uaugauuaaaaauaucaaauu

SEQ ID NO: 2667821 - RNA, 17 nt, Human
uaugauuaaaaauauca

SEQ ID NO: 2667822 - RNA, 23 nt, Human
uaugauuaaaaauaucaaauuaa

SEQ ID NO: 2667823 - RNA, 14 nt, Human
uaugauuaaaaaua

SEQ ID NO: 2667824 - RNA, 12 nt, Human
uaugauuaaaaa

SEQ ID NO: 2667825 - RNA, 16 nt, Human
uaugaugguuuuaaac

SEQ ID NO: 2667826 - RNA, 21 nt, Human
uaugaugacguacaaguaguu

SEQ ID NO: 2667827 - RNA, 18 nt, Human
uauauccugugacugucu

SEQ ID NO: 2667828 - RNA, 17 nt, Human
uauauccugugacuguc

SEQ ID NO: 2667829 - RNA, 15 nt, Human
uauauccugugacug

SEQ ID NO: 2667830 - RNA, 14 nt, Human
uauauccugugacu

SEQ ID NO: 2667831 - RNA, 13 nt, Human
uauaucaugcaaa

SEQ ID NO: 2667832 - RNA, 14 nt, Human
uauaucaugcaaaa

SEQ ID NO: 2667833 - RNA, 11 nt, Human
uauauauauaa

SEQ ID NO: 2667834 - RNA, 14 nt, Human
uauauauauaaaca

SEQ ID NO: 2667835 - RNA, 14 nt, Human
uauauauauaaaug

SEQ ID NO: 2667836 - RNA, 16 nt, Human
uauauauauaaaugua

SEQ ID NO: 2667837 - RNA, 13 nt, Human
uauauauauauaa

SEQ ID NO: 2667838 - RNA, 14 nt, Human
uauauauauauaac

SEQ ID NO: 2667839 - RNA, 20 nt, Human
uauauaucuaucuauuugag

SEQ ID NO: 2667840 - RNA, 14 nt, Human
uauagccuggacug

SEQ ID NO: 2667841 - RNA, 21 nt, Human
uauagccuauggcagaaaaaa

SEQ ID NO: 2667842 - RNA, 19 nt, Human
uauagccuauggcagaaaa

SEQ ID NO: 2667843 - RNA, 20 nt, Human
uauagccuauggcagaaaaa

SEQ ID NO: 2667844 - RNA, 16 nt, Human
uauagcaacaacaauu

SEQ ID NO: 2667845 - RNA, 14 nt, Human
uauauauacauaua

SEQ ID NO: 2667846 - RNA, 15 nt, Human
uauauauacauauau

SEQ ID NO: 2667847 - RNA, 13 nt, Human
uauauauaaaacg

SEQ ID NO: 2667848 - RNA, 13 nt, Human
uauauauaaaugu

SEQ ID NO: 2667849 - RNA, 15 nt, Human
uauauauaaauguau

SEQ ID NO: 2667850 - RNA, 16 nt, Human
uauauauaacauauau

SEQ ID NO: 2667851 - RNA, 19 nt, Human
uauaacauauauggaagag

SEQ ID NO: 2667852 - RNA, 13 nt, Human
uauaacacauuuu

SEQ ID NO: 2667853 - RNA, 14 nt, Human
uauaacacauuuuu

SEQ ID NO: 2667854 - RNA, 22 nt, Human
uauaacacauuuuuuugcaugc

SEQ ID NO: 2667855 - RNA, 23 nt, Human
uauaacacauuuuuuugcaugca

SEQ ID NO: 2667856 - RNA, 19 nt, Human
uauaauuuauuuccacuaa

SEQ ID NO: 2667857 - RNA, 18 nt, Human
uauaagccaaaauuaagg

SEQ ID NO: 2667858 - RNA, 23 nt, Human
uauaagccaaaauuaagguguuu

SEQ ID NO: 2667859 - RNA, 22 nt, Human
uauaagccaaaauuaagguguu

SEQ ID NO: 2667860 - RNA, 21 nt, Human
uauaagccaaaauuaaggugu

SEQ ID NO: 2667861 - RNA, 19 nt, Human
uauaagccaaaauuaaggu

SEQ ID NO: 2667862 - RNA, 17 nt, Human
uauaaccagcugaaguu

SEQ ID NO: 2667863 - RNA, 22 nt, Human
uauacaguauagauuuuugggu

SEQ ID NO: 2667864 - RNA, 19 nt, Human
uauacacgaauagacauca

SEQ ID NO: 2667865 - RNA, 21 nt, Human
uauacacgaauagacaucaaa

SEQ ID NO: 2667866 - RNA, 17 nt, Human
uauaccagcaauauauc

SEQ ID NO: 2667867 - RNA, 17 nt, Human
uauacagugcagagccu

SEQ ID NO: 2667868 - RNA, 18 nt, Human
uauacagugcagagccuu

SEQ ID NO: 2667869 - RNA, 18 nt, Human
uaguucugagcugccagu

SEQ ID NO: 2667870 - RNA, 15 nt, Human
uaguucuguauuuga

SEQ ID NO: 2667871 - RNA, 14 nt, Human
uaguucuguauuug

SEQ ID NO: 2667872 - RNA, 12 nt, Human
uaguucuguauu

SEQ ID NO: 2667873 - RNA, 20 nt, Human
uaguuccucauuagcauuuu

SEQ ID NO: 2667874 - RNA, 19 nt, Human
uagugaugaugguucacgu

SEQ ID NO: 2667875 - RNA, 17 nt, Human
uagugaucaagaagacu

SEQ ID NO: 2667876 - RNA, 11 nt, Human
uaguuacugug

SEQ ID NO: 2667877 - RNA, 15 nt, Human
uaguuacuguguaaa

SEQ ID NO: 2667878 - RNA, 16 nt, Human
uaguuacuguguaaac

SEQ ID NO: 2667879 - RNA, 17 nt, Human
uaguuacuguguaaacu

SEQ ID NO: 2667880 - RNA, 19 nt, Human
uaguuacuguguaaacuca

SEQ ID NO: 2667881 - RNA, 21 nt, Human
uaguuacuguguaaacucauc

SEQ ID NO: 2667882 - RNA, 16 nt, Human
uagucucuuuaaaagg

SEQ ID NO: 2667883 - RNA, 18 nt, Human
uagucucuuuaaaaggaa

SEQ ID NO: 2667884 - RNA, 17 nt, Human
uagucauauauuaaaca

SEQ ID NO: 2667885 - RNA, 21 nt, Human
uaguccaaaaagcuccugggg

SEQ ID NO: 2667886 - RNA, 23 nt, Human
acaagcugcacccucaggcaggu

SEQ ID NO: 2667887 - RNA, 22 nt, Human
acaagcugcacccucaggcagg

SEQ ID NO: 2667888 - RNA, 21 nt, Human
acaagcugcacccucaggcag

SEQ ID NO: 2667889 - RNA, 19 nt, Human
acaagcugcacccucaggc

SEQ ID NO: 2667890 - RNA, 13 nt, Human
acaagcuggcuua

SEQ ID NO: 2667891 - RNA, 19 nt, Human
acaagcaugcagcuuugca

SEQ ID NO: 2667892 - RNA, 16 nt, Human
acaagcuucaguaagu

SEQ ID NO: 2667893 - RNA, 19 nt, Human
acaagcuucaguaaguuau

SEQ ID NO: 2667894 - RNA, 19 nt, Human
acaagcuggcuuacacugg

SEQ ID NO: 2667895 - RNA, 22 nt, Human
uaguuuuauuuauauuuauuga

SEQ ID NO: 2667896 - RNA, 21 nt, Human
uaguuuuauuuauauuuauug

SEQ ID NO: 2667897 - RNA, 15 nt, Human
uaguuuuauuuauau

SEQ ID NO: 2667898 - RNA, 14 nt, Human
uaguuuuauuuaua

SEQ ID NO: 2667899 - RNA, 21 nt, Human
acaccuacuagucaccagaga

SEQ ID NO: 2667900 - RNA, 22 nt, Human
acucauuuguuaaaauuaucaa

SEQ ID NO: 2667901 - RNA, 13 nt, Human
acuccacaucugc

SEQ ID NO: 2667902 - RNA, 14 nt, Human
acuccacaucugcc

SEQ ID NO: 2667903 - RNA, 15 nt, Human
acuccacaucugccu

SEQ ID NO: 2667904 - RNA, 20 nt, Human
acuccaacucccuuaaaaua

SEQ ID NO: 2667905 - RNA, 15 nt, Human
acuccaggcccuccu

SEQ ID NO: 2667906 - RNA, 18 nt, Human
acuccaggcccuccucuc

SEQ ID NO: 2667907 - RNA, 19 nt, Human
acuccaggcccuccucucc

SEQ ID NO: 2667908 - RNA, 19 nt, Human
acuccagggacacacagcc

SEQ ID NO: 2667909 - RNA, 20 nt, Human
acuccagggacacacagccu

SEQ ID NO: 2667910 - RNA, 24 nt, Human
acuccagggacacacagccuagca

SEQ ID NO: 2667911 - RNA, 15 nt, Human
acucauugcugagcc

SEQ ID NO: 2667912 - RNA, 20 nt, Human
acucauugcugagccucugc

SEQ ID NO: 2667913 - RNA, 18 nt, Human
acucauugcugagccucu

SEQ ID NO: 2667914 - RNA, 12 nt, Human
acucauuucauc

SEQ ID NO: 2667915 - RNA, 13 nt, Human
acucauuucaucu

SEQ ID NO: 2667916 - RNA, 14 nt, Human
acucauuucaucuc

SEQ ID NO: 2667917 - RNA, 15 nt, Human
acucauuucaucuca

SEQ ID NO: 2667918 - RNA, 17 nt, Human
acucauuucaucucauu

SEQ ID NO: 2667919 - RNA, 23 nt, Human
acucauugcugagccucugcucc

SEQ ID NO: 2667920 - RNA, 22 nt, Human
acucauugcugagccucugcuc

SEQ ID NO: 2667921 - RNA, 21 nt, Human
acucauugcugagccucugcu

SEQ ID NO: 2667922 - RNA, 19 nt, Human
ucccuguaggguccaacca

SEQ ID NO: 2667923 - RNA, 15 nt, Human
ucccuuacuuugcug

SEQ ID NO: 2667924 - RNA, 22 nt, Human
ucccuuuccaaaugcccagcuu

SEQ ID NO: 2667925 - RNA, 19 nt, Human
uccguuagcuccuguggcc

SEQ ID NO: 2667926 - RNA, 18 nt, Human
uccgugaaaacggagcug

SEQ ID NO: 2667927 - RNA, 18 nt, Human
uccuaaagagaguauuuu

SEQ ID NO: 2667928 - RNA, 23 nt, Human
uccuaaagaaaaauaucuuggcc

SEQ ID NO: 2667929 - RNA, 13 nt, Human
uccguuggccacu

SEQ ID NO: 2667930 - RNA, 15 nt, Human
uccguuggccacucc

SEQ ID NO: 2667931 - RNA, 14 nt, Human
uccuaggcauuugc

SEQ ID NO: 2667932 - RNA, 20 nt, Human
uccuagcacuuugggaggcc

SEQ ID NO: 2667933 - RNA, 19 nt, Human
uccucaaauuuuuugacuu

SEQ ID NO: 2667934 - RNA, 23 nt, Human
uccucacucggguuucucugugg

SEQ ID NO: 2667935 - RNA, 14 nt, Human
uccucagaaagugu

SEQ ID NO: 2667936 - RNA, 19 nt, Human
uccucagugcauuugugcu

SEQ ID NO: 2667937 - RNA, 12 nt, Human
uccucagccagu

SEQ ID NO: 2667938 - RNA, 16 nt, Human
uccuccccuuccucuu

SEQ ID NO: 2667939 - RNA, 19 nt, Human
uccuaggcauuugcugaau

SEQ ID NO: 2667940 - RNA, 15 nt, Human
acucgcgcucaguaa

SEQ ID NO: 2667941 - RNA, 16 nt, Human
acucgcgcucaguaaa

SEQ ID NO: 2667942 - RNA, 15 nt, Human
acucgcuguaugaaa

SEQ ID NO: 2667943 - RNA, 15 nt, Human
acucggcucugcagu

SEQ ID NO: 2667944 - RNA, 16 nt, Human
acucggcucugcaguc

SEQ ID NO: 2667945 - RNA, 20 nt, Human
acucggggugcuuccuugua

SEQ ID NO: 2667946 - RNA, 20 nt, Human
acucggguuucucuguggcu

SEQ ID NO: 2667947 - RNA, 16 nt, Human
acucggggugcuuccu

SEQ ID NO: 2667948 - RNA, 16 nt, Human
acucugcuucucugac

SEQ ID NO: 2667949 - RNA, 22 nt, Human
acucugcuucucugacuucugc

SEQ ID NO: 2667950 - RNA, 14 nt, Human
acucugcauguaga

SEQ ID NO: 2667951 - RNA, 20 nt, Human
acucugcauguagaggcuug

SEQ ID NO: 2667952 - RNA, 17 nt, Human
acucugcuucucugacu

SEQ ID NO: 2667953 - RNA, 18 nt, Human
acucugcuucucugacuu

SEQ ID NO: 2667954 - RNA, 20 nt, Human
acucugcuucucugacuucu

SEQ ID NO: 2667955 - RNA, 21 nt, Human
acucugcuucucugacuucug

SEQ ID NO: 2667956 - RNA, 14 nt, Human
uccccaccuccagg

SEQ ID NO: 2667957 - RNA, 17 nt, Human
uccccaccuccaggcuu

SEQ ID NO: 2667958 - RNA, 16 nt, Human
acuauauauauaaaug

SEQ ID NO: 2667959 - RNA, 17 nt, Human
acuauauauauaaaugu

SEQ ID NO: 2667960 - RNA, 20 nt, Human
acuauauauauaaauguaua

SEQ ID NO: 2667961 - RNA, 22 nt, Human
acuauauauauaaauguauaaa

SEQ ID NO: 2667962 - RNA, 19 nt, Human
acuauauaauuuauuucca

SEQ ID NO: 2667963 - RNA, 21 nt, Human
acuauauaauuuauuuccacu

SEQ ID NO: 2667964 - RNA, 19 nt, Human
acuauauuaguauguaugu

SEQ ID NO: 2667965 - RNA, 14 nt, Human
uccccuugcagccg

SEQ ID NO: 2667966 - RNA, 12 nt, Human
uccccucagcuc

SEQ ID NO: 2667967 - RNA, 10 nt, Human
ucccucaccc

SEQ ID NO: 2667968 - RNA, 12 nt, Human
ucccucaccccc

SEQ ID NO: 2667969 - RNA, 15 nt, Human
ucccucacccccucc

SEQ ID NO: 2667970 - RNA, 17 nt, Human
ucccucacccccuccca

SEQ ID NO: 2667971 - RNA, 20 nt, Human
ucccucacccccucccaccc

SEQ ID NO: 2667972 - RNA, 23 nt, Human
ucccucacccccucccaccccca

SEQ ID NO: 2667973 - RNA, 18 nt, Human
ucccuauuagagaagaga

SEQ ID NO: 2667974 - RNA, 17 nt, Human
acuaaaaaguauaaaau

SEQ ID NO: 2667975 - RNA, 20 nt, Human
acuaaaaaguauaaaauagu

SEQ ID NO: 2667976 - RNA, 21 nt, Human
acuaaaaaguauaaaauagua

SEQ ID NO: 2667977 - RNA, 13 nt, Human
acuaaaaauauug

SEQ ID NO: 2667978 - RNA, 15 nt, Human
acuaaaaauauuguu

SEQ ID NO: 2667979 - RNA, 21 nt, Human
acuaaaaauauuguuucugca

SEQ ID NO: 2667980 - RNA, 17 nt, Human
acguuuuuuccucagug

SEQ ID NO: 2667981 - RNA, 18 nt, Human
acguuuuuuccucagugc

SEQ ID NO: 2667982 - RNA, 19 nt, Human
acguuuuaaggacugacug

SEQ ID NO: 2667983 - RNA, 11 nt, Human
acguuuauaaa

SEQ ID NO: 2667984 - RNA, 14 nt, Human
acguuuauaaacag

SEQ ID NO: 2667985 - RNA, 16 nt, Human
acguuuauaaacagaa

SEQ ID NO: 2667986 - RNA, 19 nt, Human
acguuuauaaacagaaaug

SEQ ID NO: 2667987 - RNA, 21 nt, Human
acguuuauaaacagaaaugga

SEQ ID NO: 2667988 - RNA, 18 nt, Human
accuucuagucuuggcca

SEQ ID NO: 2667989 - RNA, 22 nt, Human
uccagcgaucucuccacugugc

SEQ ID NO: 2667990 - RNA, 24 nt, Human
uccagccugggugacagagcaagu

SEQ ID NO: 2667991 - RNA, 19 nt, Human
uccagccuggggcugaggc

SEQ ID NO: 2667992 - RNA, 13 nt, Human
uccagccugggug

SEQ ID NO: 2667993 - RNA, 20 nt, Human
acuaaacuacauuguucuua

SEQ ID NO: 2667994 - RNA, 12 nt, Human
acuaaagcauga

SEQ ID NO: 2667995 - RNA, 15 nt, Human
acuaaagcaugaaau

SEQ ID NO: 2667996 - RNA, 20 nt, Human
acuaaagcaugaaaugugaa

SEQ ID NO: 2667997 - RNA, 22 nt, Human
acuaaagcaugaaaugugaauu

SEQ ID NO: 2667998 - RNA, 19 nt, Human
acuaaauaagaaaauaaca

SEQ ID NO: 2667999 - RNA, 15 nt, Human
acuaaaucagagaca

SEQ ID NO: 2668000 - RNA, 18 nt, Human
acuaaaucagagacaaaa

SEQ ID NO: 2668001 - RNA, 19 nt, Human
acuaaaucagagacaaaau

SEQ ID NO: 2668002 - RNA, 21 nt, Human
acuaaaucagagacaaaauau

SEQ ID NO: 2668003 - RNA, 17 nt, Human
acuacaguauuacucuu

SEQ ID NO: 2668004 - RNA, 21 nt, Human
ucccagguaccagcugcgcuu

SEQ ID NO: 2668005 - RNA, 19 nt, Human
ucccagguaccagcugcgc

SEQ ID NO: 2668006 - RNA, 22 nt, Human
ucccagugccgagaaggaagcc

SEQ ID NO: 2668007 - RNA, 19 nt, Human
ucccagugccgagaaggaa

SEQ ID NO: 2668008 - RNA, 17 nt, Human
ucccaggggucucccug

SEQ ID NO: 2668009 - RNA, 18 nt, Human
ucccaggggucucccugg

SEQ ID NO: 2668010 - RNA, 19 nt, Human
ucccaggggucucccuggc

SEQ ID NO: 2668011 - RNA, 20 nt, Human
ucccaggggucucccuggcu

SEQ ID NO: 2668012 - RNA, 21 nt, Human
ucccaggggucucccuggcuc

SEQ ID NO: 2668013 - RNA, 22 nt, Human
ucccaggggucucccuggcucc

SEQ ID NO: 2668014 - RNA, 16 nt, Human
ucccagguaccagcug

SEQ ID NO: 2668015 - RNA, 17 nt, Human
ucccagguaccagcugc

SEQ ID NO: 2668016 - RNA, 18 nt, Human
ucccagguaccagcugcg

SEQ ID NO: 2668017 - RNA, 16 nt, Human
ucccauagucccugcc

SEQ ID NO: 2668018 - RNA, 18 nt, Human
ucccauagucccugccac

SEQ ID NO: 2668019 - RNA, 18 nt, Human
uccccaaaucaauacacu

SEQ ID NO: 2668020 - RNA, 23 nt, Human
uccccaaaucaauacacuaguug

SEQ ID NO: 2668021 - RNA, 22 nt, Human
uccccaaccgugucugucuggc

SEQ ID NO: 2668022 - RNA, 17 nt, Human
acuguacccaaauggaa

SEQ ID NO: 2668023 - RNA, 13 nt, Human
acuguaagggauu

SEQ ID NO: 2668024 - RNA, 16 nt, Human
acuguacccaaaugga

SEQ ID NO: 2668025 - RNA, 15 nt, Human
acuguagaaaugaug

SEQ ID NO: 2668026 - RNA, 14 nt, Human
ucgcuccugcccac

SEQ ID NO: 2668027 - RNA, 16 nt, Human
acuggggcagacaaua

SEQ ID NO: 2668028 - RNA, 21 nt, Human
uccuuucccaagccuucgggc

SEQ ID NO: 2668029 - RNA, 16 nt, Human
uccuuucccaagccuu

SEQ ID NO: 2668030 - RNA, 13 nt, Human
uccuuucccaagc

SEQ ID NO: 2668031 - RNA, 13 nt, Human
uccuuuaugugaa

SEQ ID NO: 2668032 - RNA, 14 nt, Human
uccuuuaugugaau

SEQ ID NO: 2668033 - RNA, 15 nt, Human
uccuuuaugugaauu

SEQ ID NO: 2668034 - RNA, 16 nt, Human
uccuuuaugugaauuu

SEQ ID NO: 2668035 - RNA, 17 nt, Human
uccuuuaugugaauuuu

SEQ ID NO: 2668036 - RNA, 20 nt, Human
uccuuuaugugaauuuuuaa

SEQ ID NO: 2668037 - RNA, 23 nt, Human
uccuuuaugugaauuuuuaagcu

SEQ ID NO: 2668038 - RNA, 12 nt, Human
ucgacucugugc

SEQ ID NO: 2668039 - RNA, 12 nt, Human
ucgccuuuccuc

SEQ ID NO: 2668040 - RNA, 21 nt, Human
ucgccuuuccucucuauauuu

SEQ ID NO: 2668041 - RNA, 13 nt, Human
ucgccuuuccucu

SEQ ID NO: 2668042 - RNA, 14 nt, Human
uccuuccugaaacu

SEQ ID NO: 2668043 - RNA, 13 nt, Human
acuggauuuguug

SEQ ID NO: 2668044 - RNA, 16 nt, Human
acuggcaaugguaguu

SEQ ID NO: 2668045 - RNA, 23 nt, Human
uccuucagacacccucaaccucu

SEQ ID NO: 2668046 - RNA, 12 nt, Human
acugccuugaaa

SEQ ID NO: 2668047 - RNA, 17 nt, Human
acugcaggucaaguugu

SEQ ID NO: 2668048 - RNA, 20 nt, Human
acugccuuuuuauuuauaug

SEQ ID NO: 2668049 - RNA, 15 nt, Human
acugcgacuuucugc

SEQ ID NO: 2668050 - RNA, 21 nt, Human
acugcgaagacccucuugccc

SEQ ID NO: 2668051 - RNA, 22 nt, Human
acugcgaagacccucuugccca

SEQ ID NO: 2668052 - RNA, 17 nt, Human
acugcgacuuucugccu

SEQ ID NO: 2668053 - RNA, 18 nt, Human
acugcgacuuucugccug

SEQ ID NO: 2668054 - RNA, 23 nt, Human
acugcgcccuuaacugcauccag

SEQ ID NO: 2668055 - RNA, 19 nt, Human
acugcgacuuucugccugg

SEQ ID NO: 2668056 - RNA, 21 nt, Human
acugcgacuuucugccuggag

SEQ ID NO: 2668057 - RNA, 22 nt, Human
acugcgacuuucugccuggagu

SEQ ID NO: 2668058 - RNA, 23 nt, Human
acugcgacuuucugccuggagug

SEQ ID NO: 2668059 - RNA, 21 nt, Human
acugcuucccuuacuuugcug

SEQ ID NO: 2668060 - RNA, 13 nt, Human
acugcuugaauaa

SEQ ID NO: 2668061 - RNA, 13 nt, Human
uccuguguagcau

SEQ ID NO: 2668062 - RNA, 21 nt, Human
uccuguugaaugacaaaguau

SEQ ID NO: 2668063 - RNA, 18 nt, Human
uccuguucaguaauaaaa

SEQ ID NO: 2668064 - RNA, 12 nt, Human
acugcaggcccu

SEQ ID NO: 2668065 - RNA, 13 nt, Human
acugcaggcccug

SEQ ID NO: 2668066 - RNA, 14 nt, Human
acugcaggcccugg

SEQ ID NO: 2668067 - RNA, 15 nt, Human
acugcaggcccuggc

SEQ ID NO: 2668068 - RNA, 16 nt, Human
acugcaggcccuggcc

SEQ ID NO: 2668069 - RNA, 17 nt, Human
acugcaggcccuggccu

SEQ ID NO: 2668070 - RNA, 18 nt, Human
acugcaggcccuggccuc

SEQ ID NO: 2668071 - RNA, 19 nt, Human
acugcaggcccuggccucc

SEQ ID NO: 2668072 - RNA, 22 nt, Human
acugcaggcccuggccuccccu

SEQ ID NO: 2668073 - RNA, 15 nt, Human
uccuuaaaucuuaau

SEQ ID NO: 2668074 - RNA, 17 nt, Human
uccuuaaaucuuaaugu

SEQ ID NO: 2668075 - RNA, 19 nt, Human
uccuuaaaucuuaauguuc

SEQ ID NO: 2668076 - RNA, 21 nt, Human
uccuuaaaucuuaauguuccu

SEQ ID NO: 2668077 - RNA, 17 nt, Human
uccuuaagcugcagaga

SEQ ID NO: 2668078 - RNA, 20 nt, Human
uccuuaagcugcagagauuu

SEQ ID NO: 2668079 - RNA, 15 nt, Human
uccuggggcguccag

SEQ ID NO: 2668080 - RNA, 23 nt, Human
uccugggggccuggguugggggc

SEQ ID NO: 2668081 - RNA, 22 nt, Human
uccugugauagaguucuuuuaa

SEQ ID NO: 2668082 - RNA, 21 nt, Human
uccugugauccacccaacccu

SEQ ID NO: 2668083 - RNA, 20 nt, Human
uccugugaaugccacugccu

SEQ ID NO: 2668084 - RNA, 22 nt, Human
uccugugaaugccacugccuuc

SEQ ID NO: 2668085 - RNA, 12 nt, Human
uccuguggcccc

SEQ ID NO: 2668086 - RNA, 16 nt, Human
uccuguggcauaaauu

SEQ ID NO: 2668087 - RNA, 19 nt, Human
uccuguggcauaaauugca

SEQ ID NO: 2668088 - RNA, 20 nt, Human
uccuguggcauaaauugcau

SEQ ID NO: 2668089 - RNA, 22 nt, Human
uccuguggccccacccugggcc

SEQ ID NO: 2668090 - RNA, 23 nt, Human
uccuguggccccacccugggccc

SEQ ID NO: 2668091 - RNA, 16 nt, Human
uccugugaaugccacu

SEQ ID NO: 2668092 - RNA, 21 nt, Human
uccugcacuuacuugcuuauu

SEQ ID NO: 2668093 - RNA, 17 nt, Human
uccugcagaccacgccc

SEQ ID NO: 2668094 - RNA, 23 nt, Human
uccugauuucuagaacccgugac

SEQ ID NO: 2668095 - RNA, 14 nt, Human
uccugauuccucuc

SEQ ID NO: 2668096 - RNA, 13 nt, Human
uccugcggguggg

SEQ ID NO: 2668097 - RNA, 14 nt, Human
uccugcgggugggg

SEQ ID NO: 2668098 - RNA, 21 nt, Human
uccugcguccuccucaccuca

SEQ ID NO: 2668099 - RNA, 16 nt, Human
uccugcguccuccuca

SEQ ID NO: 2668100 - RNA, 18 nt, Human
uccugcguccuccucacc

SEQ ID NO: 2668101 - RNA, 13 nt, Human
uccugcguccucc

SEQ ID NO: 2668102 - RNA, 14 nt, Human
uccugcguccuccu

SEQ ID NO: 2668103 - RNA, 15 nt, Human
uccugcguccuccuc

SEQ ID NO: 2668104 - RNA, 22 nt, Human
uccugcucauuaugccacuucc

SEQ ID NO: 2668105 - RNA, 15 nt, Human
acugaggauauucag

SEQ ID NO: 2668106 - RNA, 23 nt, Human
acugaggauauucagauguaugu

SEQ ID NO: 2668107 - RNA, 18 nt, Human
acugaggcaguuugagga

SEQ ID NO: 2668108 - RNA, 20 nt, Human
acugaggcaguuugaggauu

SEQ ID NO: 2668109 - RNA, 19 nt, Human
acugaguauuaauaucuga

SEQ ID NO: 2668110 - RNA, 15 nt, Human
acugagugggaagcc

SEQ ID NO: 2668111 - RNA, 16 nt, Human
acugagugggaagccc

SEQ ID NO: 2668112 - RNA, 13 nt, Human
acugagugggaag

SEQ ID NO: 2668113 - RNA, 14 nt, Human
acugagugggaagc

SEQ ID NO: 2668114 - RNA, 22 nt, Human
ucauuuguuaaaauuaucaaua

SEQ ID NO: 2668115 - RNA, 12 nt, Human
ucauuuguuuac

SEQ ID NO: 2668116 - RNA, 15 nt, Human
ucauuuguuuacauu

SEQ ID NO: 2668117 - RNA, 18 nt, Human
ucauuuguuuacauuuga

SEQ ID NO: 2668118 - RNA, 16 nt, Human
ucauuuuacaguaucu

SEQ ID NO: 2668119 - RNA, 14 nt, Human
accucgcugagggc

SEQ ID NO: 2668120 - RNA, 21 nt, Human
accugaaguuuuuuugcugcu

SEQ ID NO: 2668121 - RNA, 20 nt, Human
accuggaagaacaggccucu

SEQ ID NO: 2668122 - RNA, 23 nt, Human
accuggaagaacaggccucucca

SEQ ID NO: 2668123 - RNA, 14 nt, Human
uccaaccuucccaa

SEQ ID NO: 2668124 - RNA, 14 nt, Human
uccaaccagaccug

SEQ ID NO: 2668125 - RNA, 15 nt, Human
uccaaccagaccugg

SEQ ID NO: 2668126 - RNA, 16 nt, Human
uccaaccagaccugga

SEQ ID NO: 2668127 - RNA, 17 nt, Human
uccaaccagaccuggaa

SEQ ID NO: 2668128 - RNA, 12 nt, Human
uccaccagcauc

SEQ ID NO: 2668129 - RNA, 19 nt, Human
uccaccagcaucaccugcc

SEQ ID NO: 2668130 - RNA, 20 nt, Human
uccaccagcaucaccugccu

SEQ ID NO: 2668131 - RNA, 16 nt, Human
accuucuucuccuaca

SEQ ID NO: 2668132 - RNA, 14 nt, Human
accuucccaaacgc

SEQ ID NO: 2668133 - RNA, 22 nt, Human
accuucccaaacgccuccccug

SEQ ID NO: 2668134 - RNA, 21 nt, Human
accuucccaaacgccuccccu

SEQ ID NO: 2668135 - RNA, 19 nt, Human
accuucccaaacgccuccc

SEQ ID NO: 2668136 - RNA, 20 nt, Human
accuucuauagcaucacuua

SEQ ID NO: 2668137 - RNA, 18 nt, Human
accuucuauagcaucacu

SEQ ID NO: 2668138 - RNA, 17 nt, Human
accuucuauagcaucac

SEQ ID NO: 2668139 - RNA, 13 nt, Human
accuuaggccuuc

SEQ ID NO: 2668140 - RNA, 14 nt, Human
accuuagaauacag

SEQ ID NO: 2668141 - RNA, 17 nt, Human
accuuaggccuuccucu

SEQ ID NO: 2668142 - RNA, 16 nt, Human
accuuaggccuuccuc

SEQ ID NO: 2668143 - RNA, 15 nt, Human
accuuaggccuuccu

SEQ ID NO: 2668144 - RNA, 14 nt, Human
accuuaggccuucc

SEQ ID NO: 2668145 - RNA, 20 nt, Human
accuuaggccuuccucucuc

SEQ ID NO: 2668146 - RNA, 18 nt, Human
accuuaggccuuccucuc

SEQ ID NO: 2668147 - RNA, 21 nt, Human
accuuaggccuuccucucucc

SEQ ID NO: 2668148 - RNA, 13 nt, Human
accuuacuaauua

SEQ ID NO: 2668149 - RNA, 19 nt, Human
accuuaaguaaucaucuaa

SEQ ID NO: 2668150 - RNA, 16 nt, Human
uccacuacaccuggcu

SEQ ID NO: 2668151 - RNA, 17 nt, Human
uccacuacaccuggcug

SEQ ID NO: 2668152 - RNA, 18 nt, Human
uccacuacaccuggcuga

SEQ ID NO: 2668153 - RNA, 14 nt, Human
uccacuaaaaauau

SEQ ID NO: 2668154 - RNA, 17 nt, Human
uccacuaaaaauauugu

SEQ ID NO: 2668155 - RNA, 15 nt, Human
uccacuacaccuggc

SEQ ID NO: 2668156 - RNA, 22 nt, Human
uccagaaguuugagaucagccu

SEQ ID NO: 2668157 - RNA, 24 nt, Human
uccacucugcuucucugacuucug

SEQ ID NO: 2668158 - RNA, 21 nt, Human
uccacucugcuucucugacuu

SEQ ID NO: 2668159 - RNA, 23 nt, Human
uccacucugcuucucugacuucu

SEQ ID NO: 2668160 - RNA, 12 nt, Human
uccacucugcuu

SEQ ID NO: 2668161 - RNA, 14 nt, Human
uccacucugcuucu

SEQ ID NO: 2668162 - RNA, 15 nt, Human
uccacucugcuucuc

SEQ ID NO: 2668163 - RNA, 19 nt, Human
uccacucugcuucucugac

SEQ ID NO: 2668164 - RNA, 20 nt, Human
uccacucugcuucucugacu

SEQ ID NO: 2668165 - RNA, 11 nt, Human
uccagccuggg

SEQ ID NO: 2668166 - RNA, 16 nt, Human
accgcccuuuuccccu

SEQ ID NO: 2668167 - RNA, 18 nt, Human
accgcccuuuuccccuac

SEQ ID NO: 2668168 - RNA, 15 nt, Human
accgccccuggccgc

SEQ ID NO: 2668169 - RNA, 16 nt, Human
accgccccuggccgcg

SEQ ID NO: 2668170 - RNA, 11 nt, Human
accgcccauca

SEQ ID NO: 2668171 - RNA, 20 nt, Human
accgccuccccaccuccagg

SEQ ID NO: 2668172 - RNA, 21 nt, Human
accgccuccccaccuccaggc

SEQ ID NO: 2668173 - RNA, 16 nt, Human
accggacuuuucugca

SEQ ID NO: 2668174 - RNA, 15 nt, Human
accggacuuuucugc

SEQ ID NO: 2668175 - RNA, 12 nt, Human
accgcacagcuc

SEQ ID NO: 2668176 - RNA, 14 nt, Human
accgcacagcucag

SEQ ID NO: 2668177 - RNA, 17 nt, Human
accgccaaggcuggggg

SEQ ID NO: 2668178 - RNA, 18 nt, Human
accgagaagguuuauccc

SEQ ID NO: 2668179 - RNA, 17 nt, Human
acccuuuuaaaguugau

SEQ ID NO: 2668180 - RNA, 12 nt, Human
accgaauaaaug

SEQ ID NO: 2668181 - RNA, 13 nt, Human
accgaauaaaugu

SEQ ID NO: 2668182 - RNA, 15 nt, Human
accgaauaaauguuu

SEQ ID NO: 2668183 - RNA, 12 nt, Human
acccuuugguuu

SEQ ID NO: 2668184 - RNA, 13 nt, Human
acccuuugggggu

SEQ ID NO: 2668185 - RNA, 17 nt, Human
acccuuuggggguugaa

SEQ ID NO: 2668186 - RNA, 21 nt, Human
acccuuugguuuuuuucuucu

SEQ ID NO: 2668187 - RNA, 23 nt, Human
acccuuugguuuuuuucuucugu

SEQ ID NO: 2668188 - RNA, 16 nt, Human
accuagcuaauuauuu

SEQ ID NO: 2668189 - RNA, 20 nt, Human
accuaaucaccauguaagca

SEQ ID NO: 2668190 - RNA, 17 nt, Human
accgugucugucuggca

SEQ ID NO: 2668191 - RNA, 13 nt, Human
accuccccagccu

SEQ ID NO: 2668192 - RNA, 14 nt, Human
accuccccagccug

SEQ ID NO: 2668193 - RNA, 22 nt, Human
accuccccagccugcgccugcu

SEQ ID NO: 2668194 - RNA, 17 nt, Human
accuccccagccugcgc

SEQ ID NO: 2668195 - RNA, 16 nt, Human
accuccccagccugcg

SEQ ID NO: 2668196 - RNA, 15 nt, Human
accuccccagccugc

SEQ ID NO: 2668197 - RNA, 15 nt, Human
accuccucauggcag

SEQ ID NO: 2668198 - RNA, 13 nt, Human
accucaauguccc

SEQ ID NO: 2668199 - RNA, 18 nt, Human
accucggucacuccaacu

SEQ ID NO: 2668200 - RNA, 17 nt, Human
accucggugccuuccuc

SEQ ID NO: 2668201 - RNA, 22 nt, Human
accucgcccucuccuuuguucc

SEQ ID NO: 2668202 - RNA, 17 nt, Human
accucgcccucuccuuu

SEQ ID NO: 2668203 - RNA, 15 nt, Human
accucgcccucuccu

SEQ ID NO: 2668204 - RNA, 14 nt, Human
accucgcccucucc

SEQ ID NO: 2668205 - RNA, 13 nt, Human
accucgcccucuc

SEQ ID NO: 2668206 - RNA, 18 nt, Human
ucauuccuuuuuauuuau

SEQ ID NO: 2668207 - RNA, 20 nt, Human
ucauuccuuuuuauuuauau

SEQ ID NO: 2668208 - RNA, 11 nt, Human
ucauugacuuu

SEQ ID NO: 2668209 - RNA, 12 nt, Human
ucauugacuuuu

SEQ ID NO: 2668210 - RNA, 14 nt, Human
ucauugacuuuuau

SEQ ID NO: 2668211 - RNA, 16 nt, Human
ucauugacuuuuauaa

SEQ ID NO: 2668212 - RNA, 21 nt, Human
ucauugacuuuuauaaagcau

SEQ ID NO: 2668213 - RNA, 24 nt, Human
ucauugacuuuuauaaagcauguu

SEQ ID NO: 2668214 - RNA, 14 nt, Human
accucucucucugg

SEQ ID NO: 2668215 - RNA, 22 nt, Human
accucugaauuuacuuccuugc

SEQ ID NO: 2668216 - RNA, 12 nt, Human
accucugcacaa

SEQ ID NO: 2668217 - RNA, 15 nt, Human
ucaugaccaguaaag

SEQ ID NO: 2668218 - RNA, 14 nt, Human
ucaugaccaguaaa

SEQ ID NO: 2668219 - RNA, 19 nt, Human
ucaugaggaggguggggga

SEQ ID NO: 2668220 - RNA, 17 nt, Human
ucaugcaugucaaacau

SEQ ID NO: 2668221 - RNA, 13 nt, Human
ucaugcccacccc

SEQ ID NO: 2668222 - RNA, 15 nt, Human
ucaugcccacccccu

SEQ ID NO: 2668223 - RNA, 16 nt, Human
ucaugcccacccccug

SEQ ID NO: 2668224 - RNA, 18 nt, Human
ucaugcccacccccugcc

SEQ ID NO: 2668225 - RNA, 19 nt, Human
ucaugcccacccccugccc

SEQ ID NO: 2668226 - RNA, 20 nt, Human
ucaugcccacccccugcccu

SEQ ID NO: 2668227 - RNA, 21 nt, Human
ucaugcccacccccugcccug

SEQ ID NO: 2668228 - RNA, 22 nt, Human
ucaugcccacccccugcccugc

SEQ ID NO: 2668229 - RNA, 16 nt, Human
ucauuaaacuuuuuua

SEQ ID NO: 2668230 - RNA, 17 nt, Human
ucauuaaacuuuuuuaa

SEQ ID NO: 2668231 - RNA, 15 nt, Human
ucauuaaagacagga

SEQ ID NO: 2668232 - RNA, 19 nt, Human
ucauguugaucauguacuu

SEQ ID NO: 2668233 - RNA, 21 nt, Human
ucauguugaucauguacuuuu

SEQ ID NO: 2668234 - RNA, 20 nt, Human
ucaugugugcaacaggguau

SEQ ID NO: 2668235 - RNA, 21 nt, Human
ucauguccaaacguccucuuu

SEQ ID NO: 2668236 - RNA, 17 nt, Human
ucaggguaaauaggaau

SEQ ID NO: 2668237 - RNA, 17 nt, Human
acccgacauaagucgag

SEQ ID NO: 2668238 - RNA, 21 nt, Human
acccgaccccccgugggcucc

SEQ ID NO: 2668239 - RNA, 23 nt, Human
acccgaccccccgugggcucccg

SEQ ID NO: 2668240 - RNA, 15 nt, Human
accccuucucuccuc

SEQ ID NO: 2668241 - RNA, 17 nt, Human
accccuucucuccuccc

SEQ ID NO: 2668242 - RNA, 23 nt, Human
accccuucucuccuccccaaauc

SEQ ID NO: 2668243 - RNA, 17 nt, Human
acccucuuccugugauc

SEQ ID NO: 2668244 - RNA, 19 nt, Human
acccucuuccugugaucca

SEQ ID NO: 2668245 - RNA, 20 nt, Human
acccucuuccugugauccac

SEQ ID NO: 2668246 - RNA, 18 nt, Human
acccucuugcccauccug

SEQ ID NO: 2668247 - RNA, 22 nt, Human
acccucuugcccauccugacug

SEQ ID NO: 2668248 - RNA, 23 nt, Human
acccucuugcccauccugacuga

SEQ ID NO: 2668249 - RNA, 15 nt, Human
acccucuuccuguga

SEQ ID NO: 2668250 - RNA, 16 nt, Human
acccucuuccugugau

SEQ ID NO: 2668251 - RNA, 14 nt, Human
acccucuuagaaaa

SEQ ID NO: 2668252 - RNA, 16 nt, Human
ucagaugccacuucua

SEQ ID NO: 2668253 - RNA, 19 nt, Human
ucagaugccacuucuaaga

SEQ ID NO: 2668254 - RNA, 20 nt, Human
ucagaugccacuucuaagaa

SEQ ID NO: 2668255 - RNA, 16 nt, Human
ucagauguuuaaaaca

SEQ ID NO: 2668256 - RNA, 17 nt, Human
ucagauguuuaaaacac

SEQ ID NO: 2668257 - RNA, 15 nt, Human
ucagauguuuaaaac

SEQ ID NO: 2668258 - RNA, 13 nt, Human
ucagauguuuaaa

SEQ ID NO: 2668259 - RNA, 16 nt, Human
ucagcccccugcuuca

SEQ ID NO: 2668260 - RNA, 17 nt, Human
ucagcccccugcuucag

SEQ ID NO: 2668261 - RNA, 18 nt, Human
acccagucaccucugucu

SEQ ID NO: 2668262 - RNA, 9 nt, Human
acccagugc

SEQ ID NO: 2668263 - RNA, 12 nt, Human
acccagugcaga

SEQ ID NO: 2668264 - RNA, 17 nt, Human
acccagugcagaaugua

SEQ ID NO: 2668265 - RNA, 18 nt, Human
acccagugcagaauguaa

SEQ ID NO: 2668266 - RNA, 13 nt, Human
acccccucccacc

SEQ ID NO: 2668267 - RNA, 14 nt, Human
acccccucccaccc

SEQ ID NO: 2668268 - RNA, 16 nt, Human
acccccucccaccccc

SEQ ID NO: 2668269 - RNA, 17 nt, Human
acccccucccaccccca

SEQ ID NO: 2668270 - RNA, 19 nt, Human
acccccucccacccccagc

SEQ ID NO: 2668271 - RNA, 20 nt, Human
acccccguggggcagggagc

SEQ ID NO: 2668272 - RNA, 12 nt, Human
ucagccugggca

SEQ ID NO: 2668273 - RNA, 10 nt, Human
ucagccuggg

SEQ ID NO: 2668274 - RNA, 13 nt, Human
accccuuccagau

SEQ ID NO: 2668275 - RNA, 15 nt, Human
accccuuccagauca

SEQ ID NO: 2668276 - RNA, 21 nt, Human
accccuuccagaucacugcca

SEQ ID NO: 2668277 - RNA, 16 nt, Human
accccuuccagaucac

SEQ ID NO: 2668278 - RNA, 20 nt, Human
accccuuccagaucacugcc

SEQ ID NO: 2668279 - RNA, 22 nt, Human
accaugauuaaccacuucagcu

SEQ ID NO: 2668280 - RNA, 23 nt, Human
accaugauuaaccacuucagcug

SEQ ID NO: 2668281 - RNA, 17 nt, Human
accauuuuuuaauuuac

SEQ ID NO: 2668282 - RNA, 23 nt, Human
accauuuuuuaauuuacuuguuu

SEQ ID NO: 2668283 - RNA, 19 nt, Human
acccaaccccaagccagcc

SEQ ID NO: 2668284 - RNA, 17 nt, Human
acccaacccuaucuccu

SEQ ID NO: 2668285 - RNA, 18 nt, Human
acccaacccuaucuccug

SEQ ID NO: 2668286 - RNA, 20 nt, Human
acccaacccuaucuccugac

SEQ ID NO: 2668287 - RNA, 22 nt, Human
acccaacccuaucuccugacag

SEQ ID NO: 2668288 - RNA, 13 nt, Human
accagggccuuuu

SEQ ID NO: 2668289 - RNA, 16 nt, Human
accagggccuuuucug

SEQ ID NO: 2668290 - RNA, 21 nt, Human
accagggccuuuucuggcacc

SEQ ID NO: 2668291 - RNA, 23 nt, Human
accagggccuuuucuggcaccgc

SEQ ID NO: 2668292 - RNA, 18 nt, Human
ucacuguaucauuuucuu

SEQ ID NO: 2668293 - RNA, 14 nt, Human
ucaccugccuguua

SEQ ID NO: 2668294 - RNA, 12 nt, Human
ucaccugccugu

SEQ ID NO: 2668295 - RNA, 13 nt, Human
uauuucagugaau

SEQ ID NO: 2668296 - RNA, 13 nt, Human
uauuucaucacaa

SEQ ID NO: 2668297 - RNA, 20 nt, Human
uauuucaucacaagaacaca

SEQ ID NO: 2668298 - RNA, 13 nt, Human
accacacuugaaa

SEQ ID NO: 2668299 - RNA, 17 nt, Human
accacacuugaaaccuu

SEQ ID NO: 2668300 - RNA, 16 nt, Human
accacagccagcaccu

SEQ ID NO: 2668301 - RNA, 17 nt, Human
accacaucaaauaagaa

SEQ ID NO: 2668302 - RNA, 23 nt, Human
accacagcaacgaucacaaauga

SEQ ID NO: 2668303 - RNA, 14 nt, Human
accacuucagcuga

SEQ ID NO: 2668304 - RNA, 13 nt, Human
accacuucagcug

SEQ ID NO: 2668305 - RNA, 15 nt, Human
accacuucagcugac

SEQ ID NO: 2668306 - RNA, 14 nt, Human
accacucgugcauc

SEQ ID NO: 2668307 - RNA, 17 nt, Human
accacucgugcaucccu

SEQ ID NO: 2668308 - RNA, 21 nt, Human
accacucgugcaucccugaga

SEQ ID NO: 2668309 - RNA, 14 nt, Human
accaggccaccucc

SEQ ID NO: 2668310 - RNA, 17 nt, Human
accaggccaccucccca

SEQ ID NO: 2668311 - RNA, 15 nt, Human
accaggccauucugc

SEQ ID NO: 2668312 - RNA, 12 nt, Human
accaggccaccu

SEQ ID NO: 2668313 - RNA, 16 nt, Human
accaggcaccucuucc

SEQ ID NO: 2668314 - RNA, 17 nt, Human
accaggcaccucuuccu

SEQ ID NO: 2668315 - RNA, 21 nt, Human
ugagccagugcuuuaauggca

SEQ ID NO: 2668316 - RNA, 20 nt, Human
agcaagugagacccugucuc

SEQ ID NO: 2668317 - RNA, 13 nt, Human
agcacagcagcuu

SEQ ID NO: 2668318 - RNA, 20 nt, Human
agcaaguucugagagccagg

SEQ ID NO: 2668319 - RNA, 16 nt, Human
agcaaguuacagugau

SEQ ID NO: 2668320 - RNA, 23 nt, Human
agcaagugugaauacugcuugaa

SEQ ID NO: 2668321 - RNA, 13 nt, Human
agcaagugguccu

SEQ ID NO: 2668322 - RNA, 21 nt, Human
agcaagugugaauacugcuug

SEQ ID NO: 2668323 - RNA, 15 nt, Human
agcaagugugaauac

SEQ ID NO: 2668324 - RNA, 19 nt, Human
agcacagucugaugacaca

SEQ ID NO: 2668325 - RNA, 16 nt, Human
agcacauauggaauuu

SEQ ID NO: 2668326 - RNA, 18 nt, Human
agcaacgaucacaaauga

SEQ ID NO: 2668327 - RNA, 15 nt, Human
agcaaccuacccagc

SEQ ID NO: 2668328 - RNA, 22 nt, Human
agcaacgaucacaaaugacuuu

SEQ ID NO: 2668329 - RNA, 21 nt, Human
agcaacgaucacaaaugacuu

SEQ ID NO: 2668330 - RNA, 20 nt, Human
agcaacgaucacaaaugacu

SEQ ID NO: 2668331 - RNA, 19 nt, Human
agcaacgaucacaaaugac

SEQ ID NO: 2668332 - RNA, 14 nt, Human
ugagcacuuuucaa

SEQ ID NO: 2668333 - RNA, 13 nt, Human
agcacuuuucaaa

SEQ ID NO: 2668334 - RNA, 17 nt, Human
agcacuuugggaggccg

SEQ ID NO: 2668335 - RNA, 20 nt, Human
agcacuuugggaggccgagg

SEQ ID NO: 2668336 - RNA, 21 nt, Human
agcacuuugggaggccgaggc

SEQ ID NO: 2668337 - RNA, 23 nt, Human
agcagaaaaaggcugugcugccc

SEQ ID NO: 2668338 - RNA, 23 nt, Human
agcacuuugggaggccaaggugg

SEQ ID NO: 2668339 - RNA, 22 nt, Human
agcacuuugggaggccaaggug

SEQ ID NO: 2668340 - RNA, 15 nt, Human
agcaccuugugccug

SEQ ID NO: 2668341 - RNA, 16 nt, Human
agcaccuugugccugg

SEQ ID NO: 2668342 - RNA, 17 nt, Human
agcaccuugugccuggg

SEQ ID NO: 2668343 - RNA, 18 nt, Human
agcaccuugugccugggg

SEQ ID NO: 2668344 - RNA, 19 nt, Human
agcaccuugugccuggggu

SEQ ID NO: 2668345 - RNA, 16 nt, Human
ugagccugggaaauaa

SEQ ID NO: 2668346 - RNA, 22 nt, Human
ugagccugggaggucaaggcug

SEQ ID NO: 2668347 - RNA, 19 nt, Human
ugagccugggaggucaagg

SEQ ID NO: 2668348 - RNA, 16 nt, Human
ugagccuggcaagaau

SEQ ID NO: 2668349 - RNA, 11 nt, Human
ugagccuggca

SEQ ID NO: 2668350 - RNA, 14 nt, Human
ugagccugggaggu

SEQ ID NO: 2668351 - RNA, 11 nt, Human
agcagacauuu

SEQ ID NO: 2668352 - RNA, 10 nt, Human
ugagccuggc

SEQ ID NO: 2668353 - RNA, 16 nt, Human
ugagguauuuuuuccu

SEQ ID NO: 2668354 - RNA, 15 nt, Human
agcagcaaauuuuca

SEQ ID NO: 2668355 - RNA, 20 nt, Human
agcagcaaauuuucagcauu

SEQ ID NO: 2668356 - RNA, 13 nt, Human
agcagaggaccag

SEQ ID NO: 2668357 - RNA, 14 nt, Human
agcagaggaccagg

SEQ ID NO: 2668358 - RNA, 16 nt, Human
agcagaggaccagggc

SEQ ID NO: 2668359 - RNA, 17 nt, Human
agcagaggaccagggcc

SEQ ID NO: 2668360 - RNA, 18 nt, Human
agcagaggaccagggccu

SEQ ID NO: 2668361 - RNA, 17 nt, Human
agcagaggaaggagagg

SEQ ID NO: 2668362 - RNA, 13 nt, Human
agcagaguuuuca

SEQ ID NO: 2668363 - RNA, 15 nt, Human
agcagaguuuucauu

SEQ ID NO: 2668364 - RNA, 19 nt, Human
agcagaguuuucauuaaau

SEQ ID NO: 2668365 - RNA, 23 nt, Human
agcagaguuuucauuaaauccuu

SEQ ID NO: 2668366 - RNA, 22 nt, Human
ugaggggucccuagcagcccac

SEQ ID NO: 2668367 - RNA, 13 nt, Human
ugagggcugcagu

SEQ ID NO: 2668368 - RNA, 13 nt, Human
ugagggcuuguag

SEQ ID NO: 2668369 - RNA, 22 nt, Human
ugagggccaaaauauuuggaau

SEQ ID NO: 2668370 - RNA, 14 nt, Human
ugagggaggggaaa

SEQ ID NO: 2668371 - RNA, 18 nt, Human
ugagggcagacuggggca

SEQ ID NO: 2668372 - RNA, 22 nt, Human
ugaggccguugcugacuuagaa

SEQ ID NO: 2668373 - RNA, 21 nt, Human
ugaggccguugcugacuuaga

SEQ ID NO: 2668374 - RNA, 20 nt, Human
ugaggccguugcugacuuag

SEQ ID NO: 2668375 - RNA, 14 nt, Human
ugaggccguugcug

SEQ ID NO: 2668376 - RNA, 19 nt, Human
ugaggccguugcugacuua

SEQ ID NO: 2668377 - RNA, 17 nt, Human
ugaggccguugcugacu

SEQ ID NO: 2668378 - RNA, 16 nt, Human
ugaggccaagaauauu

SEQ ID NO: 2668379 - RNA, 19 nt, Human
ugaggccaagaauauugca

SEQ ID NO: 2668380 - RNA, 21 nt, Human
ugaggccaagaauauugcaaa

SEQ ID NO: 2668381 - RNA, 18 nt, Human
ugagcgccuccauccaag

SEQ ID NO: 2668382 - RNA, 23 nt, Human
ugagcgccuccauccaaggccag

SEQ ID NO: 2668383 - RNA, 20 nt, Human
ugagcgccuccauccaaggc

SEQ ID NO: 2668384 - RNA, 16 nt, Human
ugagcuaggaagaguc

SEQ ID NO: 2668385 - RNA, 19 nt, Human
ugagcuaugacuuaacaua

SEQ ID NO: 2668386 - RNA, 15 nt, Human
ugagcuaugacuuaa

SEQ ID NO: 2668387 - RNA, 14 nt, Human
ugagcuaugacuua

SEQ ID NO: 2668388 - RNA, 15 nt, Human
ugaggaaaucaaagu

SEQ ID NO: 2668389 - RNA, 18 nt, Human
ugaggaaaucaaagugcu

SEQ ID NO: 2668390 - RNA, 16 nt, Human
ugaggaaaucaaagug

SEQ ID NO: 2668391 - RNA, 22 nt, Human
ugaggaaaucaaagugcuauua

SEQ ID NO: 2668392 - RNA, 19 nt, Human
ugaggaacuguagaugaug

SEQ ID NO: 2668393 - RNA, 21 nt, Human
ugaggaacuguagaugaugua

SEQ ID NO: 2668394 - RNA, 15 nt, Human
ugaggaaaauucuua

SEQ ID NO: 2668395 - RNA, 17 nt, Human
ugaauaucuauuaauau

SEQ ID NO: 2668396 - RNA, 16 nt, Human
ugaauaucuauuaaua

SEQ ID NO: 2668397 - RNA, 15 nt, Human
ugaaugccacugccu

SEQ ID NO: 2668398 - RNA, 14 nt, Human
ugaauaucuauuaa

SEQ ID NO: 2668399 - RNA, 21 nt, Human
ugaaugccacugccuucgcuu

SEQ ID NO: 2668400 - RNA, 22 nt, Human
ugaaugccacugccuucgcuuc

SEQ ID NO: 2668401 - RNA, 12 nt, Human
ugaauauaugau

SEQ ID NO: 2668402 - RNA, 23 nt, Human
ugaauguauuuauuugggagacc

SEQ ID NO: 2668403 - RNA, 19 nt, Human
ugaauguauuuauuuggga

SEQ ID NO: 2668404 - RNA, 21 nt, Human
agagucuaauagucuuugcca

SEQ ID NO: 2668405 - RNA, 17 nt, Human
ugaauguauuuauuugg

SEQ ID NO: 2668406 - RNA, 15 nt, Human
ugaauguauuuauuu

SEQ ID NO: 2668407 - RNA, 19 nt, Human
agaucacuguuuagauuug

SEQ ID NO: 2668408 - RNA, 18 nt, Human
agaucacuguuuagauuu

SEQ ID NO: 2668409 - RNA, 17 nt, Human
agaucacuguuuagauu

SEQ ID NO: 2668410 - RNA, 16 nt, Human
agaucacuguuuagau

SEQ ID NO: 2668411 - RNA, 15 nt, Human
agaucacuguuuaga

SEQ ID NO: 2668412 - RNA, 14 nt, Human
agaucacugccaca

SEQ ID NO: 2668413 - RNA, 16 nt, Human
agauauuuuucauaaa

SEQ ID NO: 2668414 - RNA, 19 nt, Human
agauaccuuaucuuacaau

SEQ ID NO: 2668415 - RNA, 22 nt, Human
agauaccuuaucuuacaauauu

SEQ ID NO: 2668416 - RNA, 14 nt, Human
agauaccuccaacc

SEQ ID NO: 2668417 - RNA, 19 nt, Human
agauaccuccaacccugcc

SEQ ID NO: 2668418 - RNA, 20 nt, Human
agauaccuccaacccugccg

SEQ ID NO: 2668419 - RNA, 20 nt, Human
agaguuuugucauucagagu

SEQ ID NO: 2668420 - RNA, 15 nt, Human
agauaauuucagggu

SEQ ID NO: 2668421 - RNA, 16 nt, Human
agauaauuucagggug

SEQ ID NO: 2668422 - RNA, 17 nt, Human
agauaauuacugccuug

SEQ ID NO: 2668423 - RNA, 19 nt, Human
agauaauuacugccuugaa

SEQ ID NO: 2668424 - RNA, 14 nt, Human
ugaagccaucuaaa

SEQ ID NO: 2668425 - RNA, 18 nt, Human
ugaagcugcccuaauaaa

SEQ ID NO: 2668426 - RNA, 13 nt, Human
ugaagcuucaugc

SEQ ID NO: 2668427 - RNA, 14 nt, Human
ugaagcuucaugca

SEQ ID NO: 2668428 - RNA, 21 nt, Human
ugaagcuucaugcacuuaaag

SEQ ID NO: 2668429 - RNA, 17 nt, Human
ugaagcauagauaauau

SEQ ID NO: 2668430 - RNA, 22 nt, Human
ugaagcauagauaauauuguuu

SEQ ID NO: 2668431 - RNA, 13 nt, Human
agaggugggccag

SEQ ID NO: 2668432 - RNA, 13 nt, Human
ugaagcagccucu

SEQ ID NO: 2668433 - RNA, 15 nt, Human
ugaagcagccucucc

SEQ ID NO: 2668434 - RNA, 20 nt, Human
ugaagcagccucuccccagg

SEQ ID NO: 2668435 - RNA, 20 nt, Human
agagggacggccaagaaugu

SEQ ID NO: 2668436 - RNA, 21 nt, Human
agagggacggccaagaaugua

SEQ ID NO: 2668437 - RNA, 22 nt, Human
agagggacggccaagaauguac

SEQ ID NO: 2668438 - RNA, 11 nt, Human
agaggcaccag

SEQ ID NO: 2668439 - RNA, 17 nt, Human
agaggcaccaggaagcc

SEQ ID NO: 2668440 - RNA, 13 nt, Human
agaggcaccagga

SEQ ID NO: 2668441 - RNA, 14 nt, Human
agaggcaccaggaa

SEQ ID NO: 2668442 - RNA, 19 nt, Human
agaggcuagcuucugcuuu

SEQ ID NO: 2668443 - RNA, 17 nt, Human
agaggcuagcuucugcu

SEQ ID NO: 2668444 - RNA, 16 nt, Human
agaggcuagcuucugc

SEQ ID NO: 2668445 - RNA, 14 nt, Human
agaggcuuguuuac

SEQ ID NO: 2668446 - RNA, 19 nt, Human
agaggcuuguuuaccuuuc

SEQ ID NO: 2668447 - RNA, 20 nt, Human
ugaagaacugcaggcccugg

SEQ ID NO: 2668448 - RNA, 23 nt, Human
ugaagaacugcaggcccuggccu

SEQ ID NO: 2668449 - RNA, 18 nt, Human
agaggcaacugcauuggc

SEQ ID NO: 2668450 - RNA, 13 nt, Human
agagcuggcucug

SEQ ID NO: 2668451 - RNA, 12 nt, Human
agagcuggcucu

SEQ ID NO: 2668452 - RNA, 15 nt, Human
agagcuggcucugag

SEQ ID NO: 2668453 - RNA, 16 nt, Human
agagcuggcucugagc

SEQ ID NO: 2668454 - RNA, 17 nt, Human
agauguccuaaugguga

SEQ ID NO: 2668455 - RNA, 19 nt, Human
agaugcuccagcaacacag

SEQ ID NO: 2668456 - RNA, 16 nt, Human
agaugcuucucacugc

SEQ ID NO: 2668457 - RNA, 18 nt, Human
agaugcuucucacugcca

SEQ ID NO: 2668458 - RNA, 19 nt, Human
agauguguggacuguggca

SEQ ID NO: 2668459 - RNA, 23 nt, Human
ugaccccgguggcggccccagca

SEQ ID NO: 2668460 - RNA, 12 nt, Human
agaugauguauu

SEQ ID NO: 2668461 - RNA, 16 nt, Human
agaucgagaccauccu

SEQ ID NO: 2668462 - RNA, 17 nt, Human
agaucgagaccauccug

SEQ ID NO: 2668463 - RNA, 18 nt, Human
agaucgagaccauccugg

SEQ ID NO: 2668464 - RNA, 20 nt, Human
agaucgagaccauccuggcu

SEQ ID NO: 2668465 - RNA, 21 nt, Human
agaucgagaccauccuggcua

SEQ ID NO: 2668466 - RNA, 16 nt, Human
agaucauuuugaaauu

SEQ ID NO: 2668467 - RNA, 12 nt, Human
agauccaaagac

SEQ ID NO: 2668468 - RNA, 13 nt, Human
agauccaaagacu

SEQ ID NO: 2668469 - RNA, 14 nt, Human
agauccaaagacuc

SEQ ID NO: 2668470 - RNA, 17 nt, Human
ugaauuuacuuccuugc

SEQ ID NO: 2668471 - RNA, 21 nt, Human
ugaauuuacuuccuugcaugu

SEQ ID NO: 2668472 - RNA, 20 nt, Human
agaucacuguuuagauuugc

SEQ ID NO: 2668473 - RNA, 18 nt, Human
ugacuucugccuggagac

SEQ ID NO: 2668474 - RNA, 12 nt, Human
ugacuucugccu

SEQ ID NO: 2668475 - RNA, 13 nt, Human
ugacuucugccug

SEQ ID NO: 2668476 - RNA, 15 nt, Human
ugacuucugccugga

SEQ ID NO: 2668477 - RNA, 16 nt, Human
ugacuucugccuggag

SEQ ID NO: 2668478 - RNA, 20 nt, Human
ugacuuuauuauuuauuuuu

SEQ ID NO: 2668479 - RNA, 17 nt, Human
ugacuuuauuauuuauu

SEQ ID NO: 2668480 - RNA, 16 nt, Human
ugacuuuauuauuuau

SEQ ID NO: 2668481 - RNA, 15 nt, Human
ugacuuuauuauuua

SEQ ID NO: 2668482 - RNA, 15 nt, Human
agauugguuuuccug

SEQ ID NO: 2668483 - RNA, 20 nt, Human
agauugugaucccuugagau

SEQ ID NO: 2668484 - RNA, 20 nt, Human
agauuuaaucugccaagggc

SEQ ID NO: 2668485 - RNA, 19 nt, Human
agauuuauuuuuuggacuu

SEQ ID NO: 2668486 - RNA, 21 nt, Human
agauuugccauagaguacacu

SEQ ID NO: 2668487 - RNA, 19 nt, Human
agauuugccauagaguaca

SEQ ID NO: 2668488 - RNA, 18 nt, Human
agauuugccauagaguac

SEQ ID NO: 2668489 - RNA, 21 nt, Human
agcaacacagccugggcccca

SEQ ID NO: 2668490 - RNA, 13 nt, Human
agcaacacagccu

SEQ ID NO: 2668491 - RNA, 15 nt, Human
agcaacacagccugg

SEQ ID NO: 2668492 - RNA, 17 nt, Human
agcaacacagccugggc

SEQ ID NO: 2668493 - RNA, 18 nt, Human
agcaacacagccugggcc

SEQ ID NO: 2668494 - RNA, 17 nt, Human
agauuuuccucuuguga

SEQ ID NO: 2668495 - RNA, 20 nt, Human
agauuuuccucuugugauuu

SEQ ID NO: 2668496 - RNA, 22 nt, Human
ucuccuuccaguauaaccagcu

SEQ ID NO: 2668497 - RNA, 18 nt, Human
ucucugccauaucaguga

SEQ ID NO: 2668498 - RNA, 20 nt, Human
ucucugcauuuaaaaaaauc

SEQ ID NO: 2668499 - RNA, 16 nt, Human
ucucuccagauguuuc

SEQ ID NO: 2668500 - RNA, 13 nt, Human
ucucuccagaugu

SEQ ID NO: 2668501 - RNA, 14 nt, Human
ucucuugagagggu

SEQ ID NO: 2668502 - RNA, 13 nt, Human
ucucugcuauaua

SEQ ID NO: 2668503 - RNA, 13 nt, Human
agaaaacugugau

SEQ ID NO: 2668504 - RNA, 14 nt, Human
agaaaacugugauu

SEQ ID NO: 2668505 - RNA, 16 nt, Human
agaaaacugugauuuc

SEQ ID NO: 2668506 - RNA, 19 nt, Human
agaaaaauaaaaaucucuu

SEQ ID NO: 2668507 - RNA, 15 nt, Human
agaaaaauaacccuu

SEQ ID NO: 2668508 - RNA, 17 nt, Human
agaaaaaugagccuggc

SEQ ID NO: 2668509 - RNA, 15 nt, Human
ucucuugagccuggg

SEQ ID NO: 2668510 - RNA, 14 nt, Human
ucucuugagccugg

SEQ ID NO: 2668511 - RNA, 13 nt, Human
ucucuugagccug

SEQ ID NO: 2668512 - RNA, 19 nt, Human
acuuuuguguaaugaaaau

SEQ ID NO: 2668513 - RNA, 18 nt, Human
acuuuuguguaaugaaaa

SEQ ID NO: 2668514 - RNA, 16 nt, Human
acuuuuguacugaauu

SEQ ID NO: 2668515 - RNA, 17 nt, Human
acuuuuguacugaauuu

SEQ ID NO: 2668516 - RNA, 18 nt, Human
acuuuuguacugaauuuu

SEQ ID NO: 2668517 - RNA, 14 nt, Human
acuuugggggagga

SEQ ID NO: 2668518 - RNA, 16 nt, Human
acuuuuuuaaauauuu

SEQ ID NO: 2668519 - RNA, 18 nt, Human
acuuuuuuaaauauuuuc

SEQ ID NO: 2668520 - RNA, 19 nt, Human
acuuuuuuaaauauuuucu

SEQ ID NO: 2668521 - RNA, 13 nt, Human
acuuuuuuuguau

SEQ ID NO: 2668522 - RNA, 14 nt, Human
acuuuuuuuguaug

SEQ ID NO: 2668523 - RNA, 16 nt, Human
acuuuuuuuguaugug

SEQ ID NO: 2668524 - RNA, 17 nt, Human
acuuuuuuuguaugugu

SEQ ID NO: 2668525 - RNA, 16 nt, Human
acuuugggaggccgag

SEQ ID NO: 2668526 - RNA, 21 nt, Human
acuuugggaggccgaggcggg

SEQ ID NO: 2668527 - RNA, 12 nt, Human
acuuugggaggc

SEQ ID NO: 2668528 - RNA, 19 nt, Human
acuuugggaaaacauguua

SEQ ID NO: 2668529 - RNA, 18 nt, Human
acuuugagccugggaaau

SEQ ID NO: 2668530 - RNA, 21 nt, Human
acuuguugccuauaagccaaa

SEQ ID NO: 2668531 - RNA, 16 nt, Human
acuuguugccuauaag

SEQ ID NO: 2668532 - RNA, 21 nt, Human
ucuccggcucccagccucagc

SEQ ID NO: 2668533 - RNA, 15 nt, Human
acuuguugccuauaa

SEQ ID NO: 2668534 - RNA, 16 nt, Human
ucuccguuagcuccug

SEQ ID NO: 2668535 - RNA, 17 nt, Human
ucuccguuagcuccugu

SEQ ID NO: 2668536 - RNA, 18 nt, Human
ucuccguuagcuccugug

SEQ ID NO: 2668537 - RNA, 19 nt, Human
ucuccguuagcuccugugg

SEQ ID NO: 2668538 - RNA, 14 nt, Human
ucuccggcucccag

SEQ ID NO: 2668539 - RNA, 16 nt, Human
ucuccggcucccagcc

SEQ ID NO: 2668540 - RNA, 15 nt, Human
ucuccggcucccagc

SEQ ID NO: 2668541 - RNA, 22 nt, Human
ucuccggcucccagccucagcg

SEQ ID NO: 2668542 - RNA, 16 nt, Human
ucuccggggccauuug

SEQ ID NO: 2668543 - RNA, 19 nt, Human
ucuccggggccauuugcaa

SEQ ID NO: 2668544 - RNA, 18 nt, Human
ucuccggcucccagccuc

SEQ ID NO: 2668545 - RNA, 17 nt, Human
ucuccggcucccagccu

SEQ ID NO: 2668546 - RNA, 13 nt, Human
ucuccgccagccu

SEQ ID NO: 2668547 - RNA, 14 nt, Human
ucuccgccagccuc

SEQ ID NO: 2668548 - RNA, 15 nt, Human
ucuccgccagccucc

SEQ ID NO: 2668549 - RNA, 18 nt, Human
ucuccgccagccuccucu

SEQ ID NO: 2668550 - RNA, 20 nt, Human
ucuccgccagccuccucugg

SEQ ID NO: 2668551 - RNA, 21 nt, Human
ucuccgccagccuccucugga

SEQ ID NO: 2668552 - RNA, 14 nt, Human
ucuccggccucucc

SEQ ID NO: 2668553 - RNA, 17 nt, Human
ucuccggccucuccagc

SEQ ID NO: 2668554 - RNA, 18 nt, Human
ucuccggccucuccagcc

SEQ ID NO: 2668555 - RNA, 21 nt, Human
ucuccggccucuccagccuca

SEQ ID NO: 2668556 - RNA, 19 nt, Human
acuguagcuuuuaggaaua

SEQ ID NO: 2668557 - RNA, 17 nt, Human
ucucccagguaccagcu

SEQ ID NO: 2668558 - RNA, 18 nt, Human
ucucccagguaccagcug

SEQ ID NO: 2668559 - RNA, 19 nt, Human
ucucccagguaccagcugc

SEQ ID NO: 2668560 - RNA, 13 nt, Human
ucuccauuugcuc

SEQ ID NO: 2668561 - RNA, 16 nt, Human
ucuccauuugcucuuc

SEQ ID NO: 2668562 - RNA, 23 nt, Human
ucuccauuugcucuucagaugcc

SEQ ID NO: 2668563 - RNA, 18 nt, Human
ucucccaaaaaacuacuu

SEQ ID NO: 2668564 - RNA, 19 nt, Human
ucuccauugugccuaaguc

SEQ ID NO: 2668565 - RNA, 15 nt, Human
acuguagaugaugua

SEQ ID NO: 2668566 - RNA, 15 nt, Human
acuguagauauguau

SEQ ID NO: 2668567 - RNA, 20 nt, Human
acuguagauauguauucuuu

SEQ ID NO: 2668568 - RNA, 13 nt, Human
acuguagaugaug

SEQ ID NO: 2668569 - RNA, 13 nt, Human
acuguagggaggg

SEQ ID NO: 2668570 - RNA, 18 nt, Human
agaagccuguaacacucc

SEQ ID NO: 2668571 - RNA, 19 nt, Human
agaagccuguaacacuccu

SEQ ID NO: 2668572 - RNA, 20 nt, Human
agaagccuguaacacuccuc

SEQ ID NO: 2668573 - RNA, 22 nt, Human
agaagccuguaacacuccucug

SEQ ID NO: 2668574 - RNA, 12 nt, Human
agaagccuucag

SEQ ID NO: 2668575 - RNA, 13 nt, Human
agaagccuucagc

SEQ ID NO: 2668576 - RNA, 14 nt, Human
agaagccuucagcu

SEQ ID NO: 2668577 - RNA, 17 nt, Human
agaagccuucagcucca

SEQ ID NO: 2668578 - RNA, 18 nt, Human
agaagccuucagcuccag

SEQ ID NO: 2668579 - RNA, 14 nt, Human
ucuggcccuagacu

SEQ ID NO: 2668580 - RNA, 13 nt, Human
ucuggcccuagac

SEQ ID NO: 2668581 - RNA, 11 nt, Human
agaagcugcag

SEQ ID NO: 2668582 - RNA, 12 nt, Human
agaagcugcagg

SEQ ID NO: 2668583 - RNA, 13 nt, Human
agaagcugcaggc

SEQ ID NO: 2668584 - RNA, 15 nt, Human
agaagcugcaggcuu

SEQ ID NO: 2668585 - RNA, 19 nt, Human
agaagcugcauccagaggc

SEQ ID NO: 2668586 - RNA, 21 nt, Human
agaagcugccaggugagaaac

SEQ ID NO: 2668587 - RNA, 22 nt, Human
agaagcugccaggugagaaacu

SEQ ID NO: 2668588 - RNA, 23 nt, Human
agaagcugccaggugagaaacug

SEQ ID NO: 2668589 - RNA, 22 nt, Human
agaagcgauuaugaaagcaaca

SEQ ID NO: 2668590 - RNA, 19 nt, Human
agaagccuucagcuccagg

SEQ ID NO: 2668591 - RNA, 16 nt, Human
agaagcggcuggcagc

SEQ ID NO: 2668592 - RNA, 15 nt, Human
agaagcggcuggcag

SEQ ID NO: 2668593 - RNA, 22 nt, Human
ucugcuucucugacuucugccu

SEQ ID NO: 2668594 - RNA, 16 nt, Human
ucugcuucucugacuu

SEQ ID NO: 2668595 - RNA, 19 nt, Human
ucugcuucucugacuucug

SEQ ID NO: 2668596 - RNA, 14 nt, Human
ucugcuucucugac

SEQ ID NO: 2668597 - RNA, 16 nt, Human
ucugcuguccuugccu

SEQ ID NO: 2668598 - RNA, 14 nt, Human
ucugcuauauauaa

SEQ ID NO: 2668599 - RNA, 15 nt, Human
ucugcuauauauaaa

SEQ ID NO: 2668600 - RNA, 16 nt, Human
ucugcuauauauaaaa

SEQ ID NO: 2668601 - RNA, 15 nt, Human
ucugccgucucugga

SEQ ID NO: 2668602 - RNA, 16 nt, Human
ucugccgucucuggag

SEQ ID NO: 2668603 - RNA, 22 nt, Human
ucugccggacccggaggccgag

SEQ ID NO: 2668604 - RNA, 18 nt, Human
ucugccgcccccuccuga

SEQ ID NO: 2668605 - RNA, 16 nt, Human
ucugccggugcucgga

SEQ ID NO: 2668606 - RNA, 21 nt, Human
ucugccggugcucggagaaga

SEQ ID NO: 2668607 - RNA, 14 nt, Human
ucugccgucucugg

SEQ ID NO: 2668608 - RNA, 15 nt, Human
agaacuccaggcccu

SEQ ID NO: 2668609 - RNA, 16 nt, Human
agaacuccaggcccuc

SEQ ID NO: 2668610 - RNA, 17 nt, Human
agaacuccaggcccucc

SEQ ID NO: 2668611 - RNA, 18 nt, Human
agaacucgcgcucaguaa

SEQ ID NO: 2668612 - RNA, 20 nt, Human
agaacucgcgcucaguaaac

SEQ ID NO: 2668613 - RNA, 21 nt, Human
agaacucgcgcucaguaaacg

SEQ ID NO: 2668614 - RNA, 14 nt, Human
agaacucuggcuuu

SEQ ID NO: 2668615 - RNA, 20 nt, Human
agaacucuggcuuuuggaag

SEQ ID NO: 2668616 - RNA, 20 nt, Human
agaacugaaaggcuuuucaa

SEQ ID NO: 2668617 - RNA, 16 nt, Human
agaacugaaaggcuuu

SEQ ID NO: 2668618 - RNA, 16 nt, Human
agaacucacuggggcc

SEQ ID NO: 2668619 - RNA, 19 nt, Human
agaacucacuggggccuac

SEQ ID NO: 2668620 - RNA, 16 nt, Human
agaacguuuuuuccuc

SEQ ID NO: 2668621 - RNA, 20 nt, Human
agaacguuuuuuccucagug

SEQ ID NO: 2668622 - RNA, 22 nt, Human
agaaauguugagucuguacuaa

SEQ ID NO: 2668623 - RNA, 16 nt, Human
agaaauguauaaacuu

SEQ ID NO: 2668624 - RNA, 20 nt, Human
agaaauguauaaacuuuaga

SEQ ID NO: 2668625 - RNA, 13 nt, Human
agaaccuaacaug

SEQ ID NO: 2668626 - RNA, 11 nt, Human
agaaauuuuca

SEQ ID NO: 2668627 - RNA, 13 nt, Human
agaaauuuucaag

SEQ ID NO: 2668628 - RNA, 13 nt, Human
agaaauuuuguaa

SEQ ID NO: 2668629 - RNA, 14 nt, Human
agaaauuuuguaag

SEQ ID NO: 2668630 - RNA, 16 nt, Human
agaaauuuuguaagaa

SEQ ID NO: 2668631 - RNA, 17 nt, Human
agaaauuuuguaagaag

SEQ ID NO: 2668632 - RNA, 21 nt, Human
agaaauuuuguaagaaggcaa

SEQ ID NO: 2668633 - RNA, 22 nt, Human
agaaauuuuguaagaaggcaau

SEQ ID NO: 2668634 - RNA, 16 nt, Human
agaaauuguauauugu

SEQ ID NO: 2668635 - RNA, 17 nt, Human
agaaauuguauauugua

SEQ ID NO: 2668636 - RNA, 20 nt, Human
agaaauuguauauuguaauu

SEQ ID NO: 2668637 - RNA, 21 nt, Human
agaaauuguauauuguaauuu

SEQ ID NO: 2668638 - RNA, 14 nt, Human
agaaauuguauauu

SEQ ID NO: 2668639 - RNA, 14 nt, Human
ucugagaaaacaag

SEQ ID NO: 2668640 - RNA, 12 nt, Human
ucugagaaaaca

SEQ ID NO: 2668641 - RNA, 17 nt, Human
ucugagggcuuguaguu

SEQ ID NO: 2668642 - RNA, 16 nt, Human
ucugagggaaauguuu

SEQ ID NO: 2668643 - RNA, 17 nt, Human
ucugagggaaauguuuu

SEQ ID NO: 2668644 - RNA, 18 nt, Human
ucugagggaaauguuuug

SEQ ID NO: 2668645 - RNA, 22 nt, Human
ucugagggaaauguuuuguaaa

SEQ ID NO: 2668646 - RNA, 20 nt, Human
ucugagggcuuguaguucuu

SEQ ID NO: 2668647 - RNA, 19 nt, Human
ucugagggcuuguaguucu

SEQ ID NO: 2668648 - RNA, 12 nt, Human
ucugagggggag

SEQ ID NO: 2668649 - RNA, 12 nt, Human
ucugacuucugc

SEQ ID NO: 2668650 - RNA, 19 nt, Human
ucugacuucugccuggaga

SEQ ID NO: 2668651 - RNA, 20 nt, Human
ucugacuucugccuggagac

SEQ ID NO: 2668652 - RNA, 14 nt, Human
ucugacuucugccu

SEQ ID NO: 2668653 - RNA, 15 nt, Human
ucugacuucugccug

SEQ ID NO: 2668654 - RNA, 16 nt, Human
ucugacuucugccugg

SEQ ID NO: 2668655 - RNA, 17 nt, Human
ucugacuucugccugga

SEQ ID NO: 2668656 - RNA, 22 nt, Human
agaaagaauuuaguauuaucaa

SEQ ID NO: 2668657 - RNA, 16 nt, Human
ucuugcaagcaugcuu

SEQ ID NO: 2668658 - RNA, 17 nt, Human
ucuugcaagcaugcuug

SEQ ID NO: 2668659 - RNA, 21 nt, Human
agaccgugaagauacuuugua

SEQ ID NO: 2668660 - RNA, 20 nt, Human
agaccgugaagauacuuugu

SEQ ID NO: 2668661 - RNA, 19 nt, Human
agaccgugaagauacuuug

SEQ ID NO: 2668662 - RNA, 22 nt, Human
agacccugggugggcucugugc

SEQ ID NO: 2668663 - RNA, 17 nt, Human
agacccugggugggcuc

SEQ ID NO: 2668664 - RNA, 19 nt, Human
agacccugggugggcucug

SEQ ID NO: 2668665 - RNA, 20 nt, Human
agacccugggugggcucugu

SEQ ID NO: 2668666 - RNA, 14 nt, Human
agacccucuugccc

SEQ ID NO: 2668667 - RNA, 15 nt, Human
agacccucuugccca

SEQ ID NO: 2668668 - RNA, 18 nt, Human
agacccucuugcccaucc

SEQ ID NO: 2668669 - RNA, 19 nt, Human
agacccucuugcccauccu

SEQ ID NO: 2668670 - RNA, 20 nt, Human
agacccucuugcccauccug

SEQ ID NO: 2668671 - RNA, 17 nt, Human
ucuuccuaucccucucc

SEQ ID NO: 2668672 - RNA, 19 nt, Human
ucuuccuaucccucuccua

SEQ ID NO: 2668673 - RNA, 22 nt, Human
ucuuccuaucccucuccuaacu

SEQ ID NO: 2668674 - RNA, 23 nt, Human
ucuuccucaaaauaaagaaguau

SEQ ID NO: 2668675 - RNA, 15 nt, Human
ucuuuaaacugucgu

SEQ ID NO: 2668676 - RNA, 16 nt, Human
ucuuggcaauaaauuu

SEQ ID NO: 2668677 - RNA, 24 nt, Human
ucuuggcaauaaauuuugaaaagu

SEQ ID NO: 2668678 - RNA, 18 nt, Human
ucuuuaaaaggaaagaaa

SEQ ID NO: 2668679 - RNA, 22 nt, Human
ucuuggcaauaaauuuugaaaa

SEQ ID NO: 2668680 - RNA, 20 nt, Human
ucuuggcaauaaauuuugaa

SEQ ID NO: 2668681 - RNA, 19 nt, Human
ucuuggcaauaaauuuuga

SEQ ID NO: 2668682 - RNA, 17 nt, Human
ucuuggcaauaaauuuu

SEQ ID NO: 2668683 - RNA, 19 nt, Human
ucuuuaccuguauacagug

SEQ ID NO: 2668684 - RNA, 15 nt, Human
ucuuuaggagauuua

SEQ ID NO: 2668685 - RNA, 16 nt, Human
ucuuuaggagauuuau

SEQ ID NO: 2668686 - RNA, 17 nt, Human
agacucggggugcuucc

SEQ ID NO: 2668687 - RNA, 14 nt, Human
agacucggggugcu

SEQ ID NO: 2668688 - RNA, 22 nt, Human
agacucggggugcuuccuugua

SEQ ID NO: 2668689 - RNA, 18 nt, Human
agagaaugaguccuugau

SEQ ID NO: 2668690 - RNA, 10 nt, Human
agagaaugag

SEQ ID NO: 2668691 - RNA, 17 nt, Human
agacuuugaugucagca

SEQ ID NO: 2668692 - RNA, 14 nt, Human
agacuuugauguca

SEQ ID NO: 2668693 - RNA, 18 nt, Human
agacuuugaugucagcag

SEQ ID NO: 2668694 - RNA, 19 nt, Human
agacugugcuguuguucuc

SEQ ID NO: 2668695 - RNA, 17 nt, Human
agacuguuaaaugaaac

SEQ ID NO: 2668696 - RNA, 18 nt, Human
agacuguuaaaugaaacc

SEQ ID NO: 2668697 - RNA, 19 nt, Human
agacuguggcuagugacaa

SEQ ID NO: 2668698 - RNA, 16 nt, Human
agacuugccagagccg

SEQ ID NO: 2668699 - RNA, 13 nt, Human
agacuuugauguc

SEQ ID NO: 2668700 - RNA, 11 nt, Human
agacuuugaug

SEQ ID NO: 2668701 - RNA, 21 nt, Human
agacuugaaaagagacaggca

SEQ ID NO: 2668702 - RNA, 20 nt, Human
agacuugaaaagagacaggc

SEQ ID NO: 2668703 - RNA, 22 nt, Human
agacuugaaaagagacaggcag

SEQ ID NO: 2668704 - RNA, 19 nt, Human
agacuugaaaagagacagg

SEQ ID NO: 2668705 - RNA, 18 nt, Human
agacuugaaaagagacag

SEQ ID NO: 2668706 - RNA, 17 nt, Human
agacuugaaaagagaca

SEQ ID NO: 2668707 - RNA, 15 nt, Human
agacuugaaaagaga

SEQ ID NO: 2668708 - RNA, 12 nt, Human
agacuugaaaag

SEQ ID NO: 2668709 - RNA, 17 nt, Human
ucuuagaucauaguuuu

SEQ ID NO: 2668710 - RNA, 16 nt, Human
ucuuagaucauaguuu

SEQ ID NO: 2668711 - RNA, 14 nt, Human
ucuucaaagccuuc

SEQ ID NO: 2668712 - RNA, 17 nt, Human
ucuucaaagccuucucc

SEQ ID NO: 2668713 - RNA, 18 nt, Human
ucuucaccuccugccagc

SEQ ID NO: 2668714 - RNA, 14 nt, Human
ucuucagagaaauc

SEQ ID NO: 2668715 - RNA, 14 nt, Human
agacagcuuuucuc

SEQ ID NO: 2668716 - RNA, 15 nt, Human
agacagcuuuucuca

SEQ ID NO: 2668717 - RNA, 18 nt, Human
agacagcuuuucucaacu

SEQ ID NO: 2668718 - RNA, 19 nt, Human
agacagcuuuucucaacug

SEQ ID NO: 2668719 - RNA, 19 nt, Human
agacacccucaaccucuuc

SEQ ID NO: 2668720 - RNA, 20 nt, Human
agacacuaacgaaauaucaa

SEQ ID NO: 2668721 - RNA, 21 nt, Human
agacacccucaaccucuucug

SEQ ID NO: 2668722 - RNA, 20 nt, Human
agacaggcaggugaucugcu

SEQ ID NO: 2668723 - RNA, 19 nt, Human
ucuuaauauguucuuuuaa

SEQ ID NO: 2668724 - RNA, 16 nt, Human
ucuuaaggacaaagug

SEQ ID NO: 2668725 - RNA, 19 nt, Human
ucuuaaggacaaagugcca

SEQ ID NO: 2668726 - RNA, 12 nt, Human
ucuuaagcuucc

SEQ ID NO: 2668727 - RNA, 15 nt, Human
agacagguccugauu

SEQ ID NO: 2668728 - RNA, 16 nt, Human
ucuguuuccugacauu

SEQ ID NO: 2668729 - RNA, 20 nt, Human
ucuguuuccugacauugucu

SEQ ID NO: 2668730 - RNA, 14 nt, Human
agaauuuaguauua

SEQ ID NO: 2668731 - RNA, 16 nt, Human
agaauuuaguauuauc

SEQ ID NO: 2668732 - RNA, 19 nt, Human
agaauuuaguauuaucaaa

SEQ ID NO: 2668733 - RNA, 21 nt, Human
agaauuuaaagaaaaaaaugu

SEQ ID NO: 2668734 - RNA, 13 nt, Human
agaauuuaaagaa

SEQ ID NO: 2668735 - RNA, 12 nt, Human
agaauuuaaaga

SEQ ID NO: 2668736 - RNA, 15 nt, Human
ucugugcccuccuga

SEQ ID NO: 2668737 - RNA, 20 nt, Human
ucugugccucccuccccagu

SEQ ID NO: 2668738 - RNA, 16 nt, Human
ucugugccuucgucuu

SEQ ID NO: 2668739 - RNA, 22 nt, Human
ucugugccuucuuuugauuaug

SEQ ID NO: 2668740 - RNA, 18 nt, Human
ucugugccuucuuuugau

SEQ ID NO: 2668741 - RNA, 14 nt, Human
ucugucuuuccuga

SEQ ID NO: 2668742 - RNA, 21 nt, Human
ucugucuuuccugaaccaugu

SEQ ID NO: 2668743 - RNA, 11 nt, Human
ucugucuuucc

SEQ ID NO: 2668744 - RNA, 21 nt, Human
ucuggggcaggcugggccaug

SEQ ID NO: 2668745 - RNA, 17 nt, Human
ucuggggcaggcugggc

SEQ ID NO: 2668746 - RNA, 18 nt, Human
ucuggggcaggcugggcc

SEQ ID NO: 2668747 - RNA, 19 nt, Human
ucuggggcaggcugggcca

SEQ ID NO: 2668748 - RNA, 20 nt, Human
ucuggggcaggcugggccau

SEQ ID NO: 2668749 - RNA, 20 nt, Human
ucuggucaagggcugucauu

SEQ ID NO: 2668750 - RNA, 15 nt, Human
ucuggucgcuccugc

SEQ ID NO: 2668751 - RNA, 17 nt, Human
ucuggucgcuccugccc

SEQ ID NO: 2668752 - RNA, 16 nt, Human
ucuggguccuuccuga

SEQ ID NO: 2668753 - RNA, 20 nt, Human
ucuguagcuauaaugagcau

SEQ ID NO: 2668754 - RNA, 14 nt, Human
ucuggucucgaacu

SEQ ID NO: 2668755 - RNA, 9 nt, Human
agccugcua

SEQ ID NO: 2668756 - RNA, 13 nt, Human
agccugcuagcua

SEQ ID NO: 2668757 - RNA, 12 nt, Human
agccugcuagcu

SEQ ID NO: 2668758 - RNA, 15 nt, Human
agccugcgccugcug

SEQ ID NO: 2668759 - RNA, 14 nt, Human
agccugcgccugcu

SEQ ID NO: 2668760 - RNA, 20 nt, Human
agccugcgccugcugcaugc

SEQ ID NO: 2668761 - RNA, 18 nt, Human
agccugcgccugcugcau

SEQ ID NO: 2668762 - RNA, 17 nt, Human
agccugcgccugcugca

SEQ ID NO: 2668763 - RNA, 16 nt, Human
agccugcgccugcugc

SEQ ID NO: 2668764 - RNA, 18 nt, Human
agccugcuagcuagcuca

SEQ ID NO: 2668765 - RNA, 17 nt, Human
agccugcuagcuagcuc

SEQ ID NO: 2668766 - RNA, 13 nt, Human
agcgccagccuca

SEQ ID NO: 2668767 - RNA, 19 nt, Human
agcgccagccucagacugg

SEQ ID NO: 2668768 - RNA, 21 nt, Human
agcggagguugcagugagcug

SEQ ID NO: 2668769 - RNA, 22 nt, Human
agcggagguugcagugagcuga

SEQ ID NO: 2668770 - RNA, 18 nt, Human
agcgcggcccucccgagu

SEQ ID NO: 2668771 - RNA, 15 nt, Human
agcgcgccccuagcc

SEQ ID NO: 2668772 - RNA, 15 nt, Human
agcgcggcccucccg

SEQ ID NO: 2668773 - RNA, 17 nt, Human
agcgcggacgugcuggg

SEQ ID NO: 2668774 - RNA, 14 nt, Human
ugccacacucucca

SEQ ID NO: 2668775 - RNA, 20 nt, Human
ugccacuuuacccaccuaga

SEQ ID NO: 2668776 - RNA, 20 nt, Human
ugccacuucacuccagccug

SEQ ID NO: 2668777 - RNA, 21 nt, Human
ugccacuuuacccaccuagaa

SEQ ID NO: 2668778 - RNA, 22 nt, Human
ugccacuuuacccaccuagaac

SEQ ID NO: 2668779 - RNA, 22 nt, Human
ugccacugccuucgcuucuugc

SEQ ID NO: 2668780 - RNA, 19 nt, Human
ugccacugccuucgcuucu

SEQ ID NO: 2668781 - RNA, 21 nt, Human
ugccacugccuucgcuucuug

SEQ ID NO: 2668782 - RNA, 15 nt, Human
ugccacuuccuuuua

SEQ ID NO: 2668783 - RNA, 16 nt, Human
ugccacuucuaagaaa

SEQ ID NO: 2668784 - RNA, 23 nt, Human
ugccacuucuaagaaaagccuaa

SEQ ID NO: 2668785 - RNA, 18 nt, Human
ugccacacucuccaucac

SEQ ID NO: 2668786 - RNA, 13 nt, Human
agcgggcgccugu

SEQ ID NO: 2668787 - RNA, 15 nt, Human
agcuacuagcaaaau

SEQ ID NO: 2668788 - RNA, 17 nt, Human
agcuacuagcaaaauaa

SEQ ID NO: 2668789 - RNA, 23 nt, Human
ugcccaagccagaggcuggguuc

SEQ ID NO: 2668790 - RNA, 22 nt, Human
ugccauuacagagguauuaaaa

SEQ ID NO: 2668791 - RNA, 21 nt, Human
ugccauguuggccaggcuggu

SEQ ID NO: 2668792 - RNA, 17 nt, Human
agcuauugccaaccagu

SEQ ID NO: 2668793 - RNA, 15 nt, Human
agcuauuuaugggcc

SEQ ID NO: 2668794 - RNA, 16 nt, Human
agcuauuuaugggccc

SEQ ID NO: 2668795 - RNA, 17 nt, Human
agcuauuuaugggcccc

SEQ ID NO: 2668796 - RNA, 22 nt, Human
agcuauuuaugggccccuggca

SEQ ID NO: 2668797 - RNA, 11 nt, Human
agcuauauaag

SEQ ID NO: 2668798 - RNA, 17 nt, Human
agcuauauaagacaaga

SEQ ID NO: 2668799 - RNA, 12 nt, Human
agcuaugacuua

SEQ ID NO: 2668800 - RNA, 17 nt, Human
agcuaugcaaaaagcua

SEQ ID NO: 2668801 - RNA, 13 nt, Human
agcuaugcaaaaa

SEQ ID NO: 2668802 - RNA, 16 nt, Human
agcuaugacuuaacau

SEQ ID NO: 2668803 - RNA, 20 nt, Human
agcuaguugaauacuugaac

SEQ ID NO: 2668804 - RNA, 19 nt, Human
agcuaguugaauacuugaa

SEQ ID NO: 2668805 - RNA, 23 nt, Human
agcuaguugaauacuugaaccau

SEQ ID NO: 2668806 - RNA, 22 nt, Human
agcuaguugaauacuugaacca

SEQ ID NO: 2668807 - RNA, 24 nt, Human
agcuaguugaauacuugaaccaua

SEQ ID NO: 2668808 - RNA, 22 nt, Human
agcuauaaagcaguauuuuucu

SEQ ID NO: 2668809 - RNA, 22 nt, Human
ugcccaagccagaggcuggguu

SEQ ID NO: 2668810 - RNA, 22 nt, Human
ugcccccaccccggggacccug

SEQ ID NO: 2668811 - RNA, 23 nt, Human
ugcccccaccccggggacccugu

SEQ ID NO: 2668812 - RNA, 14 nt, Human
ugcccccagccccg

SEQ ID NO: 2668813 - RNA, 16 nt, Human
ugcccccagccccggg

SEQ ID NO: 2668814 - RNA, 20 nt, Human
ugcccccagccccgggguga

SEQ ID NO: 2668815 - RNA, 18 nt, Human
ugcacuaaaucagagaca

SEQ ID NO: 2668816 - RNA, 19 nt, Human
ugcacuccagccugggcga

SEQ ID NO: 2668817 - RNA, 15 nt, Human
ugcacgucaugggag

SEQ ID NO: 2668818 - RNA, 19 nt, Human
ugcaccaccaagccaaggg

SEQ ID NO: 2668819 - RNA, 16 nt, Human
ugcaccaccaagccaa

SEQ ID NO: 2668820 - RNA, 18 nt, Human
ugcaccaccaagccaagg

SEQ ID NO: 2668821 - RNA, 14 nt, Human
ugcaccacugcacu

SEQ ID NO: 2668822 - RNA, 12 nt, Human
ugcaccaccaag

SEQ ID NO: 2668823 - RNA, 14 nt, Human
ugcaccaccaagcc

SEQ ID NO: 2668824 - RNA, 15 nt, Human
ugcaccaccaagcca

SEQ ID NO: 2668825 - RNA, 14 nt, Human
ugcacaagcugcac

SEQ ID NO: 2668826 - RNA, 21 nt, Human
ugcacaugacucggggguggg

SEQ ID NO: 2668827 - RNA, 17 nt, Human
ugcacaauuuugauaaa

SEQ ID NO: 2668828 - RNA, 12 nt, Human
agccuaaucaca

SEQ ID NO: 2668829 - RNA, 14 nt, Human
agccuauggcagaa

SEQ ID NO: 2668830 - RNA, 16 nt, Human
agccuauggcagaaaa

SEQ ID NO: 2668831 - RNA, 19 nt, Human
agccuauggcagaaaaaau

SEQ ID NO: 2668832 - RNA, 13 nt, Human
ugcagagauuucu

SEQ ID NO: 2668833 - RNA, 17 nt, Human
ugcacuccagccugggg

SEQ ID NO: 2668834 - RNA, 18 nt, Human
ugcacuccagccuggggg

SEQ ID NO: 2668835 - RNA, 19 nt, Human
ugcaguuugagacaggaga

SEQ ID NO: 2668836 - RNA, 22 nt, Human
ugcagucuuagaucauaguuuu

SEQ ID NO: 2668837 - RNA, 14 nt, Human
ugcagugagccgag

SEQ ID NO: 2668838 - RNA, 22 nt, Human
ugcaucugaaauaggaaacaag

SEQ ID NO: 2668839 - RNA, 19 nt, Human
agccugccucuucucuacu

SEQ ID NO: 2668840 - RNA, 16 nt, Human
agccugccucuucucu

SEQ ID NO: 2668841 - RNA, 23 nt, Human
agccugcccagcccccuggucuu

SEQ ID NO: 2668842 - RNA, 12 nt, Human
agccugcccagc

SEQ ID NO: 2668843 - RNA, 19 nt, Human
agccugcagggaagcccca

SEQ ID NO: 2668844 - RNA, 23 nt, Human
agccugcagggaagccccacaug

SEQ ID NO: 2668845 - RNA, 18 nt, Human
agccugaugagauuuuua

SEQ ID NO: 2668846 - RNA, 19 nt, Human
agccugaugagauuuuuaa

SEQ ID NO: 2668847 - RNA, 16 nt, Human
agccugauauugauau

SEQ ID NO: 2668848 - RNA, 14 nt, Human
agcugggcagguug

SEQ ID NO: 2668849 - RNA, 11 nt, Human
agcugggcccg

SEQ ID NO: 2668850 - RNA, 16 nt, Human
agcugggcccgacaug

SEQ ID NO: 2668851 - RNA, 21 nt, Human
agcugggcccgacauggcucc

SEQ ID NO: 2668852 - RNA, 22 nt, Human
agcugggcccgacauggcuccg

SEQ ID NO: 2668853 - RNA, 15 nt, Human
agcugggccgggacc

SEQ ID NO: 2668854 - RNA, 18 nt, Human
agcugggccgggacccag

SEQ ID NO: 2668855 - RNA, 20 nt, Human
ugcgaagacccucuugccca

SEQ ID NO: 2668856 - RNA, 13 nt, Human
ugcgacccugggg

SEQ ID NO: 2668857 - RNA, 14 nt, Human
ugcgacccuggggg

SEQ ID NO: 2668858 - RNA, 15 nt, Human
ugcgacccugggggc

SEQ ID NO: 2668859 - RNA, 19 nt, Human
ugcgacccugggggcacag

SEQ ID NO: 2668860 - RNA, 21 nt, Human
ugcgacccugggggcacagga

SEQ ID NO: 2668861 - RNA, 19 nt, Human
ugcgaaaggaugaaaguga

SEQ ID NO: 2668862 - RNA, 15 nt, Human
ugcgacuuucugccu

SEQ ID NO: 2668863 - RNA, 16 nt, Human
ugcgacuuucugccug

SEQ ID NO: 2668864 - RNA, 17 nt, Human
ugcgacuuucugccugg

SEQ ID NO: 2668865 - RNA, 18 nt, Human
ugcgacuuucugccugga

SEQ ID NO: 2668866 - RNA, 21 nt, Human
ugcgacuuucugccuggagug

SEQ ID NO: 2668867 - RNA, 13 nt, Human
ugccuuuuuauuu

SEQ ID NO: 2668868 - RNA, 15 nt, Human
ugccuuuuuauuuau

SEQ ID NO: 2668869 - RNA, 19 nt, Human
ugccuuuuuauuuauaugu

SEQ ID NO: 2668870 - RNA, 21 nt, Human
ugccuuuuuauuuauauguac

SEQ ID NO: 2668871 - RNA, 13 nt, Human
ugcgaaaggauga

SEQ ID NO: 2668872 - RNA, 22 nt, Human
ugccuguguccaugcgcucagg

SEQ ID NO: 2668873 - RNA, 12 nt, Human
ugccugugugcg

SEQ ID NO: 2668874 - RNA, 16 nt, Human
agcucucuccucccuu

SEQ ID NO: 2668875 - RNA, 14 nt, Human
agcucugccgucuc

SEQ ID NO: 2668876 - RNA, 17 nt, Human
agcucugccgucucugg

SEQ ID NO: 2668877 - RNA, 18 nt, Human
agcucugccgucucugga

SEQ ID NO: 2668878 - RNA, 19 nt, Human
agcucugccgucucuggag

SEQ ID NO: 2668879 - RNA, 20 nt, Human
agcucugccgucucuggagc

SEQ ID NO: 2668880 - RNA, 22 nt, Human
agcugaucugcggaucucagcu

SEQ ID NO: 2668881 - RNA, 18 nt, Human
agcucuucuuaaaguauu

SEQ ID NO: 2668882 - RNA, 17 nt, Human
agcugcacccucaggca

SEQ ID NO: 2668883 - RNA, 13 nt, Human
agcugcacccuca

SEQ ID NO: 2668884 - RNA, 22 nt, Human
agcugcacccucaggcaggugg

SEQ ID NO: 2668885 - RNA, 20 nt, Human
agcugcacccucaggcaggu

SEQ ID NO: 2668886 - RNA, 19 nt, Human
agcugcacccucaggcagg

SEQ ID NO: 2668887 - RNA, 18 nt, Human
agcugcacccucaggcag

SEQ ID NO: 2668888 - RNA, 13 nt, Human
ugcccuugggcca

SEQ ID NO: 2668889 - RNA, 20 nt, Human
ugccgccugcacuccucagg

SEQ ID NO: 2668890 - RNA, 16 nt, Human
ugccgccugcacuccu

SEQ ID NO: 2668891 - RNA, 23 nt, Human
ugccggacccggaggccgaggcc

SEQ ID NO: 2668892 - RNA, 16 nt, Human
ugccuccaggugcaga

SEQ ID NO: 2668893 - RNA, 17 nt, Human
ugccuccaggugcagag

SEQ ID NO: 2668894 - RNA, 21 nt, Human
ugccuccaggugcagagguac

SEQ ID NO: 2668895 - RNA, 16 nt, Human
ugccucccacuucacu

SEQ ID NO: 2668896 - RNA, 17 nt, Human
ugccucccacuucacug

SEQ ID NO: 2668897 - RNA, 17 nt, Human
aggaaagaggaagcaaa

SEQ ID NO: 2668898 - RNA, 13 nt, Human
aggaaagaaaaca

SEQ ID NO: 2668899 - RNA, 12 nt, Human
aggaaagaaaac

SEQ ID NO: 2668900 - RNA, 22 nt, Human
aggaaacuccacaucugccuua

SEQ ID NO: 2668901 - RNA, 16 nt, Human
aggaaacuccacaucu

SEQ ID NO: 2668902 - RNA, 19 nt, Human
aggaaacuccacaucugcc

SEQ ID NO: 2668903 - RNA, 20 nt, Human
aggaaacuccacaucugccu

SEQ ID NO: 2668904 - RNA, 21 nt, Human
aggaaacuccacaucugccuu

SEQ ID NO: 2668905 - RNA, 16 nt, Human
aggaaaauaguaaugu

SEQ ID NO: 2668906 - RNA, 23 nt, Human
aggaaaccgaguagaaaauguga

SEQ ID NO: 2668907 - RNA, 19 nt, Human
agcuuugaaaauucagugg

SEQ ID NO: 2668908 - RNA, 18 nt, Human
agcuuugaaaauucagug

SEQ ID NO: 2668909 - RNA, 16 nt, Human
agcuuugaaaauucag

SEQ ID NO: 2668910 - RNA, 12 nt, Human
agcuuugaaaau

SEQ ID NO: 2668911 - RNA, 15 nt, Human
agcuuauaaugggcu

SEQ ID NO: 2668912 - RNA, 22 nt, Human
agcuuauuguuucucugaaagu

SEQ ID NO: 2668913 - RNA, 16 nt, Human
agcuuggauuaaauac

SEQ ID NO: 2668914 - RNA, 17 nt, Human
agcuuggauuaaauaca

SEQ ID NO: 2668915 - RNA, 18 nt, Human
agcuuggauuaaauacau

SEQ ID NO: 2668916 - RNA, 23 nt, Human
agcuuuccuguugaaugacaaag

SEQ ID NO: 2668917 - RNA, 15 nt, Human
agcuuaucucagggg

SEQ ID NO: 2668918 - RNA, 14 nt, Human
agcuuaucucaggg

SEQ ID NO: 2668919 - RNA, 12 nt, Human
agcuuaucucag

SEQ ID NO: 2668920 - RNA, 17 nt, Human
ugcuaccuuucaaagcu

SEQ ID NO: 2668921 - RNA, 18 nt, Human
ugcuaccuuucaaagcuu

SEQ ID NO: 2668922 - RNA, 16 nt, Human
aggaaugaaaaaagcu

SEQ ID NO: 2668923 - RNA, 13 nt, Human
aggaauccuggca

SEQ ID NO: 2668924 - RNA, 14 nt, Human
aggaauccuggcag

SEQ ID NO: 2668925 - RNA, 15 nt, Human
aggaauccuggcagc

SEQ ID NO: 2668926 - RNA, 16 nt, Human
aggaauccuggcagcc

SEQ ID NO: 2668927 - RNA, 18 nt, Human
aggaauccuggcagccca

SEQ ID NO: 2668928 - RNA, 19 nt, Human
aggaauccuggcagcccag

SEQ ID NO: 2668929 - RNA, 20 nt, Human
aggaauccuggcagcccaga

SEQ ID NO: 2668930 - RNA, 13 nt, Human
aggaaaucaaagu

SEQ ID NO: 2668931 - RNA, 19 nt, Human
aggaaaucaaagugcuauu

SEQ ID NO: 2668932 - RNA, 14 nt, Human
aggaaaucaaagug

SEQ ID NO: 2668933 - RNA, 14 nt, Human
aggaagagaaaaaa

SEQ ID NO: 2668934 - RNA, 17 nt, Human
aggacaaagugccaaag

SEQ ID NO: 2668935 - RNA, 18 nt, Human
aggacaaagugccaaaga

SEQ ID NO: 2668936 - RNA, 19 nt, Human
aggacaaagugccaaagaa

SEQ ID NO: 2668937 - RNA, 20 nt, Human
aggacaaagugccaaagaaa

SEQ ID NO: 2668938 - RNA, 21 nt, Human
aggacaaagugccaaagaaag

SEQ ID NO: 2668939 - RNA, 22 nt, Human
aggacaaagugccaaagaaagu

SEQ ID NO: 2668940 - RNA, 19 nt, Human
ugcugccauuacagaggua

SEQ ID NO: 2668941 - RNA, 16 nt, Human
ugcugacuguuuucuc

SEQ ID NO: 2668942 - RNA, 17 nt, Human
ugcugaggguuugaaua

SEQ ID NO: 2668943 - RNA, 24 nt, Human
ugcugacuguuuucucuugagagg

SEQ ID NO: 2668944 - RNA, 21 nt, Human
ugcugacuguuuucucuugag

SEQ ID NO: 2668945 - RNA, 16 nt, Human
aggaaagcaauaaaug

SEQ ID NO: 2668946 - RNA, 19 nt, Human
aggaaagcaauaaaugaau

SEQ ID NO: 2668947 - RNA, 18 nt, Human
aggaaagcaauaaaugaa

SEQ ID NO: 2668948 - RNA, 22 nt, Human
aggaaagcaauaaaugaauggg

SEQ ID NO: 2668949 - RNA, 17 nt, Human
ugcugacuguuuucucu

SEQ ID NO: 2668950 - RNA, 19 nt, Human
ugcuaucaacaauaaaauu

SEQ ID NO: 2668951 - RNA, 21 nt, Human
ugcuauauauaaaacggugcu

SEQ ID NO: 2668952 - RNA, 19 nt, Human
ugcuauccccaucucccug

SEQ ID NO: 2668953 - RNA, 20 nt, Human
ugcuauccccaucucccugc

SEQ ID NO: 2668954 - RNA, 21 nt, Human
ugcuauccccaucucccugcc

SEQ ID NO: 2668955 - RNA, 22 nt, Human
ugcuauccccaucucccugccu

SEQ ID NO: 2668956 - RNA, 12 nt, Human
aggcaggauggc

SEQ ID NO: 2668957 - RNA, 23 nt, Human
aggcagggagacgguuuccaggg

SEQ ID NO: 2668958 - RNA, 16 nt, Human
aggcagggaggcagcc

SEQ ID NO: 2668959 - RNA, 19 nt, Human
aggcagggaggcagccgcc

SEQ ID NO: 2668960 - RNA, 18 nt, Human
aggcaggagaauggugug

SEQ ID NO: 2668961 - RNA, 20 nt, Human
aggcagccucugucaggccu

SEQ ID NO: 2668962 - RNA, 21 nt, Human
aggcagccucugucaggccuu

SEQ ID NO: 2668963 - RNA, 16 nt, Human
aggcaccaggaagccg

SEQ ID NO: 2668964 - RNA, 14 nt, Human
aggcaccaggaagc

SEQ ID NO: 2668965 - RNA, 15 nt, Human
aggcaccaggaagcc

SEQ ID NO: 2668966 - RNA, 20 nt, Human
aggcaguuugaggauuaguu

SEQ ID NO: 2668967 - RNA, 15 nt, Human
aggcaguuugaggau

SEQ ID NO: 2668968 - RNA, 12 nt, Human
uggagccgaggc

SEQ ID NO: 2668969 - RNA, 17 nt, Human
uggagccgaggccuacc

SEQ ID NO: 2668970 - RNA, 11 nt, Human
aggcaccagga

SEQ ID NO: 2668971 - RNA, 12 nt, Human
aggcaccaggaa

SEQ ID NO: 2668972 - RNA, 13 nt, Human
aggcaccaggaag

SEQ ID NO: 2668973 - RNA, 22 nt, Human
uggaaguauguauauuaaaaaa

SEQ ID NO: 2668974 - RNA, 15 nt, Human
ugcugcccugaagaa

SEQ ID NO: 2668975 - RNA, 22 nt, Human
ugcugcccugaagaauggcgcc

SEQ ID NO: 2668976 - RNA, 18 nt, Human
uggaacaauauuuuaugg

SEQ ID NO: 2668977 - RNA, 14 nt, Human
ugcugcccccaccc

SEQ ID NO: 2668978 - RNA, 15 nt, Human
ugcugcccccacccc

SEQ ID NO: 2668979 - RNA, 22 nt, Human
ugcugcccccaccccggggacc

SEQ ID NO: 2668980 - RNA, 20 nt, Human
ugcugcccccaccccgggga

SEQ ID NO: 2668981 - RNA, 16 nt, Human
uggaaguguauuuauu

SEQ ID NO: 2668982 - RNA, 22 nt, Human
uggaaguguauuuauuuuacag

SEQ ID NO: 2668983 - RNA, 21 nt, Human
aggaguuugagaccaaccugg

SEQ ID NO: 2668984 - RNA, 19 nt, Human
aggauauucagauguaugu

SEQ ID NO: 2668985 - RNA, 19 nt, Human
aggcaacugcauuggcuuu

SEQ ID NO: 2668986 - RNA, 17 nt, Human
aggcaagagggggugga

SEQ ID NO: 2668987 - RNA, 21 nt, Human
aggcaagaggggguggagggg

SEQ ID NO: 2668988 - RNA, 15 nt, Human
uggaauuuugcaaag

SEQ ID NO: 2668989 - RNA, 22 nt, Human
uggaauuuugcaaagauuuaau

SEQ ID NO: 2668990 - RNA, 18 nt, Human
uggaauuuuuuuguacga

SEQ ID NO: 2668991 - RNA, 23 nt, Human
uggaauuuugcaaagauuuaauc

SEQ ID NO: 2668992 - RNA, 14 nt, Human
aggaucucuaaaga

SEQ ID NO: 2668993 - RNA, 17 nt, Human
aggaucucuaaagagca

SEQ ID NO: 2668994 - RNA, 19 nt, Human
aggaucucuaaagagcauc

SEQ ID NO: 2668995 - RNA, 23 nt, Human
aggauuuuaacuuaacugaaaug

SEQ ID NO: 2668996 - RNA, 17 nt, Human
aggcuaugugauuacaa

SEQ ID NO: 2668997 - RNA, 14 nt, Human
aggcuaugugauua

SEQ ID NO: 2668998 - RNA, 19 nt, Human
aggcuauguauaaaauaca

SEQ ID NO: 2668999 - RNA, 20 nt, Human
aggcuauguauaaaauacau

SEQ ID NO: 2669000 - RNA, 21 nt, Human
aggcuauguauaaaauacaua

SEQ ID NO: 2669001 - RNA, 14 nt, Human
aggcuauuuucuaa

SEQ ID NO: 2669002 - RNA, 17 nt, Human
aggcuauuuucuaaaga

SEQ ID NO: 2669003 - RNA, 18 nt, Human
aggcuauuuucuaaagac

SEQ ID NO: 2669004 - RNA, 19 nt, Human
aggcuauuuucuaaagacu

SEQ ID NO: 2669005 - RNA, 19 nt, Human
aggcgcugagacugugcug

SEQ ID NO: 2669006 - RNA, 22 nt, Human
aggcgcugcccaccugccggcc

SEQ ID NO: 2669007 - RNA, 15 nt, Human
aggcgaccaccgccc

SEQ ID NO: 2669008 - RNA, 22 nt, Human
aggcgaccaccgccccuggccg

SEQ ID NO: 2669009 - RNA, 19 nt, Human
aggccucuuguaaagacug

SEQ ID NO: 2669010 - RNA, 22 nt, Human
aggcucacugcaacuucugccu

SEQ ID NO: 2669011 - RNA, 12 nt, Human
aggcucacugcc

SEQ ID NO: 2669012 - RNA, 13 nt, Human
aggcucacugcca

SEQ ID NO: 2669013 - RNA, 14 nt, Human
aggcucacugccag

SEQ ID NO: 2669014 - RNA, 15 nt, Human
aggcucacugccagg

SEQ ID NO: 2669015 - RNA, 16 nt, Human
aggcucacugccaggc

SEQ ID NO: 2669016 - RNA, 17 nt, Human
aggcucacugccaggcc

SEQ ID NO: 2669017 - RNA, 19 nt, Human
aggcucacugccaggccag

SEQ ID NO: 2669018 - RNA, 20 nt, Human
aggcucacugccaggccagc

SEQ ID NO: 2669019 - RNA, 21 nt, Human
aggcucacugccaggccagcc

SEQ ID NO: 2669020 - RNA, 22 nt, Human
aggcucacugccaggccagccu

SEQ ID NO: 2669021 - RNA, 23 nt, Human
aggcucacugccaggccagccuc

SEQ ID NO: 2669022 - RNA, 24 nt, Human
aggcucacugccaggccagccucc

SEQ ID NO: 2669023 - RNA, 12 nt, Human
uggccucugcuu

SEQ ID NO: 2669024 - RNA, 11 nt, Human
uggccugcugu

SEQ ID NO: 2669025 - RNA, 14 nt, Human
uggccucugcuuuc

SEQ ID NO: 2669026 - RNA, 15 nt, Human
uggccuggacaguau

SEQ ID NO: 2669027 - RNA, 12 nt, Human
uggccugcugug

SEQ ID NO: 2669028 - RNA, 11 nt, Human
uggccuggaca

SEQ ID NO: 2669029 - RNA, 24 nt, Human
uggccugggccguaucuccggcuc

SEQ ID NO: 2669030 - RNA, 11 nt, Human
uggccugggcc

SEQ ID NO: 2669031 - RNA, 12 nt, Human
uggccuguggcu

SEQ ID NO: 2669032 - RNA, 16 nt, Human
uggccuguggcugucg

SEQ ID NO: 2669033 - RNA, 17 nt, Human
uggccuguggcugucgg

SEQ ID NO: 2669034 - RNA, 14 nt, Human
uggcccacugcauc

SEQ ID NO: 2669035 - RNA, 13 nt, Human
uggcccacugcau

SEQ ID NO: 2669036 - RNA, 20 nt, Human
uggcccacgccuguaauccc

SEQ ID NO: 2669037 - RNA, 19 nt, Human
uggcccacgcacuucggga

SEQ ID NO: 2669038 - RNA, 21 nt, Human
uggcaugguuuugugccaucu

SEQ ID NO: 2669039 - RNA, 22 nt, Human
uggcaugguuuugugccaucug

SEQ ID NO: 2669040 - RNA, 23 nt, Human
uggcaugguuuugugccaucugu

SEQ ID NO: 2669041 - RNA, 17 nt, Human
uggcauguaaauguaaa

SEQ ID NO: 2669042 - RNA, 19 nt, Human
uggcauguaaauguaaacu

SEQ ID NO: 2669043 - RNA, 23 nt, Human
aggccguugcugacuuagaaucc

SEQ ID NO: 2669044 - RNA, 21 nt, Human
aggccguugcugacuuagaau

SEQ ID NO: 2669045 - RNA, 18 nt, Human
aggccguugcugacuuag

SEQ ID NO: 2669046 - RNA, 16 nt, Human
aggccuaccccgcaga

SEQ ID NO: 2669047 - RNA, 19 nt, Human
aggccuaccccgcagacac

SEQ ID NO: 2669048 - RNA, 22 nt, Human
aggccuaccccgcagacaccuu

SEQ ID NO: 2669049 - RNA, 20 nt, Human
uggcagcaacggcacagcua

SEQ ID NO: 2669050 - RNA, 17 nt, Human
uggcaccagcagccugg

SEQ ID NO: 2669051 - RNA, 16 nt, Human
uggcaccagcagccug

SEQ ID NO: 2669052 - RNA, 13 nt, Human
uggcacacagcag

SEQ ID NO: 2669053 - RNA, 14 nt, Human
aggccaugugcaua

SEQ ID NO: 2669054 - RNA, 20 nt, Human
aggccaugugcauaguuucu

SEQ ID NO: 2669055 - RNA, 16 nt, Human
aggccauucugccgcc

SEQ ID NO: 2669056 - RNA, 14 nt, Human
aggcuccccugagg

SEQ ID NO: 2669057 - RNA, 15 nt, Human
aggcuccccugagga

SEQ ID NO: 2669058 - RNA, 13 nt, Human
uggcuauccugau

SEQ ID NO: 2669059 - RNA, 14 nt, Human
uggcuauccugauu

SEQ ID NO: 2669060 - RNA, 19 nt, Human
uggcucacgccuguaaucc

SEQ ID NO: 2669061 - RNA, 14 nt, Human
uggcucaccuuccg

SEQ ID NO: 2669062 - RNA, 14 nt, Human
uggcucacgccugu

SEQ ID NO: 2669063 - RNA, 13 nt, Human
uggcucacgccug

SEQ ID NO: 2669064 - RNA, 21 nt, Human
uggcugaaauucuccuggagg

SEQ ID NO: 2669065 - RNA, 22 nt, Human
uggcugaaauucuccuggaggu

SEQ ID NO: 2669066 - RNA, 24 nt, Human
uggcucagcucggggagccuuagc

SEQ ID NO: 2669067 - RNA, 16 nt, Human
uggcugaaauucuccu

SEQ ID NO: 2669068 - RNA, 18 nt, Human
uggcugaaauucuccugg

SEQ ID NO: 2669069 - RNA, 19 nt, Human
uggcugaaauucuccugga

SEQ ID NO: 2669070 - RNA, 20 nt, Human
uggcugaaauucuccuggag

SEQ ID NO: 2669071 - RNA, 14 nt, Human
uggcucagcucggg

SEQ ID NO: 2669072 - RNA, 18 nt, Human
uggcucagacauguuuuc

SEQ ID NO: 2669073 - RNA, 22 nt, Human
uggcucagcucggggagccuua

SEQ ID NO: 2669074 - RNA, 14 nt, Human
uggcuucacggaag

SEQ ID NO: 2669075 - RNA, 14 nt, Human
uggcuguuugagau

SEQ ID NO: 2669076 - RNA, 20 nt, Human
uggcuucacggaagagccuu

SEQ ID NO: 2669077 - RNA, 17 nt, Human
uggcuucacggaagagc

SEQ ID NO: 2669078 - RNA, 21 nt, Human
ugggaaaacauguuaaugaca

SEQ ID NO: 2669079 - RNA, 14 nt, Human
ugggaaaacauuug

SEQ ID NO: 2669080 - RNA, 18 nt, Human
ugggaaacuuggcucgaa

SEQ ID NO: 2669081 - RNA, 17 nt, Human
ugggaaaccauguagca

SEQ ID NO: 2669082 - RNA, 21 nt, Human
aggcuuguuuaccuuucucuc

SEQ ID NO: 2669083 - RNA, 22 nt, Human
aggcuuguuuaccuuucucucu

SEQ ID NO: 2669084 - RNA, 18 nt, Human
aggcuuucccacuuccca

SEQ ID NO: 2669085 - RNA, 22 nt, Human
aggcuuucccacuucccacccu

SEQ ID NO: 2669086 - RNA, 23 nt, Human
aggcuuucccacuucccacccug

SEQ ID NO: 2669087 - RNA, 22 nt, Human
aggcuuucuguugccaugguga

SEQ ID NO: 2669088 - RNA, 18 nt, Human
aggcuuugguaacugcgg

SEQ ID NO: 2669089 - RNA, 13 nt, Human
agggaaaaauaua

SEQ ID NO: 2669090 - RNA, 14 nt, Human
agggaaaaauauau

SEQ ID NO: 2669091 - RNA, 13 nt, Human
aggcuugaagcug

SEQ ID NO: 2669092 - RNA, 22 nt, Human
aggcuuccugcguccuccucac

SEQ ID NO: 2669093 - RNA, 14 nt, Human
aggcuucuccgcca

SEQ ID NO: 2669094 - RNA, 15 nt, Human
aggcuucuccgccag

SEQ ID NO: 2669095 - RNA, 16 nt, Human
aggcuucuccgccagc

SEQ ID NO: 2669096 - RNA, 17 nt, Human
aggcuucuccgccagcc

SEQ ID NO: 2669097 - RNA, 18 nt, Human
aggcuucuccgccagccu

SEQ ID NO: 2669098 - RNA, 19 nt, Human
aggcuucuccgccagccuc

SEQ ID NO: 2669099 - RNA, 20 nt, Human
aggcuucuccgccagccucc

SEQ ID NO: 2669100 - RNA, 21 nt, Human
aggcuucuccgccagccuccu

SEQ ID NO: 2669101 - RNA, 22 nt, Human
aggcuucuccgccagccuccuc

SEQ ID NO: 2669102 - RNA, 23 nt, Human
aggcuucuccgccagccuccucu

SEQ ID NO: 2669103 - RNA, 14 nt, Human
aggcuuaguuugug

SEQ ID NO: 2669104 - RNA, 10 nt, Human
aggcuuccug

SEQ ID NO: 2669105 - RNA, 20 nt, Human
aggcuuccugcguccuccuc

SEQ ID NO: 2669106 - RNA, 21 nt, Human
aggcuuccugcguccuccuca

SEQ ID NO: 2669107 - RNA, 15 nt, Human
aggcuuaguuugugu

SEQ ID NO: 2669108 - RNA, 14 nt, Human
aggcuuauaaaaca

SEQ ID NO: 2669109 - RNA, 16 nt, Human
aggcuuauaaaacaga

SEQ ID NO: 2669110 - RNA, 10 nt, Human
aggcugggcc

SEQ ID NO: 2669111 - RNA, 12 nt, Human
aggcugggccau

SEQ ID NO: 2669112 - RNA, 18 nt, Human
aggcugggccauguccaa

SEQ ID NO: 2669113 - RNA, 22 nt, Human
aggcugggccauguccaaagag

SEQ ID NO: 2669114 - RNA, 20 nt, Human
aggcugggccauguccaaag

SEQ ID NO: 2669115 - RNA, 21 nt, Human
aggcugggccauguccaaaga

SEQ ID NO: 2669116 - RNA, 22 nt, Human
aggcugggggaagaagcucucu

SEQ ID NO: 2669117 - RNA, 17 nt, Human
aggcugggggaagaagc

SEQ ID NO: 2669118 - RNA, 15 nt, Human
agggcugucauugca

SEQ ID NO: 2669119 - RNA, 14 nt, Human
agggcuggcuccug

SEQ ID NO: 2669120 - RNA, 16 nt, Human
agggcuggcuccugau

SEQ ID NO: 2669121 - RNA, 17 nt, Human
agggcuggcuccugauc

SEQ ID NO: 2669122 - RNA, 19 nt, Human
agggcuggcuccugaucca

SEQ ID NO: 2669123 - RNA, 13 nt, Human
ugggcucuccggg

SEQ ID NO: 2669124 - RNA, 14 nt, Human
ugggcucuccgggg

SEQ ID NO: 2669125 - RNA, 16 nt, Human
ugggcucccguguuuu

SEQ ID NO: 2669126 - RNA, 19 nt, Human
ugggcucccguguuuugua

SEQ ID NO: 2669127 - RNA, 11 nt, Human
agggcuccugc

SEQ ID NO: 2669128 - RNA, 13 nt, Human
agggcucccaggg

SEQ ID NO: 2669129 - RNA, 14 nt, Human
agggcucccagggg

SEQ ID NO: 2669130 - RNA, 22 nt, Human
agggcucccaggggucucccug

SEQ ID NO: 2669131 - RNA, 11 nt, Human
agggcugcagu

SEQ ID NO: 2669132 - RNA, 12 nt, Human
agggcugcaguu

SEQ ID NO: 2669133 - RNA, 23 nt, Human
agggcugcggcguacaggcuggc

SEQ ID NO: 2669134 - RNA, 21 nt, Human
agggcugcggcguacaggcug

SEQ ID NO: 2669135 - RNA, 23 nt, Human
agggcugcugggggcaacuggcc

SEQ ID NO: 2669136 - RNA, 12 nt, Human
agggcugcuggg

SEQ ID NO: 2669137 - RNA, 20 nt, Human
agggcugcugggggcaacug

SEQ ID NO: 2669138 - RNA, 18 nt, Human
agggcccccacaguugcu

SEQ ID NO: 2669139 - RNA, 13 nt, Human
agggcccccacag

SEQ ID NO: 2669140 - RNA, 20 nt, Human
agggaguuacugaagucuua

SEQ ID NO: 2669141 - RNA, 20 nt, Human
agggauaaagaaaaaaauac

SEQ ID NO: 2669142 - RNA, 21 nt, Human
agggauaaagaaaaaaauacu

SEQ ID NO: 2669143 - RNA, 23 nt, Human
agggauaaagaaaaaaauacuau

SEQ ID NO: 2669144 - RNA, 15 nt, Human
agggcagacuggggc

SEQ ID NO: 2669145 - RNA, 20 nt, Human
agggcagacuggggcauccu

SEQ ID NO: 2669146 - RNA, 20 nt, Human
agggccaaaauauuuggaau

SEQ ID NO: 2669147 - RNA, 13 nt, Human
agggcauaaagua

SEQ ID NO: 2669148 - RNA, 14 nt, Human
agggcauaaaguaa

SEQ ID NO: 2669149 - RNA, 15 nt, Human
agggcauaaaguaaa

SEQ ID NO: 2669150 - RNA, 19 nt, Human
agggcauaaaguaaauaca

SEQ ID NO: 2669151 - RNA, 20 nt, Human
agggcauaaaguaaauacau

SEQ ID NO: 2669152 - RNA, 15 nt, Human
ugggcauugccaugu

SEQ ID NO: 2669153 - RNA, 18 nt, Human
ugggcauugccaugugga

SEQ ID NO: 2669154 - RNA, 17 nt, Human
ugggccaccccuccuag

SEQ ID NO: 2669155 - RNA, 15 nt, Human
agggaguauucuaau

SEQ ID NO: 2669156 - RNA, 19 nt, Human
agggaaaggggugcuuuua

SEQ ID NO: 2669157 - RNA, 15 nt, Human
agggaaaguuuuuuu

SEQ ID NO: 2669158 - RNA, 15 nt, Human
agggaaaggggugcu

SEQ ID NO: 2669159 - RNA, 18 nt, Human
agggaaaggggugcuuuu

SEQ ID NO: 2669160 - RNA, 13 nt, Human
agggaaagaaaau

SEQ ID NO: 2669161 - RNA, 12 nt, Human
agggaaagaaaa

SEQ ID NO: 2669162 - RNA, 21 nt, Human
agggagacuggguaggaaaga

SEQ ID NO: 2669163 - RNA, 20 nt, Human
agggagacgguuuccaggga

SEQ ID NO: 2669164 - RNA, 11 nt, Human
agggagagaga

SEQ ID NO: 2669165 - RNA, 13 nt, Human
agggaaauguuuu

SEQ ID NO: 2669166 - RNA, 17 nt, Human
agggaaauguuuuguaa

SEQ ID NO: 2669167 - RNA, 18 nt, Human
agggaaauguuuuguaaa

SEQ ID NO: 2669168 - RNA, 16 nt, Human
agggagaagaaaggug

SEQ ID NO: 2669169 - RNA, 18 nt, Human
agggagccuuugguucug

SEQ ID NO: 2669170 - RNA, 14 nt, Human
ugggaggcugaggc

SEQ ID NO: 2669171 - RNA, 11 nt, Human
ugggaggcuga

SEQ ID NO: 2669172 - RNA, 15 nt, Human
ugggaggcugaggca

SEQ ID NO: 2669173 - RNA, 14 nt, Human
ugggaggcuucccc

SEQ ID NO: 2669174 - RNA, 21 nt, Human
ugggaggauugcuugagcuca

SEQ ID NO: 2669175 - RNA, 18 nt, Human
ugggaggauugcuugagc

SEQ ID NO: 2669176 - RNA, 22 nt, Human
ugggaggauugcuugagcucag

SEQ ID NO: 2669177 - RNA, 23 nt, Human
ugggagggggcuugaagccaaag

SEQ ID NO: 2669178 - RNA, 16 nt, Human
ugggcaaacaggcagu

SEQ ID NO: 2669179 - RNA, 15 nt, Human
ugggcaaacaggcag

SEQ ID NO: 2669180 - RNA, 14 nt, Human
ugggcaaacaggca

SEQ ID NO: 2669181 - RNA, 20 nt, Human
ugucagcaguugcugguaaa

SEQ ID NO: 2669182 - RNA, 17 nt, Human
uguccaaacguccucuu

SEQ ID NO: 2669183 - RNA, 21 nt, Human
uguccaaacguccucuuuagu

SEQ ID NO: 2669184 - RNA, 15 nt, Human
ugucagguuauuuau

SEQ ID NO: 2669185 - RNA, 11 nt, Human
uguccaaagag

SEQ ID NO: 2669186 - RNA, 17 nt, Human
uguccaaagaggcugcc

SEQ ID NO: 2669187 - RNA, 19 nt, Human
uguccaaagaggcugcccc

SEQ ID NO: 2669188 - RNA, 20 nt, Human
uguccaaagaggcugccccu

SEQ ID NO: 2669189 - RNA, 21 nt, Human
uguccaaagaggcugccccuc

SEQ ID NO: 2669190 - RNA, 12 nt, Human
uguccagcaccu

SEQ ID NO: 2669191 - RNA, 15 nt, Human
uguccagcaccuugu

SEQ ID NO: 2669192 - RNA, 19 nt, Human
uguccagcaccuugugccu

SEQ ID NO: 2669193 - RNA, 20 nt, Human
uguccagcaccuugugccug

SEQ ID NO: 2669194 - RNA, 22 nt, Human
uguccagcaccuugugccuggg

SEQ ID NO: 2669195 - RNA, 16 nt, Human
aguauuuauaauagca

SEQ ID NO: 2669196 - RNA, 23 nt, Human
aguauucucggauaguugcuauu

SEQ ID NO: 2669197 - RNA, 23 nt, Human
aguauucuaauaagcuaguugaa

SEQ ID NO: 2669198 - RNA, 21 nt, Human
aguauucuaauaagcuaguug

SEQ ID NO: 2669199 - RNA, 17 nt, Human
aguauucuaauaagcua

SEQ ID NO: 2669200 - RNA, 16 nt, Human
aguauucuaauaagcu

SEQ ID NO: 2669201 - RNA, 15 nt, Human
aguauuuauuuaugu

SEQ ID NO: 2669202 - RNA, 13 nt, Human
aguauuuauuuau

SEQ ID NO: 2669203 - RNA, 20 nt, Human
aguauuuauuuauguacuuu

SEQ ID NO: 2669204 - RNA, 18 nt, Human
aguauuuauuuauguacu

SEQ ID NO: 2669205 - RNA, 16 nt, Human
aguauuuauuuaugua

SEQ ID NO: 2669206 - RNA, 17 nt, Human
aguauuuauuuauguac

SEQ ID NO: 2669207 - RNA, 14 nt, Human
agucaccagagacu

SEQ ID NO: 2669208 - RNA, 23 nt, Human
aguauuuucuucucugugagaag

SEQ ID NO: 2669209 - RNA, 15 nt, Human
aguauacaaacauuu

SEQ ID NO: 2669210 - RNA, 17 nt, Human
aguauagccuauggcag

SEQ ID NO: 2669211 - RNA, 17 nt, Human
aguauuaucaaagggau

SEQ ID NO: 2669212 - RNA, 21 nt, Human
aguauuaauaucugaggauga

SEQ ID NO: 2669213 - RNA, 19 nt, Human
uguauauuacaaugaucac

SEQ ID NO: 2669214 - RNA, 21 nt, Human
uguauauugguuuuaugauga

SEQ ID NO: 2669215 - RNA, 13 nt, Human
uguauauuguaau

SEQ ID NO: 2669216 - RNA, 14 nt, Human
uguauauuguaauu

SEQ ID NO: 2669217 - RNA, 17 nt, Human
uguauauuguaauuuaa

SEQ ID NO: 2669218 - RNA, 20 nt, Human
uguauauugguuuuaugaug

SEQ ID NO: 2669219 - RNA, 14 nt, Human
uguauauugguuuu

SEQ ID NO: 2669220 - RNA, 13 nt, Human
uguauauugguuu

SEQ ID NO: 2669221 - RNA, 19 nt, Human
uguauauuugauuuauuaa

SEQ ID NO: 2669222 - RNA, 16 nt, Human
uguauauuuguaaagc

SEQ ID NO: 2669223 - RNA, 18 nt, Human
uguauauuuguaaagcua

SEQ ID NO: 2669224 - RNA, 22 nt, Human
uguauauuuguaaagcuauuua

SEQ ID NO: 2669225 - RNA, 22 nt, Human
uguauauuugauuuauuaacuu

SEQ ID NO: 2669226 - RNA, 17 nt, Human
uguauauuugauuuauu

SEQ ID NO: 2669227 - RNA, 16 nt, Human
uguauauuugauuuau

SEQ ID NO: 2669228 - RNA, 14 nt, Human
uguauauuugauuu

SEQ ID NO: 2669229 - RNA, 12 nt, Human
uguauauuugau

SEQ ID NO: 2669230 - RNA, 23 nt, Human
agucacuggagguugaagccaag

SEQ ID NO: 2669231 - RNA, 21 nt, Human
agucacuggagguugaagcca

SEQ ID NO: 2669232 - RNA, 22 nt, Human
agucacuggagguugaagccaa

SEQ ID NO: 2669233 - RNA, 18 nt, Human
agucagcuuucaucuuug

SEQ ID NO: 2669234 - RNA, 18 nt, Human
ugucccugcgccuuuccu

SEQ ID NO: 2669235 - RNA, 14 nt, Human
ugucgcucaugugu

SEQ ID NO: 2669236 - RNA, 15 nt, Human
ugucgcucaugugug

SEQ ID NO: 2669237 - RNA, 16 nt, Human
ugucgcucaugugugc

SEQ ID NO: 2669238 - RNA, 22 nt, Human
ugucgcucaugugugcaacagg

SEQ ID NO: 2669239 - RNA, 23 nt, Human
agucauaucuuaauauauuucua

SEQ ID NO: 2669240 - RNA, 16 nt, Human
aguccauucucccagg

SEQ ID NO: 2669241 - RNA, 17 nt, Human
aguccauucucccaggu

SEQ ID NO: 2669242 - RNA, 14 nt, Human
aguccauucuccca

SEQ ID NO: 2669243 - RNA, 15 nt, Human
aguccauucucccag

SEQ ID NO: 2669244 - RNA, 19 nt, Human
aguccauucucccagguac

SEQ ID NO: 2669245 - RNA, 20 nt, Human
agucccagcuacuugggagg

SEQ ID NO: 2669246 - RNA, 17 nt, Human
agucuacccgacauaag

SEQ ID NO: 2669247 - RNA, 18 nt, Human
agucuacccgacauaagu

SEQ ID NO: 2669248 - RNA, 18 nt, Human
agucuaaggccauggcau

SEQ ID NO: 2669249 - RNA, 19 nt, Human
agucgcaucucagugcagg

SEQ ID NO: 2669250 - RNA, 14 nt, Human
agucgguccucuuu

SEQ ID NO: 2669251 - RNA, 12 nt, Human
aggugggaggau

SEQ ID NO: 2669252 - RNA, 19 nt, Human
ugggcuauuuggacucagg

SEQ ID NO: 2669253 - RNA, 23 nt, Human
agguugaagccaaguggggugcu

SEQ ID NO: 2669254 - RNA, 12 nt, Human
agguugaagcca

SEQ ID NO: 2669255 - RNA, 13 nt, Human
agguugaagccaa

SEQ ID NO: 2669256 - RNA, 15 nt, Human
agguugaagccaagu

SEQ ID NO: 2669257 - RNA, 16 nt, Human
agguugcagugagcug

SEQ ID NO: 2669258 - RNA, 13 nt, Human
agguugaaaaaca

SEQ ID NO: 2669259 - RNA, 15 nt, Human
aggugggcuggacuu

SEQ ID NO: 2669260 - RNA, 11 nt, Human
uguacaaaagc

SEQ ID NO: 2669261 - RNA, 13 nt, Human
uguacaaaagcaa

SEQ ID NO: 2669262 - RNA, 15 nt, Human
uguacaaaagcaaug

SEQ ID NO: 2669263 - RNA, 18 nt, Human
uguacauacgauuuaagg

SEQ ID NO: 2669264 - RNA, 19 nt, Human
uguacauacgauuuaaggu

SEQ ID NO: 2669265 - RNA, 21 nt, Human
uguacauacgauuuaagguau

SEQ ID NO: 2669266 - RNA, 23 nt, Human
uguacauacgauuuaagguauuu

SEQ ID NO: 2669267 - RNA, 20 nt, Human
agguuggcaaaaaggcagga

SEQ ID NO: 2669268 - RNA, 12 nt, Human
agguuuauuguu

SEQ ID NO: 2669269 - RNA, 19 nt, Human
agguuuauuguuaauacaa

SEQ ID NO: 2669270 - RNA, 14 nt, Human
uguauaguuaugua

SEQ ID NO: 2669271 - RNA, 13 nt, Human
uguauaguuaugu

SEQ ID NO: 2669272 - RNA, 18 nt, Human
uguauaguuauguaaaua

SEQ ID NO: 2669273 - RNA, 17 nt, Human
uguauaguuauguaaau

SEQ ID NO: 2669274 - RNA, 16 nt, Human
uguauaguuauguaaa

SEQ ID NO: 2669275 - RNA, 15 nt, Human
uguauaguuauguaa

SEQ ID NO: 2669276 - RNA, 19 nt, Human
uguauaguuauguaaauaa

SEQ ID NO: 2669277 - RNA, 20 nt, Human
uguauauauuauuauaaucu

SEQ ID NO: 2669278 - RNA, 14 nt, Human
uguauauauuauua

SEQ ID NO: 2669279 - RNA, 20 nt, Human
uguauauauuuugugugaaa

SEQ ID NO: 2669280 - RNA, 22 nt, Human
uguauauauuuugugugaaauu

SEQ ID NO: 2669281 - RNA, 15 nt, Human
uguauauuacaauga

SEQ ID NO: 2669282 - RNA, 14 nt, Human
uguauauuacaaug

SEQ ID NO: 2669283 - RNA, 19 nt, Human
uguauaugguauauauaca

SEQ ID NO: 2669284 - RNA, 20 nt, Human
uguauaugguauauauacau

SEQ ID NO: 2669285 - RNA, 21 nt, Human
uguauaugguauauauacaua

SEQ ID NO: 2669286 - RNA, 23 nt, Human
uguagucccagcuacuugggagg

SEQ ID NO: 2669287 - RNA, 14 nt, Human
uguagguaagacug

SEQ ID NO: 2669288 - RNA, 15 nt, Human
uguagguaagacugu

SEQ ID NO: 2669289 - RNA, 20 nt, Human
uguaggguccaaccagaccu

SEQ ID NO: 2669290 - RNA, 21 nt, Human
uguaggguccaaccagaccug

SEQ ID NO: 2669291 - RNA, 21 nt, Human
aguagauguggccuuugaauu

SEQ ID NO: 2669292 - RNA, 13 nt, Human
uguagggagggcg

SEQ ID NO: 2669293 - RNA, 22 nt, Human
uguagggagggcggcaggggcc

SEQ ID NO: 2669294 - RNA, 15 nt, Human
aguagauuuuccaaa

SEQ ID NO: 2669295 - RNA, 16 nt, Human
aguaaguuaucuuuga

SEQ ID NO: 2669296 - RNA, 20 nt, Human
aguaaguuaucuuugaauau

SEQ ID NO: 2669297 - RNA, 15 nt, Human
aguaaugaaauggag

SEQ ID NO: 2669298 - RNA, 22 nt, Human
aguaaugaauuuuuaugauauu

SEQ ID NO: 2669299 - RNA, 21 nt, Human
aguaaugaauuuuuaugauau

SEQ ID NO: 2669300 - RNA, 12 nt, Human
aguaaugaauuu

SEQ ID NO: 2669301 - RNA, 12 nt, Human
aguaauugugaa

SEQ ID NO: 2669302 - RNA, 15 nt, Human
aguaauugugaaaaa

SEQ ID NO: 2669303 - RNA, 16 nt, Human
aguaauugugaaaaag

SEQ ID NO: 2669304 - RNA, 20 nt, Human
uguguccaugcgcucagggc

SEQ ID NO: 2669305 - RNA, 13 nt, Human
ugugucccaggca

SEQ ID NO: 2669306 - RNA, 14 nt, Human
ugugucccaggcag

SEQ ID NO: 2669307 - RNA, 19 nt, Human
ugugucccaggcagggaga

SEQ ID NO: 2669308 - RNA, 18 nt, Human
uguguguugucucuugag

SEQ ID NO: 2669309 - RNA, 13 nt, Human
ugugguagaaaca

SEQ ID NO: 2669310 - RNA, 14 nt, Human
ugugguagaaacaa

SEQ ID NO: 2669311 - RNA, 20 nt, Human
ugugguagcuuaucuuagaa

SEQ ID NO: 2669312 - RNA, 12 nt, Human
agugcccuccag

SEQ ID NO: 2669313 - RNA, 13 nt, Human
agugcccuccagc

SEQ ID NO: 2669314 - RNA, 14 nt, Human
agugcccuccagcc

SEQ ID NO: 2669315 - RNA, 15 nt, Human
agugcccuccagccc

SEQ ID NO: 2669316 - RNA, 17 nt, Human
agugcccuccagccccg

SEQ ID NO: 2669317 - RNA, 18 nt, Human
agugcccuccagccccgc

SEQ ID NO: 2669318 - RNA, 16 nt, Human
uguguaaaaaaaccac

SEQ ID NO: 2669319 - RNA, 21 nt, Human
uguguaaaaaaaccaccaaaa

SEQ ID NO: 2669320 - RNA, 23 nt, Human
uguggucacagcggaggugugga

SEQ ID NO: 2669321 - RNA, 16 nt, Human
uguggucaaggcuaca

SEQ ID NO: 2669322 - RNA, 14 nt, Human
uguguaaacaaaau

SEQ ID NO: 2669323 - RNA, 20 nt, Human
uguguaaacaaaaugaagcu

SEQ ID NO: 2669324 - RNA, 22 nt, Human
uguguaaacaaaaugaagcugc

SEQ ID NO: 2669325 - RNA, 14 nt, Human
ugugucaguuuuca

SEQ ID NO: 2669326 - RNA, 15 nt, Human
ugugucaguuuucau

SEQ ID NO: 2669327 - RNA, 16 nt, Human
ugugucaugccaguga

SEQ ID NO: 2669328 - RNA, 14 nt, Human
ugugucaugccagu

SEQ ID NO: 2669329 - RNA, 22 nt, Human
aguggaccgcccuuuuccccua

SEQ ID NO: 2669330 - RNA, 16 nt, Human
aguggacucagugggu

SEQ ID NO: 2669331 - RNA, 21 nt, Human
aguggaccgcccuuuuccccu

SEQ ID NO: 2669332 - RNA, 16 nt, Human
aguggaccgcccuuuu

SEQ ID NO: 2669333 - RNA, 23 nt, Human
aguggaccuuaggccuuccucuc

SEQ ID NO: 2669334 - RNA, 20 nt, Human
aguggaccuuaggccuuccu

SEQ ID NO: 2669335 - RNA, 19 nt, Human
aguggaccuuaggccuucc

SEQ ID NO: 2669336 - RNA, 17 nt, Human
aguggaccuuaggccuu

SEQ ID NO: 2669337 - RNA, 18 nt, Human
aguggcaccgccucccca

SEQ ID NO: 2669338 - RNA, 14 nt, Human
aguggggugcuggg

SEQ ID NO: 2669339 - RNA, 16 nt, Human
aguggggugcugggag

SEQ ID NO: 2669340 - RNA, 18 nt, Human
aguggggugcugggagga

SEQ ID NO: 2669341 - RNA, 21 nt, Human
aguggggugcugggaggaggg

SEQ ID NO: 2669342 - RNA, 18 nt, Human
agugggcccacccggugg

SEQ ID NO: 2669343 - RNA, 13 nt, Human
uguguuaauuuaa

SEQ ID NO: 2669344 - RNA, 18 nt, Human
uguguuaauuuaaguuuu

SEQ ID NO: 2669345 - RNA, 14 nt, Human
uguguuaauuuaag

SEQ ID NO: 2669346 - RNA, 14 nt, Human
uguuaauacaaggu

SEQ ID NO: 2669347 - RNA, 16 nt, Human
uguuaauacaagguau

SEQ ID NO: 2669348 - RNA, 17 nt, Human
uguuaauacaagguaua

SEQ ID NO: 2669349 - RNA, 22 nt, Human
uguuaauacaagguauaauaaa

SEQ ID NO: 2669350 - RNA, 19 nt, Human
uguuacaaguuuauauaua

SEQ ID NO: 2669351 - RNA, 22 nt, Human
uguuccucaaagcuuggauuaa

SEQ ID NO: 2669352 - RNA, 18 nt, Human
uguugccaagcuccaagc

SEQ ID NO: 2669353 - RNA, 20 nt, Human
uguugccaagcuccaagccc

SEQ ID NO: 2669354 - RNA, 23 nt, Human
uguugccuauaagccaaaauuaa

SEQ ID NO: 2669355 - RNA, 22 nt, Human
uguugccuauaagccaaaauua

SEQ ID NO: 2669356 - RNA, 18 nt, Human
uguugccuauaagccaaa

SEQ ID NO: 2669357 - RNA, 17 nt, Human
uguugccuauaagccaa

SEQ ID NO: 2669358 - RNA, 19 nt, Human
uguugccaugugcaccuug

SEQ ID NO: 2669359 - RNA, 14 nt, Human
uguugccauguguu

SEQ ID NO: 2669360 - RNA, 15 nt, Human
uguugccauguguuu

SEQ ID NO: 2669361 - RNA, 21 nt, Human
aguguugguauauuuuauauu

SEQ ID NO: 2669362 - RNA, 15 nt, Human
aguuagccuccacca

SEQ ID NO: 2669363 - RNA, 20 nt, Human
uguuccuuacuuuacugccu

SEQ ID NO: 2669364 - RNA, 19 nt, Human
uguucguugguuauacaag

SEQ ID NO: 2669365 - RNA, 20 nt, Human
uguucggaagggguuccuca

SEQ ID NO: 2669366 - RNA, 21 nt, Human
uguucggaagggguuccucaa

SEQ ID NO: 2669367 - RNA, 12 nt, Human
aguguguaaaca

SEQ ID NO: 2669368 - RNA, 18 nt, Human
aguguguauauauuuugu

SEQ ID NO: 2669369 - RNA, 23 nt, Human
aguguguauauauuuugugugaa

SEQ ID NO: 2669370 - RNA, 16 nt, Human
aguguguaugccaaga

SEQ ID NO: 2669371 - RNA, 16 nt, Human
agugugggcuugacca

SEQ ID NO: 2669372 - RNA, 18 nt, Human
agugugggcuugaccagg

SEQ ID NO: 2669373 - RNA, 18 nt, Human
aguguggccucuucugag

SEQ ID NO: 2669374 - RNA, 13 nt, Human
aguguggccaggc

SEQ ID NO: 2669375 - RNA, 14 nt, Human
aguguggccaggcu

SEQ ID NO: 2669376 - RNA, 21 nt, Human
agugugccugaagucccagau

SEQ ID NO: 2669377 - RNA, 17 nt, Human
agugguccuagaggccc

SEQ ID NO: 2669378 - RNA, 13 nt, Human
agugguccuagag

SEQ ID NO: 2669379 - RNA, 20 nt, Human
agugugccugaagucccaga

SEQ ID NO: 2669380 - RNA, 20 nt, Human
ugugacuguacccaaaugga

SEQ ID NO: 2669381 - RNA, 18 nt, Human
ugugagaaacaucucaau

SEQ ID NO: 2669382 - RNA, 13 nt, Human
ugugagaagccag

SEQ ID NO: 2669383 - RNA, 21 nt, Human
ugugagaagccagccagaggc

SEQ ID NO: 2669384 - RNA, 18 nt, Human
ugugagaagguuuauugu

SEQ ID NO: 2669385 - RNA, 19 nt, Human
ugugagaagguuuauuguu

SEQ ID NO: 2669386 - RNA, 21 nt, Human
ugugagaagguuuauuguuaa

SEQ ID NO: 2669387 - RNA, 15 nt, Human
ugugagcucuuccua

SEQ ID NO: 2669388 - RNA, 21 nt, Human
ugugagaagugaaugcuggga

SEQ ID NO: 2669389 - RNA, 22 nt, Human
ugugagaagugaaugcugggac

SEQ ID NO: 2669390 - RNA, 23 nt, Human
ugugagaagugaaugcugggacu

SEQ ID NO: 2669391 - RNA, 24 nt, Human
ugugagaagugaaugcugggacuc

SEQ ID NO: 2669392 - RNA, 16 nt, Human
agucucuagguucuga

SEQ ID NO: 2669393 - RNA, 16 nt, Human
agucuccggccucucc

SEQ ID NO: 2669394 - RNA, 17 nt, Human
agucuccggccucucca

SEQ ID NO: 2669395 - RNA, 19 nt, Human
agucuccggccucuccagc

SEQ ID NO: 2669396 - RNA, 22 nt, Human
agucuccggccucuccagccuc

SEQ ID NO: 2669397 - RNA, 21 nt, Human
agucuuagaucauaguuuuau

SEQ ID NO: 2669398 - RNA, 13 nt, Human
agucuuuaauaaa

SEQ ID NO: 2669399 - RNA, 14 nt, Human
agucuuuaauaaau

SEQ ID NO: 2669400 - RNA, 16 nt, Human
agugaacuugggccac

SEQ ID NO: 2669401 - RNA, 13 nt, Human
ugugaugagcuga

SEQ ID NO: 2669402 - RNA, 14 nt, Human
ugugaugagcugau

SEQ ID NO: 2669403 - RNA, 20 nt, Human
agugauacuauccaguuacu

SEQ ID NO: 2669404 - RNA, 15 nt, Human
agugauagucuuuug

SEQ ID NO: 2669405 - RNA, 17 nt, Human
agugauagucuuuugcu

SEQ ID NO: 2669406 - RNA, 20 nt, Human
agugauagucuuuugcuuuu

SEQ ID NO: 2669407 - RNA, 21 nt, Human
agugauagucuuuugcuuuug

SEQ ID NO: 2669408 - RNA, 14 nt, Human
agugaggaaaucaa

SEQ ID NO: 2669409 - RNA, 17 nt, Human
agugaggaaaucaaagu

SEQ ID NO: 2669410 - RNA, 15 nt, Human
agugaggaaaucaaa

SEQ ID NO: 2669411 - RNA, 20 nt, Human
agugaggaaaucaaagugcu

SEQ ID NO: 2669412 - RNA, 17 nt, Human
agugcagagccuucuca

SEQ ID NO: 2669413 - RNA, 18 nt, Human
agugcagagccuucucag

SEQ ID NO: 2669414 - RNA, 19 nt, Human
agugcagagccuucucaga

SEQ ID NO: 2669415 - RNA, 21 nt, Human
agugcagagccuucucagaag

SEQ ID NO: 2669416 - RNA, 13 nt, Human
agugcagaaugua

SEQ ID NO: 2669417 - RNA, 14 nt, Human
agugcagaauguaa

SEQ ID NO: 2669418 - RNA, 20 nt, Human
agugcagaauguaagugggc

SEQ ID NO: 2669419 - RNA, 22 nt, Human
agugcagaauguaagugggccc

SEQ ID NO: 2669420 - RNA, 23 nt, Human
agugcagaauguaagugggccca

SEQ ID NO: 2669421 - RNA, 14 nt, Human
agugcauuuuugua

SEQ ID NO: 2669422 - RNA, 17 nt, Human
agugcauuuuuguaaau

SEQ ID NO: 2669423 - RNA, 20 nt, Human
agugcauuuuuguaaaugug

SEQ ID NO: 2669424 - RNA, 21 nt, Human
agugcauuugugcuagaaauu

SEQ ID NO: 2669425 - RNA, 16 nt, Human
agugcaugguggccag

SEQ ID NO: 2669426 - RNA, 17 nt, Human
agugcaugguggccaga

SEQ ID NO: 2669427 - RNA, 19 nt, Human
agugcaugguggccagagg

SEQ ID NO: 2669428 - RNA, 15 nt, Human
ugugcugugugugac

SEQ ID NO: 2669429 - RNA, 12 nt, Human
ugugcugugugu

SEQ ID NO: 2669430 - RNA, 14 nt, Human
uguggaugauaaaa

SEQ ID NO: 2669431 - RNA, 14 nt, Human
uguggaucagagau

SEQ ID NO: 2669432 - RNA, 17 nt, Human
uguggaucagagaugca

SEQ ID NO: 2669433 - RNA, 22 nt, Human
ugugauuccacuacaccuggcu

SEQ ID NO: 2669434 - RNA, 17 nt, Human
ugugcccuccugaccca

SEQ ID NO: 2669435 - RNA, 13 nt, Human
ugugcccuccuga

SEQ ID NO: 2669436 - RNA, 23 nt, Human
ugugcccuccugacccauugcug

SEQ ID NO: 2669437 - RNA, 17 nt, Human
uuaucaauaucuaauau

SEQ ID NO: 2669438 - RNA, 16 nt, Human
uuaucaauaucuaaua

SEQ ID NO: 2669439 - RNA, 15 nt, Human
uuaucaauaucuaau

SEQ ID NO: 2669440 - RNA, 22 nt, Human
uuaucaauaucuaauauauaug

SEQ ID NO: 2669441 - RNA, 19 nt, Human
uuaucaauaucuaauauau

SEQ ID NO: 2669442 - RNA, 13 nt, Human
auacgauuuaagg

SEQ ID NO: 2669443 - RNA, 17 nt, Human
auacgauuuaagguauu

SEQ ID NO: 2669444 - RNA, 13 nt, Human
auaccacaucaaa

SEQ ID NO: 2669445 - RNA, 15 nt, Human
auaccacaucaaaua

SEQ ID NO: 2669446 - RNA, 15 nt, Human
auacauagugaaaau

SEQ ID NO: 2669447 - RNA, 16 nt, Human
auacauagugaaaauu

SEQ ID NO: 2669448 - RNA, 18 nt, Human
auacauagugaaaauugu

SEQ ID NO: 2669449 - RNA, 13 nt, Human
auacauauauaua

SEQ ID NO: 2669450 - RNA, 20 nt, Human
auacauauauauauauaaca

SEQ ID NO: 2669451 - RNA, 17 nt, Human
auacaugccacaucaaa

SEQ ID NO: 2669452 - RNA, 21 nt, Human
auacaugccacaucaaaccuu

SEQ ID NO: 2669453 - RNA, 13 nt, Human
auacaugcauaua

SEQ ID NO: 2669454 - RNA, 15 nt, Human
auacaugcauauaau

SEQ ID NO: 2669455 - RNA, 20 nt, Human
auacaugcauauaaugaaua

SEQ ID NO: 2669456 - RNA, 21 nt, Human
auacaugcauauaaugaauaa

SEQ ID NO: 2669457 - RNA, 22 nt, Human
auacauguaauucuaccaaggu

SEQ ID NO: 2669458 - RNA, 21 nt, Human
auacaugucacauuuagcugu

SEQ ID NO: 2669459 - RNA, 23 nt, Human
auacaugucacauuuagcugugc

SEQ ID NO: 2669460 - RNA, 16 nt, Human
auacaugugauacauu

SEQ ID NO: 2669461 - RNA, 18 nt, Human
auacaugugauacauuuu

SEQ ID NO: 2669462 - RNA, 19 nt, Human
auacaugugauacauuuuu

SEQ ID NO: 2669463 - RNA, 13 nt, Human
auacagugcagag

SEQ ID NO: 2669464 - RNA, 17 nt, Human
auacagugcagagccuu

SEQ ID NO: 2669465 - RNA, 21 nt, Human
auacagugcagagccuucuca

SEQ ID NO: 2669466 - RNA, 23 nt, Human
auacagugcagagccuucucaga

SEQ ID NO: 2669467 - RNA, 16 nt, Human
auacaacuuaaauaau

SEQ ID NO: 2669468 - RNA, 12 nt, Human
auacaagguaua

SEQ ID NO: 2669469 - RNA, 20 nt, Human
auacaagguauaauaaaauu

SEQ ID NO: 2669470 - RNA, 19 nt, Human
auacaaguucuuggucccu

SEQ ID NO: 2669471 - RNA, 17 nt, Human
auacagaggcaacugca

SEQ ID NO: 2669472 - RNA, 16 nt, Human
auacagaggcaacugc

SEQ ID NO: 2669473 - RNA, 13 nt, Human
uuauaaagcaugu

SEQ ID NO: 2669474 - RNA, 19 nt, Human
uuauaaaguggaaguaugu

SEQ ID NO: 2669475 - RNA, 21 nt, Human
uuaugaaagcaacaaagaaau

SEQ ID NO: 2669476 - RNA, 20 nt, Human
uuaugagauugguuuuccug

SEQ ID NO: 2669477 - RNA, 13 nt, Human
uuaugagaaacuu

SEQ ID NO: 2669478 - RNA, 22 nt, Human
uuaugagaaacuuaaauguuau

SEQ ID NO: 2669479 - RNA, 17 nt, Human
uuaucccaagaaugcaa

SEQ ID NO: 2669480 - RNA, 18 nt, Human
uuauccagaaaacuguga

SEQ ID NO: 2669481 - RNA, 18 nt, Human
uuauccacaugaaaauaa

SEQ ID NO: 2669482 - RNA, 20 nt, Human
uuaugaugguuuuaaacuuu

SEQ ID NO: 2669483 - RNA, 23 nt, Human
uuaugaugacguacaaguaguuc

SEQ ID NO: 2669484 - RNA, 22 nt, Human
uuaugaugacguacaaguaguu

SEQ ID NO: 2669485 - RNA, 15 nt, Human
uuaugaugacguaca

SEQ ID NO: 2669486 - RNA, 17 nt, Human
uuaugguuuugugaugu

SEQ ID NO: 2669487 - RNA, 11 nt, Human
uuaugguuuug

SEQ ID NO: 2669488 - RNA, 14 nt, Human
uuaugguuacuucu

SEQ ID NO: 2669489 - RNA, 20 nt, Human
uuaugguuacuucuucucuu

SEQ ID NO: 2669490 - RNA, 15 nt, Human
uuaugguuauguuuu

SEQ ID NO: 2669491 - RNA, 16 nt, Human
uuaugguuauguuuuu

SEQ ID NO: 2669492 - RNA, 13 nt, Human
uuauguaaauaau

SEQ ID NO: 2669493 - RNA, 12 nt, Human
uuauguaaauaa

SEQ ID NO: 2669494 - RNA, 13 nt, Human
uuaugugagagaa

SEQ ID NO: 2669495 - RNA, 11 nt, Human
uuaugugaauu

SEQ ID NO: 2669496 - RNA, 17 nt, Human
uuaugugaauuuuuaag

SEQ ID NO: 2669497 - RNA, 19 nt, Human
uuaugugaauuuuuaagcu

SEQ ID NO: 2669498 - RNA, 20 nt, Human
uuaugugaauuuuuaagcug

SEQ ID NO: 2669499 - RNA, 15 nt, Human
uuaugugacauuaac

SEQ ID NO: 2669500 - RNA, 16 nt, Human
uuauguaaauaauucu

SEQ ID NO: 2669501 - RNA, 15 nt, Human
uuauguaaauaauuc

SEQ ID NO: 2669502 - RNA, 15 nt, Human
uuaugggccccuggc

SEQ ID NO: 2669503 - RNA, 12 nt, Human
auagaaauggaa

SEQ ID NO: 2669504 - RNA, 20 nt, Human
auagaaauggaaauuuugcu

SEQ ID NO: 2669505 - RNA, 23 nt, Human
auagaaauggaaauuuugcuauc

SEQ ID NO: 2669506 - RNA, 15 nt, Human
auagaaauguagguc

SEQ ID NO: 2669507 - RNA, 21 nt, Human
auagaaauguagguccucaga

SEQ ID NO: 2669508 - RNA, 12 nt, Human
auagaaaugucu

SEQ ID NO: 2669509 - RNA, 22 nt, Human
auagaaaugucucaaggcaguu

SEQ ID NO: 2669510 - RNA, 14 nt, Human
auagaaauuuugua

SEQ ID NO: 2669511 - RNA, 16 nt, Human
auagaaauuuuguaag

SEQ ID NO: 2669512 - RNA, 17 nt, Human
auagaaauuuuguaaga

SEQ ID NO: 2669513 - RNA, 18 nt, Human
auagaaauuuuguaagaa

SEQ ID NO: 2669514 - RNA, 23 nt, Human
auagaaauuuuguaagaaggcaa

SEQ ID NO: 2669515 - RNA, 15 nt, Human
auacuggaggaacac

SEQ ID NO: 2669516 - RNA, 12 nt, Human
auagacaugaaa

SEQ ID NO: 2669517 - RNA, 13 nt, Human
auagacaugaaag

SEQ ID NO: 2669518 - RNA, 14 nt, Human
auagacacauacau

SEQ ID NO: 2669519 - RNA, 23 nt, Human
auagaguguaguuuacagaaaaa

SEQ ID NO: 2669520 - RNA, 16 nt, Human
auagaguguaguuuac

SEQ ID NO: 2669521 - RNA, 21 nt, Human
auagaggcuucuccgccagcc

SEQ ID NO: 2669522 - RNA, 22 nt, Human
auagaggcuucuccgccagccu

SEQ ID NO: 2669523 - RNA, 23 nt, Human
auagaggcuucuccgccagccuc

SEQ ID NO: 2669524 - RNA, 17 nt, Human
auagaguacacugccug

SEQ ID NO: 2669525 - RNA, 14 nt, Human
auagaguacacugc

SEQ ID NO: 2669526 - RNA, 12 nt, Human
auagaggcuagc

SEQ ID NO: 2669527 - RNA, 19 nt, Human
auagaggcuagcuucugcu

SEQ ID NO: 2669528 - RNA, 20 nt, Human
auagaggcuagcuucugcuu

SEQ ID NO: 2669529 - RNA, 18 nt, Human
auagaggcuucuccgcca

SEQ ID NO: 2669530 - RNA, 13 nt, Human
auagacagguccu

SEQ ID NO: 2669531 - RNA, 19 nt, Human
auagacgaguugauuuccu

SEQ ID NO: 2669532 - RNA, 18 nt, Human
auagauauaaauuuuuaa

SEQ ID NO: 2669533 - RNA, 15 nt, Human
auagauaauauuguu

SEQ ID NO: 2669534 - RNA, 16 nt, Human
auagauaauauuguuu

SEQ ID NO: 2669535 - RNA, 13 nt, Human
auagaucuccagc

SEQ ID NO: 2669536 - RNA, 19 nt, Human
auagaucuccagcgucagc

SEQ ID NO: 2669537 - RNA, 19 nt, Human
auagacuguaacuuccaaa

SEQ ID NO: 2669538 - RNA, 18 nt, Human
auagaugcuguguauaug

SEQ ID NO: 2669539 - RNA, 22 nt, Human
auacugaaggaaaaacacaagc

SEQ ID NO: 2669540 - RNA, 12 nt, Human
auacugaaggaa

SEQ ID NO: 2669541 - RNA, 13 nt, Human
auacugaaggaaa

SEQ ID NO: 2669542 - RNA, 14 nt, Human
auacugaaggaaaa

SEQ ID NO: 2669543 - RNA, 15 nt, Human
auacugaaggaaaaa

SEQ ID NO: 2669544 - RNA, 23 nt, Human
auacugaaccacuuguagauuug

SEQ ID NO: 2669545 - RNA, 19 nt, Human
auacugaaccacuuguaga

SEQ ID NO: 2669546 - RNA, 18 nt, Human
auacugaaccacuuguag

SEQ ID NO: 2669547 - RNA, 12 nt, Human
auacugaaccac

SEQ ID NO: 2669548 - RNA, 12 nt, Human
auacuccuuccc

SEQ ID NO: 2669549 - RNA, 20 nt, Human
auacugaaggaaaaacacaa

SEQ ID NO: 2669550 - RNA, 14 nt, Human
auacugauggaauu

SEQ ID NO: 2669551 - RNA, 13 nt, Human
auacugauggaau

SEQ ID NO: 2669552 - RNA, 22 nt, Human
auacugauggaauuuuuuugua

SEQ ID NO: 2669553 - RNA, 21 nt, Human
auacuggugcagucauuauga

SEQ ID NO: 2669554 - RNA, 23 nt, Human
auacuggcuucaccaucaauccu

SEQ ID NO: 2669555 - RNA, 19 nt, Human
auacugcuugaauaaacac

SEQ ID NO: 2669556 - RNA, 19 nt, Human
auacugcgacuuucugccu

SEQ ID NO: 2669557 - RNA, 20 nt, Human
auacugcgacuuucugccug

SEQ ID NO: 2669558 - RNA, 22 nt, Human
auacugcgacuuucugccugga

SEQ ID NO: 2669559 - RNA, 22 nt, Human
uuauuauaaucuuauaauuguu

SEQ ID NO: 2669560 - RNA, 21 nt, Human
uuauuauaaucuuauaauugu

SEQ ID NO: 2669561 - RNA, 22 nt, Human
uuauucaacagcaagugugaau

SEQ ID NO: 2669562 - RNA, 18 nt, Human
uuauucaguaacugucag

SEQ ID NO: 2669563 - RNA, 12 nt, Human
uuauuauuuauu

SEQ ID NO: 2669564 - RNA, 14 nt, Human
uuauucaacagcaa

SEQ ID NO: 2669565 - RNA, 13 nt, Human
uuauucaacagca

SEQ ID NO: 2669566 - RNA, 23 nt, Human
uuaauccuuuguuuucugacuaa

SEQ ID NO: 2669567 - RNA, 14 nt, Human
uuaaucuacugcau

SEQ ID NO: 2669568 - RNA, 16 nt, Human
uuaaucuacugcauuu

SEQ ID NO: 2669569 - RNA, 15 nt, Human
uuaaucuacugcauu

SEQ ID NO: 2669570 - RNA, 22 nt, Human
uuaauccuuuguuuucugacua

SEQ ID NO: 2669571 - RNA, 12 nt, Human
uuaauccaaugg

SEQ ID NO: 2669572 - RNA, 18 nt, Human
uuaauccaguuauaagaa

SEQ ID NO: 2669573 - RNA, 19 nt, Human
uuaauccaguuauaagaag

SEQ ID NO: 2669574 - RNA, 20 nt, Human
uuaauccaguuauaagaaga

SEQ ID NO: 2669575 - RNA, 21 nt, Human
uuaauccaguuauaagaagaa

SEQ ID NO: 2669576 - RNA, 18 nt, Human
uuaaucauaguuacugug

SEQ ID NO: 2669577 - RNA, 19 nt, Human
uuaaucauaguuacugugu

SEQ ID NO: 2669578 - RNA, 23 nt, Human
uuaaucauaguuacuguguaaac

SEQ ID NO: 2669579 - RNA, 11 nt, Human
uuaaucacugu

SEQ ID NO: 2669580 - RNA, 14 nt, Human
uuaaucacugugua

SEQ ID NO: 2669581 - RNA, 13 nt, Human
uuaaucacugugu

SEQ ID NO: 2669582 - RNA, 20 nt, Human
uuaaucacuguguauauuug

SEQ ID NO: 2669583 - RNA, 17 nt, Human
uuaaucacuguguauau

SEQ ID NO: 2669584 - RNA, 15 nt, Human
uuaaucacuguguau

SEQ ID NO: 2669585 - RNA, 14 nt, Human
uuaagacugauuuu

SEQ ID NO: 2669586 - RNA, 18 nt, Human
uuaagacugauuuuaaua

SEQ ID NO: 2669587 - RNA, 24 nt, Human
uuaagagcaaaucaauucuaguca

SEQ ID NO: 2669588 - RNA, 20 nt, Human
uuaaguuuugacaagcuggc

SEQ ID NO: 2669589 - RNA, 12 nt, Human
aguuuuuuugcu

SEQ ID NO: 2669590 - RNA, 18 nt, Human
uuaaucuucaaagccuuc

SEQ ID NO: 2669591 - RNA, 20 nt, Human
uuaaucuucaaagccuucuc

SEQ ID NO: 2669592 - RNA, 18 nt, Human
uuaauuugcaucugaaau

SEQ ID NO: 2669593 - RNA, 11 nt, Human
uuaauuuccuu

SEQ ID NO: 2669594 - RNA, 12 nt, Human
uuaauuuccuuu

SEQ ID NO: 2669595 - RNA, 13 nt, Human
uuaauuuccuuuu

SEQ ID NO: 2669596 - RNA, 15 nt, Human
uuaauuuccuuuuug

SEQ ID NO: 2669597 - RNA, 16 nt, Human
uuaauuuccuuuuuga

SEQ ID NO: 2669598 - RNA, 18 nt, Human
uuaauuuccuuuuugaca

SEQ ID NO: 2669599 - RNA, 19 nt, Human
uuaauuuccuuuuugacac

SEQ ID NO: 2669600 - RNA, 20 nt, Human
uuaauuuccuuuuugacacu

SEQ ID NO: 2669601 - RNA, 21 nt, Human
uuaauuuccuuuuugacacug

SEQ ID NO: 2669602 - RNA, 22 nt, Human
uuaauuuccuuuuugacacuga

SEQ ID NO: 2669603 - RNA, 23 nt, Human
uuaauuuccuuuuugacacugaa

SEQ ID NO: 2669604 - RNA, 12 nt, Human
uuaauuuucacu

SEQ ID NO: 2669605 - RNA, 13 nt, Human
uuaauuuuaaagu

SEQ ID NO: 2669606 - RNA, 16 nt, Human
uuaauuuuaaagugca

SEQ ID NO: 2669607 - RNA, 18 nt, Human
uuaauuuuaaagugcaaa

SEQ ID NO: 2669608 - RNA, 19 nt, Human
uuaauuuuaaagugcaaaa

SEQ ID NO: 2669609 - RNA, 17 nt, Human
uuaauuuuuaaugauga

SEQ ID NO: 2669610 - RNA, 15 nt, Human
aguuuuauaugcuuu

SEQ ID NO: 2669611 - RNA, 16 nt, Human
aguuuuauaugcuuua

SEQ ID NO: 2669612 - RNA, 17 nt, Human
aguuuuauaugcuuuau

SEQ ID NO: 2669613 - RNA, 14 nt, Human
aguuuuauaugcuu

SEQ ID NO: 2669614 - RNA, 24 nt, Human
aguuuuauaauccuuaaaucuuaa

SEQ ID NO: 2669615 - RNA, 19 nt, Human
aguuuuauagccuggacug

SEQ ID NO: 2669616 - RNA, 23 nt, Human
aguuuuacugucuauuaauauuc

SEQ ID NO: 2669617 - RNA, 13 nt, Human
aguuuuguuguac

SEQ ID NO: 2669618 - RNA, 18 nt, Human
aguuuuguuguacuuaaa

SEQ ID NO: 2669619 - RNA, 23 nt, Human
aguuuuguuguacuuaaauggua

SEQ ID NO: 2669620 - RNA, 13 nt, Human
aguuuuuccugga

SEQ ID NO: 2669621 - RNA, 15 nt, Human
aguuuuuccuggaau

SEQ ID NO: 2669622 - RNA, 23 nt, Human
aguuuuguuuuaaaacuggaccu

SEQ ID NO: 2669623 - RNA, 21 nt, Human
aguuuuuggauaaagaauacu

SEQ ID NO: 2669624 - RNA, 16 nt, Human
aguuuuugguugggaa

SEQ ID NO: 2669625 - RNA, 17 nt, Human
aguuuuugguugggaau

SEQ ID NO: 2669626 - RNA, 12 nt, Human
aguuuuuguuug

SEQ ID NO: 2669627 - RNA, 16 nt, Human
aguuuuuguuuggaga

SEQ ID NO: 2669628 - RNA, 20 nt, Human
auaaaaggcuugaagcugug

SEQ ID NO: 2669629 - RNA, 13 nt, Human
aguuuguuggaaa

SEQ ID NO: 2669630 - RNA, 14 nt, Human
aguuuguguguugu

SEQ ID NO: 2669631 - RNA, 21 nt, Human
aguuuguguguugucucuuga

SEQ ID NO: 2669632 - RNA, 14 nt, Human
aguuuaucauucaa

SEQ ID NO: 2669633 - RNA, 15 nt, Human
aguuuaucauucaag

SEQ ID NO: 2669634 - RNA, 16 nt, Human
aguuuaucauucaagu

SEQ ID NO: 2669635 - RNA, 17 nt, Human
aguuuaucauucaagug

SEQ ID NO: 2669636 - RNA, 23 nt, Human
uuaaauuuuuuuguaugaaaaca

SEQ ID NO: 2669637 - RNA, 17 nt, Human
uuaaauuuuuuuguaug

SEQ ID NO: 2669638 - RNA, 22 nt, Human
uuaaauuuuuuuguaugaaaac

SEQ ID NO: 2669639 - RNA, 21 nt, Human
uuaaauuuuuuuguaugaaaa

SEQ ID NO: 2669640 - RNA, 20 nt, Human
uuaaauuuuuuuguaugaaa

SEQ ID NO: 2669641 - RNA, 17 nt, Human
aguuuagaacagguuuu

SEQ ID NO: 2669642 - RNA, 16 nt, Human
aguuuagaacagguuu

SEQ ID NO: 2669643 - RNA, 12 nt, Human
aguuuagaacag

SEQ ID NO: 2669644 - RNA, 14 nt, Human
uuaaaaaauaaaua

SEQ ID NO: 2669645 - RNA, 23 nt, Human
uuaaaaaauaggugguagauauu

SEQ ID NO: 2669646 - RNA, 14 nt, Human
uuaaaaaauauuuu

SEQ ID NO: 2669647 - RNA, 16 nt, Human
uuaaaaaauauuuucu

SEQ ID NO: 2669648 - RNA, 20 nt, Human
uuaaaaaauauuuucucugu

SEQ ID NO: 2669649 - RNA, 15 nt, Human
uuaaaaaaucuuaau

SEQ ID NO: 2669650 - RNA, 13 nt, Human
uuaaaaaagagac

SEQ ID NO: 2669651 - RNA, 15 nt, Human
uuaaaaaagagacau

SEQ ID NO: 2669652 - RNA, 18 nt, Human
aguuagcugaagaauuga

SEQ ID NO: 2669653 - RNA, 16 nt, Human
uuaaaaaaucuuaaug

SEQ ID NO: 2669654 - RNA, 18 nt, Human
uuaaaaucugagggaaau

SEQ ID NO: 2669655 - RNA, 21 nt, Human
uuaaaaucugagggaaauguu

SEQ ID NO: 2669656 - RNA, 22 nt, Human
uuaaaaucugagggaaauguuu

SEQ ID NO: 2669657 - RNA, 11 nt, Human
uuaaaauguaa

SEQ ID NO: 2669658 - RNA, 13 nt, Human
uuaaaauguaauu

SEQ ID NO: 2669659 - RNA, 17 nt, Human
uuaaaauguaauuuaaa

SEQ ID NO: 2669660 - RNA, 21 nt, Human
uuaaaauguaauuuaaaugaa

SEQ ID NO: 2669661 - RNA, 14 nt, Human
uuaaaccacuuaaa

SEQ ID NO: 2669662 - RNA, 19 nt, Human
uuacugccgguuugaaaau

SEQ ID NO: 2669663 - RNA, 11 nt, Human
uuacugccuug

SEQ ID NO: 2669664 - RNA, 14 nt, Human
uuacugccuugaaa

SEQ ID NO: 2669665 - RNA, 15 nt, Human
uuacugcagcuuugu

SEQ ID NO: 2669666 - RNA, 16 nt, Human
uuagaauaagaauuug

SEQ ID NO: 2669667 - RNA, 18 nt, Human
uuagaauaagaauuugca

SEQ ID NO: 2669668 - RNA, 19 nt, Human
uuagaauaagaauuugcau

SEQ ID NO: 2669669 - RNA, 23 nt, Human
uuagaaucccuguguuaauuuaa

SEQ ID NO: 2669670 - RNA, 20 nt, Human
uuagaaucccuguguuaauu

SEQ ID NO: 2669671 - RNA, 17 nt, Human
uuagaaucccuguguua

SEQ ID NO: 2669672 - RNA, 13 nt, Human
uuagaauuaaaaa

SEQ ID NO: 2669673 - RNA, 17 nt, Human
uuagaauuaaaaaagca

SEQ ID NO: 2669674 - RNA, 14 nt, Human
auaagaugacugug

SEQ ID NO: 2669675 - RNA, 17 nt, Human
auaagaugacuguguug

SEQ ID NO: 2669676 - RNA, 16 nt, Human
auaagaaaauauauuc

SEQ ID NO: 2669677 - RNA, 21 nt, Human
auaagaaaauauauucuuuca

SEQ ID NO: 2669678 - RNA, 21 nt, Human
uuacaaaguuaaaauuguuau

SEQ ID NO: 2669679 - RNA, 21 nt, Human
auaaauucuauaggaacauau

SEQ ID NO: 2669680 - RNA, 16 nt, Human
auaaauucuauaggaa

SEQ ID NO: 2669681 - RNA, 15 nt, Human
auaacucaauggaaa

SEQ ID NO: 2669682 - RNA, 18 nt, Human
uuauaaaauauaaacaaa

SEQ ID NO: 2669683 - RNA, 18 nt, Human
uuauaaaauccugugcaa

SEQ ID NO: 2669684 - RNA, 20 nt, Human
uuauaaaauccugugcaaua

SEQ ID NO: 2669685 - RNA, 13 nt, Human
uuauaaaauggcu

SEQ ID NO: 2669686 - RNA, 20 nt, Human
uuauaaaauggcuguaauca

SEQ ID NO: 2669687 - RNA, 13 nt, Human
uuauaaaauauaa

SEQ ID NO: 2669688 - RNA, 20 nt, Human
uuauaaaauauaaacaaaga

SEQ ID NO: 2669689 - RNA, 13 nt, Human
uuauaaacagaaa

SEQ ID NO: 2669690 - RNA, 17 nt, Human
uuauaaacagaaaugga

SEQ ID NO: 2669691 - RNA, 22 nt, Human
uuauaaaacagaguaaucuugu

SEQ ID NO: 2669692 - RNA, 19 nt, Human
uuauaaaacagaguaaucu

SEQ ID NO: 2669693 - RNA, 17 nt, Human
uuaguaauuucuuuuuu

SEQ ID NO: 2669694 - RNA, 17 nt, Human
uuagggcaccagggguu

SEQ ID NO: 2669695 - RNA, 18 nt, Human
uuagggaguauucuaaua

SEQ ID NO: 2669696 - RNA, 17 nt, Human
uuagggaguauucuaau

SEQ ID NO: 2669697 - RNA, 14 nt, Human
uuagggaguauucu

SEQ ID NO: 2669698 - RNA, 19 nt, Human
uuaggggaaggagaaguaa

SEQ ID NO: 2669699 - RNA, 22 nt, Human
uuagauguugccauguguuuua

SEQ ID NO: 2669700 - RNA, 16 nt, Human
uuagauguugccaugu

SEQ ID NO: 2669701 - RNA, 19 nt, Human
uuagauguugccauguguu

SEQ ID NO: 2669702 - RNA, 19 nt, Human
uuaggugugggggaagcac

SEQ ID NO: 2669703 - RNA, 20 nt, Human
auaaucuuguuucugaaaag

SEQ ID NO: 2669704 - RNA, 21 nt, Human
auaaucuuguuucugaaaaga

SEQ ID NO: 2669705 - RNA, 14 nt, Human
auaauuuagauggu

SEQ ID NO: 2669706 - RNA, 20 nt, Human
auaauuuauuuccacuaaaa

SEQ ID NO: 2669707 - RNA, 13 nt, Human
auaauuucagggu

SEQ ID NO: 2669708 - RNA, 14 nt, Human
auaauuucagggug

SEQ ID NO: 2669709 - RNA, 21 nt, Human
auaauuuuaaaaaagccuucc

SEQ ID NO: 2669710 - RNA, 14 nt, Human
auaagccaaaauua

SEQ ID NO: 2669711 - RNA, 11 nt, Human
auaauauaaaa

SEQ ID NO: 2669712 - RNA, 12 nt, Human
auaauauaaaaa

SEQ ID NO: 2669713 - RNA, 13 nt, Human
auaauauaaaaaa

SEQ ID NO: 2669714 - RNA, 13 nt, Human
auaauauauuuuc

SEQ ID NO: 2669715 - RNA, 17 nt, Human
auaaucaagagccuuaa

SEQ ID NO: 2669716 - RNA, 16 nt, Human
auaaucaagagccuua

SEQ ID NO: 2669717 - RNA, 22 nt, Human
auaaucaagagccuuaaaacau

SEQ ID NO: 2669718 - RNA, 21 nt, Human
auaaucaagagccuuaaaaca

SEQ ID NO: 2669719 - RNA, 20 nt, Human
auaaucaagagccuuaaaac

SEQ ID NO: 2669720 - RNA, 17 nt, Human
auaaucuuauaauuguu

SEQ ID NO: 2669721 - RNA, 14 nt, Human
auaauauuguuugg

SEQ ID NO: 2669722 - RNA, 16 nt, Human
auaauauuguuuggua

SEQ ID NO: 2669723 - RNA, 21 nt, Human
auaauauuguuugguaaaugu

SEQ ID NO: 2669724 - RNA, 22 nt, Human
auaauauuguuugguaaauguu

SEQ ID NO: 2669725 - RNA, 19 nt, Human
uuacugucuauuaauauuc

SEQ ID NO: 2669726 - RNA, 15 nt, Human
auaauauauuuucug

SEQ ID NO: 2669727 - RNA, 17 nt, Human
augaauaucuauuaaua

SEQ ID NO: 2669728 - RNA, 21 nt, Human
augaagacuguuaaaugaaac

SEQ ID NO: 2669729 - RNA, 22 nt, Human
augaagacuguuaaaugaaacc

SEQ ID NO: 2669730 - RNA, 16 nt, Human
augaagaauuuaaaga

SEQ ID NO: 2669731 - RNA, 13 nt, Human
augaagaauuuaa

SEQ ID NO: 2669732 - RNA, 14 nt, Human
augaagaauagaaa

SEQ ID NO: 2669733 - RNA, 16 nt, Human
augaagaauagaaaca

SEQ ID NO: 2669734 - RNA, 17 nt, Human
augaagaauagaaacaa

SEQ ID NO: 2669735 - RNA, 18 nt, Human
augaagaauagaaacaag

SEQ ID NO: 2669736 - RNA, 12 nt, Human
augaaaugugaa

SEQ ID NO: 2669737 - RNA, 13 nt, Human
augaaaugugaau

SEQ ID NO: 2669738 - RNA, 18 nt, Human
augaaaugugaauuuuua

SEQ ID NO: 2669739 - RNA, 22 nt, Human
augaaaugugaauuuuuauugu

SEQ ID NO: 2669740 - RNA, 23 nt, Human
augaaaugugaauuuuuauuguu

SEQ ID NO: 2669741 - RNA, 18 nt, Human
augaaaugcauauuugca

SEQ ID NO: 2669742 - RNA, 21 nt, Human
augaauaucuauuaauauaug

SEQ ID NO: 2669743 - RNA, 20 nt, Human
augaauaucuauuaauauau

SEQ ID NO: 2669744 - RNA, 19 nt, Human
augaauaucuauuaauaua

SEQ ID NO: 2669745 - RNA, 18 nt, Human
augaauaucuauuaauau

SEQ ID NO: 2669746 - RNA, 22 nt, Human
augaauaucuauuaauauaugu

SEQ ID NO: 2669747 - RNA, 21 nt, Human
augaaugggcugagcugccug

SEQ ID NO: 2669748 - RNA, 21 nt, Human
augaaucaaaagugccucaag

SEQ ID NO: 2669749 - RNA, 22 nt, Human
uuggggaggagggggccgggcg

SEQ ID NO: 2669750 - RNA, 23 nt, Human
uuggcccccaaagauagacaggu

SEQ ID NO: 2669751 - RNA, 15 nt, Human
uuggagucacugcca

SEQ ID NO: 2669752 - RNA, 13 nt, Human
uuggcccuauuua

SEQ ID NO: 2669753 - RNA, 21 nt, Human
aucuuugauguguuguucuug

SEQ ID NO: 2669754 - RNA, 16 nt, Human
aucuuuugaagcauag

SEQ ID NO: 2669755 - RNA, 17 nt, Human
aucuuuugaagcauaga

SEQ ID NO: 2669756 - RNA, 19 nt, Human
aucuuugauguguuguucu

SEQ ID NO: 2669757 - RNA, 17 nt, Human
aucuuugauguguuguu

SEQ ID NO: 2669758 - RNA, 16 nt, Human
aucuuugauguguugu

SEQ ID NO: 2669759 - RNA, 15 nt, Human
aucuuugauguguug

SEQ ID NO: 2669760 - RNA, 14 nt, Human
aucuuugauguguu

SEQ ID NO: 2669761 - RNA, 12 nt, Human
aucuuugaugug

SEQ ID NO: 2669762 - RNA, 15 nt, Human
aucuuugaauaugua

SEQ ID NO: 2669763 - RNA, 20 nt, Human
uuggcucgaaucucugugcc

SEQ ID NO: 2669764 - RNA, 21 nt, Human
uuggcucgaaucucugugccu

SEQ ID NO: 2669765 - RNA, 17 nt, Human
uuggcucgaaucucugu

SEQ ID NO: 2669766 - RNA, 14 nt, Human
uuggcucagacaug

SEQ ID NO: 2669767 - RNA, 13 nt, Human
uuggcucagacau

SEQ ID NO: 2669768 - RNA, 15 nt, Human
aucugcgugugugca

SEQ ID NO: 2669769 - RNA, 21 nt, Human
aucugccuuaaaaccaaagag

SEQ ID NO: 2669770 - RNA, 22 nt, Human
aucugcggaucucagcuuugag

SEQ ID NO: 2669771 - RNA, 23 nt, Human
aucugcggaucucagcuuugaga

SEQ ID NO: 2669772 - RNA, 18 nt, Human
aucugccuuaaaaccaaa

SEQ ID NO: 2669773 - RNA, 19 nt, Human
aucugccuuaaaaccaaag

SEQ ID NO: 2669774 - RNA, 17 nt, Human
aucugccuuaaaaccaa

SEQ ID NO: 2669775 - RNA, 18 nt, Human
aucugccccacagucucc

SEQ ID NO: 2669776 - RNA, 16 nt, Human
aucugccaagggccga

SEQ ID NO: 2669777 - RNA, 17 nt, Human
aucugccagacuuaaaa

SEQ ID NO: 2669778 - RNA, 13 nt, Human
uugccaaaauuca

SEQ ID NO: 2669779 - RNA, 19 nt, Human
uugccaaaauucauuucua

SEQ ID NO: 2669780 - RNA, 21 nt, Human
aucugguucauucuucagaua

SEQ ID NO: 2669781 - RNA, 14 nt, Human
aucugucugguggc

SEQ ID NO: 2669782 - RNA, 16 nt, Human
aucugucugguggccc

SEQ ID NO: 2669783 - RNA, 18 nt, Human
aucugucuauauuuuauu

SEQ ID NO: 2669784 - RNA, 16 nt, Human
aucuguuuauuuacaa

SEQ ID NO: 2669785 - RNA, 24 nt, Human
aucuuauaaaguggaaguauguau

SEQ ID NO: 2669786 - RNA, 14 nt, Human
aucuuauaauuguu

SEQ ID NO: 2669787 - RNA, 16 nt, Human
aucuuauaauuguucu

SEQ ID NO: 2669788 - RNA, 14 nt, Human
aucuugccuccagg

SEQ ID NO: 2669789 - RNA, 15 nt, Human
aucuugccuccaggu

SEQ ID NO: 2669790 - RNA, 21 nt, Human
aucuugccuccaggugcagag

SEQ ID NO: 2669791 - RNA, 19 nt, Human
uugcucuaugcuuuccaaa

SEQ ID NO: 2669792 - RNA, 18 nt, Human
uugcucuaugcuuuccaa

SEQ ID NO: 2669793 - RNA, 14 nt, Human
uugcucuacaauga

SEQ ID NO: 2669794 - RNA, 18 nt, Human
uugcucaaaaaaugagcu

SEQ ID NO: 2669795 - RNA, 17 nt, Human
aucuugcuacuaccguu

SEQ ID NO: 2669796 - RNA, 17 nt, Human
uugcucaaaaaaugagc

SEQ ID NO: 2669797 - RNA, 16 nt, Human
uugcuauuuuuguaaa

SEQ ID NO: 2669798 - RNA, 18 nt, Human
aucuaauauauaugaaua

SEQ ID NO: 2669799 - RNA, 17 nt, Human
aucuaauauauaugaau

SEQ ID NO: 2669800 - RNA, 15 nt, Human
aucuaauauauauga

SEQ ID NO: 2669801 - RNA, 20 nt, Human
aucuaauauauaugaauaaa

SEQ ID NO: 2669802 - RNA, 19 nt, Human
aucuaauauauaugaauaa

SEQ ID NO: 2669803 - RNA, 15 nt, Human
uugauacauucaaau

SEQ ID NO: 2669804 - RNA, 17 nt, Human
uugauacauucaaauuu

SEQ ID NO: 2669805 - RNA, 18 nt, Human
uugauacauucaaauuug

SEQ ID NO: 2669806 - RNA, 21 nt, Human
uugauacauucaaauuugucu

SEQ ID NO: 2669807 - RNA, 22 nt, Human
aucuaauauauaugaauaaagu

SEQ ID NO: 2669808 - RNA, 14 nt, Human
aucuacaaucucuu

SEQ ID NO: 2669809 - RNA, 19 nt, Human
aucuacaaucucuuuuugu

SEQ ID NO: 2669810 - RNA, 23 nt, Human
aucuacaaucucuuuuuguuugc

SEQ ID NO: 2669811 - RNA, 14 nt, Human
aucuacugcauuua

SEQ ID NO: 2669812 - RNA, 13 nt, Human
aucuacugcauuu

SEQ ID NO: 2669813 - RNA, 20 nt, Human
uugaguugauucagcucugc

SEQ ID NO: 2669814 - RNA, 17 nt, Human
uugaguuguuuuuguau

SEQ ID NO: 2669815 - RNA, 19 nt, Human
uugaguuguuuuuguauau

SEQ ID NO: 2669816 - RNA, 18 nt, Human
uugaguuguuuuuguaua

SEQ ID NO: 2669817 - RNA, 11 nt, Human
uugaguuuguc

SEQ ID NO: 2669818 - RNA, 23 nt, Human
uugaguuugucgcucaugugugc

SEQ ID NO: 2669819 - RNA, 19 nt, Human
uugauacaguuuucagaaa

SEQ ID NO: 2669820 - RNA, 16 nt, Human
uugagaucagccuggg

SEQ ID NO: 2669821 - RNA, 15 nt, Human
uugagaucagccugg

SEQ ID NO: 2669822 - RNA, 16 nt, Human
uugagaccgugaagau

SEQ ID NO: 2669823 - RNA, 22 nt, Human
uugagaccgugaagauacuuug

SEQ ID NO: 2669824 - RNA, 21 nt, Human
uugagaccgugaagauacuuu

SEQ ID NO: 2669825 - RNA, 17 nt, Human
uugagucuguacuaaac

SEQ ID NO: 2669826 - RNA, 13 nt, Human
uugaguauuguuu

SEQ ID NO: 2669827 - RNA, 14 nt, Human
uugaguauuguuua

SEQ ID NO: 2669828 - RNA, 15 nt, Human
uugaguauuguuuaa

SEQ ID NO: 2669829 - RNA, 20 nt, Human
uugaguauuguuuaaaaugu

SEQ ID NO: 2669830 - RNA, 22 nt, Human
uugaguauuguuuaaaauguaa

SEQ ID NO: 2669831 - RNA, 20 nt, Human
aucuaaaucuauuuauuaau

SEQ ID NO: 2669832 - RNA, 22 nt, Human
aucuaaaucuauuuauuaauau

SEQ ID NO: 2669833 - RNA, 14 nt, Human
aucguuuuuguauu

SEQ ID NO: 2669834 - RNA, 15 nt, Human
aucguuuuuguauuu

SEQ ID NO: 2669835 - RNA, 20 nt, Human
uugaagccaaguggggugcu

SEQ ID NO: 2669836 - RNA, 11 nt, Human
uugaagccaaa

SEQ ID NO: 2669837 - RNA, 14 nt, Human
uugaagccaaagaa

SEQ ID NO: 2669838 - RNA, 15 nt, Human
uugaagccaaagaaa

SEQ ID NO: 2669839 - RNA, 14 nt, Human
aucgugcuacugca

SEQ ID NO: 2669840 - RNA, 20 nt, Human
auccucuguaaacuuuuugu

SEQ ID NO: 2669841 - RNA, 16 nt, Human
auccucucaccucagc

SEQ ID NO: 2669842 - RNA, 14 nt, Human
auccuccucccacc

SEQ ID NO: 2669843 - RNA, 11 nt, Human
auccuccugca

SEQ ID NO: 2669844 - RNA, 16 nt, Human
uugaagccaucuaaag

SEQ ID NO: 2669845 - RNA, 23 nt, Human
uugaauaaacaccacuggauuaa

SEQ ID NO: 2669846 - RNA, 22 nt, Human
uugaauaaacaccacuggauua

SEQ ID NO: 2669847 - RNA, 21 nt, Human
uugaauaaacaccacuggauu

SEQ ID NO: 2669848 - RNA, 23 nt, Human
uugaaucaauaauauauuuucug

SEQ ID NO: 2669849 - RNA, 14 nt, Human
uugaauaaaugugu

SEQ ID NO: 2669850 - RNA, 17 nt, Human
uugaauacuugaaccau

SEQ ID NO: 2669851 - RNA, 16 nt, Human
uugaauacuugaacca

SEQ ID NO: 2669852 - RNA, 14 nt, Human
uugaauacuugaac

SEQ ID NO: 2669853 - RNA, 12 nt, Human
uugaauacuuga

SEQ ID NO: 2669854 - RNA, 14 nt, Human
uugaaucaauaaua

SEQ ID NO: 2669855 - RNA, 22 nt, Human
uugaaucaauaauauauuuucu

SEQ ID NO: 2669856 - RNA, 10 nt, Human
uugaaucaau

SEQ ID NO: 2669857 - RNA, 18 nt, Human
aucuacugcauuuaggga

SEQ ID NO: 2669858 - RNA, 14 nt, Human
aucucagggccugg

SEQ ID NO: 2669859 - RNA, 16 nt, Human
aucucagggccugguc

SEQ ID NO: 2669860 - RNA, 13 nt, Human
aucucauuuaagg

SEQ ID NO: 2669861 - RNA, 16 nt, Human
aucucauuuaagggaa

SEQ ID NO: 2669862 - RNA, 17 nt, Human
aucucauuuaagggaaa

SEQ ID NO: 2669863 - RNA, 18 nt, Human
aucucauuuaagggaaaa

SEQ ID NO: 2669864 - RNA, 19 nt, Human
aucucauuuaagggaaaaa

SEQ ID NO: 2669865 - RNA, 20 nt, Human
aucucauuuaagggaaaaau

SEQ ID NO: 2669866 - RNA, 23 nt, Human
aucucauuuaagggaaaaauaua

SEQ ID NO: 2669867 - RNA, 19 nt, Human
aucuccacaaccucuuccc

SEQ ID NO: 2669868 - RNA, 18 nt, Human
aucuccacaaccucuucc

SEQ ID NO: 2669869 - RNA, 15 nt, Human
aucucuugagccugg

SEQ ID NO: 2669870 - RNA, 18 nt, Human
aucucuugagccugggag

SEQ ID NO: 2669871 - RNA, 12 nt, Human
uugauuauuugc

SEQ ID NO: 2669872 - RNA, 13 nt, Human
uugauuauuugca

SEQ ID NO: 2669873 - RNA, 14 nt, Human
uugauuauuugcau

SEQ ID NO: 2669874 - RNA, 15 nt, Human
uugauuauuugcaug

SEQ ID NO: 2669875 - RNA, 16 nt, Human
uugauuauuugcaugu

SEQ ID NO: 2669876 - RNA, 20 nt, Human
uugauuauuugcauguuaug

SEQ ID NO: 2669877 - RNA, 23 nt, Human
uugauuauuugcauguuauguuu

SEQ ID NO: 2669878 - RNA, 23 nt, Human
uugauuauuuuuuuuuucuucuu

SEQ ID NO: 2669879 - RNA, 16 nt, Human
uugauuauuagccagg

SEQ ID NO: 2669880 - RNA, 21 nt, Human
aucugaaauaggaaacaagug

SEQ ID NO: 2669881 - RNA, 19 nt, Human
uugcauauuauaaaggaua

SEQ ID NO: 2669882 - RNA, 20 nt, Human
uugcaucacuguaucauuuu

SEQ ID NO: 2669883 - RNA, 19 nt, Human
uugcaucagaaagcuuuau

SEQ ID NO: 2669884 - RNA, 18 nt, Human
uugcaccacugcacucca

SEQ ID NO: 2669885 - RNA, 16 nt, Human
uugcaccacugcacuc

SEQ ID NO: 2669886 - RNA, 15 nt, Human
uugcaccacugcacu

SEQ ID NO: 2669887 - RNA, 14 nt, Human
uugcaccacugcac

SEQ ID NO: 2669888 - RNA, 14 nt, Human
auccggagaagcug

SEQ ID NO: 2669889 - RNA, 21 nt, Human
uucuuuggauucuaaauacau

SEQ ID NO: 2669890 - RNA, 20 nt, Human
auccgcugccagccuugagc

SEQ ID NO: 2669891 - RNA, 15 nt, Human
auccgcgugugccug

SEQ ID NO: 2669892 - RNA, 16 nt, Human
auccgcgugugccugu

SEQ ID NO: 2669893 - RNA, 16 nt, Human
auccuaggcauuugcu

SEQ ID NO: 2669894 - RNA, 11 nt, Human
auccuccuccc

SEQ ID NO: 2669895 - RNA, 17 nt, Human
auccgacugcuuuggac

SEQ ID NO: 2669896 - RNA, 15 nt, Human
uugaaagugccuuug

SEQ ID NO: 2669897 - RNA, 22 nt, Human
uucuuaaguauguuauuuucug

SEQ ID NO: 2669898 - RNA, 15 nt, Human
uucuucucugugaga

SEQ ID NO: 2669899 - RNA, 22 nt, Human
uucuucucugugagaagguuua

SEQ ID NO: 2669900 - RNA, 19 nt, Human
uucuucucuuagauucuua

SEQ ID NO: 2669901 - RNA, 20 nt, Human
uucuuaacccuuuccagagu

SEQ ID NO: 2669902 - RNA, 21 nt, Human
uucuucuguguuuauaaaaua

SEQ ID NO: 2669903 - RNA, 13 nt, Human
uucuucuguauuu

SEQ ID NO: 2669904 - RNA, 20 nt, Human
uucuucuguguuuauaaaau

SEQ ID NO: 2669905 - RNA, 18 nt, Human
uucuuuuuuuccuuuuua

SEQ ID NO: 2669906 - RNA, 19 nt, Human
uucuuuuuuuccuuuuuaa

SEQ ID NO: 2669907 - RNA, 21 nt, Human
uucuuuuuuauuaaucacugu

SEQ ID NO: 2669908 - RNA, 20 nt, Human
uucuuuuuuauuaaucacug

SEQ ID NO: 2669909 - RNA, 22 nt, Human
uucuuuuuuauuaaucacugug

SEQ ID NO: 2669910 - RNA, 14 nt, Human
uucuuuuuuauuaa

SEQ ID NO: 2669911 - RNA, 16 nt, Human
uucuuuuuuauuaauc

SEQ ID NO: 2669912 - RNA, 15 nt, Human
uucuuuuuuauuaau

SEQ ID NO: 2669913 - RNA, 20 nt, Human
uucucuuccuuuuaucagua

SEQ ID NO: 2669914 - RNA, 14 nt, Human
uucucuugagcugg

SEQ ID NO: 2669915 - RNA, 15 nt, Human
uucucuugagcuggc

SEQ ID NO: 2669916 - RNA, 16 nt, Human
uucucuugagcuggcc

SEQ ID NO: 2669917 - RNA, 17 nt, Human
uucucuugagcuggccu

SEQ ID NO: 2669918 - RNA, 22 nt, Human
uucucuugagcuggccucucua

SEQ ID NO: 2669919 - RNA, 18 nt, Human
uucucuugagcuggccuc

SEQ ID NO: 2669920 - RNA, 20 nt, Human
uucucuugagcuggccucuc

SEQ ID NO: 2669921 - RNA, 15 nt, Human
aucaguaacccccuu

SEQ ID NO: 2669922 - RNA, 19 nt, Human
aucaguaacccccuuaaau

SEQ ID NO: 2669923 - RNA, 22 nt, Human
aucaguaacccccuuaaauuua

SEQ ID NO: 2669924 - RNA, 23 nt, Human
aucaguaacccccuuaaauuuaa

SEQ ID NO: 2669925 - RNA, 10 nt, Human
uucuccugga

SEQ ID NO: 2669926 - RNA, 19 nt, Human
uucugccaucuagccagcc

SEQ ID NO: 2669927 - RNA, 21 nt, Human
uucugccaucuagccagcccc

SEQ ID NO: 2669928 - RNA, 13 nt, Human
uucugcccuggcu

SEQ ID NO: 2669929 - RNA, 14 nt, Human
uucugcccuggcug

SEQ ID NO: 2669930 - RNA, 14 nt, Human
uucugccuggagac

SEQ ID NO: 2669931 - RNA, 16 nt, Human
uucugcccuggcugcu

SEQ ID NO: 2669932 - RNA, 15 nt, Human
uucuggcuguuugag

SEQ ID NO: 2669933 - RNA, 18 nt, Human
uucuggcuuuaagccuuc

SEQ ID NO: 2669934 - RNA, 12 nt, Human
auccaagccucc

SEQ ID NO: 2669935 - RNA, 14 nt, Human
auccaagccuccac

SEQ ID NO: 2669936 - RNA, 15 nt, Human
auccaagccuccaca

SEQ ID NO: 2669937 - RNA, 16 nt, Human
auccaagccuccacag

SEQ ID NO: 2669938 - RNA, 17 nt, Human
auccaagccuccacagc

SEQ ID NO: 2669939 - RNA, 18 nt, Human
auccaagccuccacagcg

SEQ ID NO: 2669940 - RNA, 19 nt, Human
auccaagccuccacagcga

SEQ ID NO: 2669941 - RNA, 21 nt, Human
auccaagccuccacagcgagg

SEQ ID NO: 2669942 - RNA, 11 nt, Human
aucauuuucau

SEQ ID NO: 2669943 - RNA, 14 nt, Human
aucauuuugaaauu

SEQ ID NO: 2669944 - RNA, 15 nt, Human
aucauuuugaaauug

SEQ ID NO: 2669945 - RNA, 19 nt, Human
uucuggggggacccagugc

SEQ ID NO: 2669946 - RNA, 20 nt, Human
uucuggggggacccagugca

SEQ ID NO: 2669947 - RNA, 21 nt, Human
uucuggggggacccagugcag

SEQ ID NO: 2669948 - RNA, 22 nt, Human
uucuggggggacccagugcaga

SEQ ID NO: 2669949 - RNA, 23 nt, Human
uucuggggggacccagugcagaa

SEQ ID NO: 2669950 - RNA, 20 nt, Human
uucuggggcaggcugggcca

SEQ ID NO: 2669951 - RNA, 21 nt, Human
uucuggggcaggcugggccau

SEQ ID NO: 2669952 - RNA, 14 nt, Human
uucuggggaaagac

SEQ ID NO: 2669953 - RNA, 20 nt, Human
uucuggggaaagacacugcc

SEQ ID NO: 2669954 - RNA, 21 nt, Human
uucuggggaaagacacugccu

SEQ ID NO: 2669955 - RNA, 17 nt, Human
uucuggggcaggcuggg

SEQ ID NO: 2669956 - RNA, 22 nt, Human
uucuggggaaagacacugccug

SEQ ID NO: 2669957 - RNA, 23 nt, Human
uucuggggaaagacacugccugg

SEQ ID NO: 2669958 - RNA, 18 nt, Human
uucuggggcaggcugggc

SEQ ID NO: 2669959 - RNA, 19 nt, Human
uucuggggcaggcugggcc

SEQ ID NO: 2669960 - RNA, 13 nt, Human
auccauauuuuau

SEQ ID NO: 2669961 - RNA, 18 nt, Human
auccauauuuuauuacug

SEQ ID NO: 2669962 - RNA, 19 nt, Human
auccauauuuuauuacugu

SEQ ID NO: 2669963 - RNA, 23 nt, Human
auccauauuuuauuacuguuuau

SEQ ID NO: 2669964 - RNA, 11 nt, Human
auccagugacc

SEQ ID NO: 2669965 - RNA, 17 nt, Human
auccagugaccucucuc

SEQ ID NO: 2669966 - RNA, 19 nt, Human
auccagugaccucucucuc

SEQ ID NO: 2669967 - RNA, 21 nt, Human
auccagugaccucucucucug

SEQ ID NO: 2669968 - RNA, 22 nt, Human
auccagugaccucucucucugg

SEQ ID NO: 2669969 - RNA, 19 nt, Human
auccaguuauaagaagaag

SEQ ID NO: 2669970 - RNA, 20 nt, Human
auccacccaacccuaucucc

SEQ ID NO: 2669971 - RNA, 17 nt, Human
uuccgugaaaacggagc

SEQ ID NO: 2669972 - RNA, 15 nt, Human
uucccuauuagagaa

SEQ ID NO: 2669973 - RNA, 12 nt, Human
uucccucacccc

SEQ ID NO: 2669974 - RNA, 13 nt, Human
uucccucaccccc

SEQ ID NO: 2669975 - RNA, 14 nt, Human
uucccucacccccu

SEQ ID NO: 2669976 - RNA, 18 nt, Human
uucccucacccccuccca

SEQ ID NO: 2669977 - RNA, 19 nt, Human
uucccucacccccucccac

SEQ ID NO: 2669978 - RNA, 22 nt, Human
uucccucacccccucccacccc

SEQ ID NO: 2669979 - RNA, 15 nt, Human
auagauuuuauaaga

SEQ ID NO: 2669980 - RNA, 13 nt, Human
uuccucugccugc

SEQ ID NO: 2669981 - RNA, 14 nt, Human
uuccucugccugcc

SEQ ID NO: 2669982 - RNA, 15 nt, Human
uuccucugccugccc

SEQ ID NO: 2669983 - RNA, 16 nt, Human
uuccucugccugcccc

SEQ ID NO: 2669984 - RNA, 13 nt, Human
uuccuaaagaaaa

SEQ ID NO: 2669985 - RNA, 14 nt, Human
uuccgugcguggca

SEQ ID NO: 2669986 - RNA, 16 nt, Human
uuccgugcguggcacu

SEQ ID NO: 2669987 - RNA, 12 nt, Human
uuccucugccug

SEQ ID NO: 2669988 - RNA, 17 nt, Human
aucaacaauaaaauuuu

SEQ ID NO: 2669989 - RNA, 22 nt, Human
aucaacaauaaaauuuuuuuaa

SEQ ID NO: 2669990 - RNA, 17 nt, Human
aucaaauuaauugugug

SEQ ID NO: 2669991 - RNA, 16 nt, Human
aucaaauuaauugugu

SEQ ID NO: 2669992 - RNA, 14 nt, Human
uuccugaaccaugu

SEQ ID NO: 2669993 - RNA, 23 nt, Human
uuccugucccugcgccuuuccuu

SEQ ID NO: 2669994 - RNA, 17 nt, Human
uuccugugauccaccca

SEQ ID NO: 2669995 - RNA, 22 nt, Human
uuccugugauccacccaacccu

SEQ ID NO: 2669996 - RNA, 18 nt, Human
auauuuuuauauuuccuu

SEQ ID NO: 2669997 - RNA, 19 nt, Human
auauuuuuauauuuccuuu

SEQ ID NO: 2669998 - RNA, 20 nt, Human
auauuuuuauauuuccuuua

SEQ ID NO: 2669999 - RNA, 21 nt, Human
auauuuuuauauuuccuuuau

SEQ ID NO: 2670000 - RNA, 12 nt, Human
aucacugccaca

SEQ ID NO: 2670001 - RNA, 18 nt, Human
aucacugccacacucucc

SEQ ID NO: 2670002 - RNA, 19 nt, Human
aucacugccacacucucca

SEQ ID NO: 2670003 - RNA, 20 nt, Human
aucacugccacacucuccau

SEQ ID NO: 2670004 - RNA, 22 nt, Human
aucacugccacacucuccauca

SEQ ID NO: 2670005 - RNA, 16 nt, Human
aucaagggaagaacua

SEQ ID NO: 2670006 - RNA, 18 nt, Human
aucaagggaagaacuauu

SEQ ID NO: 2670007 - RNA, 13 nt, Human
aucaauccugauu

SEQ ID NO: 2670008 - RNA, 19 nt, Human
aucaauccugauuccucuc

SEQ ID NO: 2670009 - RNA, 20 nt, Human
aucaauccugauuccucucu

SEQ ID NO: 2670010 - RNA, 23 nt, Human
aucaauccugauuccucucuaag

SEQ ID NO: 2670011 - RNA, 15 nt, Human
aucaggggagaaaaa

SEQ ID NO: 2670012 - RNA, 14 nt, Human
aucaggcucccagg

SEQ ID NO: 2670013 - RNA, 13 nt, Human
aucaggcucccag

SEQ ID NO: 2670014 - RNA, 12 nt, Human
uucuaagagaag

SEQ ID NO: 2670015 - RNA, 13 nt, Human
uucuaagagaagu

SEQ ID NO: 2670016 - RNA, 20 nt, Human
uucuaaauguuuggcaugua

SEQ ID NO: 2670017 - RNA, 20 nt, Human
uucggaagggguuccucaaa

SEQ ID NO: 2670018 - RNA, 22 nt, Human
uucgcuucuugccucugugcug

SEQ ID NO: 2670019 - RNA, 21 nt, Human
aucacugccacacucuccauc

SEQ ID NO: 2670020 - RNA, 15 nt, Human
augugauuacaaggc

SEQ ID NO: 2670021 - RNA, 18 nt, Human
augugauggacacuccag

SEQ ID NO: 2670022 - RNA, 18 nt, Human
augugcaaaaccuuuuac

SEQ ID NO: 2670023 - RNA, 21 nt, Human
augugcaaaaccuuuuacugg

SEQ ID NO: 2670024 - RNA, 12 nt, Human
augugacccucc

SEQ ID NO: 2670025 - RNA, 14 nt, Human
augugacccuccaa

SEQ ID NO: 2670026 - RNA, 13 nt, Human
uuugucuuuuugu

SEQ ID NO: 2670027 - RNA, 22 nt, Human
uuugugcugaauguugggacug

SEQ ID NO: 2670028 - RNA, 20 nt, Human
auguccaguaagaucacugu

SEQ ID NO: 2670029 - RNA, 19 nt, Human
auguccaguaagaucacug

SEQ ID NO: 2670030 - RNA, 18 nt, Human
auguccaguaagaucacu

SEQ ID NO: 2670031 - RNA, 16 nt, Human
auguccaguaagauca

SEQ ID NO: 2670032 - RNA, 12 nt, Human
auguccaggaaa

SEQ ID NO: 2670033 - RNA, 16 nt, Human
auguccagcaccuugu

SEQ ID NO: 2670034 - RNA, 21 nt, Human
auguccagcaccuugugccug

SEQ ID NO: 2670035 - RNA, 22 nt, Human
auguccagcaccuugugccugg

SEQ ID NO: 2670036 - RNA, 13 nt, Human
augucuccucccc

SEQ ID NO: 2670037 - RNA, 21 nt, Human
auguauguguuuagaauugaa

SEQ ID NO: 2670038 - RNA, 20 nt, Human
auguauguguuuagaauuga

SEQ ID NO: 2670039 - RNA, 18 nt, Human
auguauguguuuagaauu

SEQ ID NO: 2670040 - RNA, 12 nt, Human
auguauguguuu

SEQ ID NO: 2670041 - RNA, 17 nt, Human
auguauguguuuagaau

SEQ ID NO: 2670042 - RNA, 16 nt, Human
auguauguguuuagaa

SEQ ID NO: 2670043 - RNA, 15 nt, Human
auguauguguuuaga

SEQ ID NO: 2670044 - RNA, 14 nt, Human
auguauguguuuag

SEQ ID NO: 2670045 - RNA, 19 nt, Human
uuugcugcacuuuuuacuu

SEQ ID NO: 2670046 - RNA, 12 nt, Human
auguauguuucu

SEQ ID NO: 2670047 - RNA, 14 nt, Human
auguauguuucucu

SEQ ID NO: 2670048 - RNA, 19 nt, Human
auguauguuuggcucugcu

SEQ ID NO: 2670049 - RNA, 14 nt, Human
auguaguaucuaua

SEQ ID NO: 2670050 - RNA, 19 nt, Human
auguaguaucuauaugacu

SEQ ID NO: 2670051 - RNA, 12 nt, Human
auguagguccuc

SEQ ID NO: 2670052 - RNA, 21 nt, Human
auguagguccucagaaagugu

SEQ ID NO: 2670053 - RNA, 16 nt, Human
auguagguaagacugu

SEQ ID NO: 2670054 - RNA, 18 nt, Human
auguagguaagacuguag

SEQ ID NO: 2670055 - RNA, 19 nt, Human
auguagguaagacuguaga

SEQ ID NO: 2670056 - RNA, 20 nt, Human
auguagguaagacuguagau

SEQ ID NO: 2670057 - RNA, 23 nt, Human
auguagcccccuggccucugugc

SEQ ID NO: 2670058 - RNA, 21 nt, Human
auguagcccccuggccucugu

SEQ ID NO: 2670059 - RNA, 19 nt, Human
auguagcccccuggccucu

SEQ ID NO: 2670060 - RNA, 18 nt, Human
auguagcccccuggccuc

SEQ ID NO: 2670061 - RNA, 18 nt, Human
auguagaggcuuguuuac

SEQ ID NO: 2670062 - RNA, 23 nt, Human
auguaggagcugccuuggcucag

SEQ ID NO: 2670063 - RNA, 14 nt, Human
auguacuuuuuagu

SEQ ID NO: 2670064 - RNA, 15 nt, Human
auguacuuuuuagua

SEQ ID NO: 2670065 - RNA, 20 nt, Human
auguacuuuuauuuuacaca

SEQ ID NO: 2670066 - RNA, 22 nt, Human
auguacuuuuauuuuacacaga

SEQ ID NO: 2670067 - RNA, 18 nt, Human
auguacguccagccugcc

SEQ ID NO: 2670068 - RNA, 20 nt, Human
auguacguccagccugcccc

SEQ ID NO: 2670069 - RNA, 23 nt, Human
uuugcaaccaggaacagcaaaug

SEQ ID NO: 2670070 - RNA, 14 nt, Human
auguagcagugagu

SEQ ID NO: 2670071 - RNA, 14 nt, Human
uuugcaaccaggaa

SEQ ID NO: 2670072 - RNA, 15 nt, Human
uuugcaaccaggaac

SEQ ID NO: 2670073 - RNA, 18 nt, Human
uuugcaaaguguauuagg

SEQ ID NO: 2670074 - RNA, 13 nt, Human
uuugcugcucuuc

SEQ ID NO: 2670075 - RNA, 13 nt, Human
uuugcucuucaga

SEQ ID NO: 2670076 - RNA, 18 nt, Human
uuugcucuucagaugcca

SEQ ID NO: 2670077 - RNA, 20 nt, Human
uuugcucuucagaugccacu

SEQ ID NO: 2670078 - RNA, 21 nt, Human
uuugcucuucagaugccacuu

SEQ ID NO: 2670079 - RNA, 14 nt, Human
uuugacuaauuuua

SEQ ID NO: 2670080 - RNA, 16 nt, Human
uuugacuaauuuuaca

SEQ ID NO: 2670081 - RNA, 17 nt, Human
uuugacuaauuuuacau

SEQ ID NO: 2670082 - RNA, 21 nt, Human
uuugacuaauuuuacauguuu

SEQ ID NO: 2670083 - RNA, 21 nt, Human
uuugauguguuguucuuggca

SEQ ID NO: 2670084 - RNA, 21 nt, Human
uuugaugucagcaguugcugg

SEQ ID NO: 2670085 - RNA, 20 nt, Human
uuugaugucagcaguugcug

SEQ ID NO: 2670086 - RNA, 17 nt, Human
uuugaugucagcaguug

SEQ ID NO: 2670087 - RNA, 16 nt, Human
uuugaugucagcaguu

SEQ ID NO: 2670088 - RNA, 14 nt, Human
uuugaugucagcag

SEQ ID NO: 2670089 - RNA, 17 nt, Human
augguugaugauacuuc

SEQ ID NO: 2670090 - RNA, 19 nt, Human
augguucuggcuguuugag

SEQ ID NO: 2670091 - RNA, 18 nt, Human
augguucuggcuguuuga

SEQ ID NO: 2670092 - RNA, 16 nt, Human
augguuauguuuuucu

SEQ ID NO: 2670093 - RNA, 20 nt, Human
augguucucucaacaagaaa

SEQ ID NO: 2670094 - RNA, 22 nt, Human
augguuuccuccauuugagaaa

SEQ ID NO: 2670095 - RNA, 15 nt, Human
augguuucuugcaag

SEQ ID NO: 2670096 - RNA, 23 nt, Human
augguuugacucaucuuauaugg

SEQ ID NO: 2670097 - RNA, 14 nt, Human
augguucuucaccu

SEQ ID NO: 2670098 - RNA, 14 nt, Human
augguuuuaaacuu

SEQ ID NO: 2670099 - RNA, 15 nt, Human
augguuuuaaacuuu

SEQ ID NO: 2670100 - RNA, 13 nt, Human
augguuuuaagaa

SEQ ID NO: 2670101 - RNA, 17 nt, Human
auguaaaacagaaaaaa

SEQ ID NO: 2670102 - RNA, 15 nt, Human
augguuuugugccau

SEQ ID NO: 2670103 - RNA, 19 nt, Human
augguuuugugccaucugu

SEQ ID NO: 2670104 - RNA, 16 nt, Human
auguaaagugucagaa

SEQ ID NO: 2670105 - RNA, 16 nt, Human
auguaaauaauucuuu

SEQ ID NO: 2670106 - RNA, 14 nt, Human
auguaaauaauucu

SEQ ID NO: 2670107 - RNA, 13 nt, Human
auguaaauaauuc

SEQ ID NO: 2670108 - RNA, 15 nt, Human
auguaaauguaaacu

SEQ ID NO: 2670109 - RNA, 23 nt, Human
auggugccugagaggcaggcaua

SEQ ID NO: 2670110 - RNA, 18 nt, Human
auggugugaacccgggag

SEQ ID NO: 2670111 - RNA, 22 nt, Human
augguguagcccucccacuuug

SEQ ID NO: 2670112 - RNA, 15 nt, Human
augguguggccugug

SEQ ID NO: 2670113 - RNA, 18 nt, Human
augguuacuucuucucuu

SEQ ID NO: 2670114 - RNA, 14 nt, Human
auggugccugagag

SEQ ID NO: 2670115 - RNA, 15 nt, Human
auggugccugagagg

SEQ ID NO: 2670116 - RNA, 16 nt, Human
auggugccugagaggc

SEQ ID NO: 2670117 - RNA, 17 nt, Human
auggugccugagaggca

SEQ ID NO: 2670118 - RNA, 18 nt, Human
auggugccugagaggcag

SEQ ID NO: 2670119 - RNA, 20 nt, Human
auggugccugagaggcaggc

SEQ ID NO: 2670120 - RNA, 21 nt, Human
auggugccugagaggcaggca

SEQ ID NO: 2670121 - RNA, 19 nt, Human
auggugaugcagucuuaga

SEQ ID NO: 2670122 - RNA, 20 nt, Human
auggugaugcagucuuagau

SEQ ID NO: 2670123 - RNA, 14 nt, Human
augggaugagaaaa

SEQ ID NO: 2670124 - RNA, 22 nt, Human
augggagggggcuugaagccaa

SEQ ID NO: 2670125 - RNA, 23 nt, Human
augggagggggcuugaagccaaa

SEQ ID NO: 2670126 - RNA, 17 nt, Human
uuucugauuugcugcuc

SEQ ID NO: 2670127 - RNA, 14 nt, Human
uuucuggggccuag

SEQ ID NO: 2670128 - RNA, 17 nt, Human
uuucugugcccuccuga

SEQ ID NO: 2670129 - RNA, 13 nt, Human
uuucugugcccuc

SEQ ID NO: 2670130 - RNA, 15 nt, Human
uuucugugugucagu

SEQ ID NO: 2670131 - RNA, 18 nt, Human
uuucugugugucaguuuu

SEQ ID NO: 2670132 - RNA, 21 nt, Human
uuucugugugucaguuuucau

SEQ ID NO: 2670133 - RNA, 22 nt, Human
uuucugugugucaguuuucaua

SEQ ID NO: 2670134 - RNA, 15 nt, Human
uuucugguggucugu

SEQ ID NO: 2670135 - RNA, 17 nt, Human
uuucugguggucuguug

SEQ ID NO: 2670136 - RNA, 20 nt, Human
uuucugguggucuguuggca

SEQ ID NO: 2670137 - RNA, 15 nt, Human
uuucuggggaaagac

SEQ ID NO: 2670138 - RNA, 21 nt, Human
uuucuggggaaagacacugcc

SEQ ID NO: 2670139 - RNA, 22 nt, Human
uuucuggggaaagacacugccu

SEQ ID NO: 2670140 - RNA, 12 nt, Human
uuugaaaaauau

SEQ ID NO: 2670141 - RNA, 13 nt, Human
uuugaaaaauaua

SEQ ID NO: 2670142 - RNA, 21 nt, Human
uuugaaaaauauaaaauuaug

SEQ ID NO: 2670143 - RNA, 14 nt, Human
uuucuuuuuuuccu

SEQ ID NO: 2670144 - RNA, 17 nt, Human
uuucuuuuuuuuuaagu

SEQ ID NO: 2670145 - RNA, 18 nt, Human
uuucuuuuuuuuuaaguu

SEQ ID NO: 2670146 - RNA, 11 nt, Human
auggggaggga

SEQ ID NO: 2670147 - RNA, 14 nt, Human
auggggguuucacc

SEQ ID NO: 2670148 - RNA, 17 nt, Human
augcaggcuccccugag

SEQ ID NO: 2670149 - RNA, 16 nt, Human
augcaggcuccccuga

SEQ ID NO: 2670150 - RNA, 15 nt, Human
augcaggcuccccug

SEQ ID NO: 2670151 - RNA, 14 nt, Human
augcagcuuugcaa

SEQ ID NO: 2670152 - RNA, 15 nt, Human
augcagcuuugcaaa

SEQ ID NO: 2670153 - RNA, 13 nt, Human
uuuaauuguuuaa

SEQ ID NO: 2670154 - RNA, 15 nt, Human
uuuaauuguuuaaaa

SEQ ID NO: 2670155 - RNA, 20 nt, Human
uuuaauuguccaguuugucu

SEQ ID NO: 2670156 - RNA, 17 nt, Human
uuuaauuuuuuuuagua

SEQ ID NO: 2670157 - RNA, 18 nt, Human
uuuaauuuuuuuuaguau

SEQ ID NO: 2670158 - RNA, 15 nt, Human
uuuaagugaaaaugg

SEQ ID NO: 2670159 - RNA, 17 nt, Human
uuuaagugaaaaugguc

SEQ ID NO: 2670160 - RNA, 19 nt, Human
augcaguuagcugaagaau

SEQ ID NO: 2670161 - RNA, 20 nt, Human
augcaguuagcugaagaauu

SEQ ID NO: 2670162 - RNA, 22 nt, Human
augcaguuagcugaagaauuga

SEQ ID NO: 2670163 - RNA, 14 nt, Human
augccacccuagcc

SEQ ID NO: 2670164 - RNA, 21 nt, Human
augccauuuuaaggaaaacua

SEQ ID NO: 2670165 - RNA, 18 nt, Human
augccacaucaaaccuuu

SEQ ID NO: 2670166 - RNA, 13 nt, Human
augcccucucagg

SEQ ID NO: 2670167 - RNA, 10 nt, Human
augcccucuc

SEQ ID NO: 2670168 - RNA, 19 nt, Human
augcgucccaagauguuga

SEQ ID NO: 2670169 - RNA, 13 nt, Human
augcgucccaaga

SEQ ID NO: 2670170 - RNA, 17 nt, Human
augauacaaugaacacu

SEQ ID NO: 2670171 - RNA, 13 nt, Human
augauacaaugaa

SEQ ID NO: 2670172 - RNA, 14 nt, Human
uuguucuuucagaa

SEQ ID NO: 2670173 - RNA, 15 nt, Human
uuguucuuucagaaa

SEQ ID NO: 2670174 - RNA, 15 nt, Human
uuguucauagcccag

SEQ ID NO: 2670175 - RNA, 16 nt, Human
uuguucaucauccaga

SEQ ID NO: 2670176 - RNA, 17 nt, Human
uuguucaucauccagau

SEQ ID NO: 2670177 - RNA, 17 nt, Human
uuguuuucugacuaauu

SEQ ID NO: 2670178 - RNA, 16 nt, Human
uuguuuucugacuaau

SEQ ID NO: 2670179 - RNA, 18 nt, Human
uuguuuucugacuaauua

SEQ ID NO: 2670180 - RNA, 15 nt, Human
uuguuuucugacuaa

SEQ ID NO: 2670181 - RNA, 13 nt, Human
uuuaaaaauagaa

SEQ ID NO: 2670182 - RNA, 16 nt, Human
uuuaaaaauagaaaca

SEQ ID NO: 2670183 - RNA, 17 nt, Human
uuuaaaaauagaaacau

SEQ ID NO: 2670184 - RNA, 17 nt, Human
uuguuuuggauggcuug

SEQ ID NO: 2670185 - RNA, 12 nt, Human
uuuaaaaauugu

SEQ ID NO: 2670186 - RNA, 15 nt, Human
uuuaaaaauuguuau

SEQ ID NO: 2670187 - RNA, 11 nt, Human
uuuaaaaauau

SEQ ID NO: 2670188 - RNA, 15 nt, Human
uuuaaaguauuuucu

SEQ ID NO: 2670189 - RNA, 14 nt, Human
uuuaaagugcaaaa

SEQ ID NO: 2670190 - RNA, 23 nt, Human
uuuaaagguggauuuuguuuaaa

SEQ ID NO: 2670191 - RNA, 18 nt, Human
uuuaaagaauaugacuuu

SEQ ID NO: 2670192 - RNA, 17 nt, Human
uuuaaagacccuccuau

SEQ ID NO: 2670193 - RNA, 19 nt, Human
augauugaauuauauguuc

SEQ ID NO: 2670194 - RNA, 14 nt, Human
augcaagcagagga

SEQ ID NO: 2670195 - RNA, 17 nt, Human
augcaagcagaggacca

SEQ ID NO: 2670196 - RNA, 21 nt, Human
augcaagcagaggaccagggc

SEQ ID NO: 2670197 - RNA, 22 nt, Human
augcaagcagaggaccagggcc

SEQ ID NO: 2670198 - RNA, 23 nt, Human
augcaagcagaggaccagggccu

SEQ ID NO: 2670199 - RNA, 16 nt, Human
augcaaccaagucaca

SEQ ID NO: 2670200 - RNA, 17 nt, Human
augcaaccaagucacac

SEQ ID NO: 2670201 - RNA, 18 nt, Human
augcaaccaagucacacg

SEQ ID NO: 2670202 - RNA, 21 nt, Human
augcaaccaagucacacgcuu

SEQ ID NO: 2670203 - RNA, 14 nt, Human
auggccccagcaca

SEQ ID NO: 2670204 - RNA, 15 nt, Human
auggccccagcacag

SEQ ID NO: 2670205 - RNA, 17 nt, Human
auggccccagcacagcu

SEQ ID NO: 2670206 - RNA, 18 nt, Human
auggccccagcacagcuu

SEQ ID NO: 2670207 - RNA, 20 nt, Human
auggccccagcacagcuuga

SEQ ID NO: 2670208 - RNA, 17 nt, Human
auggcaucccuuuuuca

SEQ ID NO: 2670209 - RNA, 21 nt, Human
auggcaucccuuuuucauaaa

SEQ ID NO: 2670210 - RNA, 22 nt, Human
auggcaucccuuuuucauaaau

SEQ ID NO: 2670211 - RNA, 19 nt, Human
auggcagccuacucuccuu

SEQ ID NO: 2670212 - RNA, 15 nt, Human
auggacacuccaggg

SEQ ID NO: 2670213 - RNA, 13 nt, Human
auggcccugggcg

SEQ ID NO: 2670214 - RNA, 13 nt, Human
auggcucagggug

SEQ ID NO: 2670215 - RNA, 14 nt, Human
auggcucagggugg

SEQ ID NO: 2670216 - RNA, 20 nt, Human
augggagggggcuugaagcc

SEQ ID NO: 2670217 - RNA, 16 nt, Human
uuucauuaaauccuuu

SEQ ID NO: 2670218 - RNA, 12 nt, Human
uuucaaaguuuu

SEQ ID NO: 2670219 - RNA, 20 nt, Human
uuucaaaguuuuguuguacu

SEQ ID NO: 2670220 - RNA, 21 nt, Human
uuucaaaguuuuguuguacuu

SEQ ID NO: 2670221 - RNA, 14 nt, Human
auggagaagcugca

SEQ ID NO: 2670222 - RNA, 15 nt, Human
auggagaagcugcag

SEQ ID NO: 2670223 - RNA, 16 nt, Human
auggagaagcugcagg

SEQ ID NO: 2670224 - RNA, 17 nt, Human
auggaauuuugcaaaga

SEQ ID NO: 2670225 - RNA, 17 nt, Human
auggaauuuuuuuguac

SEQ ID NO: 2670226 - RNA, 16 nt, Human
auggaauuuuuuugua

SEQ ID NO: 2670227 - RNA, 15 nt, Human
auggaauuuuuuugu

SEQ ID NO: 2670228 - RNA, 19 nt, Human
auggaauuuugcaaagauu

SEQ ID NO: 2670229 - RNA, 18 nt, Human
auggaauuuuuuuguacg

SEQ ID NO: 2670230 - RNA, 18 nt, Human
uuucaaaggaacauugug

SEQ ID NO: 2670231 - RNA, 22 nt, Human
auggacuaucugucugguggcc

SEQ ID NO: 2670232 - RNA, 20 nt, Human
auggacuaucugucuggugg

SEQ ID NO: 2670233 - RNA, 21 nt, Human
auggacuaucugucugguggc

SEQ ID NO: 2670234 - RNA, 13 nt, Human
auggacuaucugu

SEQ ID NO: 2670235 - RNA, 17 nt, Human
auggacuaucugucugg

SEQ ID NO: 2670236 - RNA, 19 nt, Human
uuucaaacaaucaaguuga

SEQ ID NO: 2670237 - RNA, 22 nt, Human
uuucaaacaaucaaguugacuc

SEQ ID NO: 2670238 - RNA, 20 nt, Human
uuucaaaagguauuauacau

SEQ ID NO: 2670239 - RNA, 21 nt, Human
uuucaaaagguauuauacaug

SEQ ID NO: 2670240 - RNA, 17 nt, Human
uuucaaaauccaaaaag

SEQ ID NO: 2670241 - RNA, 18 nt, Human
uuucaaaauccaaaaaga

SEQ ID NO: 2670242 - RNA, 19 nt, Human
uuucaaaauccaaaaagaa

SEQ ID NO: 2670243 - RNA, 21 nt, Human
uuucaaaauccaaaaagaaau

SEQ ID NO: 2670244 - RNA, 13 nt, Human
uuucaaaagaaag

SEQ ID NO: 2670245 - RNA, 23 nt, Human
augcuguguauaugguauauaua

SEQ ID NO: 2670246 - RNA, 13 nt, Human
augcuuccuugcc

SEQ ID NO: 2670247 - RNA, 16 nt, Human
augcuuccuugccuga

SEQ ID NO: 2670248 - RNA, 21 nt, Human
augcuuccuugccugaugaca

SEQ ID NO: 2670249 - RNA, 16 nt, Human
augcuucuagaguuuu

SEQ ID NO: 2670250 - RNA, 13 nt, Human
augcuucucacug

SEQ ID NO: 2670251 - RNA, 12 nt, Human
augcuccccaca

SEQ ID NO: 2670252 - RNA, 13 nt, Human
augcuccccacag

SEQ ID NO: 2670253 - RNA, 14 nt, Human
augcuccccacagc

SEQ ID NO: 2670254 - RNA, 21 nt, Human
augcuccccacagcgucccug

SEQ ID NO: 2670255 - RNA, 22 nt, Human
augcuccccacagcgucccugg

SEQ ID NO: 2670256 - RNA, 23 nt, Human
augcuccccacagcgucccuggc

SEQ ID NO: 2670257 - RNA, 17 nt, Human
augcugugcuaugaauu

SEQ ID NO: 2670258 - RNA, 18 nt, Human
augcugugcuaugaauuu

SEQ ID NO: 2670259 - RNA, 21 nt, Human
uuuauuaaucacuguguauau

SEQ ID NO: 2670260 - RNA, 19 nt, Human
uuuauuaaucacuguguau

SEQ ID NO: 2670261 - RNA, 13 nt, Human
uuuauuaaucacu

SEQ ID NO: 2670262 - RNA, 15 nt, Human
uuuauuaaucacugu

SEQ ID NO: 2670263 - RNA, 17 nt, Human
uuuauuaaugcacuuuc

SEQ ID NO: 2670264 - RNA, 12 nt, Human
uuuauuaauguu

SEQ ID NO: 2670265 - RNA, 18 nt, Human
uuuauuaauguuuucaaa

SEQ ID NO: 2670266 - RNA, 12 nt, Human
uuuauuaaugca

SEQ ID NO: 2670267 - RNA, 22 nt, Human
augcuccagcaacacagccugg

SEQ ID NO: 2670268 - RNA, 13 nt, Human
augcucaaagaaa

SEQ ID NO: 2670269 - RNA, 14 nt, Human
augcucaaagaaau

SEQ ID NO: 2670270 - RNA, 21 nt, Human
augcuccagcaacacagccug

SEQ ID NO: 2670271 - RNA, 12 nt, Human
augcuauuucug

SEQ ID NO: 2670272 - RNA, 13 nt, Human
augcuauuugaac

SEQ ID NO: 2670273 - RNA, 15 nt, Human
augcuauuugaacaa

SEQ ID NO: 2670274 - RNA, 13 nt, Human
uuuaucaagaagu

SEQ ID NO: 2670275 - RNA, 17 nt, Human
uuuaucauucaagugua

SEQ ID NO: 2670276 - RNA, 14 nt, Human
uuuaucauucaagu

SEQ ID NO: 2670277 - RNA, 15 nt, Human
uuuaucauucaagug

SEQ ID NO: 2670278 - RNA, 15 nt, Human
augcuaacaaagaca

SEQ ID NO: 2670279 - RNA, 23 nt, Human
augcuaacaaagacaaaagucug

SEQ ID NO: 2670280 - RNA, 21 nt, Human
uuuauauguauguguuuagaa

SEQ ID NO: 2670281 - RNA, 20 nt, Human
uuuauauguauguguuuaga

SEQ ID NO: 2670282 - RNA, 18 nt, Human
uuuauauuacugacauuu

SEQ ID NO: 2670283 - RNA, 21 nt, Human
uuuauauuuauugacucuuga

SEQ ID NO: 2670284 - RNA, 13 nt, Human
uuuauauuuccuu

SEQ ID NO: 2670285 - RNA, 14 nt, Human
uuuauauuuccuuu

SEQ ID NO: 2670286 - RNA, 15 nt, Human
uuuauauuuccuuua

SEQ ID NO: 2670287 - RNA, 17 nt, Human
uuuauauuuccuuuaug

SEQ ID NO: 2670288 - RNA, 18 nt, Human
uuuauauuuccuuuaugu

SEQ ID NO: 2670289 - RNA, 19 nt, Human
uuuauauuuccuuuaugug

SEQ ID NO: 2670290 - RNA, 20 nt, Human
uuuauauuuccuuuauguga

SEQ ID NO: 2670291 - RNA, 21 nt, Human
uuuauauuuccuuuaugugaa

SEQ ID NO: 2670292 - RNA, 22 nt, Human
uuuauauuuccuuuaugugaau

SEQ ID NO: 2670293 - RNA, 13 nt, Human
auuggaccaggcc

SEQ ID NO: 2670294 - RNA, 15 nt, Human
auuggaccaggccau

SEQ ID NO: 2670295 - RNA, 13 nt, Human
auugauuccuuuu

SEQ ID NO: 2670296 - RNA, 22 nt, Human
auugauuccuuuuuucaaaauc

SEQ ID NO: 2670297 - RNA, 13 nt, Human
auugauugggaaa

SEQ ID NO: 2670298 - RNA, 14 nt, Human
auugauugggaaaa

SEQ ID NO: 2670299 - RNA, 18 nt, Human
auugauugggaaaacauu

SEQ ID NO: 2670300 - RNA, 19 nt, Human
auugauugggaaaacauuu

SEQ ID NO: 2670301 - RNA, 20 nt, Human
auugauugggaaaacauuug

SEQ ID NO: 2670302 - RNA, 21 nt, Human
auugauugggaaaacauuugc

SEQ ID NO: 2670303 - RNA, 22 nt, Human
auugauugggaaaacauuugcu

SEQ ID NO: 2670304 - RNA, 23 nt, Human
auugauugggaaaacauuugcug

SEQ ID NO: 2670305 - RNA, 21 nt, Human
auugauuuaagcuuuccuguu

SEQ ID NO: 2670306 - RNA, 21 nt, Human
auugcuuuguauuguauauua

SEQ ID NO: 2670307 - RNA, 21 nt, Human
auugguaaaacucacugugau

SEQ ID NO: 2670308 - RNA, 18 nt, Human
auugguuuuaugaugacg

SEQ ID NO: 2670309 - RNA, 17 nt, Human
auugguuuuaugaugac

SEQ ID NO: 2670310 - RNA, 15 nt, Human
auugguuuuaugaug

SEQ ID NO: 2670311 - RNA, 14 nt, Human
auugguuuuaugau

SEQ ID NO: 2670312 - RNA, 15 nt, Human
auugggaaaacauuu

SEQ ID NO: 2670313 - RNA, 13 nt, Human
auuggcaaaacua

SEQ ID NO: 2670314 - RNA, 22 nt, Human
auugucguauaggcauguaaac

SEQ ID NO: 2670315 - RNA, 14 nt, Human
auuguccuauuagu

SEQ ID NO: 2670316 - RNA, 23 nt, Human
auuguccuauuaguguuauauga

SEQ ID NO: 2670317 - RNA, 21 nt, Human
auuguccuauuaguguuauau

SEQ ID NO: 2670318 - RNA, 20 nt, Human
auuguccuauuaguguuaua

SEQ ID NO: 2670319 - RNA, 18 nt, Human
auuguccuauuaguguua

SEQ ID NO: 2670320 - RNA, 15 nt, Human
auugucucccuucca

SEQ ID NO: 2670321 - RNA, 16 nt, Human
auugucucccuuccag

SEQ ID NO: 2670322 - RNA, 18 nt, Human
auugucuccuauauauuu

SEQ ID NO: 2670323 - RNA, 18 nt, Human
auuguggcuauccugauu

SEQ ID NO: 2670324 - RNA, 15 nt, Human
auugguuuuccugug

SEQ ID NO: 2670325 - RNA, 22 nt, Human
auuguaaaaaagguuuucuaua

SEQ ID NO: 2670326 - RNA, 19 nt, Human
auuguacauagcauguuua

SEQ ID NO: 2670327 - RNA, 13 nt, Human
auugucacuuuuu

SEQ ID NO: 2670328 - RNA, 17 nt, Human
auuguuugguaaauguu

SEQ ID NO: 2670329 - RNA, 18 nt, Human
auuguuugguaaauguuu

SEQ ID NO: 2670330 - RNA, 19 nt, Human
auuguuugguaaauguuuc

SEQ ID NO: 2670331 - RNA, 14 nt, Human
auuguuuuacaaua

SEQ ID NO: 2670332 - RNA, 13 nt, Human
auuguuuuacaau

SEQ ID NO: 2670333 - RNA, 18 nt, Human
auuguuuuacaauaguuc

SEQ ID NO: 2670334 - RNA, 17 nt, Human
auuguuuuacaauaguu

SEQ ID NO: 2670335 - RNA, 15 nt, Human
auuguuuuacaauag

SEQ ID NO: 2670336 - RNA, 19 nt, Human
auuuaaagaaaaaaauguc

SEQ ID NO: 2670337 - RNA, 18 nt, Human
auuuaaagaaaaaaaugu

SEQ ID NO: 2670338 - RNA, 23 nt, Human
auuucauuuuucaauagcacaua

SEQ ID NO: 2670339 - RNA, 20 nt, Human
auuuauuuccacuaaaaaua

SEQ ID NO: 2670340 - RNA, 21 nt, Human
auuuauuuccacuaaaaauau

SEQ ID NO: 2670341 - RNA, 22 nt, Human
auuuauuuccacuaaaaauauu

SEQ ID NO: 2670342 - RNA, 12 nt, Human
auuuauuuaaua

SEQ ID NO: 2670343 - RNA, 21 nt, Human
auuuccacuaaaaauauuguu

SEQ ID NO: 2670344 - RNA, 14 nt, Human
auuucuauaaauag

SEQ ID NO: 2670345 - RNA, 21 nt, Human
auuucuauaaauagaugcugu

SEQ ID NO: 2670346 - RNA, 14 nt, Human
auuugaaagugccu

SEQ ID NO: 2670347 - RNA, 13 nt, Human
auuugaaagugcc

SEQ ID NO: 2670348 - RNA, 17 nt, Human
auuugucaaugacaguu

SEQ ID NO: 2670349 - RNA, 14 nt, Human
auuugucaaugaca

SEQ ID NO: 2670350 - RNA, 15 nt, Human
auuuggcgugacccg

SEQ ID NO: 2670351 - RNA, 12 nt, Human
auuugacuaauu

SEQ ID NO: 2670352 - RNA, 13 nt, Human
auuugacuaauuu

SEQ ID NO: 2670353 - RNA, 14 nt, Human
auuugacuaauuuu

SEQ ID NO: 2670354 - RNA, 15 nt, Human
auuugacuaauuuua

SEQ ID NO: 2670355 - RNA, 17 nt, Human
auuugacuaauuuuaca

SEQ ID NO: 2670356 - RNA, 13 nt, Human
auuuguaaauuua

SEQ ID NO: 2670357 - RNA, 14 nt, Human
auuuguaaauuuag

SEQ ID NO: 2670358 - RNA, 16 nt, Human
auuuguaaauuuagug

SEQ ID NO: 2670359 - RNA, 17 nt, Human
auuuguaaauuuagugu

SEQ ID NO: 2670360 - RNA, 20 nt, Human
auuuguaaauuuaguguuuu

SEQ ID NO: 2670361 - RNA, 18 nt, Human
auuuuaaaacaauaggau

SEQ ID NO: 2670362 - RNA, 13 nt, Human
auuuuaaaacaau

SEQ ID NO: 2670363 - RNA, 17 nt, Human
auuuuaaccugcauaaa

SEQ ID NO: 2670364 - RNA, 18 nt, Human
auuuuaacuuaacugaaa

SEQ ID NO: 2670365 - RNA, 19 nt, Human
auuuuaacuuaacugaaau

SEQ ID NO: 2670366 - RNA, 20 nt, Human
auuuuaacuuaacugaaaug

SEQ ID NO: 2670367 - RNA, 22 nt, Human
auuuuaaaaucugagggaaaug

SEQ ID NO: 2670368 - RNA, 23 nt, Human
auuuuaaaaucugagggaaaugu

SEQ ID NO: 2670369 - RNA, 20 nt, Human
auuugucucugucacccuug

SEQ ID NO: 2670370 - RNA, 14 nt, Human
auuugucuuuuugu

SEQ ID NO: 2670371 - RNA, 21 nt, Human
auuugucuuuuuguuguaaaa

SEQ ID NO: 2670372 - RNA, 22 nt, Human
auuugucuuuuuguuguaaaac

SEQ ID NO: 2670373 - RNA, 23 nt, Human
auuugucuuuuuguuguaaaaca

SEQ ID NO: 2670374 - RNA, 17 nt, Human
auuuuguuuaaaaaauc

SEQ ID NO: 2670375 - RNA, 15 nt, Human
auuuuguauguuaaa

SEQ ID NO: 2670376 - RNA, 19 nt, Human
auuuugucauaucaaauaa

SEQ ID NO: 2670377 - RNA, 12 nt, Human
auuuuguguaaa

SEQ ID NO: 2670378 - RNA, 13 nt, Human
auuuuguguaaaa

SEQ ID NO: 2670379 - RNA, 14 nt, Human
auuuuguguaaaaa

SEQ ID NO: 2670380 - RNA, 20 nt, Human
auuuuguguaaaaaaaccac

SEQ ID NO: 2670381 - RNA, 19 nt, Human
auuuugcuaucaacaauaa

SEQ ID NO: 2670382 - RNA, 12 nt, Human
auuuuguaagaa

SEQ ID NO: 2670383 - RNA, 16 nt, Human
auuuuguaagaaggca

SEQ ID NO: 2670384 - RNA, 17 nt, Human
auuuuguaagaaggcaa

SEQ ID NO: 2670385 - RNA, 21 nt, Human
auuuuguaagaaggcaauauu

SEQ ID NO: 2670386 - RNA, 20 nt, Human
auuuuguacaaauuuguuau

SEQ ID NO: 2670387 - RNA, 10 nt, Human
auuuuguaug

SEQ ID NO: 2670388 - RNA, 21 nt, Human
auuuuccauuuuuauuucaaa

SEQ ID NO: 2670389 - RNA, 19 nt, Human
auuuucccuauuagagaag

SEQ ID NO: 2670390 - RNA, 16 nt, Human
auuuuccugccaggca

SEQ ID NO: 2670391 - RNA, 13 nt, Human
auuuugcaaagau

SEQ ID NO: 2670392 - RNA, 16 nt, Human
auuuugcaaagauuua

SEQ ID NO: 2670393 - RNA, 21 nt, Human
auuuugcaaagauuuaaucug

SEQ ID NO: 2670394 - RNA, 20 nt, Human
auuuugcuaaaugugaauga

SEQ ID NO: 2670395 - RNA, 13 nt, Human
auuuuuguaaaug

SEQ ID NO: 2670396 - RNA, 19 nt, Human
auuuuuguaaauguguaca

SEQ ID NO: 2670397 - RNA, 13 nt, Human
auuuuuguaaagu

SEQ ID NO: 2670398 - RNA, 14 nt, Human
auuuuuguaaaguu

SEQ ID NO: 2670399 - RNA, 15 nt, Human
auuuuuguaaaguuu

SEQ ID NO: 2670400 - RNA, 17 nt, Human
auuuuuguaaaguuucc

SEQ ID NO: 2670401 - RNA, 18 nt, Human
auuuuuguaaaguuuccg

SEQ ID NO: 2670402 - RNA, 10 nt, Human
auuuuucucu

SEQ ID NO: 2670403 - RNA, 23 nt, Human
auuuuugauacaguuuucagaaa

SEQ ID NO: 2670404 - RNA, 19 nt, Human
auuuuugcaauaccaagua

SEQ ID NO: 2670405 - RNA, 20 nt, Human
auuuuucaauagcacauaug

SEQ ID NO: 2670406 - RNA, 14 nt, Human
auuuuucaauauau

SEQ ID NO: 2670407 - RNA, 17 nt, Human
auuuuucaauauauuga

SEQ ID NO: 2670408 - RNA, 18 nt, Human
auuuuucaauauauugaa

SEQ ID NO: 2670409 - RNA, 20 nt, Human
auuuuucaauauauugaacu

SEQ ID NO: 2670410 - RNA, 22 nt, Human
auuuuucaauauauugaacuuu

SEQ ID NO: 2670411 - RNA, 22 nt, Human
auuuuucacucuaagucaugua

SEQ ID NO: 2670412 - RNA, 15 nt, Human
auuuuucauaaacaa

SEQ ID NO: 2670413 - RNA, 12 nt, Human
auuuuucucuuc

SEQ ID NO: 2670414 - RNA, 21 nt, Human
auuuuguuuuugucuuaaaaa

SEQ ID NO: 2670415 - RNA, 22 nt, Human
auuuuucaauagcacauaugga

SEQ ID NO: 2670416 - RNA, 12 nt, Human
auuuuuguuguu

SEQ ID NO: 2670417 - RNA, 12 nt, Human
auuuuuuaagcu

SEQ ID NO: 2670418 - RNA, 21 nt, Human
auuuuuuaagcuucaguugcu

SEQ ID NO: 2670419 - RNA, 16 nt, Human
auuuuuugaaaagcag

SEQ ID NO: 2670420 - RNA, 19 nt, Human
auuuuuugaaaagcagaca

SEQ ID NO: 2670421 - RNA, 12 nt, Human
auuuuuugacuu

SEQ ID NO: 2670422 - RNA, 23 nt, Human
auuuuuugacuuuuuuuguaugu

SEQ ID NO: 2670423 - RNA, 15 nt, Human
auuuuuuuaaaauuu

SEQ ID NO: 2670424 - RNA, 17 nt, Human
auuuuuuuaaaauuuug

SEQ ID NO: 2670425 - RNA, 13 nt, Human
auuuuuuaauugu

SEQ ID NO: 2670426 - RNA, 14 nt, Human
auuuuuuaauuguu

SEQ ID NO: 2670427 - RNA, 11 nt, Human
auuuuuuccuu

SEQ ID NO: 2670428 - RNA, 22 nt, Human
auugaagcucgugacaagugcc

SEQ ID NO: 2670429 - RNA, 19 nt, Human
auugacaaccgagaagguu

SEQ ID NO: 2670430 - RNA, 10 nt, Human
auugaagaau

SEQ ID NO: 2670431 - RNA, 16 nt, Human
auugaagaauguuaga

SEQ ID NO: 2670432 - RNA, 14 nt, Human
auugaacuuuugua

SEQ ID NO: 2670433 - RNA, 16 nt, Human
auugaacuuuuguacu

SEQ ID NO: 2670434 - RNA, 17 nt, Human
auugaacuuuuguacug

SEQ ID NO: 2670435 - RNA, 18 nt, Human
auugaacuuuuguacuga

SEQ ID NO: 2670436 - RNA, 19 nt, Human
auugaacuuuuguacugaa

SEQ ID NO: 2670437 - RNA, 20 nt, Human
auugaacuuuuguacugaau

SEQ ID NO: 2670438 - RNA, 23 nt, Human
auugaacuuuuguacugaauuuu

SEQ ID NO: 2670439 - RNA, 12 nt, Human
auugacacugaa

SEQ ID NO: 2670440 - RNA, 14 nt, Human
auugacacugaacu

SEQ ID NO: 2670441 - RNA, 15 nt, Human
auugacacugaacuu

SEQ ID NO: 2670442 - RNA, 16 nt, Human
auugacacugaacuua

SEQ ID NO: 2670443 - RNA, 18 nt, Human
auugacacugaacuuaau

SEQ ID NO: 2670444 - RNA, 19 nt, Human
auugacuaacucaaauaca

SEQ ID NO: 2670445 - RNA, 23 nt, Human
auugacuaacucaaauacacauu

SEQ ID NO: 2670446 - RNA, 15 nt, Human
auugacuuuuauaaa

SEQ ID NO: 2670447 - RNA, 18 nt, Human
auugacuuuuauaaagca

SEQ ID NO: 2670448 - RNA, 22 nt, Human
auugacucuugaguuguuuuug

SEQ ID NO: 2670449 - RNA, 19 nt, Human
auugacucuugaguuguuu

SEQ ID NO: 2670450 - RNA, 16 nt, Human
auugacucuugaguug

SEQ ID NO: 2670451 - RNA, 14 nt, Human
auugacucuggguc

SEQ ID NO: 2670452 - RNA, 13 nt, Human
auugacucugggu

SEQ ID NO: 2670453 - RNA, 15 nt, Human
auugacucuugaguu

SEQ ID NO: 2670454 - RNA, 14 nt, Human
auugacucuugagu

SEQ ID NO: 2670455 - RNA, 13 nt, Human
auugacucuugag

SEQ ID NO: 2670456 - RNA, 23 nt, Human
auugacucuggguccuuccugaa

SEQ ID NO: 2670457 - RNA, 22 nt, Human
auugacucuggguccuuccuga

SEQ ID NO: 2670458 - RNA, 20 nt, Human
auugacucuggguccuuccu

SEQ ID NO: 2670459 - RNA, 16 nt, Human
auugacucuggguccu

SEQ ID NO: 2670460 - RNA, 15 nt, Human
auugacucugggucc

SEQ ID NO: 2670461 - RNA, 22 nt, Human
auucuuuuuuauuaaucacugu

SEQ ID NO: 2670462 - RNA, 14 nt, Human
auucuuuuuuauua

SEQ ID NO: 2670463 - RNA, 16 nt, Human
auucuuuuuuauuaau

SEQ ID NO: 2670464 - RNA, 15 nt, Human
auucuuuuuuauuaa

SEQ ID NO: 2670465 - RNA, 21 nt, Human
auucuuuuuuauuaaucacug

SEQ ID NO: 2670466 - RNA, 20 nt, Human
auucuuuuuuauuaaucacu

SEQ ID NO: 2670467 - RNA, 19 nt, Human
auucuuuuuuauuaaucac

SEQ ID NO: 2670468 - RNA, 17 nt, Human
auucuuuuuuauuaauc

SEQ ID NO: 2670469 - RNA, 22 nt, Human
auucugccgcccccuccugaac

SEQ ID NO: 2670470 - RNA, 20 nt, Human
auucugccgcccccuccuga

SEQ ID NO: 2670471 - RNA, 21 nt, Human
auucugccgcccccuccugaa

SEQ ID NO: 2670472 - RNA, 23 nt, Human
auucugguuccagggucccucug

SEQ ID NO: 2670473 - RNA, 18 nt, Human
auuauauguucagauuau

SEQ ID NO: 2670474 - RNA, 13 nt, Human
auuauacaggaaa

SEQ ID NO: 2670475 - RNA, 15 nt, Human
auuauacaugugaua

SEQ ID NO: 2670476 - RNA, 20 nt, Human
auuauacaugugauacauuu

SEQ ID NO: 2670477 - RNA, 21 nt, Human
auuauacaugugauacauuuu

SEQ ID NO: 2670478 - RNA, 22 nt, Human
auuauacaugugauacauuuuu

SEQ ID NO: 2670479 - RNA, 17 nt, Human
auuaguuuagaacaggu

SEQ ID NO: 2670480 - RNA, 15 nt, Human
auuaguuuagaacag

SEQ ID NO: 2670481 - RNA, 21 nt, Human
auuaguuuagaacagguuuuu

SEQ ID NO: 2670482 - RNA, 13 nt, Human
auuaguuuagaac

SEQ ID NO: 2670483 - RNA, 12 nt, Human
auuaguuuagaa

SEQ ID NO: 2670484 - RNA, 15 nt, Human
auuaguguuauauga

SEQ ID NO: 2670485 - RNA, 17 nt, Human
auuaguguuauaugaac

SEQ ID NO: 2670486 - RNA, 16 nt, Human
auuaguguuauaugaa

SEQ ID NO: 2670487 - RNA, 21 nt, Human
auuaguguuauaugaacauac

SEQ ID NO: 2670488 - RNA, 19 nt, Human
auuaguguuauaugaacau

SEQ ID NO: 2670489 - RNA, 15 nt, Human
auuauuuauuuauuu

SEQ ID NO: 2670490 - RNA, 15 nt, Human
auuauuugauuauuu

SEQ ID NO: 2670491 - RNA, 16 nt, Human
auuauuugauuauuua

SEQ ID NO: 2670492 - RNA, 18 nt, Human
auuauuugauuauuuaag

SEQ ID NO: 2670493 - RNA, 19 nt, Human
auuauuugauuauuuaaga

SEQ ID NO: 2670494 - RNA, 21 nt, Human
auuauuugauuauuuaagacu

SEQ ID NO: 2670495 - RNA, 22 nt, Human
auuauuugauuauuuaagacua

SEQ ID NO: 2670496 - RNA, 11 nt, Human
auuauuugcau

SEQ ID NO: 2670497 - RNA, 12 nt, Human
auuauuugcaug

SEQ ID NO: 2670498 - RNA, 13 nt, Human
auuauuugcaugu

SEQ ID NO: 2670499 - RNA, 14 nt, Human
auuauuugcauguu

SEQ ID NO: 2670500 - RNA, 15 nt, Human
auuauuugcauguua

SEQ ID NO: 2670501 - RNA, 17 nt, Human
auuauuugcauguuaug

SEQ ID NO: 2670502 - RNA, 19 nt, Human
auuauuugcauguuauguu

SEQ ID NO: 2670503 - RNA, 20 nt, Human
auuauuugcauguuauguuu

SEQ ID NO: 2670504 - RNA, 21 nt, Human
auuauuugcauguuauguuua

SEQ ID NO: 2670505 - RNA, 20 nt, Human
auuaucaaagggauaaagaa

SEQ ID NO: 2670506 - RNA, 22 nt, Human
auuaucaaagggauaaagaaaa

SEQ ID NO: 2670507 - RNA, 22 nt, Human
auuauuagccagguaaugugaa

SEQ ID NO: 2670508 - RNA, 22 nt, Human
auuauuaucaggggagaaaaau

SEQ ID NO: 2670509 - RNA, 20 nt, Human
auucuaauaagcuaguugaa

SEQ ID NO: 2670510 - RNA, 19 nt, Human
auucuaauaagcuaguuga

SEQ ID NO: 2670511 - RNA, 16 nt, Human
auucuaauaagcuagu

SEQ ID NO: 2670512 - RNA, 14 nt, Human
auucuaauaagcua

SEQ ID NO: 2670513 - RNA, 13 nt, Human
auuccagccccuc

SEQ ID NO: 2670514 - RNA, 14 nt, Human
auuccagccccucu

SEQ ID NO: 2670515 - RNA, 16 nt, Human
auuccagaucuuucag

SEQ ID NO: 2670516 - RNA, 19 nt, Human
auuccagaucuuucagaaa

SEQ ID NO: 2670517 - RNA, 20 nt, Human
auuccagaucuuucagaaau

SEQ ID NO: 2670518 - RNA, 21 nt, Human
auuccagaucuuucagaaaua

SEQ ID NO: 2670519 - RNA, 13 nt, Human
auucagaaauguu

SEQ ID NO: 2670520 - RNA, 18 nt, Human
auucacauuguuaagaaa

SEQ ID NO: 2670521 - RNA, 16 nt, Human
auucuaguuuugucaa

SEQ ID NO: 2670522 - RNA, 24 nt, Human
cagcugucccuugcuugccugcag

SEQ ID NO: 2670523 - RNA, 18 nt, Human
cagcugcaauucccugga

SEQ ID NO: 2670524 - RNA, 15 nt, Human
cagcugcccuuccgc

SEQ ID NO: 2670525 - RNA, 21 nt, Human
cagcugcccuuccgcagugug

SEQ ID NO: 2670526 - RNA, 20 nt, Human
cagcuccagggaauccaagc

SEQ ID NO: 2670527 - RNA, 21 nt, Human
cagcuccagggaauccaagcc

SEQ ID NO: 2670528 - RNA, 22 nt, Human
cagcuccagggaauccaagccu

SEQ ID NO: 2670529 - RNA, 17 nt, Human
cagccucugucaggccu

SEQ ID NO: 2670530 - RNA, 18 nt, Human
cagccucugucaggccuu

SEQ ID NO: 2670531 - RNA, 20 nt, Human
cagccucugucaggccuuca

SEQ ID NO: 2670532 - RNA, 21 nt, Human
cagcgggggaggcccgcagag

SEQ ID NO: 2670533 - RNA, 21 nt, Human
cagcgucagcugcucccuggc

SEQ ID NO: 2670534 - RNA, 13 nt, Human
cagcgucccuggc

SEQ ID NO: 2670535 - RNA, 14 nt, Human
cagcgucccuggcg

SEQ ID NO: 2670536 - RNA, 15 nt, Human
cagcgucccuggcgc

SEQ ID NO: 2670537 - RNA, 15 nt, Human
cagcaucaccugccu

SEQ ID NO: 2670538 - RNA, 14 nt, Human
cagcaucaccugcc

SEQ ID NO: 2670539 - RNA, 17 nt, Human
cagcaccucagccugca

SEQ ID NO: 2670540 - RNA, 16 nt, Human
cagcaccucagccugc

SEQ ID NO: 2670541 - RNA, 15 nt, Human
cagcaccucagccug

SEQ ID NO: 2670542 - RNA, 18 nt, Human
cagcaggugauuggacca

SEQ ID NO: 2670543 - RNA, 20 nt, Human
cagcaggugauuggaccagg

SEQ ID NO: 2670544 - RNA, 21 nt, Human
cagcaggugauuggaccaggc

SEQ ID NO: 2670545 - RNA, 23 nt, Human
cagcaggugauuggaccaggcca

SEQ ID NO: 2670546 - RNA, 15 nt, Human
cagcaccgaggggcc

SEQ ID NO: 2670547 - RNA, 17 nt, Human
cagcaccgaggggccuu

SEQ ID NO: 2670548 - RNA, 18 nt, Human
cagcaccgaggggccuuu

SEQ ID NO: 2670549 - RNA, 23 nt, Human
cagaaguuugagaucagccuggg

SEQ ID NO: 2670550 - RNA, 22 nt, Human
cagaaguuugagaucagccugg

SEQ ID NO: 2670551 - RNA, 20 nt, Human
cagaaguuugagaucagccu

SEQ ID NO: 2670552 - RNA, 23 nt, Human
cagaaauggugagauguauguuu

SEQ ID NO: 2670553 - RNA, 16 nt, Human
cagagucaaggccugc

SEQ ID NO: 2670554 - RNA, 18 nt, Human
cagagucaaggccugcuc

SEQ ID NO: 2670555 - RNA, 19 nt, Human
cagagucaaggccugcucc

SEQ ID NO: 2670556 - RNA, 13 nt, Human
caggugcagaggu

SEQ ID NO: 2670557 - RNA, 16 nt, Human
caggugcagagguacc

SEQ ID NO: 2670558 - RNA, 23 nt, Human
caggugcagagguacccugggug

SEQ ID NO: 2670559 - RNA, 14 nt, Human
cagguugguggggg

SEQ ID NO: 2670560 - RNA, 14 nt, Human
caggugcgaaagga

SEQ ID NO: 2670561 - RNA, 12 nt, Human
caggugcagagg

SEQ ID NO: 2670562 - RNA, 15 nt, Human
caggguuaagaagac

SEQ ID NO: 2670563 - RNA, 23 nt, Human
caggguucucuuagcaacucaga

SEQ ID NO: 2670564 - RNA, 19 nt, Human
caggguucccgcggggcug

SEQ ID NO: 2670565 - RNA, 21 nt, Human
caggguucccgcggggcuguc

SEQ ID NO: 2670566 - RNA, 13 nt, Human
cagggugggccuc

SEQ ID NO: 2670567 - RNA, 20 nt, Human
cagggugggccucggccccu

SEQ ID NO: 2670568 - RNA, 23 nt, Human
cagggugggccucggccccuccc

SEQ ID NO: 2670569 - RNA, 22 nt, Human
caggguggucucuucuuggggc

SEQ ID NO: 2670570 - RNA, 18 nt, Human
cagguuuaagcuguuacu

SEQ ID NO: 2670571 - RNA, 16 nt, Human
cagguuuaagcuguua

SEQ ID NO: 2670572 - RNA, 13 nt, Human
cagucgugccugu

SEQ ID NO: 2670573 - RNA, 12 nt, Human
cagugcagaaug

SEQ ID NO: 2670574 - RNA, 14 nt, Human
cagugcagaaugua

SEQ ID NO: 2670575 - RNA, 15 nt, Human
cagugcagaauguaa

SEQ ID NO: 2670576 - RNA, 22 nt, Human
cagugcagaauguaagugggcc

SEQ ID NO: 2670577 - RNA, 16 nt, Human
cagugcagagccuucu

SEQ ID NO: 2670578 - RNA, 19 nt, Human
cagugcagagccuucucag

SEQ ID NO: 2670579 - RNA, 20 nt, Human
cagugcagagccuucucaga

SEQ ID NO: 2670580 - RNA, 14 nt, Human
cagugcagauggag

SEQ ID NO: 2670581 - RNA, 14 nt, Human
cagugcaugguggc

SEQ ID NO: 2670582 - RNA, 15 nt, Human
cagugcaugguggcc

SEQ ID NO: 2670583 - RNA, 17 nt, Human
cagugcaugguggccag

SEQ ID NO: 2670584 - RNA, 18 nt, Human
cagugcaugguggccaga

SEQ ID NO: 2670585 - RNA, 20 nt, Human
cagugcaugguggccagagg

SEQ ID NO: 2670586 - RNA, 21 nt, Human
cagugcaugguggccagaggu

SEQ ID NO: 2670587 - RNA, 15 nt, Human
cagggagcugggccc

SEQ ID NO: 2670588 - RNA, 16 nt, Human
cagggagcugggcccg

SEQ ID NO: 2670589 - RNA, 19 nt, Human
cagggagcugggcccgaca

SEQ ID NO: 2670590 - RNA, 22 nt, Human
cagggagcugggcccgacaugg

SEQ ID NO: 2670591 - RNA, 13 nt, Human
cagggaggcagcc

SEQ ID NO: 2670592 - RNA, 14 nt, Human
cagggaggcagccg

SEQ ID NO: 2670593 - RNA, 16 nt, Human
cagggaggcagccgcc

SEQ ID NO: 2670594 - RNA, 21 nt, Human
cagggaggcagccgccccauc

SEQ ID NO: 2670595 - RNA, 23 nt, Human
caggcgcugcccaccugccggcc

SEQ ID NO: 2670596 - RNA, 12 nt, Human
caggccugccuc

SEQ ID NO: 2670597 - RNA, 13 nt, Human
caggccugccucc

SEQ ID NO: 2670598 - RNA, 14 nt, Human
caggccugccuccc

SEQ ID NO: 2670599 - RNA, 15 nt, Human
caggccugccuccca

SEQ ID NO: 2670600 - RNA, 16 nt, Human
caggccugccucccac

SEQ ID NO: 2670601 - RNA, 17 nt, Human
caggccugccucccacu

SEQ ID NO: 2670602 - RNA, 13 nt, Human
caggccuauuuca

SEQ ID NO: 2670603 - RNA, 16 nt, Human
caggccuauuucauca

SEQ ID NO: 2670604 - RNA, 16 nt, Human
caggacccucgccgga

SEQ ID NO: 2670605 - RNA, 13 nt, Human
caggacccucgcc

SEQ ID NO: 2670606 - RNA, 12 nt, Human
caggacccucgc

SEQ ID NO: 2670607 - RNA, 20 nt, Human
caggagguggaggcugcagu

SEQ ID NO: 2670608 - RNA, 14 nt, Human
cauccccuguagag

SEQ ID NO: 2670609 - RNA, 18 nt, Human
caucugccuuaaaaccaa

SEQ ID NO: 2670610 - RNA, 20 nt, Human
caucugccuuaaaaccaaag

SEQ ID NO: 2670611 - RNA, 20 nt, Human
cauacacuuuguugcaagau

SEQ ID NO: 2670612 - RNA, 14 nt, Human
cauaauugaagugu

SEQ ID NO: 2670613 - RNA, 13 nt, Human
cauaauuuaaaaa

SEQ ID NO: 2670614 - RNA, 14 nt, Human
cauaauuuaaaaau

SEQ ID NO: 2670615 - RNA, 15 nt, Human
cauaauuuaaaaaua

SEQ ID NO: 2670616 - RNA, 18 nt, Human
cauaauuuaaaaauauau

SEQ ID NO: 2670617 - RNA, 20 nt, Human
cauaauuuaaaaauauauuu

SEQ ID NO: 2670618 - RNA, 23 nt, Human
caugauuaaccacuucagcugac

SEQ ID NO: 2670619 - RNA, 22 nt, Human
caugauuaaccacuucagcuga

SEQ ID NO: 2670620 - RNA, 24 nt, Human
caugauuaaccacuucagcugacu

SEQ ID NO: 2670621 - RNA, 13 nt, Human
caugcuccuggcc

SEQ ID NO: 2670622 - RNA, 18 nt, Human
caugcucaucugcugguc

SEQ ID NO: 2670623 - RNA, 19 nt, Human
caugcucaucugcuggucc

SEQ ID NO: 2670624 - RNA, 16 nt, Human
caugcucaucugcugg

SEQ ID NO: 2670625 - RNA, 17 nt, Human
caugcucaucugcuggu

SEQ ID NO: 2670626 - RNA, 24 nt, Human
caugaagucuuaaggacaaagugc

SEQ ID NO: 2670627 - RNA, 22 nt, Human
caugaagggacccuuugggggu

SEQ ID NO: 2670628 - RNA, 17 nt, Human
cauggcaucccuuuuuc

SEQ ID NO: 2670629 - RNA, 23 nt, Human
cauggcaucccuuuuucauaaau

SEQ ID NO: 2670630 - RNA, 21 nt, Human
cauggcaugguuuugugccau

SEQ ID NO: 2670631 - RNA, 16 nt, Human
cauuaugagaggcaau

SEQ ID NO: 2670632 - RNA, 17 nt, Human
cauguugaucauguacu

SEQ ID NO: 2670633 - RNA, 20 nt, Human
cauguugaucauguacuuuu

SEQ ID NO: 2670634 - RNA, 21 nt, Human
cauguugaucauguacuuuuu

SEQ ID NO: 2670635 - RNA, 19 nt, Human
cauguccagcaccuugugc

SEQ ID NO: 2670636 - RNA, 20 nt, Human
cauguccagcaccuugugcc

SEQ ID NO: 2670637 - RNA, 21 nt, Human
cauguccagcaccuugugccu

SEQ ID NO: 2670638 - RNA, 22 nt, Human
cauguccagcaccuugugccug

SEQ ID NO: 2670639 - RNA, 23 nt, Human
cauguccagcaccuugugccugg

SEQ ID NO: 2670640 - RNA, 19 nt, Human
cauguccauacacuuuguu

SEQ ID NO: 2670641 - RNA, 22 nt, Human
cauguccauacacuuuguugca

SEQ ID NO: 2670642 - RNA, 23 nt, Human
cauguccauacacuuuguugcaa

SEQ ID NO: 2670643 - RNA, 22 nt, Human
cauuaugagaggcaaugauugu

SEQ ID NO: 2670644 - RNA, 18 nt, Human
cauuccuuuuuauuuaua

SEQ ID NO: 2670645 - RNA, 13 nt, Human
ccaccaccccuac

SEQ ID NO: 2670646 - RNA, 23 nt, Human
ccacagacaaaagcgcuuuuccu

SEQ ID NO: 2670647 - RNA, 18 nt, Human
ccaccaucaccagacagg

SEQ ID NO: 2670648 - RNA, 19 nt, Human
ccaccucaccuagccugau

SEQ ID NO: 2670649 - RNA, 14 nt, Human
ccaccgcgggugug

SEQ ID NO: 2670650 - RNA, 17 nt, Human
ccacgccuguaauccca

SEQ ID NO: 2670651 - RNA, 19 nt, Human
ccacgccucuugaccaggc

SEQ ID NO: 2670652 - RNA, 21 nt, Human
ccacgccucuugaccaggcug

SEQ ID NO: 2670653 - RNA, 18 nt, Human
ccacgccucuugaccagg

SEQ ID NO: 2670654 - RNA, 15 nt, Human
ccacgcgugccgugg

SEQ ID NO: 2670655 - RNA, 20 nt, Human
ccacgcgugccguggcacca

SEQ ID NO: 2670656 - RNA, 23 nt, Human
cauuucagaaguuaguuuguaua

SEQ ID NO: 2670657 - RNA, 14 nt, Human
cauuucaucucauu

SEQ ID NO: 2670658 - RNA, 15 nt, Human
cauuucaucucauuu

SEQ ID NO: 2670659 - RNA, 16 nt, Human
cauuucaucucauuua

SEQ ID NO: 2670660 - RNA, 13 nt, Human
cauuuuuuaagcu

SEQ ID NO: 2670661 - RNA, 19 nt, Human
ccaaucuauugcuucacca

SEQ ID NO: 2670662 - RNA, 14 nt, Human
ccaaucuuacuuug

SEQ ID NO: 2670663 - RNA, 15 nt, Human
ccaaucuuacuuugu

SEQ ID NO: 2670664 - RNA, 17 nt, Human
ccaaucuuacuuuguaa

SEQ ID NO: 2670665 - RNA, 16 nt, Human
ccaaucuuacuuugua

SEQ ID NO: 2670666 - RNA, 21 nt, Human
ccaaucuuacuuuguaaauuc

SEQ ID NO: 2670667 - RNA, 20 nt, Human
ccaaucuuacuuuguaaauu

SEQ ID NO: 2670668 - RNA, 14 nt, Human
ccaagaagcagugg

SEQ ID NO: 2670669 - RNA, 21 nt, Human
ccaagaaagcucacuguagcu

SEQ ID NO: 2670670 - RNA, 17 nt, Human
ccaaccuuucccucacc

SEQ ID NO: 2670671 - RNA, 18 nt, Human
ccaaccuuucccucaccc

SEQ ID NO: 2670672 - RNA, 19 nt, Human
ccaaccuuucccucacccc

SEQ ID NO: 2670673 - RNA, 20 nt, Human
ccaaccuuucccucaccccc

SEQ ID NO: 2670674 - RNA, 23 nt, Human
ccaaccuuucccucacccccucc

SEQ ID NO: 2670675 - RNA, 11 nt, Human
ccaaggauccc

SEQ ID NO: 2670676 - RNA, 18 nt, Human
ccaagaagcaguggccuu

SEQ ID NO: 2670677 - RNA, 12 nt, Human
ccaaauaaauaa

SEQ ID NO: 2670678 - RNA, 19 nt, Human
auuucacuugaugauacaa

SEQ ID NO: 2670679 - RNA, 12 nt, Human
auuucacuugau

SEQ ID NO: 2670680 - RNA, 18 nt, Human
auuucagaaaaugaaaaa

SEQ ID NO: 2670681 - RNA, 19 nt, Human
auuucagaaaaugaaaaau

SEQ ID NO: 2670682 - RNA, 12 nt, Human
auuucagaaguu

SEQ ID NO: 2670683 - RNA, 19 nt, Human
auuucagaaguuaguuugu

SEQ ID NO: 2670684 - RNA, 13 nt, Human
auuuaugggcccc

SEQ ID NO: 2670685 - RNA, 15 nt, Human
auuuaugggccccug

SEQ ID NO: 2670686 - RNA, 16 nt, Human
auuuaugggccccugg

SEQ ID NO: 2670687 - RNA, 18 nt, Human
auuuaugggccccuggca

SEQ ID NO: 2670688 - RNA, 19 nt, Human
auuuaugggccccuggcac

SEQ ID NO: 2670689 - RNA, 20 nt, Human
auuuauauggggaauauauu

SEQ ID NO: 2670690 - RNA, 11 nt, Human
auuuauaugua

SEQ ID NO: 2670691 - RNA, 19 nt, Human
auuuauauggggaauauau

SEQ ID NO: 2670692 - RNA, 13 nt, Human
auuuauauguaug

SEQ ID NO: 2670693 - RNA, 16 nt, Human
auuuauauguaugugu

SEQ ID NO: 2670694 - RNA, 14 nt, Human
auuuauauguaugu

SEQ ID NO: 2670695 - RNA, 13 nt, Human
auuuauauguacu

SEQ ID NO: 2670696 - RNA, 15 nt, Human
auuuauauguacugu

SEQ ID NO: 2670697 - RNA, 16 nt, Human
auuuauauguacuguu

SEQ ID NO: 2670698 - RNA, 17 nt, Human
auuuauauguacuguuu

SEQ ID NO: 2670699 - RNA, 18 nt, Human
auuuauauguauguguuu

SEQ ID NO: 2670700 - RNA, 17 nt, Human
auuuauauguauguguu

SEQ ID NO: 2670701 - RNA, 21 nt, Human
auuuauauguauguguuuaga

SEQ ID NO: 2670702 - RNA, 20 nt, Human
auuuaucugggauuaugguu

SEQ ID NO: 2670703 - RNA, 16 nt, Human
auuuauaaggaaauuu

SEQ ID NO: 2670704 - RNA, 21 nt, Human
auuucagaaguuaguuuguau

SEQ ID NO: 2670705 - RNA, 16 nt, Human
auuucugugcccuccu

SEQ ID NO: 2670706 - RNA, 11 nt, Human
auuucugugcc

SEQ ID NO: 2670707 - RNA, 13 nt, Human
auuucuguauaua

SEQ ID NO: 2670708 - RNA, 19 nt, Human
auuucugggggaggaugua

SEQ ID NO: 2670709 - RNA, 14 nt, Human
auuucuauuauuaa

SEQ ID NO: 2670710 - RNA, 22 nt, Human
auuucuauuauuaauugcaaaa

SEQ ID NO: 2670711 - RNA, 14 nt, Human
auuguuuaaaaacc

SEQ ID NO: 2670712 - RNA, 22 nt, Human
auuguuuaaaaaccgaauaaau

SEQ ID NO: 2670713 - RNA, 15 nt, Human
auuguacaaaauuaa

SEQ ID NO: 2670714 - RNA, 18 nt, Human
auuguacaaaauuaagca

SEQ ID NO: 2670715 - RNA, 21 nt, Human
auuguacaaaauuaagcaaau

SEQ ID NO: 2670716 - RNA, 22 nt, Human
auuguacaaaauuaagcaaaug

SEQ ID NO: 2670717 - RNA, 14 nt, Human
auuguuaauacaag

SEQ ID NO: 2670718 - RNA, 19 nt, Human
auuguuaauacaagguaua

SEQ ID NO: 2670719 - RNA, 23 nt, Human
auuguuaauacaagguauaauaa

SEQ ID NO: 2670720 - RNA, 19 nt, Human
auugcuuauuauguaggua

SEQ ID NO: 2670721 - RNA, 21 nt, Human
auugcuguuguccaacuauuu

SEQ ID NO: 2670722 - RNA, 19 nt, Human
auugcuguuguccaacuau

SEQ ID NO: 2670723 - RNA, 15 nt, Human
auugcuguuguccaa

SEQ ID NO: 2670724 - RNA, 17 nt, Human
auugcugugugucccag

SEQ ID NO: 2670725 - RNA, 18 nt, Human
auugcugugugucccagg

SEQ ID NO: 2670726 - RNA, 19 nt, Human
auugcugugugucccaggc

SEQ ID NO: 2670727 - RNA, 21 nt, Human
auuaggcaaggcuaugugauu

SEQ ID NO: 2670728 - RNA, 20 nt, Human
auuaggcaaggcuaugugau

SEQ ID NO: 2670729 - RNA, 18 nt, Human
auuaaauuaggaauaaau

SEQ ID NO: 2670730 - RNA, 13 nt, Human
auuaaauuaggaa

SEQ ID NO: 2670731 - RNA, 21 nt, Human
auuaguaacauucauguucua

SEQ ID NO: 2670732 - RNA, 22 nt, Human
auuaugccacuuccuuuuaacu

SEQ ID NO: 2670733 - RNA, 22 nt, Human
auucaacagcaagugugaauac

SEQ ID NO: 2670734 - RNA, 21 nt, Human
auucaacagcaagugugaaua

SEQ ID NO: 2670735 - RNA, 18 nt, Human
auucaacagcaaguguga

SEQ ID NO: 2670736 - RNA, 14 nt, Human
auuauggaaaacug

SEQ ID NO: 2670737 - RNA, 15 nt, Human
auuauggaaaacugu

SEQ ID NO: 2670738 - RNA, 21 nt, Human
auuccuguacugugucucaug

SEQ ID NO: 2670739 - RNA, 12 nt, Human
caacaaagaaau

SEQ ID NO: 2670740 - RNA, 15 nt, Human
caacaacaauuggua

SEQ ID NO: 2670741 - RNA, 16 nt, Human
caacaacaauugguaa

SEQ ID NO: 2670742 - RNA, 22 nt, Human
caacaaauauucacuggccccu

SEQ ID NO: 2670743 - RNA, 16 nt, Human
caaaugcucaaagaaa

SEQ ID NO: 2670744 - RNA, 15 nt, Human
caaaugcaucuuuga

SEQ ID NO: 2670745 - RNA, 17 nt, Human
caaaugcaucuuugaug

SEQ ID NO: 2670746 - RNA, 16 nt, Human
caaaugcaucuuugau

SEQ ID NO: 2670747 - RNA, 22 nt, Human
caaaugcaucuuugauguguug

SEQ ID NO: 2670748 - RNA, 21 nt, Human
caaaugcaucuuugauguguu

SEQ ID NO: 2670749 - RNA, 19 nt, Human
caaaugcaugcuucuucuc

SEQ ID NO: 2670750 - RNA, 20 nt, Human
caaaugcaugcuucuucuca

SEQ ID NO: 2670751 - RNA, 21 nt, Human
caaaugacuuuauuauuuauu

SEQ ID NO: 2670752 - RNA, 20 nt, Human
caaaugacuuuauuauuuau

SEQ ID NO: 2670753 - RNA, 18 nt, Human
caaaugacuuuauuauuu

SEQ ID NO: 2670754 - RNA, 17 nt, Human
caaaugacuuuauuauu

SEQ ID NO: 2670755 - RNA, 16 nt, Human
caaaugacuuuauuau

SEQ ID NO: 2670756 - RNA, 15 nt, Human
caaaugacuuuauua

SEQ ID NO: 2670757 - RNA, 14 nt, Human
caaaugacuuuauu

SEQ ID NO: 2670758 - RNA, 13 nt, Human
caaaucuggaagc

SEQ ID NO: 2670759 - RNA, 12 nt, Human
caaagucauuaa

SEQ ID NO: 2670760 - RNA, 16 nt, Human
caaagucauuaaagac

SEQ ID NO: 2670761 - RNA, 17 nt, Human
caaagucauuaaagaca

SEQ ID NO: 2670762 - RNA, 13 nt, Human
caaaugacuuuau

SEQ ID NO: 2670763 - RNA, 23 nt, Human
caaaguaugugguuuuguaauuu

SEQ ID NO: 2670764 - RNA, 22 nt, Human
caacacagccugggccccagcu

SEQ ID NO: 2670765 - RNA, 13 nt, Human
caacacagccugg

SEQ ID NO: 2670766 - RNA, 15 nt, Human
caacacagccugggc

SEQ ID NO: 2670767 - RNA, 16 nt, Human
caacacagccugggcc

SEQ ID NO: 2670768 - RNA, 11 nt, Human
caagaauguac

SEQ ID NO: 2670769 - RNA, 20 nt, Human
caagaauguacguccagccu

SEQ ID NO: 2670770 - RNA, 22 nt, Human
caagaauugaagcaggacuaaa

SEQ ID NO: 2670771 - RNA, 16 nt, Human
caaccaggcaccucuu

SEQ ID NO: 2670772 - RNA, 19 nt, Human
caaccaggcaccucuuccu

SEQ ID NO: 2670773 - RNA, 18 nt, Human
caaccaggcuccugugau

SEQ ID NO: 2670774 - RNA, 12 nt, Human
caaccagaccug

SEQ ID NO: 2670775 - RNA, 23 nt, Human
caacucagagaaaaaugcucccc

SEQ ID NO: 2670776 - RNA, 14 nt, Human
auuuuaugguuaug

SEQ ID NO: 2670777 - RNA, 16 nt, Human
auuuuaugguuauguu

SEQ ID NO: 2670778 - RNA, 18 nt, Human
auuuuaugguuauguuuu

SEQ ID NO: 2670779 - RNA, 22 nt, Human
auuuuaugguuauguuuuucug

SEQ ID NO: 2670780 - RNA, 23 nt, Human
auuuuaugguuauguuuuucugu

SEQ ID NO: 2670781 - RNA, 11 nt, Human
auuuugaauca

SEQ ID NO: 2670782 - RNA, 12 nt, Human
auuuugaaucaa

SEQ ID NO: 2670783 - RNA, 13 nt, Human
auuuugaaucaau

SEQ ID NO: 2670784 - RNA, 14 nt, Human
auuuugaaucaaua

SEQ ID NO: 2670785 - RNA, 15 nt, Human
auuuugaaucaauaa

SEQ ID NO: 2670786 - RNA, 17 nt, Human
auuuugaaucaauaaua

SEQ ID NO: 2670787 - RNA, 20 nt, Human
auuuuuauacaaaccuacca

SEQ ID NO: 2670788 - RNA, 12 nt, Human
auuuuuauaauu

SEQ ID NO: 2670789 - RNA, 21 nt, Human
auuuuuauaauuguacaaaau

SEQ ID NO: 2670790 - RNA, 17 nt, Human
auuuuuauacaaaccua

SEQ ID NO: 2670791 - RNA, 16 nt, Human
auuuuuagaauaagaa

SEQ ID NO: 2670792 - RNA, 19 nt, Human
auuuuuagaauaagaauuu

SEQ ID NO: 2670793 - RNA, 21 nt, Human
auuuuuagaauaagaauuugc

SEQ ID NO: 2670794 - RNA, 22 nt, Human
auuuuuagaauaagaauuugca

SEQ ID NO: 2670795 - RNA, 23 nt, Human
auuuuuagaauaagaauuugcau

SEQ ID NO: 2670796 - RNA, 24 nt, Human
auuuuuagaauaagaauuugcaua

SEQ ID NO: 2670797 - RNA, 21 nt, Human
auuuuuagaauuaaaaaagca

SEQ ID NO: 2670798 - RNA, 14 nt, Human
auuuuuauauuucc

SEQ ID NO: 2670799 - RNA, 16 nt, Human
auuuuuauauuuccuu

SEQ ID NO: 2670800 - RNA, 17 nt, Human
auuuuuauauuuccuuu

SEQ ID NO: 2670801 - RNA, 13 nt, Human
auuuuuauagcaa

SEQ ID NO: 2670802 - RNA, 21 nt, Human
auuuuuauagcaacaacaauu

SEQ ID NO: 2670803 - RNA, 13 nt, Human
auuuuuauaucau

SEQ ID NO: 2670804 - RNA, 17 nt, Human
auuuuuauaucaugcaa

SEQ ID NO: 2670805 - RNA, 19 nt, Human
auuuuuauaucaugcaaaa

SEQ ID NO: 2670806 - RNA, 22 nt, Human
auuuuuauaucaugcaaaauau

SEQ ID NO: 2670807 - RNA, 21 nt, Human
auuuuuuugaacucuucucau

SEQ ID NO: 2670808 - RNA, 23 nt, Human
auuuuuuugaacucuucucauua

SEQ ID NO: 2670809 - RNA, 22 nt, Human
auuuuuuugaacucuucucauu

SEQ ID NO: 2670810 - RNA, 22 nt, Human
auuuuuuugcaugcaugcaaau

SEQ ID NO: 2670811 - RNA, 23 nt, Human
auuuuuuugcaugcaugcaaaug

SEQ ID NO: 2670812 - RNA, 13 nt, Human
auuuuuuuguaug

SEQ ID NO: 2670813 - RNA, 13 nt, Human
auuuuuuuguaau

SEQ ID NO: 2670814 - RNA, 14 nt, Human
auuuuuuuguaaua

SEQ ID NO: 2670815 - RNA, 15 nt, Human
auuuuuuuguaauaa

SEQ ID NO: 2670816 - RNA, 19 nt, Human
auuuuuuuguaauaagcaa

SEQ ID NO: 2670817 - RNA, 19 nt, Human
caaaagcugggcagguugg

SEQ ID NO: 2670818 - RNA, 17 nt, Human
auuuuuuuguaugaaaa

SEQ ID NO: 2670819 - RNA, 14 nt, Human
auuuuuuuguauga

SEQ ID NO: 2670820 - RNA, 13 nt, Human
caaaaggaagucu

SEQ ID NO: 2670821 - RNA, 15 nt, Human
caaacagugacugua

SEQ ID NO: 2670822 - RNA, 14 nt, Human
caaagauagacagg

SEQ ID NO: 2670823 - RNA, 17 nt, Human
caaagauagacaggucc

SEQ ID NO: 2670824 - RNA, 18 nt, Human
caaagauagacagguccu

SEQ ID NO: 2670825 - RNA, 19 nt, Human
caaagauagacagguccug

SEQ ID NO: 2670826 - RNA, 22 nt, Human
caaagauagacagguccugauu

SEQ ID NO: 2670827 - RNA, 14 nt, Human
caaggcuaugugau

SEQ ID NO: 2670828 - RNA, 21 nt, Human
caaggccugguguuucuugau

SEQ ID NO: 2670829 - RNA, 22 nt, Human
caaggccugguguuucuugaua

SEQ ID NO: 2670830 - RNA, 15 nt, Human
caagucagcuccagc

SEQ ID NO: 2670831 - RNA, 16 nt, Human
caagucagcuccagcu

SEQ ID NO: 2670832 - RNA, 22 nt, Human
caagucaguaggacuccuuauu

SEQ ID NO: 2670833 - RNA, 18 nt, Human
caagucauagccauaaau

SEQ ID NO: 2670834 - RNA, 20 nt, Human
caagucauagccauaaauga

SEQ ID NO: 2670835 - RNA, 14 nt, Human
caaguuuauauaua

SEQ ID NO: 2670836 - RNA, 15 nt, Human
caaguuuauauauau

SEQ ID NO: 2670837 - RNA, 12 nt, Human
caagaugugaau

SEQ ID NO: 2670838 - RNA, 13 nt, Human
caagaugugaauu

SEQ ID NO: 2670839 - RNA, 14 nt, Human
caagaugugaauua

SEQ ID NO: 2670840 - RNA, 18 nt, Human
caagaugugaauuauuga

SEQ ID NO: 2670841 - RNA, 16 nt, Human
caagauuuaaaugcca

SEQ ID NO: 2670842 - RNA, 16 nt, Human
caaggccugcucccug

SEQ ID NO: 2670843 - RNA, 17 nt, Human
caauccauaacuuuagu

SEQ ID NO: 2670844 - RNA, 20 nt, Human
caaucccuuuauuacccccu

SEQ ID NO: 2670845 - RNA, 19 nt, Human
caauccuaauuucuccucc

SEQ ID NO: 2670846 - RNA, 17 nt, Human
caaugggaccuguggcu

SEQ ID NO: 2670847 - RNA, 21 nt, Human
caauugaauuaaauuaggaau

SEQ ID NO: 2670848 - RNA, 15 nt, Human
caauuucuguguugc

SEQ ID NO: 2670849 - RNA, 20 nt, Human
caauuucuguguugccaagc

SEQ ID NO: 2670850 - RNA, 22 nt, Human
caccagcccaucgccacaaacu

SEQ ID NO: 2670851 - RNA, 12 nt, Human
caccagccccac

SEQ ID NO: 2670852 - RNA, 14 nt, Human
caccagccccacug

SEQ ID NO: 2670853 - RNA, 23 nt, Human
caccagccccacugccagcagca

SEQ ID NO: 2670854 - RNA, 18 nt, Human
caccagccccacugccag

SEQ ID NO: 2670855 - RNA, 20 nt, Human
caccagccccacugccagca

SEQ ID NO: 2670856 - RNA, 21 nt, Human
caccagccccacugccagcag

SEQ ID NO: 2670857 - RNA, 22 nt, Human
caccagccccacugccagcagc

SEQ ID NO: 2670858 - RNA, 19 nt, Human
cacccaugcaagcagagga

SEQ ID NO: 2670859 - RNA, 22 nt, Human
cacccaugcaagcagaggacca

SEQ ID NO: 2670860 - RNA, 13 nt, Human
cacccaugguacc

SEQ ID NO: 2670861 - RNA, 17 nt, Human
caccccaacacuuccag

SEQ ID NO: 2670862 - RNA, 12 nt, Human
caccccaagaga

SEQ ID NO: 2670863 - RNA, 22 nt, Human
caccaaaucguagcguuuguua

SEQ ID NO: 2670864 - RNA, 13 nt, Human
cacaucugccuua

SEQ ID NO: 2670865 - RNA, 13 nt, Human
caccaaagcugcc

SEQ ID NO: 2670866 - RNA, 14 nt, Human
caccaaagcugccc

SEQ ID NO: 2670867 - RNA, 18 nt, Human
caccaaagcugcccacug

SEQ ID NO: 2670868 - RNA, 12 nt, Human
cacaucugccuu

SEQ ID NO: 2670869 - RNA, 21 nt, Human
cacaccaaucuuacuuuguaa

SEQ ID NO: 2670870 - RNA, 21 nt, Human
cacuggguugcgggacagagu

SEQ ID NO: 2670871 - RNA, 15 nt, Human
cacugggcucccggg

SEQ ID NO: 2670872 - RNA, 16 nt, Human
cacugggcucccgggc

SEQ ID NO: 2670873 - RNA, 22 nt, Human
cacuuaaaacacguuuuaagga

SEQ ID NO: 2670874 - RNA, 16 nt, Human
cacuuaaaacacguuu

SEQ ID NO: 2670875 - RNA, 15 nt, Human
cacuuaaagaaguau

SEQ ID NO: 2670876 - RNA, 16 nt, Human
cacuuaaagaaguauu

SEQ ID NO: 2670877 - RNA, 17 nt, Human
cacuuaaagaaguauuu

SEQ ID NO: 2670878 - RNA, 18 nt, Human
cacuuaaagaaguauuuu

SEQ ID NO: 2670879 - RNA, 21 nt, Human
cacuguuucucuugagcuggc

SEQ ID NO: 2670880 - RNA, 15 nt, Human
cacuguuuguuuuua

SEQ ID NO: 2670881 - RNA, 18 nt, Human
cacuguuuguuuuuauuu

SEQ ID NO: 2670882 - RNA, 22 nt, Human
cacuguuucucuugagcuggcc

SEQ ID NO: 2670883 - RNA, 17 nt, Human
cacugccaugccagcuu

SEQ ID NO: 2670884 - RNA, 13 nt, Human
cacugccaggcca

SEQ ID NO: 2670885 - RNA, 14 nt, Human
cacugccaggccag

SEQ ID NO: 2670886 - RNA, 16 nt, Human
cacugccaggccagcc

SEQ ID NO: 2670887 - RNA, 17 nt, Human
cacugccaggccagccu

SEQ ID NO: 2670888 - RNA, 18 nt, Human
cacugccaggccagccuc

SEQ ID NO: 2670889 - RNA, 19 nt, Human
cacugccaggccagccucc

SEQ ID NO: 2670890 - RNA, 20 nt, Human
cacugccaggccagccuccg

SEQ ID NO: 2670891 - RNA, 21 nt, Human
cacugccaggccagccuccga

SEQ ID NO: 2670892 - RNA, 21 nt, Human
cacuuaagacuguguauucua

SEQ ID NO: 2670893 - RNA, 21 nt, Human
cacuuaaacgaagaguucccu

SEQ ID NO: 2670894 - RNA, 13 nt, Human
cacuuaagacugu

SEQ ID NO: 2670895 - RNA, 17 nt, Human
cacuuaaguuagccucc

SEQ ID NO: 2670896 - RNA, 21 nt, Human
cacuuaaguuagccuccacca

SEQ ID NO: 2670897 - RNA, 17 nt, Human
cacuuuacccaccuaga

SEQ ID NO: 2670898 - RNA, 19 nt, Human
cacuuuacccaccuagaac

SEQ ID NO: 2670899 - RNA, 20 nt, Human
cacuuuacccaccuagaaca

SEQ ID NO: 2670900 - RNA, 22 nt, Human
cacuuuacccaccuagaacacu

SEQ ID NO: 2670901 - RNA, 14 nt, Human
cacuuuacccaccu

SEQ ID NO: 2670902 - RNA, 20 nt, Human
cagaaauauaacacauuuuu

SEQ ID NO: 2670903 - RNA, 21 nt, Human
cagaaauauaacacauuuuuu

SEQ ID NO: 2670904 - RNA, 15 nt, Human
cagaaauggaaagca

SEQ ID NO: 2670905 - RNA, 17 nt, Human
cagaaauggaaagcaga

SEQ ID NO: 2670906 - RNA, 18 nt, Human
cagaaaugaggaggaugc

SEQ ID NO: 2670907 - RNA, 14 nt, Human
cagaaauacaauuu

SEQ ID NO: 2670908 - RNA, 18 nt, Human
cagaaagcuuuauuuuga

SEQ ID NO: 2670909 - RNA, 18 nt, Human
cacuacaguauuacucuu

SEQ ID NO: 2670910 - RNA, 14 nt, Human
cacuccagccuggg

SEQ ID NO: 2670911 - RNA, 13 nt, Human
cacuccagccugg

SEQ ID NO: 2670912 - RNA, 16 nt, Human
cacuccagccugggcg

SEQ ID NO: 2670913 - RNA, 23 nt, Human
cacuacaccuggcugagguuccu

SEQ ID NO: 2670914 - RNA, 14 nt, Human
cacuacaccuugcc

SEQ ID NO: 2670915 - RNA, 16 nt, Human
cacuacaccuugccuu

SEQ ID NO: 2670916 - RNA, 15 nt, Human
cacuacaccuggcug

SEQ ID NO: 2670917 - RNA, 16 nt, Human
cacucuuaagcuuccg

SEQ ID NO: 2670918 - RNA, 14 nt, Human
caccuuuuacugug

SEQ ID NO: 2670919 - RNA, 23 nt, Human
caccuagaacacuaacucaccag

SEQ ID NO: 2670920 - RNA, 13 nt, Human
ccgacauggcucc

SEQ ID NO: 2670921 - RNA, 22 nt, Human
cccugugacauggugccugaga

SEQ ID NO: 2670922 - RNA, 24 nt, Human
cccugugacauggugccugagagg

SEQ ID NO: 2670923 - RNA, 21 nt, Human
cccugugacauggugccugag

SEQ ID NO: 2670924 - RNA, 12 nt, Human
cccuccuucaga

SEQ ID NO: 2670925 - RNA, 22 nt, Human
ccgcagagcgcgccccuagccg

SEQ ID NO: 2670926 - RNA, 21 nt, Human
ccgcagagcgcgccccuagcc

SEQ ID NO: 2670927 - RNA, 17 nt, Human
ccgugaagauacuuugu

SEQ ID NO: 2670928 - RNA, 18 nt, Human
ccgugaaaacggagcuga

SEQ ID NO: 2670929 - RNA, 17 nt, Human
ccgugaaaacggagcug

SEQ ID NO: 2670930 - RNA, 14 nt, Human
ccguccugccugug

SEQ ID NO: 2670931 - RNA, 20 nt, Human
ccgugaagauacuuuguauu

SEQ ID NO: 2670932 - RNA, 18 nt, Human
ccgugaagauacuuugua

SEQ ID NO: 2670933 - RNA, 15 nt, Human
ccuaauggugaugca

SEQ ID NO: 2670934 - RNA, 19 nt, Human
ccgguuccugucccugcgc

SEQ ID NO: 2670935 - RNA, 17 nt, Human
ccgguuccugucccugc

SEQ ID NO: 2670936 - RNA, 13 nt, Human
ccguccugccugu

SEQ ID NO: 2670937 - RNA, 15 nt, Human
ccguccugccugugg

SEQ ID NO: 2670938 - RNA, 21 nt, Human
ccggcagccccagccugcuag

SEQ ID NO: 2670939 - RNA, 20 nt, Human
ccggcagccccagccugcua

SEQ ID NO: 2670940 - RNA, 19 nt, Human
ccggcagccccagccugcu

SEQ ID NO: 2670941 - RNA, 18 nt, Human
ccggcagccccagccugc

SEQ ID NO: 2670942 - RNA, 17 nt, Human
ccggcagccccagccug

SEQ ID NO: 2670943 - RNA, 16 nt, Human
ccggcagccccagccu

SEQ ID NO: 2670944 - RNA, 15 nt, Human
ccggcagccccagcc

SEQ ID NO: 2670945 - RNA, 18 nt, Human
ccucgcccucuccuuugu

SEQ ID NO: 2670946 - RNA, 14 nt, Human
ccucgcccucuccu

SEQ ID NO: 2670947 - RNA, 22 nt, Human
ccucgcagccucucagugcccu

SEQ ID NO: 2670948 - RNA, 21 nt, Human
ccucgcaacuguccacgcgug

SEQ ID NO: 2670949 - RNA, 13 nt, Human
ccuccucaccuca

SEQ ID NO: 2670950 - RNA, 14 nt, Human
ccuccucaccucau

SEQ ID NO: 2670951 - RNA, 15 nt, Human
ccuccucaccucaug

SEQ ID NO: 2670952 - RNA, 12 nt, Human
ccuccuauucua

SEQ ID NO: 2670953 - RNA, 19 nt, Human
ccuccuauucuauaaaacu

SEQ ID NO: 2670954 - RNA, 13 nt, Human
ccucccuuccuuu

SEQ ID NO: 2670955 - RNA, 15 nt, Human
ccucccuuccuuuuc

SEQ ID NO: 2670956 - RNA, 16 nt, Human
ccucccuuccuuuucc

SEQ ID NO: 2670957 - RNA, 17 nt, Human
ccucccuuccuuuuccc

SEQ ID NO: 2670958 - RNA, 21 nt, Human
ccucccuuccuuuucccugcu

SEQ ID NO: 2670959 - RNA, 22 nt, Human
ccucccuuccuuuucccugcuu

SEQ ID NO: 2670960 - RNA, 14 nt, Human
ccuccgagagggag

SEQ ID NO: 2670961 - RNA, 16 nt, Human
ccuccgagagggagag

SEQ ID NO: 2670962 - RNA, 19 nt, Human
ccuccgagagggagagaga

SEQ ID NO: 2670963 - RNA, 18 nt, Human
ccucaggcaggugggaug

SEQ ID NO: 2670964 - RNA, 12 nt, Human
ccucaggcaggu

SEQ ID NO: 2670965 - RNA, 14 nt, Human
ccucagcgcggccc

SEQ ID NO: 2670966 - RNA, 15 nt, Human
ccucagcucggcuca

SEQ ID NO: 2670967 - RNA, 13 nt, Human
ccucagcucggcu

SEQ ID NO: 2670968 - RNA, 19 nt, Human
ccucagcucggcucagcuc

SEQ ID NO: 2670969 - RNA, 18 nt, Human
ccucagcucggcucagcu

SEQ ID NO: 2670970 - RNA, 17 nt, Human
ccucagcucggcucagc

SEQ ID NO: 2670971 - RNA, 16 nt, Human
ccucaacaccucugca

SEQ ID NO: 2670972 - RNA, 15 nt, Human
ccucaaauuuuuuga

SEQ ID NO: 2670973 - RNA, 16 nt, Human
ccucaaauuuuuugac

SEQ ID NO: 2670974 - RNA, 17 nt, Human
ccucaaauuuuuugacu

SEQ ID NO: 2670975 - RNA, 22 nt, Human
ccucaaauuuuuugacuuuuuu

SEQ ID NO: 2670976 - RNA, 17 nt, Human
ccuguaacacuccucug

SEQ ID NO: 2670977 - RNA, 18 nt, Human
ccuguaacacuccucugc

SEQ ID NO: 2670978 - RNA, 15 nt, Human
ccuggccuccccugc

SEQ ID NO: 2670979 - RNA, 17 nt, Human
ccuggccuccccugcca

SEQ ID NO: 2670980 - RNA, 18 nt, Human
ccuggccuccccugccac

SEQ ID NO: 2670981 - RNA, 19 nt, Human
ccuggccuccccugccacc

SEQ ID NO: 2670982 - RNA, 20 nt, Human
ccuggccuccccugccacca

SEQ ID NO: 2670983 - RNA, 18 nt, Human
ccugguuauugauguggc

SEQ ID NO: 2670984 - RNA, 23 nt, Human
ccugguuauugauguggcccugg

SEQ ID NO: 2670985 - RNA, 14 nt, Human
ccugggcuggaauc

SEQ ID NO: 2670986 - RNA, 20 nt, Human
ccugggcuggaaucaggaau

SEQ ID NO: 2670987 - RNA, 18 nt, Human
ccugggcuuggccugcug

SEQ ID NO: 2670988 - RNA, 19 nt, Human
ccugggcuuggccugcugu

SEQ ID NO: 2670989 - RNA, 20 nt, Human
ccugggcuuggccugcugug

SEQ ID NO: 2670990 - RNA, 21 nt, Human
ccugggcuuggccugcuguga

SEQ ID NO: 2670991 - RNA, 13 nt, Human
ccugggcuuggcc

SEQ ID NO: 2670992 - RNA, 14 nt, Human
ccugggcuuggccu

SEQ ID NO: 2670993 - RNA, 15 nt, Human
ccugggcuuggccug

SEQ ID NO: 2670994 - RNA, 16 nt, Human
ccugggcuuggccugc

SEQ ID NO: 2670995 - RNA, 17 nt, Human
ccugggcuuggccugcu

SEQ ID NO: 2670996 - RNA, 19 nt, Human
ccugaggucaucggcgugg

SEQ ID NO: 2670997 - RNA, 15 nt, Human
ccugaggcugugguc

SEQ ID NO: 2670998 - RNA, 16 nt, Human
ccugaggcugugguca

SEQ ID NO: 2670999 - RNA, 17 nt, Human
ccugaggcuguggucac

SEQ ID NO: 2671000 - RNA, 20 nt, Human
ccugacccauugcuguuguc

SEQ ID NO: 2671001 - RNA, 18 nt, Human
ccucggccccucccacac

SEQ ID NO: 2671002 - RNA, 13 nt, Human
ccucuugcccauc

SEQ ID NO: 2671003 - RNA, 16 nt, Human
ccugccucagccuccc

SEQ ID NO: 2671004 - RNA, 13 nt, Human
cccacccgguggg

SEQ ID NO: 2671005 - RNA, 19 nt, Human
cccacucccuugcuggccc

SEQ ID NO: 2671006 - RNA, 16 nt, Human
cccaccccugccccca

SEQ ID NO: 2671007 - RNA, 12 nt, Human
cccaccccugcc

SEQ ID NO: 2671008 - RNA, 15 nt, Human
ccauuuccauugcuu

SEQ ID NO: 2671009 - RNA, 14 nt, Human
cccaagagaacucg

SEQ ID NO: 2671010 - RNA, 24 nt, Human
cccaagagaacucgcgcucaguaa

SEQ ID NO: 2671011 - RNA, 14 nt, Human
cccaagaaugcaag

SEQ ID NO: 2671012 - RNA, 20 nt, Human
cccaagaaugcaagauuuca

SEQ ID NO: 2671013 - RNA, 13 nt, Human
ccauuucccaucu

SEQ ID NO: 2671014 - RNA, 14 nt, Human
ccauuucccaucug

SEQ ID NO: 2671015 - RNA, 15 nt, Human
ccauuucccaucugc

SEQ ID NO: 2671016 - RNA, 16 nt, Human
ccauuucccaucugca

SEQ ID NO: 2671017 - RNA, 17 nt, Human
ccauuucccaucugcac

SEQ ID NO: 2671018 - RNA, 17 nt, Human
ccauugcuuauuaugua

SEQ ID NO: 2671019 - RNA, 18 nt, Human
ccauugcuuauuauguag

SEQ ID NO: 2671020 - RNA, 12 nt, Human
ccauuuauuuau

SEQ ID NO: 2671021 - RNA, 22 nt, Human
ccauccccuguagagugggagc

SEQ ID NO: 2671022 - RNA, 20 nt, Human
ccauguagcccccuggccuc

SEQ ID NO: 2671023 - RNA, 14 nt, Human
ccauguagcccccu

SEQ ID NO: 2671024 - RNA, 23 nt, Human
ccauguccaaagaggcugccccu

SEQ ID NO: 2671025 - RNA, 23 nt, Human
ccauguagcccccuggccucugu

SEQ ID NO: 2671026 - RNA, 22 nt, Human
ccauguagcccccuggccucug

SEQ ID NO: 2671027 - RNA, 14 nt, Human
ccagcucccucuau

SEQ ID NO: 2671028 - RNA, 22 nt, Human
ccagcccggccgcuccaccagc

SEQ ID NO: 2671029 - RNA, 13 nt, Human
ccagccccucugg

SEQ ID NO: 2671030 - RNA, 15 nt, Human
ccagcuacuugggag

SEQ ID NO: 2671031 - RNA, 16 nt, Human
ccagcuacuugggagg

SEQ ID NO: 2671032 - RNA, 17 nt, Human
ccagcuacuugggaggc

SEQ ID NO: 2671033 - RNA, 19 nt, Human
ccagcuacuugggaggcug

SEQ ID NO: 2671034 - RNA, 20 nt, Human
ccagcuacuugggaggcuga

SEQ ID NO: 2671035 - RNA, 17 nt, Human
ccagcacuuugggaggc

SEQ ID NO: 2671036 - RNA, 16 nt, Human
ccagcacuuugggagg

SEQ ID NO: 2671037 - RNA, 15 nt, Human
ccagcacuuugggag

SEQ ID NO: 2671038 - RNA, 20 nt, Human
ccagcacuuugggaggccga

SEQ ID NO: 2671039 - RNA, 18 nt, Human
ccacucgugcaucccuga

SEQ ID NO: 2671040 - RNA, 17 nt, Human
ccagccccggggugagu

SEQ ID NO: 2671041 - RNA, 19 nt, Human
ccaggaaacuccacaucug

SEQ ID NO: 2671042 - RNA, 20 nt, Human
ccaggaaacuccacaucugc

SEQ ID NO: 2671043 - RNA, 21 nt, Human
ccaggaaacuccacaucugcc

SEQ ID NO: 2671044 - RNA, 22 nt, Human
ccaggaaacuccacaucugccu

SEQ ID NO: 2671045 - RNA, 18 nt, Human
ccagggggucucacccau

SEQ ID NO: 2671046 - RNA, 16 nt, Human
ccaggggucucccugg

SEQ ID NO: 2671047 - RNA, 14 nt, Human
ccaggggucucccu

SEQ ID NO: 2671048 - RNA, 15 nt, Human
ccaggggucucccug

SEQ ID NO: 2671049 - RNA, 17 nt, Human
ccaggggucucccuggc

SEQ ID NO: 2671050 - RNA, 18 nt, Human
ccaggggucucccuggcu

SEQ ID NO: 2671051 - RNA, 21 nt, Human
ccaggggucucccuggcuccc

SEQ ID NO: 2671052 - RNA, 13 nt, Human
ccaguccaggcug

SEQ ID NO: 2671053 - RNA, 16 nt, Human
ccaguccacccugccu

SEQ ID NO: 2671054 - RNA, 17 nt, Human
ccaguccacccugccug

SEQ ID NO: 2671055 - RNA, 18 nt, Human
ccaguccacccugccugc

SEQ ID NO: 2671056 - RNA, 14 nt, Human
ccaguccaggcugc

SEQ ID NO: 2671057 - RNA, 15 nt, Human
ccaguccaggcugcc

SEQ ID NO: 2671058 - RNA, 16 nt, Human
ccaguccaggcugccg

SEQ ID NO: 2671059 - RNA, 19 nt, Human
ccaguccaggcugccgugg

SEQ ID NO: 2671060 - RNA, 19 nt, Human
ccagucagguaguugcaau

SEQ ID NO: 2671061 - RNA, 13 nt, Human
ccaggcugccucc

SEQ ID NO: 2671062 - RNA, 23 nt, Human
ccaggcugccucccuuguggcag

SEQ ID NO: 2671063 - RNA, 15 nt, Human
ccaggcugccguggg

SEQ ID NO: 2671064 - RNA, 18 nt, Human
ccaggcugccguggggcc

SEQ ID NO: 2671065 - RNA, 14 nt, Human
ccaggcugccgugg

SEQ ID NO: 2671066 - RNA, 18 nt, Human
ccaggggaguugugucug

SEQ ID NO: 2671067 - RNA, 16 nt, Human
ccaggggaguuguguc

SEQ ID NO: 2671068 - RNA, 21 nt, Human
ccaggggaaaaucagccugcu

SEQ ID NO: 2671069 - RNA, 18 nt, Human
ccaggaucccaagccucc

SEQ ID NO: 2671070 - RNA, 19 nt, Human
ccaggaucccaagccuccu

SEQ ID NO: 2671071 - RNA, 21 nt, Human
ccaggaucccaagccuccugc

SEQ ID NO: 2671072 - RNA, 22 nt, Human
ccaggaucccaagccuccugcu

SEQ ID NO: 2671073 - RNA, 15 nt, Human
cccuccuccaggccu

SEQ ID NO: 2671074 - RNA, 19 nt, Human
cccuccuccaggccugccu

SEQ ID NO: 2671075 - RNA, 23 nt, Human
cccuccuccaggccugccuccca

SEQ ID NO: 2671076 - RNA, 22 nt, Human
cccuccugaaccgcacagcuca

SEQ ID NO: 2671077 - RNA, 23 nt, Human
cccuccugaaccgcacagcucag

SEQ ID NO: 2671078 - RNA, 12 nt, Human
cccuccugaccc

SEQ ID NO: 2671079 - RNA, 12 nt, Human
ccccugccccca

SEQ ID NO: 2671080 - RNA, 12 nt, Human
ccccugccacca

SEQ ID NO: 2671081 - RNA, 20 nt, Human
ccccugccaccaggccaccu

SEQ ID NO: 2671082 - RNA, 19 nt, Human
cccucagcucggcucagcu

SEQ ID NO: 2671083 - RNA, 16 nt, Human
cccucagcucggcuca

SEQ ID NO: 2671084 - RNA, 16 nt, Human
cccucaacaccucugc

SEQ ID NO: 2671085 - RNA, 22 nt, Human
cccggccggccacccaggaggc

SEQ ID NO: 2671086 - RNA, 16 nt, Human
cccucaaccucuucug

SEQ ID NO: 2671087 - RNA, 15 nt, Human
ccccuucucuccucc

SEQ ID NO: 2671088 - RNA, 19 nt, Human
ccccuucucuccuccccaa

SEQ ID NO: 2671089 - RNA, 16 nt, Human
cccggccgccccuccu

SEQ ID NO: 2671090 - RNA, 15 nt, Human
cccggcccccugccc

SEQ ID NO: 2671091 - RNA, 17 nt, Human
cccggccgcuccaccag

SEQ ID NO: 2671092 - RNA, 20 nt, Human
ccccagcccagggcuccugc

SEQ ID NO: 2671093 - RNA, 21 nt, Human
ccccagcccagggcuccugca

SEQ ID NO: 2671094 - RNA, 12 nt, Human
ccccagcccagg

SEQ ID NO: 2671095 - RNA, 14 nt, Human
ccccagcccagggc

SEQ ID NO: 2671096 - RNA, 15 nt, Human
ccccagcccagggcu

SEQ ID NO: 2671097 - RNA, 15 nt, Human
ccccaugcuuccuug

SEQ ID NO: 2671098 - RNA, 17 nt, Human
ccccaugcuuccuugcc

SEQ ID NO: 2671099 - RNA, 24 nt, Human
ccccaugcuuccuugccugaugac

SEQ ID NO: 2671100 - RNA, 15 nt, Human
cccauuuuccucuga

SEQ ID NO: 2671101 - RNA, 16 nt, Human
cccauuugugccagag

SEQ ID NO: 2671102 - RNA, 18 nt, Human
cccauuugugccagagga

SEQ ID NO: 2671103 - RNA, 14 nt, Human
ccccgcagacaccu

SEQ ID NO: 2671104 - RNA, 22 nt, Human
cccagcaccucagccugcacag

SEQ ID NO: 2671105 - RNA, 17 nt, Human
cccagcaccucagccug

SEQ ID NO: 2671106 - RNA, 18 nt, Human
cccagcaccucagccugc

SEQ ID NO: 2671107 - RNA, 18 nt, Human
cccagcacagcuugaccu

SEQ ID NO: 2671108 - RNA, 19 nt, Human
cccagcacagcuugaccug

SEQ ID NO: 2671109 - RNA, 22 nt, Human
cccagcaagugguccuagaggc

SEQ ID NO: 2671110 - RNA, 15 nt, Human
cccagccaugccagc

SEQ ID NO: 2671111 - RNA, 17 nt, Human
cccagccaugccagcug

SEQ ID NO: 2671112 - RNA, 18 nt, Human
cccagccaugccagcugg

SEQ ID NO: 2671113 - RNA, 19 nt, Human
cccagccaugccagcuggc

SEQ ID NO: 2671114 - RNA, 22 nt, Human
cccagccaugccagcuggccuu

SEQ ID NO: 2671115 - RNA, 13 nt, Human
cccagccauccag

SEQ ID NO: 2671116 - RNA, 15 nt, Human
cccauccugaccagc

SEQ ID NO: 2671117 - RNA, 17 nt, Human
cccaucgccacaaacuc

SEQ ID NO: 2671118 - RNA, 13 nt, Human
cugagcugccagu

SEQ ID NO: 2671119 - RNA, 14 nt, Human
cugagcugccagug

SEQ ID NO: 2671120 - RNA, 21 nt, Human
cugaggaaauugcuuuguauu

SEQ ID NO: 2671121 - RNA, 22 nt, Human
cugaggugggaggaucucuuga

SEQ ID NO: 2671122 - RNA, 13 nt, Human
cugaggugggagg

SEQ ID NO: 2671123 - RNA, 13 nt, Human
cugagggggagcc

SEQ ID NO: 2671124 - RNA, 22 nt, Human
cugaggucaucggcguggccca

SEQ ID NO: 2671125 - RNA, 21 nt, Human
cugagguuccucugccugccc

SEQ ID NO: 2671126 - RNA, 23 nt, Human
cugagguuccucugccugccccg

SEQ ID NO: 2671127 - RNA, 14 nt, Human
cugagguuccucug

SEQ ID NO: 2671128 - RNA, 15 nt, Human
cugagguuccucugc

SEQ ID NO: 2671129 - RNA, 16 nt, Human
cugagguuccucugcc

SEQ ID NO: 2671130 - RNA, 17 nt, Human
cugagguuccucugccu

SEQ ID NO: 2671131 - RNA, 18 nt, Human
cugagguuccucugccug

SEQ ID NO: 2671132 - RNA, 19 nt, Human
cugagguuccucugccugc

SEQ ID NO: 2671133 - RNA, 20 nt, Human
cugagguuccucugccugcc

SEQ ID NO: 2671134 - RNA, 24 nt, Human
cugaaaauauuguuuuacaauagu

SEQ ID NO: 2671135 - RNA, 17 nt, Human
cugaaaauauuguuuua

SEQ ID NO: 2671136 - RNA, 22 nt, Human
cugaaaauauuguuuuacaaua

SEQ ID NO: 2671137 - RNA, 20 nt, Human
cugaaaauauuguuuuacaa

SEQ ID NO: 2671138 - RNA, 22 nt, Human
cugaaaaguguguauauauuuu

SEQ ID NO: 2671139 - RNA, 14 nt, Human
cucuugcccauccu

SEQ ID NO: 2671140 - RNA, 15 nt, Human
cucuugcccauccug

SEQ ID NO: 2671141 - RNA, 16 nt, Human
cucuugcccauccuga

SEQ ID NO: 2671142 - RNA, 19 nt, Human
cucuugcccauccugacug

SEQ ID NO: 2671143 - RNA, 20 nt, Human
cucuugcccauccugacuga

SEQ ID NO: 2671144 - RNA, 16 nt, Human
cucuugcaccaaauua

SEQ ID NO: 2671145 - RNA, 20 nt, Human
cucuugcaccaaauuaucuu

SEQ ID NO: 2671146 - RNA, 14 nt, Human
cucuugagccuggg

SEQ ID NO: 2671147 - RNA, 13 nt, Human
cucuugagccugg

SEQ ID NO: 2671148 - RNA, 23 nt, Human
cucuugaguuugucgcucaugug

SEQ ID NO: 2671149 - RNA, 22 nt, Human
cucuugaguuguuuuuguauau

SEQ ID NO: 2671150 - RNA, 21 nt, Human
cucuugaguuguuuuuguaua

SEQ ID NO: 2671151 - RNA, 20 nt, Human
cucuugaguuguuuuuguau

SEQ ID NO: 2671152 - RNA, 18 nt, Human
cucuugaguuguuuuugu

SEQ ID NO: 2671153 - RNA, 16 nt, Human
cucuugaguuguuuuu

SEQ ID NO: 2671154 - RNA, 13 nt, Human
cucuugaguuguu

SEQ ID NO: 2671155 - RNA, 23 nt, Human
cucuugaguuguuuuuguauauu

SEQ ID NO: 2671156 - RNA, 16 nt, Human
cucuugagccugggag

SEQ ID NO: 2671157 - RNA, 15 nt, Human
cucuugagccuggga

SEQ ID NO: 2671158 - RNA, 13 nt, Human
cucuugagcuggc

SEQ ID NO: 2671159 - RNA, 14 nt, Human
cucuugagcuggcc

SEQ ID NO: 2671160 - RNA, 15 nt, Human
cucuugagcuggccu

SEQ ID NO: 2671161 - RNA, 16 nt, Human
cucuugagcuggccuc

SEQ ID NO: 2671162 - RNA, 22 nt, Human
cucuugagcuggccucucuagc

SEQ ID NO: 2671163 - RNA, 18 nt, Human
cucugcacaagcugcacc

SEQ ID NO: 2671164 - RNA, 17 nt, Human
cucugcacaagcugcac

SEQ ID NO: 2671165 - RNA, 19 nt, Human
cucugcacaagcugcaccc

SEQ ID NO: 2671166 - RNA, 14 nt, Human
cugaagcagccucu

SEQ ID NO: 2671167 - RNA, 15 nt, Human
cugaagcagccucuc

SEQ ID NO: 2671168 - RNA, 16 nt, Human
cugaagcagccucucc

SEQ ID NO: 2671169 - RNA, 20 nt, Human
cugaagcagccucuccccag

SEQ ID NO: 2671170 - RNA, 13 nt, Human
cucuuuuuguuug

SEQ ID NO: 2671171 - RNA, 20 nt, Human
cugaccccgguggcggcccc

SEQ ID NO: 2671172 - RNA, 18 nt, Human
cuccauaguuuggcauuu

SEQ ID NO: 2671173 - RNA, 11 nt, Human
cucccagccuc

SEQ ID NO: 2671174 - RNA, 22 nt, Human
cuccagugugggcuugaccagg

SEQ ID NO: 2671175 - RNA, 22 nt, Human
cuccagggaauccaagccucca

SEQ ID NO: 2671176 - RNA, 15 nt, Human
cuccaggcuuuccca

SEQ ID NO: 2671177 - RNA, 16 nt, Human
cuccagggaauccaag

SEQ ID NO: 2671178 - RNA, 19 nt, Human
cuccagggaauccaagccu

SEQ ID NO: 2671179 - RNA, 20 nt, Human
cuccagggaauccaagccuc

SEQ ID NO: 2671180 - RNA, 21 nt, Human
cuccagggaauccaagccucc

SEQ ID NO: 2671181 - RNA, 14 nt, Human
cuccagggacacac

SEQ ID NO: 2671182 - RNA, 18 nt, Human
cuccagggacacacagcc

SEQ ID NO: 2671183 - RNA, 19 nt, Human
cuccagggacacacagccu

SEQ ID NO: 2671184 - RNA, 20 nt, Human
cuccagggacacacagccua

SEQ ID NO: 2671185 - RNA, 22 nt, Human
cuccagggacacacagccuagc

SEQ ID NO: 2671186 - RNA, 19 nt, Human
cucagacauguuuuccgug

SEQ ID NO: 2671187 - RNA, 20 nt, Human
cucagacauguuuuccguga

SEQ ID NO: 2671188 - RNA, 16 nt, Human
cuccccagguccagcu

SEQ ID NO: 2671189 - RNA, 17 nt, Human
cuccccagguccagcuc

SEQ ID NO: 2671190 - RNA, 14 nt, Human
cucccagccucagc

SEQ ID NO: 2671191 - RNA, 18 nt, Human
cuccccagguccagcucu

SEQ ID NO: 2671192 - RNA, 19 nt, Human
cuccccagguccagcucug

SEQ ID NO: 2671193 - RNA, 20 nt, Human
cuccccagguccagcucugg

SEQ ID NO: 2671194 - RNA, 21 nt, Human
cuccccagguccagcucugga

SEQ ID NO: 2671195 - RNA, 23 nt, Human
cuccccagguccagcucuggagg

SEQ ID NO: 2671196 - RNA, 22 nt, Human
cuccauaaacaugaaaacacuu

SEQ ID NO: 2671197 - RNA, 23 nt, Human
cucccucugccccucccccagcc

SEQ ID NO: 2671198 - RNA, 20 nt, Human
cuccggcucccagccucagc

SEQ ID NO: 2671199 - RNA, 19 nt, Human
cuccggcucccagccucag

SEQ ID NO: 2671200 - RNA, 14 nt, Human
cuccggggccauuu

SEQ ID NO: 2671201 - RNA, 19 nt, Human
cuccggggccauuugcaau

SEQ ID NO: 2671202 - RNA, 15 nt, Human
cucuccuccccaaau

SEQ ID NO: 2671203 - RNA, 15 nt, Human
cucugaacuugccuu

SEQ ID NO: 2671204 - RNA, 15 nt, Human
cucugaaaucuuccc

SEQ ID NO: 2671205 - RNA, 23 nt, Human
cucugaaaucuucccaugcauuc

SEQ ID NO: 2671206 - RNA, 16 nt, Human
cucugcacaagcugca

SEQ ID NO: 2671207 - RNA, 13 nt, Human
cucggggagccuu

SEQ ID NO: 2671208 - RNA, 17 nt, Human
cucggguuucucugugg

SEQ ID NO: 2671209 - RNA, 14 nt, Human
cucggggagccuua

SEQ ID NO: 2671210 - RNA, 23 nt, Human
cucgguguggagaagcggcuggc

SEQ ID NO: 2671211 - RNA, 22 nt, Human
cucgguacccggggcccagggc

SEQ ID NO: 2671212 - RNA, 21 nt, Human
cucgguacccggggcccaggg

SEQ ID NO: 2671213 - RNA, 18 nt, Human
cucgguacccggggccca

SEQ ID NO: 2671214 - RNA, 11 nt, Human
cucggugccuu

SEQ ID NO: 2671215 - RNA, 21 nt, Human
cucgguucaaggucacuguuu

SEQ ID NO: 2671216 - RNA, 13 nt, Human
cucgguuucucca

SEQ ID NO: 2671217 - RNA, 15 nt, Human
cucgguuugccaaaa

SEQ ID NO: 2671218 - RNA, 16 nt, Human
cucgguuugccaaaau

SEQ ID NO: 2671219 - RNA, 22 nt, Human
cucgguuugccaaaauucauuu

SEQ ID NO: 2671220 - RNA, 14 nt, Human
cucguggcugucaa

SEQ ID NO: 2671221 - RNA, 16 nt, Human
cuccuuuguucccggc

SEQ ID NO: 2671222 - RNA, 17 nt, Human
cuccuuuguucccggcu

SEQ ID NO: 2671223 - RNA, 19 nt, Human
cguacaaguaguucuguau

SEQ ID NO: 2671224 - RNA, 18 nt, Human
cguacaaguaguucugua

SEQ ID NO: 2671225 - RNA, 22 nt, Human
cguacaaguaguucuguauuug

SEQ ID NO: 2671226 - RNA, 21 nt, Human
cguacaaguaguucuguauuu

SEQ ID NO: 2671227 - RNA, 20 nt, Human
cgguucaaggucacuguuuc

SEQ ID NO: 2671228 - RNA, 16 nt, Human
cggagaagagcgcagu

SEQ ID NO: 2671229 - RNA, 17 nt, Human
cggagaagagcgcagug

SEQ ID NO: 2671230 - RNA, 18 nt, Human
cggagaacaugaaucaaa

SEQ ID NO: 2671231 - RNA, 16 nt, Human
cgguuccugucccugc

SEQ ID NO: 2671232 - RNA, 14 nt, Human
cuaacucaaauaca

SEQ ID NO: 2671233 - RNA, 16 nt, Human
cuaacucaaauacaca

SEQ ID NO: 2671234 - RNA, 20 nt, Human
cuaacucaaauacacauuug

SEQ ID NO: 2671235 - RNA, 14 nt, Human
cuaacucaccagcc

SEQ ID NO: 2671236 - RNA, 21 nt, Human
cuaacucaccagccccacugc

SEQ ID NO: 2671237 - RNA, 21 nt, Human
cuaaagaaaaauaucuuggcc

SEQ ID NO: 2671238 - RNA, 23 nt, Human
cuaaagaaaaauaucuuggccua

SEQ ID NO: 2671239 - RNA, 13 nt, Human
cgcaucucacagc

SEQ ID NO: 2671240 - RNA, 20 nt, Human
cgccuguagucccagcuacu

SEQ ID NO: 2671241 - RNA, 16 nt, Human
cgcaucuugccuccag

SEQ ID NO: 2671242 - RNA, 17 nt, Human
cgcaucuugccuccagg

SEQ ID NO: 2671243 - RNA, 19 nt, Human
cgcaucuugccuccaggug

SEQ ID NO: 2671244 - RNA, 12 nt, Human
cgcaucauaugc

SEQ ID NO: 2671245 - RNA, 23 nt, Human
cgauacugcgacuuucugccugg

SEQ ID NO: 2671246 - RNA, 15 nt, Human
cgcauaggaccuuuc

SEQ ID NO: 2671247 - RNA, 19 nt, Human
cgauacugcgacuuucugc

SEQ ID NO: 2671248 - RNA, 20 nt, Human
cgauacugcgacuuucugcc

SEQ ID NO: 2671249 - RNA, 22 nt, Human
cgauacugcgacuuucugccug

SEQ ID NO: 2671250 - RNA, 14 nt, Human
cgaguaagauuaag

SEQ ID NO: 2671251 - RNA, 13 nt, Human
cgaggucaggaga

SEQ ID NO: 2671252 - RNA, 14 nt, Human
cgaggucaggagau

SEQ ID NO: 2671253 - RNA, 16 nt, Human
cgaguagaaaauguga

SEQ ID NO: 2671254 - RNA, 20 nt, Human
cgaguagaaaaugugacccu

SEQ ID NO: 2671255 - RNA, 22 nt, Human
cgaguagaaaaugugacccucc

SEQ ID NO: 2671256 - RNA, 13 nt, Human
cuaggccugggga

SEQ ID NO: 2671257 - RNA, 12 nt, Human
cuaggccugggg

SEQ ID NO: 2671258 - RNA, 23 nt, Human
cuaggcccccacuugccucuucc

SEQ ID NO: 2671259 - RNA, 19 nt, Human
cuaggcccccacuugccuc

SEQ ID NO: 2671260 - RNA, 17 nt, Human
cuaggcccccacuugcc

SEQ ID NO: 2671261 - RNA, 20 nt, Human
cuaggcccccacuugccucu

SEQ ID NO: 2671262 - RNA, 22 nt, Human
cuaggcccccacuugccucuuc

SEQ ID NO: 2671263 - RNA, 18 nt, Human
cuagccagccccucuucc

SEQ ID NO: 2671264 - RNA, 14 nt, Human
cuagggaagauaau

SEQ ID NO: 2671265 - RNA, 16 nt, Human
cuaguucuaacaguga

SEQ ID NO: 2671266 - RNA, 13 nt, Human
cuauaaaacucug

SEQ ID NO: 2671267 - RNA, 15 nt, Human
cuauaaaacucugca

SEQ ID NO: 2671268 - RNA, 15 nt, Human
cuauaaaagaaacac

SEQ ID NO: 2671269 - RNA, 11 nt, Human
cuauaaaauag

SEQ ID NO: 2671270 - RNA, 13 nt, Human
cuauaaaauagau

SEQ ID NO: 2671271 - RNA, 21 nt, Human
cuauaaaauagauauaaauuu

SEQ ID NO: 2671272 - RNA, 18 nt, Human
cuauaaaaaauaaaauaa

SEQ ID NO: 2671273 - RNA, 14 nt, Human
cuauaaagcaguau

SEQ ID NO: 2671274 - RNA, 16 nt, Human
cuauaaagcaguauuu

SEQ ID NO: 2671275 - RNA, 18 nt, Human
cuauaaagcaguauuuuu

SEQ ID NO: 2671276 - RNA, 19 nt, Human
cuauaaagcaguauuuuuc

SEQ ID NO: 2671277 - RNA, 12 nt, Human
cuacguuucuuu

SEQ ID NO: 2671278 - RNA, 14 nt, Human
cuacguuucuuuaa

SEQ ID NO: 2671279 - RNA, 20 nt, Human
cuacguuucuuuaaccuugu

SEQ ID NO: 2671280 - RNA, 17 nt, Human
cuacucaagcggguggc

SEQ ID NO: 2671281 - RNA, 20 nt, Human
cuacucaagcggguggcucu

SEQ ID NO: 2671282 - RNA, 21 nt, Human
cuacucaagcggguggcucug

SEQ ID NO: 2671283 - RNA, 22 nt, Human
cuacucaagcggguggcucugg

SEQ ID NO: 2671284 - RNA, 15 nt, Human
cuacuagauugacua

SEQ ID NO: 2671285 - RNA, 16 nt, Human
cuacuagcaaaauaaa

SEQ ID NO: 2671286 - RNA, 17 nt, Human
cuacuagcaaaauaaaa

SEQ ID NO: 2671287 - RNA, 19 nt, Human
cuacuagcaaaauaaaaca

SEQ ID NO: 2671288 - RNA, 20 nt, Human
cuacuagcaaaauaaaacau

SEQ ID NO: 2671289 - RNA, 16 nt, Human
cuaccuuucaaagcuu

SEQ ID NO: 2671290 - RNA, 23 nt, Human
cucaccucaugcccacccccugc

SEQ ID NO: 2671291 - RNA, 14 nt, Human
cucaccucaugccc

SEQ ID NO: 2671292 - RNA, 15 nt, Human
cucaccuagccugau

SEQ ID NO: 2671293 - RNA, 13 nt, Human
cucaccgcccauc

SEQ ID NO: 2671294 - RNA, 14 nt, Human
cucaccgcccauca

SEQ ID NO: 2671295 - RNA, 16 nt, Human
cucaccgcccaucagg

SEQ ID NO: 2671296 - RNA, 17 nt, Human
cucaccgcccaucaggg

SEQ ID NO: 2671297 - RNA, 15 nt, Human
cucaccucaugccca

SEQ ID NO: 2671298 - RNA, 17 nt, Human
cucaccucaugcccacc

SEQ ID NO: 2671299 - RNA, 14 nt, Human
cucacuucacccug

SEQ ID NO: 2671300 - RNA, 23 nt, Human
cucaaagaaaucuacuauauccc

SEQ ID NO: 2671301 - RNA, 22 nt, Human
cucaaagcacuguugagaagga

SEQ ID NO: 2671302 - RNA, 15 nt, Human
cucaaaguuugacag

SEQ ID NO: 2671303 - RNA, 21 nt, Human
cucaaaguuugacaggaaccu

SEQ ID NO: 2671304 - RNA, 13 nt, Human
cuauuuuuguaaa

SEQ ID NO: 2671305 - RNA, 17 nt, Human
cucaaaaaaagaaaaag

SEQ ID NO: 2671306 - RNA, 18 nt, Human
cucaaaaaaagaaaaaga

SEQ ID NO: 2671307 - RNA, 12 nt, Human
cuaucuccugac

SEQ ID NO: 2671308 - RNA, 14 nt, Human
cuaucuccugacag

SEQ ID NO: 2671309 - RNA, 15 nt, Human
cuaucuccugacaga

SEQ ID NO: 2671310 - RNA, 19 nt, Human
cuaucuccugacagaaggu

SEQ ID NO: 2671311 - RNA, 15 nt, Human
cucaaauacacauuu

SEQ ID NO: 2671312 - RNA, 16 nt, Human
cucaaauacacauuug

SEQ ID NO: 2671313 - RNA, 17 nt, Human
cucaaauacacauuugc

SEQ ID NO: 2671314 - RNA, 18 nt, Human
cucaaauacacauuugcu

SEQ ID NO: 2671315 - RNA, 23 nt, Human
cucaaagcuuggauuaaauacau

SEQ ID NO: 2671316 - RNA, 23 nt, Human
gccucuuguaucccuagugcucc

SEQ ID NO: 2671317 - RNA, 16 nt, Human
gccucuuguaaagacu

SEQ ID NO: 2671318 - RNA, 17 nt, Human
gccucuuguaaagacug

SEQ ID NO: 2671319 - RNA, 18 nt, Human
gccucuuguaaagacugg

SEQ ID NO: 2671320 - RNA, 12 nt, Human
gccucuuucccu

SEQ ID NO: 2671321 - RNA, 16 nt, Human
gccucuuucccuagga

SEQ ID NO: 2671322 - RNA, 23 nt, Human
gccucuuucaagcagucgugccu

SEQ ID NO: 2671323 - RNA, 15 nt, Human
gccuccauccaaggc

SEQ ID NO: 2671324 - RNA, 15 nt, Human
gccuccaggugcaga

SEQ ID NO: 2671325 - RNA, 16 nt, Human
gccuccaggugcagag

SEQ ID NO: 2671326 - RNA, 17 nt, Human
gccuccaggugcagagg

SEQ ID NO: 2671327 - RNA, 18 nt, Human
gccuccaggugcagaggu

SEQ ID NO: 2671328 - RNA, 16 nt, Human
gccuccauccaaggcc

SEQ ID NO: 2671329 - RNA, 19 nt, Human
gccuccuuagaaaaaaaau

SEQ ID NO: 2671330 - RNA, 21 nt, Human
gccugccccgcccccaguccc

SEQ ID NO: 2671331 - RNA, 20 nt, Human
gccugccccgcccccagucc

SEQ ID NO: 2671332 - RNA, 22 nt, Human
gccuggccuuguccucagccag

SEQ ID NO: 2671333 - RNA, 23 nt, Human
gccuggccuuguccucagccagu

SEQ ID NO: 2671334 - RNA, 12 nt, Human
gccuguguccau

SEQ ID NO: 2671335 - RNA, 14 nt, Human
gccuguguccaugc

SEQ ID NO: 2671336 - RNA, 21 nt, Human
gccuguggcgccgucuccagg

SEQ ID NO: 2671337 - RNA, 23 nt, Human
gccuguggcgccgucuccagggg

SEQ ID NO: 2671338 - RNA, 15 nt, Human
gccuguggcugucgg

SEQ ID NO: 2671339 - RNA, 23 nt, Human
gccuguggcugucggugggacuc

SEQ ID NO: 2671340 - RNA, 19 nt, Human
gccuguggcgccgucucca

SEQ ID NO: 2671341 - RNA, 17 nt, Human
gcgaucucuccacugug

SEQ ID NO: 2671342 - RNA, 18 nt, Human
gcgaucucuccacugugc

SEQ ID NO: 2671343 - RNA, 16 nt, Human
gcgaucucuccuggcc

SEQ ID NO: 2671344 - RNA, 18 nt, Human
gcgaucucuccuggccua

SEQ ID NO: 2671345 - RNA, 17 nt, Human
gccuagggcccccacag

SEQ ID NO: 2671346 - RNA, 17 nt, Human
gccuagcgaucucuccu

SEQ ID NO: 2671347 - RNA, 20 nt, Human
gccuagcgaucucuccuggc

SEQ ID NO: 2671348 - RNA, 21 nt, Human
gccuagcgaucucuccuggcc

SEQ ID NO: 2671349 - RNA, 22 nt, Human
gccuagcgaucucuccuggccu

SEQ ID NO: 2671350 - RNA, 23 nt, Human
gccgccgcuagguagagucugag

SEQ ID NO: 2671351 - RNA, 20 nt, Human
gccgccgcuagguagagucu

SEQ ID NO: 2671352 - RNA, 13 nt, Human
gccgccgccucuu

SEQ ID NO: 2671353 - RNA, 20 nt, Human
gccgccccaucugccccaca

SEQ ID NO: 2671354 - RNA, 15 nt, Human
gccgcccccuccuga

SEQ ID NO: 2671355 - RNA, 16 nt, Human
gccgcccccuccugaa

SEQ ID NO: 2671356 - RNA, 23 nt, Human
gccgcaucucacagcuaugcaaa

SEQ ID NO: 2671357 - RNA, 18 nt, Human
gccgcaucucacagcuau

SEQ ID NO: 2671358 - RNA, 15 nt, Human
gccgcaucucacagc

SEQ ID NO: 2671359 - RNA, 13 nt, Human
gcccucaagggug

SEQ ID NO: 2671360 - RNA, 13 nt, Human
gcccguccugccu

SEQ ID NO: 2671361 - RNA, 16 nt, Human
gcccuaaguuuguacu

SEQ ID NO: 2671362 - RNA, 16 nt, Human
gcccgggguggccaca

SEQ ID NO: 2671363 - RNA, 13 nt, Human
gcuccccugagga

SEQ ID NO: 2671364 - RNA, 12 nt, Human
gcuccccugagg

SEQ ID NO: 2671365 - RNA, 12 nt, Human
gcuccugcacuu

SEQ ID NO: 2671366 - RNA, 20 nt, Human
gcuccugcacuuacuugcuu

SEQ ID NO: 2671367 - RNA, 19 nt, Human
gcuccuggcccacugcauc

SEQ ID NO: 2671368 - RNA, 18 nt, Human
gcuccuggcccacugcau

SEQ ID NO: 2671369 - RNA, 20 nt, Human
gcuccuggcccacugcaucg

SEQ ID NO: 2671370 - RNA, 15 nt, Human
gcuccuggcccacug

SEQ ID NO: 2671371 - RNA, 14 nt, Human
gcuccuggcccacu

SEQ ID NO: 2671372 - RNA, 23 nt, Human
gcuccacucugcuucucugacuu

SEQ ID NO: 2671373 - RNA, 18 nt, Human
gcucccacuucugccaga

SEQ ID NO: 2671374 - RNA, 17 nt, Human
gcucccacuucugccag

SEQ ID NO: 2671375 - RNA, 13 nt, Human
gcucccaggagcc

SEQ ID NO: 2671376 - RNA, 17 nt, Human
gcucccagccucagcgc

SEQ ID NO: 2671377 - RNA, 15 nt, Human
gcucccagccucagc

SEQ ID NO: 2671378 - RNA, 14 nt, Human
gcucccagccucag

SEQ ID NO: 2671379 - RNA, 13 nt, Human
gcucccagccuca

SEQ ID NO: 2671380 - RNA, 12 nt, Human
gcucccagccuc

SEQ ID NO: 2671381 - RNA, 21 nt, Human
gcucccaggagccugcccagc

SEQ ID NO: 2671382 - RNA, 20 nt, Human
gcucccaggagccugcccag

SEQ ID NO: 2671383 - RNA, 17 nt, Human
gcuccacucugcuucuc

SEQ ID NO: 2671384 - RNA, 19 nt, Human
gcuccacucugcuucucug

SEQ ID NO: 2671385 - RNA, 20 nt, Human
gcuccacucugcuucucuga

SEQ ID NO: 2671386 - RNA, 21 nt, Human
gcuccacucugcuucucugac

SEQ ID NO: 2671387 - RNA, 13 nt, Human
gcuccacucugcu

SEQ ID NO: 2671388 - RNA, 15 nt, Human
gcuccacucugcuuc

SEQ ID NO: 2671389 - RNA, 16 nt, Human
gcuccacucugcuucu

SEQ ID NO: 2671390 - RNA, 23 nt, Human
gcuccaccagcaucaccugccug

SEQ ID NO: 2671391 - RNA, 18 nt, Human
gcuccaccagcaucaccu

SEQ ID NO: 2671392 - RNA, 20 nt, Human
gcuccaccagcaucaccugc

SEQ ID NO: 2671393 - RNA, 14 nt, Human
gcucugagcgccuc

SEQ ID NO: 2671394 - RNA, 17 nt, Human
gcucugagcgccuccau

SEQ ID NO: 2671395 - RNA, 18 nt, Human
gcucugagcgccuccauc

SEQ ID NO: 2671396 - RNA, 23 nt, Human
gcucugcaagaauugaagcagga

SEQ ID NO: 2671397 - RNA, 24 nt, Human
gcucgguacccggggcccagggca

SEQ ID NO: 2671398 - RNA, 23 nt, Human
gcucgguacccggggcccagggc

SEQ ID NO: 2671399 - RNA, 17 nt, Human
gcucgguacccggggcc

SEQ ID NO: 2671400 - RNA, 22 nt, Human
gcucguggacugagugggaagc

SEQ ID NO: 2671401 - RNA, 14 nt, Human
gcucuaaaagguaa

SEQ ID NO: 2671402 - RNA, 20 nt, Human
gcucuaaaagguaaugugug

SEQ ID NO: 2671403 - RNA, 23 nt, Human
gcucuaaaagguaauguguggau

SEQ ID NO: 2671404 - RNA, 18 nt, Human
gcuacugcacuccagccu

SEQ ID NO: 2671405 - RNA, 20 nt, Human
gcuacugcacuccagccugg

SEQ ID NO: 2671406 - RNA, 21 nt, Human
gcuacugcacuccagccuggg

SEQ ID NO: 2671407 - RNA, 16 nt, Human
gcgugugccugugugc

SEQ ID NO: 2671408 - RNA, 17 nt, Human
gcgugugccugugugcg

SEQ ID NO: 2671409 - RNA, 16 nt, Human
gcuaauucuacucaca

SEQ ID NO: 2671410 - RNA, 19 nt, Human
gcucagggccaugcugagg

SEQ ID NO: 2671411 - RNA, 21 nt, Human
gcucagacauguuuuccguga

SEQ ID NO: 2671412 - RNA, 20 nt, Human
gcucacugccaggccagccu

SEQ ID NO: 2671413 - RNA, 16 nt, Human
gcucagacauguuuuc

SEQ ID NO: 2671414 - RNA, 14 nt, Human
gcucacugccaggc

SEQ ID NO: 2671415 - RNA, 15 nt, Human
gcucacugccaggcc

SEQ ID NO: 2671416 - RNA, 17 nt, Human
gcucacugccaggccag

SEQ ID NO: 2671417 - RNA, 19 nt, Human
gcucacugccaggccagcc

SEQ ID NO: 2671418 - RNA, 12 nt, Human
gcucacugccag

SEQ ID NO: 2671419 - RNA, 13 nt, Human
gcucacugccagg

SEQ ID NO: 2671420 - RNA, 17 nt, Human
gcuauuuucuaaagacu

SEQ ID NO: 2671421 - RNA, 18 nt, Human
gcuauuuucuaaagacuu

SEQ ID NO: 2671422 - RNA, 22 nt, Human
gcuauuuucuaaagacuuguau

SEQ ID NO: 2671423 - RNA, 15 nt, Human
gcucaaaaaaugagc

SEQ ID NO: 2671424 - RNA, 12 nt, Human
gcuauuuuugua

SEQ ID NO: 2671425 - RNA, 13 nt, Human
gcuauuuuuguaa

SEQ ID NO: 2671426 - RNA, 15 nt, Human
gcuauuuuuguaaag

SEQ ID NO: 2671427 - RNA, 16 nt, Human
gcuauuuuuguaaagu

SEQ ID NO: 2671428 - RNA, 20 nt, Human
gcuauuuuuguaaaguuucc

SEQ ID NO: 2671429 - RNA, 17 nt, Human
gcucacucacagaguca

SEQ ID NO: 2671430 - RNA, 18 nt, Human
gcucacucacagagucaa

SEQ ID NO: 2671431 - RNA, 17 nt, Human
gcucugggauccugggg

SEQ ID NO: 2671432 - RNA, 23 nt, Human
gcuggagggaggcgggggcugcc

SEQ ID NO: 2671433 - RNA, 15 nt, Human
gcuggagucuccuga

SEQ ID NO: 2671434 - RNA, 16 nt, Human
gcuggagucuccugag

SEQ ID NO: 2671435 - RNA, 19 nt, Human
gcuggccuuuguaagugca

SEQ ID NO: 2671436 - RNA, 21 nt, Human
gcuggccuuuguaagugcagg

SEQ ID NO: 2671437 - RNA, 20 nt, Human
gcuggcgagagucuggcccu

SEQ ID NO: 2671438 - RNA, 17 nt, Human
gcuggcgagagucuggc

SEQ ID NO: 2671439 - RNA, 15 nt, Human
gcuggcgagagucug

SEQ ID NO: 2671440 - RNA, 23 nt, Human
gcuggguggcaccagcagccugg

SEQ ID NO: 2671441 - RNA, 22 nt, Human
gcuggguggcaccagcagccug

SEQ ID NO: 2671442 - RNA, 21 nt, Human
gcuggguggcaccagcagccu

SEQ ID NO: 2671443 - RNA, 12 nt, Human
gcuggcucugag

SEQ ID NO: 2671444 - RNA, 13 nt, Human
gcuggcuccugau

SEQ ID NO: 2671445 - RNA, 14 nt, Human
gcuggcuccugauc

SEQ ID NO: 2671446 - RNA, 21 nt, Human
gcuggcuccugauccacuuug

SEQ ID NO: 2671447 - RNA, 17 nt, Human
gcugggcggcugugcuu

SEQ ID NO: 2671448 - RNA, 17 nt, Human
gcugggccgggacccag

SEQ ID NO: 2671449 - RNA, 20 nt, Human
gcugggcccgacauggcucc

SEQ ID NO: 2671450 - RNA, 21 nt, Human
gcugggcccgacauggcuccg

SEQ ID NO: 2671451 - RNA, 22 nt, Human
gcugggcccgacauggcuccgg

SEQ ID NO: 2671452 - RNA, 22 nt, Human
gcuuugagaagccuucagcucc

SEQ ID NO: 2671453 - RNA, 14 nt, Human
gcuuugagaagccu

SEQ ID NO: 2671454 - RNA, 16 nt, Human
gcuuugagaagccuuc

SEQ ID NO: 2671455 - RNA, 14 nt, Human
gcuuccucccaaca

SEQ ID NO: 2671456 - RNA, 20 nt, Human
gcuuccucccaacaagcagc

SEQ ID NO: 2671457 - RNA, 22 nt, Human
gcuuccucuagaagccaaggga

SEQ ID NO: 2671458 - RNA, 23 nt, Human
gcuuccucuagaagccaagggaa

SEQ ID NO: 2671459 - RNA, 15 nt, Human
gcuuccucuagaagc

SEQ ID NO: 2671460 - RNA, 17 nt, Human
gcuuccucuagaagcca

SEQ ID NO: 2671461 - RNA, 20 nt, Human
gcuuccucuagaagccaagg

SEQ ID NO: 2671462 - RNA, 12 nt, Human
gcuuccuccugg

SEQ ID NO: 2671463 - RNA, 13 nt, Human
gcuuccuccugga

SEQ ID NO: 2671464 - RNA, 16 nt, Human
gcuuccuccuggaaau

SEQ ID NO: 2671465 - RNA, 16 nt, Human
gcuuugaauaaaugug

SEQ ID NO: 2671466 - RNA, 17 nt, Human
gcuuugaauaaaugugu

SEQ ID NO: 2671467 - RNA, 20 nt, Human
gcuugucuauacuccuuccc

SEQ ID NO: 2671468 - RNA, 18 nt, Human
gcuugugaaaauguguuc

SEQ ID NO: 2671469 - RNA, 13 nt, Human
gcuuguaguucuu

SEQ ID NO: 2671470 - RNA, 17 nt, Human
gcuuguaguucuuuaaa

SEQ ID NO: 2671471 - RNA, 16 nt, Human
gcuuguaguucuuuaa

SEQ ID NO: 2671472 - RNA, 12 nt, Human
gcuugagccggg

SEQ ID NO: 2671473 - RNA, 12 nt, Human
gcuucuugccuc

SEQ ID NO: 2671474 - RNA, 13 nt, Human
gcuucuugccucu

SEQ ID NO: 2671475 - RNA, 14 nt, Human
gcuucuugccucug

SEQ ID NO: 2671476 - RNA, 15 nt, Human
gcuucuugccucugu

SEQ ID NO: 2671477 - RNA, 16 nt, Human
gcuucuugccucugug

SEQ ID NO: 2671478 - RNA, 17 nt, Human
gcuucuugccucugugc

SEQ ID NO: 2671479 - RNA, 18 nt, Human
gcuucuugccucugugcu

SEQ ID NO: 2671480 - RNA, 14 nt, Human
gcuugagcucagga

SEQ ID NO: 2671481 - RNA, 17 nt, Human
gcuugagccgggccccu

SEQ ID NO: 2671482 - RNA, 18 nt, Human
gcuugagccgggccccug

SEQ ID NO: 2671483 - RNA, 21 nt, Human
gcuugagccgggccccugggc

SEQ ID NO: 2671484 - RNA, 22 nt, Human
gcuugagccgggccccugggcu

SEQ ID NO: 2671485 - RNA, 18 nt, Human
gcuucacggaagagccuu

SEQ ID NO: 2671486 - RNA, 19 nt, Human
gcuucacggaagagccuug

SEQ ID NO: 2671487 - RNA, 15 nt, Human
gcuucacggaagagc

SEQ ID NO: 2671488 - RNA, 17 nt, Human
gcuucacggaagagccu

SEQ ID NO: 2671489 - RNA, 16 nt, Human
gcuuauuguuucucug

SEQ ID NO: 2671490 - RNA, 22 nt, Human
ggaagacaaugugaaaagaaaa

SEQ ID NO: 2671491 - RNA, 13 nt, Human
ggaagagaaaaaa

SEQ ID NO: 2671492 - RNA, 15 nt, Human
ggaagagaaaaaaua

SEQ ID NO: 2671493 - RNA, 20 nt, Human
ggaagcccauccugaccagc

SEQ ID NO: 2671494 - RNA, 13 nt, Human
ggaagccccacau

SEQ ID NO: 2671495 - RNA, 17 nt, Human
ggaagcccauccugacc

SEQ ID NO: 2671496 - RNA, 18 nt, Human
ggaagcccauccugacca

SEQ ID NO: 2671497 - RNA, 11 nt, Human
ggaaggaagcc

SEQ ID NO: 2671498 - RNA, 16 nt, Human
ggaaggagaaguaaga

SEQ ID NO: 2671499 - RNA, 14 nt, Human
ggaauaaaaggcuu

SEQ ID NO: 2671500 - RNA, 15 nt, Human
ggaauaaaaggcuug

SEQ ID NO: 2671501 - RNA, 17 nt, Human
ggaauaaaaggcuugaa

SEQ ID NO: 2671502 - RNA, 18 nt, Human
ggaauaaaaggcuugaag

SEQ ID NO: 2671503 - RNA, 22 nt, Human
ggaauaaaaggcuugaagcugu

SEQ ID NO: 2671504 - RNA, 21 nt, Human
ggaauaacuuuuacacgacca

SEQ ID NO: 2671505 - RNA, 20 nt, Human
ggaauccaagccuccacagc

SEQ ID NO: 2671506 - RNA, 21 nt, Human
ggaauccaagccuccacagcg

SEQ ID NO: 2671507 - RNA, 20 nt, Human
ggaaucccacuaaugcaaac

SEQ ID NO: 2671508 - RNA, 12 nt, Human
ggaauccuggca

SEQ ID NO: 2671509 - RNA, 13 nt, Human
ggaauccuggcag

SEQ ID NO: 2671510 - RNA, 21 nt, Human
ggaauccuggcagcccagaga

SEQ ID NO: 2671511 - RNA, 18 nt, Human
ggaaugaaaaaagcuuua

SEQ ID NO: 2671512 - RNA, 19 nt, Human
ggacagcuugagccgggcc

SEQ ID NO: 2671513 - RNA, 20 nt, Human
ggacacgcgcgucgccgcca

SEQ ID NO: 2671514 - RNA, 16 nt, Human
ggacccccguggggca

SEQ ID NO: 2671515 - RNA, 22 nt, Human
ggacccccguggggcagggagc

SEQ ID NO: 2671516 - RNA, 14 nt, Human
ggacggcggcagua

SEQ ID NO: 2671517 - RNA, 12 nt, Human
ggacggccaaga

SEQ ID NO: 2671518 - RNA, 17 nt, Human
ggacggccaagaaugua

SEQ ID NO: 2671519 - RNA, 16 nt, Human
ggacggguuagacagc

SEQ ID NO: 2671520 - RNA, 17 nt, Human
ggacggugcccaagcca

SEQ ID NO: 2671521 - RNA, 19 nt, Human
ggacggugcccaagccaga

SEQ ID NO: 2671522 - RNA, 21 nt, Human
ggacggugcccaagccagagg

SEQ ID NO: 2671523 - RNA, 17 nt, Human
ggacgucagacuuggcu

SEQ ID NO: 2671524 - RNA, 18 nt, Human
ggacccuuuuuguuauga

SEQ ID NO: 2671525 - RNA, 16 nt, Human
ggacccuuauaaaauc

SEQ ID NO: 2671526 - RNA, 22 nt, Human
ggacccugugacauggugccug

SEQ ID NO: 2671527 - RNA, 23 nt, Human
ggacccugugacauggugccuga

SEQ ID NO: 2671528 - RNA, 16 nt, Human
ggacccugugacaugg

SEQ ID NO: 2671529 - RNA, 19 nt, Human
ggacucaguggguuaacau

SEQ ID NO: 2671530 - RNA, 17 nt, Human
ggacucagccuucagac

SEQ ID NO: 2671531 - RNA, 15 nt, Human
ggacucagccuucag

SEQ ID NO: 2671532 - RNA, 21 nt, Human
ggacucagccuucagacagag

SEQ ID NO: 2671533 - RNA, 24 nt, Human
ggagaaagcuugguucugugaaca

SEQ ID NO: 2671534 - RNA, 12 nt, Human
ggcauaaaguaa

SEQ ID NO: 2671535 - RNA, 21 nt, Human
ggccaguccaggcugccgugg

SEQ ID NO: 2671536 - RNA, 16 nt, Human
ggcauagaggcuucuc

SEQ ID NO: 2671537 - RNA, 22 nt, Human
ggcauagaggcuucuccgccag

SEQ ID NO: 2671538 - RNA, 13 nt, Human
ggccagucugugg

SEQ ID NO: 2671539 - RNA, 14 nt, Human
ggccagucugugga

SEQ ID NO: 2671540 - RNA, 23 nt, Human
ggccagucuguggaucagagaug

SEQ ID NO: 2671541 - RNA, 15 nt, Human
ggccagucuguggau

SEQ ID NO: 2671542 - RNA, 18 nt, Human
ggccagucuguggaucag

SEQ ID NO: 2671543 - RNA, 19 nt, Human
ggccucagcucaaugcagu

SEQ ID NO: 2671544 - RNA, 13 nt, Human
ggcccuuugcugu

SEQ ID NO: 2671545 - RNA, 14 nt, Human
ggcccuuugcuguc

SEQ ID NO: 2671546 - RNA, 14 nt, Human
ggcaggggacagga

SEQ ID NO: 2671547 - RNA, 14 nt, Human
ggcaguuggccaga

SEQ ID NO: 2671548 - RNA, 12 nt, Human
ggacgugcuggg

SEQ ID NO: 2671549 - RNA, 12 nt, Human
ggagagacagcu

SEQ ID NO: 2671550 - RNA, 21 nt, Human
ggagacuuugaugucagcagu

SEQ ID NO: 2671551 - RNA, 19 nt, Human
ggagacuuugaugucagca

SEQ ID NO: 2671552 - RNA, 22 nt, Human
ggagacuugccagagccgggca

SEQ ID NO: 2671553 - RNA, 21 nt, Human
ggcacugccgccgcuagguag

SEQ ID NO: 2671554 - RNA, 21 nt, Human
ggcacuucauguaaaguguca

SEQ ID NO: 2671555 - RNA, 14 nt, Human
ggcacuugccuggg

SEQ ID NO: 2671556 - RNA, 15 nt, Human
ggcacuugccugggu

SEQ ID NO: 2671557 - RNA, 16 nt, Human
ggcacuugccuggguc

SEQ ID NO: 2671558 - RNA, 15 nt, Human
ggcucacugccaggc

SEQ ID NO: 2671559 - RNA, 16 nt, Human
ggcucacugccaggcc

SEQ ID NO: 2671560 - RNA, 18 nt, Human
ggcucacugccaggccag

SEQ ID NO: 2671561 - RNA, 19 nt, Human
ggcucacugccaggccagc

SEQ ID NO: 2671562 - RNA, 20 nt, Human
ggcucacugccaggccagcc

SEQ ID NO: 2671563 - RNA, 22 nt, Human
ggcucacugccaggccagccuc

SEQ ID NO: 2671564 - RNA, 21 nt, Human
ggcucacugccaggccagccu

SEQ ID NO: 2671565 - RNA, 12 nt, Human
ggcucagggugg

SEQ ID NO: 2671566 - RNA, 21 nt, Human
ggcucagcucggggagccuua

SEQ ID NO: 2671567 - RNA, 22 nt, Human
ggcugcggcguacaggcuggcg

SEQ ID NO: 2671568 - RNA, 21 nt, Human
ggcugcggcguacaggcuggc

SEQ ID NO: 2671569 - RNA, 19 nt, Human
ggcugcggcguacaggcug

SEQ ID NO: 2671570 - RNA, 23 nt, Human
ggcucuauuccaauaaacuauga

SEQ ID NO: 2671571 - RNA, 20 nt, Human
ggcugccucccuuguggcag

SEQ ID NO: 2671572 - RNA, 17 nt, Human
gggacaucacagggugg

SEQ ID NO: 2671573 - RNA, 18 nt, Human
gggacaucacaggguggg

SEQ ID NO: 2671574 - RNA, 22 nt, Human
gggacaucacagggugggccuc

SEQ ID NO: 2671575 - RNA, 16 nt, Human
gggaaccuccccagcc

SEQ ID NO: 2671576 - RNA, 19 nt, Human
gggaaccuccccagccugc

SEQ ID NO: 2671577 - RNA, 18 nt, Human
gggaaccuccccagccug

SEQ ID NO: 2671578 - RNA, 20 nt, Human
gggaaccuccccagccugcg

SEQ ID NO: 2671579 - RNA, 13 nt, Human
gggaaccuguguc

SEQ ID NO: 2671580 - RNA, 14 nt, Human
gggaaccugugucc

SEQ ID NO: 2671581 - RNA, 15 nt, Human
gggaaccuguguccg

SEQ ID NO: 2671582 - RNA, 18 nt, Human
gggaagaagcucucuccu

SEQ ID NO: 2671583 - RNA, 18 nt, Human
ggcuucugugaugagcug

SEQ ID NO: 2671584 - RNA, 21 nt, Human
ggcuucugugaugagcugauc

SEQ ID NO: 2671585 - RNA, 14 nt, Human
gggaacaugccccc

SEQ ID NO: 2671586 - RNA, 15 nt, Human
gggaacaugcccccu

SEQ ID NO: 2671587 - RNA, 16 nt, Human
ggcuucugugcccaga

SEQ ID NO: 2671588 - RNA, 19 nt, Human
ggcuggguggcaccagcag

SEQ ID NO: 2671589 - RNA, 18 nt, Human
aaaacugauugaaugaua

SEQ ID NO: 2671590 - RNA, 13 nt, Human
aaaacuucagaag

SEQ ID NO: 2671591 - RNA, 12 nt, Human
aaaacuguguug

SEQ ID NO: 2671592 - RNA, 17 nt, Human
aaaacuguguugccaca

SEQ ID NO: 2671593 - RNA, 12 nt, Human
aaaagauucuuc

SEQ ID NO: 2671594 - RNA, 13 nt, Human
aaaacugaaaaau

SEQ ID NO: 2671595 - RNA, 12 nt, Human
aaaacucuuuga

SEQ ID NO: 2671596 - RNA, 21 nt, Human
aaaacucuacuuaauccaaug

SEQ ID NO: 2671597 - RNA, 13 nt, Human
aaaaccuuuuacu

SEQ ID NO: 2671598 - RNA, 15 nt, Human
aaaaccuuuuacugg

SEQ ID NO: 2671599 - RNA, 23 nt, Human
aaaaccuuuuacugguugcaugg

SEQ ID NO: 2671600 - RNA, 19 nt, Human
gggaccacccugagccggc

SEQ ID NO: 2671601 - RNA, 17 nt, Human
gggaccacccugagccg

SEQ ID NO: 2671602 - RNA, 12 nt, Human
aaaacccaagug

SEQ ID NO: 2671603 - RNA, 18 nt, Human
aaaaccaccaaaaacaaa

SEQ ID NO: 2671604 - RNA, 22 nt, Human
aaaacaucauuccuuuuuauuu

SEQ ID NO: 2671605 - RNA, 15 nt, Human
gggaggucacuggaa

SEQ ID NO: 2671606 - RNA, 19 nt, Human
gggaggcugaggcaggaga

SEQ ID NO: 2671607 - RNA, 18 nt, Human
gggaggucaaggcugcag

SEQ ID NO: 2671608 - RNA, 13 nt, Human
gggaggcuucccc

SEQ ID NO: 2671609 - RNA, 22 nt, Human
gggagggauucugguuccaggg

SEQ ID NO: 2671610 - RNA, 15 nt, Human
gggagggggauccga

SEQ ID NO: 2671611 - RNA, 17 nt, Human
gggagagggaggucacu

SEQ ID NO: 2671612 - RNA, 22 nt, Human
gggagccaaaaucucaagaaau

SEQ ID NO: 2671613 - RNA, 11 nt, Human
gggagccagcc

SEQ ID NO: 2671614 - RNA, 19 nt, Human
gggagccaugcgcccccuc

SEQ ID NO: 2671615 - RNA, 16 nt, Human
gggagagccugcuggc

SEQ ID NO: 2671616 - RNA, 12 nt, Human
gggagagccugc

SEQ ID NO: 2671617 - RNA, 13 nt, Human
gggagagccugcu

SEQ ID NO: 2671618 - RNA, 10 nt, Human
aaaagcauuu

SEQ ID NO: 2671619 - RNA, 17 nt, Human
aaaagcauuuuucaaua

SEQ ID NO: 2671620 - RNA, 21 nt, Human
aaaagcauuuuucaauauauu

SEQ ID NO: 2671621 - RNA, 16 nt, Human
aaaagccuaaucacag

SEQ ID NO: 2671622 - RNA, 13 nt, Human
aaaaggaaagaaa

SEQ ID NO: 2671623 - RNA, 14 nt, Human
aaaaggaaagaaaa

SEQ ID NO: 2671624 - RNA, 17 nt, Human
guagaacuccaggcccu

SEQ ID NO: 2671625 - RNA, 16 nt, Human
guagaacugucuguga

SEQ ID NO: 2671626 - RNA, 15 nt, Human
guagaacuuuguaua

SEQ ID NO: 2671627 - RNA, 14 nt, Human
guagaacuuuguau

SEQ ID NO: 2671628 - RNA, 13 nt, Human
guagaacuuugua

SEQ ID NO: 2671629 - RNA, 14 nt, Human
guagaaaugaugau

SEQ ID NO: 2671630 - RNA, 21 nt, Human
guagaacuuuguauaguuaug

SEQ ID NO: 2671631 - RNA, 19 nt, Human
guagaccuuguuacuucug

SEQ ID NO: 2671632 - RNA, 20 nt, Human
guagaccuuguuacuucuga

SEQ ID NO: 2671633 - RNA, 21 nt, Human
guagaccuuguuacuucugag

SEQ ID NO: 2671634 - RNA, 22 nt, Human
guagaccuuguuacuucugagg

SEQ ID NO: 2671635 - RNA, 14 nt, Human
guagcccucccacu

SEQ ID NO: 2671636 - RNA, 15 nt, Human
guagcccucccacuu

SEQ ID NO: 2671637 - RNA, 17 nt, Human
guagcccucccacuuug

SEQ ID NO: 2671638 - RNA, 12 nt, Human
guagagccagcu

SEQ ID NO: 2671639 - RNA, 14 nt, Human
guagagccagcuug

SEQ ID NO: 2671640 - RNA, 23 nt, Human
guacuuaaaugguaauaagcacu

SEQ ID NO: 2671641 - RNA, 18 nt, Human
guacuguuacugggcccu

SEQ ID NO: 2671642 - RNA, 17 nt, Human
guacuguucggaagggg

SEQ ID NO: 2671643 - RNA, 22 nt, Human
guacuguucggaagggguuccu

SEQ ID NO: 2671644 - RNA, 12 nt, Human
guacugaauuuu

SEQ ID NO: 2671645 - RNA, 14 nt, Human
guacugaauuuuuu

SEQ ID NO: 2671646 - RNA, 18 nt, Human
guacugaauuuuuuugua

SEQ ID NO: 2671647 - RNA, 19 nt, Human
guacugaauuuuuuuguaa

SEQ ID NO: 2671648 - RNA, 20 nt, Human
guacugaauuuuuuuguaau

SEQ ID NO: 2671649 - RNA, 22 nt, Human
guacugaauuuuuuuguaauaa

SEQ ID NO: 2671650 - RNA, 21 nt, Human
guacucucaucacuacaguau

SEQ ID NO: 2671651 - RNA, 23 nt, Human
aaaucauaggcaccuuuuacugu

SEQ ID NO: 2671652 - RNA, 22 nt, Human
aaaucagagacaaaauauuucc

SEQ ID NO: 2671653 - RNA, 18 nt, Human
aaaucagccugcuccagc

SEQ ID NO: 2671654 - RNA, 12 nt, Human
aaaucagccugc

SEQ ID NO: 2671655 - RNA, 19 nt, Human
aaaucagccguguaaccau

SEQ ID NO: 2671656 - RNA, 19 nt, Human
aaauauuaggcuuaaaaac

SEQ ID NO: 2671657 - RNA, 14 nt, Human
aaauauuaagcaug

SEQ ID NO: 2671658 - RNA, 15 nt, Human
aaauauuaagcaugu

SEQ ID NO: 2671659 - RNA, 17 nt, Human
aaauauucacuggcccc

SEQ ID NO: 2671660 - RNA, 16 nt, Human
aaaucagagacaaaau

SEQ ID NO: 2671661 - RNA, 21 nt, Human
aaaucagccaaguuuuauaau

SEQ ID NO: 2671662 - RNA, 13 nt, Human
guaccaagugaaa

SEQ ID NO: 2671663 - RNA, 14 nt, Human
guacauuucuauaa

SEQ ID NO: 2671664 - RNA, 21 nt, Human
guacauuucuauaaauagaug

SEQ ID NO: 2671665 - RNA, 22 nt, Human
guacauuugggaguuuuuauga

SEQ ID NO: 2671666 - RNA, 14 nt, Human
guaccagcugcgcu

SEQ ID NO: 2671667 - RNA, 16 nt, Human
guaccagcugcgcuug

SEQ ID NO: 2671668 - RNA, 19 nt, Human
guaccagcugcgcuugcuu

SEQ ID NO: 2671669 - RNA, 17 nt, Human
guaccagcugcgcuugc

SEQ ID NO: 2671670 - RNA, 19 nt, Human
guaauuuaaaugaaagaaa

SEQ ID NO: 2671671 - RNA, 21 nt, Human
guaauuuaaaugaaagaaaau

SEQ ID NO: 2671672 - RNA, 23 nt, Human
guaauuuaaaugaaagaaaauug

SEQ ID NO: 2671673 - RNA, 21 nt, Human
guaauuuaaaauaauuauaua

SEQ ID NO: 2671674 - RNA, 21 nt, Human
guaauuucuuuuuuuccuuuu

SEQ ID NO: 2671675 - RNA, 13 nt, Human
guaauuugaagau

SEQ ID NO: 2671676 - RNA, 14 nt, Human
guaauuugaagauu

SEQ ID NO: 2671677 - RNA, 15 nt, Human
guaaucccagcacuu

SEQ ID NO: 2671678 - RNA, 15 nt, Human
guaaucauuuguuua

SEQ ID NO: 2671679 - RNA, 18 nt, Human
guaaucauuuguuuacau

SEQ ID NO: 2671680 - RNA, 15 nt, Human
guaauaaacuuuaau

SEQ ID NO: 2671681 - RNA, 12 nt, Human
guaacugucagg

SEQ ID NO: 2671682 - RNA, 23 nt, Human
guaacugucaggcugaaaacaau

SEQ ID NO: 2671683 - RNA, 13 nt, Human
guaacuguccugu

SEQ ID NO: 2671684 - RNA, 15 nt, Human
guaacuguccugucc

SEQ ID NO: 2671685 - RNA, 16 nt, Human
guaacuguccuguccu

SEQ ID NO: 2671686 - RNA, 17 nt, Human
guaacuguccuguccug

SEQ ID NO: 2671687 - RNA, 16 nt, Human
guaaacuuuuugugcu

SEQ ID NO: 2671688 - RNA, 16 nt, Human
guaaacuucugcaaca

SEQ ID NO: 2671689 - RNA, 17 nt, Human
guacacugccugccuua

SEQ ID NO: 2671690 - RNA, 13 nt, Human
guacacugccugc

SEQ ID NO: 2671691 - RNA, 10 nt, Human
guaauuuaaa

SEQ ID NO: 2671692 - RNA, 18 nt, Human
aaauacacauagcaugua

SEQ ID NO: 2671693 - RNA, 12 nt, Human
aaauacacauuu

SEQ ID NO: 2671694 - RNA, 13 nt, Human
aaauacacauuug

SEQ ID NO: 2671695 - RNA, 14 nt, Human
aaauacacauuugc

SEQ ID NO: 2671696 - RNA, 15 nt, Human
aaauacacauuugcu

SEQ ID NO: 2671697 - RNA, 22 nt, Human
aaauacacauuugcuacuguug

SEQ ID NO: 2671698 - RNA, 19 nt, Human
aaauacaacuuaaauaaua

SEQ ID NO: 2671699 - RNA, 12 nt, Human
aaauacaugaag

SEQ ID NO: 2671700 - RNA, 14 nt, Human
aaauacaugaagcu

SEQ ID NO: 2671701 - RNA, 20 nt, Human
aaauacaugaagcuucaugc

SEQ ID NO: 2671702 - RNA, 15 nt, Human
aaauacauagugaaa

SEQ ID NO: 2671703 - RNA, 17 nt, Human
aaauacauagugaaaau

SEQ ID NO: 2671704 - RNA, 15 nt, Human
aaauacaguacuguu

SEQ ID NO: 2671705 - RNA, 15 nt, Human
aaauacuauuuaaga

SEQ ID NO: 2671706 - RNA, 16 nt, Human
aaauacuauuuaagau

SEQ ID NO: 2671707 - RNA, 18 nt, Human
aaauacuauuuaagaugu

SEQ ID NO: 2671708 - RNA, 21 nt, Human
aaauacuauuuaagaugugaa

SEQ ID NO: 2671709 - RNA, 22 nt, Human
aaauacuauuuaagaugugaaa

SEQ ID NO: 2671710 - RNA, 19 nt, Human
aaauacaugcauauaauga

SEQ ID NO: 2671711 - RNA, 19 nt, Human
aaauacaugccacaucaaa

SEQ ID NO: 2671712 - RNA, 23 nt, Human
aaauacaugccacaucaaaccuu

SEQ ID NO: 2671713 - RNA, 18 nt, Human
aaauacauuguauauaug

SEQ ID NO: 2671714 - RNA, 16 nt, Human
aaaguaguccugugaa

SEQ ID NO: 2671715 - RNA, 20 nt, Human
aaagguauuauacaugugau

SEQ ID NO: 2671716 - RNA, 16 nt, Human
aaagguaaugugugga

SEQ ID NO: 2671717 - RNA, 12 nt, Human
aaaguagggggc

SEQ ID NO: 2671718 - RNA, 12 nt, Human
aaaguauucuuc

SEQ ID NO: 2671719 - RNA, 22 nt, Human
aaaguauucuucucuuccuuuu

SEQ ID NO: 2671720 - RNA, 20 nt, Human
aaauaacuggaacaaauuau

SEQ ID NO: 2671721 - RNA, 15 nt, Human
aaauaacccauaauu

SEQ ID NO: 2671722 - RNA, 12 nt, Human
aaauaacaguau

SEQ ID NO: 2671723 - RNA, 15 nt, Human
aaauaaaaacuaauu

SEQ ID NO: 2671724 - RNA, 14 nt, Human
aaauaagaaauaau

SEQ ID NO: 2671725 - RNA, 16 nt, Human
aaauaagaaauaaugc

SEQ ID NO: 2671726 - RNA, 20 nt, Human
aaauaagaacgaggauuuua

SEQ ID NO: 2671727 - RNA, 15 nt, Human
aaauaauaauaaugu

SEQ ID NO: 2671728 - RNA, 22 nt, Human
aaauaauucuuuuuuauuaauc

SEQ ID NO: 2671729 - RNA, 19 nt, Human
guaaacagccucuuuuuga

SEQ ID NO: 2671730 - RNA, 20 nt, Human
guaaacaguuuuuauuaaaa

SEQ ID NO: 2671731 - RNA, 12 nt, Human
guaaacauuuau

SEQ ID NO: 2671732 - RNA, 15 nt, Human
aaagagcccuugccu

SEQ ID NO: 2671733 - RNA, 14 nt, Human
aaagaugcuucuca

SEQ ID NO: 2671734 - RNA, 17 nt, Human
aaagaugcuucucacug

SEQ ID NO: 2671735 - RNA, 19 nt, Human
aaagaugcuucucacugcc

SEQ ID NO: 2671736 - RNA, 19 nt, Human
aaagaggcaccaggaagcc

SEQ ID NO: 2671737 - RNA, 18 nt, Human
aaagagcccuugccuccc

SEQ ID NO: 2671738 - RNA, 13 nt, Human
aaagacuggcuuu

SEQ ID NO: 2671739 - RNA, 21 nt, Human
aaagacuggcuuuuauuaaug

SEQ ID NO: 2671740 - RNA, 23 nt, Human
aaagacuggcuuuuauuaaugca

SEQ ID NO: 2671741 - RNA, 15 nt, Human
aaagacugguuuucu

SEQ ID NO: 2671742 - RNA, 16 nt, Human
aaagacugguuuucug

SEQ ID NO: 2671743 - RNA, 17 nt, Human
aaagacugguuuucugc

SEQ ID NO: 2671744 - RNA, 15 nt, Human
aaagacucuugggag

SEQ ID NO: 2671745 - RNA, 12 nt, Human
aaagacuggcuu

SEQ ID NO: 2671746 - RNA, 11 nt, Human
gguccuuccug

SEQ ID NO: 2671747 - RNA, 15 nt, Human
gguccuguccccgca

SEQ ID NO: 2671748 - RNA, 12 nt, Human
gguccugucccc

SEQ ID NO: 2671749 - RNA, 20 nt, Human
gguccugauuucuagaaccc

SEQ ID NO: 2671750 - RNA, 17 nt, Human
aaagcaauaaaugaaug

SEQ ID NO: 2671751 - RNA, 15 nt, Human
aaagcaauaaaugaa

SEQ ID NO: 2671752 - RNA, 12 nt, Human
aaagcaauagaa

SEQ ID NO: 2671753 - RNA, 13 nt, Human
aaagcaauagaaa

SEQ ID NO: 2671754 - RNA, 15 nt, Human
aaagcaauagaaaca

SEQ ID NO: 2671755 - RNA, 16 nt, Human
aaagcaauagaaacaa

SEQ ID NO: 2671756 - RNA, 18 nt, Human
aaagcaauauuuuggagu

SEQ ID NO: 2671757 - RNA, 13 nt, Human
aaagacacugccu

SEQ ID NO: 2671758 - RNA, 12 nt, Human
aaagacacugcc

SEQ ID NO: 2671759 - RNA, 12 nt, Human
aaacuuuucuag

SEQ ID NO: 2671760 - RNA, 13 nt, Human
aaacuuuucuaga

SEQ ID NO: 2671761 - RNA, 19 nt, Human
aaagacacugccugggcug

SEQ ID NO: 2671762 - RNA, 16 nt, Human
aaagacacugccuggg

SEQ ID NO: 2671763 - RNA, 17 nt, Human
aaagacacugccugggc

SEQ ID NO: 2671764 - RNA, 16 nt, Human
aaagacaguguaugua

SEQ ID NO: 2671765 - RNA, 22 nt, Human
aaagacaguguauguagaagca

SEQ ID NO: 2671766 - RNA, 22 nt, Human
aaagaccuggggcugcugugaa

SEQ ID NO: 2671767 - RNA, 22 nt, Human
aaagacccuccuauucuauaaa

SEQ ID NO: 2671768 - RNA, 13 nt, Human
aaacuuugggaaa

SEQ ID NO: 2671769 - RNA, 17 nt, Human
aaacuuugggaaaacau

SEQ ID NO: 2671770 - RNA, 20 nt, Human
aaacuuugggaaaacauguu

SEQ ID NO: 2671771 - RNA, 20 nt, Human
ggguggccacagcgccagcc

SEQ ID NO: 2671772 - RNA, 24 nt, Human
aaacuuggcucgaaucucugugcc

SEQ ID NO: 2671773 - RNA, 23 nt, Human
aaacuuggugacuugauccacua

SEQ ID NO: 2671774 - RNA, 13 nt, Human
aaagggauauuuu

SEQ ID NO: 2671775 - RNA, 15 nt, Human
aaaggggugcuuuua

SEQ ID NO: 2671776 - RNA, 15 nt, Human
aaaggaagcacucug

SEQ ID NO: 2671777 - RNA, 17 nt, Human
aaaggaacauugugucu

SEQ ID NO: 2671778 - RNA, 17 nt, Human
aaaggagagcuagcagc

SEQ ID NO: 2671779 - RNA, 21 nt, Human
aaaggagagcuagcagcaggg

SEQ ID NO: 2671780 - RNA, 22 nt, Human
gguggaucacgaggucaggaga

SEQ ID NO: 2671781 - RNA, 14 nt, Human
aaagcucugaccac

SEQ ID NO: 2671782 - RNA, 20 nt, Human
aaagcuccuggggcguccag

SEQ ID NO: 2671783 - RNA, 18 nt, Human
aaagcuauuuaugggccc

SEQ ID NO: 2671784 - RNA, 22 nt, Human
aaagcugcccacuguuucucuu

SEQ ID NO: 2671785 - RNA, 24 nt, Human
aaagcugcccacuguuucucuuga

SEQ ID NO: 2671786 - RNA, 11 nt, Human
ggugcagaggu

SEQ ID NO: 2671787 - RNA, 19 nt, Human
ggugcagagguacccuggg

SEQ ID NO: 2671788 - RNA, 22 nt, Human
ggugcagagguacccugggugu

SEQ ID NO: 2671789 - RNA, 15 nt, Human
ggugcugggaggagg

SEQ ID NO: 2671790 - RNA, 15 nt, Human
gguggaggcuuccug

SEQ ID NO: 2671791 - RNA, 20 nt, Human
gguggaaggguagagaggcg

SEQ ID NO: 2671792 - RNA, 21 nt, Human
ggugcuuuuauagaggcuagc

SEQ ID NO: 2671793 - RNA, 19 nt, Human
gguggaagaagggagaaga

SEQ ID NO: 2671794 - RNA, 20 nt, Human
ggugcugggaggagggagag

SEQ ID NO: 2671795 - RNA, 19 nt, Human
ggugcuuuuauagaggcua

SEQ ID NO: 2671796 - RNA, 13 nt, Human
ggucgaggcagga

SEQ ID NO: 2671797 - RNA, 13 nt, Human
aaacucaucugga

SEQ ID NO: 2671798 - RNA, 17 nt, Human
aaacucauauuacaaaa

SEQ ID NO: 2671799 - RNA, 22 nt, Human
aaacucauauuacaaaaacaaa

SEQ ID NO: 2671800 - RNA, 16 nt, Human
aaacucaucugaaaug

SEQ ID NO: 2671801 - RNA, 17 nt, Human
aaacucaucugaaaugu

SEQ ID NO: 2671802 - RNA, 13 nt, Human
aaacucacuguga

SEQ ID NO: 2671803 - RNA, 22 nt, Human
aaacucacugugaucaauauuu

SEQ ID NO: 2671804 - RNA, 17 nt, Human
aaacucaggcaaagaaa

SEQ ID NO: 2671805 - RNA, 19 nt, Human
aaacucaggcaaagaaaau

SEQ ID NO: 2671806 - RNA, 13 nt, Human
aaacucaaugcuu

SEQ ID NO: 2671807 - RNA, 14 nt, Human
aaacucaaugcuuu

SEQ ID NO: 2671808 - RNA, 18 nt, Human
aaacucaaugcuuuauuu

SEQ ID NO: 2671809 - RNA, 23 nt, Human
aaacucaaugcuuuauuuguaaa

SEQ ID NO: 2671810 - RNA, 14 nt, Human
aaacguccucuuua

SEQ ID NO: 2671811 - RNA, 23 nt, Human
aaacguccucuuuaguuuuuggu

SEQ ID NO: 2671812 - RNA, 18 nt, Human
aaacuauauuuugucaua

SEQ ID NO: 2671813 - RNA, 17 nt, Human
aaacuauauuuugucau

SEQ ID NO: 2671814 - RNA, 13 nt, Human
aaacuauaaaaca

SEQ ID NO: 2671815 - RNA, 17 nt, Human
aaacuauaaaacaaaaa

SEQ ID NO: 2671816 - RNA, 17 nt, Human
aaacgggaacaugcccc

SEQ ID NO: 2671817 - RNA, 19 nt, Human
aaacgggaacaugcccccu

SEQ ID NO: 2671818 - RNA, 20 nt, Human
aaacgggaacaugcccccug

SEQ ID NO: 2671819 - RNA, 21 nt, Human
aaacugucgugucauacucga

SEQ ID NO: 2671820 - RNA, 22 nt, Human
aaacugcuucccuuacuuugcu

SEQ ID NO: 2671821 - RNA, 20 nt, Human
aaacucuaucggagaacaug

SEQ ID NO: 2671822 - RNA, 22 nt, Human
aaacucuaucggagaacaugaa

SEQ ID NO: 2671823 - RNA, 14 nt, Human
aaacuguguugcca

SEQ ID NO: 2671824 - RNA, 15 nt, Human
aaacuguguugccac

SEQ ID NO: 2671825 - RNA, 16 nt, Human
aaacuguguugccaca

SEQ ID NO: 2671826 - RNA, 17 nt, Human
aaacuguguugccacag

SEQ ID NO: 2671827 - RNA, 19 nt, Human
ggguggcaccagcagccug

SEQ ID NO: 2671828 - RNA, 21 nt, Human
ggguggccgcugaguggcagg

SEQ ID NO: 2671829 - RNA, 17 nt, Human
ggguggccgcugagugg

SEQ ID NO: 2671830 - RNA, 23 nt, Human
aaaccaagucaagugaaaaagga

SEQ ID NO: 2671831 - RNA, 15 nt, Human
aaacgggcucagcaa

SEQ ID NO: 2671832 - RNA, 22 nt, Human
aaaccuuuuacugguugcaugg

SEQ ID NO: 2671833 - RNA, 23 nt, Human
gggucggaacccaagcuuagaac

SEQ ID NO: 2671834 - RNA, 14 nt, Human
gggucggcugacca

SEQ ID NO: 2671835 - RNA, 15 nt, Human
gggucggcugaccau

SEQ ID NO: 2671836 - RNA, 12 nt, Human
ggguccuuccug

SEQ ID NO: 2671837 - RNA, 17 nt, Human
gggucccuagcagccca

SEQ ID NO: 2671838 - RNA, 13 nt, Human
ggguccuuccuga

SEQ ID NO: 2671839 - RNA, 13 nt, Human
ggggguggaggcu

SEQ ID NO: 2671840 - RNA, 18 nt, Human
gggggucucacccaugca

SEQ ID NO: 2671841 - RNA, 21 nt, Human
ggggccuagcgaucucuccug

SEQ ID NO: 2671842 - RNA, 18 nt, Human
gggggcuagggagacgcc

SEQ ID NO: 2671843 - RNA, 12 nt, Human
gggggcuuucug

SEQ ID NO: 2671844 - RNA, 16 nt, Human
aaacauguuaaugaca

SEQ ID NO: 2671845 - RNA, 21 nt, Human
aaacauguuaaugacaauauu

SEQ ID NO: 2671846 - RNA, 19 nt, Human
ggggaagagauccaaagac

SEQ ID NO: 2671847 - RNA, 12 nt, Human
ggggaaucuaag

SEQ ID NO: 2671848 - RNA, 11 nt, Human
ggggacccugu

SEQ ID NO: 2671849 - RNA, 21 nt, Human
ggggacccaauguaggagcug

SEQ ID NO: 2671850 - RNA, 13 nt, Human
ggggacccagugc

SEQ ID NO: 2671851 - RNA, 15 nt, Human
ggggacccagugcag

SEQ ID NO: 2671852 - RNA, 21 nt, Human
ggggacccagugcagaaugua

SEQ ID NO: 2671853 - RNA, 16 nt, Human
ggggacgcuccgcugc

SEQ ID NO: 2671854 - RNA, 21 nt, Human
ggggccgggcgcgguggcuca

SEQ ID NO: 2671855 - RNA, 20 nt, Human
ggggccggcccugugugcag

SEQ ID NO: 2671856 - RNA, 23 nt, Human
ggggccuacagcuuugaucccug

SEQ ID NO: 2671857 - RNA, 19 nt, Human
aaacacaaacgggcucagc

SEQ ID NO: 2671858 - RNA, 18 nt, Human
aaacaauggaguauucuc

SEQ ID NO: 2671859 - RNA, 18 nt, Human
aaaauuuuguauguuaaa

SEQ ID NO: 2671860 - RNA, 21 nt, Human
aaaauuuuguauguuaaagag

SEQ ID NO: 2671861 - RNA, 22 nt, Human
aaaauuuuguauguuaaagaga

SEQ ID NO: 2671862 - RNA, 13 nt, Human
aaaauuuagaaca

SEQ ID NO: 2671863 - RNA, 22 nt, Human
aaaauuuaugguuuugguauuu

SEQ ID NO: 2671864 - RNA, 17 nt, Human
aaaauuuuaaaaaucua

SEQ ID NO: 2671865 - RNA, 12 nt, Human
aaaauguuuuaa

SEQ ID NO: 2671866 - RNA, 19 nt, Human
gacugucucacuuaauccu

SEQ ID NO: 2671867 - RNA, 16 nt, Human
gacuuucugccuggag

SEQ ID NO: 2671868 - RNA, 18 nt, Human
gacuguuuucucuugaga

SEQ ID NO: 2671869 - RNA, 16 nt, Human
gacuguuuucucuuga

SEQ ID NO: 2671870 - RNA, 22 nt, Human
gacuuugaugucagcaguugcu

SEQ ID NO: 2671871 - RNA, 18 nt, Human
gacuuugaugucagcagu

SEQ ID NO: 2671872 - RNA, 18 nt, Human
gacuuucugccuggagug

SEQ ID NO: 2671873 - RNA, 21 nt, Human
gacuuuucuguccgagcuuug

SEQ ID NO: 2671874 - RNA, 23 nt, Human
gacuuuucuguccgagcuuugaa

SEQ ID NO: 2671875 - RNA, 13 nt, Human
gacuuuucugcaa

SEQ ID NO: 2671876 - RNA, 14 nt, Human
gacuuuucugcaaa

SEQ ID NO: 2671877 - RNA, 15 nt, Human
gacuuuguagauccu

SEQ ID NO: 2671878 - RNA, 14 nt, Human
gacugguuuucugc

SEQ ID NO: 2671879 - RNA, 15 nt, Human
gacugguuuucugcc

SEQ ID NO: 2671880 - RNA, 16 nt, Human
gacugguuuucugcca

SEQ ID NO: 2671881 - RNA, 22 nt, Human
gacuguguauucuaguuuuguc

SEQ ID NO: 2671882 - RNA, 17 nt, Human
gagaagcggcuggcagc

SEQ ID NO: 2671883 - RNA, 16 nt, Human
gacuauauaauuuauu

SEQ ID NO: 2671884 - RNA, 18 nt, Human
gacuauauauauaaaugu

SEQ ID NO: 2671885 - RNA, 19 nt, Human
gacuauauauauaaaugua

SEQ ID NO: 2671886 - RNA, 20 nt, Human
gacuauauauauaaauguau

SEQ ID NO: 2671887 - RNA, 20 nt, Human
gacuaugcguggcuggaacc

SEQ ID NO: 2671888 - RNA, 18 nt, Human
gacccucuaaccucgccc

SEQ ID NO: 2671889 - RNA, 14 nt, Human
gacccucuaaccuc

SEQ ID NO: 2671890 - RNA, 14 nt, Human
gaagcaguggccuu

SEQ ID NO: 2671891 - RNA, 22 nt, Human
gaagcaguuguaccaagugaaa

SEQ ID NO: 2671892 - RNA, 15 nt, Human
gacacuccagggaca

SEQ ID NO: 2671893 - RNA, 21 nt, Human
gacacuccagggacacacagc

SEQ ID NO: 2671894 - RNA, 21 nt, Human
gacaguaucccacauccaacu

SEQ ID NO: 2671895 - RNA, 16 nt, Human
gacaguaucccacauc

SEQ ID NO: 2671896 - RNA, 18 nt, Human
gacaguaucccacaucca

SEQ ID NO: 2671897 - RNA, 15 nt, Human
gacaguaucccacau

SEQ ID NO: 2671898 - RNA, 19 nt, Human
gaccaggccauucugccgc

SEQ ID NO: 2671899 - RNA, 12 nt, Human
gaccaggauccc

SEQ ID NO: 2671900 - RNA, 20 nt, Human
gaccaggaucccaagccucc

SEQ ID NO: 2671901 - RNA, 21 nt, Human
gaccaggaucccaagccuccu

SEQ ID NO: 2671902 - RNA, 22 nt, Human
gaccaggaucccaagccuccug

SEQ ID NO: 2671903 - RNA, 15 nt, Human
gaccaggcugccucc

SEQ ID NO: 2671904 - RNA, 16 nt, Human
gacccuauugcugcuu

SEQ ID NO: 2671905 - RNA, 15 nt, Human
gacccgaccuggccg

SEQ ID NO: 2671906 - RNA, 16 nt, Human
gacccgaccuggccgc

SEQ ID NO: 2671907 - RNA, 12 nt, Human
gaccauguggcc

SEQ ID NO: 2671908 - RNA, 14 nt, Human
gaccauguggccac

SEQ ID NO: 2671909 - RNA, 21 nt, Human
gaccaugcucaucugcugguc

SEQ ID NO: 2671910 - RNA, 22 nt, Human
gaccaugcucaucugcuggucc

SEQ ID NO: 2671911 - RNA, 19 nt, Human
gagguggaggcugcaguga

SEQ ID NO: 2671912 - RNA, 16 nt, Human
gagguggagggaggga

SEQ ID NO: 2671913 - RNA, 18 nt, Human
gagguggagggagggaag

SEQ ID NO: 2671914 - RNA, 19 nt, Human
gagugccgcaucucacagc

SEQ ID NO: 2671915 - RNA, 21 nt, Human
gaggccagaggcccccagccc

SEQ ID NO: 2671916 - RNA, 21 nt, Human
gagggcuuccucuagaagcca

SEQ ID NO: 2671917 - RNA, 19 nt, Human
gagggcuuccucuagaagc

SEQ ID NO: 2671918 - RNA, 22 nt, Human
gagggcuuccucuagaagccaa

SEQ ID NO: 2671919 - RNA, 19 nt, Human
gagggcggcaggggccugg

SEQ ID NO: 2671920 - RNA, 23 nt, Human
gagggcggcaggggccuggagau

SEQ ID NO: 2671921 - RNA, 13 nt, Human
gagggcggcaggg

SEQ ID NO: 2671922 - RNA, 14 nt, Human
gaggcugccccucu

SEQ ID NO: 2671923 - RNA, 15 nt, Human
gaggcugccccucuc

SEQ ID NO: 2671924 - RNA, 18 nt, Human
gaggcugccccucucacc

SEQ ID NO: 2671925 - RNA, 19 nt, Human
gaggcugccccucucacca

SEQ ID NO: 2671926 - RNA, 12 nt, Human
gagaagcugcag

SEQ ID NO: 2671927 - RNA, 13 nt, Human
gagaagcugcagg

SEQ ID NO: 2671928 - RNA, 14 nt, Human
gagaagcugcaucc

SEQ ID NO: 2671929 - RNA, 17 nt, Human
gagcgcgccccuagccg

SEQ ID NO: 2671930 - RNA, 16 nt, Human
gagcgcgccccuagcc

SEQ ID NO: 2671931 - RNA, 22 nt, Human
gagcccuacucccugcagaugc

SEQ ID NO: 2671932 - RNA, 21 nt, Human
gagcccuaaccccuuccagau

SEQ ID NO: 2671933 - RNA, 17 nt, Human
gagcccuacucccugca

SEQ ID NO: 2671934 - RNA, 18 nt, Human
gagcccuacucccugcag

SEQ ID NO: 2671935 - RNA, 19 nt, Human
gagcccuacucccugcaga

SEQ ID NO: 2671936 - RNA, 16 nt, Human
gagcccuaaccccuuc

SEQ ID NO: 2671937 - RNA, 18 nt, Human
gagcccuaaccccuucca

SEQ ID NO: 2671938 - RNA, 19 nt, Human
gagcccuaaccccuuccag

SEQ ID NO: 2671939 - RNA, 20 nt, Human
gagcccuaaccccuuccaga

SEQ ID NO: 2671940 - RNA, 14 nt, Human
gagccuuaaaacau

SEQ ID NO: 2671941 - RNA, 19 nt, Human
gagccuuagccgcccaugc

SEQ ID NO: 2671942 - RNA, 14 nt, Human
gcaggcuccccuga

SEQ ID NO: 2671943 - RNA, 16 nt, Human
gcaggcuccccugagg

SEQ ID NO: 2671944 - RNA, 22 nt, Human
gcaggcuggccaguccaggcug

SEQ ID NO: 2671945 - RNA, 18 nt, Human
gcagggaagccccacaug

SEQ ID NO: 2671946 - RNA, 23 nt, Human
gcagggaagccccacauguccag

SEQ ID NO: 2671947 - RNA, 12 nt, Human
gcaggcuggcca

SEQ ID NO: 2671948 - RNA, 14 nt, Human
gcaggcuggccagu

SEQ ID NO: 2671949 - RNA, 19 nt, Human
gcagcuuauaaugggcucu

SEQ ID NO: 2671950 - RNA, 23 nt, Human
gcagcuuauaaugggcucuccgg

SEQ ID NO: 2671951 - RNA, 15 nt, Human
gcagcugucccuugc

SEQ ID NO: 2671952 - RNA, 22 nt, Human
gcagcugucccuugcuugccug

SEQ ID NO: 2671953 - RNA, 23 nt, Human
gcagcugcuauccccaucucccu

SEQ ID NO: 2671954 - RNA, 22 nt, Human
gcagcugcuauuuauuuuccua

SEQ ID NO: 2671955 - RNA, 20 nt, Human
gcacuuucuauccucuguaa

SEQ ID NO: 2671956 - RNA, 18 nt, Human
gcacucuuguucccacac

SEQ ID NO: 2671957 - RNA, 16 nt, Human
gcacucuuaagcuucc

SEQ ID NO: 2671958 - RNA, 22 nt, Human
gcacuuugggaggccgaggcgg

SEQ ID NO: 2671959 - RNA, 17 nt, Human
gcacucuguauauuuga

SEQ ID NO: 2671960 - RNA, 15 nt, Human
gcauaaauugcauca

SEQ ID NO: 2671961 - RNA, 16 nt, Human
gcauaauuuaaaaaua

SEQ ID NO: 2671962 - RNA, 17 nt, Human
gcauaauuuaaaaauau

SEQ ID NO: 2671963 - RNA, 19 nt, Human
gcauaauuuaaaaauauau

SEQ ID NO: 2671964 - RNA, 20 nt, Human
gcauaauuuaaaaauauauu

SEQ ID NO: 2671965 - RNA, 15 nt, Human
gcauaaaaauuagcc

SEQ ID NO: 2671966 - RNA, 13 nt, Human
gcauaaaguaaau

SEQ ID NO: 2671967 - RNA, 16 nt, Human
gcauaaaguaaauaca

SEQ ID NO: 2671968 - RNA, 13 nt, Human
gcagcuuauuguu

SEQ ID NO: 2671969 - RNA, 21 nt, Human
gcaugucagacagaacuugaa

SEQ ID NO: 2671970 - RNA, 20 nt, Human
gcaugucaaacaugagaugu

SEQ ID NO: 2671971 - RNA, 21 nt, Human
gcaugucaaacaugagaugug

SEQ ID NO: 2671972 - RNA, 14 nt, Human
gcaugucaaacaug

SEQ ID NO: 2671973 - RNA, 14 nt, Human
gcaugucuuuuaaa

SEQ ID NO: 2671974 - RNA, 15 nt, Human
gcaugucuuuuaaaa

SEQ ID NO: 2671975 - RNA, 17 nt, Human
gcaugucuuuuaaaaug

SEQ ID NO: 2671976 - RNA, 22 nt, Human
gcauuguaagcguauggcuuua

SEQ ID NO: 2671977 - RNA, 21 nt, Human
gcauuguaagcguauggcuuu

SEQ ID NO: 2671978 - RNA, 12 nt, Human
gcauuguaagcg

SEQ ID NO: 2671979 - RNA, 18 nt, Human
gcauguagaggcuuguuu

SEQ ID NO: 2671980 - RNA, 20 nt, Human
gcauguagaggcuuguuuac

SEQ ID NO: 2671981 - RNA, 16 nt, Human
gcauccugugccacua

SEQ ID NO: 2671982 - RNA, 18 nt, Human
gcaucgcaccauucugac

SEQ ID NO: 2671983 - RNA, 15 nt, Human
gcaucggccuagggc

SEQ ID NO: 2671984 - RNA, 20 nt, Human
gcaucgcaccauucugacuc

SEQ ID NO: 2671985 - RNA, 14 nt, Human
gcaucggccuaggg

SEQ ID NO: 2671986 - RNA, 13 nt, Human
gcauuuaaaaaaa

SEQ ID NO: 2671987 - RNA, 23 nt, Human
gcauuuagggaguauucuaauaa

SEQ ID NO: 2671988 - RNA, 22 nt, Human
gcauuuagggaguauucuaaua

SEQ ID NO: 2671989 - RNA, 15 nt, Human
gccaagaauauugca

SEQ ID NO: 2671990 - RNA, 16 nt, Human
gccaagaauauugcaa

SEQ ID NO: 2671991 - RNA, 18 nt, Human
gccaagaauauugcaaaa

SEQ ID NO: 2671992 - RNA, 19 nt, Human
gccaagaauauugcaaaau

SEQ ID NO: 2671993 - RNA, 23 nt, Human
gccaagaauauugcaaaauacau

SEQ ID NO: 2671994 - RNA, 12 nt, Human
gccaagaaugua

SEQ ID NO: 2671995 - RNA, 13 nt, Human
gccaagaauguac

SEQ ID NO: 2671996 - RNA, 19 nt, Human
gccaagaagcaguggccuu

SEQ ID NO: 2671997 - RNA, 20 nt, Human
gccaagaagcaguggccuua

SEQ ID NO: 2671998 - RNA, 15 nt, Human
gccaagaagcagugg

SEQ ID NO: 2671999 - RNA, 16 nt, Human
gccaagaagcaguggc

SEQ ID NO: 2672000 - RNA, 16 nt, Human
gccaagcuccaagccc

SEQ ID NO: 2672001 - RNA, 15 nt, Human
gccaagauuuuccuc

SEQ ID NO: 2672002 - RNA, 23 nt, Human
gccaagauuuuccucuugugauu

SEQ ID NO: 2672003 - RNA, 16 nt, Human
gaugcugugcuaugaa

SEQ ID NO: 2672004 - RNA, 17 nt, Human
gaugcuguguauauggu

SEQ ID NO: 2672005 - RNA, 23 nt, Human
gaugcuucucacugccaugccag

SEQ ID NO: 2672006 - RNA, 14 nt, Human
gaugaugcugccag

SEQ ID NO: 2672007 - RNA, 23 nt, Human
gaugcuuuguuucuuucauauga

SEQ ID NO: 2672008 - RNA, 19 nt, Human
gaugucagcaguugcuggu

SEQ ID NO: 2672009 - RNA, 17 nt, Human
gaugucagcaguugcug

SEQ ID NO: 2672010 - RNA, 16 nt, Human
gaugugcaaaaccuuu

SEQ ID NO: 2672011 - RNA, 20 nt, Human
gaugugcaaaaccuuuuacu

SEQ ID NO: 2672012 - RNA, 18 nt, Human
gcaaaaaaaaaaaaaagc

SEQ ID NO: 2672013 - RNA, 15 nt, Human
gauuucagaagccua

SEQ ID NO: 2672014 - RNA, 13 nt, Human
gauuuaagguauu

SEQ ID NO: 2672015 - RNA, 15 nt, Human
gauuuaagguauuua

SEQ ID NO: 2672016 - RNA, 20 nt, Human
gauucuuucaguucuuugga

SEQ ID NO: 2672017 - RNA, 16 nt, Human
gauucuucuguguuua

SEQ ID NO: 2672018 - RNA, 20 nt, Human
gauucuucuguguuuauaaa

SEQ ID NO: 2672019 - RNA, 22 nt, Human
gauucugguuccagggucccuc

SEQ ID NO: 2672020 - RNA, 10 nt, Human
gcaauagaaa

SEQ ID NO: 2672021 - RNA, 12 nt, Human
gcaauagaaaca

SEQ ID NO: 2672022 - RNA, 13 nt, Human
gcaauagaaacaa

SEQ ID NO: 2672023 - RNA, 13 nt, Human
gcaauaccaagua

SEQ ID NO: 2672024 - RNA, 12 nt, Human
gcaauaaaauuu

SEQ ID NO: 2672025 - RNA, 13 nt, Human
gcaauaaaauuua

SEQ ID NO: 2672026 - RNA, 14 nt, Human
gcaauaaaauuuaa

SEQ ID NO: 2672027 - RNA, 15 nt, Human
gcaauaaaauuuaaa

SEQ ID NO: 2672028 - RNA, 19 nt, Human
gcaauaaaauuuaaaaaau

SEQ ID NO: 2672029 - RNA, 21 nt, Human
gcaauaaaauuuaaaaaauaa

SEQ ID NO: 2672030 - RNA, 18 nt, Human
gcaaguuuccaucaucua

SEQ ID NO: 2672031 - RNA, 15 nt, Human
gcaaaagaugcuucu

SEQ ID NO: 2672032 - RNA, 17 nt, Human
gcaaaacucuacuuaau

SEQ ID NO: 2672033 - RNA, 22 nt, Human
gcaaaacucuacuuaauccaau

SEQ ID NO: 2672034 - RNA, 23 nt, Human
gcaaaacucuacuuaauccaaug

SEQ ID NO: 2672035 - RNA, 15 nt, Human
gcaaaaccuuuuacu

SEQ ID NO: 2672036 - RNA, 16 nt, Human
gcaaaaccuuuuacug

SEQ ID NO: 2672037 - RNA, 17 nt, Human
gcaaaaccuuuuacugg

SEQ ID NO: 2672038 - RNA, 16 nt, Human
gcaaaagaugcuucuc

SEQ ID NO: 2672039 - RNA, 14 nt, Human
gcaaccuacccagc

SEQ ID NO: 2672040 - RNA, 18 nt, Human
gcaaccuacccagcgugg

SEQ ID NO: 2672041 - RNA, 22 nt, Human
gcacucuggaugauggauucca

SEQ ID NO: 2672042 - RNA, 17 nt, Human
gcacuccagccugggug

SEQ ID NO: 2672043 - RNA, 17 nt, Human
gcacuccagccuggggg

SEQ ID NO: 2672044 - RNA, 19 nt, Human
gcacuccagccugggggac

SEQ ID NO: 2672045 - RNA, 15 nt, Human
gcacuccagccuggg

SEQ ID NO: 2672046 - RNA, 18 nt, Human
gcaccucagccugcacag

SEQ ID NO: 2672047 - RNA, 15 nt, Human
cuugaaugugucagg

SEQ ID NO: 2672048 - RNA, 17 nt, Human
cuugauguuuggggucu

SEQ ID NO: 2672049 - RNA, 15 nt, Human
cuugauucagucaca

SEQ ID NO: 2672050 - RNA, 16 nt, Human
cuugauucagucacau

SEQ ID NO: 2672051 - RNA, 14 nt, Human
cuuggccuugggcu

SEQ ID NO: 2672052 - RNA, 14 nt, Human
cuuggccugggccg

SEQ ID NO: 2672053 - RNA, 13 nt, Human
cuuggccugggcc

SEQ ID NO: 2672054 - RNA, 12 nt, Human
cuuggccugggc

SEQ ID NO: 2672055 - RNA, 12 nt, Human
cuuggccugcug

SEQ ID NO: 2672056 - RNA, 13 nt, Human
cuuggccugcugu

SEQ ID NO: 2672057 - RNA, 15 nt, Human
cuuggccugcuguga

SEQ ID NO: 2672058 - RNA, 16 nt, Human
cuuggccugcugugau

SEQ ID NO: 2672059 - RNA, 21 nt, Human
cuuggcaauaaauuuugaaaa

SEQ ID NO: 2672060 - RNA, 20 nt, Human
cuuggcaauaaauuuugaaa

SEQ ID NO: 2672061 - RNA, 22 nt, Human
cuucucuuccuuuuaucaguag

SEQ ID NO: 2672062 - RNA, 18 nt, Human
cuuccucuagaagccaag

SEQ ID NO: 2672063 - RNA, 15 nt, Human
cuuccucucuccaga

SEQ ID NO: 2672064 - RNA, 19 nt, Human
cuuccucuagaagccaagg

SEQ ID NO: 2672065 - RNA, 16 nt, Human
cuuccucucuccagau

SEQ ID NO: 2672066 - RNA, 17 nt, Human
cuuccugaaacuauauu

SEQ ID NO: 2672067 - RNA, 19 nt, Human
cuuccugaaacuauauuuu

SEQ ID NO: 2672068 - RNA, 18 nt, Human
cuuccugaaacuauauuu

SEQ ID NO: 2672069 - RNA, 23 nt, Human
cuucuaaauggcaaaggaaggug

SEQ ID NO: 2672070 - RNA, 16 nt, Human
cuucuagucuuggcca

SEQ ID NO: 2672071 - RNA, 18 nt, Human
cuucuagugaugaugguu

SEQ ID NO: 2672072 - RNA, 13 nt, Human
cuucucuuagauu

SEQ ID NO: 2672073 - RNA, 14 nt, Human
cuucucugugagaa

SEQ ID NO: 2672074 - RNA, 15 nt, Human
cuucucugugagaag

SEQ ID NO: 2672075 - RNA, 18 nt, Human
cuucucugugagaagguu

SEQ ID NO: 2672076 - RNA, 18 nt, Human
cuuucucaaagaaauauu

SEQ ID NO: 2672077 - RNA, 20 nt, Human
cuuucucaaagaaauauuaa

SEQ ID NO: 2672078 - RNA, 22 nt, Human
cuuugagaagccuucagcucca

SEQ ID NO: 2672079 - RNA, 15 nt, Human
cuuugagaagccuuc

SEQ ID NO: 2672080 - RNA, 17 nt, Human
cuuugagaagccuucag

SEQ ID NO: 2672081 - RNA, 19 nt, Human
cuuugagaagccuucagcu

SEQ ID NO: 2672082 - RNA, 11 nt, Human
cuuugguuuuu

SEQ ID NO: 2672083 - RNA, 17 nt, Human
cuuugguuuuuuucuuc

SEQ ID NO: 2672084 - RNA, 19 nt, Human
cuuugguuuuuuucuucug

SEQ ID NO: 2672085 - RNA, 21 nt, Human
cuuugguucuggccagaaugc

SEQ ID NO: 2672086 - RNA, 19 nt, Human
cuuugguucuggccagaau

SEQ ID NO: 2672087 - RNA, 14 nt, Human
cuuugguucuggcc

SEQ ID NO: 2672088 - RNA, 13 nt, Human
cuuuuauaaagca

SEQ ID NO: 2672089 - RNA, 14 nt, Human
cuuuuauaaagcau

SEQ ID NO: 2672090 - RNA, 16 nt, Human
cuuuuauaaagcaugu

SEQ ID NO: 2672091 - RNA, 19 nt, Human
cuuucacggaaacucccga

SEQ ID NO: 2672092 - RNA, 14 nt, Human
cuugugccuggggu

SEQ ID NO: 2672093 - RNA, 18 nt, Human
cuuuacccaccuagaaca

SEQ ID NO: 2672094 - RNA, 19 nt, Human
cuuuacccaccuagaacac

SEQ ID NO: 2672095 - RNA, 17 nt, Human
cuuuacccaccuagaac

SEQ ID NO: 2672096 - RNA, 20 nt, Human
cuugggguuuucaguaugaa

SEQ ID NO: 2672097 - RNA, 12 nt, Human
cuugguguaauu

SEQ ID NO: 2672098 - RNA, 13 nt, Human
cuugguguaauuu

SEQ ID NO: 2672099 - RNA, 16 nt, Human
cuugguguaauuugaa

SEQ ID NO: 2672100 - RNA, 18 nt, Human
cuugguguaauuugaaga

SEQ ID NO: 2672101 - RNA, 16 nt, Human
cuugugaaaauguguu

SEQ ID NO: 2672102 - RNA, 13 nt, Human
cuugugaaaaugu

SEQ ID NO: 2672103 - RNA, 14 nt, Human
cuugugaaaaugug

SEQ ID NO: 2672104 - RNA, 18 nt, Human
cuugugaaaauguguucu

SEQ ID NO: 2672105 - RNA, 20 nt, Human
gaacccgggagcggagguug

SEQ ID NO: 2672106 - RNA, 13 nt, Human
gaacucuggcuuu

SEQ ID NO: 2672107 - RNA, 17 nt, Human
gaacucuucucauuacu

SEQ ID NO: 2672108 - RNA, 14 nt, Human
gaacucuucucauu

SEQ ID NO: 2672109 - RNA, 22 nt, Human
gaacugaaaggcuuuucaacca

SEQ ID NO: 2672110 - RNA, 19 nt, Human
gaacucuucucauuacuug

SEQ ID NO: 2672111 - RNA, 12 nt, Human
gaacugcaggcc

SEQ ID NO: 2672112 - RNA, 14 nt, Human
gaacugcaggcccu

SEQ ID NO: 2672113 - RNA, 16 nt, Human
gaacugcaggcccugg

SEQ ID NO: 2672114 - RNA, 17 nt, Human
gaacugcaggcccuggc

SEQ ID NO: 2672115 - RNA, 18 nt, Human
gaacugcaggcccuggcc

SEQ ID NO: 2672116 - RNA, 19 nt, Human
gaacugcaggcccuggccu

SEQ ID NO: 2672117 - RNA, 21 nt, Human
gaacugcaggcccuggccucc

SEQ ID NO: 2672118 - RNA, 23 nt, Human
gaacugcaggcccuggccucccc

SEQ ID NO: 2672119 - RNA, 18 nt, Human
gaaccauggugaagugcu

SEQ ID NO: 2672120 - RNA, 14 nt, Human
gaaccauaaaaugu

SEQ ID NO: 2672121 - RNA, 19 nt, Human
gaaccauaaaauguccagu

SEQ ID NO: 2672122 - RNA, 18 nt, Human
gaaccauaaaauguccag

SEQ ID NO: 2672123 - RNA, 13 nt, Human
gaaccauaaauuc

SEQ ID NO: 2672124 - RNA, 15 nt, Human
gaaccauaaauucaa

SEQ ID NO: 2672125 - RNA, 14 nt, Human
gaaccacuuguaga

SEQ ID NO: 2672126 - RNA, 13 nt, Human
gaaccacuuguag

SEQ ID NO: 2672127 - RNA, 18 nt, Human
gaaccacuuguagauuug

SEQ ID NO: 2672128 - RNA, 15 nt, Human
gaaccacuuguagau

SEQ ID NO: 2672129 - RNA, 20 nt, Human
gaaccacuuguagauuugau

SEQ ID NO: 2672130 - RNA, 20 nt, Human
gaagaccucaccuagaaauu

SEQ ID NO: 2672131 - RNA, 17 nt, Human
gaagacccucuugccca

SEQ ID NO: 2672132 - RNA, 23 nt, Human
gaagacccucuugcccauccuga

SEQ ID NO: 2672133 - RNA, 19 nt, Human
gaagaccucaccuagaaau

SEQ ID NO: 2672134 - RNA, 12 nt, Human
gaagcagccucu

SEQ ID NO: 2672135 - RNA, 22 nt, Human
gaagcagccucuccccaggucc

SEQ ID NO: 2672136 - RNA, 20 nt, Human
gaagcacuacaccuugccuu

SEQ ID NO: 2672137 - RNA, 21 nt, Human
gaagcacuacaccuugccuug

SEQ ID NO: 2672138 - RNA, 16 nt, Human
gaagcaccauaacuuu

SEQ ID NO: 2672139 - RNA, 15 nt, Human
gaagcacagaauauu

SEQ ID NO: 2672140 - RNA, 17 nt, Human
gaagcacagaauauuuu

SEQ ID NO: 2672141 - RNA, 21 nt, Human
gaaaggggagagccugcuggc

SEQ ID NO: 2672142 - RNA, 17 nt, Human
gaaauccggagaagcug

SEQ ID NO: 2672143 - RNA, 18 nt, Human
gaaaggggagagccugcu

SEQ ID NO: 2672144 - RNA, 20 nt, Human
gaaaggggagagccugcugg

SEQ ID NO: 2672145 - RNA, 15 nt, Human
gaaaggggagagccu

SEQ ID NO: 2672146 - RNA, 20 nt, Human
gaaaugaaaacaguguguaa

SEQ ID NO: 2672147 - RNA, 23 nt, Human
gaaaugaaaacaguguguaaaca

SEQ ID NO: 2672148 - RNA, 14 nt, Human
gaacacacacauau

SEQ ID NO: 2672149 - RNA, 16 nt, Human
gaacacacacauauac

SEQ ID NO: 2672150 - RNA, 17 nt, Human
gaacacacacauauaca

SEQ ID NO: 2672151 - RNA, 16 nt, Human
gaacaauauuuuaugg

SEQ ID NO: 2672152 - RNA, 12 nt, Human
gaacaaugaagu

SEQ ID NO: 2672153 - RNA, 14 nt, Human
gaacaaauuauuuu

SEQ ID NO: 2672154 - RNA, 21 nt, Human
gaacaaguugagcuaugacuu

SEQ ID NO: 2672155 - RNA, 20 nt, Human
gaacaaguugagcuaugacu

SEQ ID NO: 2672156 - RNA, 22 nt, Human
gaacaaguugagcuaugacuua

SEQ ID NO: 2672157 - RNA, 19 nt, Human
gaacacuaacucaccagcc

SEQ ID NO: 2672158 - RNA, 22 nt, Human
gaacacuaacucaccagcccca

SEQ ID NO: 2672159 - RNA, 15 nt, Human
gaacacauuucucug

SEQ ID NO: 2672160 - RNA, 16 nt, Human
gaaacaaccaugucau

SEQ ID NO: 2672161 - RNA, 22 nt, Human
gaaaaaaaugucaaaaguagaa

SEQ ID NO: 2672162 - RNA, 23 nt, Human
gaaaagaaaaaugagccuggcaa

SEQ ID NO: 2672163 - RNA, 21 nt, Human
gaaaagaugguaucauauauu

SEQ ID NO: 2672164 - RNA, 15 nt, Human
gaaaagauucuucug

SEQ ID NO: 2672165 - RNA, 23 nt, Human
gaaaagauucuucuguguuuaua

SEQ ID NO: 2672166 - RNA, 14 nt, Human
gaaaauguccagga

SEQ ID NO: 2672167 - RNA, 18 nt, Human
gaaaaugugacccuccaa

SEQ ID NO: 2672168 - RNA, 20 nt, Human
gaaaaugugacccuccaaau

SEQ ID NO: 2672169 - RNA, 22 nt, Human
gaaaaugugacccuccaaaugg

SEQ ID NO: 2672170 - RNA, 15 nt, Human
gaaaauguccaggaa

SEQ ID NO: 2672171 - RNA, 17 nt, Human
gaaaaugucuguaauaa

SEQ ID NO: 2672172 - RNA, 22 nt, Human
gaaaaugucuguaauaauagac

SEQ ID NO: 2672173 - RNA, 12 nt, Human
cugaugaaaaca

SEQ ID NO: 2672174 - RNA, 18 nt, Human
cugaucuuuguauauuac

SEQ ID NO: 2672175 - RNA, 19 nt, Human
cugaucugcggaucucagc

SEQ ID NO: 2672176 - RNA, 20 nt, Human
cugaucugcggaucucagcu

SEQ ID NO: 2672177 - RNA, 11 nt, Human
cugaucugccc

SEQ ID NO: 2672178 - RNA, 12 nt, Human
cugaucugccca

SEQ ID NO: 2672179 - RNA, 13 nt, Human
cugaucugcccau

SEQ ID NO: 2672180 - RNA, 16 nt, Human
cugaucugcccaucgu

SEQ ID NO: 2672181 - RNA, 17 nt, Human
cugaucugcccaucgug

SEQ ID NO: 2672182 - RNA, 21 nt, Human
cugaucugcccaucgugaaga

SEQ ID NO: 2672183 - RNA, 23 nt, Human
cugaucugcccaucgugaagaag

SEQ ID NO: 2672184 - RNA, 12 nt, Human
cugaucugcgga

SEQ ID NO: 2672185 - RNA, 11 nt, Human
cugaugacaau

SEQ ID NO: 2672186 - RNA, 16 nt, Human
cugaugacaauaaagc

SEQ ID NO: 2672187 - RNA, 16 nt, Human
cugccucccuuguggc

SEQ ID NO: 2672188 - RNA, 21 nt, Human
cugccucccuuguggcagcaa

SEQ ID NO: 2672189 - RNA, 19 nt, Human
cugccuguaacuugagagu

SEQ ID NO: 2672190 - RNA, 21 nt, Human
cugcugacuguuuucucuuga

SEQ ID NO: 2672191 - RNA, 18 nt, Human
cugcugacuguuuucucu

SEQ ID NO: 2672192 - RNA, 18 nt, Human
cugcuauauauaaaacgg

SEQ ID NO: 2672193 - RNA, 18 nt, Human
cugcuagcuagcucaacu

SEQ ID NO: 2672194 - RNA, 14 nt, Human
cugcuagcuagcuc

SEQ ID NO: 2672195 - RNA, 21 nt, Human
cugcuagcuagcucaacuagu

SEQ ID NO: 2672196 - RNA, 20 nt, Human
cugcuagcuagcucaacuag

SEQ ID NO: 2672197 - RNA, 14 nt, Human
cuggauagacgagu

SEQ ID NO: 2672198 - RNA, 14 nt, Human
cuggaagauccugc

SEQ ID NO: 2672199 - RNA, 18 nt, Human
cuggaagauccugcgggu

SEQ ID NO: 2672200 - RNA, 15 nt, Human
cuggaagaacaggcc

SEQ ID NO: 2672201 - RNA, 16 nt, Human
cuggaagaacaggccu

SEQ ID NO: 2672202 - RNA, 17 nt, Human
cuggaagaacaggccuc

SEQ ID NO: 2672203 - RNA, 18 nt, Human
cuggaagaacaggccucu

SEQ ID NO: 2672204 - RNA, 19 nt, Human
cuggaagaacaggccucuc

SEQ ID NO: 2672205 - RNA, 21 nt, Human
cuggaagaacaggccucucca

SEQ ID NO: 2672206 - RNA, 24 nt, Human
cuggcucugagcgccuccauccaa

SEQ ID NO: 2672207 - RNA, 13 nt, Human
cugggacucagcc

SEQ ID NO: 2672208 - RNA, 14 nt, Human
cugggacucagccu

SEQ ID NO: 2672209 - RNA, 15 nt, Human
cugggacucagccuu

SEQ ID NO: 2672210 - RNA, 16 nt, Human
cugggacucagccuuc

SEQ ID NO: 2672211 - RNA, 17 nt, Human
cugggacucagccuuca

SEQ ID NO: 2672212 - RNA, 18 nt, Human
cugggacucagccuucag

SEQ ID NO: 2672213 - RNA, 21 nt, Human
cugggacucagccuucagaca

SEQ ID NO: 2672214 - RNA, 22 nt, Human
cuggcagcccagagacuuugua

SEQ ID NO: 2672215 - RNA, 12 nt, Human
cuggcucugagc

SEQ ID NO: 2672216 - RNA, 13 nt, Human
cuggcucugagcg

SEQ ID NO: 2672217 - RNA, 20 nt, Human
cuggcucugagcgccuccau

SEQ ID NO: 2672218 - RNA, 21 nt, Human
cuggcucugagcgccuccauc

SEQ ID NO: 2672219 - RNA, 12 nt, Human
cuggcagcccag

SEQ ID NO: 2672220 - RNA, 13 nt, Human
cuggcagcccaga

SEQ ID NO: 2672221 - RNA, 16 nt, Human
cuggcagcccagagac

SEQ ID NO: 2672222 - RNA, 11 nt, Human
cuggcagccca

SEQ ID NO: 2672223 - RNA, 14 nt, Human
cuggggauccccgc

SEQ ID NO: 2672224 - RNA, 20 nt, Human
cuggggauccccgccuggcc

SEQ ID NO: 2672225 - RNA, 22 nt, Human
cuggggauccccgccuggccag

SEQ ID NO: 2672226 - RNA, 23 nt, Human
cuggggauccccgccuggccagg

SEQ ID NO: 2672227 - RNA, 18 nt, Human
cuggggcagacaauaaac

SEQ ID NO: 2672228 - RNA, 12 nt, Human
cuggggcaggcu

SEQ ID NO: 2672229 - RNA, 14 nt, Human
cuggggcaggcugg

SEQ ID NO: 2672230 - RNA, 15 nt, Human
cuggggcaggcuggg

SEQ ID NO: 2672231 - RNA, 12 nt, Human
cugggcauuuuc

SEQ ID NO: 2672232 - RNA, 20 nt, Human
cuggggcugaggcugaggca

SEQ ID NO: 2672233 - RNA, 18 nt, Human
cuggggcauccugugcca

SEQ ID NO: 2672234 - RNA, 21 nt, Human
cuggggcaggcugggccaugu

SEQ ID NO: 2672235 - RNA, 16 nt, Human
cuggggcaggcugggc

SEQ ID NO: 2672236 - RNA, 17 nt, Human
cuggggcaggcugggcc

SEQ ID NO: 2672237 - RNA, 18 nt, Human
cuggggcaggcugggcca

SEQ ID NO: 2672238 - RNA, 19 nt, Human
cuggggcaggcugggccau

SEQ ID NO: 2672239 - RNA, 14 nt, Human
cugggugggcucug

SEQ ID NO: 2672240 - RNA, 15 nt, Human
cugggugggcucugu

SEQ ID NO: 2672241 - RNA, 13 nt, Human
cugggugggcucu

SEQ ID NO: 2672242 - RNA, 18 nt, Human
cuggucuugaacuccugg

SEQ ID NO: 2672243 - RNA, 19 nt, Human
cugugccuucuuuugauua

SEQ ID NO: 2672244 - RNA, 19 nt, Human
cugugcgucuugguguaau

SEQ ID NO: 2672245 - RNA, 18 nt, Human
cuguuaggagaagcugca

SEQ ID NO: 2672246 - RNA, 18 nt, Human
cugugcugcccugaagaa

SEQ ID NO: 2672247 - RNA, 17 nt, Human
cugugcugcccugaaga

SEQ ID NO: 2672248 - RNA, 19 nt, Human
cugugucagcauagaagua

SEQ ID NO: 2672249 - RNA, 17 nt, Human
cugugucagcauagaag

SEQ ID NO: 2672250 - RNA, 19 nt, Human
cuggucuuugagcucccac

SEQ ID NO: 2672251 - RNA, 18 nt, Human
cuggucuuugagcuccca

SEQ ID NO: 2672252 - RNA, 12 nt, Human
cuggucuuugag

SEQ ID NO: 2672253 - RNA, 14 nt, Human
cuggugaauauuuu

SEQ ID NO: 2672254 - RNA, 16 nt, Human
cuggugaauauuuuca

SEQ ID NO: 2672255 - RNA, 17 nt, Human
cuguaacacuccucugc

SEQ ID NO: 2672256 - RNA, 17 nt, Human
cuguacugugucucaug

SEQ ID NO: 2672257 - RNA, 18 nt, Human
cuguacuguuacugggcc

SEQ ID NO: 2672258 - RNA, 19 nt, Human
cuguacuguuacugggccc

SEQ ID NO: 2672259 - RNA, 20 nt, Human
cuguacuguuacugggcccu

SEQ ID NO: 2672260 - RNA, 22 nt, Human
cuguacuguuacugggcccuga

SEQ ID NO: 2672261 - RNA, 16 nt, Human
cuguaacuuccaaaua

SEQ ID NO: 2672262 - RNA, 19 nt, Human
cuguaacuuccaaauaaau

SEQ ID NO: 2672263 - RNA, 20 nt, Human
cuguaacuuccaaauaaaua

SEQ ID NO: 2672264 - RNA, 13 nt, Human
cuguagaguggga

SEQ ID NO: 2672265 - RNA, 17 nt, Human
cuguaggguccaaccag

SEQ ID NO: 2672266 - RNA, 23 nt, Human
cuguaggguccaaccagaccugg

SEQ ID NO: 2672267 - RNA, 13 nt, Human
cuguuaugggcuu

SEQ ID NO: 2672268 - RNA, 15 nt, Human
cuguuguagaagaca

SEQ ID NO: 2672269 - RNA, 17 nt, Human
cuguuguaagaauucug

SEQ ID NO: 2672270 - RNA, 19 nt, Human
cuguuguaagaauucugau

SEQ ID NO: 2672271 - RNA, 21 nt, Human
cuguuguaagaauucugauug

SEQ ID NO: 2672272 - RNA, 15 nt, Human
cuuacaauauugauu

SEQ ID NO: 2672273 - RNA, 20 nt, Human
cuuacaauauugauugggaa

SEQ ID NO: 2672274 - RNA, 21 nt, Human
cuuacaauauugauugggaaa

SEQ ID NO: 2672275 - RNA, 18 nt, Human
cuuaaaacaucauuccuu

SEQ ID NO: 2672276 - RNA, 17 nt, Human
cuuaaaacaucauuccu

SEQ ID NO: 2672277 - RNA, 13 nt, Human
cuuaaaacaucau

SEQ ID NO: 2672278 - RNA, 21 nt, Human
cuuaaauaauaaacaguggaa

SEQ ID NO: 2672279 - RNA, 15 nt, Human
cuuaaaguugucacu

SEQ ID NO: 2672280 - RNA, 20 nt, Human
cuuaaaacaucauuccuuuu

SEQ ID NO: 2672281 - RNA, 19 nt, Human
cuuaaaacaucauuccuuu

SEQ ID NO: 2672282 - RNA, 15 nt, Human
cuuagggcaccaggg

SEQ ID NO: 2672283 - RNA, 23 nt, Human
cuuagggacuacccauagacaug

SEQ ID NO: 2672284 - RNA, 15 nt, Human
cuuaggggaaggaga

SEQ ID NO: 2672285 - RNA, 17 nt, Human
cuuaggccuuccucucu

SEQ ID NO: 2672286 - RNA, 15 nt, Human
cuuaggccuuccucu

SEQ ID NO: 2672287 - RNA, 13 nt, Human
cuuaggccuuccu

SEQ ID NO: 2672288 - RNA, 12 nt, Human
cuuaggccuucc

SEQ ID NO: 2672289 - RNA, 23 nt, Human
cuuaggccuuccucucuccagau

SEQ ID NO: 2672290 - RNA, 13 nt, Human
cuuaccauuaaag

SEQ ID NO: 2672291 - RNA, 20 nt, Human
acucaucaaucaaauaagua

SEQ ID NO: 2672292 - RNA, 19 nt, Human
acucauauuacaaaaacaa

SEQ ID NO: 2672293 - RNA, 20 nt, Human
acucuaucggagaacaugaa

SEQ ID NO: 2672294 - RNA, 23 nt, Human
acucuaucggagaacaugaauca

SEQ ID NO: 2672295 - RNA, 17 nt, Human
acucuagggaaaaacca

SEQ ID NO: 2672296 - RNA, 15 nt, Human
acucuagggaaaaac

SEQ ID NO: 2672297 - RNA, 13 nt, Human
acucaggugggcc

SEQ ID NO: 2672298 - RNA, 15 nt, Human
acucaggugggcccu

SEQ ID NO: 2672299 - RNA, 19 nt, Human
acucaggugggcccucuga

SEQ ID NO: 2672300 - RNA, 20 nt, Human
acuagugggguuuccuggca

SEQ ID NO: 2672301 - RNA, 23 nt, Human
acuaguguacauuucuauaaaua

SEQ ID NO: 2672302 - RNA, 19 nt, Human
acuauuuauugacucuggg

SEQ ID NO: 2672303 - RNA, 20 nt, Human
acuauuuauugacucugggu

SEQ ID NO: 2672304 - RNA, 13 nt, Human
acucaaaagcugg

SEQ ID NO: 2672305 - RNA, 14 nt, Human
acuauuuaagaugu

SEQ ID NO: 2672306 - RNA, 16 nt, Human
acuauuuaagauguga

SEQ ID NO: 2672307 - RNA, 17 nt, Human
acuauuuaagaugugaa

SEQ ID NO: 2672308 - RNA, 18 nt, Human
acuauuuaagaugugaaa

SEQ ID NO: 2672309 - RNA, 20 nt, Human
acuauuuaagaugugaaaau

SEQ ID NO: 2672310 - RNA, 21 nt, Human
acuauuuaagaugugaaaauu

SEQ ID NO: 2672311 - RNA, 13 nt, Human
acuagauugacua

SEQ ID NO: 2672312 - RNA, 15 nt, Human
acuagauugugaucc

SEQ ID NO: 2672313 - RNA, 20 nt, Human
acuagauuuucacuuaugaa

SEQ ID NO: 2672314 - RNA, 13 nt, Human
acuagcaaaauaa

SEQ ID NO: 2672315 - RNA, 14 nt, Human
acuagcaaaauaaa

SEQ ID NO: 2672316 - RNA, 15 nt, Human
acuagcaaaauaaaa

SEQ ID NO: 2672317 - RNA, 18 nt, Human
acuagcaaaauaaaacau

SEQ ID NO: 2672318 - RNA, 19 nt, Human
acuagcaaaauaaaacaua

SEQ ID NO: 2672319 - RNA, 23 nt, Human
acuagcaaucucuucauuauucu

SEQ ID NO: 2672320 - RNA, 21 nt, Human
accuuuagaaacucaaaaacu

SEQ ID NO: 2672321 - RNA, 18 nt, Human
accuuuccaccacagcca

SEQ ID NO: 2672322 - RNA, 13 nt, Human
accuuucccucac

SEQ ID NO: 2672323 - RNA, 14 nt, Human
accuuucccucacc

SEQ ID NO: 2672324 - RNA, 17 nt, Human
accuuucccucaccccc

SEQ ID NO: 2672325 - RNA, 18 nt, Human
accuuucccucacccccu

SEQ ID NO: 2672326 - RNA, 19 nt, Human
accuuucccucacccccuc

SEQ ID NO: 2672327 - RNA, 22 nt, Human
accuuucccucacccccuccca

SEQ ID NO: 2672328 - RNA, 12 nt, Human
accuuguaaaag

SEQ ID NO: 2672329 - RNA, 13 nt, Human
accuuguaaaaga

SEQ ID NO: 2672330 - RNA, 15 nt, Human
accuuguaaaagaca

SEQ ID NO: 2672331 - RNA, 16 nt, Human
acuaagagaaguugua

SEQ ID NO: 2672332 - RNA, 17 nt, Human
acuaagagaaguuguaa

SEQ ID NO: 2672333 - RNA, 17 nt, Human
acuaacuugacuuuuaa

SEQ ID NO: 2672334 - RNA, 18 nt, Human
acuaagaauucaaacugg

SEQ ID NO: 2672335 - RNA, 16 nt, Human
acuaagaauucaaacu

SEQ ID NO: 2672336 - RNA, 21 nt, Human
acgugaccggacuuuucugca

SEQ ID NO: 2672337 - RNA, 20 nt, Human
acgugauccucucaccucag

SEQ ID NO: 2672338 - RNA, 17 nt, Human
agaaaaugaaaugcaua

SEQ ID NO: 2672339 - RNA, 21 nt, Human
agaaaaugaaaugcauauuug

SEQ ID NO: 2672340 - RNA, 17 nt, Human
agaaaggcucuauucca

SEQ ID NO: 2672341 - RNA, 22 nt, Human
agaaaggugaguuugagcugcc

SEQ ID NO: 2672342 - RNA, 23 nt, Human
agaaaggugaguuugagcugccu

SEQ ID NO: 2672343 - RNA, 15 nt, Human
agaaagugaagcaaa

SEQ ID NO: 2672344 - RNA, 23 nt, Human
agaaagugaagcaaaucagaaac

SEQ ID NO: 2672345 - RNA, 16 nt, Human
agaaagugugagcaaa

SEQ ID NO: 2672346 - RNA, 22 nt, Human
agaaagugggcuuaauggaguu

SEQ ID NO: 2672347 - RNA, 19 nt, Human
agaaaguggucuuaagaaa

SEQ ID NO: 2672348 - RNA, 20 nt, Human
agaaaguggucuuaagaaau

SEQ ID NO: 2672349 - RNA, 21 nt, Human
agaaaguggucuuaagaaaug

SEQ ID NO: 2672350 - RNA, 23 nt, Human
agaaagugugagcaaacuaacuu

SEQ ID NO: 2672351 - RNA, 17 nt, Human
agaaagugugagcaaac

SEQ ID NO: 2672352 - RNA, 21 nt, Human
agaaauaaaguuugcuuagaa

SEQ ID NO: 2672353 - RNA, 16 nt, Human
agaaauaauagaaaug

SEQ ID NO: 2672354 - RNA, 17 nt, Human
agaaauaaugcuacaau

SEQ ID NO: 2672355 - RNA, 19 nt, Human
agaaauaaugcuacaauuu

SEQ ID NO: 2672356 - RNA, 20 nt, Human
agaaauaaugcuacaauuuu

SEQ ID NO: 2672357 - RNA, 22 nt, Human
agaaauaaugcuacaauuuuaa

SEQ ID NO: 2672358 - RNA, 10 nt, Human
acuuuucauu

SEQ ID NO: 2672359 - RNA, 14 nt, Human
acuuuucauucucu

SEQ ID NO: 2672360 - RNA, 18 nt, Human
acuuuucauucucuuuua

SEQ ID NO: 2672361 - RNA, 20 nt, Human
acuuuucauucucuuuuaau

SEQ ID NO: 2672362 - RNA, 18 nt, Human
acuuuuauuuuacacaga

SEQ ID NO: 2672363 - RNA, 20 nt, Human
acuuuuauuuuacacagaaa

SEQ ID NO: 2672364 - RNA, 22 nt, Human
acuuuuauuuuacacagaaaca

SEQ ID NO: 2672365 - RNA, 21 nt, Human
acuuuauugccuuuuaauuuu

SEQ ID NO: 2672366 - RNA, 15 nt, Human
acugguaggaccaag

SEQ ID NO: 2672367 - RNA, 17 nt, Human
acugccaggccagccuc

SEQ ID NO: 2672368 - RNA, 15 nt, Human
acugccaggccagcc

SEQ ID NO: 2672369 - RNA, 16 nt, Human
acugccaggccagccu

SEQ ID NO: 2672370 - RNA, 18 nt, Human
acugccagcagcagcagg

SEQ ID NO: 2672371 - RNA, 19 nt, Human
acugccagcagcagcaggu

SEQ ID NO: 2672372 - RNA, 20 nt, Human
acugguuuauccacccacaa

SEQ ID NO: 2672373 - RNA, 18 nt, Human
acugguucucaaugaaaa

SEQ ID NO: 2672374 - RNA, 13 nt, Human
acugguugcaugg

SEQ ID NO: 2672375 - RNA, 14 nt, Human
acugguugcaugga

SEQ ID NO: 2672376 - RNA, 15 nt, Human
acugguugcauggaa

SEQ ID NO: 2672377 - RNA, 17 nt, Human
acugguugcauggaaau

SEQ ID NO: 2672378 - RNA, 18 nt, Human
acugguugcauggaaauc

SEQ ID NO: 2672379 - RNA, 19 nt, Human
acugguugcauggaaauca

SEQ ID NO: 2672380 - RNA, 12 nt, Human
acugguucucaa

SEQ ID NO: 2672381 - RNA, 14 nt, Human
acugguucucaaug

SEQ ID NO: 2672382 - RNA, 17 nt, Human
acugguucucaaugaaa

SEQ ID NO: 2672383 - RNA, 22 nt, Human
acugguuuauccacccacaaca

SEQ ID NO: 2672384 - RNA, 17 nt, Human
acugugagaacccaguu

SEQ ID NO: 2672385 - RNA, 22 nt, Human
acugugcgucuugguguaauuu

SEQ ID NO: 2672386 - RNA, 12 nt, Human
acugccagcagc

SEQ ID NO: 2672387 - RNA, 13 nt, Human
acugccagcagca

SEQ ID NO: 2672388 - RNA, 14 nt, Human
acugccagcagcag

SEQ ID NO: 2672389 - RNA, 16 nt, Human
acugccagcagcagca

SEQ ID NO: 2672390 - RNA, 17 nt, Human
acuucagaagcaaacaa

SEQ ID NO: 2672391 - RNA, 18 nt, Human
acuucagaagcaaacaau

SEQ ID NO: 2672392 - RNA, 16 nt, Human
acuguuucucuugagc

SEQ ID NO: 2672393 - RNA, 21 nt, Human
acuguuugaaaacuucagaag

SEQ ID NO: 2672394 - RNA, 23 nt, Human
acuguuucucuugagcuggccuc

SEQ ID NO: 2672395 - RNA, 21 nt, Human
acuguuucucuugagcuggcc

SEQ ID NO: 2672396 - RNA, 22 nt, Human
acuguuucucuugagcuggccu

SEQ ID NO: 2672397 - RNA, 17 nt, Human
acuguuucucuugagcu

SEQ ID NO: 2672398 - RNA, 18 nt, Human
acuguuucucuugagcug

SEQ ID NO: 2672399 - RNA, 19 nt, Human
acuguuucucuugagcugg

SEQ ID NO: 2672400 - RNA, 20 nt, Human
acuguuucucuugagcuggc

SEQ ID NO: 2672401 - RNA, 14 nt, Human
acuucuucuccauc

SEQ ID NO: 2672402 - RNA, 17 nt, Human
acuucuucuccaucccu

SEQ ID NO: 2672403 - RNA, 13 nt, Human
acuucuucucuua

SEQ ID NO: 2672404 - RNA, 16 nt, Human
acuucuucucuuagau

SEQ ID NO: 2672405 - RNA, 18 nt, Human
acuucuucucuuagauuc

SEQ ID NO: 2672406 - RNA, 14 nt, Human
acuugggccacugu

SEQ ID NO: 2672407 - RNA, 22 nt, Human
acuugggaggcugaggcaggag

SEQ ID NO: 2672408 - RNA, 15 nt, Human
acuugggccacugug

SEQ ID NO: 2672409 - RNA, 16 nt, Human
acuugguuuuuaaaaa

SEQ ID NO: 2672410 - RNA, 13 nt, Human
acuugguuuuaug

SEQ ID NO: 2672411 - RNA, 17 nt, Human
acuugguuuuaugguua

SEQ ID NO: 2672412 - RNA, 17 nt, Human
acccccuuaaauuuaau

SEQ ID NO: 2672413 - RNA, 15 nt, Human
acccccugcccugca

SEQ ID NO: 2672414 - RNA, 13 nt, Human
acccccugcccug

SEQ ID NO: 2672415 - RNA, 14 nt, Human
acccccugcccugc

SEQ ID NO: 2672416 - RNA, 20 nt, Human
accccucacaggagcuuacu

SEQ ID NO: 2672417 - RNA, 15 nt, Human
acccaccguggagga

SEQ ID NO: 2672418 - RNA, 22 nt, Human
acccaccguggaggaggaaggc

SEQ ID NO: 2672419 - RNA, 13 nt, Human
acccaccuagaac

SEQ ID NO: 2672420 - RNA, 17 nt, Human
acccauugcuguugucc

SEQ ID NO: 2672421 - RNA, 13 nt, Human
acccauugcuguu

SEQ ID NO: 2672422 - RNA, 21 nt, Human
acccauuaaggggaagaauga

SEQ ID NO: 2672423 - RNA, 22 nt, Human
acccauuaaggggaagaaugaa

SEQ ID NO: 2672424 - RNA, 22 nt, Human
accauccuggcuaacaugguga

SEQ ID NO: 2672425 - RNA, 12 nt, Human
accauccuggcu

SEQ ID NO: 2672426 - RNA, 13 nt, Human
accauccuggcua

SEQ ID NO: 2672427 - RNA, 18 nt, Human
accauccuguauucuuca

SEQ ID NO: 2672428 - RNA, 22 nt, Human
accauauugugcuucacaguag

SEQ ID NO: 2672429 - RNA, 22 nt, Human
accagagugcugaaggaaugga

SEQ ID NO: 2672430 - RNA, 14 nt, Human
accagaggagccuu

SEQ ID NO: 2672431 - RNA, 15 nt, Human
accagaggagccuuu

SEQ ID NO: 2672432 - RNA, 16 nt, Human
accagaggagccuuuu

SEQ ID NO: 2672433 - RNA, 17 nt, Human
accagaggagccuuuuu

SEQ ID NO: 2672434 - RNA, 22 nt, Human
accagauaccuuaucuuacaau

SEQ ID NO: 2672435 - RNA, 19 nt, Human
accagcccaucgccacaaa

SEQ ID NO: 2672436 - RNA, 17 nt, Human
accagcaauauaucuga

SEQ ID NO: 2672437 - RNA, 21 nt, Human
accagaugcgucccaagaugu

SEQ ID NO: 2672438 - RNA, 22 nt, Human
accagaugcgucccaagauguu

SEQ ID NO: 2672439 - RNA, 14 nt, Human
accaagcaucuugg

SEQ ID NO: 2672440 - RNA, 20 nt, Human
accaagccaagggaaccugu

SEQ ID NO: 2672441 - RNA, 23 nt, Human
accaagccaagggaaccuguguc

SEQ ID NO: 2672442 - RNA, 21 nt, Human
accacccugagccggccccag

SEQ ID NO: 2672443 - RNA, 12 nt, Human
accaagugaaau

SEQ ID NO: 2672444 - RNA, 12 nt, Human
accaagucacac

SEQ ID NO: 2672445 - RNA, 14 nt, Human
accaagucacacgc

SEQ ID NO: 2672446 - RNA, 24 nt, Human
accaaguaaaacaaaaccacuggg

SEQ ID NO: 2672447 - RNA, 20 nt, Human
acauuuuaaaaaauggucac

SEQ ID NO: 2672448 - RNA, 22 nt, Human
acauuuauuuuuuuuaaagaaa

SEQ ID NO: 2672449 - RNA, 23 nt, Human
acauuuauuuuuuuuaaagaaaa

SEQ ID NO: 2672450 - RNA, 18 nt, Human
acauuuauuuauccagaa

SEQ ID NO: 2672451 - RNA, 14 nt, Human
acagggugggccuc

SEQ ID NO: 2672452 - RNA, 15 nt, Human
acagggugggccucg

SEQ ID NO: 2672453 - RNA, 14 nt, Human
acaugugauacauu

SEQ ID NO: 2672454 - RNA, 15 nt, Human
acaugugauacauuu

SEQ ID NO: 2672455 - RNA, 17 nt, Human
acaugugauacauuuuu

SEQ ID NO: 2672456 - RNA, 23 nt, Human
acaugugauacauuuuuuaagcu

SEQ ID NO: 2672457 - RNA, 11 nt, Human
acauguuuccu

SEQ ID NO: 2672458 - RNA, 16 nt, Human
acauguuuccucuagu

SEQ ID NO: 2672459 - RNA, 13 nt, Human
acaugcauauaau

SEQ ID NO: 2672460 - RNA, 16 nt, Human
acaugcauauaaugaa

SEQ ID NO: 2672461 - RNA, 18 nt, Human
acaugcauauaaugaaua

SEQ ID NO: 2672462 - RNA, 23 nt, Human
acaugcauauaaugaauaaauca

SEQ ID NO: 2672463 - RNA, 20 nt, Human
acagccaagauuuuccucuu

SEQ ID NO: 2672464 - RNA, 19 nt, Human
acagaaucuuccuuuuauu

SEQ ID NO: 2672465 - RNA, 21 nt, Human
acacugguucucaaugaaaaa

SEQ ID NO: 2672466 - RNA, 18 nt, Human
acacugguucucaaugaa

SEQ ID NO: 2672467 - RNA, 19 nt, Human
acacugguucucaaugaaa

SEQ ID NO: 2672468 - RNA, 13 nt, Human
acacugguucuca

SEQ ID NO: 2672469 - RNA, 14 nt, Human
acacugguucucaa

SEQ ID NO: 2672470 - RNA, 15 nt, Human
acacugguucucaau

SEQ ID NO: 2672471 - RNA, 17 nt, Human
acacugguucucaauga

SEQ ID NO: 2672472 - RNA, 20 nt, Human
acagaaugcaaccaagucac

SEQ ID NO: 2672473 - RNA, 22 nt, Human
acagaaugcaaccaagucacac

SEQ ID NO: 2672474 - RNA, 20 nt, Human
acacuggcaaugguaguuuc

SEQ ID NO: 2672475 - RNA, 21 nt, Human
acacuggcaaugguaguuucu

SEQ ID NO: 2672476 - RNA, 22 nt, Human
acacugcacucuuaagcuuccg

SEQ ID NO: 2672477 - RNA, 13 nt, Human
acacauuuuuuug

SEQ ID NO: 2672478 - RNA, 15 nt, Human
acaauugguaaaacu

SEQ ID NO: 2672479 - RNA, 22 nt, Human
acaauugguaaaacucacugug

SEQ ID NO: 2672480 - RNA, 23 nt, Human
acaauugguaaaacucacuguga

SEQ ID NO: 2672481 - RNA, 22 nt, Human
acacagcagaggcccagauauu

SEQ ID NO: 2672482 - RNA, 15 nt, Human
acaauucuguuuuua

SEQ ID NO: 2672483 - RNA, 17 nt, Human
acaauucuguuuuuaau

SEQ ID NO: 2672484 - RNA, 21 nt, Human
acaauucuguuuuuaaugcua

SEQ ID NO: 2672485 - RNA, 13 nt, Human
aauuuuguacaaa

SEQ ID NO: 2672486 - RNA, 12 nt, Human
aauuuuguaaga

SEQ ID NO: 2672487 - RNA, 13 nt, Human
aauuuuguaagaa

SEQ ID NO: 2672488 - RNA, 14 nt, Human
aauuuuguacaaau

SEQ ID NO: 2672489 - RNA, 16 nt, Human
aauuuuguaugaaaaa

SEQ ID NO: 2672490 - RNA, 16 nt, Human
aauuuuguauguuaaa

SEQ ID NO: 2672491 - RNA, 20 nt, Human
aauuuuguauguuaaagaga

SEQ ID NO: 2672492 - RNA, 17 nt, Human
acaagaaauaauagaaa

SEQ ID NO: 2672493 - RNA, 13 nt, Human
acaacggaggccu

SEQ ID NO: 2672494 - RNA, 22 nt, Human
acaacggaggccugcgacccug

SEQ ID NO: 2672495 - RNA, 13 nt, Human
acaaaauuugacu

SEQ ID NO: 2672496 - RNA, 20 nt, Human
acaaaauuugacuaauuuua

SEQ ID NO: 2672497 - RNA, 20 nt, Human
acaaaauuaagcaaauguua

SEQ ID NO: 2672498 - RNA, 20 nt, Human
acaaggcacuucauguaaag

SEQ ID NO: 2672499 - RNA, 18 nt, Human
acaagggaagauuuaugu

SEQ ID NO: 2672500 - RNA, 20 nt, Human
acaagggaagauuuauguuu

SEQ ID NO: 2672501 - RNA, 16 nt, Human
aaagccuaaucacagu

SEQ ID NO: 2672502 - RNA, 16 nt, Human
aaagccuccuccagcc

SEQ ID NO: 2672503 - RNA, 13 nt, Human
aaaggccucuugu

SEQ ID NO: 2672504 - RNA, 21 nt, Human
aaaggccucuuguaaagacug

SEQ ID NO: 2672505 - RNA, 15 nt, Human
aaaguggaaguaugu

SEQ ID NO: 2672506 - RNA, 19 nt, Human
aaaguggccaagaagcagu

SEQ ID NO: 2672507 - RNA, 20 nt, Human
aaauaaaguuugcuuagaaa

SEQ ID NO: 2672508 - RNA, 13 nt, Human
aaaguggaaaaau

SEQ ID NO: 2672509 - RNA, 13 nt, Human
aaaggcgcugaga

SEQ ID NO: 2672510 - RNA, 16 nt, Human
aaagucauuaaagaca

SEQ ID NO: 2672511 - RNA, 17 nt, Human
aaagucauuaaagacag

SEQ ID NO: 2672512 - RNA, 11 nt, Human
aaauaaauaau

SEQ ID NO: 2672513 - RNA, 14 nt, Human
aaauaaauaauuuu

SEQ ID NO: 2672514 - RNA, 20 nt, Human
aaauaguuuauuuuaaaaca

SEQ ID NO: 2672515 - RNA, 17 nt, Human
aaauaguuuauuuuaaa

SEQ ID NO: 2672516 - RNA, 12 nt, Human
aaauaguuuauu

SEQ ID NO: 2672517 - RNA, 21 nt, Human
aaauaguuuauuuuaaaacaa

SEQ ID NO: 2672518 - RNA, 13 nt, Human
aaaucaaagugcu

SEQ ID NO: 2672519 - RNA, 15 nt, Human
aaaucaaagugcuau

SEQ ID NO: 2672520 - RNA, 14 nt, Human
aaaucaaagugcua

SEQ ID NO: 2672521 - RNA, 15 nt, Human
aaaucaauacacuag

SEQ ID NO: 2672522 - RNA, 22 nt, Human
aaaucaauacacuaguuguuuc

SEQ ID NO: 2672523 - RNA, 17 nt, Human
aaaucaauacacuaguu

SEQ ID NO: 2672524 - RNA, 12 nt, Human
aaaucuggaagc

SEQ ID NO: 2672525 - RNA, 13 nt, Human
aaauaggaaacaa

SEQ ID NO: 2672526 - RNA, 14 nt, Human
aaauaggaaacaag

SEQ ID NO: 2672527 - RNA, 16 nt, Human
aaauaggaaacaagug

SEQ ID NO: 2672528 - RNA, 19 nt, Human
aaauaggaaucauucagaa

SEQ ID NO: 2672529 - RNA, 20 nt, Human
aaauaggaaucauucagaaa

SEQ ID NO: 2672530 - RNA, 14 nt, Human
aaauaggauuuuua

SEQ ID NO: 2672531 - RNA, 16 nt, Human
aaauaggauuuuuaga

SEQ ID NO: 2672532 - RNA, 15 nt, Human
aaauagugucuuugu

SEQ ID NO: 2672533 - RNA, 20 nt, Human
aaagaaauccggagaagcug

SEQ ID NO: 2672534 - RNA, 11 nt, Human
aaagaaauauu

SEQ ID NO: 2672535 - RNA, 18 nt, Human
aaagaaaucauguccaua

SEQ ID NO: 2672536 - RNA, 21 nt, Human
aaagaguugggugucuccuua

SEQ ID NO: 2672537 - RNA, 22 nt, Human
aaaccauguagcagugagucau

SEQ ID NO: 2672538 - RNA, 21 nt, Human
aaacccgggaaccuccccagc

SEQ ID NO: 2672539 - RNA, 14 nt, Human
aaacccucagagcc

SEQ ID NO: 2672540 - RNA, 15 nt, Human
aaacccucagagccu

SEQ ID NO: 2672541 - RNA, 22 nt, Human
aaacacguuuuaaggacugacu

SEQ ID NO: 2672542 - RNA, 18 nt, Human
aaacacguuuuaaggacu

SEQ ID NO: 2672543 - RNA, 17 nt, Human
aaacacguuuuaaggac

SEQ ID NO: 2672544 - RNA, 22 nt, Human
aaacacugccuuuuuauuuaua

SEQ ID NO: 2672545 - RNA, 14 nt, Human
aaacaccuucuaua

SEQ ID NO: 2672546 - RNA, 14 nt, Human
aaacagaaaaaaag

SEQ ID NO: 2672547 - RNA, 20 nt, Human
aaaauugaguugcacuuauu

SEQ ID NO: 2672548 - RNA, 14 nt, Human
aaacagaaauggaa

SEQ ID NO: 2672549 - RNA, 22 nt, Human
aaaaucuaagcagcuuauuguu

SEQ ID NO: 2672550 - RNA, 23 nt, Human
aaaaucuaagcagcuuauuguuu

SEQ ID NO: 2672551 - RNA, 15 nt, Human
aaaauccugugcaau

SEQ ID NO: 2672552 - RNA, 22 nt, Human
aaaaucccuuaccucggugccu

SEQ ID NO: 2672553 - RNA, 14 nt, Human
aaaauaaacuauaa

SEQ ID NO: 2672554 - RNA, 21 nt, Human
aaaauaaacuauaaaacaaaa

SEQ ID NO: 2672555 - RNA, 14 nt, Human
aaaauaaagaagua

SEQ ID NO: 2672556 - RNA, 13 nt, Human
aaaaguguccuuc

SEQ ID NO: 2672557 - RNA, 19 nt, Human
aaaaguguguauauauuuu

SEQ ID NO: 2672558 - RNA, 20 nt, Human
aaaaguguguauauauuuug

SEQ ID NO: 2672559 - RNA, 21 nt, Human
aaaaguguguauauauuuugu

SEQ ID NO: 2672560 - RNA, 13 nt, Human
aaaauaaaaugaa

SEQ ID NO: 2672561 - RNA, 21 nt, Human
aaaauaaaaugaaaauuguau

SEQ ID NO: 2672562 - RNA, 13 nt, Human
aaaaacugaaaaa

SEQ ID NO: 2672563 - RNA, 14 nt, Human
aaaaacugaaaaau

SEQ ID NO: 2672564 - RNA, 14 nt, Human
aaaagugccucaag

SEQ ID NO: 2672565 - RNA, 18 nt, Human
aaaagugccucaagagga

SEQ ID NO: 2672566 - RNA, 20 nt, Human
aaaagugccucaagaggaau

SEQ ID NO: 2672567 - RNA, 19 nt, Human
aacggaggccugcgacccu

SEQ ID NO: 2672568 - RNA, 22 nt, Human
aacggaggccugcgacccuggg

SEQ ID NO: 2672569 - RNA, 23 nt, Human
aacggaggccugcgacccugggg

SEQ ID NO: 2672570 - RNA, 15 nt, Human
aacucacugugauca

SEQ ID NO: 2672571 - RNA, 23 nt, Human
aacucagagaaaaaugcucccca

SEQ ID NO: 2672572 - RNA, 21 nt, Human
aacuauuuauugacucugggu

SEQ ID NO: 2672573 - RNA, 21 nt, Human
aacuauugugcucagagacac

SEQ ID NO: 2672574 - RNA, 22 nt, Human
aacuauugugcucagagacacu

SEQ ID NO: 2672575 - RNA, 24 nt, Human
aacuauugugcucagagacacugu

SEQ ID NO: 2672576 - RNA, 16 nt, Human
aacgggaacaugcccc

SEQ ID NO: 2672577 - RNA, 17 nt, Human
aacgggaacaugccccc

SEQ ID NO: 2672578 - RNA, 19 nt, Human
aacgggaacaugcccccug

SEQ ID NO: 2672579 - RNA, 19 nt, Human
aacugaggcuuagagauag

SEQ ID NO: 2672580 - RNA, 23 nt, Human
aacugaguauuaauaucugagga

SEQ ID NO: 2672581 - RNA, 13 nt, Human
aacuuaacugaaa

SEQ ID NO: 2672582 - RNA, 13 nt, Human
aacuuaauaauca

SEQ ID NO: 2672583 - RNA, 17 nt, Human
aacuuaauaaucaagag

SEQ ID NO: 2672584 - RNA, 15 nt, Human
aacuuaauaaucaag

SEQ ID NO: 2672585 - RNA, 15 nt, Human
aacuuaaauguuauu

SEQ ID NO: 2672586 - RNA, 19 nt, Human
aacuuaaauguuauuaucu

SEQ ID NO: 2672587 - RNA, 21 nt, Human
aacuuaaauguuauuaucugg

SEQ ID NO: 2672588 - RNA, 20 nt, Human
aacuuaauaaucaagagccu

SEQ ID NO: 2672589 - RNA, 20 nt, Human
aaccuaaucaccauguaagc

SEQ ID NO: 2672590 - RNA, 21 nt, Human
aaccuaaucaccauguaagca

SEQ ID NO: 2672591 - RNA, 13 nt, Human
aaccgaauaaaug

SEQ ID NO: 2672592 - RNA, 22 nt, Human
aacccuaucuccugacagaagg

SEQ ID NO: 2672593 - RNA, 23 nt, Human
aacccuaucuccugacagaaggu

SEQ ID NO: 2672594 - RNA, 18 nt, Human
aacccuuuauuugaacaa

SEQ ID NO: 2672595 - RNA, 18 nt, Human
aacccuuuuaaaguugau

SEQ ID NO: 2672596 - RNA, 15 nt, Human
aacccuaucuccuga

SEQ ID NO: 2672597 - RNA, 16 nt, Human
aacccuaucuccugac

SEQ ID NO: 2672598 - RNA, 19 nt, Human
aacccuaucuccugacaga

SEQ ID NO: 2672599 - RNA, 15 nt, Human
aaccacgccucuuga

SEQ ID NO: 2672600 - RNA, 22 nt, Human
aaccacggaggaugaugccagu

SEQ ID NO: 2672601 - RNA, 21 nt, Human
aaccacugugcgucuuggugu

SEQ ID NO: 2672602 - RNA, 15 nt, Human
aaccacuucagcuga

SEQ ID NO: 2672603 - RNA, 12 nt, Human
aaccagaccugg

SEQ ID NO: 2672604 - RNA, 15 nt, Human
aaccagaccuggaag

SEQ ID NO: 2672605 - RNA, 15 nt, Human
aaccagagugcugaa

SEQ ID NO: 2672606 - RNA, 12 nt, Human
aaccacuuguag

SEQ ID NO: 2672607 - RNA, 21 nt, Human
aaccacuuguagauuugauuu

SEQ ID NO: 2672608 - RNA, 20 nt, Human
aaccacuuguagauuugauu

SEQ ID NO: 2672609 - RNA, 18 nt, Human
aaccacuuguagauuuga

SEQ ID NO: 2672610 - RNA, 17 nt, Human
aaccacuuguagauuug

SEQ ID NO: 2672611 - RNA, 22 nt, Human
aaccacuuguagauuugauuuu

SEQ ID NO: 2672612 - RNA, 17 nt, Human
aacauccaaccuuccca

SEQ ID NO: 2672613 - RNA, 16 nt, Human
aacauccaaccuuccc

SEQ ID NO: 2672614 - RNA, 14 nt, Human
aacaucauuccuuu

SEQ ID NO: 2672615 - RNA, 22 nt, Human
aacaucauuccuuuuuauuuau

SEQ ID NO: 2672616 - RNA, 21 nt, Human
aacaucauuccuuuuuauuua

SEQ ID NO: 2672617 - RNA, 20 nt, Human
aacaucauuccuuuuuauuu

SEQ ID NO: 2672618 - RNA, 17 nt, Human
aacaucauuccuuuuua

SEQ ID NO: 2672619 - RNA, 21 nt, Human
aaccaccccggcccccugccc

SEQ ID NO: 2672620 - RNA, 22 nt, Human
aaccaccccggcccccugcccg

SEQ ID NO: 2672621 - RNA, 18 nt, Human
aacagcugucacaacuug

SEQ ID NO: 2672622 - RNA, 16 nt, Human
aacagcaagugugaau

SEQ ID NO: 2672623 - RNA, 15 nt, Human
aacagcaagugugaa

SEQ ID NO: 2672624 - RNA, 17 nt, Human
aacacauguuuuuauac

SEQ ID NO: 2672625 - RNA, 13 nt, Human
aacacauuucucu

SEQ ID NO: 2672626 - RNA, 13 nt, Human
aacaacaauuggu

SEQ ID NO: 2672627 - RNA, 14 nt, Human
aacaacaauuggua

SEQ ID NO: 2672628 - RNA, 19 nt, Human
aacaacaauugguaaaacu

SEQ ID NO: 2672629 - RNA, 19 nt, Human
aaauuuuuuuuuaaagcag

SEQ ID NO: 2672630 - RNA, 15 nt, Human
aacaaauuauuuuug

SEQ ID NO: 2672631 - RNA, 12 nt, Human
aacaaaaaccaa

SEQ ID NO: 2672632 - RNA, 20 nt, Human
aacaaaaaccaaauguuuau

SEQ ID NO: 2672633 - RNA, 13 nt, Human
aacacguuuuaag

SEQ ID NO: 2672634 - RNA, 22 nt, Human
aaaucuuaaugaaugagucugu

SEQ ID NO: 2672635 - RNA, 13 nt, Human
aaaucuuaauguu

SEQ ID NO: 2672636 - RNA, 23 nt, Human
aaaucuuaauguuccucaaagcu

SEQ ID NO: 2672637 - RNA, 20 nt, Human
aaauugacacaaguggaccu

SEQ ID NO: 2672638 - RNA, 10 nt, Human
aaauguuucu

SEQ ID NO: 2672639 - RNA, 18 nt, Human
aaguguaaguucacaacu

SEQ ID NO: 2672640 - RNA, 14 nt, Human
aagugcuuuaaaaa

SEQ ID NO: 2672641 - RNA, 14 nt, Human
aaguguauaauaua

SEQ ID NO: 2672642 - RNA, 19 nt, Human
aaguguauaauauaaaaaa

SEQ ID NO: 2672643 - RNA, 21 nt, Human
aaguguauaauauaaaaaauu

SEQ ID NO: 2672644 - RNA, 20 nt, Human
aaguugagcuaugacuuaac

SEQ ID NO: 2672645 - RNA, 19 nt, Human
aaguugagcuaugacuuaa

SEQ ID NO: 2672646 - RNA, 18 nt, Human
aaguugagcuaugacuua

SEQ ID NO: 2672647 - RNA, 16 nt, Human
aaguugagcuaugacu

SEQ ID NO: 2672648 - RNA, 16 nt, Human
aaguggaaguauguau

SEQ ID NO: 2672649 - RNA, 22 nt, Human
aagugcuuggaacauacuguuc

SEQ ID NO: 2672650 - RNA, 23 nt, Human
aagugcuuggaacauacuguuca

SEQ ID NO: 2672651 - RNA, 13 nt, Human
aaguggaaauguu

SEQ ID NO: 2672652 - RNA, 21 nt, Human
aaguggaaaaauagccugccu

SEQ ID NO: 2672653 - RNA, 19 nt, Human
aaguggaaaaauagccugc

SEQ ID NO: 2672654 - RNA, 15 nt, Human
aagucugucuuuccu

SEQ ID NO: 2672655 - RNA, 22 nt, Human
aagucugucuuuccugaaccau

SEQ ID NO: 2672656 - RNA, 22 nt, Human
aagucugcucucauauaagaca

SEQ ID NO: 2672657 - RNA, 15 nt, Human
aagggaaaguuuuuu

SEQ ID NO: 2672658 - RNA, 16 nt, Human
aagggaagauuuaugu

SEQ ID NO: 2672659 - RNA, 15 nt, Human
aagggaaccuguguc

SEQ ID NO: 2672660 - RNA, 14 nt, Human
aagggaagaaacug

SEQ ID NO: 2672661 - RNA, 15 nt, Human
aagggaaagaaaaug

SEQ ID NO: 2672662 - RNA, 19 nt, Human
aagggacccuuuggggguu

SEQ ID NO: 2672663 - RNA, 16 nt, Human
aagggagaagaaaggu

SEQ ID NO: 2672664 - RNA, 15 nt, Human
aagggagaagaaagg

SEQ ID NO: 2672665 - RNA, 21 nt, Human
aagggccagcguggcucuaaa

SEQ ID NO: 2672666 - RNA, 23 nt, Human
aaguagaacuuuguauaguuaug

SEQ ID NO: 2672667 - RNA, 21 nt, Human
aaguagaacuuuguauaguua

SEQ ID NO: 2672668 - RNA, 14 nt, Human
aaguaguccuguga

SEQ ID NO: 2672669 - RNA, 22 nt, Human
aaggugaguuugagcugccuuc

SEQ ID NO: 2672670 - RNA, 20 nt, Human
aaggugaguuugagcugccu

SEQ ID NO: 2672671 - RNA, 21 nt, Human
aaggugaguuugagcugccuu

SEQ ID NO: 2672672 - RNA, 18 nt, Human
aaguagaacuuuguauag

SEQ ID NO: 2672673 - RNA, 17 nt, Human
aaguagaacuuuguaua

SEQ ID NO: 2672674 - RNA, 13 nt, Human
aaggugccacuuu

SEQ ID NO: 2672675 - RNA, 21 nt, Human
aagucucacuggcugucagua

SEQ ID NO: 2672676 - RNA, 13 nt, Human
aagucuauaaaaa

SEQ ID NO: 2672677 - RNA, 16 nt, Human
aagauguugauuuuua

SEQ ID NO: 2672678 - RNA, 21 nt, Human
aagauguugauuuuuacugug

SEQ ID NO: 2672679 - RNA, 22 nt, Human
aagauguugauuuuuacugugu

SEQ ID NO: 2672680 - RNA, 15 nt, Human
aacuuucaauuguca

SEQ ID NO: 2672681 - RNA, 23 nt, Human
aagagugauagucuuuugcuuuu

SEQ ID NO: 2672682 - RNA, 21 nt, Human
aagagucuacccgacauaagu

SEQ ID NO: 2672683 - RNA, 16 nt, Human
aagcagccucucccca

SEQ ID NO: 2672684 - RNA, 17 nt, Human
aagcagccucuccccag

SEQ ID NO: 2672685 - RNA, 22 nt, Human
aagcagccucuccccaggucca

SEQ ID NO: 2672686 - RNA, 16 nt, Human
aagccagcccggccgc

SEQ ID NO: 2672687 - RNA, 23 nt, Human
aagcuaaugacgaggaaccgaaa

SEQ ID NO: 2672688 - RNA, 15 nt, Human
aaggcaggccuauuu

SEQ ID NO: 2672689 - RNA, 17 nt, Human
aaggcaggccuauuuca

SEQ ID NO: 2672690 - RNA, 15 nt, Human
aagcugggcagguug

SEQ ID NO: 2672691 - RNA, 19 nt, Human
aagcuaccucaaacuucca

SEQ ID NO: 2672692 - RNA, 17 nt, Human
aagcuacuagcaaaaua

SEQ ID NO: 2672693 - RNA, 22 nt, Human
aagcuacuagcaaaauaaaaca

SEQ ID NO: 2672694 - RNA, 23 nt, Human
aagcgcuuuuccuuggcauuccg

SEQ ID NO: 2672695 - RNA, 13 nt, Human
aauauauaugaau

SEQ ID NO: 2672696 - RNA, 20 nt, Human
aauauauaucuaucuauuug

SEQ ID NO: 2672697 - RNA, 22 nt, Human
aauauauaucuaucuauuugag

SEQ ID NO: 2672698 - RNA, 14 nt, Human
aauauaucucuauu

SEQ ID NO: 2672699 - RNA, 21 nt, Human
aauauaucuuauaaaguggaa

SEQ ID NO: 2672700 - RNA, 15 nt, Human
aauauguuuaaaaua

SEQ ID NO: 2672701 - RNA, 20 nt, Human
aauauguuuaaaauaaaaug

SEQ ID NO: 2672702 - RNA, 23 nt, Human
aauauacaugaagaauagaaaca

SEQ ID NO: 2672703 - RNA, 19 nt, Human
aauauacauucaaacuuaa

SEQ ID NO: 2672704 - RNA, 18 nt, Human
aauauacauucaaacuua

SEQ ID NO: 2672705 - RNA, 17 nt, Human
aaucaagguuauaauuu

SEQ ID NO: 2672706 - RNA, 18 nt, Human
aaucaagguuauaauuuu

SEQ ID NO: 2672707 - RNA, 13 nt, Human
aaucaccauguaa

SEQ ID NO: 2672708 - RNA, 14 nt, Human
aaucaccauguaag

SEQ ID NO: 2672709 - RNA, 15 nt, Human
aaucaccauguaagc

SEQ ID NO: 2672710 - RNA, 16 nt, Human
aaucaccauguaagca

SEQ ID NO: 2672711 - RNA, 19 nt, Human
aaucaccauguaagcacuc

SEQ ID NO: 2672712 - RNA, 23 nt, Human
aaucaccauguaagcacucugga

SEQ ID NO: 2672713 - RNA, 22 nt, Human
aaucaagagccuuaaaacauca

SEQ ID NO: 2672714 - RNA, 21 nt, Human
aaucaagagccuuaaaacauc

SEQ ID NO: 2672715 - RNA, 22 nt, Human
aauauuaggcuuaaaaacugaa

SEQ ID NO: 2672716 - RNA, 23 nt, Human
aauauuaggcuuaaaaacugaaa

SEQ ID NO: 2672717 - RNA, 19 nt, Human
aaucaagagccuuaaaaca

SEQ ID NO: 2672718 - RNA, 17 nt, Human
aaucaagagccuuaaaa

SEQ ID NO: 2672719 - RNA, 14 nt, Human
aauacuauuuaaga

SEQ ID NO: 2672720 - RNA, 15 nt, Human
aauacuauuuaagau

SEQ ID NO: 2672721 - RNA, 19 nt, Human
aauacuauuuaagauguga

SEQ ID NO: 2672722 - RNA, 20 nt, Human
aauacuauuuaagaugugaa

SEQ ID NO: 2672723 - RNA, 21 nt, Human
aauacuauuuaagaugugaaa

SEQ ID NO: 2672724 - RNA, 14 nt, Human
aauacucuuuauuu

SEQ ID NO: 2672725 - RNA, 15 nt, Human
aauacugaaccacuu

SEQ ID NO: 2672726 - RNA, 14 nt, Human
aauacugaaccacu

SEQ ID NO: 2672727 - RNA, 13 nt, Human
aauacugaaccac

SEQ ID NO: 2672728 - RNA, 22 nt, Human
aauacucuacccucuuagaaaa

SEQ ID NO: 2672729 - RNA, 20 nt, Human
aauacucuacccucuuagaa

SEQ ID NO: 2672730 - RNA, 18 nt, Human
aauacugaaccacuugua

SEQ ID NO: 2672731 - RNA, 20 nt, Human
aauacugaaccacuuguaga

SEQ ID NO: 2672732 - RNA, 18 nt, Human
aauacugauggaauuuuu

SEQ ID NO: 2672733 - RNA, 13 nt, Human
aauacugcuugaa

SEQ ID NO: 2672734 - RNA, 16 nt, Human
aaugaaagcuguuccu

SEQ ID NO: 2672735 - RNA, 17 nt, Human
aaucucuuuuuguuugc

SEQ ID NO: 2672736 - RNA, 18 nt, Human
aaucucuuuuuguuugcc

SEQ ID NO: 2672737 - RNA, 15 nt, Human
aaucucuucauuauu

SEQ ID NO: 2672738 - RNA, 18 nt, Human
aaucucuucauuauucuc

SEQ ID NO: 2672739 - RNA, 21 nt, Human
aaucucuucauuauucucugc

SEQ ID NO: 2672740 - RNA, 13 nt, Human
aaucucugugccu

SEQ ID NO: 2672741 - RNA, 14 nt, Human
aaucucuaggaagu

SEQ ID NO: 2672742 - RNA, 15 nt, Human
aaucucuaggaaguc

SEQ ID NO: 2672743 - RNA, 19 nt, Human
aaucucuaggaagucaaua

SEQ ID NO: 2672744 - RNA, 17 nt, Human
aauccaagccuccacag

SEQ ID NO: 2672745 - RNA, 18 nt, Human
aauccaagccuccacagc

SEQ ID NO: 2672746 - RNA, 22 nt, Human
aauccaagccuccacagcgagg

SEQ ID NO: 2672747 - RNA, 23 nt, Human
aauccaagccuccacagcgaggg

SEQ ID NO: 2672748 - RNA, 14 nt, Human
aaugaaguugaaaa

SEQ ID NO: 2672749 - RNA, 19 nt, Human
aaugaaguugaaaaucaua

SEQ ID NO: 2672750 - RNA, 19 nt, Human
aaugaaauauuguuuccaa

SEQ ID NO: 2672751 - RNA, 14 nt, Human
aaugaaaugcauau

SEQ ID NO: 2672752 - RNA, 22 nt, Human
aauggugugaacccgggagcgg

SEQ ID NO: 2672753 - RNA, 16 nt, Human
aaugcuauuugaacaa

SEQ ID NO: 2672754 - RNA, 17 nt, Human
aaugguugaugauacuu

SEQ ID NO: 2672755 - RNA, 17 nt, Human
aauguccaguaagauca

SEQ ID NO: 2672756 - RNA, 17 nt, Human
aauguuucuuuuguuug

SEQ ID NO: 2672757 - RNA, 21 nt, Human
aauguuucuuuuguuugguaa

SEQ ID NO: 2672758 - RNA, 15 nt, Human
aaugugaaaagaaaa

SEQ ID NO: 2672759 - RNA, 17 nt, Human
aaugugaaaagaaaaau

SEQ ID NO: 2672760 - RNA, 15 nt, Human
aauguccauaugcua

SEQ ID NO: 2672761 - RNA, 22 nt, Human
aauguccaguaagaucacuguu

SEQ ID NO: 2672762 - RNA, 20 nt, Human
aauguccaguaagaucacug

SEQ ID NO: 2672763 - RNA, 19 nt, Human
aauguccaguaagaucacu

SEQ ID NO: 2672764 - RNA, 16 nt, Human
agccaaccuaagcaag

SEQ ID NO: 2672765 - RNA, 13 nt, Human
agccaaguggggu

SEQ ID NO: 2672766 - RNA, 16 nt, Human
agccaaguggggugcu

SEQ ID NO: 2672767 - RNA, 20 nt, Human
agccaaguggggugcuggga

SEQ ID NO: 2672768 - RNA, 23 nt, Human
agccaagugugguagagugugcc

SEQ ID NO: 2672769 - RNA, 15 nt, Human
agccaaguuuuauaa

SEQ ID NO: 2672770 - RNA, 22 nt, Human
agccaaguuuuauaauccuuaa

SEQ ID NO: 2672771 - RNA, 13 nt, Human
agccagcaccugg

SEQ ID NO: 2672772 - RNA, 14 nt, Human
agccagcaccuggc

SEQ ID NO: 2672773 - RNA, 15 nt, Human
agccagcaccuggca

SEQ ID NO: 2672774 - RNA, 23 nt, Human
agccagcaccuggcaucgcacca

SEQ ID NO: 2672775 - RNA, 17 nt, Human
agcaugcuugugaaaau

SEQ ID NO: 2672776 - RNA, 22 nt, Human
agcaugcuugugaaaauguguu

SEQ ID NO: 2672777 - RNA, 23 nt, Human
agcaugcuugugaaaauguguuc

SEQ ID NO: 2672778 - RNA, 20 nt, Human
agcaugaagucuuaaggaca

SEQ ID NO: 2672779 - RNA, 23 nt, Human
agcaugaagucuuaaggacaaag

SEQ ID NO: 2672780 - RNA, 21 nt, Human
agcaguuacaaaaaccuuccc

SEQ ID NO: 2672781 - RNA, 21 nt, Human
agcacugggcucccgggcccc

SEQ ID NO: 2672782 - RNA, 18 nt, Human
agcacugggcucccgggc

SEQ ID NO: 2672783 - RNA, 14 nt, Human
agcacagaauauuu

SEQ ID NO: 2672784 - RNA, 22 nt, Human
agcacaccaaucuuacuuugua

SEQ ID NO: 2672785 - RNA, 21 nt, Human
agcacaccaaucuuacuuugu

SEQ ID NO: 2672786 - RNA, 19 nt, Human
agcacaccaaucuuacuuu

SEQ ID NO: 2672787 - RNA, 22 nt, Human
agcagcuuauaaugggcucucc

SEQ ID NO: 2672788 - RNA, 14 nt, Human
agcagcuuauuguu

SEQ ID NO: 2672789 - RNA, 15 nt, Human
agcagcuuauuguuu

SEQ ID NO: 2672790 - RNA, 15 nt, Human
agcacuguaaacuuc

SEQ ID NO: 2672791 - RNA, 15 nt, Human
agcacuguugagaag

SEQ ID NO: 2672792 - RNA, 14 nt, Human
agccuccgagaggg

SEQ ID NO: 2672793 - RNA, 16 nt, Human
agccuccgagagggag

SEQ ID NO: 2672794 - RNA, 17 nt, Human
agccuccgagagggaga

SEQ ID NO: 2672795 - RNA, 18 nt, Human
agccuccgagagggagag

SEQ ID NO: 2672796 - RNA, 14 nt, Human
agccuccuccagcc

SEQ ID NO: 2672797 - RNA, 22 nt, Human
agccucccacgacugcccggca

SEQ ID NO: 2672798 - RNA, 23 nt, Human
agccguccuggcgccuggcaguc

SEQ ID NO: 2672799 - RNA, 13 nt, Human
agccguccuggcg

SEQ ID NO: 2672800 - RNA, 12 nt, Human
agccguccuggc

SEQ ID NO: 2672801 - RNA, 21 nt, Human
agccgccaugcuccuggccca

SEQ ID NO: 2672802 - RNA, 14 nt, Human
agccgggccccugg

SEQ ID NO: 2672803 - RNA, 18 nt, Human
agccgggccccugggcuu

SEQ ID NO: 2672804 - RNA, 16 nt, Human
agccgggccccugggc

SEQ ID NO: 2672805 - RNA, 17 nt, Human
agccgggccccugggcu

SEQ ID NO: 2672806 - RNA, 14 nt, Human
agaggaccagggcc

SEQ ID NO: 2672807 - RNA, 15 nt, Human
agaggaccagggccu

SEQ ID NO: 2672808 - RNA, 17 nt, Human
agaggaccagggccuuu

SEQ ID NO: 2672809 - RNA, 22 nt, Human
agaggacuguagggagggcggc

SEQ ID NO: 2672810 - RNA, 16 nt, Human
agaggaaggagaggag

SEQ ID NO: 2672811 - RNA, 14 nt, Human
agagugugccugaa

SEQ ID NO: 2672812 - RNA, 19 nt, Human
agaguggggauaugauuua

SEQ ID NO: 2672813 - RNA, 11 nt, Human
agagugggagc

SEQ ID NO: 2672814 - RNA, 12 nt, Human
agaucuuucaga

SEQ ID NO: 2672815 - RNA, 14 nt, Human
agaucuuucagaaa

SEQ ID NO: 2672816 - RNA, 16 nt, Human
agaucuuucagaaaua

SEQ ID NO: 2672817 - RNA, 17 nt, Human
agaucuuucagaaauau

SEQ ID NO: 2672818 - RNA, 19 nt, Human
agaucuuucagaaauauaa

SEQ ID NO: 2672819 - RNA, 20 nt, Human
agaucuuucagaaauauaac

SEQ ID NO: 2672820 - RNA, 21 nt, Human
agaucuuucagaaauauaaca

SEQ ID NO: 2672821 - RNA, 16 nt, Human
agauaucgacuuguuu

SEQ ID NO: 2672822 - RNA, 15 nt, Human
agauaucucaaugaa

SEQ ID NO: 2672823 - RNA, 20 nt, Human
agaguucccuugaaacuuug

SEQ ID NO: 2672824 - RNA, 16 nt, Human
agacgguguuuugcca

SEQ ID NO: 2672825 - RNA, 21 nt, Human
agacgguguuuugccauguug

SEQ ID NO: 2672826 - RNA, 16 nt, Human
agacgguuuccaggga

SEQ ID NO: 2672827 - RNA, 19 nt, Human
agacgguuuccagggaggg

SEQ ID NO: 2672828 - RNA, 15 nt, Human
agacaagagauggga

SEQ ID NO: 2672829 - RNA, 16 nt, Human
agacagauaccuccaa

SEQ ID NO: 2672830 - RNA, 21 nt, Human
agacagauaccuccaacccug

SEQ ID NO: 2672831 - RNA, 22 nt, Human
agacagauaccuccaacccugc

SEQ ID NO: 2672832 - RNA, 23 nt, Human
agacagauaccuccaacccugcc

SEQ ID NO: 2672833 - RNA, 22 nt, Human
agagaacucgcgcucaguaaac

SEQ ID NO: 2672834 - RNA, 18 nt, Human
agagagcugccaucgcug

SEQ ID NO: 2672835 - RNA, 20 nt, Human
aggagaauggugugaacccg

SEQ ID NO: 2672836 - RNA, 18 nt, Human
aggauuaguuuagaacag

SEQ ID NO: 2672837 - RNA, 16 nt, Human
aggauuaguuuagaac

SEQ ID NO: 2672838 - RNA, 15 nt, Human
aggauuaguuuagaa

SEQ ID NO: 2672839 - RNA, 17 nt, Human
aggauuaguuuagaaca

SEQ ID NO: 2672840 - RNA, 16 nt, Human
aggaguguggccacgu

SEQ ID NO: 2672841 - RNA, 17 nt, Human
aggaguggugauuugaa

SEQ ID NO: 2672842 - RNA, 13 nt, Human
aggaccucaggug

SEQ ID NO: 2672843 - RNA, 14 nt, Human
aggagaagcugcau

SEQ ID NO: 2672844 - RNA, 17 nt, Human
aggagaagcugcaucca

SEQ ID NO: 2672845 - RNA, 20 nt, Human
aggaguccacuuuguuucgu

SEQ ID NO: 2672846 - RNA, 20 nt, Human
aggagaauggcgugaacccg

SEQ ID NO: 2672847 - RNA, 13 nt, Human
aggagacaaaaga

SEQ ID NO: 2672848 - RNA, 16 nt, Human
aggagacaaaagagca

SEQ ID NO: 2672849 - RNA, 14 nt, Human
aggacccaggaaag

SEQ ID NO: 2672850 - RNA, 17 nt, Human
aggaaucauucagaaau

SEQ ID NO: 2672851 - RNA, 22 nt, Human
aggaaucauucagaaauguuga

SEQ ID NO: 2672852 - RNA, 23 nt, Human
aggaaucauucagaaauguugag

SEQ ID NO: 2672853 - RNA, 15 nt, Human
agcuccgcaggacuu

SEQ ID NO: 2672854 - RNA, 11 nt, Human
agcucuuuuaa

SEQ ID NO: 2672855 - RNA, 22 nt, Human
agcugaacaauaggcuguuccc

SEQ ID NO: 2672856 - RNA, 21 nt, Human
agcugaacaauaggcuguucc

SEQ ID NO: 2672857 - RNA, 19 nt, Human
agcugagacuacaagugug

SEQ ID NO: 2672858 - RNA, 23 nt, Human
agcuccgcaggacuuccccggag

SEQ ID NO: 2672859 - RNA, 15 nt, Human
agcuuccauuuuaau

SEQ ID NO: 2672860 - RNA, 20 nt, Human
agcuuccauuuuaauuuuaa

SEQ ID NO: 2672861 - RNA, 20 nt, Human
agcuucugcuuuucugcccu

SEQ ID NO: 2672862 - RNA, 21 nt, Human
agcuucugcuuuucugcccug

SEQ ID NO: 2672863 - RNA, 23 nt, Human
agcuucugcuuuucugcccuggc

SEQ ID NO: 2672864 - RNA, 22 nt, Human
agcuucugcuuuucugcccugg

SEQ ID NO: 2672865 - RNA, 20 nt, Human
agcugcuauuuauuuuccua

SEQ ID NO: 2672866 - RNA, 21 nt, Human
agcugcuauuuauuuuccuaa

SEQ ID NO: 2672867 - RNA, 18 nt, Human
agcugcuauccccaucuc

SEQ ID NO: 2672868 - RNA, 19 nt, Human
agcugcuauccccaucucc

SEQ ID NO: 2672869 - RNA, 21 nt, Human
agcugcuauccccaucucccu

SEQ ID NO: 2672870 - RNA, 22 nt, Human
agcugcuauccccaucucccug

SEQ ID NO: 2672871 - RNA, 23 nt, Human
agcugcuauccccaucucccugc

SEQ ID NO: 2672872 - RNA, 19 nt, Human
agcugcuauuuauuuuccu

SEQ ID NO: 2672873 - RNA, 16 nt, Human
agguaaugugaauaaa

SEQ ID NO: 2672874 - RNA, 23 nt, Human
agguaacacuagggccuuggaaa

SEQ ID NO: 2672875 - RNA, 20 nt, Human
agguggaggcugcagugagc

SEQ ID NO: 2672876 - RNA, 14 nt, Human
agguggagggaggg

SEQ ID NO: 2672877 - RNA, 13 nt, Human
agguguuugaaaa

SEQ ID NO: 2672878 - RNA, 17 nt, Human
agguguuugaaaauagu

SEQ ID NO: 2672879 - RNA, 15 nt, Human
agguguuugaaaaua

SEQ ID NO: 2672880 - RNA, 14 nt, Human
agguguuugaaaau

SEQ ID NO: 2672881 - RNA, 12 nt, Human
agguuccucugc

SEQ ID NO: 2672882 - RNA, 16 nt, Human
agguuccgauguuauu

SEQ ID NO: 2672883 - RNA, 14 nt, Human
agguuauaauuuuu

SEQ ID NO: 2672884 - RNA, 19 nt, Human
agguuauaauuuuuuuuaa

SEQ ID NO: 2672885 - RNA, 20 nt, Human
agguuauaauuuuuuuuaaa

SEQ ID NO: 2672886 - RNA, 18 nt, Human
aggguccaaccagaccug

SEQ ID NO: 2672887 - RNA, 19 nt, Human
aggguccaaccagaccugg

SEQ ID NO: 2672888 - RNA, 12 nt, Human
agggucccucug

SEQ ID NO: 2672889 - RNA, 14 nt, Human
agggucccucugug

SEQ ID NO: 2672890 - RNA, 15 nt, Human
agggucccucugugu

SEQ ID NO: 2672891 - RNA, 18 nt, Human
agggucccucuguguauu

SEQ ID NO: 2672892 - RNA, 20 nt, Human
agggucccucuguguauuug

SEQ ID NO: 2672893 - RNA, 19 nt, Human
aggccgaggccaugugcau

SEQ ID NO: 2672894 - RNA, 20 nt, Human
aggccgaggccaugugcaua

SEQ ID NO: 2672895 - RNA, 16 nt, Human
aggccgaggcgggugg

SEQ ID NO: 2672896 - RNA, 16 nt, Human
aggcccuuugcugucc

SEQ ID NO: 2672897 - RNA, 13 nt, Human
aggcccuuugcug

SEQ ID NO: 2672898 - RNA, 15 nt, Human
aggcccuuugcuguc

SEQ ID NO: 2672899 - RNA, 14 nt, Human
aggcccuuugcugu

SEQ ID NO: 2672900 - RNA, 14 nt, Human
agggaccggcggac

SEQ ID NO: 2672901 - RNA, 22 nt, Human
agggaccggcggaccccagcca

SEQ ID NO: 2672902 - RNA, 23 nt, Human
auagcaucucaggagauuucaug

SEQ ID NO: 2672903 - RNA, 21 nt, Human
auagcaucuggaagaucauuu

SEQ ID NO: 2672904 - RNA, 20 nt, Human
auagcaucacuuaaaacacg

SEQ ID NO: 2672905 - RNA, 18 nt, Human
auagcaucacuuaaaaca

SEQ ID NO: 2672906 - RNA, 17 nt, Human
auagcaucacuuaaaac

SEQ ID NO: 2672907 - RNA, 16 nt, Human
auagcaucacuuaaaa

SEQ ID NO: 2672908 - RNA, 15 nt, Human
auagcaucacuuaaa

SEQ ID NO: 2672909 - RNA, 13 nt, Human
auagcaucacuua

SEQ ID NO: 2672910 - RNA, 13 nt, Human
auagcaugaaaua

SEQ ID NO: 2672911 - RNA, 15 nt, Human
auagcaugaaauaaa

SEQ ID NO: 2672912 - RNA, 16 nt, Human
auagcaugaaauaaaa

SEQ ID NO: 2672913 - RNA, 14 nt, Human
auauuacugacauu

SEQ ID NO: 2672914 - RNA, 15 nt, Human
auauuacugacauuu

SEQ ID NO: 2672915 - RNA, 16 nt, Human
auauuacugacauuuc

SEQ ID NO: 2672916 - RNA, 17 nt, Human
auauuacugacauuucu

SEQ ID NO: 2672917 - RNA, 18 nt, Human
auauuauuauaaucuuau

SEQ ID NO: 2672918 - RNA, 19 nt, Human
auauuauuauaaucuuaua

SEQ ID NO: 2672919 - RNA, 21 nt, Human
auauuauuauaaucuuauaau

SEQ ID NO: 2672920 - RNA, 23 nt, Human
auauuauuauaaucuuauaauug

SEQ ID NO: 2672921 - RNA, 15 nt, Human
auauuagaaaggcuc

SEQ ID NO: 2672922 - RNA, 18 nt, Human
auauuuauugacucuuga

SEQ ID NO: 2672923 - RNA, 16 nt, Human
auauuuauugacucuu

SEQ ID NO: 2672924 - RNA, 13 nt, Human
auauuuauugacu

SEQ ID NO: 2672925 - RNA, 13 nt, Human
auaucaugcaaaa

SEQ ID NO: 2672926 - RNA, 20 nt, Human
auaucaugcaaaauauguuu

SEQ ID NO: 2672927 - RNA, 21 nt, Human
auaucaaauuaauugugugaa

SEQ ID NO: 2672928 - RNA, 20 nt, Human
auaucaaauuaauuguguga

SEQ ID NO: 2672929 - RNA, 19 nt, Human
auaucaaauuaauugugug

SEQ ID NO: 2672930 - RNA, 18 nt, Human
auaucaaauuaauugugu

SEQ ID NO: 2672931 - RNA, 13 nt, Human
auaucaaauuaau

SEQ ID NO: 2672932 - RNA, 13 nt, Human
auaucaaagucau

SEQ ID NO: 2672933 - RNA, 21 nt, Human
auaucaaagucauuaaagaca

SEQ ID NO: 2672934 - RNA, 14 nt, Human
auaaaggauaaaga

SEQ ID NO: 2672935 - RNA, 22 nt, Human
auaaauuuugaaaaguaauauu

SEQ ID NO: 2672936 - RNA, 16 nt, Human
auaacauaaauuuuuu

SEQ ID NO: 2672937 - RNA, 11 nt, Human
auaacauauau

SEQ ID NO: 2672938 - RNA, 14 nt, Human
auaacauauaugga

SEQ ID NO: 2672939 - RNA, 20 nt, Human
auaacauauauggaagagga

SEQ ID NO: 2672940 - RNA, 17 nt, Human
auaacauccagagcuuu

SEQ ID NO: 2672941 - RNA, 16 nt, Human
auaaagcaguauuuuu

SEQ ID NO: 2672942 - RNA, 14 nt, Human
auaaagcaguauuu

SEQ ID NO: 2672943 - RNA, 13 nt, Human
auaaagcuuguug

SEQ ID NO: 2672944 - RNA, 23 nt, Human
auaaagaaggaugaugucuuuuu

SEQ ID NO: 2672945 - RNA, 12 nt, Human
auaaaaauauau

SEQ ID NO: 2672946 - RNA, 18 nt, Human
auaaagaaaaaaauacua

SEQ ID NO: 2672947 - RNA, 13 nt, Human
auaaaaauauauu

SEQ ID NO: 2672948 - RNA, 17 nt, Human
auaaacuuuagaguaga

SEQ ID NO: 2672949 - RNA, 13 nt, Human
auaaaagaaacac

SEQ ID NO: 2672950 - RNA, 13 nt, Human
auaaaagaaauaa

SEQ ID NO: 2672951 - RNA, 18 nt, Human
auaccauuuaguaagaau

SEQ ID NO: 2672952 - RNA, 22 nt, Human
auaccauuuaguaagaauacca

SEQ ID NO: 2672953 - RNA, 17 nt, Human
auaauguccauaugcua

SEQ ID NO: 2672954 - RNA, 18 nt, Human
auaaggaaagcaauaaau

SEQ ID NO: 2672955 - RNA, 22 nt, Human
auaagcuuccauuuuaauuuua

SEQ ID NO: 2672956 - RNA, 13 nt, Human
auaaggauuuuuc

SEQ ID NO: 2672957 - RNA, 12 nt, Human
auaaggaaauuu

SEQ ID NO: 2672958 - RNA, 14 nt, Human
auaaugcuacaauu

SEQ ID NO: 2672959 - RNA, 15 nt, Human
auaaugcuacaauuu

SEQ ID NO: 2672960 - RNA, 17 nt, Human
auaaugcuacaauuuua

SEQ ID NO: 2672961 - RNA, 20 nt, Human
auaaugcuacaauuuuaaga

SEQ ID NO: 2672962 - RNA, 15 nt, Human
auaccuccaacccug

SEQ ID NO: 2672963 - RNA, 17 nt, Human
auaccuccaacccugcc

SEQ ID NO: 2672964 - RNA, 18 nt, Human
agugucccccacccccac

SEQ ID NO: 2672965 - RNA, 14 nt, Human
agugucccccaggu

SEQ ID NO: 2672966 - RNA, 22 nt, Human
agugucccccagguuccgaaga

SEQ ID NO: 2672967 - RNA, 17 nt, Human
aguguauguagaagcau

SEQ ID NO: 2672968 - RNA, 12 nt, Human
aguguauuuauu

SEQ ID NO: 2672969 - RNA, 18 nt, Human
aguguaugacugcacaug

SEQ ID NO: 2672970 - RNA, 19 nt, Human
aguggcgugggagccagcc

SEQ ID NO: 2672971 - RNA, 17 nt, Human
aguguauuaggaagugu

SEQ ID NO: 2672972 - RNA, 19 nt, Human
aguugaaaauucauaguaa

SEQ ID NO: 2672973 - RNA, 19 nt, Human
aguuaaggugggcccggcc

SEQ ID NO: 2672974 - RNA, 16 nt, Human
aguuaaggugggcccg

SEQ ID NO: 2672975 - RNA, 21 nt, Human
aguuaaaagaauguaaaauau

SEQ ID NO: 2672976 - RNA, 20 nt, Human
aguuaaaauuguuaucaaaa

SEQ ID NO: 2672977 - RNA, 22 nt, Human
aguuaaaauuguuaucaaaaua

SEQ ID NO: 2672978 - RNA, 15 nt, Human
aguguuuuugugaau

SEQ ID NO: 2672979 - RNA, 16 nt, Human
aguguuuuugugaauu

SEQ ID NO: 2672980 - RNA, 19 nt, Human
aguguuuuuuuauuucuac

SEQ ID NO: 2672981 - RNA, 17 nt, Human
agucaaaguugaaaauu

SEQ ID NO: 2672982 - RNA, 20 nt, Human
agucaaaguugaaaauucau

SEQ ID NO: 2672983 - RNA, 23 nt, Human
aguaugguaaucuuuaccuguau

SEQ ID NO: 2672984 - RNA, 19 nt, Human
agucaacaguacccugguu

SEQ ID NO: 2672985 - RNA, 12 nt, Human
agucaacaguac

SEQ ID NO: 2672986 - RNA, 15 nt, Human
aguaucucagggccu

SEQ ID NO: 2672987 - RNA, 19 nt, Human
aguaugaaaauggaaauuu

SEQ ID NO: 2672988 - RNA, 13 nt, Human
aguccugugaaug

SEQ ID NO: 2672989 - RNA, 18 nt, Human
aguccugugaaugccacu

SEQ ID NO: 2672990 - RNA, 19 nt, Human
aguccugugaaugccacug

SEQ ID NO: 2672991 - RNA, 20 nt, Human
aguccugugaaugccacugc

SEQ ID NO: 2672992 - RNA, 20 nt, Human
agugaacuugggccacugug

SEQ ID NO: 2672993 - RNA, 19 nt, Human
agugacaguugcagcccuu

SEQ ID NO: 2672994 - RNA, 17 nt, Human
auguauuauuuauaauu

SEQ ID NO: 2672995 - RNA, 16 nt, Human
auguauuauuuauaau

SEQ ID NO: 2672996 - RNA, 15 nt, Human
auguauuauuuauaa

SEQ ID NO: 2672997 - RNA, 17 nt, Human
auguauucuuuucucag

SEQ ID NO: 2672998 - RNA, 23 nt, Human
auggucgagaaagaggcaccagg

SEQ ID NO: 2672999 - RNA, 21 nt, Human
augguauauuugguacuguau

SEQ ID NO: 2673000 - RNA, 12 nt, Human
augguauauaua

SEQ ID NO: 2673001 - RNA, 14 nt, Human
augguauauauaca

SEQ ID NO: 2673002 - RNA, 16 nt, Human
augguauauauacaua

SEQ ID NO: 2673003 - RNA, 17 nt, Human
augguauauauacauau

SEQ ID NO: 2673004 - RNA, 19 nt, Human
augguauauauacauauau

SEQ ID NO: 2673005 - RNA, 24 nt, Human
auggucacguuuggugcuucucag

SEQ ID NO: 2673006 - RNA, 21 nt, Human
auggucacguuuggugcuucu

SEQ ID NO: 2673007 - RNA, 20 nt, Human
auggucacguuuggugcuuc

SEQ ID NO: 2673008 - RNA, 13 nt, Human
augucuuuuaaaa

SEQ ID NO: 2673009 - RNA, 14 nt, Human
augucuuuuaaaau

SEQ ID NO: 2673010 - RNA, 23 nt, Human
augucaaaaguagaacuuuguau

SEQ ID NO: 2673011 - RNA, 22 nt, Human
augucaaaaguagaacuuugua

SEQ ID NO: 2673012 - RNA, 20 nt, Human
augucaaaaguagaacuuug

SEQ ID NO: 2673013 - RNA, 17 nt, Human
augucaaaaguagaacu

SEQ ID NO: 2673014 - RNA, 15 nt, Human
augucaaaaguagaa

SEQ ID NO: 2673015 - RNA, 14 nt, Human
augugaauuauuga

SEQ ID NO: 2673016 - RNA, 16 nt, Human
augugaauuauugaca

SEQ ID NO: 2673017 - RNA, 18 nt, Human
augugaauuauugacacu

SEQ ID NO: 2673018 - RNA, 19 nt, Human
augugaauuauugacacug

SEQ ID NO: 2673019 - RNA, 20 nt, Human
augugaauuauugacacuga

SEQ ID NO: 2673020 - RNA, 21 nt, Human
augugaauuauugacacugaa

SEQ ID NO: 2673021 - RNA, 21 nt, Human
auguucuagucugcuuuggua

SEQ ID NO: 2673022 - RNA, 22 nt, Human
augugugcaacaggguauggac

SEQ ID NO: 2673023 - RNA, 12 nt, Human
auuaaauacaua

SEQ ID NO: 2673024 - RNA, 13 nt, Human
auuaaauacauau

SEQ ID NO: 2673025 - RNA, 19 nt, Human
auuaaauacauauggaugu

SEQ ID NO: 2673026 - RNA, 23 nt, Human
auuaaauacauauggauguuacu

SEQ ID NO: 2673027 - RNA, 16 nt, Human
auguuuucaaaaggua

SEQ ID NO: 2673028 - RNA, 22 nt, Human
auguuuucaaaagguauuauac

SEQ ID NO: 2673029 - RNA, 15 nt, Human
auguuuccagacuuc

SEQ ID NO: 2673030 - RNA, 17 nt, Human
augugggauauugaaug

SEQ ID NO: 2673031 - RNA, 19 nt, Human
augugggauauugaauguu

SEQ ID NO: 2673032 - RNA, 16 nt, Human
auggaaaguaacucau

SEQ ID NO: 2673033 - RNA, 20 nt, Human
auggaggaagaacugaaagg

SEQ ID NO: 2673034 - RNA, 18 nt, Human
auggaggaagaacugaaa

SEQ ID NO: 2673035 - RNA, 19 nt, Human
auggaggaucucuaaagag

SEQ ID NO: 2673036 - RNA, 21 nt, Human
auggaggaucucuaaagagca

SEQ ID NO: 2673037 - RNA, 15 nt, Human
auggauuuccagcca

SEQ ID NO: 2673038 - RNA, 23 nt, Human
auggaaagcagaguuuucauuaa

SEQ ID NO: 2673039 - RNA, 18 nt, Human
auggaaaaguguccuucu

SEQ ID NO: 2673040 - RNA, 19 nt, Human
augcugcaggacuugagaa

SEQ ID NO: 2673041 - RNA, 18 nt, Human
augcugcaggacuugaga

SEQ ID NO: 2673042 - RNA, 14 nt, Human
auggauuucagaag

SEQ ID NO: 2673043 - RNA, 17 nt, Human
auggauuucagaagccu

SEQ ID NO: 2673044 - RNA, 22 nt, Human
auggcuguguugguguggccca

SEQ ID NO: 2673045 - RNA, 14 nt, Human
augauuaaaaauau

SEQ ID NO: 2673046 - RNA, 17 nt, Human
augauuaaaaauaucaa

SEQ ID NO: 2673047 - RNA, 15 nt, Human
augcauauaaugaau

SEQ ID NO: 2673048 - RNA, 18 nt, Human
augcauauaaugaauaaa

SEQ ID NO: 2673049 - RNA, 19 nt, Human
augcauauaaugaauaaau

SEQ ID NO: 2673050 - RNA, 21 nt, Human
augcauauaaugaauaaauca

SEQ ID NO: 2673051 - RNA, 13 nt, Human
augcaucuuugau

SEQ ID NO: 2673052 - RNA, 12 nt, Human
augcaucuuuga

SEQ ID NO: 2673053 - RNA, 21 nt, Human
augcaucuuugauguguuguu

SEQ ID NO: 2673054 - RNA, 19 nt, Human
augcaucuuugauguguug

SEQ ID NO: 2673055 - RNA, 16 nt, Human
augcaucuuugaugug

SEQ ID NO: 2673056 - RNA, 15 nt, Human
augcaucuuugaugu

SEQ ID NO: 2673057 - RNA, 18 nt, Human
aucuauuaauauauguau

SEQ ID NO: 2673058 - RNA, 15 nt, Human
aucuauuaauauaug

SEQ ID NO: 2673059 - RNA, 12 nt, Human
aucuauuaauau

SEQ ID NO: 2673060 - RNA, 14 nt, Human
aucuauuaauauau

SEQ ID NO: 2673061 - RNA, 13 nt, Human
aucuaucugugcu

SEQ ID NO: 2673062 - RNA, 17 nt, Human
aucuauggucgggagac

SEQ ID NO: 2673063 - RNA, 14 nt, Human
aucucccucccaca

SEQ ID NO: 2673064 - RNA, 13 nt, Human
aucucccugccug

SEQ ID NO: 2673065 - RNA, 14 nt, Human
aucucccugccugg

SEQ ID NO: 2673066 - RNA, 15 nt, Human
aucucccugccuggc

SEQ ID NO: 2673067 - RNA, 17 nt, Human
aucucccugccuggccc

SEQ ID NO: 2673068 - RNA, 18 nt, Human
aucucccugccuggcccc

SEQ ID NO: 2673069 - RNA, 20 nt, Human
aucucccugccuggccccca

SEQ ID NO: 2673070 - RNA, 20 nt, Human
aucuccccucagcucggcuc

SEQ ID NO: 2673071 - RNA, 14 nt, Human
aucuccccucagcu

SEQ ID NO: 2673072 - RNA, 16 nt, Human
aucuccccucagcucg

SEQ ID NO: 2673073 - RNA, 15 nt, Human
aucuccccucagcuc

SEQ ID NO: 2673074 - RNA, 17 nt, Human
aucuauucugagaaaac

SEQ ID NO: 2673075 - RNA, 18 nt, Human
aucuauucugagaaaaca

SEQ ID NO: 2673076 - RNA, 22 nt, Human
aucuauucugagaaaacaagca

SEQ ID NO: 2673077 - RNA, 16 nt, Human
aucuaucuaguucuaa

SEQ ID NO: 2673078 - RNA, 14 nt, Human
aucuaucuauuuga

SEQ ID NO: 2673079 - RNA, 15 nt, Human
aucuaucuauuugag

SEQ ID NO: 2673080 - RNA, 16 nt, Human
aucuaucuauuugagg

SEQ ID NO: 2673081 - RNA, 19 nt, Human
aucuaucucaucuaucuca

SEQ ID NO: 2673082 - RNA, 13 nt, Human
aucucugugccuu

SEQ ID NO: 2673083 - RNA, 14 nt, Human
aucucugugccuuc

SEQ ID NO: 2673084 - RNA, 15 nt, Human
aucucugugccuucg

SEQ ID NO: 2673085 - RNA, 18 nt, Human
aucucugugccuucgucu

SEQ ID NO: 2673086 - RNA, 21 nt, Human
aucuggccccagguagaaacu

SEQ ID NO: 2673087 - RNA, 20 nt, Human
aucuugaauccuuccauucc

SEQ ID NO: 2673088 - RNA, 20 nt, Human
augaaaaauagugucuuugu

SEQ ID NO: 2673089 - RNA, 18 nt, Human
augaaaaauuggggagga

SEQ ID NO: 2673090 - RNA, 19 nt, Human
augaaaaauagugucuuug

SEQ ID NO: 2673091 - RNA, 22 nt, Human
augagcucgcauuugucaauga

SEQ ID NO: 2673092 - RNA, 21 nt, Human
augagcucgcauuugucaaug

SEQ ID NO: 2673093 - RNA, 13 nt, Human
augaggaggaugc

SEQ ID NO: 2673094 - RNA, 18 nt, Human
augaggaggaugcuaaaa

SEQ ID NO: 2673095 - RNA, 12 nt, Human
augaggagggga

SEQ ID NO: 2673096 - RNA, 13 nt, Human
augaggaggggag

SEQ ID NO: 2673097 - RNA, 14 nt, Human
augaggaggggagg

SEQ ID NO: 2673098 - RNA, 15 nt, Human
augaggaggggaggg

SEQ ID NO: 2673099 - RNA, 17 nt, Human
augaggaggggagggua

SEQ ID NO: 2673100 - RNA, 21 nt, Human
augaggaacuguagaugaugu

SEQ ID NO: 2673101 - RNA, 22 nt, Human
augaggaacuguagaugaugua

SEQ ID NO: 2673102 - RNA, 12 nt, Human
augaggagggug

SEQ ID NO: 2673103 - RNA, 14 nt, Human
augaggaggguggg

SEQ ID NO: 2673104 - RNA, 22 nt, Human
augaggagggugggggagggag

SEQ ID NO: 2673105 - RNA, 21 nt, Human
aucacagccucugaaaaccaa

SEQ ID NO: 2673106 - RNA, 18 nt, Human
aucagccugcuccagcug

SEQ ID NO: 2673107 - RNA, 17 nt, Human
aucagccugcuccagcu

SEQ ID NO: 2673108 - RNA, 19 nt, Human
aucagccugcuccagcugu

SEQ ID NO: 2673109 - RNA, 14 nt, Human
aucacauuucuaug

SEQ ID NO: 2673110 - RNA, 15 nt, Human
aucacccucuuccug

SEQ ID NO: 2673111 - RNA, 15 nt, Human
aucagcaugaaaaug

SEQ ID NO: 2673112 - RNA, 16 nt, Human
aucagccaaguuuuau

SEQ ID NO: 2673113 - RNA, 19 nt, Human
aucagccaaguuuuauaau

SEQ ID NO: 2673114 - RNA, 16 nt, Human
aucacccucuuccugu

SEQ ID NO: 2673115 - RNA, 15 nt, Human
auccccuguagagug

SEQ ID NO: 2673116 - RNA, 17 nt, Human
auccagcugccuauuga

SEQ ID NO: 2673117 - RNA, 14 nt, Human
auccccgccuggcc

SEQ ID NO: 2673118 - RNA, 17 nt, Human
auccccgccuggccagg

SEQ ID NO: 2673119 - RNA, 18 nt, Human
auccccgccuggccagga

SEQ ID NO: 2673120 - RNA, 20 nt, Human
auccccgccuggccaggagc

SEQ ID NO: 2673121 - RNA, 21 nt, Human
auccccgccuggccaggagca

SEQ ID NO: 2673122 - RNA, 19 nt, Human
auccuccaaccaggcuccu

SEQ ID NO: 2673123 - RNA, 18 nt, Human
auccagaaaacugugauu

SEQ ID NO: 2673124 - RNA, 15 nt, Human
aucccauuuaaaaaa

SEQ ID NO: 2673125 - RNA, 14 nt, Human
aucccauuuaaaaa

SEQ ID NO: 2673126 - RNA, 20 nt, Human
aucggagaacaugaaucaaa

SEQ ID NO: 2673127 - RNA, 16 nt, Human
aucgcugugaugcugg

SEQ ID NO: 2673128 - RNA, 13 nt, Human
auccccuaaaaua

SEQ ID NO: 2673129 - RNA, 21 nt, Human
aucggccaucaagggaagaac

SEQ ID NO: 2673130 - RNA, 16 nt, Human
aaaaaccgaauaaaug

SEQ ID NO: 2673131 - RNA, 17 nt, Human
aaaaaccgaauaaaugu

SEQ ID NO: 2673132 - RNA, 15 nt, Human
aaaaaauauuuuccu

SEQ ID NO: 2673133 - RNA, 16 nt, Human
uuuguguaaugaaaau

SEQ ID NO: 2673134 - RNA, 21 nt, Human
uuuguguaacucccagugaug

SEQ ID NO: 2673135 - RNA, 13 nt, Human
ccaccccccaggc

SEQ ID NO: 2673136 - RNA, 12 nt, Human
ccacccccagcc

SEQ ID NO: 2673137 - RNA, 13 nt, Human
ccacccccagccc

SEQ ID NO: 2673138 - RNA, 14 nt, Human
ccacccccagcccc

SEQ ID NO: 2673139 - RNA, 15 nt, Human
ccacccccagccccg

SEQ ID NO: 2673140 - RNA, 16 nt, Human
ccacccccagccccga

SEQ ID NO: 2673141 - RNA, 15 nt, Human
ccaccccccaggccu

SEQ ID NO: 2673142 - RNA, 13 nt, Human
ccacccccugccc

SEQ ID NO: 2673143 - RNA, 14 nt, Human
ccacccccugcccu

SEQ ID NO: 2673144 - RNA, 15 nt, Human
ccacccccugcccug

SEQ ID NO: 2673145 - RNA, 18 nt, Human
ccacccccugcccugcac

SEQ ID NO: 2673146 - RNA, 16 nt, Human
ccacccccugcccugc

SEQ ID NO: 2673147 - RNA, 17 nt, Human
ccacccccugcccugca

SEQ ID NO: 2673148 - RNA, 13 nt, Human
ccaccccugcccc

SEQ ID NO: 2673149 - RNA, 22 nt, Human
ccaccccugcccccagccccgg

SEQ ID NO: 2673150 - RNA, 13 nt, Human
ccacccugagccg

SEQ ID NO: 2673151 - RNA, 15 nt, Human
ccacccugagccggc

SEQ ID NO: 2673152 - RNA, 14 nt, Human
ccaccucggucacu

SEQ ID NO: 2673153 - RNA, 19 nt, Human
ccaccucggucacuccaac

SEQ ID NO: 2673154 - RNA, 21 nt, Human
ccacccugagccggccccagg

SEQ ID NO: 2673155 - RNA, 22 nt, Human
ccacccugagccggccccaggc

SEQ ID NO: 2673156 - RNA, 13 nt, Human
ccacccugccccu

SEQ ID NO: 2673157 - RNA, 13 nt, Human
ccacccugccugc

SEQ ID NO: 2673158 - RNA, 15 nt, Human
ccagaccagauuaaa

SEQ ID NO: 2673159 - RNA, 22 nt, Human
ccagaauaaguuauugcaguuu

SEQ ID NO: 2673160 - RNA, 23 nt, Human
ccagaauaaguuauugcaguuua

SEQ ID NO: 2673161 - RNA, 23 nt, Human
ccagaauacugauggaauuuuuu

SEQ ID NO: 2673162 - RNA, 21 nt, Human
ccagaauacugauggaauuuu

SEQ ID NO: 2673163 - RNA, 15 nt, Human
ccagaauacugaugg

SEQ ID NO: 2673164 - RNA, 12 nt, Human
ccagaauacuga

SEQ ID NO: 2673165 - RNA, 15 nt, Human
ccagaauaaguuauu

SEQ ID NO: 2673166 - RNA, 19 nt, Human
ccagaauaaguuauugcag

SEQ ID NO: 2673167 - RNA, 21 nt, Human
ccagaauaaguuauugcaguu

SEQ ID NO: 2673168 - RNA, 20 nt, Human
ccacugguccccaacaaugu

SEQ ID NO: 2673169 - RNA, 15 nt, Human
ccacugugaagagaa

SEQ ID NO: 2673170 - RNA, 14 nt, Human
ccacugugaagaga

SEQ ID NO: 2673171 - RNA, 13 nt, Human
ccacugccagcag

SEQ ID NO: 2673172 - RNA, 14 nt, Human
ccacugccagcagc

SEQ ID NO: 2673173 - RNA, 15 nt, Human
ccacugccagcagca

SEQ ID NO: 2673174 - RNA, 16 nt, Human
ccacugccagcagcag

SEQ ID NO: 2673175 - RNA, 17 nt, Human
ccacugccagcagcagc

SEQ ID NO: 2673176 - RNA, 23 nt, Human
ccacugccagcagcagcagguga

SEQ ID NO: 2673177 - RNA, 12 nt, Human
ccacugccuucg

SEQ ID NO: 2673178 - RNA, 20 nt, Human
ccacugccagcagcagcagg

SEQ ID NO: 2673179 - RNA, 23 nt, Human
ccacugcaucguuucaucuucca

SEQ ID NO: 2673180 - RNA, 21 nt, Human
ccacugcaucguuucaucuuc

SEQ ID NO: 2673181 - RNA, 19 nt, Human
ccagaacucacuggggccu

SEQ ID NO: 2673182 - RNA, 22 nt, Human
ccagaaccacacuugaaaccuu

SEQ ID NO: 2673183 - RNA, 19 nt, Human
ccagaaccaccccggcccc

SEQ ID NO: 2673184 - RNA, 17 nt, Human
ccacuguuucucuugag

SEQ ID NO: 2673185 - RNA, 18 nt, Human
ccacuguuucucuugagc

SEQ ID NO: 2673186 - RNA, 19 nt, Human
ccacuguuucucuugagcu

SEQ ID NO: 2673187 - RNA, 21 nt, Human
ccacuguuucucuugagcugg

SEQ ID NO: 2673188 - RNA, 22 nt, Human
ccacuguuucucuugagcuggc

SEQ ID NO: 2673189 - RNA, 23 nt, Human
ccacuguuucucuugagcuggcc

SEQ ID NO: 2673190 - RNA, 15 nt, Human
ccacugugcuuucag

SEQ ID NO: 2673191 - RNA, 12 nt, Human
ccagauuugucu

SEQ ID NO: 2673192 - RNA, 15 nt, Human
ccagauuugucuuuu

SEQ ID NO: 2673193 - RNA, 23 nt, Human
ccagauuugucuuuuuguuguaa

SEQ ID NO: 2673194 - RNA, 22 nt, Human
ccagcaaaagagcuauugccaa

SEQ ID NO: 2673195 - RNA, 22 nt, Human
ccagcaacacagccugggcccc

SEQ ID NO: 2673196 - RNA, 13 nt, Human
ccagcacagcuug

SEQ ID NO: 2673197 - RNA, 17 nt, Human
ccagcacagcuugaccu

SEQ ID NO: 2673198 - RNA, 14 nt, Human
ccagcaacacagcc

SEQ ID NO: 2673199 - RNA, 15 nt, Human
ccagcaacacagccu

SEQ ID NO: 2673200 - RNA, 16 nt, Human
ccagcaacacagccug

SEQ ID NO: 2673201 - RNA, 17 nt, Human
ccagcaacacagccugg

SEQ ID NO: 2673202 - RNA, 19 nt, Human
ccagcaacacagccugggc

SEQ ID NO: 2673203 - RNA, 20 nt, Human
ccagcaacacagccugggcc

SEQ ID NO: 2673204 - RNA, 15 nt, Human
ccagcaccuggcauc

SEQ ID NO: 2673205 - RNA, 14 nt, Human
ccagcaccuugugc

SEQ ID NO: 2673206 - RNA, 15 nt, Human
ccagcaccuugugcc

SEQ ID NO: 2673207 - RNA, 16 nt, Human
ccagcaccuugugccu

SEQ ID NO: 2673208 - RNA, 18 nt, Human
ccagcaccuugugccugg

SEQ ID NO: 2673209 - RNA, 19 nt, Human
ccagcaccuugugccuggg

SEQ ID NO: 2673210 - RNA, 20 nt, Human
ccagcaccuugugccugggg

SEQ ID NO: 2673211 - RNA, 18 nt, Human
ccagcaccucagccugca

SEQ ID NO: 2673212 - RNA, 17 nt, Human
ccagcaccucagccugc

SEQ ID NO: 2673213 - RNA, 21 nt, Human
ccagcccagggcuccugcacu

SEQ ID NO: 2673214 - RNA, 17 nt, Human
ccagcccagggcuccug

SEQ ID NO: 2673215 - RNA, 19 nt, Human
ccagcccagggcuccugca

SEQ ID NO: 2673216 - RNA, 12 nt, Human
ccagcccugcug

SEQ ID NO: 2673217 - RNA, 13 nt, Human
ccagcccugcugg

SEQ ID NO: 2673218 - RNA, 14 nt, Human
ccagcccugcuggg

SEQ ID NO: 2673219 - RNA, 16 nt, Human
ccagcccugcugggga

SEQ ID NO: 2673220 - RNA, 17 nt, Human
ccagcccugcuggggau

SEQ ID NO: 2673221 - RNA, 19 nt, Human
ccagcccugcuggggaucc

SEQ ID NO: 2673222 - RNA, 20 nt, Human
ccagcccugcuggggauccc

SEQ ID NO: 2673223 - RNA, 22 nt, Human
ccagcccugcuggggauccccg

SEQ ID NO: 2673224 - RNA, 14 nt, Human
ccagccaugccagc

SEQ ID NO: 2673225 - RNA, 16 nt, Human
ccagccaugccagcug

SEQ ID NO: 2673226 - RNA, 17 nt, Human
ccagccaugccagcugg

SEQ ID NO: 2673227 - RNA, 18 nt, Human
ccagccaugccagcuggc

SEQ ID NO: 2673228 - RNA, 13 nt, Human
ccagcccagggcu

SEQ ID NO: 2673229 - RNA, 14 nt, Human
ccagcccagggcuc

SEQ ID NO: 2673230 - RNA, 15 nt, Human
ccagcccagggcucc

SEQ ID NO: 2673231 - RNA, 14 nt, Human
ccagccugcgccug

SEQ ID NO: 2673232 - RNA, 13 nt, Human
ccagccugcgccu

SEQ ID NO: 2673233 - RNA, 19 nt, Human
ccagccugcgccugcugca

SEQ ID NO: 2673234 - RNA, 17 nt, Human
ccagccugcgccugcug

SEQ ID NO: 2673235 - RNA, 16 nt, Human
ccagccugcgccugcu

SEQ ID NO: 2673236 - RNA, 15 nt, Human
ccagccugcgccugc

SEQ ID NO: 2673237 - RNA, 16 nt, Human
ccagcucccucuauuu

SEQ ID NO: 2673238 - RNA, 21 nt, Human
ccagccuggggcugaggcuga

SEQ ID NO: 2673239 - RNA, 17 nt, Human
ccagccuugagcccugg

SEQ ID NO: 2673240 - RNA, 18 nt, Human
ccagccuugagcccuggc

SEQ ID NO: 2673241 - RNA, 19 nt, Human
ccagccuugagcccuggcu

SEQ ID NO: 2673242 - RNA, 20 nt, Human
ccagccuugagcccuggcug

SEQ ID NO: 2673243 - RNA, 21 nt, Human
ccagccuugagcccuggcugu

SEQ ID NO: 2673244 - RNA, 13 nt, Human
ccagccuggguga

SEQ ID NO: 2673245 - RNA, 21 nt, Human
ccagccugcuagcuagcucaa

SEQ ID NO: 2673246 - RNA, 19 nt, Human
ccagccugcuagcuagcuc

SEQ ID NO: 2673247 - RNA, 15 nt, Human
ccagccugcuagcua

SEQ ID NO: 2673248 - RNA, 14 nt, Human
ccagccugcuagcu

SEQ ID NO: 2673249 - RNA, 13 nt, Human
ccagccugcuagc

SEQ ID NO: 2673250 - RNA, 12 nt, Human
ccagccugcuag

SEQ ID NO: 2673251 - RNA, 10 nt, Human
ccagccugcu

SEQ ID NO: 2673252 - RNA, 21 nt, Human
ccagccugcgccugcugcaug

SEQ ID NO: 2673253 - RNA, 17 nt, Human
ccauuagccagauuugu

SEQ ID NO: 2673254 - RNA, 20 nt, Human
ccauucguacauaauacuga

SEQ ID NO: 2673255 - RNA, 21 nt, Human
ccauucguacauaauacugaa

SEQ ID NO: 2673256 - RNA, 23 nt, Human
ccauucucccagguaccagcugc

SEQ ID NO: 2673257 - RNA, 22 nt, Human
ccauucucccagguaccagcug

SEQ ID NO: 2673258 - RNA, 12 nt, Human
ccauucugacuc

SEQ ID NO: 2673259 - RNA, 13 nt, Human
ccauucugacucg

SEQ ID NO: 2673260 - RNA, 14 nt, Human
ccauuuuaauuuua

SEQ ID NO: 2673261 - RNA, 21 nt, Human
ccauuuuaauuuuaaagugca

SEQ ID NO: 2673262 - RNA, 19 nt, Human
ccauuugcucuucagaugc

SEQ ID NO: 2673263 - RNA, 22 nt, Human
ccauuugcucuucagaugccac

SEQ ID NO: 2673264 - RNA, 22 nt, Human
ccauucugccgcccccuccuga

SEQ ID NO: 2673265 - RNA, 20 nt, Human
ccauucugacucgguuucuc

SEQ ID NO: 2673266 - RNA, 18 nt, Human
ccauuugcaauaacagcu

SEQ ID NO: 2673267 - RNA, 19 nt, Human
ccauuugcaauaacagcug

SEQ ID NO: 2673268 - RNA, 20 nt, Human
ccauuugcaauaacagcugc

SEQ ID NO: 2673269 - RNA, 21 nt, Human
ccauuugcaauaacagcugca

SEQ ID NO: 2673270 - RNA, 22 nt, Human
ccauuugcaauaacagcugcaa

SEQ ID NO: 2673271 - RNA, 22 nt, Human
ccauuugccaauuuuccuacuc

SEQ ID NO: 2673272 - RNA, 20 nt, Human
ccaucuugcuucccuaaucu

SEQ ID NO: 2673273 - RNA, 21 nt, Human
ccaucuugcuucccuaaucua

SEQ ID NO: 2673274 - RNA, 18 nt, Human
ccauguuuuguuuacggu

SEQ ID NO: 2673275 - RNA, 22 nt, Human
ccauuacagagguauuaaaacu

SEQ ID NO: 2673276 - RNA, 23 nt, Human
ccauuacagagguauuaaaacua

SEQ ID NO: 2673277 - RNA, 15 nt, Human
ccauuaaggggaaga

SEQ ID NO: 2673278 - RNA, 20 nt, Human
ccauuaaggggaagaaugaa

SEQ ID NO: 2673279 - RNA, 15 nt, Human
ccauuaaaguucuca

SEQ ID NO: 2673280 - RNA, 18 nt, Human
ccauuuuuuaauuuacuu

SEQ ID NO: 2673281 - RNA, 18 nt, Human
cccaaccccaagccagcc

SEQ ID NO: 2673282 - RNA, 20 nt, Human
cccaaccaggcaccucuucc

SEQ ID NO: 2673283 - RNA, 15 nt, Human
cccacaguugcucua

SEQ ID NO: 2673284 - RNA, 18 nt, Human
cccacauccaacuccagc

SEQ ID NO: 2673285 - RNA, 19 nt, Human
cccacauccaacuccagca

SEQ ID NO: 2673286 - RNA, 21 nt, Human
cccacagucuccggccucucc

SEQ ID NO: 2673287 - RNA, 23 nt, Human
cccacagacaaaagcgcuuuucc

SEQ ID NO: 2673288 - RNA, 20 nt, Human
cccacggagucguggggugu

SEQ ID NO: 2673289 - RNA, 22 nt, Human
cccagaauaaguuauugcaguu

SEQ ID NO: 2673290 - RNA, 14 nt, Human
cccagaauacugau

SEQ ID NO: 2673291 - RNA, 19 nt, Human
cccagaauaaguuauugca

SEQ ID NO: 2673292 - RNA, 17 nt, Human
cccaccucggucacucc

SEQ ID NO: 2673293 - RNA, 21 nt, Human
cccaccuagaacacuaacuca

SEQ ID NO: 2673294 - RNA, 20 nt, Human
cccaccguggaggaggaagg

SEQ ID NO: 2673295 - RNA, 21 nt, Human
cccaccgguccagcuggccug

SEQ ID NO: 2673296 - RNA, 14 nt, Human
cccacauguccagc

SEQ ID NO: 2673297 - RNA, 15 nt, Human
cccacauguccagca

SEQ ID NO: 2673298 - RNA, 19 nt, Human
cccaccguggaggaggaag

SEQ ID NO: 2673299 - RNA, 13 nt, Human
ccagguagaaacu

SEQ ID NO: 2673300 - RNA, 14 nt, Human
ccagggaggggccg

SEQ ID NO: 2673301 - RNA, 23 nt, Human
ccagggaggggccggcccugugu

SEQ ID NO: 2673302 - RNA, 22 nt, Human
ccagggagccuuugguucuggc

SEQ ID NO: 2673303 - RNA, 18 nt, Human
ccagggagccuuugguuc

SEQ ID NO: 2673304 - RNA, 20 nt, Human
ccagggcaagcuccgcagga

SEQ ID NO: 2673305 - RNA, 17 nt, Human
ccagggcaagcuccgca

SEQ ID NO: 2673306 - RNA, 22 nt, Human
ccagggcaagcuccgcaggacu

SEQ ID NO: 2673307 - RNA, 13 nt, Human
ccagggcccucgg

SEQ ID NO: 2673308 - RNA, 16 nt, Human
ccaggccaccucccca

SEQ ID NO: 2673309 - RNA, 17 nt, Human
ccaggccaccuccccag

SEQ ID NO: 2673310 - RNA, 13 nt, Human
ccaggccaccucc

SEQ ID NO: 2673311 - RNA, 21 nt, Human
ccaggccaccuccccagcauu

SEQ ID NO: 2673312 - RNA, 18 nt, Human
ccaggcccuccucuccca

SEQ ID NO: 2673313 - RNA, 19 nt, Human
ccaggcccuccucucccau

SEQ ID NO: 2673314 - RNA, 20 nt, Human
ccaucaucuauagaaagcua

SEQ ID NO: 2673315 - RNA, 21 nt, Human
ccaucuagacuagcaaucucu

SEQ ID NO: 2673316 - RNA, 14 nt, Human
ccaucuagccagcc

SEQ ID NO: 2673317 - RNA, 23 nt, Human
ccaucuagccagccccucuuccc

SEQ ID NO: 2673318 - RNA, 21 nt, Human
ccaucuaggggagccuugauu

SEQ ID NO: 2673319 - RNA, 14 nt, Human
ccagguagaaacuu

SEQ ID NO: 2673320 - RNA, 13 nt, Human
ccaggugcagagg

SEQ ID NO: 2673321 - RNA, 14 nt, Human
ccaggugcagaggu

SEQ ID NO: 2673322 - RNA, 20 nt, Human
ccaggugcagagguacccug

SEQ ID NO: 2673323 - RNA, 22 nt, Human
ccaggugcagagguacccuggg

SEQ ID NO: 2673324 - RNA, 23 nt, Human
ccaggugcagagguacccugggu

SEQ ID NO: 2673325 - RNA, 13 nt, Human
ccagguuuaagcu

SEQ ID NO: 2673326 - RNA, 14 nt, Human
ccagugcaaaugca

SEQ ID NO: 2673327 - RNA, 17 nt, Human
ccagugcaaaugcaugc

SEQ ID NO: 2673328 - RNA, 23 nt, Human
ccagugagggacgucagacuugg

SEQ ID NO: 2673329 - RNA, 15 nt, Human
ccagugcaugguggc

SEQ ID NO: 2673330 - RNA, 18 nt, Human
ccagugcaugguggccag

SEQ ID NO: 2673331 - RNA, 19 nt, Human
ccagugcaugguggccaga

SEQ ID NO: 2673332 - RNA, 15 nt, Human
ccagugcagaaugua

SEQ ID NO: 2673333 - RNA, 16 nt, Human
ccagugcagaauguaa

SEQ ID NO: 2673334 - RNA, 13 nt, Human
ccagugaccucuc

SEQ ID NO: 2673335 - RNA, 19 nt, Human
ccagugaccucucucucug

SEQ ID NO: 2673336 - RNA, 19 nt, Human
cccucuaaccucgcccucu

SEQ ID NO: 2673337 - RNA, 20 nt, Human
cccucucccaaaaaacuacu

SEQ ID NO: 2673338 - RNA, 14 nt, Human
cccucugccccucc

SEQ ID NO: 2673339 - RNA, 20 nt, Human
cccucuguguauuugcuuuu

SEQ ID NO: 2673340 - RNA, 18 nt, Human
cccucuguguauuugcuu

SEQ ID NO: 2673341 - RNA, 14 nt, Human
cccucuuccuguga

SEQ ID NO: 2673342 - RNA, 15 nt, Human
cccucuuccugugau

SEQ ID NO: 2673343 - RNA, 13 nt, Human
cccucuugcccau

SEQ ID NO: 2673344 - RNA, 15 nt, Human
cccucuugcccaucc

SEQ ID NO: 2673345 - RNA, 16 nt, Human
cccucuugcccauccu

SEQ ID NO: 2673346 - RNA, 17 nt, Human
cccucuugcccauccug

SEQ ID NO: 2673347 - RNA, 22 nt, Human
cccucuugcccauccugacuga

SEQ ID NO: 2673348 - RNA, 19 nt, Human
cccucccacacccaaagcu

SEQ ID NO: 2673349 - RNA, 10 nt, Human
cccucccacu

SEQ ID NO: 2673350 - RNA, 15 nt, Human
cccucccacuuugcu

SEQ ID NO: 2673351 - RNA, 15 nt, Human
cccucccacccccag

SEQ ID NO: 2673352 - RNA, 16 nt, Human
cccucccacccccagc

SEQ ID NO: 2673353 - RNA, 17 nt, Human
cccucccacccccagcc

SEQ ID NO: 2673354 - RNA, 20 nt, Human
cccucccacccccagccccg

SEQ ID NO: 2673355 - RNA, 18 nt, Human
cccuugcuugccugcagg

SEQ ID NO: 2673356 - RNA, 19 nt, Human
cccuugcuugccugcaggg

SEQ ID NO: 2673357 - RNA, 22 nt, Human
cccuugcuugccugcagggcca

SEQ ID NO: 2673358 - RNA, 23 nt, Human
cccuugcuugccugcagggccau

SEQ ID NO: 2673359 - RNA, 13 nt, Human
cccuugcuggccc

SEQ ID NO: 2673360 - RNA, 15 nt, Human
cccuugcuggcccca

SEQ ID NO: 2673361 - RNA, 16 nt, Human
cccuugcuggccccag

SEQ ID NO: 2673362 - RNA, 20 nt, Human
cccuugcuggccccagcccu

SEQ ID NO: 2673363 - RNA, 21 nt, Human
cccuugcuggccccagcccug

SEQ ID NO: 2673364 - RNA, 23 nt, Human
cccuugcuggccccagcccugcu

SEQ ID NO: 2673365 - RNA, 24 nt, Human
cccuugcuggccccagcccugcug

SEQ ID NO: 2673366 - RNA, 12 nt, Human
cccuugccuccc

SEQ ID NO: 2673367 - RNA, 20 nt, Human
cccuugccuccccauuuccc

SEQ ID NO: 2673368 - RNA, 23 nt, Human
cccuugccuccccauuucccauc

SEQ ID NO: 2673369 - RNA, 13 nt, Human
cccuugccucccc

SEQ ID NO: 2673370 - RNA, 15 nt, Human
cccuugccuccccau

SEQ ID NO: 2673371 - RNA, 18 nt, Human
cccuugccuccccauuuc

SEQ ID NO: 2673372 - RNA, 19 nt, Human
cccuugccuccccauuucc

SEQ ID NO: 2673373 - RNA, 17 nt, Human
cccuugagggcugcagu

SEQ ID NO: 2673374 - RNA, 13 nt, Human
cccuuauaaaauc

SEQ ID NO: 2673375 - RNA, 21 nt, Human
cccuuacuggcuuaccuccuc

SEQ ID NO: 2673376 - RNA, 13 nt, Human
cccuuccagauca

SEQ ID NO: 2673377 - RNA, 20 nt, Human
cccuuccagaucacugccac

SEQ ID NO: 2673378 - RNA, 21 nt, Human
cccuguagagugggagcugag

SEQ ID NO: 2673379 - RNA, 13 nt, Human
cccugggcuggaa

SEQ ID NO: 2673380 - RNA, 14 nt, Human
cccugggcuggaau

SEQ ID NO: 2673381 - RNA, 17 nt, Human
cccugggcuuggccugc

SEQ ID NO: 2673382 - RNA, 22 nt, Human
cccugggcuuggccugcuguga

SEQ ID NO: 2673383 - RNA, 18 nt, Human
cccugggcuuggccugcu

SEQ ID NO: 2673384 - RNA, 19 nt, Human
cccugggcuuggccugcug

SEQ ID NO: 2673385 - RNA, 20 nt, Human
cccugggcuuggccugcugu

SEQ ID NO: 2673386 - RNA, 21 nt, Human
cccugggcuuggccugcugug

SEQ ID NO: 2673387 - RNA, 16 nt, Human
cccugcuuccaggaaa

SEQ ID NO: 2673388 - RNA, 14 nt, Human
cccugcuuccagga

SEQ ID NO: 2673389 - RNA, 15 nt, Human
cccugcuuccaggaa

SEQ ID NO: 2673390 - RNA, 13 nt, Human
cccugcugcuggu

SEQ ID NO: 2673391 - RNA, 15 nt, Human
cccugcugcuggugc

SEQ ID NO: 2673392 - RNA, 16 nt, Human
cccugcugcuggugca

SEQ ID NO: 2673393 - RNA, 19 nt, Human
cccugcugcuggugcacag

SEQ ID NO: 2673394 - RNA, 18 nt, Human
cccugcgccuuuccuuuu

SEQ ID NO: 2673395 - RNA, 16 nt, Human
cccugcgcucucuuug

SEQ ID NO: 2673396 - RNA, 22 nt, Human
cccugcgcucucuuugcaacug

SEQ ID NO: 2673397 - RNA, 15 nt, Human
cccugcgccuuuccu

SEQ ID NO: 2673398 - RNA, 14 nt, Human
cccugcgccuuucc

SEQ ID NO: 2673399 - RNA, 15 nt, Human
cccugccgucaccac

SEQ ID NO: 2673400 - RNA, 16 nt, Human
cccugccgucaccacc

SEQ ID NO: 2673401 - RNA, 17 nt, Human
cccugccgucaccacca

SEQ ID NO: 2673402 - RNA, 19 nt, Human
cccugccgucaccaccacc

SEQ ID NO: 2673403 - RNA, 20 nt, Human
cccugccgucaccaccaccc

SEQ ID NO: 2673404 - RNA, 22 nt, Human
cccugccgucaccaccaccccu

SEQ ID NO: 2673405 - RNA, 18 nt, Human
cccugcagaugccacccu

SEQ ID NO: 2673406 - RNA, 15 nt, Human
cccugcagaugccac

SEQ ID NO: 2673407 - RNA, 20 nt, Human
cccugcagaugccacccuag

SEQ ID NO: 2673408 - RNA, 14 nt, Human
ccgacugcuuugga

SEQ ID NO: 2673409 - RNA, 20 nt, Human
ccgacugaaaauauuguuuu

SEQ ID NO: 2673410 - RNA, 10 nt, Human
ccgacuccag

SEQ ID NO: 2673411 - RNA, 11 nt, Human
ccgacuccagc

SEQ ID NO: 2673412 - RNA, 12 nt, Human
ccgacuccagcc

SEQ ID NO: 2673413 - RNA, 13 nt, Human
ccgacuccagcca

SEQ ID NO: 2673414 - RNA, 14 nt, Human
ccgacuccagccag

SEQ ID NO: 2673415 - RNA, 15 nt, Human
ccgacuccagccagc

SEQ ID NO: 2673416 - RNA, 16 nt, Human
ccgacuccagccagcg

SEQ ID NO: 2673417 - RNA, 13 nt, Human
ccgaccuggccgc

SEQ ID NO: 2673418 - RNA, 14 nt, Human
ccgacgucauguau

SEQ ID NO: 2673419 - RNA, 13 nt, Human
ccgacgcccaccc

SEQ ID NO: 2673420 - RNA, 13 nt, Human
ccgagagggagag

SEQ ID NO: 2673421 - RNA, 15 nt, Human
ccgagaggugggcca

SEQ ID NO: 2673422 - RNA, 19 nt, Human
ccgagaggugggccagucu

SEQ ID NO: 2673423 - RNA, 21 nt, Human
ccgagaggugggccagucugu

SEQ ID NO: 2673424 - RNA, 16 nt, Human
ccgacugcuuuggacc

SEQ ID NO: 2673425 - RNA, 19 nt, Human
ccgagauugcaccacugca

SEQ ID NO: 2673426 - RNA, 15 nt, Human
ccgagauugcaccac

SEQ ID NO: 2673427 - RNA, 21 nt, Human
ccgagauugcaccacugcacu

SEQ ID NO: 2673428 - RNA, 17 nt, Human
ccgaguagaaaauguga

SEQ ID NO: 2673429 - RNA, 18 nt, Human
ccgaguagaaaaugugac

SEQ ID NO: 2673430 - RNA, 21 nt, Human
ccgaguagaaaaugugacccu

SEQ ID NO: 2673431 - RNA, 15 nt, Human
ccgcagacaccuugg

SEQ ID NO: 2673432 - RNA, 16 nt, Human
ccgcagacaccuugga

SEQ ID NO: 2673433 - RNA, 14 nt, Human
ccgcagacaccuug

SEQ ID NO: 2673434 - RNA, 13 nt, Human
ccgaggacccagg

SEQ ID NO: 2673435 - RNA, 17 nt, Human
ccgaggacccaggaaag

SEQ ID NO: 2673436 - RNA, 19 nt, Human
ccgagcuuugaaaauucag

SEQ ID NO: 2673437 - RNA, 17 nt, Human
ccggcucuacgggggcc

SEQ ID NO: 2673438 - RNA, 15 nt, Human
ccggcucccagccuc

SEQ ID NO: 2673439 - RNA, 14 nt, Human
ccggcucccagccu

SEQ ID NO: 2673440 - RNA, 13 nt, Human
ccggcucccagcc

SEQ ID NO: 2673441 - RNA, 13 nt, Human
ccggagggcugcg

SEQ ID NO: 2673442 - RNA, 23 nt, Human
ccggagcuggaggauccccucca

SEQ ID NO: 2673443 - RNA, 21 nt, Human
ccgggguggccacagcgccag

SEQ ID NO: 2673444 - RNA, 13 nt, Human
ccgccuggccagg

SEQ ID NO: 2673445 - RNA, 14 nt, Human
ccgccuggccagga

SEQ ID NO: 2673446 - RNA, 15 nt, Human
ccgccuggccaggag

SEQ ID NO: 2673447 - RNA, 16 nt, Human
ccgccuggccaggagc

SEQ ID NO: 2673448 - RNA, 17 nt, Human
ccgccuggccaggagca

SEQ ID NO: 2673449 - RNA, 20 nt, Human
ccgccuggccaggagcaggc

SEQ ID NO: 2673450 - RNA, 21 nt, Human
ccgccuggccaggagcaggca

SEQ ID NO: 2673451 - RNA, 23 nt, Human
ccgccuggccaggagcaggcacg

SEQ ID NO: 2673452 - RNA, 23 nt, Human
ccgccucuccucgguucaagguc

SEQ ID NO: 2673453 - RNA, 23 nt, Human
ccgcugccgugccgccugcacuc

SEQ ID NO: 2673454 - RNA, 14 nt, Human
ccgcugcugugcaa

SEQ ID NO: 2673455 - RNA, 18 nt, Human
ccuaaccccuuccagauc

SEQ ID NO: 2673456 - RNA, 15 nt, Human
ccuaaccccuuccag

SEQ ID NO: 2673457 - RNA, 16 nt, Human
ccuaaccccuuccaga

SEQ ID NO: 2673458 - RNA, 23 nt, Human
ccguggcuguugacgcaccugug

SEQ ID NO: 2673459 - RNA, 14 nt, Human
ccuaaccccuucca

SEQ ID NO: 2673460 - RNA, 17 nt, Human
ccguugcugacuuagaa

SEQ ID NO: 2673461 - RNA, 15 nt, Human
ccguugcugacuuag

SEQ ID NO: 2673462 - RNA, 14 nt, Human
ccguugcugacuua

SEQ ID NO: 2673463 - RNA, 17 nt, Human
ccguuccaccccaagag

SEQ ID NO: 2673464 - RNA, 18 nt, Human
ccguuccaccccaagaga

SEQ ID NO: 2673465 - RNA, 20 nt, Human
ccguuccaccccaagagaac

SEQ ID NO: 2673466 - RNA, 21 nt, Human
ccguuccaccccaagagaacu

SEQ ID NO: 2673467 - RNA, 22 nt, Human
ccguuccaccccaagagaacuc

SEQ ID NO: 2673468 - RNA, 23 nt, Human
ccuacucaagcggguggcucugg

SEQ ID NO: 2673469 - RNA, 23 nt, Human
ccuaggcauuugcugaauacaga

SEQ ID NO: 2673470 - RNA, 18 nt, Human
ccuacucggcucugcagu

SEQ ID NO: 2673471 - RNA, 21 nt, Human
ccuacucuccuugaguguaug

SEQ ID NO: 2673472 - RNA, 20 nt, Human
ccuacucccugcagaugcca

SEQ ID NO: 2673473 - RNA, 21 nt, Human
ccuacaguugaaaaacagcug

SEQ ID NO: 2673474 - RNA, 16 nt, Human
ccuacuagucaccaga

SEQ ID NO: 2673475 - RNA, 13 nt, Human
ccuacucccugca

SEQ ID NO: 2673476 - RNA, 15 nt, Human
ccuacucccugcaga

SEQ ID NO: 2673477 - RNA, 16 nt, Human
ccuaccgacccagggu

SEQ ID NO: 2673478 - RNA, 12 nt, Human
ccccucucacca

SEQ ID NO: 2673479 - RNA, 18 nt, Human
ccccucgcaacuguccac

SEQ ID NO: 2673480 - RNA, 20 nt, Human
ccccuccugaaccgcacagc

SEQ ID NO: 2673481 - RNA, 13 nt, Human
ccccuccuucaga

SEQ ID NO: 2673482 - RNA, 19 nt, Human
ccccuccuaguuugggagg

SEQ ID NO: 2673483 - RNA, 19 nt, Human
ccccuccgcccugccacuc

SEQ ID NO: 2673484 - RNA, 17 nt, Human
ccccuccgcccugccac

SEQ ID NO: 2673485 - RNA, 18 nt, Human
ccccuccgcccugccacu

SEQ ID NO: 2673486 - RNA, 18 nt, Human
ccccucagcucggcucag

SEQ ID NO: 2673487 - RNA, 15 nt, Human
ccccucagcucggcu

SEQ ID NO: 2673488 - RNA, 14 nt, Human
ccccucagcucggc

SEQ ID NO: 2673489 - RNA, 16 nt, Human
ccccuccgcccugcca

SEQ ID NO: 2673490 - RNA, 12 nt, Human
ccccucccaccc

SEQ ID NO: 2673491 - RNA, 17 nt, Human
ccccucccacccccagc

SEQ ID NO: 2673492 - RNA, 21 nt, Human
ccccucccacacccaaagcug

SEQ ID NO: 2673493 - RNA, 16 nt, Human
ccccggggacccugug

SEQ ID NO: 2673494 - RNA, 22 nt, Human
ccccggggugaguccauucucc

SEQ ID NO: 2673495 - RNA, 17 nt, Human
ccccggggacccuguga

SEQ ID NO: 2673496 - RNA, 17 nt, Human
ccccggcuuccuuuccc

SEQ ID NO: 2673497 - RNA, 18 nt, Human
ccccgguggcggccccag

SEQ ID NO: 2673498 - RNA, 20 nt, Human
ccccgguggcggccccagca

SEQ ID NO: 2673499 - RNA, 21 nt, Human
ccccuagccgguuccuguccc

SEQ ID NO: 2673500 - RNA, 19 nt, Human
ccccuagccgguuccuguc

SEQ ID NO: 2673501 - RNA, 17 nt, Human
ccccuagccgguuccug

SEQ ID NO: 2673502 - RNA, 15 nt, Human
ccccucaacaccucu

SEQ ID NO: 2673503 - RNA, 16 nt, Human
ccccucaacaccucug

SEQ ID NO: 2673504 - RNA, 17 nt, Human
cccccguggggcaggga

SEQ ID NO: 2673505 - RNA, 16 nt, Human
cccccucccaccccca

SEQ ID NO: 2673506 - RNA, 19 nt, Human
cccccuccgcccugccacu

SEQ ID NO: 2673507 - RNA, 20 nt, Human
cccccaccgguccagcuggc

SEQ ID NO: 2673508 - RNA, 21 nt, Human
cccccaccgguccagcuggcc

SEQ ID NO: 2673509 - RNA, 16 nt, Human
cccccaccgguccagc

SEQ ID NO: 2673510 - RNA, 18 nt, Human
cccccaccgguccagcug

SEQ ID NO: 2673511 - RNA, 19 nt, Human
cccccaccgguccagcugg

SEQ ID NO: 2673512 - RNA, 20 nt, Human
cccccaccccggggacccug

SEQ ID NO: 2673513 - RNA, 22 nt, Human
cccccacuugccucuuccuuga

SEQ ID NO: 2673514 - RNA, 21 nt, Human
ccccaguuccucccaggaagc

SEQ ID NO: 2673515 - RNA, 15 nt, Human
ccccaggcucgugga

SEQ ID NO: 2673516 - RNA, 18 nt, Human
ccccaggcucguggacug

SEQ ID NO: 2673517 - RNA, 19 nt, Human
ccccaguccccaccccugc

SEQ ID NO: 2673518 - RNA, 18 nt, Human
ccccaguccccaccccug

SEQ ID NO: 2673519 - RNA, 12 nt, Human
ccccuggccucu

SEQ ID NO: 2673520 - RNA, 13 nt, Human
ccccugcuucagu

SEQ ID NO: 2673521 - RNA, 16 nt, Human
ccccugcuucaguccc

SEQ ID NO: 2673522 - RNA, 13 nt, Human
ccccugcccugca

SEQ ID NO: 2673523 - RNA, 14 nt, Human
ccccugcccugcac

SEQ ID NO: 2673524 - RNA, 12 nt, Human
ccccugcccugc

SEQ ID NO: 2673525 - RNA, 17 nt, Human
ccccucugcacccagaa

SEQ ID NO: 2673526 - RNA, 18 nt, Human
ccccucugcacccagaac

SEQ ID NO: 2673527 - RNA, 19 nt, Human
ccccucugcacccagaaca

SEQ ID NO: 2673528 - RNA, 13 nt, Human
cccgcagagcgcg

SEQ ID NO: 2673529 - RNA, 16 nt, Human
cccgcagcccuggcag

SEQ ID NO: 2673530 - RNA, 22 nt, Human
cccgcagagcgcgccccuagcc

SEQ ID NO: 2673531 - RNA, 13 nt, Human
cccgcagcccugg

SEQ ID NO: 2673532 - RNA, 15 nt, Human
cccgcagacaccuug

SEQ ID NO: 2673533 - RNA, 16 nt, Human
cccgcagacaccuugg

SEQ ID NO: 2673534 - RNA, 12 nt, Human
cccgacauggcu

SEQ ID NO: 2673535 - RNA, 15 nt, Human
cccgacuccagccag

SEQ ID NO: 2673536 - RNA, 16 nt, Human
cccgacuccagccagc

SEQ ID NO: 2673537 - RNA, 17 nt, Human
cccgacuccagccagcg

SEQ ID NO: 2673538 - RNA, 20 nt, Human
cccgacuccagccagcgccu

SEQ ID NO: 2673539 - RNA, 23 nt, Human
ccccugucuccuuauucggcagc

SEQ ID NO: 2673540 - RNA, 15 nt, Human
ccccuggucuuugag

SEQ ID NO: 2673541 - RNA, 14 nt, Human
ccccuggccucugu

SEQ ID NO: 2673542 - RNA, 22 nt, Human
ccccuuccagaucacugccaca

SEQ ID NO: 2673543 - RNA, 23 nt, Human
cccaugacaauguuguagugucc

SEQ ID NO: 2673544 - RNA, 16 nt, Human
cccaugcaagcagagg

SEQ ID NO: 2673545 - RNA, 17 nt, Human
cccaugcaagcagagga

SEQ ID NO: 2673546 - RNA, 18 nt, Human
cccaugcaagcagaggac

SEQ ID NO: 2673547 - RNA, 21 nt, Human
cccaugcaagcagaggaccag

SEQ ID NO: 2673548 - RNA, 20 nt, Human
cccaugcuuacgugauccuc

SEQ ID NO: 2673549 - RNA, 19 nt, Human
cccagagacuuuguagauc

SEQ ID NO: 2673550 - RNA, 21 nt, Human
cccagagacuuuguagauccu

SEQ ID NO: 2673551 - RNA, 11 nt, Human
cccagagacuu

SEQ ID NO: 2673552 - RNA, 16 nt, Human
cccaucuccccucagc

SEQ ID NO: 2673553 - RNA, 12 nt, Human
cccaucucccug

SEQ ID NO: 2673554 - RNA, 19 nt, Human
cccaucucuacaaaaagca

SEQ ID NO: 2673555 - RNA, 14 nt, Human
cccaucucccugcc

SEQ ID NO: 2673556 - RNA, 15 nt, Human
cccaucucccugccu

SEQ ID NO: 2673557 - RNA, 17 nt, Human
cccaucucccugccugg

SEQ ID NO: 2673558 - RNA, 18 nt, Human
cccaucucccugccuggc

SEQ ID NO: 2673559 - RNA, 20 nt, Human
cccaucucccugccuggccc

SEQ ID NO: 2673560 - RNA, 19 nt, Human
cccaucugcaccccuucuc

SEQ ID NO: 2673561 - RNA, 18 nt, Human
cccaucugccccacaguc

SEQ ID NO: 2673562 - RNA, 20 nt, Human
cccaucugccccacagucuc

SEQ ID NO: 2673563 - RNA, 13 nt, Human
cccaucugcaccc

SEQ ID NO: 2673564 - RNA, 12 nt, Human
ccccacccuggg

SEQ ID NO: 2673565 - RNA, 14 nt, Human
ccccacccugggcc

SEQ ID NO: 2673566 - RNA, 15 nt, Human
ccccacccugggccc

SEQ ID NO: 2673567 - RNA, 20 nt, Human
ccccacccugggcccugggc

SEQ ID NO: 2673568 - RNA, 12 nt, Human
cccauuccaggc

SEQ ID NO: 2673569 - RNA, 20 nt, Human
cccauuccaggcagccucug

SEQ ID NO: 2673570 - RNA, 18 nt, Human
cccaugacaauguuguag

SEQ ID NO: 2673571 - RNA, 19 nt, Human
ccccacucccuugcuggcc

SEQ ID NO: 2673572 - RNA, 21 nt, Human
ccccacucccuugcuggcccc

SEQ ID NO: 2673573 - RNA, 23 nt, Human
ccccacucccuugcuggccccag

SEQ ID NO: 2673574 - RNA, 13 nt, Human
ccccacuugccuc

SEQ ID NO: 2673575 - RNA, 14 nt, Human
ccccacuugccucu

SEQ ID NO: 2673576 - RNA, 15 nt, Human
ccccacuugccucuu

SEQ ID NO: 2673577 - RNA, 16 nt, Human
ccccacuugccucuuc

SEQ ID NO: 2673578 - RNA, 21 nt, Human
ccccacuugccucuuccuuga

SEQ ID NO: 2673579 - RNA, 17 nt, Human
ccccaccgguccagcug

SEQ ID NO: 2673580 - RNA, 18 nt, Human
ccccaccgguccagcugg

SEQ ID NO: 2673581 - RNA, 19 nt, Human
ccccaccgguccagcuggc

SEQ ID NO: 2673582 - RNA, 21 nt, Human
ccccaccgguccagcuggccu

SEQ ID NO: 2673583 - RNA, 22 nt, Human
ccccaccgguccagcuggccug

SEQ ID NO: 2673584 - RNA, 17 nt, Human
cucauuuguuaaaauua

SEQ ID NO: 2673585 - RNA, 13 nt, Human
cucauuucaucuc

SEQ ID NO: 2673586 - RNA, 15 nt, Human
cucauuucaucucau

SEQ ID NO: 2673587 - RNA, 16 nt, Human
cucauuucaucucauu

SEQ ID NO: 2673588 - RNA, 18 nt, Human
cucauuucaucucauuua

SEQ ID NO: 2673589 - RNA, 18 nt, Human
cuccaaacugaagcagcc

SEQ ID NO: 2673590 - RNA, 22 nt, Human
cuccaaacugaagcagccucuc

SEQ ID NO: 2673591 - RNA, 16 nt, Human
cucauugcugagccuc

SEQ ID NO: 2673592 - RNA, 15 nt, Human
cucauugcugagccu

SEQ ID NO: 2673593 - RNA, 12 nt, Human
cucauugacuuu

SEQ ID NO: 2673594 - RNA, 14 nt, Human
cucauugacuuuua

SEQ ID NO: 2673595 - RNA, 21 nt, Human
cucauugacuuuuauaaagca

SEQ ID NO: 2673596 - RNA, 22 nt, Human
cucauugacuuuuauaaagcau

SEQ ID NO: 2673597 - RNA, 11 nt, Human
cuccaccccag

SEQ ID NO: 2673598 - RNA, 12 nt, Human
cuccaccccagg

SEQ ID NO: 2673599 - RNA, 13 nt, Human
cuccaccccagga

SEQ ID NO: 2673600 - RNA, 14 nt, Human
cuccaccccaggac

SEQ ID NO: 2673601 - RNA, 22 nt, Human
cuccaccccaggacgccacuca

SEQ ID NO: 2673602 - RNA, 20 nt, Human
cuccaccagcaucaccugcc

SEQ ID NO: 2673603 - RNA, 22 nt, Human
cuccaccagcaucaccugccug

SEQ ID NO: 2673604 - RNA, 23 nt, Human
cuccaccagcaucaccugccugu

SEQ ID NO: 2673605 - RNA, 17 nt, Human
cuccagauguuuccaga

SEQ ID NO: 2673606 - RNA, 19 nt, Human
cuccagauguuuccagacu

SEQ ID NO: 2673607 - RNA, 16 nt, Human
cuccagccccgcgacc

SEQ ID NO: 2673608 - RNA, 16 nt, Human
cuccagcaacacagcc

SEQ ID NO: 2673609 - RNA, 11 nt, Human
cuccccugagg

SEQ ID NO: 2673610 - RNA, 12 nt, Human
cuccccugagga

SEQ ID NO: 2673611 - RNA, 12 nt, Human
cuccccugccac

SEQ ID NO: 2673612 - RNA, 13 nt, Human
cuccccugccacc

SEQ ID NO: 2673613 - RNA, 18 nt, Human
cuccccugccaccaggcc

SEQ ID NO: 2673614 - RNA, 23 nt, Human
cuccccugccaccaggccaccuc

SEQ ID NO: 2673615 - RNA, 21 nt, Human
cuccccagcauuccagccccu

SEQ ID NO: 2673616 - RNA, 22 nt, Human
cuccccagcauuccagccccuc

SEQ ID NO: 2673617 - RNA, 23 nt, Human
cuccccagcauuccagccccucu

SEQ ID NO: 2673618 - RNA, 13 nt, Human
cucccugccuggc

SEQ ID NO: 2673619 - RNA, 15 nt, Human
cucccugccuggccc

SEQ ID NO: 2673620 - RNA, 16 nt, Human
cucccugccuggcccc

SEQ ID NO: 2673621 - RNA, 18 nt, Human
cucccugccuggccccca

SEQ ID NO: 2673622 - RNA, 18 nt, Human
cucccgagaccgggcccu

SEQ ID NO: 2673623 - RNA, 23 nt, Human
cucccgagaccgggcccuggguu

SEQ ID NO: 2673624 - RNA, 15 nt, Human
cucccacaaaggaga

SEQ ID NO: 2673625 - RNA, 22 nt, Human
cuccauuugagaaaauaaagcu

SEQ ID NO: 2673626 - RNA, 13 nt, Human
cuccauuugcucu

SEQ ID NO: 2673627 - RNA, 15 nt, Human
cuccauuugcucuuc

SEQ ID NO: 2673628 - RNA, 17 nt, Human
cuccauuugcucuucag

SEQ ID NO: 2673629 - RNA, 18 nt, Human
cuccauuugcucuucaga

SEQ ID NO: 2673630 - RNA, 18 nt, Human
cucccacacccaaagcug

SEQ ID NO: 2673631 - RNA, 21 nt, Human
cucccacacccaaagcugagc

SEQ ID NO: 2673632 - RNA, 22 nt, Human
cucccacacccaaagcugagcc

SEQ ID NO: 2673633 - RNA, 15 nt, Human
cuccccaccuccagg

SEQ ID NO: 2673634 - RNA, 16 nt, Human
cuccccaccuccaggc

SEQ ID NO: 2673635 - RNA, 19 nt, Human
cucaggaggcgcccuuggc

SEQ ID NO: 2673636 - RNA, 18 nt, Human
cucaggcaggugggaugg

SEQ ID NO: 2673637 - RNA, 20 nt, Human
cucaggaggcgcccuuggcu

SEQ ID NO: 2673638 - RNA, 15 nt, Human
cucaggcagguggga

SEQ ID NO: 2673639 - RNA, 19 nt, Human
cucagggccaugcugaggc

SEQ ID NO: 2673640 - RNA, 20 nt, Human
cucagggccaugcugaggcc

SEQ ID NO: 2673641 - RNA, 15 nt, Human
cucagggccaugcug

SEQ ID NO: 2673642 - RNA, 17 nt, Human
cucagggccaugcugag

SEQ ID NO: 2673643 - RNA, 18 nt, Human
cucagggccaugcugagg

SEQ ID NO: 2673644 - RNA, 13 nt, Human
cucagggccaugc

SEQ ID NO: 2673645 - RNA, 14 nt, Human
cucaggugggcccu

SEQ ID NO: 2673646 - RNA, 14 nt, Human
cucagggccugguc

SEQ ID NO: 2673647 - RNA, 15 nt, Human
cucaggguggucucu

SEQ ID NO: 2673648 - RNA, 16 nt, Human
cucaggguggucucuu

SEQ ID NO: 2673649 - RNA, 18 nt, Human
cucagcucggcucagcuc

SEQ ID NO: 2673650 - RNA, 15 nt, Human
cucagcucggggagc

SEQ ID NO: 2673651 - RNA, 18 nt, Human
cucagcucggggagccuu

SEQ ID NO: 2673652 - RNA, 19 nt, Human
cucagcucggggagccuua

SEQ ID NO: 2673653 - RNA, 13 nt, Human
cucagcucggcuc

SEQ ID NO: 2673654 - RNA, 17 nt, Human
cucagcucggcucagcu

SEQ ID NO: 2673655 - RNA, 16 nt, Human
cucagcucggcucagc

SEQ ID NO: 2673656 - RNA, 15 nt, Human
cucagcucggcucag

SEQ ID NO: 2673657 - RNA, 14 nt, Human
cucagcucggcuca

SEQ ID NO: 2673658 - RNA, 22 nt, Human
cucagcuuugagaagccuucag

SEQ ID NO: 2673659 - RNA, 13 nt, Human
cucagcuuugaga

SEQ ID NO: 2673660 - RNA, 16 nt, Human
cucagcuuugagaagc

SEQ ID NO: 2673661 - RNA, 21 nt, Human
cucagcuuugagaagccuuca

SEQ ID NO: 2673662 - RNA, 12 nt, Human
cucagcuuugag

SEQ ID NO: 2673663 - RNA, 15 nt, Human
cucagagcucucucu

SEQ ID NO: 2673664 - RNA, 18 nt, Human
cucacuggggccuacagc

SEQ ID NO: 2673665 - RNA, 16 nt, Human
cucacuggggccuaca

SEQ ID NO: 2673666 - RNA, 13 nt, Human
cucacuggggccu

SEQ ID NO: 2673667 - RNA, 10 nt, Human
cucacuguga

SEQ ID NO: 2673668 - RNA, 12 nt, Human
cucacugugauc

SEQ ID NO: 2673669 - RNA, 22 nt, Human
cucacugugaucaauauuuuua

SEQ ID NO: 2673670 - RNA, 11 nt, Human
cucacugccag

SEQ ID NO: 2673671 - RNA, 12 nt, Human
cucacagaguca

SEQ ID NO: 2673672 - RNA, 13 nt, Human
cucacagagucaa

SEQ ID NO: 2673673 - RNA, 17 nt, Human
cucacagagucaaggcc

SEQ ID NO: 2673674 - RNA, 19 nt, Human
cucacagagucaaggccug

SEQ ID NO: 2673675 - RNA, 20 nt, Human
cucacagagucaaggccugc

SEQ ID NO: 2673676 - RNA, 22 nt, Human
cucacagagucaaggccugcuc

SEQ ID NO: 2673677 - RNA, 14 nt, Human
cucagcucaaugca

SEQ ID NO: 2673678 - RNA, 18 nt, Human
cucagcccccugcuucag

SEQ ID NO: 2673679 - RNA, 20 nt, Human
cucagcaucaaaauauuuca

SEQ ID NO: 2673680 - RNA, 21 nt, Human
cucagcaaaagaugcuucuca

SEQ ID NO: 2673681 - RNA, 20 nt, Human
cucagcaaaagaugcuucuc

SEQ ID NO: 2673682 - RNA, 19 nt, Human
cucagcaaaagaugcuucu

SEQ ID NO: 2673683 - RNA, 20 nt, Human
cuauuuauuaauauuuaaca

SEQ ID NO: 2673684 - RNA, 17 nt, Human
cuauuuauuaauauuua

SEQ ID NO: 2673685 - RNA, 19 nt, Human
cuauuuauugacucugggu

SEQ ID NO: 2673686 - RNA, 15 nt, Human
cuauuuauuaauauu

SEQ ID NO: 2673687 - RNA, 14 nt, Human
cuauuuauuaauau

SEQ ID NO: 2673688 - RNA, 13 nt, Human
cuauuuauuaaua

SEQ ID NO: 2673689 - RNA, 10 nt, Human
cuauuuaaga

SEQ ID NO: 2673690 - RNA, 11 nt, Human
cuauuuaagau

SEQ ID NO: 2673691 - RNA, 14 nt, Human
cuauuuaagaugug

SEQ ID NO: 2673692 - RNA, 15 nt, Human
cuauuuaagauguga

SEQ ID NO: 2673693 - RNA, 21 nt, Human
cuauuuaaaaaaaaagucaga

SEQ ID NO: 2673694 - RNA, 16 nt, Human
cuauugcugcuugagg

SEQ ID NO: 2673695 - RNA, 14 nt, Human
cuauugcuucacca

SEQ ID NO: 2673696 - RNA, 21 nt, Human
cuauugcuucaccauggccuu

SEQ ID NO: 2673697 - RNA, 15 nt, Human
cuauugccaaccagu

SEQ ID NO: 2673698 - RNA, 21 nt, Human
cuauuuauuaauauuuaacau

SEQ ID NO: 2673699 - RNA, 13 nt, Human
cuauuuauuuucc

SEQ ID NO: 2673700 - RNA, 16 nt, Human
cuauuuauuuuccuaa

SEQ ID NO: 2673701 - RNA, 17 nt, Human
cuauuuauuuuccuaaa

SEQ ID NO: 2673702 - RNA, 21 nt, Human
cuauuuauuuuccuaaagaga

SEQ ID NO: 2673703 - RNA, 18 nt, Human
cuauuuauuuuccuaaag

SEQ ID NO: 2673704 - RNA, 19 nt, Human
cuauuuauuuuccuaaaga

SEQ ID NO: 2673705 - RNA, 14 nt, Human
cuauuugaacaagu

SEQ ID NO: 2673706 - RNA, 23 nt, Human
cucacacggacacucaaaagcug

SEQ ID NO: 2673707 - RNA, 18 nt, Human
cucacacuccccuagggg

SEQ ID NO: 2673708 - RNA, 21 nt, Human
cucacacugguucucaaugaa

SEQ ID NO: 2673709 - RNA, 23 nt, Human
cucacacugguucucaaugaaaa

SEQ ID NO: 2673710 - RNA, 14 nt, Human
cuaggaaacucaca

SEQ ID NO: 2673711 - RNA, 14 nt, Human
cuauauaauuuauu

SEQ ID NO: 2673712 - RNA, 16 nt, Human
cuauauaauuuauuuc

SEQ ID NO: 2673713 - RNA, 20 nt, Human
cuauauaauuuauuuccacu

SEQ ID NO: 2673714 - RNA, 19 nt, Human
cuauauaagacaagaacuc

SEQ ID NO: 2673715 - RNA, 15 nt, Human
cuauagcuugcagaa

SEQ ID NO: 2673716 - RNA, 21 nt, Human
cuauagcuugcagaacuguag

SEQ ID NO: 2673717 - RNA, 14 nt, Human
cuaugcaaaaagcu

SEQ ID NO: 2673718 - RNA, 17 nt, Human
cuauugauuuaagcuuu

SEQ ID NO: 2673719 - RNA, 17 nt, Human
cuauucugagaaaacaa

SEQ ID NO: 2673720 - RNA, 15 nt, Human
cuauucugagaaaac

SEQ ID NO: 2673721 - RNA, 16 nt, Human
cuauucugagaaaaca

SEQ ID NO: 2673722 - RNA, 16 nt, Human
cuauuauuuuuauaau

SEQ ID NO: 2673723 - RNA, 18 nt, Human
cuauuauuuuuauaauug

SEQ ID NO: 2673724 - RNA, 19 nt, Human
cuauuauuuuuauaauugu

SEQ ID NO: 2673725 - RNA, 15 nt, Human
cuauuauggaaaacu

SEQ ID NO: 2673726 - RNA, 16 nt, Human
cuauuauggaaaacug

SEQ ID NO: 2673727 - RNA, 17 nt, Human
cuauuauggaaaacugu

SEQ ID NO: 2673728 - RNA, 18 nt, Human
cuauuauggaaaacugug

SEQ ID NO: 2673729 - RNA, 19 nt, Human
cuauuaguguuauaugaac

SEQ ID NO: 2673730 - RNA, 18 nt, Human
cuauuaguguuauaugaa

SEQ ID NO: 2673731 - RNA, 17 nt, Human
cuauuaguguuauauga

SEQ ID NO: 2673732 - RNA, 13 nt, Human
cuauguauaaaau

SEQ ID NO: 2673733 - RNA, 15 nt, Human
cuauguauaaaauac

SEQ ID NO: 2673734 - RNA, 17 nt, Human
cuauguauaaaauacau

SEQ ID NO: 2673735 - RNA, 18 nt, Human
cuauguauaaaauacaua

SEQ ID NO: 2673736 - RNA, 24 nt, Human
cuauguauaaaauacauagugaaa

SEQ ID NO: 2673737 - RNA, 15 nt, Human
cuaccgacccagggu

SEQ ID NO: 2673738 - RNA, 21 nt, Human
cuaccgacccaggguucccgc

SEQ ID NO: 2673739 - RNA, 22 nt, Human
cuacucccugcagaugccaccc

SEQ ID NO: 2673740 - RNA, 17 nt, Human
cuacucccugcagaugc

SEQ ID NO: 2673741 - RNA, 18 nt, Human
cuacucccugcagaugcc

SEQ ID NO: 2673742 - RNA, 13 nt, Human
cuacucccugcag

SEQ ID NO: 2673743 - RNA, 14 nt, Human
cuacucccugcaga

SEQ ID NO: 2673744 - RNA, 17 nt, Human
cuacugcacuccagccu

SEQ ID NO: 2673745 - RNA, 18 nt, Human
cuacugcacuccagccug

SEQ ID NO: 2673746 - RNA, 19 nt, Human
cuacugcacuccagccugg

SEQ ID NO: 2673747 - RNA, 20 nt, Human
cuacugcacuccagccuggg

SEQ ID NO: 2673748 - RNA, 21 nt, Human
cuacugcacuccagccugggg

SEQ ID NO: 2673749 - RNA, 23 nt, Human
cuacugcacuccagccuggggga

SEQ ID NO: 2673750 - RNA, 21 nt, Human
cuacucucacacugguucuca

SEQ ID NO: 2673751 - RNA, 23 nt, Human
cuacucucacacugguucucaau

SEQ ID NO: 2673752 - RNA, 16 nt, Human
cuacugcauuuaggga

SEQ ID NO: 2673753 - RNA, 19 nt, Human
cuacugcauuuagggagua

SEQ ID NO: 2673754 - RNA, 17 nt, Human
cuacugcauuuagggag

SEQ ID NO: 2673755 - RNA, 20 nt, Human
cuagaggcccuuugcugucc

SEQ ID NO: 2673756 - RNA, 22 nt, Human
cuacuguuguaagaauucugau

SEQ ID NO: 2673757 - RNA, 17 nt, Human
cuacugucaaaugaugu

SEQ ID NO: 2673758 - RNA, 18 nt, Human
cuacugucaaaugaugug

SEQ ID NO: 2673759 - RNA, 20 nt, Human
cuacugucaaaugaugugca

SEQ ID NO: 2673760 - RNA, 21 nt, Human
cuacugucaaaugaugugcaa

SEQ ID NO: 2673761 - RNA, 17 nt, Human
cuacuuuguggcaaucu

SEQ ID NO: 2673762 - RNA, 20 nt, Human
cuacuuuguuaggauuuuca

SEQ ID NO: 2673763 - RNA, 17 nt, Human
cuacuuuugcaugaaaa

SEQ ID NO: 2673764 - RNA, 18 nt, Human
cuacuuuugcaugaaaau

SEQ ID NO: 2673765 - RNA, 13 nt, Human
cuagacucggggu

SEQ ID NO: 2673766 - RNA, 22 nt, Human
cuagacucggggugcuuccuug

SEQ ID NO: 2673767 - RNA, 16 nt, Human
cuagacucggggugcu

SEQ ID NO: 2673768 - RNA, 15 nt, Human
cuagcuccuccccuu

SEQ ID NO: 2673769 - RNA, 12 nt, Human
cuagcuagcuca

SEQ ID NO: 2673770 - RNA, 16 nt, Human
cuagcuagcucaacua

SEQ ID NO: 2673771 - RNA, 13 nt, Human
cuagcuucugcuu

SEQ ID NO: 2673772 - RNA, 14 nt, Human
cuagcuucugcuuu

SEQ ID NO: 2673773 - RNA, 15 nt, Human
cuagcuucugcuuuu

SEQ ID NO: 2673774 - RNA, 16 nt, Human
cuagcuucugcuuuuc

SEQ ID NO: 2673775 - RNA, 18 nt, Human
cuagcuucugcuuuucug

SEQ ID NO: 2673776 - RNA, 21 nt, Human
cuagcuucugcuuuucugccc

SEQ ID NO: 2673777 - RNA, 22 nt, Human
cuagcuucugcuuuucugcccu

SEQ ID NO: 2673778 - RNA, 20 nt, Human
cuagcuugggaggcuucccc

SEQ ID NO: 2673779 - RNA, 23 nt, Human
cuagcuucugcuuuucugcccug

SEQ ID NO: 2673780 - RNA, 15 nt, Human
cuagcuuuagacccu

SEQ ID NO: 2673781 - RNA, 19 nt, Human
cuagcuuuagacccugggu

SEQ ID NO: 2673782 - RNA, 18 nt, Human
cuagcuuuagacccuggg

SEQ ID NO: 2673783 - RNA, 14 nt, Human
cuagauaucgacuu

SEQ ID NO: 2673784 - RNA, 18 nt, Human
cuagaguuuuauagccug

SEQ ID NO: 2673785 - RNA, 16 nt, Human
cuagauaggaggaugg

SEQ ID NO: 2673786 - RNA, 21 nt, Human
cuagauaucgacuuguuuuug

SEQ ID NO: 2673787 - RNA, 16 nt, Human
cuagcgaucucuccug

SEQ ID NO: 2673788 - RNA, 17 nt, Human
cuagcgaucucuccugg

SEQ ID NO: 2673789 - RNA, 18 nt, Human
cuagcgaucucuccuggc

SEQ ID NO: 2673790 - RNA, 19 nt, Human
cuagcgaucucuccuggcc

SEQ ID NO: 2673791 - RNA, 20 nt, Human
cuagcgaucucuccuggccu

SEQ ID NO: 2673792 - RNA, 14 nt, Human
cuagcuaauuauuu

SEQ ID NO: 2673793 - RNA, 15 nt, Human
cuagcuaauuauuua

SEQ ID NO: 2673794 - RNA, 16 nt, Human
cuagcuaauuauuuaa

SEQ ID NO: 2673795 - RNA, 17 nt, Human
cuaauauauaugaauaa

SEQ ID NO: 2673796 - RNA, 15 nt, Human
cuaauauauaugaau

SEQ ID NO: 2673797 - RNA, 18 nt, Human
cuaauauauaugaauaaa

SEQ ID NO: 2673798 - RNA, 13 nt, Human
cuaauauauauga

SEQ ID NO: 2673799 - RNA, 18 nt, Human
cuaauagugaucaagaag

SEQ ID NO: 2673800 - RNA, 23 nt, Human
cuaauagugaucaagaagacuuu

SEQ ID NO: 2673801 - RNA, 15 nt, Human
cuaauaaucuuguuu

SEQ ID NO: 2673802 - RNA, 19 nt, Human
cuaauaaucuuguuucuga

SEQ ID NO: 2673803 - RNA, 20 nt, Human
cuaauaaucuuguuucugaa

SEQ ID NO: 2673804 - RNA, 21 nt, Human
cuaauaaucuuguuucugaaa

SEQ ID NO: 2673805 - RNA, 22 nt, Human
cuaauaagcuaguugaauacuu

SEQ ID NO: 2673806 - RNA, 17 nt, Human
cuaauaagcuaguugaa

SEQ ID NO: 2673807 - RNA, 11 nt, Human
cuaaggaccuu

SEQ ID NO: 2673808 - RNA, 23 nt, Human
cuaaggccauggcaucccuuuuu

SEQ ID NO: 2673809 - RNA, 15 nt, Human
cuacaccuugccuug

SEQ ID NO: 2673810 - RNA, 13 nt, Human
cuacaccuggcug

SEQ ID NO: 2673811 - RNA, 15 nt, Human
cuacaccuggcugag

SEQ ID NO: 2673812 - RNA, 12 nt, Human
cuacaccuggcu

SEQ ID NO: 2673813 - RNA, 16 nt, Human
cuaauuauacuacuuu

SEQ ID NO: 2673814 - RNA, 18 nt, Human
cuaauuauacuacuuugu

SEQ ID NO: 2673815 - RNA, 21 nt, Human
cuaauuauacuacuuuguuag

SEQ ID NO: 2673816 - RNA, 14 nt, Human
cuaauuauuuaauu

SEQ ID NO: 2673817 - RNA, 18 nt, Human
cuaauuauuuaauugucc

SEQ ID NO: 2673818 - RNA, 23 nt, Human
cguuuuaaggacugacugaggca

SEQ ID NO: 2673819 - RNA, 16 nt, Human
cguuuuaaggacugac

SEQ ID NO: 2673820 - RNA, 13 nt, Human
cguuuuaaggacu

SEQ ID NO: 2673821 - RNA, 13 nt, Human
cuaaaaaguauaa

SEQ ID NO: 2673822 - RNA, 15 nt, Human
cuaaaaaguauaaaa

SEQ ID NO: 2673823 - RNA, 16 nt, Human
cuaaaaaguauaaaau

SEQ ID NO: 2673824 - RNA, 17 nt, Human
cuaaaaaguauaaaaua

SEQ ID NO: 2673825 - RNA, 14 nt, Human
cgggacagaguagc

SEQ ID NO: 2673826 - RNA, 19 nt, Human
cgggacaucacaggguggg

SEQ ID NO: 2673827 - RNA, 21 nt, Human
cgggacaucacagggugggcc

SEQ ID NO: 2673828 - RNA, 22 nt, Human
cgggacaucacagggugggccu

SEQ ID NO: 2673829 - RNA, 23 nt, Human
cgggacaucacagggugggccuc

SEQ ID NO: 2673830 - RNA, 16 nt, Human
cgggaccacccugagc

SEQ ID NO: 2673831 - RNA, 17 nt, Human
cgggaccacccugagcc

SEQ ID NO: 2673832 - RNA, 18 nt, Human
cgggaccacccugagccg

SEQ ID NO: 2673833 - RNA, 14 nt, Human
cgggacccagggcc

SEQ ID NO: 2673834 - RNA, 22 nt, Human
cgggacccagggcccucggugg

SEQ ID NO: 2673835 - RNA, 18 nt, Human
cguuuggugcuucucaga

SEQ ID NO: 2673836 - RNA, 12 nt, Human
cuaaaaucauga

SEQ ID NO: 2673837 - RNA, 13 nt, Human
cuaaaaucaugaa

SEQ ID NO: 2673838 - RNA, 18 nt, Human
cuaaauaagaaaauaaca

SEQ ID NO: 2673839 - RNA, 15 nt, Human
cuaaauaaaauuugu

SEQ ID NO: 2673840 - RNA, 20 nt, Human
cuaaauaaaauuuguugcau

SEQ ID NO: 2673841 - RNA, 17 nt, Human
cuaaccucgcccucucc

SEQ ID NO: 2673842 - RNA, 16 nt, Human
cuaaccucgcccucuc

SEQ ID NO: 2673843 - RNA, 13 nt, Human
cuaaccucgcccu

SEQ ID NO: 2673844 - RNA, 19 nt, Human
cuaaccccuuccagaucac

SEQ ID NO: 2673845 - RNA, 13 nt, Human
cuaaccccuucca

SEQ ID NO: 2673846 - RNA, 14 nt, Human
cuaaccccuuccag

SEQ ID NO: 2673847 - RNA, 19 nt, Human
cuaagagaaguuauuuucu

SEQ ID NO: 2673848 - RNA, 22 nt, Human
cuaagagaaguuauuuucuaca

SEQ ID NO: 2673849 - RNA, 21 nt, Human
cuaagagaaguuguaaaguau

SEQ ID NO: 2673850 - RNA, 19 nt, Human
cuaacauaccguuuauaau

SEQ ID NO: 2673851 - RNA, 20 nt, Human
cuaacagugaaguuuuacug

SEQ ID NO: 2673852 - RNA, 13 nt, Human
cuaccaauauuag

SEQ ID NO: 2673853 - RNA, 20 nt, Human
cuaccaaggucuucuuaaua

SEQ ID NO: 2673854 - RNA, 18 nt, Human
cuaccauccccuguagag

SEQ ID NO: 2673855 - RNA, 13 nt, Human
cuacaugugagug

SEQ ID NO: 2673856 - RNA, 12 nt, Human
cuaccaaaaugg

SEQ ID NO: 2673857 - RNA, 15 nt, Human
cuacccucagugagc

SEQ ID NO: 2673858 - RNA, 17 nt, Human
cuacccucuuagaaaaa

SEQ ID NO: 2673859 - RNA, 17 nt, Human
cuacccuccguuuuucu

SEQ ID NO: 2673860 - RNA, 19 nt, Human
cuacagcuuugaucccuga

SEQ ID NO: 2673861 - RNA, 22 nt, Human
cuacaguauuacucuuacaaga

SEQ ID NO: 2673862 - RNA, 16 nt, Human
cgaagucauuaaacug

SEQ ID NO: 2673863 - RNA, 19 nt, Human
cgaagucauuaaacugguu

SEQ ID NO: 2673864 - RNA, 15 nt, Human
cgaagaguucccuug

SEQ ID NO: 2673865 - RNA, 12 nt, Human
cgaaucucugug

SEQ ID NO: 2673866 - RNA, 16 nt, Human
cgaaucucugugccuu

SEQ ID NO: 2673867 - RNA, 22 nt, Human
cgagaccgggcccuggguuccu

SEQ ID NO: 2673868 - RNA, 17 nt, Human
cgagaccauccuggcua

SEQ ID NO: 2673869 - RNA, 20 nt, Human
cgagaccccggcuuccuuuc

SEQ ID NO: 2673870 - RNA, 19 nt, Human
cgaacauccaaccuuccca

SEQ ID NO: 2673871 - RNA, 15 nt, Human
cgaaauaucaaaguc

SEQ ID NO: 2673872 - RNA, 17 nt, Human
cgaaauaucaaagucau

SEQ ID NO: 2673873 - RNA, 13 nt, Human
ccuugugccuggg

SEQ ID NO: 2673874 - RNA, 14 nt, Human
ccuugugccugggg

SEQ ID NO: 2673875 - RNA, 15 nt, Human
ccuugugccuggggu

SEQ ID NO: 2673876 - RNA, 12 nt, Human
ccuuguggcuuc

SEQ ID NO: 2673877 - RNA, 11 nt, Human
ccuugugccug

SEQ ID NO: 2673878 - RNA, 12 nt, Human
ccuugugccugg

SEQ ID NO: 2673879 - RNA, 11 nt, Human
ccuuugggggu

SEQ ID NO: 2673880 - RNA, 12 nt, Human
ccuuuggggguu

SEQ ID NO: 2673881 - RNA, 14 nt, Human
ccuuugguucuggc

SEQ ID NO: 2673882 - RNA, 20 nt, Human
ccuuugguucuggccagaau

SEQ ID NO: 2673883 - RNA, 15 nt, Human
ccuuugguucuggcc

SEQ ID NO: 2673884 - RNA, 16 nt, Human
ccuuugguuuuuuucu

SEQ ID NO: 2673885 - RNA, 17 nt, Human
ccuuugguccugucccc

SEQ ID NO: 2673886 - RNA, 18 nt, Human
ccuuuguccuuuuucagg

SEQ ID NO: 2673887 - RNA, 15 nt, Human
ccuuuguucccggcu

SEQ ID NO: 2673888 - RNA, 13 nt, Human
ccuuuguucuggg

SEQ ID NO: 2673889 - RNA, 15 nt, Human
ccuuuguucuggggg

SEQ ID NO: 2673890 - RNA, 14 nt, Human
ccuuuguucccggc

SEQ ID NO: 2673891 - RNA, 12 nt, Human
ccuuuuuucaaa

SEQ ID NO: 2673892 - RNA, 14 nt, Human
ccuuuuuucuuuuu

SEQ ID NO: 2673893 - RNA, 16 nt, Human
ccuucgucuuucccau

SEQ ID NO: 2673894 - RNA, 17 nt, Human
ccuucgucuuucccaug

SEQ ID NO: 2673895 - RNA, 17 nt, Human
ccuucucccuagcuccu

SEQ ID NO: 2673896 - RNA, 22 nt, Human
ccuucucccuagcuccuccccu

SEQ ID NO: 2673897 - RNA, 15 nt, Human
ccuucucagaagcac

SEQ ID NO: 2673898 - RNA, 18 nt, Human
ccuucucagaagcacaga

SEQ ID NO: 2673899 - RNA, 15 nt, Human
ccugucccuugaccu

SEQ ID NO: 2673900 - RNA, 21 nt, Human
ccuguggcgccgucuccaggg

SEQ ID NO: 2673901 - RNA, 20 nt, Human
ccuguggaugauaaaacaca

SEQ ID NO: 2673902 - RNA, 13 nt, Human
ccuguggcugucg

SEQ ID NO: 2673903 - RNA, 22 nt, Human
ccuguggcgccgucuccagggg

SEQ ID NO: 2673904 - RNA, 13 nt, Human
ccugucccugcgc

SEQ ID NO: 2673905 - RNA, 23 nt, Human
ccugucccugcgccuuuccuuuu

SEQ ID NO: 2673906 - RNA, 22 nt, Human
ccugugggggguaaucccugcu

SEQ ID NO: 2673907 - RNA, 15 nt, Human
ccuuccagaugguca

SEQ ID NO: 2673908 - RNA, 20 nt, Human
ccuuccagaucacugccaca

SEQ ID NO: 2673909 - RNA, 13 nt, Human
ccuuccagaucac

SEQ ID NO: 2673910 - RNA, 13 nt, Human
ccuuggccugggc

SEQ ID NO: 2673911 - RNA, 13 nt, Human
ccuugagcccugg

SEQ ID NO: 2673912 - RNA, 14 nt, Human
ccuugagcccuggc

SEQ ID NO: 2673913 - RNA, 15 nt, Human
ccuugagcccuggcu

SEQ ID NO: 2673914 - RNA, 16 nt, Human
ccuugagcccuggcug

SEQ ID NO: 2673915 - RNA, 17 nt, Human
ccuugagcccuggcugu

SEQ ID NO: 2673916 - RNA, 22 nt, Human
ccuugagcccuggcuguucugu

SEQ ID NO: 2673917 - RNA, 17 nt, Human
ccuuggcuucugugaug

SEQ ID NO: 2673918 - RNA, 21 nt, Human
ccuugguugucuggcaaggac

SEQ ID NO: 2673919 - RNA, 22 nt, Human
ccuugguugucuggcaaggacu

SEQ ID NO: 2673920 - RNA, 13 nt, Human
cgagagggagaga

SEQ ID NO: 2673921 - RNA, 14 nt, Human
cgagagggagagag

SEQ ID NO: 2673922 - RNA, 16 nt, Human
cgagagggagagagag

SEQ ID NO: 2673923 - RNA, 15 nt, Human
cgaggacccaggaaa

SEQ ID NO: 2673924 - RNA, 23 nt, Human
cgaggccuaccccgcagacaccu

SEQ ID NO: 2673925 - RNA, 17 nt, Human
cgaggccuaccccgcag

SEQ ID NO: 2673926 - RNA, 23 nt, Human
cgaggauuuuaauuuuuuuuagu

SEQ ID NO: 2673927 - RNA, 14 nt, Human
cgaggauuuuaauu

SEQ ID NO: 2673928 - RNA, 23 nt, Human
cgcacuucgggaggucgaggcag

SEQ ID NO: 2673929 - RNA, 21 nt, Human
cgcagagcgcgccccuagccg

SEQ ID NO: 2673930 - RNA, 21 nt, Human
cgcaccggagugucuggaauu

SEQ ID NO: 2673931 - RNA, 15 nt, Human
cggcccugugugcag

SEQ ID NO: 2673932 - RNA, 20 nt, Human
cggccgccccuccucgugaa

SEQ ID NO: 2673933 - RNA, 15 nt, Human
cggccgcuccaccag

SEQ ID NO: 2673934 - RNA, 13 nt, Human
cggccucugccuu

SEQ ID NO: 2673935 - RNA, 17 nt, Human
cggccucugccuuugca

SEQ ID NO: 2673936 - RNA, 14 nt, Human
cggcuggcagccca

SEQ ID NO: 2673937 - RNA, 15 nt, Human
cggauaguugcuauu

SEQ ID NO: 2673938 - RNA, 17 nt, Human
cggauaguugcuauuuu

SEQ ID NO: 2673939 - RNA, 20 nt, Human
cggauaguugcuauuuuugu

SEQ ID NO: 2673940 - RNA, 18 nt, Human
cggagugucuggaauugu

SEQ ID NO: 2673941 - RNA, 19 nt, Human
cggaguguguaugccaaga

SEQ ID NO: 2673942 - RNA, 17 nt, Human
cggaucaggcucccagg

SEQ ID NO: 2673943 - RNA, 16 nt, Human
cggaucaggcucccag

SEQ ID NO: 2673944 - RNA, 16 nt, Human
cggcccguggcuguug

SEQ ID NO: 2673945 - RNA, 19 nt, Human
cggcuuccuuucccaagcc

SEQ ID NO: 2673946 - RNA, 14 nt, Human
cggcuuccuuuccc

SEQ ID NO: 2673947 - RNA, 15 nt, Human
cggcuuccuuuccca

SEQ ID NO: 2673948 - RNA, 16 nt, Human
cgggaacaugcccccu

SEQ ID NO: 2673949 - RNA, 17 nt, Human
cgggaacaugcccccug

SEQ ID NO: 2673950 - RNA, 16 nt, Human
cgggaaccuccccagc

SEQ ID NO: 2673951 - RNA, 22 nt, Human
cgggaaccuccccagccugcgc

SEQ ID NO: 2673952 - RNA, 21 nt, Human
cgggaaccuccccagccugcg

SEQ ID NO: 2673953 - RNA, 20 nt, Human
cgggaaccuccccagccugc

SEQ ID NO: 2673954 - RNA, 19 nt, Human
cgggaaccuccccagccug

SEQ ID NO: 2673955 - RNA, 18 nt, Human
cgggaaccuccccagccu

SEQ ID NO: 2673956 - RNA, 17 nt, Human
cgggaaccuccccagcc

SEQ ID NO: 2673957 - RNA, 23 nt, Human
cggcuggcagcccaccccucaac

SEQ ID NO: 2673958 - RNA, 20 nt, Human
cgcggggcugucggcgcugc

SEQ ID NO: 2673959 - RNA, 13 nt, Human
cgcgguggcucac

SEQ ID NO: 2673960 - RNA, 15 nt, Human
cgcuaaagagcccuu

SEQ ID NO: 2673961 - RNA, 19 nt, Human
cgcuaaagagcccuugccu

SEQ ID NO: 2673962 - RNA, 21 nt, Human
cgcuaaagagcccuugccucc

SEQ ID NO: 2673963 - RNA, 22 nt, Human
cgcuaaagagcccuugccuccc

SEQ ID NO: 2673964 - RNA, 19 nt, Human
cgcgguggcucacgccugu

SEQ ID NO: 2673965 - RNA, 23 nt, Human
cgcgggagccaugcgcccccucc

SEQ ID NO: 2673966 - RNA, 23 nt, Human
cgccuuuccuuuucgccuuuccu

SEQ ID NO: 2673967 - RNA, 19 nt, Human
cgccuuuccucucuauauu

SEQ ID NO: 2673968 - RNA, 13 nt, Human
cgccuuuccucuc

SEQ ID NO: 2673969 - RNA, 12 nt, Human
cgcccguccugc

SEQ ID NO: 2673970 - RNA, 14 nt, Human
cgcccguccugccu

SEQ ID NO: 2673971 - RNA, 17 nt, Human
cgcccgggguggccaca

SEQ ID NO: 2673972 - RNA, 15 nt, Human
cgcccguccugccug

SEQ ID NO: 2673973 - RNA, 23 nt, Human
cgccaugugauggacacuccagg

SEQ ID NO: 2673974 - RNA, 16 nt, Human
cgcagcccuggcaggg

SEQ ID NO: 2673975 - RNA, 23 nt, Human
cgcagcccuggcagggggcaugc

SEQ ID NO: 2673976 - RNA, 23 nt, Human
cgcagccucucagugcccuccag

SEQ ID NO: 2673977 - RNA, 14 nt, Human
cggacuuuucugca

SEQ ID NO: 2673978 - RNA, 15 nt, Human
cggacuuuucugcaa

SEQ ID NO: 2673979 - RNA, 16 nt, Human
cggacuuuucugcaaa

SEQ ID NO: 2673980 - RNA, 22 nt, Human
cggagucguggggugugcuggg

SEQ ID NO: 2673981 - RNA, 23 nt, Human
cggagucguggggugugcuggga

SEQ ID NO: 2673982 - RNA, 16 nt, Human
cgcuucuugccucugu

SEQ ID NO: 2673983 - RNA, 17 nt, Human
cgcuucuugccucugug

SEQ ID NO: 2673984 - RNA, 23 nt, Human
cgcuccgggcuuucacggaaacu

SEQ ID NO: 2673985 - RNA, 15 nt, Human
cgcuucuugccucug

SEQ ID NO: 2673986 - RNA, 14 nt, Human
cgcuucugccugca

SEQ ID NO: 2673987 - RNA, 19 nt, Human
ccuguauauuuguaaagcu

SEQ ID NO: 2673988 - RNA, 20 nt, Human
ccuguauauuuguaaagcua

SEQ ID NO: 2673989 - RNA, 14 nt, Human
ccuguauacagugc

SEQ ID NO: 2673990 - RNA, 15 nt, Human
ccuguauacagugca

SEQ ID NO: 2673991 - RNA, 16 nt, Human
ccuguauacagugcag

SEQ ID NO: 2673992 - RNA, 18 nt, Human
ccuguauacagugcagag

SEQ ID NO: 2673993 - RNA, 21 nt, Human
ccuguauacagugcagagccu

SEQ ID NO: 2673994 - RNA, 22 nt, Human
ccuguacaguagauuuuccaaa

SEQ ID NO: 2673995 - RNA, 14 nt, Human
ccuguacaguagau

SEQ ID NO: 2673996 - RNA, 20 nt, Human
ccuggucuuugagcucccac

SEQ ID NO: 2673997 - RNA, 13 nt, Human
ccuggucuuugag

SEQ ID NO: 2673998 - RNA, 20 nt, Human
ccuguacaguagauuuucca

SEQ ID NO: 2673999 - RNA, 21 nt, Human
ccuguacaguagauuuuccaa

SEQ ID NO: 2674000 - RNA, 17 nt, Human
ccuguagcacuuacugg

SEQ ID NO: 2674001 - RNA, 16 nt, Human
ccuguagagugggagc

SEQ ID NO: 2674002 - RNA, 15 nt, Human
ccuguagagugggag

SEQ ID NO: 2674003 - RNA, 14 nt, Human
ccuggguguccccg

SEQ ID NO: 2674004 - RNA, 20 nt, Human
ccuggguguccccgcugcug

SEQ ID NO: 2674005 - RNA, 21 nt, Human
ccuggguguccccgcugcugu

SEQ ID NO: 2674006 - RNA, 18 nt, Human
ccugggguguuaguggca

SEQ ID NO: 2674007 - RNA, 20 nt, Human
ccugggguguuaguggcacc

SEQ ID NO: 2674008 - RNA, 21 nt, Human
ccugggguguuaguggcaccg

SEQ ID NO: 2674009 - RNA, 18 nt, Human
ccugggacggcggcagua

SEQ ID NO: 2674010 - RNA, 22 nt, Human
ccugggaggucaaggcugcagu

SEQ ID NO: 2674011 - RNA, 16 nt, Human
ccuggcccacugcauc

SEQ ID NO: 2674012 - RNA, 12 nt, Human
ccuggcucccuc

SEQ ID NO: 2674013 - RNA, 14 nt, Human
ccuggcucccuccu

SEQ ID NO: 2674014 - RNA, 15 nt, Human
ccuggcucccuccuc

SEQ ID NO: 2674015 - RNA, 20 nt, Human
ccuggcucccuccuccaggc

SEQ ID NO: 2674016 - RNA, 22 nt, Human
ccuggcucccuccuccaggccu

SEQ ID NO: 2674017 - RNA, 23 nt, Human
ccuggcucccuccuccaggccug

SEQ ID NO: 2674018 - RNA, 23 nt, Human
ccugcuagcuagcucaacuagug

SEQ ID NO: 2674019 - RNA, 15 nt, Human
ccugcuagcuagcuc

SEQ ID NO: 2674020 - RNA, 23 nt, Human
ccugccuguggcgccgucuccag

SEQ ID NO: 2674021 - RNA, 21 nt, Human
ccuggcaguccgugggacggg

SEQ ID NO: 2674022 - RNA, 21 nt, Human
ccuggcaucgcaccauucuga

SEQ ID NO: 2674023 - RNA, 23 nt, Human
ccuggcaucgcaccauucugacu

SEQ ID NO: 2674024 - RNA, 14 nt, Human
ccuggcccacugca

SEQ ID NO: 2674025 - RNA, 13 nt, Human
ccuggcccacugc

SEQ ID NO: 2674026 - RNA, 11 nt, Human
ccuggccagga

SEQ ID NO: 2674027 - RNA, 12 nt, Human
ccuggccaggag

SEQ ID NO: 2674028 - RNA, 13 nt, Human
ccugcccucaagg

SEQ ID NO: 2674029 - RNA, 14 nt, Human
ccugcccucaaggg

SEQ ID NO: 2674030 - RNA, 18 nt, Human
ccugcccucaagggugug

SEQ ID NO: 2674031 - RNA, 14 nt, Human
ccugcccguucuug

SEQ ID NO: 2674032 - RNA, 13 nt, Human
ccugccaggcagg

SEQ ID NO: 2674033 - RNA, 14 nt, Human
ccugccaggcaggg

SEQ ID NO: 2674034 - RNA, 15 nt, Human
ccugccaggcagggg

SEQ ID NO: 2674035 - RNA, 19 nt, Human
ccugccaggcagggguggg

SEQ ID NO: 2674036 - RNA, 22 nt, Human
ccugccaggcaggggugggggu

SEQ ID NO: 2674037 - RNA, 21 nt, Human
ccugccacgaauuucugugcc

SEQ ID NO: 2674038 - RNA, 12 nt, Human
ccugccaggcau

SEQ ID NO: 2674039 - RNA, 21 nt, Human
ccugccacucacuaggccccc

SEQ ID NO: 2674040 - RNA, 22 nt, Human
ccugccacucacuaggccccca

SEQ ID NO: 2674041 - RNA, 13 nt, Human
ccugccacucacu

SEQ ID NO: 2674042 - RNA, 15 nt, Human
ccugccacucacuag

SEQ ID NO: 2674043 - RNA, 16 nt, Human
ccugccacucacuagg

SEQ ID NO: 2674044 - RNA, 18 nt, Human
ccugccacucacuaggcc

SEQ ID NO: 2674045 - RNA, 11 nt, Human
ccugcccugca

SEQ ID NO: 2674046 - RNA, 13 nt, Human
ccugcccugcacg

SEQ ID NO: 2674047 - RNA, 19 nt, Human
ccugaaacuauauuuuguc

SEQ ID NO: 2674048 - RNA, 14 nt, Human
ccugaaacuauauu

SEQ ID NO: 2674049 - RNA, 14 nt, Human
ccugaaagcccuga

SEQ ID NO: 2674050 - RNA, 13 nt, Human
ccugaaagcccug

SEQ ID NO: 2674051 - RNA, 13 nt, Human
ccugaagagcauu

SEQ ID NO: 2674052 - RNA, 18 nt, Human
ccugaaagcccugagcuu

SEQ ID NO: 2674053 - RNA, 13 nt, Human
ccucuuccuguga

SEQ ID NO: 2674054 - RNA, 21 nt, Human
ccucuuccugugauccaccca

SEQ ID NO: 2674055 - RNA, 14 nt, Human
ccuaguaagaagac

SEQ ID NO: 2674056 - RNA, 18 nt, Human
ccugagcuaggaagaguc

SEQ ID NO: 2674057 - RNA, 17 nt, Human
ccugagcccuacucccu

SEQ ID NO: 2674058 - RNA, 19 nt, Human
ccugagcccuacucccugc

SEQ ID NO: 2674059 - RNA, 21 nt, Human
ccugagcccuacucccugcag

SEQ ID NO: 2674060 - RNA, 22 nt, Human
ccugagcccuacucccugcaga

SEQ ID NO: 2674061 - RNA, 16 nt, Human
ccugagccggccccag

SEQ ID NO: 2674062 - RNA, 17 nt, Human
ccugagccggccccagg

SEQ ID NO: 2674063 - RNA, 17 nt, Human
ccugaagaugggagccu

SEQ ID NO: 2674064 - RNA, 15 nt, Human
ccugaauaaagagcc

SEQ ID NO: 2674065 - RNA, 13 nt, Human
ccugcauuuccuc

SEQ ID NO: 2674066 - RNA, 14 nt, Human
ccugcacuuacuug

SEQ ID NO: 2674067 - RNA, 17 nt, Human
ccugcacuuacuugcuu

SEQ ID NO: 2674068 - RNA, 12 nt, Human
ccugccaccagg

SEQ ID NO: 2674069 - RNA, 13 nt, Human
ccugccaccaggc

SEQ ID NO: 2674070 - RNA, 14 nt, Human
ccugccaccaggcc

SEQ ID NO: 2674071 - RNA, 15 nt, Human
ccugccaccaggcca

SEQ ID NO: 2674072 - RNA, 18 nt, Human
ccugccaccaggccaccu

SEQ ID NO: 2674073 - RNA, 19 nt, Human
ccugccaccaggccaccuc

SEQ ID NO: 2674074 - RNA, 21 nt, Human
ccugaucccauuuuccucuga

SEQ ID NO: 2674075 - RNA, 19 nt, Human
ccugcacagugucccccag

SEQ ID NO: 2674076 - RNA, 20 nt, Human
ccugcacagugucccccagg

SEQ ID NO: 2674077 - RNA, 22 nt, Human
gaaaaugaauaucuauuaauau

SEQ ID NO: 2674078 - RNA, 17 nt, Human
gaaacaagugaaagcau

SEQ ID NO: 2674079 - RNA, 19 nt, Human
gaaacuccacaucugccuu

SEQ ID NO: 2674080 - RNA, 20 nt, Human
gaaacuccacaucugccuua

SEQ ID NO: 2674081 - RNA, 13 nt, Human
gaaacuaaagcaa

SEQ ID NO: 2674082 - RNA, 19 nt, Human
gaaacuaaagcaauagaaa

SEQ ID NO: 2674083 - RNA, 22 nt, Human
gaaacuaaagcaauagaaacaa

SEQ ID NO: 2674084 - RNA, 18 nt, Human
gaaacuccacaucugccu

SEQ ID NO: 2674085 - RNA, 21 nt, Human
gaaaccgaguagaaaauguga

SEQ ID NO: 2674086 - RNA, 23 nt, Human
gaaaccauguagcagugagucau

SEQ ID NO: 2674087 - RNA, 16 nt, Human
gaaaccugggauucag

SEQ ID NO: 2674088 - RNA, 13 nt, Human
gaaagaggaagca

SEQ ID NO: 2674089 - RNA, 16 nt, Human
gaaagaggcaccagga

SEQ ID NO: 2674090 - RNA, 17 nt, Human
gaaagaggcaccaggaa

SEQ ID NO: 2674091 - RNA, 20 nt, Human
gaaagaggcaccaggaagcc

SEQ ID NO: 2674092 - RNA, 21 nt, Human
gaaagaggcaccaggaagccg

SEQ ID NO: 2674093 - RNA, 22 nt, Human
gaaagcagaguuuucauuaaau

SEQ ID NO: 2674094 - RNA, 23 nt, Human
gaaagcauauggguuagauguug

SEQ ID NO: 2674095 - RNA, 17 nt, Human
gaaagcccugagcuuuc

SEQ ID NO: 2674096 - RNA, 22 nt, Human
gaaagcccugagcuuucugcua

SEQ ID NO: 2674097 - RNA, 21 nt, Human
gaaagcccugagcuuucugcu

SEQ ID NO: 2674098 - RNA, 20 nt, Human
gaaagcgcggacgugcuggg

SEQ ID NO: 2674099 - RNA, 19 nt, Human
gaaagcuauauaagacaag

SEQ ID NO: 2674100 - RNA, 17 nt, Human
gaaagcucacuguagcu

SEQ ID NO: 2674101 - RNA, 20 nt, Human
gaaaaugaauaucuauuaau

SEQ ID NO: 2674102 - RNA, 14 nt, Human
gaaaaugaaaugca

SEQ ID NO: 2674103 - RNA, 17 nt, Human
gaaaaugaaaugcauau

SEQ ID NO: 2674104 - RNA, 18 nt, Human
gaaaaugaaaugcauauu

SEQ ID NO: 2674105 - RNA, 22 nt, Human
gaaaaucagccugcuccagcug

SEQ ID NO: 2674106 - RNA, 20 nt, Human
gaaaaucagccugcuccagc

SEQ ID NO: 2674107 - RNA, 15 nt, Human
gaaaauauuguuuua

SEQ ID NO: 2674108 - RNA, 22 nt, Human
gaaaauauuguuuuacaauagu

SEQ ID NO: 2674109 - RNA, 23 nt, Human
gaaaaguggcgugggagccagcc

SEQ ID NO: 2674110 - RNA, 18 nt, Human
gaaaacaguguguaaaca

SEQ ID NO: 2674111 - RNA, 15 nt, Human
gaaaaaggaggaaga

SEQ ID NO: 2674112 - RNA, 12 nt, Human
gaaaaaggagga

SEQ ID NO: 2674113 - RNA, 15 nt, Human
cuuuuuguguuuuuu

SEQ ID NO: 2674114 - RNA, 17 nt, Human
cuuuuuguuguaaaaca

SEQ ID NO: 2674115 - RNA, 12 nt, Human
cuuuuuauuuau

SEQ ID NO: 2674116 - RNA, 13 nt, Human
cuuuuuauuaaaa

SEQ ID NO: 2674117 - RNA, 16 nt, Human
cuuuuuauuaaaauau

SEQ ID NO: 2674118 - RNA, 18 nt, Human
cuuuuuauuaaaauauuu

SEQ ID NO: 2674119 - RNA, 15 nt, Human
cuuuuuaugcuauuu

SEQ ID NO: 2674120 - RNA, 23 nt, Human
cuuuuuaugcuauuucuguauau

SEQ ID NO: 2674121 - RNA, 13 nt, Human
cuuuuuauuuaua

SEQ ID NO: 2674122 - RNA, 17 nt, Human
cuuuuuauuuauaugua

SEQ ID NO: 2674123 - RNA, 14 nt, Human
cuuuuuauuuauau

SEQ ID NO: 2674124 - RNA, 19 nt, Human
cuuuuuauuuauauguacu

SEQ ID NO: 2674125 - RNA, 20 nt, Human
cuuuuuauuuauauguacug

SEQ ID NO: 2674126 - RNA, 19 nt, Human
cuuuuuauuuauauguaug

SEQ ID NO: 2674127 - RNA, 18 nt, Human
cuuuuuauuuauauguau

SEQ ID NO: 2674128 - RNA, 23 nt, Human
cuuggggggcugaggugggagga

SEQ ID NO: 2674129 - RNA, 12 nt, Human
cuugaguuuguc

SEQ ID NO: 2674130 - RNA, 22 nt, Human
cuugaguuguuuuuguauauug

SEQ ID NO: 2674131 - RNA, 21 nt, Human
cuugaguuguuuuuguauauu

SEQ ID NO: 2674132 - RNA, 20 nt, Human
cuugaguuguuuuuguauau

SEQ ID NO: 2674133 - RNA, 19 nt, Human
cuugaguuguuuuuguaua

SEQ ID NO: 2674134 - RNA, 18 nt, Human
cuugaguuguuuuuguau

SEQ ID NO: 2674135 - RNA, 23 nt, Human
cuugaguuguuuuuguauauugg

SEQ ID NO: 2674136 - RNA, 13 nt, Human
cuugaguuugucg

SEQ ID NO: 2674137 - RNA, 14 nt, Human
cuuggggggguggc

SEQ ID NO: 2674138 - RNA, 22 nt, Human
cuuggggggcugaggugggagg

SEQ ID NO: 2674139 - RNA, 16 nt, Human
cuuggggggguggccg

SEQ ID NO: 2674140 - RNA, 18 nt, Human
cuuggggggguggccgcu

SEQ ID NO: 2674141 - RNA, 19 nt, Human
cuuggggggguggccgcug

SEQ ID NO: 2674142 - RNA, 22 nt, Human
cuuggggggguggccgcugagu

SEQ ID NO: 2674143 - RNA, 14 nt, Human
cuuguauaaauuau

SEQ ID NO: 2674144 - RNA, 21 nt, Human
cuuguauagcaugaaauaaaa

SEQ ID NO: 2674145 - RNA, 20 nt, Human
cuuguaguucuuuaaacugu

SEQ ID NO: 2674146 - RNA, 15 nt, Human
cuuguaguucuuuaa

SEQ ID NO: 2674147 - RNA, 13 nt, Human
cuuguaguucuuu

SEQ ID NO: 2674148 - RNA, 13 nt, Human
cuuuacugccuga

SEQ ID NO: 2674149 - RNA, 18 nt, Human
cuuuacugccugaauaaa

SEQ ID NO: 2674150 - RNA, 19 nt, Human
cuuuacugccugaauaaag

SEQ ID NO: 2674151 - RNA, 23 nt, Human
cuuuacugccugaauaaagagcc

SEQ ID NO: 2674152 - RNA, 16 nt, Human
cuuuaaaaggaaagaa

SEQ ID NO: 2674153 - RNA, 17 nt, Human
cuuuaaaaggaaagaaa

SEQ ID NO: 2674154 - RNA, 14 nt, Human
cuuuaaaauauugu

SEQ ID NO: 2674155 - RNA, 18 nt, Human
cuuuaaaaggaaagaaaa

SEQ ID NO: 2674156 - RNA, 14 nt, Human
cuuuaaaagugauc

SEQ ID NO: 2674157 - RNA, 16 nt, Human
cuuguucaucauccag

SEQ ID NO: 2674158 - RNA, 22 nt, Human
cuuguucaucauccagaugugg

SEQ ID NO: 2674159 - RNA, 16 nt, Human
cuuguuauucaacagc

SEQ ID NO: 2674160 - RNA, 12 nt, Human
cuuuaugugaau

SEQ ID NO: 2674161 - RNA, 13 nt, Human
cuuuaugugaauu

SEQ ID NO: 2674162 - RNA, 14 nt, Human
cuuuaugugaauuu

SEQ ID NO: 2674163 - RNA, 15 nt, Human
cuuuaugugaauuuu

SEQ ID NO: 2674164 - RNA, 17 nt, Human
cuuuaugugaauuuuua

SEQ ID NO: 2674165 - RNA, 22 nt, Human
cuuuccaggcuauguauaaaau

SEQ ID NO: 2674166 - RNA, 23 nt, Human
cuuuccaggcuauguauaaaaua

SEQ ID NO: 2674167 - RNA, 11 nt, Human
cuuucccucac

SEQ ID NO: 2674168 - RNA, 14 nt, Human
cuuucccucacccc

SEQ ID NO: 2674169 - RNA, 16 nt, Human
cuuucccucacccccu

SEQ ID NO: 2674170 - RNA, 18 nt, Human
cuuucccucacccccucc

SEQ ID NO: 2674171 - RNA, 19 nt, Human
cuuucccucacccccuccc

SEQ ID NO: 2674172 - RNA, 16 nt, Human
cuuugucaaaaggaag

SEQ ID NO: 2674173 - RNA, 22 nt, Human
cuuuguauuguccuauuagugu

SEQ ID NO: 2674174 - RNA, 13 nt, Human
cuuuguauuuuga

SEQ ID NO: 2674175 - RNA, 17 nt, Human
cuuuguauuuugauuau

SEQ ID NO: 2674176 - RNA, 18 nt, Human
cuuuguauuuugauuauu

SEQ ID NO: 2674177 - RNA, 22 nt, Human
cuuuguauuguauauuacaaug

SEQ ID NO: 2674178 - RNA, 16 nt, Human
cuuuguauuguccuau

SEQ ID NO: 2674179 - RNA, 15 nt, Human
cuuuguauuguccua

SEQ ID NO: 2674180 - RNA, 12 nt, Human
cuuuguauuguc

SEQ ID NO: 2674181 - RNA, 13 nt, Human
cuucaaagccuuc

SEQ ID NO: 2674182 - RNA, 15 nt, Human
cuucaaagccuucuc

SEQ ID NO: 2674183 - RNA, 18 nt, Human
cuuauuuggcgugacccg

SEQ ID NO: 2674184 - RNA, 15 nt, Human
cuucacaguagagcc

SEQ ID NO: 2674185 - RNA, 17 nt, Human
cuucacaguagagccag

SEQ ID NO: 2674186 - RNA, 16 nt, Human
cuucaccaucaauccu

SEQ ID NO: 2674187 - RNA, 17 nt, Human
cuucaccaucaauccug

SEQ ID NO: 2674188 - RNA, 20 nt, Human
cuucaccaucaauccugauu

SEQ ID NO: 2674189 - RNA, 19 nt, Human
cuucaccauggccuuauga

SEQ ID NO: 2674190 - RNA, 14 nt, Human
cuucacacagacac

SEQ ID NO: 2674191 - RNA, 19 nt, Human
cuucacacagaccccucgc

SEQ ID NO: 2674192 - RNA, 13 nt, Human
cuguucugguaau

SEQ ID NO: 2674193 - RNA, 21 nt, Human
cuuauaucuggccucugcuuu

SEQ ID NO: 2674194 - RNA, 16 nt, Human
cuuauaucuggccucu

SEQ ID NO: 2674195 - RNA, 22 nt, Human
cuuauaucuggccucugcuuuc

SEQ ID NO: 2674196 - RNA, 17 nt, Human
cuuauaugggaaaccau

SEQ ID NO: 2674197 - RNA, 17 nt, Human
cuuaguuuguguguugu

SEQ ID NO: 2674198 - RNA, 22 nt, Human
cuuaguuuguguguugucucuu

SEQ ID NO: 2674199 - RNA, 14 nt, Human
cuuauaaaacagag

SEQ ID NO: 2674200 - RNA, 12 nt, Human
cuuauaaaacag

SEQ ID NO: 2674201 - RNA, 23 nt, Human
cuuaguuuguguguugucucuug

SEQ ID NO: 2674202 - RNA, 15 nt, Human
cuuauaaaacagagu

SEQ ID NO: 2674203 - RNA, 15 nt, Human
cuucacccuggagcc

SEQ ID NO: 2674204 - RNA, 18 nt, Human
cuucacaguagagccagc

SEQ ID NO: 2674205 - RNA, 23 nt, Human
cuucaguaagccgugauuuucau

SEQ ID NO: 2674206 - RNA, 16 nt, Human
cuucaguaagccguga

SEQ ID NO: 2674207 - RNA, 15 nt, Human
cuucaguaagccgug

SEQ ID NO: 2674208 - RNA, 13 nt, Human
cuuccaggaaacu

SEQ ID NO: 2674209 - RNA, 22 nt, Human
cuuccaggaaacuccacaucug

SEQ ID NO: 2674210 - RNA, 23 nt, Human
cuuccaggaaacuccacaucugc

SEQ ID NO: 2674211 - RNA, 17 nt, Human
cuuccaggaaacuccac

SEQ ID NO: 2674212 - RNA, 18 nt, Human
cuuccaggaaacuccaca

SEQ ID NO: 2674213 - RNA, 19 nt, Human
cuuccaggaaacuccacau

SEQ ID NO: 2674214 - RNA, 21 nt, Human
cuuccaggaaacuccacaucu

SEQ ID NO: 2674215 - RNA, 12 nt, Human
cuuccccucacu

SEQ ID NO: 2674216 - RNA, 18 nt, Human
cuuccccggagggcugcg

SEQ ID NO: 2674217 - RNA, 17 nt, Human
cuucccuacaguugaaa

SEQ ID NO: 2674218 - RNA, 12 nt, Human
cuucccuaaucu

SEQ ID NO: 2674219 - RNA, 18 nt, Human
cuugaaaagagacaggca

SEQ ID NO: 2674220 - RNA, 15 nt, Human
cuugaaaagagacag

SEQ ID NO: 2674221 - RNA, 21 nt, Human
cuugaaaagagacaggcaggu

SEQ ID NO: 2674222 - RNA, 17 nt, Human
cuucuuuaauugaucua

SEQ ID NO: 2674223 - RNA, 16 nt, Human
cuugaaacuuugggaa

SEQ ID NO: 2674224 - RNA, 18 nt, Human
cuugaaacuuugggaaaa

SEQ ID NO: 2674225 - RNA, 23 nt, Human
cuugaaacuuugggaaaacaugu

SEQ ID NO: 2674226 - RNA, 18 nt, Human
cuugaacauguuuuguau

SEQ ID NO: 2674227 - RNA, 21 nt, Human
cuucugugcccagaauacuga

SEQ ID NO: 2674228 - RNA, 20 nt, Human
cuucugugcccagaauacug

SEQ ID NO: 2674229 - RNA, 17 nt, Human
cuucugugaugagcuga

SEQ ID NO: 2674230 - RNA, 19 nt, Human
cuucugugcccagaauacu

SEQ ID NO: 2674231 - RNA, 14 nt, Human
cuucugugcccaga

SEQ ID NO: 2674232 - RNA, 15 nt, Human
cuucugugaugagcu

SEQ ID NO: 2674233 - RNA, 16 nt, Human
cuucugugaugagcug

SEQ ID NO: 2674234 - RNA, 19 nt, Human
cuucugugaugagcugauc

SEQ ID NO: 2674235 - RNA, 14 nt, Human
cuucugugaugagc

SEQ ID NO: 2674236 - RNA, 12 nt, Human
cuucuuuaaaca

SEQ ID NO: 2674237 - RNA, 16 nt, Human
cuucuugccucugugc

SEQ ID NO: 2674238 - RNA, 17 nt, Human
cuucuugccucugugcu

SEQ ID NO: 2674239 - RNA, 18 nt, Human
cuucuugccucugugcug

SEQ ID NO: 2674240 - RNA, 11 nt, Human
cuucuugggau

SEQ ID NO: 2674241 - RNA, 18 nt, Human
cuucuuggggcccagugc

SEQ ID NO: 2674242 - RNA, 19 nt, Human
cuucuuggggcccagugca

SEQ ID NO: 2674243 - RNA, 21 nt, Human
cuucuuggggcccagugcaug

SEQ ID NO: 2674244 - RNA, 22 nt, Human
cuucuuggggcccagugcaugg

SEQ ID NO: 2674245 - RNA, 23 nt, Human
cuucuuggggcccagugcauggu

SEQ ID NO: 2674246 - RNA, 24 nt, Human
cuucuuggggcccagugcauggug

SEQ ID NO: 2674247 - RNA, 11 nt, Human
cuucuguguuu

SEQ ID NO: 2674248 - RNA, 14 nt, Human
cuucuguguuuaua

SEQ ID NO: 2674249 - RNA, 23 nt, Human
cuucugugcccagaauacugaug

SEQ ID NO: 2674250 - RNA, 13 nt, Human
cuucuugccucug

SEQ ID NO: 2674251 - RNA, 15 nt, Human
cuucuugccucugug

SEQ ID NO: 2674252 - RNA, 21 nt, Human
cuugaguugauucagcucugc

SEQ ID NO: 2674253 - RNA, 14 nt, Human
cuugagcuggccuc

SEQ ID NO: 2674254 - RNA, 16 nt, Human
cuugagcuggccucuc

SEQ ID NO: 2674255 - RNA, 17 nt, Human
cuugagcuggccucucu

SEQ ID NO: 2674256 - RNA, 23 nt, Human
cuugagcuggccucucuagcaca

SEQ ID NO: 2674257 - RNA, 13 nt, Human
cuugagcuggccu

SEQ ID NO: 2674258 - RNA, 12 nt, Human
cuugagcuggcc

SEQ ID NO: 2674259 - RNA, 16 nt, Human
cuugagccugggaggu

SEQ ID NO: 2674260 - RNA, 14 nt, Human
cuugaccugaggcu

SEQ ID NO: 2674261 - RNA, 23 nt, Human
cuugaccugaggcuguggucaca

SEQ ID NO: 2674262 - RNA, 17 nt, Human
cuugaccugaggcugug

SEQ ID NO: 2674263 - RNA, 20 nt, Human
cuugaccugaggcugugguc

SEQ ID NO: 2674264 - RNA, 17 nt, Human
cuugaaccauaaaaugu

SEQ ID NO: 2674265 - RNA, 14 nt, Human
cuugaaccauaaaa

SEQ ID NO: 2674266 - RNA, 12 nt, Human
cuugaagaacug

SEQ ID NO: 2674267 - RNA, 17 nt, Human
cuugaagaacugcaggc

SEQ ID NO: 2674268 - RNA, 18 nt, Human
cuugaagaacugcaggcc

SEQ ID NO: 2674269 - RNA, 20 nt, Human
cuugaagaacugcaggcccu

SEQ ID NO: 2674270 - RNA, 22 nt, Human
cuugaagaacugcaggcccugg

SEQ ID NO: 2674271 - RNA, 15 nt, Human
cuucugguacuuucu

SEQ ID NO: 2674272 - RNA, 22 nt, Human
cuucuguauuuuuuuuucuaag

SEQ ID NO: 2674273 - RNA, 20 nt, Human
cuucuguauuuuuuuuucua

SEQ ID NO: 2674274 - RNA, 21 nt, Human
cuucucugacuucugccugga

SEQ ID NO: 2674275 - RNA, 12 nt, Human
cuucugccugca

SEQ ID NO: 2674276 - RNA, 13 nt, Human
cuucugccuggag

SEQ ID NO: 2674277 - RNA, 14 nt, Human
cuucugccuggaga

SEQ ID NO: 2674278 - RNA, 15 nt, Human
cuucugccuggagac

SEQ ID NO: 2674279 - RNA, 16 nt, Human
cuucugccuggagacu

SEQ ID NO: 2674280 - RNA, 21 nt, Human
cuucuggggcaggcugggcca

SEQ ID NO: 2674281 - RNA, 22 nt, Human
cuucuggggcaggcugggccau

SEQ ID NO: 2674282 - RNA, 15 nt, Human
cuucuggggcaggcu

SEQ ID NO: 2674283 - RNA, 16 nt, Human
cuucuggggcaggcug

SEQ ID NO: 2674284 - RNA, 19 nt, Human
cuucuggggcaggcugggc

SEQ ID NO: 2674285 - RNA, 20 nt, Human
cuucuggggcaggcugggcc

SEQ ID NO: 2674286 - RNA, 14 nt, Human
cuucuggggcaggc

SEQ ID NO: 2674287 - RNA, 13 nt, Human
cuucucuccuccc

SEQ ID NO: 2674288 - RNA, 15 nt, Human
cuucucuccucccca

SEQ ID NO: 2674289 - RNA, 12 nt, Human
cuucucugacuu

SEQ ID NO: 2674290 - RNA, 14 nt, Human
cuucucugacuucu

SEQ ID NO: 2674291 - RNA, 15 nt, Human
cuucucugacuucug

SEQ ID NO: 2674292 - RNA, 16 nt, Human
cuucucugacuucugc

SEQ ID NO: 2674293 - RNA, 20 nt, Human
cuucugccauuucugagauc

SEQ ID NO: 2674294 - RNA, 17 nt, Human
cuucucugacuucugcc

SEQ ID NO: 2674295 - RNA, 20 nt, Human
cuucucugacuucugccugg

SEQ ID NO: 2674296 - RNA, 23 nt, Human
cuucuccuacauaucccuuccag

SEQ ID NO: 2674297 - RNA, 16 nt, Human
cuucucccuagcuccu

SEQ ID NO: 2674298 - RNA, 19 nt, Human
cuucucccuagcuccuccc

SEQ ID NO: 2674299 - RNA, 12 nt, Human
cuucuccgccag

SEQ ID NO: 2674300 - RNA, 13 nt, Human
cuucuccgccagc

SEQ ID NO: 2674301 - RNA, 14 nt, Human
cuucuccgccagcc

SEQ ID NO: 2674302 - RNA, 15 nt, Human
cuucuccgccagccu

SEQ ID NO: 2674303 - RNA, 16 nt, Human
cuucuccgccagccuc

SEQ ID NO: 2674304 - RNA, 17 nt, Human
cuucuccgccagccucc

SEQ ID NO: 2674305 - RNA, 18 nt, Human
cuucuccgccagccuccu

SEQ ID NO: 2674306 - RNA, 19 nt, Human
cuucuccgccagccuccuc

SEQ ID NO: 2674307 - RNA, 21 nt, Human
cuucuccgccagccuccucug

SEQ ID NO: 2674308 - RNA, 23 nt, Human
cuucuccgccagccuccucugga

SEQ ID NO: 2674309 - RNA, 24 nt, Human
cuucuccgccagccuccucuggac

SEQ ID NO: 2674310 - RNA, 20 nt, Human
cugccgguuugaaaauaugc

SEQ ID NO: 2674311 - RNA, 14 nt, Human
cugccgguuugaaa

SEQ ID NO: 2674312 - RNA, 16 nt, Human
cugccgucaccaccac

SEQ ID NO: 2674313 - RNA, 18 nt, Human
cugccgucaccaccaccc

SEQ ID NO: 2674314 - RNA, 19 nt, Human
cugccgucaccaccacccc

SEQ ID NO: 2674315 - RNA, 20 nt, Human
cugccgucaccaccaccccu

SEQ ID NO: 2674316 - RNA, 22 nt, Human
cugccgucaccaccaccccuac

SEQ ID NO: 2674317 - RNA, 13 nt, Human
cugccguggggcc

SEQ ID NO: 2674318 - RNA, 17 nt, Human
cugccgugccgccugca

SEQ ID NO: 2674319 - RNA, 19 nt, Human
cugccgugccgccugcacu

SEQ ID NO: 2674320 - RNA, 20 nt, Human
cugccguggggccgccgccu

SEQ ID NO: 2674321 - RNA, 21 nt, Human
cugccguggggccgccgccuc

SEQ ID NO: 2674322 - RNA, 14 nt, Human
cugccgucucugga

SEQ ID NO: 2674323 - RNA, 15 nt, Human
cugccgucucuggag

SEQ ID NO: 2674324 - RNA, 17 nt, Human
cugccgucucuggagcg

SEQ ID NO: 2674325 - RNA, 15 nt, Human
cugccgugccgccug

SEQ ID NO: 2674326 - RNA, 13 nt, Human
cugcccuugggcc

SEQ ID NO: 2674327 - RNA, 12 nt, Human
cugcccuugggc

SEQ ID NO: 2674328 - RNA, 15 nt, Human
cugcccuuccgcagu

SEQ ID NO: 2674329 - RNA, 18 nt, Human
cugcccuuccgcagugug

SEQ ID NO: 2674330 - RNA, 16 nt, Human
cugcccuggcugcugc

SEQ ID NO: 2674331 - RNA, 12 nt, Human
cugcccuggcug

SEQ ID NO: 2674332 - RNA, 14 nt, Human
cugcccuggcugcu

SEQ ID NO: 2674333 - RNA, 15 nt, Human
cugccucuucucuac

SEQ ID NO: 2674334 - RNA, 14 nt, Human
cugccucuuucccu

SEQ ID NO: 2674335 - RNA, 18 nt, Human
cugccucuuucccuagga

SEQ ID NO: 2674336 - RNA, 19 nt, Human
cugccucuuucccuaggaa

SEQ ID NO: 2674337 - RNA, 14 nt, Human
cugccuuggcucag

SEQ ID NO: 2674338 - RNA, 22 nt, Human
cugccuuggcucagacauguuu

SEQ ID NO: 2674339 - RNA, 18 nt, Human
cugccuuggcucagacau

SEQ ID NO: 2674340 - RNA, 17 nt, Human
cugccuuggcucagaca

SEQ ID NO: 2674341 - RNA, 15 nt, Human
cugccuuggcucaga

SEQ ID NO: 2674342 - RNA, 13 nt, Human
cugccucccaugc

SEQ ID NO: 2674343 - RNA, 12 nt, Human
cugccuggccuu

SEQ ID NO: 2674344 - RNA, 15 nt, Human
cugccuggcccccaa

SEQ ID NO: 2674345 - RNA, 19 nt, Human
cugccuggcccccaaccuc

SEQ ID NO: 2674346 - RNA, 22 nt, Human
cugccuggcccccaaccucagg

SEQ ID NO: 2674347 - RNA, 23 nt, Human
cugccuggcccccaaccucaggg

SEQ ID NO: 2674348 - RNA, 11 nt, Human
cugccuggccc

SEQ ID NO: 2674349 - RNA, 12 nt, Human
cugccuggcccc

SEQ ID NO: 2674350 - RNA, 12 nt, Human
cugccucccacu

SEQ ID NO: 2674351 - RNA, 14 nt, Human
cugccucccacuuc

SEQ ID NO: 2674352 - RNA, 15 nt, Human
cugccucccacuuca

SEQ ID NO: 2674353 - RNA, 18 nt, Human
cugccucccacuucacug

SEQ ID NO: 2674354 - RNA, 22 nt, Human
cugccgugccgccugcacuccu

SEQ ID NO: 2674355 - RNA, 21 nt, Human
cugcugcagagcaguaaggga

SEQ ID NO: 2674356 - RNA, 15 nt, Human
cugcugcagagcagu

SEQ ID NO: 2674357 - RNA, 14 nt, Human
cugcugcagagcag

SEQ ID NO: 2674358 - RNA, 14 nt, Human
cugcugcccccacc

SEQ ID NO: 2674359 - RNA, 15 nt, Human
cugcugcccccaccc

SEQ ID NO: 2674360 - RNA, 22 nt, Human
cugcugcccccaccccggggac

SEQ ID NO: 2674361 - RNA, 21 nt, Human
cugcugcccccaccccgggga

SEQ ID NO: 2674362 - RNA, 21 nt, Human
cugcugcaugcccucucaggc

SEQ ID NO: 2674363 - RNA, 17 nt, Human
cugcugcaugcccucuc

SEQ ID NO: 2674364 - RNA, 14 nt, Human
cugcugcaugcccu

SEQ ID NO: 2674365 - RNA, 16 nt, Human
cugcugcaugcccucu

SEQ ID NO: 2674366 - RNA, 15 nt, Human
cugcugcaugcccuc

SEQ ID NO: 2674367 - RNA, 20 nt, Human
cugcgacuuucugccuggag

SEQ ID NO: 2674368 - RNA, 18 nt, Human
cugcgacuuucugccugg

SEQ ID NO: 2674369 - RNA, 19 nt, Human
cugcgacuuucugccugga

SEQ ID NO: 2674370 - RNA, 19 nt, Human
cugcuccagcuguucagcu

SEQ ID NO: 2674371 - RNA, 20 nt, Human
cugcuccagcuguucagcug

SEQ ID NO: 2674372 - RNA, 14 nt, Human
cugcgacuuucugc

SEQ ID NO: 2674373 - RNA, 16 nt, Human
cugcgacuuucugccu

SEQ ID NO: 2674374 - RNA, 17 nt, Human
cugcgacuuucugccug

SEQ ID NO: 2674375 - RNA, 13 nt, Human
cugcgacccuggg

SEQ ID NO: 2674376 - RNA, 14 nt, Human
cugcgacccugggg

SEQ ID NO: 2674377 - RNA, 15 nt, Human
cugcgacccuggggg

SEQ ID NO: 2674378 - RNA, 21 nt, Human
cugcgacccugggggcacagg

SEQ ID NO: 2674379 - RNA, 22 nt, Human
cugcgacccugggggcacagga

SEQ ID NO: 2674380 - RNA, 13 nt, Human
cugcuggggaucc

SEQ ID NO: 2674381 - RNA, 14 nt, Human
cugcuggggauccc

SEQ ID NO: 2674382 - RNA, 14 nt, Human
cugcuggcacccac

SEQ ID NO: 2674383 - RNA, 16 nt, Human
cugcuggcacccaccg

SEQ ID NO: 2674384 - RNA, 17 nt, Human
cugcuggcacccaccgu

SEQ ID NO: 2674385 - RNA, 16 nt, Human
cugcugcuacaauguc

SEQ ID NO: 2674386 - RNA, 21 nt, Human
cuggcacuggaugcagaaaca

SEQ ID NO: 2674387 - RNA, 17 nt, Human
cuggcacuggaccccag

SEQ ID NO: 2674388 - RNA, 19 nt, Human
cuggcacuggaccccagca

SEQ ID NO: 2674389 - RNA, 18 nt, Human
cuggcacuggaccccagc

SEQ ID NO: 2674390 - RNA, 15 nt, Human
cuggcccacugcauc

SEQ ID NO: 2674391 - RNA, 22 nt, Human
cuggccaguccaggcugccgug

SEQ ID NO: 2674392 - RNA, 23 nt, Human
cuggccaguccaggcugccgugg

SEQ ID NO: 2674393 - RNA, 18 nt, Human
cuggccaguccaggcugc

SEQ ID NO: 2674394 - RNA, 16 nt, Human
cuggcaguccguggga

SEQ ID NO: 2674395 - RNA, 19 nt, Human
cuggcaguccgugggacgg

SEQ ID NO: 2674396 - RNA, 20 nt, Human
cuggcaucgcaccauucuga

SEQ ID NO: 2674397 - RNA, 22 nt, Human
cuggcaucgcaccauucugacu

SEQ ID NO: 2674398 - RNA, 17 nt, Human
cuggcaucgcaccauuc

SEQ ID NO: 2674399 - RNA, 18 nt, Human
cuggcaucgcaccauucu

SEQ ID NO: 2674400 - RNA, 19 nt, Human
cuggcaucgcaccauucug

SEQ ID NO: 2674401 - RNA, 19 nt, Human
cuggccaguccaggcugcc

SEQ ID NO: 2674402 - RNA, 21 nt, Human
cuggccaguccaggcugccgu

SEQ ID NO: 2674403 - RNA, 13 nt, Human
cuggccagaaugc

SEQ ID NO: 2674404 - RNA, 12 nt, Human
cuggccccagcc

SEQ ID NO: 2674405 - RNA, 14 nt, Human
cuggccccagcccu

SEQ ID NO: 2674406 - RNA, 15 nt, Human
cuggccccagcccug

SEQ ID NO: 2674407 - RNA, 16 nt, Human
cuggccccagcccugc

SEQ ID NO: 2674408 - RNA, 18 nt, Human
cuggccccagcccugcug

SEQ ID NO: 2674409 - RNA, 19 nt, Human
cuggccccagcccugcugg

SEQ ID NO: 2674410 - RNA, 23 nt, Human
cuggccccagcccugcuggggau

SEQ ID NO: 2674411 - RNA, 15 nt, Human
cuggccuuguccuca

SEQ ID NO: 2674412 - RNA, 19 nt, Human
cuggccuuguccucagcca

SEQ ID NO: 2674413 - RNA, 21 nt, Human
cuggccuuguccucagccagu

SEQ ID NO: 2674414 - RNA, 17 nt, Human
cuggcugagguuccucu

SEQ ID NO: 2674415 - RNA, 19 nt, Human
cuggcugagguuccucugc

SEQ ID NO: 2674416 - RNA, 20 nt, Human
cuggcugagguuccucugcc

SEQ ID NO: 2674417 - RNA, 21 nt, Human
cuggcugagguuccucugccu

SEQ ID NO: 2674418 - RNA, 22 nt, Human
cuggcugagguuccucugccug

SEQ ID NO: 2674419 - RNA, 23 nt, Human
cuggcugagguuccucugccugc

SEQ ID NO: 2674420 - RNA, 14 nt, Human
cuggagcccuaacc

SEQ ID NO: 2674421 - RNA, 22 nt, Human
cuggagcccuaaccccuuccag

SEQ ID NO: 2674422 - RNA, 23 nt, Human
cuggagauccuccugcagaccac

SEQ ID NO: 2674423 - RNA, 18 nt, Human
cuggagauccuccugcag

SEQ ID NO: 2674424 - RNA, 20 nt, Human
cuggagauccuccugcagac

SEQ ID NO: 2674425 - RNA, 14 nt, Human
cuggagauccuccu

SEQ ID NO: 2674426 - RNA, 15 nt, Human
cuggagauccuccug

SEQ ID NO: 2674427 - RNA, 16 nt, Human
cuggagauccuccugc

SEQ ID NO: 2674428 - RNA, 17 nt, Human
cuggagauccuccugca

SEQ ID NO: 2674429 - RNA, 13 nt, Human
cuggagucuccug

SEQ ID NO: 2674430 - RNA, 15 nt, Human
cuggagucuccugag

SEQ ID NO: 2674431 - RNA, 16 nt, Human
cuggagucuccugagg

SEQ ID NO: 2674432 - RNA, 17 nt, Human
cuggagguugaagccaa

SEQ ID NO: 2674433 - RNA, 19 nt, Human
cuggagguugaagccaagu

SEQ ID NO: 2674434 - RNA, 13 nt, Human
cuggaggggaggg

SEQ ID NO: 2674435 - RNA, 16 nt, Human
cuggagguugaagcca

SEQ ID NO: 2674436 - RNA, 15 nt, Human
cugcuuccuccugga

SEQ ID NO: 2674437 - RNA, 16 nt, Human
cugcuuccuccuggaa

SEQ ID NO: 2674438 - RNA, 15 nt, Human
cugcuucccuuacuu

SEQ ID NO: 2674439 - RNA, 20 nt, Human
cugcuucccuuacuuugcug

SEQ ID NO: 2674440 - RNA, 21 nt, Human
cugcuucccuuacuuugcuga

SEQ ID NO: 2674441 - RNA, 12 nt, Human
cugcuuccuccu

SEQ ID NO: 2674442 - RNA, 13 nt, Human
cugcuuccuccug

SEQ ID NO: 2674443 - RNA, 14 nt, Human
cugcuuccuccugg

SEQ ID NO: 2674444 - RNA, 12 nt, Human
cuggaccccagc

SEQ ID NO: 2674445 - RNA, 14 nt, Human
cuggacggcaggcu

SEQ ID NO: 2674446 - RNA, 20 nt, Human
cuggacggcaggcucacugc

SEQ ID NO: 2674447 - RNA, 21 nt, Human
cuggacggcaggcucacugcc

SEQ ID NO: 2674448 - RNA, 15 nt, Human
cuggaccuguauauu

SEQ ID NO: 2674449 - RNA, 16 nt, Human
cuggaccuguauauuu

SEQ ID NO: 2674450 - RNA, 13 nt, Human
cuggacggcaggc

SEQ ID NO: 2674451 - RNA, 16 nt, Human
cuggacccuuauaaaa

SEQ ID NO: 2674452 - RNA, 17 nt, Human
cuggacccuuauaaaau

SEQ ID NO: 2674453 - RNA, 18 nt, Human
cuggacccuuauaaaauc

SEQ ID NO: 2674454 - RNA, 15 nt, Human
cuggacccuguggau

SEQ ID NO: 2674455 - RNA, 16 nt, Human
cuguauauuuguaaag

SEQ ID NO: 2674456 - RNA, 19 nt, Human
cuguauauuuguaaagcua

SEQ ID NO: 2674457 - RNA, 20 nt, Human
cuguauauuuguaaagcuau

SEQ ID NO: 2674458 - RNA, 13 nt, Human
cuguauacagugc

SEQ ID NO: 2674459 - RNA, 21 nt, Human
cuguauacagugcagagccuu

SEQ ID NO: 2674460 - RNA, 22 nt, Human
cuguauacagugcagagccuuc

SEQ ID NO: 2674461 - RNA, 22 nt, Human
cuguagucccagcuacucggga

SEQ ID NO: 2674462 - RNA, 14 nt, Human
cuguagucccagcu

SEQ ID NO: 2674463 - RNA, 21 nt, Human
cuguauuuuauuuagacaaga

SEQ ID NO: 2674464 - RNA, 22 nt, Human
cuguauuuuauuuagacaagag

SEQ ID NO: 2674465 - RNA, 16 nt, Human
cuguaucauuuucuuu

SEQ ID NO: 2674466 - RNA, 20 nt, Human
cuguaugaaaaauuggggag

SEQ ID NO: 2674467 - RNA, 21 nt, Human
cuguaugaaaaauuggggagg

SEQ ID NO: 2674468 - RNA, 16 nt, Human
cugucaaugagagcau

SEQ ID NO: 2674469 - RNA, 22 nt, Human
cugucaaugagagcauaauuua

SEQ ID NO: 2674470 - RNA, 15 nt, Human
cugucaaugggaccu

SEQ ID NO: 2674471 - RNA, 19 nt, Human
cugucaaugggaccugugg

SEQ ID NO: 2674472 - RNA, 14 nt, Human
cugucaaaugaugu

SEQ ID NO: 2674473 - RNA, 18 nt, Human
cugucaaaugaugugcaa

SEQ ID NO: 2674474 - RNA, 15 nt, Human
cuguccccgcagccc

SEQ ID NO: 2674475 - RNA, 14 nt, Human
cuguccgagcuuug

SEQ ID NO: 2674476 - RNA, 13 nt, Human
cugucccugcgcc

SEQ ID NO: 2674477 - RNA, 11 nt, Human
cugucccugcg

SEQ ID NO: 2674478 - RNA, 17 nt, Human
cuguccccgcagcccug

SEQ ID NO: 2674479 - RNA, 23 nt, Human
cuguccccgcagcccuggcaggg

SEQ ID NO: 2674480 - RNA, 15 nt, Human
cuguccgagcuuuga

SEQ ID NO: 2674481 - RNA, 18 nt, Human
cugucccugcgccuuucc

SEQ ID NO: 2674482 - RNA, 18 nt, Human
cugucucaaaaaaagaaa

SEQ ID NO: 2674483 - RNA, 16 nt, Human
cugucucaaaaaaaga

SEQ ID NO: 2674484 - RNA, 15 nt, Human
cuguacaaaagcaau

SEQ ID NO: 2674485 - RNA, 20 nt, Human
cuguaauccuagcacuuugg

SEQ ID NO: 2674486 - RNA, 18 nt, Human
cuguaaucauuuguuuac

SEQ ID NO: 2674487 - RNA, 20 nt, Human
cuguaaucauuuguuuacau

SEQ ID NO: 2674488 - RNA, 12 nt, Human
cuguaauaauag

SEQ ID NO: 2674489 - RNA, 20 nt, Human
cuguaaucgcccuacuauuc

SEQ ID NO: 2674490 - RNA, 15 nt, Human
cugguccgugggacg

SEQ ID NO: 2674491 - RNA, 16 nt, Human
cugguccgugggacgg

SEQ ID NO: 2674492 - RNA, 17 nt, Human
cuggugcugcagcaccg

SEQ ID NO: 2674493 - RNA, 19 nt, Human
cugguccgugggacggugc

SEQ ID NO: 2674494 - RNA, 21 nt, Human
cugguccgugggacggugccc

SEQ ID NO: 2674495 - RNA, 14 nt, Human
cuggggggacccag

SEQ ID NO: 2674496 - RNA, 16 nt, Human
cuggggggacccagug

SEQ ID NO: 2674497 - RNA, 17 nt, Human
cuggggggacccagugc

SEQ ID NO: 2674498 - RNA, 18 nt, Human
cuggggggacccagugca

SEQ ID NO: 2674499 - RNA, 19 nt, Human
cuggggggacccagugcag

SEQ ID NO: 2674500 - RNA, 20 nt, Human
cuggggggacccagugcaga

SEQ ID NO: 2674501 - RNA, 21 nt, Human
cuggggggacccagugcagaa

SEQ ID NO: 2674502 - RNA, 20 nt, Human
cugggggacccaauguagga

SEQ ID NO: 2674503 - RNA, 15 nt, Human
cugggggaagaagcu

SEQ ID NO: 2674504 - RNA, 13 nt, Human
cugggggcacagg

SEQ ID NO: 2674505 - RNA, 14 nt, Human
cugggggcacagga

SEQ ID NO: 2674506 - RNA, 19 nt, Human
cugggggcacaggaggcag

SEQ ID NO: 2674507 - RNA, 17 nt, Human
cugggggcaacuggcca

SEQ ID NO: 2674508 - RNA, 13 nt, Human
cugggcuuggccu

SEQ ID NO: 2674509 - RNA, 13 nt, Human
cugggggaagaag

SEQ ID NO: 2674510 - RNA, 15 nt, Human
cuggggcugcuguga

SEQ ID NO: 2674511 - RNA, 20 nt, Human
cugggcuuggccugcuguga

SEQ ID NO: 2674512 - RNA, 14 nt, Human
cugggcuuggccug

SEQ ID NO: 2674513 - RNA, 15 nt, Human
cugggcuuggccugc

SEQ ID NO: 2674514 - RNA, 16 nt, Human
cugggcuuggccugcu

SEQ ID NO: 2674515 - RNA, 17 nt, Human
cugggcuuggccugcug

SEQ ID NO: 2674516 - RNA, 18 nt, Human
cugggcuuggccugcugu

SEQ ID NO: 2674517 - RNA, 16 nt, Human
cugguacaacggaggc

SEQ ID NO: 2674518 - RNA, 18 nt, Human
cugguacaacggaggccu

SEQ ID NO: 2674519 - RNA, 19 nt, Human
cugguacaacggaggccug

SEQ ID NO: 2674520 - RNA, 20 nt, Human
cuggguaacuagggaagaua

SEQ ID NO: 2674521 - RNA, 22 nt, Human
cuggguaacuagggaagauaau

SEQ ID NO: 2674522 - RNA, 16 nt, Human
cuguguuuauaaaaua

SEQ ID NO: 2674523 - RNA, 17 nt, Human
cuguguuuauaaaauau

SEQ ID NO: 2674524 - RNA, 19 nt, Human
cuguguuuauaaaauauaa

SEQ ID NO: 2674525 - RNA, 18 nt, Human
cuguguuuuauaaaauag

SEQ ID NO: 2674526 - RNA, 21 nt, Human
cugugugugugugugugcgug

SEQ ID NO: 2674527 - RNA, 23 nt, Human
cugugugugugugugugcgugug

SEQ ID NO: 2674528 - RNA, 23 nt, Human
cugugggcuacaugcugggguca

SEQ ID NO: 2674529 - RNA, 20 nt, Human
cuguucccauguagcccccu

SEQ ID NO: 2674530 - RNA, 21 nt, Human
cuguucagcugguugagguuu

SEQ ID NO: 2674531 - RNA, 19 nt, Human
cuguucagcugguugaggu

SEQ ID NO: 2674532 - RNA, 18 nt, Human
cuguucagcugguugagg

SEQ ID NO: 2674533 - RNA, 16 nt, Human
cuguucaguaauaaaa

SEQ ID NO: 2674534 - RNA, 14 nt, Human
cuguuacugggccc

SEQ ID NO: 2674535 - RNA, 15 nt, Human
cuguuacugggcccu

SEQ ID NO: 2674536 - RNA, 16 nt, Human
cuguuacugggcccug

SEQ ID NO: 2674537 - RNA, 20 nt, Human
cuguuacugggcccugaguc

SEQ ID NO: 2674538 - RNA, 13 nt, Human
cuguucggaaggg

SEQ ID NO: 2674539 - RNA, 18 nt, Human
cuguucggaagggguucc

SEQ ID NO: 2674540 - RNA, 22 nt, Human
cuguucggaagggguuccucaa

SEQ ID NO: 2674541 - RNA, 23 nt, Human
cuguucggaagggguuccucaaa

SEQ ID NO: 2674542 - RNA, 16 nt, Human
cuguuccuguucagua

SEQ ID NO: 2674543 - RNA, 18 nt, Human
cugugccucccuccccag

SEQ ID NO: 2674544 - RNA, 19 nt, Human
cugugccucccuccccagu

SEQ ID NO: 2674545 - RNA, 21 nt, Human
cugugccucccuccccagugc

SEQ ID NO: 2674546 - RNA, 23 nt, Human
cugugccucccuccccagugcaa

SEQ ID NO: 2674547 - RNA, 15 nt, Human
cugugcacacccacc

SEQ ID NO: 2674548 - RNA, 17 nt, Human
cugugcacacccaccuu

SEQ ID NO: 2674549 - RNA, 18 nt, Human
cugugcagucacuggagg

SEQ ID NO: 2674550 - RNA, 17 nt, Human
cugugcaacgccguggg

SEQ ID NO: 2674551 - RNA, 19 nt, Human
cugugauccacccaacccu

SEQ ID NO: 2674552 - RNA, 18 nt, Human
cugugcaacgccgugggc

SEQ ID NO: 2674553 - RNA, 21 nt, Human
cugugcaacgccgugggcugc

SEQ ID NO: 2674554 - RNA, 18 nt, Human
cugugcaacggucuccug

SEQ ID NO: 2674555 - RNA, 19 nt, Human
cugugcaacggucuccuga

SEQ ID NO: 2674556 - RNA, 22 nt, Human
cugugcaacggucuccugacug

SEQ ID NO: 2674557 - RNA, 16 nt, Human
cugugcaaggccuggu

SEQ ID NO: 2674558 - RNA, 21 nt, Human
cugugcaauagacacauacau

SEQ ID NO: 2674559 - RNA, 14 nt, Human
cugugagggagggg

SEQ ID NO: 2674560 - RNA, 15 nt, Human
cugugagggagggga

SEQ ID NO: 2674561 - RNA, 22 nt, Human
cugugagggaggggaaaagcau

SEQ ID NO: 2674562 - RNA, 20 nt, Human
cugugaucaauauuuuuaua

SEQ ID NO: 2674563 - RNA, 23 nt, Human
cugugaucaauauuuuuauauca

SEQ ID NO: 2674564 - RNA, 21 nt, Human
cugugcuucgguaggcgacca

SEQ ID NO: 2674565 - RNA, 17 nt, Human
cugugcuuccuccugcc

SEQ ID NO: 2674566 - RNA, 11 nt, Human
cugugcugugu

SEQ ID NO: 2674567 - RNA, 13 nt, Human
cugugcugugugu

SEQ ID NO: 2674568 - RNA, 18 nt, Human
cugugcugugugugacgu

SEQ ID NO: 2674569 - RNA, 17 nt, Human
cuguggaugauaaaaca

SEQ ID NO: 2674570 - RNA, 16 nt, Human
cuguggaugccagggc

SEQ ID NO: 2674571 - RNA, 15 nt, Human
cuguggcacuugccu

SEQ ID NO: 2674572 - RNA, 14 nt, Human
cuguggcauaaauu

SEQ ID NO: 2674573 - RNA, 15 nt, Human
cuguggcauaaauug

SEQ ID NO: 2674574 - RNA, 17 nt, Human
cuguggcauaaauugca

SEQ ID NO: 2674575 - RNA, 18 nt, Human
cuguggcauaaauugcau

SEQ ID NO: 2674576 - RNA, 21 nt, Human
cuguggcacuugccuggguca

SEQ ID NO: 2674577 - RNA, 16 nt, Human
cuguggcacuugccug

SEQ ID NO: 2674578 - RNA, 17 nt, Human
cuguggcacuugccugg

SEQ ID NO: 2674579 - RNA, 19 nt, Human
cuguggcacuugccugggu

SEQ ID NO: 2674580 - RNA, 20 nt, Human
cuguggcacuugccuggguc

SEQ ID NO: 2674581 - RNA, 17 nt, Human
cuguggcgccgucucca

SEQ ID NO: 2674582 - RNA, 19 nt, Human
cuguggcgccgucuccagg

SEQ ID NO: 2674583 - RNA, 20 nt, Human
cuguggcgccgucuccaggg

SEQ ID NO: 2674584 - RNA, 15 nt, Human
cuguggcuagugaca

SEQ ID NO: 2674585 - RNA, 15 nt, Human
cuguggcuccaggcc

SEQ ID NO: 2674586 - RNA, 16 nt, Human
cuguggcuccaggcca

SEQ ID NO: 2674587 - RNA, 18 nt, Human
cuguggcuccaggccaaa

SEQ ID NO: 2674588 - RNA, 21 nt, Human
cuguggcgccgucuccagggg

SEQ ID NO: 2674589 - RNA, 24 nt, Human
cuguggcgccgucuccaggggcug

SEQ ID NO: 2674590 - RNA, 12 nt, Human
gaaugugucagg

SEQ ID NO: 2674591 - RNA, 13 nt, Human
gaauguuaaaggg

SEQ ID NO: 2674592 - RNA, 23 nt, Human
gaauguauuuauuugggagaccg

SEQ ID NO: 2674593 - RNA, 14 nt, Human
gaauguacguccag

SEQ ID NO: 2674594 - RNA, 19 nt, Human
gaauucuguuuaauuuuca

SEQ ID NO: 2674595 - RNA, 11 nt, Human
gaauugaaggu

SEQ ID NO: 2674596 - RNA, 14 nt, Human
gaauugaagcagga

SEQ ID NO: 2674597 - RNA, 23 nt, Human
gaauguuagaguaaugaaaugga

SEQ ID NO: 2674598 - RNA, 18 nt, Human
gaauugaagguuuuugau

SEQ ID NO: 2674599 - RNA, 14 nt, Human
gaauguugggacug

SEQ ID NO: 2674600 - RNA, 23 nt, Human
gaauguugggacugcuaaauaaa

SEQ ID NO: 2674601 - RNA, 16 nt, Human
gaauccuuccauucca

SEQ ID NO: 2674602 - RNA, 21 nt, Human
gaaucaggaauauuuuccaaa

SEQ ID NO: 2674603 - RNA, 23 nt, Human
gaaucaggaauauuuuccaaaga

SEQ ID NO: 2674604 - RNA, 18 nt, Human
gaaucauucagaaauguu

SEQ ID NO: 2674605 - RNA, 15 nt, Human
gaaucucugugccuu

SEQ ID NO: 2674606 - RNA, 13 nt, Human
gaaucucugugcc

SEQ ID NO: 2674607 - RNA, 14 nt, Human
gaaucucugugccu

SEQ ID NO: 2674608 - RNA, 12 nt, Human
gaaucuggagac

SEQ ID NO: 2674609 - RNA, 12 nt, Human
gacaacugugac

SEQ ID NO: 2674610 - RNA, 13 nt, Human
gacaacugugacu

SEQ ID NO: 2674611 - RNA, 17 nt, Human
gacaacguuucagcgac

SEQ ID NO: 2674612 - RNA, 14 nt, Human
gacaacauguuuaa

SEQ ID NO: 2674613 - RNA, 20 nt, Human
gacaacauguuuaauaaaua

SEQ ID NO: 2674614 - RNA, 19 nt, Human
gaauuucugugcccuccug

SEQ ID NO: 2674615 - RNA, 10 nt, Human
gaauuugcau

SEQ ID NO: 2674616 - RNA, 17 nt, Human
gaauuugcauacuuacc

SEQ ID NO: 2674617 - RNA, 18 nt, Human
gaauuugcauacuuaccu

SEQ ID NO: 2674618 - RNA, 18 nt, Human
gacaauguuguagugucc

SEQ ID NO: 2674619 - RNA, 17 nt, Human
gacaauguuguaguguc

SEQ ID NO: 2674620 - RNA, 19 nt, Human
gacaauguuguaguguccc

SEQ ID NO: 2674621 - RNA, 13 nt, Human
gacaauucuguuu

SEQ ID NO: 2674622 - RNA, 20 nt, Human
gacaaugugaaaagaaaaau

SEQ ID NO: 2674623 - RNA, 19 nt, Human
gacaaugugaaaagaaaaa

SEQ ID NO: 2674624 - RNA, 20 nt, Human
gacaauggacccuuuuuguu

SEQ ID NO: 2674625 - RNA, 18 nt, Human
gacaaugugaaaagaaaa

SEQ ID NO: 2674626 - RNA, 12 nt, Human
gacaaugugaaa

SEQ ID NO: 2674627 - RNA, 20 nt, Human
gacaagcuggcuuacacugg

SEQ ID NO: 2674628 - RNA, 14 nt, Human
gacaagcuggcuua

SEQ ID NO: 2674629 - RNA, 18 nt, Human
gaccgcccuuuuccccua

SEQ ID NO: 2674630 - RNA, 17 nt, Human
gaccgcccuuuuccccu

SEQ ID NO: 2674631 - RNA, 12 nt, Human
gacccuuugggg

SEQ ID NO: 2674632 - RNA, 21 nt, Human
gacccugggugggcucugugc

SEQ ID NO: 2674633 - RNA, 22 nt, Human
gacccugguuauugauguggcc

SEQ ID NO: 2674634 - RNA, 12 nt, Human
gacccugucuca

SEQ ID NO: 2674635 - RNA, 17 nt, Human
gacccugggugggcucu

SEQ ID NO: 2674636 - RNA, 11 nt, Human
gacccuggggg

SEQ ID NO: 2674637 - RNA, 17 nt, Human
gacccugggggcacagg

SEQ ID NO: 2674638 - RNA, 18 nt, Human
gacccugggggcacagga

SEQ ID NO: 2674639 - RNA, 21 nt, Human
gacccugggggcacaggaggc

SEQ ID NO: 2674640 - RNA, 18 nt, Human
gacccugggugggcucug

SEQ ID NO: 2674641 - RNA, 19 nt, Human
gacccugggugggcucugu

SEQ ID NO: 2674642 - RNA, 22 nt, Human
gacccugggugggcucugugca

SEQ ID NO: 2674643 - RNA, 19 nt, Human
gaccauuuuuuaauuuacu

SEQ ID NO: 2674644 - RNA, 20 nt, Human
gaccauuuuuuaauuuacuu

SEQ ID NO: 2674645 - RNA, 23 nt, Human
gaccauuuuuuaauuuacuuguu

SEQ ID NO: 2674646 - RNA, 19 nt, Human
gacccaauguaggagcugc

SEQ ID NO: 2674647 - RNA, 18 nt, Human
gacccaauguaggagcug

SEQ ID NO: 2674648 - RNA, 22 nt, Human
gaccacgcccguccugccugug

SEQ ID NO: 2674649 - RNA, 15 nt, Human
gaccacuugaggccu

SEQ ID NO: 2674650 - RNA, 16 nt, Human
gaccacuugaggccug

SEQ ID NO: 2674651 - RNA, 17 nt, Human
gaccacuugaggccuga

SEQ ID NO: 2674652 - RNA, 17 nt, Human
gaccacgcccguccugc

SEQ ID NO: 2674653 - RNA, 19 nt, Human
gaccacgcccguccugccu

SEQ ID NO: 2674654 - RNA, 21 nt, Human
gaccacgcccguccugccugu

SEQ ID NO: 2674655 - RNA, 14 nt, Human
gaccacccugagcc

SEQ ID NO: 2674656 - RNA, 15 nt, Human
gaccacccugagccg

SEQ ID NO: 2674657 - RNA, 19 nt, Human
gaccaccgccccuggccgc

SEQ ID NO: 2674658 - RNA, 20 nt, Human
gacaguguauguagaagcau

SEQ ID NO: 2674659 - RNA, 22 nt, Human
gacaggaaccuuaaguaaucau

SEQ ID NO: 2674660 - RNA, 22 nt, Human
gacauacuccuuccaucaaaua

SEQ ID NO: 2674661 - RNA, 15 nt, Human
gacauccuccuccca

SEQ ID NO: 2674662 - RNA, 18 nt, Human
gacauccuccucccaccc

SEQ ID NO: 2674663 - RNA, 15 nt, Human
gacaugcaauaaaau

SEQ ID NO: 2674664 - RNA, 17 nt, Human
gacaugcaauaaaauuu

SEQ ID NO: 2674665 - RNA, 19 nt, Human
gacaugcaauaaaauuuaa

SEQ ID NO: 2674666 - RNA, 20 nt, Human
gacaugcaauaaaauuuaaa

SEQ ID NO: 2674667 - RNA, 22 nt, Human
gacagcuugagccgggccccug

SEQ ID NO: 2674668 - RNA, 15 nt, Human
gacagcuuuucucaa

SEQ ID NO: 2674669 - RNA, 15 nt, Human
gacagauaccuccaa

SEQ ID NO: 2674670 - RNA, 17 nt, Human
gacagauaccuccaacc

SEQ ID NO: 2674671 - RNA, 21 nt, Human
gacagauaccuccaacccugc

SEQ ID NO: 2674672 - RNA, 22 nt, Human
gacagauaccuccaacccugcc

SEQ ID NO: 2674673 - RNA, 23 nt, Human
gacagauaccuccaacccugccg

SEQ ID NO: 2674674 - RNA, 19 nt, Human
gacagagaggacuguaggg

SEQ ID NO: 2674675 - RNA, 15 nt, Human
gacagagaggacugu

SEQ ID NO: 2674676 - RNA, 16 nt, Human
gacagagaggacugua

SEQ ID NO: 2674677 - RNA, 21 nt, Human
gacagagcaagugagacccug

SEQ ID NO: 2674678 - RNA, 16 nt, Human
gacuuaaaaaaaccau

SEQ ID NO: 2674679 - RNA, 21 nt, Human
gacugcuuuggaccuaaaugg

SEQ ID NO: 2674680 - RNA, 14 nt, Human
gacugagugggaag

SEQ ID NO: 2674681 - RNA, 15 nt, Human
gacugcccggcaggg

SEQ ID NO: 2674682 - RNA, 13 nt, Human
gacugcccggcag

SEQ ID NO: 2674683 - RNA, 13 nt, Human
gacucgacucugu

SEQ ID NO: 2674684 - RNA, 16 nt, Human
gacucgacucugugcc

SEQ ID NO: 2674685 - RNA, 17 nt, Human
gacucgacucugugccu

SEQ ID NO: 2674686 - RNA, 17 nt, Human
gacuccguuggccacuc

SEQ ID NO: 2674687 - RNA, 16 nt, Human
gacuccguuggccacu

SEQ ID NO: 2674688 - RNA, 13 nt, Human
gaccuacucucau

SEQ ID NO: 2674689 - RNA, 18 nt, Human
gacucagagcucucucua

SEQ ID NO: 2674690 - RNA, 20 nt, Human
gacucagccuucagacagag

SEQ ID NO: 2674691 - RNA, 15 nt, Human
gacucagccuucaga

SEQ ID NO: 2674692 - RNA, 19 nt, Human
gacucagccuucagacaga

SEQ ID NO: 2674693 - RNA, 12 nt, Human
gacucagccuuc

SEQ ID NO: 2674694 - RNA, 14 nt, Human
gacucagccuucag

SEQ ID NO: 2674695 - RNA, 22 nt, Human
gacuugaaaagagacaggcagg

SEQ ID NO: 2674696 - RNA, 21 nt, Human
gacuugaaaagagacaggcag

SEQ ID NO: 2674697 - RNA, 17 nt, Human
gacuugaaaagagacag

SEQ ID NO: 2674698 - RNA, 11 nt, Human
gacuugaaaag

SEQ ID NO: 2674699 - RNA, 15 nt, Human
gacuucuaccugccc

SEQ ID NO: 2674700 - RNA, 21 nt, Human
gacuugccagagccgggcaca

SEQ ID NO: 2674701 - RNA, 22 nt, Human
gacuuguauagcaugaaauaaa

SEQ ID NO: 2674702 - RNA, 23 nt, Human
gacuuguauagcaugaaauaaaa

SEQ ID NO: 2674703 - RNA, 17 nt, Human
gacuucugccuggagac

SEQ ID NO: 2674704 - RNA, 15 nt, Human
gacuucugccuggag

SEQ ID NO: 2674705 - RNA, 16 nt, Human
gacuucugccuggaga

SEQ ID NO: 2674706 - RNA, 13 nt, Human
gacuucugccugg

SEQ ID NO: 2674707 - RNA, 14 nt, Human
gacuucugccugga

SEQ ID NO: 2674708 - RNA, 20 nt, Human
gacuuccuugagacacggag

SEQ ID NO: 2674709 - RNA, 16 nt, Human
gacuuccuugagacac

SEQ ID NO: 2674710 - RNA, 20 nt, Human
gacuuaacugcauuuuuaga

SEQ ID NO: 2674711 - RNA, 23 nt, Human
gacuuaacauagccaaaauguga

SEQ ID NO: 2674712 - RNA, 21 nt, Human
gacuuaacauagccaaaaugu

SEQ ID NO: 2674713 - RNA, 17 nt, Human
gacuuaacauagccaaa

SEQ ID NO: 2674714 - RNA, 15 nt, Human
gacuuccuugagaca

SEQ ID NO: 2674715 - RNA, 16 nt, Human
gagaagcagaggaagg

SEQ ID NO: 2674716 - RNA, 20 nt, Human
gagaagaaaggugaguuuga

SEQ ID NO: 2674717 - RNA, 22 nt, Human
gagaagcaaguaaaaaggcuaa

SEQ ID NO: 2674718 - RNA, 20 nt, Human
gagaacucgcgcucaguaaa

SEQ ID NO: 2674719 - RNA, 22 nt, Human
gagaacucgcgcucaguaaacg

SEQ ID NO: 2674720 - RNA, 14 nt, Human
gagaacucuggcuu

SEQ ID NO: 2674721 - RNA, 13 nt, Human
gagaaaugaaaac

SEQ ID NO: 2674722 - RNA, 14 nt, Human
gagaaaugaaaaca

SEQ ID NO: 2674723 - RNA, 19 nt, Human
gagaaagaggcaccaggaa

SEQ ID NO: 2674724 - RNA, 14 nt, Human
gagagagagaggac

SEQ ID NO: 2674725 - RNA, 12 nt, Human
gagagagaggac

SEQ ID NO: 2674726 - RNA, 13 nt, Human
gagagagaggaca

SEQ ID NO: 2674727 - RNA, 14 nt, Human
gagagagagagaga

SEQ ID NO: 2674728 - RNA, 14 nt, Human
gagagagagagagg

SEQ ID NO: 2674729 - RNA, 13 nt, Human
gagagagagagga

SEQ ID NO: 2674730 - RNA, 13 nt, Human
gagaggggcacag

SEQ ID NO: 2674731 - RNA, 15 nt, Human
gagagucuggcccua

SEQ ID NO: 2674732 - RNA, 17 nt, Human
gagaguauuuuuauaca

SEQ ID NO: 2674733 - RNA, 22 nt, Human
gagaguauuuuuauacaaaccu

SEQ ID NO: 2674734 - RNA, 14 nt, Human
gagagucuggcccu

SEQ ID NO: 2674735 - RNA, 13 nt, Human
gagagucuggccc

SEQ ID NO: 2674736 - RNA, 15 nt, Human
gagaagagcgcagug

SEQ ID NO: 2674737 - RNA, 20 nt, Human
gagaauggcgugaacccggg

SEQ ID NO: 2674738 - RNA, 20 nt, Human
gagaauggugugaacccggg

SEQ ID NO: 2674739 - RNA, 21 nt, Human
gagaauggugugaacccggga

SEQ ID NO: 2674740 - RNA, 23 nt, Human
gagaauggugugaacccgggagc

SEQ ID NO: 2674741 - RNA, 12 nt, Human
gagaccauccug

SEQ ID NO: 2674742 - RNA, 14 nt, Human
gagaccauccuggc

SEQ ID NO: 2674743 - RNA, 15 nt, Human
gagaccauccuggcu

SEQ ID NO: 2674744 - RNA, 16 nt, Human
gagaccauccuggcua

SEQ ID NO: 2674745 - RNA, 15 nt, Human
gagacuggguaggaa

SEQ ID NO: 2674746 - RNA, 22 nt, Human
gagagaaagugugagcaaacua

SEQ ID NO: 2674747 - RNA, 12 nt, Human
gagauccuccug

SEQ ID NO: 2674748 - RNA, 13 nt, Human
gagauccaaagac

SEQ ID NO: 2674749 - RNA, 14 nt, Human
gagccauacauaaa

SEQ ID NO: 2674750 - RNA, 18 nt, Human
gagcccagcccuccccau

SEQ ID NO: 2674751 - RNA, 15 nt, Human
gagcccagcccuccc

SEQ ID NO: 2674752 - RNA, 24 nt, Human
gagcagagacaugacucagccugu

SEQ ID NO: 2674753 - RNA, 15 nt, Human
gagcaugucguggac

SEQ ID NO: 2674754 - RNA, 14 nt, Human
gagggugggggagg

SEQ ID NO: 2674755 - RNA, 15 nt, Human
gagggugggggaggg

SEQ ID NO: 2674756 - RNA, 17 nt, Human
gagggugggggagggag

SEQ ID NO: 2674757 - RNA, 17 nt, Human
gaggucaaggcugcagu

SEQ ID NO: 2674758 - RNA, 13 nt, Human
gagguacccuggg

SEQ ID NO: 2674759 - RNA, 14 nt, Human
gagguauuaaaacu

SEQ ID NO: 2674760 - RNA, 15 nt, Human
gaggucacuggaaag

SEQ ID NO: 2674761 - RNA, 16 nt, Human
gaggucacuggaaagg

SEQ ID NO: 2674762 - RNA, 17 nt, Human
gaggucacuggaaaggg

SEQ ID NO: 2674763 - RNA, 13 nt, Human
gagggugggaagg

SEQ ID NO: 2674764 - RNA, 12 nt, Human
gaggguggaaua

SEQ ID NO: 2674765 - RNA, 21 nt, Human
gaggguaggagggugggaagg

SEQ ID NO: 2674766 - RNA, 13 nt, Human
gagggagagagag

SEQ ID NO: 2674767 - RNA, 15 nt, Human
gagggagagagagag

SEQ ID NO: 2674768 - RNA, 16 nt, Human
gagggagagagagaga

SEQ ID NO: 2674769 - RNA, 22 nt, Human
gagggagagagagagagagagg

SEQ ID NO: 2674770 - RNA, 13 nt, Human
gagggagagggag

SEQ ID NO: 2674771 - RNA, 23 nt, Human
gaggcuguggucacagcggaggu

SEQ ID NO: 2674772 - RNA, 12 nt, Human
gagggaggggaa

SEQ ID NO: 2674773 - RNA, 21 nt, Human
gagggaggggaaaagcauuuu

SEQ ID NO: 2674774 - RNA, 13 nt, Human
gagggcagcugcu

SEQ ID NO: 2674775 - RNA, 14 nt, Human
gagggcagcugcua

SEQ ID NO: 2674776 - RNA, 18 nt, Human
gagggauucugguuccag

SEQ ID NO: 2674777 - RNA, 21 nt, Human
gagggauucugguuccagggu

SEQ ID NO: 2674778 - RNA, 20 nt, Human
gaggggucccuagcagccca

SEQ ID NO: 2674779 - RNA, 14 nt, Human
gagggguguggcag

SEQ ID NO: 2674780 - RNA, 17 nt, Human
gagggguguggcagugg

SEQ ID NO: 2674781 - RNA, 18 nt, Human
gagggguguggcaguggu

SEQ ID NO: 2674782 - RNA, 15 nt, Human
gaggguaaauaaacc

SEQ ID NO: 2674783 - RNA, 14 nt, Human
gagggggccgggcg

SEQ ID NO: 2674784 - RNA, 21 nt, Human
gagggggccgggcgcgguggc

SEQ ID NO: 2674785 - RNA, 17 nt, Human
gagggggcuugaagcca

SEQ ID NO: 2674786 - RNA, 18 nt, Human
gagggggcuugaagccaa

SEQ ID NO: 2674787 - RNA, 13 nt, Human
gaggaucucuuga

SEQ ID NO: 2674788 - RNA, 19 nt, Human
gaggaucucuugagccugg

SEQ ID NO: 2674789 - RNA, 16 nt, Human
gaggaucucuugagcc

SEQ ID NO: 2674790 - RNA, 22 nt, Human
gaggaucucuugagccugggag

SEQ ID NO: 2674791 - RNA, 20 nt, Human
gaggcaaagcuggcucaccu

SEQ ID NO: 2674792 - RNA, 16 nt, Human
gaggcaaagcuggcuc

SEQ ID NO: 2674793 - RNA, 17 nt, Human
gaggaugcuaaaaaugu

SEQ ID NO: 2674794 - RNA, 20 nt, Human
gaggauugcuugagcucagg

SEQ ID NO: 2674795 - RNA, 16 nt, Human
gaggcagggaggcagc

SEQ ID NO: 2674796 - RNA, 17 nt, Human
gaggcagggaggcagcc

SEQ ID NO: 2674797 - RNA, 18 nt, Human
gaggcagggaggcagccg

SEQ ID NO: 2674798 - RNA, 14 nt, Human
gaggcaggcuccag

SEQ ID NO: 2674799 - RNA, 21 nt, Human
gaggccguugcugacuuagaa

SEQ ID NO: 2674800 - RNA, 18 nt, Human
gaggccuaccccgcagac

SEQ ID NO: 2674801 - RNA, 22 nt, Human
gaggcgcccuuggcuucuguga

SEQ ID NO: 2674802 - RNA, 14 nt, Human
gaggcgcggaguga

SEQ ID NO: 2674803 - RNA, 12 nt, Human
gaggccccaggg

SEQ ID NO: 2674804 - RNA, 14 nt, Human
gaggccccaggggg

SEQ ID NO: 2674805 - RNA, 14 nt, Human
gaggccaugugcau

SEQ ID NO: 2674806 - RNA, 21 nt, Human
gaggccaugugcauaguuucu

SEQ ID NO: 2674807 - RNA, 22 nt, Human
gaggccaugugcauaguuucuu

SEQ ID NO: 2674808 - RNA, 20 nt, Human
gaucacaaaugacuuuauua

SEQ ID NO: 2674809 - RNA, 16 nt, Human
gaucacaaaugacuuu

SEQ ID NO: 2674810 - RNA, 13 nt, Human
gaucacaaaugac

SEQ ID NO: 2674811 - RNA, 12 nt, Human
gaucacaaauga

SEQ ID NO: 2674812 - RNA, 18 nt, Human
gaucacuguuuagauuug

SEQ ID NO: 2674813 - RNA, 14 nt, Human
gaucacuguuuaga

SEQ ID NO: 2674814 - RNA, 21 nt, Human
gaucacuguuuagauuugcca

SEQ ID NO: 2674815 - RNA, 16 nt, Human
gauagcuaacuguaaa

SEQ ID NO: 2674816 - RNA, 19 nt, Human
gauagcuaacuguaaauca

SEQ ID NO: 2674817 - RNA, 20 nt, Human
gauagcuaacuguaaaucau

SEQ ID NO: 2674818 - RNA, 14 nt, Human
gauauaaauuuuua

SEQ ID NO: 2674819 - RNA, 18 nt, Human
gauauaaauuuuuaagag

SEQ ID NO: 2674820 - RNA, 21 nt, Human
gauauaaauuuuuaagagaaa

SEQ ID NO: 2674821 - RNA, 16 nt, Human
gauaacuuuacagaaa

SEQ ID NO: 2674822 - RNA, 19 nt, Human
gauaacuuuacagaaaugg

SEQ ID NO: 2674823 - RNA, 17 nt, Human
gagugucuggaauugug

SEQ ID NO: 2674824 - RNA, 18 nt, Human
gagugucuggaauugugg

SEQ ID NO: 2674825 - RNA, 20 nt, Human
gagugugccugaagucccag

SEQ ID NO: 2674826 - RNA, 13 nt, Human
gaguguaugagua

SEQ ID NO: 2674827 - RNA, 15 nt, Human
gaguguagacugugg

SEQ ID NO: 2674828 - RNA, 17 nt, Human
gaguguagacuguggcu

SEQ ID NO: 2674829 - RNA, 13 nt, Human
gagugggugaaua

SEQ ID NO: 2674830 - RNA, 13 nt, Human
gaguuaagguggg

SEQ ID NO: 2674831 - RNA, 21 nt, Human
gagucguggggugugcuggga

SEQ ID NO: 2674832 - RNA, 22 nt, Human
gagucguggggugugcugggag

SEQ ID NO: 2674833 - RNA, 18 nt, Human
gagucuaauagucuuugc

SEQ ID NO: 2674834 - RNA, 19 nt, Human
gagucuaauagucuuugcc

SEQ ID NO: 2674835 - RNA, 20 nt, Human
gaguauucuaauaagcuagu

SEQ ID NO: 2674836 - RNA, 21 nt, Human
gaguauucucggauaguugcu

SEQ ID NO: 2674837 - RNA, 18 nt, Human
gaguauugaaugguggug

SEQ ID NO: 2674838 - RNA, 20 nt, Human
gaguauuguuuaaaauguaa

SEQ ID NO: 2674839 - RNA, 12 nt, Human
gaguauucuaau

SEQ ID NO: 2674840 - RNA, 21 nt, Human
gaguagccagguucugccggu

SEQ ID NO: 2674841 - RNA, 22 nt, Human
gagucuguugugugucaugcca

SEQ ID NO: 2674842 - RNA, 18 nt, Human
gagucuggcccuagacuc

SEQ ID NO: 2674843 - RNA, 16 nt, Human
gagucuguucugguaa

SEQ ID NO: 2674844 - RNA, 20 nt, Human
gagucuguugugugucaugc

SEQ ID NO: 2674845 - RNA, 15 nt, Human
gagugaaaaagagaa

SEQ ID NO: 2674846 - RNA, 19 nt, Human
gagugaaccccacgcccug

SEQ ID NO: 2674847 - RNA, 15 nt, Human
gaguagaaaauguga

SEQ ID NO: 2674848 - RNA, 16 nt, Human
gaguagaaaaugugac

SEQ ID NO: 2674849 - RNA, 23 nt, Human
gaguagaaaaugugacccuccaa

SEQ ID NO: 2674850 - RNA, 17 nt, Human
gaguaaucuuguugguu

SEQ ID NO: 2674851 - RNA, 16 nt, Human
gagguugugcacuguu

SEQ ID NO: 2674852 - RNA, 16 nt, Human
gagguuucaaaccucc

SEQ ID NO: 2674853 - RNA, 13 nt, Human
gagguugaagcca

SEQ ID NO: 2674854 - RNA, 15 nt, Human
gagguugaagccaag

SEQ ID NO: 2674855 - RNA, 15 nt, Human
gagguugcagugagc

SEQ ID NO: 2674856 - RNA, 18 nt, Human
gagguuccucugccugcc

SEQ ID NO: 2674857 - RNA, 19 nt, Human
gagguuccucugccugccc

SEQ ID NO: 2674858 - RNA, 18 nt, Human
gagguugaaaaacaaaau

SEQ ID NO: 2674859 - RNA, 16 nt, Human
gagguuccucugccug

SEQ ID NO: 2674860 - RNA, 17 nt, Human
gagguuccucugccugc

SEQ ID NO: 2674861 - RNA, 16 nt, Human
gagguguggagccgag

SEQ ID NO: 2674862 - RNA, 21 nt, Human
gaggugggccagucuguggau

SEQ ID NO: 2674863 - RNA, 21 nt, Human
gaggucacuggaaaggggaga

SEQ ID NO: 2674864 - RNA, 18 nt, Human
gaggucacuggaaagggg

SEQ ID NO: 2674865 - RNA, 20 nt, Human
gaggucacuggaaaggggag

SEQ ID NO: 2674866 - RNA, 14 nt, Human
gcaccuugugccug

SEQ ID NO: 2674867 - RNA, 15 nt, Human
gcaccuugugccugg

SEQ ID NO: 2674868 - RNA, 18 nt, Human
gcaccuugugccuggggu

SEQ ID NO: 2674869 - RNA, 19 nt, Human
gcaccuugugccuggggug

SEQ ID NO: 2674870 - RNA, 15 nt, Human
gcaccuguaguccca

SEQ ID NO: 2674871 - RNA, 16 nt, Human
gcaccuguagucccag

SEQ ID NO: 2674872 - RNA, 17 nt, Human
gcaccuguagucccagc

SEQ ID NO: 2674873 - RNA, 18 nt, Human
gcaccuguagucccagcu

SEQ ID NO: 2674874 - RNA, 12 nt, Human
gcaccauaacuu

SEQ ID NO: 2674875 - RNA, 16 nt, Human
gcacagugaagugcug

SEQ ID NO: 2674876 - RNA, 12 nt, Human
gcacauguuucc

SEQ ID NO: 2674877 - RNA, 14 nt, Human
gcacauugagcugu

SEQ ID NO: 2674878 - RNA, 18 nt, Human
gcacauugagcugugcaa

SEQ ID NO: 2674879 - RNA, 18 nt, Human
gcaccaggcgcugcccac

SEQ ID NO: 2674880 - RNA, 18 nt, Human
gcaccaggaagccguccu

SEQ ID NO: 2674881 - RNA, 16 nt, Human
gcaccagggguuucuc

SEQ ID NO: 2674882 - RNA, 18 nt, Human
gcaccagggguuucucgc

SEQ ID NO: 2674883 - RNA, 19 nt, Human
gcaccagggguuucucgca

SEQ ID NO: 2674884 - RNA, 14 nt, Human
gcaccaggaagccg

SEQ ID NO: 2674885 - RNA, 15 nt, Human
gcagacaccuuggac

SEQ ID NO: 2674886 - RNA, 17 nt, Human
gcacugacugggcauag

SEQ ID NO: 2674887 - RNA, 14 nt, Human
gcacagaauauuuu

SEQ ID NO: 2674888 - RNA, 18 nt, Human
gcaauugaauuaaauuag

SEQ ID NO: 2674889 - RNA, 17 nt, Human
gcaauguaagcauacuu

SEQ ID NO: 2674890 - RNA, 14 nt, Human
gcaaugugauaaaa

SEQ ID NO: 2674891 - RNA, 14 nt, Human
gcaacucaucuuag

SEQ ID NO: 2674892 - RNA, 23 nt, Human
gcaacgaucacaaaugacuuuau

SEQ ID NO: 2674893 - RNA, 22 nt, Human
gcaacgccgugggcugcguccu

SEQ ID NO: 2674894 - RNA, 22 nt, Human
gcaacggucuccugacuggugc

SEQ ID NO: 2674895 - RNA, 22 nt, Human
gcaacgaucacaaaugacuuua

SEQ ID NO: 2674896 - RNA, 21 nt, Human
gcaacgaucacaaaugacuuu

SEQ ID NO: 2674897 - RNA, 20 nt, Human
gcaacgaucacaaaugacuu

SEQ ID NO: 2674898 - RNA, 16 nt, Human
gcaacgaucacaaaug

SEQ ID NO: 2674899 - RNA, 14 nt, Human
gcaacacagccugg

SEQ ID NO: 2674900 - RNA, 15 nt, Human
gcaacacagccuggg

SEQ ID NO: 2674901 - RNA, 19 nt, Human
gcaaugguaguuucugugg

SEQ ID NO: 2674902 - RNA, 17 nt, Human
gcaaugguaguuucugu

SEQ ID NO: 2674903 - RNA, 18 nt, Human
gaugccaguuacuugcuu

SEQ ID NO: 2674904 - RNA, 17 nt, Human
gaugccagggccgacca

SEQ ID NO: 2674905 - RNA, 23 nt, Human
gaucacuuagcgaacccuuuauu

SEQ ID NO: 2674906 - RNA, 12 nt, Human
gauggccccagc

SEQ ID NO: 2674907 - RNA, 14 nt, Human
gauggccccagcac

SEQ ID NO: 2674908 - RNA, 15 nt, Human
gauggccccagcaca

SEQ ID NO: 2674909 - RNA, 22 nt, Human
gauggccgggcgcgguggcuca

SEQ ID NO: 2674910 - RNA, 21 nt, Human
gauguuacaaguuuauauaua

SEQ ID NO: 2674911 - RNA, 23 nt, Human
gauguggcccuggcugccggcac

SEQ ID NO: 2674912 - RNA, 21 nt, Human
gauguggcuacugacauaucu

SEQ ID NO: 2674913 - RNA, 16 nt, Human
gaugguguggccugug

SEQ ID NO: 2674914 - RNA, 19 nt, Human
gaugguguggccuguggcu

SEQ ID NO: 2674915 - RNA, 15 nt, Human
gaugguaucauauau

SEQ ID NO: 2674916 - RNA, 13 nt, Human
gauggucauccag

SEQ ID NO: 2674917 - RNA, 14 nt, Human
gauuacacacguga

SEQ ID NO: 2674918 - RNA, 12 nt, Human
gauuaaauacau

SEQ ID NO: 2674919 - RNA, 13 nt, Human
gauuaaauacaua

SEQ ID NO: 2674920 - RNA, 19 nt, Human
gauuaaauacauauggaug

SEQ ID NO: 2674921 - RNA, 22 nt, Human
gauuaaaaauaucaaauuaauu

SEQ ID NO: 2674922 - RNA, 19 nt, Human
gauguugccauguguuuua

SEQ ID NO: 2674923 - RNA, 14 nt, Human
gauguuuaaaacac

SEQ ID NO: 2674924 - RNA, 23 nt, Human
gauguuuaaaacaccuucuauag

SEQ ID NO: 2674925 - RNA, 22 nt, Human
gauguuuaaaacaccuucuaua

SEQ ID NO: 2674926 - RNA, 17 nt, Human
gauguugccauguguuu

SEQ ID NO: 2674927 - RNA, 13 nt, Human
gauguugccaugu

SEQ ID NO: 2674928 - RNA, 15 nt, Human
gauguugccaugugu

SEQ ID NO: 2674929 - RNA, 12 nt, Human
gcaaauguuaaa

SEQ ID NO: 2674930 - RNA, 23 nt, Human
gcaaauguuaaaaguuuuauaug

SEQ ID NO: 2674931 - RNA, 22 nt, Human
gcaaagggccugcccagacaag

SEQ ID NO: 2674932 - RNA, 15 nt, Human
gcaacaacaauuggu

SEQ ID NO: 2674933 - RNA, 21 nt, Human
gcaacaacaauugguaaaacu

SEQ ID NO: 2674934 - RNA, 22 nt, Human
gcaacaacaauugguaaaacuc

SEQ ID NO: 2674935 - RNA, 22 nt, Human
gcaacaagaccaccacuucgaa

SEQ ID NO: 2674936 - RNA, 16 nt, Human
gcaaagauuuaaucug

SEQ ID NO: 2674937 - RNA, 23 nt, Human
gcaaaggaaacuuugcagaugug

SEQ ID NO: 2674938 - RNA, 20 nt, Human
gcaaaggaagguggauggcc

SEQ ID NO: 2674939 - RNA, 15 nt, Human
gcaaaggaaggugga

SEQ ID NO: 2674940 - RNA, 17 nt, Human
gauuuuuaaaaaauauu

SEQ ID NO: 2674941 - RNA, 21 nt, Human
gauuuuuaaaaaauauuuucu

SEQ ID NO: 2674942 - RNA, 17 nt, Human
gauuuucuuuugccuuu

SEQ ID NO: 2674943 - RNA, 22 nt, Human
gauuuuaauagggaauauaucu

SEQ ID NO: 2674944 - RNA, 23 nt, Human
gauuuuaauagggaauauaucuc

SEQ ID NO: 2674945 - RNA, 11 nt, Human
gauuugcaaua

SEQ ID NO: 2674946 - RNA, 15 nt, Human
gauuuuaacuuaacu

SEQ ID NO: 2674947 - RNA, 20 nt, Human
gauuuuaacuuaacugaaau

SEQ ID NO: 2674948 - RNA, 17 nt, Human
gauuuuacagagcgcac

SEQ ID NO: 2674949 - RNA, 15 nt, Human
gauuuucuuuugccu

SEQ ID NO: 2674950 - RNA, 12 nt, Human
gauuuaaaucag

SEQ ID NO: 2674951 - RNA, 12 nt, Human
gauuuaaaugcc

SEQ ID NO: 2674952 - RNA, 22 nt, Human
gauuuccucccucugccccucc

SEQ ID NO: 2674953 - RNA, 18 nt, Human
gauucucaaaggagcgag

SEQ ID NO: 2674954 - RNA, 18 nt, Human
gauuaaagcuaaggaccu

SEQ ID NO: 2674955 - RNA, 13 nt, Human
gauugccucugaa

SEQ ID NO: 2674956 - RNA, 14 nt, Human
gauugccucugaaa

SEQ ID NO: 2674957 - RNA, 14 nt, Human
gauugagugagggc

SEQ ID NO: 2674958 - RNA, 19 nt, Human
gauugauaucuauaaaaua

SEQ ID NO: 2674959 - RNA, 18 nt, Human
ggaugcaggcuccccuga

SEQ ID NO: 2674960 - RNA, 13 nt, Human
ggaugauuuaagu

SEQ ID NO: 2674961 - RNA, 17 nt, Human
ggauccgacugcuuugg

SEQ ID NO: 2674962 - RNA, 19 nt, Human
ggauccgacugcuuuggac

SEQ ID NO: 2674963 - RNA, 21 nt, Human
ggauccgacugcuuuggaccu

SEQ ID NO: 2674964 - RNA, 18 nt, Human
ggauauugaauguuaaag

SEQ ID NO: 2674965 - RNA, 16 nt, Human
ggauaguugcuauuuu

SEQ ID NO: 2674966 - RNA, 19 nt, Human
ggauauauaggcuauuuuc

SEQ ID NO: 2674967 - RNA, 15 nt, Human
ggauugccucugaaa

SEQ ID NO: 2674968 - RNA, 20 nt, Human
ggcacccaccguggaggagg

SEQ ID NO: 2674969 - RNA, 21 nt, Human
ggcacccaccguggaggagga

SEQ ID NO: 2674970 - RNA, 18 nt, Human
ggcaaugguaguuucugu

SEQ ID NO: 2674971 - RNA, 17 nt, Human
ggcaaugguaguuucug

SEQ ID NO: 2674972 - RNA, 16 nt, Human
ggcaaugguaguuucu

SEQ ID NO: 2674973 - RNA, 19 nt, Human
ggcaauaaauuuugaaaag

SEQ ID NO: 2674974 - RNA, 17 nt, Human
ggcaauaaauuuugaaa

SEQ ID NO: 2674975 - RNA, 16 nt, Human
ggcaauaaauuuugaa

SEQ ID NO: 2674976 - RNA, 14 nt, Human
ggcaauauuaaccu

SEQ ID NO: 2674977 - RNA, 12 nt, Human
ggccacauggcg

SEQ ID NO: 2674978 - RNA, 16 nt, Human
ggccacauggcggaga

SEQ ID NO: 2674979 - RNA, 22 nt, Human
ggccagccuccgagagggagag

SEQ ID NO: 2674980 - RNA, 23 nt, Human
ggccacgugggcaaacaggcagu

SEQ ID NO: 2674981 - RNA, 13 nt, Human
ggccacuccgaga

SEQ ID NO: 2674982 - RNA, 16 nt, Human
ggcauggcccugggcg

SEQ ID NO: 2674983 - RNA, 13 nt, Human
ggccaccaaagcu

SEQ ID NO: 2674984 - RNA, 15 nt, Human
ggccaccaaagcugc

SEQ ID NO: 2674985 - RNA, 16 nt, Human
ggccaccaaagcugcc

SEQ ID NO: 2674986 - RNA, 17 nt, Human
ggccaccaaagcugccc

SEQ ID NO: 2674987 - RNA, 18 nt, Human
ggccaccaaagcugccca

SEQ ID NO: 2674988 - RNA, 14 nt, Human
ggccauucugccgc

SEQ ID NO: 2674989 - RNA, 20 nt, Human
ggccauucugccgcccccuc

SEQ ID NO: 2674990 - RNA, 14 nt, Human
ggccauuugcaaua

SEQ ID NO: 2674991 - RNA, 18 nt, Human
ggccauuugcaauaacag

SEQ ID NO: 2674992 - RNA, 20 nt, Human
ggccauuugcaauaacagcu

SEQ ID NO: 2674993 - RNA, 21 nt, Human
ggccauuugcaauaacagcug

SEQ ID NO: 2674994 - RNA, 22 nt, Human
ggccauuugcaauaacagcugc

SEQ ID NO: 2674995 - RNA, 23 nt, Human
ggccauuugcaauaacagcugca

SEQ ID NO: 2674996 - RNA, 16 nt, Human
ggccauguaugaagcc

SEQ ID NO: 2674997 - RNA, 13 nt, Human
ggccauguccaaa

SEQ ID NO: 2674998 - RNA, 15 nt, Human
ggccauguccaaaga

SEQ ID NO: 2674999 - RNA, 16 nt, Human
ggccauguccaaagag

SEQ ID NO: 2675000 - RNA, 23 nt, Human
ggccaugugcauaguuucuuuau

SEQ ID NO: 2675001 - RNA, 22 nt, Human
ggccauguccaaagaggcugcc

SEQ ID NO: 2675002 - RNA, 23 nt, Human
ggccauguccaaagaggcugccc

SEQ ID NO: 2675003 - RNA, 13 nt, Human
ggccagcguggcu

SEQ ID NO: 2675004 - RNA, 16 nt, Human
ggcaccuuuuacugug

SEQ ID NO: 2675005 - RNA, 17 nt, Human
ggcacgcacuggguugc

SEQ ID NO: 2675006 - RNA, 14 nt, Human
ggcacggguggucc

SEQ ID NO: 2675007 - RNA, 15 nt, Human
ggcacgggugguccc

SEQ ID NO: 2675008 - RNA, 17 nt, Human
ggcacgggugguccccg

SEQ ID NO: 2675009 - RNA, 16 nt, Human
ggcacuagccaaagcg

SEQ ID NO: 2675010 - RNA, 17 nt, Human
ggcaugcggucgggcag

SEQ ID NO: 2675011 - RNA, 16 nt, Human
ggcaugcggucgggca

SEQ ID NO: 2675012 - RNA, 13 nt, Human
ggcccuggcugcc

SEQ ID NO: 2675013 - RNA, 17 nt, Human
ggcccuggccuccccug

SEQ ID NO: 2675014 - RNA, 13 nt, Human
ggcccuggccucc

SEQ ID NO: 2675015 - RNA, 14 nt, Human
ggcccuggccuccc

SEQ ID NO: 2675016 - RNA, 18 nt, Human
ggcccugagucugggcag

SEQ ID NO: 2675017 - RNA, 19 nt, Human
ggcccugagucugggcagc

SEQ ID NO: 2675018 - RNA, 22 nt, Human
ggcccacgccuguaaucccagc

SEQ ID NO: 2675019 - RNA, 18 nt, Human
ggccaggcugccuggccu

SEQ ID NO: 2675020 - RNA, 16 nt, Human
ggccucugugccuucu

SEQ ID NO: 2675021 - RNA, 14 nt, Human
ggccuauuucauca

SEQ ID NO: 2675022 - RNA, 15 nt, Human
ggcccuggguuccuc

SEQ ID NO: 2675023 - RNA, 14 nt, Human
ggcccugggcugga

SEQ ID NO: 2675024 - RNA, 15 nt, Human
ggcccugggcuggaa

SEQ ID NO: 2675025 - RNA, 12 nt, Human
ggcccugggcug

SEQ ID NO: 2675026 - RNA, 13 nt, Human
ggcccugggcugg

SEQ ID NO: 2675027 - RNA, 16 nt, Human
ggccguaucuccggcu

SEQ ID NO: 2675028 - RNA, 22 nt, Human
ggccguaucuccggcucccagc

SEQ ID NO: 2675029 - RNA, 21 nt, Human
ggccguaucuccggcucccag

SEQ ID NO: 2675030 - RNA, 20 nt, Human
ggccguaucuccggcuccca

SEQ ID NO: 2675031 - RNA, 19 nt, Human
ggccguaucuccggcuccc

SEQ ID NO: 2675032 - RNA, 18 nt, Human
ggccguaucuccggcucc

SEQ ID NO: 2675033 - RNA, 23 nt, Human
ggccuacagcuuugaucccugac

SEQ ID NO: 2675034 - RNA, 20 nt, Human
ggccuacagcuuugaucccu

SEQ ID NO: 2675035 - RNA, 16 nt, Human
ggccuaccccgcagac

SEQ ID NO: 2675036 - RNA, 20 nt, Human
ggccuaccccgcagacaccu

SEQ ID NO: 2675037 - RNA, 23 nt, Human
ggccuaccccgcagacaccuugg

SEQ ID NO: 2675038 - RNA, 19 nt, Human
ggccuagcgaucucuccug

SEQ ID NO: 2675039 - RNA, 21 nt, Human
ggccuagcgaucucuccuggc

SEQ ID NO: 2675040 - RNA, 22 nt, Human
ggccuagcgaucucuccuggcc

SEQ ID NO: 2675041 - RNA, 23 nt, Human
ggccuagcgaucucuccuggccu

SEQ ID NO: 2675042 - RNA, 18 nt, Human
ggcucacacaccuguagc

SEQ ID NO: 2675043 - RNA, 20 nt, Human
ggcuagcuucugcuuuucug

SEQ ID NO: 2675044 - RNA, 18 nt, Human
ggcuauuuucuaaagacu

SEQ ID NO: 2675045 - RNA, 20 nt, Human
ggcuauuuucuaaagacuug

SEQ ID NO: 2675046 - RNA, 22 nt, Human
ggcuagggagacgccaugugau

SEQ ID NO: 2675047 - RNA, 22 nt, Human
ggcuagcuucugcuuuucugcc

SEQ ID NO: 2675048 - RNA, 20 nt, Human
ggcgccgucuccaggggcug

SEQ ID NO: 2675049 - RNA, 14 nt, Human
ggccucggccccuc

SEQ ID NO: 2675050 - RNA, 15 nt, Human
ggcgcggagugaacc

SEQ ID NO: 2675051 - RNA, 21 nt, Human
ggcgccgucuccaggggcugc

SEQ ID NO: 2675052 - RNA, 20 nt, Human
ggcggagcuugcagugagcc

SEQ ID NO: 2675053 - RNA, 21 nt, Human
ggcggagcuugcagugagccg

SEQ ID NO: 2675054 - RNA, 20 nt, Human
ggcggaucaucuaauucucu

SEQ ID NO: 2675055 - RNA, 13 nt, Human
ggcggccccagca

SEQ ID NO: 2675056 - RNA, 17 nt, Human
ggcggcaggggccugga

SEQ ID NO: 2675057 - RNA, 18 nt, Human
ggcggcaggggccuggag

SEQ ID NO: 2675058 - RNA, 23 nt, Human
ggaccucaggugagaagcagagg

SEQ ID NO: 2675059 - RNA, 19 nt, Human
ggaccucaggugagaagca

SEQ ID NO: 2675060 - RNA, 15 nt, Human
ggaccacccugagcc

SEQ ID NO: 2675061 - RNA, 16 nt, Human
ggaccacccugagccg

SEQ ID NO: 2675062 - RNA, 18 nt, Human
ggaccacccugagccggc

SEQ ID NO: 2675063 - RNA, 16 nt, Human
ggaccaagcaucuugg

SEQ ID NO: 2675064 - RNA, 21 nt, Human
ggacagauugccuguuucuga

SEQ ID NO: 2675065 - RNA, 22 nt, Human
ggacacucaaaagcugggcagg

SEQ ID NO: 2675066 - RNA, 17 nt, Human
ggacacucaaaagcugg

SEQ ID NO: 2675067 - RNA, 19 nt, Human
ggacgccacucauuucauc

SEQ ID NO: 2675068 - RNA, 20 nt, Human
ggacgccacucauuucaucu

SEQ ID NO: 2675069 - RNA, 19 nt, Human
ggacgcuccgcugccgugc

SEQ ID NO: 2675070 - RNA, 23 nt, Human
ggacugcuaccuuucaaagcuug

SEQ ID NO: 2675071 - RNA, 18 nt, Human
ggagaagcggcuggcagc

SEQ ID NO: 2675072 - RNA, 17 nt, Human
ggagaagcggcuggcag

SEQ ID NO: 2675073 - RNA, 19 nt, Human
ggacuguggcacuugccug

SEQ ID NO: 2675074 - RNA, 13 nt, Human
ggagauccuccug

SEQ ID NO: 2675075 - RNA, 15 nt, Human
ggagauccuccugca

SEQ ID NO: 2675076 - RNA, 19 nt, Human
ggagauaauuacugccuug

SEQ ID NO: 2675077 - RNA, 15 nt, Human
ggagacaaaagagca

SEQ ID NO: 2675078 - RNA, 22 nt, Human
ggagaauggugugaacccggga

SEQ ID NO: 2675079 - RNA, 18 nt, Human
ggagaagcccgugugaga

SEQ ID NO: 2675080 - RNA, 14 nt, Human
ggagacagcaucag

SEQ ID NO: 2675081 - RNA, 17 nt, Human
ggagacagcaucagggu

SEQ ID NO: 2675082 - RNA, 18 nt, Human
ggagacagcaucaggguu

SEQ ID NO: 2675083 - RNA, 15 nt, Human
ggaauguguggccug

SEQ ID NO: 2675084 - RNA, 19 nt, Human
ggaauuacgugcucugugg

SEQ ID NO: 2675085 - RNA, 13 nt, Human
ggaauuguggcua

SEQ ID NO: 2675086 - RNA, 21 nt, Human
ggaauuguggcuauccugauu

SEQ ID NO: 2675087 - RNA, 23 nt, Human
ggaauuguggcuauccugauuau

SEQ ID NO: 2675088 - RNA, 13 nt, Human
ggaauuuuuuugu

SEQ ID NO: 2675089 - RNA, 12 nt, Human
ggacaaagugcc

SEQ ID NO: 2675090 - RNA, 17 nt, Human
ggacaaagugccaaaga

SEQ ID NO: 2675091 - RNA, 18 nt, Human
ggacaaagugccaaagaa

SEQ ID NO: 2675092 - RNA, 18 nt, Human
ggaaguauguauauuaaa

SEQ ID NO: 2675093 - RNA, 19 nt, Human
ggaagggguuccucaaauu

SEQ ID NO: 2675094 - RNA, 21 nt, Human
ggaagggguuccucaaauuuu

SEQ ID NO: 2675095 - RNA, 22 nt, Human
ggaagggguuccucaaauuuuu

SEQ ID NO: 2675096 - RNA, 15 nt, Human
ggaaggguuucucua

SEQ ID NO: 2675097 - RNA, 15 nt, Human
ggaagggaaaguuuu

SEQ ID NO: 2675098 - RNA, 17 nt, Human
ggaagggaaaguuuuuu

SEQ ID NO: 2675099 - RNA, 21 nt, Human
ggaaccuccccagccugcgcc

SEQ ID NO: 2675100 - RNA, 19 nt, Human
ggaaccuccccagccugcg

SEQ ID NO: 2675101 - RNA, 18 nt, Human
ggaaccuccccagccugc

SEQ ID NO: 2675102 - RNA, 17 nt, Human
ggaaccuccccagccug

SEQ ID NO: 2675103 - RNA, 16 nt, Human
ggaaccuccccagccu

SEQ ID NO: 2675104 - RNA, 21 nt, Human
ggaaaggggagagccugcugg

SEQ ID NO: 2675105 - RNA, 12 nt, Human
ggaaaggggaga

SEQ ID NO: 2675106 - RNA, 13 nt, Human
ggaaaggggagag

SEQ ID NO: 2675107 - RNA, 14 nt, Human
ggaaaggggagagc

SEQ ID NO: 2675108 - RNA, 18 nt, Human
ggaaaggggagagccugc

SEQ ID NO: 2675109 - RNA, 19 nt, Human
ggaaaggggagagccugcu

SEQ ID NO: 2675110 - RNA, 19 nt, Human
ggaaaaucagccugcucca

SEQ ID NO: 2675111 - RNA, 23 nt, Human
ggaaaaucagccugcuccagcug

SEQ ID NO: 2675112 - RNA, 23 nt, Human
ggaaauauauacaaaaagaaaau

SEQ ID NO: 2675113 - RNA, 14 nt, Human
ggaacaugcccccu

SEQ ID NO: 2675114 - RNA, 15 nt, Human
ggaacaugcccccug

SEQ ID NO: 2675115 - RNA, 14 nt, Human
ggaacauacuguuc

SEQ ID NO: 2675116 - RNA, 14 nt, Human
ggaaccuccccagc

SEQ ID NO: 2675117 - RNA, 14 nt, Human
gcuuuagacccugg

SEQ ID NO: 2675118 - RNA, 20 nt, Human
gcuuucacggaaacucccga

SEQ ID NO: 2675119 - RNA, 16 nt, Human
gcuuuauuuuuuugaa

SEQ ID NO: 2675120 - RNA, 24 nt, Human
gcuuuagacuugaaaagagacagg

SEQ ID NO: 2675121 - RNA, 21 nt, Human
gcuuuagacuugaaaagagac

SEQ ID NO: 2675122 - RNA, 17 nt, Human
gcuuuagacccugggug

SEQ ID NO: 2675123 - RNA, 12 nt, Human
gcuuuagacuug

SEQ ID NO: 2675124 - RNA, 15 nt, Human
gcuuuagacccuggg

SEQ ID NO: 2675125 - RNA, 16 nt, Human
gcuuuagacccugggu

SEQ ID NO: 2675126 - RNA, 18 nt, Human
gcuuuagacuugaaaaga

SEQ ID NO: 2675127 - RNA, 17 nt, Human
gcuuuagacuugaaaag

SEQ ID NO: 2675128 - RNA, 15 nt, Human
gcuuuagacuugaaa

SEQ ID NO: 2675129 - RNA, 14 nt, Human
gcuuuagacuugaa

SEQ ID NO: 2675130 - RNA, 15 nt, Human
gcuuucagaagugcc

SEQ ID NO: 2675131 - RNA, 19 nt, Human
gcuuugucguauuuggcac

SEQ ID NO: 2675132 - RNA, 16 nt, Human
ggaaaaggcugguaca

SEQ ID NO: 2675133 - RNA, 12 nt, Human
ggaaaacauuug

SEQ ID NO: 2675134 - RNA, 13 nt, Human
ggaaaacauuugc

SEQ ID NO: 2675135 - RNA, 14 nt, Human
ggaaaacauuugcu

SEQ ID NO: 2675136 - RNA, 21 nt, Human
gcuuuguuuguugucagcuga

SEQ ID NO: 2675137 - RNA, 18 nt, Human
gcugucggcgcugcccca

SEQ ID NO: 2675138 - RNA, 15 nt, Human
gcugucggcgcugcc

SEQ ID NO: 2675139 - RNA, 13 nt, Human
gcuguucagcugg

SEQ ID NO: 2675140 - RNA, 14 nt, Human
gcuguucagcuggu

SEQ ID NO: 2675141 - RNA, 22 nt, Human
gcuguucccauguagcccccug

SEQ ID NO: 2675142 - RNA, 12 nt, Human
gcuguucugugg

SEQ ID NO: 2675143 - RNA, 21 nt, Human
gcuguucugugguuccucugc

SEQ ID NO: 2675144 - RNA, 21 nt, Human
gcuguuccuguucaguaauaa

SEQ ID NO: 2675145 - RNA, 19 nt, Human
gcuguggucaaggcuacag

SEQ ID NO: 2675146 - RNA, 16 nt, Human
gcuuagagaggacaau

SEQ ID NO: 2675147 - RNA, 12 nt, Human
gcuuaguuugug

SEQ ID NO: 2675148 - RNA, 14 nt, Human
gcuuaguuugugug

SEQ ID NO: 2675149 - RNA, 16 nt, Human
gcuuaguuuguguguu

SEQ ID NO: 2675150 - RNA, 21 nt, Human
gcuuccaggaaacuccacauc

SEQ ID NO: 2675151 - RNA, 19 nt, Human
gcuuccaggaaacuccaca

SEQ ID NO: 2675152 - RNA, 20 nt, Human
gcuucuccgccagccuccuc

SEQ ID NO: 2675153 - RNA, 21 nt, Human
gcuucuccgccagccuccucu

SEQ ID NO: 2675154 - RNA, 14 nt, Human
gcuucuccgccagc

SEQ ID NO: 2675155 - RNA, 15 nt, Human
gcuucuccgccagcc

SEQ ID NO: 2675156 - RNA, 16 nt, Human
gcuucuccgccagccu

SEQ ID NO: 2675157 - RNA, 17 nt, Human
gcuucuccgccagccuc

SEQ ID NO: 2675158 - RNA, 18 nt, Human
gcuucuccgccagccucc

SEQ ID NO: 2675159 - RNA, 19 nt, Human
gcuucuccgccagccuccu

SEQ ID NO: 2675160 - RNA, 12 nt, Human
gcuucugccugc

SEQ ID NO: 2675161 - RNA, 19 nt, Human
gcuuaucucaggggugugc

SEQ ID NO: 2675162 - RNA, 13 nt, Human
gcuuaucucaggg

SEQ ID NO: 2675163 - RNA, 12 nt, Human
gcuuauaaaaca

SEQ ID NO: 2675164 - RNA, 19 nt, Human
gcuuauaaaacagaguaau

SEQ ID NO: 2675165 - RNA, 13 nt, Human
gcuuauaaaacag

SEQ ID NO: 2675166 - RNA, 20 nt, Human
gcuuaguuuguguguugucu

SEQ ID NO: 2675167 - RNA, 21 nt, Human
gcuuaguuuguguguugucuc

SEQ ID NO: 2675168 - RNA, 22 nt, Human
gcuuauaaaacagaguaaucuu

SEQ ID NO: 2675169 - RNA, 16 nt, Human
gccugauccuccaaca

SEQ ID NO: 2675170 - RNA, 19 nt, Human
gccugaugagauuuuuaaa

SEQ ID NO: 2675171 - RNA, 20 nt, Human
gccugaugagauuuuuaaaa

SEQ ID NO: 2675172 - RNA, 13 nt, Human
gccugaucugccc

SEQ ID NO: 2675173 - RNA, 15 nt, Human
gccugaucugcccau

SEQ ID NO: 2675174 - RNA, 23 nt, Human
gccugaucugcccaucgugaaga

SEQ ID NO: 2675175 - RNA, 19 nt, Human
gccugaugacaauaaagcu

SEQ ID NO: 2675176 - RNA, 20 nt, Human
gccugaugacaauaaagcuu

SEQ ID NO: 2675177 - RNA, 21 nt, Human
gccugaugacaauaaagcuug

SEQ ID NO: 2675178 - RNA, 11 nt, Human
gccugaauaaa

SEQ ID NO: 2675179 - RNA, 12 nt, Human
gccugaauaaag

SEQ ID NO: 2675180 - RNA, 16 nt, Human
gccugaauaaagagcc

SEQ ID NO: 2675181 - RNA, 23 nt, Human
gccugaauaaagagcccuaaguu

SEQ ID NO: 2675182 - RNA, 18 nt, Human
gccugcuccagcuguuca

SEQ ID NO: 2675183 - RNA, 16 nt, Human
gccugcuccagcuguu

SEQ ID NO: 2675184 - RNA, 21 nt, Human
gccugcuuugaauaaaugugu

SEQ ID NO: 2675185 - RNA, 22 nt, Human
gccugcugugauuccacuacac

SEQ ID NO: 2675186 - RNA, 15 nt, Human
gccugcuccagcugu

SEQ ID NO: 2675187 - RNA, 17 nt, Human
gccugcacuccucaggg

SEQ ID NO: 2675188 - RNA, 20 nt, Human
gccuggcaguccgugggacg

SEQ ID NO: 2675189 - RNA, 24 nt, Human
gccuggaguguaugacugcacaug

SEQ ID NO: 2675190 - RNA, 15 nt, Human
gccuggccaggagca

SEQ ID NO: 2675191 - RNA, 17 nt, Human
gccuggccaggagcagg

SEQ ID NO: 2675192 - RNA, 14 nt, Human
gccuggccaggagc

SEQ ID NO: 2675193 - RNA, 23 nt, Human
gccugggugacaaagugagacuc

SEQ ID NO: 2675194 - RNA, 20 nt, Human
gccugggggacagaaagaga

SEQ ID NO: 2675195 - RNA, 22 nt, Human
gccuggggcugaggcugaggca

SEQ ID NO: 2675196 - RNA, 14 nt, Human
gccuccccugccac

SEQ ID NO: 2675197 - RNA, 15 nt, Human
gccuccccugccacc

SEQ ID NO: 2675198 - RNA, 16 nt, Human
gccuccccugccacca

SEQ ID NO: 2675199 - RNA, 19 nt, Human
gccuccccugccaccaggc

SEQ ID NO: 2675200 - RNA, 21 nt, Human
gccucccacgacugcccggca

SEQ ID NO: 2675201 - RNA, 14 nt, Human
gccucccacgacug

SEQ ID NO: 2675202 - RNA, 13 nt, Human
gccucggccccuc

SEQ ID NO: 2675203 - RNA, 18 nt, Human
gccucggccccucccaca

SEQ ID NO: 2675204 - RNA, 19 nt, Human
gcccuuuuccccuaccaau

SEQ ID NO: 2675205 - RNA, 22 nt, Human
gccuauaagccaaaauuaaggu

SEQ ID NO: 2675206 - RNA, 18 nt, Human
gccgaggccaugugcaua

SEQ ID NO: 2675207 - RNA, 19 nt, Human
gccuauaagccaaaauuaa

SEQ ID NO: 2675208 - RNA, 13 nt, Human
gccuauccgcugc

SEQ ID NO: 2675209 - RNA, 18 nt, Human
gccuauccgcugccagcc

SEQ ID NO: 2675210 - RNA, 19 nt, Human
gccucacuaauuuuuguau

SEQ ID NO: 2675211 - RNA, 13 nt, Human
gccucacuggggc

SEQ ID NO: 2675212 - RNA, 14 nt, Human
gccucacuggggca

SEQ ID NO: 2675213 - RNA, 17 nt, Human
gccucacuggggcagac

SEQ ID NO: 2675214 - RNA, 21 nt, Human
gccucaccaugugagcucuuc

SEQ ID NO: 2675215 - RNA, 18 nt, Human
gccucagcgcggcccucc

SEQ ID NO: 2675216 - RNA, 16 nt, Human
gccucagcgcggcccu

SEQ ID NO: 2675217 - RNA, 13 nt, Human
gcccuuuuccccu

SEQ ID NO: 2675218 - RNA, 14 nt, Human
gcccuuugcugucc

SEQ ID NO: 2675219 - RNA, 13 nt, Human
gcccuuugcuguc

SEQ ID NO: 2675220 - RNA, 17 nt, Human
gccgagauugcaccacu

SEQ ID NO: 2675221 - RNA, 18 nt, Human
gccgagauugcaccacug

SEQ ID NO: 2675222 - RNA, 21 nt, Human
gcccuuuccccgacgcccacc

SEQ ID NO: 2675223 - RNA, 22 nt, Human
gcccuuuccccgacgcccaccc

SEQ ID NO: 2675224 - RNA, 19 nt, Human
gcccuggccuccccugcca

SEQ ID NO: 2675225 - RNA, 20 nt, Human
gcccuggccuccccugccac

SEQ ID NO: 2675226 - RNA, 21 nt, Human
gcccuggccuccccugccacc

SEQ ID NO: 2675227 - RNA, 24 nt, Human
gcccuggccuccccugccaccagg

SEQ ID NO: 2675228 - RNA, 10 nt, Human
gcccuggcug

SEQ ID NO: 2675229 - RNA, 15 nt, Human
gcccuggcagggggc

SEQ ID NO: 2675230 - RNA, 16 nt, Human
gcccuggcagggggca

SEQ ID NO: 2675231 - RNA, 17 nt, Human
gcccuggcagggggcau

SEQ ID NO: 2675232 - RNA, 12 nt, Human
gcccuggccucc

SEQ ID NO: 2675233 - RNA, 14 nt, Human
gcccuggccucccc

SEQ ID NO: 2675234 - RNA, 16 nt, Human
gcccuggccuccccug

SEQ ID NO: 2675235 - RNA, 17 nt, Human
gcccuggccuccccugc

SEQ ID NO: 2675236 - RNA, 17 nt, Human
gcccuggcugcugcccc

SEQ ID NO: 2675237 - RNA, 19 nt, Human
gcccuggcugcugccccca

SEQ ID NO: 2675238 - RNA, 22 nt, Human
gcccuggcugcugcccccaccc

SEQ ID NO: 2675239 - RNA, 15 nt, Human
gcccuggcuguucug

SEQ ID NO: 2675240 - RNA, 23 nt, Human
gcccuggcuguucugugguuccu

SEQ ID NO: 2675241 - RNA, 11 nt, Human
gcccuggcugc

SEQ ID NO: 2675242 - RNA, 16 nt, Human
gcccuggcugccggca

SEQ ID NO: 2675243 - RNA, 12 nt, Human
gcccuggcugcu

SEQ ID NO: 2675244 - RNA, 14 nt, Human
gcccuggcugcugc

SEQ ID NO: 2675245 - RNA, 15 nt, Human
gcccuggcugcugcc

SEQ ID NO: 2675246 - RNA, 16 nt, Human
gcccuggcugcugccc

SEQ ID NO: 2675247 - RNA, 16 nt, Human
gcccugggcuggaauc

SEQ ID NO: 2675248 - RNA, 18 nt, Human
gcccugggcuggaaucag

SEQ ID NO: 2675249 - RNA, 11 nt, Human
gcccugggcug

SEQ ID NO: 2675250 - RNA, 12 nt, Human
gcccugggcugg

SEQ ID NO: 2675251 - RNA, 13 nt, Human
gcccugggcugga

SEQ ID NO: 2675252 - RNA, 14 nt, Human
gcccugggcuggaa

SEQ ID NO: 2675253 - RNA, 15 nt, Human
gccccucucaccaaa

SEQ ID NO: 2675254 - RNA, 14 nt, Human
gccccucucaccaa

SEQ ID NO: 2675255 - RNA, 15 nt, Human
gcccgcgccacagga

SEQ ID NO: 2675256 - RNA, 16 nt, Human
gcccgcgccacaggac

SEQ ID NO: 2675257 - RNA, 20 nt, Human
gcccggccgcuccaccagca

SEQ ID NO: 2675258 - RNA, 16 nt, Human
gcccgacauggcuccg

SEQ ID NO: 2675259 - RNA, 19 nt, Human
gcccgacauggcuccggcc

SEQ ID NO: 2675260 - RNA, 22 nt, Human
gcccgacauggcuccggccucu

SEQ ID NO: 2675261 - RNA, 24 nt, Human
gcccgacauggcuccggccucugc

SEQ ID NO: 2675262 - RNA, 16 nt, Human
gcccucuccuuuguuc

SEQ ID NO: 2675263 - RNA, 22 nt, Human
gcccucuccuuuguucccggcu

SEQ ID NO: 2675264 - RNA, 16 nt, Human
gcccugagcuuucugc

SEQ ID NO: 2675265 - RNA, 17 nt, Human
gcccucugaacuugccu

SEQ ID NO: 2675266 - RNA, 19 nt, Human
gcccucucaggccggcagc

SEQ ID NO: 2675267 - RNA, 17 nt, Human
gcccugagucugggcag

SEQ ID NO: 2675268 - RNA, 19 nt, Human
gcuccauaguuuggcauuu

SEQ ID NO: 2675269 - RNA, 22 nt, Human
gcuccaucccaaccaggcaccu

SEQ ID NO: 2675270 - RNA, 20 nt, Human
gcuccagcuguucagcuggu

SEQ ID NO: 2675271 - RNA, 11 nt, Human
gcuccagcugu

SEQ ID NO: 2675272 - RNA, 14 nt, Human
gcucccuccuccag

SEQ ID NO: 2675273 - RNA, 16 nt, Human
gcucccuccuccaggc

SEQ ID NO: 2675274 - RNA, 18 nt, Human
gcucccuccuccaggccu

SEQ ID NO: 2675275 - RNA, 19 nt, Human
gcucccuccuccaggccug

SEQ ID NO: 2675276 - RNA, 22 nt, Human
gcucccuccuccaggccugccu

SEQ ID NO: 2675277 - RNA, 16 nt, Human
gcuccaagccccaucu

SEQ ID NO: 2675278 - RNA, 19 nt, Human
gcuccaagccccaucuucu

SEQ ID NO: 2675279 - RNA, 23 nt, Human
gcucagcaaaagaugcuucucac

SEQ ID NO: 2675280 - RNA, 22 nt, Human
gcucagcaaaagaugcuucuca

SEQ ID NO: 2675281 - RNA, 20 nt, Human
gcucagcaaaagaugcuucu

SEQ ID NO: 2675282 - RNA, 17 nt, Human
gcucagcaaaagaugcu

SEQ ID NO: 2675283 - RNA, 11 nt, Human
gcuaugacuua

SEQ ID NO: 2675284 - RNA, 15 nt, Human
gcucaccgcccauca

SEQ ID NO: 2675285 - RNA, 16 nt, Human
gcucaccgcccaucag

SEQ ID NO: 2675286 - RNA, 17 nt, Human
gcucaccgcccaucagg

SEQ ID NO: 2675287 - RNA, 19 nt, Human
gcucaguguuuuugugaau

SEQ ID NO: 2675288 - RNA, 12 nt, Human
gcucaguaaacg

SEQ ID NO: 2675289 - RNA, 18 nt, Human
gcucaguaaacgggaaca

SEQ ID NO: 2675290 - RNA, 22 nt, Human
gcucaguaaacgggaacaugcc

SEQ ID NO: 2675291 - RNA, 14 nt, Human
gcuacuagcaaaau

SEQ ID NO: 2675292 - RNA, 16 nt, Human
gcuacuagcaaaauaa

SEQ ID NO: 2675293 - RNA, 14 nt, Human
gcuagcuagcucaa

SEQ ID NO: 2675294 - RNA, 12 nt, Human
gcuagcucaacu

SEQ ID NO: 2675295 - RNA, 17 nt, Human
gcuagcuagcucaacua

SEQ ID NO: 2675296 - RNA, 12 nt, Human
gcuaugaauuuu

SEQ ID NO: 2675297 - RNA, 14 nt, Human
gcuaacaaagacaa

SEQ ID NO: 2675298 - RNA, 19 nt, Human
gcgugacccgaccuggccg

SEQ ID NO: 2675299 - RNA, 16 nt, Human
gcuaaaugugaaugau

SEQ ID NO: 2675300 - RNA, 21 nt, Human
gcuaaauaaaauuuguugcau

SEQ ID NO: 2675301 - RNA, 13 nt, Human
gcuaaaugugaau

SEQ ID NO: 2675302 - RNA, 19 nt, Human
gcuaaauaaaauuuguugc

SEQ ID NO: 2675303 - RNA, 20 nt, Human
gcuaaauaaaauuuguugca

SEQ ID NO: 2675304 - RNA, 23 nt, Human
gcgugaacccgggaggcggagcu

SEQ ID NO: 2675305 - RNA, 14 nt, Human
gcgucccaagaugu

SEQ ID NO: 2675306 - RNA, 17 nt, Human
gcgucccaagauguuga

SEQ ID NO: 2675307 - RNA, 18 nt, Human
gcguauggcuuuauuuuu

SEQ ID NO: 2675308 - RNA, 14 nt, Human
gcgucagcugcucc

SEQ ID NO: 2675309 - RNA, 17 nt, Human
gcgucagcugcucccug

SEQ ID NO: 2675310 - RNA, 22 nt, Human
gcgucagcugcucccuggcauu

SEQ ID NO: 2675311 - RNA, 19 nt, Human
gcucuccggggccauuugc

SEQ ID NO: 2675312 - RNA, 21 nt, Human
gcucuccggggccauuugcaa

SEQ ID NO: 2675313 - RNA, 22 nt, Human
gcucuccggggccauuugcaau

SEQ ID NO: 2675314 - RNA, 17 nt, Human
gcucccuguagggucca

SEQ ID NO: 2675315 - RNA, 23 nt, Human
gcucccuguaggguccaaccaga

SEQ ID NO: 2675316 - RNA, 19 nt, Human
gcucgaaucucugugccuu

SEQ ID NO: 2675317 - RNA, 18 nt, Human
gcucgacuauagaaaacu

SEQ ID NO: 2675318 - RNA, 15 nt, Human
gcucgaaucucugug

SEQ ID NO: 2675319 - RNA, 16 nt, Human
gcucgaaucucugugc

SEQ ID NO: 2675320 - RNA, 16 nt, Human
gcucugccgucucugg

SEQ ID NO: 2675321 - RNA, 17 nt, Human
gcucugccgucucugga

SEQ ID NO: 2675322 - RNA, 16 nt, Human
gcucugccugacagag

SEQ ID NO: 2675323 - RNA, 18 nt, Human
gcucugccgucucuggag

SEQ ID NO: 2675324 - RNA, 14 nt, Human
gcugcauccagagg

SEQ ID NO: 2675325 - RNA, 15 nt, Human
gcugcaugcccucuc

SEQ ID NO: 2675326 - RNA, 16 nt, Human
gcugcaugcccucuca

SEQ ID NO: 2675327 - RNA, 18 nt, Human
gcugcaugcccucucagg

SEQ ID NO: 2675328 - RNA, 17 nt, Human
gcugcaugcccucucag

SEQ ID NO: 2675329 - RNA, 22 nt, Human
gcugcaugcccucucaggccgg

SEQ ID NO: 2675330 - RNA, 21 nt, Human
gcugcaugcccucucaggccg

SEQ ID NO: 2675331 - RNA, 20 nt, Human
gcugcaugcccucucaggcc

SEQ ID NO: 2675332 - RNA, 19 nt, Human
gcugcaugcccucucaggc

SEQ ID NO: 2675333 - RNA, 22 nt, Human
gcugaugguguggccuguggcu

SEQ ID NO: 2675334 - RNA, 17 nt, Human
gcugaugucaauuucug

SEQ ID NO: 2675335 - RNA, 20 nt, Human
gcugaugucaauuucugugu

SEQ ID NO: 2675336 - RNA, 23 nt, Human
gcugaugucaauuucuguguugc

SEQ ID NO: 2675337 - RNA, 21 nt, Human
gcugaguggcaggggacagga

SEQ ID NO: 2675338 - RNA, 23 nt, Human
gcugagugggggaucacagccuc

SEQ ID NO: 2675339 - RNA, 22 nt, Human
gcugagugggggaucacagccu

SEQ ID NO: 2675340 - RNA, 17 nt, Human
gcugaguggcaggggac

SEQ ID NO: 2675341 - RNA, 19 nt, Human
gcugaguggcaggggacag

SEQ ID NO: 2675342 - RNA, 19 nt, Human
gcucuuccuaucccucucc

SEQ ID NO: 2675343 - RNA, 20 nt, Human
gcucuuccuaucccucuccu

SEQ ID NO: 2675344 - RNA, 22 nt, Human
gcugaccaugcucaucugcugg

SEQ ID NO: 2675345 - RNA, 21 nt, Human
gcugaccaugcucaucugcug

SEQ ID NO: 2675346 - RNA, 17 nt, Human
guaaugaaaaugaauau

SEQ ID NO: 2675347 - RNA, 17 nt, Human
guaaucuuuaccuguau

SEQ ID NO: 2675348 - RNA, 19 nt, Human
guaaucuuuaccuguauac

SEQ ID NO: 2675349 - RNA, 20 nt, Human
guaaucuuuaccuguauaca

SEQ ID NO: 2675350 - RNA, 17 nt, Human
guaaucuuguugguuca

SEQ ID NO: 2675351 - RNA, 14 nt, Human
guaagugggcccac

SEQ ID NO: 2675352 - RNA, 16 nt, Human
guaagugggcccaccc

SEQ ID NO: 2675353 - RNA, 17 nt, Human
guaagugggcccacccg

SEQ ID NO: 2675354 - RNA, 21 nt, Human
guaaugaauuuuuaugauauu

SEQ ID NO: 2675355 - RNA, 16 nt, Human
guaaugcuucaaucag

SEQ ID NO: 2675356 - RNA, 16 nt, Human
guaaugugaauaaauu

SEQ ID NO: 2675357 - RNA, 14 nt, Human
guaaugugaauaaa

SEQ ID NO: 2675358 - RNA, 13 nt, Human
guaauugugaaaa

SEQ ID NO: 2675359 - RNA, 23 nt, Human
guaauucuaccaaggucuucuua

SEQ ID NO: 2675360 - RNA, 14 nt, Human
guaauugugaaaaa

SEQ ID NO: 2675361 - RNA, 13 nt, Human
guacaggcuggcg

SEQ ID NO: 2675362 - RNA, 14 nt, Human
guacauaauacuga

SEQ ID NO: 2675363 - RNA, 19 nt, Human
guacauaauacugaaccac

SEQ ID NO: 2675364 - RNA, 18 nt, Human
guacauaauacugaacca

SEQ ID NO: 2675365 - RNA, 16 nt, Human
guacauaauacugaac

SEQ ID NO: 2675366 - RNA, 15 nt, Human
guacauaauacugaa

SEQ ID NO: 2675367 - RNA, 17 nt, Human
guacauacgauuuaagg

SEQ ID NO: 2675368 - RNA, 19 nt, Human
guacgacgucagauguuua

SEQ ID NO: 2675369 - RNA, 13 nt, Human
guacccugggugu

SEQ ID NO: 2675370 - RNA, 18 nt, Human
guacccggggcccagggc

SEQ ID NO: 2675371 - RNA, 17 nt, Human
guacccggggcccaggg

SEQ ID NO: 2675372 - RNA, 13 nt, Human
guaccuaagggag

SEQ ID NO: 2675373 - RNA, 18 nt, Human
guagaaaagaacuggaaa

SEQ ID NO: 2675374 - RNA, 20 nt, Human
guacuuuuuuaaauauuuuc

SEQ ID NO: 2675375 - RNA, 21 nt, Human
guacuuuuuuaaauauuuucu

SEQ ID NO: 2675376 - RNA, 13 nt, Human
guagaaaauguga

SEQ ID NO: 2675377 - RNA, 15 nt, Human
guagaaaaugugacc

SEQ ID NO: 2675378 - RNA, 17 nt, Human
guagaaaaugugacccu

SEQ ID NO: 2675379 - RNA, 18 nt, Human
guagaaaaugugacccuc

SEQ ID NO: 2675380 - RNA, 23 nt, Human
guacuuuuauuuuacacagaaac

SEQ ID NO: 2675381 - RNA, 23 nt, Human
guacuuuuuaguaauuucuuuuu

SEQ ID NO: 2675382 - RNA, 16 nt, Human
guacuuuuaaaaacau

SEQ ID NO: 2675383 - RNA, 17 nt, Human
guacuuuuaaaaacaua

SEQ ID NO: 2675384 - RNA, 16 nt, Human
guacuuuucauucucu

SEQ ID NO: 2675385 - RNA, 17 nt, Human
guacuuuucauucucuu

SEQ ID NO: 2675386 - RNA, 18 nt, Human
guacuuuucauucucuuu
